United States Patent Application Publication US 2015/0232836 A1 - sequence listing, part 4

SEQ ID NO: 1129 - DNA, 4070 bp, Homo sapiens
ccccctcccgggtctgtagagggggtaccgatggaggggagagagataggtggggggcagagaagctcccagaatggattgagccccggccggagccatggagaaattggaaaagcagggagcaccgagcgggcttcgccgcgagttttggagctgagcgagcgggtcggtggcccgatttcgacccggctgggtttcgcggtggccatctcgcgcgcgctcgccctagcgcttcattcattggttttgttttaaaggccctggcggtggatcccttggccgcgcccgagggcaaggggaggagagcgctgtctcggtttaaaagacatttataccggactggaccgaggccctgggaagtgtgcgctgaggggaacagccgccgagggcggggaggcggcgtgaatatgacctcagcggcggccgcgcgctccctcccgccctctcagctccgggctccggtttctaggactgcctggagaagtgtgtcttgtgcacagctctggaatgcatttggccggctgacgagctgtgaggggcagcatcccggcgggagaaggggagcgggggtgggggctcgcctgcgcgccgcgggcaggtttcctcccgggcccggaagacctccgccacccgccaccctgcctcccggcgcgggaaggttacccagcgagcagacctgcctagggcattcatttgcatgcaggccctgtttctgggcctcgtagctttcaaggtgcttagagtcagagagtttattccttgaccccaggtcccgaagaaacatatacccaagctggcgggttactgcatagaaacgggcatggcattgctagggcataaacgcatttacagcgtgaaagctgatggctccgagaaacgtaatgatttaaatacacacacatcagtattgatgaggccactagttggcatggtgatctaacctcacttcatattcagtgaaatacgatttttttaaaaagccattgagaattgtgagatcaggccagcagtgaaactcgttgggggctttaaagaatctttttttctttctttctttctttttttttttttttttagagtctcactcttcacccgggctagagtccagtggctcgatttcggctcactgcagcctctgcctccccagatcaaacgattctcccacctcagcctccggagtagctgggactacaggcgcgcgccaccacatctggctaatttttgtattttttggtagtgacgcggtttaaccatgttggccaggctgatgtggaactcctgacctcaagtgatctacctgcctcagcctctcaaagtactgggagtacaggcgtgagccactgcacctggccttaaaataatctttagaaaaggtgaaatgtgcccaggtgcgatggctcacgcttgtaatcccagcactttgggaggctgaggcaggtggatcacctgaggtcaagagtttgagaccagcctggccaacatggtgaaacccgtctctactaaaaatacaaaaattagccaggcgggtggcgcgcgccagtaatcccagctgagacaggagaattgcttgaacccgggagacggaggttgcagtgagctgagatcgcgccactgcactccatcctgggcaacagagtgagactctgtctcaaaaaaagaaaagaaaaaaagaaaagtaaagatgaaatgtacatcttgccggctaaattatatgttcttaaaaggaaaaggcaggaatgaatcttagccgcctttagagctcaagtcctctccccctctagcaattaaaaagatttctaacatattagtacaatagtagatgcttaataaatatttagaaatcaacacttagggcttaaggggcatttggacccttcctccaccccaccaaaagtacctttggtaatataaattcaagaggaaatcagcaacattgcttacatgatcatttccaggcaaggagatcctaacacttattgacttggaagatagtaggatgccaagcagtgcagaaccctactggacggacagaagctgccattctgaacatttactgtgtaaggccacataagctgcagttgtataacatcataattttgttgtaaattaaaatatggcttgtataaaagggcattgaaaccttgtgtgtgtattaaaaaaacattctaagaagcaacctgtgaagacagcagctgagaaagcacaggagagaatggagaaggagtgtaatcccagcactttgggaggcctatcatgataggcaagggaagacgaaagagacagaagtgggatttttttttttttttttttttttgagatggagccttgctttgtcacccagcctagagggcagtggcatgatctcagctcactgcaacctccgcctcctgggttcaagcaattctcctgcctcagcctccctagtagctggaactacacgtgcactccacacctcgctaatttttttgtattttagcagagacaaggtttcaccgtgttgcccaggctagtctcgaactcctgagctcaggcgatccacccgcctcagcctcccaaagtgtgggataacaggcatgagccacagcgcccggcccagaaatgggatttttaaggtgtctgggaaatgtatcatattttcaccttagaaaggcttagaaagagtaccagactagaggtcagaaaacctgattccaggctggggcgttgccgctcactggttaagcaactagggccaacagcaatccccacgttaggcgagcacttggcagagtttataagattttctgggcaagtttccgctctctagggtcccattccctctctgttctggatctccctaaaagatcttcacttattgagagtggtcagaccaggcttcatagcaacagaaaggacttaaataagcagagaaagtagaggtcataattctaattcagtttcttggctaaatggagaatctgaagaatcttttggagatctggccagtagtgctaaggctctgtaatgagaggccggagcacacacagggcaggtaggtttcatgggtgtttcaagagtggagtctgacgtcacggtttgtctgggtggaacatgcatgtacttgcagagatatgttcccgtatagtgtaattgtaggtgtattaattcaggtgtcacccctctctacacggctttcctcttccattttgctaccctaggtagaagctgggtgcggtgctgagcaagtagctacaatgattggtgctgctttatagctccctggcatcccctgaatcagttaacatcccagctttcctgatagccccaccccatcacattcttatccctctcctctccaagaaagaagccagaagcctggcagtagaggaattcccagcaggctggtgtgcctagaaaggtagtttctttctttcccttccacaggcacaaaggaggccaacaaacacgcagtttcagactattctgacccttaagaaaaaagtttaagagttcaccaaactattgtgaatgagtttgattctaatcatttgctggcagggaatatggaataaaatagctcatttgcagttgtttatttcctgttgtggcttctattttcatcttttagtcgctttggtgatagtaatcaaaccctaatcatggtgccgccacaagtcacagagaccaaaataacttgcagcagagttatgacaaacaaggatggaatcagctaaagacctggctacttaatcaccggccactgccgcccagaggactgtggggctgcctcttgaccggctgctggctaggaatctagaggagagaggaagtcgagggaagttgctccaaggcccatgttttctgagcagccagggaaggcagtagagtgcacaggaagtgaccgaaaaagcaggtgaattctccacacctgccaaggggagaggcaggcttctggaggggcctgacttgagagagaaagaggaggggaaaaaaatctccaaaactcttgacacctcaaaacaatgataagtaaaagctgaaaagtgcctgtctagagaagacaggattctgcctttcagttctttgctcat

SEQ ID NO: 1130 - DNA, 4045 bp, Homo sapiens
tggctacttaatcaccggccactgccgcccagaggactgtggggctgcctcttgaccggctgctggctaggaatctagaggagagaggaagtcgagggaagttgctccaaggcccatgttttctgagcagccagggaaggcagtagagtgcacaggaagtgaccgaaaaagcaggtgaattctccacacctgccaaggggagaggcaggcttctggaggggcctgacttgagagagaaagaggaggggaaaaaaatctccaaaactcttgacacctcaaaacaatgataagtaaaagctgaaaagtgcctgtctagagaagacaggattctgcctttcagttctttgctcattgtcagtggattccagaagagaagggcagagagaggccccaaagcatgtatggatgtgtgttgatgggagtgaggacaggggtaaagatttttttcttgcacaagccaaaagaagaaaccattgaggagaccaaaaaagtactggaaaacatcaacatttcttgcacaatcatcccctgaaaaatgtgtgagtgagccctaaaccatgcacaactggcaacaatacaaatggaagtgatggcttatgaaaagaagacagtacaaggaaggctgatgggacaatcaacgcttcttggcttctcttggaagaacaggaacataagtgaatgaaaatgcatctaattcactatcaaacaaaaatactataagcccggactccacaaatattcttggattacagacaagctgtcagctgatccccaacatttgccaggtgcctatccagagcatgcaactaggtatcagggattggaatgggggcaggatgaaatgaatgttgctatggaggagatgagaaacatccagaaaaggtaaagagtgaggacaatagagacattcaaatctacagtcacatttagatgccgtttcctccaaggagggcccctggacagctgaagaacagaactgggaggggaattttactctgtataattttgtaccttttgaattgtgaaccgtgtgaatgtgttacttattcaaaaataaacagatttaaattgttttcaaatctctgcttgcttttctcatttcctgaaattcgttgttctgatgtccttgtagaaaaggacaagttggcaaggtcccacgtggaaatgatgctatagacagcttctctctctgtgaggcagttgctacaggaagaggctggtaacaacagaggccaatgtctcatcccagacagcaagggtggaggctgcttcgtcatgagcctggccagagtcagcgaggaaacatgcccatcctaatcaaaagtcattccagatatcagtcaggtgcaagtcctaacctgggatggacagcctaataaatactgctgtcagggccgggcgcagtggctcacgcctgtaatcccaggactttgggaggccaaggcgggcagatcacttgaggtcaggagtttgagaccagcctggccaacatggtgaaactccatttctactaaaaatacaaaaaaattagccaggcgtggtggcatgctcctgtaatcccagctacttgggaggctgaggcaggagaatcacttgaacccaggaggccgagggtgcagtgagctgagatcaccacactgcactctagcctgggcgacagagtgagactccatctcaaaaaaaaaaagataaatacggctgtcaggatgacacaggcacaggaaggagcctgcccaatctgagaaaatgagagctttgctttttggaacagaaacgtgttcacatgattttcaattcatttagccagcactgattcagagctgattggagtcaggatccaggagagacctctgagggttataaatgtgaggattaatcagcctttgccctcaagaagtccacagtctaggagagccacaaactctcatgaaatgggatcagtgttaccccagcagcaagaatggaggcactggctctaagaacagaaagtcaagggactcattctgtctgggagaggcctcaaaaggtttcccaaaggaagaaatattttagactagattagctgagttgactagccaggcaaaggtgatcagagtcctaattgtcctatcaaaaagaaaaaaaaaaaagaaaggattacaaatatgagccaccacacctggaacaatgcctggtgtgatggctcacgcctgtaatcccagcactttggacagctgaggtgggaggactgcctgagcccaggagttggagaccagcctgggcaacatagtgggaactcgtccctacaaaaaatacaaaaattatggccaagcgtggtggctcacgcctgtaatcccagcactttgggaggctgaggcaggtggatcacctgaggtcaagagttcgagaccagcctgaccaacatggtgaaaccctgtctctactaaatatacaaaaattagctgggcgtggtggctggcacctgtaattccagctactcaggaggctgaggcaggagaatcgcttgaacccgggaggcagaggttgcagtgagcccagactgcgccactgcactccagcctgggtgacagagagagattctatctcaataataataataataataataataataataatacaaaaattagctgggggtggtggtgcgtgcctgtagtcccagctactctggaggctgaggtgggaggatcacttgagaccctgaggtagaggctgcagtgagctaagactgcaccactgctctccagcctaagtgacagaaaaaaaaggaacgaaattttgttttctttgagctaacttttcaatacccaagccacacttatcacttaagtgtataactttataaacactcccaagccataggaagtcagtgatgaaagtgaggtccctgcagtgggtggtctgggagggcatctccctcagaaggcagttttctctgtagaaaacattggaggaaaaacactagatcgtctacggttacagagaagtttctcctcaaataactatagagatcgccacgatctccacccctcagatcaagagcaggccttacttgagtcaaactggttcatgttaggaagttgtgccagttttaagacaagtggaagggaagtaccctcagcagggaagttggctgagatgcctcagtaatgggggtacttaaataatgctctcaaatgccaacaacaaaaaattattatttgccattatcgtatagacggtgagacatacagttggctgatccctacaggtactaaaaaattgattttaaagacagcaaagcaaggaaatcagtgttgagcctaacccagatggaccctgatgggtcctggtgttatttctcactggccatgttgcagacaagttcttcattccagcttccagccactcaactgggcagctccaagttcctggtcacattgggctaccaaattatccttttctgttttctgatttttttcctatttttatctttcccattcctctgccaaaagtccttaatgggtcacttaagtgctgaattctgcctagtaagtgctggttaggatctgagctatgagacatgctggtaatcgtgattcagaacagaaagcctgcggaggggtgaatgatgttttatctgtagtagggaattgggactagagcaaaggggtcatacaggtgaccgcacatgctgcccctggcacgtgctgggacccaccgaaggagtgagggccaaggcatcttgctcattctcccaacgcagacctaggagaatagaaaggccctcagctcggctttaggattcaatagacttttctgccattgctagctataagaccttagggaagtctgtttccagtctgtctaccttcctcatacaacaaacactgaattaacaatgtcttgtgtcttctgtgtgccagactcagcgtgaggctccaagaacaaagtcctcacggtggggttgctgggaggagacgttcacaccacaagagccccagtgctatgtaaaccaagtggtatacagatgctaattatcatattatcatggattctgaggtcc

SEQ ID NO: 1131 - DNA, 4043 bp, Homo sapiens
cccaggttcaagtgattctcctgcctcagcctcctaagtagctgggattacaggcacgcgccaccacgcctggctaatttttttttttttttttttttttgagtagagacagagtttcaccatgttggccaggatggtctcgatctcttgaccttgtgatctgcccagctcagcctcccaaagtgttgggattacaggtgtgagccactgcgcccagcatttttttttttccttagagacagggtcttgctatgttgcccaggctggtctcaaactcctggcctcaagcagtcctctgaccttggcctcccaaagtgttaagattacaggtgtgagccaccgtgcctggccccatctgtttctattgttgttgttgtttgttttgagataggatctcactttgtcgctcaggctggagtgcagtggtacaatctgcaggtagcagctaactgcaaccttgaactcctggtctcaagggatcctcctgcctcagcctcccaagtagctgggactataggcatgcaccaccacacccagctgattttgtggttgttgttttgttttagtagagacagggtctttactaaatgttgcccagtctagtcttgaactcctggacttatgcgatcctcttgccttggcctcccaaagtgctgggattacagcactgtgaaccaccgcgcccagcctgacattcccatttgaagacacttattggccgggtgtggtgtctcatgcctgtaatcccagctctttgggaggcaaagatgggcggatcacctgaggtcaggagtttgagaccagcctggccaacatggtgaaaccctgtctctactaaaaatacaaaaattagccaggcatggtgttgtgcacctgtaatcccagctacttgggaagctggggtgggagaatcacttgaaccctgggggtggaggttgcagtgagctgagatcttgccactgcactccagcctgggtgacaagagcgaaacaagaaagaaagaaagaaagagagagagagagagagagagaaaaggaaggaaagaaaagaaagaaagaaagaaaggaaaagaaagaaaagaaagaaagaaaggaaagaaagaaaggaagaaaagaaggaaagaaaggaagaaaaggaaagaaagagagaaagagaaagagaaagagagaaagagagaaagggagaaaggaaggaagggagggagggagggagggaggggaaaagaaaggaaagaaaagaaagaaacgtaagaaagaagaaaaaaattattaattagtcttaaaacacttgctgtcgccagggaaaggtgatgtttccagggatggccacaaggtggtggagtggtacccatgcccaaagtctggtgggcagttgcccattttacagtattgggagctgggaaaagaccctcagaacccaggcacctcccagagactctgtgagggtttgggcaaagggtagcttcaagtcattaggaatctgcctctgggtccttggctccgggatgtcttgtatgcaaagaggatggggtgaagttgtggggtcgaggttaggtgaagtggggtcaggacagtggggactgtcgcaccatccccaaagtgaagactttaattttttaattttaattattttatttatttatttatttatttatttatctatttatttattgagatggagtttcgctcttgttgcccaggctggattgcaatggcacgatcttggctcactgcaacctccgcctcccgggttcatgccattctcctgcctcagcctcccgagtagctgggattacaggcacccgccaccatgcctggctaatttttgtatttttagtagagacggtgtttcaccatgttggccaggctggtctcgaactcctgacctcaggtgatacgcctgcctcggcctcccaaagtgctgggattacaggcgagagctactgcccccggactccaagtggggactttctggcctgaaaccctcctccccatttcacttggcagtacgaggagcgagtgctgaaaaaaatccgccggaaaatccggaacaagcagtcggcgcaagaaagcaggaagaagaagaaggaatatatcgatggcctggagactcggtgggtagtgctggacccagactctacactcgtggaggaaactgaggcccagagagaaggagatgtggctaaggccacacagcttagagtctgacaaaattggaggtgattctcctctctgggagagatcatgcttcttactgattgcagggatggaaagatgcctagtgatggtgtaggacaagggtttgggggaccctttgccccctagaaggtgtgcggaaaaaggacaaagtgtgacccatcctattctgaccctctgcctgaagatagacacttcctttttgtgtgtgtggaagggtctccttctatcacccaggctggagtgcagtggtgcgatcttggctcactgcaacctccacctcccgggttcaagcgattctcctgcctcagcctctccagaagctgggattacaggtgcatggccaccacgcccagctaatttctttgtatttttggtagagatggggtttcactgtgttgcccaggctagtctcaaactcctgacctcaggtgatctggccgcctcagcctcccaaagtgctgggattacaggcgtgagccactgcgcctggtctctcccctttcttaaatgcaatctgctaagctcctgatcatctttatccagggtcattccccccaccaccctatgtcctgggtaattgtatcccattttacagacacaaaagctgagatcagagagtggagtggcccaaggtcatggggagagggagagatgaaacttgaatctcggccgggcgccgtggctcacacttgtaatcccagcactttgggaggctgaggcaggcggatcacgagttcaggagatcgagaccacggtgaaactctgtctttacaaaaaatccaaaaaaattaactgggcttggtggcgggtgcctgtagtcccagctactcgggaggctgaggcaggagaatggcgtgaacccagaaggcagagcttgcagtgagtcgagattgtgccactgcattccagcctgggcgacagagcgagactccatctcaaaaaacaaacaaacaaaaaaagaaacttgagtctcccaggatgcctggttgtcctgatatttcatcttctggaaacatcactgcctgaatctaggaggctcagcttttttttttttttttttttttttgacacagagtttcattcttgttgcccaggctggagtgcaatggtgcgatcttgactcactgcaacctccacttcccgggttcaatcgattctcctgccttagcctcccaagttcccaagtagctggaattataggcgcccaccaccacacctggctaattttgcatttttagtacaggcagggtttcaccatgttggccaggctggtcttgaactcctgacctcaggtgatccgcccaccacggcctcccaaagtgctgggattacaggtgtgaaccaccacacccatccagggggctcagctttgaatgaagccccctccatattaatgcagaaatgggacctaggaaccaggcagatgtgggttcaaatcccagccctgtctgacctgccgagtaaccttggatgaatgacttcccctctctggccttgggttctcttggcttgtaacgtgaggcctctgggggagatgtcagtggggccagctggtgactggcatatgctgaatgtcgatgcgtcttcctcctttcaggatgtcagcttgcactgctcagaatcaggagttacagaggaaagtcttgcatctcgagaagcaaaacctgtgagtctgggtccagctggggcagaggacaggggaagcagccccagagtccctttgcaggaagagcagagagcccatgtgatggcagaatgacatagggaataagagttttacctatgggccgcgtgcagtggctcacgcctgtaatctcagcactttgggaggccgaggcgggtgga

SEQ ID NO: 1132 - DNA, 4086 bp, Homo sapiens
cctgggcgacagagcaagactccgtctcaaaaaaaaaaaaaaaaaaaaaagcctggcatggtggctcacgcctgtaatcccagcactttgggaggccgaggcgggcggatcacaaagtcaggagatcgagaccatcctggctaacacagtgaaactccatctctactaaatatacaaaaaagtagccgggcgtagtggcaggcgcctgcagtcccagctactcagaaggctgaggcaggagaatggcatgaacccagggggcggagcttgcagtgcgcagacatcgcaccgctgcactccagcctgggcgacggagtaagactctgtctcaaaaaaaaaaaaaaaaaaaaaagaaataactaaaaaaggccagacacggccaggcgcggtggctcatgtctgtaatcccagaactttgggaggccgaggtgggtggatcacctgaggtcaggagtttgagaccagcctgaccaacatggagaaaccccgtctctactaaaagtacaaaaattagccaggcgtggtggcaggtgcctgtaatcccagctactcgggaggctgaggcaggagaattgcttgaacccaggaggcagaggttgcagtgagccgagatcacaccattgcactccagcctgggcaacaagagcgaaactccatctcaaaaaaaaaaaaaaaaaaggccaggtgcagtggctcatgcccataatcccaacactttgggagcccaaggcaggcagatcacgaggtcaggagatcgagaccatcctggctaacatagtgaaaccccatctctactaaaaaatacaaaaaattagctgggcgtagtgggacgtgcctatagtcccagctactggggaggctgaggcagaagaagcgcttgaacccaggaggcggaggttgcagtgagccaagcgcttgaacctgggaggcagaggctgcagtgagccaagatcgtgccactgcactccagcctgggcaacagagcaagactccgtctcaaaaaaaaaaaaaaaaaaaaaaaagagtactgaaaataaacactatgaatatctactttgtgatcgtattgtttctttttcctttttctttttttgtttttttcagacagggtttcactttgtcccccaggctggagtgaagtggtgtgattatagctctctgtagccttgacctcctgggctcaagcaatcctcacacctcagcctcccgagtagctgggaccacaggtgtgagccaccacgtctgggtcatattgttatttgttgttgttcaaaagggagattcaattcacttgagggaggtgctggcctcaactgagactttctcagaggatgagaaaagtcaacaaagggggatgggcgcggtggctcatgcctgtaatcgtagcacttcgggaggcagaggtgggaggatcacctgaggtcaggagttcaagaccagcctggccaccatggagaaaccctgtctgtactaaaaatacaaaacttagccaggcatggtggcgcatgcttgtaatcccagctacttgggaggctgaggcaggagaattgcttgaacccagtgggagaggtagcagtgagccaagatggcaccactgcattccaggctgggtgacagcaaatctcaaaagaaaaaaataaagaaaaagaaaagtcaacaaaggggaccatttcctccctcagggctcctgtcagaaatcagatcacctcttcagggggccgggaaagaggaaaccaggcatcaaaggggaactgggtaaatgtcaagcccggtgctgatgtgtccatccaagaaaagtatggttatcccgactcatgagtccttacaacgaccttgaggtacccatttgacagatgagcagagagaggctcaggagggggcagttggaggacacaggacgcagaaacaaggcgtgtgccacacctgtgaggcagctcctcatgtccctggccagcagcatgccgtccgggcaggcgcaggtaaacttgggcgagtgggggttgatctgcggggcagggaggcacagatactggcagccgccattgctcagggtggtcctctcacaccagttcactcctggggcagaagaagcggagtcagggcaggaacgagatcatcagctataccagaagattccagaaatttccagaacattccagagtttccacaaggaggtttcaaggttgggggggtggggctgacccacccttacctcttggctgggtgaggttgtggaagagaaccatatcctctggggacagtaggttttcagccaacaagttgacatcggaacctgtgaggcggttggcactgaaaatggcttcgttgatgatatctgtccaaaatactttgtcctaaacaggcagcaaggaagatgacaaatcccgttaaacactgggatgagacacaggccaccctctctccacaactagtttttttgtttgtctgtttgtttgtttgtttgtttgtttcagacagagtttcacttttgttgcccaggctggagtacagtggcccaatctcggctcactgcaacgtccacctcctgggttcaaacgattctcttgcttcagcctcccgagtagctgggattacaggtgtgccaacatacctgactaattttttgtatttttagtagagacgggctttcaccatgttggccaggctggattcgaactcctgacctcaggccatccacctacctcggtctcccaaagtgctgggattacaggcgtgagccacagtgcctgacccacagctaattttttttttggttttttttttgagacgaagtctcactctgtcgtccaggctggagtgcagtggcacgatctcggctcactgcaatcttagcctcccaggttcaagcgattctcctgcttcagcctctcaagtagctgggactacaggcatgtgccaccacgcctggctaatttttgtatttttagtagagatggggtttcaccatgttggcctggctggtctcgaactgctgacctcatgatccacctccctctgacctcccaaagtgctgggattacaggcatgaaccaccacacctggcccacaactagtttttaattgtggtgaaatacacataacataaaatgtaccatctcgactatttgtgagtgcacagttcggtggccttaagcagattcacgctgttgtggaagtatcaccatcaccaccatccatttccagaactttttttttgttgttttttgagacagagtcccactctgtcgcccaggctggagtgcagtggcatgatcttggctcactgcagcctccacctcctggggtcaggcaattctcatgcctcggtctcgagaacccaggattacaggtgcctgccaccacacctggctactttttgtatttttttttttttttttttttttgagacggagtctcaactcggtcacccaggctggagtgcagtggcgcgatcttggctcactgcaagctccgcctcccgggttcacgccattctcccgcctcagcctcccgagtagctgggactacaggcgcctgccaccacacccggctaattttgtttttgtatttttagtagagacggggtttcaccgtgttagccaggatggtctcgatctcctgacctcgtgatccgcccgcctcggcctcccaaagtgctgggattacaggcgtgaaccaccgtgcctggcctactttttgtattttttgtagagacagagtttcgtcatgttggccaggctggtctcggtctcacactcctggactcaagcgatcctcctgcctcagcctcccaaagttctgggattataggcataaactgccatacccagtttaaatctcttttctttataaattacccggcctcagctattcctttactgcaatgcaaatggacgaacacacttggggggactccacttttggctgttggtaatcatgccaggaacgtggggttataaaatagcgccatttccttagagcagggtttccccacgatggctctatctagggcctgctacttccctgttctgggtgttcagcagcgtcaccagcctctacccactaaatgccaacagtcttccccat

SEQ ID NO: 1133 - DNA, 4042 bp, Homo sapiens
aatggcgtgagcctgggaagtggagcttgcagtgagctgagatcatggcactgcactccagcctgggcgacagagcaagactccgtctcaaaaaaaaaaaaaaaaaaaaaagcctggcatggtggctcacgcctgtaatcccagcactttgggaggccgaggcgggcggatcacaaagtcaggagatcgagaccatcctggctaacacagtgaaactccatctctactaaatatacaaaaaagtagccgggcgtagtggcaggcgcctgcagtcccagctactcagaaggctgaggcaggagaatggcatgaacccagggggcggagcttgcagtgcgcagacatcgcaccgctgcactccagcctgggcgacggagtaagactctgtctcaaaaaaaaaaaaaaaaaaaaaagaaataactaaaaaaggccagacacggccaggcgcggtggctcatgtctgtaatcccagaactttgggaggccgaggtgggtggatcacctgaggtcaggagtttgagaccagcctgaccaacatggagaaaccccgtctctactaaaagtacaaaaattagccaggcgtggtggcaggtgcctgtaatcccagctactcgggaggctgaggcaggagaattgcttgaacccaggaggcagaggttgcagtgagccgagatcacaccattgcactccagcctgggcaacaagagcgaaactccatctcaaaaaaaaaaaaaaaaaaggccaggtgcagtggctcatgcccataatcccaacactttgggagcccaaggcaggcagatcacgaggtcaggagatcgagaccatcctggctaacatagtgaaaccccatctctactaaaaaatacaaaaaattagctgggcgtagtgggacgtgcctatagtcccagctactggggaggctgaggcagaagaagcgcttgaacccaggaggcggaggttgcagtgagccaagcgcttgaacctgggaggcagaggctgcagtgagccaagatcgtgccactgcactccagcctgggcaacagagcaagactccgtctcaaaaaaaaaaaaaaaaaaaaaaaagagtactgaaaataaacactatgaatatctactttgtgatcgtattgtttctttttcctttttctttttttgtttttttcagacagggtttcactttgtcccccaggctggagtgaagtggtgtgattatagctctctgtagccttgacctcctgggctcaagcaatcctcacacctcagcctcccgagtagctgggaccacaggtgtgagccaccacgtctgggtcatattgttatttgttgttgttcaaaagggagattcaattcacttgagggaggtgctggcctcaactgagactttctcagaggatgagaaaagtcaacaaagggggatgggcgcggtggctcatgcctgtaatcgtagcacttcgggaggcagaggtgggaggatcacctgaggtcaggagttcaagaccagcctggccaccatggagaaaccctgtctgtactaaaaatacaaaacttagccaggcatggtggcgcatgcttgtaatcccagctacttgggaggctgaggcaggagaattgcttgaacccagtgggagaggtagcagtgagccaagatggcaccactgcattccaggctgggtgacagcaaatctcaaaagaaaaaaataaagaaaaagaaaagtcaacaaaggggaccatttcctccctcagggctcctgtcagaaatcagatcacctcttcagggggccgggaaagaggaaaccaggcatcaaaggggaactgggtaaatgtcaagcccggtgctgatgtgtccatccaagaaaagtatggttatcccgactcatgagtccttacaacgaccttgaggtacccatttgacagatgagcagagagaggctcaggagggggcagttggaggacacaggacgcagaaacaaggcgtgtgccacacctgtgaggcagctcctcatgtccctggccagcagcatgccgtccgggcaggcgcaggtaaacttgggcgagtgggggttgatctgcggggcagggaggcacagatactggcagccgccattgctcagggtggtcctctcacaccagttcactcctggggcagaagaagcggagtcagggcaggaacgagatcatcagctataccagaagattccagaaatttccagaacattccagagtttccacaaggaggtttcaaggttgggggggtggggctgacccacccttacctcttggctgggtgaggttgtggaagagaaccatatcctctggggacagtaggttttcagccaacaagttgacatcggaacctgtgaggcggttggcactgaaaatggcttcgttgatgatatctgtccaaaatactttgtcctaaacaggcagcaaggaagatgacaaatcccgttaaacactgggatgagacacaggccaccctctctccacaactagtttttttgtttgtctgtttgtttgtttgtttgtttgtttcagacagagtttcacttttgttgcccaggctggagtacagtggcccaatctcggctcactgcaacgtccacctcctgggttcaaacgattctcttgcttcagcctcccgagtagctgggattacaggtgtgccaacatacctgactaattttttgtatttttagtagagacgggctttcaccatgttggccaggctggattcgaactcctgacctcaggccatccacctacctcggtctcccaaagtgctgggattacaggcgtgagccacagtgcctgacccacagctaattttttttttggttttttttttgagacgaagtctcactctgtcgtccaggctggagtgcagtggcacgatctcggctcactgcaatcttagcctcccaggttcaagcgattctcctgcttcagcctctcaagtagctgggactacaggcatgtgccaccacgcctggctaatttttgtatttttagtagagatggggtttcaccatgttggcctggctggtctcgaactgctgacctcatgatccacctccctctgacctcccaaagtgctgggattacaggcatgaaccaccacacctggcccacaactagtttttaattgtggtgaaatacacataacataaaatgtaccatctcgactatttgtgagtgcacagttcggtggccttaagcagattcacgctgttgtggaagtatcaccatcaccaccatccatttccagaactttttttttgttgttttttgagacagagtcccactctgtcgcccaggctggagtgcagtggcatgatcttggctcactgcagcctccacctcctggggtcaggcaattctcatgcctcggtctcgagaacccaggattacaggtgcctgccaccacacctggctactttttgtatttttttttttttttttttttttgagacggagtctcaactcggtcacccaggctggagtgcagtggcgcgatcttggctcactgcaagctccgcctcccgggttcacgccattctcccgcctcagcctcccgagtagctgggactacaggcgcctgccaccacacccggctaattttgtttttgtatttttagtagagacggggtttcaccgtgttagccaggatggtctcgatctcctgacctcgtgatccgcccgcctcggcctcccaaagtgctgggattacaggcgtgaaccaccgtgcctggcctactttttgtattttttgtagagacagagtttcgtcatgttggccaggctggtctcggtctcacactcctggactcaagcgatcctcctgcctcagcctcccaaagttctgggattataggcataaactgccatacccagtttaaatctcttttctttataaattacccggcctcagctattcctttactgcaatgcaaatggacgaacacacttggggggactccacttttggctgttggtaatcatgccaggaacgtggggttataaaatagcgccatttccttagagc

SEQ ID NO: 1134 - DNA, 4043 bp, Homo sapiens
ctggagagaaatggaggtgtcatcctggtccccccgggcctgtttctcttatccttcacgaggaaaggaagaaaccaaaatcccaacccaagccattgcatgggcactgtccgaagcctgttctgcctcccagatgaataaatatataaaacaaagctctggcaggcaatgctttggtcttctctgtctttgaataaaacaaggccggcgaggtctcaggaagggttctgggcagggacgggactccaggcagatgttcacgccacgtcatcctccagactgaccatctgtctctgccaacaaatggtaaacagcggaaactatcagtccagcattcaggaaacacggctggaggccacctacttctcacctcctgggcctggcagcctcccccagcctgatccccaagcatgttcccccaggagccgccagagggagacggtgagtaccggattcagtcacttcccaccgctctcagggcaaaagccaaagtcctccccagtggcccacaaggctctgcacaacctgcctggtagcctcctgcctttttacccctctctctgtttgctccagctacaacggcctcaaacccaacaggcacggtccagcctcagggccttcgcacaggctgttctcctggttcagagaaggctacctaccctaaaccccttgtgtaaagatcaaggcgggcgcagtggctcacgcctgcaatcccagcacgtggggaggccaaggcgggtggatcacttgaggtcaggagttcgagaccagtctgggcaacatggcgaaacctcgtctctactaaaaatacaaaaattacccgggcatagtgttgtaatcccagctactcaggaggctgaggctgaggcataagaattgcttgaacccaggaggcagaagttgcagtgagccaagatcacagcactgcactccaacctgggtgacagagagagactctgtctcaaaataaaaaataaaagcaaaaaaataaaacacctcctctcccttcctccctcctggccctctggaaacccttctttgaatttttttttttttttaagagacaagggcttgctctgtcacccaggctggagcgcagtgacgcaatcacaagtcactgcagtctcaatctcctaccttagcctcaagcaatcctcctgccttagcctccctagtagctggaactaggcgctcatcaccacactgggctaaatttttattttttgcagagatggggtcttgctgtgctgcccaggctggtcttgaactctgagctcaggtgattctcctgcctcaacctccccaagttctgggatcacatgtgtgaaccaccatgccgggcctctgaactccttttttttttttttttgagatggagttttgctcttgcctcccgggctggaatgcagtggcgcgatctcggctcactgcaacctctgcctcctaggttcaagcgatttttctacctcggcctcccgagtagctgggattacaggcgcccactcccacgcctggctaattttttgtatttttaatagagacggggttttgtcatgatggccaagctggtctcaaactcctgacttcaggtgatccgccagcctcggcctcccaaagtcctgggattacaggcatgagccaccgcgcccggcctctgaactccttttgactttctttgccctgtcaccatctgatggagctctctatttgcttatccaacattcctctacaccaccaaggccattgtccgctgacattctgaatgagcgcacagaagcattcacctaatgctgtcctcgatctggagggctggggaagcctcggcctggtcccttgaggatcatatgcctccagctgggagggggccgccatgggctctggctttctagagagggtcactcaccgaggggtagctgtagccgtcctggttgtggcaaatgtggacctcatcctctgtggtcttctgatagacggggttgtcaaagttgatgctgttgatgttcttaagccgccagttcttccatagaaggaagacccccaggcaaaggaagacgaggagcactgtagggagaggcacgctctgtcacacagctgcccccgagaccagagacccagctccgtggctggagtgaaaacacgggcatcgtaccataaccttgactcctggtcttttatgtttgtttagagatcgccttgcggcctgggcctggtggctcacgcctgtaatcccagcattttgggaggctgaggcgggcggatcatgaggtcaagagttcgagaccagcctggccaacatgatgaaacccagtcagtctctactaaaaatacaaaaattagctgggcatggtggcgggcgcctgtagtcccagctactcaggaggctgaggcaggagaattgcttgaacccgggaggcagaggttgcagtgagccgaggttgagccactgtactccagcctgggcgacagagcgagactccatctcaaaacaaacaaacagaaaagaggcaaatctatgcataagaatttttttctttctttttttttttttgagacggggtcttgctctgtcaccaggctggagtgcagtgacatgatctcagttcactgcaacctcgacctcccaggttcaagcgatcctcctgcctcaggccctcaagtagctggtaccacaggcacgtgccacctgcccagctaatttttgtaccttttctagaaacagggtttcgccatgttgcccaggttggtctcgaactcctgagcccaagcaatccacccacttcagcctcccaaagtgctgggattacaggcataagccaccacacccagcctcataagtataagaaatatctaacctgaagcccactgggtgagccacgccccagaagtagctgacttcttctagatttctgtccaggattagccacacacagggctgtgactttttaagaaataggaagtggggtatagtggcttgcaccagctactcaggaggctgaggtgggaggatcgcttgagcccagacattgaggctgcagcgaggcatgatggtgccactgcactccagcctgggtgacagagcaagactctgtctctcaaaaaaattaaatttcttttttcttaaaatttaagaaaaaaagaaaaaagagatgtgatggtaaccgagttaggatgagcatgggtgaggcagggagagcgcgcctctccacacagccccctgcaagggaaccagttccccagaaggcactcaaatctcggtgaggctattccacagcacgggacccagctccacatcctccatctgaccccttagctgtctgatcttgtcactgtcagccccaagccaggagaggccgtgggggtgataaaggacaccagtggggctgttccctgtccaggagaaaaagtgaacaggcccaaccagccaggcacgaggtcacatagcgggaggctgtgacctgggggacgctgggggaccggcccgcgcttaccgatggggaggacaatggacagagccctcacgctactgggcttcttctcatttcctctgccagcaacgtcgcccagagctgcaggagagaagcaagagtgaggcccaggtctaaaggaaggccaccaagaaatggagcaggcagaggacggtggtcacggcaggaaagcgcctggcacatctccctggacacttggagaacttcccaagtctgtgagaggccacacgggcttatttgtgagttatcgaggttgtaggactcaattccggtttaagaaggttctttttgtgggggatagaaacagaggtctggctatgttgcccaggcttgtcttgaactcctggcctcaagagatcctcctgcctcagccttccaaagtgcagggattacagaaatgagccaccgagcccagcctaagaaggttcttgagcctcacattgatgagtctttaggggagggctgcagaggcttttattctaggtggttgacaaggttgcaggtgaaattcttgtcaacctacttgtgcattttattaaaatgagcatattttggtct

SEQ ID NO: 1135 - DNA, 4065 bp, Homo sapiens
agtggtttaaaaagtgacacccatctcccagaagccactcatacatacaacggggacatcattctcccaaaaagcgttgcacacagtccagttcgtgcaaataatctttgtacataaagaagaggcatttcagaggcaataaccccctacacagggccccgagaatagtcactgaacaaatacagcaaccagggtttgcaaaaataaatagattttatatatatgtgtgtatatatatatatataagtgataacagtttcaaccaatatacaaagtgcaaacataacaaaaaatccccactatctgtacagggacgcatttacgtgctccgaaaccagaaaggcttatcacggttccctgcactgggggggacacagtgttttgtccctggggacaattgccaatcccttgtgacatcttcacgcgggagtctgacggaggctgtcactgtctctccggacatcagtgcaacagtaacacggcgatttcagaaagaacctgaagtcccgtcaaacgatccagactggaggatttatttatttttttatagttgtatttctgaaatagggtcttcatctgttgcccaggctggagtgcagtggctcgatcatggctcactgcaacctccacctcctgggctcaggcgatcctcctgcctcagcctcccaagtagctgggatcacaggcacgtgccaccgtacccagctgatttttaactttttggtttttgtagagatgggatctcgctttgttgctcaggcctggtctccaactcctgaactcaagtgatccagctcagcctcccaaagtgctgggattacaggcgtgaggcacctgtgtctggccaaattcattttttaagagatggggtcttactatgttgcccaggctggaaagcagtggcataatcatagctcacgacagcctcaaatgcctgagctcaaaccatcctcccacctcagcctcgccatgcctggccagaggccatgggctgctgatgcaccatgcatggtttttttttgttttttttttttgagacggagtctcgctctgtcgcccaggccagactgcggactgcagtggcgcaatctcggctcactgcaagctccgcttcccgggttcacaccattctcctgcctcagcctcccgagtagctgggactacaggtgcccgccaccacgcccggctaattttttgtatttttagtagagacggggtttcacgtgttagccaggatggtctcgatctcctgacctcatgatccacccgcctcggcctcccaaagtgctgggattacaggcgtgagccactgcgcccggcctcaccgtgcatgttttaaacacatacccatcaacgacaagattggggaagtgaatggcttggaggcatttgcatagaagtggaagcactaggtgggcggacataaagacgacaatggcagttctcgatattcacgatcacggctttgaagtcccggtcaacctgcccctctctgtccccggcattcattgacacgggctttccctggcctgggatcccatcccaacacacacgacagaaaacagtgcaaaataataacacaaatgccaaatgtacacagtgtacaactctgaactgagaaagtgcaaggagaccacgggaatggaagtgggtaggggtcgggaggatgggcaccaggctggtgtcctgacagccacacctgggtgcaggccacgtgtcctcacggccaaggtaaccgggtgtctcaggcacttaataaatattaagggtgaccagtgactcaggctctgcctctgggaagtggcatcatttggtgaatgagtttggtctcggtgccaccacggattcagccagatcatttccgacgccatgaatccctttcctggcttaaggaaggtacaaacccacctcgaaagacactgggtgggtcatgattcgggggtgacagggcaaaggctaacctggctgtctagcaaggcttgcatagaagaggtaaacacgttgactcctgagtttaggggtttggcttagagattggtggatgaggcagggccagggggtcccgttggtgccatctgctgttgtgtgttgaaagccacttgcttctctgggcctgacatcccctcccctttcatcttccatgtttgaggattgtgtcacggtggagagaaactcaaaacttcctggagagaaatggaggtgtcatcctggtccccccgggcctgtttctcttatccttcacgaggaaaggaagaaaccaaaatcccaacccaagccattgcatgggcactgtccgaagcctgttctgcctcccagatgaataaatatataaaacaaagctctggcaggcaatgctttggtcttctctgtctttgaataaaacaaggccggcgaggtctcaggaagggttctgggcagggacgggactccaggcagatgttcacgccacgtcatcctccagactgaccatctgtctctgccaacaaatggtaaacagcggaaactatcagtccagcattcaggaaacacggctggaggccacctacttctcacctcctgggcctggcagcctcccccagcctgatccccaagcatgttcccccaggagccgccagagggagacggtgagtaccggattcagtcacttcccaccgctctcagggcaaaagccaaagtcctccccagtggcccacaaggctctgcacaacctgcctggtagcctcctgcctttttacccctctctctgtttgctccagctacaacggcctcaaacccaacaggcacggtccagcctcagggccttcgcacaggctgttctcctggttcagagaaggctacctaccctaaaccccttgtgtaaagatcaaggcgggcgcagtggctcacgcctgcaatcccagcacgtggggaggccaaggcgggtggatcacttgaggtcaggagttcgagaccagtctgggcaacatggcgaaacctcgtctctactaaaaatacaaaaattacccgggcatagtgttgtaatcccagctactcaggaggctgaggctgaggcataagaattgcttgaacccaggaggcagaagttgcagtgagccaagatcacagcactgcactccaacctgggtgacagagagagactctgtctcaaaataaaaaataaaagcaaaaaaataaaacacctcctctcccttcctccctcctggccctctggaaacccttctttgaatttttttttttttttaagagacaagggcttgctctgtcacccaggctggagcgcagtgacgcaatcacaagtcactgcagtctcaatctcctaccttagcctcaagcaatcctcctgccttagcctccctagtagctggaactaggcgctcatcaccacactgggctaaatttttattttttgcagagatggggtcttgctgtgctgcccaggctggtcttgaactctgagctcaggtgattctcctgcctcaacctccccaagttctgggatcacatgtgtgaaccaccatgccgggcctctgaactccttttttttttttttttgagatggagttttgctcttgcctcccgggctggaatgcagtggcgcgatctcggctcactgcaacctctgcctcctaggttcaagcgatttttctacctcggcctcccgagtagctgggattacaggcgcccactcccacgcctggctaattttttgtatttttaatagagacggggttttgtcatgatggccaagctggtctcaaactcctgacttcaggtgatccgccagcctcggcctcccaaagtcctgggattacaggcatgagccaccgcgcccggcctctgaactccttttgactttctttgccctgtcaccatctgatggagctctctatttgcttatccaacattcctctacaccaccaaggccattgtccgctgacattctgaatgagcgcacagaagcattcacctaatgctgtcctcgatctggagggctggggaagcctcggcctggtcccttgaggatcatatgcctccagctgggagggggccgccatgggctctggc

SEQ ID NO: 1136 - DNA, 4048 bp, Homo sapiens
gaccagcctggccaacatggtgaaaccccgtctctaccaaaaatacaaaaactagctaggtgtggcagcgggcacctgtagtcccagctacttgggagactgaggcaggagaatcacttgaaccggggaggcagaggttgtagtaagctgagattgcgccactgtgacagagcgagattccatctcaaaacaaaacaacaaacaaacaaaaaaccaagtgagtagaagcatgaattagtaacattaagagtagaaatcaatgaaacggaaaaagcaatctaatctggcacctaaaaatcagatttcacataagtctcgatttctagcttctcagagtttctggcaacagtggccctagattctgacagggcagcaaggggaaggcactgggcaagggccacccttcaggcagcgcacacatgccccagatcactgggggccccccacaacctttcctatctttttctgacacaaggtctgggtctgttgctcaggctggagggtaatctcagctcactgcaacctctgtctcccggactcaagccatcttcccaccacaggttcccaagtagctgggactgttacaggcatgtaccaccaggcctggctaatttttaatttttttggtagagacagggttttgtcacattgcctaggatggtctcaaactcctgggctcaagtgatccgtccgtcttggccaaaatgtaatcccaaaagtgctgggattccgggcgggagccaccacacccagccacacaccccttcctgagatgccaagtgcacctccctccctcaggcccctgcaggcatttgagtctgtgactctgggataagctcctgcagtaccaagaagtggtgggaaggagggaaaaagaagtgagagaagcggatctgaaatcaccacagaagagaaacttggggtttgtggccataagggaagaagagggcagagttgaaagcggctctggtcttagtttctggcttgggcagctgtgacaggggtagcttttgctgctctgcaaagaagaaggttgcatgaaagcctttggagacgggagatggcacattctcttttgggcgagttgagtttgaggcattacagggatgtccagagacagaaatctcgaataggtagttcaaaacgtggggctggagttgcagtgaaaggaagggaatggatggaaacacagttccttgcattaccaggagccaggtggtgggcgaagcctgggaggacatcaaggaacagtcctcaactttttgtgagtcacacactcttctgcagcaaagaaaaaagaggaacacctacaagggggaacagagtttgggggatactgaccaagagcttccgagcccatcgctgggcctcacaagtcatacacctgaggccgacgggaggggccggaccttatgaaacaccagcaagactgggtgtggcagctcaggcctgtagccgaggccggaggactgcctgaggccagaagttcaagacgagcctgggcagcatagcaagacctccactctacagataaaaaaaaattaccccatgtgatgacgcctgcctgtggtcccagccactcagaagcctgaggtgtgaggatcgcttgagcctgggaggtcaaggctgcagtgagctgtgattgtgccactgtactccagcctgggtgacagagtgagacccccttctcaaaaaaaaagaaacactcgcagccaaagcagtttctcaagcttgtccactatgacaaatcacctgaagagctgatggaaaacacagattccccggcacccccatctactcacttggaactgggacagccctggaaatttcactgttaacagtggggtaggaaaggcaaagatcacaggagaatcagagaggatggaggagaaaggaagattccagaaaggaacagagggaaacaggcagcatcagatgcttggagcccagacagcaaaggaggccagtggatgtggcaatggggtcaccacgggtgaccggaagtggagctgttttggtagagccatgagccagatggctgagggtactgggaggatgagcagattggggcagatgctctgcaagtcaggaaagcggagacaggacggagctggagaagtgggcaggtgatgaagactgcttcacagggtgagaaagtttcaaggctgcctggagtcagattaactaagggagaggcgggggtgagagtggggtgggagggttctgagtcctctcttcgccttactgtgtggccaccaagactcactgcatccccaccaggtgcccggggcggctgtgcttccaccatttcacagagggaagacaggtacggagattaagaaccaccctgacgccccaccacaggtaagtcgtggggctggggctgctctgggggcccctcaaactcactgcatctcaaaaccaagctcagatgcaccccttcccttccaagcatggaggggagttcagcacgaaacccttattctccagccttggagtcctccccacatttcccccaacccctgccctgtctcaggcctgacagtcgtatggtctcctacctcccagccccttcccaccactcttgccaacagcctccacaacccaaacccctctgctggcttctcatcaccctggaataaaaccacaggagcccagacagccacactggggacttcttccaaggtcctccaccatctggcctgggcagccccctccactgcgccaacttcctctttcctttcctgaattctgctcttctgcagacacaccatggcggccctggctcagggcctggcctgtgttctagctcttccctctgcccgggactctcctgaggttctcaacaggccccttccctcaggtcgcttcagggatctgcttcaatgtcacctctcgaagagcccttcagagcacactaccatgccgccatcacccgccaccttcttccccagctttcctctcctgcctgtgactgcctgcactgcctgatgcggctgtgtgactcccatctctcccaccagaacgcgcacagagagctgagaccttgtctgtcctatcatctgctgcattgccatatctgaggacgcaaaaggggggctggtcgtagtatgcacgcgctgaatgaacgcctgaactcagggaggagctgctcagaacacaactacctgggccacagaccccagtcccatcaccacctttaggactcagcattcagcccctcactcgggcattcgaggccttcccgatcttccctcctgaggcattctaaatggaacttctcccacaaccaaaccagcaccccacaaagtaacctgacccacactcccctctccctagggaagcgtcaccccagcccaccccccatcaatgtcccatgagacccatgagacataagccctcaggcctttgagcctccctgacgctccaggccagactccagacctggcacagggcctgtgccgctcagcccagaacccacgggcagtaaatatttgttgaatgatggttgtttgggtgtaagcactctcctggcacttgcacagtgctgtgcccactgcagtggctactgacaggcggggcgggacagtgctgaaggccaaatgacctgaggtgagacctggtgtttctggaaagggcaggatgctccggccttaggtagccagaggcagaacttcatgcagtttctccctcagatgtgctccctgggggaacagacctacttctggaggccaggcaggcatgggagtgcgggatgtgagcatgacagctgccacgtggaaaggtcagcccacgtgagcccggtcagccccatttttcaagtggggcaggcaatccgtatgggagtgtgaagtccaccatcttagatgtgggccatgaattcaagatcaccagccgggtcaacaaatggccagttccaattcacactccctgtccctctacttctgacactgtactctcccctcgttgctcactttctacctttacagcgtccagcaaagccctctggagcacttgtggcctgcccaggagtggcttctctctctgt

SEQ ID NO: 1137 - DNA, 4036 bp, Homo sapiens
agagtcactttttttgtttgttttttagacagagtcttcctctgttgcccaggccagagtgcagtggcacagtcatagctccctgcagccttgacctcctgtgctcaagcgatgctcccgcctcagcttcccgagtagctgggacagcaggtgcacgccaccacacccggctaattttttaattttttgtagaggtggggtctggttgtgttgcccaagctggtcttgaactcctgggctcaactgatcttcctaccttggcctcccaaaactctgggattacaggtgtgagccatggtgcctgactggcagattaagttttttaaaacatggccagtgagattgtggttttctccattttaaaaacctacaggaggctgggcgcagtggctcacgcctgtaatcccagcactttgggaagccgaggtgggagaatcacctgaggtcaggagttcaagaccagtctggccaacatggtgaaaccctgtctctactaaaaaaacaaaaattagccgggcgtggtggcagccgcctgtaatcccagctgctcgggaagctgaggcaggagaattgcttgaacccgggaggcggaggttgcagtgagcccagatgatgccactgcacaccagcctgaacgacagagcgagaccctatctcagaaaaaaaaaaaaaagcttatgggggcttcctctttattccaaggaaaaatcagtgtctgcatggttgcccacaagacttagggactgcccacccctcagccttatccccaagtcccaccatctcctcttgttcagcctgaccctgggctatgctggcttgtcctctccttaggtctttgctgcctccatctctcaccctccaagacgaaggtcaactgtcactttctcatgaaacacttgcttgactgccagccccttgaccatgcctgtggtcccccaacccgtggcatgtgcctgctgtcccagctacttgggacgctgaggtgggaggattgcttgagcacaggaggttgaggctgcagtgaactatgactgcaccactgcactccagcctcagcaacagaggaagaccctgtctctaaaaaacaaaccaaaaaagtgactctactgtgtggcgaatgggtcacggtcactctaccactgtctgttatgagattcacgaatagaatgtactagacacaattatttattcatgttttcatcagtctttaacaaattccctgaccaggatggagaaatctcctctctcatctaccttgttcatggcctcgtccccactgtctagaataagactccacacggcgtaggggttccgtaaatacccatggaattaggaccttccagtccctgtcactcggtgcttcattgatttctgttcttttttggagatggagtcttgctctgttgccaggctggagtgcagtggtgcaatctcagctcactgtgcaacctccaccttgcgggttcaagcaattctcctgcctcagtctcccgagtagctgggattacaggcacctgccaccaagcctggctaacttttgtatttttagtagagacggggttttaccatgttggccaggctggtctcaaactgacctcaagtgggctgcctgcctcaacctcccaaagtgctgggattacaggcatgagccaccgtgcctgtcctggttcctgttcagctgccagtactcctgagacgtcctgagctctgctcagtgctcgggtgtctccagtgccctaggctgaggcctggctctcccatccctgctgccctgctaaggacccaggccactgggctctcacctgttgtgggaaaacagagccactggtcaggctggcgaggaggaggaggagcaggaggcaagcggcccagatctgggagctcagtgccatcgtgccgtctgtctggctgtcccactgctgggtcttgagcttgctctggtgtctgggaccgagtgacagtcgcttttatggggcctgccaggggaggcggtggtctgagccccctcccctttgctctgtctcatttccaagaaggtggtggcgccgaaaaggcgggagagataagcgggaacagagcgacagggaacagggttgtgtcaccctcagccggcagaggtgtgttcagggggtggggcagacggggtcacagacacacactgctcaccagccatctggggagccctttccccatcacgatgtcattctgctgatcgggaaaaaagttcccccttttgcttcagcggttaagcagtttgatgagcagaatcaaggttccgctctcctccactcacttccccatcgcctacatgcacacggggcatggccagcagccgccaggctcctcaggagtgtctggcatgttgggggaagcatccattgctttaagctctcaccacacgtgcataggttctggcagggaacactagatagccctgagcagggcaagcatcagcgtgtgcccgatccgcacgtggtgttttcccagtgtcagacccttgagatgtggctctggtaactggaaaatgtttgagcaaacttttggccataaatgacagcagtaatatggcccagcacagtggcttatgcctgtaatcccagcaatttgggaggccaaggcaggagggtcgcttgagcccagaagttcaagactagcctgggcaacatagggagaccccatctctacaaaaaaaattttaaacaaatttagccaggcgtggtggcacacatctgtagtcccagctacttgggaggctgaggcagatcgcttaagcccaggaggctgaggttgcagtgagctatgattgtgtgactgcactccagcctgggtgacagagtgagaccctgtctataaaacataaaatagcagtaatagtaatagctaacatctacagtccgatgagtacattttatacgatggcacatatgttgactcacttctgcaccaactcagcctgtgctgcctgttctcccagcagcacttactgccccaccttcagctctgctctgtattcaggggctgccttctcagtcacccaaccccagaggcctgggctccccagaccctgctcccttttaggaacctcctccccgtcggacactcatttccttcactttacagaaaaggcactgaaggcagagatcagggcatggcccaagcttgctcagccagaggcagagctgagattctagcctggacagcctgactccagggcttttgctcttacccaccaggtttccccatctcccctaaaacacagcagggcacagcggtatgctagacctggctcaacatagcagaccatgcacatctcgaaactctgcattcagtggcatcatgctggtatcctgaaatcagcagcagtgggagtcttgacacccagaaattggcaagcactacaagccagggatgtttttggggagccggttccttaggacaccactagctgggggatgaacccaggctgcctgactgcagtgccttcattcctttccactaccaggcccagctcagggtgcacacggcccaggggatcaacaaaccttggttccagatgggcccttgcacattttgcctctttgcctttttcattccagggccatccagtgtcagccaagtcaccagagcccggggatgttgttgtcgaggaatgaacacttcttcctggttgctgaaccactttcaaggcccactcaagcacagaaatgcacaggccctgccatctgcctcctcatccacaccacgtgggaggctcctcttgtcacagcctgggtaacaaagcgagaccccatctatacaaaaacttggctgtggtgctacgcacctgtagttggtcaaggctgcagtgagccgtgattgtgtgccactgcaccccagcctgggtgagagtgaaaccctgtctctaaaaactaaatgaataaagatggcctcagatgggaatagctaggaaaaggagacagggctcttgtgggaagagacgagtgcagggagtgggggaattggggaggaaaggcagatggagctccacaaggtgagc

SEQ ID NO: 1138 - DNA, 4022 bp, Homo sapiens
ggagctccctcgactggctgaggccagtgaaggcagaacagctgagttcgggccgcggtgcgggagcgcaaaataccccgtccctcctcccctcccgcctccccacccatccctttcctccctggagtccgcagcacctcactctacctcccaggagaccaaactccatgccgcctctccagtcctctgagtctgcacccgggtctgctctcccaacgcgtggctggcgccccaaccccggccctcctgtctgctcctcccgcgcctcagttccccagccccagcttctagacaactgcagcgggggtgtgggaggtggatcgggaaatggaacatcccgcaggtgaggtcaggctagatggattaaggaaactctgtaaagggaccaccctacacaccaccgcagccggcagggagaaggaaggggccttgccgtagaggagcaagtgaggaggcgttgtcccgccgtccggccgcctggagcagtttttaaattcataagcgcttctgtaacgtcagtgggacacagcgcagccccatgccaaagtctcagcgcattttcgggtgaattttgagcgaggtgaaggaggccttgggttcccggagtcgctggaggacgcgcgtcgggccccgcccagttatttcgctgcaagagggaaaaggcacgagcgtggacacggctaagtagactcggaggccggagatcggtcctaaccgggcctcgaagttcctaccgcggacgaactttgctcttcgcggccgtcccgcgtcgcacccggggaaaagcaacacaacttgctgcgcgggctgagagcccgaagcccgccgcacgccgcaatgctccgcgctccccgcggggtcgggcgactcagacagggaccggaaaagaaccacgcagaagaaagccctatttcttgtcgtctgttcctgtgcagccttgcagcctcgccgcccccgcgtcgctcgctctcgcgaccctgtgaacactttgaaaaacaagagtcgggggaagcaacgggctaagcgctgctatttggggcactaaaaggaagccggccagaggtggcgggttcatgcgtcccccgagacccaggccgcgtcgggggccaagagcccttacagccttctcccgcgccgtcgggaggtcctcccggaactgggccggagcgcagagaacgcagtgtgagaagggcccatgggttttaggtcacctccttcgcgctggacgcgggcagagcggtgtccctttctgtctctgccaagagacgtggagggagggagaagggaggatggcttgtgctgaaagaaacaagaatgaagtcgggcagccgggatctgagaaatgggaaatccatggcccttgttcgggaccacaggctttgccgacgtggtctctcctagttccgaaattgcccaggcccgcctccccaccctctgcaagcagcgggaacgacttccacatcgcttaatttctttattaaacttttcacctattctcttctaaaggacagactacagcgtcagatggtaaaaatgttttccgcgccttgtcttgccgtacggaaaccgccggcctgggaggacaagccgagttcttgttttgccgagagcaaaactctaggctcccacttccttctcccagtccgtgcgtttccttgcagagccccagagcgtctgattcactgaaatagcatcacttgctgaaccaaaccttttttcccgctcgcggaaagagtggagcttttttcttttgtctaagggtgtttgcttttttttttttctttcactcggcaccacagtttttctaaatcactgggaatgtgagtcaccgctaacagcaggagacctttggcggcacccggctgtggggcgcgctcgcagcggggagcccaccctgattgtctaggggatccggcactgaagttgggagaggttgcagtcaggccaggctgggtttcagggaaagggcacagggatccagcgcaccaggcgaccgtctggatctctttcctagcagccagccgcgcacctcgccagcctcggcgggacctccgctttgccaccaaaatccccgagagtggcggcccagcgggtgccagcccccggcctcggccacagctctgggcgtcggtggagcgagcgtcgtggcagctgctggcgggccaccacacttcccgccacacccgttagagcttggctcccagcttgggccgccgggagcgcgcctcttcccgtggccgcggctgcagcggtgcagggtagaaagcccacgcggcccgcgggttggagattccggcgattggtgcgtggaggtaggtgtgtggaatgttaaaggtcgagatcaccctccgggcatcatccttcaccgagtcgcacaaatccagcaactgcaaaacacaacacaatgggacaggtcagatgttggcacacttacagccatctagtgacagcagctttcagcccaccaagcacccgcacacacagcggccccggaaactagtttccctttggattctcctgtggaaactgttggccatgaataaccctcggaagccttttttgttttagacattcccaactctgacacctagcccagtggaaaccccggcttttcccgtaagggggtgggcgtggacgtggggtcggtcggctttgcccccaaattagccgggaactcgagaccaaggtctgagaatttattaaagctccctccttggtccttcctccctggtccttccctccgctcctctctctttgcctcccctgtcgtcccctcctctccacctctggagtgcctggggtgccaccctctggcgcgcagagggaactgaacaggaagagcctccgaacaggtgaaccactagagacctgctccagtctccccagactagcgccttcggtcctgacctggctggcagtaggccatgattcttgaaattcagtacagtgagacggcggaccaatgctaggcatcttccgcctggccgctgcggaaaatccatctgctgttaacgccaatgccaaggaacgccgcggatgcccttggttctggcagccactggaaggcagggataagacattcccggcggataggagagggagatgcaagtcagtgttttggaagctgcactggtgtatttttatttcattttccatggcttaggtgccaatgtatttttttttttattttcaggaaaaaaagctaccaaactaataagattgtttttctaaaactacacaagggcagagggacggctttcttttcttctgatctacacattgtactccatttttcaagttttcggccagtggtaaatttgtttcactccccaaatcacagtaaatccccaggttttcatggtttatttttacaggtttaacaacatcacttacaccagccccacctttgccctcacatggtggtcatgtctgagccgcactgatgttgttaagatcacagtttcccttgcagcagtccaaaacgccatttcaggttttcagagcatttcaggttttcagtgaggtcccaaggaggaaggtggaggaaataggggatggggaatatagagggtagggatatggtgggggaagagcatgaattgtaatagtccaacaatacatcttccctgaaaatgtgctctattacaccagtaatttctaatgaaaaacttcattcttcacacactgtggttaagcatcatcaaatcagtactgaaaagacctttgatcgtatttgcaagatgcactaaaatgaactttcactgaccaagatttcaaagtttgtaattaatactcttgaaaaatccctgactaatctgtcaactctcaacgtctttaaccacacagttcaaaaccatgaggtggcgtacacagcccctaaactttccacatattgtcatatgattattcaagataattttccctttgggtttgcattatgaaactcaaccaactttggtaatatattcaccggtgggggaaatacaatgatttgaatgagtgtaaaatagagtatgggtttt

SEQ ID NO: 1139 - DNA, 4042 bp, Homo sapiens
ctggcgctctctccgcccgtgctccctccctcccgctcccgtaccgcacgccgcaccgaatcagacagaacttctctgaggtgcacaccgtgaggtgcacatctctaaatggggagggggcggcggagggcgacgaagcgaacgcctgcaaggtctacaactaggtccgcaggctaggcgacaccggtgcgcgccgcgccgccttcatcccacagaccctcccctcagaaggcaatcacaccgaaactcacgtccgcgccttcccttcagagcgcagcgtccgggccagggaccaagccccgcggcgtccggcccgcgcccttcgccgaccgggcgccccctgaccgtcaccacgaaagcagcgcaggagacaaagcccgggactcgggttcagagtccccggcgcagcgcaaagcccgcgccttcccgccagcccgccgccgcgctccgccgggcagccgagggctccgcacgccgcgcctctggcccgcgctgccccggccgcagccgccgggaacatcctccgcctcctcccgctcctcccctcgcgctctgcgcccgccgccgccggcaccgccgacctccccgcgccgctggcgccgggtgcccgcgttcccaattggtccgcgcgcggtcgctccgcgccgcagccaatcggcagccgcggtgggggcggcgcctacgggtcaggccgccaaaggcgaggcgattgttgacaaactcgcctccgagcgctgctctggccgtggtcgtggcggctgccgcttcgtcggaggatttgagggccggctggcccggccaccctgcccatccctgtgctccttccggacacaagccttagcagctcccgccgtcctggacagccagtcacctggagacaaagcaggacttgcgccgcgcccggacccgcagggccatccccaggcccagtcctcgccacttgtccttgttttggcccgtcgggggcagaccctaacggccgtcaccgccctggctgtggcaactattctcctccaacaacttcctctctctcctggtgcgccgcagacacgagtcaaagccgaagagccacccctggccgcggacgcgcacgtccgcgaccatcgagtaaattcacaccctccgccctggcgtccgtcgggccctccaccagcagcgccaaccctggggcaacaggtcccagagggcacggcgccgccagcctgcaccgcgaaccgggtcgggtgtgctcgggcatgcgtgagccgctaagatagcccggcccagggaccgagcaggttctgccggccgcgactagtcccctgcgcggtccaggtggtcaggggaggacctagatttctcgctgccagggaatcgtgcggatggcacaggccgcaggactcctgcagagcaagcaggggccccaggtacgcttgagaaagcgaacgcagcagtggccccgaaaccttggcctgaatgagtaaaaggaaaagccgtgtctcgtcagttaaatcaccaccgcagttccgcaaatcctccgcaacaggcccacgcgccccaaaaaaccaagacacgaaacaccctcacactgcgcggccgctactctgagggcgccggagccggcggcgagactttccagctgggcgcacagcccgatactacgagcaggtcctcagctcccgggccggcgccgaaaggcacgcgctgcctctcctcctgcccggacctacgacccttcaccaggcccgcgcgcagcatcccgtcccaagccgcacttcggccaagagcctgcaggttccgcgtgaacgacttttctttaaagagaacctgcccgagagggaacccgatccacacggatccccacctcccgccggcgacaagcggcgccgatgcaagcgtctccgctcgcacgtgcacgggaagcgggcagtaggtggtgccgttcgggctccagcgctagtcttccttcggtgccaggcccgcgccccgggatttggaggtatttaccttgcgtttctcagtccgagagtcagagtcagacatttgggggaacaagggccaagaaagggcgccgaggcggtggcggcgggaacgcagcgaaccgaataccgcgatgatgcgatcgcagtgtggcagggttcgcagggtggctgcaagaatcaagtggtggtagtggcggcggcggcggcggcggcggcggcggcggcggcggcggcagcggcagcggcgctggacgcagagctccaacaaactgcagaccaggcggctgcgcggagcgaagtgaaacctgcgcggccctgcagcccagctctggctggcggccccgctcctacgcccaatcactgcggaccccgcccccgctaggtcccgccccggcgcgcgggctggcaagctccgcccccctcggcgccgcggccgccggcgcgtgcaggctcggacaggtaaaggcgggggttgccccgctgggttgcctcccgcgcgcgccgccgtccctggcgtgtttaccggagtaactctgcctgctggcggccatgtgcgcgcccatcccccaccccgaagtgtaccctagcctcccgctcacctaccccaacccggcggcggccgcggcgtgcgcggcacagagggggcgctccggtcacagcctccgctggcccggccggcggtgtgaagcctcgggaggcgccctgcgctctcactgtgccctgagtttctaagccgctctggggcaggcgcggggactgggttggtcctcgcgaaggcgcggggcgaggtctttgagctctcctccctctgagggtccctggcgccgggcgggacgcggatcagcaggctgcgcatcttcctcgcccgggcctctcgcgggactcaggcaccctcctcctgccaccccgcaggggctctccagcttttcttccgcgcccagtcgccctaagagacagaggccgtgggggcaggacgcgcccagaaaacggccaggcgcggtcccagtgggcgtcttcgccgcctcccgggtgagggcgggaggcatgtgcaaagcaggtaaaatagggaaatgaaaaaagcactcagaaaaaaaaatccttttaggaaaaaaaaaaacgaggtgaatggcggcctccaagtgagagagaacgttgcgcactgcatttggctaggacccccaagatttgctgggctcgcagataacctcgtaggagctccctcgactggctgaggccagtgaaggcagaacagctgagttcgggccgcggtgcgggagcgcaaaataccccgtccctcctcccctcccgcctccccacccatccctttcctccctggagtccgcagcacctcactctacctcccaggagaccaaactccatgccgcctctccagtcctctgagtctgcacccgggtctgctctcccaacgcgtggctggcgccccaaccccggccctcctgtctgctcctcccgcgcctcagttccccagccccagcttctagacaactgcagcgggggtgtgggaggtggatcgggaaatggaacatcccgcaggtgaggtcaggctagatggattaaggaaactctgtaaagggaccaccctacacaccaccgcagccggcagggagaaggaaggggccttgccgtagaggagcaagtgaggaggcgttgtcccgccgtccggccgcctggagcagtttttaaattcataagcgcttctgtaacgtcagtgggacacagcgcagccccatgccaaagtctcagcgcattttcgggtgaattttgagcgaggtgaaggaggccttgggttcccggagtcgctggaggacgcgcgtcgggccccgcccagttatttcgctgcaagagggaaaaggcacgagcgtggacacggctaagtagactcggaggccggagatcggtcctaaccgggcctcgaagttcctaccgcggacgaactttgctcttcgcggccgtcccgcgtcgcacccggggaaaagcaacacaacttgctgcgcgggctgagagcccgaagcccgccgcacgccgcaatgctccgcgctccccgcggggtcgggcgactc

SEQ ID NO: 1140 - DNA, 4050 bp, Homo sapiens
gtaaaatagtatttatcaacaaaaaaagcatttgtgcctgtctttacattaaaaaatacactatctcacccactattcccagttccagggaaggagaaactatttccatgcattaacccatcacctacagagaccaatgtatgcattttgcttgaaagggaactggttagagaaaatagcttaataaccacaagtgtgaagcttttgttgtgaaagtgtgaaaagctaataccttccagagggtctttaatgcacgtgtgtttcacgatacacaccataaagccctgttaactcatttagtaagcaaggatgttatagtaagcgagaatgatcatatatatgggggagcattttcatgagtacaacaaaaactacaagccaagaacttctaaggctgaaatgagttcacgagcagtagtaacagcaataataaaacttccagcccctttccctaaggagggaccctaaaaaattacctcctggcatttggcaagagacgtgcagccagcatgtgtagctgctgggatgtctgtcatttctccccaccacctcacaggtgtgcccaacctctgacaagtgaccaccactctgaggttctttccaattctataacatgggcaaaggcctgcctgatttacctcactgaagcctatgaagacagagctggatggtatttagaaatgtcattttgttccagtgtctgttctgatgggtttgttgagttagccttcatcatgaggtacaatctaaattataatagactctgtactgggtttcctaattgataactctaccaacttacttctatcttgttcatgtatggcaagctaatctggacaaatggtcaatgtgattgactactgatcaagacatgaaccttttccattggtggggaacagcaagtcgatcaacacagactcagcccctcaccaaggttacccaaagtatgtacccaaagtcacatgctgtaggttcaagggccaaatcaagtctgcagatgtttcttttcagcttgtacaatgttttcaaaatctgaatcagctgtcaatgttgaaacagggtatctggcatcaattttgcattcctaggttatcttgcaatataggaaaacccaccctgagaccacatgccctcacagccacaattaggtgtggcccaaacatagaaggggcaaatactctccaatttaccagtctccaccaggtcagttccttccatgattttgctgtgggcctctgtggtatttatgttagccactcttggttcaaaccctactactgcctttaatccctgaaataaaaacctacaacctaatctgattagtactatgtccaaaccctctgagcaataagcacaaagaggaatttaggcagaaaacaaaccattttcatggttctatgttggtactgctttcatgaactagttcatttttttaaaagtgttattttcaaaaatgattgtcatctttctttacacttttgattattaagctattttctgtaaatgatcagttccctttcaagcaaaatgtcattactatgtaaagcctggtggttaaaacacactttagcttaatgaagacagacctgaaagctaatgtttggacctcaactcatcactgccacaaaagttagtaactttgtaaaaatgttgatgtgggccatgcgcggtggctcacgcctgtaatcccagcactttgggaggctgagacaggcagattacaaggtcaggagattgagaccatcctggctaacacggtgaaaccccatctctaccaaaaatagaaaaaattagctgggcgtggtggcacgcgcctgtagtcccagctactctggaggctgaggtaggagaattgcttgaacccgggaggtggagcttgcggtgagctgagattgcaccactgcactccagcctgggcgacagagcaagactcatctcaaaaaaaaaaaaaaaagttggtttgatagtttgacacatcctccattcccatctaaagatggaataaatcagttacggggttttaaaaggggattttaaatgccacacacagccttcaagcagattcaaccatccacacgtcaactgcctcttacccaggcattgcttacccattgcactgagatagtggttgaaggcctggcaaggaggacttggggtttgtgttgatttgtcacaactcatgggtgctgggctcctgtctgtgtcaaaagagaaatacccactggaggatcgagacagcagggaggatcttctcataaagatgaaaagcggggatctggtagcaaaagggccagggctggcaggtggggccagcgggccctgagggctgccgtgggggcagctgtccccttcacctccgtgattgccttcaggattaccttgtggctctgtctgtagggaggtaggggccccaggtctgagctggggaggcctctccgcaggctgcaattgtctaccttctcggtcacactcagaacttacatcagaaggttgctttgccatttggtctttttttctgcaagtaaaataaaaactaagattattttaagcaaaaaaaaaaatcgatgaataaacaaattagctctcacctagcgattaaaaattcttagggttaatcccaaatactttgttctatacttttctgacaatctcccaaataaaaaaattgcacctaaaataataaaggtgtaatttttttttggtagagggtacccccaaacaaaatacagtaacaatgtcaacagcttgcggaactggtgcacacacacatgcgtttccagagaagcagctaatctgaagtctattcgtgtgtgctctttgcccaggacagacttcttcgagtaagtcagaaactcccagcggctctgacttcccggggttaggtaggacgccggagcacaggagcgggcgcagatgcagcgattgcaggcggctggccgcgttccctgctccggccccattgtttgccgaaaatgctgagggcagcaagtctggggaaggtctggcagcggccgtcagtcgtagtaagtgcgtcacaatagagtttgtaactccagcgcggctcggcccggctctggcgctctctccgcccgtgctccctccctcccgctcccgtaccgcacgccgcaccgaatcagacagaacttctctgaggtgcacaccgtgaggtgcacatctctaaatggggagggggcggcggagggcgacgaagcgaacgcctgcaaggtctacaactaggtccgcaggctaggcgacaccggtgcgcgccgcgccgccttcatcccacagaccctcccctcagaaggcaatcacaccgaaactcacgtccgcgccttcccttcagagcgcagcgtccgggccagggaccaagccccgcggcgtccggcccgcgcccttcgccgaccgggcgccccctgaccgtcaccacgaaagcagcgcaggagacaaagcccgggactcgggttcagagtccccggcgcagcgcaaagcccgcgccttcccgccagcccgccgccgcgctccgccgggcagccgagggctccgcacgccgcgcctctggcccgcgctgccccggccgcagccgccgggaacatcctccgcctcctcccgctcctcccctcgcgctctgcgcccgccgccgccggcaccgccgacctccccgcgccgctggcgccgggtgcccgcgttcccaattggtccgcgcgcggtcgctccgcgccgcagccaatcggcagccgcggtgggggcggcgcctacgggtcaggccgccaaaggcgaggcgattgttgacaaactcgcctccgagcgctgctctggccgtggtcgtggcggctgccgcttcgtcggaggatttgagggccggctggcccggccaccctgcccatccctgtgctccttccggacacaagccttagcagctcccgccgtcctggacagccagtcacctggagacaaagcaggacttgcgccgcgcccggacccgcagggccatccccaggcccagtcctcgccacttgtccttgttttggcccgtcgggggcagaccctaac

SEQ ID NO: 1141 - DNA, 4037 bp, Homo sapiens
gtgtcaaacaagtaactttggggtttcagagacagagctgggactccctcgaagacacctctattgggaggctccaggcagcctgaaggtgctgagaaagcatgtgctctaccatctactttttgaagtccgaatataccatggaatttaaagaggtaaaacaaaactgtatttgcctgaagaatgccgctgtttacaatgctcatttaatgtttaaaatgcttacaagattctgctaatcacttccattctcctaagtcaaccaaacaacccaaggagtaagcttcatggaagtgatgtgccctgagtgggaagagtcaagcctggcttgctagagcagcactgcacactccagctcctctgtgaggccagcctgtttagatgaaacagaacaccagccacaaatctaattgtgcatttttctagtagccatgtttaaaaaggtagaaagaaacagagaaagtcaatattaaaatacattttatttaatcaccaatgaccatatgacaaaatgctcaaggaagagggagagaggtggctgtggctataaaaaggtatcatgagaaatccttgtggttgagttgttctgtatcttgactatggtggtggccatacaaatctaagccagtaaatataaatccaaagcacagtgaaagatcacctatatcctctaggatgactactgttaaaaaaaaaaaaaaaaaagtgttggtaagtatgtggagaaactggaacccttgtgccctgttggtgggaatgtaaaatggcacagcctctatggagaacagcatgatggttccccaaaaaattaaaaatagaattaccatatgatccagcaattccacttccaagtatatatccaaaaaaattcaaagcagaatcccccaaaagatatttgcatacccatgttcatagcagcactactcacaatagccaaaaagtggaagcaacccaagtatctcctgatggatgaatggataaatgaagtatgtgatatacacacactggaacaaccttcagccttaaaaaggaaggaaattctgacatgttgcaagataaatgaaccctgacgacattacgctaagtgaaataagcctgtcatggaagagcaaatactatataaatttcacttatataaggtatctgaagttgtcaaattaatagacagaaaatagaatggtggttgtcagaagctggggggagggggaaatggggagttgtttaatgagtacagaatttctgttttgcaaggtgaagaagttctggagattggccgcacaacaaaataagtgcacttaacactactgaacagtacacttagaaataaatggttcagatggtaaattttacgctttgtgtttaactgcaatacaagtttatattttatttaacctatatatttaaaacaccatttcaacatgtaacccatatgaaaacaattaaactattttgcattcttttttgtctcctcaaaatccagtgtgtatcaataatgacagcacaactcagttcagactagtcctatgtcaagtgcttaatgcatgtgtggcttccctgctgagtagtgctgagctagacctcagctgtcaccactacgtggcaaaccttacagctagatccaggtaattaaaaacactttggcagagcagaggtcaggatctttttcttgctacctgccttcttcaactttatttgtctgaaaggctaacaggcagagctggactgactctcaacatctcctgggcttctcctctttgtcaggcactcgctagcatctgcaggccattattccccgcccagggagctcacaaactaaaggaggggtcagacaagtaccagctataagagaagtacccacaagacgctgaggaaaaaaaaaaaaaaaaaaagaaagccattaactcccatctgtgaattccaatgtgccagggaacaagtataaaatttaagacatttactaacatgacactagggagcattcctccatatcctgacttttctcaactcttatttccaattgtactgactacactttagtgtactgactacactttaatttccattaaaaacacatatggcataaaacactcatccaaaaaggcactcagtaaaccaacacatgtgagtgattttgataaaaataatcagttattcactaaggtatcatttgtcaagttaatcctcccagagtgtaaggagactaaaattgaggaaaagtgaaaaaactgtatctgttgccccacagagaaatatattccttgaacttgtcttcagaaaaatcagagacataaaaggaaaatatgaaaacagtgttaatacaaacactcaactactatacattcctcctaagacttgactttctcattagaacaaagttttgcaaaacaaaacttcaagacacactgatctctaccccaagttgctgagcaaaaaactgctttgcagctaaaggagcccctggctaaggcgaacctctttataacctcacatttgtgttccactagttcaaaccaatcataatgacttctttgtggaaaatgtattttgcaataaattatcaaaagcttcattgaagaacttcatggatagggttgagtaaagaatactaaacaaagtcaagagaaccacttatcaactcagcattatttcagtggtcttcaggcatgaactaagactgtagaatgtccagagaaaattatggactacataaattgtaaattttatgcttcaatttaagaaactcacatctggctaagtcctttcctcccccaaccccaactcatcctctcccaaaacaaatctcccaaaaacttaacactgaaaacttacctcggtacattaactttaaacaaactcctcgtaacttctcatttaatcctatgcattaaactcttcatcacaccatctactgaaatgcagctaatactataaaattacacctcaggatccactactttacttcacaggtataaccattagctgtgcataattatttagattatgatctttgaagccctgtatatttcatctcaagtaacagtgcttaacttataattagcttgtaaaatagtatttatcaacaaaaaaagcatttgtgcctgtctttacattaaaaaatacactatctcacccactattcccagttccagggaaggagaaactatttccatgcattaacccatcacctacagagaccaatgtatgcattttgcttgaaagggaactggttagagaaaatagcttaataaccacaagtgtgaagcttttgttgtgaaagtgtgaaaagctaataccttccagagggtctttaatgcacgtgtgtttcacgatacacaccataaagccctgttaactcatttagtaagcaaggatgttatagtaagcgagaatgatcatatatatgggggagcattttcatgagtacaacaaaaactacaagccaagaacttctaaggctgaaatgagttcacgagcagtagtaacagcaataataaaacttccagcccctttccctaaggagggaccctaaaaaattacctcctggcatttggcaagagacgtgcagccagcatgtgtagctgctgggatgtctgtcatttctccccaccacctcacaggtgtgcccaacctctgacaagtgaccaccactctgaggttctttccaattctataacatgggcaaaggcctgcctgatttacctcactgaagcctatgaagacagagctggatggtatttagaaatgtcattttgttccagtgtctgttctgatgggtttgttgagttagccttcatcatgaggtacaatctaaattataatagactctgtactgggtttcctaattgataactctaccaacttacttctatcttgttcatgtatggcaagctaatctggacaaatggtcaatgtgattgactactgatcaagacatgaaccttttccattggtggggaacagcaagtcgatcaacacagactcagcccctcaccaaggttacccaaagtatgtacccaaagtcacatgctgtaggttca

SEQ ID NO: 1142 - DNA, 4045 bp, Homo sapiens
ggcatacagaaatctccaaacacacgctgctccaccctcactcctgtaatcttacctggatactcaacccaattcctcctatcctaacatactcgagctatcaaaaagataacttaggttgacatttctagtttataagaaaagtaagaaccaagcataaatattttattttgctatctgcaatgtgtctgaccgccgtaaatgttgatacctggtctataaaatggttttatttgaaatgaaagctcttactctgtagggagatcaaatttttaacttggcaattttatgtgaacataaaaaattcttcaaaggggaaattctgatgagctgcatttttacccacagaaaatgtagtttcagcatttatgaaagcacttcactccataaacctggcactaaattttttttttaaagcacaataaaatataaactgctcttgaggtaaagtgacttcaaagctgtaatctgcagcaaaagctccaatcctgcaagtagcagactcaggcagaggtgacttcctaggcagatccatgttttctttctctttacttgttacaaaaaaaaaaaaaaaaaaaagaaagccactaatcaaaacttttataatgcaatatgtcagatataagcaatttttgccaaaagtgtgtccactgaatcttcaaacttcttagaaatcattttttgaagcccggaacttactggtaacattactacctatgggaaaataccatgaagtattcttaatccatttttggaggagtgtggagggcattttccaacaccaagggactttagttctactcaaagatgcatgtttcttaacaaactattctggctcagcaacagactatttttaaagtcttaagtaatttaaaatcttaaaagttcaacaactgaaaaattaataccgtggttaagtggttgatagtgaaatcaggctggggctttcacaaaggactttctgtagcagcagccacggcaggaaacttttttttttaaaaaaagagagattgtcaatctataatgagctcagtatcagtcaggctaaaccttctgatttctctttaatgtccaagagcttctaacccaagagcctctatcccagtgctccaaggaaatgaagtcacatcatgacattctctctccaaaacccagttgttctctgtgacgatgccataaagtgacatctaatgactcaggtgtgtgtactgggtggcaggggcatgtcacacacaagcattctcaactgcagcctcagtctgggaacgaggtggtgcgaccctcatttccgaggggcagctgctgttttagttcccatcttatcattactggaatttcaagtgtagtaccagaaaccaaattaaaattcacaggaacgctgcactctgtactgttttcagatgttcagatatctacaaacactcgagtagaatcaagattagattttcaagtcatcagcgtgaattaagctttgaatcgatattcaactcagaactgagagaggattttacacacataatagaacatacttagccaaaaagtgcacattctgtctggcacttgcgggaaacagccaggcacagccagggactgcaggggtgtgaggagaaagaaggcctgtccttcagacattgcagggctgtctacctttactctccagagagattctgctttaaccaccaaaagcaataaaggatcctgtaaagggccatttctttgtggactctgaaaccagctttaaaccaattccaagagatactccgaaaatgtttaggggagtcactgcctctgtctgcaggtgggctctctgaagctgacattcatttagagaaagaaaaattccaggatgtttattcaactctgtaagtctccttctttaaatatcttcagaaatatctttctaaattcagagttatccaaagcttacaagaggagggaagcaacagaccagcccccttatgtttccttataaaactcacctgggtgatggagctgtttctagtcccagttagctataaggcaaaggagagcaactgccatcagcgtttgcggtaaatgctatcagaatcatgtttgaaatcctcaactctgacggttctcagaaataaaataagcaagtaaccaacaacacacacacacacctccctccaggtctatttctcacttgtatcattttattttttggcaatcccaatcaattccgctgagccactggatgaaaacaaaagctatgagaaatacgatgacagcattagtactcaaagattcctcaatctgtctccctggaacacatttgtgtcaaaagcctgggcagtcacatgaattcaagacagtgcttcaaaaacagctgctaggataaaatactatcaataataaagtttatgagatgaggccagtgttttcatacttactctttcaacgtgcactgcccattgcctttatggagccatggtcaaaagaaacagctttcatcaatttccagcctgaccatttggaaactgccagtaaaccaaggctgtgaagttggacagaagtctggaaactagtgttcatgagattttttccctcattcactattatctgtcccttataataaaaatacaagtctaaagacattaagattaatgtgttatgcctttttactcatttctcattcaacatcagaaaaactaattatccatgtcaccagagctgtccccgacacacatattaacatatttactagcagctggggacaagccaggagcaaacccagactgagctgtgatccctatactcaaggacatccccagctgagtcacgacagaagcccagcatcttgcaccatgtgggagacctgagcaggagccctctaagactcccagcctgtgtgcccgcttcctgggacagatgcacatttcctaaggcactgctgtcctcgctgaagaacactgagtgctacgatgctattcctcgtagggaattgaaatgttcccttctaagccccacttcaatcttgattctgcccctgggactataaaggaaatctatgatccctctcaatcatcaccccactttttgtcagtgaacctgtgccaaacctggtcctaaaccagttctttccatgtgccttgtatgacatcccctgggaagccccttgaccacctggcccgccttggtgtgctcctgaaatcgctgctctgaatagtgtgtgacagtgttctgcccctggtgttctgccagtgttcttctggggaaagacacgggacactgaatactgctactactccttagtttttctacaccaaccttcatcctagtaagtctctgcgacagccacagctccatttctatagctttagattactttcaggggattaaaagtatctgacctgtgccattttattctgaaaaacaaaaataatcccaaaactaaggacagctaaaagaagaccaaccctgaaattactttagtgcaaagacacaaatccctatattttttctactgacgaggtaaactacccaatttatttccccataagaagaaaaatgctttagagaccttttaaaagtaaagataaaactctatatacattggttcacttaagaccattccttagaattaaaatgcttaatttgaagttactgtaagttgtttctagccaaaaaaccagatctgggcaagaggggagggagatgagaatttaaacaaaaaatataagaatttctgatgacaaaataagtgtggcttcctctatgaaatttaaaaccagtagcaggaaactggtgattaacatcttttctcctaaactcacattaaggtcttcagtattactgttttcacctccatgataagaaagaccaagacacaggtaaaaaataagagcaaaaacagaatccttaaaaagctacaccttaaacagtttttaaaataaaaatggaaaaagcctataatgtatacggttaaaacttacaatggtgatatacaaagtgaagtacaatttaacacagatatgattattgataacacactgtagggctaagacataatgaaagcttctcactt

SEQ ID NO: 1143 - DNA, 4044 bp, Homo sapiens
attcacctaccctcttaaagggactcatgtcctccccactttgatcctgaatacactgtggtcccacttctcaccagttcttcctagtcaatagagacagccacttccagtcacacacaggaacaccaaaatccctttaggtaaaccaaggcagaggaactggagggaatggttacttcagtgacaagttataaaaccaaccaaagttccaaaaaaattaccatttcagatctaggctggaatgttctgtgaactggtttatgtcaggtggaggatgccaggagttttgccagcttaagacagtattttaagaaattcttaagtccatcaatgtcacacttcccattttacaacagaatcattactacagcactctcctcaaacacccccacagaaaggtaggaagatccgatgtgtgttttcttgactcttacagaaattccatactgaagaactgatagtgtcctttgtaatgggaaaatgtctatttgtctaaaagaagcctaaaacacattgtataaaggcagaaaaataataatcaaaggtaaaatccatttacttagcaacaattaaccaagcatgacctcccctagaaaacagattaaaaaaaaacttttaagaggtacttatataaaacaacaacgttcagaaaaaaaagagctaaaagagaaggggtaagaataaatgatattaacaactataacattttccacaaaataagaattagtgtcttccttttggataaatcaactgaattaatacctttatatgaggtgtttaaaactctgtgaacaagtaaatacactatatcacacatttgctagtgtaccctttagcggaagcagtcacaggtgttcccaatggtactaactcctggagtcaaagtctacacatttaaaaatgtctcccatgcggccaggcgcagaggctcacacctgtaatcccagcactttgggaggccgaggcaggcagatcacagagtcaggaaatcgagatcatcctggacaatatggtgaaaccccatctcaactaaaaatacaaaactagctgggtgtggttgcaggcgcctgtaatcccagctactcaagaggctgaggcaggagaatcacttgaacctgggaggcggaggttgcagtgagctgggattgcgccactgcacttcagcctggtgacagagcaagactccgtctcaaaaacaaacacacacacaaacaaacaaacaaacaaacaaaagtgtcccatgtgaaaaaggtgtccaaatggtcacctacattgcccccaggtaaaacaaacaaaaaacaccgcttctactaactacagaagatgacataggctaaaatttttaaaaaatcaagaacatagctcaaaataagtggcaattatctataatataaagtttttacagcccaaattacaggctattgattagcggcctcctaatacatttcaacaattaaatgtccaaagacagcaatgggctctgcaagggcaatggctccctgcttcctcgggccaccctgcaaattgcaggagagtcttttacatgagtgctggcatcgctcccatgcgctaagtgacaaaagatgttgtttaaaaattacctttaactttgacctaaaatgcacaaggggagtacagaaacacactacatggattgaaacctatgttaatagtatttctagactatctcaaagtctataaataatcccttttttagcattgttttaaagtctgtgctcataaaattcctttgctgcctcctactgtattattttatttaagtgccattacttagtcataaaacaaatgaaaaatgggaaaggagaaacaatgaaaggtcacaactaggcaacagtaatcatttccagaattagcatgtagttacaagaagtcactgtctttttaaaaaaatatagtgtggaaggggagggtgtgagcagaaaagcgggtaaagaaaacatcattaccctccttgcatagtaagcgttaaactcgtctccaatacgccgcaactcttgggcgatccatatctctgggcgcatatctgcaggttcagcctgcctcatggaagctgcatcagaacaaaacaaaacaaaaatcacattgtggtccacagatcactgggaaagttccaaagataagtctctagaggcaagcccatctcacacactctttcacatttctgggagctccctgacttcaacaactacagccatgtactaaagattagagtggcagagtcttctacataactctggttaaagaataagagatatagaataaaatttccttttttaaaactggagattcagaattgcaagaactgaaaacattccaacccattcatacacacttccatttccagaagttactcacaagaaaatggaaaatactgccaaagaaatatgcttgaaacataattataacataacaatttagtttttcagtaaaataatcattctgatcttattacaaggcaaatattcctatataactttcaaacatcatccaaaaatatgaggtgaaatggctgtcccattcaaagcaaaataagcgaaaccctgagaaacctgaataagttggtttctatgaaagcaggtacaatgatacagacagctgtcttcagaatggctaccccagggccaaatgaaagcataattgcatgttttgtctcaatattaatgcagccaatcaagatgagctcaagtctgcaaacaccacatggagagaaaacatgtttttgggtctaagagcaaaggcatttttgaaaggagaagaaagagggaggactgccctttcattaagctgtcactaacattcacacccagtacattcatctgtttactaatgaaaccattaaaagccatgtgacagccaaaaatgaaggagaacaaaaatgtgagttgtcaaaagatcccattatgcattaggaagattatattctccatgtgccaccaggaaagcattacactcagaggtgaacagttcagtaacgtgtacaggaaatgagataaaattcttggatttccaccgctattcacgtgtgacttacgttaacttactgtaaaaatgggcacaccgtactcacaattaaacacacatattacgttttcaccagaacaaaataggtaaaaacctacgataataggattttgccatacgaaggaacataacttcctgtctttatttttgtaaaaggccagtaaaactgatactgattcagagctctataaaaacacttaaaagtgaacactttgaagagtttttgccaattcctctacaatctcttgcctcatcttatacccaagtgaatttaacaataatcccacaaagactgagggcctaggagaggcagaatatcacaccacccctgtgggggtggcagtggggtaagagggacacacaccgatcccctccagagttatctgcagtctgtgaataaaccagagggaggaactgctgtaggaagccctggtggagaagcacaaaggctgatgaaggggaaactttcaggatgtcaggcatggcctctgaatacatccaatcatacaaaatttactttgattgtacctgtgtcacacaaatatttctaacaaatctgtaaaaagtcttaaaattaatttttgaactaaactgggagaaaacaaaatttctgggtagatgtgatatgaggtgatgctgatgtcatagttccttttcctgggcttactgccccttaaagagctactctttttaagtgttctttccctgatttagaagcttttaacaagttagttcgcccttaggggaagaagaaaagtgtgttttgtttgggcacccactgcacaagggtctcatgcagtcctcctaaaggaggtgtgcctacccatatgcacaagtgaacgtccagccagcaagacaccatcacccacctctcctgagcttcaagctccacctgtttctcactacacatgactgagagagaaaactgccttcagccccggagtcagaagtgaagaaaacaccaattatcaaaaggacatctgtgaactacagattgatgtt

SEQ ID NO: 1144 - DNA, 4067 bp, Homo sapiens
ctgaatgtttggaagttttcacaataaaatgttgggaaaaaaaggcaacagattgaaggaaaagtatttccaacatataagagatttttttgtccagaatgtataaagagctaatcatcaatagaaaaaatactcaaccaaaaattagcaaaaactttcagaaaaaaaggcaaatgccaccagtgcctgaaaagatcatcctactgcattgatagaaaaattcaaatgagcaccacttgctcctcacccagcaggcagacaccagctcactcatgtctgacagcactgggggtaagtgggtgttcttatgtgctgccagggcccgtgtgaagtggagctgccactttgacagtgtcttccagagtctgttgaggctgatcttccacctccctgtaccacaagagtgggatacctatgagcaaattctatgcctgtgctctggcacttgctgcagtagttagcatgaagtggagtcgctatggaaagatatgtgacctattgctaagtcagaaccatatacagagctatggcacttacagaaaagcaaaactgctgtgtgagtacacacaacacacacacacacacacactgcagattaagagtccaggagaatgcaaactcctacctcagtgaggaggtaggattaagacagaacaatttgatttgaaacaaatacaatttgaaataaatttacaagaccatattcatgtattactcacccgattgaaagcattaacagattgttagtctaaaagaaagctgagtctgtctttcactttcccagcacttagggtgaaagtgccaaattaaatacttattaggattttatcacctgtatccccaaaccaggctttaatttctttcactcattcctaaggcaattcccatccaccctacatgacgggagctgggaacttggcggttcctggtcatcatttcacacacagggtctaggcacgtttgggtgacccctttgaccctgagcaggtgctgcagacaagccctttctattatggggttgatggggtaagatggctgggcacctgccatatcactcatcaacacagtacagagccggctcctagtacacttccctgcccccacaactccccacccaagtgctgagtcatatctgactgtgcaggcagaatacttttcgcaccagccacatcaaaactttaaagactcgtttacttttaagtgtactgcacggattcgtcttcaagcaaaaatatatgagctacacacagctacattttatgactgataatagcagatgtgtgggcgtgtacatgttcatatataatttcagctgtttctctgacattttgtgcaaacaaatcaaacgctcaccaaaactagttgaaagttttatttttataaaattaacataaaagattgtttaaaaatctgcagttatttacagcagtattgcacaagtaaagtggcaattaccctgtcaaaattcatcagtgcaaaacacaagtaagccagggaaactgcaatacaaatgctacatacgctgggtcctagaaaacaggttagtgatggatcagtatacagccagatcagtgctatttataagtgggtacctgatgagttctgatacagtaactagtggtcacagaatctggacataaaacataagagagcttctatagtctgaaattcccaaataaaagtagtcaagttacttaactgggagcttgaggatgcttcttacacacaatgctgtttagagtagaccccaactgatttagcgtcatctgtagacacgtttcccccaccccacgtgtacgtgagtggacacacacaggcaccaggctaaatcagcagggatggcagaaccacctgcatggaaccaccatgaagtctccttaaagctcccataagctttcacatcttgacacccagtccagtggggccccaacctcccctgaaggagatggagtatcagaaggagggcatcgacctgaagaagcaggctgaccaaatgcagtgaccgtatgggtggggcgtggggagggctgtacagttaattagctcctgaagacaagttagtccaacctcaaagcacaggaagttgcacagcaggtgggggaaaacccagctactcacagttgtccacaaggggttagtggcctgaggtggtccttaggcaggagccacctgtcccacccattcacttgtcctgcctggccctagccctgaacaactgcaatgcagcacctctggaagtggcacattttatttcttttctaaacgctgagttgtcagggataaattttcaatagaaaaatctttcccacctgctgataatactttggtttttttgttttcctaaagataaagcctggagtcagcaaaatttgcttgcatgataagctagttgctttggaacaaacagaaggttgctgggtatttcttggagtagaattttgtagcctgccagactgagtttctcactggcatcaaacacacacttcatcataagggcggcaaagcccaagaattgaaacccacttgactggaaataccaggacccgaaggtggagagccaccctggaggaccacgtggtctgcaatgagctctccagtcacccccgacaactctcaggagttaacttcatgggacggcaggggagtgggagacagggatgttaatacttttcagaaattaagacattaaataagcagaaaataaatatacaatatttctacaagttacagcattatgaaacagtaggacacatcacacagaaaaagaatctacaatatttacaatccttgattttgaaaaagttgagaaaaacagtgatttttttacttatttatgctgtacaaaattttacaaggtaaaggaaacacaattgcacacagacatttggctcagttgataagtaatatgacctacgaatctaataaatactcacaatatatacattaagaaggggaaacggcagacaattgtattccactatatttttttaatcagaaggaattttaaacttgatttctccgcaacccccacccccaaaattcttgatcaactaaccagttgggaagggcatctgaagaatcactcatgaaactattttgtgtgtgtttattgcgtttctgtgttaagtcacaggacactttttacaaacctcacatagggagaggttgtcaaggcacaaaacctgcagtaagtttccaaaaaggggatttaattattttttctacaaaaatgttttttaaaaaaggtaaaaacgtatacccacgggaggcatactttctgcacagaggcatcttgataaccagatacatacagtacagagacatccagtcatcgctttaagttctggtgccaacagcctggtctttaatactcctacaattcatagaatctctaatttcctcaggaactgtttccacagccagcctggaggccgccaggccagagggaaatgtgctcatgtggtgcacacagcccctgggcagcacagggcagggcctcccgtgcctggcccagggctgcacccagtgtgtgctcccaggggctgcagggctgaggaaacagagtaaagtgctctagtcaggagactggcacgtgagtacagggatcctgggagggggtgcccagatccaaatacatctttggtgtatgtgtgtgtccagcaggcccacggctgcaatcctaccactgcttgtaaccgtgggctttgtatgaccctaccaatgggctcgagacacatcagggaacaagatgagctccaacacagctttaaaaataagtcaaagtcccaaggagattcttggggaaaggaaattttttaaagtaagagtatttggattgaaatcatctctacctaaaggaaaaagtgaatatgcaatatatacatatatattttttaaattatgaagataaaaatgtttagatttttccacctaatttaaataacgtgaacatgctggctcttctatcgggcaaaacactagttggtggcactgcttactcatttgaaaatttagttatttcttttaaaagttgtttaacgatggagttttcaaaaattttaagagtt

SEQ ID NO: 1145 - DNA, 4081 bp, Homo sapiens
ttctgccatttgactaaagtgactaaagttgccatttcaggggccagtgtctcaatcccctccataaccctatgtgatagagcttatgatccttatttacagataaggacatgtattggggataaccaagtgtccaactccagatcaccagctaatagcagaccctatatttgaatccagttgtgtctgattttaactttgagtgtcaaaggcttgcctgtctcctcagtaggcccgctccctcaccagggtattggagaggtaaggaccagggtaggggaatgagccttcccagcagcaatgaaagagtagcctagggcaccttcttcagaagtcaactcagccatccccctacctgcagggatgctgtttccagcctcacgagacctgacagtgagcagctcactctcagaggtctcccttcagtcccgtctgagtaggaggtgttaggtcaagagcccagcccttcacccctttctcttccctgctcctgaactgctgggctactttatacaggggaccctctttttctgagctttcattcccccatcagcaacatgaggggagtaactctaacccttttgacttcatagacagaaaacaaaatgcaaaatacactattttttagtcttataagcacgcatgatgttgtgtcataattgttgcaatctatccttaacacctcctgtgactcagatctctgtggcagctcagtttcccatgacaagagcaccccctcaaagctcccctccctgctaggacctgtcccctcctatccttctctaccaccccaatcctgttatgcccccaggatgcccagcttttgccttaggcctggggctaaggagtaaaatcggatcagaggaaagtgtgggttcaggagcctgacacttctgggaataaggcctctgggaagacagctcacagaaactttcctcttccctttgctttcttcccttcattcaaaccagacctgtaaacctggcctggaggaggatggaaccaggaagcagagcctccacccctatcccaacccagtccgtaagaggagggaacgatgggcaagaaccacatcttgggtctgcagccctggcccctgaaagatcccagccgcaccaggaaaaccaaggcctggctgggggcgctgtgaggaaggtgtcttggaagggggaggttgtctcctggggctcaggacagcagctgggctggggaacaggggcagggagaggatgcgtctggaaaataatctgggggctgaaaaatgtgctggcatcttagctgagaggtatgtctgtccacatctggggtttccgccgaggtggagtctgccctcaccaaggcaatggttctgggacaaacttcaaggttcgttcaggtccactccccacagatctcagttctttaggtctgggggtagcagtgggaggtgataggaagaacctgtttcctgacccaggacaggccacccaagtctatgtctcctctctgctcaagcaagtcccagcatctttggacagctcccctcttcaaaagcagctgaccactgtccctagcccaggatcccagggcaggaaaagcaacaagggcaagagagaggggctgcggtggtccacctgtggcctgctctctggtggcaccaaggagcccaggtgttcttgcgtgtcccagtatgccttctcttggggcctgctgtcagtgcaggatgagaatgggaggtcagcagagtgggtgagtgggggcgcctggctgcttccaggggggcactgagccttctgcctgtttgctacagaggctggtaggggacggggggtaggttccatctgggaggtcactgggaaggacaagctgccaccgcagggccccaggagccatgaatcaaaggctgtgctgggggctgatgagaaagggagaggagccgggtctccgcaccctggccctctcagctcctcccagggtcttctcagggtctttgagcaggtggattgtctggggaggcactgcgggagaggggtctgggtcagactgtggggcagagggagtccgggaggatgccgggctgtgccagggccgctgacacggtttagaaggagttgggaaagtgctggggacaaaggagaagcggagcagaagtcagcgcagggcggccgcggggcagcgggtgcccgggcagagggacccgggtggcgaggaagagggcgcctcgctggggttggggggaatcctctgtagtccaagccctcacctgggccttccagcccaggggcaccaagtctccagtccctactccccccgaggctttcggatgcccccgccagcggtctcggagtttcgttcaagtcccggggccctccaccaggacactgcgcctgcagcccgcagagccacccgcctcccccggtgtcgtcggggtccctggatctcacctgggggcgggggccggccctgcccaccatcccgagcagcagcagcgcaaggcgcagcgggccgggggcgccggccatggcggggagttcaggactgggccatcgctgccacctgcggaaccgcgtgcggagactgatcccgggctggtggcgggcggtgggggaggagccggcgaggggccgccctgcccgcgggaggggcctggcagggtcccggttcttccggccgccagagacccctgggcccgccccgccgcacccctctgccggtcccgggccaggagatagcgggcactgctctccgagcgagcgcggctgggaatcaggaagcgcaggaggcggccaccagctctgagcgccgacagtgcgcctggccggctttcagcgacaagccaggccctcctcccaccctggcaccccggacctcctcccgggtctcccagctgaggaaagctacagcaacccccgcccattcagggtccctcaaaggaaactgaggcctgaggaatggacgggacttgtccaaggtcacacggcttggcaggccactcctggaaagtatcctcagagccaggggtgactaataagaacttttttttcccaggattaccccttcccaggtcctcttctcattcccatgttctgtcctgaaggcaggcccaggatagtcaaggttgggggtggggagactgacaaatggatccacagaactctgacagtcgcaagggtctagaggttcccctctacctggaaacttcagcattgcagggcagggagggatgaggctggggtctgcctttctggaagcttccctgccacctcttgcagctccagcctcctgctcttgtaacctgtgtatgtgtgataatgtgtgtccatggttgttcctgccttctttatctctctccctgcttcgcttcttggggactctggatctttcctgtctgtttccactcccacccctaaacactgcagggccctcaggttcccttcttacacccaacaagtggaaagagaatgctaagagggcactgactgtatcttccctaatgctcttgagaagtggggatgggaaaagaggatcccccaccaaagaaccttgatgccactcttaggaaagatgagttgtggcagagcccagcctcggacctgccgtggggcatgtcgactaaagggacaggaagtttgtgaaagtagctactcctggggagagaactgaacttctcaaagtcctgaggaaggctggacctgcctgagcccagggaaggagacagccagtgggaggggcccctggcttccattcaccaggagagactctcctctccagcaagctctggttccaccacctgagactcgtttattccctcccctcccaagaggtcagtctagcagggaccttctaggtatcacttaggattaggttgttcacctgggagtgacagaaaatcccaccccaaacaacaatggcataaccaagggctctctcatgtaaagcaaggccagaggttcagcccaaggttggagtggctgctccctgatcatcagggtgcctgggtcttctagcttccaccatcctttggtccaagatttccacctcatgatccaaggtggctgctccagccacgatatccaaattccaaccagcaggaaggaggaat

SEQ ID NO: 1146 - DNA, 4045 bp, Homo sapiens
ttgcacacacagggactcattcccacacagactgttacacacagggtcactcacacatacctgggaactgggggttcatatagcctactcccttctccccctggtctgtctcagactacctgtctgtatctctgtcccctcctccaaccaccaccaccaccacacacacataggaattttcctaggggcaggctgcagctgaggaagcctgttttgccttggtgcaaggcattcgagggcaggatgtggtttcttggttgctcctgccccagcccccagcctgggtcctgtccaggaggaaacccagcttagaacaatgtccgcactgatcaaggctcagccctggactccacctgccattcactagagtacagagacccagggtctccaacagcccctctctcatactatcctgcagccctggaaaacacttctggatccccaaggacaaatgggtcagttctgccatttgactaaagtgactaaagttgccatttcaggggccagtgtctcaatcccctccataaccctatgtgatagagcttatgatccttatttacagataaggacatgtattggggataaccaagtgtccaactccagatcaccagctaatagcagaccctatatttgaatccagttgtgtctgattttaactttgagtgtcaaaggcttgcctgtctcctcagtaggcccgctccctcaccagggtattggagaggtaaggaccagggtaggggaatgagccttcccagcagcaatgaaagagtagcctagggcaccttcttcagaagtcaactcagccatccccctacctgcagggatgctgtttccagcctcacgagacctgacagtgagcagctcactctcagaggtctcccttcagtcccgtctgagtaggaggtgttaggtcaagagcccagcccttcacccctttctcttccctgctcctgaactgctgggctactttatacaggggaccctctttttctgagctttcattcccccatcagcaacatgaggggagtaactctaacccttttgacttcatagacagaaaacaaaatgcaaaatacactattttttagtcttataagcacgcatgatgttgtgtcataattgttgcaatctatccttaacacctcctgtgactcagatctctgtggcagctcagtttcccatgacaagagcaccccctcaaagctcccctccctgctaggacctgtcccctcctatccttctctaccaccccaatcctgttatgcccccaggatgcccagcttttgccttaggcctggggctaaggagtaaaatcggatcagaggaaagtgtgggttcaggagcctgacacttctgggaataaggcctctgggaagacagctcacagaaactttcctcttccctttgctttcttcccttcattcaaaccagacctgtaaacctggcctggaggaggatggaaccaggaagcagagcctccacccctatcccaacccagtccgtaagaggagggaacgatgggcaagaaccacatcttgggtctgcagccctggcccctgaaagatcccagccgcaccaggaaaaccaaggcctggctgggggcgctgtgaggaaggtgtcttggaagggggaggttgtctcctggggctcaggacagcagctgggctggggaacaggggcagggagaggatgcgtctggaaaataatctgggggctgaaaaatgtgctggcatcttagctgagaggtatgtctgtccacatctggggtttccgccgaggtggagtctgccctcaccaaggcaatggttctgggacaaacttcaaggttcgttcaggtccactccccacagatctcagttctttaggtctgggggtagcagtgggaggtgataggaagaacctgtttcctgacccaggacaggccacccaagtctatgtctcctctctgctcaagcaagtcccagcatctttggacagctcccctcttcaaaagcagctgaccactgtccctagcccaggatcccagggcaggaaaagcaacaagggcaagagagaggggctgcggtggtccacctgtggcctgctctctggtggcaccaaggagcccaggtgttcttgcgtgtcccagtatgccttctcttggggcctgctgtcagtgcaggatgagaatgggaggtcagcagagtgggtgagtgggggcgcctggctgcttccaggggggcactgagccttctgcctgtttgctacagaggctggtaggggacggggggtaggttccatctgggaggtcactgggaaggacaagctgccaccgcagggccccaggagccatgaatcaaaggctgtgctgggggctgatgagaaagggagaggagccgggtctccgcaccctggccctctcagctcctcccagggtcttctcagggtctttgagcaggtggattgtctggggaggcactgcgggagaggggtctgggtcagactgtggggcagagggagtccgggaggatgccgggctgtgccagggccgctgacacggtttagaaggagttgggaaagtgctggggacaaaggagaagcggagcagaagtcagcgcagggcggccgcggggcagcgggtgcccgggcagagggacccgggtggcgaggaagagggcgcctcgctggggttggggggaatcctctgtagtccaagccctcacctgggccttccagcccaggggcaccaagtctccagtccctactccccccgaggctttcggatgcccccgccagcggtctcggagtttcgttcaagtcccggggccctccaccaggacactgcgcctgcagcccgcagagccacccgcctcccccggtgtcgtcggggtccctggatctcacctgggggcgggggccggccctgcccaccatcccgagcagcagcagcgcaaggcgcagcgggccgggggcgccggccatggcggggagttcaggactgggccatcgctgccacctgcggaaccgcgtgcggagactgatcccgggctggtggcgggcggtgggggaggagccggcgaggggccgccctgcccgcgggaggggcctggcagggtcccggttcttccggccgccagagacccctgggcccgccccgccgcacccctctgccggtcccgggccaggagatagcgggcactgctctccgagcgagcgcggctgggaatcaggaagcgcaggaggcggccaccagctctgagcgccgacagtgcgcctggccggctttcagcgacaagccaggccctcctcccaccctggcaccccggacctcctcccgggtctcccagctgaggaaagctacagcaacccccgcccattcagggtccctcaaaggaaactgaggcctgaggaatggacgggacttgtccaaggtcacacggcttggcaggccactcctggaaagtatcctcagagccaggggtgactaataagaacttttttttcccaggattaccccttcccaggtcctcttctcattcccatgttctgtcctgaaggcaggcccaggatagtcaaggttgggggtggggagactgacaaatggatccacagaactctgacagtcgcaagggtctagaggttcccctctacctggaaacttcagcattgcagggcagggagggatgaggctggggtctgcctttctggaagcttccctgccacctcttgcagctccagcctcctgctcttgtaacctgtgtatgtgtgataatgtgtgtccatggttgttcctgccttctttatctctctccctgcttcgcttcttggggactctggatctttcctgtctgtttccactcccacccctaaacactgcagggccctcaggttcccttcttacacccaacaagtggaaagagaatgctaagagggcactgactgtatcttccctaatgctcttgagaagtggggatgggaaaagaggatcccccaccaaagaaccttgatgccactcttaggaaagatgagttgtggcagagcccagcctcggacctgccgtggggca

SEQ ID NO: 1147 - DNA, 4051 bp, Homo sapiens
cacatgttcttacagtcacaaaaacccccacgtggacacacggtcacacgcatcatcacacacgcccccaagcacattcccaatactgagacactgacacagactctctcccaccacacacaatcactcacagactgccaggtacacagtcgcatgctgagacactgtccccaacacacacacacagaggaacacacagacactctcacatgcacactatctctcctgcacatatagacacacactagttgacacccattcacacaccaagatgcccccccccccacacacacacacagaccctcccacagacacagtatcatatgcagggtcacaaaaacatagacactgtcagatgtacagttgcatgctgagatgttgcacacacagggactcattcccacacagactgttacacacagggtcactcacacatacctgggaactgggggttcatatagcctactcccttctccccctggtctgtctcagactacctgtctgtatctctgtcccctcctccaaccaccaccaccaccacacacacataggaattttcctaggggcaggctgcagctgaggaagcctgttttgccttggtgcaaggcattcgagggcaggatgtggtttcttggttgctcctgccccagcccccagcctgggtcctgtccaggaggaaacccagcttagaacaatgtccgcactgatcaaggctcagccctggactccacctgccattcactagagtacagagacccagggtctccaacagcccctctctcatactatcctgcagccctggaaaacacttctggatccccaaggacaaatgggtcagttctgccatttgactaaagtgactaaagttgccatttcaggggccagtgtctcaatcccctccataaccctatgtgatagagcttatgatccttatttacagataaggacatgtattggggataaccaagtgtccaactccagatcaccagctaatagcagaccctatatttgaatccagttgtgtctgattttaactttgagtgtcaaaggcttgcctgtctcctcagtaggcccgctccctcaccagggtattggagaggtaaggaccagggtaggggaatgagccttcccagcagcaatgaaagagtagcctagggcaccttcttcagaagtcaactcagccatccccctacctgcagggatgctgtttccagcctcacgagacctgacagtgagcagctcactctcagaggtctcccttcagtcccgtctgagtaggaggtgttaggtcaagagcccagcccttcacccctttctcttccctgctcctgaactgctgggctactttatacaggggaccctctttttctgagctttcattcccccatcagcaacatgaggggagtaactctaacccttttgacttcatagacagaaaacaaaatgcaaaatacactattttttagtcttataagcacgcatgatgttgtgtcataattgttgcaatctatccttaacacctcctgtgactcagatctctgtggcagctcagtttcccatgacaagagcaccccctcaaagctcccctccctgctaggacctgtcccctcctatccttctctaccaccccaatcctgttatgcccccaggatgcccagcttttgccttaggcctggggctaaggagtaaaatcggatcagaggaaagtgtgggttcaggagcctgacacttctgggaataaggcctctgggaagacagctcacagaaactttcctcttccctttgctttcttcccttcattcaaaccagacctgtaaacctggcctggaggaggatggaaccaggaagcagagcctccacccctatcccaacccagtccgtaagaggagggaacgatgggcaagaaccacatcttgggtctgcagccctggcccctgaaagatcccagccgcaccaggaaaaccaaggcctggctgggggcgctgtgaggaaggtgtcttggaagggggaggttgtctcctggggctcaggacagcagctgggctggggaacaggggcagggagaggatgcgtctggaaaataatctgggggctgaaaaatgtgctggcatcttagctgagaggtatgtctgtccacatctggggtttccgccgaggtggagtctgccctcaccaaggcaatggttctgggacaaacttcaaggttcgttcaggtccactccccacagatctcagttctttaggtctgggggtagcagtgggaggtgataggaagaacctgtttcctgacccaggacaggccacccaagtctatgtctcctctctgctcaagcaagtcccagcatctttggacagctcccctcttcaaaagcagctgaccactgtccctagcccaggatcccagggcaggaaaagcaacaagggcaagagagaggggctgcggtggtccacctgtggcctgctctctggtggcaccaaggagcccaggtgttcttgcgtgtcccagtatgccttctcttggggcctgctgtcagtgcaggatgagaatgggaggtcagcagagtgggtgagtgggggcgcctggctgcttccaggggggcactgagccttctgcctgtttgctacagaggctggtaggggacggggggtaggttccatctgggaggtcactgggaaggacaagctgccaccgcagggccccaggagccatgaatcaaaggctgtgctgggggctgatgagaaagggagaggagccgggtctccgcaccctggccctctcagctcctcccagggtcttctcagggtctttgagcaggtggattgtctggggaggcactgcgggagaggggtctgggtcagactgtggggcagagggagtccgggaggatgccgggctgtgccagggccgctgacacggtttagaaggagttgggaaagtgctggggacaaaggagaagcggagcagaagtcagcgcagggcggccgcggggcagcgggtgcccgggcagagggacccgggtggcgaggaagagggcgcctcgctggggttggggggaatcctctgtagtccaagccctcacctgggccttccagcccaggggcaccaagtctccagtccctactccccccgaggctttcggatgcccccgccagcggtctcggagtttcgttcaagtcccggggccctccaccaggacactgcgcctgcagcccgcagagccacccgcctcccccggtgtcgtcggggtccctggatctcacctgggggcgggggccggccctgcccaccatcccgagcagcagcagcgcaaggcgcagcgggccgggggcgccggccatggcggggagttcaggactgggccatcgctgccacctgcggaaccgcgtgcggagactgatcccgggctggtggcgggcggtgggggaggagccggcgaggggccgccctgcccgcgggaggggcctggcagggtcccggttcttccggccgccagagacccctgggcccgccccgccgcacccctctgccggtcccgggccaggagatagcgggcactgctctccgagcgagcgcggctgggaatcaggaagcgcaggaggcggccaccagctctgagcgccgacagtgcgcctggccggctttcagcgacaagccaggccctcctcccaccctggcaccccggacctcctcccgggtctcccagctgaggaaagctacagcaacccccgcccattcagggtccctcaaaggaaactgaggcctgaggaatggacgggacttgtccaaggtcacacggcttggcaggccactcctggaaagtatcctcagagccaggggtgactaataagaacttttttttcccaggattaccccttcccaggtcctcttctcattcccatgttctgtcctgaaggcaggcccaggatagtcaaggttgggggtggggagactgacaaatggatccacagaactctgacagtcgcaagggtctagaggttcccctctacctggaaacttcagcattgcagggcagggagggatgaggctggg

SEQ ID NO: 1148 - DNA, 4062 bp, Homo sapiens
gatctctgatctcacttaggagagagactttctgagggcccaggactctaagctccttctggcgcctagtcagcctgcctgagggcttcttgcactttcaaccattctagaagaagacacacaggccagagtgggagaggaactgaatcaagggtgcacagcccccccaggaagcagagttaaggctagaatctggagtccttcagatcagtgaccatggtagaatatcgcaaggtgtgcgggggccggggagagtagtggcgttcagggctacaaagagctgggatgtctgccattagcattcctcctccaaaacgcactcacttacagatgcactcaacacagcaccccccaccccctccccgtgctcccctctgacacagcaaccaaatctaatattcaacccagcttctatccacccaaaggaagagtcctgaggacatgaggtgaaggggtcagggaggttccagaacactgaagtcacacgtgcaatgggagggatccctctcacctgtgagtagggagagctgagcctccacttccagtgaggtcaccgaaatggcttttcagcacacagacccaaacagacccatcccactgagaatccaccattccttctgagtgtttttgtgcacttccttcagctatgtcttggggttgtcgttctttttagttttttcctgaacagccttaaaaattataaatattcgtccttcagaggctgcagatgctgaaatgacccaagagccccatgtataaaatgtaggacccatacataatttaaaacaacattttgctttttgaaatcacaaaaatgtccacgtgtgctgaaattaaaatagcttctttttagaagcttgcccccttgccttgtagcgtgctgggcacatgctggatccagtctcgggttctagctggcttatcacacacctccctgagagacttgggttgccttgctcaccccttgctgcctcggaggccccatggaagggcccagctcactttaagccccagcagcatccttggcataagtgtgccaaggcggcaggggctaccctgaaggacagagctcttctgagggcaaaggtcaactgtatttgcttggggaaaaaaagaacaagaaatcaaacataacagctgcaaaggtgttgtccatgatattagccacagctgaggaggtggcacagttttcatcagagcaagtcctggtggatcaacccccaccgccccgtttcccttctcacttcttccctcttctccgggtaaagggctcttccatgctgcccctaaatgcagcagctgctgggggtggagggcagagagacggagaaatcccccttggtttctgtttctagaatgaaagcagaccacacacaaggtcactgctgggaactggggcagaaggtgtgtctggggcaggcagagaggtatggaagccagttcttcccagaggcggggggaggggttaacgacagcgccatgaaggccaatctggcctcctgcaccccagggcagcgctgtcacctactctgagcagagctgtggacataaaactatattcagactggggctccctgaggacggggctgtgtctcccctcagactggagcttcctgaggatggggctgtggctcccccttaggtgagggattcctgacagtaagagtatcttgtcccctccctacaccagatcagggcttctaaataccttcgagccttcatcccacccctgcaggcacacacagtgcaaactacccagacttctggcctctcccacgcctcgtatttacagaaaccataactgtgccaggttctgggtggtcgtgggtggaggggaatgcagggagtataaaggtgactgcaggagccctgcctgagagagtcttcaggctactcgggggtcaatgctttacaggacaagtgacataacagggaaggcagtgggtgaaagtgttcagggagtggttggggcagggttcagtgcagactcaagaggcctgagggattggggactgtgaggtggggctggggtgaagggggttggaggcagactgggctagcaaggaggagggcgggcacttcagcaggagggcacagcagggaaaaggtacaaaggtggggacatcagtgctccggagagcagaggagagctgtggactgttatcaggaggattttttggggcagggagagagtggtggtgggccctgggacagatgggaggttctggtctggggaaagactgagtaaatgaggctagggccacccagtgccatagggcctgggtgcccaggtaacatagtggaggctgaacaaccctggccttgggctcagatctgggcctggacctgggtcacccagatattaggtttgcaaccgagtgcaagagttgtatgttttaggctcagcttacacttgtgcaaaagggaacagcagcccctcccccatgggatggctgtggggactgagttaatgcttaggatggtgggcacatggagaaggctcagtcaatggcagcaatccccatgatttctactgtttagtggaaagggcagagtgggagggagtgaccaggcttcctggggactggggccccaccccttcctcacttctaggatcaacatattcccagaaagaggaaatgaatatatgttcatgtccaatgaccaatcattctgcttaatttgtgagatcttccagcagtaaccacagccaatggcaaagtgaagcagggaggaagctttggaccccatgccctgtgaggaggggcaaggccctgcccaccagtgtcccccactcctccatttcatcctcccacaacataagtccctgctgcaagcctgacaaggtggggctgtgggttctgggtagcgggaaggatgcaatccagatgtccctgtccctcacaaggcagcagagctgaccaggagagcaaagcagcggtcagagggggtctaaagggccatgggaagggcaggatggcagtttctagaatcaagacttgacaggcttcatgggatctctctgaggtggatgaaggcacgtggagacgacacctgggttggaggttacaagaaggaaggggcatccctcagattcaggagtttttggaggaagcaggagacaggaaagaggacaccaggagggagtggtgtggtctacaggaaggagcactggacagcgatttataagttcttggtctaaatcccagctctgttaatgcaggactgtgggacacgatttatcttttaggacctcagtttcctcatcagttgccagttctgccgtccataaaatgggcatatcattcttctcaaactgcacagatccaacaagataaagcaggtgaaaatctttgtgacttctcaagccctgtacaagcaggcagcgttggaaggaaggacagcagagaaggaagcaggtggagtggaagcccccggggtggtgggctttccaacaccccaggaaggggctccctctccaaacactggctgccaatctgaaaggcactcctatttctcagtgcgaataagtgtatcagattctttctttctctggggaccattttggtgacgggaaggaggtggcacagaggtgggagacatgcaggaaggcctctcagaaggaggaaggagggattccaactcaaatttctggagtcccccaactaagtccagcccttcaggttccctggcatctcctcccaggaccccaacctccttcctctgtgtcacctcccagaagtcaaatcaccccttccatcaacagacccctgtctctttgaccgccccttgtttttctttctttctttcttttttttcaaaagctcagagcttacaatccattttttttccctaagggctttagatatctgaacgaaaggacaggaaaaggaatactacacacatgttcttacagtcacaaaaacccccacgtggacacacggtcacacgcatcatcacacacgcccccaagcacattcccaatactgagacactgacacagactctctcccaccacacacaatcactcacagactgccaggtacacagtcgcatgctgag

SEQ ID NO: 1149 - DNA, 4053 bp, Homo sapiens
gcatcctatagaggcaaatggctcccagccatggacattgagttcatcaaagtcctccagaagttggttgggtggggagcactaaaggtggggagcctacatggactcacctgtggcaggaggtggatcctcagtcagggagcgctggcactggcgtcggtattctcgccatttctgcaccgtctcccagagggacacagtggcaccctggggggagggcatatatgggaggcctgtgggttcagccagcccctctcctgccccctcaccccctaacacacttggtttctcaatctccatgaaacctcaaagccccaaattctgccaggcatcagccacctctgaaagagagtgagaataagtcactgccacccaggggccccaggtggatggtttgacatcttcattcctcccagggtgcatagcttgatgtgtcacgagcacccagcaaatgtctgctaaattgatgcttttggggaggtgggtgggtgaaggaggaaaggagcgtgtgtgtctcatttgtgatctctgatctcacttaggagagagactttctgagggcccaggactctaagctccttctggcgcctagtcagcctgcctgagggcttcttgcactttcaaccattctagaagaagacacacaggccagagtgggagaggaactgaatcaagggtgcacagcccccccaggaagcagagttaaggctagaatctggagtccttcagatcagtgaccatggtagaatatcgcaaggtgtgcgggggccggggagagtagtggcgttcagggctacaaagagctgggatgtctgccattagcattcctcctccaaaacgcactcacttacagatgcactcaacacagcaccccccaccccctccccgtgctcccctctgacacagcaaccaaatctaatattcaacccagcttctatccacccaaaggaagagtcctgaggacatgaggtgaaggggtcagggaggttccagaacactgaagtcacacgtgcaatgggagggatccctctcacctgtgagtagggagagctgagcctccacttccagtgaggtcaccgaaatggcttttcagcacacagacccaaacagacccatcccactgagaatccaccattccttctgagtgtttttgtgcacttccttcagctatgtcttggggttgtcgttctttttagttttttcctgaacagccttaaaaattataaatattcgtccttcagaggctgcagatgctgaaatgacccaagagccccatgtataaaatgtaggacccatacataatttaaaacaacattttgctttttgaaatcacaaaaatgtccacgtgtgctgaaattaaaatagcttctttttagaagcttgcccccttgccttgtagcgtgctgggcacatgctggatccagtctcgggttctagctggcttatcacacacctccctgagagacttgggttgccttgctcaccccttgctgcctcggaggccccatggaagggcccagctcactttaagccccagcagcatccttggcataagtgtgccaaggcggcaggggctaccctgaaggacagagctcttctgagggcaaaggtcaactgtatttgcttggggaaaaaaagaacaagaaatcaaacataacagctgcaaaggtgttgtccatgatattagccacagctgaggaggtggcacagttttcatcagagcaagtcctggtggatcaacccccaccgccccgtttcccttctcacttcttccctcttctccgggtaaagggctcttccatgctgcccctaaatgcagcagctgctgggggtggagggcagagagacggagaaatcccccttggtttctgtttctagaatgaaagcagaccacacacaaggtcactgctgggaactggggcagaaggtgtgtctggggcaggcagagaggtatggaagccagttcttcccagaggcggggggaggggttaacgacagcgccatgaaggccaatctggcctcctgcaccccagggcagcgctgtcacctactctgagcagagctgtggacataaaactatattcagactggggctccctgaggacggggctgtgtctcccctcagactggagcttcctgaggatggggctgtggctcccccttaggtgagggattcctgacagtaagagtatcttgtcccctccctacaccagatcagggcttctaaataccttcgagccttcatcccacccctgcaggcacacacagtgcaaactacccagacttctggcctctcccacgcctcgtatttacagaaaccataactgtgccaggttctgggtggtcgtgggtggaggggaatgcagggagtataaaggtgactgcaggagccctgcctgagagagtcttcaggctactcgggggtcaatgctttacaggacaagtgacataacagggaaggcagtgggtgaaagtgttcagggagtggttggggcagggttcagtgcagactcaagaggcctgagggattggggactgtgaggtggggctggggtgaagggggttggaggcagactgggctagcaaggaggagggcgggcacttcagcaggagggcacagcagggaaaaggtacaaaggtggggacatcagtgctccggagagcagaggagagctgtggactgttatcaggaggattttttggggcagggagagagtggtggtgggccctgggacagatgggaggttctggtctggggaaagactgagtaaatgaggctagggccacccagtgccatagggcctgggtgcccaggtaacatagtggaggctgaacaaccctggccttgggctcagatctgggcctggacctgggtcacccagatattaggtttgcaaccgagtgcaagagttgtatgttttaggctcagcttacacttgtgcaaaagggaacagcagcccctcccccatgggatggctgtggggactgagttaatgcttaggatggtgggcacatggagaaggctcagtcaatggcagcaatccccatgatttctactgtttagtggaaagggcagagtgggagggagtgaccaggcttcctggggactggggccccaccccttcctcacttctaggatcaacatattcccagaaagaggaaatgaatatatgttcatgtccaatgaccaatcattctgcttaatttgtgagatcttccagcagtaaccacagccaatggcaaagtgaagcagggaggaagctttggaccccatgccctgtgaggaggggcaaggccctgcccaccagtgtcccccactcctccatttcatcctcccacaacataagtccctgctgcaagcctgacaaggtggggctgtgggttctgggtagcgggaaggatgcaatccagatgtccctgtccctcacaaggcagcagagctgaccaggagagcaaagcagcggtcagagggggtctaaagggccatgggaagggcaggatggcagtttctagaatcaagacttgacaggcttcatgggatctctctgaggtggatgaaggcacgtggagacgacacctgggttggaggttacaagaaggaaggggcatccctcagattcaggagtttttggaggaagcaggagacaggaaagaggacaccaggagggagtggtgtggtctacaggaaggagcactggacagcgatttataagttcttggtctaaatcccagctctgttaatgcaggactgtgggacacgatttatcttttaggacctcagtttcctcatcagttgccagttctgccgtccataaaatgggcatatcattcttctcaaactgcacagatccaacaagataaagcaggtgaaaatctttgtgacttctcaagccctgtacaagcaggcagcgttggaaggaaggacagcagagaaggaagcaggtggagtggaagcccccggggtggtgggctttccaacaccccaggaaggggctccctctccaaacactggctgccaatctgaaaggcactcctatttctcagtgcgaataa

SEQ ID NO: 1150 - DNA, 4046 bp, Homo sapiens
ctgccttcaaccagctgtgggatgttgagcatgtcccttcacatcctcaggcctcagtttccttatctgtaaaatgggaagcataatgacttcccagaagataaagcatgtgaagtgcccggtacatagtagacctttgaaacatcctcccccatgccggtttcttgaaggggcactccttcactgaggctggagatggagcttgtgacaccacttcagccagaactcctctggggacaagcttgggcctcagtttccccttggcaaccccaggctgtcgtaaaaacccccaggctccacattactcaggggaggcacccgccagagtttccaagaactgtgagttataggttatttttaaagcattttatgactctcatataattagaactaagctaacaaacaggtagggatcaggaggaggtgtagctaatgaggctggaatgatttgtaacaagcagatcagctgtttgtgggtaaacgaggctgctgaagggccctcgggcggccaacaggctctctgaagccacttcagccttctcctcccagtctcgtttgtaccagccatttcctttgaatatcttctgtctttgactcatctgctcctgctctctctgcacaatcctgagacccaagttctcaattagaggggtcagaattcaagggcttggctggcttctccaggacactgcgtagttccgaggcccgtggcctggccccatgtccagggtgctgcctggaaccctcattccttggaggagcttccttttcccttctgcatctgcctgttctttcacgtctggccccagtgtcacctgtccctggaagccttcctaatgccgccacactcctggcagaaggggtggctctggcctccctcagtaccactgcctgggctgctgagccgaccttcagctccatggaggggggttaccccttctccccaatgcacacactcacacacctctaaggtctcagtggcatccctagctcctaacacaacccagctcaggggtctggtgattgttttgacttttgctgtttctcagatcaccactcctctgctccattctgaactctagaagcctgagccatgggacagcacccctcggcttccctggcctctgttgggttgggccagtgggaggcattggcagaagatggaagggcagagggagagagaggctgggtgttctcccctgctccctccctgccttgatttgaagtctgcctgtgactttgtcccctctgtggccacagccctgctgggtggcttctccattgtagcccagctgtcatggggaccccccagccccattcttgtcccttccttctcaggtctaggggtgctcaagctttccattgttgtagtccctggtgctttatatgcctcattggtccctttaccttgccagcctctgaaaatgacccctccccaacattaaattctctccaaattgccaactgagcatgttttctgccaggaccctgcctgagataactcccttccttctccttgacaccagggcacactgtgacgtttctccacaggctactcgcttgatcagcccaagaaagctccagaactgtccccttcttcagaactgctcccacacacctgggtgggggtcagggaagcctccgctgccaacctttgccaaggaaagctccaggacaggccagaggcagcaattacgcagcttgagcctgtggtagttgtctctgagcatccgtaactcagggagtgaggagagggcagcagagtcggtgattccaagtgtcaaaaaagggagtaaattagcctggtgagtggcagggggacggggttggggaaaggctggcagggggcctgtgcagtggccgttatcttcatggagaaagcaataaaaccatgtttgctcataaacgggcaccaccaggacctatttcctgctcaaataaaattaaaggtgatggatggagctgcaagcggcaggcagagctgggggtggcttagtgctgagtgatgggccctgtcctacgcctggctccctggggtctagaggcccagcagacgctggccaagctgccagtctcaaatctatgggaggcagagaaagtgtgtgtattgcaggaagtcagggaggtatgtagggaggtgggaaaaattaacagctaccatttctcaaggccctgtggtcctcccgacacccatgtcacttggctctataccatctcccagatgagtcaaccaaggcacagagaggtctggcaacttgctcctgcttacacggctagtcagcagaaccaccagattgcagagttcataggagagggcagacagctcacccctgtccctagaggtgtgcccagacagcagagggcatccagatcactcacctgtctccaggccagagccacatgcaagggcacacacacacacccccaaggaagactttggtgtagcaattagccacactgactctaaaccaagcttctgggtcgcccactaatggctgtgtgagcttgcaaaagtcactgagcacctctgtgccttagtttccccatctgaaaatgggagggtaatcagagtacttgcctcagagggttgtgaggatgaaaagagtgtagcacggaaagtgcttccaacaggcagtattggagaaggcaggccactgatgggcccaggctcctgcctccttctaggcccaggctctccctgctccttggggagaggtgagtgtactgtgagtgtggacaaggagacagtacttttaggagaccagcctgggcctcatctgacttcagtcccacgtgccaaggtgaagcttacattgggccccaccaggccacctcctccaggaagacacctggcttccccagagcataacctcatgcccgcacttgtttctgggccagttgctgcttgggctccagccccttcaaggtgtgatgataggagcacgaattggattcaaatcctggctctgccattgaccacatcatttggaacaagtgacttaaactttttgtgcttcagtttcctcatctgtacagcaggtataaccacagggtagttataaagccctgcttttagggcaggacttggcacacagtaggtactcaataaatgctggctatgatgacgatgatgatggtgatggtgatgatgatgatgatgatgatgatgatagggaaatatcttttctccccttatggagactgggagctccttgccatgagggtgcttgtctcctgttatcctccacggtgcctgggtgaaactgggctcagcaagggaggctgggatagatagcggggcacattaactaaccctccagtcagggatcctcttgcagcctctgcaaatctctgtacccccaatgaaatgaccttcccacctacccagtcacatcttccccagtacaaggtcccccttgcaggcaggagtgagctgaggagggctgagtctggtggggttcgtcaccccaccaatgccctgatcacttctcccagtgaacctctaaagagtgaggaagtagctaaatgtcactgccaggtatgggccacctgcatacacatatcatacatacatgtatacacacagcagacaccctgggtagcttccctccccgcaagagtctgtccccacccagctcttttcctgactactgaattggaaggggtcgcatttctcttcagacacttactttcccttccccacacactggccagcactggcctcacgcccagacccaggtggtacctcaggccatcatgaaacttatcactactgactgctcccctcaccccaggaaaggcaggcggaccactcactaggaggcctaaagacattctgggtggggagggctgtgtctcagaggaaaggaagcagcgccttgacctcagcctcctcgatacaggggacggtgggggagggagctcaccactgctgacccagggcaggtaccaggtcagggagggggctcaccactgctgacccacggcaggtaccaggttagggagggggctcaccactgctgacccacggcaggtaccaggttagg

SEQ ID NO: 1151 - DNA, 4034 bp, Homo sapiens
ggtatttttgttcttttttgcagtacatacgcacacttttacaccgtggagactagaccaagaacacagtatcacatcctgtgttttcaacctcatattctacggtcagggctctgtagagagctcttgagagaaggacgaatgtgctgcactgttgctttgatttggtgttgggctgcttcattcctctatctgggggagttaggatgaagcagccccctcccagggtccgggccaccttacctgaagccgaggaggatcgcagaggcgataaccagagcagagaaggagagtgcgtagcccaccgtgtagatgatgtagaggaacaggagctgctcctccggggagctctgtggcacacgggggacatacgtgtacatgggcagcccatggccctcttcccacaatcttccttcccatggcacagagacagagctggggccccaagtcaggactcaccggggataccaagaccaagaaagagaataaccgtaacctacggcgatggttcttggatatcttgggccctgttccaaggccagagaggtgaatacacaccacctttgtccagaaagcatggtgtgcaaagcccccagaggcaaggagatggatgaaatgaccacagatgcccccatcaaagccaagggtctttgctccagtgaagtgctccaagacatggctccccgctccctggctcagaaccccgcctcaactcactctttcccctcgcttggactcctcgcactccgacaagtccctccagggcaggctggagttgtccttctgcagccagaggccttcagctgtgcagaaccggtacacgtggccctgcggcactggggtggggagacctggccctgagcctcagcccagaatagggcagcctgcccagtgctagatgctccccttcctccccattctgagggctatccctgctcccccagaatggactactctgagttagtgacatccttttcccttctttacacacaaacacacacacacacacctggaccttcctcccctgacatatacgctgttggtccagggacaagacagggggccaccaaggcaggggctcctcagctccaccctcagccctgcctctcggcaaccctaggacacagtttaatgaattcatgcctttgagatgacaggagtttagctcagttccatgtccctgcctccagcctcaaatcacactactgacaaggtctggcaccgaccagcagcagccgtgcctgccccgcagtcactcgctatttctgatttttaggactcagtgcccacctccctcccacactccttggggagagcagaccctgggaacaaggttggcactgagttcccaagagaagggaaggaagacagagcactgatctgagagagagagagacacagccctgcccataagaagttctaatctgatggaggagacacagacctacctgcaaggaccccctggtctaaaaggagtacacggcctcttggtcgtatgcagccttggcctttggagatcccccatagaaaaagggaatacccagctcctaccttcacatagactctaattataggttggaaatggagatagcccttggagagaggaaagggatccagcccccgtcctcagggagctcccctgtctgaggatggtggcaccgtccctgtcttcagagaatcaagactcacacagaaaaaacaaaaaagacctgagaaaggaagagcatagatggaaactaacagagatcaaacacaggccctgcagaggcaaggcggggcattgcctgtgcccattcacatcccagcagaggctgtcccccaccatgccccatgtccacctaccagggagatggctggcctgtggcctcaggtttgatgtgaggctgatagaggccactgcttacttgtgtccaggaggaaatggttcattcctggcctctctgtaggggaacttaagtttgacaccagggccaatgaacttgggacaaaagggcacaatgagagggtggggggatattgacctgtaggaagaacagggggaccaaggagagaagctgcagccaggacaaactttaaaagagttcaacattctaaaagactagaagattttaaagaccagttttcccagctgtgggaggaaggagggagtgaaggccagagaatggagaaggcaccagaggcccactgggggcagtggctgctcagtgttcatgtggagagacagcagtcagaactgggtctcggctgggtgtggtggctcatgcctgtaatcctagcactctgggaggccgaggcaggtggattgcctgagctcaagagttcgagaccagcctgggcaacatggtgaaaccccatctctactaaaaatacaaaaaattagccaggcatggtggcgtgcgcctgtagtcccagctactcaggaagctgaggcacgaaaatcacttgaacttgggaggaggaggttgtagtgagttaagatcaagccactaactactccagcctaggcgacagagtgagactctgcctcaaaaaaaaaaaaaaaaaaagaactgagtctcctgagaagaggcttcattaatgtggggtgtgtgtgtgtgtgtgtgtgtgtgtgtgtgtgtgttatgtgtctgtgtgtgtgtgtgtgtgtgtacacgatggggactgtggcagccccagggcctgaccctcaggggtgcaggacaggggcaaccatctagtctgggagttctatttttcaccctagcaaaaaatgtggcagggacaactttactgcagagtctggtgacagcctcttccagcactgtcagcaaggcctgccaatggaccttgccctcccctaaccctgatcccagacaccaggacagcctccctgctctttcttctcctccttcccagctcctttcccaaacaaaccctgaaccaggtcccccttcaagacacagaaattatctggtaacacagtggggcaagtcagcttgcagcatgactccttctggaagaacctgcattttaaaagatacttcacctgggagaaaaacaaaaacctgaaaatctaatggtgaaactgacagcagtgggaacgatggtgttccaatacccttcgaacgcatttatgaacaaaatcaggtgtacccccaacggcagagaaggggaggcacgtggtctgattttagcaacgcgaagggcccctctcaagcccacaaatgcctctcttatctgctgcatggatgcctgagattcttcactggggccaagtcttctgacgtgaggcaaaatcagtgttttcctgtagatacccccaaaagcagtgatggggacctgagctgactccatgcggaatgagatggtgtcagagcctgcactagcagcctgctttgatgggaggaaatggggagaaaggaagaaggttgagggaccagagaaaagaagacacagccatggaaccacaggcacacaaaccatctaaagacccgcatacccaggactcagcctgcaaccgtgtgatgctagtaagatgcacttcccacagctggcacagggcctggcatacagtaggcactgccttgttgcagattccttcacaacatgctccttacttgctctttccataggctgtgccttcacagaatcagtttttgaacacctactgtacacctgacacctttggacattagaaccacctttcaaggtaggaacagttagtcccattgtacatatgaagaaactgagcctctgagaagccaaacaacttgcctaagatcatcaactagaaagtagcagagtcaagactaaaatccgccagctctttgcctccggaggtcccaagttagcagccaaacttgctgttaataggaaagaatgtggcatgtgccattctcctctgcccttcctctgggctcagatttctcaacattcagtctcctcccagcaggcccccttgccagtgtggacccccggccgctgcaccattcctgctccctctgttcagagccagttgggagggtggggaggtggtgtgtgcacagatgtgtgca

SEQ ID NO: 1152 - DNA, 4046 bp, Homo sapiens
gttatcagccagacctggcaagtttcactcatcgtcagcatttccttaacaaggccttttcaaaaaacacagtcacgaaagccctgctgcatgcaaacattacgcactccctgctggcttcatctttctcccatttagaaaacgagcaagacaggttggagaaaaaagctcaaattaagacacacacaactggctccaggaagtaatgattccctcaaccatcatttgcctccctcttgcacagcctccatgtgggtttctacaggcccccaactgcctggggactgcagcagaagctgccatgccctttgggggacctctccaactgtgtcagagtcctaattttaattcttccacttgcacatgaagctgaaagttgtttcccaagtatcccagcttgggcaaggcctcctggcatcacgtctgagctcctagcaacctgtgaatctctctccgtctcccccaccccaatcctcaagaaaaaggtgttctgattagagcagggtgtcctccgggtcttgcccttgtgctcccacagaccccgagccctgagctagggtgtgaggtggtaggaaaaggacttggcactccctcccccatctcccactcagagacctctagggcagtgtgtccccaccaaactccagccacccccgctcctctgcacacatcacacacgtcccttgattgttcctgccctcgggtcgccatggtgacaggcactaacagcgctgatgctatttcctagaatggacagacaccgtcccccaccctgaagacagccttccctgagctgccctcgatggcctccctcctcctgctctagcaggaggaagaagcctcggggagaaaaggccaaggaagggactgggttctgggagtggaggaggcaggtgaggagcagggatctgtgagcaggagccaggcctacctgcccacctgtgcagaggcctgagcctgctcaggggtgctgcaggggactgaagggatgcagcccaggcaagagaacagggcatgatggccgcaggcccagagcctgggagtcaggaggcctgggttccagggcctgctctgcctgtaaggccctgccagctctgggccttggtgtcctcaagacactggtcacattaaaatctctcaggctactcttctcctggggggtggggggagctgtatagagaaaaatggctgaggaacaccagtaaaaataaatgaagtgcaaggacaggggatggagagcttgagagggcagagagcacagaaccacgaggactggtggcctgaggcagcttcctgaagaggcagcggacaccctggtgtgggaaggatgctccctgaacattcctgcatggagaacagccttgcaaaggctcagggacaggaccattgtcagggaagaggagtctggatgtgactgagctggaaagtccccggaggtccgtggcaggggcagccgtggtcagagcagcgtgaggtgggcgcatgaaggaaggaggagtgaatgaaggagtggcaagcagggcgggggatggtgtggaacaggaaaactcatggattcaatggcagattagggaggacagagggcagggcctattctctgggtaccgtgggtccctccagaaaggcctgttgcatgttttcccaggggtgaaggggatcccagcccccttcccaaccccaatgctgcccctcattacaatcccacgtggtgagaggcagaagcacaaccagaaatgttccagcaaaaaaaaagacacaatggttcttggcaaacttttttggctagaacatttccagctgggctccaggcacatccgccgtccaccctttccttggctggcctctggcccccctgccccactgtacttggctctcctctgagccctcctcttcatcgtcatgtgacagagcaccagcaggctccccccagccagccccctaccctcttgatcccctccccaccttgaggcccaggactcaccatttccctcaggccctcgggctgcccgggactgggtgtgaacttatgtccccatgtggtcttaagagaacagtgccatgacctccagtggtgtgcatgatagtggtagagggtggtgtttggccacatgcggtggaggcttccattaagggaggagagttatgcagaggaggggaggaccataaccccctacggcatcttaacagcaccggggcagaaggtcctgtgcccaggaagagggttacccagtgggccttgccccttgctcagcagtgcgttccaagtaccatgttagaagaggggtcaaggtctcccacccccgtgccacaggtccagggtgggtgatggcggttcttaccccagcctatgctcacgtagagcctgaagatccattgctcagataagaccgagaaggccagcagtgtgtacaggtacacgccctccaccaagagccagtagtaattggccgccacacagtactgcatgagcagaaacaccaggcggcagctcagagagtcctgggggtagaggaagggtgtcatggggacaacagctctgccctctgcctctcttgataccactccccgtcctgctccagccactatcctgccatggttaatgcaggaggagagagctcacatctctggctagggctagtgctaaggactttatctgctttagctcattgaatcctcactatcctgattggaagaaagtaatgtatccccctgcaggtgagaagtaagtgacttctcacctatttctcagcctcagagaagtaagtgacttgcctaaaagtgtacagatagtaagtgacagagctgacattcaaactcaagtgtgtctccaaagactactcttttgtgtcagactgagaattccctagggcagtgtctcctcccttagattgggagctccctaaggtagactgcctctctcagcagactggagggtcccaaggcgaactgcctctcccatcagactgggggctcccgaagggccaggactgttcggctcttgtcttctcctgtcccaggcctgtctagggtggcagaggcaggcctcctccaaccgcccatccctcctgaggcggtcctggatgcaccacacacctggtaggagaggagcccatcccactggtgctgctgggcggctgtgctatacatccacttcagggctgcgtccttgatgaagacggacaatgctcgcaggatgaaggatgcaaacaggttcaggtggatgtagttcctggtgcagtgcaggtgtctgagggagaaagcagggcctttccctggcaaggcagccaacagttctgctctacaaccccaggctctcaagctaacacacacattaggcatgtttccagccctgggactgtgcgtgtgtcttcttctatgaatacccttcttcctcatcatcgtgaaaatccttctgtccaactcaaatcctgcctctccatgaaggcttccgctatgtagtcactgccccctcctcccatccacattctatccttctctctgcagcatcttctttgacacaaagtcttgcataaccaaagagatttatgcatgaggatcagtttccccagtgggaacactgcttcttgttgacagggcccacatcctaaatgcctcacagaggcagagcaggactaggcacttggtaggaattcagaaactattggatagagttttaatatcctttcatgtgaaaatgtgtagcaaattgaaagtacaggggcatttcttaacctaatgaaggctatttacctaaccaggggcaaatatcaatcttaactgagaaactgtgggagcatttcctttgaaatcaggaacaaaataaggatgtctgttatcactgcttctagtcaacattgtaactacagatcctgcccactataataaggcaagggaaaaatgtacaagaatcagaagtaaacaaaatagttattatttgtagatggtagattatcttcatagaaaattcaagaaatctatggacaaattattagaactaataagacagtttagcaaggttgctgataagtatgtttgtatatgcctgc

SEQ ID NO: 1153 - DNA, 4042 bp, Homo sapiens
tggaaagcagcagagctcagggctgggtagcgcatcacccagctggctgagagcattcctggaggggaggccacccacagagcttaggtttttgcacttcctcgtttgcatcagttttaaagaaactcattttgaggatatggcagtggaggaggaccaggactgcctcctgtgggtcacgagcctgttccctgccctaccctccaaacggagccgctgggtcctctaagacctgtcccaggagcagccagaatcccatttatgggccactctttgcctggcgctgccttcacctccccagcacctgcttccctgaggcattaagtgggatcttgcccccgccacagcccactagctctaccatcttctgtctattgaattaggctactcatttcattttgctgaggcttaacgttcttagctgtgaattggggataccatctgctgcacagcattggatgtaatgagacactctgagcaccttatatgcagtaaacccttaagagaccttggtttccctcccatttagagatctgagggccacacttcccacaggtagccagttcagcagaagcagggggaggcctcagggacaagggaacattcccctcccttccctttcacccagcctcattttctctgcacggcatcctctgaaattccttaggcccctgtctctgggaatcactgaatactgatctaatagtgattgcttactgagcatctggagataatggtgtgtgtttctccatgccaagcagcacctgtgaggagctaggatgggccttcagcatcccaccttgaaggaaggacttgttctctgttcccctttcgcacctttttcagactttcttaatcctcacaggattatccccactttgtaaatgagcaaactaagtttcagagtgggcaggtaacttaggcaaagtcacacagctcattaagtgatggggcccagatcagaccaaataagatgccaaagcctgcatccttgcatcttttctgctacatcacattgcttctttgagccatctcatagctccttgaaacacccaggtccccacccactgtcctttctgcatcccccacacccatagaaaaagacaagcctattaatgtgctgactccaacatccctgagctctgggattccaaagctgagtaccttggtggaaggggccttttccaggtgcccatgaacacagccatgccctcctcccaggagctgaccatctcagggatgggagggaggcctgctgtcctgcagacattttcaggagagtgtgtggggccagcgagaacccccttctcccatcctagcaccagaaagccacccccttccccacagtgagccagggctcttgcctgtgtgtatgaagaatggggtactttctgctttaatgcagaattaatttgaatcctggctctgccatgccactatttccacacttcaccttagccaaaaggctaagaagcgatgtgtgccactatttccaaacctagggcaggttcctgactctttctgatcttcagtgttttcatgtatatataaaaaatgggaatatgaaataagaattttagcagggtttttttttgagggatgtgggggtcataattaaatgagatagtgattattaaagccccaagcatgtggcttgggtatgtgtgtgttgaatcactttgtaagtgacagtcactaccaccaagcaaagagggtcattcaggatccccttaacatgagtctgggtcttccttagggtcacatgccattagggtatacctgtacatgtacttgtgtgtgtgtgttcatgtgtgagagagaccatgcacagaaaaccaaatctgtggacaagatggcttctcaaccctagtgcctcagtgaggtgagtagggggtttcagctggcaagattgatgggagtccccattgtactactccagacgggctgatggtacccacccaccagggtccccaccgtccctcctcagagcttacctcattgttgacaaagcagtataatatggccaccatcagcccctggaaacaagagtcacatcaagagggaggaagcaggagggaggtgccctgcagactggccctggtcggaagcactttgggactccatcctcaacaaccccctccccaaatccagcggcccaggcagatccaggaatggggcagtggcttccctctcatttcctttctgaaggaacaccagggttgcacctctgcgactaggcctggctacaggccccagctagcctctccccatgggtctcccaggcatgtgccatggggtccaggagaccctgctcagaagctgcccagaagctgtagagatcctacatccaacctctccttgaggaggcctgatccagtgaagtacaatgactctgatcatggagaatattccccactccagccccatctgttcatgaaggagacccagggctccagaattgtgttctgtatgtctgcacatgtatgtaaatacacacacatgagcccacatgtgtgcaggcatctcatgacactcttgaggggcaggcagggaccagtttttttgtatttttacacccccttagcatcatctaatgctagtggagaggatcagttcttttctttgaaactgtgacaccgtaactctggttttaacacctctgagtctcctctgtaaagtgaggctaaccctgcacatctcctgggttctgtgaggagtaaatgcacaatgcatgtaaagcacctggcagggtgctcgccaccaagtagatggcagctgcaatgccaggctggtacccagagctacatccaggaaggcttcttgtcccatgtgcttacagagaagactggcccaggtattgggacacctggggatactagttctggctctgctccaactaggtgactttgggcagggatcacccctccaggtcccagtcttcccaccttttccatctgcatgatgcaggctggtgtctgtcccacccccactctaggactttacaagcaagtgtccccaagcatgaagtcacctggaaggaggtgaaggagagctctgtaaacagcttgatgaagcgcagggtcccccgggcgtgctcgtccatcacaaaggcaaagatgacctcatgagtccccagcagggggatgagtgtcagcgtggacttggcaagtctgaggggcagggcagagatctcgagtcattctggacctctcccatggactcttcttccctttctctaccctccccacttcctaccaagtcctgatatctgggtcatggatgttctcccaccccaaataccctgggacaggctgcctggagggaaagaatagaggtcaagaccccaacaagtccaggggctgcccagagacagggcaaaagcaagggtttggggtccaaggccaggcctgggtggaaggagagggtagtgtagggctctaagctaagcatcccaggatctctctctctctctctgctagaaggaaaggggcacttgctgagggtcctcagtaaagccagctcagttacatcacctgcatttgatgtctgtcttgcacatgagattggccttcagtttggataccacgatgcagatgacccgaacaaagatgaggaagttcacctgcggggtggggccggggattggcagggggcaccagcccagccctatcatagctgccactcccatccctgacaccatcactcaccccaatggcaaagagaatgggcagccggataatgagccagtagttcatgttggagttcctggtccagcagctggggagggagagagatgcacacatgcatccagcaggactcacaggacccccagctcaggtgcaggcacagaggccgccaatgcacatggccatgttgagtgccacacacacagctcccaggagccacccaaaaaccagtcccatggacccacagagccctgccagtgcacagccacacaacacacacgcatagtccaaatacacagtcatacacagagatgcacacagcccccaaacaagctttcaaggacctaccaacacag

SEQ ID NO: 1154 - DNA, 4046 bp, Homo sapiens
gcagctgagccaggggtcaggggagactgttcacaatggcgggggggaagccaagcacacgtgtctgctagtagggctgcagtgacagtgtcagaggatagagaagtgagaaacggggacgtgggggggtcaagatgacaaggtggcagcagggagcctcagtctctccctacaggcctctgctcctcatccccacacaggatacatgccaccctgtcttgcccccatcaccactgggctggaatggaaagcagcagagctcagggctgggtagcgcatcacccagctggctgagagcattcctggaggggaggccacccacagagcttaggtttttgcacttcctcgtttgcatcagttttaaagaaactcattttgaggatatggcagtggaggaggaccaggactgcctcctgtgggtcacgagcctgttccctgccctaccctccaaacggagccgctgggtcctctaagacctgtcccaggagcagccagaatcccatttatgggccactctttgcctggcgctgccttcacctccccagcacctgcttccctgaggcattaagtgggatcttgcccccgccacagcccactagctctaccatcttctgtctattgaattaggctactcatttcattttgctgaggcttaacgttcttagctgtgaattggggataccatctgctgcacagcattggatgtaatgagacactctgagcaccttatatgcagtaaacccttaagagaccttggtttccctcccatttagagatctgagggccacacttcccacaggtagccagttcagcagaagcagggggaggcctcagggacaagggaacattcccctcccttccctttcacccagcctcattttctctgcacggcatcctctgaaattccttaggcccctgtctctgggaatcactgaatactgatctaatagtgattgcttactgagcatctggagataatggtgtgtgtttctccatgccaagcagcacctgtgaggagctaggatgggccttcagcatcccaccttgaaggaaggacttgttctctgttcccctttcgcacctttttcagactttcttaatcctcacaggattatccccactttgtaaatgagcaaactaagtttcagagtgggcaggtaacttaggcaaagtcacacagctcattaagtgatggggcccagatcagaccaaataagatgccaaagcctgcatccttgcatcttttctgctacatcacattgcttctttgagccatctcatagctccttgaaacacccaggtccccacccactgtcctttctgcatcccccacacccatagaaaaagacaagcctattaatgtgctgactccaacatccctgagctctgggattccaaagctgagtaccttggtggaaggggccttttccaggtgcccatgaacacagccatgccctcctcccaggagctgaccatctcagggatgggagggaggcctgctgtcctgcagacattttcaggagagtgtgtggggccagcgagaacccccttctcccatcctagcaccagaaagccacccccttccccacagtgagccagggctcttgcctgtgtgtatgaagaatggggtactttctgctttaatgcagaattaatttgaatcctggctctgccatgccactatttccacacttcaccttagccaaaaggctaagaagcgatgtgtgccactatttccaaacctagggcaggttcctgactctttctgatcttcagtgttttcatgtatatataaaaaatgggaatatgaaataagaattttagcagggtttttttttgagggatgtgggggtcataattaaatgagatagtgattattaaagccccaagcatgtggcttgggtatgtgtgtgttgaatcactttgtaagtgacagtcactaccaccaagcaaagagggtcattcaggatccccttaacatgagtctgggtcttccttagggtcacatgccattagggtatacctgtacatgtacttgtgtgtgtgtgttcatgtgtgagagagaccatgcacagaaaaccaaatctgtggacaagatggcttctcaaccctagtgcctcagtgaggtgagtagggggtttcagctggcaagattgatgggagtccccattgtactactccagacgggctgatggtacccacccaccagggtccccaccgtccctcctcagagcttacctcattgttgacaaagcagtataatatggccaccatcagcccctggaaacaagagtcacatcaagagggaggaagcaggagggaggtgccctgcagactggccctggtcggaagcactttgggactccatcctcaacaaccccctccccaaatccagcggcccaggcagatccaggaatggggcagtggcttccctctcatttcctttctgaaggaacaccagggttgcacctctgcgactaggcctggctacaggccccagctagcctctccccatgggtctcccaggcatgtgccatggggtccaggagaccctgctcagaagctgcccagaagctgtagagatcctacatccaacctctccttgaggaggcctgatccagtgaagtacaatgactctgatcatggagaatattccccactccagccccatctgttcatgaaggagacccagggctccagaattgtgttctgtatgtctgcacatgtatgtaaatacacacacatgagcccacatgtgtgcaggcatctcatgacactcttgaggggcaggcagggaccagtttttttgtatttttacacccccttagcatcatctaatgctagtggagaggatcagttcttttctttgaaactgtgacaccgtaactctggttttaacacctctgagtctcctctgtaaagtgaggctaaccctgcacatctcctgggttctgtgaggagtaaatgcacaatgcatgtaaagcacctggcagggtgctcgccaccaagtagatggcagctgcaatgccaggctggtacccagagctacatccaggaaggcttcttgtcccatgtgcttacagagaagactggcccaggtattgggacacctggggatactagttctggctctgctccaactaggtgactttgggcagggatcacccctccaggtcccagtcttcccaccttttccatctgcatgatgcaggctggtgtctgtcccacccccactctaggactttacaagcaagtgtccccaagcatgaagtcacctggaaggaggtgaaggagagctctgtaaacagcttgatgaagcgcagggtcccccgggcgtgctcgtccatcacaaaggcaaagatgacctcatgagtccccagcagggggatgagtgtcagcgtggacttggcaagtctgaggggcagggcagagatctcgagtcattctggacctctcccatggactcttcttccctttctctaccctccccacttcctaccaagtcctgatatctgggtcatggatgttctcccaccccaaataccctgggacaggctgcctggagggaaagaatagaggtcaagaccccaacaagtccaggggctgcccagagacagggcaaaagcaagggtttggggtccaaggccaggcctgggtggaaggagagggtagtgtagggctctaagctaagcatcccaggatctctctctctctctctgctagaaggaaaggggcacttgctgagggtcctcagtaaagccagctcagttacatcacctgcatttgatgtctgtcttgcacatgagattggccttcagtttggataccacgatgcagatgacccgaacaaagatgaggaagttcacctgcggggtggggccggggattggcagggggcaccagcccagccctatcatagctgccactcccatccctgacaccatcactcaccccaatggcaaagagaatgggcagccggataatgagccagtagttcatgttggagttcctggtccagcagctggggagggagagagatgcacaca

SEQ ID NO: 1155 - DNA, 4043 bp, Homo sapiens
cctgatgagagtggccaagaccttcagagcatggaagggagttgactccatttgccctttgtggtgctgtgccatctttgctaggctacagttgccgtttgctagctgtctccaaattcagaggttctaaagaggtaaaggggaggttcaagaccttttaggttattttagtacactctgtgtgactatcaatacaacttttcaaacacatagagaggcatcagaaaaaaaaattaagccaatccattaaaagagtgctggaattgccatccaaaatggcttatgtgctgtttctatgtatatgtgtgccctgatgcatttcatttcttaagtttaagacaaggatgaatgaagtaccagtgtaaaaataggaaagcacatccttcccctcctctcaccagtataaattacaaaggagatgacactttcaccatctgatgagtctacctttgctgctgtatttcctcttcagtagaaattccagataacaccactgacttttactcagagtatcttgaacagctatttatagttttcacctatccttcccagaggcctcactagactgagagaaaagggcttgtctgggtcctggcccagctcaaccaccctctagtgttgtgaccttgggcaagccacctctacaagcctcattcctcaatcctatagatcgggccaggggggatcaccaaggtctttctctgctcagagctctcccagagctccaacgatgtggtctacagcatgaggcacgctaagaccataaaaaatcatctctgcaatccagaagctcattttaaagggaaggaactttgcaatataagtgttttgtttcagttctgcgattcagctgcttgaaagactgaaatggcaaagaaaaattgacaaaatgcaagccactaacaagtttgaggaagctggccagagtgctgaagtcagctgctgttcacaacagacatcagaccttgtggctacaaagctcaaacaaaagcagcgcctacaccctgctggtcagcaatagtaccccaggacagaggcagccgagagttctcagcaagttccaggcgtatggcattaggcatcaggcatgtaaacagctgctggaatttcagagtacattgcattcaatagttcccagacctgttggagccatatttagcttaggaaagcttggaaagagtgcagtgccatttgaatgactattaatagcttcggggggccgggggagcgggggttggagcaaagaaaagatttcttcagttcggtatcttgtatgtattcatgaaggaaaaacttcctccgtgttaaaagacttgggtgtaggggtctgatgagccttctgaaatcaggaatcaccagttctcgttgggaagacaactctacttacagtttaaactaaatgatttgagcttcccaggtgcctaactaagcaacttcttccctacaatccctctcctcagcaatttatttcacacagattatatcaatctgtttctttgttgctatgtaatgtaataatgattctcaaaatcctcagtttatccaaaacttaaacacttgcaccagcactgtttcccacatcaacccactggtgcccacgcttacgaagagacagcaaataaggggtgcctttgggaagcctgcccttgttctggggaagcaggaacgcccccctgcccatattgtctcagtcaaggcagccatccacacaattcctttctttagcccgaggttcaacttgcctattaacatagacaacacttcactgaagctgaagtataagaaattttctacttgatgtgttttatatcctattattttccttgcacatcacatgcctctctgaggggcacaggagaatgtgtctggggaaaggttttggggagggttcccaccatttaaaagggagagagagactgactcataaaggaatccgtcggaaccctctgctctccccggaggtcctgactcccaagagcgagctctctcttgctccagaaacttcttttgcagccacgaactccttgccagcctctctaggatagccatgtgtctggctatctgcagtgctgctgtgtgtcaccatggcttggggcttcctcaccatggctgggggcaggattgataggtttccccgtccagtctttctgctgttcattatttgtgggggaggctgcaggcagggcaaaccttaattagctccaagtgtgagtgggtcaaatcaattactactgcactctcccaaacaacatcactacaaccatgatttcgctcatttccactagatgggagaagtcagaattgcccattgtgcacacagactattcacagcaataaagaaaagtgagtgaagtatatacaagctcccaagtgggggaatttcaaaggcagggggagcctgcctccatggtgctgatggggactattggtttccctaagagagtctcttcatggtcccctaaagctagagagtgtatccaaattctcaagagacagcgtgtggtcacagataaagtatttccaaggagaggtggaggcaatgtctctcttggccctctgggctcctggaagtggcaggtaatctacacccacagtctggacattcctaacgtgtccctagatgaaccccagaggattcttgagcgtctttaaaatagacttggcagctcataccccagggctgggttccccggtggcaagcctgccctgattctctgggcatggcagaggcaggcaccaaaacaactcaaatacctggaggagaagcgagcaccgtctcaatgctcattctttctcaacaccacctacagccatttccagaaacagctgctggcagtggcccaaacaaagcccctcaaaaagaaactgggcagtgagatgagggggcaagatgagggaaataagcaacccagacacacaaacagcttccctttgagagaagacaggggagggtggtgaccccaagtgatgcaagcagaggaggctcccgtcactcccgctctgtgtttggctgaggttagaagagccactttcagaaccacctcctcttgcaagccccagtttcactaataagccgttgaccttgagtttgagtctggggttgatttgcggctctgtctgggggaaccccaagggcctgtggtttcacaagaagcaatcctcctcattttcacagcgatcgtttttcctctcctctcgccactgtgatcaaattaggaggctgcttctcctaggagaaaatgtgtccatggtcccaggaggcactgcccatttacctgtctgatgggtttggggagggaaagcaggatgtatgtgtgtgtgtgtgtgtgtgtgtgtgtgtgtgtgtgtgtcccttccttcccttgtccctgggagtgtctctcccacctggattggccacccggcctgcagcaaggaccccagggagggcaggcgctggagtctcagctgcaggaggcctggcaagtggctgtgtacatgctgctgcccgccgtggctccactgctcaggctgctggtgggacacttgaggggcttcatgctgctgtccctctggatgtgcaagtgctcaagccgccagcgctcccagctcttccgaaattccagctggaccttccatgggaaaaggagggaaacgaaagccatcatgcaaaccaatggctaacaaaatggccccactattacattagtggggaagggaagaaatccactgcattatattaagagacacaagtcaaggccttcgggctcctaaattaatatcccaataaaattgtttattgttgtctcctattttctgcagctcctcaggagagagatcagcttgatgacctaattggtcttttccatctctaaactctgtgattcagctaagtaccttttacaatccatcacagtattatttaacggaagagaatgagagggagggtgaaacacagggagacaggagatgggagagagaagagagactctgtctttacagcgcacagtccagtttcagcttggatgcttgagaagggggacggcaacccccagccttcctgg

SEQ ID NO: 1156 - DNA, 4068 bp, Homo sapiens
cagagagctgatctgggccagcaggtaactgtaggggcatgggaatgtggttggcataagtttctcacttgggcgattttctttcccaggggaactcattccagccacaaaagagggaaaaaatgttaagagttgatcctaatttggtttctgctgaatgtttagcacgtcattcacacaggtgtctttgcagagtaagcctctgtattttatttgagaatttttatagtttgcctcgtaggagccaaaagcagggtaagcactgtagattagaatcaattcaacagagggaaaataaacctttggaatagattttgccttccctgagcacgtcgcaggcattagcaaataatgggagccctgtctgcgcatggagaggaagcatctaccacttagactcccagcctcgggtgtgcggtcctatgacctgcacagcgggtgtgatgattctggagtcatcatctcctaactttatgctgctatgcacagaagaaacatgcacacacacatgcacacacatacacacacacacgcccacatgcaatgttctttccttgcggaagaaagaaatgggagggactgaggaggggaggtctcctgactgtgagctgctggatagtacacagccaaccctgatgagagtggccaagaccttcagagcatggaagggagttgactccatttgccctttgtggtgctgtgccatctttgctaggctacagttgccgtttgctagctgtctccaaattcagaggttctaaagaggtaaaggggaggttcaagaccttttaggttattttagtacactctgtgtgactatcaatacaacttttcaaacacatagagaggcatcagaaaaaaaaattaagccaatccattaaaagagtgctggaattgccatccaaaatggcttatgtgctgtttctatgtatatgtgtgccctgatgcatttcatttcttaagtttaagacaaggatgaatgaagtaccagtgtaaaaataggaaagcacatccttcccctcctctcaccagtataaattacaaaggagatgacactttcaccatctgatgagtctacctttgctgctgtatttcctcttcagtagaaattccagataacaccactgacttttactcagagtatcttgaacagctatttatagttttcacctatccttcccagaggcctcactagactgagagaaaagggcttgtctgggtcctggcccagctcaaccaccctctagtgttgtgaccttgggcaagccacctctacaagcctcattcctcaatcctatagatcgggccaggggggatcaccaaggtctttctctgctcagagctctcccagagctccaacgatgtggtctacagcatgaggcacgctaagaccataaaaaatcatctctgcaatccagaagctcattttaaagggaaggaactttgcaatataagtgttttgtttcagttctgcgattcagctgcttgaaagactgaaatggcaaagaaaaattgacaaaatgcaagccactaacaagtttgaggaagctggccagagtgctgaagtcagctgctgttcacaacagacatcagaccttgtggctacaaagctcaaacaaaagcagcgcctacaccctgctggtcagcaatagtaccccaggacagaggcagccgagagttctcagcaagttccaggcgtatggcattaggcatcaggcatgtaaacagctgctggaatttcagagtacattgcattcaatagttcccagacctgttggagccatatttagcttaggaaagcttggaaagagtgcagtgccatttgaatgactattaatagcttcggggggccgggggagcgggggttggagcaaagaaaagatttcttcagttcggtatcttgtatgtattcatgaaggaaaaacttcctccgtgttaaaagacttgggtgtaggggtctgatgagccttctgaaatcaggaatcaccagttctcgttgggaagacaactctacttacagtttaaactaaatgatttgagcttcccaggtgcctaactaagcaacttcttccctacaatccctctcctcagcaatttatttcacacagattatatcaatctgtttctttgttgctatgtaatgtaataatgattctcaaaatcctcagtttatccaaaacttaaacacttgcaccagcactgtttcccacatcaacccactggtgcccacgcttacgaagagacagcaaataaggggtgcctttgggaagcctgcccttgttctggggaagcaggaacgcccccctgcccatattgtctcagtcaaggcagccatccacacaattcctttctttagcccgaggttcaacttgcctattaacatagacaacacttcactgaagctgaagtataagaaattttctacttgatgtgttttatatcctattattttccttgcacatcacatgcctctctgaggggcacaggagaatgtgtctggggaaaggttttggggagggttcccaccatttaaaagggagagagagactgactcataaaggaatccgtcggaaccctctgctctccccggaggtcctgactcccaagagcgagctctctcttgctccagaaacttcttttgcagccacgaactccttgccagcctctctaggatagccatgtgtctggctatctgcagtgctgctgtgtgtcaccatggcttggggcttcctcaccatggctgggggcaggattgataggtttccccgtccagtctttctgctgttcattatttgtgggggaggctgcaggcagggcaaaccttaattagctccaagtgtgagtgggtcaaatcaattactactgcactctcccaaacaacatcactacaaccatgatttcgctcatttccactagatgggagaagtcagaattgcccattgtgcacacagactattcacagcaataaagaaaagtgagtgaagtatatacaagctcccaagtgggggaatttcaaaggcagggggagcctgcctccatggtgctgatggggactattggtttccctaagagagtctcttcatggtcccctaaagctagagagtgtatccaaattctcaagagacagcgtgtggtcacagataaagtatttccaaggagaggtggaggcaatgtctctcttggccctctgggctcctggaagtggcaggtaatctacacccacagtctggacattcctaacgtgtccctagatgaaccccagaggattcttgagcgtctttaaaatagacttggcagctcataccccagggctgggttccccggtggcaagcctgccctgattctctgggcatggcagaggcaggcaccaaaacaactcaaatacctggaggagaagcgagcaccgtctcaatgctcattctttctcaacaccacctacagccatttccagaaacagctgctggcagtggcccaaacaaagcccctcaaaaagaaactgggcagtgagatgagggggcaagatgagggaaataagcaacccagacacacaaacagcttccctttgagagaagacaggggagggtggtgaccccaagtgatgcaagcagaggaggctcccgtcactcccgctctgtgtttggctgaggttagaagagccactttcagaaccacctcctcttgcaagccccagtttcactaataagccgttgaccttgagtttgagtctggggttgatttgcggctctgtctgggggaaccccaagggcctgtggtttcacaagaagcaatcctcctcattttcacagcgatcgtttttcctctcctctcgccactgtgatcaaattaggaggctgcttctcctaggagaaaatgtgtccatggtcccaggaggcactgcccatttacctgtctgatgggtttggggagggaaagcaggatgtatgtgtgtgtgtgtgtgtgtgtgtgtgtgtgtgtgtgtgtcccttccttcccttgtccctgggagtgtctctcccacctggattggccacccggcctgcagcaaggaccccagggagggcaggcgct

SEQ ID NO: 1157 - DNA, 4041 bp, Homo sapiens
ggctaaaatggccaaagaagagagaaaactctctcctctgagagattcagatacatatatattccaagagacttggggagttattggaaaacaattatgcttatctgcttcctgccagtctgtattccttgacagagcggaagtacttatagatactgcagacacactgtggcactaagtaaagtgtttgaaattatactgcttaataatgcttcctgtctcggccctctgcagacccagagagctgatctgggccagcaggtaactgtaggggcatgggaatgtggttggcataagtttctcacttgggcgattttctttcccaggggaactcattccagccacaaaagagggaaaaaatgttaagagttgatcctaatttggtttctgctgaatgtttagcacgtcattcacacaggtgtctttgcagagtaagcctctgtattttatttgagaatttttatagtttgcctcgtaggagccaaaagcagggtaagcactgtagattagaatcaattcaacagagggaaaataaacctttggaatagattttgccttccctgagcacgtcgcaggcattagcaaataatgggagccctgtctgcgcatggagaggaagcatctaccacttagactcccagcctcgggtgtgcggtcctatgacctgcacagcgggtgtgatgattctggagtcatcatctcctaactttatgctgctatgcacagaagaaacatgcacacacacatgcacacacatacacacacacacgcccacatgcaatgttctttccttgcggaagaaagaaatgggagggactgaggaggggaggtctcctgactgtgagctgctggatagtacacagccaaccctgatgagagtggccaagaccttcagagcatggaagggagttgactccatttgccctttgtggtgctgtgccatctttgctaggctacagttgccgtttgctagctgtctccaaattcagaggttctaaagaggtaaaggggaggttcaagaccttttaggttattttagtacactctgtgtgactatcaatacaacttttcaaacacatagagaggcatcagaaaaaaaaattaagccaatccattaaaagagtgctggaattgccatccaaaatggcttatgtgctgtttctatgtatatgtgtgccctgatgcatttcatttcttaagtttaagacaaggatgaatgaagtaccagtgtaaaaataggaaagcacatccttcccctcctctcaccagtataaattacaaaggagatgacactttcaccatctgatgagtctacctttgctgctgtatttcctcttcagtagaaattccagataacaccactgacttttactcagagtatcttgaacagctatttatagttttcacctatccttcccagaggcctcactagactgagagaaaagggcttgtctgggtcctggcccagctcaaccaccctctagtgttgtgaccttgggcaagccacctctacaagcctcattcctcaatcctatagatcgggccaggggggatcaccaaggtctttctctgctcagagctctcccagagctccaacgatgtggtctacagcatgaggcacgctaagaccataaaaaatcatctctgcaatccagaagctcattttaaagggaaggaactttgcaatataagtgttttgtttcagttctgcgattcagctgcttgaaagactgaaatggcaaagaaaaattgacaaaatgcaagccactaacaagtttgaggaagctggccagagtgctgaagtcagctgctgttcacaacagacatcagaccttgtggctacaaagctcaaacaaaagcagcgcctacaccctgctggtcagcaatagtaccccaggacagaggcagccgagagttctcagcaagttccaggcgtatggcattaggcatcaggcatgtaaacagctgctggaatttcagagtacattgcattcaatagttcccagacctgttggagccatatttagcttaggaaagcttggaaagagtgcagtgccatttgaatgactattaatagcttcggggggccgggggagcgggggttggagcaaagaaaagatttcttcagttcggtatcttgtatgtattcatgaaggaaaaacttcctccgtgttaaaagacttgggtgtaggggtctgatgagccttctgaaatcaggaatcaccagttctcgttgggaagacaactctacttacagtttaaactaaatgatttgagcttcccaggtgcctaactaagcaacttcttccctacaatccctctcctcagcaatttatttcacacagattatatcaatctgtttctttgttgctatgtaatgtaataatgattctcaaaatcctcagtttatccaaaacttaaacacttgcaccagcactgtttcccacatcaacccactggtgcccacgcttacgaagagacagcaaataaggggtgcctttgggaagcctgcccttgttctggggaagcaggaacgcccccctgcccatattgtctcagtcaaggcagccatccacacaattcctttctttagcccgaggttcaacttgcctattaacatagacaacacttcactgaagctgaagtataagaaattttctacttgatgtgttttatatcctattattttccttgcacatcacatgcctctctgaggggcacaggagaatgtgtctggggaaaggttttggggagggttcccaccatttaaaagggagagagagactgactcataaaggaatccgtcggaaccctctgctctccccggaggtcctgactcccaagagcgagctctctcttgctccagaaacttcttttgcagccacgaactccttgccagcctctctaggatagccatgtgtctggctatctgcagtgctgctgtgtgtcaccatggcttggggcttcctcaccatggctgggggcaggattgataggtttccccgtccagtctttctgctgttcattatttgtgggggaggctgcaggcagggcaaaccttaattagctccaagtgtgagtgggtcaaatcaattactactgcactctcccaaacaacatcactacaaccatgatttcgctcatttccactagatgggagaagtcagaattgcccattgtgcacacagactattcacagcaataaagaaaagtgagtgaagtatatacaagctcccaagtgggggaatttcaaaggcagggggagcctgcctccatggtgctgatggggactattggtttccctaagagagtctcttcatggtcccctaaagctagagagtgtatccaaattctcaagagacagcgtgtggtcacagataaagtatttccaaggagaggtggaggcaatgtctctcttggccctctgggctcctggaagtggcaggtaatctacacccacagtctggacattcctaacgtgtccctagatgaaccccagaggattcttgagcgtctttaaaatagacttggcagctcataccccagggctgggttccccggtggcaagcctgccctgattctctgggcatggcagaggcaggcaccaaaacaactcaaatacctggaggagaagcgagcaccgtctcaatgctcattctttctcaacaccacctacagccatttccagaaacagctgctggcagtggcccaaacaaagcccctcaaaaagaaactgggcagtgagatgagggggcaagatgagggaaataagcaacccagacacacaaacagcttccctttgagagaagacaggggagggtggtgaccccaagtgatgcaagcagaggaggctcccgtcactcccgctctgtgtttggctgaggttagaagagccactttcagaaccacctcctcttgcaagccccagtttcactaataagccgttgaccttgagtttgagtctggggttgatttgcggctctgtctgggggaaccccaagggcctgtggtttcacaagaagcaatcctcctcattttcac

SEQ ID NO: 1158 - DNA, 4030 bp, Homo sapiens
tactgggctgtcctgtaggcaggagactttgtatgctctggatctggctgaggtttgagctgtcactgcctgtctctctgtctctgtttctctctctggtgctttggatgtcccctgctgctcctctggtactcatgaggatcactttctcctctagctcttgggttctcagatgaagggtgacgggagcactaactattctctcctgagaagtcgtctccctacactccagctgtctgaccctcttacccctcacggcgcatgaggggctcaggaggcatgatgccaggttctgggcatttcctctagaaatttgcatgttacctggcccctgctttggtgtccatgttcctcatgtcttagtgccttgcctgtatttgcaatgagaagctggttgtgtttcaaatgggtacctctctgcctttcacaaagggcccatgcagggaggcacccaagccagtgtattgagatggggtgcgagcagtgggccaggggaggctgtgtggttgggtgtgggggtcccagggctgctgcccacccgctgggctgttgggcagagtttgctgagtgcccagcaagcagcctcttctctgcacagccccaagtagctgggcagtgcccactttgtggctcattcctgggcttggtggaggtggtgtaaatcccaccatctcctcttctagagggctggccttggtaagatgctcacactttctgggcctcagtgtcctcatctgtaaactaggcatgatcatagttcacacttcacttggcatcatgggagtgaatcaaggtgagctggcgaggggccagctcccaggaggtagatggtggccatgatcatggtgatgtgcgcactgagaccctgggatcccccttggctggtccccaacccatctgtcacagacaagacaccacagcaattccaattttgcaacagagtttattgaggtgcccccccgtgggcctggccctgcccctcattcctctttctcgtctccatgggtgatgatgtagcacagtgacttgtagtcgatgttccccgccaggtccatgggtgtcagggcgaacatctgctccacctgcaggggacactggtgagtggcagtcccctggctcctggcccagcccggcagagacctcacctgagtcctgtggcctttctgtctgccccctgcatctgtgctttttgccttagcttttcaaccctagaccccagactctgggttaatgtttttctcttggctgactctgggcagagtgaggagtcagtgcaaatgtgggccaagaggcaaaggacgcccctccagccacaggcacaggcccaccccgagtgtacgaaacctctccctatccacttccccccaggtctgtgcacagtctccctgcctggcgcaccctgccctcttttctgactccacatctttaccctctaggtctcaacagagatggcacctcctccagaagggccctcggctcacccttccagcaactgcctcactggtactgggctctgggtcatgggtgaaggcccagagaaggtgctggggatgagtattgaaggggctgggcagcctcacctcagctggagagaacttgtctgcctgggtcaggagaagctgcttgaacctggggggtgaggagggtctgagcaggagactgcgggggagtgactgcacagggaaggtgggtacggaggctcccatggcgcagggaagggttggctgcaccccaaagagcagtgtaaggccccgaagcacaggcagcccccctcactaggggcctcaccccgctctctgcttccaccacggtgctcctcatctggctgggcccatacttactcatccttgttcaccacccctttgccgctggggtcaaacatgcggaaggcactcaggatggcttcctcggggtctgtccctggaaggccgaggcagccaggtgagcatccatgtctccagcatcccaggtcccccgcaggaggaactgggctgcatgaggagcctcccacatcccagaagaggtgggggtattccctaacataaaatgtttctcggggatcagtggggctgggaatggtcatcctcctgaggcgggcagcttggctgggagactggaatttgggggtgggggctgaaggcacatttcctggctccaagtcagcactggggtgaccagtgcacatgggattctggggcagaggatgtgcttggaatgggtcatggccaggaagagtccaggtgggtccaggtggggttcagttagggttcaggtggggttcatgtaaggttcaggtggggttcaggcagggttcaggtggggttcaggcagggtgcaggctccctgcctggccaagggtgcccagctctgtcccaggctcaccattgagcttctccccaaagagcgtgaggaagacggtgaagttgatggggcccttgccctcttgcagcatggcgtccagctcctcctctgggacactcaccttccctggtgggggtggggcatgaggtgcacacagggaccctgggtgtcccccagaaggcccaggccgccctccctccatcctggccacaggggctggaggggcagaggcagctgtgggtcgggaaggtgaagtggaagcaaggcgtgacaaggggggaagggcagtgtgaggagacggggaggaggggaagcaggggagcagagtcctgtccccccagccactcccacccgcccagcagctcagagtagggaccccagtgcgcagggtgggaggtgggtgcacgcacccagctgggagtaggtctccctcaggtctgccttgcagatgatgccatcacgattctggtcgatacagctgaaggcctgtgggatgggggccttcaggtgggagcagcccccagctctagggaaggtgggaggtgggggagagacctgggtggtgtgagaggcaaggtcagggtagaaggggggtatgtatgtggggtggggtgggggggccaggatgggatctgaggctactgggagtgggcactcacttctttgaactcctgtatctgggcttgttcaaacatggaaaagacgttggaagaaccacgttgggcctgcttggtggctgccaccttgccccgggtccccgccttcctgctggcctgcaacactgtgagtagggaggggtcctctccccaactcctcagagtctccccaccccacccatcatgcacagtcccagagcattcccaggagagccagggccaggatcctcttcctctccctggggaccaccctcaacccaacacaagcacagaaaactctgctcccccagcccaaaggccagcacctgggagaccgctagcctttcttccccagcaggcactcaccattctctctgcagaggtgtggctgctgtcgtggtggcagggcccagcctcctttatgtctcagccttatcacctgaaggtccaaataaggagaggaacagaggataggcccaaacttggcagcccccgcctgggctgggggaggcctaacagattccagccacattcctgatgaccttcatgtcctcaacgtgtaacatcctgctgtctatccatcctggcagggccagacacaatgtctgcctggagcagagcaggctcaaagctctcaccaccctaggtcctgatgaagggatccagttactcctgtatctgaccacccctccttgccagtccagccagaaccctggccagtgcaagaagacagctggtgagggccagtccagggcccccgccaggcatgggagggcagtgtgtagttctgaggatggtctgtggcctgagacccccggggcttcccagaggttttggtgaccctaggctctgaccttttgcccctctgaccaaggggcagaaggcatccctgagctagctgtgaccccaagaagaacactttgcttggctttggggcaattccagagggttaaggagctccatcagctgccctcccatgcagtctaccttgctcccagtctgccctgctgtttggagccttgccttcctcaagc

SEQ ID NO: 1159 - DNA, 4030 bp, Homo sapiens
acagcaattccaattttgcaacagagtttattgaggtgcccccccgtgggcctggccctgcccctcattcctctttctcgtctccatgggtgatgatgtagcacagtgacttgtagtcgatgttccccgccaggtccatgggtgtcagggcgaacatctgctccacctgcaggggacactggtgagtggcagtcccctggctcctggcccagcccggcagagacctcacctgagtcctgtggcctttctgtctgccccctgcatctgtgctttttgccttagcttttcaaccctagaccccagactctgggttaatgtttttctcttggctgactctgggcagagtgaggagtcagtgcaaatgtgggccaagaggcaaaggacgcccctccagccacaggcacaggcccaccccgagtgtacgaaacctctccctatccacttccccccaggtctgtgcacagtctccctgcctggcgcaccctgccctcttttctgactccacatctttaccctctaggtctcaacagagatggcacctcctccagaagggccctcggctcacccttccagcaactgcctcactggtactgggctctgggtcatgggtgaaggcccagagaaggtgctggggatgagtattgaaggggctgggcagcctcacctcagctggagagaacttgtctgcctgggtcaggagaagctgcttgaacctggggggtgaggagggtctgagcaggagactgcgggggagtgactgcacagggaaggtgggtacggaggctcccatggcgcagggaagggttggctgcaccccaaagagcagtgtaaggccccgaagcacaggcagcccccctcactaggggcctcaccccgctctctgcttccaccacggtgctcctcatctggctgggcccatacttactcatccttgttcaccacccctttgccgctggggtcaaacatgcggaaggcactcaggatggcttcctcggggtctgtccctggaaggccgaggcagccaggtgagcatccatgtctccagcatcccaggtcccccgcaggaggaactgggctgcatgaggagcctcccacatcccagaagaggtgggggtattccctaacataaaatgtttctcggggatcagtggggctgggaatggtcatcctcctgaggcgggcagcttggctgggagactggaatttgggggtgggggctgaaggcacatttcctggctccaagtcagcactggggtgaccagtgcacatgggattctggggcagaggatgtgcttggaatgggtcatggccaggaagagtccaggtgggtccaggtggggttcagttagggttcaggtggggttcatgtaaggttcaggtggggttcaggcagggttcaggtggggttcaggcagggtgcaggctccctgcctggccaagggtgcccagctctgtcccaggctcaccattgagcttctccccaaagagcgtgaggaagacggtgaagttgatggggcccttgccctcttgcagcatggcgtccagctcctcctctgggacactcaccttccctggtgggggtggggcatgaggtgcacacagggaccctgggtgtcccccagaaggcccaggccgccctccctccatcctggccacaggggctggaggggcagaggcagctgtgggtcgggaaggtgaagtggaagcaaggcgtgacaaggggggaagggcagtgtgaggagacggggaggaggggaagcaggggagcagagtcctgtccccccagccactcccacccgcccagcagctcagagtagggaccccagtgcgcagggtgggaggtgggtgcacgcacccagctgggagtaggtctccctcaggtctgccttgcagatgatgccatcacgattctggtcgatacagctgaaggcctgtgggatgggggccttcaggtgggagcagcccccagctctagggaaggtgggaggtgggggagagacctgggtggtgtgagaggcaaggtcagggtagaaggggggtatgtatgtggggtggggtgggggggccaggatgggatctgaggctactgggagtgggcactcacttctttgaactcctgtatctgggcttgttcaaacatggaaaagacgttggaagaaccacgttgggcctgcttggtggctgccaccttgccccgggtccccgccttcctgctggcctgcaacactgtgagtagggaggggtcctctccccaactcctcagagtctccccaccccacccatcatgcacagtcccagagcattcccaggagagccagggccaggatcctcttcctctccctggggaccaccctcaacccaacacaagcacagaaaactctgctcccccagcccaaaggccagcacctgggagaccgctagcctttcttccccagcaggcactcaccattctctctgcagaggtgtggctgctgtcgtggtggcagggcccagcctcctttatgtctcagccttatcacctgaaggtccaaataaggagaggaacagaggataggcccaaacttggcagcccccgcctgggctgggggaggcctaacagattccagccacattcctgatgaccttcatgtcctcaacgtgtaacatcctgctgtctatccatcctggcagggccagacacaatgtctgcctggagcagagcaggctcaaagctctcaccaccctaggtcctgatgaagggatccagttactcctgtatctgaccacccctccttgccagtccagccagaaccctggccagtgcaagaagacagctggtgagggccagtccagggcccccgccaggcatgggagggcagtgtgtagttctgaggatggtctgtggcctgagacccccggggcttcccagaggttttggtgaccctaggctctgaccttttgcccctctgaccaaggggcagaaggcatccctgagctagctgtgaccccaagaagaacactttgcttggctttggggcaattccagagggttaaggagctccatcagctgccctcccatgcagtctaccttgctcccagtctgccctgctgtttggagccttgccttcctcaagcctcatctcaaccacactacttcagaatgctctccctaacatcctcagcagggagcttctggggcacatttcccatttgcctggtggctgatgtgtttgtcattcctggcttctgtgcccctcctgagcaccccacctggttgacatctgtatccccagaaggcctggtgcacagtgggccgatgggcaggcctgcgtgatgctgttccagagaagcagtctcgccagcttctggggccgagggcacagcagaggggctggggaaacaggggacatcctggaggcagcaggagtgggccaccccaggctgggctcactggctgctgcccctccactggagccagacctatgtctgtcagtagctggctggtagagtgcaggagctcttatctgtcagacccaataccctttttatataacaagagttttcttttaaatttcttaaattcccttttttttttttgagacagagtctcactctcgcacaggctggagtgcagtggcgcgatctcagctcactgccacctctgcctcccgggttcaagccattcttgttcctcagcctcccaagcagctgggattataggcatgtgccaccacacccagctaatttttatatatattttttattttattttatttttagtaaagacggggttttatcatgttggccagccggtctcgaactcctgatcttaggtgatctgcctgcttcagcctcccaaagtgctaggattacaggtgtaagccactgagctctgtcacccaggctggagtgcagtggcatgagtagagctcactgcagacaacctcctgggctcaagtgctccttcctgcctcagcctctggagtagttgggactacaggtgcacaccaccctgcccagtgttttttttttctttttttaattaattaat

SEQ ID NO: 1160 - DNA, 4045 bp, Homo sapiens
tagcacagtgacttgtagtcgatgttccccgccaggtccatgggtgtcagggcgaacatctgctccacctgcaggggacactggtgagtggcagtcccctggctcctggcccagcccggcagagacctcacctgagtcctgtggcctttctgtctgccccctgcatctgtgctttttgccttagcttttcaaccctagaccccagactctgggttaatgtttttctcttggctgactctgggcagagtgaggagtcagtgcaaatgtgggccaagaggcaaaggacgcccctccagccacaggcacaggcccaccccgagtgtacgaaacctctccctatccacttccccccaggtctgtgcacagtctccctgcctggcgcaccctgccctcttttctgactccacatctttaccctctaggtctcaacagagatggcacctcctccagaagggccctcggctcacccttccagcaactgcctcactggtactgggctctgggtcatgggtgaaggcccagagaaggtgctggggatgagtattgaaggggctgggcagcctcacctcagctggagagaacttgtctgcctgggtcaggagaagctgcttgaacctggggggtgaggagggtctgagcaggagactgcgggggagtgactgcacagggaaggtgggtacggaggctcccatggcgcagggaagggttggctgcaccccaaagagcagtgtaaggccccgaagcacaggcagcccccctcactaggggcctcaccccgctctctgcttccaccacggtgctcctcatctggctgggcccatacttactcatccttgttcaccacccctttgccgctggggtcaaacatgcggaaggcactcaggatggcttcctcggggtctgtccctggaaggccgaggcagccaggtgagcatccatgtctccagcatcccaggtcccccgcaggaggaactgggctgcatgaggagcctcccacatcccagaagaggtgggggtattccctaacataaaatgtttctcggggatcagtggggctgggaatggtcatcctcctgaggcgggcagcttggctgggagactggaatttgggggtgggggctgaaggcacatttcctggctccaagtcagcactggggtgaccagtgcacatgggattctggggcagaggatgtgcttggaatgggtcatggccaggaagagtccaggtgggtccaggtggggttcagttagggttcaggtggggttcatgtaaggttcaggtggggttcaggcagggttcaggtggggttcaggcagggtgcaggctccctgcctggccaagggtgcccagctctgtcccaggctcaccattgagcttctccccaaagagcgtgaggaagacggtgaagttgatggggcccttgccctcttgcagcatggcgtccagctcctcctctgggacactcaccttccctggtgggggtggggcatgaggtgcacacagggaccctgggtgtcccccagaaggcccaggccgccctccctccatcctggccacaggggctggaggggcagaggcagctgtgggtcgggaaggtgaagtggaagcaaggcgtgacaaggggggaagggcagtgtgaggagacggggaggaggggaagcaggggagcagagtcctgtccccccagccactcccacccgcccagcagctcagagtagggaccccagtgcgcagggtgggaggtgggtgcacgcacccagctgggagtaggtctccctcaggtctgccttgcagatgatgccatcacgattctggtcgatacagctgaaggcctgtgggatgggggccttcaggtgggagcagcccccagctctagggaaggtgggaggtgggggagagacctgggtggtgtgagaggcaaggtcagggtagaaggggggtatgtatgtggggtggggtgggggggccaggatgggatctgaggctactgggagtgggcactcacttctttgaactcctgtatctgggcttgttcaaacatggaaaagacgttggaagaaccacgttgggcctgcttggtggctgccaccttgccccgggtccccgccttcctgctggcctgcaacactgtgagtagggaggggtcctctccccaactcctcagagtctccccaccccacccatcatgcacagtcccagagcattcccaggagagccagggccaggatcctcttcctctccctggggaccaccctcaacccaacacaagcacagaaaactctgctcccccagcccaaaggccagcacctgggagaccgctagcctttcttccccagcaggcactcaccattctctctgcagaggtgtggctgctgtcgtggtggcagggcccagcctcctttatgtctcagccttatcacctgaaggtccaaataaggagaggaacagaggataggcccaaacttggcagcccccgcctgggctgggggaggcctaacagattccagccacattcctgatgaccttcatgtcctcaacgtgtaacatcctgctgtctatccatcctggcagggccagacacaatgtctgcctggagcagagcaggctcaaagctctcaccaccctaggtcctgatgaagggatccagttactcctgtatctgaccacccctccttgccagtccagccagaaccctggccagtgcaagaagacagctggtgagggccagtccagggcccccgccaggcatgggagggcagtgtgtagttctgaggatggtctgtggcctgagacccccggggcttcccagaggttttggtgaccctaggctctgaccttttgcccctctgaccaaggggcagaaggcatccctgagctagctgtgaccccaagaagaacactttgcttggctttggggcaattccagagggttaaggagctccatcagctgccctcccatgcagtctaccttgctcccagtctgccctgctgtttggagccttgccttcctcaagcctcatctcaaccacactacttcagaatgctctccctaacatcctcagcagggagcttctggggcacatttcccatttgcctggtggctgatgtgtttgtcattcctggcttctgtgcccctcctgagcaccccacctggttgacatctgtatccccagaaggcctggtgcacagtgggccgatgggcaggcctgcgtgatgctgttccagagaagcagtctcgccagcttctggggccgagggcacagcagaggggctggggaaacaggggacatcctggaggcagcaggagtgggccaccccaggctgggctcactggctgctgcccctccactggagccagacctatgtctgtcagtagctggctggtagagtgcaggagctcttatctgtcagacccaataccctttttatataacaagagttttcttttaaatttcttaaattcccttttttttttttgagacagagtctcactctcgcacaggctggagtgcagtggcgcgatctcagctcactgccacctctgcctcccgggttcaagccattcttgttcctcagcctcccaagcagctgggattataggcatgtgccaccacacccagctaatttttatatatattttttattttattttatttttagtaaagacggggttttatcatgttggccagccggtctcgaactcctgatcttaggtgatctgcctgcttcagcctcccaaagtgctaggattacaggtgtaagccactgagctctgtcacccaggctggagtgcagtggcatgagtagagctcactgcagacaacctcctgggctcaagtgctccttcctgcctcagcctctggagtagttgggactacaggtgcacaccaccctgcccagtgttttttttttctttttttaattaattaattcatttttgagacagagtttcgctctgttgcccaggctggagtgcagtggtgcaatctctgctcactgcaacctccgcctcctgggttcaagcaattcttctgcctcagcctc

SEQ ID NO: 1161 - DNA, 4047 bp, Homo sapiens
aggcatgtgccaccacacccagctaatttttatatatattttttattttattttatttttagtaaagacggggttttatcatgttggccagccggtctcgaactcctgatcttaggtgatctgcctgcttcagcctcccaaagtgctaggattacaggtgtaagccactgagctctgtcacccaggctggagtgcagtggcatgagtagagctcactgcagacaacctcctgggctcaagtgctccttcctgcctcagcctctggagtagttgggactacaggtgcacaccaccctgcccagtgttttttttttctttttttaattaattaattcatttttgagacagagtttcgctctgttgcccaggctggagtgcagtggtgcaatctctgctcactgcaacctccgcctcctgggttcaagcaattcttctgcctcagcctcctgagtagctgggattataagcacccgccatcatgcccggctaatttttgtatttttagtagagttggggtttcaccatgttggccaggctgatctcgaactcctgaccttttgatccacctgctttggcttcccaaagtgctgggattacaggcatgagccaccgcgcccagcagtgcccccccgccccacccttttttttttaagagatggggtcttgctatgttgccccaggctggtctcaaattcctggcctcaagcaatcctccacctcagcctctcaaagcactgagattataggcatgagccatcacactggcccataacaagtgttttatgacacctcctttgttatctagaaaagaaattcattttatctatttcaattcagtcatataacctacctacgaatagaattttaataattaatacaatgtcctgaactgtaatataaaggagaaatagaaagcaattgatattaaaatgtgttccactctgtgaatgcttgagcataacagtaatgataacaaaataatcagatgcttgcaccaacttataaggaataatttagactcaagagaactaagaagagccaaagcaattccacatgagaagtagcagaaaacaagaaatctgaagggggacatgacttttcaaaatcacaactttgggttatgatctgaaggaaacaaaacagttgttcctaattagctgggtaatatctctcatcaaaaaaggaatgcatgaaaatcacacaaatatgtttctatgtcactgtattttatgctgcagaaagatggcattatgcctacgcttggctaactctaaataggcgttccactgacaggagcatctggagggaccttagaaatccaacatgtatctgggcccctactcactggcaaacctaagtgactctgactggacaggacggtgctgagactgacctgcagcaggaccagcctcattcccccacttctccagagcagcacctggcctggcactccctctgcacacattccatgggcaggcaagcaggggcccgggccaggcagtgtactgtccactgctctgccatcccccatgacaccccattcctgttcctacagcctggtctgtcactcctcacactccccttggcacagatggctggaggagctgtctggagggcattgccgagatactgaagtgtcttcatgcatgtgacgcagactctttatagattgtccccacagtcctaatgcacagaagtcaaagaacagtggacaggccatgtttaaaacttttaacatttttaattaaaaaacccacacaatcttaggttgggcatggagagggtggcatgtcatatgatggggttgtcccttggggtgtgctgaatgctgcttggggtttcttcctgagccagcgctatgggagctgaagatgtagggctggcccttctcccctttgtgggccccttggggcagaggcttgggggctctgtctcttgcacctgctgcgagggtccatcccagaatcacaagccactcagtgatggtatgggagagaaaaggtctctgggggtattcaaagcttgggacacctcctccatggagccccctcccattgctccctgggcctcttgagcctcaggcaagaaaatggccaggactgggtgatgagcagcccctggctgcccttttggcccaggtctaggtctggtcaagctgttggagctgcctccccacacaggatgagttcccagggaagtgaggccacagcaggatccagagggcaccccttcccagagcctgggcccaggcgaggccaacagctctgacagtgtggaaatgcatcaaagtcctgagtgagcaactcccttctgggaaattgattccagcgagaaaggtggggggcttccagagtctctgttcctgctcctgccgcacccccgttagggccctggggctgtcccaccgaaaaactgagggaagaggcccgctctgttccccagcggtatggcaggcggcctgggtcctgacaaggccaggcctcctgccccgccaggctgcgagcacgtgtggggagcacttccccatggagcctgggtgctgtggggctgtggcatcctccctgcgcttgcggccactgctctcactggcccagcatacaggccttcttacaggccaccgccgagaccagggccgcgccccggccactgccctcctccgactcgatgaaggtgatctcgcagctgggcgtcagcctgcgcacgctggcatggaaccgctccttgaagctgggcagaagagaagcagggctgccgtccctcctcccacctcatcctccacattcattaccgggcgccctgcacgcagtcgacccttcccccaaatctaggccaagggggacgagaagaggactacgaaatcttggagcttgggaaccgcaaggaaccttggagcgcgcgctttttgggccccactttaccagggagagagcggggcgggctcacctggggtgcagcttgtacacggagccatccacgcccacagtgatgcgcattacgtcctcgctgcggctctcgcgcatgcggttgatgacgcccgccagccccgccgagcacatgtgcgcagcgcgcgtagacacgctctcgcaggcgcggcgcacgatgtcgcagtcggtggtcgagggtcgcagccccagcgtgctcaggatgttgtagatctgcttgcggtcgcccgtgtcgctgcggggcgggaggaggtagggcggtcgctgagtgtcgctccgacagtccatccccctccagcggcggcctctcgttctccagggaggggccccggccagccgtccccccagcggcggcctctttccctcgctgagccgggacccctctctggagaaatgggggcgatcccgctcacctcacccagccaaagcgtttccgccagggactggttagtactgccccctctaactaagcccagggtctccgtcctaacgtgggggtgtcaaccatgccgcgccttggggttgtgagtgatgtgagaggatggccacggcgggcagggagcaccgaggggactcacggatggggaccagtgcccggacgcaggctcgctcccatccctgctcttggcatccccgtccggaccccgcctcctccccttgggccctccccctcctccccgtctcgggccccgcccctccctttgcatccccgtcctgtcccagcctcctgcccttggacccgtccctgccccgccctcgcctccagcgcccggcctcgggccccgcccactcccccgccccctgtgccccgccccgggccccgcccacgcccggaatcccgccccaggccctagtttcccatccctgcgccccgggcctgggactcagcgtcgccctgagaccaagtctgcagtgcccgggcgtccccagcccctgccctttgcacccaccctcctcctccgcacacctctccacctgcgacacgaagcgcgtctcgaaggctccgcgtgtgcgcagctgctcggaggcctccccgtggaagagcaggttttcgtccacgagcctgagcagcacaagccgcaccagctcgcccatgtacttgcca

SEQ ID NO: 1162 - DNA, 4055 bp, Homo sapiens
tcactgcagacaacctcctgggctcaagtgctccttcctgcctcagcctctggagtagttgggactacaggtgcacaccaccctgcccagtgttttttttttctttttttaattaattaattcatttttgagacagagtttcgctctgttgcccaggctggagtgcagtggtgcaatctctgctcactgcaacctccgcctcctgggttcaagcaattcttctgcctcagcctcctgagtagctgggattataagcacccgccatcatgcccggctaatttttgtatttttagtagagttggggtttcaccatgttggccaggctgatctcgaactcctgaccttttgatccacctgctttggcttcccaaagtgctgggattacaggcatgagccaccgcgcccagcagtgcccccccgccccacccttttttttttaagagatggggtcttgctatgttgccccaggctggtctcaaattcctggcctcaagcaatcctccacctcagcctctcaaagcactgagattataggcatgagccatcacactggcccataacaagtgttttatgacacctcctttgttatctagaaaagaaattcattttatctatttcaattcagtcatataacctacctacgaatagaattttaataattaatacaatgtcctgaactgtaatataaaggagaaatagaaagcaattgatattaaaatgtgttccactctgtgaatgcttgagcataacagtaatgataacaaaataatcagatgcttgcaccaacttataaggaataatttagactcaagagaactaagaagagccaaagcaattccacatgagaagtagcagaaaacaagaaatctgaagggggacatgacttttcaaaatcacaactttgggttatgatctgaaggaaacaaaacagttgttcctaattagctgggtaatatctctcatcaaaaaaggaatgcatgaaaatcacacaaatatgtttctatgtcactgtattttatgctgcagaaagatggcattatgcctacgcttggctaactctaaataggcgttccactgacaggagcatctggagggaccttagaaatccaacatgtatctgggcccctactcactggcaaacctaagtgactctgactggacaggacggtgctgagactgacctgcagcaggaccagcctcattcccccacttctccagagcagcacctggcctggcactccctctgcacacattccatgggcaggcaagcaggggcccgggccaggcagtgtactgtccactgctctgccatcccccatgacaccccattcctgttcctacagcctggtctgtcactcctcacactccccttggcacagatggctggaggagctgtctggagggcattgccgagatactgaagtgtcttcatgcatgtgacgcagactctttatagattgtccccacagtcctaatgcacagaagtcaaagaacagtggacaggccatgtttaaaacttttaacatttttaattaaaaaacccacacaatcttaggttgggcatggagagggtggcatgtcatatgatggggttgtcccttggggtgtgctgaatgctgcttggggtttcttcctgagccagcgctatgggagctgaagatgtagggctggcccttctcccctttgtgggccccttggggcagaggcttgggggctctgtctcttgcacctgctgcgagggtccatcccagaatcacaagccactcagtgatggtatgggagagaaaaggtctctgggggtattcaaagcttgggacacctcctccatggagccccctcccattgctccctgggcctcttgagcctcaggcaagaaaatggccaggactgggtgatgagcagcccctggctgcccttttggcccaggtctaggtctggtcaagctgttggagctgcctccccacacaggatgagttcccagggaagtgaggccacagcaggatccagagggcaccccttcccagagcctgggcccaggcgaggccaacagctctgacagtgtggaaatgcatcaaagtcctgagtgagcaactcccttctgggaaattgattccagcgagaaaggtggggggcttccagagtctctgttcctgctcctgccgcacccccgttagggccctggggctgtcccaccgaaaaactgagggaagaggcccgctctgttccccagcggtatggcaggcggcctgggtcctgacaaggccaggcctcctgccccgccaggctgcgagcacgtgtggggagcacttccccatggagcctgggtgctgtggggctgtggcatcctccctgcgcttgcggccactgctctcactggcccagcatacaggccttcttacaggccaccgccgagaccagggccgcgccccggccactgccctcctccgactcgatgaaggtgatctcgcagctgggcgtcagcctgcgcacgctggcatggaaccgctccttgaagctgggcagaagagaagcagggctgccgtccctcctcccacctcatcctccacattcattaccgggcgccctgcacgcagtcgacccttcccccaaatctaggccaagggggacgagaagaggactacgaaatcttggagcttgggaaccgcaaggaaccttggagcgcgcgctttttgggccccactttaccagggagagagcggggcgggctcacctggggtgcagcttgtacacggagccatccacgcccacagtgatgcgcattacgtcctcgctgcggctctcgcgcatgcggttgatgacgcccgccagccccgccgagcacatgtgcgcagcgcgcgtagacacgctctcgcaggcgcggcgcacgatgtcgcagtcggtggtcgagggtcgcagccccagcgtgctcaggatgttgtagatctgcttgcggtcgcccgtgtcgctgcggggcgggaggaggtagggcggtcgctgagtgtcgctccgacagtccatccccctccagcggcggcctctcgttctccagggaggggccccggccagccgtccccccagcggcggcctctttccctcgctgagccgggacccctctctggagaaatgggggcgatcccgctcacctcacccagccaaagcgtttccgccagggactggttagtactgccccctctaactaagcccagggtctccgtcctaacgtgggggtgtcaaccatgccgcgccttggggttgtgagtgatgtgagaggatggccacggcgggcagggagcaccgaggggactcacggatggggaccagtgcccggacgcaggctcgctcccatccctgctcttggcatccccgtccggaccccgcctcctccccttgggccctccccctcctccccgtctcgggccccgcccctccctttgcatccccgtcctgtcccagcctcctgcccttggacccgtccctgccccgccctcgcctccagcgcccggcctcgggccccgcccactcccccgccccctgtgccccgccccgggccccgcccacgcccggaatcccgccccaggccctagtttcccatccctgcgccccgggcctgggactcagcgtcgccctgagaccaagtctgcagtgcccgggcgtccccagcccctgccctttgcacccaccctcctcctccgcacacctctccacctgcgacacgaagcgcgtctcgaaggctccgcgtgtgcgcagctgctcggaggcctccccgtggaagagcaggttttcgtccacgagcctgagcagcacaagccgcaccagctcgcccatgtacttgccacctatgagcttctcatacctggacatagggcaggtccattacatcagcaggcacgagggagggcccctcatgcaggtggaagccgggagccggccccactgctccccactgaggtcacgaggcggccacgtggggcactgcgatccccactcccccagctggttcacgtctttccctcgttaatgagccagagctttagaaatgtcagggattaggaacg

SEQ ID NO: 1163 - DNA, 4043 bp, Homo sapiens
cctaattagctgggtaatatctctcatcaaaaaaggaatgcatgaaaatcacacaaatatgtttctatgtcactgtattttatgctgcagaaagatggcattatgcctacgcttggctaactctaaataggcgttccactgacaggagcatctggagggaccttagaaatccaacatgtatctgggcccctactcactggcaaacctaagtgactctgactggacaggacggtgctgagactgacctgcagcaggaccagcctcattcccccacttctccagagcagcacctggcctggcactccctctgcacacattccatgggcaggcaagcaggggcccgggccaggcagtgtactgtccactgctctgccatcccccatgacaccccattcctgttcctacagcctggtctgtcactcctcacactccccttggcacagatggctggaggagctgtctggagggcattgccgagatactgaagtgtcttcatgcatgtgacgcagactctttatagattgtccccacagtcctaatgcacagaagtcaaagaacagtggacaggccatgtttaaaacttttaacatttttaattaaaaaacccacacaatcttaggttgggcatggagagggtggcatgtcatatgatggggttgtcccttggggtgtgctgaatgctgcttggggtttcttcctgagccagcgctatgggagctgaagatgtagggctggcccttctcccctttgtgggccccttggggcagaggcttgggggctctgtctcttgcacctgctgcgagggtccatcccagaatcacaagccactcagtgatggtatgggagagaaaaggtctctgggggtattcaaagcttgggacacctcctccatggagccccctcccattgctccctgggcctcttgagcctcaggcaagaaaatggccaggactgggtgatgagcagcccctggctgcccttttggcccaggtctaggtctggtcaagctgttggagctgcctccccacacaggatgagttcccagggaagtgaggccacagcaggatccagagggcaccccttcccagagcctgggcccaggcgaggccaacagctctgacagtgtggaaatgcatcaaagtcctgagtgagcaactcccttctgggaaattgattccagcgagaaaggtggggggcttccagagtctctgttcctgctcctgccgcacccccgttagggccctggggctgtcccaccgaaaaactgagggaagaggcccgctctgttccccagcggtatggcaggcggcctgggtcctgacaaggccaggcctcctgccccgccaggctgcgagcacgtgtggggagcacttccccatggagcctgggtgctgtggggctgtggcatcctccctgcgcttgcggccactgctctcactggcccagcatacaggccttcttacaggccaccgccgagaccagggccgcgccccggccactgccctcctccgactcgatgaaggtgatctcgcagctgggcgtcagcctgcgcacgctggcatggaaccgctccttgaagctgggcagaagagaagcagggctgccgtccctcctcccacctcatcctccacattcattaccgggcgccctgcacgcagtcgacccttcccccaaatctaggccaagggggacgagaagaggactacgaaatcttggagcttgggaaccgcaaggaaccttggagcgcgcgctttttgggccccactttaccagggagagagcggggcgggctcacctggggtgcagcttgtacacggagccatccacgcccacagtgatgcgcattacgtcctcgctgcggctctcgcgcatgcggttgatgacgcccgccagccccgccgagcacatgtgcgcagcgcgcgtagacacgctctcgcaggcgcggcgcacgatgtcgcagtcggtggtcgagggtcgcagccccagcgtgctcaggatgttgtagatctgcttgcggtcgcccgtgtcgctgcggggcgggaggaggtagggcggtcgctgagtgtcgctccgacagtccatccccctccagcggcggcctctcgttctccagggaggggccccggccagccgtccccccagcggcggcctctttccctcgctgagccgggacccctctctggagaaatgggggcgatcccgctcacctcacccagccaaagcgtttccgccagggactggttagtactgccccctctaactaagcccagggtctccgtcctaacgtgggggtgtcaaccatgccgcgccttggggttgtgagtgatgtgagaggatggccacggcgggcagggagcaccgaggggactcacggatggggaccagtgcccggacgcaggctcgctcccatccctgctcttggcatccccgtccggaccccgcctcctccccttgggccctccccctcctccccgtctcgggccccgcccctccctttgcatccccgtcctgtcccagcctcctgcccttggacccgtccctgccccgccctcgcctccagcgcccggcctcgggccccgcccactcccccgccccctgtgccccgccccgggccccgcccacgcccggaatcccgccccaggccctagtttcccatccctgcgccccgggcctgggactcagcgtcgccctgagaccaagtctgcagtgcccgggcgtccccagcccctgccctttgcacccaccctcctcctccgcacacctctccacctgcgacacgaagcgcgtctcgaaggctccgcgtgtgcgcagctgctcggaggcctccccgtggaagagcaggttttcgtccacgagcctgagcagcacaagccgcaccagctcgcccatgtacttgccacctatgagcttctcatacctggacatagggcaggtccattacatcagcaggcacgagggagggcccctcatgcaggtggaagccgggagccggccccactgctccccactgaggtcacgaggcggccacgtggggcactgcgatccccactcccccagctggttcacgtctttccctcgttaatgagccagagctttagaaatgtcagggattaggaacgtgcacgttcaagtcaatcacgggagcaactttggcctgcccctgggcccactgcagtaaagggaaagacagatagttcaaagaccccatccagtccctccgaaaccttccttgcagggggccctgcgccgagcacgggacctacagcttcagtcttcctttagctgcatccagagctgctgttcattggccagttatggttgggaaaactaagacttggagggttagtgcccagtcagaggcacgcaccatgttgctggcactttcttgcttaatctatgaccttccgtatttaatttaaataaatcgaatactactgacctataataatagaggcctgcgagcggcagagaggacgctaataaagtaattagcataggcctggcacagtaggtggtaaacaagtgatagccatgattaatgatgagctctctgtgggttggtttccaagctgtgactgtcaacccgcagcattccacaaaagactaatattctttctgtgaatgtggccaaatacatactttggggaatgttgggttaaacccaggaaccttgctgggggcgtctcagagcctcctctgcatgcacgatcacctgtcggaaggaaagaggtctgggcttatcacatcacaactgggactaacccttcatctctcacaggggcaggtcatgactgagcagaagggatggagcttacgaacggattgtcagtttgcttttccccagagttgtttaaaaacaagcccattatctgcaatggcccggctcccatctgccgctgcaccagagcggcccagggcctgggttgtgggggaggggggcatccttacagctgctgaccggggtttgcagagctctcgtccaccaggcggtcatactccagcaggaactcgtccagctcgccggagtccccgaaggcgcccca

SEQ ID NO: 1164 - DNA, 4035 bp, Homo sapiens
agggagcaccgaggggactcacggatggggaccagtgcccggacgcaggctcgctcccatccctgctcttggcatccccgtccggaccccgcctcctccccttgggccctccccctcctccccgtctcgggccccgcccctccctttgcatccccgtcctgtcccagcctcctgcccttggacccgtccctgccccgccctcgcctccagcgcccggcctcgggccccgcccactcccccgccccctgtgccccgccccgggccccgcccacgcccggaatcccgccccaggccctagtttcccatccctgcgccccgggcctgggactcagcgtcgccctgagaccaagtctgcagtgcccgggcgtccccagcccctgccctttgcacccaccctcctcctccgcacacctctccacctgcgacacgaagcgcgtctcgaaggctccgcgtgtgcgcagctgctcggaggcctccccgtggaagagcaggttttcgtccacgagcctgagcagcacaagccgcaccagctcgcccatgtacttgccacctatgagcttctcatacctggacatagggcaggtccattacatcagcaggcacgagggagggcccctcatgcaggtggaagccgggagccggccccactgctccccactgaggtcacgaggcggccacgtggggcactgcgatccccactcccccagctggttcacgtctttccctcgttaatgagccagagctttagaaatgtcagggattaggaacgtgcacgttcaagtcaatcacgggagcaactttggcctgcccctgggcccactgcagtaaagggaaagacagatagttcaaagaccccatccagtccctccgaaaccttccttgcagggggccctgcgccgagcacgggacctacagcttcagtcttcctttagctgcatccagagctgctgttcattggccagttatggttgggaaaactaagacttggagggttagtgcccagtcagaggcacgcaccatgttgctggcactttcttgcttaatctatgaccttccgtatttaatttaaataaatcgaatactactgacctataataatagaggcctgcgagcggcagagaggacgctaataaagtaattagcataggcctggcacagtaggtggtaaacaagtgatagccatgattaatgatgagctctctgtgggttggtttccaagctgtgactgtcaacccgcagcattccacaaaagactaatattctttctgtgaatgtggccaaatacatactttggggaatgttgggttaaacccaggaaccttgctgggggcgtctcagagcctcctctgcatgcacgatcacctgtcggaaggaaagaggtctgggcttatcacatcacaactgggactaacccttcatctctcacaggggcaggtcatgactgagcagaagggatggagcttacgaacggattgtcagtttgcttttccccagagttgtttaaaaacaagcccattatctgcaatggcccggctcccatctgccgctgcaccagagcggcccagggcctgggttgtgggggaggggggcatccttacagctgctgaccggggtttgcagagctctcgtccaccaggcggtcatactccagcaggaactcgtccagctcgccggagtccccgaaggcgccccactcggtattgacgcacatgcggccctcgtccccctccaccagctccacattctgcatctcctccatgtagcaggcattgcagcccgtgcctggggtggaggtcggggggactgtcagcgagagctgcactgccccggagtagggcctggttcctgcccacaggagtccctctcccgctcccccatgcctgtctctgctttgtctggaacaatggaaaggcggctctccctggggctggaagacctgggttgcttcagtggccagggacagctttcagggctgtcctctttcctaacaggcaacagtaacaccttccctgcctgttacctaggtggttgggaggactgagagaaacagtgtgtatcaaagaaatggttgtgggacgttatcattttattttgtctatgtacgacccttgttttctggcactgtccatgcacatgtttgagcttctttgtcatgagacatgtttggatggcaacccaaagtgagtaaggcatggtgtgggcccttgggagcagcccagaggctcctgtagacaattccggatatggaattttgtaatttgctggcccctgtgcagagtgacaacatggagtcttttgttcacaagttattaagagtttcaaactgctgacagcagagcctcaagctagcatgactgtgtgggctgcacacccccaaagctgtcagggacagcaactcaaatgctggtcagtcgagctgccacataggaatcagggctcagtgatgcttagacttccagtttttatttatttatttatttatttggagacagagtctcactcactccatcacccaggctggagtgcagtggcgtgatcttggctcactgcaacctctgcctccagggtttaagcaattctcctgcctcagtctcctgagtacctgggattacaggcatgcgccatcacacccagctaatttttgtatttttagtagagacgaggttacaccttgttggccagctagtcttcaaatcctgacctcaagtgacccgcctgccttagcctcccaaagtgttgggattactggcgtgagccaccttgcctggctgccttctagttttttatgaacaaacagaaatccagactttgatgtgaattctcctaattttcagatcttggtaattgttataaacatgtttttaaacactgagcagagtcaagagtggatgtggggcagatgtgagtggtgggtcactccttgccacctctgccccaggaggggttatgcctgggcccagcagctgcagcttggcttggtgggaattcatgtggaagtgtcttggggagccccaggcagttccagaggatagggtggaaagggctggggggatcacagccagggatggctggggctcacgtttagatgctggatttaaagacaacgttccttctgaaaggtgaaaatggaagtaagagaagtatagaaccacacggctgtgcgcacagcagataactgatctgattggattgctcctcagtgaaggctggttataatgacctccggaacttctgagaaaggtccgagttggtgtggaagacccctctgctgggaggggcggactgctgctccctttcctggtacctgccttcactttgggtgggggcaggggcaggggcaggcccgtggaaagaccattcgggtggagatggtaccacttttgcttatcctcttccacttggaccaatctgtccagttggtcaatttaccagataagtgttttaattataatcctgatgggtgaggtggatatgcagctggcataccatctgatgcaggaatgtggcatcatggcgttgaaatgcttcctactgtacacggtgcttccatcttgataccccaagaccacccaggctgtagcaccaggctctgctctgacatcaccggttgttaagtagtttggtcctcaccccacagggcccttgaagcctgttgtacacagggagcctcagcagtctggaaggggcaggggtgcaaggagcccttacccacgatcatgccgacctcgcactgatggtcttcgtagtagcaggagatcatcgtggccaccgtgtcattcaccattgccaccacatccatttcaaagtcctgccaagaagcacagaagctgcagtgctggaagccaaggagaaaggcaggcagtgctggggtgggtggcccagggcagcccccccggcaggtacaggtgccccctcacccctctccgtttgatagcgtctcgcagaagccccacgacattgttcccttctgctcctgaggccttgaagcccttggtccagttgagaaggatgccctgtggggagagataggcctcg

SEQ ID NO: 1165 - DNA, 4037 bp, Homo sapiens
ctcaagggcggggatctgcaggaaagaacctcagtcaagttggggacaggctggggggtgaaggaatggggacagatgaagagggaccaggtcgggcagctgctgccagaagatgggagcaggggacctgcactgaggctggagcagaggcggggagggagggagtgaggctgagctgtgagcagcaggaggtgagaagcctggaggcgccgggctgcagagcaggggcatcttggggcagggtggaagcagggcgtcaggctgtcctaacaatccctgtgcagggatgctgggcgcaggcttggtgaaagcgataagagtctagacttattctgaagggaggtgggaggggctgaggagaggaacagaagggcctgggaagaagaggttccatctgacctgggagttgggttgtgggagttgggatcttggtctgggcatgttaacacatctgccagccaaggggcgatttgttccaagtagcagttggccatgtgaggcccgagttcagaggagagtctggctggagaggtagatgtggagccatcagtacagagacagtccttaaggccactggcctggacatggtcaccagggtgtacaggttggatagcagtgggagaggcggagctggtcaggcagggctgccaggggcaggatgctgtcccttttatgcagtgagcagtgctttgtgaccccacctccagaacgcagtaaaaaaggcaggatgccttctagtgccgcctttggcagatgtggactgaggaactgtctattccagcactgggaggggccggctggtggagctgtgggtccctgaggaaatggccaagggccagggcagtccctgggcagatgctgcaggcctgggggctccagagcccatccgagtgccagatgtccagctgtagcctggccccctccattcctgggccctcaggtggctatgtacacagaagtgagtggccttgggctagtgcccacattctcctgagggacagaatccctgatccaccaacccctggaaatgccatgcagagcccccagagagccagacagccctgggcagccagccagctccccccataaaagccccaggccaggccccggacactggtgtcctgggtcaccgttagctccaggaataagtaccctagaacccctcgagaggctggacactggatagccacagtgaggaggggtggtgggcagagggccagtggcaggcacagctgccctagccaggacccccaaggcccatgtgcctccttccaaggtgccccaagcctgctcgccttccctgcccccagccttagttttggtaatctgcaaaaccaagggccctgccctgggtgctgctctcccagtgcaaagtccctaactttggtgtgacccttaccagagtcaaggctgtctgggcctggctccttgtgacatccatcgccatctctccgaggggctaagaggtagatgctttgggaggcagagatgctcctgcctgctgaggcctagcacatgctgtagccttggagcgtaaggcccgcctgtggcagcaacggctgcttggatggagagctgcctgaggctggcagcccagggcttctgcactgaaagggctcagcctggcggctgctcaaatactctgccccctgccatggggtcagaggcagggcagaaagggagggtaggccatgtgggtaacagttgacagggccacggggacagagccatggggcagccggccacactctgtgaacatggggtagggattgctgcccagcaggagggggtgtgcagagccagcctacccatcttccattcctcagccttgtgcgggcagaaagtcaccaggctgccttggccacagaacacttactgaaatgcccttggacagggagggggtcctaagggggcctggcccgcgctggtgcaggtctggacttgctcttggaggcaaggggatccccagtggattttcatctgcagagaggttcgatttgcatttcatacaatccaggggtctgtatggaacttggggaaggggtggtggaggaaggtggccaactgatcaaaaacaaacaaaaaacaggggtatcattcttaattttgtgactgcaaagtccaggcctcaggcttgctttgggtgcctccatgggcatagaccatgacttccaggctctggcccaggcctctccttgggctcacctgggagtgacatccacatgctatgtacttgctggcacctgccaaagcctgctaaaattagctggagctggcaagtgggtcagggtatggagggtgccttgtcagaatgccaggtctctcgccaatggccagagtgatcactcccaagaaagcccttgatacaattgatccctttcccaatatagagcagagatggcctcatcagatctcatgtgacaggccactgacccccacagcccccagctctgagctactgtttgctcatgggggcagggctcacacccaggtttggagtggcactggggccttctggttcagccaggccaagaagcagccacccagcgagacttgcccttcttctgggccaagcacacagcacaggggaggagaatctaaattcagttctcaagaaaggctgaggatgtgtacaaagcctgaagctgaggcaagtgggccccctttcttggttgactgaactgccagtgccctctctagcctctatttagagcaacaggcatcccctagagttcctttctgggagccacctgctgatattcattggcatccatgaggccagaaagcggcccaacacccctacttccccacaccgtctaattctccgggaccagattctcatgactcatgccagccctcctgggcacccacccttgtcctgtctcagtgcctcttcttcaggataaggggtgacaccaacagtctgtactgcactggagttgagagtcattgtagcaggaacagttcctgctttccaggaattttggaagggcaagactgtccagaacctgtccagagaagaggggccaagaaggggagggcctcagagatgatggctcatggaggatgaccaggacatgcttagagtcttcagtagctcaagggctgtcccgaggaggatggatgaacattgtttctgcttagagctttctaaaaagacagaactgtgcagctgtgggctaggatgtctcagtagatagtgaactccccatttcatggggagagaaagacaagagcagaatcagaagggaccttgctctatgtcccagtggtacccccatttcttagttgctcagggttctgattgacagacatgacttgattttctttttcattcatcaaaagaaaataatatgacaagtttggtgatggatattcaagatgattaattctactatcaaaaaacgagacacaacccacatacccaactacaggaggttggttaaataaattatgctacacttacatgtagtcattaaaaatggtaagattcatctgctctattggcatggaaagatgttcatgacatactgttgaaagggaatgtgtagccgcccttgaagctggccttcaattagccctgcttctggtattcaccccatggtatagtctcttccatgcagaataggtctagcctgtgtaactaatatgataatgcagaaatggtggagtatgactttggagcctaagccagaaaagaccctgtggtttctgccttgttctctcctggactgttccctctgggggaagccaactgctatgctatgaggttgcctacaagaactctgggaagatccattgagaagaagcgaagtctcttgccaatacgcaactccaacttgccagccatgtgagtggaccactttggaagcagctcctctggccccagtcaagccttcaggtgatgcagccccagccaaaaccctgacctcaggagagacaccaagccagaccacccagctaagctgcttctgaattcttgacctacagaaactgtgtgagataacaaaggtttgttgtttcaagctactatggtt

SEQ ID NO: 1166 - DNA, 4045 bp, Homo sapiens
ttaaaaactagtgtgtttgaaaatcccaagtgcaaaagtgttgaaaggtgggacctgtgagtggtaattaggtcatgaaggctctgccttcaagaatgaattaattttgttattgagggagtaggtttgttataaaagtgaaagtgggccccctcttgttttctcatgttctcttacccttccaccttccaccaagggatgacagcaagaaggacctccccacatgccagtcccttgatctcaagacttccctgactcctgaactacaagaaataaaatgtgttctttaaaaattacccaatctgtggtattctgttacagcagcacaaaacagactaacactgttaccaacaaatacgtaattccattaaaacatatattcaaacaacttcttaaaggtatagaactttgagaccagaaggtatcctggagacatacttgtctaaagcgaagaagacaatattgcgacaagcagccatccaaaaagatgaaaagcgagaaagccatggtctttccgatgacagactcaaaagggctgagcagcacctattcaaatggtgagacaattctagagtgctgaatcctatccgcctcccagggacacgatcccgagggatactacaaaacaaatgtaaatatgaacatgagttcaagttagtaatcaaaatacttaagttagtatctgaaaggtacaagtttcctaacaaaatgagtacattatctcaagcgttttaaaaagcgttttaatgcagctaaacacctgaggaaaatgcatttccagacttgcactcccagagtatggagattaacaagggaagatatatatgtgtacatatgtatatatcttcaggactgtaagaatttcccagtactgtgaaattaaaatttaaaacaaaaacaaaaacactctaccttgaaatttccagatttaaaggactgtaacccttagctcgaaatttactttgtgtttcggaactctctggagtgttaaggctcgtgtgttttctttgcgggtgtttttttaacgactcagtgggctggctccaagtttgtgaagatcctgttaattacctcctgcatttaccaccgaccaaggatgggaggcacgcggcacttgctgagcatatgtagctttacagggaagggagacgagcaaagatcactgaaaactgcaaccgaaaccctcagaaattccagctctcccctcttccctccggtcccttcgacaatccatttggtgacctgacacgtcatccatacactcccaagagtgccttcgggaacccctctccccactacccaaccagagagacagccccacgcccggcaagacgcaactccgggccacggagggcgccgcccggacagcccggccgggtcagggggcttcgccgccgagcaccctccggcagccgccctcgggcctccgcggccgggcgggagggcgcctccccgaccacacttcggccgcttggcacccacagccgggagggcgtgaggaaggactcggtctaactccggggaaccctcggagttccggcgcagacacccgagggggtgtcctgggaactccttcgcccgcgacacccgttcttctccgtctcccgaccaccagcgacgcagcagggcggctgccggcccggcccggcccgccttgcgggctgtgcgcggcgcagctcttcctccgcggggccgtgaaggccaccggccgcccccgcgcgcccagctgcccggccccgccgcctaagccgccgcgttgctggcgggtagccgcgggcctccggtgcgcgggccccggcgcgtccccgagcgcgcgcctggccgcggccccgcgcgagttgcactaactttccggggcgggggaggggtgggcgccgcgggcccggctcccaggccttacctgtgctcaagttgtcgttgattttcaaaggcacccgcaggatgtagaccaggaatagcacgatgaagaaccacacggtccacagatacgtccaagaccaaactatgcaggacttgagctgctccagaaagcccgtggccgcttcagccatgtttcagcgctcctctctgctgccgcggctcttggtgtctgccgggatgattcaccggcccggaggcgcagctcgcgccgccgccgccgccgcggcccgggcgcccccggagcccgcccgccgccggggacgcgggctcggcgggaaatcgcgcgggccgcgggcgcgccggcttttccttctccagccttattgctaactctctaaaggtccctacaagtggctttcgtggagcgatcacgtggcccctgccccctcgcgttctgggtccatttatatttattatgctaatatttagaaagagaaggccaagtggcgcgccgaaggaaacgcctcaggcagttacaacccgcataagttgagcgtttaccacacgccaggcgctgctccacgatccgtacaatctcatttaacccctgcaacaattccccactacgatcctctttctataggtagggaaactgaggctcacagcagctgcgtagtttaccttaaggtggaaccaaaattcaattgcagtggtgtattctggggtccgaggtcttaaaccctactctgctcccttatcaggattcaggctcagggaatgaataaacccgggacagctaggagaagggaggaggtgcgctcctgtcgccggctagtaggcctgaagataaatcactctattcagcaagatttgggtggcagatgctatttacctttgttctgtctctttgaagcagcgcagggattttccagagaaatcttgacagatgaatgtttatcctccaggttttttggtgatcagaggtcaaactattctcagcctgtttttaatataaacaattctctgggataattttgactgtgaaacggccacctctaacagaaagtccattttaaacattgttttgttgtttttgttttgttttgactgtgctgaataaaatgtttcttttattctaaaatgttttctcagctgaaattttcaagtctgtttctgtccgtaagtgatttgactttctatgtattagatggtaatgaggaaattgcaggttttccagtctacatctatttttaaaattctgagcataaagaatattttattataaattgttttgcttacttgtataatagtttccttcataattaaataagctcctttaacttttcacatatagggcctattacggcatacataatggatggaactactcttaaatttttactaattccagcctctctcggctactgtttcttcctcacatttgatctactacagtgagatccaggccagaataagtgaaattggcacacatagactttctttatagttatttatggcagcacatgaccaaatgatttttgtgtctaacactgatacatggaatctcagtaaaataaaacaatattgtcaccagtaaaggatcgtgactgcaggttgtccaggttcttggcgttttgaacaaagaattggacaaaacacccagagaagcgacaaaagaacgaaagcagggatttattgaaaacgaaagtacactctacattgtgggagcgggcggagcagcggctcaaaggccgaatacagaatcttcttgggtccaaatacccccaagaagtttccctttggcaactcatgctcatctcacgtaaatgaagtggtagcccgcaatcagtctgactggttgcagaaagcagccaaccagaggctgaaatgaagatacaaaggtaacactcctgtgcaaacatctgattggttgcaaaaaacaaccaatcagaggctgggatgtacttaatgaagttatgcttctatgcaaacgaagactcgcccacagtctgattagttgtggacaacaaccattcagaggctggagtgaagttacaaagttgcaaatgaagattggacccgcagtcagtctgattggttacagacagccaatttcccatctactaggcagaaaaggtcaaaggtagcctctggtccttttgttacttaggcgtggaaagttagg

SEQ ID NO: 1167 - DNA, 4042 bp, Homo sapiens
taggaagtgttcggactcagataaactacaggtgtctaacttgcagatgactcatctggcctccatgacaacaaaagtgaagaatttttaaggtgatcaggaatatgaatgctgggcgtggtggctcatggctataatcccagcactttgggaggcgaggcgggcatatcatttgaggccaggaattggagacgagcctggccaacatggcgaaactccgtctctactaaaaatgcaaaaattcgccgggagttgtgatgggtacctgtaatcccagttactcgggaggctgaggcaggggaattgcttgaatccaggagccggaggttgcagtgagccgagatcgcagcactgcactccagcccatgcgacagagtgagactctgtctccaaaaaaaaaaaaaaaaagagaaacaaaagaaaaagaaaaaaggaatatgagcatgataaatataataaagttacatttagtaaagcatactttgaatggagcatggtgtatgaagaaaagcagtgagtatcaagccagaaacatgcagtggcgctcacggtagaaggcctaggatattaggtttaggtgtctctatttcatttgctaggcaatagaaagacattaaagaatttgcaagcaatatcccagcatataggatagattaggagagattagaggcaggaagaccagttgggagattactgtaataagattataagtgttgaaataaaggcagaagtaggaagcaaagagagattaaggcaatacaaagttaatgggatttagtaacttaacgtatataaaggaaagaaaagatgaagactattaagagccttgaagagaaattgcactctgttaaaaggaagagatagagctagtaacctatgccttagtgaaaatatacaacaggcaattgaaaatgcaaacctggaagttgggagaggacagaaaggagaaagatctcactttcatttacacaagcttattgaaagatacagcataagacaagaagactgctgtaaatggaatcttgagaaatgcctcttgttaggaaaagagacagtgaaacaaaaaaatatttcaatgagtcagagaaaatgtcttctgctagttatttttccatttgtccctccccttccactttccctgctgcttgccctaggcttctggttgggttcagccaatgaaagaccccaacaggggattaatagggtgggagaaaaataggcacagagcgttttctccaggctcccaatgcacagattggctatgtctctccactgaaggccacagcctttccacatggctgcctccccaggttttagagctgtgcccaaggatggtcatggctcccttctgctgcttactccagggtactgtgctatcctttgttaccaataaaacattctttattattatcctgccaatacctctgtaaatagccttttattaaattttcttcagttgccaatttgaatgcatgatttgggccaggcgcagtggctcacacctgtaatcttagcactttgggaggccaaggcaggcagatcacctgagctcaggagtttgagactagcctgggcaacatagcaaaactctgtctctactaaaaatacaaaaaattagctggacctggtggtgcatgcctgtagtcccagctactcggaggctgaggcacgagaatcgcttgaacctgggagctgtaggtttgcagtgagccaagattatgccactgcactccagtctgggcaacagagaaagactgtctctagatagatagattagatagatagatagatagatagaatgtatgatatgtttcctgctacgaccttcatttgaatatagtgccctatctttgtcagtcataataatctccataatgtatattgaagcatttaatttatcccactatccctaaacaaagttctagtcaacagccttttctagaatgtaattggtccattctatctttgatctcctctgttgtctttcaagattctggattctaagataccagaagtagaatacatcctctccaaatcctgtggaagctggtgcctcctgggaaaaggaaatcgggggatatcagaaaacttcacacctgcaagtcaggaagcaacttctttcttatctggtaagagagacattgttccacagacactggcctggccttcctcaactatggttcttctctgaaaatgtcatgtaagtctccatgttttaccaaaagatatgaggctggccagaaggatatgaggctggcccatggaatgattcagccaagctcagctgagcagatgagaatgagaatggtaaaagctccactgaccaggcacaggagagagaactgaggagagaagtgagaaatgagaagtagaagccagaggagggctctggaaatgttactggggttatgaattgtatctcctttaagaaataacagtatagaaagaaattccttttcaatttttattgttttttcaggtatggcctgtgcttctttaaaaataccaccactcggccgggcgcggtggctcacgcctgtaatcccagaactttgggaggccaaggccggacgaatcatgaggtcaagagatcgagaccatcctgaccaacatggtgaaactctgtctctactaaagatacaaaaaaattagctgggcgtggtggcacatgcctgtagtcccacctacttgggaggctgaggcaggagaattgcttgaacctgggaggcagagggtgcaatgagccaagatcgtgccactgcactccagcctggcaaaacagtgaaaccttgtctcaaaataaaaaaatatataaaaacataaaaaaatactaccactcttggactgatctgtctgatcccagcacaaattagattatatttacaaggcagaagctctgtgggtgcctttcttccttcccacccctccctcacttgaatgcagctctccagcaagacctgcctccacattagaggagtgccaataaacaggaagcattcttcccagagaaacataccagaaatccatttattgaaacccacaacatctgcattttttgcagtacagtcacacttttgaaagagtagtttggaatataatgcctacaccttacttacttagtggggtcaataaaattagattattacatggaaagaaaattacgaatgcatcatatacacagaatcagaatgttagaacagggcccttggagaacagagtctagacattttaatggtcctcagaatatctgacattacttaagcaaaagaaaaacaaattaattaattggtagccaaagtgagcaactgattataactatcataatctcagattccaaatttttattttcatcacaaaaagcctccttattctaactgactttagagtggaggctaaaactaatcttttaaaatgaatagatagtattttgaaagacctatataattggaaatgaaaattaaaataacaatgtcatttaacactcatcaaactagcaagaatgttgaagttgggtaacatcaagactagtgaagatgttgagaaacaggagtttgcatctattactggtgaggtatataatggtacaaccatgtggtaaactgaatcattattcataattcttcacaccctccctgtactagaattctaatccacatcattgccagataactttgcagtaccattcactagaatatacagaatatatagccctacctcacggatgttgggcttggccttgtgacaagctggggtccatgaaatgtgagcaaaaatgacagcaagtcagttctatgtatggcccacatgaggttttacatatttccacttggcttcttttgcttctgccactttccatgaggaaaacatgtcctaggtaactgttagtccaagagaatgagagacatggagcagacctgaacccaacctcaatccaacctgcagactggagctcagtgcctgaagtccagaatcctgcccagctaatttttgttgcaatctacccacaggttgacagggaaaaataaatacttactatatgaag

SEQ ID NO: 1168 - DNA, 4030 bp, Homo sapiens
taccagctaacctcagtcaaacacaattaattattcctaacttcatgaaagaagggactatgtctcatctctgtagccccatgtgaggcacgttgaatttgcttgttgaatttgttcagaaagtaaaacaaaaattgctttatattttttgatgtcaccatacttcaaatgatgcatactctgagttgtatgtgatgttgactatccactactagtacatttgagtgtgaaatgtctgctaagcttttctgttcatattgaaaaatcaagaggaaattatgtgggcctacaggttgcttaattatcttgatacttctaacaaattcatgaactagcctaggtccaatttcgcacacatttcaaaaatacgaataccatattacccacattaattcttcccatctcatcatttttttagtaaatatcttatacttaggacttgggaatgctatgggtaaacaaagtgatccaaacttttaaattttcatcaaatcctaccctaaattttacccttaaaaacatctcatcaacaaggtgaacatgagtatcaataccactatacaattctcaaaggtcaacaagatgtgttttaccccaaattatgtaactttatataggagagcctcacaaatatatggacaagcaccatctagtggtagaaagaattactctggataaacagttaccattgatggtacagctaaattacctgccaaaatccaaatcatgggcagttcttatacaggacccaatttttttaacaaatttaataatcacgtcatgactaaatcaagggtaatgccagttttagggtaaatattaagtctgaatggtcatgagaacagtccagattgagctgttttaacatccttgcatgaatcttaaacccatagtagaggaaagcaaatgcctatattgagcactgactctgcacatgtgttgggcatatttacatatgttgtatctcatttaaccctcacaggaacagggtaagaaagttattaaaatccccactgtacaaatgagaaaactgaccctcacgtattaaataatgtatcctaagtcatacagacattaagtgatagagtcatctcctcatctaccccaccccctgccatctattactgggtccttgggaaaaaattaagtaatacaatagaagaagtgcacagaaactcactgagcacttagtttagggcacacgtaaccgaccccaacatggaaaagagagatgcgctattgtataacagataatcccacagactttaggattaaccagactgctgccatcttaaaagaaaacagagcctgtattagtctattttctgttgctcataatagaatacctgaaactaggtaatttataaagaaaaggaatttatttcttgcagttatggaggctgagaagtctcagattgacaggccagatctggggatgtttaaagactatcacaacaagggagtcctttataaattattcagcccaatttcaaaagtttctcttctttctcagacagatagacacacacacacacacacacacacacacacagctgacataaatacgtgcaaactggagctagcattcaaactgctgctttccaatagacatgctctttgtggcaaggtttgcaaggtttcttcaaggccttacatcttcacataatttgatcgatatcaccttaagaaccaaaggatgtgacaaatagatgagagcttagcttaatgaaagaggacatgactttggaaccaagaatgagaccaaaaactttaagtatgtagtaactgattaatatattatttggattttcttaaaggtagcaagaaagagaaaggggtgagaggagaatcaatcataaaggtgggcccacctcctctttgtcttccccttcctacatagttctaaagtcataggtggggccaagcgaggtaggtatctatgcttgggtgaagacagacagtgggggttggtagcggcactgagactcagcaaggtgaggacagcatcgatgcatgcggcagccctgcttagggtgtcatggcccaagcagagaaaggagggtataagaacagggggcaggctgcatgtggtgtcagagcccagtgtgtataaggaggcatcccctaggggaagggggatggatgtagaggatattgggtgctggagcccagacaactgagcaaggcctctgaggaggatgctcagcatgtggtttcaaaacccaagcatgtgatatcagagccagagtgaggtgaggggggatattaagagatactggttacatacagatgggttaagcaaataagtaaatatattaaggataatgggacccacatttctgattttcaggaaatgaacaaatatgaaaagaaggaaacagagagattagatgaggatctgcgatatcaatatgaacttataatttcaagagagatagataagaactagatataaaaacaatatacgtggctgggcgtggtggctcacacctgtaatcccagcactttgggaggccaaggtgggcagatcacctgaggtcaagagttcaagaccagcttggccaatatgatgaaaccacatctctactcaaaatacaaaattagccaggcgtggtggcatatgcctgtaatcccagctacttgggaggctcaggcaggagaatcgcttgaacctgggaggcggaggttgcagtgagctgagactgcaccattgcactccagcctgggcaacaagagtgaaactccatctcaaaaacaaaaaatatatatatacatgtaaaagtgcatagatctatatatgaatatatacatatattcccttactctcccctgagaggactgggaacagcaactcctcaatggcaacaagtataccttgtgcccagatcttggcttctaaatatttttctccactaaaatgaaaaagggatcctcagagaaactgctgattccaagaatggaacaggaaaagtgcaagatgagactgggacatcttagaaagtaatcaagtcctccaagaataatagggacatgtcaaaaggatagagaagttagcttgaaggggctcccatgggccaaatctaggacaatttgagtattaaaataatgttagtaaaaataggctatatcccactgaatacaacagaaaagcaggagtctacactggtttaaagaagtaaatggggaggccgaggcaggcggatcacctgaagttgggagttcgagaccagcctgaccgacatggagaaaccccatctccactaaaaatacaaaattagccgggcgtgatggtgcatgcccgtaatcctagctactcaggaagctgaggcaggagaatcacttgaacctgggaggcggagggtgcagtgagccaagattgcaccatagaactccagcctaggcaacaagagcaaaagtctatctcaaaaaacaaaacaaaacaaaacaaaaaagaagtaaaaagaagaagcagcagcagcagcagcagcagaagtaaatgaatacagtcatgcaccacataacaacatatctgtcaatgacagaccacgttaaacagtgcaagattatataccaaaagattaaagtggaactgaaaggttcctatcacctaatgatgttgcagccattgtaacactgtagcacaactaattactcactttgtaacctactgccaagattatataccaaaagattaaaatggaactgaaagattcctatcacctaatgattttgcagccattataacactgtagcacaaataattactcacttttgtaacctactgcagcttccaattaaataaagtatagcacatataattatgtacagtacagtacacttgaaaaggataataaatgactatattcctggtttatgtatttactacacttttatcattattttagagtgtactcctacttagctcactgtaaaacagcttcaagcaggtccttcaggaggtattccagaaaggagggattgtcattaagcaacacatgactgtacattaagcgtctgataaagaatttac

SEQ ID NO: 1169 - DNA, 4047 bp, Homo sapiens
tgtcctttgaacaactcaaaaccccttcctatgaaacattttcttaaaaaagtccttcagtacaccacaaggaaaagatatacacattcgtcaggtatggtggctcacgctctaatgctagcactttgggaggctgaggcaggaggatcacttgagcccaggaggtcaagactagcctgggcaacatggcgaaacccccatctctcccaaagttatacaaaaattagccaggcatggccaggcgcagtggctcacgcttgtaatcccagccctttgggtggatcacctgaggtcaggagttcaagaccagcctgttcaacatggtgaaaccccatctttactaaaaatacaaaaattagccaggtgtggtggtgtgcgcctgtagtcccagctactcaggaggctgaggcaggagaattgcttgaacccaggagtcagaggttgcaatgtgccaagattgggccactgcactctagcctgggcgacagagtgagactgtgtctcagaaaaataaagaaaaattagccaggtatggtggtgcacacctatagtcttagctacttgggaggctgagatggaaagatcacttgggcccaggtggggctcatgacactgcactctagcctgggcgacagagtaagaccttgtctcaaaaaaaaaataataataatacacacattctaaaaaactaattcaggcttggcgtggtggctcacgcctgtaatcccagcactttgggaggctgaggcaggtggatcacctgagggcaggagttcgagaccagcctggccaacatggtgaaaacctgtctctactaaaaatacaaaaaattagctgggcacggttgtgggtgcctgtaatcccagctactcaggaggctgaagcagaagaattgcttgaacctgggaggcagagttagcagtgagccgagattggcccttgcactccagcctgggcaactagagcaaaaactccatctcaaaaaaaaaaaaaaaaaaaaaaaaaaggaaaaaaaattcagtagatgcatctaatttcatgttgtcttaatcatataaaatcataaacagattttgttattattaatttgcataatttcttcattcagtggttcatagtgaagagattctgcctttaacacacatacatacaaacacacacacacacacacacacacacagcctcaactacaatccttaggaggttaccagagattctatatatctgatcaatttgaaacagattgcattgaaaatatatcatgctattaactggaggtaattaatgaaacttttaaacacaacaaatgctgtgtaaaaataataatattgtattagaaccttgaaatcctaaaataatgggtcttagttcatctccagttaaaattacttagacaaacgttagtgtttaagagtgtatattcataaggctgggcatggtgttgcattctcacagtctcagctactcgagaggctgaggtaggaggatcatttaagcctaggagatcaagaccaacctggacagcacagagagacctgtctctaaaaaatatataaaataaataaagtattttattttattttactttatttgagacagagtcttgctctgtcgcccaggctggagtacagtggcgcgacctcggctcactgcaacctccacatcccaggttcaagcaattctcctgcctcagcctcccgagtagctgggactataggcatgcaccaccatgcccagctacatttttttgtatttttagtagagatggggtttcaccattgttggccaggatggtcttgatctcttgacctcgtgatccgtccgcctcagcctcccaaagtgttgggattacaggcgtgagccaccacgcctggccaataaaacattttaaaaagaaagtatgttcataacacataatgtcttgtccatgtactttcccatgtacttttattatattttgtctgtagacaaaatagacatcagattatctttgtggaacaacaaaaggatcctgccattactatggtattggagggaagaataagaaaaatcagccacttttttttaaatataccccctgtaatgatattaatgcaattatcaatctatcacccataattacaaaaaaagataataacactaaactgtatcaaaaatgttctctggttacaatgacaattacataagatataccttcttccaaggttggcccaggaacaacctcaaaggtttgtaagctctgttgacagcctgcagtgattgcttctgaaagtatcattgcctgatcctgcaattttatcaccttactaactactagtcctttctgcagctcacacagacataaaccccctttttccagctcatttatcaagtgaaaggttccttcccatgaaaatggacacctgagctccagggaccataatagaaaacagcaggaaaaccactcaactatacttagtattggtagttttcttttctatgtttttttcaggcaaaaggtagactttaaatttggaaatatacaaatacatacattcttctacataatactacaagtagtttaatttgtcttttaaagtggaggcaggcgaatactacttaggtgaggtttcagttgacgatgattagacctcctgctttcttcccttcatcggcagcacagcagtttttaaatcatctacatggatttttgtgcacatgagataaggtgccggtttcactgctgctgctcaaaacaaatgtcaatggctttttcagtgttatccaaccacaacattaaaatgttctactaattgtctggtgctcaaaaagcatcttagattcacaatgccataggctacaatacagaaaaacatccagaagcttcagagaatgtctaccagatgtctgggtttttcagagaagaaataattctttgagttctggaatttctaaattttaataactcttaccatcaaaaagatccagcaatacttctcaatgagggtgttattggtattttaggcaggataatattacagtcaatatccctggcctcccaggtattatggccagtagcactaacaagtcattgcaacaaggcaaagcccacacccacatttccacatggcagtactgccacgcaaccttcatatgtatttccctgcgatcttaagtcacacaaagctctgaaaaagcttctcctaataatgcaattactttgatagactacagaagtaactggagatgcaaataaagatgatgtgggatataggcctaacctctaaacaggctctcgaacaagctgcttcaaagtctcaaagatcactttgctttttggtcacttgtttctcccctcataaaggtattaaatacctcataaaggtattaaagttatctcaaagcctgtgctattcaatatggtagccactagctataaatggctaaatttaaattaattaaaattaaatattcacttcctcagtcacactagccacatgagctcaacagacactgtattacaggacatttccattattgcagaaagttctattggacaacgctgctctaaaaacttcctaagcatatgacctgccaccaactcattgccattttgagggtagtttgcagcaaagacagaattcttcagtgtcagtaacagaaagtacttacacagtccacggttcatctccaaacactttttgatatttggctttaaaagaaaattctaggctgggcgcagtggctcacgcctgtaatcccagcactttgggaggctgaggtgggtggatcacgaggtcaggagatcgagaccatcctggctaacacggtgaaaccccatctctactaaaaaatacaaaaaattagctgggcgtggtggcaggcacctgtagtcccagctacttgggaggctgaggcaggagaatggcgtgaacccaggagatgaagcttgcagtgagctgagattgcgccactgcactccagtctgggtgacacagcgagactctgtctcaaaaaaaaaaaaaaaaaaaagaaagaaaattctaggcacaagcaaaattaaaaaca

SEQ ID NO: 1170 - DNA, 4041 bp, Homo sapiens
tcgttaaaagagaaaggtcatcagagaaagaaaaaaaatcacagaaaattgcaggaattaataaaaatgtataccttcaaaaacagtcacatcgacaaccaagggggaatatcaataatgatgttgaaatgtaactgtaggaagtgggaaaggataatacagttcaaaagggtggaaccttaaagccagaatattatcttacataagatctattttaaattgcatatgagatgttgtcacataaatagtcactcaaatagtggatggatgtggccgtcagaaaggcaagagggaaaagagaatgagaaaatggcccctgggttagagatattttcaaacagaggccatggtctacatgtaataactgctttgccgactcatttatgttgctccttttgttggctcatacatgagagggtgtgtatatgtgtatgaaaatgcatttttctgagggcctatatttacttcttggcacaggcttctaagagttaaaggctgtgatttttttaagtctactttttagacaactgtaacaggatcagtatgctaaaaacatcaggcatctcacttgccaggaaaaccggacacaaatcacaccctctgactcctatgaagatttctgttatgtggaggcctgaggcatttctaaccactttagaacgtttggatccacattgttgaagacccatctttgaccaaaatgattccaaaagtttagttcattccagttctctcctctagtcagctcagagaaggaacacaaagtttaatatgttgtctaaagaaaatgtaatgaagaaaaatgaaggatgaataaaactgatctgatatcccttactaacccccctccaaaaaaaaagtcatataatacaatccaaacccaaagtgatctttggcttaaccactctgtctgaatacccctgcctgcaaccttgcccttccttcacagtaaagacagtgctgttaatttctagataaagttagcaacgaaaggaaggaaaacattcaaagtagtttagtggtcaaaataataatcattaaatgagaatgctattgacaaagaacaattatagcgaaaatcttaaagtcagtcaacagtcacttttaaaggaaagcctatcaagcattcactcaacaactattttctgggagcttactgttctacactctaggcatcagccatgaacagagtccctcccctatgaagcttgtatcttagtgagtgagacagagaaacaaacacgtgacgtgtcaagtgatggtatatgtgatgaacaaagataaagaggaattagaggataaggagtaattgcatgagaaggttattttaggtaaaattatcaggaaaggccactctaaaaaggtgacatttcaacaagacctgaaaaaaccacatggttagcctgaaaaccacgtggaaggaagagtgtttcatgcaaaggccttaatagaagtgttttgggccccttaaattattttaataataaatctgttcttgaatcatcaaatatcagttttgaaagatatccccttcagtgctataatgatgccattagtacaaaagtgattgtgctgaaagcaaaataaatgctcttttctaatacaaaaaaatcactctgccatgaactgaaaacatgagttgttctcttcaaagtttaatagattaaatatagctatctttgcaatgaatgtgtaaatgtttataaaaatcactatgaaagacaacattcaaaagggcttctcaccacatcagacaggtaatttaattaatgtatttattaatgtggtaagaacttaaaccatatttttttctctacagcacacacaactaaatttgaaagtgtcatgtgaatttccttaaagtcacctcctttgttcacactaaagttcttagtttcttaggattctcttgatgtctatttagaatgttaaggctgtacatcttaaactatcaattatacatatataaagtattacttaagaacaacaaatgttttaatggcaatatacaaactatagaaaatgaaagaattcttcaatgatggtgttctttgtgggaggaggtacaaatttataactaaaagcatactcatagtaaagctctgtggtaggattttacaaatttgatttctctgcatatggctaaaatgtgttccttcctgcttcaatgtagtaccacacataaagcgaaccttctaaaaaggtgggtgcattttatttcagagccctggaacaaaaattctggcatgctaatcttatgaggaaaagaaaatcaaaatgcacacacaagacacagatacaggtatacttgctttaaagaaaccctaacatagaatactaaagatttataaaacaaatcttttggggcaattaattgctttaaaatgttttatcttcaaaaagtatctaccacagaagtcctttaaatagcaagctcctaaaagctatattttaaatgagcaatttcacaaaacttttatttgcacactgtaattaactgtcttgccaaagatccacctacagttataatttatagatactgtgtaagtagagttcaatccggatgcacactggaatttatattacactgggtatgaaaagtggcctctctctgccctagaaaaaaaattttccaattcttcgttctttagtttaaaagcaatctgtcagcaaacaatgtcgccattccccaaaagttcaaatttagggcaatataattctgaattgggtgcacaaattttgggcaaagactcatgtccctacctgatcactgcttcacctcccacccacacctttaccctaccagatgtaagggaatcgcccacttactcatcaagtaaccaccacccatggttaatctaaccttatttctaaacatgtaccaatttaccattcagtgaaactagagattgagaaacaagtctatgcaatttaaaaaaggaaaaggttagaaaggtcagaaaaggtcagaaaaatctgggcacatttatactcagaaaatttaggataaaaactgaaattctccaattcacttcattacattaacaccatctaaaagagcaatacacaagcacaaaaccaccaccacaataacagaaactctctgtagactgtgtacatattttattccctgtgtggaataatctgaactcagatgtttgtactttaaatcctctggcctaagaggggagaaatgtggattaactatgggttggagtttaagtccatttaagtatgatccaactgaaatggaagaaacaacaaaggtatgtctcagaaattcccttaagcacttatcctaaattaatcacaatttggataaaacaaattcatacaatactcaggaataaactgatgcacaatatttttaaagtactcacacaatcaatgtagtttttaaaatataaattcaaaatattatttttaaagtaattctacataactggaaaatatttaacatttaattttacctgtataatccataatgaagcagtaagcaggaaactgagtattttccaagtacaactctatcagccagaaaatgaaacggctccctggactgacgaaccgttctggggaagcctcctgccatgtgacatgaagcacacccacacttctgcttatctctctcaagcggcaacggctgggctctgctctcctttgcctggtcttttaaagtcgtccttagaaatgtctctcagaaaataactgttatttactcccatttccctcctgtattaattattaggttaaaactaaattttggttttaggttaaaactctaaataagagaaaaaataaattattttattcctgtaagtgaaaaggacacaagatatccatacttcttcctagtactcaatgatatgaaagaagccacataacctgaaaggaatcagcgtccaaatttttgtctcaattttgtcattacattcattcatttgatagtacatatgcatattttatccatttgtccatttgaaatacatttgactaatgtgaaaacaaacctaataaaggtgatgcaagaacagtccttta

SEQ ID NO: 1171 - DNA, 4047 bp, Homo sapiens
tatatatatataatcaaattaagaactccaaatatacattttaattatcaccttcctcaacaaaacttgatagtactttcttcttacacctaaagtattctgaccacagaaactaaaactgtatatcttcaaagcagttaaagagcagacacgctactcccatttttagacatgggaaactttagtaaaggaaaagctcagtgaaatacatcaagatggtaataaacggagttacagaagctatacttcctgctttgtgatgattagtctacacatactatagaacacccatttcaaagtgagcccaaaatagactgactgtggccaatctgcacaactgtgggagattcagattcactaagtcaaagagatgagactagtatcattggagatattgatgaaagcagtgtcaggcataaaagagcatttattaattctattgccatagctgtgtaagtctttaactttgaagaactagcgtttactcttccacataatttttttggtattttaaaggctttttttgtctgttttttttggtgaggaagggtgcaagtatttaaaacaatattatttcagtaagacagaatgtattataatgtgatatccaggctactgcaaatttctgacctcaaaggtctgaaacataaaatcaacttaatcaatacaatatttgaaaatgaagacatttccttctcttacaggcaaagagcaagggggagataaagaaagtttaaaagagccacttacaacatgaatctatggcatcagaagtcagaatagtggttaccttttcatgaagaggggaaataatattgactgggaaaggccacaagagaacttccaggggaaatggaaatgttctgtattttgagctgagtagagttctatgggtataaacatgggcaaaaattcactgagctgcacacctagacttaagcattttactgcatgtaaatcatacctcaatttaaaaagtaaaagcatcctatacaagtaaggcactgcaaccataatcaagggtaagaatcacgaaatcagaataagttagaaaaaaattaacccttaccaggatctaccacagtactgtatacagaatagatagttaaacaagtatttcttacgataatttagtaagaacaccctagatggtttgggagatcccttttgaactaattggaatttcaaatgtgactattttcctgaatattttaagtacagtttcaaacctaaaaaatagcctccaaaaggttgacatcaaaggccaagaaagctatgtctcagaacacaaagaaaatacacttgtcctaacactgaatgcagacttagggaatcttcttttattattattattatactttaagttctggggtacatgtgcagaatgtgcaggtttgttacataggtatacacgtgccaaagaaggcaattcattttcaacacgatatccactgacagtacgaatctacctataagcaagaaacagagcttaacactcacgaaagacaaaaaatgctaaaaacctgtatgatagtattctgtcttctgaaggatattctattctcttcagtaatttagcagctatggagggcacaagcaaccagcagttttcacacataccatacagcgcataggtgatattatcaaaagatcaggtttgatgatcaggaaaggctatgtgtctgcttggtaacactgagcagacaatgttagagtccctagtccaagaaccaaagacttctgcactgagttttaacttccatttttggctaaaccaagtaacaggtctaattttcctttagtatataattatttctgtccatacctaggctcctgcataaacaaaattccatgactgaaatgaaactggatggtctttgacacttagtgatttatttctatttcttagataaccaattctaaatgtaccattaagtgaattaaaaaattatgcctaaattattaggaaataatactgtcacatgctgaatgggacattacctgtcactattattctaacacaactttgattaggcaatgtggtagtctgagatgagaagcttctacagtgaaacaaaagtaattaacctttttaaaaagccaatcaagaaacaaaagaactgaggattattagctctctcgaaatgctactattctgtaataatcagctatgcacaaacagtcacactgatcacctgagatcaaaaaacaaaggtcaaattacaagttcgtaagaaatcagtttcctaaattcctcccctaaaccccttctccctagcaaagatagtggcttgccaatatttaatgctctagccagcaggttgaaagtctctttagaaattcttatctcttagaaattcttaactgtcatttttgctaatagacaatgacaaaatattctgcagagcctgtacaactgcattgacgttatatttctatatcaacattaaataatcctcacatagtttggttgtaatttttaaaatatccattgtagctgtctacaactgctgtcctgcctagcccattgtgcagggccttctctgcaccaaagcaatttcattgtataagtttttaaaaagatatgatcctgctggactgtgatgctagccagcatatcaaaattgaagccactgtgggaaaaaaaaaaatccatcctcaaaaataaagcgatttcttactcattctgaatctacctataatgtctatgtttttgtgaaaatatggaagagtatataatgataactatttatctctttagatgaaaaaatgtaagcctttctttcctttctaataaacactatcatctcagatcctcccagtatctattttaaggtttaagcaccattacggagcctacaacaatagatcagtgacaggcctgatcccatcaattaacacattctagggtggctgtatggattctggttttcctacctccctcttacaggcctggttttgacacattgacatccctggccttaaggatgaataacccagttaaggggagttccttccctgagaccaattcctttgtaattagagccaaaatacaaaggttgttaatgacctaaggcaaagtgatatgaactctaagccaatgaaaccatgacagcaagcagatttctaaatagcagagaagtgggatccatttacttacatgaagattcagtgccaaacatggctggctccagaggctgctttttaaaaattagaagaaagaaaagggaaaaaaaaaagaaagaaaagcgaggagagtgtacatgtgagagtgaagagatgagccggctacacagcaggggtcatgaagccagacaatgcagtccaagctgtgtccagctgccagattctcctgttacgagcttcagttttctcccggtgtgattgaaatgcaaggtctcttaacagcaccaaaaaccgaagagctgcttttgaaaatccactaggcaaatgaaggccgacgtgcctcttctgggatgcggtgaggctggactaggtagcagcaggggcaggactgggagcagcagcaacagcggatactgcaatccccagccctgctgtagcagtaagacaatagcagggcttatgcatacgctggatgacgtcagggacactgcacagaccgactgcgctgcttgagccagaggctccaggggctccaggagagcagcgtgattgaaaggggaattcctttgtcacaaaatgcacaagaccgagagccacgtatacactcccctcctgcgcagctcttcatcccatgataccaggcagtaaaagaggactcaaagaaatttaaatattggctttatagcaattaaccacaaagacatcatgcatatcagtcttcttggttttgcgcagcatatagaaagaacttttcaagggaattaagaatatcagaaatgagaaacattatctgtctttagaagtaattacagaagagttcattgttatcttctcaaagcttatggtagattgacagatcaaggattgtacactcaatcacaagtatgtgaaaatatgtatactattacacatatattctag

SEQ ID NO: 1172 - DNA, 4047 bp, Homo sapiens
attgaatttcatatcacagtgagtaaaagattagtaagctaccacctttaatcaaacaatactgactctgatctccatgagagcacatgtgctacaattagaatgagctccctgcttaggggctgaaaaagtataagatagggtacctgctggcaaaattaccatctattatggactgaattgcattcctccaaaattcttacgttgaagctgtagcccctaatgtgatggtatttggagatggggcctttgggaggcaattagaattagatgaggtcatgagagaagcgcccaagggaccctcataatgggattagtgccctcataagaagagactccagaggacttgctgtcttcctctctccctctctcccacctttcccccctcaccctgtgaagacactgcaagaaagtggccttctgcaagccagaaagaaagaccttgtaccagggaaccaagtcagctggcatcttgatcttgaacttcccaaccttcataactgtgagaaagaaattcctgttgagccacccagcctatgaaattttgttatggcagcctgagcttctgactcatataccatcaaatcagtcacacacaagttatccttttgaatcaggacaatccagaaatataatctgaaaatgtgcttagattcttaagcttcatcctacatattaattttccaagtgacaaccaatataaatattgttccttttctttttctggcacagtaatggctacacatttccttttaatgtcagtgtccctctctattacccttatatatatataatcctccatctttgctatgtctgtggattcagaccttcctttaattactaattcaatttatattcttcccttgtgcctttacagatataaaattcaggccctttggtcttctgaaaagtagaacatttacatctaagtttttcttatcactgagactgggattcagataatttacataaatgttctctgggtttctaattattttacataataaataatttgcatcaaattacttgtaaaaagcatcataaattattcctactacccctcccctaccccaatcaaaagtgtagaaagtgaggttcaaataaatttaagcaggctggccagtgagaagggtgagccaatggacttgaatcttttaagacttgctcttcctgcttccccatttagtgtaggaatccttagagctcaattttgtggttaagactgcaggaaaaaaagccaaatggccaatctgattccccacagcccacacatctcagagacccaaaactccttttaattgtctttaaaatggcaggacctaaaaccccttttaattgtgtttaaaatggcaggacctaaaactccttttaattgtctttaaaatggcaggacctaaaactccttttaattgtctttaaaagggcaggaattggatttattttcccatttatttatgggaaaggcaatattatattttgttttttttgagacagagtctcactctgccgcccaggctggagtgcagtggtgcaatctcagctcactgcaacctccgcctcccaggttcaagcgattgtcctgcctcaacaacctgaatagctgggattacaggcgcccgccaccacacccagctaatttttgtatttttagtagagaccaagtttcaccatgttggccaggctggtctcaaactcctgacatcaggtgatccatccacctcagcctcccaaagtgctaggattacaggtgtaagccactacgcctggccaggcaatattatattaaacattattttatctcatggtaatcacaggattgagaaaaaaattgatatatatgaaaaacattattttaattatttttaaaaccctgcaaactatcattttaatagaattactttattgactattagctttcacacaattttattatccttgaaatcacactgtgggttctattctatttaacattacaccttaaatgtatttgtcaagcatttagtcttcatatttttcattgtaatgacttgataagattgtgccatgttgatgtagcatcacttacataccagttcctcttcaatgaacactgaagttaaacactagggtctgtataagcgaaatgtttctataattacggctttgcagtcatgagttacctgatattctgcttgccttctccacatttcctttacaactgattctgcaactgattctgtagctctcaggcctattttgatctccattacccatagactcttattctttaaccagccagtgtctagccccacccaaggtctgtgtgcctcaggtacccccagactttcccaccaaaagatcccactgcacttgtgtcaactggttatgctgatcaaaccctgtaaaatccagaacaaaattttaaaagctaatcagacaaatcctaaaaatggtggaggtgtaaagtccaaggtcaggaatatattaaaagaaaacaaacaattacttggtatatgagaatttgattttttgagacagggtcttgctctgttgcccagggtgaagtggggtagtgcgatcttggttcactgcagcctcaacctcctgagatcaagcgatcctcccacctcagcctcccaaatagctaggactacaggcacacattaccacacgtagctaattttttttttttttttttttttttttgcagagatgaagtcttactaagtagcaaaggctggtcttgaattcctgggctcaagtgattctcccactttggcctcccaaagtgctgggattacaggcaaaagccaccgtgcctggccaagaatctgatttaatattaagatccacagtacttctgaccagaagcagtatttctgtgaaatatagtctctgagggatgacataattctcaactccagaacaagtttagatctatacctctaaaattagtaggaatttcatatatatccatatatatgccagaaattccatatgttacatacacaaacacattctcacacatacacaagaatgaaactttgccattatttctgtccattctagcatatcaaataggcaaagacatatttcttgccttgaccactattttctttttaaataataacctattcaaaagcagaaattatatctactatttctttttatctttaatttttgtgggtacatagtagatatgtatttataaggtacattagatgttttggtacaggcatgcaatgtgtaataccaggcatcagggtcaatgaggtgtctatcacctccagcatttatcctttgtgttacaaacaatccaattacactcttttagttatttctaaatgtacaattaaattatatttgactatggtcacctcattgtgctggcaaatactaggtctattcactctattttctttttttgtacccattaactatctccacatccccgtgtccccaccttcccaatctctggtaaccatccttctattctctatctccattagttcaactgttttaacttttagctcctacaaataagtgagaacaggcgaagtttctctttctgcgcctggcttatttctcttaatataatgacctgcagttccatccatgttgttgcaaatcacaggctctcattcttttttatggctgaatcgtactccattgtgtatatgtaccacattttctttatccatttatctgtcaatggatacttaggttgcttccaaatcttggctattgtgaatagtgctacaataaataggggagtgcagtatatctgctatttctttgataccatcacacagtagttgttgaagaaatatggccaatctattgacttaaaagctgagtaaaatttttctacattgtgacttctcataaaacacaggatggatatgaaaataggatttataattcttaaatatttccctttttgataattggcttcctcttaagaattatgatgctcaattttaccataatgcactatgaaatcaaagcaaattcaatcttcaagtaaagcagcaccatgtcccttcatgaaaaataagtctccataac

SEQ ID NO: 1173 - DNA, 4043 bp, Homo sapiens
tgacctcgtgatccacctgcctcagcctcccaaggtgctgggattacaggcgttagccaccacgcctggctgaatctcacatttttaaagggcagatattgctgtatgtgaattatatttcaataaagctatttagaaaaaaaaagtcattgctacaggttcatttgttcaatatctatttgttgagggccaactaaataccaggcactggagctacaataatacatagacacggtctatttcccagagtttatagttttgttgaggaaacctgggtttaaaccctggttcaacacttgtgggaatctgggaaagtattttacttcctcatctacaaataaggtttaaaggcaggtgattggcacactggaagggcttgctaaatgttatttctaaatgagtataaaggcaaattataaatgtcaggagagagaaaaaacatgaataaatcaggaggacttagtttaggaagtaggagaatgtatttcttcaggaaatgacatttgggctgaaatctgaaggatcagttggagggagtcaaagaatttaaggaacttgaagacctgcagacaaaggaaagtttaagtgcaaagttcctgaggcaaggaagagtttaaggtatttcaggaaccatggtcagatgatactgagcaagtgagggagaggtaagcaggagccagaacgtgctgggtcttgaagaccaaaataagtactttggattttattctaagtacaatggaaaatcactgacggtttttgaacagaaggatggcatgatctgaattacatttcaaaaagatgactggctgctgagaggtgaggagcatagtacagtcagaaggccactgctgtgctctgaaggaaatataataatgacttggattatgctatcgcagagattctaacaaccttgacagatacacagaaataaaaaggacttgaggcagaattccttcctattctgctctatatatgcagcctgcactggatagaatacaaaaggaagagtgaactggtataaagtgtaccataaaagacttcaggccgggcgcagtggctcacgcctgtaatcccagcaatttgggaggccgaggcaggcagatcacgaggtcaggagatcgagaccatcctggctaacacggtgaaaccccgtctctactaaaaatacaaaaaaattagccgggcatggtggcgggtgcctgtaatcccagctacccgggaggctgaggcgggagaatggcgtgaacccaggaggtggagattgcagtgagcggagatcgtgccactgcactccagcctaggcgatagtgccagactccgtctaaaaaaaaaaaaaaaaaaaaaaagacttgaaccaaaaagccctcaaattcctagttttattcataacttgctatagaatcttggcaaatgcttcctcactgagtctcagttctttatcagtatagttagaataataccttttcctcaaaggttactctaagacttaactgtcttaatatatgtgaaagtgactgcagagttgcaggcagtgtgcttataagtgttagacagtttaagagatacacccaaaggaaaacaatatacacaatgagattagtcatttttccccctttaaggtcaaggtgtgttttgttttaatgaggataaattaagctgcttcaatatacgatggcctgtagagaacacagtggggatccatcaactcctgttccatggcacgcacttcccgggaaactcttaaaatttttgcaggtgaatcctctcctacagacacatctctgggaagcaaacagtattttaagagaaagcttttccttaaagaagcccagaccaggcaatgtacagacctgaagaagaacagtatacatttgctataaaacagctttatgaagcaacaaataagagaattggttttaggagatagtttggcaaagttcatgacaaaattatctgtattacagcattaaaatttgactgaagtaaataaattacagtcaaatttcacctgcaaaccccaacacgttggtcctgctgctggtgaagacaccactatacacatcatagtcaccacttttctgaaggatgtttgtaataagggtacacttgggacttttctcaagttaattaaacagttgtgaaaaaagcaaaatcttttgagactttgctggaagcccctgacagaagcatagggaagtagttttttaattaccttgatatttcattaatgtttttctgacttttcataataattacatcacatttattaaattttttctaagaaagcattaactaaaagaaaagcaaaagaatatatgtttatttacaatatgttaagtaggataatataaaagaaaaaaaacttttcccatgtatattgtcccataaattttaatgtttatcttcaatagaaaaaggtagtagctttttcttgttgaataaaatgccgtattaaaaaaaccaaaggtaataaaatagaaaatgcctttaaataaatgctatattgtgttgtcatagctattatttaattactgaagaaatatgaggaaatctaattatttccctaaatagaaatttaatgttctgaaaattattgtgcttcaaatcatacaagaacactgatacacattagtataagtaatgcctgtcgggaattgctataaatggcacatactggtattaaatttcgtccccaagatgtagtaccaaaggtattttccatgttagtgtatgtttttaaaaattcagctaccttcaaagaagcaagttaactatgcttctataggaagagatataaaaccaagaaaacagcagatggaattattttattttattttattttgagaccgggtcttgctatgttgcccaggctggagtacagtggtacaatctcggctcacttcagcctcaccctcccaggctcagatgatcctcccacttcagcctctcaggtagctgggactacaggtgcatgccaccacacccagctaatttttggattttttgtagagataggctttcaccacagtgcccaggctcgtcttgaactcctggactcaagtcatctgcccatctcagcctcccaaagtgctaggattataggcatgagccactgtgcctggccctgaaatactttatacaaacataaatgcaaaaatctttctccatgtcctatcaattgaaagaaacaaaaatgaacagaaacaaaagctttatcattgtgaaaacatttaatctttgtcctgggcttaaagcaaaaaaagaattggaactatattttataattcacataaaatcatcagtcatattatttaaaaagtcttatcacccagatttctaatttaattctgtctaggacctcaaaaaagaacacagtgaaatacaaaaacaaaagcaaagaaacaaaaaagcaaacaagattctatttccagttttatctttgattttgattatttttctgtctataggacaatatccgtatgcttaaaaaaatcaattctttaaaatatcactattgattaatgagagcatctgcaaaggtcaaaaccaagggatttcttaacattcttttcttctacttgaaagatgtaaaaaactaaaggaaagtttccagcatcctatgctccactgtatctgactatgtagggggattaaggcactaataattccaactaaaatggcagaattaacccattattttggcacagaatagacaaactgagttggtcacaggagtgctagccaagttcaggatgtaccatttttctatccaatgtttgacatacagagtagatgaacataaacattcacttttttcctatgaagaatctacatttaatttaacttacccatgataaactattgtattaatgattatatcttttaaggagacctcataaatttattgtatcttagaaaaatttaacatgtattaaatataatgttccagaaaaggaaaagggaaaaaaataaacacatgaatggcactgctactgctgcttagcattctaacagaccagctcactgaaataaattccatagac

SEQ ID NO: 1174 - DNA, 4038 bp, Homo sapiens
ctatactggaagttataccaaaaaatattacagaaactttaatagtaagatttggaagattacatgctacaaagctgaatacggcaattcgttacttaatgtgctggaacctaataaaagggttcaaaatactcacaataatcaactgtttgaacagataattgttaaatctaaaatgcatggaaataactaagaaatgtaagaagaatattaacaagtataacggaataacatctatattctaaaacatctttcatatatgctctacatttattaatatctaaaatatatttagcttataaaaagtatcatacactgaactagacactgggggcagaaaataacatgataatgagactgatcctacccttgagacaggaaaatgagatggctacacaaataacacagaatatgaaacatctcagaagagaagtacagataaaatctagaggaagtaaacattacttccagctaggagggttagagaaggttaatgaatgggatgtccttccttctgggcttggaaagaaggataagctttgaacatgagattagagaggaaagaagagagagtatggactctaggtagatatcacagcatacataaaggaattggattggaaaacagggcggatgagaagcagtgggagagaatgctggctcaaatgccaagccaagaaaagtggacttcatatagcaggcagaaagaagataccattcataaccagagatgtgacaaagacagacacatctggtagcaatggggtagagtgtgtaaaatgtgcagctgcgggaattatttcagaggggagcgcctataataccaccagagaggggagttgagcatatcagatgttgcagagttaaattcaacaggatgtggctttcccaatgtgacataaagggcgagagtctgggcatgttggtgaagtggggccaaagtcaaatttgaagtgattaaagacagtgaatagtaaggaaattaaggcagccagctcagctacttctacaggcagtctggcagtaaagaggagagcatttatcattaagtgtgacttaagttaaagataaatggcattgaatgagttagtaagtaaattatgaataaaactcatatcttttttctgctgcaagaacaatcagcccttctatgaagtataatactggttcattcttacaccaaacttttaaagatgtatgtatggttaatcattatgaatgtgtctcctttctctgagattcttttttatatatgcctttaagaaaaattaaaacacagagaactttaactggcatgattttgaaactgaccactacacacatatgtatattcctgttttatcagccgagattacatgacaaaataaaaataaatctattttctattctatttattctgatttttacactttttattaatctacttgctttgttttgaaaccctctactaactgaaaactaaatagtttgccttaaaggaagataatatattgagtcagagaagcagctacaggccatggggtagtaaaattcaaatctgatccaaagttaggtttttcttttcattatattctctaacagttcaatgactaatgtacttctcttctgaggaaaatctgccccgcaaaagaaggcctgctgcaagctgcattaagaaggctgtcttcccctgggtgagggtgtgtaacccacggagataagaagccacaggggaaaccaccacacaggccactattttagtattcagctgctccagctgcatggttgtccaaaataagcccttggctttattattttcaattccaataactacgtttggctttgcatttgtacctaaggaccagttatttttccagaaagtacctaaaattatctcctcaggtcctgggctgtgaactccggttaaatcacaaatgcatctggctttacgtaatgtctacgggtaacagtcggtggaaactggagcactgatattttcaaatattggcaagccagtttaaaaaaaaaatctattaaaagatgcatctaaattccaggtgctttttgttaccaaacaaatctcaagctaaattcatccctaataaaaatgctcctagcccatgtaaatggcattttcccctcttaaacatctattcttattatctcaaatagtgtccaaaatggtcatccctcatggtgaataatctattcatctgtaatgcagaaggaaaaagaaagaaatttcatgtttttaattagcaattgtctaacgcctagatccttagaatgcagacaatgtttcttgaggtggatcagtaattggttaaaactcaaggttaatgaagctacagtcctaggtttgaatgagtcagtcaacctcactctaagaaatcctgtgccatgaactcagaaggtacctctggcccagttgtattacaaatgagtattaccactggaaggccaaccatcatgttactatagaaacaaacaaatgtgtatccccaaaatggatggagattgcttttgcttttcaaagttgttttcccaaaacattttttaaaatacagaaaataaaacaaaaaaaagaaagaaaccattcctccctgcccctgctcaagaaagaaaagaaaaaagaaaggaaaagaaaacaagggggagggagaagaagggaagagaggggaggggagaggagggaagtttggttatttgattactagctaggcttaaaattctatgtctattttctctagtttttaatgctttaattaattttttaaatttaatttaattactagttcgtgttgcctttttttctattggaatggcactaatttataaaagctcttagtaagtacgttaatctcttatctgtcataattgatgcaattcttcccttttcttttaatttcctttctgagtttcatttccagaattttaacaaaacactttctacataaaaatcgggaggaaaacattactggaagaaaaacctctatattcaatttgctacaaagtagaatttactggaatgtccctttctatcctctagctatctttcatgcaaaaagccgaaggaacactttgagagtacttgatagcatgcagaaaaacaaaaagaaatcactccattgaacatgtggagtttcacagtgctctaggcaactgtatagcaaatagtcatcgcacacatgcatacagacgctagccataaatattgtttggtaacagaagggagaataagcagagaggcatgtcattacatgagatgacatgactactggtttaaatgtctccccaaaactggaaaacagacagacacaaaacacagaaaccattaaaatgagacatttctcagcttcatcacaggcaaaaccagatacataaatgatgggaatgtaacatgagacagaccaacagctgcagagaaaataaaataaaataagaacctagctgatgaaaagaaatattcaaaaaaatccaacttgcagagtattggggagagtatgtttttaatataaagtctacctcagtgtattatgaaacacaacctttttctcttctgtcacagagcactagtgacgtttggtgtttttctcccttcctttattctttttcttgtacagaatcaatatgtatttgcctcttattttccttttcttaggaacaagcgccaggactgacttaagcattacacagatagacataccaaattacagagaacaggtatctactgttctaaaaacctggaaacagaaaaaatgacaacctaaaactgatttgctcctaccgcttttgagaaaagtaaaaacataaaatataattttattctcaaattagaatgaaaaatagaatgctccctggttcctgagaaatttttaaaacttttatataatcacaatttgtaatggttgaaaattattattggtacttgaactttacttcctcccacaaataataataatgaataataataatggcagcaaacactcatagaatcttcataaaacaaccagcaatgggctaaatgctttacatggtgtcttagtaaattttcacaac

SEQ ID NO: 1175 - DNA, 4052 bp, Homo sapiens
aaatcaagatggtcccagatatacttatattatcctcatatagcaagactatggctatgtagaaccctcagaaattagtcatgtgggatagttaaggttttatcctattaaaccagacacttttaaaaacaatttcacaacggaatctttccaaaatgcattacatacttgacttcacccttaaaaagaatggccagaacatatttcaatctttgactggtaactctaagtcatcaaaatgaatgtaaactacagtactgtgttagcatgcaagaaagttttttaaaaaactgttgaggccgggtgcggtggctcatgcctgtaatcccagcactttgggaggccgaggcgggaggatcacaaggtcaggagttcaagaccagcctggccaatatggtgaaaccccgtctctactaaaaatacaaaaactagccgggcgtggtggtgggtgcctgtagtcccagctactcaggaggctgaggcaggagaatcgcttgaacccaagaggtagaggttgcagtgagccgagatcgcgccattgcactccagcctgggcgacagagcgagattccatctcaaaaaaaaaaaaaaacaaaaaaacaaaaaacaaactgttgaagtgctctaggttattgcctccaaaagtaagtaatcccgcacaggtttttttttgttttgttttgttttaagtcttcttcatgttatttttgtcacctgacacactatcagatattaactattattatttgttgtgtacctgcttcaaactgccttttctcctcaatgtgctacttaaaaatctgttgtgatttcaaaggcgcatgaccagctttggccattcaatagatattcatattcaacgtgtggccaggtactatgtaaaacactggtgatacaaagatatatgatatatacatagttcttatcctcaaggagctctaggttttgtgggagaagcagacatggagacaaattggcaggcaattataattctggtgttgctggaaatatagagctagtactcttaactcagccatgggctggatggagtgagtgacagagtgtgcataaaggaatgtttccttgagaagggtgctaagtacagccctaaaagatgtgcactggaactacgtaaaataacagctgtgtttgagggccaaaggtaaggccttcccttggtaattattttatgcttatctgtatgtactatacgcactggcctttttttcttacttagtgcttggtgctctggggaattgaaatgtttggattgctcagttcttgcaaggtgcagtgtcactgtagagagctattacatgctcttatggggtggctggagtgagtggtataaaaggacactcccatttgttcttgtcttcatactggagtactccaaagggctcttcacagcatcagccatgcaaaatgtgctaggacttttccattatcttaaggggaatttgttcactagcttctcatttactcttcctatactggaagttataccaaaaaatattacagaaactttaatagtaagatttggaagattacatgctacaaagctgaatacggcaattcgttacttaatgtgctggaacctaataaaagggttcaaaatactcacaataatcaactgtttgaacagataattgttaaatctaaaatgcatggaaataactaagaaatgtaagaagaatattaacaagtataacggaataacatctatattctaaaacatctttcatatatgctctacatttattaatatctaaaatatatttagcttataaaaagtatcatacactgaactagacactgggggcagaaaataacatgataatgagactgatcctacccttgagacaggaaaatgagatggctacacaaataacacagaatatgaaacatctcagaagagaagtacagataaaatctagaggaagtaaacattacttccagctaggagggttagagaaggttaatgaatgggatgtccttccttctgggcttggaaagaaggataagctttgaacatgagattagagaggaaagaagagagagtatggactctaggtagatatcacagcatacataaaggaattggattggaaaacagggcggatgagaagcagtgggagagaatgctggctcaaatgccaagccaagaaaagtggacttcatatagcaggcagaaagaagataccattcataaccagagatgtgacaaagacagacacatctggtagcaatggggtagagtgtgtaaaatgtgcagctgcgggaattatttcagaggggagcgcctataataccaccagagaggggagttgagcatatcagatgttgcagagttaaattcaacaggatgtggctttcccaatgtgacataaagggcgagagtctgggcatgttggtgaagtggggccaaagtcaaatttgaagtgattaaagacagtgaatagtaaggaaattaaggcagccagctcagctacttctacaggcagtctggcagtaaagaggagagcatttatcattaagtgtgacttaagttaaagataaatggcattgaatgagttagtaagtaaattatgaataaaactcatatcttttttctgctgcaagaacaatcagcccttctatgaagtataatactggttcattcttacaccaaacttttaaagatgtatgtatggttaatcattatgaatgtgtctcctttctctgagattcttttttatatatgcctttaagaaaaattaaaacacagagaactttaactggcatgattttgaaactgaccactacacacatatgtatattcctgttttatcagccgagattacatgacaaaataaaaataaatctattttctattctatttattctgatttttacactttttattaatctacttgctttgttttgaaaccctctactaactgaaaactaaatagtttgccttaaaggaagataatatattgagtcagagaagcagctacaggccatggggtagtaaaattcaaatctgatccaaagttaggtttttcttttcattatattctctaacagttcaatgactaatgtacttctcttctgaggaaaatctgccccgcaaaagaaggcctgctgcaagctgcattaagaaggctgtcttcccctgggtgagggtgtgtaacccacggagataagaagccacaggggaaaccaccacacaggccactattttagtattcagctgctccagctgcatggttgtccaaaataagcccttggctttattattttcaattccaataactacgtttggctttgcatttgtacctaaggaccagttatttttccagaaagtacctaaaattatctcctcaggtcctgggctgtgaactccggttaaatcacaaatgcatctggctttacgtaatgtctacgggtaacagtcggtggaaactggagcactgatattttcaaatattggcaagccagtttaaaaaaaaaatctattaaaagatgcatctaaattccaggtgctttttgttaccaaacaaatctcaagctaaattcatccctaataaaaatgctcctagcccatgtaaatggcattttcccctcttaaacatctattcttattatctcaaatagtgtccaaaatggtcatccctcatggtgaataatctattcatctgtaatgcagaaggaaaaagaaagaaatttcatgtttttaattagcaattgtctaacgcctagatccttagaatgcagacaatgtttcttgaggtggatcagtaattggttaaaactcaaggttaatgaagctacagtcctaggtttgaatgagtcagtcaacctcactctaagaaatcctgtgccatgaactcagaaggtacctctggcccagttgtattacaaatgagtattaccactggaaggccaaccatcatgttactatagaaacaaacaaatgtgtatccccaaaatggatggagattgcttttgcttttcaaagttgttttcccaaaacattttttaaaatacagaaaataaaacaaaaaaaa

SEQ ID NO: 1176 - DNA, 4041 bp, Homo sapiens
atcccaagtccattctgcctttaaaaagtaacctaccggctgggcgcggtggctcatgcctgtaatcgcaacactttgggaggccaaggcgggcagatcacctgaggtcaggagttcgagaccagcctggccaacatggtgaaaccccatctctacaaaaatataaaaattagccaggcgtggtggtgggtgcctgtcatcccagctactcgggtggctgaggcagcagaattgcttgaacctgggagacggaagttgcaatgagctgagatcgcgggactgtactccagcctgggtgacagagttagactgtgtctcaaaaaaaaaaaaaaaaaaagtaacctaccacttctcacttcttgctctaagataggaagaaagagaaagaagaatgaatagggggagacattctattttggaaagtagagtgtgatatgagctgtttcccaggttagaaggcaataactggataaaaactgggtgacactgatctcagtggaggtgcaggttaggtatatcttctgggaataagggaagtggggatggaattgggaatgagagggctgaggaagtggtttggacctatatcttacaaggcagaagggccagaagctatactcagggcccagatcgtatttaaaacaaagatccatttggcaaggacccagttaccaatgcccagtgagctccttcattattatttgacagaagcagaaaggataaccaaggagcactggggctgggagctgggggcagagacccaggtttccagctggcctaagcttcaaacttgtctcatatttacctgcagggaacaaaaatcagacaaaggaacaataaacaaggcctttccatcaatcttgcagacctaaaagtagactctttgttcaagatgcctaggttcttcctatccaataagtcctcctcttcttttgaattgcatattctatacataaaacactccatgtgtcaggaatttccctatgccctattatcacactcaaaaatgcctccagatttccacacagcaaaagcttagtaattccacaccaacaccattaaacccatgggaaatagaaagatgtcaaagcttgaaactggctaagtgcttcttaagaattaaagtagacaatgatgtcacaggaggatagatacagtgatggcagagactgaagaaggaatacgaaactttatggcagtctactcctagatagaaagattgccaaatcaacacctgctccaagtcttcaaaaatatatctggtggtaaacagtttttttttttttggcaaaagggattatctgggcttaagaagataaacccaggcagttggcatgtgttacagtaatacctgtaacatttttagtttcttttttgatcctaaagtatattctttttaccatattgactctttcaaagtccttcctaattcctcatgacagatcaaacttttttttttttacattcttggtttctgtatattttgtttaggaatatggaatagcaactgagtgggtcttggcctcctgcttcctagatctcagccaatccctctgcagccacctgttcccctcaacagttgcgggggctatgtaaactggcactctgcccttccacccgcctttgtggccacctgttgccgagactttaagaaaacacagggaagtaaggctctcttcaaggtcaacagccaatggtccatccccacctcagtgtctctaagttcacaggatgagattttccaccgcagcattaactactatggcctaaaagggagggtaactctcctgaacaaagccctggagaccactgagaattgggaaaagccagcctgtgtcattcatcccaagccctgccagctgtcctctaggtccctcctctagagattctaattcagttggtctgggtggtgctcagaatctatcattttaaacaagctcccagataattctgatgcagtcagtttcattcattcattccttggatcttatgtgcatttgacaaatattttctaagtatttaccctggcatttcatatacagtagcacacagaaacacagatatggttcctgcctattctaaagaggaagaagacaataaacgatcacacaaatgaaatataatgataaatgtgctaagcattggtctatgttctaggctggacaaatctggcctaacccatggccaattagaaaaagaaaaaatgtttcctccaaagaaggttgcagtcttcctcttctctctttcttttcctttttcttttctctttccctctccccactctctccttcttatctacctgacccacttctgtgtgtctgttaaaatgaaaatatcaaccgctacaccctgctgctatccaccttcccaggcaaaccttatgagaggcagaaagatgctagggcagagtggtggaaatttaaattctagtcttcactccatccttacctagcaaagtttcgtaggtaagtcacaagttttctgaatgcctagtccttaggtctttactgatttaaagtggattgcttctgagcattcctgcctcagcactgcaactatatgactttcaagtctctcaatttgtgctgaaatgcaagctgaaaaagccaaaatggcagttttgtccctttatccgccattagctcattcaccttcttcacttctgccatatcttatcattaatctgttctacccaaatgctgaaatccacaatcagtccacgagaggtatcaatctactttctttgcctgacacggggtcccctgcagaagatcatttacttccgtggtgaacacaagaagctgtaatttgacaaggttaaatgagcctatttcctctcattgtctgcaggctccccagccatctggccctcacagcatctctctcattctttattctagagtcaagagacaaggtgcttcagagatgacacagcttgacatttatgggctgcttcccaccccaatcccccaagagcccttctaatcaagtttccctgtgtctttttccactcttcgttccagaatcaccattattttgggtgatccatatggctatcaattaaagtgctacctgagtgctgttcaacttcttgagatggatgaaaaaggaatgaaaggagacatagcaatcttcaactccgctcctttacttttgaataagaggtgatggaaggcaaggtcagagagatctgggttcaaatctcatgatttaactgctatataaccttggccaaattatttaaactttgtgtctgtttttacttagcaatataaagacactggtcatacccaccactcagaatttcaatcagaactaaatgaaataatatatgcaaagtgcttaatatagtacacctggcatggagtggtaactcaataaatagatcttttgttataactcattcctattcaatcgtcatctgctaccactttcccaaaaacacacttcttttacatttaatccatgaattaattattttatttaccattctgattttctccatttcctgttcttgattctgacttctaaaaattatgctctggatgcctcttaaaaatacctctgttatatatatatatacacacacacacacatgcatatatatgtacatatatgtatatctatatacatatacacaaatatacatatcctgtatcctattaaaatgtgtattgatccctatatccaatgaaatacatacacacacattttaatagggatataggaatctatgtataaatgtcaatgcaacatacagaattgtatgcattctatcaacattttgagataattaaggggagcattttctgcacatatccaccttaccactctcaaaagcgaagcaaaatccagagattttctccactataataaacactccctgcagaggctgggcatgtctttgctagcagataagactaacttggcaggtctggactgtgatgacaggtgcagttcttgtggatggaactggactgggatgggaaggcttgtgccaagcaggcagaggggtatcttgaaattaagcaagggaaaaag

SEQ ID NO: 1177 - DNA, 4067 bp, Homo sapiens
atctagaagggagtctataaccccaggtgagttattatctgaacgtcggtttcttcaactgtaagtggaaatcatatttgttatttatctcaagggtcctgaattttcatactaaccccatgtaaaacacctaagtcggtgcctgctgcagttggttttcaaaagtaatagcaaagctgccatttactatgttaatgatgcacatccctcccatgggcagcacacctcacatgctgccatgaggcaccccactttatgccagtctataattcaggttactacagcattttgcctgttactagacagttggtagaaagtactgtaaatcatcatgatgaagggtactgctcactgtacaatcctgaccactcaacaaggccctcaatagattcatggctttgcatttattagaagagaagactccaaaggacccagaaaattctgtgccccaagtcatttttctgctttctatattgtgctgctggagcacctgccagtccttagttcattgattccatcacacagcactacatgttccacaccaatcacaagcggtgctccaggattacagacttagcccctgccactacaagtctatgtcacagatccataatacctctcacaggctcctggcatgcctgtacccatcacacacacacaaaccctgggtttcttcagatttctcagttcttccagcagaatcataaagtgtcagcgctaaaaaggaccttaaaggactatgtagagtccacttacagatgcagaatgagaactacccatcaagttacaatgacctgaccaaagtcacagagctaattaaatagtcacttagcctaaagcccctactctctgtcactatcttaccaaggccctctatcaagactttatagctcccttgcttcgtataaacagacagatgtagcctatcattccttttttcaaatctttacttccaagtgccctctgacactgtccctctgtgctttcctagttataaaaaccaattcagaagtagtagtctatcaaatgggaccagattattcatcctaaggtaaaaaatgactcatattaactggacatttgctttgtaataggtgatagaccttctacccagtatttctaatgcagtaataatagacctcagtaaagactgggttattcatgcagctgcttggggaggaaaaggagggccttctcaggtctgtcatatcactgcaatagtacagcccctgctgtgtacagagaacataagtataaagatggacctctgctgtgtacagggggcactagaataaaaaaggaccccgtccttctaataaatattgaatgaacaactaggaaagaaagaagggaagaactcaaagccttctgaaacttcaaacagtgtcttcatgtagggtcttaacataaaaatctttcccttatcctgaaatatgtcaggctttgggcgagcacctcacagtattttaaaagagctgcacagatccaaatgggcagatggtgttatttaatgcgcacatatttggtgtcactttgaattcttttccctggtgcatacctacaatgtaaacagcaaagctctcataaacaaatttagattttaaaagcacttcttggacatgctagtagctcagtgggcctgtcacagtggaacaaaacagtttttggtctgacaaccaaaaaattaaaatataaatatgcatttcatagtcttaaaaacttaacctctcctgcgcttttttcctgttgatgctctgcccctgagagggtcaagtaagacgagaactaaaaagtatcaagctggtttgggatttaggaagtcaacaggaaccttaccatttagtttaaaggcaaaacccctttaaactagatagctgggctatgtgaccttggttgcttttcttgattccttggggcttagttttctaatgtgtaaaataagatcactgtaagcattcagttgatgttggatgaagagatggagagagaaagggagggatgactagaagactgaatggaaggatatttggaaggttgactgggtggatgataagggctggcctggttgatgtaacaggagattgtctaaatcaacagtgggatcaataaaaggttttgtgttcattttgttttttatgaaaaagagaggttcacacatgtttgtgttaggggaaaaaaatccagtggaaagagagaaactgatggtgggaaagagtacaaattacccagagacatgatcccaagtccattctgcctttaaaaagtaacctaccggctgggcgcggtggctcatgcctgtaatcgcaacactttgggaggccaaggcgggcagatcacctgaggtcaggagttcgagaccagcctggccaacatggtgaaaccccatctctacaaaaatataaaaattagccaggcgtggtggtgggtgcctgtcatcccagctactcgggtggctgaggcagcagaattgcttgaacctgggagacggaagttgcaatgagctgagatcgcgggactgtactccagcctgggtgacagagttagactgtgtctcaaaaaaaaaaaaaaaaaaagtaacctaccacttctcacttcttgctctaagataggaagaaagagaaagaagaatgaatagggggagacattctattttggaaagtagagtgtgatatgagctgtttcccaggttagaaggcaataactggataaaaactgggtgacactgatctcagtggaggtgcaggttaggtatatcttctgggaataagggaagtggggatggaattgggaatgagagggctgaggaagtggtttggacctatatcttacaaggcagaagggccagaagctatactcagggcccagatcgtatttaaaacaaagatccatttggcaaggacccagttaccaatgcccagtgagctccttcattattatttgacagaagcagaaaggataaccaaggagcactggggctgggagctgggggcagagacccaggtttccagctggcctaagcttcaaacttgtctcatatttacctgcagggaacaaaaatcagacaaaggaacaataaacaaggcctttccatcaatcttgcagacctaaaagtagactctttgttcaagatgcctaggttcttcctatccaataagtcctcctcttcttttgaattgcatattctatacataaaacactccatgtgtcaggaatttccctatgccctattatcacactcaaaaatgcctccagatttccacacagcaaaagcttagtaattccacaccaacaccattaaacccatgggaaatagaaagatgtcaaagcttgaaactggctaagtgcttcttaagaattaaagtagacaatgatgtcacaggaggatagatacagtgatggcagagactgaagaaggaatacgaaactttatggcagtctactcctagatagaaagattgccaaatcaacacctgctccaagtcttcaaaaatatatctggtggtaaacagtttttttttttttggcaaaagggattatctgggcttaagaagataaacccaggcagttggcatgtgttacagtaatacctgtaacatttttagtttcttttttgatcctaaagtatattctttttaccatattgactctttcaaagtccttcctaattcctcatgacagatcaaacttttttttttttacattcttggtttctgtatattttgtttaggaatatggaatagcaactgagtgggtcttggcctcctgcttcctagatctcagccaatccctctgcagccacctgttcccctcaacagttgcgggggctatgtaaactggcactctgcccttccacccgcctttgtggccacctgttgccgagactttaagaaaacacagggaagtaaggctctcttcaaggtcaacagccaatggtccatccccacctcagtgtctctaagttcacaggatgagattttccaccgcagcattaactactatggcctaaaagggagggtaactctcctgaacaaagccctggagaccactgagaattgggaaaagccagc

SEQ ID NO: 1178 - DNA, 4035 bp, Homo sapiens
gaaaagctaatttccctaaggtctatggtaaatgagattaaggcctggtgtccagactgcccgactcttatccattacatgcaacaaacctgttaaaccctgcaacatcatattttggaaatattgtgaatccatcagttagatttttcactaaagaaacaatttttaaaaactcccctggaaaaacattaggaactttttaacacttttaaacactttagtttcaaagtacaacagaaaagggtgctagctaaagtttcattggcttgtattataaaattaaccccaagccagtcaatttctgacaagtgattgtgcatatgtttattagctttgatatctcagaaatgaatacccaattctctacattattcagatcaatttaaagcaatcattattagtaaaaatatccatattcttaaataattaagctttaactgtttcataacttcaaaatgttattttgaaacaatgattagaagtaaaggcacaaaaatatgtaggtagctttcaattcaacaaatatgttactatctcaaattctttatgaaataacaaaagatataagtaaatgtgaattttaagaccattattttggcctcctattcaagataatgtaccactttcttcaagaatactgtcgagatggttaaatctgtaacagcatctgtcatgcacttctcattggtcatttttcacctaagtcaaccaaccctaccaaataatgtggaaattatgaaataactttactaagtaagtgttcactagctactaaaactattttaggtattatcatcatttaactggagacctaatttgtactagagcacaaattttagtgtcaaaggattttaaaaagatgtgaaaaacactggctaagataatcactttcaacacatccattagattttggtgagtttaccctcattaagactattagagagcagcccgaaaggtccttgacatgtagcattttgcagttttgctgagggatatatttgaaatgaaagcactgaatggcctggatataaagagtcactcagctagtgagtaagcccggctgaccacaaagccatacctccaagtgactgccattctccacagtcgtatttgtagagaaatcagctcatctgggcacactgccaaatggctgtcctctgacctgacatttccacatgacctcatttaatgctgaaatgactttatgcagtagacattactgctattcccatgtttgcagattaagatactaagacatagcaaagttaaacaacttgcccaaggtcacacacagaagattaggaccacatctgtctgaccccagagcccgagctgtcaaccactggcaatcctgccactgaactgttcctacagtaagttaggttaatgtcacttcagaaataatgtcatccactgcagtacagaattttactaaaattattattttaattgcttaataattatgttaatcttggtttatacacctcatagaggttctggacaaggtcaattcaattttttaaagtgcttaagaacttggattgtgaagtaagactacccaggttatccgccatgtgaccctggacagattacttcaccttgctatacctcagctcccttaactataaaagagagataataataatatctgcttcctggggctattgtgaggattacaagagacaatatcatataaagctgatagcagacactaagagtgttagttattattattggaaccaaatggcttcttatcgataaaattatttgttctagtgctatgaaaatttgggaccgacgaaggtcttgaatatattttttttactctacctaaatttctacatcgccattgtttttctttatgatctgaatttaatcagcacttaaattgcttctggccatgtaataaaatttaattcagaatttagaatatatacatttatatagaattattaaaattatttagaatttggaatatacatatatacttatgaagattaaaaggagatgattcgtgacaggaagccaagtgactatccagtttgtttaaagatccaattctatgcaagaggctattaaagtatctcagagaatttaaacttgactttggcagggatatttttcatgtgacagagcactctccacttttcccattatcctgaagaaggtaaacactgcaaacctttgtctttatggcatcttatttgagaacaaggcaaattatcaaacagatgttcctataaactcaaattcagaatgttactgggcccttttaaatgcctatttatcatcagctcataaactaagctgaattaagaaatggtagtgagaaacatggtgatgtggcagaatatatcagcagggtttatcagaaactgcatatctgagaggaaaacagcagtttagctcccaaataaagcaaaaccagtggaatggacacaaatgctaacttcagccaaacaatctgaagtttgaagtaagaaactgtataattaactacatttctccactggcccgcagataaagatcactgcaaattgtgagcaagtctgcattcaggccactttgtacaaatccagaagtttaaaaatatatgcacaatctgcctgtaaccataacaacctttctcactcctcactccaccacccccatcccaagtcgttcttaggtaggccatgtttttcagcttttattcaaaacaaattattccttaaggaaagagctacactgaattttcatatagaacaatgtttataactgatatttcccctttattcttacttttttcaatgattttctcaaataatcaataaaataccattacactgcctttgccaacatccatgagactttgtgagccatgttatatttcatgtacaattcagcaaagggccatcttatgatgctccaagaaaatcaatagattcacccttctgttattaaggcaatagtcattttattattatgaaggcaatgggaatttgtaaacaagtttaagaaaatacactgataaccctcagctttggaccttcttgatacttagcatttgaaatgagactatgaaatagaaagtgattaaaagtagagataaattcagacaatgtacctaatgtacccttttagtatttttcttattcaaaaatcaaaatcaccacaaaaaaacagaaacagcaatggtattattccagtggtatctggcacttccaaactagcatacatgtttgtttagctgagtcagccaaatatcagaagcccaaatgtcaagaagtgggcagatggagacctaaatatacttaagacaagttaatttccatttttctaaggataactatttgaacactgttatgataccagaaaataaatgctgttatctattatacaagaaatgaatggaaatatagaatgcatagtaggcactcagtaaatactagtagatgttaatattaaatgaatactggtagataatattatcattgaactagtaataatatccaaaagctcagtcttagccaagtaaaaaatacaaacaaaagtgagaatttccacaggttatcctcagtgaatgaattcatttcttccatgataattgcagaaccttgtgtctaactagatctgatcacatcactcctctgtttaaaaagtatcattggttcccattccactgaagataaggcccaggttccagattccttagcacagcatgagctacttggcaactttggcttctgtcacaatccagtccctttcccatatgtcctgttttctagtcacatgaagccaatttttatttctcgaacatgccatgtttctcatgatgctctgcctacaagtctcccttttcccttattcatccatccaaatcactatccaaatcaaatgtcacctcctgggaagccttctctgatagtctgtacactatctctctacttccattaatctttaatatttttacctttagcaacacttacaaaattgcattataatttttaaggcacggctttatttctagcttcttgtagcatcctatttctttga

SEQ ID NO: 1179 - DNA, 4051 bp, Homo sapiens
acaaaggatgtaaatgccaagcatattagaatatgaagatttaagtcaggaagtacttagatctctagagggtaagagtttcttatgtgttcctttaaggaataaattccttatttcaaatcagatttaaaattttacctccaaaaaggaattttccattctccattaacatcaacaattttaatgccctcaagatgcactagaagttgattgggacttcatcatgaacttgctaatatcaataataatatagttaaaaatatacccttgatacaacaaacatgctctctatagttccatatgcagcaattcacagtgcagtctctactcacaagtgctgacagaaatgttccatccttagcacacatgcaagaatgaaattcaagaaaaagggcagcagcaaatattgaatagcacttgcttagttcccaaagtctgcggaagagattccctactttgtcataatgagatcattacaagcttctttgtgagagacaaagaacctaaagaataatgtttactatctacagctaagtacttctaaaagcaagctctaatccttttttttcagccctccctctcactattccctactaaaaccttccatcacaatcatacttatttatttcatgtcttttcatactcttctactcttctgcaatgcccaccccatcactcataagactgtgtggtttaaacatgtattgagtgggtaattatgcattaatctctcaattaggccatgggttacaaaaaaagataatagcttatgtcttagaggaacatttagccttggcagaaaagtgaaaagggtattgaactaactggcacccacctgaagaagctctacagagggaataaatattctgagagaaccacagacttttccctttgtcacaatactcaagagaagagaactcaattctcataaaacaaacaaaaaaaaggctctatagtcacagagcttttaatcacacagaaagaaaatattattctacacccaatttaactctgaaaacttttttctaaaattaaaaaaaagatagaaaatccctagtcatggggacttcaaaaattataaattgctaattcaaggcccagaagggtttcttatactaaaaagttaccacatcttcccagaatctaaagtatggataagcatgacaatgttattacaaacagtagtagcagcaacttttgttgttgctatgagcttgattttcatggatcctttctgtaaaggggcttaaagctcgatttatctacattccttacatacattagttaggggtatatattacaccctttttacataagtaaaaagtacagaaaagctaatttccctaaggtctatggtaaatgagattaaggcctggtgtccagactgcccgactcttatccattacatgcaacaaacctgttaaaccctgcaacatcatattttggaaatattgtgaatccatcagttagatttttcactaaagaaacaatttttaaaaactcccctggaaaaacattaggaactttttaacacttttaaacactttagtttcaaagtacaacagaaaagggtgctagctaaagtttcattggcttgtattataaaattaaccccaagccagtcaatttctgacaagtgattgtgcatatgtttattagctttgatatctcagaaatgaatacccaattctctacattattcagatcaatttaaagcaatcattattagtaaaaatatccatattcttaaataattaagctttaactgtttcataacttcaaaatgttattttgaaacaatgattagaagtaaaggcacaaaaatatgtaggtagctttcaattcaacaaatatgttactatctcaaattctttatgaaataacaaaagatataagtaaatgtgaattttaagaccattattttggcctcctattcaagataatgtaccactttcttcaagaatactgtcgagatggttaaatctgtaacagcatctgtcatgcacttctcattggtcatttttcacctaagtcaaccaaccctaccaaataatgtggaaattatgaaataactttactaagtaagtgttcactagctactaaaactattttaggtattatcatcatttaactggagacctaatttgtactagagcacaaattttagtgtcaaaggattttaaaaagatgtgaaaaacactggctaagataatcactttcaacacatccattagattttggtgagtttaccctcattaagactattagagagcagcccgaaaggtccttgacatgtagcattttgcagttttgctgagggatatatttgaaatgaaagcactgaatggcctggatataaagagtcactcagctagtgagtaagcccggctgaccacaaagccatacctccaagtgactgccattctccacagtcgtatttgtagagaaatcagctcatctgggcacactgccaaatggctgtcctctgacctgacatttccacatgacctcatttaatgctgaaatgactttatgcagtagacattactgctattcccatgtttgcagattaagatactaagacatagcaaagttaaacaacttgcccaaggtcacacacagaagattaggaccacatctgtctgaccccagagcccgagctgtcaaccactggcaatcctgccactgaactgttcctacagtaagttaggttaatgtcacttcagaaataatgtcatccactgcagtacagaattttactaaaattattattttaattgcttaataattatgttaatcttggtttatacacctcatagaggttctggacaaggtcaattcaattttttaaagtgcttaagaacttggattgtgaagtaagactacccaggttatccgccatgtgaccctggacagattacttcaccttgctatacctcagctcccttaactataaaagagagataataataatatctgcttcctggggctattgtgaggattacaagagacaatatcatataaagctgatagcagacactaagagtgttagttattattattggaaccaaatggcttcttatcgataaaattatttgttctagtgctatgaaaatttgggaccgacgaaggtcttgaatatattttttttactctacctaaatttctacatcgccattgtttttctttatgatctgaatttaatcagcacttaaattgcttctggccatgtaataaaatttaattcagaatttagaatatatacatttatatagaattattaaaattatttagaatttggaatatacatatatacttatgaagattaaaaggagatgattcgtgacaggaagccaagtgactatccagtttgtttaaagatccaattctatgcaagaggctattaaagtatctcagagaatttaaacttgactttggcagggatatttttcatgtgacagagcactctccacttttcccattatcctgaagaaggtaaacactgcaaacctttgtctttatggcatcttatttgagaacaaggcaaattatcaaacagatgttcctataaactcaaattcagaatgttactgggcccttttaaatgcctatttatcatcagctcataaactaagctgaattaagaaatggtagtgagaaacatggtgatgtggcagaatatatcagcagggtttatcagaaactgcatatctgagaggaaaacagcagtttagctcccaaataaagcaaaaccagtggaatggacacaaatgctaacttcagccaaacaatctgaagtttgaagtaagaaactgtataattaactacatttctccactggcccgcagataaagatcactgcaaattgtgagcaagtctgcattcaggccactttgtacaaatccagaagtttaaaaatatatgcacaatctgcctgtaaccataacaacctttctcactcctcactccaccacccccatcccaagtcgttcttaggtaggccatgtttttcagcttttattcaaaacaaattattccttaaggaaagagc

SEQ ID NO: 1180 - DNA, 4031 bp, Homo sapiens
aagacaggtatatttttattttaagaaacaagcaacctagaggtcacacatgagcacatgtcaaagttgtgctttaaaattaggccacagctatgttaatttcttctttgtccctctgttccataatcttatcttgtctgcaaaaactcaatctagaatcactctaggtaacatacctcataaatatcaggctatgtgatggtttagtgatagagacaaaggatgtaaatgccaagcatattagaatatgaagatttaagtcaggaagtacttagatctctagagggtaagagtttcttatgtgttcctttaaggaataaattccttatttcaaatcagatttaaaattttacctccaaaaaggaattttccattctccattaacatcaacaattttaatgccctcaagatgcactagaagttgattgggacttcatcatgaacttgctaatatcaataataatatagttaaaaatatacccttgatacaacaaacatgctctctatagttccatatgcagcaattcacagtgcagtctctactcacaagtgctgacagaaatgttccatccttagcacacatgcaagaatgaaattcaagaaaaagggcagcagcaaatattgaatagcacttgcttagttcccaaagtctgcggaagagattccctactttgtcataatgagatcattacaagcttctttgtgagagacaaagaacctaaagaataatgtttactatctacagctaagtacttctaaaagcaagctctaatccttttttttcagccctccctctcactattccctactaaaaccttccatcacaatcatacttatttatttcatgtcttttcatactcttctactcttctgcaatgcccaccccatcactcataagactgtgtggtttaaacatgtattgagtgggtaattatgcattaatctctcaattaggccatgggttacaaaaaaagataatagcttatgtcttagaggaacatttagccttggcagaaaagtgaaaagggtattgaactaactggcacccacctgaagaagctctacagagggaataaatattctgagagaaccacagacttttccctttgtcacaatactcaagagaagagaactcaattctcataaaacaaacaaaaaaaaggctctatagtcacagagcttttaatcacacagaaagaaaatattattctacacccaatttaactctgaaaacttttttctaaaattaaaaaaaagatagaaaatccctagtcatggggacttcaaaaattataaattgctaattcaaggcccagaagggtttcttatactaaaaagttaccacatcttcccagaatctaaagtatggataagcatgacaatgttattacaaacagtagtagcagcaacttttgttgttgctatgagcttgattttcatggatcctttctgtaaaggggcttaaagctcgatttatctacattccttacatacattagttaggggtatatattacaccctttttacataagtaaaaagtacagaaaagctaatttccctaaggtctatggtaaatgagattaaggcctggtgtccagactgcccgactcttatccattacatgcaacaaacctgttaaaccctgcaacatcatattttggaaatattgtgaatccatcagttagatttttcactaaagaaacaatttttaaaaactcccctggaaaaacattaggaactttttaacacttttaaacactttagtttcaaagtacaacagaaaagggtgctagctaaagtttcattggcttgtattataaaattaaccccaagccagtcaatttctgacaagtgattgtgcatatgtttattagctttgatatctcagaaatgaatacccaattctctacattattcagatcaatttaaagcaatcattattagtaaaaatatccatattcttaaataattaagctttaactgtttcataacttcaaaatgttattttgaaacaatgattagaagtaaaggcacaaaaatatgtaggtagctttcaattcaacaaatatgttactatctcaaattctttatgaaataacaaaagatataagtaaatgtgaattttaagaccattattttggcctcctattcaagataatgtaccactttcttcaagaatactgtcgagatggttaaatctgtaacagcatctgtcatgcacttctcattggtcatttttcacctaagtcaaccaaccctaccaaataatgtggaaattatgaaataactttactaagtaagtgttcactagctactaaaactattttaggtattatcatcatttaactggagacctaatttgtactagagcacaaattttagtgtcaaaggattttaaaaagatgtgaaaaacactggctaagataatcactttcaacacatccattagattttggtgagtttaccctcattaagactattagagagcagcccgaaaggtccttgacatgtagcattttgcagttttgctgagggatatatttgaaatgaaagcactgaatggcctggatataaagagtcactcagctagtgagtaagcccggctgaccacaaagccatacctccaagtgactgccattctccacagtcgtatttgtagagaaatcagctcatctgggcacactgccaaatggctgtcctctgacctgacatttccacatgacctcatttaatgctgaaatgactttatgcagtagacattactgctattcccatgtttgcagattaagatactaagacatagcaaagttaaacaacttgcccaaggtcacacacagaagattaggaccacatctgtctgaccccagagcccgagctgtcaaccactggcaatcctgccactgaactgttcctacagtaagttaggttaatgtcacttcagaaataatgtcatccactgcagtacagaattttactaaaattattattttaattgcttaataattatgttaatcttggtttatacacctcatagaggttctggacaaggtcaattcaattttttaaagtgcttaagaacttggattgtgaagtaagactacccaggttatccgccatgtgaccctggacagattacttcaccttgctatacctcagctcccttaactataaaagagagataataataatatctgcttcctggggctattgtgaggattacaagagacaatatcatataaagctgatagcagacactaagagtgttagttattattattggaaccaaatggcttcttatcgataaaattatttgttctagtgctatgaaaatttgggaccgacgaaggtcttgaatatattttttttactctacctaaatttctacatcgccattgtttttctttatgatctgaatttaatcagcacttaaattgcttctggccatgtaataaaatttaattcagaatttagaatatatacatttatatagaattattaaaattatttagaatttggaatatacatatatacttatgaagattaaaaggagatgattcgtgacaggaagccaagtgactatccagtttgtttaaagatccaattctatgcaagaggctattaaagtatctcagagaatttaaacttgactttggcagggatatttttcatgtgacagagcactctccacttttcccattatcctgaagaaggtaaacactgcaaacctttgtctttatggcatcttatttgagaacaaggcaaattatcaaacagatgttcctataaactcaaattcagaatgttactgggcccttttaaatgcctatttatcatcagctcataaactaagctgaattaagaaatggtagtgagaaacatggtgatgtggcagaatatatcagcagggtttatcagaaactgcatatctgagaggaaaacagcagtttagctcccaaataaagcaaaaccagtggaatggacacaaatgctaacttcagccaaacaatctgaagtttgaagtaagaaactgt

SEQ ID NO: 1181 - DNA, 4046 bp, Homo sapiens
gattcaagcaccagatgggtggttcagctaagtgacctttaaggtctctgccaaccctgagtttttatgactccaactttaagaatctttctcattttctgagatctccagaagagatttcccagccttccttggtaacccacagaatgtttaacaacactcaagacagcatttcctcttatctttgtcttaatcttgaagtattttctaaaattttttttttaaaccttatgttgttatcatgttttccccactagcagaagttctactagaaaatgttctagtgcagatgagcattctacatctggaaaattttccctgtcagaatgttttagatatgtaaagaattgtatttattttatatcctcacaatatcctagggatagcccttcaagaaattaatttaggatcacagcaaagccattgaattcataaaatgactaaaaccacctccacatggtggctgtccttcatttaaaaaaaaaacttttttaaatagagtaataactccccaaataatcctccagttcaaatgcagtttaatttaagtatcctatcaatggcaactgaatatattcagcaaaggatgagatttcctttttaacagcaagattttcccccacttactcatttatctccaaggcttcatgagctgcagaaatcctagcttgggggtttctctctctccaggctttctgcattactatttaagaaaaagagaaaacaccaagtcaatccatacatataattaggtagactcagtagaggacaagagctaaattaggagtgtcagcttaaattacaagaacatatttcattgctaagagggttggccaaaatctccaaagtcatattagtgtattaatgtgctattccacagtatttcaactgctgatagcaaaccttttttgtgctcacaaaactacaggctaaggaaatcaagaaaaggcactctaacagagattttgcgtgtcttttgcacattaatgtcatttgttcttggagaatatattttatgcattttgagatgacattgctaccaaccttttcattcacttagatacaacataattggtcattttccgaagcacttaacacagactcttggtgttagaacattctgaaaccatttcaagaattatgcgtgggtcagtaaaaaatgcttaagcttttgcttaacatgtgtacttatatcccaaatttacctgcaaacctagcttttatacatcagagcagtttctgaacatatggtgggaagctcaatgggaatatttactgtaccatgatgtttctaccatagcaaagagtaccattttacaaaggagtaacaatctccttatttattttataaatttgtattttataaattattttagagtgtgtagaggttccctttcaaaaacattttttcacctatttactttgaataaattttataacaaaaaatttcagttgaattatctgaaactcaagtaatgtaaaatacacactaaacaaagtattttctcagatggaacacacatctagactccaatagccaaggccatgaccccattcgatgctagttaacctataaataggcaaataaaagtcactaaaatatattcattaatcatctgaatccagtaaattccaatttctactttgaatatcataaaggagataaggccttcatgctaactcaaccaagaacttcattagcttcatataagattcatatttctttaaaatatataaaaccaacttcgatatatttttaaaaatcatgattcaaattattatgaggggactcatttcaacataaatacttcattgtgataaaggtttacttaattatcagagttctgggttcttattagtcaatcaacaatttaatattttattcattggagttttacagagtggatattctaaaagcagaaatcttgacacttaagccaaaaagccctcccattcagaaggatgtatggatttttcatacttgcatctgcgggacgcagatggtccgagtcacaagtaaagaatgtctggtggtcttgggcagagagattcatgtcatagtaagtaagaggctctcgtcctgtcacccaagtatacctgcaaaggagaaataagatgattagacacttttgagagagaaaagcaagacctataaaatattaagctgcagaggcgttgaaatatagaccattaactgaatactaaaatagctttgctaatgaataaaaaaaatttttaaaaatcatcttattctcccttcaggaattatatcagtcaaaagaaataaacattttctcctgtgtttttgtcttaaaatttactagcccttgctaatgaaaaccttccctaattcatattatgaatagacactttcctaaagctatgaaaattctaatttgcctaattactttgctaaactaaattccaacataacttctgcgacatctctataaccatattccaggtaagcttcaaaatgttttcaatgtatagtatatattgaaaagaataactgttaatacaaaaactctaaaaactacacatttttgtacattatcccaaatctagtgctaaaatatttataaaacagaaaaatcaaaacatttgaagatagtattaaaaaatggacgcactacatagactgttacaatgacccctaaatgaaccagcaaaaacatttgctgctgtctttgctctctgaaccagacccatttgtttcccaagctgtcaaaatgcttaccgattgtattcagcacccctaaataaatttagtggatttcgccatactttgcattctgcaacaaagagaaatatgaaaatgttacgcgtaagttcagtgacactacaagctaattaattcagcaaaacacccttcctgccatttgataagataattctattcactaccctttacatgggaagcaatgtggaaaaactctgggtggttaatcacaaaatgtggctcaggctccgggactttggaaagttttgcctaatctctctgggcctgagtttcctcacttgccaaatcaagatgcatgccaaaatcagctagttcataactcctaaaattatttcaagaggtccaaactgattctatgaatttacttctaaaaccttatagataaaagtataggcagaagtaaaactattttctgtcagtctaaaacatacctcataataacgttgtacatgacaagacaaactatagagtataatatgcaaacagccttatagtcttaatttgggttcatgctaacagtgattttatgataatttaccagtttgcttttgccttacaggaaaggaataagaaaattaataagattaccatattgtaggaagaaatgcaattaaaagaaattgtctcaaagcattttaatatcatttacttgcacagatacatatactaatcatcatactaatatcatcatgttagcacatcctaataggtcatacctctttattataccaggaccacagaaatttagaacaaaaggactttaacttagaaaagccaagcattaactttaagactgtgttataatggtaagcatatgactaataaactacaattcttttaaaacagtctatgattaagactttctactgattcagaatactagattttggatgaataagattttattataaaaaaatcagttaatagtattcaaaacatctatgtgcgtgtgcaaccagcaaaaaccacatccaacaacatatgtacaaaaaagtgagcaattattgcagaaatccaaaggacattgaaggccacgtggtgattcattaggatcctaccctcagtcctgtacattcaacatccatccatccactgagcattaatttgagcacccactggaggaaataagtaaaccatcaatttcaacacagtgtgataatggagaacacaaagcactctgggaacatgtgtgtaatctcaacaaatatttgttaaaatagtaaaggatatacacataacaggaatacgtgttttcatttaaagaagatgtacttatttctaaattagggcaggatcccactta

SEQ ID NO: 1182 - DNA, 4044 bp, Homo sapiens
aggtctttagccagtctctctaatttcaggcaggaaccatcaatggggctttaaacaatgtggtgaggtagggagaaaaatgcccagaaaaacagctataaaaccaatttctacagatggcagcatccatgacttggaaagaaccataatgatgctgaaactatacaagtgattcactggagaaaataactgggacaggcatcagaagaaatgcttaaggcttcagatgccaacatataaatatgaggcaagggtaatgaagtgaaaattgagattgtaatactgagtggtagatacagtatcagaggaattagctataagattgtagttgttgggctgggaacccaagaatggttggggctagcttgcttgctttgcttatttatatttcaaatggtattcttaggaggagaggcagagtagcactactggccaagaaacatacatctatgtggaaacgcatgagtttgggatagaaacatgctaagagcttgtgagtgaaggaaaaaggagagagcaatagaagtgctaatggttggggagtacagaacagactgctcagctcgatggaagatatagatgatgcatccttgtcacaacacaatacacatacagaagcaagaaagtgtggtgatgggggtgtcaaccatccagatatccactagaagtctcatttggttagaagtagggcacccaacaggttcttgacttactttggtaacaattttatctcccagatggtagaggaagcaattaggggaacttcaactctggacctaattctgaccaagaagaaaaaaatagttggtaaaatgaaaattgataggaacattcagagagagtcactatgtcatttcggagttcagggtaatcaaagaggggaaggtggacttcaaaaaattcaaagaaaagaggcatgattcaatggcatgagattcagaaggaaaaatggtttaagagggttgagcagcttccaaatgttcaactgtaactgcaatcacaaatgatcctctcaggaagaaaagaggggtggcacttaagtaaccaacacggcttcacagagatttctcccaggtcagatttttaaaggacatattttaaaagatggaaagagggcatgtaatgatggtctataagagagtggaatgagcttataagaataatgtcaggagagctacaattccaaattagctgaagcttgcaaaaataacaataataataataataataaaacaaaataaaatactaaagacaaccatttattccctattttaaaattatatttaaggccctatcaccgtccccatgtcacaaaggcaaataagtaaaaaaaaaagacaaacaacataataacatcaaaacaaggaaggtttattgttaaaagcagtagataataaagaaaaagcaaaactctctccctcctattttgttcctggcttctctatcaaggagaatgactgtcagactgaaaaagggagaagaaattaaactctaaaatgggtaaaaagatgtaagatagcaaataattgatccattctaaatgaattactggactggatgggcaaatcccaggaaaccgaaagaccttgtaggcaggccatggaattgctctctgtggatagttgaggaatcacaaagaatggagaggtgctagaagatgagatgataaatgtagcataaattttcaaaaaggggaagaaggcagacttcccaaactacagaacacagtgatttggaaagatattctaatggattattaaaggaatggtctccaagcactttaaaaagaaagtagtgacgactagaagccagcttatattcactaagaataaataaatcagattgtgctagcttaatttactgtaatagatttactataaatttaagatccgcagctacgattggcattcttaagatccaaatggagaaatatgagctgagtcacagtgtaactgggtggcttagtaattgagtgaacaatacaaaagatggtgattcatgaagacatgaacctggagggtagtttctatgtcatgtcacagggctctattcctggccttcatatttttctcagaaatatggatgacacacagaaggcaggcatatcgaatttgtagatgacaagaaactggaaaataaatatgttgcatgacagaatcagaaaccgtagatcaactggttacaatggcaggattttcaactctcacgacaatcttttttttttttccctaagatctctgaagaagattctgtaaccttcttcagaaaaatcataaaatagtttaacaatgaccacttggcaaggatagtgttgaggtgattcaagcaccagatgggtggttcagctaagtgacctttaaggtctctgccaaccctgagtttttatgactccaactttaagaatctttctcattttctgagatctccagaagagatttcccagccttccttggtaacccacagaatgtttaacaacactcaagacagcatttcctcttatctttgtcttaatcttgaagtattttctaaaattttttttttaaaccttatgttgttatcatgttttccccactagcagaagttctactagaaaatgttctagtgcagatgagcattctacatctggaaaattttccctgtcagaatgttttagatatgtaaagaattgtatttattttatatcctcacaatatcctagggatagcccttcaagaaattaatttaggatcacagcaaagccattgaattcataaaatgactaaaaccacctccacatggtggctgtccttcatttaaaaaaaaaacttttttaaatagagtaataactccccaaataatcctccagttcaaatgcagtttaatttaagtatcctatcaatggcaactgaatatattcagcaaaggatgagatttcctttttaacagcaagattttcccccacttactcatttatctccaaggcttcatgagctgcagaaatcctagcttgggggtttctctctctccaggctttctgcattactatttaagaaaaagagaaaacaccaagtcaatccatacatataattaggtagactcagtagaggacaagagctaaattaggagtgtcagcttaaattacaagaacatatttcattgctaagagggttggccaaaatctccaaagtcatattagtgtattaatgtgctattccacagtatttcaactgctgatagcaaaccttttttgtgctcacaaaactacaggctaaggaaatcaagaaaaggcactctaacagagattttgcgtgtcttttgcacattaatgtcatttgttcttggagaatatattttatgcattttgagatgacattgctaccaaccttttcattcacttagatacaacataattggtcattttccgaagcacttaacacagactcttggtgttagaacattctgaaaccatttcaagaattatgcgtgggtcagtaaaaaatgcttaagcttttgcttaacatgtgtacttatatcccaaatttacctgcaaacctagcttttatacatcagagcagtttctgaacatatggtgggaagctcaatgggaatatttactgtaccatgatgtttctaccatagcaaagagtaccattttacaaaggagtaacaatctccttatttattttataaatttgtattttataaattattttagagtgtgtagaggttccctttcaaaaacattttttcacctatttactttgaataaattttataacaaaaaatttcagttgaattatctgaaactcaagtaatgtaaaatacacactaaacaaagtattttctcagatggaacacacatctagactccaatagccaaggccatgaccccattcgatgctagttaacctataaataggcaaataaaagtcactaaaatatattcattaatcatctgaatccagtaaattccaatttctactttgaatatcataaaggagataaggccttcatgctaactcaaccaagaacttcattagcttcatataagattcatatttcttt

SEQ ID NO: 1183 - DNA, 4045 bp, Homo sapiens
ccatgatgttgtagctgctgagagcgtcggtaacagccatctccagccttcagggcctgcttaaataatttttctgcttcagcaatggttgttgcttcctcttcagccaagagaatataagcagttgcacacctgttcattcagataatagccaccatcaattacaaagccaaggacatggtaatagactgtaggagctcatgcagaaaggcaaggagttacgccaaaacatgcagagtggccaactggttcatgcactcctgtttgtagttgctgacacaaaataatggtacaaaagaaacatctgtattttagcttgagaggtaggatgcgtagtgttaagagcatggggctcacatgtggacttcaccctttatattagtgtgtcactttgggcaagttcttactctgcctccctgatggagaacaacatggaatctttgttcacagtgttgttgtgaaggttaagtaaggtgatgcatgtaaagtgctcagtacagtagccagcatgtggttaagtgctcaataaatgtcagctagtgatggtgatgataacagctgttattaaatagttccttccaacactcaaagttagaggtgctatatacaggtttacttctgttaactaaacacagattatcttcaatctaaggatttcttcagaataagaaattcgttaaatcaagttactcactgaaaaaaaacacagtgcttcaacatctctttacagttagcactgactttctgcttcagagaacactggaagaacctacaagtagtgttatttctgaagaactcaaaatctgactcagccacagtagctaacaagttaaatctcatgccttcaacaacaatagctaccacttgttgcttagtatatattaagcactgtaccaggcacttaacatatatcatctcatataatcttttcaacaaccctcttaggtgggaagccaaaaggataattaatgaacatggggagttcttgtgaatttaaaccttccaaagcatatgaggaacaacccactgccaaagaaagggaatgtaatagggaagtggtgaggctgtaacagaccacgcaggtcctgcacccatcctttcactctccttccccactgcctcacttgtggccatttccctacttatttccatcagaccacaagagagaaaataaacagaaagtaaaaccaaatgttacttttactgtccacaaactgcaatagccagctaggaaaaggaggctgaacttcacagctaatgtaagggctggggctactagttaatcttagccttaggaagggtctgtaaggtctttagccagtctctctaatttcaggcaggaaccatcaatggggctttaaacaatgtggtgaggtagggagaaaaatgcccagaaaaacagctataaaaccaatttctacagatggcagcatccatgacttggaaagaaccataatgatgctgaaactatacaagtgattcactggagaaaataactgggacaggcatcagaagaaatgcttaaggcttcagatgccaacatataaatatgaggcaagggtaatgaagtgaaaattgagattgtaatactgagtggtagatacagtatcagaggaattagctataagattgtagttgttgggctgggaacccaagaatggttggggctagcttgcttgctttgcttatttatatttcaaatggtattcttaggaggagaggcagagtagcactactggccaagaaacatacatctatgtggaaacgcatgagtttgggatagaaacatgctaagagcttgtgagtgaaggaaaaaggagagagcaatagaagtgctaatggttggggagtacagaacagactgctcagctcgatggaagatatagatgatgcatccttgtcacaacacaatacacatacagaagcaagaaagtgtggtgatgggggtgtcaaccatccagatatccactagaagtctcatttggttagaagtagggcacccaacaggttcttgacttactttggtaacaattttatctcccagatggtagaggaagcaattaggggaacttcaactctggacctaattctgaccaagaagaaaaaaatagttggtaaaatgaaaattgataggaacattcagagagagtcactatgtcatttcggagttcagggtaatcaaagaggggaaggtggacttcaaaaaattcaaagaaaagaggcatgattcaatggcatgagattcagaaggaaaaatggtttaagagggttgagcagcttccaaatgttcaactgtaactgcaatcacaaatgatcctctcaggaagaaaagaggggtggcacttaagtaaccaacacggcttcacagagatttctcccaggtcagatttttaaaggacatattttaaaagatggaaagagggcatgtaatgatggtctataagagagtggaatgagcttataagaataatgtcaggagagctacaattccaaattagctgaagcttgcaaaaataacaataataataataataataaaacaaaataaaatactaaagacaaccatttattccctattttaaaattatatttaaggccctatcaccgtccccatgtcacaaaggcaaataagtaaaaaaaaaagacaaacaacataataacatcaaaacaaggaaggtttattgttaaaagcagtagataataaagaaaaagcaaaactctctccctcctattttgttcctggcttctctatcaaggagaatgactgtcagactgaaaaagggagaagaaattaaactctaaaatgggtaaaaagatgtaagatagcaaataattgatccattctaaatgaattactggactggatgggcaaatcccaggaaaccgaaagaccttgtaggcaggccatggaattgctctctgtggatagttgaggaatcacaaagaatggagaggtgctagaagatgagatgataaatgtagcataaattttcaaaaaggggaagaaggcagacttcccaaactacagaacacagtgatttggaaagatattctaatggattattaaaggaatggtctccaagcactttaaaaagaaagtagtgacgactagaagccagcttatattcactaagaataaataaatcagattgtgctagcttaatttactgtaatagatttactataaatttaagatccgcagctacgattggcattcttaagatccaaatggagaaatatgagctgagtcacagtgtaactgggtggcttagtaattgagtgaacaatacaaaagatggtgattcatgaagacatgaacctggagggtagtttctatgtcatgtcacagggctctattcctggccttcatatttttctcagaaatatggatgacacacagaaggcaggcatatcgaatttgtagatgacaagaaactggaaaataaatatgttgcatgacagaatcagaaaccgtagatcaactggttacaatggcaggattttcaactctcacgacaatcttttttttttttccctaagatctctgaagaagattctgtaaccttcttcagaaaaatcataaaatagtttaacaatgaccacttggcaaggatagtgttgaggtgattcaagcaccagatgggtggttcagctaagtgacctttaaggtctctgccaaccctgagtttttatgactccaactttaagaatctttctcattttctgagatctccagaagagatttcccagccttccttggtaacccacagaatgtttaacaacactcaagacagcatttcctcttatctttgtcttaatcttgaagtattttctaaaattttttttttaaaccttatgttgttatcatgttttccccactagcagaagttctactagaaaatgttctagtgcagatgagcattctacatctggaaaattttccctgtcagaatgttttagatatgtaaagaattgtatttattttatatcctcacaatatcctagggatagcccttcaagaaattaatttaggatcacagcaaag

SEQ ID NO: 1184 - DNA, 4046 bp, Homo sapiens
ttgctcccgtggacaccctccgcccttttcttgtttgacctctgcatcatttgaaagtctgatggctttttctttgaaacacttgcctctcttggcttcttcaacagcattctcttctggttttctttatacttatctcacagctccttttctagtttccccttgtctctgatttaggagtaagtcttcttgcaggttatgtcccacatcctcttatcttaaacaccctgatctctagaactgttgtcatttccagggtctcagcatcagcatctccatggggatgacttccacaacctaacatcctgctcttgccaactgtcttcctgacagttttacctgagtgtccttaaaggcaacacacctaatactgagatgataatttcccccttcccaggccaacccttcaaacctgttcttccctccttggtatttcctatttcagagaaaagaaccattaacctcttgtcaccctcttctccctacagccactttagaggccctgcaacccccgagagttgatatttaaaacatgctgacagctttcattacattcaatgaaagctgtgttatgcaaacatacaccttaagaatcatgaacacttggacacaggaaggggaacatcacactctggggactgttgtggggtggggggaggggggagggatagcagagggtgatatacctaatgctagatgacgagttagtgggtgcagcacaccagcatggcacatgtatacgtatgtaactaacctgcacaatgtgcacatgtaccctaaaacttaaagtataataattaaaaaaaacaaagtaaaaaaaaaaaagaatcattaccatctcctcttttctctaaccatgctgccagtaacttatgcccctcatacgttgcctaaattgctcacacagcatctgcatttgtccatttgcctccaatcacctctttccaatccacccttccaatattgtcataaaggcttttttttttttgagagacagagtctggctctgtcacccagtctggagcgcagtggtgcaatctcagctcactgcaagctctgcctcccaggttcatgccattctcctgcctcagcctcccaagtagctggaactacaggcgcccaccaccatgcccggctaattttttgtatctttagtagagatggggtttcaccatgttagccaggatggtctcgatctcctgaccttgtgatccacctgcctcagcctcccaaagtgctgggattacaggtgtgagccactgcgcctggcccataaaggctcttatacacaagtgagtccatcacactcctgcttaaaaggcaatcacggacatgacgagatttatcccaaggaaataagcagatgttaatacaaatttacaaagctgtttatcacaacattatttgtaatagtaaaaaaaaaaaaaatgcaagcaacttaaaatttaacccattatgagatatttaagtataataaactatagtcaccttttgggctattatatgttgtcattagaagttaagttctcaaaaaactttcaacagcatagcctgggaaatgctggcatacaatattacactagagaaagcaggatacaaactatattttgtaataaaatcatgcttttcttatgagcctatgcatagaaacatacttggttagaaatacactaaaattataccaatatgctaaattatactaatatactaaaattttaacagcagttatttctagttgatgatattaaaggtgatttttatttcttccttcatattttctatatgttctaatttttaaaattttgttctaatattcattctataaactggggagggggacagccatttttaggaatactggcttctcactgaattcaggatataatctaaaatgcttagcatggcaaacgtagccccttgtgacaagtccctgtctaatatgccaacctcacttctagccacttcacacgcaccacgcatctggcatagaacagctttcagttccttaaacaggccatgttcactcatgttccaagctcctcctccctggagtgctctcctgtcctggtcaatctggccgctcctcaactttcaggaaatctttacctggcccctgactcctgacctcttaccttcatctgctggttaagtactcctggcctgaactaccagagtccttgtcacaatcatctacttgtccatcttctccatgagtctgagaagaacgtgagagcaggaactttgccttattgctgtattcttggtcagtgaccgacctatcataggtgctcaacacacacttcatgactggaatactttttaaaggctttaaatttctattgctttggagtacgtattataatattatatgtctactgccacagctctacttcaggccattgagttacatatccctaaacgtgtcctttatcatttataatcttccattatctacaccttggacaaggtataggtagaacctgtacgttttgactcaatgctcagaattttcttatacttagagctgtctgaaaatggaatagatggtctagagaagtctctgtcaccagaactatttatatacagagaagccagtcatgggatagggatactaaagaaaggaccaagaacctttcaaattctgcaattccaggtaaacaattcccagctcctaagcgtaacttttaaggccctctctcagctcaaggccagattcctccggcctctcctgtcttctgcaggattaaattctagccttgtcaaaccagactattacacgccattcccagaatcctttctatagttactagccaccgtgtttctgctcaaactgttttcaccacctggaataccttttcctctcatttacaaggcagcctgtcaaaatcaccccaccctccaaagcccagatcaaatgccacctcctaaagtcacagcatcatagaaagtgagagccagaagagtccgtggagatcatccaaacaccctcctcactttacagatgagctccctcccacccccgccccaccaaaaaacaataaaggctgcaagtttaagtgattcagccaagttagtgctgggattatgattcaaacccagtcatcagcactgagtccaaatttcaacacatcagaaccctagtttctatgttgccaagtccagaactaaaccattttgcttatgcttctcacacaatgctattgtatcatctttgtattgtgtttacatgaatttaagaagatagctgtattgcagaggaaagagtcctatatttaaagttattcttgaattaaaatccaacctctgccattaactacctgtgtgaatttgcacaaattatttacctctctgagctttggtttcttcatctcctgggtcttagctcatatggcatcttctcaaactctctctaccaccctacctaatgtcaccacccaccccctcatatcaccattttccattgtttctatcacattctgaaatcatcttatttatgcagctgaatattagataattcaaaaaacaaaactaaaaacaataaaatagagggtgagaggtgggggggtctagttttattcttttgtgtatgaatatccagtttccccaacaccactttttgaagagactgtcctttctccagtgacaacggttcttggcacctttgtcaaaatcagttggctgtagatatgtggatgaatttctggcttctttattctgttccatcggtttgtgtgtctgttttgatgccagtaccatgcagtttgggttacaatagcttatagtatgatgcctccagctttgtactttttgcttagaattgctttggctatttggggtcttttgtggttccacacagattttaggattgtttttctatttctatgaagaatgtcattggtattttgatacagattgcagcaaaactgtagattgcttccaaaaacctcaatgtaaggtccaagactataaaactactagaagaaaacataggggaaatgcttcaggacattggtctgggaaaatattttatgaataagacctcaaaa

SEQ ID NO: 1185 - DNA, 4024 bp, Homo sapiens
tatcatcagagacagaagtttgtcatgcatatagtcctcactgaaatgacatctattatcagaacttttgctcaatgcaatatatagttcatccctgacagtctatcatttgttctaaagtaacctcaaaggactagtcctcttggcagatctacctcttggtgtccaaatctgtagagcatccagtgcaaagctatgcaggaccaccatttctcagtgacttgtgcttacaggcatgaagccacagccatagtatcagtgctgataattattttcttctttgaagcactgatgtggttcattcgcccatcttttacacaaggactctctttgagcacttgcctggtaaccatgatcttttccgtaacagcgagcccagggaaatgagccggactaggtttatagtctgtcactagaaactgacagcataccaaatcttctttctaatatgcagccaaattttgtggtgagtattttcagaggctgcttgtgcctgtggcatcaaaattcacatttatatacttaactgaaaagtactgttttggaagtatggacatactgacacttgaagtgtttgacaaatacagattttactcattggacctccagacatctcacatccttcctatttttacttattcctcaaacataaatggaaaacagcctaaccaaaagacagggtatccagtaaccatttcaaaggaactatgatgatagctgaataacttgtgctagttataaggccttgggaaataagcaaggtttacgaaatttttagttataactacatgctgactctgcaaaacagtatcagcaaaaggctttttctctgaatagtctcaacatagcatgattccctaatgactttccttagaacttctgttttcaatctactgagatgaaagcatttcctccaatgttagaaacatgtccttttctaaaaagtataccctctgcaaattaccagatggcagataataatgctaatttaggatgggcttgatggcatcagtaaaaatgatcttgatatagtggttgcatttatataacttttgtgactgtaagaaagaccagctgtccctagttcgtttgagaaggaagggaagaacaagagaagattctgccccaaatttagggcaatcactaaatgacttaacggagtaaatatccaaaagtgcttagatctgtatttccattaggacaaattgttcagaggctgaagttgctatgaacccaaagaagtaatttttcctttgatcaggagtaaaaatccctggcatgtcttttttcagctttccaaaagtttagataaaactaagaattttagttcttatcaaatatctatatgtcctattagatccataattaattttaataacaagtcgtaacattgtctttttgcagagcataagactgggctcttattctctcattgcgacattttatatatagttttccatttgaacaagactaatgaagaatagtggtgaagtttaggagtgacacttttggctctttataatagcgaataatatctgaactcttactgtgtgtcccacactgttcttgacacttaacatagattaaactactttaatcctcacaacaaattacccgctgtgtgatcttgggcaagttacttagcctttctaagtctcgatctcatttccagagaaagaaaccaaggcttggaatgttaagtaatttgctcaagctccctcagttggtgaaaggcagagctgggacctgatccacctcttccccaccacccatgactgccttctggtatccccaaggatcactaactagagacaggcagaactagatgctcccaaaggtaccttatagtgctcagacctgtgttcgcttgctgtacgagattctcctaaaattgaaatgcacaaatgacaatgaataagaaacatatgaattcttttccacactcccaccctaatctttgggacttaagttttcacgtaggtggcctataaacttctttgaaaggcaatccaaagcttgtaagaacttttgcaacggcttctaaaagaaggttctcatgacttaatgatcttgaaaacatggctgtctttatagcaaatgtatgactgaagagaaagataaataaatctcaaattaaatgaacatcttacatcaaatcccctttgtgattaaaaaaatcagatacaagttgattgaagatggaaagccatgtttggaagacagtttcagaaagacaagcaaatatagatacactcagttcttaaagaatgattagaaaggaatcttgcaagacaatgaggcgtcactgaaattctgcaccatggcttcagcccacctaagtcatgcctttgtaagaggagtgagagaggcccagcacatcacttttgggaggcttacatttatgcaaaacacatgggatttagagccagctggatctggatttgaatcccagctctgcagttttctaagaatgtggtcttgtaagttatttaatctcacaaagcctcagtttctgcatctgctaaaatggaataactgcctccttgcagggttattgtgagggtaaagctaatgccaagctaataacatgcttggcacatggtaggttctcaatagattgtggctaataacaacaacaagaacaatggtattaataaaaacaatttaaataaatactaccaacagcagaaagagtgtaagtgtggtggttaaaagcatgggtctggagtgagaccacctccgtttttatcctggctttcctttacttgtagaattcacatcatatttaatgaagttgttctcagtcgatcacttttctctcataacatcacatctacatggctttactttgatattataggctcttcctgtgagcaattaccttctttttgtaccagttaccatacctgcaaaatggggctaacaacagtatctaccaaatatgcttgtggtttgaatcatgtatgatactgatacattacaagaactcaataaatgctagctgttgctgctattttagtcactgtgtgaagaacattatagaaccaggatcagccacctggaataaaactgcccacctataatgttgaatcacaaattgaaaatacaagagtatgaaaaatcctgaggatagcaatatagtattttagactaatacctggaataataaagcattagaagttatctcaatggcaaaaatcaaaatcagactgcagactacatggatatatgtccaatcaactggtaatctttgtggggacacaggagtatatgattgttactgatttataaactcaaagccaaactttttttaaggtggtgaagaacaatgagacaaggggaatacattttgcctcccttctttcccccaaaatatgttcttcgacacccccatccctggcccccagtgccttgccatttttctaaatctttttgaaaaggtcagaaaagcagaactaatcccattgtgttcccagcatactacttaaaaaattcagccacctagcaaatgtaataaagaaggattgctgtacccaaaaacaatccaaaaaacggctacccaaccagagcattccaattagtaaaaaggacatataatcctgctgctttgggtgtggctctacagagagggatgaaggggctgggattctaagtgctgtctccagcatctcatggattagacatctgaaccagggtgaagatcagaatgccctaaaagctgtctgtactctaagacctctaaagcacccacttcctcgcccagggccagataaggaaccagcaactcagtagacgtctccaggaaaagcagcagggataaacttgaaagaacccatttcatgatatggggtgagaaacaagaggcatgtttttccacaatcttcagtggctgcagctcaaccctcaagaacagtaacttcagcagccacttcattatatttctactgtaaatgatacaggcctgagccaagtcagcaccaaaactcccttcagaattcagtcggtgttaggtcatctgtactct

SEQ ID NO: 1186 - DNA, 4045 bp, Homo sapiens
catcttctgcccttcactgcatccctcctcatccctctgctctaagggatacagacaattctccaaataagccatgccaattgtgcctctgcacatttccatatgctttccttgcctcaagcacctttgctgtccagttcagacaccacctccaaggggaagactcccgtcactcctccttgctgcatgcagtgccccttccatcctgggctaaagtgtatcacaatctttatacttaacagcaattgcctgttctcttacttccctgtcctgcgtacatggtgtgatttaggagtaaaagctgtgcttcttcatcaccttgcacccacaacaaaaaacaatgtctgaaatatagttggcgctcagtgtttgctgaataaaatcctaaattaatgtactaacatctcaaatatcttgatattagcttccttcattttgcaaacatttacatccaatttagctcctagaagccaaaattgatcagtgttgtacgttctaatagggaatcagaaacttgttatttctcaacatgtgtactgcatttatctttgcttacagttccagcagagtttgaaattgtgttggtgctctaatctcgatgtctatttgaaacagcagtggaatgaaattatggggcaggatgaagaaaaacaataaagtaaaaactgaaacaaggttgaagaaaagtagaaaaaacaaagaaaaccacacctcttctggctccttaaggacccgttattggaatgctgctgctgaaacaaaaggtcatcttagggagaatgactcttgaattttcaaaagtcataagtggttcataatagccaaactttaattcaataatcttggaagaaatgtctgtaattatgagtaaaactgtcaattagatgggtcttggaaaacttatggtgcaaaactttagacaggatagaacagttttccatgataacctttttgacctaatatccttttgttcatctcccagtaataacaatcaagacgtagttttaaaaggatcattactattcttatgcatgataggtcaactgagggtcaattctcatatctatgaatctaaaattttttcaaaggtggcagcaagtagatatataaatcccaaaccatctcacaaatgagaacactgtgtcgtagtgggatcttatgtatcaattcactcacagaccacagatattcccaatgactaccctagtacacagaggttgagatgaaagtaggggggcatgagtttgctctcaagggctttctttctctgcactccccacagcttgtttcaaacagactcactgagcactgattcatctcgcttcgcctgtttttttgtatttttgttttttaacatctttctctactagactgaaaccatcttggtgacagagaataggttatatttatctctgaatctaaagcacctaaaagttcgtacttcaacataataaggactcaacagatccttgctgaaataatttgaaaaaaattaacctatttactctctgttatcctttaaaattatgaagtaccaagaatcccttttcttggtcaggcaacaaattatatcaggcaacaaatgatatcatttctaccagatacacttgaagctcctataatccagcatatttggccttcacagatgctcttggaagcatgacccaaacaaacaaacaaaaatggaaaagaaatttaaaaagcagtccatttctccttcgtaacctgtttgtggattgtgatgtgttcttactgtcccattatgtgattaatttctcaatttacttgtttatgatatgatgtaaagaaaacaatagacatacaggattctccttaaatttttgttactgttgatcccaggcagtatgaggtctttttgccccaccttcaaaaagccaatccgaggtccccttccaaccaaagggaaaaatttcactgaagaaataaaagggattgatatacaagaatctcaaaaagatgtgccacttgggagttcaatgattcaactgggaagttctacatgaccttagtaatttggggcagggggaaagacaagcactaagcattcaactacacccagaaaaattcgtcttacgctacaaagccaaacaccagttgttattttcaacttttggactggattaccccagaaggtctgtgtcagagggcccttccgtggctggtgccctgaagccaaacaaagcagtttccctgatggtaatggctggctggggagggatgttaccttggtaaattatgataactgggcaataaggattaccaaacccaacataaatttggagggtttgtacatgtgccagctatgtgaattacagatgtatgcattcaccaaaggtcttctatcatcagagacagaagtttgtcatgcatatagtcctcactgaaatgacatctattatcagaacttttgctcaatgcaatatatagttcatccctgacagtctatcatttgttctaaagtaacctcaaaggactagtcctcttggcagatctacctcttggtgtccaaatctgtagagcatccagtgcaaagctatgcaggaccaccatttctcagtgacttgtgcttacaggcatgaagccacagccatagtatcagtgctgataattattttcttctttgaagcactgatgtggttcattcgcccatcttttacacaaggactctctttgagcacttgcctggtaaccatgatcttttccgtaacagcgagcccagggaaatgagccggactaggtttatagtctgtcactagaaactgacagcataccaaatcttctttctaatatgcagccaaattttgtggtgagtattttcagaggctgcttgtgcctgtggcatcaaaattcacatttatatacttaactgaaaagtactgttttggaagtatggacatactgacacttgaagtgtttgacaaatacagattttactcattggacctccagacatctcacatccttcctatttttacttattcctcaaacataaatggaaaacagcctaaccaaaagacagggtatccagtaaccatttcaaaggaactatgatgatagctgaataacttgtgctagttataaggccttgggaaataagcaaggtttacgaaatttttagttataactacatgctgactctgcaaaacagtatcagcaaaaggctttttctctgaatagtctcaacatagcatgattccctaatgactttccttagaacttctgttttcaatctactgagatgaaagcatttcctccaatgttagaaacatgtccttttctaaaaagtataccctctgcaaattaccagatggcagataataatgctaatttaggatgggcttgatggcatcagtaaaaatgatcttgatatagtggttgcatttatataacttttgtgactgtaagaaagaccagctgtccctagttcgtttgagaaggaagggaagaacaagagaagattctgccccaaatttagggcaatcactaaatgacttaacggagtaaatatccaaaagtgcttagatctgtatttccattaggacaaattgttcagaggctgaagttgctatgaacccaaagaagtaatttttcctttgatcaggagtaaaaatccctggcatgtcttttttcagctttccaaaagtttagataaaactaagaattttagttcttatcaaatatctatatgtcctattagatccataattaattttaataacaagtcgtaacattgtctttttgcagagcataagactgggctcttattctctcattgcgacattttatatatagttttccatttgaacaagactaatgaagaatagtggtgaagtttaggagtgacacttttggctctttataatagcgaataatatctgaactcttactgtgtgtcccacactgttcttgacacttaacatagattaaactactttaatcctcacaacaaattacccgctgtgtgatcttgggcaagttacttagcctttctaagtctcgatctcatttccagagaaagaaacca

SEQ ID NO: 1187 - DNA, 4044 bp, Homo sapiens
tctagtcatggcaggagttaaattcggctgtcaagtctctgtctaaatggctaatctaaatcttctacgaggtacctgctcaggtcaggggaagaggtaggactgacaagggcagacagtgtaggaaaaagagaaaactaggttacagaagagcgcacttggttaaaaacagaactgggaaggatttgaaaggaggcctcccacccaatgtcagtgctgcgatggaggttaaatcgttgcagcttcagcagcaggcgagcctgcttggggccattccggcagagggtgtgtgcatgcccaaactgcgggcaagacacctgcccaagtgaatgaaaaaaaccagaccatgcaatctctttctcacctcacacccagggctaactccagagctgtgcttggcaggcagacaccacaggggaagctgtgacaaccctggccctgccctcccaagctggagtcgctgtgtagggagaaaagatgttgcagtaggtactggcgatctacaggataaaaaagaatgaaagaaaattactttggtcttgaagtgtacacacacttaacagcaaacctgtctgatacagcagaggctggtttcctgttctctgctttcgatgctacagagggattatattggggaagcgtaagagtttatgaactcaaaagcagttaagccatctatgctctttcatctgacaggcatccttggatgcttatgaaaagtctatatgtcatagtcacctgcctgaacaaaataggcaaacgtaccattgagatggcaactcaaagttaatagaccagtggggggctaatttgaagttgatgaggcaaagaatgagagatgaccatcctgtctgccacattccacgtgtgtatgacactacccagttatggaccgctgaagggagaggaatgtgcaaaaaacaaatagaaggatggtattctgtgttaagtcccaagcaggtgttttggtatctactgtctcacaccaaaaaactcatctcagaagcatggaatttcaaataaatcctgctttaggatacctttacacacccttacattacctgaggatatacattccctccttccaatagtgaaagaaaagaacagcaggttttggaaaatgcatgcttataagcaggggtctcatagcctaagagaaacttccagagaaagccctcagaggcaacacatctcaattccggtcaggcattagtaccgcgcaaactattattcacttacttgtcagagacagctcttgctttgagcaaagcagctgtgtagcatattgttgctgactttggtaagcttatatctgttggagaaaaagaaagtaggaacacataagtttgcaggtaacaaagagcaatcattttcaatacactagcattttaatcacgtttaagtgcaataaagcataaatgaagaatattttaatacagacattacacaagaatttcagctattccttactgtatcaacgtggtatgtgaaactaagggtagtttgtatttttgtgaataattcatgtccaacaggctgactcttaagcaatcaccttctattttaaaatatgaattttcatatgttgagtttaagcagagtatagctataaatatatacatttagatatcacatgaatatccttgatgtgaaagacatgaaagtgtctttgtcacttacaaaaatttctcaacaggtatatgaaatgctaattgaagaaaaaaatctagattaaaagaagacttagccaaatgaatgattctttagtggacagatttaaactaaatttcctttgcattaaatttcaagtttacattcaatttttaatagtgcttgttaaaaatgtaaaagtccaagttatatatatgtctaatatataaataaacatatataacttttaaagggtatatgtatgaaatctttagaaaactacacaatttttgctcatgaaaacctatcataaatctcctttcatatgaagcctcacttgtcatcaggaaaaacagttcctttcaattttacaaaaatttcagaagggccagggtgggtgtggggttcagataatgagtttacaggaaagtgaaagcacagggtacaagtgagagtagataaactcaaagagggcacccctttgggtgaaaaatgtgttcttaaattatgattgcattctttccagaataggagttagtatttaatacttgcaaccaaatttacactatgacacagaaataccttaattcagaacaggtaaaaatatgccattcccagatgctgcaaaattcattctaggttagaggaactctttgcccctggaatgccctgcgagtttctttgcaaggctgttttcaacttagaaaggattacagtaaagtagaaatgaaaaatagaagtcccataattagccaatagacagaggcagaagaaaacaatttcataaagaaaaccaatctctctttcaataaagagtatttaatgccaattccaaggagattcctaaggaatttctctttgagggaaatttcaatgacattgataaaacacaatcatagaaaatatcagcacagaattgaaaggaaaacaggtctttgtacccgtaatctcttaaactatattcaagcaaaatgtcaccaccacatacatactatataaaatggtgcacttacaattaagaagaaaaaaatgccagacactcatggattagtcttgttgcttttccagcatctaaacatttaacagctttccagtgtggggaatcaatacaggaacgaaatatgttgttttctagggtatactcattgattgttatttgaagctaataaaaaaaactagatgacacatggcctacttaaaagttcagactttttattttaaaattacccaagccttgtttccgaaaacaatgatcataactatttgaaggtggcagcacaagaaggagcctctttttaatgacttagctgcccaacaagaaagatcaagttgtgtttgatggttatctaatcaatcaaatggacactttcacccagatagaaatacagaaaaagatacattcgaggtgttccagcaaatgactagagatgcctaatcaaaggtaatctttaatctagaatcctgacctccgttcccactagcatagacaggacattcacagctagaaaaatgcaacagcattcagcaacattatgacgactacagtaccttttctccatttttaaaatgtttgctccttctcctttattaagtagtatatgtgcacaagaaaaatgcttaaaaaaaataaccaaaatatattttaatcaatatcaaagagggaaatgtagctctatgaaaataccccattccccattagtggcatgtcattctacttatctttttatgctagtaagttattttgttctcactgattaacagaaatagaaaatagcaaaatattcttgcatggctggtttatttagatattttcaatgttattcttttatctgtaaaaacattacatctacttggtaatagcaatttgcctctaaggagggatgaatcactctaaagaaacggatcctaaatttcccttcacatagagcatcttgttgttcaaataggttttggtttacaattttcatttttgaaaatgatgcatatttttctgcagagcacttaggcaatataaatggaaagcttttacattttgactacccagcaattccacttctaagactttatcctaggaaataatcatcaatgtgcacaaagattgttcatcacaacattgtttctaatggaaaattggaaatggcccaatgtccaatcatagactggctaacatgctgtaagttcattcacagggtacaattccatgcagtcattaaattatgcggtggaaaggtactgaatgatctgggggaaatgtattgtgcacatatcaataagtttataaaaagtatgctttaatattcatttttaaaagcatttctatgcacaaagattggaataatatgcaccaaatattgtagactccccttatcagtagtttcactttctgtggtttca

SEQ ID NO: 1188 - DNA, 4043 bp, Homo sapiens
agtaaaatcccaggaatattagatcacttatctctgtcactctgaatatcaacaaaataaagtagttaactccataaaccatctctctctctctcactcatacccccccacccttttgctatagtgctacaacacaagtcaaacagccttcctttgtcatttttcaccactaagtcttcatcagacattttgccaaggaagttatggcttgtcatacctgaggtgaaccacacgaagtttcttagaggccaaaatgtacttaatagcgggactgaaagtggctctcagctactttttttcctccctcagagaagatgataattacgtaatacagcatgtagatactaaaagagcagggagttaaatataggtaaataataaatacacattcatctcctgaataaaagattacagaaatattccctgctctgatttgattcccttaaaatcaatttcaggaaaaaaaattggaaatattgggtatttataaattggtcaaccatgtggttaataactaagacaaatattttctactatatacacttattaaaatggtacaaagcaaaatacttcttcatattttgaagttttctctattattttcttgccaatactgattactatcattcatttatagagacacggaatgccacattagtattttttttttaccagttttattcacaacaacatttatttcctgagtttggtctatgtgagaccataactggtgtgaaattcctgtcaaatgtgtcaacactcccgggatatctactttttgccaatttcaggcttcctggcctgcctaagcgaggtctatcgatttacccttattaagtgaagtctggaaatctgccccaaagcctcttgagtatagcttttgcttaaaatgaggctaatgcccatacattatacagggtctcaacatttgttggttgcaattcatttttttataagcggtgtacttgagatacaacactgtggtcaatgaatgctttctctgctatcataacgagttcctgtggggattccacagactcacttttggcacatgaggattgaattccacagctctatgaatggcctctactgcattcatctctgctgtgctcagcccccgccgagatgcagcctcaggagagaatctgaaaagcagaaagacaaaaaccatccaggtgggaccactgcttgggcatcaacccggaagcatctacacatctagggcccataaaaccacagtgagccaatagcatgagctctccaaacttctactgcatggaacctctgagtgaccccacggaccgaggccagcaaaaaccccagcagaagcagaaagcgtgcttgcatctagtcatggcaggagttaaattcggctgtcaagtctctgtctaaatggctaatctaaatcttctacgaggtacctgctcaggtcaggggaagaggtaggactgacaagggcagacagtgtaggaaaaagagaaaactaggttacagaagagcgcacttggttaaaaacagaactgggaaggatttgaaaggaggcctcccacccaatgtcagtgctgcgatggaggttaaatcgttgcagcttcagcagcaggcgagcctgcttggggccattccggcagagggtgtgtgcatgcccaaactgcgggcaagacacctgcccaagtgaatgaaaaaaaccagaccatgcaatctctttctcacctcacacccagggctaactccagagctgtgcttggcaggcagacaccacaggggaagctgtgacaaccctggccctgccctcccaagctggagtcgctgtgtagggagaaaagatgttgcagtaggtactggcgatctacaggataaaaaagaatgaaagaaaattactttggtcttgaagtgtacacacacttaacagcaaacctgtctgatacagcagaggctggtttcctgttctctgctttcgatgctacagagggattatattggggaagcgtaagagtttatgaactcaaaagcagttaagccatctatgctctttcatctgacaggcatccttggatgcttatgaaaagtctatatgtcatagtcacctgcctgaacaaaataggcaaacgtaccattgagatggcaactcaaagttaatagaccagtggggggctaatttgaagttgatgaggcaaagaatgagagatgaccatcctgtctgccacattccacgtgtgtatgacactacccagttatggaccgctgaagggagaggaatgtgcaaaaaacaaatagaaggatggtattctgtgttaagtcccaagcaggtgttttggtatctactgtctcacaccaaaaaactcatctcagaagcatggaatttcaaataaatcctgctttaggatacctttacacacccttacattacctgaggatatacattccctccttccaatagtgaaagaaaagaacagcaggttttggaaaatgcatgcttataagcaggggtctcatagcctaagagaaacttccagagaaagccctcagaggcaacacatctcaattccggtcaggcattagtaccgcgcaaactattattcacttacttgtcagagacagctcttgctttgagcaaagcagctgtgtagcatattgttgctgactttggtaagcttatatctgttggagaaaaagaaagtaggaacacataagtttgcaggtaacaaagagcaatcattttcaatacactagcattttaatcacgtttaagtgcaataaagcataaatgaagaatattttaatacagacattacacaagaatttcagctattccttactgtatcaacgtggtatgtgaaactaagggtagtttgtatttttgtgaataattcatgtccaacaggctgactcttaagcaatcaccttctattttaaaatatgaattttcatatgttgagtttaagcagagtatagctataaatatatacatttagatatcacatgaatatccttgatgtgaaagacatgaaagtgtctttgtcacttacaaaaatttctcaacaggtatatgaaatgctaattgaagaaaaaaatctagattaaaagaagacttagccaaatgaatgattctttagtggacagatttaaactaaatttcctttgcattaaatttcaagtttacattcaatttttaatagtgcttgttaaaaatgtaaaagtccaagttatatatatgtctaatatataaataaacatatataacttttaaagggtatatgtatgaaatctttagaaaactacacaatttttgctcatgaaaacctatcataaatctcctttcatatgaagcctcacttgtcatcaggaaaaacagttcctttcaattttacaaaaatttcagaagggccagggtgggtgtggggttcagataatgagtttacaggaaagtgaaagcacagggtacaagtgagagtagataaactcaaagagggcacccctttgggtgaaaaatgtgttcttaaattatgattgcattctttccagaataggagttagtatttaatacttgcaaccaaatttacactatgacacagaaataccttaattcagaacaggtaaaaatatgccattcccagatgctgcaaaattcattctaggttagaggaactctttgcccctggaatgccctgcgagtttctttgcaaggctgttttcaacttagaaaggattacagtaaagtagaaatgaaaaatagaagtcccataattagccaatagacagaggcagaagaaaacaatttcataaagaaaaccaatctctctttcaataaagagtatttaatgccaattccaaggagattcctaaggaatttctctttgagggaaatttcaatgacattgataaaacacaatcatagaaaatatcagcacagaattgaaaggaaaacaggtctttgtacccgtaatctcttaaactatattcaagcaaaatgtcaccaccacatacatactatataaaatggtgcacttacaattaagaagaaaaaaatgccagacactcatgga

SEQ ID NO: 1189 - DNA, 4025 bp, Homo sapiens
aatgctgtttctcctctaagttctctccaatctttgtgtatgtgtactaatcacacgccaccttatattagttattgtgtatcttgttcctctgctaaatcataagacccccaagagcatgaactttgccatctgcaccttaatttcccctccccacacctcctacagagccttgcacatcaaggtaatatttttttaagttgaattacattgaaatcttacttcccaagaagtctctcaaagtgaacatccctggcctaatcagccttatgaggctaaccaaagcaatacatcaaggaaacaactctgccttctcatcttatctatcttatggcagaaatcggctatgactataaaagagatttacactcctttataattccaaacaaaatgttggccctaaccaaatgatgaaggctaataacaacaatgtgttatgtttttggccaggcttaaaatggctggcaagatcagttctcaacatgtgcaacatttaaattagaaaagcatggaacaacatttcacatcttacttgtcaagagaaaaataaatggaacagggcagatccctatccacaagtatgcagaaatcaattagaataactgtagctcacaaatcaaagaacacgctttgtccatctataataatggcttggttctgtgctattttgcccgccatcctgcctctaacttccttcccagataaaatcacactgatcttgaaatgcagtgcttctaaaaattttggaagcaacttttcaaaatctatttgtgtcagcctccactgcaggagcatccaaagtcagggcatatgaagagaagcagagagctgtggtctttaggtgtgagcagcgcctactcatggaggtctctgagtggagactggctcacctgtcagggaaactgctgaagagatgtggcctattagaggctaccttgggtggctgctaaagtgctttttgctaagatcttaaaattctatcataatttgaatgaaaatgatcccatagttatcattcacataaatgttaataccaaagaattaactcatacaactattttttcgggattttcaatatcaacaatagcataagtcatatgaaaatcattagcaaaagtataaataaacaaaatgtgaaaaaaaacaggtacattaatttatatcacagtcaatgatgactattaagttgctcccaaaaccaggtagtgaaataatatgtattagcacagggaaatgttcatcatacattgctaaatggaaaaaaatcaatgtaccctaacaatttacatagcagattattaattattttgacaaaaaaaggtataggtaggcattaaaaaccattggacaatcacaggttgaatgttcatggtggttaaatatttgattttaatgggagattaacttcttttgtactccttctgtgctttccaagttttctataataagcattttttaagggatggggtctcactctgttgtccaggctggagtgcagtggtgcaaccatagctcactgcagccttgaactcctgggctcaagcgatcctcctgcctcagcctcccaagttactgggactataaggcatatgccaccatgcctggcttgtaataagcatttttatttttctctctctctatatgtatgtaagtatatatgtaatacaaatctattttctagacttgcatcaaaaacagacacaaccacacacacacacaaacatacaaacaaaagataactggagatagcaaatttttttcatgcctacaatgctttggtgcaactggctctgataaaatggcctaagaccagaaaagatgtttttaaaacatcaataaggagttctgagaataaagctagtgctatttgggagagacaccacatagtctgagtttcaatgttgcttactccctggaatcagtaagacacaaagcaggcacaggacaaaaaaaacactgcaagtagccatggctcactcagatcatgcggtgatggagaatgaggtagacatcaccaggattccttgccttacctcctctcatctaccatctgccactttgaatcacttactggaatcctggctctactgtttagctacgagaccctggacatgttatttaatttctttgaacctcagtttgctcctctgtaaaactggaatagtaaaaacacaccttgctggttttaatttttgaagattatgtaatatatgtaaagcattcattcacatagtacctggcatataagcgtgcattgaatagtagatatttttgctaccaaaaaaattaaatgttcatattactgtagaggtaatttgtgttttccacatatacatgtcccacagataactgagtttgtttttaggtaaaatacttcagcacttttattgtagtagcagatcagttgaagagacctgggctaacgagggtcattaaccgaccgatatggaggcaagcataaagcaaagctgaattgtcaaattaaacctggtgatttcagtaccactcaggggtcctcatcacaaggcacctgcttcttcctggttcacttctctgttcatcggttactttgcttcattcaaaaaatatgcgaaggcccacagtgtatctcaagtgtacagatatgggagcacccacagcctatccaaggacatggatatggaaggatcctttgtgtattccaaggacacagatatggaagcaccataatttacctcaggggcatggatatgaatcaggccaggtccccaccttgatgatccatagtctttgtaggagtagaggagggagagagagaggagagaaaaagagaatgtatggagaaagaataaaattcaacatggtaagtaccttagtaagatgtataaacttagcactaaggaagcaaatggagagcattgtgtctgagaagcttcacagaaaaatgaaaacatcaattttactaattaaataagagtttatactgaaaaaatgaggaggggggattccaaaccagcattaacgggcaaagtataccaaaagcatcaaagcctaccaaaagcaaaccaaggcattcaagggcatgatgtgtttctaaactggtggggcctgagtactaacatgatggtaactgccaacactgattacacactaacacacatgccaagcattatctcagtaactccttaacactaactctgtgatagagctaatatttctattcctgtttcacagatgggaaaatgaaggctttaggaactaacttgttcagggttacacagttggaagtggcaaaacctgcatttgaactcaggctactctccaaaggagtgaagtagaaaaagtaggctgtaaaaggccttcatgacctgctccagagggtgccctgaccttcagtaactggttttcagacttttagacacagactacagttggctcttgagcaacctgggtttgaactgcacaggcttacttttatacaaaatttttttcaactaaacacggattgaaaatataatattcatgggatgggaaacctgcatatacagagagctgattttttgcataacacaggttctgttcggttctgcagggcccactgggggacttgagtatgtgcagattttggtatatgtgaggggtcctggaaccaatcccctgcagatactgagggggggaaaaaaacacttagaatctgtgaagctgatgaaaaacaaagctgtggggaaatctgagggagggacccaagagaggtccggggaaccctcctggctctcctaggaggacagtttggaaatcactgccataggcaattgggaagtgagttgtgcagtttgcaattttgagagaaatgggtgagtcatgtgtaggatcaacagacagggaacagatggaaattagcaaagtcttaaaaagctcctgttagagtccaggtgatggggacaaaattgcggggtggaggaggagcttctccaggacttggcacctgactaaatgtgagagtgagggaaagaaccgaaggtgacaaatttttggcataagaaact

SEQ ID NO: 1190 - DNA, 4047 bp, Homo sapiens
aattcagaaagaccattcttgtgtcagtataaaagaaagacggtggaggataagacaggaagcaaggagaccagttaagactatggcaggagttcaggcaagaaacaacaaggacctagactaagagggatgctttgggaaaaggagggaaagaagaggtgaatcacatttactgaaggcctagttgcttaggaggttagaactgacagattgtgaaggccgagacgatgggatgtggggagtgagagagggaagagtttggaagggctgccgagtttccggcttgagcaacggggtggatggcggaggtcaggaatacaggaggaggagcagttttggtggtgggggaagaggggtgatgagttcagttttggaaatgttgagattgaggtgccggagggatttccagttcatcttcaacacgcatgaaaatactcttgcaattccagtccctgaactctgccgagcagaaaatgtcaatcatctggaaagggattaaatcaacccagccaagttagaaatcatcctttctgattgcactcgccttgaaatctgaatggagttccagggaaacaattgatactgttttccttattccttctgtttgaaactcatctgtggcaagatcagtaaacttatcctcaactgcatgtgcaggttgaaatggtcagttttcaacaaagaaacaatggttcttggctgtcaatgcagatggcttttcttattaaagctcctctccccaagctccttaaagactcttaatggatttccatatttctaaatgtcatttcagtttacttcttaataagccctttacaccctctgttcattccttagacaagccaagggtttgcagccattaaaaaaaattatttaaatcatctttgaaaatgtaaatctcatccttcactaaggaaagacccacaatatccaacgattggaaataatgtcattcaatttacagaaaaccgagtaacttcccacacattttcatttgctaggatttcctaaatcattccatccttttggacctcctgcattttttggaaactgctaagaatttgttgtgaaatgaggcaaggcatgcagtaacaacctgcactttctcatttgacccttaatgctttgattccattgacgatcatgaaaattaaatggtgagcaatgatctttgcaggctcgtacccatttctgtaaggcaaccccatttctctcacgctgcttttatgcccttggctttccccatccattccccaaggcctccctctaggcaaacactcacagcttttgcgaagacccccataagttccgggaactgatgtgtcaggagggccagcatggctgtgaaggaacataatccagcagtaaagagaataaagaagggaagctccttctttgggtaaactgagacttcatggaaagctgtggagaagaccaaaagggaaatatcagggctggagtaaactgcactctcaggggaggtctttatggtggcactgactccagagcttgggaaagagttggaagcctatgggaaatgaaaaaatagcacacctgacaaaccatagccaacatctgacccagcctttggaggcccatctgctggtcgcaagtctccatccagccttcagcactctaaattgaggcaggagggggctgatttgagggtgtcacgccttcatgggagggaagaggagcaccgcctatgcctaatgtatagtatttttttctcaaaagcaaacacagctgaaacaatttgtaatttactcaaattacaaaacacgtgttcattgtacaaaacctggaaaatccaaaaccgagtatacagggaaaaaaggtatcccgtctatattttttccttcctgtatttaaaaaatcattataatgagatgatactagtttctcctgtattttttcctggcaccctctaagtatatcagtggagggtgccaccctcatagagagatatccagcaaggacctcacatgtaggtctattcaaactgcaaggagggaaggtcaagactgctagggttatctggcacaattgtaagagactcttgatgacaaatacacttccaacaatcatcaaaaaaacaagaaaagctggtgctctttagagtgccctctataatttttatattatatttcaaacattgggtttgggaaaaccaaaaagctgtggtacagaggtcaagagaatcgcctccttctctgtgctcatgatgaggctgcctgagagactgcctgggtcgatggggcgggcctgcaggaggagaaagagccacctgctgggggtgctgggggagaggctgtgaaactgcacgtgagaaacagcccactctaaccaagaggaccagagggctccatggtcctcagggaatacaagatctagaggcctttcctctaccattcagctcctattcctcagagtcttcaacagtaatccacaaggctaatactgagggtggagggaatccaggaggaactccatgcagacgaatatgcctactacatccaggtaggtcagcctgctgggattcaaacacacggaacaagtgtgctcagggcctcgtgtggctataattatacttttaatgtgcaaattatgggtagcacttaaaacaacctaccttcttcatatcctcacccttaacatccaaccaaaaaagattttggagggagaccagacttggagcactgcattcaattaatgtgagccataatttcctatttcaggcttataaagattatccctataaggtttctcttaagaactgtaatcttgttctaataactaatctatccccatggaaacttaattggactcgattaaaacatttaaaaatactgtacttttcagaaaactgcctttcttaccagaaaaccgaaacttaacaaggatctccctgaagggggagttgaaaggtaaactatgggcccacggtgaggatttctgaaatcaaatctaatgtgtgaggtaccagactcttttcacaatcaaactcgaacggtgagaaacacatcacggggatctcccagttccctgagtaacaaatctcgcactgggtctggctggcaggaaggcaagtgagcaactcctgctacctcaatctgatgacagccattgagttctgcacccagatcccaccatgctggagattcatgactggcttgatgatgctggtgtttggaaatttactatgcacccagggctctaaggttacactgttcctctggggaaagtacttatatgttacagctataagatattgatataactggggctggtgaaagggcagagatggcaggagagaggacagagaagggagaagagctaaaatttggagcttattatctgagggagaaaaatatatcctaagtctgggccacatgaagagcctgacatgatccttgtacatagtatgatttgataataaccatttagcctgaattgtcaaaacaatgttgtattacagcaaagcaaaataatattttccacatgtggtatgggtcattagactgctagcaagtgtaaggtagtcgagggcagggttttcttttgtgtgctttcatacagtgctgaggctacacgtgtgctctgcacatggtactccgagtcactacatgcaacccacgaggtgctcacgggaaatccctcttgccagagcacagcctcaccacacagcacactgccctgccccacaactccacatctggccatggtgccagcttcctggtgctggcctcccacccatgactcatgcgcagctccctctcagtcagcagctcctcttcaaactccggtcggtgcagaccacatctgtccagctgaagagcccaggcagaaccctcacaatggaccagcccagcagacaccagcccaaaccaggggtctctgtgctcaggccaatcagtacatagggtttcttcagctacatttcaatcctttggcatctttccctttgataaatttggagagacttggaggaaaaggaagccaaacccactcacataattcactttaatacatatgctatcaaacaag

SEQ ID NO: 1191 - DNA, 4034 bp, Homo sapiens
aacactattaccagaaggtagtaaatggttcagtttagctaggacagttagaagaagtagagttcaaaagtggctagaaggatactggggagggccctgcgtgtcaggttggatctgcagttaagaaacaggcagccatgtcagtgcttgagcaaagaggagacggtgccatcctcaagcgggtgccaggtacatggcagtttctgataatcttctgaaattatcctttgttgagtgcacaaaaccaccctacggaatagatggcctatctttttcagtttagagctggattgggagcacccatgaatgcagttggaaggcatcatgggagacaatgggcctgggaatgagcaattactgcccaattactctgaaagcatttgtaaaatcctagttataagaggataatatggaacaagtctactgattgcattcacccaacatgataggaaatacacacataatatgtgtacatacataattatatatgtctgcgtatatgtatatctacatacacagacacatatataatcagagactaccaaggctccacaaaccacagcatctgtctataatgctcaacttcataaagaggagttaaagtgttacagtggtctcgataaaccagagattctgacaggtggtggaagatagggcttaataaacaaggtgatattgctggcaaagttatatcctgaagacttggccaaaaacagatttagaactgttgaagttgtggttgagtggggaaggaactgctgatattgagccattgcagccatggagctgttgcaactgctgaacatgagccagcgcagctagataacaggcatcgctcaaagtctgtactctgggtgatgcacacacactaaaatgtggggtcctcggggagcctcaccttgagctgtagaatgaatggagatgttacaaggttggcttaaaataaaggcctttatttgtttgctttgttttgggcactaacctgacttggataaaaagcacaaaagtgaagcctctgaaaatcaggaggaaagcttcatcctggttgatgtccataaatgctcccttttccccatgctgcacagcaaagtactgtggtcccttctttcctggatgacacctgcccttctcaacaaggttccacaagaatacgaagccccaatgcttccaacgtatagaatgatttgcttctatccctcctatctagaatgttccatccttgggagaattcacaaagactcccttgaactttttcctagagggcctaatttactctcccacgagccccagttgagatgggctcccttcattactaagccaccttcccccacagcaagccttccatcccatacctgcaaggaaggagcaggcaatgtagtgaggtgtctgaagctgctaagccctttcacttcataaccaaataaaagctccatcaggagatattttttaaaaaatgtctggaggtgcagacttgcttgggatgctcagttgtatttctgcgcatgtttgaaaatcagtcaatattttttagttggagacccaaccaatatagaaggagaaacagcagttttcacttgacttagggggaaatttactgctgaaaagttaagtctgaatgagcaacaccaagaaaacctggaacagcctatttatctcgatgtctaaaactgtccagagggcagagatacatggtcatatctttaatcaaaatgccctaggattcaatgagtgtctcgtggtgagaaaaagcaactgaactagtaaaaaaagagaacgacatttcaattgcctgatcttccttttcctgaaacaccatcacttagaaggtcacggctcccaacaggcttcattaacattcaaaacgcctctgcttatctgaataacttccaggtgccctactgcaatcagacaattgacatttcacggtaatcaatatcaggcttcaaagaggtcgaggactataagtgaacatgagagtcagaaatcaagaggctcagtctcggagaaggagagagacaagagaaggaaagacagaggggtcagaatcctgaccttcccacattctgtgaggaggtgggtttggaatgataacgtatttatatgtgcaagcttatctttgtaactaaacattctaggaagagttagtcctaaatcactgaggtagattagattagggggaaatgccagtggaagctgctctttccactatttcccagtggttcacgcttccctgtgggcttccttatggactgcacatcatggtcaccaagtaaacatgctggagagttcccaagccagcagctgggggtggcagtgcaatctctctgcatctactaaaggtcattgtcccagggacattatctcagcaaagggctgagaaaatcactttcacaagctgcaaatggtcgcaggcagcctctagggcagttgcgataacctgcggggtgtggggtgtggcgtgggagcttcgggaggggcctgatgaagtgaccagggtgaagatgcagagaagactctgggggcaggtcgaggaggcggcgggagaaggggcttgtctcattcaggccatccatcttccttccccacacagtctctacagacattttggaaactgctagaccttaatgaagggcaagataaatgtgattctccagatagaggttgaaatgcaaacttatctaaagtacatttgaaaactatggggagctgaccaaactaccacaccttggtagagcagaaaatatgaggaccctaaaggcagatttctattttattcaatcatttgatgctatactcaaaaccaaagctttgaaaacatgaaatgaggcgagttgagtcctgtcccacatccttaatgaacacccctctccgatactctggaagcacagctgtacggccagtcctagagaacacccaggtgtattctagtcactatccttccctctgcattgccaatccccttgctggttaaagcaggctcaggcaattattcattctattcaatacactggttgtacatccgcatcaccaggggagtgcttgacaactgagttgcccatgcggaccccagaccaagaaagttccggttgtggggacaggcctcagtaacttttaagtttttcgatgattccaaggtagagccagggaaaccactgattcctgaaaagcttccacctgaacagctgtgatggcacaccatgcagctgcaagtggctgctcgaaggttcagctttccaagcagtgtccctggaaggagacgggagaatgccatcaatctccatcctcagaatatgctgggggctttgtgaaaaatacagatacctcctgctaatactcaagattttggatttctggtggtgcggccaggtgaatatatagactggaggctgggaatctctactgattcaaaactcccaccaagtgctattacagttagtttaatgaagaatactggactaatgacatatttttacaaatatgctctaaaaatgtttaacagaaaaacagaaaacataaaagagcaataattgtttaatgtaaatatattcttattttaaattttactaagtcacactctactcagagttttggcaactacttttactcagagattggctagggagtagaagaaaataacaagtagtgtaggcccataaactaaggaacatccaaggcagcaatatgggtgataatgggtgtagaaatcatgtcatgcacagaagacttaaggaaatgtaagatattctacctggaggaaaaagcaggtagttggttagaggtggccatgaatgagtgagctgtcctaagaatttgcaagaggaaggagggctgcttggtgtaccctcaatatagaataggaataagtggaaaccaaagggaggcagatttttacagtacaaggaaaagttctgagtcatccaataatcaaatgggctttgatgtttataaatatgtgagtgccccatcactgaaagtattcaagatgagtctaggtgacctccactcagggttgctattaaaggcaatttgcttca

SEQ ID NO: 1192 - DNA, 4037 bp, Homo sapiens
ggtgtaagccactgcaccttgtcagaattactattattattattatttcctgagatggagtctcgctctgtcacccaggctggagtgcggtggcgtgatctcagctcactgcaacctccgactcccaggttcaagcgattctcctgcctcagcctcctgagtagcgaggattacaggtgtatgccactatgccctgcgaatttttgtatttttttagtagagacggggtttcaccacattggccaggctggtctcgaactcctgacctcatgatccacccgcctccgtctcccaaagtgctgggattacaggcgtgagccacccgtccccagccgagaatcttttttttaagtagctaaggaagagtttcgtttgttttcttttggggttttgctttactccttggaatctgttctacaggtattcataattatcacagttgttgcatttttaaggagaatcgaatatctgagaaacaaaacccatgatacaaagtttagtagtttctgaaaaagatggttttattgtaccattgataagtacatccttgaaatcatccagtcccagcatttttgtagatctgcgggcaaatagcaagtttgagtattattgttttgcatgaataaagcaaactagtgcttttggcaataaaattaaagtatacttttcattttctttaattaacaatctgaagaggaaaattagattggaaggaggtagatgctttaaatttgccagtatcaccaaattgtttacaggatttcatttctaagcacagttaggttgaaatctctgactaaacatttgctgtgtttaaaggtgctctctagtatgtggactgtaactgtttgagctacaaacaaaaatacactcgtctacagaattattataacatgttcatagaaatcttctcctggaatcccatgtaccttgttaaactgaagattgaaagaaagaaaataagcaatgtcttattatcccttcttaagagaggcagtgtggaataatggttttaagatcatagactctggagacaggctgcttaggctcatactggcctctggcacttgctagctacatagtttgataattacattctgcatgccttatacttctcattaggaacatgaggataataacatacgtttctggccgggtgcagtggctcacgcctgtaatcctagcactttgggaggccaagatcggtggatcacctgaggtcaggagttcgagaccagcctggccaacatggtgaaaccccgtctctactaaaaatacaaaaaagtagctgggtgtggtggcaggtgcctataatcccagctacttgggaggctgaggcaggagaatcgcttgaacctaggaggcagaggttgcagtgagctgagatcgtgccactgcactccagcccaggtgacagagcgagactccatctcaaaataataataataataataaataaataacatacataacttttgggatggctatgagaatggaaagggttaatttgtaaattgcttagaaaaatgctgtatttgataattaaaatattgatgataaattggtttacatagcattcgttagaagacagactagaaaatgtagtttttaaggcaaaccttttttccacataccttgtactttataggtaagacttgcaaacaagaaaaaaggtagttcagactctcacttgaatcttacgctcagtaaataacaagcaatgataatataacatggaaggtgcttgatgtgcaatctcataaaccccatcaaattagaaacacatgttttgcataatttaagttatatccctaagagaaagggatttctgtttgactcatggctcatttaaaactctggcttttgcaaaacaccttttctcaaaatacaactgtaataacctcattgtttgtattttactatataattcttatgtaaagctgatacactttctatagtttcctttctcaccactctccgtatccatgttaggtaagtaagaaatgcatagatgactccatttctagggagaaaatgtaagacaaattaagtgagatgcagttattacagctctctaatttttacacagctttatgtgtttgtttactagaagttactgaaccacagttgttcagtagaagttaacttggccaggtaaggaatgagaagaagaatgcattttcccacattttactgccttctcttacctgtggatttggcagagcaaagcccacttcttcatcaatatggtactctttactgattgtccaggagttttccatagcgtgtgccattcttgtagtctgctcctctggtgcccctcagtgtctgaagagttttcagagcatcttataatagttgctgccacagccagtgaccacagtttatcacaggggcagtgagaaattacttccacttttggaatggtttcattttctagtttctttgtttgtaatatgaaaaccaataaaaccacaaaagcatctctgtgcatcatatgtacaaactgaaagttcgtattccatatgaaatttgtaatcattaagcacatcattttcttactgccatataggaagccagaaaggcctgaaggaaaacacagaactatgaaaacaggtggccggagaagaacattttactttatggaaacttttaaatctttgaatgaaaatgaaggctgcagtcctaaactctcatttagttatttctcattggcttccttttaggcttccacagttctttgaaaatattagtgtcatgtttcagcagcccggaaacacaacctgtgttatactcaactattagtcaatggctctgaagtaggaaaaaaatagaagcacatgaaaaattagaaacatagtaactctccacttccttatttttcctattgggacttttgtcagtttttccaatgatagcatttgcccttctcacatctctaataagtaacttttaggaagattgccttgcatctaactgtacctgactgcggggggctgatgaggcaacagtctggcatatttgggtactttgtaatatgtcaaaagttggagaaaaggataaaataccttgaaaatgtttttctcaaagtacaaattaagactgcatttggtaaaggttttcagcttgcatgcaagtctgtggttcactttagaggcattgttcaatcttaatgagaacaaggaagctaaagaagaaaccaagttgcccgttcctctagatgatcaaaaggagaaaagagaaatagttcgtgtgagtaaactaaaagacatcgctgttttgtcatcagcttattagtacttgaaataaattaaattgtgatagcatatggctttcgttacagtctagaatagctctcgcgctattctctactaaattatggctgttttcttcaacctgtcattttacaggaaaatgttccttgaataggaaatgtaaggaaaactgaaaccaaaattatacagcaaagagaatacaatgactgtgtttcttatgactacatgattcatgaggctaatactttgggaatcagttcaaggaaaacaaacaaaaaatcatgaagacctatcatatctatatagaaaacaacactacaaataaaatattgagcattagaaaatatgtggttatttttcattctttgtacttgaagtttttatgggtgagtcaaagtgaagacatggaacaacgttttagatgattctgtcccaggattaagtttttaagaagcataagtttttgacaaagctttttcttgattccgtttatccagtcatctcactaaatctatcctaccccccggtgtggtggctcacgcctgtaatcccagcactttgggaagctgaggagggcggatcacttgaggtcaggagttgaagaccagcctgggcaacatggtgaaacccagtctctattgaaaatacaaaaattagctgggcatggtggcatgtgcctgtaatcccagctactcgggaggctgaggcaggagaattgcttgagcccgagaggcagaggttgcagtgagccaagattgcacc

SEQ ID NO: 1193 - DNA, 4041 bp, Homo sapiens
cattagtctagcttcaccaaggtgggtttatactgatgatatttaccttagtttttccatcttttttttttttttgagatggagtcttgttctgtcacccaggctggaatgcagtggcgtgatttccgctcactgcaacctccacctcctgggttcaattgattctcctgcctcagcctcctgagtagctgagattacaggcgcccgccaccaggcccggctaattttttgtatttttagtagagacgaggtttcaccatgttgcccaggctggtcttgaactcctgacctcaggtgatccacctgcctcggcatcccaaagtgcagggattacaggcgtgagccatgcacccagcccaggttttccatctcttagcctatgtttagtatatattataggtcaaaagtagtaaggattgggtcaaaaagaacaagttggtatatggttacttattgacaccggtaactagttatggacatgggagttattaaatcatagatacacagatgtatgtgcattttgtatgtttgcatattaatttcctacagatgtatttgagtagtattcttgtatatatctatagctataatatcagatagacatagttgtaacacaatcatagatacaattaaagactgagattatttgttctctaaatagtcacttaaattattttttggctgaattcaattaatcatttaaaaatgcatttggagtctattgataaacctacattcaactataagtaacaaataattcttagaatcaaacaagaatcagatacttactcataagtcaggggccttatgaaagcagccatgaagcaatggaccaattggaagagagaaagaaaaccaatttaacatcaaataatgatgagttgttgctatttgattgaatgctactatcagaggtaagacataggtaaaaagaaaaagcttattaaaatgtttcttcagtaggcattacatttaacttaataacttacaaatgaatgaaataattaaatatgcaaggaacacacatggacagtcaaaactagttgttttatttttatttttttgagacagggtctcattctgtcacccaggctggtgtgcagtggcacgaacatggctcactgcagcctcaacttcttgggctgaagtgatcctcctgccttaactccctgtgtagctgggaccacagacatacgccaccattcccggtgaatttttttttaaaaaaactaatttttaataagaagaaactttctagattgaatcctttcattttatgatattcccatttgcagaatatttttctacaggcacacacccagagacgtgggctttggttctccctttcctttattgtagcagatcttatgcctaaatgggtaaaaatcacctatatcctgagcagactgctctgagaaaccagtcattgctgcctgtaattaaagatgtgttgactcttaaccacaattggctgctaaaaaattaaattaatagaatctcaaagacatgctcatcaaaagaagccagacacaagagtctatactctgtggtttcattgatatgaaacccaataacaaaaatcatctaatttttgataaggcaaataaaaatatatttgtctgtggcaggaaagggaattgaaagaggcacaaagaaattttctgaggtgataaaaaattctgtatcttactgagaatggtgggtgtatgtatgtatataatagttaaattcaagctgaacacttaagatttgtgcattttactgtgttaactatacacctgtcacatatgtgtacatttgtagtggtagacacagcagtccaagaaaccgtacccagccgaggaactgagaggaaccatacccagctgagaggaaagctgcgctgcccaaaattaagccaatgaacaacccctgttttatttaatcggcacacactccaaaaattcctgttgttatcactgtttacatacttattaggatcctttttcttccagtttgccaagacacagtctgcataaaccaaaataggaggcagttccagtttcttggagagttggcagtaaggaacagcaatatttcttggcaagacctgattaaaatacagtagttaggttttttgttgttgttgttgttgtttttttttttttttttttttttgagatggagtcttgctcctgtcccccaggctggagcgcagtggcaggatctcggctcactgcaacctctgcctcccaggttcaagtgattctcccacctcagcctcccgagtagctgggattataggcacctgccaccatgcctggctattttttgtatttttagtagagatggggtttcactatgttagccaagttggtcttgaactcctgacctcaggtgatcctccggccttggcctctcaaagtgctgggaggcccatgtgtgttttaaaggttagatattgcagtctgtattagttttatgtaattagggttgccagataaaatacaggatgaaaaatgaagtaaaagactaaaaatataataatgataacagtggacatgtcaagccagggcatattttctttatcattttgtcgtgttatctaaactttgcatgatgcagttataatgcttttagaaaatttttggaaagttaaatgtaaattagatgaaaatctgtcacatagcataagaaatctgagaaaatctccaaaccttacggacatctccatgacctttgccccacacatatgccatggtgatgcatcccagaactagacgtgcaaggcgctgtgacttgtggtctgtgagatgatcaatgctgagcatgtttaactgaaaacaaatggagcaattgactcaaatcaatctcagtaatgttttatgcttcaaaaccaagttaacaatgttaagaagctatacaagaagacaaatgtaatacatatgtcaaaccttctcaactctttctcgaagctggccagactctatgagatcaggcagatgtttagcaatgaacatccagtcattataaaaatcaggtagattttccttgaaaaaaaaaaaagatctttatttagtagtagcagttattgtagatttggcttcccactgatagtatgccttgccttcacatccattctgtgcaatgttgccctggcatatggcttacctgtctggaaacaccagcctctgtcttgtcatctgcacacgcagggctgaagaccctctctgtgttccacctcttcctctctcttcaaacactgccatttgcagcttttcaaagttcacctcaaaggtttcactaaaatcctcctgactactctatttgaaaccaatctcctccactataaattctatggattatgccttttcaaattgttaaacaattattatctgctgctttggtttttcttttcttttcttttttgaattggagtctcactctgttgcccaggctggagtgcagtggcgcaatcttggctcactacaacttctgtctcctgggttcaagcaattctcctgcctcagcctcccaagtagctgggattacaggcatgagccaccatgcctggctaatttttgtatttttagtagagatggggttttgccatgttggccaagttggtctcgacctcctaacctcaggtgatctgcctgcctcggcctcccaaagtgctgggattacaggcatgagccactgcgcctggcctactttggtttatcttggctagattttaagttctttgaatggaaggaaaatgagatgttttaaatgtcaatagtggactaggcactctgctcgataatttcatatatataaaagatacatatttaattattgtaatggcccaagaagttatctctgtatcataaataaggaaacccaggcttatacagtttacataacgatttttgtatatcgagtttattgtgaagtttccaactttcaaaagaaatgtaataaatgtatttttgttgtttttattctatgtttcaccatctagtacatcttatttttttggttgttgtgattttctccaaataacagaatacttttttg

SEQ ID NO: 1194 - DNA, 4023 bp, Homo sapiens
aaaactatcagataagctcagataagatgctgatgggaaggtgctttgtagatatccaaatactattgtattcacataagagataattatttcttgttattttccactcacctccaccagcagtctgctggatgcccagcaggacgtcaaagcactgaaagacgctgctttggcctgcactgccccctgcaaactcctttgggtcttcccagaacccttcatacaccagaccgtctgatagctgggggttgcctttccagctatcagaggaaagaaagaaaaaaagaaaaatcattctttaggttaattgctaattttcaggtaccaaatcttgcactagtgctgaacagaaggtgacaagagatggatttcatgatccttttttcatacccccttgcccctgctcattttcaagcatgagaatagtaaataatataatcctgagcagatttggcataactattctaggaatggaatcttacctttgtactagcacagaccactctttttaaaataactagctttcctgtcccccactccagtacattcctggccaagtgataacagaacagtctagtatttttctaccatgtgaatttttggatgtaaattgttagccaaacccaatggatattagggaccaaccaagagaatttggtggtgttctttgttaagtgagagcaaacaaattcaaacataagactacatacccagacaaatatatgcgaagaacactgaaaaatgcttttgggttcacatgatctgtaaaaagatggaatatgtttaattaagcagcatcagaggtatacagggaaatcaaggtgttgtgtacaactgataatggattttggcacaggctgcaggaaaaggcattaggtcagtctatgctaaacaaagcccctgcagataagcattcactttcctaccctcttccaggaagcccattaaactgtatctatttatttagcactactttactttacgtgcttactgacgtaacaagtaaactgtttacataaagaaacaaaccaaagacaaaaaaaaacaaatcaaaacaaaccaaaacaaaaccctagaaactagatttccctctctatttttaaaatttttaaaaattgtttggagacagggtctcacttcatcactcaggctggaatgtattgatcatagctcactgcagccccaactcctgggctcaagcaatcttcccacctcagcctcccaagtagctggaaactacacatatgagccaccgcactcagtctcctaccctacttgatttgaaaatctagcttcttgccaaggactaaacagcaataactcaaaacccagagagaaacaatcaagtatttgttgagtctgttcagtagggcagatttcctattgcaaattactgcttatgcacttttttgtgtgtttttttgtgggtagttttttagctgttaattttgcaacaacttttgacctcaatgacttttctgtattgtttcttaatttgtaaaaaaacagaattaggaaggagttcttatcaagcagaagctattttttttttttcgggacttaaaaccaccctcccatgtggaaagtttctctaaggtttttagcgggaggcaaggaagttccttagtgttaaatagacccagcttggaactctggcttcaccgcctgtggaatctgaagtcatttaccctgtctttctgaatttagatgactttacttataaaatggagataatgaaacctaccacatagaaagtggaatggtttagtaagataaaatacctaaagtgaaaacatactaagtgatagttgctttttgcttcccttttttcaactattctacacctggaacatttgacttgtcagcctagactattgcactgcacacaacacttgccgtggatttggtgaaacacttgaagggctttctccaagcaagaagctatttccaacagcgcctttagcaaagtgtcccgttcttgcatttgcattgccttgaatacagtaggaattacctaaaacaaacaaacaaaacacaaacatttaaggttttctttctttcttttttttttttttttttgagacggagtctcgctcagttgtccaggctggggtgcagtggcgcgatctcagctcactgcaagctctgcctcccgggttcacgccattctcctgcctcagcctcctgagtagctgggactacaggtgcccaccaccatgcccggctaatttttatatttttagtagagacggggtttcgccatgttggccaggctggtctcgaactcctgacttcaagtgatccgcccacttcagcctcccaaagtgctgggattacaggtgtgagccactgtgccctgccaaattcccccgtcttaatccataaattaaatttgggatttttacatttctttcctgggctggacactctatttgactaatttccttacatttatagaagcttggatttgtttttattcacatagcatttaatttaaagatatttatatagttgtatatgtttcatttctatttttgataatcaaaactattgaatttatgacactgtatcatagttccaaagccagattttattgaaaatttttatctcctacagaggtttcaagttggattttaagtatatggctctgagattttatattttaggtaatacacaaaaataaataattgatcctttacccccaattaaatgatcccatgttgtacttgttaaggataaagttaactcatgcttagtatagtttaggctccgaagtgattgctctgcttacgtaaattgacatataaattttgaagtgaggatagacgtactttgattgcagaagcagctgctatttccaccaatagagagaccaggaagaatcctttactgcagtctccatcacgaaatgagaacaaaacgtccatgttcctgaggaaattggataaggaaggcaagaagtttagcaaaaattatgggatattttttgacatttttatttatgctattttagtttcaacataattttatgagagaggtgtggcaggccttactatctccattatgtagttgggaatattaagactccttttttaggcccattgtccaagatcatataattaatagtaagtaggttaaactgagacctaaagtttcatattagaactcagaactagggccgggcatggtagttcacatctgtatctgtaattccggcactttaggaggccaaggcgggtggatcacctgaggtcaggagtttgagaccagcctggccaatgtggtgaaaccccgtctctactaagaatacaaaaattaggtgggcatggtgatgggcgcctgtaatcccagctactcgggaggctgaggcaggagaatcacttgaacacaggaggcggaggttgcagtgagccaagatcactccattgcactccagcctgggcgacaagagcgagactcgtctcagaaaacaaataaacaaaacaaaacaacaacaacaaaaaacactcagaattagaaattcccaaactagttctgtttctattatcccgtcaacttctcacaggatatctgcgaggtagagttttaagaggtagtcttttgtttaaataattatattcatattcacattttaatttgtgagcctaattcaatttctcagtggtttatatgctttacaaaggaattgactgcgaaattcaaataactgattagaccctgtttttctttttaattgaagtttgggcgttggtgcaaacatagtcttactatctgtatatctatgagttttgtggtggttaaattcatggtatctgaagccagaccatctctgcaacttacttgctgtgtgaccttgagcaagatatgacaccgtctgccttggtgttctcatctgtaaagtgagactgactgctgatgtcatcctcgtttttaaaaaccttccagtttctcccttaagatactgttttaactccttatcatagctaataaaatcctacataatctttatttatttttatttta

SEQ ID NO: 1195 - DNA, 4045 bp, Homo sapiens
cccagctactcagggggatgaggtaggagaatcgcttgaacccgggaggcagaggttgcactgagccgagatcatgccactgtactccagcccgggcaacaagagcgaaactccatctcaaaaaataaataaataaataaataaaataaagtacaaatattagccagggatggtggtgcgcacctgtagtcccagctacttgggaggctgaagtgggagaatcccctgagcctggggagaatcacccgagcccgggaagtcgaggctgcagtgagcagtgattgtgccactgcactccatcctaggtgacagagtgagaccctgtctcaaaaaaaagaaattggcagaattaagtaagttgatgtttagagatgaaaaatcaacattttttcctcagcaactgaataaaaacaacagccactaccatttttttgagtacctatttgtagcctattttttaactggtattactcgagagagagagagctaggttcgagacagagctccttctcttaataactgtatgacctagggtatgtctgttagcctctctgaggcttcaaaggttcctcatctgtaaaatggtaataatcataccattgctacagggctgttttgaagactaattaggactatgtaagtaaacatgatgatggctattattactgttccccgccaggggccatgcaagggttgctgattcacatagactgtcttataatcctctcaataactccaagaggtagccagcacctcagatatacataaaatgacttaagcccagagaggtgaagtaagttgcccacagccacacaactagtaaatagcccaaacaagctggattcccagttagactccgttaatagcactgctctttaccttaagtcattacaatgcctaatatgaaatagaatcgcttctttcttagggttcaagtggttaattatttaatgtattcattcaacaaaccatcatcgaggacctcttacaagccaagtactgtgctaagtgctagagttacggcggtgattcctgcccttaaaaagttttagtgggagaaacaacaggtaaccaggtcattgccaaaacaacaaaaataatcataataaagcaggctaaagcatatttaactggccggggttttgactattttagcaagcatgatcagaacggttgaggagggaggccagcagcttggccggttcaacaaacaagaaaaaaccagtgagggtggagctaagataccagaggctgattacggttaagaatgttcttgaaggtaaggaccagattctcattttctatatcctggggcatcggtcagcatggaatctggattctagcacatgtgaatttcggcttgaaatgacctaatgccttttccctagttccttcgtgtgtcaaatacgcatggttaccgctaccagagctgtagtggggcttcaatgaggccatgagcatctccataaagatgaactacagtgtgtgcaaaactaaaggcaaaacctggtccccacacgccctcccaggtggtcgctttccgtgccgaggcccctccagaggtgccccgagaacctcaccatcgcaccccaaacttccagggaagggcctctcccgagaaagcccccacgcccccaccccgcgccatcattcccgaatctgccctcggcccctccccgcagcacgctcgcaggcggcacatgtcaaccaaaacgccatttccaccttctcttcccacacgcagtcctcttttcccagggctcccccgaggagggacccaccccaaaccccgccattccgtcctccctgccgccctcgcgtgacgtaaagccgaacccgggaaactggccgcccccgcctgcggggttccctgggcccggccgcccgagcccgcactgcggatcccgcgcctcagggcccggccgccacctgccgcgtgggcctgaaccggccagggccggcaggccgagctgctcaccacgacgccagggctgcgggtcgccataacggagccggccggcgcgcgggctgactgctcaggaggaggaagccggtggcggagcagaggaggaggcggaggcgcagcaagaggcggcgccgcgcgggaaagccgagaggttcgcctgagggctcgtcgcagccgcctgaagctgaggagaagcaggccccgccctctgcccgccccgccacgccccgcaggccccgcccccggccccgcccgcgcgcctacgccggcgcctaccagtttgcaggctcactaggtagccgtgggaattttctcccagaagaagccgaggctcccccagcgaagcccctttccctcccaactcagtctcctattcagagggctccctgattcccaaacctaccggcgcgcgttgcttcatggcggccgtaaaccgggccccggctcttcgggttccagtcatcgcgtgaatccttggaccagacgtcccattcccaagaccttgcactacctgtggcttccattttcctgactcttggcccagtgcttccccaaacccttaactggttgtaacagttgagacctagagtcctagagtcacccagatcagggtacacatctgagaggacacttaactgctctgtagttttgtacaaatcagactctgagcctctatttttgcctcactaaaatgagcatattagcccggcgcggtggctcatgcctgtaatcccagcactttgggaggccgaggcaggtggatcactcaaggtcaggagtacgagaccagcctggccaacatggcgaaaccccatctctactaaaaatacaaaaattagctgggcgtggaggcgggcgcctgtaatcccagctagtccggaggctgaggcaggagaatcacttgaacccgggaggcggaggtcgcactgagctgagatcgcaccactgcacttcagcctccgcgacagaatgagactccgtctcaaaaataaataaaaataaaaataaataaaaatttaaaaataaaatgagcatattaacaatacataaacaggatcattttgagtattagaggagtataggtatgcgtgtgtgtatgtatatatatatgcacttaggacagtacagtcagcaaatgggaactactgttattactactgatctttatttttgcccacacaagttcttatattgaatctgaaaacaaaaatatgttcccctgctaattaattctcagataggtcaggtaagcaagcaacagttgctccagcaacaccatttcttatatactcaaccctatagctccagcatccaccacagtgcccagcacatagttggtggcctccctcttattaaggacgctgaggggtatgtgatggcaggagatttgtaaaactaggcaagtcattgagcttctctggacctcagtctcttcatctaaaaaatgagaataataaacctgggtaacatggtgagactcagtctctacaaaaatgaaaaattatctgggcctggtggccatgtgcctgtagccccagctacttgggaggctgaggtgggaggatggcttgagcccaggaggtccaggctgcagtgagccaagactgtgccactgcactccagcctgggcaacagagaaatatcctgtctcaagaaaaaagaaaaagagagagagagagaataataactactgccatgaagagttttacgagaattctaaaaatcatttatgtaaagtacctcatatagtatttgccacataataggtgctcaagaaacagtagctgttataattttagcatgtatgaatttgtgaagtccatacttccctactttccctgtcttccctctttatcctggagaggcagcaggctgtaatggaaaagggatgtatgggctttggactgagttcaaatcctgggttccccactattatagcattttgactttgggcaagatccttggtccctgcgtgcttggtttcttatacgtcaaatgaggttaatatctctgtcacagagtgtggtgaagattaaacaaaataatatatgcaaaagtgcctagcatagagcttggctc

SEQ ID NO: 1196 - DNA, 4050 bp, Homo sapiens
gagctgagattgcaccattgcactacagtctgggcaacaaaagtgaaactccatcttaaaaaaaaaaagacaatgttcgtgggtccaaacaagacttaatggaagtgagtctaaaaatgagctatgtgggccaggcgtagtggctcccacctgtaatcccagcactttgggaggccgaagcaggcagatcatgaggtcaggagatggagaccatcctggccaacacggtgaaatcctgtctctacaaaaattagctgggcgtggtggtgcctgcctgtaatcccagctactcagaaggctcaggcaggagaatcgcttgaaccagggagtcggtggctagagtgagccgagattgcatcactgcactcctgcctggtgacagagcaagactccatctcaaaaaaaacaaacaaaaataaaagataaaaatgagctatgtgaattaaaagaggtataacaatagataaaccatattttatttaattcctagtaatgagtaatatttccaaacttctggaatgggcagaaattgctagttggcatatttttaccttttatattcagatacattaaaattctcaaaaaaaaacacctcaaagcagatgatccgccatctccttggataatttgtgttaactcaggataacagaaaaccaaaattatgagttactgatgcaatattcctaaatgtaaaaataattaaagctaatagtagattcatcttccaatttcatatcagtcttacaaataaactacatatataacttgcttgccttcccttctgagggataaagctgttagaagaattaaaatcagcattcttgactattcaaccaagggagggataaattattactcattctagggacatgggctcataactactacatgtgtaaggacatgaatttacccaatattacaatttttccttttattagtgtgtacagtggaagaatagacatgttcactctggacaaaaaaaaaattatacttatcagttatcagaagcacaatgctgaagacagtagttccataacaatttgaagtatgtgatcgaactagtagattatcttagtagtagtgaattattgtaaatgttagtaatttggcagccactgggcagaaaaataagaattgaggctcaatattgatattaatggtggtgattgacacataaattttatcaagtctacacaatataaaattacagaaaggtagaagagtataccagtacaacttcaacatatcttcactacaagggagtaaaatgacatggcctagttactatctaatgaactgcagaaaactaaaagaaaactccaaggcaactcttctctgctgatctggttggtccttttcctaccttttgcaatacccagatacaaacaatggatagaaaacaaagtagacttgtagtatgcaggtcacagtgctaaattcacagaaagaaacccctgaactgaactgctctatttcctggtggtcacaaagagtaattctggtttacacctacagattgatgtcaatctacaccctgttgataacagtgtggccaaggacaaaaaaaaggtgctccgttttaccaattctgtaaaaaattattggcagggtaagctcggctagggcaggattacatttctaggactaccatccccgaaatttagaagatattatatccacataaagcatatctttcacattaatttgcaaaaatctaaaagctttttcttagctcaagtgtgtccaagtttaccctggcagtttaaaacgatagttacaagcagcatgggttgtatcagacacatttgagggccaatttcatgtaagtgatattgggcaagttacttcaactatctgtgcctccaaggtcatactagtgtttatttacctaaagggtacctgttatgtaactttagggtgtttacattagataatgcctgcaaaatatttacttcaacgcctaaaacatagttaagtattcaataaatacctactattgtcactactaacttaaaagtttagagattaagagcagaatctggggtgagacaaacttaggttcaaatcctagtattgttgggtaatcttgggcaagttacttaacctctctgatttgtgtaatttaaaaaattagttaatatacataacagggcttagaagagtatctagcacatagcaccatttaagcatttgttattgctaacatgcaaacaatttaagggaaagaaattttttaaaaaggaagagggatttgcaaactaaaaacaatgagtatcttatgttcaaagaaaactaacaaacagccagctctagcaataattaaattcactatatactggggcaggcatcacaccccaaagctaaaagcgtctacctaggccaggcacggtggctcatgcctgtaatcccagcactttgggaagcagaggcgggcagatcgcttgagctcaggagttcaagaccagcctggacaacatggcaaaacaccatctctacaaaaaatacaaatattaggccgggcgcagtggctcacgcctgtaatcccagcactttgggaggccaaggcgggtggatcacctgagatcaggagttcgagagtagcctggccaacatggtgaaacctcgtctctattaaaaatacaaaaaattagccaggcatggtggcaggcgcctgtaatcccagctactcagggggatgaggtaggagaatcgcttgaacccgggaggcagaggttgcactgagccgagatcatgccactgtactccagcccgggcaacaagagcgaaactccatctcaaaaaataaataaataaataaataaaataaagtacaaatattagccagggatggtggtgcgcacctgtagtcccagctacttgggaggctgaagtgggagaatcccctgagcctggggagaatcacccgagcccgggaagtcgaggctgcagtgagcagtgattgtgccactgcactccatcctaggtgacagagtgagaccctgtctcaaaaaaaagaaattggcagaattaagtaagttgatgtttagagatgaaaaatcaacattttttcctcagcaactgaataaaaacaacagccactaccatttttttgagtacctatttgtagcctattttttaactggtattactcgagagagagagagctaggttcgagacagagctccttctcttaataactgtatgacctagggtatgtctgttagcctctctgaggcttcaaaggttcctcatctgtaaaatggtaataatcataccattgctacagggctgttttgaagactaattaggactatgtaagtaaacatgatgatggctattattactgttccccgccaggggccatgcaagggttgctgattcacatagactgtcttataatcctctcaataactccaagaggtagccagcacctcagatatacataaaatgacttaagcccagagaggtgaagtaagttgcccacagccacacaactagtaaatagcccaaacaagctggattcccagttagactccgttaatagcactgctctttaccttaagtcattacaatgcctaatatgaaatagaatcgcttctttcttagggttcaagtggttaattatttaatgtattcattcaacaaaccatcatcgaggacctcttacaagccaagtactgtgctaagtgctagagttacggcggtgattcctgcccttaaaaagttttagtgggagaaacaacaggtaaccaggtcattgccaaaacaacaaaaataatcataataaagcaggctaaagcatatttaactggccggggttttgactattttagcaagcatgatcagaacggttgaggagggaggccagcagcttggccggttcaacaaacaagaaaaaaccagtgagggtggagctaagataccagaggctgattacggttaagaatgttcttgaaggtaaggaccagattctcattttctatatcctggggcatcggtcagcatggaatctggattctagcacatgtgaatttcggcttgaaatgacct

SEQ ID NO: 1197 - DNA, 4044 bp, Homo sapiens
cactttgggaggctgaggtgggcggatcacccctggcctgcccaacatggtgaaaccccgtctctactaaaaacacaaaaattagctgggcgtggtggcgggcgcctgtaattccagctactcgggaggctgaggcaggagaattgctagaacccaggaggcagagattgcagtgagctgagattgcaccattgcactacagtctgggcaacaaaagtgaaactccatcttaaaaaaaaaaagacaatgttcgtgggtccaaacaagacttaatggaagtgagtctaaaaatgagctatgtgggccaggcgtagtggctcccacctgtaatcccagcactttgggaggccgaagcaggcagatcatgaggtcaggagatggagaccatcctggccaacacggtgaaatcctgtctctacaaaaattagctgggcgtggtggtgcctgcctgtaatcccagctactcagaaggctcaggcaggagaatcgcttgaaccagggagtcggtggctagagtgagccgagattgcatcactgcactcctgcctggtgacagagcaagactccatctcaaaaaaaacaaacaaaaataaaagataaaaatgagctatgtgaattaaaagaggtataacaatagataaaccatattttatttaattcctagtaatgagtaatatttccaaacttctggaatgggcagaaattgctagttggcatatttttaccttttatattcagatacattaaaattctcaaaaaaaaacacctcaaagcagatgatccgccatctccttggataatttgtgttaactcaggataacagaaaaccaaaattatgagttactgatgcaatattcctaaatgtaaaaataattaaagctaatagtagattcatcttccaatttcatatcagtcttacaaataaactacatatataacttgcttgccttcccttctgagggataaagctgttagaagaattaaaatcagcattcttgactattcaaccaagggagggataaattattactcattctagggacatgggctcataactactacatgtgtaaggacatgaatttacccaatattacaatttttccttttattagtgtgtacagtggaagaatagacatgttcactctggacaaaaaaaaaattatacttatcagttatcagaagcacaatgctgaagacagtagttccataacaatttgaagtatgtgatcgaactagtagattatcttagtagtagtgaattattgtaaatgttagtaatttggcagccactgggcagaaaaataagaattgaggctcaatattgatattaatggtggtgattgacacataaattttatcaagtctacacaatataaaattacagaaaggtagaagagtataccagtacaacttcaacatatcttcactacaagggagtaaaatgacatggcctagttactatctaatgaactgcagaaaactaaaagaaaactccaaggcaactcttctctgctgatctggttggtccttttcctaccttttgcaatacccagatacaaacaatggatagaaaacaaagtagacttgtagtatgcaggtcacagtgctaaattcacagaaagaaacccctgaactgaactgctctatttcctggtggtcacaaagagtaattctggtttacacctacagattgatgtcaatctacaccctgttgataacagtgtggccaaggacaaaaaaaaggtgctccgttttaccaattctgtaaaaaattattggcagggtaagctcggctagggcaggattacatttctaggactaccatccccgaaatttagaagatattatatccacataaagcatatctttcacattaatttgcaaaaatctaaaagctttttcttagctcaagtgtgtccaagtttaccctggcagtttaaaacgatagttacaagcagcatgggttgtatcagacacatttgagggccaatttcatgtaagtgatattgggcaagttacttcaactatctgtgcctccaaggtcatactagtgtttatttacctaaagggtacctgttatgtaactttagggtgtttacattagataatgcctgcaaaatatttacttcaacgcctaaaacatagttaagtattcaataaatacctactattgtcactactaacttaaaagtttagagattaagagcagaatctggggtgagacaaacttaggttcaaatcctagtattgttgggtaatcttgggcaagttacttaacctctctgatttgtgtaatttaaaaaattagttaatatacataacagggcttagaagagtatctagcacatagcaccatttaagcatttgttattgctaacatgcaaacaatttaagggaaagaaattttttaaaaaggaagagggatttgcaaactaaaaacaatgagtatcttatgttcaaagaaaactaacaaacagccagctctagcaataattaaattcactatatactggggcaggcatcacaccccaaagctaaaagcgtctacctaggccaggcacggtggctcatgcctgtaatcccagcactttgggaagcagaggcgggcagatcgcttgagctcaggagttcaagaccagcctggacaacatggcaaaacaccatctctacaaaaaatacaaatattaggccgggcgcagtggctcacgcctgtaatcccagcactttgggaggccaaggcgggtggatcacctgagatcaggagttcgagagtagcctggccaacatggtgaaacctcgtctctattaaaaatacaaaaaattagccaggcatggtggcaggcgcctgtaatcccagctactcagggggatgaggtaggagaatcgcttgaacccgggaggcagaggttgcactgagccgagatcatgccactgtactccagcccgggcaacaagagcgaaactccatctcaaaaaataaataaataaataaataaaataaagtacaaatattagccagggatggtggtgcgcacctgtagtcccagctacttgggaggctgaagtgggagaatcccctgagcctggggagaatcacccgagcccgggaagtcgaggctgcagtgagcagtgattgtgccactgcactccatcctaggtgacagagtgagaccctgtctcaaaaaaaagaaattggcagaattaagtaagttgatgtttagagatgaaaaatcaacattttttcctcagcaactgaataaaaacaacagccactaccatttttttgagtacctatttgtagcctattttttaactggtattactcgagagagagagagctaggttcgagacagagctccttctcttaataactgtatgacctagggtatgtctgttagcctctctgaggcttcaaaggttcctcatctgtaaaatggtaataatcataccattgctacagggctgttttgaagactaattaggactatgtaagtaaacatgatgatggctattattactgttccccgccaggggccatgcaagggttgctgattcacatagactgtcttataatcctctcaataactccaagaggtagccagcacctcagatatacataaaatgacttaagcccagagaggtgaagtaagttgcccacagccacacaactagtaaatagcccaaacaagctggattcccagttagactccgttaatagcactgctctttaccttaagtcattacaatgcctaatatgaaatagaatcgcttctttcttagggttcaagtggttaattatttaatgtattcattcaacaaaccatcatcgaggacctcttacaagccaagtactgtgctaagtgctagagttacggcggtgattcctgcccttaaaaagttttagtgggagaaacaacaggtaaccaggtcattgccaaaacaacaaaaataatcataataaagcaggctaaagcatatttaactggccggggttttgactattttagcaagcatgatcagaacggttgaggagggaggccagca

SEQ ID NO: 1198 - DNA, 4029 bp, Homo sapiens
atatattaaatatactcacacaatagctcttcagtctgataaaatctacagtcataggaatggatctatcactatttctattcagtgctttgatgtaatccagcaggtcagcaaagaatttatagccccccttgagcacacagagggctacaatgtgatggcctcccatctccttcatcacatctcgagcaagacgttcagtcctacagaaataaaatcaggaatttaatagaaagtttcatacattaaactttataacaaacacctcttagtcattaaacttccacaccaacctgggcaatacagtgagaccccatgcctgcaaaaaaaaaaaaattagccaggcatggtagcatgtacctgtagtcccagctacttgagaggtgaggtgggaaaatcactttagtgcaggatgttgaggctggagtgaactgtgattgtgccactgcactccagcctggacaatagagcaagaccttgtctcaaaaaaatgcattaaaaattttttttaaatcttccacgtaacacatcctttgccctcatgtttcataaggtaaaaaatttgataccttcaaaaaaaccaagcataccactatcataattttttttaaatgcaaataaaaacaagataccattttcacctatcagactggcaggttctgattaaatgaaatttcttggataatatacaatattaagagagactgtagaaactgggccagtggctcatgcctgtaatcccagcactttgggaggctgggtaacatggcgaaccctgtttctacaaaataaaaatattagctgggagtggtggcgcacacctatagtcccagctactcaggaggctgaggtggaaggatcgcttgaacccaggaggttgagactgcagtgaactgtgatcattctgctgcactgcaccccagcctgggcaacagagaccttgtctcaaaaaaaaaaaaaaaagagacaaattgtgaagagaaaggtactctcatataacatcaggagtataaaatgattcaacttcttagaggaaaatttggcaataccaaaatattcaataaactctttccccttgacccagaaattccacttgaataaagctgaacaagtaccaaacatgtaaaagaatgtttcttctagtacagtcggtaagaacaaaatagtgtctatcaatagtggactggttaaatcagttatggtatctccataagacagaatgctatgcaacctttaaaatatattagatagctctagacacactaatattaaaagtgtccaataacatttaaaactatactcatacgttaaaatataaatgtatatatgtacttttgcatatagtatacatgcatagccagtgcttgagaagaaatgtgtacagaaggctgaaaggagagaactttagtcttcttgtttatggcctccatagttagaatattttataacacaaatattttgatattataattttaaaataaaaacacagaatagccagacatacaatgcaagcattcaataccaggtaaggtttttcactgtaattgacttaacagaaaattttcaagctagatgtgcataataataaaaatctgaccttgccttcatgtgattcagccccagtccattaccctgtttaggactgagaaatgcaagactctggctagagttccttcttccatctcccttcaatgtttactttgttctggtccctacagagtcccactataccacaactgatactaagtaattagtaaggccctcctcttttatttttaataaagaagattttagaaagcatcagttatttaataagttggcctagtttatgttcaaatagcaagtactcagaacagctgctgatgtttgaaattaacacaagaaaaagtaaaaaacctcattttaagatcttacttacctgtccataattagtccatgaggaataaacaccctttccaaatcctcagcataatgattaggtatgcaaaataaatcaaggtcataacctggttcatcatcactaatctgaaaaagaaatatagctgtttcaatgagagcattacaggatacaaacatttgattggattaagatgttaaaaaataaccttagtctatcagagaaatttaggtgtaagatgatattagtaactgttaactttgtaggtatgataatgaattatgtaagaaaacaacaggccgggcgggttggttcacacgtgtaatcccagcactttgggaggctgaggcaggcagactgcctgagctcaggagttcgagaccagcctgggcaacacggtgaaatcccgtctctactaaaaatacaaaaaaattagccgggtgtggtgacacatgcctgtagtcccagctacttgggaggctgaggcaggagaatcacttgaacctgggaggtgaaggttgcagtgagccaagaatgcgccacttcactccagcctgggaaacagagcaagactctgtctcaaaaaaaacaaaacaaacaaacaaaaaaacaggctgggcgcggtggctcacgcctgtaatcccagcactttgggaggccgaggcgggtggatcacctgaggtcaggagttccagaccagccttgtcaacatggtgaaacctccccccgccgtctctactaaaaatacaaaaattagccaggcgtggtggcaggagcctgtaatcccagctacttgggaggctgaggcaggagaatcgcttgtacccagaaggcagaggttgcactgagctgagatggcaccattgcactccagcctgggggacaagagcgagatttcgtctttaaaaaacaaaaaacaaaacaaaaaaccatgtaactatatgtcttagtcatcttagtcaagaatgtagaagtaaagtgataagatatggaatttcctttaggtcacaaagagaaaaagaaaaattttaaagagctaagacaaacgcagcaaaatctttatatttaataatattctaaacatgggtgatgaacatacgggtattcattatactattctctccacttttgagtatgtttgaaaatttagtaaaacaagttttaacacactgtagtctaacaagataaaatatcacactgaacaggaaaaactggcatggtgtggtggctcacacttgtaatcccagtgctttgggaggctgagacaggagagttgcttgaggccaggagttcaagaccgacatggggaatgtagcaagaccccgtccctacaaaaaactttgtaaaaatttgccaggtatggtggtgcatacctgtagtcccagctactcgggaggcggaggcagaaggaatcacttgagcccaggagtttgaggctgcagtgagctacgatcataccacagcactccagcgtggacaacagagtaagaccctatctcaaaaacaaaacaaaacaaaacaaacaaaaaaaaccacaagaaaaactgctggctgatgcagcggctcatgcctgtaatcccagtattttgggaggcccaggtgggcgtatcacctgaggtcaggagttagagaccagcctggccaacatggtgaaaccccatctctactaaaaatacaaaattagccaggcatgtggcacgcgcctgtagtcccagttactggggaggctgaagcaggaggatcacctgagcccgggaggtggaggttgcagtgagccgagatcacaccactgcactccagcctgggtgacacagcaataccctacctcaaaataaaaaagaaaaagaaaagaaaagttgctgtccccgctaccccaatcccaaatccaaacagcctctctcatctcacagtaagggggaaaaatcacccaaaaaagctaagtgatcttttgaaaacccaaactcttagaagtctaagattattatagtcaactcatgaagtgtcatcataaaagatactctaatattatttaagtagaaccacatattggttgtcttggtatgtctagcccctggcatacaaaatatttaataacactgatatggtacctgtgatgtgaaaatgtactatga

SEQ ID NO: 1199 - DNA, 4035 bp, Homo sapiens
cttggactacactaaaacatgataccaatgcttcctctcaccataaaccctcacttcgctttctacatttaagaattttatagctggaagagtccttaacagaaaataccatctaataattacccctcaaaatcgagaaagtcctatctgttcttatgctagttataagaatgaggcagcatttcacataatggttataaacactgccacaagaagattcatgatgtgttgtttatctgtagctctcatcatactctgtcatataactatagcattaagattttaatgttctatatattcttctaagacagtgtttaccagagtaaggcacaaaagatccactggtttgcaagaaagattagaacttttaaattttttacctcaccttgtttaatctatatttttgtatgtattttgtaacatatatattattattaccataaatcatatataatttaaaatgcatatattaggggtaaatgctcaggaaactttttataaattgggcatgcaaatacaagtttgaagactcactgttctaggtattaaaagtaaagttataaccaagtaaagcttccaccttttcatgtctcaaagcagtttattgttggaggtaagatctcttagaagcctaaacaggtccaagtacagaatgaagtaaggctagcccataacttgtggcaagcaattcatactatttctctcatgctgagctctcctcagtgaagcagctactatagacaactgcagcctattggtagcctattttacaggcaggaaaaaaattactttttattcaaagtggaactcaggacatggggagaaaatgaatacaaaaaatagggtcaatccaaaggcacacagcaaatgagtaacacagttatgtttttttcccatttgtatgaggtcccagtaaattctaagtaaactgcaaatttaataatacactaaaaaagccatgcaattgttcaaatgaatcccagcatggtacaacgagtacagacactagagtctaaaaaacaaaagaatgccattattgagtttttgaattatatcaagtagttacatctctacttaataaatgagaaaaacgaggataagaggccatttgataaaatgaaaatagccaagaagtggtattagagacttgaatacaggtattcgggtccaaagttcatctgctcaaatactaactggggaaaagagggaaaaatatttatatacatatatatctgcacacaaaaatacccccaaaagacaaaatgaggccaggcagggtggctcacacccgtaatcccggtactttgggaggctgaggcaggtggatacctgagatcaggagttggagatcagcctggtcaacatggtgaaaccctgtctctactaaagataaaaaaattagccaggcatggtggcgtgcgcctgtaatcccagctacttgggagtctgaggcaggagaatcacttgaactgggaaggggaggttgcagtgagccaagatcgtactactgcactccagcctgggcagcagagtgagactccatcacaaaaataaataaataaataaaatacaatgaaacagaaagttcaaataatcccataatcttaccaccaagaaataactttcactcgttatacttattgatttttccataataaatgtactttactgtgactatcatgaaaagaaagttattttagaaacagagaactgtttcagatcaaatctatgtagtagaacagagccattaggtgggaaagacgagatcaaactaaatctcagaaggcctaaaaggctaggtccattccagcactaaaaactgaccagacaagtaatggcttcaacagcttctaaatatggacaaagcatgctgaaagggaaggacaggtctaacagtggtatatgaaatgaacaggaggggcaaagctcatttctcctctgaagttttccaaagatgctgaggaggacattagtttgacatgaccctgatatgggacaagataatttcacagaagttttacatgttaaagttttcttatagatactcattcaagtaagcaatgaacactaaaatctaaagaaagaaaagagctttagagtcaggtctgtattcaaattcaagctctaccacttactggttctgtgactttgggcaagtcttttaaccttattaagtcttaatttcctgatttgtaaaatggggatatcgtctccctcacaggattgttgtgaaacttttatgagattaatgcctttatatttggcatagtgtaagtaaacaataactggcagcttcaaaaaaaaaaagcagtagcattccatcatttattattggttactctcaaaaagtttttcaatgtactagaagataaatattcaaataccttaatatctccattattttcaggtaaacagcatgctcctgaacaaccaatgggtcaacaaataaattaaaagggaaatctaaaaacatcttgatattaaactacatggaagcacaatataccaaaaccaatggttcacactaggagaattttaaggtacaagaaaactctttgagatttcttaaaataatagtatgtctgaatttattgagtgatttaccagaaactgttgtaagagctctacttgcattatagcacttaatcctcttaactctatggctgctattatcaacctcaccctaatcacatatgggacacagagaggttaagtaacttgcccaaggtcagagttaggaagtactaagccatgctttgaatcagttgtcaggctccggaactcacactttcagccactacataatactgctttgctatcttttaggaaactatgtgagtctacctcacatagactcacataggtttgttttttttttttttttaaaggctatcttttcccccatcaatgttttttgaaggatcccaaattagagtcccacagaggcagacagcagtacttgacaatatggacatttaaggttaatgttggattctactgtctttttactacatgacctagggaacgataattaacctagactgcttccaagggttaaataacccatttagttatactatgtaaattatctcttagtgattgattgaaagcacactgttactaattgactcggtatgaagtgcttttttttcttccctttcaagatacatacctttccagttaaagttgagagatcatctccaccaattacttttatgtcccctgttgactggtcattctagttaaaaaaaaaaaaaactatatatatatatatctacacacacatatgtatatgtatatccttatgtacacacacaaacttcaaattaaatgagaactagaagatttgagaagttagctagctaatatccatagcattatgatattctaaatgatatgaattataagaattaggtttcctgaaatgaatgactagaaaactttcaagtagagattagtaaaaattaaaaagtcctaatcggccattactgatttgatgtttttaagagtcctaaaaaatgggttacatccatttttaagtgggtagtattataacagccacccatcttcaatcacagtgatttctgaattgtgagggaagttattagcatgacaggtgtctggttctggccctgtacgattcccatgagtcaagcaaattgtaagggctggtctatatcacacccaaccccaaggatatgtccctcaaaagtctagcccaggccccgtcatcttcagcatcatctgggaaaccaggtctgattagtagtcctttaaggaatacctcttaggctcccattttactgctatcacagaatccaataaaacccttacaggagattcaatgggaaatgctcaacacccactgtagttggtggtgacaatgaccataatttggctgtgctggattcaggacagaaaatttgggtgaaagagcaggtgaacaaaagagcttcgacttgccctagcagagagcaagccataccataccacaaagccacagcaattacaacggtgcagtaccagcacagtaaa

SEQ ID NO: 1200 - DNA, 4042 bp, Homo sapiens
cattctaagaattatatttgtacaataactcaaaaatcacataatttaatttaccatatggactccaaaatatattttctcattaggctaaacttgatctgcattttctggatgtgtccatattcttggactacactaaaacatgataccaatgcttcctctcaccataaaccctcacttcgctttctacatttaagaattttatagctggaagagtccttaacagaaaataccatctaataattacccctcaaaatcgagaaagtcctatctgttcttatgctagttataagaatgaggcagcatttcacataatggttataaacactgccacaagaagattcatgatgtgttgtttatctgtagctctcatcatactctgtcatataactatagcattaagattttaatgttctatatattcttctaagacagtgtttaccagagtaaggcacaaaagatccactggtttgcaagaaagattagaacttttaaattttttacctcaccttgtttaatctatatttttgtatgtattttgtaacatatatattattattaccataaatcatatataatttaaaatgcatatattaggggtaaatgctcaggaaactttttataaattgggcatgcaaatacaagtttgaagactcactgttctaggtattaaaagtaaagttataaccaagtaaagcttccaccttttcatgtctcaaagcagtttattgttggaggtaagatctcttagaagcctaaacaggtccaagtacagaatgaagtaaggctagcccataacttgtggcaagcaattcatactatttctctcatgctgagctctcctcagtgaagcagctactatagacaactgcagcctattggtagcctattttacaggcaggaaaaaaattactttttattcaaagtggaactcaggacatggggagaaaatgaatacaaaaaatagggtcaatccaaaggcacacagcaaatgagtaacacagttatgtttttttcccatttgtatgaggtcccagtaaattctaagtaaactgcaaatttaataatacactaaaaaagccatgcaattgttcaaatgaatcccagcatggtacaacgagtacagacactagagtctaaaaaacaaaagaatgccattattgagtttttgaattatatcaagtagttacatctctacttaataaatgagaaaaacgaggataagaggccatttgataaaatgaaaatagccaagaagtggtattagagacttgaatacaggtattcgggtccaaagttcatctgctcaaatactaactggggaaaagagggaaaaatatttatatacatatatatctgcacacaaaaatacccccaaaagacaaaatgaggccaggcagggtggctcacacccgtaatcccggtactttgggaggctgaggcaggtggatacctgagatcaggagttggagatcagcctggtcaacatggtgaaaccctgtctctactaaagataaaaaaattagccaggcatggtggcgtgcgcctgtaatcccagctacttgggagtctgaggcaggagaatcacttgaactgggaaggggaggttgcagtgagccaagatcgtactactgcactccagcctgggcagcagagtgagactccatcacaaaaataaataaataaataaaatacaatgaaacagaaagttcaaataatcccataatcttaccaccaagaaataactttcactcgttatacttattgatttttccataataaatgtactttactgtgactatcatgaaaagaaagttattttagaaacagagaactgtttcagatcaaatctatgtagtagaacagagccattaggtgggaaagacgagatcaaactaaatctcagaaggcctaaaaggctaggtccattccagcactaaaaactgaccagacaagtaatggcttcaacagcttctaaatatggacaaagcatgctgaaagggaaggacaggtctaacagtggtatatgaaatgaacaggaggggcaaagctcatttctcctctgaagttttccaaagatgctgaggaggacattagtttgacatgaccctgatatgggacaagataatttcacagaagttttacatgttaaagttttcttatagatactcattcaagtaagcaatgaacactaaaatctaaagaaagaaaagagctttagagtcaggtctgtattcaaattcaagctctaccacttactggttctgtgactttgggcaagtcttttaaccttattaagtcttaatttcctgatttgtaaaatggggatatcgtctccctcacaggattgttgtgaaacttttatgagattaatgcctttatatttggcatagtgtaagtaaacaataactggcagcttcaaaaaaaaaaagcagtagcattccatcatttattattggttactctcaaaaagtttttcaatgtactagaagataaatattcaaataccttaatatctccattattttcaggtaaacagcatgctcctgaacaaccaatgggtcaacaaataaattaaaagggaaatctaaaaacatcttgatattaaactacatggaagcacaatataccaaaaccaatggttcacactaggagaattttaaggtacaagaaaactctttgagatttcttaaaataatagtatgtctgaatttattgagtgatttaccagaaactgttgtaagagctctacttgcattatagcacttaatcctcttaactctatggctgctattatcaacctcaccctaatcacatatgggacacagagaggttaagtaacttgcccaaggtcagagttaggaagtactaagccatgctttgaatcagttgtcaggctccggaactcacactttcagccactacataatactgctttgctatcttttaggaaactatgtgagtctacctcacatagactcacataggtttgttttttttttttttttaaaggctatcttttcccccatcaatgttttttgaaggatcccaaattagagtcccacagaggcagacagcagtacttgacaatatggacatttaaggttaatgttggattctactgtctttttactacatgacctagggaacgataattaacctagactgcttccaagggttaaataacccatttagttatactatgtaaattatctcttagtgattgattgaaagcacactgttactaattgactcggtatgaagtgcttttttttcttccctttcaagatacatacctttccagttaaagttgagagatcatctccaccaattacttttatgtcccctgttgactggtcattctagttaaaaaaaaaaaaaactatatatatatatatctacacacacatatgtatatgtatatccttatgtacacacacaaacttcaaattaaatgagaactagaagatttgagaagttagctagctaatatccatagcattatgatattctaaatgatatgaattataagaattaggtttcctgaaatgaatgactagaaaactttcaagtagagattagtaaaaattaaaaagtcctaatcggccattactgatttgatgtttttaagagtcctaaaaaatgggttacatccatttttaagtgggtagtattataacagccacccatcttcaatcacagtgatttctgaattgtgagggaagttattagcatgacaggtgtctggttctggccctgtacgattcccatgagtcaagcaaattgtaagggctggtctatatcacacccaaccccaaggatatgtccctcaaaagtctagcccaggccccgtcatcttcagcatcatctgggaaaccaggtctgattagtagtcctttaaggaatacctcttaggctcccattttactgctatcacagaatccaataaaacccttacaggagattcaatgggaaatgctcaacacccactgtagttggtggtgacaatgaccataatttggctgtgctggattcaggacag

SEQ ID NO: 1201 - DNA, 4042 bp, Homo sapiens
aggccaacagcagtctgacccatcttggaggaatgccatgtgatcctcccaggaacactgtaacataaccagtcttgggaagaagctgtcccaaggccatttgtcacccacctccctatgttgtgggagctgccataaggcagtttctcatctgcctccctggttctgataagacatgggactttcaacattgcctcctcacttaggggagagctgcaaggttatacaatcatttagctagagtctgaagctgactcctccaggacatagcaacccaccacttgtgggtaaattatataacatgttattgggttatacgacgccaaactgcctatcaccggccattttttacctgcaaaaatggtaatttcatatggttcaacttactagaaggtggtaagtgcaactgaaaaaaaaagagtaaagaggttcagcagtgggaagctggatgcagtattcaagagggtagccaagtggacctcagcgggctgacattttaggggaagaaggggattcaggagttctggatattgcactcacatgtggtaacatctacctcaaccttacatgggtatgaagatcaaatgagataacagaagtaaaaatgttttgtaaactaagaagttctaggactatagaaaattatttagtttgagtctcctactttgttgctgggaattacagcaaactcttttttttgagacagggtctcactctgtcatccaggctggagtgtagtggcactgtcaaggctcactgcagccttcacctcccaagctcaagcaatcctcccacctcagcctcccaagtagctgggactacagttgtgcgccaccacacccagcgtttttttttttttttgtatttttgtagagatggcgttttgccatgttgcccaggctggtcttgaactcctgagctcaagtgatcccccaccctgggctcccaaaagtgctgggactacaggtacgagccactgtgcccggcctacagcaaactttttaaggaacacgtgtaagctagatggctcctaagtttgatagttcatacctcacgtggagcagataagcaattaagagttttggcttaaaacttttctcctattcccagaaaacaaaaggtgttgttgtcattgttcttagtcaataaagcactatctacacaaagaaggtaataggacatatctgagaacaatctgttgagatgtagctgagattacaatctgaaaaactgaacagaattccaaaagaaagccgtgttattttagcatagtaaaatgtaatataaagtgtaccatgtgtctgaaatttaatgtctctgaagtagctaggaatttttgtagctccgccaacccattctaccacataatcattgagattacaattaaactagctactaaaacttaacaaacaaggaaaatggaaccaacagaaaactaaactaggttaatttgtagagaaatgataactatgcataggtttttttaaagagacaggacttattttaaggatttttaaattgaattcataaagcagttaaatttttgggaatttattgatttgcatttaaaagggaactgctgacaaagattcactggtaataatttgaacaagttggaaaatacagtcaacattactgaaacactactaaaataattccaggacagaacaaaacttcttagatgctgtctttgatgtgaaaattgactgcttcttacttttctaacacacggtggtataattaacaatattcaatcacttctattctttcctgcatatataaaaattaaaataccaattaaaaaactaatatatcttctctttatttcttacagatatgagttcaatgtttcactcaatagtgctgtggtttaagagaattttttcatttacaagttaaacaacaatccgcccaaagggaactgatagtctataggctcatagtgcaaataaacagtttaggaatgcagcaactgacatttctaaagtacaaaacagataaaattcttagaagatacatgcaaaaagctctactaagcagatggccacagaactagaacattgataattttactggcgatgtcaataggactccagatgtttccaaactcaacttgaactctcatcttaggctttgtattttgcttttccagtttcactaatgacacaaacatgctataaaaaaaaatccagaaattcacatttaaaaagtatattctgaaatgaaaggcaagaatagcattttacatataagaacactattagttgtcagggttcttactaaacagagatagtactactgtattttagatcagtaacttttggggagtgtatcttttgaaaacaaagcagtagtctatcacattagtttaatttgtttcttgtttttgtttttttttttgagacggagtcttgctctgtcacccagactggagtgcagtggcacgatctctgctcactgcaagctctgcctcccgggttcacgccattctcctgcctcagcctcccgagtagctgagactataggcgcccgccaccaccccagctaattttttctattttttagtagagacggggtttcaccgtgttagccaggatggtctcgatctcctgaccttgtgatccgcccgcctcagcctcccaaagtgctgggattacaggcgtgagccaccgcgcccagtctgtttcttgtcttaatacgtagttttttgttttttgttttgttttgagacagagtcttgctctgtcacccaggctggagtgcagtggcgtgatgttggctcactgtagcctctgcctcccgggttccagtgattctcctgcctcagcctcccaggtagctgggttacaggcacacaccactacgcctggctaatttttgtatttttagtaaaggtggggtttcatcatgtttgccaggctggtctcgaactcctgacctcaagtgatctgtccggcttggcctcccaaagtgctaggattacaggtgtgagccaccgcaaccagcctcaatatgtagttttgaaagacaaatcaaggagataatttcaagcatatcaaagtgggaggccagtgtacgtggcaaaaaaagatggagtaaaaaacctgctttaggtagtgtactgttgcagtcttcctaaatcttcctcaaccatgttcataaacacatccatgggacttctgcctccagagtaagaggcaggtattcaaaggacagtgaattaaaagactaaactcgatcatttatttcttacttatgaccacatttatcatctgaaataataatgcaacaattattgtatattaaagctgttcaactatttcagccaacaagaagtgtcaccctagcctggccaggttccagttctaaggacgtctgtactagactacagctttatgtgactaatgggaaccatcagtctgttcaaattatgaggtgctggaaggagaaaacaattctctttcctaaatttttatgcgtgttttgaaaaatgagtgagaaaaagaagcaattacttacattcaaatccctgaagtattcattatagtcaagggcatatcctacaacaaacttgtctggaatttcaaatccaacaactaaaaagaatcataattcatcatttagataaagaaaacatcacttttaaatctaatactggcaaatgtgcctctctacaaatattctctaagcaattataagccatttcacataaaactcttttaggttaaagatggttaaatgattgacaaaaaaagtaattcacttacagtctggcttatatccaacacttcgtggggtccttttcaccagcaagctgttaattacaaaatgtgacatataacatacagagagactacagggcattacaaaagagaagactgacgtttctaaacactgtttcatttcatccgtgctgagtgtaccatggtcacttttaacacacccaaggaaagactatgaaatggagagctaaattatggggattactaggaaggggcagcaatgagttgacactacagacaaggcacttggttgatcacct

SEQ ID NO: 1202 - DNA, 4043 bp, Homo sapiens
gtggagctctccgaagtcccaatgctagaccggaaaagagaagccaaaggagacctgaagccctcttggcgctgcaggaggcggcccggctgaagcgccccccgctcctccacaactacccacacgacaggcccggatcccgctgggagatgatgtttaggaaagggggaataagccatcgccgtcacttagcgccgatttcggcccttcccgcccggctctagtacctgccgccggccctcgcccatccccagctcaccccggcggggctcggcgccgaaagagaaccctctcctcgctggtctctcatttcgataggcgctagggcctctcggagtcggagaggggcttccaacaggccccaagtccagtccttccctcccaacaacatcccgccgagcgtgccctggcacccaggcgcggtgctcgggaagagggccccgggcctgcctcccgccgacaccaagaagaaaagggagggaaggaagggcgaagatggggcctgccctagagccaagtaccttgtagaaagcgccattggagccccgcacttccaccaccagctcctccatcttctcttcagccctgctagcgccgggagcccgcccccgagaggtgggctgcgggcgctcgaggcccagccgccgccgccgccgccgccgccgccgcctccgccgccgccgccgccgccgccgccgccgcgctgccgcacgccccctggcagcggcgcctccgtcaccgccgccgcccgcgctcgccgtcggcccgccgcccgctcagaggcggccctccaccggaagtgaaaccgaaacggagctgagcgcctgactgaggccgaacccccggcccgctgcgggtgtaaacactgaaaccacgtcacgtgatcaacgctgttccctccccccgcgggctcagcccctcggccccgccctctctcttcaagtggcctgggagcgcgcgcatgcgcgctgctgggaaccggccggggtgccgggtcgaaagacagacgcgcgggccgggcgtgcgcgggcttggtggagggcgggaaggctgaagggcggtgacaggtcgcactgcctcgcgagggccagaacgcccatttctgcagaggtgcactcagtggcgtgggaaatcaaatgcatccggttatcccagttcggcctctctgggattccgcgggagggggtgtctggtctggtttggtttggtttggtttggtttggtttggtccggttcaaagtagcgcagtctgactgagcgggaggtggagtggaaggcgagaataggggtgaaggattagacagaagaagactttgaactaggaacagtggcaaccagggtgacccaggcttttgtgacccgtagaggcagaaggtgaggcgtctacgccctctctcaccagattttgggcggccctgtggagacaccctgtgccctttaagggacatggattgagtcgggatctcaaaatgtgagcctttcctcagacccagctttgacccacgtactcgcctttcctcaactcattttcatactttcacttgactatatattttttaaaaattgtgttaagcacttgaggttcatttctgcccctactgtatgtgcaccctgtgccagagggtggggtgaacacgtgtgtagcagtcatgcgtcctgtccacaggggccgatgcacctccttgcaaccctttacattccactgtgaaacaaacctcaactttttcttattcctgtttttacaccgtgcttatagctgccttaatccatgttcccttcgggatgctggtatccaactgagaagttgacggagcatctatcgtgtgccagacactgtgctaagtgctaacgagaaatcggtgagcaaaacagaaaagaaaaaaaaagaagaaacgactgccagcattgaacttagtacctagcaaagtaggtggacataaatcaaattgtcagacaagtaaatgagtagttgcagctgtgataaggggtatgaagaataggcgcttccatgatggcggaacatgacctagtctggggtggagaaggggagatgattccagctggaatatggcaggtgagagttaactaatagcactgagttggcagaggcaggatgacctgccccaggcaggtgccccagaatgagaggatgttgctgctggtggaactccagctttaaagcggtggatctagggccacattcctcaaggccatagcaaacaggaaagaccttttggactagggtctttggagtagtcacatgaggccaagaacccaatagggctgaaagagaatctcatcataggctgaatgggagcagagcattagctgcaactccaatgtattatagtaaaaggggacacattgattagaatgattatacccctccaagtgtaagctgttgttcaatttacccagggcttaaaaatatgtcaactcttcacaaccatttttactacaagccacactcaacctgtgttgttccctgaacctgtgatgcactttcatccgttcatgtctctacacatccttcctgggccccatagaggccctgcaccttaaggttttcagctggattcctattagctagttattttatctcaggtacagagagttaactttgctcctcaattttcagcacattgtcatatcagtccctacagggtccttgtttacattattttatagtgtttatattattttttcctcatctttctcgatccccactctcattcttctagacacaagctgcaatatgttcgatagagatccttgataatttaacacagataatgttttgtttatgcctcttgcatttacagagatggtattggactgtaaatctctatttcccactgttttactcaacagtctgtttttgagctatacccacattgctgtgtgtacacctagtttgctaccgagtatgccagaaattttattcatacatatccctactgatcgggcatctaggttactgccaactccctgaagtcatactgtggtgaaaacccttgtgaatgtctttacaaacctttgccagaacttattttgtgctcttgtagaactttgtgcataccctctgcttcctcattacactgcttggcatatagcagagactcaacaaatgttgaatacctctactatgatggttagtgtactagaataatttatttatatttctgttttccttattggattattagtaccttccagacagggcaaatgtcttttctatctttgtgtccctggcacattaaaagtggttgatttcaaggtatgttcaatgaatgaataaatacttatcttcactgccagtacatactgcaacttagtcttccccacttgactctgagtctcagccttactctgatctctagcttttgatatttcccctttcaagatagcttacctgaattcagacactgagctcaggcctgatcatgagcctgctcttccaaagtcctctctctctctctctctttctctcctgtctctcgttacaggcagctcctgccttccagttcgttgctcaagcctaaaactgagacattttgaccctctttcacacatcagatccatcagcaaatcattgtagaatccagactctgtttctgatcatttgctcagctaaaaccatagtccaagcttccattctcttacctgcattatggcagcaacttcttcgctggtatccctgcagtcactgtccactgttgtaccctctctgacagttctcagcacagaagacagaatgaccctgttgaggtgtcaatcaagtcactctgccactcacaatcccccagtgactccctacatctctcagagtaaaagccagagtcattatttattctggcttcagtgccctatatactctgacttctgttatctccgctatctcaccttctactttcccccttcacttcattccagtgcatgaaatctatctagttcacctagattttctcctatgttatctttcagaagttttacagttttgtgttttgcatttaggtctatgatccattttgagtaaatttttt

SEQ ID NO: 1203 - DNA, 4023 bp, Homo sapiens
cagttgccattgtgatttggtgccgactaccgcttcttactactctttcttcacagccctcgcccagaacagtggagctctccgaagtcccaatgctagaccggaaaagagaagccaaaggagacctgaagccctcttggcgctgcaggaggcggcccggctgaagcgccccccgctcctccacaactacccacacgacaggcccggatcccgctgggagatgatgtttaggaaagggggaataagccatcgccgtcacttagcgccgatttcggcccttcccgcccggctctagtacctgccgccggccctcgcccatccccagctcaccccggcggggctcggcgccgaaagagaaccctctcctcgctggtctctcatttcgataggcgctagggcctctcggagtcggagaggggcttccaacaggccccaagtccagtccttccctcccaacaacatcccgccgagcgtgccctggcacccaggcgcggtgctcgggaagagggccccgggcctgcctcccgccgacaccaagaagaaaagggagggaaggaagggcgaagatggggcctgccctagagccaagtaccttgtagaaagcgccattggagccccgcacttccaccaccagctcctccatcttctcttcagccctgctagcgccgggagcccgcccccgagaggtgggctgcgggcgctcgaggcccagccgccgccgccgccgccgccgccgccgcctccgccgccgccgccgccgccgccgccgccgcgctgccgcacgccccctggcagcggcgcctccgtcaccgccgccgcccgcgctcgccgtcggcccgccgcccgctcagaggcggccctccaccggaagtgaaaccgaaacggagctgagcgcctgactgaggccgaacccccggcccgctgcgggtgtaaacactgaaaccacgtcacgtgatcaacgctgttccctccccccgcgggctcagcccctcggccccgccctctctcttcaagtggcctgggagcgcgcgcatgcgcgctgctgggaaccggccggggtgccgggtcgaaagacagacgcgcgggccgggcgtgcgcgggcttggtggagggcgggaaggctgaagggcggtgacaggtcgcactgcctcgcgagggccagaacgcccatttctgcagaggtgcactcagtggcgtgggaaatcaaatgcatccggttatcccagttcggcctctctgggattccgcgggagggggtgtctggtctggtttggtttggtttggtttggtttggtttggtccggttcaaagtagcgcagtctgactgagcgggaggtggagtggaaggcgagaataggggtgaaggattagacagaagaagactttgaactaggaacagtggcaaccagggtgacccaggcttttgtgacccgtagaggcagaaggtgaggcgtctacgccctctctcaccagattttgggcggccctgtggagacaccctgtgccctttaagggacatggattgagtcgggatctcaaaatgtgagcctttcctcagacccagctttgacccacgtactcgcctttcctcaactcattttcatactttcacttgactatatattttttaaaaattgtgttaagcacttgaggttcatttctgcccctactgtatgtgcaccctgtgccagagggtggggtgaacacgtgtgtagcagtcatgcgtcctgtccacaggggccgatgcacctccttgcaaccctttacattccactgtgaaacaaacctcaactttttcttattcctgtttttacaccgtgcttatagctgccttaatccatgttcccttcgggatgctggtatccaactgagaagttgacggagcatctatcgtgtgccagacactgtgctaagtgctaacgagaaatcggtgagcaaaacagaaaagaaaaaaaaagaagaaacgactgccagcattgaacttagtacctagcaaagtaggtggacataaatcaaattgtcagacaagtaaatgagtagttgcagctgtgataaggggtatgaagaataggcgcttccatgatggcggaacatgacctagtctggggtggagaaggggagatgattccagctggaatatggcaggtgagagttaactaatagcactgagttggcagaggcaggatgacctgccccaggcaggtgccccagaatgagaggatgttgctgctggtggaactccagctttaaagcggtggatctagggccacattcctcaaggccatagcaaacaggaaagaccttttggactagggtctttggagtagtcacatgaggccaagaacccaatagggctgaaagagaatctcatcataggctgaatgggagcagagcattagctgcaactccaatgtattatagtaaaaggggacacattgattagaatgattatacccctccaagtgtaagctgttgttcaatttacccagggcttaaaaatatgtcaactcttcacaaccatttttactacaagccacactcaacctgtgttgttccctgaacctgtgatgcactttcatccgttcatgtctctacacatccttcctgggccccatagaggccctgcaccttaaggttttcagctggattcctattagctagttattttatctcaggtacagagagttaactttgctcctcaattttcagcacattgtcatatcagtccctacagggtccttgtttacattattttatagtgtttatattattttttcctcatctttctcgatccccactctcattcttctagacacaagctgcaatatgttcgatagagatccttgataatttaacacagataatgttttgtttatgcctcttgcatttacagagatggtattggactgtaaatctctatttcccactgttttactcaacagtctgtttttgagctatacccacattgctgtgtgtacacctagtttgctaccgagtatgccagaaattttattcatacatatccctactgatcgggcatctaggttactgccaactccctgaagtcatactgtggtgaaaacccttgtgaatgtctttacaaacctttgccagaacttattttgtgctcttgtagaactttgtgcataccctctgcttcctcattacactgcttggcatatagcagagactcaacaaatgttgaatacctctactatgatggttagtgtactagaataatttatttatatttctgttttccttattggattattagtaccttccagacagggcaaatgtcttttctatctttgtgtccctggcacattaaaagtggttgatttcaaggtatgttcaatgaatgaataaatacttatcttcactgccagtacatactgcaacttagtcttccccacttgactctgagtctcagccttactctgatctctagcttttgatatttcccctttcaagatagcttacctgaattcagacactgagctcaggcctgatcatgagcctgctcttccaaagtcctctctctctctctctctttctctcctgtctctcgttacaggcagctcctgccttccagttcgttgctcaagcctaaaactgagacattttgaccctctttcacacatcagatccatcagcaaatcattgtagaatccagactctgtttctgatcatttgctcagctaaaaccatagtccaagcttccattctcttacctgcattatggcagcaacttcttcgctggtatccctgcagtcactgtccactgttgtaccctctctgacagttctcagcacagaagacagaatgaccctgttgaggtgtcaatcaagtcactctgccactcacaatcccccagtgactccctacatctctcagagtaaaagccagagtcattatttattctggcttcagtgccctatatactctgacttctgttatctccgctatctcaccttctactttcccccttcacttcattccagtgcatgaaatctatctagt

SEQ ID NO: 1204 - DNA, 4049 bp, Homo sapiens
tcagggaactaaggggcaaccaacctattcttcattcaccttcaagttaaacaacttcgttacaaaacaaaacaaaaaaggagggaattaatagcaaaaatagaaggcatttcttatattccagtcagtgtgcaagcaaaatcactggagcaaatcataagttgctggaagagaacaataagtacttcaaggccataatgtgctacttgccctctgtgataagcaaactttagtggcatccaatctaagtttatatcacaggtcaatcaaaatcttgcctaaccattagccgttactcacacatatatatgtatatgtattatagttattagtgccagaaatctagtgaccaaaaccactaatctaggaccgtgaacgattctacgcaaactcaccagaagaaattatggatcaataaaatcaatgaaattaaaattttgactgcagagtcaactgaaacaatttcatattcatgagactgttaagaacataaacgcggggttaccttttgcctccttttacagcaaaaggctttatctttgtgctcaaagtatggaacagtttacatactttactcatttatgaaatatactgatctccaaatgtcttcataaaattggtaaacacagaataaagtcaattgtttattttcctatagccaaacgtgtcctgtctgaaacattcaagccattctacaatacatttaagaattgtgttggacactgctaatagctattttccagccttccttccacacgcaccttctattgccaaaatactgtagtaaggtgggatattattgaaagaggttatagacattcaaaaggaaatgagaatttatagatgaatttatacagcacctacataccaacaaacgcactactgctacatcaaatttgtaaatcttccttttaaaactgaaaggtgttagttgatctgcaatggtgtaactttaaaaagcacagtaaacccatgaatgcctatataaagcctcaacaattcagtccactgcaacaccacaaattcaaaggaaatgtggtcaagttcttaggggcacaaaaatattttcgctcagttaaaaaaaaaatgccctagtaataatatactctcagttaattacctgaagtttcatggcatatatttaggtctttggaaacttaaacacacacacacaatttttaagtagcagcgctgctaatggttttagacgctgaagcatgtgcattcctgaatttaccccgtttaacaaaaagggggacgcgaatattcacgatgatcaacttcttcaatgcactgctgggccatgttagggtcttcctgaaacttttggatctaaaatctcctccgaaatccacaaagagaagccactaaaaatcagttgccattgtgatttggtgccgactaccgcttcttactactctttcttcacagccctcgcccagaacagtggagctctccgaagtcccaatgctagaccggaaaagagaagccaaaggagacctgaagccctcttggcgctgcaggaggcggcccggctgaagcgccccccgctcctccacaactacccacacgacaggcccggatcccgctgggagatgatgtttaggaaagggggaataagccatcgccgtcacttagcgccgatttcggcccttcccgcccggctctagtacctgccgccggccctcgcccatccccagctcaccccggcggggctcggcgccgaaagagaaccctctcctcgctggtctctcatttcgataggcgctagggcctctcggagtcggagaggggcttccaacaggccccaagtccagtccttccctcccaacaacatcccgccgagcgtgccctggcacccaggcgcggtgctcgggaagagggccccgggcctgcctcccgccgacaccaagaagaaaagggagggaaggaagggcgaagatggggcctgccctagagccaagtaccttgtagaaagcgccattggagccccgcacttccaccaccagctcctccatcttctcttcagccctgctagcgccgggagcccgcccccgagaggtgggctgcgggcgctcgaggcccagccgccgccgccgccgccgccgccgccgcctccgccgccgccgccgccgccgccgccgccgcgctgccgcacgccccctggcagcggcgcctccgtcaccgccgccgcccgcgctcgccgtcggcccgccgcccgctcagaggcggccctccaccggaagtgaaaccgaaacggagctgagcgcctgactgaggccgaacccccggcccgctgcgggtgtaaacactgaaaccacgtcacgtgatcaacgctgttccctccccccgcgggctcagcccctcggccccgccctctctcttcaagtggcctgggagcgcgcgcatgcgcgctgctgggaaccggccggggtgccgggtcgaaagacagacgcgcgggccgggcgtgcgcgggcttggtggagggcgggaaggctgaagggcggtgacaggtcgcactgcctcgcgagggccagaacgcccatttctgcagaggtgcactcagtggcgtgggaaatcaaatgcatccggttatcccagttcggcctctctgggattccgcgggagggggtgtctggtctggtttggtttggtttggtttggtttggtttggtccggttcaaagtagcgcagtctgactgagcgggaggtggagtggaaggcgagaataggggtgaaggattagacagaagaagactttgaactaggaacagtggcaaccagggtgacccaggcttttgtgacccgtagaggcagaaggtgaggcgtctacgccctctctcaccagattttgggcggccctgtggagacaccctgtgccctttaagggacatggattgagtcgggatctcaaaatgtgagcctttcctcagacccagctttgacccacgtactcgcctttcctcaactcattttcatactttcacttgactatatattttttaaaaattgtgttaagcacttgaggttcatttctgcccctactgtatgtgcaccctgtgccagagggtggggtgaacacgtgtgtagcagtcatgcgtcctgtccacaggggccgatgcacctccttgcaaccctttacattccactgtgaaacaaacctcaactttttcttattcctgtttttacaccgtgcttatagctgccttaatccatgttcccttcgggatgctggtatccaactgagaagttgacggagcatctatcgtgtgccagacactgtgctaagtgctaacgagaaatcggtgagcaaaacagaaaagaaaaaaaaagaagaaacgactgccagcattgaacttagtacctagcaaagtaggtggacataaatcaaattgtcagacaagtaaatgagtagttgcagctgtgataaggggtatgaagaataggcgcttccatgatggcggaacatgacctagtctggggtggagaaggggagatgattccagctggaatatggcaggtgagagttaactaatagcactgagttggcagaggcaggatgacctgccccaggcaggtgccccagaatgagaggatgttgctgctggtggaactccagctttaaagcggtggatctagggccacattcctcaaggccatagcaaacaggaaagaccttttggactagggtctttggagtagtcacatgaggccaagaacccaatagggctgaaagagaatctcatcataggctgaatgggagcagagcattagctgcaactccaatgtattatagtaaaaggggacacattgattagaatgattatacccctccaagtgtaagctgttgttcaatttacccagggcttaaaaatatgtcaactcttcacaaccatttttactacaagccacactcaacctgtgttgttccctgaacctgtgatgcactttcatccgttcatgtctctacacatccttcctgggccccatagaggccctgcaccttaaggttttcagctggattcctattagctagttattttatctca

SEQ ID NO: 1205 - DNA, 4045 bp, Homo sapiens
tacagaataacacctttatgcaaagttagctcaggagacttcagagaaaccacgagtgcaagtttatttacactttacccaagttgatttataaacttataaatttataaaccttatgcaagtttatttgtagtaaaactgattttactacatttcagctatgtatctgaaatgacatgttagaccactaatatcttcattaaaaatatccttttgattgtacactttatcatatttagctgctagctgccataatactactaaccaaatgaaagtctgtcctcaaacactgaacttaaaaaagtataatctaacaacaaaattacaatctagtataattacaccatattacaacaaggaatcagaaatcagaggttgtattttcagaaaacaaaaaggtttgtatcttatgtctccaacatgtgatttttccatctttagtaattttcatactagtacacaaaacctacaaatcttaggattcattagggcattcatattggagtgatacgcattctacatttaaaatggagttaattcattaccattctcaacacatcaaaacttctagtccaaagaaaacaaattatgtggggcagatgcacctagaataaagactttatttcatcattattcatttagaaaatactttgtaaagattttatgaggtgtaagtcaaagtgccttcatatcttaacacctgcagggcactataaagtggtacacgtgaccaattttttctaagtcaaacaaatacctaagcataaaagtagtggctctggtgatcgctaaatctaacttttaagtttttaagaataaacaccagaagatagagagctgtccttgcaaatatggtggttatgttaggcaaatcaaagtctgaattccattatactcaagttgtttgatttgtttagttttaaaagcttttctatcaatttgatgaacaaggttcctatttctttttccataaatgtaacacttctccacagcagttcatttttcattggtttttatttcacatctttcctgtccatcccactggacaagcaactcagtttacttttgctttacttttaaaactcacagcagtattataagtcatataaaaatttcaagcttttttgttacagaaactgttcttccatcagtgcagaccatttgagattttcttagaaatcaaacttaattaaataaacataacagcaatttgtctgacacacacttgttcaagtattaacatttctcctcagggaactaaggggcaaccaacctattcttcattcaccttcaagttaaacaacttcgttacaaaacaaaacaaaaaaggagggaattaatagcaaaaatagaaggcatttcttatattccagtcagtgtgcaagcaaaatcactggagcaaatcataagttgctggaagagaacaataagtacttcaaggccataatgtgctacttgccctctgtgataagcaaactttagtggcatccaatctaagtttatatcacaggtcaatcaaaatcttgcctaaccattagccgttactcacacatatatatgtatatgtattatagttattagtgccagaaatctagtgaccaaaaccactaatctaggaccgtgaacgattctacgcaaactcaccagaagaaattatggatcaataaaatcaatgaaattaaaattttgactgcagagtcaactgaaacaatttcatattcatgagactgttaagaacataaacgcggggttaccttttgcctccttttacagcaaaaggctttatctttgtgctcaaagtatggaacagtttacatactttactcatttatgaaatatactgatctccaaatgtcttcataaaattggtaaacacagaataaagtcaattgtttattttcctatagccaaacgtgtcctgtctgaaacattcaagccattctacaatacatttaagaattgtgttggacactgctaatagctattttccagccttccttccacacgcaccttctattgccaaaatactgtagtaaggtgggatattattgaaagaggttatagacattcaaaaggaaatgagaatttatagatgaatttatacagcacctacataccaacaaacgcactactgctacatcaaatttgtaaatcttccttttaaaactgaaaggtgttagttgatctgcaatggtgtaactttaaaaagcacagtaaacccatgaatgcctatataaagcctcaacaattcagtccactgcaacaccacaaattcaaaggaaatgtggtcaagttcttaggggcacaaaaatattttcgctcagttaaaaaaaaaatgccctagtaataatatactctcagttaattacctgaagtttcatggcatatatttaggtctttggaaacttaaacacacacacacaatttttaagtagcagcgctgctaatggttttagacgctgaagcatgtgcattcctgaatttaccccgtttaacaaaaagggggacgcgaatattcacgatgatcaacttcttcaatgcactgctgggccatgttagggtcttcctgaaacttttggatctaaaatctcctccgaaatccacaaagagaagccactaaaaatcagttgccattgtgatttggtgccgactaccgcttcttactactctttcttcacagccctcgcccagaacagtggagctctccgaagtcccaatgctagaccggaaaagagaagccaaaggagacctgaagccctcttggcgctgcaggaggcggcccggctgaagcgccccccgctcctccacaactacccacacgacaggcccggatcccgctgggagatgatgtttaggaaagggggaataagccatcgccgtcacttagcgccgatttcggcccttcccgcccggctctagtacctgccgccggccctcgcccatccccagctcaccccggcggggctcggcgccgaaagagaaccctctcctcgctggtctctcatttcgataggcgctagggcctctcggagtcggagaggggcttccaacaggccccaagtccagtccttccctcccaacaacatcccgccgagcgtgccctggcacccaggcgcggtgctcgggaagagggccccgggcctgcctcccgccgacaccaagaagaaaagggagggaaggaagggcgaagatggggcctgccctagagccaagtaccttgtagaaagcgccattggagccccgcacttccaccaccagctcctccatcttctcttcagccctgctagcgccgggagcccgcccccgagaggtgggctgcgggcgctcgaggcccagccgccgccgccgccgccgccgccgccgcctccgccgccgccgccgccgccgccgccgccgcgctgccgcacgccccctggcagcggcgcctccgtcaccgccgccgcccgcgctcgccgtcggcccgccgcccgctcagaggcggccctccaccggaagtgaaaccgaaacggagctgagcgcctgactgaggccgaacccccggcccgctgcgggtgtaaacactgaaaccacgtcacgtgatcaacgctgttccctccccccgcgggctcagcccctcggccccgccctctctcttcaagtggcctgggagcgcgcgcatgcgcgctgctgggaaccggccggggtgccgggtcgaaagacagacgcgcgggccgggcgtgcgcgggcttggtggagggcgggaaggctgaagggcggtgacaggtcgcactgcctcgcgagggccagaacgcccatttctgcagaggtgcactcagtggcgtgggaaatcaaatgcatccggttatcccagttcggcctctctgggattccgcgggagggggtgtctggtctggtttggtttggtttggtttggtttggtttggtccggttcaaagtagcgcagtctgactgagcgggaggtggagtggaaggcgagaataggggtgaaggattagacagaagaagactttgaactaggaacagtggcaaccagggtgacccaggc

SEQ ID NO: 1206 - DNA, 4049 bp, Homo sapiens
cagttaatcgttcctaggtacccttacaagcagtgctagggaaagtgacatacctccagctgcttactagcttcttcatttctcattatcagagacaacttagtgcgcagactccgaaagtgcatgtcaatcagcatatgtgctcgctttgaggtgacttcattgatggactaaatgatttaaattaacaacattattatcaaggcaattgccccagatgaattaaactaaaaataaacaactcaaaaatgctcaccaaaatgacaagctgataattttctggatcataagttacagaaaaggcaccaactgcctttttaaaatccttatgtgccgcctctttggcacacctagaaatttaaaaaaaaaaattaagatgaataattaccaactactgacataaataaatgcaggcagatttacacatacaagaatcatggattcatattaaatttgatttatgcaaaatatgctatatccatttagaagcttagctccttttctgtacatttctgaaatacagcttagattaccaaaagagacatattcaggggaaccactctacactacaggtttcctgatttcagttacatacaagtcagtagttttcttaagtcaactattgaaaacttttgggagatagctacctacagggtatctgatttctttcttcttctcttgttgcaggcctttttttttcctttttttttaatttttagttttgtgggtacatagtaggtatatatatttatggggcatatgagatgttttgatacaggcatgcaatatgaaataagcacatcacggagaatggggtaagaaactgctaaacgatttgagggagagaaggaaacgtacatgaaccagaaggcacaaaaatttacacacatacacaatctctagaaaagggaggatttctatgtattctgaactgcaatttaatgttcaacaacatgtccaaatcaaacgtactgtattcacttaataaaatctgtaaaaaataaaaatgcgtctcttctatagtctttaagcattattccagatcaaggattgtaagatgagatgactttttaaagcttctttggctctacttattacacatttatctgaaaacattttaggtaaaagagaaaaaaacggagaaatcgtttatagtttgtgacttatgacagaattatcacatttgtttgatcagtttttaaatcttagaatgaacaaagttagtttagaaaacaaatgtacattatgtacatcagacacgtgtatagccaagtaagtttaaacaagcgcaaggctgccttgattctataagtaggaaaagttaaataagttttttctccattgctcttgcaaaccaaaccatttttgccaaagtccaccaaatttaaaatcaatttctagtagtttaaaaaattttaaactactagaaattcttctaaactaattgcatatcacttccaagttctcagcatttcttgtgtatcaacttacatttgccgtaagtcttctggcacatccagcttgatcttatggaaagtatcttttgtggcaggtttgttgggattaacagatcttagacgttcaattgtgacaatttcattgtaagttgcatcacatgctgcatattctatcacataaaactgagaaataaataaaagtcacttctaatcacaatttttaaagtaagaataagaagttctccctattcagttattttaaaataaataatctatgtgaaaaaatttatgaccaacagaaacatactgaacacatagtgaaaacattttaattaaattactcaaaattagatattacttcaaaatagaaatccacacgggaatgtacaacctgggtttaaaaaaaggaaacaatataagaaaaaaatttaaataggcattttcctacctcaccctttatcatcctcactttagctaaccaccaacagcaaggctctttttcatttgctctggaatacacctacacaaaaattacaacacagaatatttcatgattaacataattttgaaatctacagattttcagatatcgaggaaattttcttaaaatgcccctaggtgtctttaaaaaccacatgtcatatatcctcaaccaaattgtaaccctgtctatgtaccccgaggtaggcagagatacataatcagaaactacctgagattgctttgaagctccttgtaaaaatcagttttcctatatttctgttctaattcagcaataattagtgctctgaaaatagacgcccataaatacaagcacactttccttgggtactcagcaagttacaaaaaatgtatctaaaaatgtataagcttatttttgctttatcctagtaagcaaaaattgactgaaagttactgaccatgccctactgtcttgttgcttggtcactaaagtaagaccactgaacattcagcccactaaggataccactctggcagtcatatctcctggaactaaatggacagatccttggtcactttctggtctcctgcttcctctccactaaaaatgacaacttcatggtggcaatcctctggatatcactttcctggtctgtcacacactgcagatcagttcttctaactgatctctttgatgaccacttcaaagttcacttaagatgtacagcatggaacctttcatgaagaccctagcaaatcaaggttaataggaaaagagacaacagagtatatatggacagagagacagggatactcagaagcagaaaagagaaataagaaagacaagggggataaagacatgaggccaagagaggtacaaagtctagggctgacaagtagagtaaaagctcgaacttgtctcccttttacaaccaaagttaatgatcacacaatacagtgactgaatacaacttaacatacctttccctcttgcttccatctttctcaactactctagccagagaaattacctcaacgaatcggtgtgtaagacagtgaggtcatcctagcaatggtatctcattggtcccgatctgtcaagtgaccaagctggggagaaaaagtccctttcatccctccatcaaacactattctgggtactcctaatacagaccaaagacctgggtcttgccttcagagagcttacagtcttctggggaagtggacagctaagcatacacagtgtttctgttccctattaagatcccttgcaaaaccaagcccagctgcttacacctagtagagattggttacatttttggaaaataaataacactatatcctatgtccactttaaaactgtagagagaaaaacacaggcctggacattgagagatcttccctgactactctctgaaacagcaatcctgtccctaaatcacctttcatcctctccctttttttttctttaagactcacatctgtcatattagctatccttactggaatgtgatttcatcaaaggcagaagattctgtcctgtttttgctacacctttactacctagtgcagcaaataagaattcaaggaccagctgggcatggtggctcacatctgtaatcccagcactttgggaggccgaggcgagtggatcacctgaggtcaggagttcgagactagcctgaccaacatggtgaaaccccgtctctactaaaaatataaaaattatctgggcgtggtggtgggcgactgtaatcccagctactcaggaggctgaggcagaagaatcgctagaacccgggaggcggaggttgcagggagccaagatcgcgccattgcactcctggatgacaagagtgagactccatctcaaaaaataaataaataaataaataaagaactgaaggacaggacctagaaccactctgcctcacctgcacaaatgtctacttagcgacatccttcatactacaaatattcatggaacggcaactattattaactaatagtaaggcattatgcttattattgtagaaaaagaagagaagcagctcaaaatggagtatgtgaaaggatacaaaggagagaagataccacacaaactatatgaggcactgtaagcgccttaaa

SEQ ID NO: 1207 - DNA, 4046 bp, Homo sapiens
cagtgctcacgcctgtaatcccagcacactgggaggccaaggtgggcagatcacctgaggttgggagttcaagaccagcctgaccaacatggtgaaaccccgtctctactaaaaatacaaaaattagctgggcatggtagtggatgcctgtaattccagctactcaggaggctgaggcaggagaatcacttgaacccgggaggcagaggttgctctgagccgagattgcgccattgcactccagcctgggcaacaaaagcgaaactcccgtctcaaaaaaataaaaataaataataaataataaaatcatagtgtggctgtcaaggtcttcacaaatactcagactgcatattctctagagaaatcctcttatttgtatacttgtcacaaagaactaagattgactacaattgtaatgttgaaggtaaaatatttcacataaactggatttgtaatctttgaacatgtttttaataaagtaaaataaactcataaatctcaaactaccatattcaaacaattaagatgaaaagaggcagacaggttttacctgaagggatccatctgttgttcttcctttagcctctcttggattacgtggacgattatctgttcgggagtgatcgtcgtttcctatgagaatattttcaaaaggttcaacagttactgattctgaaatgcttactggaagttctttattcccacaccctctatttaaaccaaccacagaatctgaaatgtaatcaataccccagtgattccagttacacaatggctaataatctagcctgctgctaagtaacagaaaatatttcacagttattataattctgcatctacaggtcaatgtgagttaatgaagggatgctgtttagacccaccaagatgctgaattagttatcagcatttattcatatatctgtatgaaccataaggaaggctgcctaatattctttctttctacacaagtggaaggctgatcctttcctatggtatcagcacaaaacgggagagatgggatcttggtaacagttcattgcatcaataggatttctcatggaacttcaagacagctgttacaattcactttgatttcttaatgaagatctccatacctttgaagcctcctccacgtcctcttcctccttgtcctcttcctccccctccacgccgccgtccgtctcctctgcgcaggaagctctccctctcttcctctgttggagctaatgaccaatcactgagttcgtctctgtggtcagattctgtttcagaagcatttgatgcttcagaattagttcctatcgagagttaaaagttatataccattgtctgactttaaaaaaaaaaaaaagagggttaacagaagcttccagagacgtttcaggggtaatccaaaactcttcccaatttataagcccaccaagagtattatcactttccatttcataaaacaaaattttaaactcaaaatgaagggctttgcaatatttgaggttaattttggttataaacatgtttcattctcatttttaaaaaggtatgttattagccacctaagttcaaaccttgatgtgccatatcattaaatagctgtgttcctttaaacatctatactctctggaggaaaagattatccacgacagttaagtgtgataccctgataaacaaaacctctaaaaagagagctccttttagcaagatttggcccaggacagaggggaatgtatatattttggtcatttctgagagggtggcaaaggaggccaccatggcaactgcttcagggaagggtctcttgtgggtcatggattggatctagctgaaggcagatacatgcttgcctgatgtttggtccacaacctgccctcccactcccattacaataattgatcattaataaagaattactataataaattcattatgcctgaaggggttaacgacttagaggacaggagcggagaaaaagagctccacggtgaggcagaaattcatgagtaaaaagaacagactgttgggagaggggttaggggttaggttcaaggttggccttaggagtaggtaactctccccaactccagaatatcagctctactacctctctcttcctctgttggagctaatgaccaattatagcttcaccattatagcttcattcctgtggatcttgaaggcttttccatcttaaagagttcctttttgaaatgcaaatatgcgtgaaatggattataccttataccatcattagcaagttacaaaggagatacactgttgagcaagaaagacagtaggcactggcaggtggggatcaggttcactgaaaggtactgggagagaagaaagaagcacggacagaaaagctgggaaggcaaagagaaacttcgcctacttcttgactgtgcctagggctgactttggccatgtcactcaaaatcaccttatgagccacaagaggcagacccctgatttacacagtccatccagcaagtatgaccagcacatacctgacaaaataaaaatgagccacagtacacaaatgaaaaaagttttgactatacagttataaaatcaggagaggccttaagaaaatcatcaacacacaagggctttgcagatttacccccaatcagagcatgaacagaacttgcaccggccctgtgaactctacgtgtttatcatcaggtttttactctatgtctcctgtaacacaatttaacccactgtgaattggaaaccatgtagcggcaaattgttataatggggttctaatgaatattagagattagcagctataagtctaggaacagataaagttactgagtaaaatgcttagtttgtacctgaagtatatccaggaccgcgtctgccgtgccccctatttctgtaaggtctactacctcgacccattccttgaccatcatcagtcacatagcttttttccttatctgtacgatttggtggtggtctagaactagctccaatctgtcgcaactgctcatcaatttgtaatctctccaaacgcaactggtctacttcctatttaaaatatacaagataacagtaaaaataatttgacattttacttaataaaacctttctccttttcatcagataaaaatatactggaatatttcaatttcagttctaaatttacagtaaacactgttacacagaattatcaggaaattgaatgatctccttaaaaagaaaattactacagataacagattattgatgtcaagaattagagatataacaaaaacactcagcagtaaaattatactgaataaaatttaaagttgtctaatttggcactattatccaattattctactgctaaggcacagatatgctattttggggacttcttcatgataggatattaaataaaacatgctaaaatgtatgaatatagataaatgacattcaaggtataaccagctaaccttaaaaaatcacacattgtaaataatcttgattaaaatagatttgccagttaatatcttaatttacaaagcattgagtttgggccatcttttgttttaaaagaacatatactatggttaaggaacaatgattttttcatcaactgaaaatgctgactattcctcatgaggggaaaacaaaactatttaatagctgaccagacagctaggtcttacatcatgccttgaaaacttcctaaagactacaactctgctacaacaagtacgagaaacagtatacatttagttgatagaaatatacacctggggtccaatgacagacccttacaaaaagcacttccagtatgttgggttctgttaaaaccagatgaaacctcatttctaaccactgtccttccaatccactcataaacatctcatttactggctacggggaatcagattcataactatagtagtagtaggcgtctcagtgaagcagaggttatcatagagactgtctacatgaacagtcattggagaagctcctgtaaagctaagtttctaaaatcttggttgtggcagcttctggaaaagaaaggtcaggtaaggatttggtcc

SEQ ID NO: 1208 - DNA, 4060 bp, Homo sapiens
ggacatatgctagctatgtgactgtgggcaaaggactgaagctacagtgcactcacctataaagtggaataataaaactacctcagtgggttgctgtaagattaaatgagataaaacatacacaaagcacttagcaaaggtgcctggatgtgctcaggagataattttaaaattatttaacaattggtttagcactggtgacagccaattgagaagagatcctcggactaggtcctggctgtaaataagcagatgactgaccaagcatggagactagctgaatatcatcagctctgtctatcatgattattagttgtaagacagacaccttcttttccttattttctattcaaagagaataccctatccctgttaatttgggggagcaaagacacataaggtttactgaggtctctaagtacatcccaggatgttccttctctgggggattgcaggtctaccaatgtggtattaaaatcatagtgtggctgggcacagtgctcacgcctgtaatcccagcacactgggaggccaaggtgggcagatcacctgaggttgggagttcaagaccagcctgaccaacatggtgaaaccccgtctctactaaaaatacaaaaattagctgggcatggtagtggatgcctgtaattccagctactcaggaggctgaggcaggagaatcacttgaacccgggaggcagaggttgctctgagccgagattgcgccattgcactccagcctgggcaacaaaagcgaaactcccgtctcaaaaaaataaaaataaataataaataataaaatcatagtgtggctgtcaaggtcttcacaaatactcagactgcatattctctagagaaatcctcttatttgtatacttgtcacaaagaactaagattgactacaattgtaatgttgaaggtaaaatatttcacataaactggatttgtaatctttgaacatgtttttaataaagtaaaataaactcataaatctcaaactaccatattcaaacaattaagatgaaaagaggcagacaggttttacctgaagggatccatctgttgttcttcctttagcctctcttggattacgtggacgattatctgttcgggagtgatcgtcgtttcctatgagaatattttcaaaaggttcaacagttactgattctgaaatgcttactggaagttctttattcccacaccctctatttaaaccaaccacagaatctgaaatgtaatcaataccccagtgattccagttacacaatggctaataatctagcctgctgctaagtaacagaaaatatttcacagttattataattctgcatctacaggtcaatgtgagttaatgaagggatgctgtttagacccaccaagatgctgaattagttatcagcatttattcatatatctgtatgaaccataaggaaggctgcctaatattctttctttctacacaagtggaaggctgatcctttcctatggtatcagcacaaaacgggagagatgggatcttggtaacagttcattgcatcaataggatttctcatggaacttcaagacagctgttacaattcactttgatttcttaatgaagatctccatacctttgaagcctcctccacgtcctcttcctccttgtcctcttcctccccctccacgccgccgtccgtctcctctgcgcaggaagctctccctctcttcctctgttggagctaatgaccaatcactgagttcgtctctgtggtcagattctgtttcagaagcatttgatgcttcagaattagttcctatcgagagttaaaagttatataccattgtctgactttaaaaaaaaaaaaaagagggttaacagaagcttccagagacgtttcaggggtaatccaaaactcttcccaatttataagcccaccaagagtattatcactttccatttcataaaacaaaattttaaactcaaaatgaagggctttgcaatatttgaggttaattttggttataaacatgtttcattctcatttttaaaaaggtatgttattagccacctaagttcaaaccttgatgtgccatatcattaaatagctgtgttcctttaaacatctatactctctggaggaaaagattatccacgacagttaagtgtgataccctgataaacaaaacctctaaaaagagagctccttttagcaagatttggcccaggacagaggggaatgtatatattttggtcatttctgagagggtggcaaaggaggccaccatggcaactgcttcagggaagggtctcttgtgggtcatggattggatctagctgaaggcagatacatgcttgcctgatgtttggtccacaacctgccctcccactcccattacaataattgatcattaataaagaattactataataaattcattatgcctgaaggggttaacgacttagaggacaggagcggagaaaaagagctccacggtgaggcagaaattcatgagtaaaaagaacagactgttgggagaggggttaggggttaggttcaaggttggccttaggagtaggtaactctccccaactccagaatatcagctctactacctctctcttcctctgttggagctaatgaccaattatagcttcaccattatagcttcattcctgtggatcttgaaggcttttccatcttaaagagttcctttttgaaatgcaaatatgcgtgaaatggattataccttataccatcattagcaagttacaaaggagatacactgttgagcaagaaagacagtaggcactggcaggtggggatcaggttcactgaaaggtactgggagagaagaaagaagcacggacagaaaagctgggaaggcaaagagaaacttcgcctacttcttgactgtgcctagggctgactttggccatgtcactcaaaatcaccttatgagccacaagaggcagacccctgatttacacagtccatccagcaagtatgaccagcacatacctgacaaaataaaaatgagccacagtacacaaatgaaaaaagttttgactatacagttataaaatcaggagaggccttaagaaaatcatcaacacacaagggctttgcagatttacccccaatcagagcatgaacagaacttgcaccggccctgtgaactctacgtgtttatcatcaggtttttactctatgtctcctgtaacacaatttaacccactgtgaattggaaaccatgtagcggcaaattgttataatggggttctaatgaatattagagattagcagctataagtctaggaacagataaagttactgagtaaaatgcttagtttgtacctgaagtatatccaggaccgcgtctgccgtgccccctatttctgtaaggtctactacctcgacccattccttgaccatcatcagtcacatagcttttttccttatctgtacgatttggtggtggtctagaactagctccaatctgtcgcaactgctcatcaatttgtaatctctccaaacgcaactggtctacttcctatttaaaatatacaagataacagtaaaaataatttgacattttacttaataaaacctttctccttttcatcagataaaaatatactggaatatttcaatttcagttctaaatttacagtaaacactgttacacagaattatcaggaaattgaatgatctccttaaaaagaaaattactacagataacagattattgatgtcaagaattagagatataacaaaaacactcagcagtaaaattatactgaataaaatttaaagttgtctaatttggcactattatccaattattctactgctaaggcacagatatgctattttggggacttcttcatgataggatattaaataaaacatgctaaaatgtatgaatatagataaatgacattcaaggtataaccagctaaccttaaaaaatcacacattgtaaataatcttgattaaaatagatttgccagttaatatcttaatttacaaagcattgagtttgggccatcttttgttttaaaagaacatatactatggtt

SEQ ID NO: 1209 - DNA, 4044 bp, Homo sapiens
gccaagaactgtactcaacgttttactgtattagttcatttaattaatcctaacaggtgctagaatgattcacattttacagctgaagaaactggggtccgtacataaatagaccagtggctctcttacttgtttagggttaaatctccaaactcttccaagtagtatttctaagttatctggtaactaaatcaacattaaattccaaaatctgctactggagatcttcgagctttaccaagttgtgaaaatgaggtggtattttttttttgtcaattatttagagcttcaggtacaaagtgttcaaagcttcaagtatatctgccctactctgagaactctgatgatttctaccagcaatattcattttaaatttgataatgatgtaaacttgtatttatttcctgacacaagcaaccattccagaaaggaagaaagctgtaaagaagtaggctgagtaggtagggaacctctgcccacattgctactcactattgctgtacaccagaaaaagtgtgctcatcccagcatgtagatgctcgccaataaggcattccacccgccaaattccagctttggatggtaacatttccactgtctcaaaaacaccttataaaaaccaacaggaacagaaattatttcttttcactaaaaaatgagcatgagatacattggtttatgcgaaatatcagagtagacctaccaaatttggtagttccactacttttggacccctcaaatgcaaagtgcttgctacgtgacccttacagttgggggttgtggagattgagttctgaccactcccctccccccaggagatgagaaacagggtgactgaattctttgatggttgggacaggagaatgctactgcattatgattgacctacattcccagggtctttctgagcaaaaggtgtgtttcccattggccagatgtggactctgtgaaacagataagtcagggtgagttccctctggatccagtccactagagctgcctacaagggtaaagttaccccagcaacaagaagctgcaggtgaacactgagggctgagaaatgagtcacaagtgaccacccagagtaaaggtggaagaaatcatgtcaaggggatttcatgacagtcacgtaagggagtctctaaagagttccctgaaagtgccctgcaggagaaagagtcaacaagtattgccaggcacaaacagtgttaagctagtttacaacaatggtgccagctgtaaataggtaagaactatcttatccccttacctttaacctatccatgttggagttcaaaacagcagctataaaggggttgtggggaagcacgatcatcacaaggtacagaaacagaggactcaaccatgtctcccttttccaatgcagacttccagcctgatgcaggctcaagttggaggaggggagattgaagttaaatcaagtttacaattttgattaatatcttgggatggacattgtaatttctgatttgaactgtatttgtgacataaagtgactttagtcctgtttattacttaagggtgagcagaaaagttacagggcttatcagaatttttacgaagaaataaggaaagtttacccccgctattaaactggatggttttttttttttagagacagggtcttgctctgttgtccaagtttgagtgcagtggcactttcatagctcactgcagcatcaacctcctgggctcaagcaatccttccacttcagccacccaagtaggtgaagtagctgggactacaggtatataccacatgtctggctaattattttttgtagagatgggggtcttgctttgtcacccaggctggtcttgaactcctggcctcaagcaatcctccaaccttggcctcccaaagtgctgggattacaagtgtgagccatcgcacctggccaaatctattttaaagggacagtgaagaaccaaaataaaattgtgttgtgatcaacattatgagtagtgcttaatcaatatactggttacatacataaacaaatgactctttggatgactactggtgccctatgggatttgagatggtaaatgataaaggaataaattccttttccctaggaaagtactgtgacattaattatccatttattctgttctatttcctttttagcaatttttctatatctgaaattatcttgttcatttgctttgaacaaatggtttaaaaagcatttgaaaaagtattacttaagagcatggagcttgtctgctttgatcactgattgtgttcccagtgcctagaccatttaaagtaagtactcaacaaatagagtaggtagaagaaagagcacaaacaagctcatacctggatagagattgtacagtgccattttatactcctctttttttcgtacagtgaacacatgtccactgaaatgaatagaatggatgttttcattgctgcccatgctgagcagataccatcgaatcctttgatcctgagccattactaagccaggtagtgtatccattatgtagccattgattgctggagaaggacacagagaagcctgttaaaatctattatataagtttctttctctccactccaccaaaaaaactgacatctatgaggattccactcccacagatatactctaaataaatacaatgttcaagtccctggatcaagtctcatttgtcaaagtgcaatctgcatttcacagtgataatgtttggatgtggaatatattaccatggaagcgataattctctttaaaagtgggatcttccatctggatattgcagggagccctgcagtttctttccatattttcagtgaagtaccagcttttggtctcatcaaagatggtgaaaaacagagcaaattcctgtactgtcacttgtctcccatgagcagggttcagtgtgttagtgtggcagaccagaaggggtccaatcaggcctgagtgcacatctttttcctagggagggaagacatcaatcctatgagtataagctctctcacctatgaaccagagtggatttctcatcaatttttatgccagtccaacctgcctcccaccttccaaaaatataatccatcctcttcagtagattccagaatgacatttctaaaacacaaatataatgatcaactctcctatttaaagcttcttattgcacgtaggataaatatcaaaattcttagtacacaaagaccatttcttttaaaccaaaaagtggtcagcacaatagacacctgcttaccaggtcaacatcagagaaataagcccaggctttgcagtcaaactcatctttagtgggtgccatatgatgttgcactttccaaaagtaagttttggtttcattaggcttgacaaagttttttctaggttctgctccttgcctctgatcttcctcataagaaataaggctagaatagaaggaatagggacgagaggcctgatttctgaaagttacctgtagaacaataacgacaaaaaaaaaaaagcaagaataatcttctaggatcttaaggtccttagggtttacatccctaaaagaaatacctgtcttttggtctttatcaaagtttttaataccctggaagaagtggtacagaagatggatgctgttagaactcaaacctaatcctgaggaggttttgtattctaaatttaaggtatgaactcaaagttgcaaaggagaaaattcctaaacacataaaagccattccagagtaaaagggaaaatgttactgcaggggttataagagaccataacgccaggagttgatatgtaagttaaggttcttcatgacaaattctagaatgaatgcatattatcttttaaaaaaggcttactttccagattaaaaattatacatatttatcatagaatataatggaaagtaaaataaaatgtaaggcaaaaattgcccacaattccataattttagatccttctacatccttaatatacaccatcaattaattgaaacaacgaatagatattttcagaaaaaaataaaactactttgatctttggttcacacaatgc

SEQ ID NO: 1210 - DNA, 4046 bp, Homo sapiens
tgtgactagttgtaaaccctatggcaaatgtattcaacattctcagtctcatcttcatgctttgtaaaatggataataataattcctgccctatttataccacagggcaattttgaagatcaaatacttctaagaagggagacctgtttacttgattatgaggaacagggaaggttttaggagcagcaaacaactagtctggggttcatgtagccttaaacataactcagtctgcatcgaaaaacaaagtgtttggtctgaggttcaataagataaagcatttttttctgaaaaataaagattaaaattagtggatagaatctgtgaaaaggagaaaaacaaaacaaaaaataaactgaatcggggtccaactggacaatgattgattgacaatgatcatatacaagtaaatgacctattcctctgtgcctgcaagaatgttgtttgtgcatcaacttcctgttactcattcagtatgacacattttgtccactaaggtcttgtcaaaattccataaatattatgtgacacatggggaagagagatttctattcttaatcactacagaagacaataaacaaggtcactaatagaacataaggaggaaaatggtggatgcatggcaagatcaattctcttttctaagtcaaccaaggaacctgaggagaaggttaatatgagagtaataggaagaaagaaatgctattaaatataaaagattaggcctctccgacatttttctccaataactcttgctatggtttgaatgtctgtcccctccgaaactcatattgaaatttaattatcatcgtgatggtattgagaggtgaacatataaaaggtgtttaggtcataagcgttccaccctcatgaatggactaatgcagttatctggggaaagtgttcatgggagtggatttgttatcacaggagtgagctcaccctcctcttgctctctctcaccctttctttgcccttttgtcatataatgccttccaccatgttaagacgcagaaaaaggcaacttgatattggacctcccagcccccagaaatgtgagccaataaatttctgtccattataaattacccattctgtggtatactgttattgcagcacaaactgactaagagccttcaatggccacgagaggggtagagaaagagggttattaggttgatccaagattaagagttagcagaataaatacaaaagtaaggaaaattggggtgaaatgatgatgcaatctgaatttgcacaactagcagttacaaataaagttacattaacaataatttaaaactgtagttaccatcgtcctaatttgcttacacagaacctttgaccctttccaaagttcccaccaaatagtcctttcaatcccatgttacttctaaaattcactagctcctgacctgccctcagtttcacaggtgtctctcatctactgccaggtatctacagagtgcctctggctgtctggtgtctgaagtcaagctctacaatagcctgtcatatttgctatttactgctctgggcattactaatgatatagtggagcccttacagttgcaatctggacaatgcctttttttcccatttccctagatttctccaaaaaaaaaaaaaatctcttcagctacaacttgcagttcctctctccataatattggagcgtaattaatgggataaggctgagaaaccaagggcatactattctcctcattttcccacctcaatcatccataagccatcttttctccatcacagacatttaactaaaaatccatgagtcctactaatactcaagcccttttatagtcaaggtaaaaactttacactggaagctggaaactaggggatcttggctgaggtctaatacagtaactctataatgtccccttcagcaacacactatattcctgtacattgtccagtaaattttattaaaagtaggactggatatttataatattcattttaaagatccaagatattaccatgttggtgggaagagatatgacaaaacagtagaaactgtccaaggtccatcaagagtgtttgagcagtaaggaaagttattggcgagatttccaaggacgcctggcgatggttcctcacaagaaatgtgtgaccttcgaggaatattgagtgcacttcaggagtggtgcccattccaatcacatgccaatagactgatttcctgtggcatccaatcagacctgtaaagtaggaataagacacctatggctatgaagtagagaatctgaaatggaaaacacttgctaggacagaatggacaaattgactttagacactttattgctaccttgacttgtaaacaaatttatcaagaacattgggctactatcaaaccaacagctcttgccaaggtcaccaatcaccatcatgctgctaaatccaatggacatttttcagtctttatttgcacctgttgaccattcattcgtttttaaaactctctcttcccttggcctctgtgccaacatctctgtgggtttttttctcctacttctcagactgctccttcttctgtctcccctgctgacctcttctggaactccaggctcatacagccaatcactttctcaacatctccacctagatatctcaaaaaacccacatgttcaaaaccaaatttacaattttcatcacttcattctcttccagagttttttataacagtgaatggcagcatcctgcatttgaatatgcaagtgagagttatccttgttaccattctcatctcccatatgcagtttgacactgaccagggcaatataatcaataatagctaatatgtattgagcacttgttttatgtcaagcactgtccaaagtattttacaagttttaattcattcattcctcataacaaccctatgaatgtagaaaccattatcatccatgtcttgcaggagaggaaacggatgcccagagaggttaattaatttgctcagtatttgaacccaagtagtcatgtgttcagatcccacactggtaacaacaagggcacagctgcctcctattttggctctaaaagctttcaaatgtatctagtttttcactgttactactaccactatcttaatccaagttaccattatctcgtctgagctactgataaactttttttacaggtctccctacagttggtcatattctcccctctaagacttttacccacaaagaaactggtgtactatttctgcattccagatctgattgtagtatccgccagcctaaaacccactggaggctgtcattccacatagaataaagtccagactctctactaaggactagaaggccccaataggtttgattcctaatacctctaacagcttcatctcacattgcctcattttcccagtttcaaagctaagttcaaggggtacttgcttagggaagccttctctgattccccagtctaggtcagattcctgtattataggcttacatagaattatgtaattttccttcagagtaatgctcagtttgtaattttgcatgtattattatgcttatttgactacaatctgtccctccactataaggtatgtgagaacaggaacttgcatgttgtcaaaattaatttcctttttaattataaaattatgcatgtttattatcaaattattgaaaaatacggaaaagaactaaggagaaaacatccccctcatacttcattattctcttgggttgctgaatctcccaaattcctcttttatgtagtttctggttttactatagtacacattcagtgactattaaggccctctatatatgaaaatgtcttttttcttcccccaaaattgattcatagtttgactaaaaattctaggttccaaataatttttcccttagatcttttacaatattgcttaattatatcgccagtctaattcccattcttttgtatgcgtcctgttcctctcagaagaagctttaagtatcttctctctgtgctctgaaatgccacaatgataattttgtgtgtgggtctttttatttatcctaatgggc

SEQ ID NO: 1211 - DNA, 15 bp, Homo sapiens
caagcttacccatat

SEQ ID NO: 1212 - DNA, 15 bp, Homo sapiens
tcaagcttacccata

SEQ ID NO: 1213 - DNA, 15 bp, Homo sapiens
ttcaagcttacccat

SEQ ID NO: 1214 - DNA, 15 bp, Homo sapiens
cttcaagcttaccca

SEQ ID NO: 1215 - DNA, 15 bp, Homo sapiens
acttcaagcttaccc

SEQ ID NO: 1216 - DNA, 15 bp, Homo sapiens
tacttcaagcttacc

SEQ ID NO: 1217 - DNA, 15 bp, Homo sapiens
gtacttcaagcttac

SEQ ID NO: 1218 - DNA, 15 bp, Homo sapiens
agtacttcaagctta

SEQ ID NO: 1219 - DNA, 15 bp, Homo sapiens
aagtacttcaagctt

SEQ ID NO: 1220 - DNA, 15 bp, Homo sapiens
aaagtacttcaagct

SEQ ID NO: 1221 - DNA, 15 bp, Homo sapiens
caaagtacttcaagc

SEQ ID NO: 1222 - DNA, 15 bp, Homo sapiens
acaaagtacttcaag

SEQ ID NO: 1223 - DNA, 15 bp, Homo sapiens
gacaaagtacttcaa

SEQ ID NO: 1224 - DNA, 15 bp, Homo sapiens
ggacaaagtacttca

SEQ ID NO: 1225 - DNA, 15 bp, Homo sapiens
tggacaaagtacttc

SEQ ID NO: 1226 - DNA, 15 bp, Homo sapiens
ctggacaaagtactt

SEQ ID NO: 1227 - DNA, 15 bp, Homo sapiens
gctggacaaagtact

SEQ ID NO: 1228 - DNA, 15 bp, Homo sapiens
tgctggacaaagtac

SEQ ID NO: 1229 - DNA, 15 bp, Homo sapiens
atgctggacaaagta

SEQ ID NO: 1230 - DNA, 15 bp, Homo sapiens
tatgctggacaaagt

SEQ ID NO: 1231 - DNA, 15 bp, Homo sapiens
ttatgctggacaaag

SEQ ID NO: 1232 - DNA, 15 bp, Homo sapiens
tttatgctggacaaa

SEQ ID NO: 1233 - DNA, 15 bp, Homo sapiens
atttatgctggacaa

SEQ ID NO: 1234 - DNA, 15 bp, Homo sapiens
catttatgctggaca

SEQ ID NO: 1235 - DNA, 15 bp, Homo sapiens
ccatttatgctggac

SEQ ID NO: 1236 - DNA, 15 bp, Homo sapiens
cccatttatgctgga

SEQ ID NO: 1237 - DNA, 15 bp, Homo sapiens
acccatttatgctgg

SEQ ID NO: 1238 - DNA, 15 bp, Homo sapiens
gacccatttatgctg

SEQ ID NO: 1239 - DNA, 15 bp, Homo sapiens
tgacccatttatgct

SEQ ID NO: 1240 - DNA, 15 bp, Homo sapiens
atgacccatttatgc

SEQ ID NO: 1241 - DNA, 15 bp, Homo sapiens
tatgacccatttatg

SEQ ID NO: 1242 - DNA, 15 bp, Homo sapiens
ttatgacccatttat

SEQ ID NO: 1243 - DNA, 15 bp, Homo sapiens
tttatgacccattta

SEQ ID NO: 1244 - DNA, 15 bp, Homo sapiens
gtttatgacccattt

SEQ ID NO: 1245 - DNA, 15 bp, Homo sapiens
agtttatgacccatt

SEQ ID NO: 1246 - DNA, 15 bp, Homo sapiens
cagtttatgacccat

SEQ ID NO: 1247 - DNA, 15 bp, Homo sapiens
ccagtttatgaccca

SEQ ID NO: 1248 - DNA, 15 bp, Homo sapiens
gccagtttatgaccc

SEQ ID NO: 1249 - DNA, 15 bp, Homo sapiens
tgccagtttatgacc

SEQ ID NO: 1250 - DNA, 15 bp, Homo sapiens
ctgccagtttatgac

SEQ ID NO: 1251 - DNA, 15 bp, Homo sapiens
cctgccagtttatga

SEQ ID NO: 1252 - DNA, 15 bp, Homo sapiens
ccctgccagtttatg

SEQ ID NO: 1253 - DNA, 15 bp, Homo sapiens
gccctgccagtttat

SEQ ID NO: 1254 - DNA, 15 bp, Homo sapiens
tgccctgccagttta

SEQ ID NO: 1255 - DNA, 15 bp, Homo sapiens
ctgccctgccagttt

SEQ ID NO: 1256 - DNA, 15 bp, Homo sapiens
tctgccctgccagtt

SEQ ID NO: 1257 - DNA, 15 bp, Homo sapiens
ctctgccctgccagt

SEQ ID NO: 1258 - DNA, 15 bp, Homo sapiens
cctctgccctgccag

SEQ ID NO: 1259 - DNA, 15 bp, Homo sapiens
tcctctgccctgcca

SEQ ID NO: 1260 - DNA, 15 bp, Homo sapiens
gtcctctgccctgcc

SEQ ID NO: 1261 - DNA, 15 bp, Homo sapiens
ggtcctctgccctgc

SEQ ID NO: 1262 - DNA, 15 bp, Homo sapiens
gggtcctctgccctg

SEQ ID NO: 1263 - DNA, 15 bp, Homo sapiens
ggggtcctctgccct

SEQ ID NO: 1264 - DNA, 15 bp, Homo sapiens
aggggtcctctgccc

SEQ ID NO: 1265 - DNA, 15 bp, Homo sapiens
taggggtcctctgcc

SEQ ID NO: 1266 - DNA, 15 bp, Homo sapiens
gtaggggtcctctgc

SEQ ID NO: 1267 - DNA, 15 bp, Homo sapiens
tgtaggggtcctctg

SEQ ID NO: 1268 - DNA, 15 bp, Homo sapiens
gtgtaggggtcctct

SEQ ID NO: 1269 - DNA, 15 bp, Homo sapiens
agtgtaggggtcctc

SEQ ID NO: 1270 - DNA, 15 bp, Homo sapiens
tagtgtaggggtcct

SEQ ID NO: 1271 - DNA, 15 bp, Homo sapiens
atagtgtaggggtcc

SEQ ID NO: 1272 - DNA, 15 bp, Homo sapiens
catagtgtaggggtc

SEQ ID NO: 1273 - DNA, 15 bp, Homo sapiens
acatagtgtaggggt

SEQ ID NO: 1274 - DNA, 15 bp, Homo sapiens
cacatagtgtagggg

SEQ ID NO: 1275 - DNA, 15 bp, Homo sapiens
gcacatagtgtaggg

SEQ ID NO: 1276 - DNA, 15 bp, Homo sapiens
tgcacatagtgtagg

SEQ ID NO: 1277 - DNA, 15 bp, Homo sapiens
ttgcacatagtgtag

SEQ ID NO: 1278 - DNA, 15 bp, Homo sapiens
attgcacatagtgta

SEQ ID NO: 1279 - DNA, 15 bp, Homo sapiens
aattgcacatagtgt

SEQ ID NO: 1280 - DNA, 15 bp, Homo sapiens
aaattgcacatagtg

SEQ ID NO: 1281 - DNA, 15 bp, Homo sapiens
aaaattgcacatagt

SEQ ID NO: 1282 - DNA, 15 bp, Homo sapiens
aaaaattgcacatag

SEQ ID NO: 1283 - DNA, 15 bp, Homo sapiens
taaaaattgcacata

SEQ ID NO: 1284 - DNA, 15 bp, Homo sapiens
ataaaaattgcacat

SEQ ID NO: 1285 - DNA, 15 bp, Homo sapiens
cataaaaattgcaca

SEQ ID NO: 1286 - DNA, 15 bp, Homo sapiens
gcataaaaattgcac

SEQ ID NO: 1287 - DNA, 15 bp, Homo sapiens
agcataaaaattgca

SEQ ID NO: 1288 - DNA, 15 bp, Homo sapiens
aagcataaaaattgc

SEQ ID NO: 1289 - DNA, 15 bp, Homo sapiens
taagcataaaaattg

SEQ ID NO: 1290 - DNA, 15 bp, Homo sapiens
ataagcataaaaatt

SEQ ID NO: 1291 - DNA, 15 bp, Homo sapiens
tataagcataaaaat

SEQ ID NO: 1292 - DNA, 15 bp, Homo sapiens
ctataagcataaaaa

SEQ ID NO: 1293 - DNA, 15 bp, Homo sapiens
actataagcataaaa

SEQ ID NO: 1294 - DNA, 15 bp, Homo sapiens
tactataagcataaa

SEQ ID NO: 1295 - DNA, 15 bp, Homo sapiens
atactataagcataa

SEQ ID NO: 1296 - DNA, 15 bp, Homo sapiens
catactataagcata

SEQ ID NO: 1297 - DNA, 15 bp, Homo sapiens
ccatactataagcat

SEQ ID NO: 1298 - DNA, 15 bp, Homo sapiens
tccatactataagca

SEQ ID NO: 1299 - DNA, 15 bp, Homo sapiens
ttccatactataagc

SEQ ID NO: 1300 - DNA, 15 bp, Homo sapiens
cttccatactataag

SEQ ID NO: 1301 - DNA, 15 bp, Homo sapiens
gcttccatactataa

SEQ ID NO: 1302 - DNA, 15 bp, Homo sapiens
tgcttccatactata

SEQ ID NO: 1303 - DNA, 15 bp, Homo sapiens
atgcttccatactat

SEQ ID NO: 1304 - DNA, 15 bp, Homo sapiens
catgcttccatacta

SEQ ID NO: 1305 - DNA, 15 bp, Homo sapiens
acatgcttccatact

SEQ ID NO: 1306 - DNA, 15 bp, Homo sapiens
aacatgcttccatac

SEQ ID NO: 1307 - DNA, 15 bp, Homo sapiens
aaacatgcttccata

SEQ ID NO: 1308 - DNA, 15 bp, Homo sapiens
caaacatgcttccat

SEQ ID NO: 1309 - DNA, 15 bp, Homo sapiens
ccaaacatgcttcca

SEQ ID NO: 1310 - DNA, 15 bp, Homo sapiens
accaaacatgcttcc

SEQ ID NO: 1311 - DNA, 15 bp, Homo sapiens
taccaaacatgcttc

SEQ ID NO: 1312 - DNA, 15 bp, Homo sapiens
ttaccaaacatgctt

SEQ ID NO: 1313 - DNA, 15 bp, Homo sapiens
gttaccaaacatgct

SEQ ID NO: 1314 - DNA, 15 bp, Homo sapiens
tgttaccaaacatgc

SEQ ID NO: 1315 - DNA, 15 bp, Homo sapiens
ttgttaccaaacatg

SEQ ID NO: 1316 - DNA, 15 bp, Homo sapiens
tttgttaccaaacat

SEQ ID NO: 1317 - DNA, 15 bp, Homo sapiens
ttttgttaccaaaca

SEQ ID NO: 1318 - DNA, 15 bp, Homo sapiens
gttttgttaccaaac

SEQ ID NO: 1319 - DNA, 15 bp, Homo sapiens
agttttgttaccaaa

SEQ ID NO: 1320 - DNA, 15 bp, Homo sapiens
tagttttgttaccaa

SEQ ID NO: 1321 - DNA, 15 bp, Homo sapiens
ttagttttgttacca

SEQ ID NO: 1322 - DNA, 15 bp, Homo sapiens
tttagttttgttacc

SEQ ID NO: 1323 - DNA, 15 bp, Homo sapiens
gtttagttttgttac

SEQ ID NO: 1324 - DNA, 15 bp, Homo sapiens
agtttagttttgtta

SEQ ID NO: 1325 - DNA, 15 bp, Homo sapiens
aagtttagttttgtt

SEQ ID NO: 1326 - DNA, 15 bp, Homo sapiens
aaagtttagttttgt

SEQ ID NO: 1327 - DNA, 15 bp, Homo sapiens
taaagtttagttttg

SEQ ID NO: 1328 - DNA, 15 bp, Homo sapiens
ttaaagtttagtttt

SEQ ID NO: 1329 - DNA, 15 bp, Homo sapiens
attaaagtttagttt

SEQ ID NO: 1330 - DNA, 15 bp, Homo sapiens
tattaaagtttagtt

SEQ ID NO: 1331 - DNA, 15 bp, Homo sapiens
ttattaaagtttagt

SEQ ID NO: 1332 - DNA, 15 bp, Homo sapiens
attattaaagtttag

SEQ ID NO: 1333 - DNA, 15 bp, Homo sapiens
tattattaaagttta

SEQ ID NO: 1334 - DNA, 15 bp, Homo sapiens
gtattattaaagttt

SEQ ID NO: 1335 - DNA, 15 bp, Homo sapiens
tgtattattaaagtt

SEQ ID NO: 1336 - DNA, 15 bp, Homo sapiens
gtgtattattaaagt

SEQ ID NO: 1337 - DNA, 15 bp, Homo sapiens
agtgtattattaaag

SEQ ID NO: 1338 - DNA, 15 bp, Homo sapiens
cagtgtattattaaa

SEQ ID NO: 1339 - DNA, 15 bp, Homo sapiens
gcagtgtattattaa

SEQ ID NO: 1340 - DNA, 15 bp, Homo sapiens
agcagtgtattatta

SEQ ID NO: 1341 - DNA, 15 bp, Homo sapiens
aagcagtgtattatt

SEQ ID NO: 1342 - DNA, 15 bp, Homo sapiens
taagcagtgtattat

SEQ ID NO: 1343 - DNA, 15 bp, Homo sapiens
ctaagcagtgtatta

SEQ ID NO: 1344 - DNA, 15 bp, Homo sapiens
gctaagcagtgtatt

SEQ ID NO: 1345 - DNA, 15 bp, Homo sapiens
ggctaagcagtgtat

SEQ ID NO: 1346 - DNA, 15 bp, Homo sapiens
gggctaagcagtgta

SEQ ID NO: 1347 - DNA, 15 bp, Homo sapiens
ggggctaagcagtgt

SEQ ID NO: 1348 - DNA, 15 bp, Homo sapiens
tggggctaagcagtg

SEQ ID NO: 1349 - DNA, 15 bp, Homo sapiens
atggggctaagcagt

SEQ ID NO: 1350 - DNA, 15 bp, Homo sapiens
tatggggctaagcag

SEQ ID NO: 1351 - DNA, 15 bp, Homo sapiens
atatggggctaagca

SEQ ID NO: 1352 - DNA, 15 bp, Homo sapiens
tatatggggctaagc

SEQ ID NO: 1353 - DNA, 15 bp, Homo sapiens
ttatatggggctaag

SEQ ID NO: 1354 - DNA, 15 bp, Homo sapiens
tttatatggggctaa

SEQ ID NO: 1355 - DNA, 15 bp, Homo sapiens
ttttatatggggcta

SEQ ID NO: 1356 - DNA, 15 bp, Homo sapiens
tttttatatggggct

SEQ ID NO: 1357 - DNA, 15 bp, Homo sapiens
atttttatatggggc

SEQ ID NO: 1358 - DNA, 15 bp, Homo sapiens
tatttttatatgggg

SEQ ID NO: 1359 - DNA, 15 bp, Homo sapiens
gtatttttatatggg

SEQ ID NO: 1360 - DNA, 15 bp, Homo sapiens
ggtatttttatatgg

SEQ ID NO: 1361 - DNA, 15 bp, Homo sapiens
gggtatttttatatg

SEQ ID NO: 1362 - DNA, 15 bp, Homo sapiens
ggggtatttttatat

SEQ ID NO: 1363 - DNA, 15 bp, Homo sapiens
gggggtatttttata

SEQ ID NO: 1364 - DNA, 15 bp, Homo sapiens
agggggtatttttat

SEQ ID NO: 1365 - DNA, 15 bp, Homo sapiens
cagggggtattttta

SEQ ID NO: 1366 - DNA, 15 bp, Homo sapiens
ccagggggtattttt

SEQ ID NO: 1367 - DNA, 15 bp, Homo sapiens
accagggggtatttt

SEQ ID NO: 1368 - DNA, 15 bp, Homo sapiens
taccagggggtattt

SEQ ID NO: 1369 - DNA, 15 bp, Homo sapiens
ttaccagggggtatt

SEQ ID NO: 1370 - DNA, 15 bp, Homo sapiens
attaccagggggtat

SEQ ID NO: 1371 - DNA, 15 bp, Homo sapiens
tattaccagggggta

SEQ ID NO: 1372 - DNA, 15 bp, Homo sapiens
ttattaccagggggt

SEQ ID NO: 1373 - DNA, 15 bp, Homo sapiens
tttattaccaggggg

SEQ ID NO: 1374 - DNA, 15 bp, Homo sapiens
ttttattaccagggg

SEQ ID NO: 1375 - DNA, 15 bp, Homo sapiens
tttttattaccaggg

SEQ ID NO: 1376 - DNA, 15 bp, Homo sapiens
atttttattaccagg

SEQ ID NO: 1377 - DNA, 15 bp, Homo sapiens
tatttttattaccag

SEQ ID NO: 1378 - DNA, 15 bp, Homo sapiens
gtatttttattacca

SEQ ID NO: 1379 - DNA, 15 bp, Homo sapiens
agtatttttattacc

SEQ ID NO: 1380 - DNA, 15 bp, Homo sapiens
cagtatttttattac

SEQ ID NO: 1381 - DNA, 15 bp, Homo sapiens
acagtatttttatta

SEQ ID NO: 1382 - DNA, 15 bp, Homo sapiens
tacagtatttttatt

SEQ ID NO: 1383 - DNA, 15 bp, Homo sapiens
ttacagtatttttat

SEQ ID NO: 1384 - DNA, 15 bp, Homo sapiens
gttacagtattttta

SEQ ID NO: 1385 - DNA, 15 bp, Homo sapiens
agttacagtattttt

SEQ ID NO: 1386 - DNA, 15 bp, Homo sapiens
cagttacagtatttt

SEQ ID NO: 1387 - DNA, 15 bp, Homo sapiens
acagttacagtattt

SEQ ID NO: 1388 - DNA, 15 bp, Homo sapiens
cacagttacagtatt

SEQ ID NO: 1389 - DNA, 15 bp, Homo sapiens
acacagttacagtat

SEQ ID NO: 1390 - DNA, 15 bp, Homo sapiens
tacacagttacagta

SEQ ID NO: 1391 - DNA, 15 bp, Homo sapiens
ttacacagttacagt

SEQ ID NO: 1392 - DNA, 15 bp, Homo sapiens
attacacagttacag

SEQ ID NO: 1393 - DNA, 15 bp, Homo sapiens
tattacacagttaca

SEQ ID NO: 1394 - DNA, 15 bp, Homo sapiens
ttattacacagttac

SEQ ID NO: 1395 - DNA, 15 bp, Homo sapiens
attattacacagtta

SEQ ID NO: 1396 - DNA, 15 bp, Homo sapiens
gattattacacagtt

SEQ ID NO: 1397 - DNA, 15 bp, Homo sapiens
tgattattacacagt

SEQ ID NO: 1398 - DNA, 15 bp, Homo sapiens
ttgattattacacag

SEQ ID NO: 1399 - DNA, 15 bp, Homo sapiens
attgattattacaca

SEQ ID NO: 1400 - DNA, 15 bp, Homo sapiens
cattgattattacac

SEQ ID NO: 1401 - DNA, 15 bp, Homo sapiens
gcattgattattaca

SEQ ID NO: 1402 - DNA, 15 bp, Homo sapiens
agcattgattattac

SEQ ID NO: 1403 - DNA, 15 bp, Homo sapiens
tagcattgattatta

SEQ ID NO: 1404 - DNA, 15 bp, Homo sapiens
atagcattgattatt

SEQ ID NO: 1405 - DNA, 15 bp, Homo sapiens
tatagcattgattat

SEQ ID NO: 1406 - DNA, 15 bp, Homo sapiens
atatagcattgatta

SEQ ID NO: 1407 - DNA, 15 bp, Homo sapiens
aatatagcattgatt

SEQ ID NO: 1408 - DNA, 15 bp, Homo sapiens
taatatagcattgat

SEQ ID NO: 1409 - DNA, 15 bp, Homo sapiens
ataatatagcattga

SEQ ID NO: 1410 - DNA, 15 bp, Homo sapiens
gataatatagcattg

SEQ ID NO: 1411 - DNA, 15 bp, Homo sapiens
agataatatagcatt

SEQ ID NO: 1412 - DNA, 15 bp, Homo sapiens
aagataatatagcat

SEQ ID NO: 1413 - DNA, 15 bp, Homo sapiens
gaagataatatagca

SEQ ID NO: 1414 - DNA, 15 bp, Homo sapiens
agaagataatatagc

SEQ ID NO: 1415 - DNA, 15 bp, Homo sapiens
gagaagataatatag

SEQ ID NO: 1416 - DNA, 15 bp, Homo sapiens
tgagaagataatata

SEQ ID NO: 1417 - DNA, 15 bp, Homo sapiens
ttgagaagataatat

SEQ ID NO: 1418 - DNA, 15 bp, Homo sapiens
cttgagaagataata

SEQ ID NO: 1419 - DNA, 15 bp, Homo sapiens
acttgagaagataat

SEQ ID NO: 1420 - DNA, 15 bp, Homo sapiens
aacttgagaagataa

SEQ ID NO: 1421 - DNA, 15 bp, Homo sapiens
aaacttgagaagata

SEQ ID NO: 1422 - DNA, 15 bp, Homo sapiens
taaacttgagaagat

SEQ ID NO: 1423 - DNA, 15 bp, Homo sapiens
ataaacttgagaaga

SEQ ID NO: 1424 - DNA, 15 bp, Homo sapiens
aataaacttgagaag

SEQ ID NO: 1425 - DNA, 15 bp, Homo sapiens
aaataaacttgagaa

SEQ ID NO: 1426 - DNA, 15 bp, Homo sapiens
aaaataaacttgaga

SEQ ID NO: 1427 - DNA, 15 bp, Homo sapiens
caaaataaacttgag

SEQ ID NO: 1428 - DNA, 15 bp, Homo sapiens
acaaaataaacttga

SEQ ID NO: 1429 - DNA, 15 bp, Homo sapiens
tacaaaataaacttg

SEQ ID NO: 1430 - DNA, 15 bp, Homo sapiens
atacaaaataaactt

SEQ ID NO: 1431 - DNA, 15 bp, Homo sapiens
aatacaaaataaact

SEQ ID NO: 1432 - DNA, 15 bp, Homo sapiens
taatacaaaataaac

SEQ ID NO: 1433 - DNA, 15 bp, Homo sapiens
ttaatacaaaataaa

SEQ ID NO: 1434 - DNA, 15 bp, Homo sapiens
tttaatacaaaataa

SEQ ID NO: 1435 - DNA, 15 bp, Homo sapiens
ctttaatacaaaata

SEQ ID NO: 1436 - DNA, 15 bp, Homo sapiens
tctttaatacaaaat

SEQ ID NO: 1437 - DNA, 15 bp, Homo sapiens
ctctttaatacaaaa

SEQ ID NO: 1438 - DNA, 15 bp, Homo sapiens
tctctttaatacaaa

SEQ ID NO: 1439 - DNA, 15 bp, Homo sapiens
atctctttaatacaa

SEQ ID NO: 1440 - DNA, 15 bp, Homo sapiens
gatctctttaataca

SEQ ID NO: 1441 - DNA, 15 bp, Homo sapiens
tgatctctttaatac

SEQ ID NO: 1442 - DNA, 15 bp, Homo sapiens
atgatctctttaata

SEQ ID NO: 1443 - DNA, 15 bp, Homo sapiens
tatgatctctttaat

SEQ ID NO: 1444 - DNA, 15 bp, Homo sapiens
atatgatctctttaa

SEQ ID NO: 1445 - DNA, 15 bp, Homo sapiens
tatatgatctcttta

SEQ ID NO: 1446 - DNA, 15 bp, Homo sapiens
atatatgatctcttt

SEQ ID NO: 1447 - DNA, 15 bp, Homo sapiens
aatatatgatctctt

SEQ ID NO: 1448 - DNA, 15 bp, Homo sapiens
aaatatatgatctct

SEQ ID NO: 1449 - DNA, 15 bp, Homo sapiens
aaaatatatgatctc

SEQ ID NO: 1450 - DNA, 15 bp, Homo sapiens
aaaaatatatgatct

SEQ ID NO: 1451 - DNA, 15 bp, Homo sapiens
taaaaatatatgatc

SEQ ID NO: 1452 - DNA, 15 bp, Homo sapiens
ttaaaaatatatgat

SEQ ID NO: 1453 - DNA, 15 bp, Homo sapiens
tttaaaaatatatga

SEQ ID NO: 1454 - DNA, 15 bp, Homo sapiens
ttttaaaaatatatg

SEQ ID NO: 1455 - DNA, 15 bp, Homo sapiens
tttttaaaaatatat

SEQ ID NO: 1456 - DNA, 15 bp, Homo sapiens
atttttaaaaatata

SEQ ID NO: 1457 - DNA, 15 bp, Homo sapiens
aatttttaaaaatat

SEQ ID NO: 1458 - DNA, 15 bp, Homo sapiens
aaatttttaaaaata

SEQ ID NO: 1459 - DNA, 15 bp, Homo sapiens
aaaatttttaaaaat

SEQ ID NO: 1460 - DNA, 15 bp, Homo sapiens
aaaaatttttaaaaa

SEQ ID NO: 1461 - DNA, 15 bp, Homo sapiens
taaaaatttttaaaa

SEQ ID NO: 1462 - DNA, 15 bp, Homo sapiens
ttaaaaatttttaaa

SEQ ID NO: 1463 - DNA, 15 bp, Homo sapiens
tttaaaaatttttaa

SEQ ID NO: 1464 - DNA, 15 bp, Homo sapiens
ttttaaaaattttta

SEQ ID NO: 1465 - DNA, 15 bp, Homo sapiens
gttttaaaaattttt

SEQ ID NO: 1466 - DNA, 15 bp, Homo sapiens
cgttttaaaaatttt

SEQ ID NO: 1467 - DNA, 15 bp, Homo sapiens
gcgttttaaaaattt

SEQ ID NO: 1468 - DNA, 15 bp, Homo sapiens
ggcgttttaaaaatt

SEQ ID NO: 1469 - DNA, 15 bp, Homo sapiens
aggcgttttaaaaat

SEQ ID NO: 1470 - DNA, 15 bp, Homo sapiens
gaggcgttttaaaaa

SEQ ID NO: 1471 - DNA, 15 bp, Homo sapiens
tgaggcgttttaaaa

SEQ ID NO: 1472 - DNA, 15 bp, Homo sapiens
ttgaggcgttttaaa

SEQ ID NO: 1473 - DNA, 15 bp, Homo sapiens
gttgaggcgttttaa

SEQ ID NO: 1474 - DNA, 15 bp, Homo sapiens
tgttgaggcgtttta

SEQ ID NO: 1475 - DNA, 15 bp, Homo sapiens
ctgttgaggcgtttt

SEQ ID NO: 1476 - DNA, 15 bp, Homo sapiens
gctgttgaggcgttt

SEQ ID NO: 1477 - DNA, 15 bp, Homo sapiens
agctgttgaggcgtt

SEQ ID NO: 1478 - DNA, 15 bp, Homo sapiens
aagctgttgaggcgt

SEQ ID NO: 1479 - DNA, 15 bp, Homo sapiens
gaagctgttgaggcg

SEQ ID NO: 1480 - DNA, 15 bp, Homo sapiens
tgaagctgttgaggc

SEQ ID NO: 1481 - DNA, 15 bp, Homo sapiens
gtgaagctgttgagg

SEQ ID NO: 1482 - DNA, 15 bp, Homo sapiens
cgtgaagctgttgag

SEQ ID NO: 1483 - DNA, 15 bp, Homo sapiens
tcgtgaagctgttga

SEQ ID NO: 1484 - DNA, 15 bp, Homo sapiens
atcgtgaagctgttg

SEQ ID NO: 1485 - DNA, 15 bp, Homo sapiens
catcgtgaagctgtt

SEQ ID NO: 1486 - DNA, 15 bp, Homo sapiens
acatcgtgaagctgt

SEQ ID NO: 1487 - DNA, 15 bp, Homo sapiens
cacatcgtgaagctg

SEQ ID NO: 1488 - DNA, 15 bp, Homo sapiens
tcacatcgtgaagct

SEQ ID NO: 1489 - DNA, 15 bp, Homo sapiens
ctcacatcgtgaagc

SEQ ID NO: 1490 - DNA, 15 bp, Homo sapiens
tctcacatcgtgaag

SEQ ID NO: 1491 - DNA, 15 bp, Homo sapiens
gtctcacatcgtgaa

SEQ ID NO: 1492 - DNA, 15 bp, Homo sapiens
ggtctcacatcgtga

SEQ ID NO: 1493 - DNA, 15 bp, Homo sapiens
aggtctcacatcgtg

SEQ ID NO: 1494 - DNA, 15 bp, Homo sapiens
caggtctcacatcgt

SEQ ID NO: 1495 - DNA, 15 bp, Homo sapiens
acaggtctcacatcg

SEQ ID NO: 1496 - DNA, 15 bp, Homo sapiens
aacaggtctcacatc

SEQ ID NO: 1497 - DNA, 15 bp, Homo sapiens
gaacaggtctcacat

SEQ ID NO: 1498 - DNA, 15 bp, Homo sapiens
ggaacaggtctcaca

SEQ ID NO: 1499 - DNA, 15 bp, Homo sapiens
aggaacaggtctcac

SEQ ID NO: 1500 - DNA, 15 bp, Homo sapiens
caggaacaggtctca

SEQ ID NO: 1501 - DNA, 15 bp, Homo sapiens
acaggaacaggtctc

SEQ ID NO: 1502 - DNA, 15 bp, Homo sapiens
tacaggaacaggtct

SEQ ID NO: 1503 - DNA, 15 bp, Homo sapiens
ctacaggaacaggtc

SEQ ID NO: 1504 - DNA, 15 bp, Homo sapiens
actacaggaacaggt

SEQ ID NO: 1505 - DNA, 15 bp, Homo sapiens
cactacaggaacagg

SEQ ID NO: 1506 - DNA, 15 bp, Homo sapiens
acactacaggaacag

SEQ ID NO: 1507 - DNA, 15 bp, Homo sapiens
cacactacaggaaca

SEQ ID NO: 1508 - DNA, 15 bp, Homo sapiens
acacactacaggaac

SEQ ID NO: 1509 - DNA, 15 bp, Homo sapiens
tacacactacaggaa

SEQ ID NO: 1510 - DNA, 15 bp, Homo sapiens
gtacacactacagga

SEQ ID NO: 1511 - DNA, 15 bp, Homo sapiens
ggtacacactacagg

SEQ ID NO: 1512 - DNA, 15 bp, Homo sapiens
tggtacacactacag

SEQ ID NO: 1513 - DNA, 15 bp, Homo sapiens
atggtacacactaca

SEQ ID NO: 1514 - DNA, 15 bp, Homo sapiens
aatggtacacactac

SEQ ID NO: 1515 - DNA, 15 bp, Homo sapiens
taatggtacacacta

SEQ ID NO: 1516 - DNA, 15 bp, Homo sapiens
ttaatggtacacact

SEQ ID NO: 1517 - DNA, 15 bp, Homo sapiens
tttaatggtacacac

SEQ ID NO: 1518 - DNA, 15 bp, Homo sapiens
gtttaatggtacaca

SEQ ID NO: 1519 - DNA, 15 bp, Homo sapiens
ggtttaatggtacac

SEQ ID NO: 1520 - DNA, 15 bp, Homo sapiens
aggtttaatggtaca

SEQ ID NO: 1521 - DNA, 15 bp, Homo sapiens
gaggtttaatggtac

SEQ ID NO: 1522 - DNA, 15 bp, Homo sapiens
agaggtttaatggta

SEQ ID NO: 1523 - DNA, 15 bp, Homo sapiens
tagaggtttaatggt

SEQ ID NO: 1524 - DNA, 15 bp, Homo sapiens
ttagaggtttaatgg

SEQ ID NO: 1525 - DNA, 15 bp, Homo sapiens
tttagaggtttaatg

SEQ ID NO: 1526 - DNA, 15 bp, Homo sapiens
ctttagaggtttaat

SEQ ID NO: 1527 - DNA, 15 bp, Homo sapiens
actttagaggtttaa

SEQ ID NO: 1528 - DNA, 15 bp, Homo sapiens
gactttagaggttta

SEQ ID NO: 1529 - DNA, 15 bp, Homo sapiens
ggactttagaggttt

SEQ ID NO: 1530 - DNA, 15 bp, Homo sapiens
tggactttagaggtt

SEQ ID NO: 1531 - DNA, 15 bp, Homo sapiens
ctggactttagaggt

SEQ ID NO: 1532 - DNA, 15 bp, Homo sapiens
tctggactttagagg

SEQ ID NO: 1533 - DNA, 15 bp, Homo sapiens
ttctggactttagag

SEQ ID NO: 1534 - DNA, 15 bp, Homo sapiens
attctggactttaga

SEQ ID NO: 1535 - DNA, 15 bp, Homo sapiens
aattctggactttag

SEQ ID NO: 1536 - DNA, 15 bp, Homo sapiens
caattctggacttta

SEQ ID NO: 1537 - DNA, 15 bp, Homo sapiens
acaattctggacttt

SEQ ID NO: 1538 - DNA, 15 bp, Homo sapiens
tacaattctggactt

SEQ ID NO: 1539 - DNA, 15 bp, Homo sapiens
gtacaattctggact

SEQ ID NO: 1540 - DNA, 15 bp, Homo sapiens
ggtacaattctggac

SEQ ID NO: 1541 - DNA, 15 bp, Homo sapiens
aggtacaattctgga

SEQ ID NO: 1542 - DNA, 15 bp, Homo sapiens
taggtacaattctgg

SEQ ID NO: 1543 - DNA, 15 bp, Homo sapiens
ttaggtacaattctg

SEQ ID NO: 1544 - DNA, 15 bp, Homo sapiens
gttaggtacaattct

SEQ ID NO: 1545 - DNA, 15 bp, Homo sapiens
tgttaggtacaattc

SEQ ID NO: 1546 - DNA, 15 bp, Homo sapiens
gtgttaggtacaatt

SEQ ID NO: 1547 - DNA, 15 bp, Homo sapiens
agtgttaggtacaat

SEQ ID NO: 1548 - DNA, 15 bp, Homo sapiens
cagtgttaggtacaa

SEQ ID NO: 1549 - DNA, 15 bp, Homo sapiens
ccagtgttaggtaca

SEQ ID NO: 1550 - DNA, 15 bp, Homo sapiens
cccagtgttaggtac

SEQ ID NO: 1551 - DNA, 15 bp, Homo sapiens
acccagtgttaggta

SEQ ID NO: 1552 - DNA, 15 bp, Homo sapiens
tacccagtgttaggt

SEQ ID NO: 1553 - DNA, 15 bp, Homo sapiens
ctacccagtgttagg

SEQ ID NO: 1554 - DNA, 15 bp, Homo sapiens
cctacccagtgttag

SEQ ID NO: 1555 - DNA, 15 bp, Homo sapiens
tcctacccagtgtta

SEQ ID NO: 1556 - DNA, 15 bp, Homo sapiens
ttcctacccagtgtt

SEQ ID NO: 1557 - DNA, 15 bp, Homo sapiens
attcctacccagtgt

SEQ ID NO: 1558 - DNA, 15 bp, Homo sapiens
gattcctacccagtg

SEQ ID NO: 1559 - DNA, 15 bp, Homo sapiens
ggattcctacccagt

SEQ ID NO: 1560 - DNA, 15 bp, Homo sapiens
tggattcctacccag

SEQ ID NO: 1561 - DNA, 15 bp, Homo sapiens
ctggattcctaccca

SEQ ID NO: 1562 - DNA, 15 bp, Homo sapiens
gctggattcctaccc

SEQ ID NO: 1563 - DNA, 15 bp, Homo sapiens
tgctggattcctacc

SEQ ID NO: 1564 - DNA, 15 bp, Homo sapiens
atgctggattcctac

SEQ ID NO: 1565 - DNA, 15 bp, Homo sapiens
tatgctggattccta

SEQ ID NO: 1566 - DNA, 15 bp, Homo sapiens
gtatgctggattcct

SEQ ID NO: 1567 - DNA, 15 bp, Homo sapiens
ggtatgctggattcc

SEQ ID NO: 1568 - DNA, 15 bp, Homo sapiens
tggtatgctggattc

SEQ ID NO: 1569 - DNA, 15 bp, Homo sapiens
atggtatgctggatt

SEQ ID NO: 1570 - DNA, 15 bp, Homo sapiens
aatggtatgctggat

SEQ ID NO: 1571 - DNA, 15 bp, Homo sapiens
aaatggtatgctgga

SEQ ID NO: 1572 - DNA, 15 bp, Homo sapiens
caaatggtatgctgg

SEQ ID NO: 1573 - DNA, 15 bp, Homo sapiens
acaaatggtatgctg

SEQ ID NO: 1574 - DNA, 15 bp, Homo sapiens
cacaaatggtatgct

SEQ ID NO: 1575 - DNA, 15 bp, Homo sapiens
tcacaaatggtatgc

SEQ ID NO: 1576 - DNA, 15 bp, Homo sapiens
ctcacaaatggtatg

SEQ ID NO: 1577 - DNA, 15 bp, Homo sapiens
actcacaaatggtat

SEQ ID NO: 1578 - DNA, 15 bp, Homo sapiens
cactcacaaatggta

SEQ ID NO: 1579 - DNA, 15 bp, Homo sapiens
tcactcacaaatggt

SEQ ID NO: 1580 - DNA, 15 bp, Homo sapiens
ttcactcacaaatgg

SEQ ID NO: 1581 - DNA, 15 bp, Homo sapiens
tttcactcacaaatg

SEQ ID NO: 1582 - DNA, 15 bp, Homo sapiens
ctttcactcacaaat

SEQ ID NO: 1583 - DNA, 15 bp, Homo sapiens
cctttcactcacaaa

SEQ ID NO: 1584 - DNA, 15 bp, Homo sapiens
tcctttcactcacaa

SEQ ID NO: 1585 - DNA, 15 bp, Homo sapiens
atcctttcactcaca

SEQ ID NO: 1586 - DNA, 15 bp, Homo sapiens
catcctttcactcac

SEQ ID NO: 1587 - DNA, 15 bp, Homo sapiens
ccatcctttcactca

SEQ ID NO: 1588 - DNA, 15 bp, Homo sapiens
accatcctttcactc

SEQ ID NO: 1589 - DNA, 15 bp, Homo sapiens
taccatcctttcact

SEQ ID NO: 1590 - DNA, 15 bp, Homo sapiens
ttaccatcctttcac

SEQ ID NO: 1591 - DNA, 15 bp, Homo sapiens
attaccatcctttca

SEQ ID NO: 1592 - DNA, 15 bp, Homo sapiens
aattaccatcctttc

SEQ ID NO: 1593 - DNA, 15 bp, Homo sapiens
taattaccatccttt

SEQ ID NO: 1594 - DNA, 15 bp, Homo sapiens
ataattaccatcctt

SEQ ID NO: 1595 - DNA, 15 bp, Homo sapiens
aataattaccatcct

SEQ ID NO: 1596 - DNA, 15 bp, Homo sapiens
taataattaccatcc

SEQ ID NO: 1597 - DNA, 15 bp, Homo sapiens
ataataattaccatc

SEQ ID NO: 1598 - DNA, 15 bp, Homo sapiens
aataataattaccat

SEQ ID NO: 1599 - DNA, 15 bp, Homo sapiens
taataataattacca

SEQ ID NO: 1600 - DNA, 15 bp, Homo sapiens
ataataataattacc

SEQ ID NO: 1601 - DNA, 15 bp, Homo sapiens
gataataataattac

SEQ ID NO: 1602 - DNA, 15 bp, Homo sapiens
tgataataataatta

SEQ ID NO: 1603 - DNA, 15 bp, Homo sapiens
atgataataataatt

SEQ ID NO: 1604 - DNA, 15 bp, Homo sapiens
gatgataataataat

SEQ ID NO: 1605 - DNA, 15 bp, Homo sapiens
agatgataataataa

SEQ ID NO: 1606 - DNA, 15 bp, Homo sapiens
aagatgataataata

SEQ ID NO: 1607 - DNA, 15 bp, Homo sapiens
caagatgataataat

SEQ ID NO: 1608 - DNA, 15 bp, Homo sapiens
tcaagatgataataa

SEQ ID NO: 1609 - DNA, 15 bp, Homo sapiens
gtcaagatgataata

SEQ ID NO: 1610 - DNA, 15 bp, Homo sapiens
tgtcaagatgataat

SEQ ID NO: 1611 - DNA, 15 bp, Homo sapiens
ctgtcaagatgataa

SEQ ID NO: 1612 - DNA, 15 bp, Homo sapiens
gctgtcaagatgata

SEQ ID NO: 1613 - DNA, 15 bp, Homo sapiens
ggctgtcaagatgat

SEQ ID NO: 1614 - DNA, 15 bp, Homo sapiens
tggctgtcaagatga

SEQ ID NO: 1615 - DNA, 15 bp, Homo sapiens
ctggctgtcaagatg

SEQ ID NO: 1616 - DNA, 15 bp, Homo sapiens
cctggctgtcaagat

SEQ ID NO: 1617 - DNA, 15 bp, Homo sapiens
tcctggctgtcaaga

SEQ ID NO: 1618 - DNA, 15 bp, Homo sapiens
ttcctggctgtcaag

SEQ ID NO: 1619 - DNA, 15 bp, Homo sapiens
gttcctggctgtcaa

SEQ ID NO: 1620 - DNA, 15 bp, Homo sapiens
tgttcctggctgtca

SEQ ID NO: 1621 - DNA, 15 bp, Homo sapiens
ctgttcctggctgtc

SEQ ID NO: 1622 - DNA, 15 bp, Homo sapiens
tctgttcctggctgt

SEQ ID NO: 1623 - DNA, 15 bp, Homo sapiens
ctctgttcctggctg

SEQ ID NO: 1624 - DNA, 15 bp, Homo sapiens
cctctgttcctggct

SEQ ID NO: 1625 - DNA, 15 bp, Homo sapiens
acctctgttcctggc

SEQ ID NO: 1626 - DNA, 15 bp, Homo sapiens
cacctctgttcctgg

SEQ ID NO: 1627 - DNA, 15 bp, Homo sapiens
ccacctctgttcctg

SEQ ID NO: 1628 - DNA, 15 bp, Homo sapiens
cccacctctgttcct

SEQ ID NO: 1629 - DNA, 15 bp, Homo sapiens
acccacctctgttcc

SEQ ID NO: 1630 - DNA, 15 bp, Homo sapiens
cacccacctctgttc

SEQ ID NO: 1631 - DNA, 15 bp, Homo sapiens
ccacccacctctgtt

SEQ ID NO: 1632 - DNA, 15 bp, Homo sapiens
cccacccacctctgt

SEQ ID NO: 1633 - DNA, 15 bp, Homo sapiens
acccacccacctctg

SEQ ID NO: 1634 - DNA, 15 bp, Homo sapiens
tacccacccacctct

SEQ ID NO: 1635 - DNA, 15 bp, Homo sapiens
gtacccacccacctc

SEQ ID NO: 1636 - DNA, 15 bp, Homo sapiens
ggtacccacccacct

SEQ ID NO: 1637 - DNA, 15 bp, Homo sapiens
aggtacccacccacc

SEQ ID NO: 1638 - DNA, 15 bp, Homo sapiens
caggtacccacccac

SEQ ID NO: 1639 - DNA, 15 bp, Homo sapiens
ccaggtacccaccca

SEQ ID NO: 1640 - DNA, 15 bp, Homo sapiens
tccaggtacccaccc

SEQ ID NO: 1641 - DNA, 15 bp, Homo sapiens
ttccaggtacccacc

SEQ ID NO: 1642 - DNA, 15 bp, Homo sapiens
attccaggtacccac

SEQ ID NO: 1643 - DNA, 15 bp, Homo sapiens
gattccaggtaccca

SEQ ID NO: 1644 - DNA, 15 bp, Homo sapiens
tgattccaggtaccc

SEQ ID NO: 1645 - DNA, 15 bp, Homo sapiens
ctgattccaggtacc

SEQ ID NO: 1646 - DNA, 15 bp, Homo sapiens
tctgattccaggtac

SEQ ID NO: 1647 - DNA, 15 bp, Homo sapiens
ctctgattccaggta

SEQ ID NO: 1648 - DNA, 15 bp, Homo sapiens
actctgattccaggt

SEQ ID NO: 1649 - DNA, 15 bp, Homo sapiens
gactctgattccagg

SEQ ID NO: 1650 - DNA, 15 bp, Homo sapiens
tgactctgattccag

SEQ ID NO: 1651 - DNA, 15 bp, Homo sapiens
ttgactctgattcca

SEQ ID NO: 1652 - DNA, 15 bp, Homo sapiens
tttgactctgattcc

SEQ ID NO: 1653 - DNA, 15 bp, Homo sapiens
gtttgactctgattc

SEQ ID NO: 1654 - DNA, 15 bp, Homo sapiens
tgtttgactctgatt

SEQ ID NO: 1655 - DNA, 15 bp, Homo sapiens
ttgtttgactctgat

SEQ ID NO: 1656 - DNA, 15 bp, Homo sapiens
attgtttgactctga

SEQ ID NO: 1657 - DNA, 15 bp, Homo sapiens
tattgtttgactctg

SEQ ID NO: 1658 - DNA, 15 bp, Homo sapiens
ttattgtttgactct

SEQ ID NO: 1659 - DNA, 15 bp, Homo sapiens
gttattgtttgactc

SEQ ID NO: 1660 - DNA, 15 bp, Homo sapiens
agttattgtttgact

SEQ ID NO: 1661 - DNA, 15 bp, Homo sapiens
tagttattgtttgac

SEQ ID NO: 1662 - DNA, 15 bp, Homo sapiens
ttagttattgtttga

SEQ ID NO: 1663 - DNA, 15 bp, Homo sapiens
cttagttattgtttg

SEQ ID NO: 1664 - DNA, 15 bp, Homo sapiens
tcttagttattgttt

SEQ ID NO: 1665 - DNA, 15 bp, Homo sapiens
ctcttagttattgtt

SEQ ID NO: 1666 - DNA, 15 bp, Homo sapiens
actcttagttattgt

SEQ ID NO: 1667 - DNA, 15 bp, Homo sapiens
gactcttagttattg

SEQ ID NO: 1668 - DNA, 15 bp, Homo sapiens
tgactcttagttatt

SEQ ID NO: 1669 - DNA, 15 bp, Homo sapiens
ttgactcttagttat

SEQ ID NO: 1670 - DNA, 15 bp, Homo sapiens
tttgactcttagtta

SEQ ID NO: 1671 - DNA, 15 bp, Homo sapiens
gtttgactcttagtt

SEQ ID NO: 1672 - DNA, 15 bp, Homo sapiens
tgtttgactcttagt

SEQ ID NO: 1673 - DNA, 15 bp, Homo sapiens
ttgtttgactcttag

SEQ ID NO: 1674 - DNA, 15 bp, Homo sapiens
attgtttgactctta

SEQ ID NO: 1675 - DNA, 15 bp, Homo sapiens
tattgtttgactctt

SEQ ID NO: 1676 - DNA, 15 bp, Homo sapiens
gttagttattgtttg

SEQ ID NO: 1677 - DNA, 15 bp, Homo sapiens
tgttagttattgttt

SEQ ID NO: 1678 - DNA, 15 bp, Homo sapiens
ctgttagttattgtt

SEQ ID NO: 1679 - DNA, 15 bp, Homo sapiens
cctgttagttattgt

SEQ ID NO: 1680 - DNA, 15 bp, Homo sapiens
tcctgttagttattg

SEQ ID NO: 1681 - DNA, 15 bp, Homo sapiens
ttcctgttagttatt

SEQ ID NO: 1682 - DNA, 15 bp, Homo sapiens
attcctgttagttat

SEQ ID NO: 1683 - DNA, 15 bp, Homo sapiens
cattcctgttagtta

SEQ ID NO: 1684 - DNA, 15 bp, Homo sapiens
tcattcctgttagtt

SEQ ID NO: 1685 - DNA, 15 bp, Homo sapiens
atcattcctgttagt

SEQ ID NO: 1686 - DNA, 15 bp, Homo sapiens
catcattcctgttag

SEQ ID NO: 1687 - DNA, 15 bp, Homo sapiens
gcatcattcctgtta

SEQ ID NO: 1688 - DNA, 15 bp, Homo sapiens
ggcatcattcctgtt

SEQ ID NO: 1689 - DNA, 15 bp, Homo sapiens
cggcatcattcctgt

SEQ ID NO: 1690 - DNA, 15 bp, Homo sapiens
ccggcatcattcctg

SEQ ID NO: 1691 - DNA, 15 bp, Homo sapiens
tccggcatcattcct

SEQ ID NO: 1692 - DNA, 15 bp, Homo sapiens
atccggcatcattcc

SEQ ID NO: 1693 - DNA, 15 bp, Homo sapiens
gatccggcatcattc

SEQ ID NO: 1694 - DNA, 15 bp, Homo sapiens
ggatccggcatcatt

SEQ ID NO: 1695 - DNA, 15 bp, Homo sapiens
cggatccggcatcat

SEQ ID NO: 1696 - DNA, 15 bp, Homo sapiens
acggatccggcatca

SEQ ID NO: 1697 - DNA, 15 bp, Homo sapiens
gacggatccggcatc

SEQ ID NO: 1698 - DNA, 15 bp, Homo sapiens
ggacggatccggcat

SEQ ID NO: 1699 - DNA, 15 bp, Homo sapiens
tggacggatccggca

SEQ ID NO: 1700 - DNA, 15 bp, Homo sapiens
atggacggatccggc

SEQ ID NO: 1701 - DNA, 15 bp, Homo sapiens
aatggacggatccgg

SEQ ID NO: 1702 - DNA, 15 bp, Homo sapiens
caatggacggatccg

SEQ ID NO: 1703 - DNA, 15 bp, Homo sapiens
tcaatggacggatcc

SEQ ID NO: 1704 - DNA, 15 bp, Homo sapiens
ctcaatggacggatc

SEQ ID NO: 1705 - DNA, 15 bp, Homo sapiens
tctcaatggacggat

SEQ ID NO: 1706 - DNA, 15 bp, Homo sapiens
gtctcaatggacgga

SEQ ID NO: 1707 - DNA, 15 bp, Homo sapiens
tgtctcaatggacgg

SEQ ID NO: 1708 - DNA, 15 bp, Homo sapiens
ttgtctcaatggacg

SEQ ID NO: 1709 - DNA, 15 bp, Homo sapiens
attgtctcaatggac

SEQ ID NO: 1710 - DNA, 15 bp, Homo sapiens
tattgtctcaatgga

SEQ ID NO: 1711 - DNA, 15 bp, Homo sapiens
ttattgtctcaatgg

SEQ ID NO: 1712 - DNA, 15 bp, Homo sapiens
attattgtctcaatg

SEQ ID NO: 1713 - DNA, 15 bp, Homo sapiens
gattattgtctcaat

SEQ ID NO: 1714 - DNA, 15 bp, Homo sapiens
tgattattgtctcaa

SEQ ID NO: 1715 - DNA, 15 bp, Homo sapiens
atgattattgtctca

SEQ ID NO: 1716 - DNA, 15 bp, Homo sapiens
aatgattattgtctc

SEQ ID NO: 1717 - DNA, 15 bp, Homo sapiens
gaatgattattgtct

SEQ ID NO: 1718 - DNA, 15 bp, Homo sapiens
agaatgattattgtc

SEQ ID NO: 1719 - DNA, 15 bp, Homo sapiens
cagaatgattattgt

SEQ ID NO: 1720 - DNA, 15 bp, Homo sapiens
tcagaatgattattg

SEQ ID NO: 1721 - DNA, 15 bp, Homo sapiens
ctcagaatgattatt

SEQ ID NO: 1722 - DNA, 15 bp, Homo sapiens
cctcagaatgattat

SEQ ID NO: 1723 - DNA, 15 bp, Homo sapiens
acctcagaatgatta

SEQ ID NO: 1724 - DNA, 15 bp, Homo sapiens
aacctcagaatgatt

SEQ ID NO: 1725 - DNA, 15 bp, Homo sapiens
aaacctcagaatgat

SEQ ID NO: 1726 - DNA, 15 bp, Homo sapiens
gaaacctcagaatga

SEQ ID NO: 1727 - DNA, 15 bp, Homo sapiens
agaaacctcagaatg

SEQ ID NO: 1728 - DNA, 15 bp, Homo sapiens
cagaaacctcagaat

SEQ ID NO: 1729 - DNA, 15 bp, Homo sapiens
acagaaacctcagaa

SEQ ID NO: 1730 - DNA, 15 bp, Homo sapiens
aacagaaacctcaga

SEQ ID NO: 1731 - DNA, 15 bp, Homo sapiens
caacagaaacctcag

SEQ ID NO: 1732 - DNA, 15 bp, Homo sapiens
gcaacagaaacctca

SEQ ID NO: 1733 - DNA, 15 bp, Homo sapiens
tgcaacagaaacctc

SEQ ID NO: 1734 - DNA, 15 bp, Homo sapiens
ctgcaacagaaacct

SEQ ID NO: 1735 - DNA, 15 bp, Homo sapiens
actgcaacagaaacc

SEQ ID NO: 1736 - DNA, 15 bp, Homo sapiens
gactgcaacagaaac

SEQ ID NO: 1737 - DNA, 15 bp, Homo sapiens
agactgcaacagaaa

SEQ ID NO: 1738 - DNA, 15 bp, Homo sapiens
tagactgcaacagaa

SEQ ID NO: 1739 - DNA, 15 bp, Homo sapiens
ctagactgcaacaga

SEQ ID NO: 1740 - DNA, 15 bp, Homo sapiens
cctagactgcaacag

SEQ ID NO: 1741 - DNA, 15 bp, Homo sapiens
tcctagactgcaaca

SEQ ID NO: 1742 - DNA, 15 bp, Homo sapiens
ttcctagactgcaac

SEQ ID NO: 1743 - DNA, 15 bp, Homo sapiens
tttcctagactgcaa

SEQ ID NO: 1744 - DNA, 15 bp, Homo sapiens
ttttcctagactgca

SEQ ID NO: 1745 - DNA, 15 bp, Homo sapiens
tttttcctagactgc

SEQ ID NO: 1746 - DNA, 15 bp, Homo sapiens
atttttcctagactg

SEQ ID NO: 1747 - DNA, 15 bp, Homo sapiens
catttttcctagact

SEQ ID NO: 1748 - DNA, 15 bp, Homo sapiens
ccatttttcctagac

SEQ ID NO: 1749 - DNA, 15 bp, Homo sapiens
tccatttttcctaga

SEQ ID NO: 1750 - DNA, 15 bp, Homo sapiens
ctccatttttcctag

SEQ ID NO: 1751 - DNA, 15 bp, Homo sapiens
tctccatttttccta

SEQ ID NO: 1752 - DNA, 15 bp, Homo sapiens
ttctccatttttcct

SEQ ID NO: 1753 - DNA, 15 bp, Homo sapiens
cttctccatttttcc

SEQ ID NO: 1754 - DNA, 15 bp, Homo sapiens
ccttctccatttttc

SEQ ID NO: 1755 - DNA, 15 bp, Homo sapiens
gccttctccattttt

SEQ ID NO: 1756 - DNA, 15 bp, Homo sapiens
agccttctccatttt

SEQ ID NO: 1757 - DNA, 15 bp, Homo sapiens
tagccttctccattt

SEQ ID NO: 1758 - DNA, 15 bp, Homo sapiens
ctagccttctccatt

SEQ ID NO: 1759 - DNA, 15 bp, Homo sapiens
tctagccttctccat

SEQ ID NO: 1760 - DNA, 15 bp, Homo sapiens
ttctagccttctcca

SEQ ID NO: 1761 - DNA, 15 bp, Homo sapiens
cttctagccttctcc

SEQ ID NO: 1762 - DNA, 15 bp, Homo sapiens
ccttctagccttctc

SEQ ID NO: 1763 - DNA, 15 bp, Homo sapiens
tccttctagccttct

SEQ ID NO: 1764 - DNA, 15 bp, Homo sapiens
ctccttctagccttc

SEQ ID NO: 1765 - DNA, 15 bp, Homo sapiens
actccttctagcctt

SEQ ID NO: 1766 - DNA, 15 bp, Homo sapiens
tactccttctagcct

SEQ ID NO: 1767 - DNA, 15 bp, Homo sapiens
atactccttctagcc

SEQ ID NO: 1768 - DNA, 15 bp, Homo sapiens
aatactccttctagc

SEQ ID NO: 1769 - DNA, 15 bp, Homo sapiens
aaatactccttctag

SEQ ID NO: 1770 - DNA, 15 bp, Homo sapiens
aaaatactccttcta

SEQ ID NO: 1771 - DNA, 15 bp, Homo sapiens
taaaatactccttct

SEQ ID NO: 1772 - DNA, 15 bp, Homo sapiens
ttaaaatactccttc

SEQ ID NO: 1773 - DNA, 15 bp, Homo sapiens
tttaaaatactcctt

SEQ ID NO: 1774 - DNA, 15 bp, Homo sapiens
gtttaaaatactcct

SEQ ID NO: 1775 - DNA, 15 bp, Homo sapiens
agtttaaaatactcc

SEQ ID NO: 1776 - DNA, 15 bp, Homo sapiens
cagtttaaaatactc

SEQ ID NO: 1777 - DNA, 15 bp, Homo sapiens
gcagtttaaaatact

SEQ ID NO: 1778 - DNA, 15 bp, Homo sapiens
agcagtttaaaatac

SEQ ID NO: 1779 - DNA, 15 bp, Homo sapiens
gagcagtttaaaata

SEQ ID NO: 1780 - DNA, 15 bp, Homo sapiens
ggagcagtttaaaat

SEQ ID NO: 1781 - DNA, 15 bp, Homo sapiens
tggagcagtttaaaa

SEQ ID NO: 1782 - DNA, 15 bp, Homo sapiens
ctggagcagtttaaa

SEQ ID NO: 1783 - DNA, 15 bp, Homo sapiens
tctggagcagtttaa

SEQ ID NO: 1784 - DNA, 15 bp, Homo sapiens
ttctggagcagttta

SEQ ID NO: 1785 - DNA, 15 bp, Homo sapiens
gttctggagcagttt

SEQ ID NO: 1786 - DNA, 15 bp, Homo sapiens
agttctggagcagtt

SEQ ID NO: 1787 - DNA, 15 bp, Homo sapiens
aagttctggagcagt

SEQ ID NO: 1788 - DNA, 15 bp, Homo sapiens
aaagttctggagcag

SEQ ID NO: 1789 - DNA, 15 bp, Homo sapiens
taaagttctggagca

SEQ ID NO: 1790 - DNA, 15 bp, Homo sapiens
ctaaagttctggagc

SEQ ID NO: 1791 - DNA, 15 bp, Homo sapiens
tctaaagttctggag

SEQ ID NO: 1792 - DNA, 15 bp, Homo sapiens
atctaaagttctgga

SEQ ID NO: 1793 - DNA, 15 bp, Homo sapiens
aatctaaagttctgg

SEQ ID NO: 1794 - DNA, 15 bp, Homo sapiens
aaatctaaagttctg

SEQ ID NO: 1795 - DNA, 15 bp, Homo sapiens
taaatctaaagttct

SEQ ID NO: 1796 - DNA, 15 bp, Homo sapiens
ctaaatctaaagttc

SEQ ID NO: 1797 - DNA, 15 bp, Homo sapiens
tctaaatctaaagtt

SEQ ID NO: 1798 - DNA, 15 bp, Homo sapiens
ttctaaatctaaagt

SEQ ID NO: 1799 - DNA, 15 bp, Homo sapiens
tttctaaatctaaag

SEQ ID NO: 1800 - DNA, 15 bp, Homo sapiens
ctttctaaatctaaa

SEQ ID NO: 1801 - DNA, 15 bp, Homo sapiens
tctttctaaatctaa

SEQ ID NO: 1802 - DNA, 15 bp, Homo sapiens
ttctttctaaatcta

SEQ ID NO: 1803 - DNA, 15 bp, Homo sapiens
attctttctaaatct

SEQ ID NO: 1804 - DNA, 15 bp, Homo sapiens
gattctttctaaatc

SEQ ID NO: 1805 - DNA, 15 bp, Homo sapiens
agattctttctaaat

SEQ ID NO: 1806 - DNA, 15 bp, Homo sapiens
aagattctttctaaa

SEQ ID NO: 1807 - DNA, 15 bp, Homo sapiens
caagattctttctaa

SEQ ID NO: 1808 - DNA, 15 bp, Homo sapiens
ccaagattctttcta

SEQ ID NO: 1809 - DNA, 15 bp, Homo sapiens
gccaagattctttct

SEQ ID NO: 1810 - DNA, 15 bp, Homo sapiens
tgccaagattctttc

SEQ ID NO: 1811 - DNA, 15 bp, Homo sapiens
ctgccaagattcttt

SEQ ID NO: 1812 - DNA, 15 bp, Homo sapiens
actgccaagattctt

SEQ ID NO: 1813 - DNA, 15 bp, Homo sapiens
gactgccaagattct

SEQ ID NO: 1814 - DNA, 15 bp, Homo sapiens
tgactgccaagattc

SEQ ID NO: 1815 - DNA, 15 bp, Homo sapiens
ttgactgccaagatt

SEQ ID NO: 1816 - DNA, 15 bp, Homo sapiens
gttgactgccaagat

SEQ ID NO: 1817 - DNA, 15 bp, Homo sapiens
agttgactgccaaga

SEQ ID NO: 1818 - DNA, 15 bp, Homo sapiens
gagttgactgccaag

SEQ ID NO: 1819 - DNA, 15 bp, Homo sapiens
ggagttgactgccaa

SEQ ID NO: 1820 - DNA, 15 bp, Homo sapiens
aggagttgactgcca

SEQ ID NO: 1821 - DNA, 15 bp, Homo sapiens
gaggagttgactgcc

SEQ ID NO: 1822 - DNA, 15 bp, Homo sapiens
agaggagttgactgc

SEQ ID NO: 1823 - DNA, 15 bp, Homo sapiens
aagaggagttgactg

SEQ ID NO: 1824 - DNA, 15 bp, Homo sapiens
gaagaggagttgact

SEQ ID NO: 1825 - DNA, 15 bp, Homo sapiens
tgaagaggagttgac

SEQ ID NO: 1826 - DNA, 15 bp, Homo sapiens
gtgaagaggagttga

SEQ ID NO: 1827 - DNA, 15 bp, Homo sapiens
tgtgaagaggagttg

SEQ ID NO: 1828 - DNA, 15 bp, Homo sapiens
ctgtgaagaggagtt

SEQ ID NO: 1829 - DNA, 15 bp, Homo sapiens
gctgtgaagaggagt

SEQ ID NO: 1830 - DNA, 15 bp, Homo sapiens
ggctgtgaagaggag

SEQ ID NO: 1831 - DNA, 15 bp, Homo sapiens
tggctgtgaagagga

SEQ ID NO: 1832 - DNA, 15 bp, Homo sapiens
ctggctgtgaagagg

SEQ ID NO: 1833 - DNA, 15 bp, Homo sapiens
actggctgtgaagag

SEQ ID NO: 1834 - DNA, 15 bp, Homo sapiens
aactggctgtgaaga

SEQ ID NO: 1835 - DNA, 15 bp, Homo sapiens
gaactggctgtgaag

SEQ ID NO: 1836 - DNA, 15 bp, Homo sapiens
tgaactggctgtgaa

SEQ ID NO: 1837 - DNA, 15 bp, Homo sapiens
atgaactggctgtga

SEQ ID NO: 1838 - DNA, 15 bp, Homo sapiens
aatgaactggctgtg

SEQ ID NO: 1839 - DNA, 15 bp, Homo sapiens
aaatgaactggctgt

SEQ ID NO: 1840 - DNA, 15 bp, Homo sapiens
aaaatgaactggctg

SEQ ID NO: 1841 - DNA, 15 bp, Homo sapiens
aaaaatgaactggct

SEQ ID NO: 1842 - DNA, 15 bp, Homo sapiens
gaaaaatgaactggc

SEQ ID NO: 1843 - DNA, 15 bp, Homo sapiens
agaaaaatgaactgg

SEQ ID NO: 1844 - DNA, 15 bp, Homo sapiens
aagaaaaatgaactg

SEQ ID NO: 1845 - DNA, 15 bp, Homo sapiens
gaagaaaaatgaact

SEQ ID NO: 1846 - DNA, 15 bp, Homo sapiens
agaagaaaaatgaac

SEQ ID NO: 1847 - DNA, 15 bp, Homo sapiens
gagaagaaaaatgaa

SEQ ID NO: 1848 - DNA, 15 bp, Homo sapiens
agagaagaaaaatga

SEQ ID NO: 1849 - DNA, 15 bp, Homo sapiens
tagagaagaaaaatg

SEQ ID NO: 1850 - DNA, 15 bp, Homo sapiens
ctagagaagaaaaat

SEQ ID NO: 1851 - DNA, 15 bp, Homo sapiens
cctagagaagaaaaa

SEQ ID NO: 1852 - DNA, 15 bp, Homo sapiens
ccctagagaagaaaa

SEQ ID NO: 1853 - DNA, 15 bp, Homo sapiens
accctagagaagaaa

SEQ ID NO: 1854 - DNA, 15 bp, Homo sapiens
caccctagagaagaa

SEQ ID NO: 1855 - DNA, 15 bp, Homo sapiens
gcaccctagagaaga

SEQ ID NO: 1856 - DNA, 15 bp, Homo sapiens
ggcaccctagagaag

SEQ ID NO: 1857 - DNA, 15 bp, Homo sapiens
tggcaccctagagaa

SEQ ID NO: 1858 - DNA, 15 bp, Homo sapiens
atggcaccctagaga

SEQ ID NO: 1859 - DNA, 15 bp, Homo sapiens
aatggcaccctagag

SEQ ID NO: 1860 - DNA, 15 bp, Homo sapiens
caatggcaccctaga

SEQ ID NO: 1861 - DNA, 15 bp, Homo sapiens
ccaatggcaccctag

SEQ ID NO: 1862 - DNA, 15 bp, Homo sapiens
tccaatggcacccta

SEQ ID NO: 1863 - DNA, 15 bp, Homo sapiens
ctccaatggcaccct

SEQ ID NO: 1864 - DNA, 15 bp, Homo sapiens
cctccaatggcaccc

SEQ ID NO: 1865 - DNA, 15 bp, Homo sapiens
ccctccaatggcacc

SEQ ID NO: 1866 - DNA, 15 bp, Homo sapiens
gccctccaatggcac

SEQ ID NO: 1867 - DNA, 15 bp, Homo sapiens
tgccctccaatggca

SEQ ID NO: 1868 - DNA, 15 bp, Homo sapiens
gtgccctccaatggc

SEQ ID NO: 1869 - DNA, 15 bp, Homo sapiens
tgtgccctccaatgg

SEQ ID NO: 1870 - DNA, 15 bp, Homo sapiens
gtgtgccctccaatg

SEQ ID NO: 1871 - DNA, 15 bp, Homo sapiens
agtgtgccctccaat

SEQ ID NO: 1872 - DNA, 15 bp, Homo sapiens
gagtgtgccctccaa

SEQ ID NO: 1873 - DNA, 15 bp, Homo sapiens
ggagtgtgccctcca

SEQ ID NO: 1874 - DNA, 15 bp, Homo sapiens
gggagtgtgccctcc

SEQ ID NO: 1875 - DNA, 15 bp, Homo sapiens
agggagtgtgccctc

SEQ ID NO: 1876 - DNA, 15 bp, Homo sapiens
cagggagtgtgccct

SEQ ID NO: 1877 - DNA, 15 bp, Homo sapiens
tcagggagtgtgccc

SEQ ID NO: 1878 - DNA, 15 bp, Homo sapiens
ttcagggagtgtgcc

SEQ ID NO: 1879 - DNA, 15 bp, Homo sapiens
gttcagggagtgtgc

SEQ ID NO: 1880 - DNA, 15 bp, Homo sapiens
tgttcagggagtgtg

SEQ ID NO: 1881 - DNA, 15 bp, Homo sapiens
gtgttcagggagtgt

SEQ ID NO: 1882 - DNA, 15 bp, Homo sapiens
agtgttcagggagtg

SEQ ID NO: 1883 - DNA, 15 bp, Homo sapiens
aagtgttcagggagt

SEQ ID NO: 1884 - DNA, 15 bp, Homo sapiens
taagtgttcagggag

SEQ ID NO: 1885 - DNA, 15 bp, Homo sapiens
ataagtgttcaggga

SEQ ID NO: 1886 - DNA, 15 bp, Homo sapiens
cataagtgttcaggg

SEQ ID NO: 1887 - DNA, 15 bp, Homo sapiens
tcataagtgttcagg

SEQ ID NO: 1888 - DNA, 15 bp, Homo sapiens
ctcataagtgttcag

SEQ ID NO: 1889 - DNA, 15 bp, Homo sapiens
actcataagtgttca

SEQ ID NO: 1890 - DNA, 15 bp, Homo sapiens
cactcataagtgttc

SEQ ID NO: 1891 - DNA, 15 bp, Homo sapiens
tcactcataagtgtt

SEQ ID NO: 1892 - DNA, 15 bp, Homo sapiens
ttcactcataagtgt

SEQ ID NO: 1893 - DNA, 15 bp, Homo sapiens
cttcactcataagtg

SEQ ID NO: 1894 - DNA, 15 bp, Homo sapiens
tcttcactcataagt

SEQ ID NO: 1895 - DNA, 15 bp, Homo sapiens
ttcttcactcataag

SEQ ID NO: 1896 - DNA, 15 bp, Homo sapiens
tttcttcactcataa

SEQ ID NO: 1897 - DNA, 15 bp, Homo sapiens
gtttcttcactcata

SEQ ID NO: 1898 - DNA, 15 bp, Homo sapiens
ggtttcttcactcat

SEQ ID NO: 1899 - DNA, 15 bp, Homo sapiens
gggtttcttcactca

SEQ ID NO: 1900 - DNA, 15 bp, Homo sapiens
agggtttcttcactc

SEQ ID NO: 1901 - DNA, 15 bp, Homo sapiens
gagggtttcttcact

SEQ ID NO: 1902 - DNA, 15 bp, Homo sapiens
ggagggtttcttcac

SEQ ID NO: 1903 - DNA, 15 bp, Homo sapiens
aggagggtttcttca

SEQ ID NO: 1904 - DNA, 15 bp, Homo sapiens
aaggagggtttcttc

SEQ ID NO: 1905 - DNA, 15 bp, Homo sapiens
aaaggagggtttctt

SEQ ID NO: 1906 - DNA, 15 bp, Homo sapiens
aaaaggagggtttct

SEQ ID NO: 1907 - DNA, 15 bp, Homo sapiens
gaaaaggagggtttc

SEQ ID NO: 1908 - DNA, 15 bp, Homo sapiens
tgaaaaggagggttt

SEQ ID NO: 1909 - DNA, 15 bp, Homo sapiens
gtgaaaaggagggtt

SEQ ID NO: 1910 - DNA, 15 bp, Homo sapiens
ggtgaaaaggagggt

SEQ ID NO: 1911 - DNA, 15 bp, Homo sapiens
tggtgaaaaggaggg

SEQ ID NO: 1912 - DNA, 15 bp, Homo sapiens
ctggtgaaaaggagg

SEQ ID NO: 1913 - DNA, 15 bp, Homo sapiens
gctggtgaaaaggag

SEQ ID NO: 1914 - DNA, 15 bp, Homo sapiens
ggctggtgaaaagga

SEQ ID NO: 1915 - DNA, 15 bp, Homo sapiens
tggctggtgaaaagg

SEQ ID NO: 1916 - DNA, 15 bp, Homo sapiens
atggctggtgaaaag

SEQ ID NO: 1917 - DNA, 15 bp, Homo sapiens
aatggctggtgaaaa

SEQ ID NO: 1918 - DNA, 15 bp, Homo sapiens
caatggctggtgaaa

SEQ ID NO: 1919 - DNA, 15 bp, Homo sapiens
ccaatggctggtgaa

SEQ ID NO: 1920 - DNA, 15 bp, Homo sapiens
cccaatggctggtga

SEQ ID NO: 1921 - DNA, 15 bp, Homo sapiens
acccaatggctggtg

SEQ ID NO: 1922 - DNA, 15 bp, Homo sapiens
aacccaatggctggt

SEQ ID NO: 1923 - DNA, 15 bp, Homo sapiens
gaacccaatggctgg

SEQ ID NO: 1924 - DNA, 15 bp, Homo sapiens
ggaacccaatggctg

SEQ ID NO: 1925 - DNA, 15 bp, Homo sapiens
aggaacccaatggct

SEQ ID NO: 1926 - DNA, 15 bp, Homo sapiens
aaggaacccaatggc

SEQ ID NO: 1927 - DNA, 15 bp, Homo sapiens
aaaggaacccaatgg

SEQ ID NO: 1928 - DNA, 15 bp, Homo sapiens
aaaaggaacccaatg

SEQ ID NO: 1929 - DNA, 15 bp, Homo sapiens
gaaaaggaacccaat

SEQ ID NO: 1930 - DNA, 15 bp, Homo sapiens
tgaaaaggaacccaa

SEQ ID NO: 1931 - DNA, 15 bp, Homo sapiens
ttgaaaaggaaccca

SEQ ID NO: 1932 - DNA, 15 bp, Homo sapiens
cttgaaaaggaaccc

SEQ ID NO: 1933 - DNA, 15 bp, Homo sapiens
acttgaaaaggaacc

SEQ ID NO: 1934 - DNA, 15 bp, Homo sapiens
aacttgaaaaggaac

SEQ ID NO: 1935 - DNA, 15 bp, Homo sapiens
aaacttgaaaaggaa

SEQ ID NO: 1936 - DNA, 15 bp, Homo sapiens
taaacttgaaaagga

SEQ ID NO: 1937 - DNA, 15 bp, Homo sapiens
ataaacttgaaaagg

SEQ ID NO: 1938 - DNA, 15 bp, Homo sapiens
aataaacttgaaaag

SEQ ID NO: 1939 - DNA, 15 bp, Homo sapiens
aaataaacttgaaaa

SEQ ID NO: 1940 - DNA, 15 bp, Homo sapiens
aaaataaacttgaaa

SEQ ID NO: 1941 - DNA, 15 bp, Homo sapiens
aaaaataaacttgaa

SEQ ID NO: 1942 - DNA, 15 bp, Homo sapiens
aaaaaataaacttga

SEQ ID NO: 1943 - DNA, 15 bp, Homo sapiens
aaaaaaataaacttg

SEQ ID NO: 1944 - DNA, 15 bp, Homo sapiens
taaaaaaataaactt

SEQ ID NO: 1945 - DNA, 15 bp, Homo sapiens
ttaaaaaaataaact

SEQ ID NO: 1946 - DNA, 15 bp, Homo sapiens
tttaaaaaaataaac

SEQ ID NO: 1947 - DNA, 15 bp, Homo sapiens
ttttaaaaaaataaa

SEQ ID NO: 1948 - DNA, 15 bp, Homo sapiens
attttaaaaaaataa

SEQ ID NO: 1949 - DNA, 15 bp, Homo sapiens
aattttaaaaaaata

SEQ ID NO: 1950 - DNA, 15 bp, Homo sapiens
aaattttaaaaaaat

SEQ ID NO: 1951 - DNA, 15 bp, Homo sapiens
aaaattttaaaaaaa

SEQ ID NO: 1952 - DNA, 15 bp, Homo sapiens
gaaaattttaaaaaa

SEQ ID NO: 1953 - DNA, 15 bp, Homo sapiens
agaaaattttaaaaa

SEQ ID NO: 1954 - DNA, 15 bp, Homo sapiens
aagaaaattttaaaa

SEQ ID NO: 1955 - DNA, 15 bp, Homo sapiens
aaagaaaattttaaa

SEQ ID NO: 1956 - DNA, 15 bp, Homo sapiens
taaagaaaattttaa

SEQ ID NO: 1957 - DNA, 15 bp, Homo sapiens
ataaagaaaatttta

SEQ ID NO: 1958 - DNA, 15 bp, Homo sapiens
tataaagaaaatttt

SEQ ID NO: 1959 - DNA, 15 bp, Homo sapiens
atataaagaaaattt

SEQ ID NO: 1960 - DNA, 15 bp, Homo sapiens
aatataaagaaaatt

SEQ ID NO: 1961 - DNA, 15 bp, Homo sapiens
caatataaagaaaat

SEQ ID NO: 1962 - DNA, 15 bp, Homo sapiens
tcaatataaagaaaa

SEQ ID NO: 1963 - DNA, 15 bp, Homo sapiens
ttcaatataaagaaa

SEQ ID NO: 1964 - DNA, 15 bp, Homo sapiens
tttcaatataaagaa

SEQ ID NO: 1965 - DNA, 15 bp, Homo sapiens
atttcaatataaaga

SEQ ID NO: 1966 - DNA, 15 bp, Homo sapiens
gatttcaatataaag

SEQ ID NO: 1967 - DNA, 15 bp, Homo sapiens
agatttcaatataaa

SEQ ID NO: 1968 - DNA, 15 bp, Homo sapiens
cagatttcaatataa

SEQ ID NO: 1969 - DNA, 15 bp, Homo sapiens
gcagatttcaatata

SEQ ID NO: 1970 - DNA, 15 bp, Homo sapiens
ggcagatttcaatat

SEQ ID NO: 1971 - DNA, 15 bp, Homo sapiens
aggcagatttcaata

SEQ ID NO: 1972 - DNA, 15 bp, Homo sapiens
gaggcagatttcaat

SEQ ID NO: 1973 - DNA, 15 bp, Homo sapiens
tgaggcagatttcaa

SEQ ID NO: 1974 - DNA, 15 bp, Homo sapiens
atgaggcagatttca

SEQ ID NO: 1975 - DNA, 15 bp, Homo sapiens
aatgaggcagatttc

SEQ ID NO: 1976 - DNA, 15 bp, Homo sapiens
aaatgaggcagattt

SEQ ID NO: 1977 - DNA, 15 bp, Homo sapiens
taaatgaggcagatt

SEQ ID NO: 1978 - DNA, 15 bp, Homo sapiens
ttaaatgaggcagat

SEQ ID NO: 1979 - DNA, 15 bp, Homo sapiens
attaaatgaggcaga

SEQ ID NO: 1980 - DNA, 15 bp, Homo sapiens
aattaaatgaggcag

SEQ ID NO: 1981 - DNA, 15 bp, Homo sapiens
gaattaaatgaggca

SEQ ID NO: 1982 - DNA, 15 bp, Homo sapiens
ggaattaaatgaggc

SEQ ID NO: 1983 - DNA, 15 bp, Homo sapiens
aggaattaaatgagg

SEQ ID NO: 1984 - DNA, 15 bp, Homo sapiens
taggaattaaatgag

SEQ ID NO: 1985 - DNA, 15 bp, Homo sapiens
gtaggaattaaatga

SEQ ID NO: 1986 - DNA, 15 bp, Homo sapiens
ggtaggaattaaatg

SEQ ID NO: 1987 - DNA, 15 bp, Homo sapiens
aggtaggaattaaat

SEQ ID NO: 1988 - DNA, 15 bp, Homo sapiens
gaggtaggaattaaa

SEQ ID NO: 1989 - DNA, 15 bp, Homo sapiens
agaggtaggaattaa

SEQ ID NO: 1990 - DNA, 15 bp, Homo sapiens
cagaggtaggaatta

SEQ ID NO: 1991 - DNA, 15 bp, Homo sapiens
ccagaggtaggaatt

SEQ ID NO: 1992 - DNA, 15 bp, Homo sapiens
gccagaggtaggaat

SEQ ID NO: 1993 - DNA, 15 bp, Homo sapiens
ggccagaggtaggaa

SEQ ID NO: 1994 - DNA, 15 bp, Homo sapiens
gggccagaggtagga

SEQ ID NO: 1995 - DNA, 15 bp, Homo sapiens
agggccagaggtagg

SEQ ID NO: 1996 - DNA, 15 bp, Homo sapiens
tagggccagaggtag

SEQ ID NO: 1997 - DNA, 15 bp, Homo sapiens
gtagggccagaggta

SEQ ID NO: 1998 - DNA, 15 bp, Homo sapiens
cgtagggccagaggt

SEQ ID NO: 1999 - DNA, 15 bp, Homo sapiens
acgtagggccagagg

SEQ ID NO: 2000 - DNA, 15 bp, Homo sapiens
aacgtagggccagag

SEQ ID NO: 2001 - DNA, 15 bp, Homo sapiens
gaacgtagggccaga

SEQ ID NO: 2002 - DNA, 15 bp, Homo sapiens
agaacgtagggccag

SEQ ID NO: 2003 - DNA, 15 bp, Homo sapiens
cagaacgtagggcca

SEQ ID NO: 2004 - DNA, 15 bp, Homo sapiens
acagaacgtagggcc

SEQ ID NO: 2005 - DNA, 15 bp, Homo sapiens
aacagaacgtagggc

SEQ ID NO: 2006 - DNA, 15 bp, Homo sapiens
aaacagaacgtaggg

SEQ ID NO: 2007 - DNA, 15 bp, Homo sapiens
aaaacagaacgtagg

SEQ ID NO: 2008 - DNA, 15 bp, Homo sapiens
aaaaacagaacgtag

SEQ ID NO: 2009 - DNA, 15 bp, Homo sapiens
caaaaacagaacgta

SEQ ID NO: 2010 - DNA, 15 bp, Homo sapiens
ccaaaaacagaacgt

SEQ ID NO: 2011 - DNA, 15 bp, Homo sapiens
gccaaaaacagaacg

SEQ ID NO: 2012 - DNA, 15 bp, Homo sapiens
tgccaaaaacagaac

SEQ ID NO: 2013 - DNA, 15 bp, Homo sapiens
gtgccaaaaacagaa

SEQ ID NO: 2014 - DNA, 15 bp, Homo sapiens
ggtgccaaaaacaga

SEQ ID NO: 2015 - DNA, 15 bp, Homo sapiens
tggtgccaaaaacag

SEQ ID NO: 2016 - DNA, 15 bp, Homo sapiens
ctggtgccaaaaaca

SEQ ID NO: 2017 - DNA, 15 bp, Homo sapiens
tctggtgccaaaaac

SEQ ID NO: 2018 - DNA, 15 bp, Homo sapiens
atctggtgccaaaaa

SEQ ID NO: 2019 - DNA, 15 bp, Homo sapiens
tatctggtgccaaaa

SEQ ID NO: 2020 - DNA, 15 bp, Homo sapiens
ctatctggtgccaaa

SEQ ID NO: 2021 - DNA, 15 bp, Homo sapiens
tctatctggtgccaa

SEQ ID NO: 2022 - DNA, 15 bp, Homo sapiens
atctatctggtgcca

SEQ ID NO: 2023 - DNA, 15 bp, Homo sapiens
tatctatctggtgcc

SEQ ID NO: 2024 - DNA, 15 bp, Homo sapiens
ttatctatctggtgc

SEQ ID NO: 2025 - DNA, 15 bp, Homo sapiens
tttatctatctggtg

SEQ ID NO: 2026 - DNA, 15 bp, Homo sapiens
ttttatctatctggt

SEQ ID NO: 2027 - DNA, 15 bp, Homo sapiens
gttttatctatctgg

SEQ ID NO: 2028 - DNA, 15 bp, Homo sapiens
ggttttatctatctg

SEQ ID NO: 2029 - DNA, 15 bp, Homo sapiens
gggttttatctatct

SEQ ID NO: 2030 - DNA, 15 bp, Homo sapiens
tgggttttatctatc

SEQ ID NO: 2031 - DNA, 15 bp, Homo sapiens
atgggttttatctat

SEQ ID NO: 2032 - DNA, 15 bp, Homo sapiens
tatgggttttatcta

SEQ ID NO: 2033 - DNA, 15 bp, Homo sapiens
gtatgggttttatct

SEQ ID NO: 2034 - DNA, 15 bp, Homo sapiens
agtatgggttttatc

SEQ ID NO: 2035 - DNA, 15 bp, Homo sapiens
gagtatgggttttat

SEQ ID NO: 2036 - DNA, 15 bp, Homo sapiens
agagtatgggtttta

SEQ ID NO: 2037 - DNA, 15 bp, Homo sapiens
tagagtatgggtttt

SEQ ID NO: 2038 - DNA, 15 bp, Homo sapiens
atagagtatgggttt

SEQ ID NO: 2039 - DNA, 15 bp, Homo sapiens
aatagagtatgggtt

SEQ ID NO: 2040 - DNA, 15 bp, Homo sapiens
aaatagagtatgggt

SEQ ID NO: 2041 - DNA, 15 bp, Homo sapiens
aaaatagagtatggg

SEQ ID NO: 2042 - DNA, 15 bp, Homo sapiens
taaaatagagtatgg

SEQ ID NO: 2043 - DNA, 15 bp, Homo sapiens
gtaaaatagagtatg

SEQ ID NO: 2044 - DNA, 15 bp, Homo sapiens
tgtaaaatagagtat

SEQ ID NO: 2045 - DNA, 15 bp, Homo sapiens
gtgtaaaatagagta

SEQ ID NO: 2046 - DNA, 15 bp, Homo sapiens
agtgtaaaatagagt

SEQ ID NO: 2047 - DNA, 15 bp, Homo sapiens
gagtgtaaaatagag

SEQ ID NO: 2048 - DNA, 15 bp, Homo sapiens
tgagtgtaaaataga

SEQ ID NO: 2049 - DNA, 15 bp, Homo sapiens
atgagtgtaaaatag

SEQ ID NO: 2050 - DNA, 15 bp, Homo sapiens
aatgagtgtaaaata

SEQ ID NO: 2051 - DNA, 15 bp, Homo sapiens
gaatgagtgtaaaat

SEQ ID NO: 2052 - DNA, 15 bp, Homo sapiens
tgaatgagtgtaaaa

SEQ ID NO: 2053 - DNA, 15 bp, Homo sapiens
ttgaatgagtgtaaa

SEQ ID NO: 2054 - DNA, 15 bp, Homo sapiens
tttgaatgagtgtaa

SEQ ID NO: 2055 - DNA, 15 bp, Homo sapiens
atttgaatgagtgta

SEQ ID NO: 2056 - DNA, 15 bp, Homo sapiens
gatttgaatgagtgt

SEQ ID NO: 2057 - DNA, 15 bp, Homo sapiens
tgatttgaatgagtg

SEQ ID NO: 2058 - DNA, 15 bp, Homo sapiens
atgatttgaatgagt

SEQ ID NO: 2059 - DNA, 15 bp, Homo sapiens
aatgatttgaatgag

SEQ ID NO: 2060 - DNA, 15 bp, Homo sapiens
caatgatttgaatga

SEQ ID NO: 2061 - DNA, 15 bp, Homo sapiens
acaatgatttgaatg

SEQ ID NO: 2062 - DNA, 15 bp, Homo sapiens
tacaatgatttgaat

SEQ ID NO: 2063 - DNA, 15 bp, Homo sapiens
atacaatgatttgaa

SEQ ID NO: 2064 - DNA, 15 bp, Homo sapiens
aatacaatgatttga

SEQ ID NO: 2065 - DNA, 15 bp, Homo sapiens
aaatacaatgatttg

SEQ ID NO: 2066 - DNA, 15 bp, Homo sapiens
gaaatacaatgattt

SEQ ID NO: 2067 - DNA, 15 bp, Homo sapiens
ggaaatacaatgatt

SEQ ID NO: 2068 - DNA, 15 bp, Homo sapiens
gggaaatacaatgat

SEQ ID NO: 2069 - DNA, 15 bp, Homo sapiens
ggggaaatacaatga

SEQ ID NO: 2070 - DNA, 15 bp, Homo sapiens
gggggaaatacaatg

SEQ ID NO: 2071 - DNA, 15 bp, Homo sapiens
tgggggaaatacaat

SEQ ID NO: 2072 - DNA, 15 bp, Homo sapiens
gtgggggaaatacaa

SEQ ID NO: 2073 - DNA, 15 bp, Homo sapiens
ggtgggggaaataca

SEQ ID NO: 2074 - DNA, 15 bp, Homo sapiens
cggtgggggaaatac

SEQ ID NO: 2075 - DNA, 15 bp, Homo sapiens
ccggtgggggaaata

SEQ ID NO: 2076 - DNA, 15 bp, Homo sapiens
accggtgggggaaat

SEQ ID NO: 2077 - DNA, 15 bp, Homo sapiens
caccggtgggggaaa

SEQ ID NO: 2078 - DNA, 15 bp, Homo sapiens
tcaccggtgggggaa

SEQ ID NO: 2079 - DNA, 15 bp, Homo sapiens
ttcaccggtggggga

SEQ ID NO: 2080 - DNA, 15 bp, Homo sapiens
attcaccggtggggg

SEQ ID NO: 2081 - DNA, 15 bp, Homo sapiens
tattcaccggtgggg

SEQ ID NO: 2082 - DNA, 15 bp, Homo sapiens
atattcaccggtggg

SEQ ID NO: 2083 - DNA, 15 bp, Homo sapiens
tatattcaccggtgg

SEQ ID NO: 2084 - DNA, 15 bp, Homo sapiens
atatattcaccggtg

SEQ ID NO: 2085 - DNA, 15 bp, Homo sapiens
aatatattcaccggt

SEQ ID NO: 2086 - DNA, 15 bp, Homo sapiens
taatatattcaccgg

SEQ ID NO: 2087 - DNA, 15 bp, Homo sapiens
gtaatatattcaccg

SEQ ID NO: 2088 - DNA, 15 bp, Homo sapiens
ggtaatatattcacc

SEQ ID NO: 2089 - DNA, 15 bp, Homo sapiens
tggtaatatattcac

SEQ ID NO: 2090 - DNA, 15 bp, Homo sapiens
ttggtaatatattca

SEQ ID NO: 2091 - DNA, 15 bp, Homo sapiens
tttggtaatatattc

SEQ ID NO: 2092 - DNA, 15 bp, Homo sapiens
ctttggtaatatatt

SEQ ID NO: 2093 - DNA, 15 bp, Homo sapiens
actttggtaatatat

SEQ ID NO: 2094 - DNA, 15 bp, Homo sapiens
aactttggtaatata

SEQ ID NO: 2095 - DNA, 15 bp, Homo sapiens
caactttggtaatat

SEQ ID NO: 2096 - DNA, 15 bp, Homo sapiens
ccaactttggtaata

SEQ ID NO: 2097 - DNA, 15 bp, Homo sapiens
accaactttggtaat

SEQ ID NO: 2098 - DNA, 15 bp, Homo sapiens
aaccaactttggtaa

SEQ ID NO: 2099 - DNA, 15 bp, Homo sapiens
caaccaactttggta

SEQ ID NO: 2100 - DNA, 15 bp, Homo sapiens
tcaaccaactttggt

SEQ ID NO: 2101 - DNA, 15 bp, Homo sapiens
ctcaaccaactttgg

SEQ ID NO: 2102 - DNA, 15 bp, Homo sapiens
actcaaccaactttg

SEQ ID NO: 2103 - DNA, 15 bp, Homo sapiens
aactcaaccaacttt

SEQ ID NO: 2104 - DNA, 15 bp, Homo sapiens
aaactcaaccaactt

SEQ ID NO: 2105 - DNA, 15 bp, Homo sapiens
gaaactcaaccaact

SEQ ID NO: 2106 - DNA, 15 bp, Homo sapiens
tgaaactcaaccaac

SEQ ID NO: 2107 - DNA, 15 bp, Homo sapiens
atgaaactcaaccaa

SEQ ID NO: 2108 - DNA, 15 bp, Homo sapiens
tatgaaactcaacca

SEQ ID NO: 2109 - DNA, 15 bp, Homo sapiens
ttatgaaactcaacc

SEQ ID NO: 2110 - DNA, 15 bp, Homo sapiens
attatgaaactcaac

SEQ ID NO: 2111 - DNA, 15 bp, Homo sapiens
cattatgaaactcaa

SEQ ID NO: 2112 - DNA, 15 bp, Homo sapiens
gcattatgaaactca

SEQ ID NO: 2113 - DNA, 15 bp, Homo sapiens
tgcattatgaaactc

SEQ ID NO: 2114 - DNA, 15 bp, Homo sapiens
ttgcattatgaaact

SEQ ID NO: 2115 - DNA, 15 bp, Homo sapiens
tttgcattatgaaac

SEQ ID NO: 2116 - DNA, 15 bp, Homo sapiens
gtttgcattatgaaa

SEQ ID NO: 2117 - DNA, 15 bp, Homo sapiens
ggtttgcattatgaa

SEQ ID NO: 2118 - DNA, 15 bp, Homo sapiens
gggtttgcattatga

SEQ ID NO: 2119 - DNA, 15 bp, Homo sapiens
tgggtttgcattatg

SEQ ID NO: 2120 - DNA, 15 bp, Homo sapiens
ttgggtttgcattat

SEQ ID NO: 2121 - DNA, 15 bp, Homo sapiens
tttgggtttgcatta

SEQ ID NO: 2122 - DNA, 15 bp, Homo sapiens
ctttgggtttgcatt

SEQ ID NO: 2123 - DNA, 15 bp, Homo sapiens
cctttgggtttgcat

SEQ ID NO: 2124 - DNA, 15 bp, Homo sapiens
ccctttgggtttgca

SEQ ID NO: 2125 - DNA, 15 bp, Homo sapiens
tccctttgggtttgc

SEQ ID NO: 2126 - DNA, 15 bp, Homo sapiens
ttccctttgggtttg

SEQ ID NO: 2127 - DNA, 15 bp, Homo sapiens
tttccctttgggttt

SEQ ID NO: 2128 - DNA, 15 bp, Homo sapiens
ttttccctttgggtt

SEQ ID NO: 2129 - DNA, 15 bp, Homo sapiens
attttccctttgggt

SEQ ID NO: 2130 - DNA, 15 bp, Homo sapiens
aattttccctttggg

SEQ ID NO: 2131 - DNA, 15 bp, Homo sapiens
taattttccctttgg

SEQ ID NO: 2132 - DNA, 15 bp, Homo sapiens
ataattttccctttg

SEQ ID NO: 2133 - DNA, 15 bp, Homo sapiens
gataattttcccttt

SEQ ID NO: 2134 - DNA, 15 bp, Homo sapiens
agataattttccctt

SEQ ID NO: 2135 - DNA, 15 bp, Homo sapiens
aagataattttccct

SEQ ID NO: 2136 - DNA, 15 bp, Homo sapiens
caagataattttccc

SEQ ID NO: 2137 - DNA, 15 bp, Homo sapiens
tcaagataattttcc

SEQ ID NO: 2138 - DNA, 15 bp, Homo sapiens
ttcaagataattttc

SEQ ID NO: 2139 - DNA, 15 bp, Homo sapiens
attcaagataatttt

SEQ ID NO: 2140 - DNA, 15 bp, Homo sapiens
tattcaagataattt

SEQ ID NO: 2141 - DNA, 15 bp, Homo sapiens
ttattcaagataatt

SEQ ID NO: 2142 - DNA, 15 bp, Homo sapiens
attattcaagataat

SEQ ID NO: 2143 - DNA, 15 bp, Homo sapiens
gattattcaagataa

SEQ ID NO: 2144 - DNA, 15 bp, Homo sapiens
tgattattcaagata

SEQ ID NO: 2145 - DNA, 15 bp, Homo sapiens
atgattattcaagat

SEQ ID NO: 2146 - DNA, 15 bp, Homo sapiens
tatgattattcaaga

SEQ ID NO: 2147 - DNA, 15 bp, Homo sapiens
atatgattattcaag

SEQ ID NO: 2148 - DNA, 15 bp, Homo sapiens
catatgattattcaa

SEQ ID NO: 2149 - DNA, 15 bp, Homo sapiens
tcatatgattattca

SEQ ID NO: 2150 - DNA, 15 bp, Homo sapiens
gtcatatgattattc

SEQ ID NO: 2151 - DNA, 15 bp, Homo sapiens
tgtcatatgattatt

SEQ ID NO: 2152 - DNA, 15 bp, Homo sapiens
ttgtcatatgattat

SEQ ID NO: 2153 - DNA, 15 bp, Homo sapiens
attgtcatatgatta

SEQ ID NO: 2154 - DNA, 15 bp, Homo sapiens
tattgtcatatgatt

SEQ ID NO: 2155 - DNA, 15 bp, Homo sapiens
atattgtcatatgat

SEQ ID NO: 2156 - DNA, 15 bp, Homo sapiens
catattgtcatatga

SEQ ID NO: 2157 - DNA, 15 bp, Homo sapiens
acatattgtcatatg

SEQ ID NO: 2158 - DNA, 15 bp, Homo sapiens
cacatattgtcatat

SEQ ID NO: 2159 - DNA, 15 bp, Homo sapiens
ccacatattgtcata

SEQ ID NO: 2160 - DNA, 15 bp, Homo sapiens
tccacatattgtcat

SEQ ID NO: 2161 - DNA, 15 bp, Homo sapiens
ttccacatattgtca

SEQ ID NO: 2162 - DNA, 15 bp, Homo sapiens
tttccacatattgtc

SEQ ID NO: 2163 - DNA, 15 bp, Homo sapiens
ctttccacatattgt

SEQ ID NO: 2164 - DNA, 15 bp, Homo sapiens
actttccacatattg

SEQ ID NO: 2165 - DNA, 15 bp, Homo sapiens
aactttccacatatt

SEQ ID NO: 2166 - DNA, 15 bp, Homo sapiens
aaactttccacatat

SEQ ID NO: 2167 - DNA, 15 bp, Homo sapiens
taaactttccacata

SEQ ID NO: 2168 - DNA, 15 bp, Homo sapiens
ctaaactttccacat

SEQ ID NO: 2169 - DNA, 15 bp, Homo sapiens
cctaaactttccaca

SEQ ID NO: 2170 - DNA, 15 bp, Homo sapiens
ccctaaactttccac

SEQ ID NO: 2171 - DNA, 15 bp, Homo sapiens
cccctaaactttcca

SEQ ID NO: 2172 - DNA, 15 bp, Homo sapiens
gcccctaaactttcc

SEQ ID NO: 2173 - DNA, 15 bp, Homo sapiens
agcccctaaactttc

SEQ ID NO: 2174 - DNA, 15 bp, Homo sapiens
cagcccctaaacttt

SEQ ID NO: 2175 - DNA, 15 bp, Homo sapiens
acagcccctaaactt

SEQ ID NO: 2176 - DNA, 15 bp, Homo sapiens
cacagcccctaaact

SEQ ID NO: 2177 - DNA, 15 bp, Homo sapiens
acacagcccctaaac

SEQ ID NO: 2178 - DNA, 15 bp, Homo sapiens
tacacagcccctaaa

SEQ ID NO: 2179 - DNA, 15 bp, Homo sapiens
gtacacagcccctaa

SEQ ID NO: 2180 - DNA, 15 bp, Homo sapiens
cgtacacagccccta

SEQ ID NO: 2181 - DNA, 15 bp, Homo sapiens
gcgtacacagcccct

SEQ ID NO: 2182 - DNA, 15 bp, Homo sapiens
ggcgtacacagcccc

SEQ ID NO: 2183 - DNA, 15 bp, Homo sapiens
tggcgtacacagccc

SEQ ID NO: 2184 - DNA, 15 bp, Homo sapiens
gtggcgtacacagcc

SEQ ID NO: 2185 - DNA, 15 bp, Homo sapiens
ggtggcgtacacagc

SEQ ID NO: 2186 - DNA, 15 bp, Homo sapiens
aggtggcgtacacag

SEQ ID NO: 2187 - DNA, 15 bp, Homo sapiens
gaggtggcgtacaca

SEQ ID NO: 2188 - DNA, 15 bp, Homo sapiens
tgaggtggcgtacac

SEQ ID NO: 2189 - DNA, 15 bp, Homo sapiens
atgaggtggcgtaca

SEQ ID NO: 2190 - DNA, 15 bp, Homo sapiens
catgaggtggcgtac

SEQ ID NO: 2191 - DNA, 15 bp, Homo sapiens
ccatgaggtggcgta

SEQ ID NO: 2192 - DNA, 15 bp, Homo sapiens
accatgaggtggcgt

SEQ ID NO: 2193 - DNA, 15 bp, Homo sapiens
aaccatgaggtggcg

SEQ ID NO: 2194 - DNA, 15 bp, Homo sapiens
aaaccatgaggtggc

SEQ ID NO: 2195 - DNA, 15 bp, Homo sapiens
aaaaccatgaggtgg

SEQ ID NO: 2196 - DNA, 15 bp, Homo sapiens
caaaaccatgaggtg

SEQ ID NO: 2197 - DNA, 15 bp, Homo sapiens
tcaaaaccatgaggt

SEQ ID NO: 2198 - DNA, 15 bp, Homo sapiens
ttcaaaaccatgagg

SEQ ID NO: 2199 - DNA, 15 bp, Homo sapiens
gttcaaaaccatgag

SEQ ID NO: 2200 - DNA, 15 bp, Homo sapiens
agttcaaaaccatga

SEQ ID NO: 2201 - DNA, 15 bp, Homo sapiens
cagttcaaaaccatg

SEQ ID NO: 2202 - DNA, 15 bp, Homo sapiens
acagttcaaaaccat

SEQ ID NO: 2203 - DNA, 15 bp, Homo sapiens
cacagttcaaaacca

SEQ ID NO: 2204 - DNA, 15 bp, Homo sapiens
acacagttcaaaacc

SEQ ID NO: 2205 - DNA, 15 bp, Homo sapiens
cacacagttcaaaac

SEQ ID NO: 2206 - DNA, 15 bp, Homo sapiens
ccacacagttcaaaa

SEQ ID NO: 2207 - DNA, 15 bp, Homo sapiens
accacacagttcaaa

SEQ ID NO: 2208 - DNA, 15 bp, Homo sapiens
aaccacacagttcaa

SEQ ID NO: 2209 - DNA, 15 bp, Homo sapiens
taaccacacagttca

SEQ ID NO: 2210 - DNA, 15 bp, Homo sapiens
ttaaccacacagttc

SEQ ID NO: 2211 - DNA, 15 bp, Homo sapiens
tttaaccacacagtt

SEQ ID NO: 2212 - DNA, 15 bp, Homo sapiens
ctttaaccacacagt

SEQ ID NO: 2213 - DNA, 15 bp, Homo sapiens
tctttaaccacacag

SEQ ID NO: 2214 - DNA, 15 bp, Homo sapiens
gtctttaaccacaca

SEQ ID NO: 2215 - DNA, 15 bp, Homo sapiens
cgtctttaaccacac

SEQ ID NO: 2216 - DNA, 15 bp, Homo sapiens
acgtctttaaccaca

SEQ ID NO: 2217 - DNA, 15 bp, Homo sapiens
aacgtctttaaccac

SEQ ID NO: 2218 - DNA, 15 bp, Homo sapiens
caacgtctttaacca

SEQ ID NO: 2219 - DNA, 15 bp, Homo sapiens
tcaacgtctttaacc

SEQ ID NO: 2220 - DNA, 15 bp, Homo sapiens
ctcaacgtctttaac

SEQ ID NO: 2221 - DNA, 15 bp, Homo sapiens
tctcaacgtctttaa

SEQ ID NO: 2222 - DNA, 15 bp, Homo sapiens
ctctcaacgtcttta

SEQ ID NO: 2223 - DNA, 15 bp, Homo sapiens
actctcaacgtcttt

SEQ ID NO: 2224 - DNA, 15 bp, Homo sapiens
aactctcaacgtctt

SEQ ID NO: 2225 - DNA, 15 bp, Homo sapiens
caactctcaacgtct

SEQ ID NO: 2226 - DNA, 15 bp, Homo sapiens
tcaactctcaacgtc

SEQ ID NO: 2227 - DNA, 15 bp, Homo sapiens
gtcaactctcaacgt

SEQ ID NO: 2228 - DNA, 15 bp, Homo sapiens
tgtcaactctcaacg

SEQ ID NO: 2229 - DNA, 15 bp, Homo sapiens
ctgtcaactctcaac

SEQ ID NO: 2230 - DNA, 15 bp, Homo sapiens
tctgtcaactctcaa

SEQ ID NO: 2231 - DNA, 15 bp, Homo sapiens
atctgtcaactctca

SEQ ID NO: 2232 - DNA, 15 bp, Homo sapiens
aatctgtcaactctc

SEQ ID NO: 2233 - DNA, 15 bp, Homo sapiens
taatctgtcaactct

SEQ ID NO: 2234 - DNA, 15 bp, Homo sapiens
ctaatctgtcaactc

SEQ ID NO: 2235 - DNA, 15 bp, Homo sapiens
actaatctgtcaact

SEQ ID NO: 2236 - DNA, 15 bp, Homo sapiens
gactaatctgtcaac

SEQ ID NO: 2237 - DNA, 15 bp, Homo sapiens
tgactaatctgtcaa

SEQ ID NO: 2238 - DNA, 15 bp, Homo sapiens
ctgactaatctgtca

SEQ ID NO: 2239 - DNA, 15 bp, Homo sapiens
cctgactaatctgtc

SEQ ID NO: 2240 - DNA, 15 bp, Homo sapiens
ccctgactaatctgt

SEQ ID NO: 2241 - DNA, 15 bp, Homo sapiens
tccctgactaatctg

SEQ ID NO: 2242 - DNA, 15 bp, Homo sapiens
atccctgactaatct

SEQ ID NO: 2243 - DNA, 15 bp, Homo sapiens
aatccctgactaatc

SEQ ID NO: 2244 - DNA, 15 bp, Homo sapiens
aaatccctgactaat

SEQ ID NO: 2245 - DNA, 15 bp, Homo sapiens
aaaatccctgactaa

SEQ ID NO: 2246 - DNA, 15 bp, Homo sapiens
aaaaatccctgacta

SEQ ID NO: 2247 - DNA, 15 bp, Homo sapiens
gaaaaatccctgact

SEQ ID NO: 2248 - DNA, 15 bp, Homo sapiens
tgaaaaatccctgac

SEQ ID NO: 2249 - DNA, 15 bp, Homo sapiens
ttgaaaaatccctga

SEQ ID NO: 2250 - DNA, 15 bp, Homo sapiens
cttgaaaaatccctg

SEQ ID NO: 2251 - DNA, 15 bp, Homo sapiens
tcttgaaaaatccct

SEQ ID NO: 2252 - DNA, 15 bp, Homo sapiens
ctcttgaaaaatccc

SEQ ID NO: 2253 - DNA, 15 bp, Homo sapiens
actcttgaaaaatcc

SEQ ID NO: 2254 - DNA, 15 bp, Homo sapiens
tactcttgaaaaatc

SEQ ID NO: 2255 - DNA, 15 bp, Homo sapiens
atactcttgaaaaat

SEQ ID NO: 2256 - DNA, 15 bp, Homo sapiens
aatactcttgaaaaa

SEQ ID NO: 2257 - DNA, 15 bp, Homo sapiens
taatactcttgaaaa

SEQ ID NO: 2258 - DNA, 15 bp, Homo sapiens
ttaatactcttgaaa

SEQ ID NO: 2259 - DNA, 15 bp, Homo sapiens
attaatactcttgaa

SEQ ID NO: 2260 - DNA, 15 bp, Homo sapiens
aattaatactcttga

SEQ ID NO: 2261 - DNA, 15 bp, Homo sapiens
taattaatactcttg

SEQ ID NO: 2262 - DNA, 15 bp, Homo sapiens
gtaattaatactctt

SEQ ID NO: 2263 - DNA, 15 bp, Homo sapiens
tgtaattaatactct

SEQ ID NO: 2264 - DNA, 15 bp, Homo sapiens
ttgtaattaatactc

SEQ ID NO: 2265 - DNA, 15 bp, Homo sapiens
tttgtaattaatact

SEQ ID NO: 2266 - DNA, 15 bp, Homo sapiens
gtttgtaattaatac

SEQ ID NO: 2267 - DNA, 15 bp, Homo sapiens
agtttgtaattaata

SEQ ID NO: 2268 - DNA, 15 bp, Homo sapiens
aagtttgtaattaat

SEQ ID NO: 2269 - DNA, 15 bp, Homo sapiens
aaagtttgtaattaa

SEQ ID NO: 2270 - DNA, 15 bp, Homo sapiens
caaagtttgtaatta

SEQ ID NO: 2271 - DNA, 15 bp, Homo sapiens
tcaaagtttgtaatt

SEQ ID NO: 2272 - DNA, 15 bp, Homo sapiens
ttcaaagtttgtaat

SEQ ID NO: 2273 - DNA, 15 bp, Homo sapiens
tttcaaagtttgtaa

SEQ ID NO: 2274 - DNA, 15 bp, Homo sapiens
atttcaaagtttgta

SEQ ID NO: 2275 - DNA, 15 bp, Homo sapiens
gatttcaaagtttgt

SEQ ID NO: 2276 - DNA, 15 bp, Homo sapiens
agatttcaaagtttg

SEQ ID NO: 2277 - DNA, 15 bp, Homo sapiens
aagatttcaaagttt

SEQ ID NO: 2278 - DNA, 15 bp, Homo sapiens
caagatttcaaagtt

SEQ ID NO: 2279 - DNA, 15 bp, Homo sapiens
ccaagatttcaaagt

SEQ ID NO: 2280 - DNA, 15 bp, Homo sapiens
accaagatttcaaag

SEQ ID NO: 2281 - DNA, 15 bp, Homo sapiens
gaccaagatttcaaa

SEQ ID NO: 2282 - DNA, 15 bp, Homo sapiens
tgaccaagatttcaa

SEQ ID NO: 2283 - DNA, 15 bp, Homo sapiens
ctgaccaagatttca

SEQ ID NO: 2284 - DNA, 15 bp, Homo sapiens
actgaccaagatttc

SEQ ID NO: 2285 - DNA, 15 bp, Homo sapiens
cactgaccaagattt

SEQ ID NO: 2286 - DNA, 15 bp, Homo sapiens
tcactgaccaagatt

SEQ ID NO: 2287 - DNA, 15 bp, Homo sapiens
ttcactgaccaagat

SEQ ID NO: 2288 - DNA, 15 bp, Homo sapiens
tttcactgaccaaga

SEQ ID NO: 2289 - DNA, 15 bp, Homo sapiens
ctttcactgaccaag

SEQ ID NO: 2290 - DNA, 15 bp, Homo sapiens
actttcactgaccaa

SEQ ID NO: 2291 - DNA, 15 bp, Homo sapiens
aactttcactgacca

SEQ ID NO: 2292 - DNA, 15 bp, Homo sapiens
gaactttcactgacc

SEQ ID NO: 2293 - DNA, 15 bp, Homo sapiens
tgaactttcactgac

SEQ ID NO: 2294 - DNA, 15 bp, Homo sapiens
atgaactttcactga

SEQ ID NO: 2295 - DNA, 15 bp, Homo sapiens
aatgaactttcactg

SEQ ID NO: 2296 - DNA, 15 bp, Homo sapiens
aaatgaactttcact

SEQ ID NO: 2297 - DNA, 15 bp, Homo sapiens
aaaatgaactttcac

SEQ ID NO: 2298 - DNA, 15 bp, Homo sapiens
taaaatgaactttca

SEQ ID NO: 2299 - DNA, 15 bp, Homo sapiens
ctaaaatgaactttc

SEQ ID NO: 2300 - DNA, 15 bp, Homo sapiens
actaaaatgaacttt

SEQ ID NO: 2301 - DNA, 15 bp, Homo sapiens
cactaaaatgaactt

SEQ ID NO: 2302 - DNA, 15 bp, Homo sapiens
gcactaaaatgaact

SEQ ID NO: 2303 - DNA, 15 bp, Homo sapiens
tgcactaaaatgaac

SEQ ID NO: 2304 - DNA, 15 bp, Homo sapiens
atgcactaaaatgaa

SEQ ID NO: 2305 - DNA, 15 bp, Homo sapiens
gatgcactaaaatga

SEQ ID NO: 2306 - DNA, 15 bp, Homo sapiens
agatgcactaaaatg

SEQ ID NO: 2307 - DNA, 15 bp, Homo sapiens
aagatgcactaaaat

SEQ ID NO: 2308 - DNA, 15 bp, Homo sapiens
caagatgcactaaaa

SEQ ID NO: 2309 - DNA, 15 bp, Homo sapiens
gcaagatgcactaaa

SEQ ID NO: 2310 - DNA, 15 bp, Homo sapiens
tgcaagatgcactaa

SEQ ID NO: 2311 - DNA, 15 bp, Homo sapiens
ttgcaagatgcacta

SEQ ID NO: 2312 - DNA, 15 bp, Homo sapiens
tttgcaagatgcact

SEQ ID NO: 2313 - DNA, 15 bp, Homo sapiens
atttgcaagatgcac

SEQ ID NO: 2314 - DNA, 15 bp, Homo sapiens
tatttgcaagatgca

SEQ ID NO: 2315 - DNA, 15 bp, Homo sapiens
gtatttgcaagatgc

SEQ ID NO: 2316 - DNA, 15 bp, Homo sapiens
cgtatttgcaagatg

SEQ ID NO: 2317 - DNA, 15 bp, Homo sapiens
tcgtatttgcaagat

SEQ ID NO: 2318 - DNA, 15 bp, Homo sapiens
atcgtatttgcaaga

SEQ ID NO: 2319 - DNA, 15 bp, Homo sapiens
gatcgtatttgcaag

SEQ ID NO: 2320 - DNA, 15 bp, Homo sapiens
tgatcgtatttgcaa

SEQ ID NO: 2321 - DNA, 15 bp, Homo sapiens
ttgatcgtatttgca

SEQ ID NO: 2322 - DNA, 15 bp, Homo sapiens
tttgatcgtatttgc

SEQ ID NO: 2323 - DNA, 15 bp, Homo sapiens
ctttgatcgtatttg

SEQ ID NO: 2324 - DNA, 15 bp, Homo sapiens
cctttgatcgtattt

SEQ ID NO: 2325 - DNA, 15 bp, Homo sapiens
acctttgatcgtatt

SEQ ID NO: 2326 - DNA, 15 bp, Homo sapiens
gacctttgatcgtat

SEQ ID NO: 2327 - DNA, 15 bp, Homo sapiens
agacctttgatcgta

SEQ ID NO: 2328 - DNA, 15 bp, Homo sapiens
aagacctttgatcgt

SEQ ID NO: 2329 - DNA, 15 bp, Homo sapiens
aaagacctttgatcg

SEQ ID NO: 2330 - DNA, 15 bp, Homo sapiens
aaaagacctttgatc

SEQ ID NO: 2331 - DNA, 15 bp, Homo sapiens
gaaaagacctttgat

SEQ ID NO: 2332 - DNA, 15 bp, Homo sapiens
tgaaaagacctttga

SEQ ID NO: 2333 - DNA, 15 bp, Homo sapiens
ctgaaaagacctttg

SEQ ID NO: 2334 - DNA, 15 bp, Homo sapiens
actgaaaagaccttt

SEQ ID NO: 2335 - DNA, 15 bp, Homo sapiens
tactgaaaagacctt

SEQ ID NO: 2336 - DNA, 15 bp, Homo sapiens
gtactgaaaagacct

SEQ ID NO: 2337 - DNA, 15 bp, Homo sapiens
agtactgaaaagacc

SEQ ID NO: 2338 - DNA, 15 bp, Homo sapiens
cagtactgaaaagac

SEQ ID NO: 2339 - DNA, 15 bp, Homo sapiens
tcagtactgaaaaga

SEQ ID NO: 2340 - DNA, 15 bp, Homo sapiens
atcagtactgaaaag

SEQ ID NO: 2341 - DNA, 15 bp, Homo sapiens
aatcagtactgaaaa

SEQ ID NO: 2342 - DNA, 15 bp, Homo sapiens
aaatcagtactgaaa

SEQ ID NO: 2343 - DNA, 15 bp, Homo sapiens
caaatcagtactgaa

SEQ ID NO: 2344 - DNA, 15 bp, Homo sapiens
tcaaatcagtactga

SEQ ID NO: 2345 - DNA, 15 bp, Homo sapiens
atcaaatcagtactg

SEQ ID NO: 2346 - DNA, 15 bp, Homo sapiens
catcaaatcagtact

SEQ ID NO: 2347 - DNA, 15 bp, Homo sapiens
tcatcaaatcagtac

SEQ ID NO: 2348 - DNA, 15 bp, Homo sapiens
atcatcaaatcagta

SEQ ID NO: 2349 - DNA, 15 bp, Homo sapiens
catcatcaaatcagt

SEQ ID NO: 2350 - DNA, 15 bp, Homo sapiens
gcatcatcaaatcag

SEQ ID NO: 2351 - DNA, 15 bp, Homo sapiens
agcatcatcaaatca

SEQ ID NO: 2352 - DNA, 15 bp, Homo sapiens
aagcatcatcaaatc

SEQ ID NO: 2353 - DNA, 15 bp, Homo sapiens
taagcatcatcaaat

SEQ ID NO: 2354 - DNA, 15 bp, Homo sapiens
ttaagcatcatcaaa

SEQ ID NO: 2355 - DNA, 15 bp, Homo sapiens
gttaagcatcatcaa

SEQ ID NO: 2356 - DNA, 15 bp, Homo sapiens
ggttaagcatcatca

SEQ ID NO: 2357 - DNA, 15 bp, Homo sapiens
tggttaagcatcatc

SEQ ID NO: 2358 - DNA, 15 bp, Homo sapiens
gtggttaagcatcat

SEQ ID NO: 2359 - DNA, 15 bp, Homo sapiens
tgtggttaagcatca

SEQ ID NO: 2360 - DNA, 15 bp, Homo sapiens
ctgtggttaagcatc

SEQ ID NO: 2361 - DNA, 15 bp, Homo sapiens
actgtggttaagcat

SEQ ID NO: 2362 - DNA, 15 bp, Homo sapiens
cactgtggttaagca

SEQ ID NO: 2363 - DNA, 15 bp, Homo sapiens
acactgtggttaagc

SEQ ID NO: 2364 - DNA, 15 bp, Homo sapiens
cacactgtggttaag

SEQ ID NO: 2365 - DNA, 15 bp, Homo sapiens
acacactgtggttaa

SEQ ID NO: 2366 - DNA, 15 bp, Homo sapiens
cacacactgtggtta

SEQ ID NO: 2367 - DNA, 15 bp, Homo sapiens
tcacacactgtggtt

SEQ ID NO: 2368 - DNA, 15 bp, Homo sapiens
ttcacacactgtggt

SEQ ID NO: 2369 - DNA, 15 bp, Homo sapiens
cttcacacactgtgg

SEQ ID NO: 2370 - DNA, 15 bp, Homo sapiens
tcttcacacactgtg

SEQ ID NO: 2371 - DNA, 15 bp, Homo sapiens
ttcttcacacactgt

SEQ ID NO: 2372 - DNA, 15 bp, Homo sapiens
attcttcacacactg

SEQ ID NO: 2373 - DNA, 15 bp, Homo sapiens
cattcttcacacact

SEQ ID NO: 2374 - DNA, 15 bp, Homo sapiens
tcattcttcacacac

SEQ ID NO: 2375 - DNA, 15 bp, Homo sapiens
ttcattcttcacaca

SEQ ID NO: 2376 - DNA, 15 bp, Homo sapiens
cttcattcttcacac

SEQ ID NO: 2377 - DNA, 15 bp, Homo sapiens
acttcattcttcaca

SEQ ID NO: 2378 - DNA, 15 bp, Homo sapiens
aacttcattcttcac

SEQ ID NO: 2379 - DNA, 15 bp, Homo sapiens
aaacttcattcttca

SEQ ID NO: 2380 - DNA, 15 bp, Homo sapiens
aaaacttcattcttc

SEQ ID NO: 2381 - DNA, 15 bp, Homo sapiens
aaaaacttcattctt

SEQ ID NO: 2382 - DNA, 15 bp, Homo sapiens
gaaaaacttcattct

SEQ ID NO: 2383 - DNA, 15 bp, Homo sapiens
tgaaaaacttcattc

SEQ ID NO: 2384 - DNA, 15 bp, Homo sapiens
atgaaaaacttcatt

SEQ ID NO: 2385 - DNA, 15 bp, Homo sapiens
aatgaaaaacttcat

SEQ ID NO: 2386 - DNA, 15 bp, Homo sapiens
taatgaaaaacttca

SEQ ID NO: 2387 - DNA, 15 bp, Homo sapiens
ctaatgaaaaacttc

SEQ ID NO: 2388 - DNA, 15 bp, Homo sapiens
tctaatgaaaaactt

SEQ ID NO: 2389 - DNA, 15 bp, Homo sapiens
ttctaatgaaaaact

SEQ ID NO: 2390 - DNA, 15 bp, Homo sapiens
tttctaatgaaaaac

SEQ ID NO: 2391 - DNA, 15 bp, Homo sapiens
atttctaatgaaaaa

SEQ ID NO: 2392 - DNA, 15 bp, Homo sapiens
aatttctaatgaaaa

SEQ ID NO: 2393 - DNA, 15 bp, Homo sapiens
taatttctaatgaaa

SEQ ID NO: 2394 - DNA, 15 bp, Homo sapiens
gtaatttctaatgaa

SEQ ID NO: 2395 - DNA, 15 bp, Homo sapiens
agtaatttctaatga

SEQ ID NO: 2396 - DNA, 15 bp, Homo sapiens
cagtaatttctaatg

SEQ ID NO: 2397 - DNA, 15 bp, Homo sapiens
ccagtaatttctaat

SEQ ID NO: 2398 - DNA, 15 bp, Homo sapiens
accagtaatttctaa

SEQ ID NO: 2399 - DNA, 15 bp, Homo sapiens
caccagtaatttcta

SEQ ID NO: 2400 - DNA, 15 bp, Homo sapiens
acaccagtaatttct

SEQ ID NO: 2401 - DNA, 15 bp, Homo sapiens
tacaccagtaatttc

SEQ ID NO: 2402 - DNA, 15 bp, Homo sapiens
ttacaccagtaattt

SEQ ID NO: 2403 - DNA, 15 bp, Homo sapiens
attacaccagtaatt

SEQ ID NO: 2404 - DNA, 15 bp, Homo sapiens
tattacaccagtaat

SEQ ID NO: 2405 - DNA, 15 bp, Homo sapiens
ctattacaccagtaa

SEQ ID NO: 2406 - DNA, 15 bp, Homo sapiens
tctattacaccagta

SEQ ID NO: 2407 - DNA, 15 bp, Homo sapiens
ctctattacaccagt

SEQ ID NO: 2408 - DNA, 15 bp, Homo sapiens
gctctattacaccag

SEQ ID NO: 2409 - DNA, 15 bp, Homo sapiens
tgctctattacacca

SEQ ID NO: 2410 - DNA, 15 bp, Homo sapiens
gtgctctattacacc

SEQ ID NO: 2411 - DNA, 15 bp, Homo sapiens
tgtgctctattacac

SEQ ID NO: 2412 - DNA, 15 bp, Homo sapiens
atgtgctctattaca

SEQ ID NO: 2413 - DNA, 15 bp, Homo sapiens
aatgtgctctattac

SEQ ID NO: 2414 - DNA, 15 bp, Homo sapiens
aaatgtgctctatta

SEQ ID NO: 2415 - DNA, 15 bp, Homo sapiens
aaaatgtgctctatt

SEQ ID NO: 2416 - DNA, 15 bp, Homo sapiens
gaaaatgtgctctat

SEQ ID NO: 2417 - DNA, 15 bp, Homo sapiens
tgaaaatgtgctcta

SEQ ID NO: 2418 - DNA, 15 bp, Homo sapiens
ctgaaaatgtgctct

SEQ ID NO: 2419 - DNA, 15 bp, Homo sapiens
cctgaaaatgtgctc

SEQ ID NO: 2420 - DNA, 15 bp, Homo sapiens
ccctgaaaatgtgct

SEQ ID NO: 2421 - DNA, 15 bp, Homo sapiens
tccctgaaaatgtgc

SEQ ID NO: 2422 - DNA, 15 bp, Homo sapiens
ttccctgaaaatgtg

SEQ ID NO: 2423 - DNA, 15 bp, Homo sapiens
cttccctgaaaatgt

SEQ ID NO: 2424 - DNA, 15 bp, Homo sapiens
tcttccctgaaaatg

SEQ ID NO: 2425 - DNA, 15 bp, Homo sapiens
atcttccctgaaaat

SEQ ID NO: 2426 - DNA, 15 bp, Homo sapiens
catcttccctgaaaa

SEQ ID NO: 2427 - DNA, 15 bp, Homo sapiens
acatcttccctgaaa

SEQ ID NO: 2428 - DNA, 15 bp, Homo sapiens
tacatcttccctgaa

SEQ ID NO: 2429 - DNA, 15 bp, Homo sapiens
atacatcttccctga

SEQ ID NO: 2430 - DNA, 15 bp, Homo sapiens
aatacatcttccctg

SEQ ID NO: 2431 - DNA, 15 bp, Homo sapiens
caatacatcttccct

SEQ ID NO: 2432 - DNA, 15 bp, Homo sapiens
acaatacatcttccc

SEQ ID NO: 2433 - DNA, 15 bp, Homo sapiens
aacaatacatcttcc

SEQ ID NO: 2434 - DNA, 15 bp, Homo sapiens
caacaatacatcttc

SEQ ID NO: 2435 - DNA, 15 bp, Homo sapiens
ccaacaatacatctt

SEQ ID NO: 2436 - DNA, 15 bp, Homo sapiens
tccaacaatacatct

SEQ ID NO: 2437 - DNA, 15 bp, Homo sapiens
gtccaacaatacatc

SEQ ID NO: 2438 - DNA, 15 bp, Homo sapiens
agtccaacaatacat

SEQ ID NO: 2439 - DNA, 15 bp, Homo sapiens
tagtccaacaataca

SEQ ID NO: 2440 - DNA, 15 bp, Homo sapiens
atagtccaacaatac

SEQ ID NO: 2441 - DNA, 15 bp, Homo sapiens
aatagtccaacaata

SEQ ID NO: 2442 - DNA, 15 bp, Homo sapiens
taatagtccaacaat

SEQ ID NO: 2443 - DNA, 15 bp, Homo sapiens
gtaatagtccaacaa

SEQ ID NO: 2444 - DNA, 15 bp, Homo sapiens
tgtaatagtccaaca

SEQ ID NO: 2445 - DNA, 15 bp, Homo sapiens
ttgtaatagtccaac

SEQ ID NO: 2446 - DNA, 15 bp, Homo sapiens
attgtaatagtccaa

SEQ ID NO: 2447 - DNA, 15 bp, Homo sapiens
aattgtaatagtcca

SEQ ID NO: 2448 - DNA, 15 bp, Homo sapiens
gaattgtaatagtcc

SEQ ID NO: 2449 - DNA, 15 bp, Homo sapiens
tgaattgtaatagtc

SEQ ID NO: 2450 - DNA, 15 bp, Homo sapiens
atgaattgtaatagt

SEQ ID NO: 2451 - DNA, 15 bp, Homo sapiens
catgaattgtaatag

SEQ ID NO: 2452 - DNA, 15 bp, Homo sapiens
gcatgaattgtaata

SEQ ID NO: 2453 - DNA, 15 bp, Homo sapiens
agcatgaattgtaat

SEQ ID NO: 2454 - DNA, 15 bp, Homo sapiens
gagcatgaattgtaa

SEQ ID NO: 2455 - DNA, 15 bp, Homo sapiens
agagcatgaattgta

SEQ ID NO: 2456 - DNA, 15 bp, Homo sapiens
aagagcatgaattgt

SEQ ID NO: 2457 - DNA, 15 bp, Homo sapiens
gaagagcatgaattg

SEQ ID NO: 2458 - DNA, 15 bp, Homo sapiens
ggaagagcatgaatt

SEQ ID NO: 2459 - DNA, 15 bp, Homo sapiens
gggaagagcatgaat

SEQ ID NO: 2460 - DNA, 15 bp, Homo sapiens
ggggaagagcatgaa

SEQ ID NO: 2461 - DNA, 15 bp, Homo sapiens
gggggaagagcatga

SEQ ID NO: 2462 - DNA, 15 bp, Homo sapiens
tgggggaagagcatg

SEQ ID NO: 2463 - DNA, 15 bp, Homo sapiens
gtgggggaagagcat

SEQ ID NO: 2464 - DNA, 15 bp, Homo sapiens
ggtgggggaagagca

SEQ ID NO: 2465 - DNA, 15 bp, Homo sapiens
tggtgggggaagagc

SEQ ID NO: 2466 - DNA, 15 bp, Homo sapiens
atggtgggggaagag

SEQ ID NO: 2467 - DNA, 15 bp, Homo sapiens
tatggtgggggaaga

SEQ ID NO: 2468 - DNA, 15 bp, Homo sapiens
atatggtgggggaag

SEQ ID NO: 2469 - DNA, 15 bp, Homo sapiens
gatatggtgggggaa

SEQ ID NO: 2470 - DNA, 15 bp, Homo sapiens
ggatatggtggggga

SEQ ID NO: 2471 - DNA, 15 bp, Homo sapiens
gggatatggtggggg

SEQ ID NO: 2472 - DNA, 15 bp, Homo sapiens
agggatatggtgggg

SEQ ID NO: 2473 - DNA, 15 bp, Homo sapiens
tagggatatggtggg

SEQ ID NO: 2474 - DNA, 15 bp, Homo sapiens
gtagggatatggtgg

SEQ ID NO: 2475 - DNA, 15 bp, Homo sapiens
ggtagggatatggtg

SEQ ID NO: 2476 - DNA, 15 bp, Homo sapiens
gggtagggatatggt

SEQ ID NO: 2477 - DNA, 15 bp, Homo sapiens
agggtagggatatgg

SEQ ID NO: 2478 - DNA, 15 bp, Homo sapiens
gagggtagggatatg

SEQ ID NO: 2479 - DNA, 15 bp, Homo sapiens
agagggtagggatat

SEQ ID NO: 2480 - DNA, 15 bp, Homo sapiens
tagagggtagggata

SEQ ID NO: 2481 - DNA, 15 bp, Homo sapiens
atagagggtagggat

SEQ ID NO: 2482 - DNA, 15 bp, Homo sapiens
tatagagggtaggga

SEQ ID NO: 2483 - DNA, 15 bp, Homo sapiens
atatagagggtaggg

SEQ ID NO: 2484 - DNA, 15 bp, Homo sapiens
aatatagagggtagg

SEQ ID NO: 2485 - DNA, 15 bp, Homo sapiens
gaatatagagggtag

SEQ ID NO: 2486 - DNA, 15 bp, Homo sapiens
ggaatatagagggta

SEQ ID NO: 2487 - DNA, 15 bp, Homo sapiens
gggaatatagagggt

SEQ ID NO: 2488 - DNA, 15 bp, Homo sapiens
ggggaatatagaggg

SEQ ID NO: 2489 - DNA, 15 bp, Homo sapiens
tggggaatatagagg

SEQ ID NO: 2490 - DNA, 15 bp, Homo sapiens
atggggaatatagag

SEQ ID NO: 2491 - DNA, 15 bp, Homo sapiens
gatggggaatataga

SEQ ID NO: 2492 - DNA, 15 bp, Homo sapiens
ggatggggaatatag

SEQ ID NO: 2493 - DNA, 15 bp, Homo sapiens
gggatggggaatata

SEQ ID NO: 2494 - DNA, 15 bp, Homo sapiens
ggggatggggaatat

SEQ ID NO: 2495 - DNA, 15 bp, Homo sapiens
aggggatggggaata

SEQ ID NO: 2496 - DNA, 15 bp, Homo sapiens
taggggatggggaat

SEQ ID NO: 2497 - DNA, 15 bp, Homo sapiens
ataggggatggggaa

SEQ ID NO: 2498 - DNA, 15 bp, Homo sapiens
aataggggatgggga

SEQ ID NO: 2499 - DNA, 15 bp, Homo sapiens
aaataggggatgggg

SEQ ID NO: 2500 - DNA, 15 bp, Homo sapiens
gaaataggggatggg

SEQ ID NO: 2501 - DNA, 15 bp, Homo sapiens
ggaaataggggatgg

SEQ ID NO: 2502 - DNA, 15 bp, Homo sapiens
aggaaataggggatg

SEQ ID NO: 2503 - DNA, 15 bp, Homo sapiens
gaggaaataggggat

SEQ ID NO: 2504 - DNA, 15 bp, Homo sapiens
ggaggaaatagggga

SEQ ID NO: 2505 - DNA, 15 bp, Homo sapiens
tggaggaaatagggg

SEQ ID NO: 2506 - DNA, 15 bp, Homo sapiens
gtggaggaaataggg

SEQ ID NO: 2507 - DNA, 15 bp, Homo sapiens
ggtggaggaaatagg

SEQ ID NO: 2508 - DNA, 15 bp, Homo sapiens
aggtggaggaaatag

SEQ ID NO: 2509 - DNA, 15 bp, Homo sapiens
aaggtggaggaaata

SEQ ID NO: 2510 - DNA, 15 bp, Homo sapiens
gaaggtggaggaaat

SEQ ID NO: 2511 - DNA, 15 bp, Homo sapiens
ggaaggtggaggaaa

SEQ ID NO: 2512 - DNA, 15 bp, Homo sapiens
aggaaggtggaggaa

SEQ ID NO: 2513 - DNA, 15 bp, Homo sapiens
gaggaaggtggagga

SEQ ID NO: 2514 - DNA, 15 bp, Homo sapiens
ggaggaaggtggagg

SEQ ID NO: 2515 - DNA, 15 bp, Homo sapiens
aggaggaaggtggag

SEQ ID NO: 2516 - DNA, 15 bp, Homo sapiens
aaggaggaaggtgga

SEQ ID NO: 2517 - DNA, 15 bp, Homo sapiens
caaggaggaaggtgg

SEQ ID NO: 2518 - DNA, 15 bp, Homo sapiens
ccaaggaggaaggtg

SEQ ID NO: 2519 - DNA, 15 bp, Homo sapiens
cccaaggaggaaggt

SEQ ID NO: 2520 - DNA, 15 bp, Homo sapiens
tcccaaggaggaagg

SEQ ID NO: 2521 - DNA, 15 bp, Homo sapiens
gtcccaaggaggaag

SEQ ID NO: 2522 - DNA, 15 bp, Homo sapiens
ggtcccaaggaggaa

SEQ ID NO: 2523 - DNA, 15 bp, Homo sapiens
aggtcccaaggagga

SEQ ID NO: 2524 - DNA, 15 bp, Homo sapiens
gaggtcccaaggagg

SEQ ID NO: 2525 - DNA, 15 bp, Homo sapiens
tgaggtcccaaggag

SEQ ID NO: 2526 - DNA, 15 bp, Homo sapiens
gtgaggtcccaagga

SEQ ID NO: 2527 - DNA, 15 bp, Homo sapiens
agtgaggtcccaagg

SEQ ID NO: 2528 - DNA, 15 bp, Homo sapiens
cagtgaggtcccaag

SEQ ID NO: 2529 - DNA, 15 bp, Homo sapiens
tcagtgaggtcccaa

SEQ ID NO: 2530 - DNA, 15 bp, Homo sapiens
ttcagtgaggtccca

SEQ ID NO: 2531 - DNA, 15 bp, Homo sapiens
tttcagtgaggtccc

SEQ ID NO: 2532 - DNA, 15 bp, Homo sapiens
ttttcagtgaggtcc

SEQ ID NO: 2533 - DNA, 15 bp, Homo sapiens
gttttcagtgaggtc

SEQ ID NO: 2534 - DNA, 15 bp, Homo sapiens
ggttttcagtgaggt

SEQ ID NO: 2535 - DNA, 15 bp, Homo sapiens
aggttttcagtgagg

SEQ ID NO: 2536 - DNA, 15 bp, Homo sapiens
caggttttcagtgag

SEQ ID NO: 2537 - DNA, 15 bp, Homo sapiens
tcaggttttcagtga

SEQ ID NO: 2538 - DNA, 15 bp, Homo sapiens
ttcaggttttcagtg

SEQ ID NO: 2539 - DNA, 15 bp, Homo sapiens
tttcaggttttcagt

SEQ ID NO: 2540 - DNA, 15 bp, Homo sapiens
atttcaggttttcag

SEQ ID NO: 2541 - DNA, 15 bp, Homo sapiens
catttcaggttttca

SEQ ID NO: 2542 - DNA, 15 bp, Homo sapiens
gcatttcaggttttc

SEQ ID NO: 2543 - DNA, 15 bp, Homo sapiens
agcatttcaggtttt

SEQ ID NO: 2544 - DNA, 15 bp, Homo sapiens
gagcatttcaggttt

SEQ ID NO: 2545 - DNA, 15 bp, Homo sapiens
agagcatttcaggtt

SEQ ID NO: 2546 - DNA, 15 bp, Homo sapiens
cagagcatttcaggt

SEQ ID NO: 2547 - DNA, 15 bp, Homo sapiens
tcagagcatttcagg

SEQ ID NO: 2548 - DNA, 15 bp, Homo sapiens
ttcagagcatttcag

SEQ ID NO: 2549 - DNA, 15 bp, Homo sapiens
tttcagagcatttca

SEQ ID NO: 2550 - DNA, 15 bp, Homo sapiens
ttttcagagcatttc

SEQ ID NO: 2551 - DNA, 15 bp, Homo sapiens
gttttcagagcattt

SEQ ID NO: 2552 - DNA, 15 bp, Homo sapiens
ggttttcagagcatt

SEQ ID NO: 2553 - DNA, 15 bp, Homo sapiens
aggttttcagagcat

SEQ ID NO: 2554 - DNA, 15 bp, Homo sapiens
caggttttcagagca

SEQ ID NO: 2555 - DNA, 15 bp, Homo sapiens
tcaggttttcagagc

SEQ ID NO: 2556 - DNA, 15 bp, Homo sapiens
ttcaggttttcagag

SEQ ID NO: 2557 - DNA, 15 bp, Homo sapiens
tttcaggttttcaga

SEQ ID NO: 2558 - DNA, 15 bp, Homo sapiens
ccatttcaggttttc

SEQ ID NO: 2559 - DNA, 15 bp, Homo sapiens
gccatttcaggtttt

SEQ ID NO: 2560 - DNA, 15 bp, Homo sapiens
cgccatttcaggttt

SEQ ID NO: 2561 - DNA, 15 bp, Homo sapiens
acgccatttcaggtt

SEQ ID NO: 2562 - DNA, 15 bp, Homo sapiens
aacgccatttcaggt

SEQ ID NO: 2563 - DNA, 15 bp, Homo sapiens
aaacgccatttcagg

SEQ ID NO: 2564 - DNA, 15 bp, Homo sapiens
aaaacgccatttcag

SEQ ID NO: 2565 - DNA, 15 bp, Homo sapiens
caaaacgccatttca

SEQ ID NO: 2566 - DNA, 15 bp, Homo sapiens
ccaaaacgccatttc

SEQ ID NO: 2567 - DNA, 15 bp, Homo sapiens
tccaaaacgccattt

SEQ ID NO: 2568 - DNA, 15 bp, Homo sapiens
gtccaaaacgccatt

SEQ ID NO: 2569 - DNA, 15 bp, Homo sapiens
agtccaaaacgccat

SEQ ID NO: 2570 - DNA, 15 bp, Homo sapiens
cagtccaaaacgcca

SEQ ID NO: 2571 - DNA, 15 bp, Homo sapiens
gcagtccaaaacgcc

SEQ ID NO: 2572 - DNA, 15 bp, Homo sapiens
agcagtccaaaacgc

SEQ ID NO: 2573 - DNA, 15 bp, Homo sapiens
cagcagtccaaaacg

SEQ ID NO: 2574 - DNA, 15 bp, Homo sapiens
gcagcagtccaaaac

SEQ ID NO: 2575 - DNA, 15 bp, Homo sapiens
tgcagcagtccaaaa

SEQ ID NO: 2576 - DNA, 15 bp, Homo sapiens
ttgcagcagtccaaa

SEQ ID NO: 2577 - DNA, 15 bp, Homo sapiens
cttgcagcagtccaa

SEQ ID NO: 2578 - DNA, 15 bp, Homo sapiens
ccttgcagcagtcca

SEQ ID NO: 2579 - DNA, 15 bp, Homo sapiens
cccttgcagcagtcc

SEQ ID NO: 2580 - DNA, 15 bp, Homo sapiens
tcccttgcagcagtc

SEQ ID NO: 2581 - DNA, 15 bp, Homo sapiens
ttcccttgcagcagt

SEQ ID NO: 2582 - DNA, 15 bp, Homo sapiens
tttcccttgcagcag

SEQ ID NO: 2583 - DNA, 15 bp, Homo sapiens
gtttcccttgcagca

SEQ ID NO: 2584 - DNA, 15 bp, Homo sapiens
agtttcccttgcagc

SEQ ID NO: 2585 - DNA, 15 bp, Homo sapiens
cagtttcccttgcag

SEQ ID NO: 2586 - DNA, 15 bp, Homo sapiens
acagtttcccttgca

SEQ ID NO: 2587 - DNA, 15 bp, Homo sapiens
cacagtttcccttgc

SEQ ID NO: 2588 - DNA, 15 bp, Homo sapiens
tcacagtttcccttg

SEQ ID NO: 2589 - DNA, 15 bp, Homo sapiens
atcacagtttccctt

SEQ ID NO: 2590 - DNA, 15 bp, Homo sapiens
gatcacagtttccct

SEQ ID NO: 2591 - DNA, 15 bp, Homo sapiens
agatcacagtttccc

SEQ ID NO: 2592 - DNA, 15 bp, Homo sapiens
aagatcacagtttcc

SEQ ID NO: 2593 - DNA, 15 bp, Homo sapiens
taagatcacagtttc

SEQ ID NO: 2594 - DNA, 15 bp, Homo sapiens
ttaagatcacagttt

SEQ ID NO: 2595 - DNA, 15 bp, Homo sapiens
gttaagatcacagtt

SEQ ID NO: 2596 - DNA, 15 bp, Homo sapiens
tgttaagatcacagt

SEQ ID NO: 2597 - DNA, 15 bp, Homo sapiens
ttgttaagatcacag

SEQ ID NO: 2598 - DNA, 15 bp, Homo sapiens
gttgttaagatcaca

SEQ ID NO: 2599 - DNA, 15 bp, Homo sapiens
tgttgttaagatcac

SEQ ID NO: 2600 - DNA, 15 bp, Homo sapiens
atgttgttaagatca

SEQ ID NO: 2601 - DNA, 15 bp, Homo sapiens
gatgttgttaagatc

SEQ ID NO: 2602 - DNA, 15 bp, Homo sapiens
tgatgttgttaagat

SEQ ID NO: 2603 - DNA, 15 bp, Homo sapiens
ctgatgttgttaaga

SEQ ID NO: 2604 - DNA, 15 bp, Homo sapiens
actgatgttgttaag

SEQ ID NO: 2605 - DNA, 15 bp, Homo sapiens
cactgatgttgttaa

SEQ ID NO: 2606 - DNA, 15 bp, Homo sapiens
gcactgatgttgtta

SEQ ID NO: 2607 - DNA, 15 bp, Homo sapiens
cgcactgatgttgtt

SEQ ID NO: 2608 - DNA, 15 bp, Homo sapiens
ccgcactgatgttgt

SEQ ID NO: 2609 - DNA, 15 bp, Homo sapiens
gccgcactgatgttg

SEQ ID NO: 2610 - DNA, 15 bp, Homo sapiens
agccgcactgatgtt

SEQ ID NO: 2611 - DNA, 15 bp, Homo sapiens
gagccgcactgatgt

SEQ ID NO: 2612 - DNA, 15 bp, Homo sapiens
tgagccgcactgatg

SEQ ID NO: 2613 - DNA, 15 bp, Homo sapiens
ctgagccgcactgat

SEQ ID NO: 2614 - DNA, 15 bp, Homo sapiens
tctgagccgcactga

SEQ ID NO: 2615 - DNA, 15 bp, Homo sapiens
gtctgagccgcactg

SEQ ID NO: 2616 - DNA, 15 bp, Homo sapiens
tgtctgagccgcact

SEQ ID NO: 2617 - DNA, 15 bp, Homo sapiens
atgtctgagccgcac

SEQ ID NO: 2618 - DNA, 15 bp, Homo sapiens
catgtctgagccgca

SEQ ID NO: 2619 - DNA, 15 bp, Homo sapiens
tcatgtctgagccgc

SEQ ID NO: 2620 - DNA, 15 bp, Homo sapiens
gtcatgtctgagccg

SEQ ID NO: 2621 - DNA, 15 bp, Homo sapiens
ggtcatgtctgagcc

SEQ ID NO: 2622 - DNA, 15 bp, Homo sapiens
tggtcatgtctgagc

SEQ ID NO: 2623 - DNA, 15 bp, Homo sapiens
gtggtcatgtctgag

SEQ ID NO: 2624 - DNA, 15 bp, Homo sapiens
ggtggtcatgtctga

SEQ ID NO: 2625 - DNA, 15 bp, Homo sapiens
tggtggtcatgtctg

SEQ ID NO: 2626 - DNA, 15 bp, Homo sapiens
atggtggtcatgtct

SEQ ID NO: 2627 - DNA, 15 bp, Homo sapiens
catggtggtcatgtc

SEQ ID NO: 2628 - DNA, 15 bp, Homo sapiens
acatggtggtcatgt

SEQ ID NO: 2629 - DNA, 15 bp, Homo sapiens
cacatggtggtcatg

SEQ ID NO: 2630 - DNA, 15 bp, Homo sapiens
tcacatggtggtcat

SEQ ID NO: 2631 - DNA, 15 bp, Homo sapiens
ctcacatggtggtca

SEQ ID NO: 2632 - DNA, 15 bp, Homo sapiens
cctcacatggtggtc

SEQ ID NO: 2633 - DNA, 15 bp, Homo sapiens
ccctcacatggtggt

SEQ ID NO: 2634 - DNA, 15 bp, Homo sapiens
gccctcacatggtgg

SEQ ID NO: 2635 - DNA, 15 bp, Homo sapiens
tgccctcacatggtg

SEQ ID NO: 2636 - DNA, 15 bp, Homo sapiens
ttgccctcacatggt

SEQ ID NO: 2637 - DNA, 15 bp, Homo sapiens
tttgccctcacatgg

SEQ ID NO: 2638 - DNA, 15 bp, Homo sapiens
ctttgccctcacatg

SEQ ID NO: 2639 - DNA, 15 bp, Homo sapiens
cctttgccctcacat

SEQ ID NO: 2640 - DNA, 15 bp, Homo sapiens
acctttgccctcaca

SEQ ID NO: 2641 - DNA, 15 bp, Homo sapiens
cacctttgccctcac

SEQ ID NO: 2642 - DNA, 15 bp, Homo sapiens
ccacctttgccctca

SEQ ID NO: 2643 - DNA, 15 bp, Homo sapiens
cccacctttgccctc

SEQ ID NO: 2644 - DNA, 15 bp, Homo sapiens
ccccacctttgccct

SEQ ID NO: 2645 - DNA, 15 bp, Homo sapiens
gccccacctttgccc

SEQ ID NO: 2646 - DNA, 15 bp, Homo sapiens
agccccacctttgcc

SEQ ID NO: 2647 - DNA, 15 bp, Homo sapiens
cagccccacctttgc

SEQ ID NO: 2648 - DNA, 15 bp, Homo sapiens
ccagccccacctttg

SEQ ID NO: 2649 - DNA, 15 bp, Homo sapiens
accagccccaccttt

SEQ ID NO: 2650 - DNA, 15 bp, Homo sapiens
caccagccccacctt

SEQ ID NO: 2651 - DNA, 15 bp, Homo sapiens
acaccagccccacct

SEQ ID NO: 2652 - DNA, 15 bp, Homo sapiens
tacaccagccccacc

SEQ ID NO: 2653 - DNA, 15 bp, Homo sapiens
ttacaccagccccac

SEQ ID NO: 2654 - DNA, 15 bp, Homo sapiens
cttacaccagcccca

SEQ ID NO: 2655 - DNA, 15 bp, Homo sapiens
acttacaccagcccc

SEQ ID NO: 2656 - DNA, 15 bp, Homo sapiens
cacttacaccagccc

SEQ ID NO: 2657 - DNA, 15 bp, Homo sapiens
tcacttacaccagcc

SEQ ID NO: 2658 - DNA, 15 bp, Homo sapiens
atcacttacaccagc

SEQ ID NO: 2659 - DNA, 15 bp, Homo sapiens
catcacttacaccag

SEQ ID NO: 2660 - DNA, 15 bp, Homo sapiens
acatcacttacacca

SEQ ID NO: 2661 - DNA, 15 bp, Homo sapiens
aacatcacttacacc

SEQ ID NO: 2662 - DNA, 15 bp, Homo sapiens
caacatcacttacac

SEQ ID NO: 2663 - DNA, 15 bp, Homo sapiens
acaacatcacttaca

SEQ ID NO: 2664 - DNA, 15 bp, Homo sapiens
aacaacatcacttac

SEQ ID NO: 2665 - DNA, 15 bp, Homo sapiens
taacaacatcactta

SEQ ID NO: 2666 - DNA, 15 bp, Homo sapiens
ttaacaacatcactt

SEQ ID NO: 2667 - DNA, 15 bp, Homo sapiens
tttaacaacatcact

SEQ ID NO: 2668 - DNA, 15 bp, Homo sapiens
gtttaacaacatcac

SEQ ID NO: 2669 - DNA, 15 bp, Homo sapiens
ggtttaacaacatca

SEQ ID NO: 2670 - DNA, 15 bp, Homo sapiens
aggtttaacaacatc

SEQ ID NO: 2671 - DNA, 15 bp, Homo sapiens
caggtttaacaacat

SEQ ID NO: 2672 - DNA, 15 bp, Homo sapiens
acaggtttaacaaca

SEQ ID NO: 2673 - DNA, 15 bp, Homo sapiens
tacaggtttaacaac

SEQ ID NO: 2674 - DNA, 15 bp, Homo sapiens
ttacaggtttaacaa

SEQ ID NO: 2675 - DNA, 15 bp, Homo sapiens
tttacaggtttaaca

SEQ ID NO: 2676 - DNA, 15 bp, Homo sapiens
ttttacaggtttaac

SEQ ID NO: 2677 - DNA, 15 bp, Homo sapiens
tttttacaggtttaa

SEQ ID NO: 2678 - DNA, 15 bp, Homo sapiens
atttttacaggttta

SEQ ID NO: 2679 - DNA, 15 bp, Homo sapiens
tatttttacaggttt

SEQ ID NO: 2680 - DNA, 15 bp, Homo sapiens
ttatttttacaggtt

SEQ ID NO: 2681 - DNA, 15 bp, Homo sapiens
tttatttttacaggt

SEQ ID NO: 2682 - DNA, 15 bp, Homo sapiens
gtttatttttacagg

SEQ ID NO: 2683 - DNA, 15 bp, Homo sapiens
ggtttatttttacag

SEQ ID NO: 2684 - DNA, 15 bp, Homo sapiens
tggtttatttttaca

SEQ ID NO: 2685 - DNA, 15 bp, Homo sapiens
atggtttatttttac

SEQ ID NO: 2686 - DNA, 15 bp, Homo sapiens
catggtttattttta

SEQ ID NO: 2687 - DNA, 15 bp, Homo sapiens
tcatggtttattttt

SEQ ID NO: 2688 - DNA, 15 bp, Homo sapiens
ttcatggtttatttt

SEQ ID NO: 2689 - DNA, 15 bp, Homo sapiens
tttcatggtttattt

SEQ ID NO: 2690 - DNA, 15 bp, Homo sapiens
ttttcatggtttatt

SEQ ID NO: 2691 - DNA, 15 bp, Homo sapiens
gttttcatggtttat

SEQ ID NO: 2692 - DNA, 15 bp, Homo sapiens
ggttttcatggttta

SEQ ID NO: 2693 - DNA, 15 bp, Homo sapiens
aggttttcatggttt

SEQ ID NO: 2694 - DNA, 15 bp, Homo sapiens
caggttttcatggtt

SEQ ID NO: 2695 - DNA, 15 bp, Homo sapiens
ccaggttttcatggt

SEQ ID NO: 2696 - DNA, 15 bp, Homo sapiens
cccaggttttcatgg

SEQ ID NO: 2697 - DNA, 15 bp, Homo sapiens
ccccaggttttcatg

SEQ ID NO: 2698 - DNA, 15 bp, Homo sapiens
tccccaggttttcat

SEQ ID NO: 2699 - DNA, 15 bp, Homo sapiens
atccccaggttttca

SEQ ID NO: 2700 - DNA, 15 bp, Homo sapiens
aatccccaggttttc

SEQ ID NO: 2701 - DNA, 15 bp, Homo sapiens
aaatccccaggtttt

SEQ ID NO: 2702 - DNA, 15 bp, Homo sapiens
taaatccccaggttt

SEQ ID NO: 2703 - DNA, 15 bp, Homo sapiens
gtaaatccccaggtt

SEQ ID NO: 2704 - DNA, 15 bp, Homo sapiens
agtaaatccccaggt

SEQ ID NO: 2705 - DNA, 15 bp, Homo sapiens
cagtaaatccccagg

SEQ ID NO: 2706 - DNA, 15 bp, Homo sapiens
acagtaaatccccag

SEQ ID NO: 2707 - DNA, 15 bp, Homo sapiens
cacagtaaatcccca

SEQ ID NO: 2708 - DNA, 15 bp, Homo sapiens
tcacagtaaatcccc

SEQ ID NO: 2709 - DNA, 15 bp, Homo sapiens
atcacagtaaatccc

SEQ ID NO: 2710 - DNA, 15 bp, Homo sapiens
aatcacagtaaatcc

SEQ ID NO: 2711 - DNA, 15 bp, Homo sapiens
aaatcacagtaaatc

SEQ ID NO: 2712 - DNA, 15 bp, Homo sapiens
caaatcacagtaaat

SEQ ID NO: 2713 - DNA, 15 bp, Homo sapiens
ccaaatcacagtaaa

SEQ ID NO: 2714 - DNA, 15 bp, Homo sapiens
cccaaatcacagtaa

SEQ ID NO: 2715 - DNA, 15 bp, Homo sapiens
ccccaaatcacagta

SEQ ID NO: 2716 - DNA, 15 bp, Homo sapiens
tccccaaatcacagt

SEQ ID NO: 2717 - DNA, 15 bp, Homo sapiens
ctccccaaatcacag

SEQ ID NO: 2718 - DNA, 15 bp, Homo sapiens
actccccaaatcaca

SEQ ID NO: 2719 - DNA, 15 bp, Homo sapiens
cactccccaaatcac

SEQ ID NO: 2720 - DNA, 15 bp, Homo sapiens
tcactccccaaatca

SEQ ID NO: 2721 - DNA, 15 bp, Homo sapiens
ttcactccccaaatc

SEQ ID NO: 2722 - DNA, 15 bp, Homo sapiens
tttcactccccaaat

SEQ ID NO: 2723 - DNA, 15 bp, Homo sapiens
gtttcactccccaaa

SEQ ID NO: 2724 - DNA, 15 bp, Homo sapiens
tgtttcactccccaa

SEQ ID NO: 2725 - DNA, 15 bp, Homo sapiens
ttgtttcactcccca

SEQ ID NO: 2726 - DNA, 15 bp, Homo sapiens
tttgtttcactcccc

SEQ ID NO: 2727 - DNA, 15 bp, Homo sapiens
atttgtttcactccc

SEQ ID NO: 2728 - DNA, 15 bp, Homo sapiens
aatttgtttcactcc

SEQ ID NO: 2729 - DNA, 15 bp, Homo sapiens
aaatttgtttcactc

SEQ ID NO: 2730 - DNA, 15 bp, Homo sapiens
taaatttgtttcact

SEQ ID NO: 2731 - DNA, 15 bp, Homo sapiens
gtaaatttgtttcac

SEQ ID NO: 2732 - DNA, 15 bp, Homo sapiens
ggtaaatttgtttca

SEQ ID NO: 2733 - DNA, 15 bp, Homo sapiens
tggtaaatttgtttc

SEQ ID NO: 2734 - DNA, 15 bp, Homo sapiens
gtggtaaatttgttt

SEQ ID NO: 2735 - DNA, 15 bp, Homo sapiens
agtggtaaatttgtt

SEQ ID NO: 2736 - DNA, 15 bp, Homo sapiens
cagtggtaaatttgt

SEQ ID NO: 2737 - DNA, 15 bp, Homo sapiens
ccagtggtaaatttg

SEQ ID NO: 2738 - DNA, 15 bp, Homo sapiens
gccagtggtaaattt

SEQ ID NO: 2739 - DNA, 15 bp, Homo sapiens
ggccagtggtaaatt

SEQ ID NO: 2740 - DNA, 15 bp, Homo sapiens
cggccagtggtaaat

SEQ ID NO: 2741 - DNA, 15 bp, Homo sapiens
tcggccagtggtaaa

SEQ ID NO: 2742 - DNA, 15 bp, Homo sapiens
ttcggccagtggtaa

SEQ ID NO: 2743 - DNA, 15 bp, Homo sapiens
tttcggccagtggta

SEQ ID NO: 2744 - DNA, 15 bp, Homo sapiens
ttttcggccagtggt

SEQ ID NO: 2745 - DNA, 15 bp, Homo sapiens
gttttcggccagtgg

SEQ ID NO: 2746 - DNA, 15 bp, Homo sapiens
agttttcggccagtg

SEQ ID NO: 2747 - DNA, 15 bp, Homo sapiens
aagttttcggccagt

SEQ ID NO: 2748 - DNA, 15 bp, Homo sapiens
caagttttcggccag

SEQ ID NO: 2749 - DNA, 15 bp, Homo sapiens
tcaagttttcggcca

SEQ ID NO: 2750 - DNA, 15 bp, Homo sapiens
ttcaagttttcggcc

SEQ ID NO: 2751 - DNA, 15 bp, Homo sapiens
tttcaagttttcggc

SEQ ID NO: 2752 - DNA, 15 bp, Homo sapiens
ttttcaagttttcgg

SEQ ID NO: 2753 - DNA, 15 bp, Homo sapiens
tttttcaagttttcg

SEQ ID NO: 2754 - DNA, 15 bp, Homo sapiens
atttttcaagttttc

SEQ ID NO: 2755 - DNA, 15 bp, Homo sapiens
catttttcaagtttt

SEQ ID NO: 2756 - DNA, 15 bp, Homo sapiens
ccatttttcaagttt

SEQ ID NO: 2757 - DNA, 15 bp, Homo sapiens
tccatttttcaagtt

SEQ ID NO: 2758 - DNA, 15 bp, Homo sapiens
ctccatttttcaagt

SEQ ID NO: 2759 - DNA, 15 bp, Homo sapiens
actccatttttcaag

SEQ ID NO: 2760 - DNA, 15 bp, Homo sapiens
tactccatttttcaa

SEQ ID NO: 2761 - DNA, 15 bp, Homo sapiens
gtactccatttttca

SEQ ID NO: 2762 - DNA, 15 bp, Homo sapiens
tgtactccatttttc

SEQ ID NO: 2763 - DNA, 15 bp, Homo sapiens
ttgtactccattttt

SEQ ID NO: 2764 - DNA, 15 bp, Homo sapiens
attgtactccatttt

SEQ ID NO: 2765 - DNA, 15 bp, Homo sapiens
cattgtactccattt

SEQ ID NO: 2766 - DNA, 15 bp, Homo sapiens
acattgtactccatt

SEQ ID NO: 2767 - DNA, 15 bp, Homo sapiens
cacattgtactccat

SEQ ID NO: 2768 - DNA, 15 bp, Homo sapiens
acacattgtactcca

SEQ ID NO: 2769 - DNA, 15 bp, Homo sapiens
tacacattgtactcc

SEQ ID NO: 2770 - DNA, 15 bp, Homo sapiens
ctacacattgtactc

SEQ ID NO: 2771 - DNA, 15 bp, Homo sapiens
tctacacattgtact

SEQ ID NO: 2772 - DNA, 15 bp, Homo sapiens
atctacacattgtac

SEQ ID NO: 2773 - DNA, 15 bp, Homo sapiens
gatctacacattgta

SEQ ID NO: 2774 - DNA, 15 bp, Homo sapiens
tgatctacacattgt

SEQ ID NO: 2775 - DNA, 15 bp, Homo sapiens
ctgatctacacattg

SEQ ID NO: 2776 - DNA, 15 bp, Homo sapiens
tctgatctacacatt

SEQ ID NO: 2777 - DNA, 15 bp, Homo sapiens
ttctgatctacacat

SEQ ID NO: 2778 - DNA, 15 bp, Homo sapiens
cttctgatctacaca

SEQ ID NO: 2779 - DNA, 15 bp, Homo sapiens
tcttctgatctacac

SEQ ID NO: 2780 - DNA, 15 bp, Homo sapiens
ttcttctgatctaca

SEQ ID NO: 2781 - DNA, 15 bp, Homo sapiens
tttcttctgatctac

SEQ ID NO: 2782 - DNA, 15 bp, Homo sapiens
ttttcttctgatcta

SEQ ID NO: 2783 - DNA, 15 bp, Homo sapiens
cttttcttctgatct

SEQ ID NO: 2784 - DNA, 15 bp, Homo sapiens
tcttttcttctgatc

SEQ ID NO: 2785 - DNA, 15 bp, Homo sapiens
ttcttttcttctgat

SEQ ID NO: 2786 - DNA, 15 bp, Homo sapiens
tttcttttcttctga

SEQ ID NO: 2787 - DNA, 15 bp, Homo sapiens
ctttcttttcttctg

SEQ ID NO: 2788 - DNA, 15 bp, Homo sapiens
gctttcttttcttct

SEQ ID NO: 2789 - DNA, 15 bp, Homo sapiens
ggctttcttttcttc

SEQ ID NO: 2790 - DNA, 15 bp, Homo sapiens
cggctttcttttctt

SEQ ID NO: 2791 - DNA, 15 bp, Homo sapiens
acggctttcttttct

SEQ ID NO: 2792 - DNA, 15 bp, Homo sapiens
gacggctttcttttc

SEQ ID NO: 2793 - DNA, 15 bp, Homo sapiens
ggacggctttctttt

SEQ ID NO: 2794 - DNA, 15 bp, Homo sapiens
gggacggctttcttt

SEQ ID NO: 2795 - DNA, 15 bp, Homo sapiens
agggacggctttctt

SEQ ID NO: 2796 - DNA, 15 bp, Homo sapiens
gagggacggctttct

SEQ ID NO: 2797 - DNA, 15 bp, Homo sapiens
agagggacggctttc

SEQ ID NO: 2798 - DNA, 15 bp, Homo sapiens
cagagggacggcttt

SEQ ID NO: 2799 - DNA, 15 bp, Homo sapiens
gcagagggacggctt

SEQ ID NO: 2800 - DNA, 15 bp, Homo sapiens
ggcagagggacggct

SEQ ID NO: 2801 - DNA, 15 bp, Homo sapiens
gggcagagggacggc

SEQ ID NO: 2802 - DNA, 15 bp, Homo sapiens
agggcagagggacgg

SEQ ID NO: 2803 - DNA, 15 bp, Homo sapiens
aagggcagagggacg

SEQ ID NO: 2804 - DNA, 15 bp, Homo sapiens
caagggcagagggac

SEQ ID NO: 2805 - DNA, 15 bp, Homo sapiens
acaagggcagaggga

SEQ ID NO: 2806 - DNA, 15 bp, Homo sapiens
cacaagggcagaggg

SEQ ID NO: 2807 - DNA, 15 bp, Homo sapiens
acacaagggcagagg

SEQ ID NO: 2808 - DNA, 15 bp, Homo sapiens
tacacaagggcagag

SEQ ID NO: 2809 - DNA, 15 bp, Homo sapiens
ctacacaagggcaga

SEQ ID NO: 2810 - DNA, 15 bp, Homo sapiens
actacacaagggcag

SEQ ID NO: 2811 - DNA, 15 bp, Homo sapiens
aactacacaagggca

SEQ ID NO: 2812 - DNA, 15 bp, Homo sapiens
aaactacacaagggc

SEQ ID NO: 2813 - DNA, 15 bp, Homo sapiens
aaaactacacaaggg

SEQ ID NO: 2814 - DNA, 15 bp, Homo sapiens
taaaactacacaagg

SEQ ID NO: 2815 - DNA, 15 bp, Homo sapiens
ctaaaactacacaag

SEQ ID NO: 2816 - DNA, 15 bp, Homo sapiens
tctaaaactacacaa

SEQ ID NO: 2817 - DNA, 15 bp, Homo sapiens
ttctaaaactacaca

SEQ ID NO: 2818 - DNA, 15 bp, Homo sapiens
tttctaaaactacac

SEQ ID NO: 2819 - DNA, 15 bp, Homo sapiens
ttttctaaaactaca

SEQ ID NO: 2820 - DNA, 15 bp, Homo sapiens
tttttctaaaactac

SEQ ID NO: 2821 - DNA, 15 bp, Homo sapiens
gtttttctaaaacta

SEQ ID NO: 2822 - DNA, 15 bp, Homo sapiens
tgtttttctaaaact

SEQ ID NO: 2823 - DNA, 15 bp, Homo sapiens
ttgtttttctaaaac

SEQ ID NO: 2824 - DNA, 15 bp, Homo sapiens
attgtttttctaaaa

SEQ ID NO: 2825 - DNA, 15 bp, Homo sapiens
gattgtttttctaaa

SEQ ID NO: 2826 - DNA, 15 bp, Homo sapiens
agattgtttttctaa

SEQ ID NO: 2827 - DNA, 15 bp, Homo sapiens
aagattgtttttcta

SEQ ID NO: 2828 - DNA, 15 bp, Homo sapiens
taagattgtttttct

SEQ ID NO: 2829 - DNA, 15 bp, Homo sapiens
ataagattgtttttc

SEQ ID NO: 2830 - DNA, 15 bp, Homo sapiens
aataagattgttttt

SEQ ID NO: 2831 - DNA, 15 bp, Homo sapiens
taataagattgtttt

SEQ ID NO: 2832 - DNA, 15 bp, Homo sapiens
ctaataagattgttt

SEQ ID NO: 2833 - DNA, 15 bp, Homo sapiens
actaataagattgtt

SEQ ID NO: 2834 - DNA, 15 bp, Homo sapiens
aactaataagattgt

SEQ ID NO: 2835 - DNA, 15 bp, Homo sapiens
aaactaataagattg

SEQ ID NO: 2836 - DNA, 15 bp, Homo sapiens
caaactaataagatt

SEQ ID NO: 2837 - DNA, 15 bp, Homo sapiens
ccaaactaataagat

SEQ ID NO: 2838 - DNA, 15 bp, Homo sapiens
accaaactaataaga

SEQ ID NO: 2839 - DNA, 15 bp, Homo sapiens
taccaaactaataag

SEQ ID NO: 2840 - DNA, 15 bp, Homo sapiens
ctaccaaactaataa

SEQ ID NO: 2841 - DNA, 15 bp, Homo sapiens
gctaccaaactaata

SEQ ID NO: 2842 - DNA, 15 bp, Homo sapiens
agctaccaaactaat

SEQ ID NO: 2843 - DNA, 15 bp, Homo sapiens
aagctaccaaactaa

SEQ ID NO: 2844 - DNA, 15 bp, Homo sapiens
aaagctaccaaacta

SEQ ID NO: 2845 - DNA, 15 bp, Homo sapiens
aaaagctaccaaact

SEQ ID NO: 2846 - DNA, 15 bp, Homo sapiens
aaaaagctaccaaac

SEQ ID NO: 2847 - DNA, 15 bp, Homo sapiens
aaaaaagctaccaaa

SEQ ID NO: 2848 - DNA, 15 bp, Homo sapiens
aaaaaaagctaccaa

SEQ ID NO: 2849 - DNA, 15 bp, Homo sapiens
gaaaaaaagctacca

SEQ ID NO: 2850 - DNA, 15 bp, Homo sapiens
ggaaaaaaagctacc

SEQ ID NO: 2851 - DNA, 15 bp, Homo sapiens
aggaaaaaaagctac

SEQ ID NO: 2852 - DNA, 15 bp, Homo sapiens
caggaaaaaaagcta

SEQ ID NO: 2853 - DNA, 15 bp, Homo sapiens
tcaggaaaaaaagct

SEQ ID NO: 2854 - DNA, 15 bp, Homo sapiens
ttcaggaaaaaaagc

SEQ ID NO: 2855 - DNA, 15 bp, Homo sapiens
tttcaggaaaaaaag

SEQ ID NO: 2856 - DNA, 15 bp, Homo sapiens
ttttcaggaaaaaaa

SEQ ID NO: 2857 - DNA, 15 bp, Homo sapiens
attttcaggaaaaaa

SEQ ID NO: 2858 - DNA, 15 bp, Homo sapiens
tattttcaggaaaaa

SEQ ID NO: 2859 - DNA, 15 bp, Homo sapiens
ttattttcaggaaaa

SEQ ID NO: 2860 - DNA, 15 bp, Homo sapiens
tttattttcaggaaa

SEQ ID NO: 2861 - DNA, 15 bp, Homo sapiens
ttttattttcaggaa

SEQ ID NO: 2862 - DNA, 15 bp, Homo sapiens
tttttattttcagga

SEQ ID NO: 2863 - DNA, 15 bp, Homo sapiens
ttttttattttcagg

SEQ ID NO: 2864 - DNA, 15 bp, Homo sapiens
tttttttattttcag

SEQ ID NO: 2865 - DNA, 15 bp, Homo sapiens
ttttttttattttca

SEQ ID NO: 2866 - DNA, 15 bp, Homo sapiens
tttttttttattttc

SEQ ID NO: 2867 - DNA, 15 bp, Homo sapiens
ttttttttttatttt

SEQ ID NO: 2868 - DNA, 15 bp, Homo sapiens
tttttttttttattt

SEQ ID NO: 2869 - DNA, 15 bp, Homo sapiens
atttttttttttatt

SEQ ID NO: 2870 - DNA, 15 bp, Homo sapiens
tatttttttttttat

SEQ ID NO: 2871 - DNA, 15 bp, Homo sapiens
gtattttttttttta

SEQ ID NO: 2872 - DNA, 15 bp, Homo sapiens
tgtattttttttttt

SEQ ID NO: 2873 - DNA, 15 bp, Homo sapiens
atgtatttttttttt

SEQ ID NO: 2874 - DNA, 15 bp, Homo sapiens
aatgtattttttttt

SEQ ID NO: 2875 - DNA, 15 bp, Homo sapiens
caatgtatttttttt

SEQ ID NO: 2876 - DNA, 15 bp, Homo sapiens
ccaatgtattttttt

SEQ ID NO: 2877 - DNA, 15 bp, Homo sapiens
gccaatgtatttttt

SEQ ID NO: 2878 - DNA, 15 bp, Homo sapiens
tgccaatgtattttt

SEQ ID NO: 2879 - DNA, 15 bp, Homo sapiens
gtgccaatgtatttt

SEQ ID NO: 2880 - DNA, 15 bp, Homo sapiens
ggtgccaatgtattt

SEQ ID NO: 2881 - DNA, 15 bp, Homo sapiens
aggtgccaatgtatt

SEQ ID NO: 2882 - DNA, 15 bp, Homo sapiens
taggtgccaatgtat

SEQ ID NO: 2883 - DNA, 15 bp, Homo sapiens
ttaggtgccaatgta

SEQ ID NO: 2884 - DNA, 15 bp, Homo sapiens
cttaggtgccaatgt

SEQ ID NO: 2885 - DNA, 15 bp, Homo sapiens
gcttaggtgccaatg

SEQ ID NO: 2886 - DNA, 15 bp, Homo sapiens
ggcttaggtgccaat

SEQ ID NO: 2887 - DNA, 15 bp, Homo sapiens
tggcttaggtgccaa

SEQ ID NO: 2888 - DNA, 15 bp, Homo sapiens
atggcttaggtgcca

SEQ ID NO: 2889 - DNA, 15 bp, Homo sapiens
catggcttaggtgcc

SEQ ID NO: 2890 - DNA, 15 bp, Homo sapiens
ccatggcttaggtgc

SEQ ID NO: 2891 - DNA, 15 bp, Homo sapiens
tccatggcttaggtg

SEQ ID NO: 2892 - DNA, 15 bp, Homo sapiens
ttccatggcttaggt

SEQ ID NO: 2893 - DNA, 15 bp, Homo sapiens
tttccatggcttagg

SEQ ID NO: 2894 - DNA, 15 bp, Homo sapiens
ttttccatggcttag

SEQ ID NO: 2895 - DNA, 15 bp, Homo sapiens
attttccatggctta

SEQ ID NO: 2896 - DNA, 15 bp, Homo sapiens
cattttccatggctt

SEQ ID NO: 2897 - DNA, 15 bp, Homo sapiens
tcattttccatggct

SEQ ID NO: 2898 - DNA, 15 bp, Homo sapiens
ttcattttccatggc

SEQ ID NO: 2899 - DNA, 15 bp, Homo sapiens
tttcattttccatgg

SEQ ID NO: 2900 - DNA, 15 bp, Homo sapiens
atttcattttccatg

SEQ ID NO: 2901 - DNA, 15 bp, Homo sapiens
tatttcattttccat

SEQ ID NO: 2902 - DNA, 15 bp, Homo sapiens
ttatttcattttcca

SEQ ID NO: 2903 - DNA, 15 bp, Homo sapiens
tttatttcattttcc

SEQ ID NO: 2904 - DNA, 15 bp, Homo sapiens
ttttatttcattttc

SEQ ID NO: 2905 - DNA, 15 bp, Homo sapiens
tttttatttcatttt

SEQ ID NO: 2906 - DNA, 15 bp, Homo sapiens
atttttatttcattt

SEQ ID NO: 2907 - DNA, 15 bp, Homo sapiens
tatttttatttcatt

SEQ ID NO: 2908 - DNA, 15 bp, Homo sapiens
gtatttttatttcat

SEQ ID NO: 2909 - DNA, 15 bp, Homo sapiens
tgtatttttatttca

SEQ ID NO: 2910 - DNA, 15 bp, Homo sapiens
gtgtatttttatttc

SEQ ID NO: 2911 - DNA, 15 bp, Homo sapiens
ggtgtatttttattt

SEQ ID NO: 2912 - DNA, 15 bp, Homo sapiens
tggtgtatttttatt

SEQ ID NO: 2913 - DNA, 15 bp, Homo sapiens
ctggtgtatttttat

SEQ ID NO: 2914 - DNA, 15 bp, Homo sapiens
actggtgtattttta

SEQ ID NO: 2915 - DNA, 15 bp, Homo sapiens
cactggtgtattttt

SEQ ID NO: 2916 - DNA, 15 bp, Homo sapiens
gcactggtgtatttt

SEQ ID NO: 2917 - DNA, 15 bp, Homo sapiens
tgcactggtgtattt

SEQ ID NO: 2918 - DNA, 15 bp, Homo sapiens
ctgcactggtgtatt

SEQ ID NO: 2919 - DNA, 15 bp, Homo sapiens
gctgcactggtgtat

SEQ ID NO: 2920 - DNA, 15 bp, Homo sapiens
agctgcactggtgta

SEQ ID NO: 2921 - DNA, 15 bp, Homo sapiens
aagctgcactggtgt

SEQ ID NO: 2922 - DNA, 15 bp, Homo sapiens
gaagctgcactggtg

SEQ ID NO: 2923 - DNA, 15 bp, Homo sapiens
ggaagctgcactggt

SEQ ID NO: 2924 - DNA, 15 bp, Homo sapiens
tggaagctgcactgg

SEQ ID NO: 2925 - DNA, 15 bp, Homo sapiens
ttggaagctgcactg

SEQ ID NO: 2926 - DNA, 15 bp, Homo sapiens
tttggaagctgcact

SEQ ID NO: 2927 - DNA, 15 bp, Homo sapiens
ttttggaagctgcac

SEQ ID NO: 2928 - DNA, 15 bp, Homo sapiens
gttttggaagctgca

SEQ ID NO: 2929 - DNA, 15 bp, Homo sapiens
tgttttggaagctgc

SEQ ID NO: 2930 - DNA, 15 bp, Homo sapiens
gtgttttggaagctg

SEQ ID NO: 2931 - DNA, 15 bp, Homo sapiens
agtgttttggaagct

SEQ ID NO: 2932 - DNA, 15 bp, Homo sapiens
cagtgttttggaagc

SEQ ID NO: 2933 - DNA, 15 bp, Homo sapiens
tcagtgttttggaag

SEQ ID NO: 2934 - DNA, 15 bp, Homo sapiens
gtcagtgttttggaa

SEQ ID NO: 2935 - DNA, 15 bp, Homo sapiens
agtcagtgttttgga

SEQ ID NO: 2936 - DNA, 15 bp, Homo sapiens
aagtcagtgttttgg

SEQ ID NO: 2937 - DNA, 15 bp, Homo sapiens
caagtcagtgttttg

SEQ ID NO: 2938 - DNA, 15 bp, Homo sapiens
gcaagtcagtgtttt

SEQ ID NO: 2939 - DNA, 15 bp, Homo sapiens
tgcaagtcagtgttt

SEQ ID NO: 2940 - DNA, 15 bp, Homo sapiens
atgcaagtcagtgtt

SEQ ID NO: 2941 - DNA, 15 bp, Homo sapiens
gatgcaagtcagtgt

SEQ ID NO: 2942 - DNA, 15 bp, Homo sapiens
agatgcaagtcagtg

SEQ ID NO: 2943 - DNA, 15 bp, Homo sapiens
gagatgcaagtcagt

SEQ ID NO: 2944 - DNA, 15 bp, Homo sapiens
ggagatgcaagtcag

SEQ ID NO: 2945 - DNA, 15 bp, Homo sapiens
gggagatgcaagtca

SEQ ID NO: 2946 - DNA, 15 bp, Homo sapiens
agggagatgcaagtc

SEQ ID NO: 2947 - DNA, 15 bp, Homo sapiens
gagggagatgcaagt

SEQ ID NO: 2948 - DNA, 15 bp, Homo sapiens
agagggagatgcaag

SEQ ID NO: 2949 - DNA, 15 bp, Homo sapiens
gagagggagatgcaa

SEQ ID NO: 2950 - DNA, 15 bp, Homo sapiens
ggagagggagatgca

SEQ ID NO: 2951 - DNA, 15 bp, Homo sapiens
aggagagggagatgc

SEQ ID NO: 2952 - DNA, 15 bp, Homo sapiens
taggagagggagatg

SEQ ID NO: 2953 - DNA, 15 bp, Homo sapiens
ataggagagggagat

SEQ ID NO: 2954 - DNA, 15 bp, Homo sapiens
gataggagagggaga

SEQ ID NO: 2955 - DNA, 15 bp, Homo sapiens
ggataggagagggag

SEQ ID NO: 2956 - DNA, 15 bp, Homo sapiens
cggataggagaggga

SEQ ID NO: 2957 - DNA, 15 bp, Homo sapiens
gcggataggagaggg

SEQ ID NO: 2958 - DNA, 15 bp, Homo sapiens
ggcggataggagagg

SEQ ID NO: 2959 - DNA, 15 bp, Homo sapiens
cggcggataggagag

SEQ ID NO: 2960 - DNA, 15 bp, Homo sapiens
ccggcggataggaga

SEQ ID NO: 2961 - DNA, 15 bp, Homo sapiens
cccggcggataggag

SEQ ID NO: 2962 - DNA, 15 bp, Homo sapiens
tcccggcggatagga

SEQ ID NO: 2963 - DNA, 15 bp, Homo sapiens
ttcccggcggatagg

SEQ ID NO: 2964 - DNA, 15 bp, Homo sapiens
attcccggcggatag

SEQ ID NO: 2965 - DNA, 15 bp, Homo sapiens
cattcccggcggata

SEQ ID NO: 2966 - DNA, 15 bp, Homo sapiens
acattcccggcggat

SEQ ID NO: 2967 - DNA, 15 bp, Homo sapiens
gacattcccggcgga

SEQ ID NO: 2968 - DNA, 15 bp, Homo sapiens
agacattcccggcgg

SEQ ID NO: 2969 - DNA, 15 bp, Homo sapiens
aagacattcccggcg

SEQ ID NO: 2970 - DNA, 15 bp, Homo sapiens
taagacattcccggc

SEQ ID NO: 2971 - DNA, 15 bp, Homo sapiens
ataagacattcccgg

SEQ ID NO: 2972 - DNA, 15 bp, Homo sapiens
gataagacattcccg

SEQ ID NO: 2973 - DNA, 15 bp, Homo sapiens
ggataagacattccc

SEQ ID NO: 2974 - DNA, 15 bp, Homo sapiens
gggataagacattcc

SEQ ID NO: 2975 - DNA, 15 bp, Homo sapiens
agggataagacattc

SEQ ID NO: 2976 - DNA, 15 bp, Homo sapiens
cagggataagacatt

SEQ ID NO: 2977 - DNA, 15 bp, Homo sapiens
gcagggataagacat

SEQ ID NO: 2978 - DNA, 15 bp, Homo sapiens
ggcagggataagaca

SEQ ID NO: 2979 - DNA, 15 bp, Homo sapiens
aggcagggataagac

SEQ ID NO: 2980 - DNA, 15 bp, Homo sapiens
aaggcagggataaga

SEQ ID NO: 2981 - DNA, 15 bp, Homo sapiens
gaaggcagggataag

SEQ ID NO: 2982 - DNA, 15 bp, Homo sapiens
ggaaggcagggataa

SEQ ID NO: 2983 - DNA, 15 bp, Homo sapiens
tggaaggcagggata

SEQ ID NO: 2984 - DNA, 15 bp, Homo sapiens
ctggaaggcagggat

SEQ ID NO: 2985 - DNA, 15 bp, Homo sapiens
actggaaggcaggga

SEQ ID NO: 2986 - DNA, 15 bp, Homo sapiens
cactggaaggcaggg

SEQ ID NO: 2987 - DNA, 15 bp, Homo sapiens
ccactggaaggcagg

SEQ ID NO: 2988 - DNA, 15 bp, Homo sapiens
gccactggaaggcag

SEQ ID NO: 2989 - DNA, 15 bp, Homo sapiens
agccactggaaggca

SEQ ID NO: 2990 - DNA, 15 bp, Homo sapiens
cagccactggaaggc

SEQ ID NO: 2991 - DNA, 15 bp, Homo sapiens
gcagccactggaagg

SEQ ID NO: 2992 - DNA, 15 bp, Homo sapiens
ggcagccactggaag

SEQ ID NO: 2993 - DNA, 15 bp, Homo sapiens
tggcagccactggaa

SEQ ID NO: 2994 - DNA, 15 bp, Homo sapiens
ctggcagccactgga

SEQ ID NO: 2995 - DNA, 15 bp, Homo sapiens
tctggcagccactgg

SEQ ID NO: 2996 - DNA, 15 bp, Homo sapiens
ttctggcagccactg

SEQ ID NO: 2997 - DNA, 15 bp, Homo sapiens
gttctggcagccact

SEQ ID NO: 2998 - DNA, 15 bp, Homo sapiens
ggttctggcagccac

SEQ ID NO: 2999 - DNA, 15 bp, Homo sapiens
tggttctggcagcca

SEQ ID NO: 3000 - DNA, 15 bp, Homo sapiens
ttggttctggcagcc

SEQ ID NO: 3001 - DNA, 15 bp, Homo sapiens
cttggttctggcagc

SEQ ID NO: 3002 - DNA, 15 bp, Homo sapiens
ccttggttctggcag

SEQ ID NO: 3003 - DNA, 15 bp, Homo sapiens
cccttggttctggca

SEQ ID NO: 3004 - DNA, 15 bp, Homo sapiens
gcccttggttctggc

SEQ ID NO: 3005 - DNA, 15 bp, Homo sapiens
tgcccttggttctgg

SEQ ID NO: 3006 - DNA, 15 bp, Homo sapiens
atgcccttggttctg

SEQ ID NO: 3007 - DNA, 15 bp, Homo sapiens
gatgcccttggttct

SEQ ID NO: 3008 - DNA, 15 bp, Homo sapiens
ggatgcccttggttc

SEQ ID NO: 3009 - DNA, 15 bp, Homo sapiens
cggatgcccttggtt

SEQ ID NO: 3010 - DNA, 15 bp, Homo sapiens
gcggatgcccttggt

SEQ ID NO: 3011 - DNA, 15 bp, Homo sapiens
cgcggatgcccttgg

SEQ ID NO: 3012 - DNA, 15 bp, Homo sapiens
ccgcggatgcccttg

SEQ ID NO: 3013 - DNA, 15 bp, Homo sapiens
gccgcggatgccctt

SEQ ID NO: 3014 - DNA, 15 bp, Homo sapiens
cgccgcggatgccct

SEQ ID NO: 3015 - DNA, 15 bp, Homo sapiens
acgccgcggatgccc

SEQ ID NO: 3016 - DNA, 15 bp, Homo sapiens
aacgccgcggatgcc

SEQ ID NO: 3017 - DNA, 15 bp, Homo sapiens
gaacgccgcggatgc

SEQ ID NO: 3018 - DNA, 15 bp, Homo sapiens
ggaacgccgcggatg

SEQ ID NO: 3019 - DNA, 15 bp, Homo sapiens
aggaacgccgcggat

SEQ ID NO: 3020 - DNA, 15 bp, Homo sapiens
aaggaacgccgcgga

SEQ ID NO: 3021 - DNA, 15 bp, Homo sapiens
caaggaacgccgcgg

SEQ ID NO: 3022 - DNA, 15 bp, Homo sapiens
ccaaggaacgccgcg

SEQ ID NO: 3023 - DNA, 15 bp, Homo sapiens
gccaaggaacgccgc

SEQ ID NO: 3024 - DNA, 15 bp, Homo sapiens
tgccaaggaacgccg

SEQ ID NO: 3025 - DNA, 15 bp, Homo sapiens
atgccaaggaacgcc

SEQ ID NO: 3026 - DNA, 15 bp, Homo sapiens
aatgccaaggaacgc

SEQ ID NO: 3027 - DNA, 15 bp, Homo sapiens
caatgccaaggaacg

SEQ ID NO: 3028 - DNA, 15 bp, Homo sapiens
ccaatgccaaggaac

SEQ ID NO: 3029 - DNA, 15 bp, Homo sapiens
gccaatgccaaggaa

SEQ ID NO: 3030 - DNA, 15 bp, Homo sapiens
cgccaatgccaagga

SEQ ID NO: 3031 - DNA, 15 bp, Homo sapiens
acgccaatgccaagg

SEQ ID NO: 3032 - DNA, 15 bp, Homo sapiens
aacgccaatgccaag

SEQ ID NO: 3033 - DNA, 15 bp, Homo sapiens
taacgccaatgccaa

SEQ ID NO: 3034 - DNA, 15 bp, Homo sapiens
ttaacgccaatgcca

SEQ ID NO: 3035 - DNA, 15 bp, Homo sapiens
gttaacgccaatgcc

SEQ ID NO: 3036 - DNA, 15 bp, Homo sapiens
tgttaacgccaatgc

SEQ ID NO: 3037 - DNA, 15 bp, Homo sapiens
ctgttaacgccaatg

SEQ ID NO: 3038 - DNA, 15 bp, Homo sapiens
gctgttaacgccaat

SEQ ID NO: 3039 - DNA, 15 bp, Homo sapiens
tgctgttaacgccaa

SEQ ID NO: 3040 - DNA, 15 bp, Homo sapiens
ctgctgttaacgcca

SEQ ID NO: 3041 - DNA, 15 bp, Homo sapiens
tctgctgttaacgcc

SEQ ID NO: 3042 - DNA, 15 bp, Homo sapiens
atctgctgttaacgc

SEQ ID NO: 3043 - DNA, 15 bp, Homo sapiens
catctgctgttaacg

SEQ ID NO: 3044 - DNA, 15 bp, Homo sapiens
ccatctgctgttaac

SEQ ID NO: 3045 - DNA, 15 bp, Homo sapiens
tccatctgctgttaa

SEQ ID NO: 3046 - DNA, 15 bp, Homo sapiens
atccatctgctgtta

SEQ ID NO: 3047 - DNA, 15 bp, Homo sapiens
aatccatctgctgtt

SEQ ID NO: 3048 - DNA, 15 bp, Homo sapiens
aaatccatctgctgt

SEQ ID NO: 3049 - DNA, 15 bp, Homo sapiens
aaaatccatctgctg

SEQ ID NO: 3050 - DNA, 15 bp, Homo sapiens
gaaaatccatctgct

SEQ ID NO: 3051 - DNA, 15 bp, Homo sapiens
ggaaaatccatctgc

SEQ ID NO: 3052 - DNA, 15 bp, Homo sapiens
cggaaaatccatctg

SEQ ID NO: 3053 - DNA, 15 bp, Homo sapiens
gcggaaaatccatct

SEQ ID NO: 3054 - DNA, 15 bp, Homo sapiens
tgcggaaaatccatc

SEQ ID NO: 3055 - DNA, 15 bp, Homo sapiens
ctgcggaaaatccat

SEQ ID NO: 3056 - DNA, 15 bp, Homo sapiens
gctgcggaaaatcca

SEQ ID NO: 3057 - DNA, 15 bp, Homo sapiens
cgctgcggaaaatcc

SEQ ID NO: 3058 - DNA, 15 bp, Homo sapiens
ccgctgcggaaaatc

SEQ ID NO: 3059 - DNA, 15 bp, Homo sapiens
gccgctgcggaaaat

SEQ ID NO: 3060 - DNA, 15 bp, Homo sapiens
ggccgctgcggaaaa

SEQ ID NO: 3061 - DNA, 15 bp, Homo sapiens
tggccgctgcggaaa

SEQ ID NO: 3062 - DNA, 15 bp, Homo sapiens
ctggccgctgcggaa

SEQ ID NO: 3063 - DNA, 15 bp, Homo sapiens
cctggccgctgcgga

SEQ ID NO: 3064 - DNA, 15 bp, Homo sapiens
gcctggccgctgcgg

SEQ ID NO: 3065 - DNA, 15 bp, Homo sapiens
cgcctggccgctgcg

SEQ ID NO: 3066 - DNA, 15 bp, Homo sapiens
ccgcctggccgctgc

SEQ ID NO: 3067 - DNA, 15 bp, Homo sapiens
tccgcctggccgctg

SEQ ID NO: 3068 - DNA, 15 bp, Homo sapiens
ttccgcctggccgct

SEQ ID NO: 3069 - DNA, 15 bp, Homo sapiens
cttccgcctggccgc

SEQ ID NO: 3070 - DNA, 15 bp, Homo sapiens
tcttccgcctggccg

SEQ ID NO: 3071 - DNA, 15 bp, Homo sapiens
atcttccgcctggcc

SEQ ID NO: 3072 - DNA, 15 bp, Homo sapiens
catcttccgcctggc

SEQ ID NO: 3073 - DNA, 15 bp, Homo sapiens
gcatcttccgcctgg

SEQ ID NO: 3074 - DNA, 15 bp, Homo sapiens
ggcatcttccgcctg

SEQ ID NO: 3075 - DNA, 15 bp, Homo sapiens
aggcatcttccgcct

SEQ ID NO: 3076 - DNA, 15 bp, Homo sapiens
taggcatcttccgcc

SEQ ID NO: 3077 - DNA, 15 bp, Homo sapiens
ctaggcatcttccgc

SEQ ID NO: 3078 - DNA, 15 bp, Homo sapiens
gctaggcatcttccg

SEQ ID NO: 3079 - DNA, 15 bp, Homo sapiens
tgctaggcatcttcc

SEQ ID NO: 3080 - DNA, 15 bp, Homo sapiens
atgctaggcatcttc

SEQ ID NO: 3081 - DNA, 15 bp, Homo sapiens
aatgctaggcatctt

SEQ ID NO: 3082 - DNA, 15 bp, Homo sapiens
caatgctaggcatct

SEQ ID NO: 3083 - DNA, 15 bp, Homo sapiens
ccaatgctaggcatc

SEQ ID NO: 3084 - DNA, 15 bp, Homo sapiens
accaatgctaggcat

SEQ ID NO: 3085 - DNA, 15 bp, Homo sapiens
gaccaatgctaggca

SEQ ID NO: 3086 - DNA, 15 bp, Homo sapiens
ggaccaatgctaggc

SEQ ID NO: 3087 - DNA, 15 bp, Homo sapiens
cggaccaatgctagg

SEQ ID NO: 3088 - DNA, 15 bp, Homo sapiens
gcggaccaatgctag

SEQ ID NO: 3089 - DNA, 15 bp, Homo sapiens
ggcggaccaatgcta

SEQ ID NO: 3090 - DNA, 15 bp, Homo sapiens
cggcggaccaatgct

SEQ ID NO: 3091 - DNA, 15 bp, Homo sapiens
acggcggaccaatgc

SEQ ID NO: 3092 - DNA, 15 bp, Homo sapiens
gacggcggaccaatg

SEQ ID NO: 3093 - DNA, 15 bp, Homo sapiens
agacggcggaccaat

SEQ ID NO: 3094 - DNA, 15 bp, Homo sapiens
gagacggcggaccaa

SEQ ID NO: 3095 - DNA, 15 bp, Homo sapiens
tgagacggcggacca

SEQ ID NO: 3096 - DNA, 15 bp, Homo sapiens
gtgagacggcggacc

SEQ ID NO: 3097 - DNA, 15 bp, Homo sapiens
agtgagacggcggac

SEQ ID NO: 3098 - DNA, 15 bp, Homo sapiens
cagtgagacggcgga

SEQ ID NO: 3099 - DNA, 15 bp, Homo sapiens
acagtgagacggcgg

SEQ ID NO: 3100 - DNA, 15 bp, Homo sapiens
tacagtgagacggcg

SEQ ID NO: 3101 - DNA, 15 bp, Homo sapiens
gtacagtgagacggc

SEQ ID NO: 3102 - DNA, 15 bp, Homo sapiens
agtacagtgagacgg

SEQ ID NO: 3103 - DNA, 15 bp, Homo sapiens
cagtacagtgagacg

SEQ ID NO: 3104 - DNA, 15 bp, Homo sapiens
tcagtacagtgagac

SEQ ID NO: 3105 - DNA, 15 bp, Homo sapiens
ttcagtacagtgaga

SEQ ID NO: 3106 - DNA, 15 bp, Homo sapiens
attcagtacagtgag

SEQ ID NO: 3107 - DNA, 15 bp, Homo sapiens
aattcagtacagtga

SEQ ID NO: 3108 - DNA, 15 bp, Homo sapiens
aaattcagtacagtg

SEQ ID NO: 3109 - DNA, 15 bp, Homo sapiens
gaaattcagtacagt

SEQ ID NO: 3110 - DNA, 15 bp, Homo sapiens
tgaaattcagtacag

SEQ ID NO: 3111 - DNA, 15 bp, Homo sapiens
ttgaaattcagtaca

SEQ ID NO: 3112 - DNA, 15 bp, Homo sapiens
cttgaaattcagtac

SEQ ID NO: 3113 - DNA, 15 bp, Homo sapiens
tcttgaaattcagta

SEQ ID NO: 3114 - DNA, 15 bp, Homo sapiens
ttcttgaaattcagt

SEQ ID NO: 3115 - DNA, 15 bp, Homo sapiens
attcttgaaattcag

SEQ ID NO: 3116 - DNA, 15 bp, Homo sapiens
gattcttgaaattca

SEQ ID NO: 3117 - DNA, 15 bp, Homo sapiens
tgattcttgaaattc

SEQ ID NO: 3118 - DNA, 15 bp, Homo sapiens
atgattcttgaaatt

SEQ ID NO: 3119 - DNA, 15 bp, Homo sapiens
catgattcttgaaat

SEQ ID NO: 3120 - DNA, 15 bp, Homo sapiens
ccatgattcttgaaa

SEQ ID NO: 3121 - DNA, 15 bp, Homo sapiens
gccatgattcttgaa

SEQ ID NO: 3122 - DNA, 15 bp, Homo sapiens
ggccatgattcttga

SEQ ID NO: 3123 - DNA, 15 bp, Homo sapiens
aggccatgattcttg

SEQ ID NO: 3124 - DNA, 15 bp, Homo sapiens
taggccatgattctt

SEQ ID NO: 3125 - DNA, 15 bp, Homo sapiens
gtaggccatgattct

SEQ ID NO: 3126 - DNA, 15 bp, Homo sapiens
agtaggccatgattc

SEQ ID NO: 3127 - DNA, 15 bp, Homo sapiens
cagtaggccatgatt

SEQ ID NO: 3128 - DNA, 15 bp, Homo sapiens
gcagtaggccatgat

SEQ ID NO: 3129 - DNA, 15 bp, Homo sapiens
ggcagtaggccatga

SEQ ID NO: 3130 - DNA, 15 bp, Homo sapiens
tggcagtaggccatg

SEQ ID NO: 3131 - DNA, 15 bp, Homo sapiens
ctggcagtaggccat

SEQ ID NO: 3132 - DNA, 15 bp, Homo sapiens
gctggcagtaggcca

SEQ ID NO: 3133 - DNA, 15 bp, Homo sapiens
ggctggcagtaggcc

SEQ ID NO: 3134 - DNA, 15 bp, Homo sapiens
tggctggcagtaggc

SEQ ID NO: 3135 - DNA, 15 bp, Homo sapiens
ctggctggcagtagg

SEQ ID NO: 3136 - DNA, 15 bp, Homo sapiens
cctggctggcagtag

SEQ ID NO: 3137 - DNA, 15 bp, Homo sapiens
acctggctggcagta

SEQ ID NO: 3138 - DNA, 15 bp, Homo sapiens
gacctggctggcagt

SEQ ID NO: 3139 - DNA, 15 bp, Homo sapiens
tgacctggctggcag

SEQ ID NO: 3140 - DNA, 15 bp, Homo sapiens
ctgacctggctggca

SEQ ID NO: 3141 - DNA, 15 bp, Homo sapiens
cctgacctggctggc

SEQ ID NO: 3142 - DNA, 15 bp, Homo sapiens
tcctgacctggctgg

SEQ ID NO: 3143 - DNA, 15 bp, Homo sapiens
gtcctgacctggctg

SEQ ID NO: 3144 - DNA, 15 bp, Homo sapiens
ggtcctgacctggct

SEQ ID NO: 3145 - DNA, 15 bp, Homo sapiens
cggtcctgacctggc

SEQ ID NO: 3146 - DNA, 15 bp, Homo sapiens
tcggtcctgacctgg

SEQ ID NO: 3147 - DNA, 15 bp, Homo sapiens
ttcggtcctgacctg

SEQ ID NO: 3148 - DNA, 15 bp, Homo sapiens
cttcggtcctgacct

SEQ ID NO: 3149 - DNA, 15 bp, Homo sapiens
ccttcggtcctgacc

SEQ ID NO: 3150 - DNA, 15 bp, Homo sapiens
gccttcggtcctgac

SEQ ID NO: 3151 - DNA, 15 bp, Homo sapiens
cgccttcggtcctga

SEQ ID NO: 3152 - DNA, 15 bp, Homo sapiens
gcgccttcggtcctg

SEQ ID NO: 3153 - DNA, 15 bp, Homo sapiens
agcgccttcggtcct

SEQ ID NO: 3154 - DNA, 15 bp, Homo sapiens
tagcgccttcggtcc

SEQ ID NO: 3155 - DNA, 15 bp, Homo sapiens
ctagcgccttcggtc

SEQ ID NO: 3156 - DNA, 15 bp, Homo sapiens
actagcgccttcggt

SEQ ID NO: 3157 - DNA, 15 bp, Homo sapiens
gactagcgccttcgg

SEQ ID NO: 3158 - DNA, 15 bp, Homo sapiens
agactagcgccttcg

SEQ ID NO: 3159 - DNA, 15 bp, Homo sapiens
cagactagcgccttc

SEQ ID NO: 3160 - DNA, 15 bp, Homo sapiens
ccagactagcgcctt

SEQ ID NO: 3161 - DNA, 15 bp, Homo sapiens
cccagactagcgcct

SEQ ID NO: 3162 - DNA, 15 bp, Homo sapiens
ccccagactagcgcc

SEQ ID NO: 3163 - DNA, 15 bp, Homo sapiens
tccccagactagcgc

SEQ ID NO: 3164 - DNA, 15 bp, Homo sapiens
ctccccagactagcg

SEQ ID NO: 3165 - DNA, 15 bp, Homo sapiens
tctccccagactagc

SEQ ID NO: 3166 - DNA, 15 bp, Homo sapiens
gtctccccagactag

SEQ ID NO: 3167 - DNA, 15 bp, Homo sapiens
agtctccccagacta

SEQ ID NO: 3168 - DNA, 15 bp, Homo sapiens
cagtctccccagact

SEQ ID NO: 3169 - DNA, 15 bp, Homo sapiens
ccagtctccccagac

SEQ ID NO: 3170 - DNA, 15 bp, Homo sapiens
tccagtctccccaga

SEQ ID NO: 3171 - DNA, 15 bp, Homo sapiens
ctccagtctccccag

SEQ ID NO: 3172 - DNA, 15 bp, Homo sapiens
gctccagtctcccca

SEQ ID NO: 3173 - DNA, 15 bp, Homo sapiens
tgctccagtctcccc

SEQ ID NO: 3174 - DNA, 15 bp, Homo sapiens
ctgctccagtctccc

SEQ ID NO: 3175 - DNA, 15 bp, Homo sapiens
cctgctccagtctcc

SEQ ID NO: 3176 - DNA, 15 bp, Homo sapiens
acctgctccagtctc

SEQ ID NO: 3177 - DNA, 15 bp, Homo sapiens
gacctgctccagtct

SEQ ID NO: 3178 - DNA, 15 bp, Homo sapiens
agacctgctccagtc

SEQ ID NO: 3179 - DNA, 15 bp, Homo sapiens
gagacctgctccagt

SEQ ID NO: 3180 - DNA, 15 bp, Homo sapiens
agagacctgctccag

SEQ ID NO: 3181 - DNA, 15 bp, Homo sapiens
tagagacctgctcca

SEQ ID NO: 3182 - DNA, 15 bp, Homo sapiens
ctagagacctgctcc

SEQ ID NO: 3183 - DNA, 15 bp, Homo sapiens
actagagacctgctc

SEQ ID NO: 3184 - DNA, 15 bp, Homo sapiens
cactagagacctgct

SEQ ID NO: 3185 - DNA, 15 bp, Homo sapiens
ccactagagacctgc

SEQ ID NO: 3186 - DNA, 15 bp, Homo sapiens
accactagagacctg

SEQ ID NO: 3187 - DNA, 15 bp, Homo sapiens
aaccactagagacct

SEQ ID NO: 3188 - DNA, 15 bp, Homo sapiens
gaaccactagagacc

SEQ ID NO: 3189 - DNA, 15 bp, Homo sapiens
tgaaccactagagac

SEQ ID NO: 3190 - DNA, 15 bp, Homo sapiens
gtgaaccactagaga

SEQ ID NO: 3191 - DNA, 15 bp, Homo sapiens
ggtgaaccactagag

SEQ ID NO: 3192 - DNA, 15 bp, Homo sapiens
aggtgaaccactaga

SEQ ID NO: 3193 - DNA, 15 bp, Homo sapiens
caggtgaaccactag

SEQ ID NO: 3194 - DNA, 15 bp, Homo sapiens
acaggtgaaccacta

SEQ ID NO: 3195 - DNA, 15 bp, Homo sapiens
aacaggtgaaccact

SEQ ID NO: 3196 - DNA, 15 bp, Homo sapiens
gaacaggtgaaccac

SEQ ID NO: 3197 - DNA, 15 bp, Homo sapiens
cgaacaggtgaacca

SEQ ID NO: 3198 - DNA, 15 bp, Homo sapiens
ccgaacaggtgaacc

SEQ ID NO: 3199 - DNA, 15 bp, Homo sapiens
tccgaacaggtgaac

SEQ ID NO: 3200 - DNA, 15 bp, Homo sapiens
ctccgaacaggtgaa

SEQ ID NO: 3201 - DNA, 15 bp, Homo sapiens
cctccgaacaggtga

SEQ ID NO: 3202 - DNA, 15 bp, Homo sapiens
gcctccgaacaggtg

SEQ ID NO: 3203 - DNA, 15 bp, Homo sapiens
agcctccgaacaggt

SEQ ID NO: 3204 - DNA, 15 bp, Homo sapiens
gagcctccgaacagg

SEQ ID NO: 3205 - DNA, 15 bp, Homo sapiens
agagcctccgaacag

SEQ ID NO: 3206 - DNA, 15 bp, Homo sapiens
aagagcctccgaaca

SEQ ID NO: 3207 - DNA, 15 bp, Homo sapiens
gaagagcctccgaac

SEQ ID NO: 3208 - DNA, 15 bp, Homo sapiens
ggaagagcctccgaa

SEQ ID NO: 3209 - DNA, 15 bp, Homo sapiens
aggaagagcctccga

SEQ ID NO: 3210 - DNA, 15 bp, Homo sapiens
caggaagagcctccg

SEQ ID NO: 3211 - DNA, 15 bp, Homo sapiens
acaggaagagcctcc

SEQ ID NO: 3212 - DNA, 15 bp, Homo sapiens
aacaggaagagcctc

SEQ ID NO: 3213 - DNA, 15 bp, Homo sapiens
gaacaggaagagcct

SEQ ID NO: 3214 - DNA, 15 bp, Homo sapiens
tgaacaggaagagcc

SEQ ID NO: 3215 - DNA, 15 bp, Homo sapiens
ctgaacaggaagagc

SEQ ID NO: 3216 - DNA, 15 bp, Homo sapiens
actgaacaggaagag

SEQ ID NO: 3217 - DNA, 15 bp, Homo sapiens
aactgaacaggaaga

SEQ ID NO: 3218 - DNA, 15 bp, Homo sapiens
gaactgaacaggaag

SEQ ID NO: 3219 - DNA, 15 bp, Homo sapiens
ggaactgaacaggaa

SEQ ID NO: 3220 - DNA, 15 bp, Homo sapiens
gggaactgaacagga

SEQ ID NO: 3221 - DNA, 15 bp, Homo sapiens
agggaactgaacagg

SEQ ID NO: 3222 - DNA, 15 bp, Homo sapiens
gagggaactgaacag

SEQ ID NO: 3223 - DNA, 15 bp, Homo sapiens
agagggaactgaaca

SEQ ID NO: 3224 - DNA, 15 bp, Homo sapiens
cagagggaactgaac

SEQ ID NO: 3225 - DNA, 15 bp, Homo sapiens
gcagagggaactgaa

SEQ ID NO: 3226 - DNA, 15 bp, Homo sapiens
cgcagagggaactga

SEQ ID NO: 3227 - DNA, 15 bp, Homo sapiens
gcgcagagggaactg

SEQ ID NO: 3228 - DNA, 15 bp, Homo sapiens
cgcgcagagggaact

SEQ ID NO: 3229 - DNA, 15 bp, Homo sapiens
gcgcgcagagggaac

SEQ ID NO: 3230 - DNA, 15 bp, Homo sapiens
ggcgcgcagagggaa

SEQ ID NO: 3231 - DNA, 15 bp, Homo sapiens
tggcgcgcagaggga

SEQ ID NO: 3232 - DNA, 15 bp, Homo sapiens
ctggcgcgcagaggg

SEQ ID NO: 3233 - DNA, 15 bp, Homo sapiens
tctggcgcgcagagg

SEQ ID NO: 3234 - DNA, 15 bp, Homo sapiens
ctctggcgcgcagag

SEQ ID NO: 3235 - DNA, 15 bp, Homo sapiens
cctctggcgcgcaga

SEQ ID NO: 3236 - DNA, 15 bp, Homo sapiens
ccctctggcgcgcag

SEQ ID NO: 3237 - DNA, 15 bp, Homo sapiens
accctctggcgcgca

SEQ ID NO: 3238 - DNA, 15 bp, Homo sapiens
caccctctggcgcgc

SEQ ID NO: 3239 - DNA, 15 bp, Homo sapiens
ccaccctctggcgcg

SEQ ID NO: 3240 - DNA, 15 bp, Homo sapiens
gccaccctctggcgc

SEQ ID NO: 3241 - DNA, 15 bp, Homo sapiens
tgccaccctctggcg

SEQ ID NO: 3242 - DNA, 15 bp, Homo sapiens
gtgccaccctctggc

SEQ ID NO: 3243 - DNA, 15 bp, Homo sapiens
ggtgccaccctctgg

SEQ ID NO: 3244 - DNA, 15 bp, Homo sapiens
gggtgccaccctctg

SEQ ID NO: 3245 - DNA, 15 bp, Homo sapiens
ggggtgccaccctct

SEQ ID NO: 3246 - DNA, 15 bp, Homo sapiens
tggggtgccaccctc

SEQ ID NO: 3247 - DNA, 15 bp, Homo sapiens
ctggggtgccaccct

SEQ ID NO: 3248 - DNA, 15 bp, Homo sapiens
cctggggtgccaccc

SEQ ID NO: 3249 - DNA, 15 bp, Homo sapiens
gcctggggtgccacc

SEQ ID NO: 3250 - DNA, 15 bp, Homo sapiens
tgcctggggtgccac

SEQ ID NO: 3251 - DNA, 15 bp, Homo sapiens
gtgcctggggtgcca

SEQ ID NO: 3252 - DNA, 15 bp, Homo sapiens
agtgcctggggtgcc

SEQ ID NO: 3253 - DNA, 15 bp, Homo sapiens
gagtgcctggggtgc

SEQ ID NO: 3254 - DNA, 15 bp, Homo sapiens
ggagtgcctggggtg

SEQ ID NO: 3255 - DNA, 15 bp, Homo sapiens
tggagtgcctggggt

SEQ ID NO: 3256 - DNA, 15 bp, Homo sapiens
ctggagtgcctgggg

SEQ ID NO: 3257 - DNA, 15 bp, Homo sapiens
tctggagtgcctggg

SEQ ID NO: 3258 - DNA, 15 bp, Homo sapiens
ctctggagtgcctgg

SEQ ID NO: 3259 - DNA, 15 bp, Homo sapiens
cctctggagtgcctg

SEQ ID NO: 3260 - DNA, 15 bp, Homo sapiens
acctctggagtgcct

SEQ ID NO: 3261 - DNA, 15 bp, Homo sapiens
cacctctggagtgcc

SEQ ID NO: 3262 - DNA, 15 bp, Homo sapiens
ccacctctggagtgc

SEQ ID NO: 3263 - DNA, 15 bp, Homo sapiens
tccacctctggagtg

SEQ ID NO: 3264 - DNA, 15 bp, Homo sapiens
ctccacctctggagt

SEQ ID NO: 3265 - DNA, 15 bp, Homo sapiens
tctccacctctggag

SEQ ID NO: 3266 - DNA, 15 bp, Homo sapiens
ctctccacctctgga

SEQ ID NO: 3267 - DNA, 15 bp, Homo sapiens
cctctccacctctgg

SEQ ID NO: 3268 - DNA, 15 bp, Homo sapiens
tcctctccacctctg

SEQ ID NO: 3269 - DNA, 15 bp, Homo sapiens
ctcctctccacctct

SEQ ID NO: 3270 - DNA, 15 bp, Homo sapiens
cctcctctccacctc

SEQ ID NO: 3271 - DNA, 15 bp, Homo sapiens
ccctcctctccacct

SEQ ID NO: 3272 - DNA, 15 bp, Homo sapiens
cccctcctctccacc

SEQ ID NO: 3273 - DNA, 15 bp, Homo sapiens
tcccctcctctccac

SEQ ID NO: 3274 - DNA, 15 bp, Homo sapiens
gtcccctcctctcca

SEQ ID NO: 3275 - DNA, 15 bp, Homo sapiens
cgtcccctcctctcc

SEQ ID NO: 3276 - DNA, 15 bp, Homo sapiens
tcgtcccctcctctc

SEQ ID NO: 3277 - DNA, 15 bp, Homo sapiens
gtcgtcccctcctct

SEQ ID NO: 3278 - DNA, 15 bp, Homo sapiens
tgtcgtcccctcctc

SEQ ID NO: 3279 - DNA, 15 bp, Homo sapiens
ctgtcgtcccctcct

SEQ ID NO: 3280 - DNA, 15 bp, Homo sapiens
cctgtcgtcccctcc

SEQ ID NO: 3281 - DNA, 15 bp, Homo sapiens
ccctgtcgtcccctc

SEQ ID NO: 3282 - DNA, 15 bp, Homo sapiens
cccctgtcgtcccct

SEQ ID NO: 3283 - DNA, 15 bp, Homo sapiens
tcccctgtcgtcccc

SEQ ID NO: 3284 - DNA, 15 bp, Homo sapiens
ctcccctgtcgtccc

SEQ ID NO: 3285 - DNA, 15 bp, Homo sapiens
cctcccctgtcgtcc

SEQ ID NO: 3286 - DNA, 15 bp, Homo sapiens
gcctcccctgtcgtc

SEQ ID NO: 3287 - DNA, 15 bp, Homo sapiens
tgcctcccctgtcgt

SEQ ID NO: 3288 - DNA, 15 bp, Homo sapiens
ttgcctcccctgtcg

SEQ ID NO: 3289 - DNA, 15 bp, Homo sapiens
tttgcctcccctgtc

SEQ ID NO: 3290 - DNA, 15 bp, Homo sapiens
ctttgcctcccctgt

SEQ ID NO: 3291 - DNA, 15 bp, Homo sapiens
tctttgcctcccctg

SEQ ID NO: 3292 - DNA, 15 bp, Homo sapiens
ctctttgcctcccct

SEQ ID NO: 3293 - DNA, 15 bp, Homo sapiens
tctctttgcctcccc

SEQ ID NO: 3294 - DNA, 15 bp, Homo sapiens
ctctctttgcctccc

SEQ ID NO: 3295 - DNA, 15 bp, Homo sapiens
tctctctttgcctcc

SEQ ID NO: 3296 - DNA, 15 bp, Homo sapiens
ctctctctttgcctc

SEQ ID NO: 3297 - DNA, 15 bp, Homo sapiens
cctctctctttgcct

SEQ ID NO: 3298 - DNA, 15 bp, Homo sapiens
tcctctctctttgcc

SEQ ID NO: 3299 - DNA, 15 bp, Homo sapiens
ctcctctctctttgc

SEQ ID NO: 3300 - DNA, 15 bp, Homo sapiens
gctcctctctctttg

SEQ ID NO: 3301 - DNA, 15 bp, Homo sapiens
cgctcctctctcttt

SEQ ID NO: 3302 - DNA, 15 bp, Homo sapiens
ccgctcctctctctt

SEQ ID NO: 3303 - DNA, 15 bp, Homo sapiens
tccgctcctctctct

SEQ ID NO: 3304 - DNA, 15 bp, Homo sapiens
ctccgctcctctctc

SEQ ID NO: 3305 - DNA, 15 bp, Homo sapiens
cctccgctcctctct

SEQ ID NO: 3306 - DNA, 15 bp, Homo sapiens
ccctccgctcctctc

SEQ ID NO: 3307 - DNA, 15 bp, Homo sapiens
tccctccgctcctct

SEQ ID NO: 3308 - DNA, 15 bp, Homo sapiens
ttccctccgctcctc

SEQ ID NO: 3309 - DNA, 15 bp, Homo sapiens
cttccctccgctcct

SEQ ID NO: 3310 - DNA, 15 bp, Homo sapiens
ccttccctccgctcc

SEQ ID NO: 3311 - DNA, 15 bp, Homo sapiens
tccttccctccgctc

SEQ ID NO: 3312 - DNA, 15 bp, Homo sapiens
gtccttccctccgct

SEQ ID NO: 3313 - DNA, 15 bp, Homo sapiens
ggtccttccctccgc

SEQ ID NO: 3314 - DNA, 15 bp, Homo sapiens
tggtccttccctccg

SEQ ID NO: 3315 - DNA, 15 bp, Homo sapiens
ctggtccttccctcc

SEQ ID NO: 3316 - DNA, 15 bp, Homo sapiens
cctggtccttccctc

SEQ ID NO: 3317 - DNA, 15 bp, Homo sapiens
ccctggtccttccct

SEQ ID NO: 3318 - DNA, 15 bp, Homo sapiens
tccctggtccttccc

SEQ ID NO: 3319 - DNA, 15 bp, Homo sapiens
ctccctggtccttcc

SEQ ID NO: 3320 - DNA, 15 bp, Homo sapiens
cctccctggtccttc

SEQ ID NO: 3321 - DNA, 15 bp, Homo sapiens
tcctccctggtcctt

SEQ ID NO: 3322 - DNA, 15 bp, Homo sapiens
ttcctccctggtcct

SEQ ID NO: 3323 - DNA, 15 bp, Homo sapiens
cttcctccctggtcc

SEQ ID NO: 3324 - DNA, 15 bp, Homo sapiens
ccttcctccctggtc

SEQ ID NO: 3325 - DNA, 15 bp, Homo sapiens
tccttcctccctggt

SEQ ID NO: 3326 - DNA, 15 bp, Homo sapiens
gtccttcctccctgg

SEQ ID NO: 3327 - DNA, 15 bp, Homo sapiens
ggtccttcctccctg

SEQ ID NO: 3328 - DNA, 15 bp, Homo sapiens
tggtccttcctccct

SEQ ID NO: 3329 - DNA, 15 bp, Homo sapiens
ttggtccttcctccc

SEQ ID NO: 3330 - DNA, 15 bp, Homo sapiens
cttggtccttcctcc

SEQ ID NO: 3331 - DNA, 15 bp, Homo sapiens
ccttggtccttcctc

SEQ ID NO: 3332 - DNA, 15 bp, Homo sapiens
tccttggtccttcct

SEQ ID NO: 3333 - DNA, 15 bp, Homo sapiens
ctccttggtccttcc

SEQ ID NO: 3334 - DNA, 15 bp, Homo sapiens
cctccttggtccttc

SEQ ID NO: 3335 - DNA, 15 bp, Homo sapiens
ccctccttggtcctt

SEQ ID NO: 3336 - DNA, 15 bp, Homo sapiens
tccctccttggtcct

SEQ ID NO: 3337 - DNA, 15 bp, Homo sapiens
ctccctccttggtcc

SEQ ID NO: 3338 - DNA, 15 bp, Homo sapiens
gctccctccttggtc

SEQ ID NO: 3339 - DNA, 15 bp, Homo sapiens
agctccctccttggt

SEQ ID NO: 3340 - DNA, 15 bp, Homo sapiens
aagctccctccttgg

SEQ ID NO: 3341 - DNA, 15 bp, Homo sapiens
aaagctccctccttg

SEQ ID NO: 3342 - DNA, 15 bp, Homo sapiens
taaagctccctcctt

SEQ ID NO: 3343 - DNA, 15 bp, Homo sapiens
ttaaagctccctcct

SEQ ID NO: 3344 - DNA, 15 bp, Homo sapiens
attaaagctccctcc

SEQ ID NO: 3345 - DNA, 15 bp, Homo sapiens
tattaaagctccctc

SEQ ID NO: 3346 - DNA, 15 bp, Homo sapiens
ttattaaagctccct

SEQ ID NO: 3347 - DNA, 15 bp, Homo sapiens
tttattaaagctccc

SEQ ID NO: 3348 - DNA, 15 bp, Homo sapiens
atttattaaagctcc

SEQ ID NO: 3349 - DNA, 15 bp, Homo sapiens
aatttattaaagctc

SEQ ID NO: 3350 - DNA, 15 bp, Homo sapiens
gaatttattaaagct

SEQ ID NO: 3351 - DNA, 15 bp, Homo sapiens
agaatttattaaagc

SEQ ID NO: 3352 - DNA, 15 bp, Homo sapiens
gagaatttattaaag

SEQ ID NO: 3353 - DNA, 15 bp, Homo sapiens
tgagaatttattaaa

SEQ ID NO: 3354 - DNA, 15 bp, Homo sapiens
ctgagaatttattaa

SEQ ID NO: 3355 - DNA, 15 bp, Homo sapiens
tctgagaatttatta

SEQ ID NO: 3356 - DNA, 15 bp, Homo sapiens
gtctgagaatttatt

SEQ ID NO: 3357 - DNA, 15 bp, Homo sapiens
ggtctgagaatttat

SEQ ID NO: 3358 - DNA, 15 bp, Homo sapiens
aggtctgagaattta

SEQ ID NO: 3359 - DNA, 15 bp, Homo sapiens
aaggtctgagaattt

SEQ ID NO: 3360 - DNA, 15 bp, Homo sapiens
caaggtctgagaatt

SEQ ID NO: 3361 - DNA, 15 bp, Homo sapiens
ccaaggtctgagaat

SEQ ID NO: 3362 - DNA, 15 bp, Homo sapiens
accaaggtctgagaa

SEQ ID NO: 3363 - DNA, 15 bp, Homo sapiens
gaccaaggtctgaga

SEQ ID NO: 3364 - DNA, 15 bp, Homo sapiens
agaccaaggtctgag

SEQ ID NO: 3365 - DNA, 15 bp, Homo sapiens
gagaccaaggtctga

SEQ ID NO: 3366 - DNA, 15 bp, Homo sapiens
cgagaccaaggtctg

SEQ ID NO: 3367 - DNA, 15 bp, Homo sapiens
tcgagaccaaggtct

SEQ ID NO: 3368 - DNA, 15 bp, Homo sapiens
ctcgagaccaaggtc

SEQ ID NO: 3369 - DNA, 15 bp, Homo sapiens
actcgagaccaaggt

SEQ ID NO: 3370 - DNA, 15 bp, Homo sapiens
aactcgagaccaagg

SEQ ID NO: 3371 - DNA, 15 bp, Homo sapiens
gaactcgagaccaag

SEQ ID NO: 3372 - DNA, 15 bp, Homo sapiens
ggaactcgagaccaa

SEQ ID NO: 3373 - DNA, 15 bp, Homo sapiens
gggaactcgagacca

SEQ ID NO: 3374 - DNA, 15 bp, Homo sapiens
cgggaactcgagacc

SEQ ID NO: 3375 - DNA, 15 bp, Homo sapiens
ccgggaactcgagac

SEQ ID NO: 3376 - DNA, 15 bp, Homo sapiens
gccgggaactcgaga

SEQ ID NO: 3377 - DNA, 15 bp, Homo sapiens
agccgggaactcgag

SEQ ID NO: 3378 - DNA, 15 bp, Homo sapiens
tagccgggaactcga

SEQ ID NO: 3379 - DNA, 15 bp, Homo sapiens
ttagccgggaactcg

SEQ ID NO: 3380 - DNA, 15 bp, Homo sapiens
attagccgggaactc

SEQ ID NO: 3381 - DNA, 15 bp, Homo sapiens
aattagccgggaact

SEQ ID NO: 3382 - DNA, 15 bp, Homo sapiens
aaattagccgggaac

SEQ ID NO: 3383 - DNA, 15 bp, Homo sapiens
caaattagccgggaa

SEQ ID NO: 3384 - DNA, 15 bp, Homo sapiens
ccaaattagccggga

SEQ ID NO: 3385 - DNA, 15 bp, Homo sapiens
cccaaattagccggg

SEQ ID NO: 3386 - DNA, 15 bp, Homo sapiens
ccccaaattagccgg

SEQ ID NO: 3387 - DNA, 15 bp, Homo sapiens
cccccaaattagccg

SEQ ID NO: 3388 - DNA, 15 bp, Homo sapiens
gcccccaaattagcc

SEQ ID NO: 3389 - DNA, 15 bp, Homo sapiens
tgcccccaaattagc

SEQ ID NO: 3390 - DNA, 15 bp, Homo sapiens
ttgcccccaaattag

SEQ ID NO: 3391 - DNA, 15 bp, Homo sapiens
tttgcccccaaatta

SEQ ID NO: 3392 - DNA, 15 bp, Homo sapiens
ctttgcccccaaatt

SEQ ID NO: 3393 - DNA, 15 bp, Homo sapiens
gctttgcccccaaat

SEQ ID NO: 3394 - DNA, 15 bp, Homo sapiens
ggctttgcccccaaa

SEQ ID NO: 3395 - DNA, 15 bp, Homo sapiens
cggctttgcccccaa

SEQ ID NO: 3396 - DNA, 15 bp, Homo sapiens
tcggctttgccccca

SEQ ID NO: 3397 - DNA, 15 bp, Homo sapiens
gtcggctttgccccc

SEQ ID NO: 3398 - DNA, 15 bp, Homo sapiens
ggtcggctttgcccc

SEQ ID NO: 3399 - DNA, 15 bp, Homo sapiens
cggtcggctttgccc

SEQ ID NO: 3400 - DNA, 15 bp, Homo sapiens
tcggtcggctttgcc

SEQ ID NO: 3401 - DNA, 15 bp, Homo sapiens
gtcggtcggctttgc

SEQ ID NO: 3402 - DNA, 15 bp, Homo sapiens
ggtcggtcggctttg

SEQ ID NO: 3403 - DNA, 15 bp, Homo sapiens
gggtcggtcggcttt

SEQ ID NO: 3404 - DNA, 15 bp, Homo sapiens
ggggtcggtcggctt

SEQ ID NO: 3405 - DNA, 15 bp, Homo sapiens
tggggtcggtcggct

SEQ ID NO: 3406 - DNA, 15 bp, Homo sapiens
gtggggtcggtcggc

SEQ ID NO: 3407 - DNA, 15 bp, Homo sapiens
cgtggggtcggtcgg

SEQ ID NO: 3408 - DNA, 15 bp, Homo sapiens
acgtggggtcggtcg

SEQ ID NO: 3409 - DNA, 15 bp, Homo sapiens
gacgtggggtcggtc

SEQ ID NO: 3410 - DNA, 15 bp, Homo sapiens
ggacgtggggtcggt

SEQ ID NO: 3411 - DNA, 15 bp, Homo sapiens
tggacgtggggtcgg

SEQ ID NO: 3412 - DNA, 15 bp, Homo sapiens
gtggacgtggggtcg

SEQ ID NO: 3413 - DNA, 15 bp, Homo sapiens
cgtggacgtggggtc

SEQ ID NO: 3414 - DNA, 15 bp, Homo sapiens
gcgtggacgtggggt

SEQ ID NO: 3415 - DNA, 15 bp, Homo sapiens
ggcgtggacgtgggg

SEQ ID NO: 3416 - DNA, 15 bp, Homo sapiens
gggcgtggacgtggg

SEQ ID NO: 3417 - DNA, 15 bp, Homo sapiens
tgggcgtggacgtgg

SEQ ID NO: 3418 - DNA, 15 bp, Homo sapiens
gtgggcgtggacgtg

SEQ ID NO: 3419 - DNA, 15 bp, Homo sapiens
ggtgggcgtggacgt

SEQ ID NO: 3420 - DNA, 15 bp, Homo sapiens
gggtgggcgtggacg

SEQ ID NO: 3421 - DNA, 15 bp, Homo sapiens
ggggtgggcgtggac

SEQ ID NO: 3422 - DNA, 15 bp, Homo sapiens
gggggtgggcgtgga

SEQ ID NO: 3423 - DNA, 15 bp, Homo sapiens
agggggtgggcgtgg

SEQ ID NO: 3424 - DNA, 15 bp, Homo sapiens
aagggggtgggcgtg

SEQ ID NO: 3425 - DNA, 15 bp, Homo sapiens
taagggggtgggcgt

SEQ ID NO: 3426 - DNA, 15 bp, Homo sapiens
gtaagggggtgggcg

SEQ ID NO: 3427 - DNA, 15 bp, Homo sapiens
cgtaagggggtgggc

SEQ ID NO: 3428 - DNA, 15 bp, Homo sapiens
ccgtaagggggtggg

SEQ ID NO: 3429 - DNA, 15 bp, Homo sapiens
cccgtaagggggtgg

SEQ ID NO: 3430 - DNA, 15 bp, Homo sapiens
tcccgtaagggggtg

SEQ ID NO: 3431 - DNA, 15 bp, Homo sapiens
ttcccgtaagggggt

SEQ ID NO: 3432 - DNA, 15 bp, Homo sapiens
tttcccgtaaggggg

SEQ ID NO: 3433 - DNA, 15 bp, Homo sapiens
ttttcccgtaagggg

SEQ ID NO: 3434 - DNA, 15 bp, Homo sapiens
cttttcccgtaaggg

SEQ ID NO: 3435 - DNA, 15 bp, Homo sapiens
gcttttcccgtaagg

SEQ ID NO: 3436 - DNA, 15 bp, Homo sapiens
ggcttttcccgtaag

SEQ ID NO: 3437 - DNA, 15 bp, Homo sapiens
cggcttttcccgtaa

SEQ ID NO: 3438 - DNA, 15 bp, Homo sapiens
ccggcttttcccgta

SEQ ID NO: 3439 - DNA, 15 bp, Homo sapiens
cccggcttttcccgt

SEQ ID NO: 3440 - DNA, 15 bp, Homo sapiens
ccccggcttttcccg

SEQ ID NO: 3441 - DNA, 15 bp, Homo sapiens
accccggcttttccc

SEQ ID NO: 3442 - DNA, 15 bp, Homo sapiens
aaccccggcttttcc

SEQ ID NO: 3443 - DNA, 15 bp, Homo sapiens
aaaccccggcttttc

SEQ ID NO: 3444 - DNA, 15 bp, Homo sapiens
gaaaccccggctttt

SEQ ID NO: 3445 - DNA, 15 bp, Homo sapiens
ggaaaccccggcttt

SEQ ID NO: 3446 - DNA, 15 bp, Homo sapiens
tggaaaccccggctt

SEQ ID NO: 3447 - DNA, 15 bp, Homo sapiens
gtggaaaccccggct

SEQ ID NO: 3448 - DNA, 15 bp, Homo sapiens
agtggaaaccccggc

SEQ ID NO: 3449 - DNA, 15 bp, Homo sapiens
cagtggaaaccccgg

SEQ ID NO: 3450 - DNA, 15 bp, Homo sapiens
ccagtggaaaccccg

SEQ ID NO: 3451 - DNA, 15 bp, Homo sapiens
cccagtggaaacccc

SEQ ID NO: 3452 - DNA, 15 bp, Homo sapiens
gcccagtggaaaccc

SEQ ID NO: 3453 - DNA, 15 bp, Homo sapiens
agcccagtggaaacc

SEQ ID NO: 3454 - DNA, 15 bp, Homo sapiens
tagcccagtggaaac

SEQ ID NO: 3455 - DNA, 15 bp, Homo sapiens
ctagcccagtggaaa

SEQ ID NO: 3456 - DNA, 15 bp, Homo sapiens
cctagcccagtggaa

SEQ ID NO: 3457 - DNA, 15 bp, Homo sapiens
acctagcccagtgga

SEQ ID NO: 3458 - DNA, 15 bp, Homo sapiens
cacctagcccagtgg

SEQ ID NO: 3459 - DNA, 15 bp, Homo sapiens
acacctagcccagtg

SEQ ID NO: 3460 - DNA, 15 bp, Homo sapiens
gacacctagcccagt

SEQ ID NO: 3461 - DNA, 15 bp, Homo sapiens
tgacacctagcccag

SEQ ID NO: 3462 - DNA, 15 bp, Homo sapiens
ctgacacctagccca

SEQ ID NO: 3463 - DNA, 15 bp, Homo sapiens
tctgacacctagccc

SEQ ID NO: 3464 - DNA, 15 bp, Homo sapiens
ctctgacacctagcc

SEQ ID NO: 3465 - DNA, 15 bp, Homo sapiens
actctgacacctagc

SEQ ID NO: 3466 - DNA, 15 bp, Homo sapiens
aactctgacacctag

SEQ ID NO: 3467 - DNA, 15 bp, Homo sapiens
caactctgacaccta

SEQ ID NO: 3468 - DNA, 15 bp, Homo sapiens
ccaactctgacacct

SEQ ID NO: 3469 - DNA, 15 bp, Homo sapiens
cccaactctgacacc

SEQ ID NO: 3470 - DNA, 15 bp, Homo sapiens
tcccaactctgacac

SEQ ID NO: 3471 - DNA, 15 bp, Homo sapiens
ttcccaactctgaca

SEQ ID NO: 3472 - DNA, 15 bp, Homo sapiens
attcccaactctgac

SEQ ID NO: 3473 - DNA, 15 bp, Homo sapiens
cattcccaactctga

SEQ ID NO: 3474 - DNA, 15 bp, Homo sapiens
acattcccaactctg

SEQ ID NO: 3475 - DNA, 15 bp, Homo sapiens
gacattcccaactct

SEQ ID NO: 3476 - DNA, 15 bp, Homo sapiens
agacattcccaactc

SEQ ID NO: 3477 - DNA, 15 bp, Homo sapiens
tagacattcccaact

SEQ ID NO: 3478 - DNA, 15 bp, Homo sapiens
ttagacattcccaac

SEQ ID NO: 3479 - DNA, 15 bp, Homo sapiens
tttagacattcccaa

SEQ ID NO: 3480 - DNA, 15 bp, Homo sapiens
ttttagacattccca

SEQ ID NO: 3481 - DNA, 15 bp, Homo sapiens
gttttagacattccc

SEQ ID NO: 3482 - DNA, 15 bp, Homo sapiens
tgttttagacattcc

SEQ ID NO: 3483 - DNA, 15 bp, Homo sapiens
ttgttttagacattc

SEQ ID NO: 3484 - DNA, 15 bp, Homo sapiens
tttgttttagacatt

SEQ ID NO: 3485 - DNA, 15 bp, Homo sapiens
ttttgttttagacat

SEQ ID NO: 3486 - DNA, 15 bp, Homo sapiens
tttttgttttagaca

SEQ ID NO: 3487 - DNA, 15 bp, Homo sapiens
ttttttgttttagac

SEQ ID NO: 3488 - DNA, 15 bp, Homo sapiens
cttttttgttttaga

SEQ ID NO: 3489 - DNA, 15 bp, Homo sapiens
ccttttttgttttag

SEQ ID NO: 3490 - DNA, 15 bp, Homo sapiens
gccttttttgtttta

SEQ ID NO: 3491 - DNA, 15 bp, Homo sapiens
agccttttttgtttt

SEQ ID NO: 3492 - DNA, 15 bp, Homo sapiens
aagccttttttgttt

SEQ ID NO: 3493 - DNA, 15 bp, Homo sapiens
gaagccttttttgtt

SEQ ID NO: 3494 - DNA, 15 bp, Homo sapiens
ggaagccttttttgt

SEQ ID NO: 3495 - DNA, 15 bp, Homo sapiens
cggaagccttttttg

SEQ ID NO: 3496 - DNA, 15 bp, Homo sapiens
tcggaagcctttttt

SEQ ID NO: 3497 - DNA, 15 bp, Homo sapiens
ctcggaagccttttt

SEQ ID NO: 3498 - DNA, 15 bp, Homo sapiens
cctcggaagcctttt

SEQ ID NO: 3499 - DNA, 15 bp, Homo sapiens
ccctcggaagccttt

SEQ ID NO: 3500 - DNA, 15 bp, Homo sapiens
accctcggaagcctt

SEQ ID NO: 3501 - DNA, 15 bp, Homo sapiens
aaccctcggaagcct

SEQ ID NO: 3502 - DNA, 15 bp, Homo sapiens
taaccctcggaagcc

SEQ ID NO: 3503 - DNA, 15 bp, Homo sapiens
ataaccctcggaagc

SEQ ID NO: 3504 - DNA, 15 bp, Homo sapiens
aataaccctcggaag

SEQ ID NO: 3505 - DNA, 15 bp, Homo sapiens
gaataaccctcggaa

SEQ ID NO: 3506 - DNA, 15 bp, Homo sapiens
tgaataaccctcgga

SEQ ID NO: 3507 - DNA, 15 bp, Homo sapiens
atgaataaccctcgg

SEQ ID NO: 3508 - DNA, 15 bp, Homo sapiens
catgaataaccctcg

SEQ ID NO: 3509 - DNA, 15 bp, Homo sapiens
ccatgaataaccctc

SEQ ID NO: 3510 - DNA, 15 bp, Homo sapiens
gccatgaataaccct

SEQ ID NO: 3511 - DNA, 15 bp, Homo sapiens
ggccatgaataaccc

SEQ ID NO: 3512 - DNA, 15 bp, Homo sapiens
tggccatgaataacc

SEQ ID NO: 3513 - DNA, 15 bp, Homo sapiens
ttggccatgaataac

SEQ ID NO: 3514 - DNA, 15 bp, Homo sapiens
gttggccatgaataa

SEQ ID NO: 3515 - DNA, 15 bp, Homo sapiens
tgttggccatgaata

SEQ ID NO: 3516 - DNA, 15 bp, Homo sapiens
ctgttggccatgaat

SEQ ID NO: 3517 - DNA, 15 bp, Homo sapiens
actgttggccatgaa

SEQ ID NO: 3518 - DNA, 15 bp, Homo sapiens
aactgttggccatga

SEQ ID NO: 3519 - DNA, 15 bp, Homo sapiens
aaactgttggccatg

SEQ ID NO: 3520 - DNA, 15 bp, Homo sapiens
gaaactgttggccat

SEQ ID NO: 3521 - DNA, 15 bp, Homo sapiens
ggaaactgttggcca

SEQ ID NO: 3522 - DNA, 15 bp, Homo sapiens
tggaaactgttggcc

SEQ ID NO: 3523 - DNA, 15 bp, Homo sapiens
gtggaaactgttggc

SEQ ID NO: 3524 - DNA, 15 bp, Homo sapiens
tgtggaaactgttgg

SEQ ID NO: 3525 - DNA, 15 bp, Homo sapiens
ctgtggaaactgttg

SEQ ID NO: 3526 - DNA, 15 bp, Homo sapiens
cctgtggaaactgtt

SEQ ID NO: 3527 - DNA, 15 bp, Homo sapiens
tcctgtggaaactgt

SEQ ID NO: 3528 - DNA, 15 bp, Homo sapiens
ctcctgtggaaactg

SEQ ID NO: 3529 - DNA, 15 bp, Homo sapiens
tctcctgtggaaact

SEQ ID NO: 3530 - DNA, 15 bp, Homo sapiens
ttctcctgtggaaac

SEQ ID NO: 3531 - DNA, 15 bp, Homo sapiens
attctcctgtggaaa

SEQ ID NO: 3532 - DNA, 15 bp, Homo sapiens
gattctcctgtggaa

SEQ ID NO: 3533 - DNA, 15 bp, Homo sapiens
ggattctcctgtgga

SEQ ID NO: 3534 - DNA, 15 bp, Homo sapiens
tggattctcctgtgg

SEQ ID NO: 3535 - DNA, 15 bp, Homo sapiens
ttggattctcctgtg

SEQ ID NO: 3536 - DNA, 15 bp, Homo sapiens
tttggattctcctgt

SEQ ID NO: 3537 - DNA, 15 bp, Homo sapiens
ctttggattctcctg

SEQ ID NO: 3538 - DNA, 15 bp, Homo sapiens
cctttggattctcct

SEQ ID NO: 3539 - DNA, 15 bp, Homo sapiens
ccctttggattctcc

SEQ ID NO: 3540 - DNA, 15 bp, Homo sapiens
tccctttggattctc

SEQ ID NO: 3541 - DNA, 15 bp, Homo sapiens
ttccctttggattct

SEQ ID NO: 3542 - DNA, 15 bp, Homo sapiens
tttccctttggattc

SEQ ID NO: 3543 - DNA, 15 bp, Homo sapiens
gtttccctttggatt

SEQ ID NO: 3544 - DNA, 15 bp, Homo sapiens
agtttccctttggat

SEQ ID NO: 3545 - DNA, 15 bp, Homo sapiens
tagtttccctttgga

SEQ ID NO: 3546 - DNA, 15 bp, Homo sapiens
ctagtttccctttgg

SEQ ID NO: 3547 - DNA, 15 bp, Homo sapiens
actagtttccctttg

SEQ ID NO: 3548 - DNA, 15 bp, Homo sapiens
aactagtttcccttt

SEQ ID NO: 3549 - DNA, 15 bp, Homo sapiens
aaactagtttccctt

SEQ ID NO: 3550 - DNA, 15 bp, Homo sapiens
gaaactagtttccct

SEQ ID NO: 3551 - DNA, 15 bp, Homo sapiens
ggaaactagtttccc

SEQ ID NO: 3552 - DNA, 15 bp, Homo sapiens
cggaaactagtttcc

SEQ ID NO: 3553 - DNA, 15 bp, Homo sapiens
ccggaaactagtttc

SEQ ID NO: 3554 - DNA, 15 bp, Homo sapiens
cccggaaactagttt

SEQ ID NO: 3555 - DNA, 15 bp, Homo sapiens
ccccggaaactagtt

SEQ ID NO: 3556 - DNA, 15 bp, Homo sapiens
gccccggaaactagt

SEQ ID NO: 3557 - DNA, 15 bp, Homo sapiens
ggccccggaaactag

SEQ ID NO: 3558 - DNA, 15 bp, Homo sapiens
cggccccggaaacta

SEQ ID NO: 3559 - DNA, 15 bp, Homo sapiens
gcggccccggaaact

SEQ ID NO: 3560 - DNA, 15 bp, Homo sapiens
agcggccccggaaac

SEQ ID NO: 3561 - DNA, 15 bp, Homo sapiens
cagcggccccggaaa

SEQ ID NO: 3562 - DNA, 15 bp, Homo sapiens
acagcggccccggaa

SEQ ID NO: 3563 - DNA, 15 bp, Homo sapiens
cacagcggccccgga

SEQ ID NO: 3564 - DNA, 15 bp, Homo sapiens
acacagcggccccgg

SEQ ID NO: 3565 - DNA, 15 bp, Homo sapiens
cacacagcggccccg

SEQ ID NO: 3566 - DNA, 15 bp, Homo sapiens
acacacagcggcccc

SEQ ID NO: 3567 - DNA, 15 bp, Homo sapiens
cacacacagcggccc

SEQ ID NO: 3568 - DNA, 15 bp, Homo sapiens
gcacacacagcggcc

SEQ ID NO: 3569 - DNA, 15 bp, Homo sapiens
cgcacacacagcggc

SEQ ID NO: 3570 - DNA, 15 bp, Homo sapiens
ccgcacacacagcgg

SEQ ID NO: 3571 - DNA, 15 bp, Homo sapiens
cccgcacacacagcg

SEQ ID NO: 3572 - DNA, 15 bp, Homo sapiens
acccgcacacacagc

SEQ ID NO: 3573 - DNA, 15 bp, Homo sapiens
cacccgcacacacag

SEQ ID NO: 3574 - DNA, 15 bp, Homo sapiens
gcacccgcacacaca

SEQ ID NO: 3575 - DNA, 15 bp, Homo sapiens
agcacccgcacacac

SEQ ID NO: 3576 - DNA, 15 bp, Homo sapiens
aagcacccgcacaca

SEQ ID NO: 3577 - DNA, 15 bp, Homo sapiens
caagcacccgcacac

SEQ ID NO: 3578 - DNA, 15 bp, Homo sapiens
ccaagcacccgcaca

SEQ ID NO: 3579 - DNA, 15 bp, Homo sapiens
accaagcacccgcac

SEQ ID NO: 3580 - DNA, 15 bp, Homo sapiens
caccaagcacccgca

SEQ ID NO: 3581 - DNA, 15 bp, Homo sapiens
ccaccaagcacccgc

SEQ ID NO: 3582 - DNA, 15 bp, Homo sapiens
cccaccaagcacccg

SEQ ID NO: 3583 - DNA, 15 bp, Homo sapiens
gcccaccaagcaccc

SEQ ID NO: 3584 - DNA, 15 bp, Homo sapiens
agcccaccaagcacc

SEQ ID NO: 3585 - DNA, 15 bp, Homo sapiens
cagcccaccaagcac

SEQ ID NO: 3586 - DNA, 15 bp, Homo sapiens
tcagcccaccaagca

SEQ ID NO: 3587 - DNA, 15 bp, Homo sapiens
ttcagcccaccaagc

SEQ ID NO: 3588 - DNA, 15 bp, Homo sapiens
tttcagcccaccaag

SEQ ID NO: 3589 - DNA, 15 bp, Homo sapiens
ctttcagcccaccaa

SEQ ID NO: 3590 - DNA, 15 bp, Homo sapiens
gctttcagcccacca

SEQ ID NO: 3591 - DNA, 15 bp, Homo sapiens
agctttcagcccacc

SEQ ID NO: 3592 - DNA, 15 bp, Homo sapiens
cagctttcagcccac

SEQ ID NO: 3593 - DNA, 15 bp, Homo sapiens
gcagctttcagccca

SEQ ID NO: 3594 - DNA, 15 bp, Homo sapiens
agcagctttcagccc

SEQ ID NO: 3595 - DNA, 15 bp, Homo sapiens
cagcagctttcagcc

SEQ ID NO: 3596 - DNA, 15 bp, Homo sapiens
acagcagctttcagc

SEQ ID NO: 3597 - DNA, 15 bp, Homo sapiens
gacagcagctttcag

SEQ ID NO: 3598 - DNA, 15 bp, Homo sapiens
tgacagcagctttca

SEQ ID NO: 3599 - DNA, 15 bp, Homo sapiens
gtgacagcagctttc

SEQ ID NO: 3600 - DNA, 15 bp, Homo sapiens
agtgacagcagcttt

SEQ ID NO: 3601 - DNA, 15 bp, Homo sapiens
tagtgacagcagctt

SEQ ID NO: 3602 - DNA, 15 bp, Homo sapiens
ctagtgacagcagct

SEQ ID NO: 3603 - DNA, 15 bp, Homo sapiens
tctagtgacagcagc

SEQ ID NO: 3604 - DNA, 15 bp, Homo sapiens
atctagtgacagcag

SEQ ID NO: 3605 - DNA, 15 bp, Homo sapiens
catctagtgacagca

SEQ ID NO: 3606 - DNA, 15 bp, Homo sapiens
ccatctagtgacagc

SEQ ID NO: 3607 - DNA, 15 bp, Homo sapiens
gccatctagtgacag

SEQ ID NO: 3608 - DNA, 15 bp, Homo sapiens
agccatctagtgaca

SEQ ID NO: 3609 - DNA, 15 bp, Homo sapiens
cagccatctagtgac

SEQ ID NO: 3610 - DNA, 15 bp, Homo sapiens
acagccatctagtga

SEQ ID NO: 3611 - DNA, 15 bp, Homo sapiens
tacagccatctagtg

SEQ ID NO: 3612 - DNA, 15 bp, Homo sapiens
ttacagccatctagt

SEQ ID NO: 3613 - DNA, 15 bp, Homo sapiens
cttacagccatctag

SEQ ID NO: 3614 - DNA, 15 bp, Homo sapiens
acttacagccatcta

SEQ ID NO: 3615 - DNA, 15 bp, Homo sapiens
cacttacagccatct

SEQ ID NO: 3616 - DNA, 15 bp, Homo sapiens
acacttacagccatc

SEQ ID NO: 3617 - DNA, 15 bp, Homo sapiens
cacacttacagccat

SEQ ID NO: 3618 - DNA, 15 bp, Homo sapiens
gcacacttacagcca

SEQ ID NO: 3619 - DNA, 15 bp, Homo sapiens
ggcacacttacagcc

SEQ ID NO: 3620 - DNA, 15 bp, Homo sapiens
tggcacacttacagc

SEQ ID NO: 3621 - DNA, 15 bp, Homo sapiens
ttggcacacttacag

SEQ ID NO: 3622 - DNA, 15 bp, Homo sapiens
gttggcacacttaca

SEQ ID NO: 3623 - DNA, 15 bp, Homo sapiens
tgttggcacacttac

SEQ ID NO: 3624 - DNA, 15 bp, Homo sapiens
atgttggcacactta

SEQ ID NO: 3625 - DNA, 15 bp, Homo sapiens
gatgttggcacactt

SEQ ID NO: 3626 - DNA, 15 bp, Homo sapiens
agatgttggcacact

SEQ ID NO: 3627 - DNA, 15 bp, Homo sapiens
cagatgttggcacac

SEQ ID NO: 3628 - DNA, 15 bp, Homo sapiens
tcagatgttggcaca

SEQ ID NO: 3629 - DNA, 15 bp, Homo sapiens
gtcagatgttggcac

SEQ ID NO: 3630 - DNA, 15 bp, Homo sapiens
ggtcagatgttggca

SEQ ID NO: 3631 - DNA, 15 bp, Homo sapiens
aggtcagatgttggc

SEQ ID NO: 3632 - DNA, 15 bp, Homo sapiens
caggtcagatgttgg

SEQ ID NO: 3633 - DNA, 15 bp, Homo sapiens
acaggtcagatgttg

SEQ ID NO: 3634 - DNA, 15 bp, Homo sapiens
gacaggtcagatgtt

SEQ ID NO: 3635 - DNA, 15 bp, Homo sapiens
ggacaggtcagatgt

SEQ ID NO: 3636 - DNA, 15 bp, Homo sapiens
gggacaggtcagatg

SEQ ID NO: 3637 - DNA, 15 bp, Homo sapiens
tgggacaggtcagat

SEQ ID NO: 3638 - DNA, 15 bp, Homo sapiens
atgggacaggtcaga

SEQ ID NO: 3639 - DNA, 15 bp, Homo sapiens
aatgggacaggtcag

SEQ ID NO: 3640 - DNA, 15 bp, Homo sapiens
caatgggacaggtca

SEQ ID NO: 3641 - DNA, 15 bp, Homo sapiens
acaatgggacaggtc

SEQ ID NO: 3642 - DNA, 15 bp, Homo sapiens
cacaatgggacaggt

SEQ ID NO: 3643 - DNA, 15 bp, Homo sapiens
acacaatgggacagg

SEQ ID NO: 3644 - DNA, 15 bp, Homo sapiens
aacacaatgggacag

SEQ ID NO: 3645 - DNA, 15 bp, Homo sapiens
caacacaatgggaca

SEQ ID NO: 3646 - DNA, 15 bp, Homo sapiens
acaacacaatgggac

SEQ ID NO: 3647 - DNA, 15 bp, Homo sapiens
cacaacacaatggga

SEQ ID NO: 3648 - DNA, 15 bp, Homo sapiens
acacaacacaatggg

SEQ ID NO: 3649 - DNA, 15 bp, Homo sapiens
aacacaacacaatgg

SEQ ID NO: 3650 - DNA, 15 bp, Homo sapiens
aaacacaacacaatg

SEQ ID NO: 3651 - DNA, 15 bp, Homo sapiens
aaaacacaacacaat

SEQ ID NO: 3652 - DNA, 15 bp, Homo sapiens
caaaacacaacacaa

SEQ ID NO: 3653 - DNA, 15 bp, Homo sapiens
gcaaaacacaacaca

SEQ ID NO: 3654 - DNA, 15 bp, Homo sapiens
tgcaaaacacaacac

SEQ ID NO: 3655 - DNA, 15 bp, Homo sapiens
ctgcaaaacacaaca

SEQ ID NO: 3656 - DNA, 15 bp, Homo sapiens
actgcaaaacacaac

SEQ ID NO: 3657 - DNA, 15 bp, Homo sapiens
aactgcaaaacacaa

SEQ ID NO: 3658 - DNA, 15 bp, Homo sapiens
caactgcaaaacaca

SEQ ID NO: 3659 - DNA, 15 bp, Homo sapiens
gcaactgcaaaacac

SEQ ID NO: 3660 - DNA, 15 bp, Homo sapiens
agcaactgcaaaaca

SEQ ID NO: 3661 - DNA, 15 bp, Homo sapiens
cagcaactgcaaaac

SEQ ID NO: 3662 - DNA, 15 bp, Homo sapiens
ccagcaactgcaaaa

SEQ ID NO: 3663 - DNA, 15 bp, Homo sapiens
tccagcaactgcaaa

SEQ ID NO: 3664 - DNA, 15 bp, Homo sapiens
atccagcaactgcaa

SEQ ID NO: 3665 - DNA, 15 bp, Homo sapiens
aatccagcaactgca

SEQ ID NO: 3666 - DNA, 15 bp, Homo sapiens
aaatccagcaactgc

SEQ ID NO: 3667 - DNA, 15 bp, Homo sapiens
caaatccagcaactg

SEQ ID NO: 3668 - DNA, 15 bp, Homo sapiens
acaaatccagcaact

SEQ ID NO: 3669 - DNA, 15 bp, Homo sapiens
cacaaatccagcaac

SEQ ID NO: 3670 - DNA, 15 bp, Homo sapiens
gcacaaatccagcaa

SEQ ID NO: 3671 - DNA, 15 bp, Homo sapiens
cgcacaaatccagca

SEQ ID NO: 3672 - DNA, 15 bp, Homo sapiens
tcgcacaaatccagc

SEQ ID NO: 3673 - DNA, 15 bp, Homo sapiens
gtcgcacaaatccag

SEQ ID NO: 3674 - DNA, 15 bp, Homo sapiens
agtcgcacaaatcca

SEQ ID NO: 3675 - DNA, 15 bp, Homo sapiens
gagtcgcacaaatcc

SEQ ID NO: 3676 - DNA, 15 bp, Homo sapiens
cgagtcgcacaaatc

SEQ ID NO: 3677 - DNA, 15 bp, Homo sapiens
ccgagtcgcacaaat

SEQ ID NO: 3678 - DNA, 15 bp, Homo sapiens
accgagtcgcacaaa

SEQ ID NO: 3679 - DNA, 15 bp, Homo sapiens
caccgagtcgcacaa

SEQ ID NO: 3680 - DNA, 15 bp, Homo sapiens
tcaccgagtcgcaca

SEQ ID NO: 3681 - DNA, 15 bp, Homo sapiens
ttcaccgagtcgcac

SEQ ID NO: 3682 - DNA, 15 bp, Homo sapiens
cttcaccgagtcgca

SEQ ID NO: 3683 - DNA, 15 bp, Homo sapiens
ccttcaccgagtcgc

SEQ ID NO: 3684 - DNA, 15 bp, Homo sapiens
tccttcaccgagtcg

SEQ ID NO: 3685 - DNA, 15 bp, Homo sapiens
atccttcaccgagtc

SEQ ID NO: 3686 - DNA, 15 bp, Homo sapiens
catccttcaccgagt

SEQ ID NO: 3687 - DNA, 15 bp, Homo sapiens
tcatccttcaccgag

SEQ ID NO: 3688 - DNA, 15 bp, Homo sapiens
atcatccttcaccga

SEQ ID NO: 3689 - DNA, 15 bp, Homo sapiens
catcatccttcaccg

SEQ ID NO: 3690 - DNA, 15 bp, Homo sapiens
gcatcatccttcacc

SEQ ID NO: 3691 - DNA, 15 bp, Homo sapiens
ggcatcatccttcac

SEQ ID NO: 3692 - DNA, 15 bp, Homo sapiens
gggcatcatccttca

SEQ ID NO: 3693 - DNA, 15 bp, Homo sapiens
cgggcatcatccttc

SEQ ID NO: 3694 - DNA, 15 bp, Homo sapiens
ccgggcatcatcctt

SEQ ID NO: 3695 - DNA, 15 bp, Homo sapiens
tccgggcatcatcct

SEQ ID NO: 3696 - DNA, 15 bp, Homo sapiens
ctccgggcatcatcc

SEQ ID NO: 3697 - DNA, 15 bp, Homo sapiens
cctccgggcatcatc

SEQ ID NO: 3698 - DNA, 15 bp, Homo sapiens
ccctccgggcatcat

SEQ ID NO: 3699 - DNA, 15 bp, Homo sapiens
accctccgggcatca

SEQ ID NO: 3700 - DNA, 15 bp, Homo sapiens
caccctccgggcatc

SEQ ID NO: 3701 - DNA, 15 bp, Homo sapiens
tcaccctccgggcat

SEQ ID NO: 3702 - DNA, 15 bp, Homo sapiens
atcaccctccgggca

SEQ ID NO: 3703 - DNA, 15 bp, Homo sapiens
gatcaccctccgggc

SEQ ID NO: 3704 - DNA, 15 bp, Homo sapiens
agatcaccctccggg

SEQ ID NO: 3705 - DNA, 15 bp, Homo sapiens
gagatcaccctccgg

SEQ ID NO: 3706 - DNA, 15 bp, Homo sapiens
cgagatcaccctccg

SEQ ID NO: 3707 - DNA, 15 bp, Homo sapiens
tcgagatcaccctcc

SEQ ID NO: 3708 - DNA, 15 bp, Homo sapiens
gtcgagatcaccctc

SEQ ID NO: 3709 - DNA, 15 bp, Homo sapiens
ggtcgagatcaccct

SEQ ID NO: 3710 - DNA, 15 bp, Homo sapiens
aggtcgagatcaccc

SEQ ID NO: 3711 - DNA, 15 bp, Homo sapiens
aaggtcgagatcacc

SEQ ID NO: 3712 - DNA, 15 bp, Homo sapiens
aaaggtcgagatcac

SEQ ID NO: 3713 - DNA, 15 bp, Homo sapiens
taaaggtcgagatca

SEQ ID NO: 3714 - DNA, 15 bp, Homo sapiens
ttaaaggtcgagatc

SEQ ID NO: 3715 - DNA, 15 bp, Homo sapiens
gttaaaggtcgagat

SEQ ID NO: 3716 - DNA, 15 bp, Homo sapiens
tgttaaaggtcgaga

SEQ ID NO: 3717 - DNA, 15 bp, Homo sapiens
atgttaaaggtcgag

SEQ ID NO: 3718 - DNA, 15 bp, Homo sapiens
aatgttaaaggtcga

SEQ ID NO: 3719 - DNA, 15 bp, Homo sapiens
gaatgttaaaggtcg

SEQ ID NO: 3720 - DNA, 15 bp, Homo sapiens
ggaatgttaaaggtc

SEQ ID NO: 3721 - DNA, 15 bp, Homo sapiens
tggaatgttaaaggt

SEQ ID NO: 3722 - DNA, 15 bp, Homo sapiens
gtggaatgttaaagg

SEQ ID NO: 3723 - DNA, 15 bp, Homo sapiens
tgtggaatgttaaag

SEQ ID NO: 3724 - DNA, 15 bp, Homo sapiens
gtgtggaatgttaaa

SEQ ID NO: 3725 - DNA, 15 bp, Homo sapiens
tgtgtggaatgttaa

SEQ ID NO: 3726 - DNA, 15 bp, Homo sapiens
gtgtgtggaatgtta

SEQ ID NO: 3727 - DNA, 15 bp, Homo sapiens
ggtgtgtggaatgtt

SEQ ID NO: 3728 - DNA, 15 bp, Homo sapiens
aggtgtgtggaatgt

SEQ ID NO: 3729 - DNA, 15 bp, Homo sapiens
taggtgtgtggaatg

SEQ ID NO: 3730 - DNA, 15 bp, Homo sapiens
gtaggtgtgtggaat

SEQ ID NO: 3731 - DNA, 15 bp, Homo sapiens
ggtaggtgtgtggaa

SEQ ID NO: 3732 - DNA, 15 bp, Homo sapiens
aggtaggtgtgtgga

SEQ ID NO: 3733 - DNA, 15 bp, Homo sapiens
gaggtaggtgtgtgg

SEQ ID NO: 3734 - DNA, 15 bp, Homo sapiens
ggaggtaggtgtgtg

SEQ ID NO: 3735 - DNA, 15 bp, Homo sapiens
tggaggtaggtgtgt

SEQ ID NO: 3736 - DNA, 15 bp, Homo sapiens
gtggaggtaggtgtg

SEQ ID NO: 3737 - DNA, 15 bp, Homo sapiens
cgtggaggtaggtgt

SEQ ID NO: 3738 - DNA, 15 bp, Homo sapiens
gcgtggaggtaggtg

SEQ ID NO: 3739 - DNA, 15 bp, Homo sapiens
tgcgtggaggtaggt

SEQ ID NO: 3740 - DNA, 15 bp, Homo sapiens
gtgcgtggaggtagg

SEQ ID NO: 3741 - DNA, 15 bp, Homo sapiens
ggtgcgtggaggtag

SEQ ID NO: 3742 - DNA, 15 bp, Homo sapiens
tggtgcgtggaggta

SEQ ID NO: 3743 - DNA, 15 bp, Homo sapiens
ttggtgcgtggaggt

SEQ ID NO: 3744 - DNA, 15 bp, Homo sapiens
attggtgcgtggagg

SEQ ID NO: 3745 - DNA, 15 bp, Homo sapiens
gattggtgcgtggag

SEQ ID NO: 3746 - DNA, 15 bp, Homo sapiens
cgattggtgcgtgga

SEQ ID NO: 3747 - DNA, 15 bp, Homo sapiens
gcgattggtgcgtgg

SEQ ID NO: 3748 - DNA, 15 bp, Homo sapiens
ggcgattggtgcgtg

SEQ ID NO: 3749 - DNA, 15 bp, Homo sapiens
cggcgattggtgcgt

SEQ ID NO: 3750 - DNA, 15 bp, Homo sapiens
ccggcgattggtgcg

SEQ ID NO: 3751 - DNA, 15 bp, Homo sapiens
tccggcgattggtgc

SEQ ID NO: 3752 - DNA, 15 bp, Homo sapiens
ttccggcgattggtg

SEQ ID NO: 3753 - DNA, 15 bp, Homo sapiens
attccggcgattggt

SEQ ID NO: 3754 - DNA, 15 bp, Homo sapiens
gattccggcgattgg

SEQ ID NO: 3755 - DNA, 15 bp, Homo sapiens
agattccggcgattg

SEQ ID NO: 3756 - DNA, 15 bp, Homo sapiens
gagattccggcgatt

SEQ ID NO: 3757 - DNA, 15 bp, Homo sapiens
ggagattccggcgat

SEQ ID NO: 3758 - DNA, 15 bp, Homo sapiens
tggagattccggcga

SEQ ID NO: 3759 - DNA, 15 bp, Homo sapiens
ttggagattccggcg

SEQ ID NO: 3760 - DNA, 15 bp, Homo sapiens
gttggagattccggc

SEQ ID NO: 3761 - DNA, 15 bp, Homo sapiens
ggttggagattccgg

SEQ ID NO: 3762 - DNA, 15 bp, Homo sapiens
gggttggagattccg

SEQ ID NO: 3763 - DNA, 15 bp, Homo sapiens
cgggttggagattcc

SEQ ID NO: 3764 - DNA, 15 bp, Homo sapiens
gcgggttggagattc

SEQ ID NO: 3765 - DNA, 15 bp, Homo sapiens
cgcgggttggagatt

SEQ ID NO: 3766 - DNA, 15 bp, Homo sapiens
ccgcgggttggagat

SEQ ID NO: 3767 - DNA, 15 bp, Homo sapiens
cccgcgggttggaga

SEQ ID NO: 3768 - DNA, 15 bp, Homo sapiens
gcccgcgggttggag

SEQ ID NO: 3769 - DNA, 15 bp, Homo sapiens
ggcccgcgggttgga

SEQ ID NO: 3770 - DNA, 15 bp, Homo sapiens
cggcccgcgggttgg

SEQ ID NO: 3771 - DNA, 15 bp, Homo sapiens
gcggcccgcgggttg

SEQ ID NO: 3772 - DNA, 15 bp, Homo sapiens
cgcggcccgcgggtt

SEQ ID NO: 3773 - DNA, 15 bp, Homo sapiens
acgcggcccgcgggt

SEQ ID NO: 3774 - DNA, 15 bp, Homo sapiens
cacgcggcccgcggg

SEQ ID NO: 3775 - DNA, 15 bp, Homo sapiens
ccacgcggcccgcgg

SEQ ID NO: 3776 - DNA, 15 bp, Homo sapiens
cccacgcggcccgcg

SEQ ID NO: 3777 - DNA, 15 bp, Homo sapiens
gcccacgcggcccgc

SEQ ID NO: 3778 - DNA, 15 bp, Homo sapiens
agcccacgcggcccg

SEQ ID NO: 3779 - DNA, 15 bp, Homo sapiens
aagcccacgcggccc

SEQ ID NO: 3780 - DNA, 15 bp, Homo sapiens
aaagcccacgcggcc

SEQ ID NO: 3781 - DNA, 15 bp, Homo sapiens
gaaagcccacgcggc

SEQ ID NO: 3782 - DNA, 15 bp, Homo sapiens
agaaagcccacgcgg

SEQ ID NO: 3783 - DNA, 15 bp, Homo sapiens
tagaaagcccacgcg

SEQ ID NO: 3784 - DNA, 15 bp, Homo sapiens
gtagaaagcccacgc

SEQ ID NO: 3785 - DNA, 15 bp, Homo sapiens
ggtagaaagcccacg

SEQ ID NO: 3786 - DNA, 15 bp, Homo sapiens
gggtagaaagcccac

SEQ ID NO: 3787 - DNA, 15 bp, Homo sapiens
agggtagaaagccca

SEQ ID NO: 3788 - DNA, 15 bp, Homo sapiens
cagggtagaaagccc

SEQ ID NO: 3789 - DNA, 15 bp, Homo sapiens
gcagggtagaaagcc

SEQ ID NO: 3790 - DNA, 15 bp, Homo sapiens
tgcagggtagaaagc

SEQ ID NO: 3791 - DNA, 15 bp, Homo sapiens
gtgcagggtagaaag

SEQ ID NO: 3792 - DNA, 15 bp, Homo sapiens
ggtgcagggtagaaa

SEQ ID NO: 3793 - DNA, 15 bp, Homo sapiens
cggtgcagggtagaa

SEQ ID NO: 3794 - DNA, 15 bp, Homo sapiens
gcggtgcagggtaga

SEQ ID NO: 3795 - DNA, 15 bp, Homo sapiens
agcggtgcagggtag

SEQ ID NO: 3796 - DNA, 15 bp, Homo sapiens
cagcggtgcagggta

SEQ ID NO: 3797 - DNA, 15 bp, Homo sapiens
gcagcggtgcagggt

SEQ ID NO: 3798 - DNA, 15 bp, Homo sapiens
tgcagcggtgcaggg

SEQ ID NO: 3799 - DNA, 15 bp, Homo sapiens
ctgcagcggtgcagg

SEQ ID NO: 3800 - DNA, 15 bp, Homo sapiens
gctgcagcggtgcag

SEQ ID NO: 3801 - DNA, 15 bp, Homo sapiens
ggctgcagcggtgca

SEQ ID NO: 3802 - DNA, 15 bp, Homo sapiens
cggctgcagcggtgc

SEQ ID NO: 3803 - DNA, 15 bp, Homo sapiens
gcggctgcagcggtg

SEQ ID NO: 3804 - DNA, 15 bp, Homo sapiens
cgcggctgcagcggt

SEQ ID NO: 3805 - DNA, 15 bp, Homo sapiens
ccgcggctgcagcgg

SEQ ID NO: 3806 - DNA, 15 bp, Homo sapiens
gccgcggctgcagcg

SEQ ID NO: 3807 - DNA, 15 bp, Homo sapiens
ggccgcggctgcagc

SEQ ID NO: 3808 - DNA, 15 bp, Homo sapiens
tggccgcggctgcag

SEQ ID NO: 3809 - DNA, 15 bp, Homo sapiens
gtggccgcggctgca

SEQ ID NO: 3810 - DNA, 15 bp, Homo sapiens
cgtggccgcggctgc

SEQ ID NO: 3811 - DNA, 15 bp, Homo sapiens
ccgtggccgcggctg

SEQ ID NO: 3812 - DNA, 15 bp, Homo sapiens
cccgtggccgcggct

SEQ ID NO: 3813 - DNA, 15 bp, Homo sapiens
tcccgtggccgcggc

SEQ ID NO: 3814 - DNA, 15 bp, Homo sapiens
ttcccgtggccgcgg

SEQ ID NO: 3815 - DNA, 15 bp, Homo sapiens
cttcccgtggccgcg

SEQ ID NO: 3816 - DNA, 15 bp, Homo sapiens
tcttcccgtggccgc

SEQ ID NO: 3817 - DNA, 15 bp, Homo sapiens
ctcttcccgtggccg

SEQ ID NO: 3818 - DNA, 15 bp, Homo sapiens
cctcttcccgtggcc

SEQ ID NO: 3819 - DNA, 15 bp, Homo sapiens
gcctcttcccgtggc

SEQ ID NO: 3820 - DNA, 15 bp, Homo sapiens
cgcctcttcccgtgg

SEQ ID NO: 3821 - DNA, 15 bp, Homo sapiens
gcgcctcttcccgtg

SEQ ID NO: 3822 - DNA, 15 bp, Homo sapiens
cgcgcctcttcccgt

SEQ ID NO: 3823 - DNA, 15 bp, Homo sapiens
gcgcgcctcttcccg

SEQ ID NO: 3824 - DNA, 15 bp, Homo sapiens
agcgcgcctcttccc

SEQ ID NO: 3825 - DNA, 15 bp, Homo sapiens
gagcgcgcctcttcc

SEQ ID NO: 3826 - DNA, 15 bp, Homo sapiens
ggagcgcgcctcttc

SEQ ID NO: 3827 - DNA, 15 bp, Homo sapiens
gggagcgcgcctctt

SEQ ID NO: 3828 - DNA, 15 bp, Homo sapiens
cgggagcgcgcctct

SEQ ID NO: 3829 - DNA, 15 bp, Homo sapiens
ccgggagcgcgcctc

SEQ ID NO: 3830 - DNA, 15 bp, Homo sapiens
gccgggagcgcgcct

SEQ ID NO: 3831 - DNA, 15 bp, Homo sapiens
cgccgggagcgcgcc

SEQ ID NO: 3832 - DNA, 15 bp, Homo sapiens
ccgccgggagcgcgc

SEQ ID NO: 3833 - DNA, 15 bp, Homo sapiens
gccgccgggagcgcg

SEQ ID NO: 3834 - DNA, 15 bp, Homo sapiens
ggccgccgggagcgc

SEQ ID NO: 3835 - DNA, 15 bp, Homo sapiens
gggccgccgggagcg

SEQ ID NO: 3836 - DNA, 15 bp, Homo sapiens
tgggccgccgggagc

SEQ ID NO: 3837 - DNA, 15 bp, Homo sapiens
ttgggccgccgggag

SEQ ID NO: 3838 - DNA, 15 bp, Homo sapiens
cttgggccgccggga

SEQ ID NO: 3839 - DNA, 15 bp, Homo sapiens
gcttgggccgccggg

SEQ ID NO: 3840 - DNA, 15 bp, Homo sapiens
agcttgggccgccgg

SEQ ID NO: 3841 - DNA, 15 bp, Homo sapiens
cagcttgggccgccg

SEQ ID NO: 3842 - DNA, 15 bp, Homo sapiens
ccagcttgggccgcc

SEQ ID NO: 3843 - DNA, 15 bp, Homo sapiens
cccagcttgggccgc

SEQ ID NO: 3844 - DNA, 15 bp, Homo sapiens
tcccagcttgggccg

SEQ ID NO: 3845 - DNA, 15 bp, Homo sapiens
ctcccagcttgggcc

SEQ ID NO: 3846 - DNA, 15 bp, Homo sapiens
gctcccagcttgggc

SEQ ID NO: 3847 - DNA, 15 bp, Homo sapiens
ggctcccagcttggg

SEQ ID NO: 3848 - DNA, 15 bp, Homo sapiens
tggctcccagcttgg

SEQ ID NO: 3849 - DNA, 15 bp, Homo sapiens
ttggctcccagcttg

SEQ ID NO: 3850 - DNA, 15 bp, Homo sapiens
cttggctcccagctt

SEQ ID NO: 3851 - DNA, 15 bp, Homo sapiens
gcttggctcccagct

SEQ ID NO: 3852 - DNA, 15 bp, Homo sapiens
agcttggctcccagc

SEQ ID NO: 3853 - DNA, 15 bp, Homo sapiens
gagcttggctcccag

SEQ ID NO: 3854 - DNA, 15 bp, Homo sapiens
agagcttggctccca

SEQ ID NO: 3855 - DNA, 15 bp, Homo sapiens
tagagcttggctccc

SEQ ID NO: 3856 - DNA, 15 bp, Homo sapiens
ttagagcttggctcc

SEQ ID NO: 3857 - DNA, 15 bp, Homo sapiens
gttagagcttggctc

SEQ ID NO: 3858 - DNA, 15 bp, Homo sapiens
cgttagagcttggct

SEQ ID NO: 3859 - DNA, 15 bp, Homo sapiens
ccgttagagcttggc

SEQ ID NO: 3860 - DNA, 15 bp, Homo sapiens
cccgttagagcttgg

SEQ ID NO: 3861 - DNA, 15 bp, Homo sapiens
acccgttagagcttg

SEQ ID NO: 3862 - DNA, 15 bp, Homo sapiens
cacccgttagagctt

SEQ ID NO: 3863 - DNA, 15 bp, Homo sapiens
acacccgttagagct

SEQ ID NO: 3864 - DNA, 15 bp, Homo sapiens
cacacccgttagagc

SEQ ID NO: 3865 - DNA, 15 bp, Homo sapiens
ccacacccgttagag

SEQ ID NO: 3866 - DNA, 15 bp, Homo sapiens
gccacacccgttaga

SEQ ID NO: 3867 - DNA, 15 bp, Homo sapiens
cgccacacccgttag

SEQ ID NO: 3868 - DNA, 15 bp, Homo sapiens
ccgccacacccgtta

SEQ ID NO: 3869 - DNA, 15 bp, Homo sapiens
cccgccacacccgtt

SEQ ID NO: 3870 - DNA, 15 bp, Homo sapiens
tcccgccacacccgt

SEQ ID NO: 3871 - DNA, 15 bp, Homo sapiens
ttcccgccacacccg

SEQ ID NO: 3872 - DNA, 15 bp, Homo sapiens
cttcccgccacaccc

SEQ ID NO: 3873 - DNA, 15 bp, Homo sapiens
acttcccgccacacc

SEQ ID NO: 3874 - DNA, 15 bp, Homo sapiens
cacttcccgccacac

SEQ ID NO: 3875 - DNA, 15 bp, Homo sapiens
acacttcccgccaca

SEQ ID NO: 3876 - DNA, 15 bp, Homo sapiens
cacacttcccgccac

SEQ ID NO: 3877 - DNA, 15 bp, Homo sapiens
ccacacttcccgcca

SEQ ID NO: 3878 - DNA, 15 bp, Homo sapiens
accacacttcccgcc

SEQ ID NO: 3879 - DNA, 15 bp, Homo sapiens
caccacacttcccgc

SEQ ID NO: 3880 - DNA, 15 bp, Homo sapiens
ccaccacacttcccg

SEQ ID NO: 3881 - DNA, 15 bp, Homo sapiens
gccaccacacttccc

SEQ ID NO: 3882 - DNA, 15 bp, Homo sapiens
ggccaccacacttcc

SEQ ID NO: 3883 - DNA, 15 bp, Homo sapiens
gggccaccacacttc

SEQ ID NO: 3884 - DNA, 15 bp, Homo sapiens
cgggccaccacactt

SEQ ID NO: 3885 - DNA, 15 bp, Homo sapiens
gcgggccaccacact

SEQ ID NO: 3886 - DNA, 15 bp, Homo sapiens
ggcgggccaccacac

SEQ ID NO: 3887 - DNA, 15 bp, Homo sapiens
tggcgggccaccaca

SEQ ID NO: 3888 - DNA, 15 bp, Homo sapiens
ctggcgggccaccac

SEQ ID NO: 3889 - DNA, 15 bp, Homo sapiens
gctggcgggccacca

SEQ ID NO: 3890 - DNA, 15 bp, Homo sapiens
tgctggcgggccacc

SEQ ID NO: 3891 - DNA, 15 bp, Homo sapiens
ctgctggcgggccac

SEQ ID NO: 3892 - DNA, 15 bp, Homo sapiens
gctgctggcgggcca

SEQ ID NO: 3893 - DNA, 15 bp, Homo sapiens
agctgctggcgggcc

SEQ ID NO: 3894 - DNA, 15 bp, Homo sapiens
cagctgctggcgggc

SEQ ID NO: 3895 - DNA, 15 bp, Homo sapiens
gcagctgctggcggg

SEQ ID NO: 3896 - DNA, 15 bp, Homo sapiens
ggcagctgctggcgg

SEQ ID NO: 3897 - DNA, 15 bp, Homo sapiens
tggcagctgctggcg

SEQ ID NO: 3898 - DNA, 15 bp, Homo sapiens
gtggcagctgctggc

SEQ ID NO: 3899 - DNA, 15 bp, Homo sapiens
cgtggcagctgctgg

SEQ ID NO: 3900 - DNA, 15 bp, Homo sapiens
tcgtggcagctgctg

SEQ ID NO: 3901 - DNA, 15 bp, Homo sapiens
gtcgtggcagctgct

SEQ ID NO: 3902 - DNA, 15 bp, Homo sapiens
cgtcgtggcagctgc

SEQ ID NO: 3903 - DNA, 15 bp, Homo sapiens
gcgtcgtggcagctg

SEQ ID NO: 3904 - DNA, 15 bp, Homo sapiens
agcgtcgtggcagct

SEQ ID NO: 3905 - DNA, 15 bp, Homo sapiens
gagcgtcgtggcagc

SEQ ID NO: 3906 - DNA, 15 bp, Homo sapiens
cgagcgtcgtggcag

SEQ ID NO: 3907 - DNA, 15 bp, Homo sapiens
gcgagcgtcgtggca

SEQ ID NO: 3908 - DNA, 15 bp, Homo sapiens
agcgagcgtcgtggc

SEQ ID NO: 3909 - DNA, 15 bp, Homo sapiens
gagcgagcgtcgtgg

SEQ ID NO: 3910 - DNA, 15 bp, Homo sapiens
ggagcgagcgtcgtg

SEQ ID NO: 3911 - DNA, 15 bp, Homo sapiens
tggagcgagcgtcgt

SEQ ID NO: 3912 - DNA, 15 bp, Homo sapiens
gtggagcgagcgtcg

SEQ ID NO: 3913 - DNA, 15 bp, Homo sapiens
ggtggagcgagcgtc

SEQ ID NO: 3914 - DNA, 15 bp, Homo sapiens
cggtggagcgagcgt

SEQ ID NO: 3915 - DNA, 15 bp, Homo sapiens
tcggtggagcgagcg

SEQ ID NO: 3916 - DNA, 15 bp, Homo sapiens
gtcggtggagcgagc

SEQ ID NO: 3917 - DNA, 15 bp, Homo sapiens
cgtcggtggagcgag

SEQ ID NO: 3918 - DNA, 15 bp, Homo sapiens
gcgtcggtggagcga

SEQ ID NO: 3919 - DNA, 15 bp, Homo sapiens
ggcgtcggtggagcg

SEQ ID NO: 3920 - DNA, 15 bp, Homo sapiens
gggcgtcggtggagc

SEQ ID NO: 3921 - DNA, 15 bp, Homo sapiens
tgggcgtcggtggag

SEQ ID NO: 3922 - DNA, 15 bp, Homo sapiens
ctgggcgtcggtgga

SEQ ID NO: 3923 - DNA, 15 bp, Homo sapiens
tctgggcgtcggtgg

SEQ ID NO: 3924 - DNA, 15 bp, Homo sapiens
ctctgggcgtcggtg

SEQ ID NO: 3925 - DNA, 15 bp, Homo sapiens
gctctgggcgtcggt

SEQ ID NO: 3926 - DNA, 15 bp, Homo sapiens
agctctgggcgtcgg

SEQ ID NO: 3927 - DNA, 15 bp, Homo sapiens
cagctctgggcgtcg

SEQ ID NO: 3928 - DNA, 15 bp, Homo sapiens
acagctctgggcgtc

SEQ ID NO: 3929 - DNA, 15 bp, Homo sapiens
cacagctctgggcgt

SEQ ID NO: 3930 - DNA, 15 bp, Homo sapiens
ccacagctctgggcg

SEQ ID NO: 3931 - DNA, 15 bp, Homo sapiens
gccacagctctgggc

SEQ ID NO: 3932 - DNA, 15 bp, Homo sapiens
ggccacagctctggg

SEQ ID NO: 3933 - DNA, 15 bp, Homo sapiens
cggccacagctctgg

SEQ ID NO: 3934 - DNA, 15 bp, Homo sapiens
tcggccacagctctg

SEQ ID NO: 3935 - DNA, 15 bp, Homo sapiens
ctcggccacagctct

SEQ ID NO: 3936 - DNA, 15 bp, Homo sapiens
cctcggccacagctc

SEQ ID NO: 3937 - DNA, 15 bp, Homo sapiens
gcctcggccacagct

SEQ ID NO: 3938 - DNA, 15 bp, Homo sapiens
ggcctcggccacagc

SEQ ID NO: 3939 - DNA, 15 bp, Homo sapiens
cggcctcggccacag

SEQ ID NO: 3940 - DNA, 15 bp, Homo sapiens
ccggcctcggccaca

SEQ ID NO: 3941 - DNA, 15 bp, Homo sapiens
cccggcctcggccac

SEQ ID NO: 3942 - DNA, 15 bp, Homo sapiens
ccccggcctcggcca

SEQ ID NO: 3943 - DNA, 15 bp, Homo sapiens
cccccggcctcggcc

SEQ ID NO: 3944 - DNA, 15 bp, Homo sapiens
gcccccggcctcggc

SEQ ID NO: 3945 - DNA, 15 bp, Homo sapiens
agcccccggcctcgg

SEQ ID NO: 3946 - DNA, 15 bp, Homo sapiens
cagcccccggcctcg

SEQ ID NO: 3947 - DNA, 15 bp, Homo sapiens
ccagcccccggcctc

SEQ ID NO: 3948 - DNA, 15 bp, Homo sapiens
gccagcccccggcct

SEQ ID NO: 3949 - DNA, 15 bp, Homo sapiens
tgccagcccccggcc

SEQ ID NO: 3950 - DNA, 15 bp, Homo sapiens
gtgccagcccccggc

SEQ ID NO: 3951 - DNA, 15 bp, Homo sapiens
ggtgccagcccccgg

SEQ ID NO: 3952 - DNA, 15 bp, Homo sapiens
gggtgccagcccccg

SEQ ID NO: 3953 - DNA, 15 bp, Homo sapiens
cgggtgccagccccc

SEQ ID NO: 3954 - DNA, 15 bp, Homo sapiens
gcgggtgccagcccc

SEQ ID NO: 3955 - DNA, 15 bp, Homo sapiens
agcgggtgccagccc

SEQ ID NO: 3956 - DNA, 15 bp, Homo sapiens
cagcgggtgccagcc

SEQ ID NO: 3957 - DNA, 15 bp, Homo sapiens
ccagcgggtgccagc

SEQ ID NO: 3958 - DNA, 15 bp, Homo sapiens
cccagcgggtgccag

SEQ ID NO: 3959 - DNA, 15 bp, Homo sapiens
gcccagcgggtgcca

SEQ ID NO: 3960 - DNA, 15 bp, Homo sapiens
ggcccagcgggtgcc

SEQ ID NO: 3961 - DNA, 15 bp, Homo sapiens
cggcccagcgggtgc

SEQ ID NO: 3962 - DNA, 15 bp, Homo sapiens
gcggcccagcgggtg

SEQ ID NO: 3963 - DNA, 15 bp, Homo sapiens
ggcggcccagcgggt

SEQ ID NO: 3964 - DNA, 15 bp, Homo sapiens
tggcggcccagcggg

SEQ ID NO: 3965 - DNA, 15 bp, Homo sapiens
gtggcggcccagcgg

SEQ ID NO: 3966 - DNA, 15 bp, Homo sapiens
agtggcggcccagcg

SEQ ID NO: 3967 - DNA, 15 bp, Homo sapiens
gagtggcggcccagc

SEQ ID NO: 3968 - DNA, 15 bp, Homo sapiens
agagtggcggcccag

SEQ ID NO: 3969 - DNA, 15 bp, Homo sapiens
gagagtggcggccca

SEQ ID NO: 3970 - DNA, 15 bp, Homo sapiens
cgagagtggcggccc

SEQ ID NO: 3971 - DNA, 15 bp, Homo sapiens
ccgagagtggcggcc

SEQ ID NO: 3972 - DNA, 15 bp, Homo sapiens
cccgagagtggcggc

SEQ ID NO: 3973 - DNA, 15 bp, Homo sapiens
ccccgagagtggcgg

SEQ ID NO: 3974 - DNA, 15 bp, Homo sapiens
tccccgagagtggcg

SEQ ID NO: 3975 - DNA, 15 bp, Homo sapiens
atccccgagagtggc

SEQ ID NO: 3976 - DNA, 15 bp, Homo sapiens
aatccccgagagtgg

SEQ ID NO: 3977 - DNA, 15 bp, Homo sapiens
aaatccccgagagtg

SEQ ID NO: 3978 - DNA, 15 bp, Homo sapiens
aaaatccccgagagt

SEQ ID NO: 3979 - DNA, 15 bp, Homo sapiens
caaaatccccgagag

SEQ ID NO: 3980 - DNA, 15 bp, Homo sapiens
ccaaaatccccgaga

SEQ ID NO: 3981 - DNA, 15 bp, Homo sapiens
accaaaatccccgag

SEQ ID NO: 3982 - DNA, 15 bp, Homo sapiens
caccaaaatccccga

SEQ ID NO: 3983 - DNA, 15 bp, Homo sapiens
ccaccaaaatccccg

SEQ ID NO: 3984 - DNA, 15 bp, Homo sapiens
gccaccaaaatcccc

SEQ ID NO: 3985 - DNA, 15 bp, Homo sapiens
tgccaccaaaatccc

SEQ ID NO: 3986 - DNA, 15 bp, Homo sapiens
ttgccaccaaaatcc

SEQ ID NO: 3987 - DNA, 15 bp, Homo sapiens
tttgccaccaaaatc

SEQ ID NO: 3988 - DNA, 15 bp, Homo sapiens
ctttgccaccaaaat

SEQ ID NO: 3989 - DNA, 15 bp, Homo sapiens
gctttgccaccaaaa

SEQ ID NO: 3990 - DNA, 15 bp, Homo sapiens
cgctttgccaccaaa

SEQ ID NO: 3991 - DNA, 15 bp, Homo sapiens
ccgctttgccaccaa

SEQ ID NO: 3992 - DNA, 15 bp, Homo sapiens
tccgctttgccacca

SEQ ID NO: 3993 - DNA, 15 bp, Homo sapiens
ctccgctttgccacc

SEQ ID NO: 3994 - DNA, 15 bp, Homo sapiens
cctccgctttgccac

SEQ ID NO: 3995 - DNA, 15 bp, Homo sapiens
acctccgctttgcca

SEQ ID NO: 3996 - DNA, 15 bp, Homo sapiens
gacctccgctttgcc

SEQ ID NO: 3997 - DNA, 15 bp, Homo sapiens
ggacctccgctttgc

SEQ ID NO: 3998 - DNA, 15 bp, Homo sapiens
gggacctccgctttg

SEQ ID NO: 3999 - DNA, 15 bp, Homo sapiens
cgggacctccgcttt

SEQ ID NO: 4000 - DNA, 15 bp, Homo sapiens
gcgggacctccgctt

SEQ ID NO: 4001 - DNA, 15 bp, Homo sapiens
ggcgggacctccgct

SEQ ID NO: 4002 - DNA, 15 bp, Homo sapiens
cggcgggacctccgc

SEQ ID NO: 4003 - DNA, 15 bp, Homo sapiens
tcggcgggacctccg

SEQ ID NO: 4004 - DNA, 15 bp, Homo sapiens
ctcggcgggacctcc

SEQ ID NO: 4005 - DNA, 15 bp, Homo sapiens
cctcggcgggacctc

SEQ ID NO: 4006 - DNA, 15 bp, Homo sapiens
gcctcggcgggacct

SEQ ID NO: 4007 - DNA, 15 bp, Homo sapiens
agcctcggcgggacc

SEQ ID NO: 4008 - DNA, 15 bp, Homo sapiens
cagcctcggcgggac

SEQ ID NO: 4009 - DNA, 15 bp, Homo sapiens
ccagcctcggcggga

SEQ ID NO: 4010 - DNA, 15 bp, Homo sapiens
gccagcctcggcggg

SEQ ID NO: 4011 - DNA, 15 bp, Homo sapiens
cgccagcctcggcgg

SEQ ID NO: 4012 - DNA, 15 bp, Homo sapiens
cttctaaaggacaga

SEQ ID NO: 4013 - DNA, 15 bp, Homo sapiens
tcttctaaaggacag

SEQ ID NO: 4014 - DNA, 15 bp, Homo sapiens
ctcttctaaaggaca

SEQ ID NO: 4015 - DNA, 15 bp, Homo sapiens
tctcttctaaaggac

SEQ ID NO: 4016 - DNA, 15 bp, Homo sapiens
ttctcttctaaagga

SEQ ID NO: 4017 - DNA, 15 bp, Homo sapiens
attctcttctaaagg

SEQ ID NO: 4018 - DNA, 15 bp, Homo sapiens
tattctcttctaaag

SEQ ID NO: 4019 - DNA, 15 bp, Homo sapiens
ctattctcttctaaa

SEQ ID NO: 4020 - DNA, 15 bp, Homo sapiens
cctattctcttctaa

SEQ ID NO: 4021 - DNA, 15 bp, Homo sapiens
acctattctcttcta

SEQ ID NO: 4022 - DNA, 15 bp, Homo sapiens
cacctattctcttct

SEQ ID NO: 4023 - DNA, 15 bp, Homo sapiens
tcacctattctcttc

SEQ ID NO: 4024 - DNA, 15 bp, Homo sapiens
ttcacctattctctt

SEQ ID NO: 4025 - DNA, 15 bp, Homo sapiens
tttcacctattctct

SEQ ID NO: 4026 - DNA, 15 bp, Homo sapiens
ttttcacctattctc

SEQ ID NO: 4027 - DNA, 15 bp, Homo sapiens
cttttcacctattct

SEQ ID NO: 4028 - DNA, 15 bp, Homo sapiens
acttttcacctattc

SEQ ID NO: 4029 - DNA, 15 bp, Homo sapiens
aacttttcacctatt

SEQ ID NO: 4030 - DNA, 15 bp, Homo sapiens
aaacttttcacctat

SEQ ID NO: 4031 - DNA, 15 bp, Homo sapiens
taaacttttcaccta

SEQ ID NO: 4032 - DNA, 15 bp, Homo sapiens
ttaaacttttcacct

SEQ ID NO: 4033 - DNA, 15 bp, Homo sapiens
attaaacttttcacc

SEQ ID NO: 4034 - DNA, 15 bp, Homo sapiens
tattaaacttttcac

SEQ ID NO: 4035 - DNA, 15 bp, Homo sapiens
ttattaaacttttca

SEQ ID NO: 4036 - DNA, 15 bp, Homo sapiens
tttattaaacttttc

SEQ ID NO: 4037 - DNA, 15 bp, Homo sapiens
ctttattaaactttt

SEQ ID NO: 4038 - DNA, 15 bp, Homo sapiens
tctttattaaacttt

SEQ ID NO: 4039 - DNA, 15 bp, Homo sapiens
ttctttattaaactt

SEQ ID NO: 4040 - DNA, 15 bp, Homo sapiens
tttctttattaaact

SEQ ID NO: 4041 - DNA, 15 bp, Homo sapiens
atttctttattaaac

SEQ ID NO: 4042 - DNA, 15 bp, Homo sapiens
aatttctttattaaa

SEQ ID NO: 4043 - DNA, 15 bp, Homo sapiens
taatttctttattaa

SEQ ID NO: 4044 - DNA, 15 bp, Homo sapiens
ttaatttctttatta

SEQ ID NO: 4045 - DNA, 15 bp, Homo sapiens
cttaatttctttatt

SEQ ID NO: 4046 - DNA, 15 bp, Homo sapiens
gcttaatttctttat

SEQ ID NO: 4047 - DNA, 15 bp, Homo sapiens
cgcttaatttcttta

SEQ ID NO: 4048 - DNA, 15 bp, Homo sapiens
tcgcttaatttcttt

SEQ ID NO: 4049 - DNA, 15 bp, Homo sapiens
atcgcttaatttctt

SEQ ID NO: 4050 - DNA, 15 bp, Homo sapiens
catcgcttaatttct

SEQ ID NO: 4051 - DNA, 15 bp, Homo sapiens
acatcgcttaatttc

SEQ ID NO: 4052 - DNA, 15 bp, Homo sapiens
cacatcgcttaattt

SEQ ID NO: 4053 - DNA, 15 bp, Homo sapiens
ccacatcgcttaatt

SEQ ID NO: 4054 - DNA, 15 bp, Homo sapiens
tccacatcgcttaat

SEQ ID NO: 4055 - DNA, 15 bp, Homo sapiens
ttccacatcgcttaa

SEQ ID NO: 4056 - DNA, 15 bp, Homo sapiens
cttccacatcgctta

SEQ ID NO: 4057 - DNA, 15 bp, Homo sapiens
acttccacatcgctt

SEQ ID NO: 4058 - DNA, 15 bp, Homo sapiens
gacttccacatcgct

SEQ ID NO: 4059 - DNA, 15 bp, Homo sapiens
cgacttccacatcgc

SEQ ID NO: 4060 - DNA, 15 bp, Homo sapiens
acgacttccacatcg

SEQ ID NO: 4061 - DNA, 15 bp, Homo sapiens
aacgacttccacatc

SEQ ID NO: 4062 - DNA, 15 bp, Homo sapiens
gaacgacttccacat

SEQ ID NO: 4063 - DNA, 15 bp, Homo sapiens
ggaacgacttccaca

SEQ ID NO: 4064 - DNA, 15 bp, Homo sapiens
gggaacgacttccac

SEQ ID NO: 4065 - DNA, 15 bp, Homo sapiens
cgggaacgacttcca

SEQ ID NO: 4066 - DNA, 15 bp, Homo sapiens
gcgggaacgacttcc

SEQ ID NO: 4067 - DNA, 15 bp, Homo sapiens
agcgggaacgacttc

SEQ ID NO: 4068 - DNA, 15 bp, Homo sapiens
cagcgggaacgactt

SEQ ID NO: 4069 - DNA, 15 bp, Homo sapiens
gcagcgggaacgact

SEQ ID NO: 4070 - DNA, 15 bp, Homo sapiens
agcagcgggaacgac

SEQ ID NO: 4071 - DNA, 15 bp, Homo sapiens
aagcagcgggaacga

SEQ ID NO: 4072 - DNA, 15 bp, Homo sapiens
caagcagcgggaacg

SEQ ID NO: 4073 - DNA, 15 bp, Homo sapiens
gcaagcagcgggaac

SEQ ID NO: 4074 - DNA, 15 bp, Homo sapiens
tgcaagcagcgggaa

SEQ ID NO: 4075 - DNA, 15 bp, Homo sapiens
ctgcaagcagcggga

SEQ ID NO: 4076 - DNA, 15 bp, Homo sapiens
tctgcaagcagcggg

SEQ ID NO: 4077 - DNA, 15 bp, Homo sapiens
ctctgcaagcagcgg

SEQ ID NO: 4078 - DNA, 15 bp, Homo sapiens
cctctgcaagcagcg

SEQ ID NO: 4079 - DNA, 15 bp, Homo sapiens
ccctctgcaagcagc

SEQ ID NO: 4080 - DNA, 15 bp, Homo sapiens
accctctgcaagcag

SEQ ID NO: 4081 - DNA, 15 bp, Homo sapiens
caccctctgcaagca

SEQ ID NO: 4082 - DNA, 15 bp, Homo sapiens
ccaccctctgcaagc

SEQ ID NO: 4083 - DNA, 15 bp, Homo sapiens
cccaccctctgcaag

SEQ ID NO: 4084 - DNA, 15 bp, Homo sapiens
ccccaccctctgcaa

SEQ ID NO: 4085 - DNA, 15 bp, Homo sapiens
tccccaccctctgca

SEQ ID NO: 4086 - DNA, 15 bp, Homo sapiens
ctccccaccctctgc

SEQ ID NO: 4087 - DNA, 15 bp, Homo sapiens
cctccccaccctctg

SEQ ID NO: 4088 - DNA, 15 bp, Homo sapiens
gcctccccaccctct

SEQ ID NO: 4089 - DNA, 15 bp, Homo sapiens
cgcctccccaccctc

SEQ ID NO: 4090 - DNA, 15 bp, Homo sapiens
ccgcctccccaccct

SEQ ID NO: 4091 - DNA, 15 bp, Homo sapiens
cccgcctccccaccc

SEQ ID NO: 4092 - DNA, 15 bp, Homo sapiens
gcccgcctccccacc

SEQ ID NO: 4093 - DNA, 15 bp, Homo sapiens
ggcccgcctccccac

SEQ ID NO: 4094 - DNA, 15 bp, Homo sapiens
aggcccgcctcccca

SEQ ID NO: 4095 - DNA, 15 bp, Homo sapiens
caggcccgcctcccc

SEQ ID NO: 4096 - DNA, 15 bp, Homo sapiens
ccaggcccgcctccc

SEQ ID NO: 4097 - DNA, 15 bp, Homo sapiens
cccaggcccgcctcc

SEQ ID NO: 4098 - DNA, 15 bp, Homo sapiens
gcccaggcccgcctc

SEQ ID NO: 4099 - DNA, 15 bp, Homo sapiens
tgcccaggcccgcct

SEQ ID NO: 4100 - DNA, 15 bp, Homo sapiens
ttgcccaggcccgcc

SEQ ID NO: 4101 - DNA, 15 bp, Homo sapiens
attgcccaggcccgc

SEQ ID NO: 4102 - DNA, 15 bp, Homo sapiens
aattgcccaggcccg

SEQ ID NO: 4103 - DNA, 15 bp, Homo sapiens
aaattgcccaggccc

SEQ ID NO: 4104 - DNA, 15 bp, Homo sapiens
gaaattgcccaggcc

SEQ ID NO: 4105 - DNA, 15 bp, Homo sapiens
cgaaattgcccaggc

SEQ ID NO: 4106 - DNA, 15 bp, Homo sapiens
ccgaaattgcccagg

SEQ ID NO: 4107 - DNA, 15 bp, Homo sapiens
tccgaaattgcccag

SEQ ID NO: 4108 - DNA, 15 bp, Homo sapiens
ttccgaaattgccca

SEQ ID NO: 4109 - DNA, 15 bp, Homo sapiens
gttccgaaattgccc

SEQ ID NO: 4110 - DNA, 15 bp, Homo sapiens
agttccgaaattgcc

SEQ ID NO: 4111 - DNA, 15 bp, Homo sapiens
tagttccgaaattgc

SEQ ID NO: 4112 - DNA, 15 bp, Homo sapiens
ctagttccgaaattg

SEQ ID NO: 4113 - DNA, 15 bp, Homo sapiens
cctagttccgaaatt

SEQ ID NO: 4114 - DNA, 15 bp, Homo sapiens
tcctagttccgaaat

SEQ ID NO: 4115 - DNA, 15 bp, Homo sapiens
ctcctagttccgaaa

SEQ ID NO: 4116 - DNA, 15 bp, Homo sapiens
tctcctagttccgaa

SEQ ID NO: 4117 - DNA, 15 bp, Homo sapiens
ctctcctagttccga

SEQ ID NO: 4118 - DNA, 15 bp, Homo sapiens
tctctcctagttccg

SEQ ID NO: 4119 - DNA, 15 bp, Homo sapiens
gtctctcctagttcc

SEQ ID NO: 4120 - DNA, 15 bp, Homo sapiens
ggtctctcctagttc

SEQ ID NO: 4121 - DNA, 15 bp, Homo sapiens
tggtctctcctagtt

SEQ ID NO: 4122 - DNA, 15 bp, Homo sapiens
gtggtctctcctagt

SEQ ID NO: 4123 - DNA, 15 bp, Homo sapiens
cgtggtctctcctag

SEQ ID NO: 4124 - DNA, 15 bp, Homo sapiens
acgtggtctctccta

SEQ ID NO: 4125 - DNA, 15 bp, Homo sapiens
gacgtggtctctcct

SEQ ID NO: 4126 - DNA, 15 bp, Homo sapiens
cgacgtggtctctcc

SEQ ID NO: 4127 - DNA, 15 bp, Homo sapiens
ccgacgtggtctctc

SEQ ID NO: 4128 - DNA, 15 bp, Homo sapiens
gccgacgtggtctct

SEQ ID NO: 4129 - DNA, 15 bp, Homo sapiens
tgccgacgtggtctc

SEQ ID NO: 4130 - DNA, 15 bp, Homo sapiens
ttgccgacgtggtct

SEQ ID NO: 4131 - DNA, 15 bp, Homo sapiens
tttgccgacgtggtc

SEQ ID NO: 4132 - DNA, 15 bp, Homo sapiens
ctttgccgacgtggt

SEQ ID NO: 4133 - DNA, 15 bp, Homo sapiens
gctttgccgacgtgg

SEQ ID NO: 4134 - DNA, 15 bp, Homo sapiens
ggctttgccgacgtg

SEQ ID NO: 4135 - DNA, 15 bp, Homo sapiens
aggctttgccgacgt

SEQ ID NO: 4136 - DNA, 15 bp, Homo sapiens
caggctttgccgacg

SEQ ID NO: 4137 - DNA, 15 bp, Homo sapiens
acaggctttgccgac

SEQ ID NO: 4138 - DNA, 15 bp, Homo sapiens
cacaggctttgccga

SEQ ID NO: 4139 - DNA, 15 bp, Homo sapiens
ccacaggctttgccg

SEQ ID NO: 4140 - DNA, 15 bp, Homo sapiens
accacaggctttgcc

SEQ ID NO: 4141 - DNA, 15 bp, Homo sapiens
gaccacaggctttgc

SEQ ID NO: 4142 - DNA, 15 bp, Homo sapiens
ggaccacaggctttg

SEQ ID NO: 4143 - DNA, 15 bp, Homo sapiens
gggaccacaggcttt

SEQ ID NO: 4144 - DNA, 15 bp, Homo sapiens
cgggaccacaggctt

SEQ ID NO: 4145 - DNA, 15 bp, Homo sapiens
tcgggaccacaggct

SEQ ID NO: 4146 - DNA, 15 bp, Homo sapiens
ttcgggaccacaggc

SEQ ID NO: 4147 - DNA, 15 bp, Homo sapiens
gttcgggaccacagg

SEQ ID NO: 4148 - DNA, 15 bp, Homo sapiens
tgttcgggaccacag

SEQ ID NO: 4149 - DNA, 15 bp, Homo sapiens
ttgttcgggaccaca

SEQ ID NO: 4150 - DNA, 15 bp, Homo sapiens
cttgttcgggaccac

SEQ ID NO: 4151 - DNA, 15 bp, Homo sapiens
ccttgttcgggacca

SEQ ID NO: 4152 - DNA, 15 bp, Homo sapiens
cccttgttcgggacc

SEQ ID NO: 4153 - DNA, 15 bp, Homo sapiens
gcccttgttcgggac

SEQ ID NO: 4154 - DNA, 15 bp, Homo sapiens
ggcccttgttcggga

SEQ ID NO: 4155 - DNA, 15 bp, Homo sapiens
tggcccttgttcggg

SEQ ID NO: 4156 - DNA, 15 bp, Homo sapiens
atggcccttgttcgg

SEQ ID NO: 4157 - DNA, 15 bp, Homo sapiens
catggcccttgttcg

SEQ ID NO: 4158 - DNA, 15 bp, Homo sapiens
ccatggcccttgttc

SEQ ID NO: 4159 - DNA, 15 bp, Homo sapiens
tccatggcccttgtt

SEQ ID NO: 4160 - DNA, 15 bp, Homo sapiens
atccatggcccttgt

SEQ ID NO: 4161 - DNA, 15 bp, Homo sapiens
aatccatggcccttg

SEQ ID NO: 4162 - DNA, 15 bp, Homo sapiens
aaatccatggccctt

SEQ ID NO: 4163 - DNA, 15 bp, Homo sapiens
gaaatccatggccct

SEQ ID NO: 4164 - DNA, 15 bp, Homo sapiens
ggaaatccatggccc

SEQ ID NO: 4165 - DNA, 15 bp, Homo sapiens
gggaaatccatggcc

SEQ ID NO: 4166 - DNA, 15 bp, Homo sapiens
tgggaaatccatggc

SEQ ID NO: 4167 - DNA, 15 bp, Homo sapiens
atgggaaatccatgg

SEQ ID NO: 4168 - DNA, 15 bp, Homo sapiens
aatgggaaatccatg

SEQ ID NO: 4169 - DNA, 15 bp, Homo sapiens
aaatgggaaatccat

SEQ ID NO: 4170 - DNA, 15 bp, Homo sapiens
gaaatgggaaatcca

SEQ ID NO: 4171 - DNA, 15 bp, Homo sapiens
agaaatgggaaatcc

SEQ ID NO: 4172 - DNA, 15 bp, Homo sapiens
gagaaatgggaaatc

SEQ ID NO: 4173 - DNA, 15 bp, Homo sapiens
tgagaaatgggaaat

SEQ ID NO: 4174 - DNA, 15 bp, Homo sapiens
ctgagaaatgggaaa

SEQ ID NO: 4175 - DNA, 15 bp, Homo sapiens
tctgagaaatgggaa

SEQ ID NO: 4176 - DNA, 15 bp, Homo sapiens
atctgagaaatggga

SEQ ID NO: 4177 - DNA, 15 bp, Homo sapiens
gatctgagaaatggg

SEQ ID NO: 4178 - DNA, 15 bp, Homo sapiens
ggatctgagaaatgg

SEQ ID NO: 4179 - DNA, 15 bp, Homo sapiens
gggatctgagaaatg

SEQ ID NO: 4180 - DNA, 15 bp, Homo sapiens
cgggatctgagaaat

SEQ ID NO: 4181 - DNA, 15 bp, Homo sapiens
ccgggatctgagaaa

SEQ ID NO: 4182 - DNA, 15 bp, Homo sapiens
gccgggatctgagaa

SEQ ID NO: 4183 - DNA, 15 bp, Homo sapiens
agccgggatctgaga

SEQ ID NO: 4184 - DNA, 15 bp, Homo sapiens
cagccgggatctgag

SEQ ID NO: 4185 - DNA, 15 bp, Homo sapiens
gcagccgggatctga

SEQ ID NO: 4186 - DNA, 15 bp, Homo sapiens
ggcagccgggatctg

SEQ ID NO: 4187 - DNA, 15 bp, Homo sapiens
gggcagccgggatct

SEQ ID NO: 4188 - DNA, 15 bp, Homo sapiens
cgggcagccgggatc

SEQ ID NO: 4189 - DNA, 15 bp, Homo sapiens
tcgggcagccgggat

SEQ ID NO: 4190 - DNA, 15 bp, Homo sapiens
gtcgggcagccggga

SEQ ID NO: 4191 - DNA, 15 bp, Homo sapiens
agtcgggcagccggg

SEQ ID NO: 4192 - DNA, 15 bp, Homo sapiens
aagtcgggcagccgg

SEQ ID NO: 4193 - DNA, 15 bp, Homo sapiens
gaagtcgggcagccg

SEQ ID NO: 4194 - DNA, 15 bp, Homo sapiens
tgaagtcgggcagcc

SEQ ID NO: 4195 - DNA, 15 bp, Homo sapiens
atgaagtcgggcagc

SEQ ID NO: 4196 - DNA, 15 bp, Homo sapiens
aatgaagtcgggcag

SEQ ID NO: 4197 - DNA, 15 bp, Homo sapiens
gaatgaagtcgggca

SEQ ID NO: 4198 - DNA, 15 bp, Homo sapiens
agaatgaagtcgggc

SEQ ID NO: 4199 - DNA, 15 bp, Homo sapiens
aagaatgaagtcggg

SEQ ID NO: 4200 - DNA, 15 bp, Homo sapiens
caagaatgaagtcgg

SEQ ID NO: 4201 - DNA, 15 bp, Homo sapiens
acaagaatgaagtcg

SEQ ID NO: 4202 - DNA, 15 bp, Homo sapiens
aacaagaatgaagtc

SEQ ID NO: 4203 - DNA, 15 bp, Homo sapiens
aaacaagaatgaagt

SEQ ID NO: 4204 - DNA, 15 bp, Homo sapiens
gaaacaagaatgaag

SEQ ID NO: 4205 - DNA, 15 bp, Homo sapiens
agaaacaagaatgaa

SEQ ID NO: 4206 - DNA, 15 bp, Homo sapiens
aagaaacaagaatga

SEQ ID NO: 4207 - DNA, 15 bp, Homo sapiens
aaagaaacaagaatg

SEQ ID NO: 4208 - DNA, 15 bp, Homo sapiens
gaaagaaacaagaat

SEQ ID NO: 4209 - DNA, 15 bp, Homo sapiens
tgaaagaaacaagaa

SEQ ID NO: 4210 - DNA, 15 bp, Homo sapiens
ctgaaagaaacaaga

SEQ ID NO: 4211 - DNA, 15 bp, Homo sapiens
gctgaaagaaacaag

SEQ ID NO: 4212 - DNA, 15 bp, Homo sapiens
tgctgaaagaaacaa

SEQ ID NO: 4213 - DNA, 15 bp, Homo sapiens
gtgctgaaagaaaca

SEQ ID NO: 4214 - DNA, 15 bp, Homo sapiens
tgtgctgaaagaaac

SEQ ID NO: 4215 - DNA, 15 bp, Homo sapiens
ttgtgctgaaagaaa

SEQ ID NO: 4216 - DNA, 15 bp, Homo sapiens
cttgtgctgaaagaa

SEQ ID NO: 4217 - DNA, 15 bp, Homo sapiens
gcttgtgctgaaaga

SEQ ID NO: 4218 - DNA, 15 bp, Homo sapiens
ggcttgtgctgaaag

SEQ ID NO: 4219 - DNA, 15 bp, Homo sapiens
tggcttgtgctgaaa

SEQ ID NO: 4220 - DNA, 15 bp, Homo sapiens
atggcttgtgctgaa

SEQ ID NO: 4221 - DNA, 15 bp, Homo sapiens
gatggcttgtgctga

SEQ ID NO: 4222 - DNA, 15 bp, Homo sapiens
ggatggcttgtgctg

SEQ ID NO: 4223 - DNA, 15 bp, Homo sapiens
aggatggcttgtgct

SEQ ID NO: 4224 - DNA, 15 bp, Homo sapiens
gaggatggcttgtgc

SEQ ID NO: 4225 - DNA, 15 bp, Homo sapiens
ggaggatggcttgtg

SEQ ID NO: 4226 - DNA, 15 bp, Homo sapiens
gggaggatggcttgt

SEQ ID NO: 4227 - DNA, 15 bp, Homo sapiens
agggaggatggcttg

SEQ ID NO: 4228 - DNA, 15 bp, Homo sapiens
aagggaggatggctt

SEQ ID NO: 4229 - DNA, 15 bp, Homo sapiens
gaagggaggatggct

SEQ ID NO: 4230 - DNA, 15 bp, Homo sapiens
agaagggaggatggc

SEQ ID NO: 4231 - DNA, 15 bp, Homo sapiens
gagaagggaggatgg

SEQ ID NO: 4232 - DNA, 15 bp, Homo sapiens
ggagaagggaggatg

SEQ ID NO: 4233 - DNA, 15 bp, Homo sapiens
gggagaagggaggat

SEQ ID NO: 4234 - DNA, 15 bp, Homo sapiens
agggagaagggagga

SEQ ID NO: 4235 - DNA, 15 bp, Homo sapiens
gagggagaagggagg

SEQ ID NO: 4236 - DNA, 15 bp, Homo sapiens
ggagggagaagggag

SEQ ID NO: 4237 - DNA, 15 bp, Homo sapiens
gggagggagaaggga

SEQ ID NO: 4238 - DNA, 15 bp, Homo sapiens
agggagggagaaggg

SEQ ID NO: 4239 - DNA, 15 bp, Homo sapiens
gagggagggagaagg

SEQ ID NO: 4240 - DNA, 15 bp, Homo sapiens
ggagggagggagaag

SEQ ID NO: 4241 - DNA, 15 bp, Homo sapiens
tggagggagggagaa

SEQ ID NO: 4242 - DNA, 15 bp, Homo sapiens
gtggagggagggaga

SEQ ID NO: 4243 - DNA, 15 bp, Homo sapiens
cgtggagggagggag

SEQ ID NO: 4244 - DNA, 15 bp, Homo sapiens
acgtggagggaggga

SEQ ID NO: 4245 - DNA, 15 bp, Homo sapiens
gacgtggagggaggg

SEQ ID NO: 4246 - DNA, 15 bp, Homo sapiens
agacgtggagggagg

SEQ ID NO: 4247 - DNA, 15 bp, Homo sapiens
gagacgtggagggag

SEQ ID NO: 4248 - DNA, 15 bp, Homo sapiens
agagacgtggaggga

SEQ ID NO: 4249 - DNA, 15 bp, Homo sapiens
aagagacgtggaggg

SEQ ID NO: 4250 - DNA, 15 bp, Homo sapiens
caagagacgtggagg

SEQ ID NO: 4251 - DNA, 15 bp, Homo sapiens
ccaagagacgtggag

SEQ ID NO: 4252 - DNA, 15 bp, Homo sapiens
gccaagagacgtgga

SEQ ID NO: 4253 - DNA, 15 bp, Homo sapiens
tgccaagagacgtgg

SEQ ID NO: 4254 - DNA, 15 bp, Homo sapiens
ctgccaagagacgtg

SEQ ID NO: 4255 - DNA, 15 bp, Homo sapiens
tctgccaagagacgt

SEQ ID NO: 4256 - DNA, 15 bp, Homo sapiens
ctctgccaagagacg

SEQ ID NO: 4257 - DNA, 15 bp, Homo sapiens
tctctgccaagagac

SEQ ID NO: 4258 - DNA, 15 bp, Homo sapiens
gtctctgccaagaga

SEQ ID NO: 4259 - DNA, 15 bp, Homo sapiens
tgtctctgccaagag

SEQ ID NO: 4260 - DNA, 15 bp, Homo sapiens
ctgtctctgccaaga

SEQ ID NO: 4261 - DNA, 15 bp, Homo sapiens
tctgtctctgccaag

SEQ ID NO: 4262 - DNA, 15 bp, Homo sapiens
ttctgtctctgccaa

SEQ ID NO: 4263 - DNA, 15 bp, Homo sapiens
tttctgtctctgcca

SEQ ID NO: 4264 - DNA, 15 bp, Homo sapiens
ctttctgtctctgcc

SEQ ID NO: 4265 - DNA, 15 bp, Homo sapiens
cctttctgtctctgc

SEQ ID NO: 4266 - DNA, 15 bp, Homo sapiens
ccctttctgtctctg

SEQ ID NO: 4267 - DNA, 15 bp, Homo sapiens
tccctttctgtctct

SEQ ID NO: 4268 - DNA, 15 bp, Homo sapiens
gtccctttctgtctc

SEQ ID NO: 4269 - DNA, 15 bp, Homo sapiens
tgtccctttctgtct

SEQ ID NO: 4270 - DNA, 15 bp, Homo sapiens
gtgtccctttctgtc

SEQ ID NO: 4271 - DNA, 15 bp, Homo sapiens
ggtgtccctttctgt

SEQ ID NO: 4272 - DNA, 15 bp, Homo sapiens
cggtgtccctttctg

SEQ ID NO: 4273 - DNA, 15 bp, Homo sapiens
gcggtgtccctttct

SEQ ID NO: 4274 - DNA, 15 bp, Homo sapiens
agcggtgtccctttc

SEQ ID NO: 4275 - DNA, 15 bp, Homo sapiens
gagcggtgtcccttt

SEQ ID NO: 4276 - DNA, 15 bp, Homo sapiens
agagcggtgtccctt

SEQ ID NO: 4277 - DNA, 15 bp, Homo sapiens
cagagcggtgtccct

SEQ ID NO: 4278 - DNA, 15 bp, Homo sapiens
gcagagcggtgtccc

SEQ ID NO: 4279 - DNA, 15 bp, Homo sapiens
ggcagagcggtgtcc

SEQ ID NO: 4280 - DNA, 15 bp, Homo sapiens
gggcagagcggtgtc

SEQ ID NO: 4281 - DNA, 15 bp, Homo sapiens
cgggcagagcggtgt

SEQ ID NO: 4282 - DNA, 15 bp, Homo sapiens
gcgggcagagcggtg

SEQ ID NO: 4283 - DNA, 15 bp, Homo sapiens
cgcgggcagagcggt

SEQ ID NO: 4284 - DNA, 15 bp, Homo sapiens
acgcgggcagagcgg

SEQ ID NO: 4285 - DNA, 15 bp, Homo sapiens
gacgcgggcagagcg

SEQ ID NO: 4286 - DNA, 15 bp, Homo sapiens
ggacgcgggcagagc

SEQ ID NO: 4287 - DNA, 15 bp, Homo sapiens
tggacgcgggcagag

SEQ ID NO: 4288 - DNA, 15 bp, Homo sapiens
ctggacgcgggcaga

SEQ ID NO: 4289 - DNA, 15 bp, Homo sapiens
gctggacgcgggcag

SEQ ID NO: 4290 - DNA, 15 bp, Homo sapiens
cgctggacgcgggca

SEQ ID NO: 4291 - DNA, 15 bp, Homo sapiens
gcgctggacgcgggc

SEQ ID NO: 4292 - DNA, 15 bp, Homo sapiens
cgcgctggacgcggg

SEQ ID NO: 4293 - DNA, 15 bp, Homo sapiens
tcgcgctggacgcgg

SEQ ID NO: 4294 - DNA, 15 bp, Homo sapiens
ttcgcgctggacgcg

SEQ ID NO: 4295 - DNA, 15 bp, Homo sapiens
cttcgcgctggacgc

SEQ ID NO: 4296 - DNA, 15 bp, Homo sapiens
ccttcgcgctggacg

SEQ ID NO: 4297 - DNA, 15 bp, Homo sapiens
tccttcgcgctggac

SEQ ID NO: 4298 - DNA, 15 bp, Homo sapiens
ctccttcgcgctgga

SEQ ID NO: 4299 - DNA, 15 bp, Homo sapiens
cctccttcgcgctgg

SEQ ID NO: 4300 - DNA, 15 bp, Homo sapiens
acctccttcgcgctg

SEQ ID NO: 4301 - DNA, 15 bp, Homo sapiens
cacctccttcgcgct

SEQ ID NO: 4302 - DNA, 15 bp, Homo sapiens
tcacctccttcgcgc

SEQ ID NO: 4303 - DNA, 15 bp, Homo sapiens
gtcacctccttcgcg

SEQ ID NO: 4304 - DNA, 15 bp, Homo sapiens
ggtcacctccttcgc

SEQ ID NO: 4305 - DNA, 15 bp, Homo sapiens
aggtcacctccttcg

SEQ ID NO: 4306 - DNA, 15 bp, Homo sapiens
taggtcacctccttc

SEQ ID NO: 4307 - DNA, 15 bp, Homo sapiens
ttaggtcacctcctt

SEQ ID NO: 4308 - DNA, 15 bp, Homo sapiens
tttaggtcacctcct

SEQ ID NO: 4309 - DNA, 15 bp, Homo sapiens
ttttaggtcacctcc

SEQ ID NO: 4310 - DNA, 15 bp, Homo sapiens
gttttaggtcacctc

SEQ ID NO: 4311 - DNA, 15 bp, Homo sapiens
ggttttaggtcacct

SEQ ID NO: 4312 - DNA, 15 bp, Homo sapiens
gggttttaggtcacc

SEQ ID NO: 4313 - DNA, 15 bp, Homo sapiens
tgggttttaggtcac

SEQ ID NO: 4314 - DNA, 15 bp, Homo sapiens
atgggttttaggtca

SEQ ID NO: 4315 - DNA, 15 bp, Homo sapiens
catgggttttaggtc

SEQ ID NO: 4316 - DNA, 15 bp, Homo sapiens
ccatgggttttaggt

SEQ ID NO: 4317 - DNA, 15 bp, Homo sapiens
cccatgggttttagg

SEQ ID NO: 4318 - DNA, 15 bp, Homo sapiens
gcccatgggttttag

SEQ ID NO: 4319 - DNA, 15 bp, Homo sapiens
ggcccatgggtttta

SEQ ID NO: 4320 - DNA, 15 bp, Homo sapiens
gggcccatgggtttt

SEQ ID NO: 4321 - DNA, 15 bp, Homo sapiens
agggcccatgggttt

SEQ ID NO: 4322 - DNA, 15 bp, Homo sapiens
aagggcccatgggtt

SEQ ID NO: 4323 - DNA, 15 bp, Homo sapiens
gaagggcccatgggt

SEQ ID NO: 4324 - DNA, 15 bp, Homo sapiens
agaagggcccatggg

SEQ ID NO: 4325 - DNA, 15 bp, Homo sapiens
gagaagggcccatgg

SEQ ID NO: 4326 - DNA, 15 bp, Homo sapiens
tgagaagggcccatg

SEQ ID NO: 4327 - DNA, 15 bp, Homo sapiens
gtgagaagggcccat

SEQ ID NO: 4328 - DNA, 15 bp, Homo sapiens
tgtgagaagggccca

SEQ ID NO: 4329 - DNA, 15 bp, Homo sapiens
gtgtgagaagggccc

SEQ ID NO: 4330 - DNA, 15 bp, Homo sapiens
agtgtgagaagggcc

SEQ ID NO: 4331 - DNA, 15 bp, Homo sapiens
cagtgtgagaagggc

SEQ ID NO: 4332 - DNA, 15 bp, Homo sapiens
gcagtgtgagaaggg

SEQ ID NO: 4333 - DNA, 15 bp, Homo sapiens
cgcagtgtgagaagg

SEQ ID NO: 4334 - DNA, 15 bp, Homo sapiens
acgcagtgtgagaag

SEQ ID NO: 4335 - DNA, 15 bp, Homo sapiens
aacgcagtgtgagaa

SEQ ID NO: 4336 - DNA, 15 bp, Homo sapiens
gaacgcagtgtgaga

SEQ ID NO: 4337 - DNA, 15 bp, Homo sapiens
agaacgcagtgtgag

SEQ ID NO: 4338 - DNA, 15 bp, Homo sapiens
gagaacgcagtgtga

SEQ ID NO: 4339 - DNA, 15 bp, Homo sapiens
agagaacgcagtgtg

SEQ ID NO: 4340 - DNA, 15 bp, Homo sapiens
cagagaacgcagtgt

SEQ ID NO: 4341 - DNA, 15 bp, Homo sapiens
gcagagaacgcagtg

SEQ ID NO: 4342 - DNA, 15 bp, Homo sapiens
cgcagagaacgcagt

SEQ ID NO: 4343 - DNA, 15 bp, Homo sapiens
gcgcagagaacgcag

SEQ ID NO: 4344 - DNA, 15 bp, Homo sapiens
agcgcagagaacgca

SEQ ID NO: 4345 - DNA, 15 bp, Homo sapiens
gagcgcagagaacgc

SEQ ID NO: 4346 - DNA, 15 bp, Homo sapiens
ggagcgcagagaacg

SEQ ID NO: 4347 - DNA, 15 bp, Homo sapiens
cggagcgcagagaac

SEQ ID NO: 4348 - DNA, 15 bp, Homo sapiens
ccggagcgcagagaa

SEQ ID NO: 4349 - DNA, 15 bp, Homo sapiens
gccggagcgcagaga

SEQ ID NO: 4350 - DNA, 15 bp, Homo sapiens
ggccggagcgcagag

SEQ ID NO: 4351 - DNA, 15 bp, Homo sapiens
gggccggagcgcaga

SEQ ID NO: 4352 - DNA, 15 bp, Homo sapiens
tgggccggagcgcag

SEQ ID NO: 4353 - DNA, 15 bp, Homo sapiens
ctgggccggagcgca

SEQ ID NO: 4354 - DNA, 15 bp, Homo sapiens
actgggccggagcgc

SEQ ID NO: 4355 - DNA, 15 bp, Homo sapiens
aactgggccggagcg

SEQ ID NO: 4356 - DNA, 15 bp, Homo sapiens
gaactgggccggagc

SEQ ID NO: 4357 - DNA, 15 bp, Homo sapiens
ggaactgggccggag

SEQ ID NO: 4358 - DNA, 15 bp, Homo sapiens
cggaactgggccgga

SEQ ID NO: 4359 - DNA, 15 bp, Homo sapiens
ccggaactgggccgg

SEQ ID NO: 4360 - DNA, 15 bp, Homo sapiens
cccggaactgggccg

SEQ ID NO: 4361 - DNA, 15 bp, Homo sapiens
tcccggaactgggcc

SEQ ID NO: 4362 - DNA, 15 bp, Homo sapiens
ctcccggaactgggc

SEQ ID NO: 4363 - DNA, 15 bp, Homo sapiens
cctcccggaactggg

SEQ ID NO: 4364 - DNA, 15 bp, Homo sapiens
tcctcccggaactgg

SEQ ID NO: 4365 - DNA, 15 bp, Homo sapiens
gtcctcccggaactg

SEQ ID NO: 4366 - DNA, 15 bp, Homo sapiens
ggtcctcccggaact

SEQ ID NO: 4367 - DNA, 15 bp, Homo sapiens
aggtcctcccggaac

SEQ ID NO: 4368 - DNA, 15 bp, Homo sapiens
gaggtcctcccggaa

SEQ ID NO: 4369 - DNA, 15 bp, Homo sapiens
ggaggtcctcccgga

SEQ ID NO: 4370 - DNA, 15 bp, Homo sapiens
gggaggtcctcccgg

SEQ ID NO: 4371 - DNA, 15 bp, Homo sapiens
cgggaggtcctcccg

SEQ ID NO: 4372 - DNA, 15 bp, Homo sapiens
tcgggaggtcctccc

SEQ ID NO: 4373 - DNA, 15 bp, Homo sapiens
gtcgggaggtcctcc

SEQ ID NO: 4374 - DNA, 15 bp, Homo sapiens
cgtcgggaggtcctc

SEQ ID NO: 4375 - DNA, 15 bp, Homo sapiens
ccgtcgggaggtcct

SEQ ID NO: 4376 - DNA, 15 bp, Homo sapiens
gccgtcgggaggtcc

SEQ ID NO: 4377 - DNA, 15 bp, Homo sapiens
cgccgtcgggaggtc

SEQ ID NO: 4378 - DNA, 15 bp, Homo sapiens
gcgccgtcgggaggt

SEQ ID NO: 4379 - DNA, 15 bp, Homo sapiens
cgcgccgtcgggagg

SEQ ID NO: 4380 - DNA, 15 bp, Homo sapiens
ccgcgccgtcgggag

SEQ ID NO: 4381 - DNA, 15 bp, Homo sapiens
cccgcgccgtcggga

SEQ ID NO: 4382 - DNA, 15 bp, Homo sapiens
tcccgcgccgtcggg

SEQ ID NO: 4383 - DNA, 15 bp, Homo sapiens
ctcccgcgccgtcgg

SEQ ID NO: 4384 - DNA, 15 bp, Homo sapiens
tctcccgcgccgtcg

SEQ ID NO: 4385 - DNA, 15 bp, Homo sapiens
ttctcccgcgccgtc

SEQ ID NO: 4386 - DNA, 15 bp, Homo sapiens
cttctcccgcgccgt

SEQ ID NO: 4387 - DNA, 15 bp, Homo sapiens
ccttctcccgcgccg

SEQ ID NO: 4388 - DNA, 15 bp, Homo sapiens
gccttctcccgcgcc

SEQ ID NO: 4389 - DNA, 15 bp, Homo sapiens
agccttctcccgcgc

SEQ ID NO: 4390 - DNA, 15 bp, Homo sapiens
cagccttctcccgcg

SEQ ID NO: 4391 - DNA, 15 bp, Homo sapiens
acagccttctcccgc

SEQ ID NO: 4392 - DNA, 15 bp, Homo sapiens
tacagccttctcccg

SEQ ID NO: 4393 - DNA, 15 bp, Homo sapiens
ttacagccttctccc

SEQ ID NO: 4394 - DNA, 15 bp, Homo sapiens
cttacagccttctcc

SEQ ID NO: 4395 - DNA, 15 bp, Homo sapiens
ccttacagccttctc

SEQ ID NO: 4396 - DNA, 15 bp, Homo sapiens
cccttacagccttct

SEQ ID NO: 4397 - DNA, 15 bp, Homo sapiens
gcccttacagccttc

SEQ ID NO: 4398 - DNA, 15 bp, Homo sapiens
agcccttacagcctt

SEQ ID NO: 4399 - DNA, 15 bp, Homo sapiens
gagcccttacagcct

SEQ ID NO: 4400 - DNA, 15 bp, Homo sapiens
agagcccttacagcc

SEQ ID NO: 4401 - DNA, 15 bp, Homo sapiens
aagagcccttacagc

SEQ ID NO: 4402 - DNA, 15 bp, Homo sapiens
caagagcccttacag

SEQ ID NO: 4403 - DNA, 15 bp, Homo sapiens
ccaagagcccttaca

SEQ ID NO: 4404 - DNA, 15 bp, Homo sapiens
gccaagagcccttac

SEQ ID NO: 4405 - DNA, 15 bp, Homo sapiens
ggccaagagccctta

SEQ ID NO: 4406 - DNA, 15 bp, Homo sapiens
gggccaagagccctt

SEQ ID NO: 4407 - DNA, 15 bp, Homo sapiens
ggggccaagagccct

SEQ ID NO: 4408 - DNA, 15 bp, Homo sapiens
gggggccaagagccc

SEQ ID NO: 4409 - DNA, 15 bp, Homo sapiens
cgggggccaagagcc

SEQ ID NO: 4410 - DNA, 15 bp, Homo sapiens
tcgggggccaagagc

SEQ ID NO: 4411 - DNA, 15 bp, Homo sapiens
gtcgggggccaagag

SEQ ID NO: 4412 - DNA, 15 bp, Homo sapiens
cgtcgggggccaaga

SEQ ID NO: 4413 - DNA, 15 bp, Homo sapiens
gcgtcgggggccaag

SEQ ID NO: 4414 - DNA, 15 bp, Homo sapiens
cgcgtcgggggccaa

SEQ ID NO: 4415 - DNA, 15 bp, Homo sapiens
ccgcgtcgggggcca

SEQ ID NO: 4416 - DNA, 15 bp, Homo sapiens
gccgcgtcgggggcc

SEQ ID NO: 4417 - DNA, 15 bp, Homo sapiens
ggccgcgtcgggggc

SEQ ID NO: 4418 - DNA, 15 bp, Homo sapiens
aggccgcgtcggggg

SEQ ID NO: 4419 - DNA, 15 bp, Homo sapiens
caggccgcgtcgggg

SEQ ID NO: 4420 - DNA, 15 bp, Homo sapiens
ccaggccgcgtcggg

SEQ ID NO: 4421 - DNA, 15 bp, Homo sapiens
cccaggccgcgtcgg

SEQ ID NO: 4422 - DNA, 15 bp, Homo sapiens
acccaggccgcgtcg

SEQ ID NO: 4423 - DNA, 15 bp, Homo sapiens
gacccaggccgcgtc

SEQ ID NO: 4424 - DNA, 15 bp, Homo sapiens
agacccaggccgcgt

SEQ ID NO: 4425 - DNA, 15 bp, Homo sapiens
gagacccaggccgcg

SEQ ID NO: 4426 - DNA, 15 bp, Homo sapiens
cgagacccaggccgc

SEQ ID NO: 4427 - DNA, 15 bp, Homo sapiens
ccgagacccaggccg

SEQ ID NO: 4428 - DNA, 15 bp, Homo sapiens
cccgagacccaggcc

SEQ ID NO: 4429 - DNA, 15 bp, Homo sapiens
ccccgagacccaggc

SEQ ID NO: 4430 - DNA, 15 bp, Homo sapiens
cccccgagacccagg

SEQ ID NO: 4431 - DNA, 15 bp, Homo sapiens
tcccccgagacccag

SEQ ID NO: 4432 - DNA, 15 bp, Homo sapiens
gtcccccgagaccca

SEQ ID NO: 4433 - DNA, 15 bp, Homo sapiens
cgtcccccgagaccc

SEQ ID NO: 4434 - DNA, 15 bp, Homo sapiens
gcgtcccccgagacc

SEQ ID NO: 4435 - DNA, 15 bp, Homo sapiens
tgcgtcccccgagac

SEQ ID NO: 4436 - DNA, 15 bp, Homo sapiens
atgcgtcccccgaga

SEQ ID NO: 4437 - DNA, 15 bp, Homo sapiens
catgcgtcccccgag

SEQ ID NO: 4438 - DNA, 15 bp, Homo sapiens
tcatgcgtcccccga

SEQ ID NO: 4439 - DNA, 15 bp, Homo sapiens
ttcatgcgtcccccg

SEQ ID NO: 4440 - DNA, 15 bp, Homo sapiens
gttcatgcgtccccc

SEQ ID NO: 4441 - DNA, 15 bp, Homo sapiens
ggttcatgcgtcccc

SEQ ID NO: 4442 - DNA, 15 bp, Homo sapiens
gggttcatgcgtccc

SEQ ID NO: 4443 - DNA, 15 bp, Homo sapiens
cgggttcatgcgtcc

SEQ ID NO: 4444 - DNA, 15 bp, Homo sapiens
gcgggttcatgcgtc

SEQ ID NO: 4445 - DNA, 15 bp, Homo sapiens
ggcgggttcatgcgt

SEQ ID NO: 4446 - DNA, 15 bp, Homo sapiens
tggcgggttcatgcg

SEQ ID NO: 4447 - DNA, 15 bp, Homo sapiens
gtggcgggttcatgc

SEQ ID NO: 4448 - DNA, 15 bp, Homo sapiens
ggtggcgggttcatg

SEQ ID NO: 4449 - DNA, 15 bp, Homo sapiens
aggtggcgggttcat

SEQ ID NO: 4450 - DNA, 15 bp, Homo sapiens
gaggtggcgggttca

SEQ ID NO: 4451 - DNA, 15 bp, Homo sapiens
agaggtggcgggttc

SEQ ID NO: 4452 - DNA, 15 bp, Homo sapiens
cagaggtggcgggtt

SEQ ID NO: 4453 - DNA, 15 bp, Homo sapiens
ccagaggtggcgggt

SEQ ID NO: 4454 - DNA, 15 bp, Homo sapiens
gccagaggtggcggg

SEQ ID NO: 4455 - DNA, 15 bp, Homo sapiens
ggccagaggtggcgg

SEQ ID NO: 4456 - DNA, 15 bp, Homo sapiens
cggccagaggtggcg

SEQ ID NO: 4457 - DNA, 15 bp, Homo sapiens
ccggccagaggtggc

SEQ ID NO: 4458 - DNA, 15 bp, Homo sapiens
gccggccagaggtgg

SEQ ID NO: 4459 - DNA, 15 bp, Homo sapiens
agccggccagaggtg

SEQ ID NO: 4460 - DNA, 15 bp, Homo sapiens
aagccggccagaggt

SEQ ID NO: 4461 - DNA, 15 bp, Homo sapiens
gaagccggccagagg

SEQ ID NO: 4462 - DNA, 15 bp, Homo sapiens
ggaagccggccagag

SEQ ID NO: 4463 - DNA, 15 bp, Homo sapiens
aggaagccggccaga

SEQ ID NO: 4464 - DNA, 15 bp, Homo sapiens
aaggaagccggccag

SEQ ID NO: 4465 - DNA, 15 bp, Homo sapiens
aaaggaagccggcca

SEQ ID NO: 4466 - DNA, 15 bp, Homo sapiens
aaaaggaagccggcc

SEQ ID NO: 4467 - DNA, 15 bp, Homo sapiens
taaaaggaagccggc

SEQ ID NO: 4468 - DNA, 15 bp, Homo sapiens
ctaaaaggaagccgg

SEQ ID NO: 4469 - DNA, 15 bp, Homo sapiens
actaaaaggaagccg

SEQ ID NO: 4470 - DNA, 15 bp, Homo sapiens
cactaaaaggaagcc

SEQ ID NO: 4471 - DNA, 15 bp, Homo sapiens
gcactaaaaggaagc

SEQ ID NO: 4472 - DNA, 15 bp, Homo sapiens
ggcactaaaaggaag

SEQ ID NO: 4473 - DNA, 15 bp, Homo sapiens
gggcactaaaaggaa

SEQ ID NO: 4474 - DNA, 15 bp, Homo sapiens
ggggcactaaaagga

SEQ ID NO: 4475 - DNA, 15 bp, Homo sapiens
tggggcactaaaagg

SEQ ID NO: 4476 - DNA, 15 bp, Homo sapiens
ttggggcactaaaag

SEQ ID NO: 4477 - DNA, 15 bp, Homo sapiens
tttggggcactaaaa

SEQ ID NO: 4478 - DNA, 15 bp, Homo sapiens
atttggggcactaaa

SEQ ID NO: 4479 - DNA, 15 bp, Homo sapiens
tatttggggcactaa

SEQ ID NO: 4480 - DNA, 15 bp, Homo sapiens
ctatttggggcacta

SEQ ID NO: 4481 - DNA, 15 bp, Homo sapiens
gctatttggggcact

SEQ ID NO: 4482 - DNA, 15 bp, Homo sapiens
tgctatttggggcac

SEQ ID NO: 4483 - DNA, 15 bp, Homo sapiens
ctgctatttggggca

SEQ ID NO: 4484 - DNA, 15 bp, Homo sapiens
gctgctatttggggc

SEQ ID NO: 4485 - DNA, 15 bp, Homo sapiens
cgctgctatttgggg

SEQ ID NO: 4486 - DNA, 15 bp, Homo sapiens
gcgctgctatttggg

SEQ ID NO: 4487 - DNA, 15 bp, Homo sapiens
agcgctgctatttgg

SEQ ID NO: 4488 - DNA, 15 bp, Homo sapiens
aagcgctgctatttg

SEQ ID NO: 4489 - DNA, 15 bp, Homo sapiens
taagcgctgctattt

SEQ ID NO: 4490 - DNA, 15 bp, Homo sapiens
ctaagcgctgctatt

SEQ ID NO: 4491 - DNA, 15 bp, Homo sapiens
gctaagcgctgctat

SEQ ID NO: 4492 - DNA, 15 bp, Homo sapiens
ggctaagcgctgcta

SEQ ID NO: 4493 - DNA, 15 bp, Homo sapiens
gggctaagcgctgct

SEQ ID NO: 4494 - DNA, 15 bp, Homo sapiens
cgggctaagcgctgc

SEQ ID NO: 4495 - DNA, 15 bp, Homo sapiens
acgggctaagcgctg

SEQ ID NO: 4496 - DNA, 15 bp, Homo sapiens
aacgggctaagcgct

SEQ ID NO: 4497 - DNA, 15 bp, Homo sapiens
caacgggctaagcgc

SEQ ID NO: 4498 - DNA, 15 bp, Homo sapiens
gcaacgggctaagcg

SEQ ID NO: 4499 - DNA, 15 bp, Homo sapiens
agcaacgggctaagc

SEQ ID NO: 4500 - DNA, 15 bp, Homo sapiens
aagcaacgggctaag

SEQ ID NO: 4501 - DNA, 15 bp, Homo sapiens
gaagcaacgggctaa

SEQ ID NO: 4502 - DNA, 15 bp, Homo sapiens
ggaagcaacgggcta

SEQ ID NO: 4503 - DNA, 15 bp, Homo sapiens
gggaagcaacgggct

SEQ ID NO: 4504 - DNA, 15 bp, Homo sapiens
ggggaagcaacgggc

SEQ ID NO: 4505 - DNA, 15 bp, Homo sapiens
gggggaagcaacggg

SEQ ID NO: 4506 - DNA, 15 bp, Homo sapiens
cgggggaagcaacgg

SEQ ID NO: 4507 - DNA, 15 bp, Homo sapiens
tcgggggaagcaacg

SEQ ID NO: 4508 - DNA, 15 bp, Homo sapiens
gtcgggggaagcaac

SEQ ID NO: 4509 - DNA, 15 bp, Homo sapiens
agtcgggggaagcaa

SEQ ID NO: 4510 - DNA, 15 bp, Homo sapiens
gagtcgggggaagca

SEQ ID NO: 4511 - DNA, 15 bp, Homo sapiens
agagtcgggggaagc

SEQ ID NO: 4512 - DNA, 15 bp, Homo sapiens
aagagtcgggggaag

SEQ ID NO: 4513 - DNA, 15 bp, Homo sapiens
caagagtcgggggaa

SEQ ID NO: 4514 - DNA, 15 bp, Homo sapiens
acaagagtcggggga

SEQ ID NO: 4515 - DNA, 15 bp, Homo sapiens
aacaagagtcggggg

SEQ ID NO: 4516 - DNA, 15 bp, Homo sapiens
aaacaagagtcgggg

SEQ ID NO: 4517 - DNA, 15 bp, Homo sapiens
aaaacaagagtcggg

SEQ ID NO: 4518 - DNA, 15 bp, Homo sapiens
aaaaacaagagtcgg

SEQ ID NO: 4519 - DNA, 15 bp, Homo sapiens
gaaaaacaagagtcg

SEQ ID NO: 4520 - DNA, 15 bp, Homo sapiens
tgaaaaacaagagtc

SEQ ID NO: 4521 - DNA, 15 bp, Homo sapiens
ttgaaaaacaagagt

SEQ ID NO: 4522 - DNA, 15 bp, Homo sapiens
tttgaaaaacaagag

SEQ ID NO: 4523 - DNA, 15 bp, Homo sapiens
ctttgaaaaacaaga

SEQ ID NO: 4524 - DNA, 15 bp, Homo sapiens
actttgaaaaacaag

SEQ ID NO: 4525 - DNA, 15 bp, Homo sapiens
cactttgaaaaacaa

SEQ ID NO: 4526 - DNA, 15 bp, Homo sapiens
acactttgaaaaaca

SEQ ID NO: 4527 - DNA, 15 bp, Homo sapiens
aacactttgaaaaac

SEQ ID NO: 4528 - DNA, 15 bp, Homo sapiens
gaacactttgaaaaa

SEQ ID NO: 4529 - DNA, 15 bp, Homo sapiens
tgaacactttgaaaa

SEQ ID NO: 4530 - DNA, 15 bp, Homo sapiens
gtgaacactttgaaa

SEQ ID NO: 4531 - DNA, 15 bp, Homo sapiens
tgtgaacactttgaa

SEQ ID NO: 4532 - DNA, 15 bp, Homo sapiens
ctgtgaacactttga

SEQ ID NO: 4533 - DNA, 15 bp, Homo sapiens
cctgtgaacactttg

SEQ ID NO: 4534 - DNA, 15 bp, Homo sapiens
ccctgtgaacacttt

SEQ ID NO: 4535 - DNA, 15 bp, Homo sapiens
accctgtgaacactt

SEQ ID NO: 4536 - DNA, 15 bp, Homo sapiens
gaccctgtgaacact

SEQ ID NO: 4537 - DNA, 15 bp, Homo sapiens
cgaccctgtgaacac

SEQ ID NO: 4538 - DNA, 15 bp, Homo sapiens
gcgaccctgtgaaca

SEQ ID NO: 4539 - DNA, 15 bp, Homo sapiens
cgcgaccctgtgaac

SEQ ID NO: 4540 - DNA, 15 bp, Homo sapiens
tcgcgaccctgtgaa

SEQ ID NO: 4541 - DNA, 15 bp, Homo sapiens
ctcgcgaccctgtga

SEQ ID NO: 4542 - DNA, 15 bp, Homo sapiens
tctcgcgaccctgtg

SEQ ID NO: 4543 - DNA, 15 bp, Homo sapiens
ctctcgcgaccctgt

SEQ ID NO: 4544 - DNA, 15 bp, Homo sapiens
gctctcgcgaccctg

SEQ ID NO: 4545 - DNA, 15 bp, Homo sapiens
cgctctcgcgaccct

SEQ ID NO: 4546 - DNA, 15 bp, Homo sapiens
tcgctctcgcgaccc

SEQ ID NO: 4547 - DNA, 15 bp, Homo sapiens
ctcgctctcgcgacc

SEQ ID NO: 4548 - DNA, 15 bp, Homo sapiens
gctcgctctcgcgac

SEQ ID NO: 4549 - DNA, 15 bp, Homo sapiens
cgctcgctctcgcga

SEQ ID NO: 4550 - DNA, 15 bp, Homo sapiens
tcgctcgctctcgcg

SEQ ID NO: 4551 - DNA, 15 bp, Homo sapiens
gtcgctcgctctcgc

SEQ ID NO: 4552 - DNA, 15 bp, Homo sapiens
cgtcgctcgctctcg

SEQ ID NO: 4553 - DNA, 15 bp, Homo sapiens
gcgtcgctcgctctc

SEQ ID NO: 4554 - DNA, 15 bp, Homo sapiens
cgcgtcgctcgctct

SEQ ID NO: 4555 - DNA, 15 bp, Homo sapiens
ccgcgtcgctcgctc

SEQ ID NO: 4556 - DNA, 15 bp, Homo sapiens
cccgcgtcgctcgct

SEQ ID NO: 4557 - DNA, 15 bp, Homo sapiens
ccccgcgtcgctcgc

SEQ ID NO: 4558 - DNA, 15 bp, Homo sapiens
cccccgcgtcgctcg

SEQ ID NO: 4559 - DNA, 15 bp, Homo sapiens
gcccccgcgtcgctc

SEQ ID NO: 4560 - DNA, 15 bp, Homo sapiens
cgcccccgcgtcgct

SEQ ID NO: 4561 - DNA, 15 bp, Homo sapiens
ccgcccccgcgtcgc

SEQ ID NO: 4562 - DNA, 15 bp, Homo sapiens
gccgcccccgcgtcg

SEQ ID NO: 4563 - DNA, 15 bp, Homo sapiens
cgccgcccccgcgtc

SEQ ID NO: 4564 - DNA, 15 bp, Homo sapiens
tcgccgcccccgcgt

SEQ ID NO: 4565 - DNA, 15 bp, Homo sapiens
ctcgccgcccccgcg

SEQ ID NO: 4566 - DNA, 15 bp, Homo sapiens
cctcgccgcccccgc

SEQ ID NO: 4567 - DNA, 15 bp, Homo sapiens
gcctcgccgcccccg

SEQ ID NO: 4568 - DNA, 15 bp, Homo sapiens
agcctcgccgccccc

SEQ ID NO: 4569 - DNA, 15 bp, Homo sapiens
cagcctcgccgcccc

SEQ ID NO: 4570 - DNA, 15 bp, Homo sapiens
gcagcctcgccgccc

SEQ ID NO: 4571 - DNA, 15 bp, Homo sapiens
tgcagcctcgccgcc

SEQ ID NO: 4572 - DNA, 15 bp, Homo sapiens
ttgcagcctcgccgc

SEQ ID NO: 4573 - DNA, 15 bp, Homo sapiens
cttgcagcctcgccg

SEQ ID NO: 4574 - DNA, 15 bp, Homo sapiens
ccttgcagcctcgcc

SEQ ID NO: 4575 - DNA, 15 bp, Homo sapiens
gccttgcagcctcgc

SEQ ID NO: 4576 - DNA, 15 bp, Homo sapiens
agccttgcagcctcg

SEQ ID NO: 4577 - DNA, 15 bp, Homo sapiens
cagccttgcagcctc

SEQ ID NO: 4578 - DNA, 15 bp, Homo sapiens
gcagccttgcagcct

SEQ ID NO: 4579 - DNA, 15 bp, Homo sapiens
tgcagccttgcagcc

SEQ ID NO: 4580 - DNA, 15 bp, Homo sapiens
gtgcagccttgcagc

SEQ ID NO: 4581 - DNA, 15 bp, Homo sapiens
tgtgcagccttgcag

SEQ ID NO: 4582 - DNA, 15 bp, Homo sapiens
ctgtgcagccttgca

SEQ ID NO: 4583 - DNA, 15 bp, Homo sapiens
cctgtgcagccttgc

SEQ ID NO: 4584 - DNA, 15 bp, Homo sapiens
tcctgtgcagccttg

SEQ ID NO: 4585 - DNA, 15 bp, Homo sapiens
ttcctgtgcagcctt

SEQ ID NO: 4586 - DNA, 15 bp, Homo sapiens
gttcctgtgcagcct

SEQ ID NO: 4587 - DNA, 15 bp, Homo sapiens
tgttcctgtgcagcc

SEQ ID NO: 4588 - DNA, 15 bp, Homo sapiens
ctgttcctgtgcagc

SEQ ID NO: 4589 - DNA, 15 bp, Homo sapiens
tctgttcctgtgcag

SEQ ID NO: 4590 - DNA, 15 bp, Homo sapiens
gtctgttcctgtgca

SEQ ID NO: 4591 - DNA, 15 bp, Homo sapiens
cgtctgttcctgtgc

SEQ ID NO: 4592 - DNA, 15 bp, Homo sapiens
tcgtctgttcctgtg

SEQ ID NO: 4593 - DNA, 15 bp, Homo sapiens
gtcgtctgttcctgt

SEQ ID NO: 4594 - DNA, 15 bp, Homo sapiens
tgtcgtctgttcctg

SEQ ID NO: 4595 - DNA, 15 bp, Homo sapiens
ttgtcgtctgttcct

SEQ ID NO: 4596 - DNA, 15 bp, Homo sapiens
cttgtcgtctgttcc

SEQ ID NO: 4597 - DNA, 15 bp, Homo sapiens
tcttgtcgtctgttc

SEQ ID NO: 4598 - DNA, 15 bp, Homo sapiens
ttcttgtcgtctgtt

SEQ ID NO: 4599 - DNA, 15 bp, Homo sapiens
tttcttgtcgtctgt

SEQ ID NO: 4600 - DNA, 15 bp, Homo sapiens
atttcttgtcgtctg

SEQ ID NO: 4601 - DNA, 15 bp, Homo sapiens
tatttcttgtcgtct

SEQ ID NO: 4602 - DNA, 15 bp, Homo sapiens
ctatttcttgtcgtc

SEQ ID NO: 4603 - DNA, 15 bp, Homo sapiens
cctatttcttgtcgt

SEQ ID NO: 4604 - DNA, 15 bp, Homo sapiens
ccctatttcttgtcg

SEQ ID NO: 4605 - DNA, 15 bp, Homo sapiens
gccctatttcttgtc

SEQ ID NO: 4606 - DNA, 15 bp, Homo sapiens
agccctatttcttgt

SEQ ID NO: 4607 - DNA, 15 bp, Homo sapiens
aagccctatttcttg

SEQ ID NO: 4608 - DNA, 15 bp, Homo sapiens
aaagccctatttctt

SEQ ID NO: 4609 - DNA, 15 bp, Homo sapiens
gaaagccctatttct

SEQ ID NO: 4610 - DNA, 15 bp, Homo sapiens
agaaagccctatttc

SEQ ID NO: 4611 - DNA, 15 bp, Homo sapiens
aagaaagccctattt

SEQ ID NO: 4612 - DNA, 15 bp, Homo sapiens
gaagaaagccctatt

SEQ ID NO: 4613 - DNA, 15 bp, Homo sapiens
agaagaaagccctat

SEQ ID NO: 4614 - DNA, 15 bp, Homo sapiens
cagaagaaagcccta

SEQ ID NO: 4615 - DNA, 15 bp, Homo sapiens
gcagaagaaagccct

SEQ ID NO: 4616 - DNA, 15 bp, Homo sapiens
cgcagaagaaagccc

SEQ ID NO: 4617 - DNA, 15 bp, Homo sapiens
acgcagaagaaagcc

SEQ ID NO: 4618 - DNA, 15 bp, Homo sapiens
cacgcagaagaaagc

SEQ ID NO: 4619 - DNA, 15 bp, Homo sapiens
ccacgcagaagaaag

SEQ ID NO: 4620 - DNA, 15 bp, Homo sapiens
accacgcagaagaaa

SEQ ID NO: 4621 - DNA, 15 bp, Homo sapiens
aaccacgcagaagaa

SEQ ID NO: 4622 - DNA, 15 bp, Homo sapiens
gaaccacgcagaaga

SEQ ID NO: 4623 - DNA, 15 bp, Homo sapiens
agaaccacgcagaag

SEQ ID NO: 4624 - DNA, 15 bp, Homo sapiens
aagaaccacgcagaa

SEQ ID NO: 4625 - DNA, 15 bp, Homo sapiens
aaagaaccacgcaga

SEQ ID NO: 4626 - DNA, 15 bp, Homo sapiens
aaaagaaccacgcag

SEQ ID NO: 4627 - DNA, 15 bp, Homo sapiens
gaaaagaaccacgca

SEQ ID NO: 4628 - DNA, 15 bp, Homo sapiens
ggaaaagaaccacgc

SEQ ID NO: 4629 - DNA, 15 bp, Homo sapiens
cggaaaagaaccacg

SEQ ID NO: 4630 - DNA, 15 bp, Homo sapiens
ccggaaaagaaccac

SEQ ID NO: 4631 - DNA, 15 bp, Homo sapiens
accggaaaagaacca

SEQ ID NO: 4632 - DNA, 15 bp, Homo sapiens
gaccggaaaagaacc

SEQ ID NO: 4633 - DNA, 15 bp, Homo sapiens
ggaccggaaaagaac

SEQ ID NO: 4634 - DNA, 15 bp, Homo sapiens
gggaccggaaaagaa

SEQ ID NO: 4635 - DNA, 15 bp, Homo sapiens
agggaccggaaaaga

SEQ ID NO: 4636 - DNA, 15 bp, Homo sapiens
cagggaccggaaaag

SEQ ID NO: 4637 - DNA, 15 bp, Homo sapiens
acagggaccggaaaa

SEQ ID NO: 4638 - DNA, 15 bp, Homo sapiens
gacagggaccggaaa

SEQ ID NO: 4639 - DNA, 15 bp, Homo sapiens
agacagggaccggaa

SEQ ID NO: 4640 - DNA, 15 bp, Homo sapiens
cagacagggaccgga

SEQ ID NO: 4641 - DNA, 15 bp, Homo sapiens
tcagacagggaccgg

SEQ ID NO: 4642 - DNA, 15 bp, Homo sapiens
ctcagacagggaccg

SEQ ID NO: 4643 - DNA, 15 bp, Homo sapiens
actcagacagggacc

SEQ ID NO: 4644 - DNA, 15 bp, Homo sapiens
gactcagacagggac

SEQ ID NO: 4645 - DNA, 15 bp, Homo sapiens
cgactcagacaggga

SEQ ID NO: 4646 - DNA, 15 bp, Homo sapiens
gcgactcagacaggg

SEQ ID NO: 4647 - DNA, 15 bp, Homo sapiens
ggcgactcagacagg

SEQ ID NO: 4648 - DNA, 15 bp, Homo sapiens
gggcgactcagacag

SEQ ID NO: 4649 - DNA, 15 bp, Homo sapiens
cgggcgactcagaca

SEQ ID NO: 4650 - DNA, 15 bp, Homo sapiens
tcgggcgactcagac

SEQ ID NO: 4651 - DNA, 15 bp, Homo sapiens
gtcgggcgactcaga

SEQ ID NO: 4652 - DNA, 15 bp, Homo sapiens
ggtcgggcgactcag

SEQ ID NO: 4653 - DNA, 15 bp, Homo sapiens
gggtcgggcgactca

SEQ ID NO: 4654 - DNA, 15 bp, Homo sapiens
ggggtcgggcgactc

SEQ ID NO: 4655 - DNA, 15 bp, Homo sapiens
cggggtcgggcgact

SEQ ID NO: 4656 - DNA, 15 bp, Homo sapiens
gcggggtcgggcgac

SEQ ID NO: 4657 - DNA, 15 bp, Homo sapiens
cgcggggtcgggcga

SEQ ID NO: 4658 - DNA, 15 bp, Homo sapiens
ccgcggggtcgggcg

SEQ ID NO: 4659 - DNA, 15 bp, Homo sapiens
cccgcggggtcgggc

SEQ ID NO: 4660 - DNA, 15 bp, Homo sapiens
ccccgcggggtcggg

SEQ ID NO: 4661 - DNA, 15 bp, Homo sapiens
tccccgcggggtcgg

SEQ ID NO: 4662 - DNA, 15 bp, Homo sapiens
ctccccgcggggtcg

SEQ ID NO: 4663 - DNA, 15 bp, Homo sapiens
gctccccgcggggtc

SEQ ID NO: 4664 - DNA, 15 bp, Homo sapiens
cgctccccgcggggt

SEQ ID NO: 4665 - DNA, 15 bp, Homo sapiens
gcgctccccgcgggg

SEQ ID NO: 4666 - DNA, 15 bp, Homo sapiens
cgcgctccccgcggg

SEQ ID NO: 4667 - DNA, 15 bp, Homo sapiens
ccgcgctccccgcgg

SEQ ID NO: 4668 - DNA, 15 bp, Homo sapiens
tccgcgctccccgcg

SEQ ID NO: 4669 - DNA, 15 bp, Homo sapiens
ctccgcgctccccgc

SEQ ID NO: 4670 - DNA, 15 bp, Homo sapiens
gctccgcgctccccg

SEQ ID NO: 4671 - DNA, 15 bp, Homo sapiens
tgctccgcgctcccc

SEQ ID NO: 4672 - DNA, 15 bp, Homo sapiens
atgctccgcgctccc

SEQ ID NO: 4673 - DNA, 15 bp, Homo sapiens
aatgctccgcgctcc

SEQ ID NO: 4674 - DNA, 15 bp, Homo sapiens
caatgctccgcgctc

SEQ ID NO: 4675 - DNA, 15 bp, Homo sapiens
gcaatgctccgcgct

SEQ ID NO: 4676 - DNA, 15 bp, Homo sapiens
cgcaatgctccgcgc

SEQ ID NO: 4677 - DNA, 15 bp, Homo sapiens
ccgcaatgctccgcg

SEQ ID NO: 4678 - DNA, 15 bp, Homo sapiens
gccgcaatgctccgc

SEQ ID NO: 4679 - DNA, 15 bp, Homo sapiens
cgccgcaatgctccg

SEQ ID NO: 4680 - DNA, 15 bp, Homo sapiens
acgccgcaatgctcc

SEQ ID NO: 4681 - DNA, 15 bp, Homo sapiens
cacgccgcaatgctc

SEQ ID NO: 4682 - DNA, 15 bp, Homo sapiens
gcacgccgcaatgct

SEQ ID NO: 4683 - DNA, 15 bp, Homo sapiens
cgcacgccgcaatgc

SEQ ID NO: 4684 - DNA, 15 bp, Homo sapiens
ccgcacgccgcaatg

SEQ ID NO: 4685 - DNA, 15 bp, Homo sapiens
gccgcacgccgcaat

SEQ ID NO: 4686 - DNA, 15 bp, Homo sapiens
cgccgcacgccgcaa

SEQ ID NO: 4687 - DNA, 15 bp, Homo sapiens
ccgccgcacgccgca

SEQ ID NO: 4688 - DNA, 15 bp, Homo sapiens
cccgccgcacgccgc

SEQ ID NO: 4689 - DNA, 15 bp, Homo sapiens
gcccgccgcacgccg

SEQ ID NO: 4690 - DNA, 15 bp, Homo sapiens
agcccgccgcacgcc

SEQ ID NO: 4691 - DNA, 15 bp, Homo sapiens
aagcccgccgcacgc

SEQ ID NO: 4692 - DNA, 15 bp, Homo sapiens
gaagcccgccgcacg

SEQ ID NO: 4693 - DNA, 15 bp, Homo sapiens
cgaagcccgccgcac

SEQ ID NO: 4694 - DNA, 15 bp, Homo sapiens
ccgaagcccgccgca

SEQ ID NO: 4695 - DNA, 15 bp, Homo sapiens
cccgaagcccgccgc

SEQ ID NO: 4696 - DNA, 15 bp, Homo sapiens
gcccgaagcccgccg

SEQ ID NO: 4697 - DNA, 15 bp, Homo sapiens
agcccgaagcccgcc

SEQ ID NO: 4698 - DNA, 15 bp, Homo sapiens
gagcccgaagcccgc

SEQ ID NO: 4699 - DNA, 15 bp, Homo sapiens
agagcccgaagcccg

SEQ ID NO: 4700 - DNA, 15 bp, Homo sapiens
gagagcccgaagccc

SEQ ID NO: 4701 - DNA, 15 bp, Homo sapiens
tgagagcccgaagcc

SEQ ID NO: 4702 - DNA, 15 bp, Homo sapiens
ctgagagcccgaagc

SEQ ID NO: 4703 - DNA, 15 bp, Homo sapiens
gctgagagcccgaag

SEQ ID NO: 4704 - DNA, 15 bp, Homo sapiens
ggctgagagcccgaa

SEQ ID NO: 4705 - DNA, 15 bp, Homo sapiens
gggctgagagcccga

SEQ ID NO: 4706 - DNA, 15 bp, Homo sapiens
cgggctgagagcccg

SEQ ID NO: 4707 - DNA, 15 bp, Homo sapiens
gcgggctgagagccc

SEQ ID NO: 4708 - DNA, 15 bp, Homo sapiens
cgcgggctgagagcc

SEQ ID NO: 4709 - DNA, 15 bp, Homo sapiens
gcgcgggctgagagc

SEQ ID NO: 4710 - DNA, 15 bp, Homo sapiens
tgcgcgggctgagag

SEQ ID NO: 4711 - DNA, 15 bp, Homo sapiens
ctgcgcgggctgaga

SEQ ID NO: 4712 - DNA, 15 bp, Homo sapiens
gctgcgcgggctgag

SEQ ID NO: 4713 - DNA, 15 bp, Homo sapiens
tgctgcgcgggctga

SEQ ID NO: 4714 - DNA, 15 bp, Homo sapiens
ttgctgcgcgggctg

SEQ ID NO: 4715 - DNA, 15 bp, Homo sapiens
cttgctgcgcgggct

SEQ ID NO: 4716 - DNA, 15 bp, Homo sapiens
acttgctgcgcgggc

SEQ ID NO: 4717 - DNA, 15 bp, Homo sapiens
aacttgctgcgcggg

SEQ ID NO: 4718 - DNA, 15 bp, Homo sapiens
caacttgctgcgcgg

SEQ ID NO: 4719 - DNA, 15 bp, Homo sapiens
acaacttgctgcgcg

SEQ ID NO: 4720 - DNA, 15 bp, Homo sapiens
cacaacttgctgcgc

SEQ ID NO: 4721 - DNA, 15 bp, Homo sapiens
acacaacttgctgcg

SEQ ID NO: 4722 - DNA, 15 bp, Homo sapiens
aacacaacttgctgc

SEQ ID NO: 4723 - DNA, 15 bp, Homo sapiens
caacacaacttgctg

SEQ ID NO: 4724 - DNA, 15 bp, Homo sapiens
gcaacacaacttgct

SEQ ID NO: 4725 - DNA, 15 bp, Homo sapiens
agcaacacaacttgc

SEQ ID NO: 4726 - DNA, 15 bp, Homo sapiens
aagcaacacaacttg

SEQ ID NO: 4727 - DNA, 15 bp, Homo sapiens
aaagcaacacaactt

SEQ ID NO: 4728 - DNA, 15 bp, Homo sapiens
aaaagcaacacaact

SEQ ID NO: 4729 - DNA, 15 bp, Homo sapiens
gaaaagcaacacaac

SEQ ID NO: 4730 - DNA, 15 bp, Homo sapiens
ggaaaagcaacacaa

SEQ ID NO: 4731 - DNA, 15 bp, Homo sapiens
gggaaaagcaacaca

SEQ ID NO: 4732 - DNA, 15 bp, Homo sapiens
ggggaaaagcaacac

SEQ ID NO: 4733 - DNA, 15 bp, Homo sapiens
cggggaaaagcaaca

SEQ ID NO: 4734 - DNA, 15 bp, Homo sapiens
ccggggaaaagcaac

SEQ ID NO: 4735 - DNA, 15 bp, Homo sapiens
cccggggaaaagcaa

SEQ ID NO: 4736 - DNA, 15 bp, Homo sapiens
acccggggaaaagca

SEQ ID NO: 4737 - DNA, 15 bp, Homo sapiens
cacccggggaaaagc

SEQ ID NO: 4738 - DNA, 15 bp, Homo sapiens
gcacccggggaaaag

SEQ ID NO: 4739 - DNA, 15 bp, Homo sapiens
cgcacccggggaaaa

SEQ ID NO: 4740 - DNA, 15 bp, Homo sapiens
tcgcacccggggaaa

SEQ ID NO: 4741 - DNA, 15 bp, Homo sapiens
gtcgcacccggggaa

SEQ ID NO: 4742 - DNA, 15 bp, Homo sapiens
cgtcgcacccgggga

SEQ ID NO: 4743 - DNA, 15 bp, Homo sapiens
gcgtcgcacccgggg

SEQ ID NO: 4744 - DNA, 15 bp, Homo sapiens
cgcgtcgcacccggg

SEQ ID NO: 4745 - DNA, 15 bp, Homo sapiens
ccgcgtcgcacccgg

SEQ ID NO: 4746 - DNA, 15 bp, Homo sapiens
cccgcgtcgcacccg

SEQ ID NO: 4747 - DNA, 15 bp, Homo sapiens
tcccgcgtcgcaccc

SEQ ID NO: 4748 - DNA, 15 bp, Homo sapiens
gtcccgcgtcgcacc

SEQ ID NO: 4749 - DNA, 15 bp, Homo sapiens
cgtcccgcgtcgcac

SEQ ID NO: 4750 - DNA, 15 bp, Homo sapiens
ccgtcccgcgtcgca

SEQ ID NO: 4751 - DNA, 15 bp, Homo sapiens
gccgtcccgcgtcgc

SEQ ID NO: 4752 - DNA, 15 bp, Homo sapiens
ggccgtcccgcgtcg

SEQ ID NO: 4753 - DNA, 15 bp, Homo sapiens
cggccgtcccgcgtc

SEQ ID NO: 4754 - DNA, 15 bp, Homo sapiens
gcggccgtcccgcgt

SEQ ID NO: 4755 - DNA, 15 bp, Homo sapiens
cgcggccgtcccgcg

SEQ ID NO: 4756 - DNA, 15 bp, Homo sapiens
tcgcggccgtcccgc

SEQ ID NO: 4757 - DNA, 15 bp, Homo sapiens
ttcgcggccgtcccg

SEQ ID NO: 4758 - DNA, 15 bp, Homo sapiens
cttcgcggccgtccc

SEQ ID NO: 4759 - DNA, 15 bp, Homo sapiens
tcttcgcggccgtcc

SEQ ID NO: 4760 - DNA, 15 bp, Homo sapiens
ctcttcgcggccgtc

SEQ ID NO: 4761 - DNA, 15 bp, Homo sapiens
gctcttcgcggccgt

SEQ ID NO: 4762 - DNA, 15 bp, Homo sapiens
tgctcttcgcggccg

SEQ ID NO: 4763 - DNA, 15 bp, Homo sapiens
ttgctcttcgcggcc

SEQ ID NO: 4764 - DNA, 15 bp, Homo sapiens
tttgctcttcgcggc

SEQ ID NO: 4765 - DNA, 15 bp, Homo sapiens
ctttgctcttcgcgg

SEQ ID NO: 4766 - DNA, 15 bp, Homo sapiens
actttgctcttcgcg

SEQ ID NO: 4767 - DNA, 15 bp, Homo sapiens
aactttgctcttcgc

SEQ ID NO: 4768 - DNA, 15 bp, Homo sapiens
gaactttgctcttcg

SEQ ID NO: 4769 - DNA, 15 bp, Homo sapiens
cgaactttgctcttc

SEQ ID NO: 4770 - DNA, 15 bp, Homo sapiens
acgaactttgctctt

SEQ ID NO: 4771 - DNA, 15 bp, Homo sapiens
gacgaactttgctct

SEQ ID NO: 4772 - DNA, 15 bp, Homo sapiens
ggacgaactttgctc

SEQ ID NO: 4773 - DNA, 15 bp, Homo sapiens
cggacgaactttgct

SEQ ID NO: 4774 - DNA, 15 bp, Homo sapiens
gcggacgaactttgc

SEQ ID NO: 4775 - DNA, 15 bp, Homo sapiens
cgcggacgaactttg

SEQ ID NO: 4776 - DNA, 15 bp, Homo sapiens
ccgcggacgaacttt

SEQ ID NO: 4777 - DNA, 15 bp, Homo sapiens
accgcggacgaactt

SEQ ID NO: 4778 - DNA, 15 bp, Homo sapiens
taccgcggacgaact

SEQ ID NO: 4779 - DNA, 15 bp, Homo sapiens
ctaccgcggacgaac

SEQ ID NO: 4780 - DNA, 15 bp, Homo sapiens
cctaccgcggacgaa

SEQ ID NO: 4781 - DNA, 15 bp, Homo sapiens
tcctaccgcggacga

SEQ ID NO: 4782 - DNA, 15 bp, Homo sapiens
ttcctaccgcggacg

SEQ ID NO: 4783 - DNA, 15 bp, Homo sapiens
gttcctaccgcggac

SEQ ID NO: 4784 - DNA, 15 bp, Homo sapiens
agttcctaccgcgga

SEQ ID NO: 4785 - DNA, 15 bp, Homo sapiens
aagttcctaccgcgg

SEQ ID NO: 4786 - DNA, 15 bp, Homo sapiens
gaagttcctaccgcg

SEQ ID NO: 4787 - DNA, 15 bp, Homo sapiens
cgaagttcctaccgc

SEQ ID NO: 4788 - DNA, 15 bp, Homo sapiens
tcgaagttcctaccg

SEQ ID NO: 4789 - DNA, 15 bp, Homo sapiens
ctcgaagttcctacc

SEQ ID NO: 4790 - DNA, 15 bp, Homo sapiens
cctcgaagttcctac

SEQ ID NO: 4791 - DNA, 15 bp, Homo sapiens
gcctcgaagttccta

SEQ ID NO: 4792 - DNA, 15 bp, Homo sapiens
ggcctcgaagttcct

SEQ ID NO: 4793 - DNA, 15 bp, Homo sapiens
gggcctcgaagttcc

SEQ ID NO: 4794 - DNA, 15 bp, Homo sapiens
cgggcctcgaagttc

SEQ ID NO: 4795 - DNA, 15 bp, Homo sapiens
ccgggcctcgaagtt

SEQ ID NO: 4796 - DNA, 15 bp, Homo sapiens
accgggcctcgaagt

SEQ ID NO: 4797 - DNA, 15 bp, Homo sapiens
aaccgggcctcgaag

SEQ ID NO: 4798 - DNA, 15 bp, Homo sapiens
taaccgggcctcgaa

SEQ ID NO: 4799 - DNA, 15 bp, Homo sapiens
ctaaccgggcctcga

SEQ ID NO: 4800 - DNA, 15 bp, Homo sapiens
cctaaccgggcctcg

SEQ ID NO: 4801 - DNA, 15 bp, Homo sapiens
tcctaaccgggcctc

SEQ ID NO: 4802 - DNA, 15 bp, Homo sapiens
gtcctaaccgggcct

SEQ ID NO: 4803 - DNA, 15 bp, Homo sapiens
ggtcctaaccgggcc

SEQ ID NO: 4804 - DNA, 15 bp, Homo sapiens
cggtcctaaccgggc

SEQ ID NO: 4805 - DNA, 15 bp, Homo sapiens
tcggtcctaaccggg

SEQ ID NO: 4806 - DNA, 15 bp, Homo sapiens
atcggtcctaaccgg

SEQ ID NO: 4807 - DNA, 15 bp, Homo sapiens
gatcggtcctaaccg

SEQ ID NO: 4808 - DNA, 15 bp, Homo sapiens
agatcggtcctaacc

SEQ ID NO: 4809 - DNA, 15 bp, Homo sapiens
gagatcggtcctaac

SEQ ID NO: 4810 - DNA, 15 bp, Homo sapiens
ggagatcggtcctaa

SEQ ID NO: 4811 - DNA, 15 bp, Homo sapiens
cggagatcggtccta

SEQ ID NO: 4812 - DNA, 15 bp, Homo sapiens
ccggagatcggtcct

SEQ ID NO: 4813 - DNA, 15 bp, Homo sapiens
gccggagatcggtcc

SEQ ID NO: 4814 - DNA, 15 bp, Homo sapiens
ggccggagatcggtc

SEQ ID NO: 4815 - DNA, 15 bp, Homo sapiens
aggccggagatcggt

SEQ ID NO: 4816 - DNA, 15 bp, Homo sapiens
gaggccggagatcgg

SEQ ID NO: 4817 - DNA, 15 bp, Homo sapiens
ggaggccggagatcg

SEQ ID NO: 4818 - DNA, 15 bp, Homo sapiens
cggaggccggagatc

SEQ ID NO: 4819 - DNA, 15 bp, Homo sapiens
tcggaggccggagat

SEQ ID NO: 4820 - DNA, 15 bp, Homo sapiens
ctcggaggccggaga

SEQ ID NO: 4821 - DNA, 15 bp, Homo sapiens
actcggaggccggag

SEQ ID NO: 4822 - DNA, 15 bp, Homo sapiens
gactcggaggccgga

SEQ ID NO: 4823 - DNA, 15 bp, Homo sapiens
agactcggaggccgg

SEQ ID NO: 4824 - DNA, 15 bp, Homo sapiens
tagactcggaggccg

SEQ ID NO: 4825 - DNA, 15 bp, Homo sapiens
gtagactcggaggcc

SEQ ID NO: 4826 - DNA, 15 bp, Homo sapiens
agtagactcggaggc

SEQ ID NO: 4827 - DNA, 15 bp, Homo sapiens
aagtagactcggagg

SEQ ID NO: 4828 - DNA, 15 bp, Homo sapiens
taagtagactcggag

SEQ ID NO: 4829 - DNA, 15 bp, Homo sapiens
ctaagtagactcgga

SEQ ID NO: 4830 - DNA, 15 bp, Homo sapiens
gctaagtagactcgg

SEQ ID NO: 4831 - DNA, 15 bp, Homo sapiens
ggctaagtagactcg

SEQ ID NO: 4832 - DNA, 15 bp, Homo sapiens
cggctaagtagactc

SEQ ID NO: 4833 - DNA, 15 bp, Homo sapiens
acggctaagtagact

SEQ ID NO: 4834 - DNA, 15 bp, Homo sapiens
cacggctaagtagac

SEQ ID NO: 4835 - DNA, 15 bp, Homo sapiens
acacggctaagtaga

SEQ ID NO: 4836 - DNA, 15 bp, Homo sapiens
gacacggctaagtag

SEQ ID NO: 4837 - DNA, 15 bp, Homo sapiens
ggacacggctaagta

SEQ ID NO: 4838 - DNA, 15 bp, Homo sapiens
tggacacggctaagt

SEQ ID NO: 4839 - DNA, 15 bp, Homo sapiens
gtggacacggctaag

SEQ ID NO: 4840 - DNA, 15 bp, Homo sapiens
cgtggacacggctaa

SEQ ID NO: 4841 - DNA, 15 bp, Homo sapiens
gcgtggacacggcta

SEQ ID NO: 4842 - DNA, 15 bp, Homo sapiens
agcgtggacacggct

SEQ ID NO: 4843 - DNA, 15 bp, Homo sapiens
gagcgtggacacggc

SEQ ID NO: 4844 - DNA, 15 bp, Homo sapiens
cgagcgtggacacgg

SEQ ID NO: 4845 - DNA, 15 bp, Homo sapiens
acgagcgtggacacg

SEQ ID NO: 4846 - DNA, 15 bp, Homo sapiens
cacgagcgtggacac

SEQ ID NO: 4847 - DNA, 15 bp, Homo sapiens
gcacgagcgtggaca

SEQ ID NO: 4848 - DNA, 15 bp, Homo sapiens
ggcacgagcgtggac

SEQ ID NO: 4849 - DNA, 15 bp, Homo sapiens
aggcacgagcgtgga

SEQ ID NO: 4850 - DNA, 15 bp, Homo sapiens
aaggcacgagcgtgg

SEQ ID NO: 4851 - DNA, 15 bp, Homo sapiens
aaaggcacgagcgtg

SEQ ID NO: 4852 - DNA, 15 bp, Homo sapiens
aaaaggcacgagcgt

SEQ ID NO: 4853 - DNA, 15 bp, Homo sapiens
gaaaaggcacgagcg

SEQ ID NO: 4854 - DNA, 15 bp, Homo sapiens
ggaaaaggcacgagc

SEQ ID NO: 4855 - DNA, 15 bp, Homo sapiens
gggaaaaggcacgag

SEQ ID NO: 4856 - DNA, 15 bp, Homo sapiens
agggaaaaggcacga

SEQ ID NO: 4857 - DNA, 15 bp, Homo sapiens
gagggaaaaggcacg

SEQ ID NO: 4858 - DNA, 15 bp, Homo sapiens
agagggaaaaggcac

SEQ ID NO: 4859 - DNA, 15 bp, Homo sapiens
aagagggaaaaggca

SEQ ID NO: 4860 - DNA, 15 bp, Homo sapiens
caagagggaaaaggc

SEQ ID NO: 4861 - DNA, 15 bp, Homo sapiens
gcaagagggaaaagg

SEQ ID NO: 4862 - DNA, 15 bp, Homo sapiens
tgcaagagggaaaag

SEQ ID NO: 4863 - DNA, 15 bp, Homo sapiens
ctgcaagagggaaaa

SEQ ID NO: 4864 - DNA, 15 bp, Homo sapiens
gctgcaagagggaaa

SEQ ID NO: 4865 - DNA, 15 bp, Homo sapiens
cgctgcaagagggaa

SEQ ID NO: 4866 - DNA, 15 bp, Homo sapiens
tcgctgcaagaggga

SEQ ID NO: 4867 - DNA, 15 bp, Homo sapiens
ttcgctgcaagaggg

SEQ ID NO: 4868 - DNA, 15 bp, Homo sapiens
tttcgctgcaagagg

SEQ ID NO: 4869 - DNA, 15 bp, Homo sapiens
atttcgctgcaagag

SEQ ID NO: 4870 - DNA, 15 bp, Homo sapiens
tatttcgctgcaaga

SEQ ID NO: 4871 - DNA, 15 bp, Homo sapiens
ttatttcgctgcaag

SEQ ID NO: 4872 - DNA, 15 bp, Homo sapiens
gttatttcgctgcaa

SEQ ID NO: 4873 - DNA, 15 bp, Homo sapiens
agttatttcgctgca

SEQ ID NO: 4874 - DNA, 15 bp, Homo sapiens
cagttatttcgctgc

SEQ ID NO: 4875 - DNA, 15 bp, Homo sapiens
ccagttatttcgctg

SEQ ID NO: 4876 - DNA, 15 bp, Homo sapiens
cccagttatttcgct

SEQ ID NO: 4877 - DNA, 15 bp, Homo sapiens
gcccagttatttcgc

SEQ ID NO: 4878 - DNA, 15 bp, Homo sapiens
cgcccagttatttcg

SEQ ID NO: 4879 - DNA, 15 bp, Homo sapiens
ccgcccagttatttc

SEQ ID NO: 4880 - DNA, 15 bp, Homo sapiens
cccgcccagttattt

SEQ ID NO: 4881 - DNA, 15 bp, Homo sapiens
ccccgcccagttatt

SEQ ID NO: 4882 - DNA, 15 bp, Homo sapiens
gccccgcccagttat

SEQ ID NO: 4883 - DNA, 15 bp, Homo sapiens
ggccccgcccagtta

SEQ ID NO: 4884 - DNA, 15 bp, Homo sapiens
gggccccgcccagtt

SEQ ID NO: 4885 - DNA, 15 bp, Homo sapiens
cgggccccgcccagt

SEQ ID NO: 4886 - DNA, 15 bp, Homo sapiens
tcgggccccgcccag

SEQ ID NO: 4887 - DNA, 15 bp, Homo sapiens
gtcgggccccgccca

SEQ ID NO: 4888 - DNA, 15 bp, Homo sapiens
cgtcgggccccgccc

SEQ ID NO: 4889 - DNA, 15 bp, Homo sapiens
gcgtcgggccccgcc

SEQ ID NO: 4890 - DNA, 15 bp, Homo sapiens
cgcgtcgggccccgc

SEQ ID NO: 4891 - DNA, 15 bp, Homo sapiens
gcgcgtcgggccccg

SEQ ID NO: 4892 - DNA, 15 bp, Homo sapiens
cgcgcgtcgggcccc

SEQ ID NO: 4893 - DNA, 15 bp, Homo sapiens
acgcgcgtcgggccc

SEQ ID NO: 4894 - DNA, 15 bp, Homo sapiens
gacgcgcgtcgggcc

SEQ ID NO: 4895 - DNA, 15 bp, Homo sapiens
ggacgcgcgtcgggc

SEQ ID NO: 4896 - DNA, 15 bp, Homo sapiens
aggacgcgcgtcggg

SEQ ID NO: 4897 - DNA, 15 bp, Homo sapiens
gaggacgcgcgtcgg

SEQ ID NO: 4898 - DNA, 15 bp, Homo sapiens
ggaggacgcgcgtcg

SEQ ID NO: 4899 - DNA, 15 bp, Homo sapiens
tggaggacgcgcgtc

SEQ ID NO: 4900 - DNA, 15 bp, Homo sapiens
ctggaggacgcgcgt

SEQ ID NO: 4901 - DNA, 15 bp, Homo sapiens
gctggaggacgcgcg

SEQ ID NO: 4902 - DNA, 15 bp, Homo sapiens
cgctggaggacgcgc

SEQ ID NO: 4903 - DNA, 15 bp, Homo sapiens
tcgctggaggacgcg

SEQ ID NO: 4904 - DNA, 15 bp, Homo sapiens
gtcgctggaggacgc

SEQ ID NO: 4905 - DNA, 15 bp, Homo sapiens
agtcgctggaggacg

SEQ ID NO: 4906 - DNA, 15 bp, Homo sapiens
gagtcgctggaggac

SEQ ID NO: 4907 - DNA, 15 bp, Homo sapiens
ggagtcgctggagga

SEQ ID NO: 4908 - DNA, 15 bp, Homo sapiens
cggagtcgctggagg

SEQ ID NO: 4909 - DNA, 15 bp, Homo sapiens
ccggagtcgctggag

SEQ ID NO: 4910 - DNA, 15 bp, Homo sapiens
cccggagtcgctgga

SEQ ID NO: 4911 - DNA, 15 bp, Homo sapiens
tcccggagtcgctgg

SEQ ID NO: 4912 - DNA, 15 bp, Homo sapiens
ttcccggagtcgctg

SEQ ID NO: 4913 - DNA, 15 bp, Homo sapiens
gttcccggagtcgct

SEQ ID NO: 4914 - DNA, 15 bp, Homo sapiens
ggttcccggagtcgc

SEQ ID NO: 4915 - DNA, 15 bp, Homo sapiens
gggttcccggagtcg

SEQ ID NO: 4916 - DNA, 15 bp, Homo sapiens
tgggttcccggagtc

SEQ ID NO: 4917 - DNA, 15 bp, Homo sapiens
ttgggttcccggagt

SEQ ID NO: 4918 - DNA, 15 bp, Homo sapiens
cttgggttcccggag

SEQ ID NO: 4919 - DNA, 15 bp, Homo sapiens
ccttgggttcccgga

SEQ ID NO: 4920 - DNA, 15 bp, Homo sapiens
gccttgggttcccgg

SEQ ID NO: 4921 - DNA, 15 bp, Homo sapiens
ggccttgggttcccg

SEQ ID NO: 4922 - DNA, 15 bp, Homo sapiens
aggccttgggttccc

SEQ ID NO: 4923 - DNA, 15 bp, Homo sapiens
gaggccttgggttcc

SEQ ID NO: 4924 - DNA, 15 bp, Homo sapiens
ggaggccttgggttc

SEQ ID NO: 4925 - DNA, 15 bp, Homo sapiens
aggaggccttgggtt

SEQ ID NO: 4926 - DNA, 15 bp, Homo sapiens
aaggaggccttgggt

SEQ ID NO: 4927 - DNA, 15 bp, Homo sapiens
gaaggaggccttggg

SEQ ID NO: 4928 - DNA, 15 bp, Homo sapiens
tgaaggaggccttgg

SEQ ID NO: 4929 - DNA, 15 bp, Homo sapiens
gtgaaggaggccttg

SEQ ID NO: 4930 - DNA, 15 bp, Homo sapiens
ggtgaaggaggcctt

SEQ ID NO: 4931 - DNA, 15 bp, Homo sapiens
aggtgaaggaggcct

SEQ ID NO: 4932 - DNA, 15 bp, Homo sapiens
gaggtgaaggaggcc

SEQ ID NO: 4933 - DNA, 15 bp, Homo sapiens
cgaggtgaaggaggc

SEQ ID NO: 4934 - DNA, 15 bp, Homo sapiens
gcgaggtgaaggagg

SEQ ID NO: 4935 - DNA, 15 bp, Homo sapiens
agcgaggtgaaggag

SEQ ID NO: 4936 - DNA, 15 bp, Homo sapiens
gagcgaggtgaagga

SEQ ID NO: 4937 - DNA, 15 bp, Homo sapiens
tgagcgaggtgaagg

SEQ ID NO: 4938 - DNA, 15 bp, Homo sapiens
ttgagcgaggtgaag

SEQ ID NO: 4939 - DNA, 15 bp, Homo sapiens
tttgagcgaggtgaa

SEQ ID NO: 4940 - DNA, 15 bp, Homo sapiens
ttttgagcgaggtga

SEQ ID NO: 4941 - DNA, 15 bp, Homo sapiens
attttgagcgaggtg

SEQ ID NO: 4942 - DNA, 15 bp, Homo sapiens
aattttgagcgaggt

SEQ ID NO: 4943 - DNA, 15 bp, Homo sapiens
gaattttgagcgagg

SEQ ID NO: 4944 - DNA, 15 bp, Homo sapiens
tgaattttgagcgag

SEQ ID NO: 4945 - DNA, 15 bp, Homo sapiens
gtgaattttgagcga

SEQ ID NO: 4946 - DNA, 15 bp, Homo sapiens
ggtgaattttgagcg

SEQ ID NO: 4947 - DNA, 15 bp, Homo sapiens
gggtgaattttgagc

SEQ ID NO: 4948 - DNA, 15 bp, Homo sapiens
cgggtgaattttgag

SEQ ID NO: 4949 - DNA, 15 bp, Homo sapiens
tcgggtgaattttga

SEQ ID NO: 4950 - DNA, 15 bp, Homo sapiens
ttcgggtgaattttg

SEQ ID NO: 4951 - DNA, 15 bp, Homo sapiens
tttcgggtgaatttt

SEQ ID NO: 4952 - DNA, 15 bp, Homo sapiens
ttttcgggtgaattt

SEQ ID NO: 4953 - DNA, 15 bp, Homo sapiens
attttcgggtgaatt

SEQ ID NO: 4954 - DNA, 15 bp, Homo sapiens
cattttcgggtgaat

SEQ ID NO: 4955 - DNA, 15 bp, Homo sapiens
gcattttcgggtgaa

SEQ ID NO: 4956 - DNA, 15 bp, Homo sapiens
cgcattttcgggtga

SEQ ID NO: 4957 - DNA, 15 bp, Homo sapiens
gcgcattttcgggtg

SEQ ID NO: 4958 - DNA, 15 bp, Homo sapiens
agcgcattttcgggt

SEQ ID NO: 4959 - DNA, 15 bp, Homo sapiens
cagcgcattttcggg

SEQ ID NO: 4960 - DNA, 15 bp, Homo sapiens
tcagcgcattttcgg

SEQ ID NO: 4961 - DNA, 15 bp, Homo sapiens
ctcagcgcattttcg

SEQ ID NO: 4962 - DNA, 15 bp, Homo sapiens
tctcagcgcattttc

SEQ ID NO: 4963 - DNA, 15 bp, Homo sapiens
gtctcagcgcatttt

SEQ ID NO: 4964 - DNA, 15 bp, Homo sapiens
agtctcagcgcattt

SEQ ID NO: 4965 - DNA, 15 bp, Homo sapiens
aagtctcagcgcatt

SEQ ID NO: 4966 - DNA, 15 bp, Homo sapiens
aaagtctcagcgcat

SEQ ID NO: 4967 - DNA, 15 bp, Homo sapiens
caaagtctcagcgca

SEQ ID NO: 4968 - DNA, 15 bp, Homo sapiens
ccaaagtctcagcgc

SEQ ID NO: 4969 - DNA, 15 bp, Homo sapiens
gccaaagtctcagcg

SEQ ID NO: 4970 - DNA, 15 bp, Homo sapiens
tgccaaagtctcagc

SEQ ID NO: 4971 - DNA, 15 bp, Homo sapiens
atgccaaagtctcag

SEQ ID NO: 4972 - DNA, 15 bp, Homo sapiens
catgccaaagtctca

SEQ ID NO: 4973 - DNA, 15 bp, Homo sapiens
ccatgccaaagtctc

SEQ ID NO: 4974 - DNA, 15 bp, Homo sapiens
cccatgccaaagtct

SEQ ID NO: 4975 - DNA, 15 bp, Homo sapiens
ccccatgccaaagtc

SEQ ID NO: 4976 - DNA, 15 bp, Homo sapiens
gccccatgccaaagt

SEQ ID NO: 4977 - DNA, 15 bp, Homo sapiens
agccccatgccaaag

SEQ ID NO: 4978 - DNA, 15 bp, Homo sapiens
cagccccatgccaaa

SEQ ID NO: 4979 - DNA, 15 bp, Homo sapiens
gcagccccatgccaa

SEQ ID NO: 4980 - DNA, 15 bp, Homo sapiens
cgcagccccatgcca

SEQ ID NO: 4981 - DNA, 15 bp, Homo sapiens
gcgcagccccatgcc

SEQ ID NO: 4982 - DNA, 15 bp, Homo sapiens
agcgcagccccatgc

SEQ ID NO: 4983 - DNA, 15 bp, Homo sapiens
cagcgcagccccatg

SEQ ID NO: 4984 - DNA, 15 bp, Homo sapiens
acagcgcagccccat

SEQ ID NO: 4985 - DNA, 15 bp, Homo sapiens
cacagcgcagcccca

SEQ ID NO: 4986 - DNA, 15 bp, Homo sapiens
acacagcgcagcccc

SEQ ID NO: 4987 - DNA, 15 bp, Homo sapiens
gacacagcgcagccc

SEQ ID NO: 4988 - DNA, 15 bp, Homo sapiens
ggacacagcgcagcc

SEQ ID NO: 4989 - DNA, 15 bp, Homo sapiens
gggacacagcgcagc

SEQ ID NO: 4990 - DNA, 15 bp, Homo sapiens
tgggacacagcgcag

SEQ ID NO: 4991 - DNA, 15 bp, Homo sapiens
gtgggacacagcgca

SEQ ID NO: 4992 - DNA, 15 bp, Homo sapiens
agtgggacacagcgc

SEQ ID NO: 4993 - DNA, 15 bp, Homo sapiens
cagtgggacacagcg

SEQ ID NO: 4994 - DNA, 15 bp, Homo sapiens
tcagtgggacacagc

SEQ ID NO: 4995 - DNA, 15 bp, Homo sapiens
gtcagtgggacacag

SEQ ID NO: 4996 - DNA, 15 bp, Homo sapiens
cgtcagtgggacaca

SEQ ID NO: 4997 - DNA, 15 bp, Homo sapiens
acgtcagtgggacac

SEQ ID NO: 4998 - DNA, 15 bp, Homo sapiens
aacgtcagtgggaca

SEQ ID NO: 4999 - DNA, 15 bp, Homo sapiens
taacgtcagtgggac

SEQ ID NO: 5000 - DNA, 15 bp, Homo sapiens
gtaacgtcagtggga

SEQ ID NO: 5001 - DNA, 15 bp, Homo sapiens
tgtaacgtcagtggg

SEQ ID NO: 5002 - DNA, 15 bp, Homo sapiens
ctgtaacgtcagtgg

SEQ ID NO: 5003 - DNA, 15 bp, Homo sapiens
tctgtaacgtcagtg

SEQ ID NO: 5004 - DNA, 15 bp, Homo sapiens
ttctgtaacgtcagt

SEQ ID NO: 5005 - DNA, 15 bp, Homo sapiens
cttctgtaacgtcag

SEQ ID NO: 5006 - DNA, 15 bp, Homo sapiens
gcttctgtaacgtca

SEQ ID NO: 5007 - DNA, 15 bp, Homo sapiens
cgcttctgtaacgtc

SEQ ID NO: 5008 - DNA, 15 bp, Homo sapiens
gcgcttctgtaacgt

SEQ ID NO: 5009 - DNA, 15 bp, Homo sapiens
agcgcttctgtaacg

SEQ ID NO: 5010 - DNA, 15 bp, Homo sapiens
aagcgcttctgtaac

SEQ ID NO: 5011 - DNA, 15 bp, Homo sapiens
taagcgcttctgtaa

SEQ ID NO: 5012 - DNA, 15 bp, Homo sapiens
ataagcgcttctgta

SEQ ID NO: 5013 - DNA, 15 bp, Homo sapiens
cataagcgcttctgt

SEQ ID NO: 5014 - DNA, 15 bp, Homo sapiens
tcataagcgcttctg

SEQ ID NO: 5015 - DNA, 15 bp, Homo sapiens
ttcataagcgcttct

SEQ ID NO: 5016 - DNA, 15 bp, Homo sapiens
attcataagcgcttc

SEQ ID NO: 5017 - DNA, 15 bp, Homo sapiens
aattcataagcgctt

SEQ ID NO: 5018 - DNA, 15 bp, Homo sapiens
aaattcataagcgct

SEQ ID NO: 5019 - DNA, 15 bp, Homo sapiens
taaattcataagcgc

SEQ ID NO: 5020 - DNA, 15 bp, Homo sapiens
ttaaattcataagcg

SEQ ID NO: 5021 - DNA, 15 bp, Homo sapiens
tttaaattcataagc

SEQ ID NO: 5022 - DNA, 15 bp, Homo sapiens
ttttaaattcataag

SEQ ID NO: 5023 - DNA, 15 bp, Homo sapiens
tttttaaattcataa

SEQ ID NO: 5024 - DNA, 15 bp, Homo sapiens
gtttttaaattcata

SEQ ID NO: 5025 - DNA, 15 bp, Homo sapiens
agtttttaaattcat

SEQ ID NO: 5026 - DNA, 15 bp, Homo sapiens
cagtttttaaattca

SEQ ID NO: 5027 - DNA, 15 bp, Homo sapiens
gcagtttttaaattc

SEQ ID NO: 5028 - DNA, 15 bp, Homo sapiens
agcagtttttaaatt

SEQ ID NO: 5029 - DNA, 15 bp, Homo sapiens
gagcagtttttaaat

SEQ ID NO: 5030 - DNA, 15 bp, Homo sapiens
ggagcagtttttaaa

SEQ ID NO: 5031 - DNA, 15 bp, Homo sapiens
tggagcagtttttaa

SEQ ID NO: 5032 - DNA, 15 bp, Homo sapiens
ctggagcagttttta

SEQ ID NO: 5033 - DNA, 15 bp, Homo sapiens
cctggagcagttttt

SEQ ID NO: 5034 - DNA, 15 bp, Homo sapiens
gcctggagcagtttt

SEQ ID NO: 5035 - DNA, 15 bp, Homo sapiens
cgcctggagcagttt

SEQ ID NO: 5036 - DNA, 15 bp, Homo sapiens
ccgcctggagcagtt

SEQ ID NO: 5037 - DNA, 15 bp, Homo sapiens
gccgcctggagcagt

SEQ ID NO: 5038 - DNA, 15 bp, Homo sapiens
ggccgcctggagcag

SEQ ID NO: 5039 - DNA, 15 bp, Homo sapiens
cggccgcctggagca

SEQ ID NO: 5040 - DNA, 15 bp, Homo sapiens
ccggccgcctggagc

SEQ ID NO: 5041 - DNA, 15 bp, Homo sapiens
tccggccgcctggag

SEQ ID NO: 5042 - DNA, 15 bp, Homo sapiens
gtccggccgcctgga

SEQ ID NO: 5043 - DNA, 15 bp, Homo sapiens
cgtccggccgcctgg

SEQ ID NO: 5044 - DNA, 15 bp, Homo sapiens
ccgtccggccgcctg

SEQ ID NO: 5045 - DNA, 15 bp, Homo sapiens
gccgtccggccgcct

SEQ ID NO: 5046 - DNA, 15 bp, Homo sapiens
cgccgtccggccgcc

SEQ ID NO: 5047 - DNA, 15 bp, Homo sapiens
ccgccgtccggccgc

SEQ ID NO: 5048 - DNA, 15 bp, Homo sapiens
cccgccgtccggccg

SEQ ID NO: 5049 - DNA, 15 bp, Homo sapiens
tcccgccgtccggcc

SEQ ID NO: 5050 - DNA, 15 bp, Homo sapiens
gtcccgccgtccggc

SEQ ID NO: 5051 - DNA, 15 bp, Homo sapiens
tgtcccgccgtccgg

SEQ ID NO: 5052 - DNA, 15 bp, Homo sapiens
ttgtcccgccgtccg

SEQ ID NO: 5053 - DNA, 15 bp, Homo sapiens
gttgtcccgccgtcc

SEQ ID NO: 5054 - DNA, 15 bp, Homo sapiens
cgttgtcccgccgtc

SEQ ID NO: 5055 - DNA, 15 bp, Homo sapiens
gcgttgtcccgccgt

SEQ ID NO: 5056 - DNA, 15 bp, Homo sapiens
ggcgttgtcccgccg

SEQ ID NO: 5057 - DNA, 15 bp, Homo sapiens
aggcgttgtcccgcc

SEQ ID NO: 5058 - DNA, 15 bp, Homo sapiens
gaggcgttgtcccgc

SEQ ID NO: 5059 - DNA, 15 bp, Homo sapiens
ggaggcgttgtcccg

SEQ ID NO: 5060 - DNA, 15 bp, Homo sapiens
aggaggcgttgtccc

SEQ ID NO: 5061 - DNA, 15 bp, Homo sapiens
gaggaggcgttgtcc

SEQ ID NO: 5062 - DNA, 15 bp, Homo sapiens
tgaggaggcgttgtc

SEQ ID NO: 5063 - DNA, 15 bp, Homo sapiens
gtgaggaggcgttgt

SEQ ID NO: 5064 - DNA, 15 bp, Homo sapiens
agtgaggaggcgttg

SEQ ID NO: 5065 - DNA, 15 bp, Homo sapiens
aagtgaggaggcgtt

SEQ ID NO: 5066 - DNA, 15 bp, Homo sapiens
caagtgaggaggcgt

SEQ ID NO: 5067 - DNA, 15 bp, Homo sapiens
gcaagtgaggaggcg

SEQ ID NO: 5068 - DNA, 15 bp, Homo sapiens
agcaagtgaggaggc

SEQ ID NO: 5069 - DNA, 15 bp, Homo sapiens
gagcaagtgaggagg

SEQ ID NO: 5070 - DNA, 15 bp, Homo sapiens
ggagcaagtgaggag

SEQ ID NO: 5071 - DNA, 15 bp, Homo sapiens
aggagcaagtgagga

SEQ ID NO: 5072 - DNA, 15 bp, Homo sapiens
gaggagcaagtgagg

SEQ ID NO: 5073 - DNA, 15 bp, Homo sapiens
agaggagcaagtgag

SEQ ID NO: 5074 - DNA, 15 bp, Homo sapiens
tagaggagcaagtga

SEQ ID NO: 5075 - DNA, 15 bp, Homo sapiens
gtagaggagcaagtg

SEQ ID NO: 5076 - DNA, 15 bp, Homo sapiens
cgtagaggagcaagt

SEQ ID NO: 5077 - DNA, 15 bp, Homo sapiens
ccgtagaggagcaag

SEQ ID NO: 5078 - DNA, 15 bp, Homo sapiens
gccgtagaggagcaa

SEQ ID NO: 5079 - DNA, 15 bp, Homo sapiens
tgccgtagaggagca

SEQ ID NO: 5080 - DNA, 15 bp, Homo sapiens
ttgccgtagaggagc

SEQ ID NO: 5081 - DNA, 15 bp, Homo sapiens
cttgccgtagaggag

SEQ ID NO: 5082 - DNA, 15 bp, Homo sapiens
ccttgccgtagagga

SEQ ID NO: 5083 - DNA, 15 bp, Homo sapiens
gccttgccgtagagg

SEQ ID NO: 5084 - DNA, 15 bp, Homo sapiens
ggccttgccgtagag

SEQ ID NO: 5085 - DNA, 15 bp, Homo sapiens
gggccttgccgtaga

SEQ ID NO: 5086 - DNA, 15 bp, Homo sapiens
ggggccttgccgtag

SEQ ID NO: 5087 - DNA, 15 bp, Homo sapiens
aggggccttgccgta

SEQ ID NO: 5088 - DNA, 15 bp, Homo sapiens
aaggggccttgccgt

SEQ ID NO: 5089 - DNA, 15 bp, Homo sapiens
gaaggggccttgccg

SEQ ID NO: 5090 - DNA, 15 bp, Homo sapiens
ggaaggggccttgcc

SEQ ID NO: 5091 - DNA, 15 bp, Homo sapiens
aggaaggggccttgc

SEQ ID NO: 5092 - DNA, 15 bp, Homo sapiens
aaggaaggggccttg

SEQ ID NO: 5093 - DNA, 15 bp, Homo sapiens
gaaggaaggggcctt

SEQ ID NO: 5094 - DNA, 15 bp, Homo sapiens
agaaggaaggggcct

SEQ ID NO: 5095 - DNA, 15 bp, Homo sapiens
gagaaggaaggggcc

SEQ ID NO: 5096 - DNA, 15 bp, Homo sapiens
ggagaaggaaggggc

SEQ ID NO: 5097 - DNA, 15 bp, Homo sapiens
gggagaaggaagggg

SEQ ID NO: 5098 - DNA, 15 bp, Homo sapiens
agggagaaggaaggg

SEQ ID NO: 5099 - DNA, 15 bp, Homo sapiens
cagggagaaggaagg

SEQ ID NO: 5100 - DNA, 15 bp, Homo sapiens
gcagggagaaggaag

SEQ ID NO: 5101 - DNA, 15 bp, Homo sapiens
ggcagggagaaggaa

SEQ ID NO: 5102 - DNA, 15 bp, Homo sapiens
cggcagggagaagga

SEQ ID NO: 5103 - DNA, 15 bp, Homo sapiens
ccggcagggagaagg

SEQ ID NO: 5104 - DNA, 15 bp, Homo sapiens
gccggcagggagaag

SEQ ID NO: 5105 - DNA, 15 bp, Homo sapiens
agccggcagggagaa

SEQ ID NO: 5106 - DNA, 15 bp, Homo sapiens
cagccggcagggaga

SEQ ID NO: 5107 - DNA, 15 bp, Homo sapiens
gcagccggcagggag

SEQ ID NO: 5108 - DNA, 15 bp, Homo sapiens
cgcagccggcaggga

SEQ ID NO: 5109 - DNA, 15 bp, Homo sapiens
ccgcagccggcaggg

SEQ ID NO: 5110 - DNA, 15 bp, Homo sapiens
accgcagccggcagg

SEQ ID NO: 5111 - DNA, 15 bp, Homo sapiens
caccgcagccggcag

SEQ ID NO: 5112 - DNA, 15 bp, Homo sapiens
ccaccgcagccggca

SEQ ID NO: 5113 - DNA, 15 bp, Homo sapiens
accaccgcagccggc

SEQ ID NO: 5114 - DNA, 15 bp, Homo sapiens
caccaccgcagccgg

SEQ ID NO: 5115 - DNA, 15 bp, Homo sapiens
acaccaccgcagccg

SEQ ID NO: 5116 - DNA, 15 bp, Homo sapiens
cacaccaccgcagcc

SEQ ID NO: 5117 - DNA, 15 bp, Homo sapiens
acacaccaccgcagc

SEQ ID NO: 5118 - DNA, 15 bp, Homo sapiens
tacacaccaccgcag

SEQ ID NO: 5119 - DNA, 15 bp, Homo sapiens
ctacacaccaccgca

SEQ ID NO: 5120 - DNA, 15 bp, Homo sapiens
cctacacaccaccgc

SEQ ID NO: 5121 - DNA, 15 bp, Homo sapiens
ccctacacaccaccg

SEQ ID NO: 5122 - DNA, 15 bp, Homo sapiens
accctacacaccacc

SEQ ID NO: 5123 - DNA, 15 bp, Homo sapiens
caccctacacaccac

SEQ ID NO: 5124 - DNA, 15 bp, Homo sapiens
ccaccctacacacca

SEQ ID NO: 5125 - DNA, 15 bp, Homo sapiens
accaccctacacacc

SEQ ID NO: 5126 - DNA, 15 bp, Homo sapiens
gaccaccctacacac

SEQ ID NO: 5127 - DNA, 15 bp, Homo sapiens
ggaccaccctacaca

SEQ ID NO: 5128 - DNA, 15 bp, Homo sapiens
gggaccaccctacac

SEQ ID NO: 5129 - DNA, 15 bp, Homo sapiens
agggaccaccctaca

SEQ ID NO: 5130 - DNA, 15 bp, Homo sapiens
aagggaccaccctac

SEQ ID NO: 5131 - DNA, 15 bp, Homo sapiens
aaagggaccacccta

SEQ ID NO: 5132 - DNA, 15 bp, Homo sapiens
taaagggaccaccct

SEQ ID NO: 5133 - DNA, 15 bp, Homo sapiens
gtaaagggaccaccc

SEQ ID NO: 5134 - DNA, 15 bp, Homo sapiens
tgtaaagggaccacc

SEQ ID NO: 5135 - DNA, 15 bp, Homo sapiens
ctgtaaagggaccac

SEQ ID NO: 5136 - DNA, 15 bp, Homo sapiens
tctgtaaagggacca

SEQ ID NO: 5137 - DNA, 15 bp, Homo sapiens
ctctgtaaagggacc

SEQ ID NO: 5138 - DNA, 15 bp, Homo sapiens
actctgtaaagggac

SEQ ID NO: 5139 - DNA, 15 bp, Homo sapiens
aactctgtaaaggga

SEQ ID NO: 5140 - DNA, 15 bp, Homo sapiens
aaactctgtaaaggg

SEQ ID NO: 5141 - DNA, 15 bp, Homo sapiens
gaaactctgtaaagg

SEQ ID NO: 5142 - DNA, 15 bp, Homo sapiens
ggaaactctgtaaag

SEQ ID NO: 5143 - DNA, 15 bp, Homo sapiens
aggaaactctgtaaa

SEQ ID NO: 5144 - DNA, 15 bp, Homo sapiens
aaggaaactctgtaa

SEQ ID NO: 5145 - DNA, 15 bp, Homo sapiens
taaggaaactctgta

SEQ ID NO: 5146 - DNA, 15 bp, Homo sapiens
ttaaggaaactctgt

SEQ ID NO: 5147 - DNA, 15 bp, Homo sapiens
attaaggaaactctg

SEQ ID NO: 5148 - DNA, 15 bp, Homo sapiens
gattaaggaaactct

SEQ ID NO: 5149 - DNA, 15 bp, Homo sapiens
ggattaaggaaactc

SEQ ID NO: 5150 - DNA, 15 bp, Homo sapiens
tggattaaggaaact

SEQ ID NO: 5151 - DNA, 15 bp, Homo sapiens
atggattaaggaaac

SEQ ID NO: 5152 - DNA, 15 bp, Homo sapiens
gatggattaaggaaa

SEQ ID NO: 5153 - DNA, 15 bp, Homo sapiens
agatggattaaggaa

SEQ ID NO: 5154 - DNA, 15 bp, Homo sapiens
tagatggattaagga

SEQ ID NO: 5155 - DNA, 15 bp, Homo sapiens
ctagatggattaagg

SEQ ID NO: 5156 - DNA, 15 bp, Homo sapiens
gctagatggattaag

SEQ ID NO: 5157 - DNA, 15 bp, Homo sapiens
ggctagatggattaa

SEQ ID NO: 5158 - DNA, 15 bp, Homo sapiens
aggctagatggatta

SEQ ID NO: 5159 - DNA, 15 bp, Homo sapiens
caggctagatggatt

SEQ ID NO: 5160 - DNA, 15 bp, Homo sapiens
tcaggctagatggat

SEQ ID NO: 5161 - DNA, 15 bp, Homo sapiens
gtcaggctagatgga

SEQ ID NO: 5162 - DNA, 15 bp, Homo sapiens
ggtcaggctagatgg

SEQ ID NO: 5163 - DNA, 15 bp, Homo sapiens
aggtcaggctagatg

SEQ ID NO: 5164 - DNA, 15 bp, Homo sapiens
gaggtcaggctagat

SEQ ID NO: 5165 - DNA, 15 bp, Homo sapiens
tgaggtcaggctaga

SEQ ID NO: 5166 - DNA, 15 bp, Homo sapiens
gtgaggtcaggctag

SEQ ID NO: 5167 - DNA, 15 bp, Homo sapiens
ggtgaggtcaggcta

SEQ ID NO: 5168 - DNA, 15 bp, Homo sapiens
aggtgaggtcaggct

SEQ ID NO: 5169 - DNA, 15 bp, Homo sapiens
caggtgaggtcaggc

SEQ ID NO: 5170 - DNA, 15 bp, Homo sapiens
gcaggtgaggtcagg

SEQ ID NO: 5171 - DNA, 15 bp, Homo sapiens
cgcaggtgaggtcag

SEQ ID NO: 5172 - DNA, 15 bp, Homo sapiens
ccgcaggtgaggtca

SEQ ID NO: 5173 - DNA, 15 bp, Homo sapiens
cccgcaggtgaggtc

SEQ ID NO: 5174 - DNA, 15 bp, Homo sapiens
tcccgcaggtgaggt

SEQ ID NO: 5175 - DNA, 15 bp, Homo sapiens
atcccgcaggtgagg

SEQ ID NO: 5176 - DNA, 15 bp, Homo sapiens
catcccgcaggtgag

SEQ ID NO: 5177 - DNA, 15 bp, Homo sapiens
acatcccgcaggtga

SEQ ID NO: 5178 - DNA, 15 bp, Homo sapiens
aacatcccgcaggtg

SEQ ID NO: 5179 - DNA, 15 bp, Homo sapiens
gaacatcccgcaggt

SEQ ID NO: 5180 - DNA, 15 bp, Homo sapiens
ggaacatcccgcagg

SEQ ID NO: 5181 - DNA, 15 bp, Homo sapiens
tggaacatcccgcag

SEQ ID NO: 5182 - DNA, 15 bp, Homo sapiens
atggaacatcccgca

SEQ ID NO: 5183 - DNA, 15 bp, Homo sapiens
aatggaacatcccgc

SEQ ID NO: 5184 - DNA, 15 bp, Homo sapiens
aaatggaacatcccg

SEQ ID NO: 5185 - DNA, 15 bp, Homo sapiens
gaaatggaacatccc

SEQ ID NO: 5186 - DNA, 15 bp, Homo sapiens
ggaaatggaacatcc

SEQ ID NO: 5187 - DNA, 15 bp, Homo sapiens
gggaaatggaacatc

SEQ ID NO: 5188 - DNA, 15 bp, Homo sapiens
cgggaaatggaacat

SEQ ID NO: 5189 - DNA, 15 bp, Homo sapiens
tcgggaaatggaaca

SEQ ID NO: 5190 - DNA, 15 bp, Homo sapiens
atcgggaaatggaac

SEQ ID NO: 5191 - DNA, 15 bp, Homo sapiens
gatcgggaaatggaa

SEQ ID NO: 5192 - DNA, 15 bp, Homo sapiens
ggatcgggaaatgga

SEQ ID NO: 5193 - DNA, 15 bp, Homo sapiens
tggatcgggaaatgg

SEQ ID NO: 5194 - DNA, 15 bp, Homo sapiens
gtggatcgggaaatg

SEQ ID NO: 5195 - DNA, 15 bp, Homo sapiens
ggtggatcgggaaat

SEQ ID NO: 5196 - DNA, 15 bp, Homo sapiens
aggtggatcgggaaa

SEQ ID NO: 5197 - DNA, 15 bp, Homo sapiens
gaggtggatcgggaa

SEQ ID NO: 5198 - DNA, 15 bp, Homo sapiens
ggaggtggatcggga

SEQ ID NO: 5199 - DNA, 15 bp, Homo sapiens
gggaggtggatcggg

SEQ ID NO: 5200 - DNA, 15 bp, Homo sapiens
tgggaggtggatcgg

SEQ ID NO: 5201 - DNA, 15 bp, Homo sapiens
gtgggaggtggatcg

SEQ ID NO: 5202 - DNA, 15 bp, Homo sapiens
tgtgggaggtggatc

SEQ ID NO: 5203 - DNA, 15 bp, Homo sapiens
gtgtgggaggtggat

SEQ ID NO: 5204 - DNA, 15 bp, Homo sapiens
ggtgtgggaggtgga

SEQ ID NO: 5205 - DNA, 15 bp, Homo sapiens
gggtgtgggaggtgg

SEQ ID NO: 5206 - DNA, 15 bp, Homo sapiens
ggggtgtgggaggtg

SEQ ID NO: 5207 - DNA, 15 bp, Homo sapiens
gggggtgtgggaggt

SEQ ID NO: 5208 - DNA, 15 bp, Homo sapiens
cgggggtgtgggagg

SEQ ID NO: 5209 - DNA, 15 bp, Homo sapiens
gcgggggtgtgggag

SEQ ID NO: 5210 - DNA, 15 bp, Homo sapiens
agcgggggtgtggga

SEQ ID NO: 5211 - DNA, 15 bp, Homo sapiens
cagcgggggtgtggg

SEQ ID NO: 5212 - DNA, 15 bp, Homo sapiens
gcagcgggggtgtgg

SEQ ID NO: 5213 - DNA, 15 bp, Homo sapiens
tgcagcgggggtgtg

SEQ ID NO: 5214 - DNA, 15 bp, Homo sapiens
ctgcagcgggggtgt

SEQ ID NO: 5215 - DNA, 15 bp, Homo sapiens
actgcagcgggggtg

SEQ ID NO: 5216 - DNA, 15 bp, Homo sapiens
aactgcagcgggggt

SEQ ID NO: 5217 - DNA, 15 bp, Homo sapiens
caactgcagcggggg

SEQ ID NO: 5218 - DNA, 15 bp, Homo sapiens
acaactgcagcgggg

SEQ ID NO: 5219 - DNA, 15 bp, Homo sapiens
gacaactgcagcggg

SEQ ID NO: 5220 - DNA, 15 bp, Homo sapiens
agacaactgcagcgg

SEQ ID NO: 5221 - DNA, 15 bp, Homo sapiens
tagacaactgcagcg

SEQ ID NO: 5222 - DNA, 15 bp, Homo sapiens
ctagacaactgcagc

SEQ ID NO: 5223 - DNA, 15 bp, Homo sapiens
tctagacaactgcag

SEQ ID NO: 5224 - DNA, 15 bp, Homo sapiens
ttctagacaactgca

SEQ ID NO: 5225 - DNA, 15 bp, Homo sapiens
cttctagacaactgc

SEQ ID NO: 5226 - DNA, 15 bp, Homo sapiens
gcttctagacaactg

SEQ ID NO: 5227 - DNA, 15 bp, Homo sapiens
agcttctagacaact

SEQ ID NO: 5228 - DNA, 15 bp, Homo sapiens
cagcttctagacaac

SEQ ID NO: 5229 - DNA, 15 bp, Homo sapiens
ccagcttctagacaa

SEQ ID NO: 5230 - DNA, 15 bp, Homo sapiens
cccagcttctagaca

SEQ ID NO: 5231 - DNA, 15 bp, Homo sapiens
ccccagcttctagac

SEQ ID NO: 5232 - DNA, 15 bp, Homo sapiens
gccccagcttctaga

SEQ ID NO: 5233 - DNA, 15 bp, Homo sapiens
agccccagcttctag

SEQ ID NO: 5234 - DNA, 15 bp, Homo sapiens
cagccccagcttcta

SEQ ID NO: 5235 - DNA, 15 bp, Homo sapiens
ccagccccagcttct

SEQ ID NO: 5236 - DNA, 15 bp, Homo sapiens
cccagccccagcttc

SEQ ID NO: 5237 - DNA, 15 bp, Homo sapiens
ccccagccccagctt

SEQ ID NO: 5238 - DNA, 15 bp, Homo sapiens
tccccagccccagct

SEQ ID NO: 5239 - DNA, 15 bp, Homo sapiens
ttccccagccccagc

SEQ ID NO: 5240 - DNA, 15 bp, Homo sapiens
gttccccagccccag

SEQ ID NO: 5241 - DNA, 15 bp, Homo sapiens
agttccccagcccca

SEQ ID NO: 5242 - DNA, 15 bp, Homo sapiens
cagttccccagcccc

SEQ ID NO: 5243 - DNA, 15 bp, Homo sapiens
tcagttccccagccc

SEQ ID NO: 5244 - DNA, 15 bp, Homo sapiens
ctcagttccccagcc

SEQ ID NO: 5245 - DNA, 15 bp, Homo sapiens
cctcagttccccagc

SEQ ID NO: 5246 - DNA, 15 bp, Homo sapiens
gcctcagttccccag

SEQ ID NO: 5247 - DNA, 15 bp, Homo sapiens
cgcctcagttcccca

SEQ ID NO: 5248 - DNA, 15 bp, Homo sapiens
gcgcctcagttcccc

SEQ ID NO: 5249 - DNA, 15 bp, Homo sapiens
cgcgcctcagttccc

SEQ ID NO: 5250 - DNA, 15 bp, Homo sapiens
ccgcgcctcagttcc

SEQ ID NO: 5251 - DNA, 15 bp, Homo sapiens
cccgcgcctcagttc

SEQ ID NO: 5252 - DNA, 15 bp, Homo sapiens
tcccgcgcctcagtt

SEQ ID NO: 5253 - DNA, 15 bp, Homo sapiens
ctcccgcgcctcagt

SEQ ID NO: 5254 - DNA, 15 bp, Homo sapiens
cctcccgcgcctcag

SEQ ID NO: 5255 - DNA, 15 bp, Homo sapiens
tcctcccgcgcctca

SEQ ID NO: 5256 - DNA, 15 bp, Homo sapiens
ctcctcccgcgcctc

SEQ ID NO: 5257 - DNA, 15 bp, Homo sapiens
gctcctcccgcgcct

SEQ ID NO: 5258 - DNA, 15 bp, Homo sapiens
tgctcctcccgcgcc

SEQ ID NO: 5259 - DNA, 15 bp, Homo sapiens
ctgctcctcccgcgc

SEQ ID NO: 5260 - DNA, 15 bp, Homo sapiens
tctgctcctcccgcg

SEQ ID NO: 5261 - DNA, 15 bp, Homo sapiens
gtctgctcctcccgc

SEQ ID NO: 5262 - DNA, 15 bp, Homo sapiens
tgtctgctcctcccg

SEQ ID NO: 5263 - DNA, 15 bp, Homo sapiens
ctgtctgctcctccc

SEQ ID NO: 5264 - DNA, 15 bp, Homo sapiens
cctgtctgctcctcc

SEQ ID NO: 5265 - DNA, 15 bp, Homo sapiens
tcctgtctgctcctc

SEQ ID NO: 5266 - DNA, 15 bp, Homo sapiens
ctcctgtctgctcct

SEQ ID NO: 5267 - DNA, 15 bp, Homo sapiens
cctcctgtctgctcc

SEQ ID NO: 5268 - DNA, 15 bp, Homo sapiens
ccctcctgtctgctc

SEQ ID NO: 5269 - DNA, 15 bp, Homo sapiens
gccctcctgtctgct

SEQ ID NO: 5270 - DNA, 15 bp, Homo sapiens
ggccctcctgtctgc

SEQ ID NO: 5271 - DNA, 15 bp, Homo sapiens
cggccctcctgtctg

SEQ ID NO: 5272 - DNA, 15 bp, Homo sapiens
ccggccctcctgtct

SEQ ID NO: 5273 - DNA, 15 bp, Homo sapiens
cccggccctcctgtc

SEQ ID NO: 5274 - DNA, 15 bp, Homo sapiens
ccccggccctcctgt

SEQ ID NO: 5275 - DNA, 15 bp, Homo sapiens
accccggccctcctg

SEQ ID NO: 5276 - DNA, 15 bp, Homo sapiens
aaccccggccctcct

SEQ ID NO: 5277 - DNA, 15 bp, Homo sapiens
caaccccggccctcc

SEQ ID NO: 5278 - DNA, 15 bp, Homo sapiens
ccaaccccggccctc

SEQ ID NO: 5279 - DNA, 15 bp, Homo sapiens
cccaaccccggccct

SEQ ID NO: 5280 - DNA, 15 bp, Homo sapiens
ccccaaccccggccc

SEQ ID NO: 5281 - DNA, 15 bp, Homo sapiens
gccccaaccccggcc

SEQ ID NO: 5282 - DNA, 15 bp, Homo sapiens
cgccccaaccccggc

SEQ ID NO: 5283 - DNA, 15 bp, Homo sapiens
gcgccccaaccccgg

SEQ ID NO: 5284 - DNA, 15 bp, Homo sapiens
ggcgccccaaccccg

SEQ ID NO: 5285 - DNA, 15 bp, Homo sapiens
tggcgccccaacccc

SEQ ID NO: 5286 - DNA, 15 bp, Homo sapiens
ctggcgccccaaccc

SEQ ID NO: 5287 - DNA, 15 bp, Homo sapiens
gctggcgccccaacc

SEQ ID NO: 5288 - DNA, 15 bp, Homo sapiens
ggctggcgccccaac

SEQ ID NO: 5289 - DNA, 15 bp, Homo sapiens
tggctggcgccccaa

SEQ ID NO: 5290 - DNA, 15 bp, Homo sapiens
gtggctggcgcccca

SEQ ID NO: 5291 - DNA, 15 bp, Homo sapiens
cgtggctggcgcccc

SEQ ID NO: 5292 - DNA, 15 bp, Homo sapiens
gcgtggctggcgccc

SEQ ID NO: 5293 - DNA, 15 bp, Homo sapiens
cgcgtggctggcgcc

SEQ ID NO: 5294 - DNA, 15 bp, Homo sapiens
acgcgtggctggcgc

SEQ ID NO: 5295 - DNA, 15 bp, Homo sapiens
aacgcgtggctggcg

SEQ ID NO: 5296 - DNA, 15 bp, Homo sapiens
caacgcgtggctggc

SEQ ID NO: 5297 - DNA, 15 bp, Homo sapiens
ccaacgcgtggctgg

SEQ ID NO: 5298 - DNA, 15 bp, Homo sapiens
cccaacgcgtggctg

SEQ ID NO: 5299 - DNA, 15 bp, Homo sapiens
tcccaacgcgtggct

SEQ ID NO: 5300 - DNA, 15 bp, Homo sapiens
ctcccaacgcgtggc

SEQ ID NO: 5301 - DNA, 15 bp, Homo sapiens
tctcccaacgcgtgg

SEQ ID NO: 5302 - DNA, 15 bp, Homo sapiens
ctctcccaacgcgtg

SEQ ID NO: 5303 - DNA, 15 bp, Homo sapiens
gctctcccaacgcgt

SEQ ID NO: 5304 - DNA, 15 bp, Homo sapiens
tgctctcccaacgcg

SEQ ID NO: 5305 - DNA, 15 bp, Homo sapiens
ctgctctcccaacgc

SEQ ID NO: 5306 - DNA, 15 bp, Homo sapiens
tctgctctcccaacg

SEQ ID NO: 5307 - DNA, 15 bp, Homo sapiens
gtctgctctcccaac

SEQ ID NO: 5308 - DNA, 15 bp, Homo sapiens
ggtctgctctcccaa

SEQ ID NO: 5309 - DNA, 15 bp, Homo sapiens
gggtctgctctccca

SEQ ID NO: 5310 - DNA, 15 bp, Homo sapiens
cgggtctgctctccc

SEQ ID NO: 5311 - DNA, 15 bp, Homo sapiens
ccgggtctgctctcc

SEQ ID NO: 5312 - DNA, 15 bp, Homo sapiens
cccgggtctgctctc

SEQ ID NO: 5313 - DNA, 15 bp, Homo sapiens
acccgggtctgctct

SEQ ID NO: 5314 - DNA, 15 bp, Homo sapiens
cacccgggtctgctc

SEQ ID NO: 5315 - DNA, 15 bp, Homo sapiens
gcacccgggtctgct

SEQ ID NO: 5316 - DNA, 15 bp, Homo sapiens
tgcacccgggtctgc

SEQ ID NO: 5317 - DNA, 15 bp, Homo sapiens
ctgcacccgggtctg

SEQ ID NO: 5318 - DNA, 15 bp, Homo sapiens
tctgcacccgggtct

SEQ ID NO: 5319 - DNA, 15 bp, Homo sapiens
gtctgcacccgggtc

SEQ ID NO: 5320 - DNA, 15 bp, Homo sapiens
agtctgcacccgggt

SEQ ID NO: 5321 - DNA, 15 bp, Homo sapiens
gagtctgcacccggg

SEQ ID NO: 5322 - DNA, 15 bp, Homo sapiens
tgagtctgcacccgg

SEQ ID NO: 5323 - DNA, 15 bp, Homo sapiens
ctgagtctgcacccg

SEQ ID NO: 5324 - DNA, 15 bp, Homo sapiens
tctgagtctgcaccc

SEQ ID NO: 5325 - DNA, 15 bp, Homo sapiens
ctctgagtctgcacc

SEQ ID NO: 5326 - DNA, 15 bp, Homo sapiens
cctctgagtctgcac

SEQ ID NO: 5327 - DNA, 15 bp, Homo sapiens
tcctctgagtctgca

SEQ ID NO: 5328 - DNA, 15 bp, Homo sapiens
gtcctctgagtctgc

SEQ ID NO: 5329 - DNA, 15 bp, Homo sapiens
agtcctctgagtctg

SEQ ID NO: 5330 - DNA, 15 bp, Homo sapiens
cagtcctctgagtct

SEQ ID NO: 5331 - DNA, 15 bp, Homo sapiens
ccagtcctctgagtc

SEQ ID NO: 5332 - DNA, 15 bp, Homo sapiens
tccagtcctctgagt

SEQ ID NO: 5333 - DNA, 15 bp, Homo sapiens
ctccagtcctctgag

SEQ ID NO: 5334 - DNA, 15 bp, Homo sapiens
tctccagtcctctga

SEQ ID NO: 5335 - DNA, 15 bp, Homo sapiens
ctctccagtcctctg

SEQ ID NO: 5336 - DNA, 15 bp, Homo sapiens
cctctccagtcctct

SEQ ID NO: 5337 - DNA, 15 bp, Homo sapiens
gcctctccagtcctc

SEQ ID NO: 5338 - DNA, 15 bp, Homo sapiens
cgcctctccagtcct

SEQ ID NO: 5339 - DNA, 15 bp, Homo sapiens
ccgcctctccagtcc

SEQ ID NO: 5340 - DNA, 15 bp, Homo sapiens
gccgcctctccagtc

SEQ ID NO: 5341 - DNA, 15 bp, Homo sapiens
tgccgcctctccagt

SEQ ID NO: 5342 - DNA, 15 bp, Homo sapiens
atgccgcctctccag

SEQ ID NO: 5343 - DNA, 15 bp, Homo sapiens
catgccgcctctcca

SEQ ID NO: 5344 - DNA, 15 bp, Homo sapiens
ccatgccgcctctcc

SEQ ID NO: 5345 - DNA, 15 bp, Homo sapiens
tccatgccgcctctc

SEQ ID NO: 5346 - DNA, 15 bp, Homo sapiens
ctccatgccgcctct

SEQ ID NO: 5347 - DNA, 15 bp, Homo sapiens
actccatgccgcctc

SEQ ID NO: 5348 - DNA, 15 bp, Homo sapiens
aactccatgccgcct

SEQ ID NO: 5349 - DNA, 15 bp, Homo sapiens
aaactccatgccgcc

SEQ ID NO: 5350 - DNA, 15 bp, Homo sapiens
caaactccatgccgc

SEQ ID NO: 5351 - DNA, 15 bp, Homo sapiens
ccaaactccatgccg

SEQ ID NO: 5352 - DNA, 15 bp, Homo sapiens
accaaactccatgcc

SEQ ID NO: 5353 - DNA, 15 bp, Homo sapiens
gaccaaactccatgc

SEQ ID NO: 5354 - DNA, 15 bp, Homo sapiens
agaccaaactccatg

SEQ ID NO: 5355 - DNA, 15 bp, Homo sapiens
gagaccaaactccat

SEQ ID NO: 5356 - DNA, 15 bp, Homo sapiens
ggagaccaaactcca

SEQ ID NO: 5357 - DNA, 15 bp, Homo sapiens
aggagaccaaactcc

SEQ ID NO: 5358 - DNA, 15 bp, Homo sapiens
caggagaccaaactc

SEQ ID NO: 5359 - DNA, 15 bp, Homo sapiens
ccaggagaccaaact

SEQ ID NO: 5360 - DNA, 15 bp, Homo sapiens
cccaggagaccaaac

SEQ ID NO: 5361 - DNA, 15 bp, Homo sapiens
tcccaggagaccaaa

SEQ ID NO: 5362 - DNA, 15 bp, Homo sapiens
ctcccaggagaccaa

SEQ ID NO: 5363 - DNA, 15 bp, Homo sapiens
cctcccaggagacca

SEQ ID NO: 5364 - DNA, 15 bp, Homo sapiens
acctcccaggagacc

SEQ ID NO: 5365 - DNA, 15 bp, Homo sapiens
tacctcccaggagac

SEQ ID NO: 5366 - DNA, 15 bp, Homo sapiens
ctacctcccaggaga

SEQ ID NO: 5367 - DNA, 15 bp, Homo sapiens
tctacctcccaggag

SEQ ID NO: 5368 - DNA, 15 bp, Homo sapiens
ctctacctcccagga

SEQ ID NO: 5369 - DNA, 15 bp, Homo sapiens
actctacctcccagg

SEQ ID NO: 5370 - DNA, 15 bp, Homo sapiens
cactctacctcccag

SEQ ID NO: 5371 - DNA, 15 bp, Homo sapiens
tcactctacctccca

SEQ ID NO: 5372 - DNA, 15 bp, Homo sapiens
ctcactctacctccc

SEQ ID NO: 5373 - DNA, 15 bp, Homo sapiens
cctcactctacctcc

SEQ ID NO: 5374 - DNA, 15 bp, Homo sapiens
acctcactctacctc

SEQ ID NO: 5375 - DNA, 15 bp, Homo sapiens
cacctcactctacct

SEQ ID NO: 5376 - DNA, 15 bp, Homo sapiens
gcacctcactctacc

SEQ ID NO: 5377 - DNA, 15 bp, Homo sapiens
agcacctcactctac

SEQ ID NO: 5378 - DNA, 15 bp, Homo sapiens
cagcacctcactcta

SEQ ID NO: 5379 - DNA, 15 bp, Homo sapiens
gcagcacctcactct

SEQ ID NO: 5380 - DNA, 15 bp, Homo sapiens
cgcagcacctcactc

SEQ ID NO: 5381 - DNA, 15 bp, Homo sapiens
ccgcagcacctcact

SEQ ID NO: 5382 - DNA, 15 bp, Homo sapiens
tccgcagcacctcac

SEQ ID NO: 5383 - DNA, 15 bp, Homo sapiens
gtccgcagcacctca

SEQ ID NO: 5384 - DNA, 15 bp, Homo sapiens
agtccgcagcacctc

SEQ ID NO: 5385 - DNA, 15 bp, Homo sapiens
gagtccgcagcacct

SEQ ID NO: 5386 - DNA, 15 bp, Homo sapiens
ggagtccgcagcacc

SEQ ID NO: 5387 - DNA, 15 bp, Homo sapiens
tggagtccgcagcac

SEQ ID NO: 5388 - DNA, 15 bp, Homo sapiens
ctggagtccgcagca

SEQ ID NO: 5389 - DNA, 15 bp, Homo sapiens
cctggagtccgcagc

SEQ ID NO: 5390 - DNA, 15 bp, Homo sapiens
ccctggagtccgcag

SEQ ID NO: 5391 - DNA, 15 bp, Homo sapiens
tccctggagtccgca

SEQ ID NO: 5392 - DNA, 15 bp, Homo sapiens
ctccctggagtccgc

SEQ ID NO: 5393 - DNA, 15 bp, Homo sapiens
cctccctggagtccg

SEQ ID NO: 5394 - DNA, 15 bp, Homo sapiens
tcctccctggagtcc

SEQ ID NO: 5395 - DNA, 15 bp, Homo sapiens
ttcctccctggagtc

SEQ ID NO: 5396 - DNA, 15 bp, Homo sapiens
tttcctccctggagt

SEQ ID NO: 5397 - DNA, 15 bp, Homo sapiens
ctttcctccctggag

SEQ ID NO: 5398 - DNA, 15 bp, Homo sapiens
cctttcctccctgga

SEQ ID NO: 5399 - DNA, 15 bp, Homo sapiens
ccctttcctccctgg

SEQ ID NO: 5400 - DNA, 15 bp, Homo sapiens
tccctttcctccctg

SEQ ID NO: 5401 - DNA, 15 bp, Homo sapiens
atccctttcctccct

SEQ ID NO: 5402 - DNA, 15 bp, Homo sapiens
catccctttcctccc

SEQ ID NO: 5403 - DNA, 15 bp, Homo sapiens
ccatccctttcctcc

SEQ ID NO: 5404 - DNA, 15 bp, Homo sapiens
cccatccctttcctc

SEQ ID NO: 5405 - DNA, 15 bp, Homo sapiens
acccatccctttcct

SEQ ID NO: 5406 - DNA, 15 bp, Homo sapiens
cacccatccctttcc

SEQ ID NO: 5407 - DNA, 15 bp, Homo sapiens
ccacccatccctttc

SEQ ID NO: 5408 - DNA, 15 bp, Homo sapiens
cccacccatcccttt

SEQ ID NO: 5409 - DNA, 15 bp, Homo sapiens
ccccacccatccctt

SEQ ID NO: 5410 - DNA, 15 bp, Homo sapiens
tccccacccatccct

SEQ ID NO: 5411 - DNA, 15 bp, Homo sapiens
ctccccacccatccc

SEQ ID NO: 5412 - DNA, 15 bp, Homo sapiens
cctccccacccatcc

SEQ ID NO: 5413 - DNA, 15 bp, Homo sapiens
gcctccccacccatc

SEQ ID NO: 5414 - DNA, 15 bp, Homo sapiens
cgcctccccacccat

SEQ ID NO: 5415 - DNA, 15 bp, Homo sapiens
ccgcctccccaccca

SEQ ID NO: 5416 - DNA, 15 bp, Homo sapiens
tcccgcctccccacc

SEQ ID NO: 5417 - DNA, 15 bp, Homo sapiens
ctcccgcctccccac

SEQ ID NO: 5418 - DNA, 15 bp, Homo sapiens
cctcccgcctcccca

SEQ ID NO: 5419 - DNA, 15 bp, Homo sapiens
ccctcccgcctcccc

SEQ ID NO: 5420 - DNA, 15 bp, Homo sapiens
cccctcccgcctccc

SEQ ID NO: 5421 - DNA, 15 bp, Homo sapiens
tcccctcccgcctcc

SEQ ID NO: 5422 - DNA, 15 bp, Homo sapiens
ctcccctcccgcctc

SEQ ID NO: 5423 - DNA, 15 bp, Homo sapiens
cctcccctcccgcct

SEQ ID NO: 5424 - DNA, 15 bp, Homo sapiens
tcctcccctcccgcc

SEQ ID NO: 5425 - DNA, 15 bp, Homo sapiens
ctcctcccctcccgc

SEQ ID NO: 5426 - DNA, 15 bp, Homo sapiens
cctcctcccctcccg

SEQ ID NO: 5427 - DNA, 15 bp, Homo sapiens
ccctcctcccctccc

SEQ ID NO: 5428 - DNA, 15 bp, Homo sapiens
tccctcctcccctcc

SEQ ID NO: 5429 - DNA, 15 bp, Homo sapiens
gtccctcctcccctc

SEQ ID NO: 5430 - DNA, 15 bp, Homo sapiens
cgtccctcctcccct

SEQ ID NO: 5431 - DNA, 15 bp, Homo sapiens
ccgtccctcctcccc

SEQ ID NO: 5432 - DNA, 15 bp, Homo sapiens
cccgtccctcctccc

SEQ ID NO: 5433 - DNA, 15 bp, Homo sapiens
ccccgtccctcctcc

SEQ ID NO: 5434 - DNA, 15 bp, Homo sapiens
accccgtccctcctc

SEQ ID NO: 5435 - DNA, 15 bp, Homo sapiens
taccccgtccctcct

SEQ ID NO: 5436 - DNA, 15 bp, Homo sapiens
ataccccgtccctcc

SEQ ID NO: 5437 - DNA, 15 bp, Homo sapiens
aataccccgtccctc

SEQ ID NO: 5438 - DNA, 15 bp, Homo sapiens
aaataccccgtccct

SEQ ID NO: 5439 - DNA, 15 bp, Homo sapiens
aaaataccccgtccc

SEQ ID NO: 5440 - DNA, 15 bp, Homo sapiens
caaaataccccgtcc

SEQ ID NO: 5441 - DNA, 15 bp, Homo sapiens
gcaaaataccccgtc

SEQ ID NO: 5442 - DNA, 15 bp, Homo sapiens
cgcaaaataccccgt

SEQ ID NO: 5443 - DNA, 15 bp, Homo sapiens
gcgcaaaataccccg

SEQ ID NO: 5444 - DNA, 15 bp, Homo sapiens
agcgcaaaatacccc

SEQ ID NO: 5445 - DNA, 15 bp, Homo sapiens
gagcgcaaaataccc

SEQ ID NO: 5446 - DNA, 15 bp, Homo sapiens
ggagcgcaaaatacc

SEQ ID NO: 5447 - DNA, 15 bp, Homo sapiens
gggagcgcaaaatac

SEQ ID NO: 5448 - DNA, 15 bp, Homo sapiens
cgggagcgcaaaata

SEQ ID NO: 5449 - DNA, 15 bp, Homo sapiens
gcgggagcgcaaaat

SEQ ID NO: 5450 - DNA, 15 bp, Homo sapiens
tgcgggagcgcaaaa

SEQ ID NO: 5451 - DNA, 15 bp, Homo sapiens
gtgcgggagcgcaaa

SEQ ID NO: 5452 - DNA, 15 bp, Homo sapiens
ggtgcgggagcgcaa

SEQ ID NO: 5453 - DNA, 15 bp, Homo sapiens
cggtgcgggagcgca

SEQ ID NO: 5454 - DNA, 15 bp, Homo sapiens
gcggtgcgggagcgc

SEQ ID NO: 5455 - DNA, 15 bp, Homo sapiens
cgcggtgcgggagcg

SEQ ID NO: 5456 - DNA, 15 bp, Homo sapiens
ccgcggtgcgggagc

SEQ ID NO: 5457 - DNA, 15 bp, Homo sapiens
gccgcggtgcgggag

SEQ ID NO: 5458 - DNA, 15 bp, Homo sapiens
ggccgcggtgcggga

SEQ ID NO: 5459 - DNA, 15 bp, Homo sapiens
gggccgcggtgcggg

SEQ ID NO: 5460 - DNA, 15 bp, Homo sapiens
cgggccgcggtgcgg

SEQ ID NO: 5461 - DNA, 15 bp, Homo sapiens
tcgggccgcggtgcg

SEQ ID NO: 5462 - DNA, 15 bp, Homo sapiens
ttcgggccgcggtgc

SEQ ID NO: 5463 - DNA, 15 bp, Homo sapiens
gttcgggccgcggtg

SEQ ID NO: 5464 - DNA, 15 bp, Homo sapiens
agttcgggccgcggt

SEQ ID NO: 5465 - DNA, 15 bp, Homo sapiens
gagttcgggccgcgg

SEQ ID NO: 5466 - DNA, 15 bp, Homo sapiens
tgagttcgggccgcg

SEQ ID NO: 5467 - DNA, 15 bp, Homo sapiens
ctgagttcgggccgc

SEQ ID NO: 5468 - DNA, 15 bp, Homo sapiens
gctgagttcgggccg

SEQ ID NO: 5469 - DNA, 15 bp, Homo sapiens
agctgagttcgggcc

SEQ ID NO: 5470 - DNA, 15 bp, Homo sapiens
cagctgagttcgggc

SEQ ID NO: 5471 - DNA, 15 bp, Homo sapiens
acagctgagttcggg

SEQ ID NO: 5472 - DNA, 15 bp, Homo sapiens
aacagctgagttcgg

SEQ ID NO: 5473 - DNA, 15 bp, Homo sapiens
gaacagctgagttcg

SEQ ID NO: 5474 - DNA, 15 bp, Homo sapiens
agaacagctgagttc

SEQ ID NO: 5475 - DNA, 15 bp, Homo sapiens
cagaacagctgagtt

SEQ ID NO: 5476 - DNA, 15 bp, Homo sapiens
gcagaacagctgagt

SEQ ID NO: 5477 - DNA, 15 bp, Homo sapiens
ggcagaacagctgag

SEQ ID NO: 5478 - DNA, 15 bp, Homo sapiens
aggcagaacagctga

SEQ ID NO: 5479 - DNA, 15 bp, Homo sapiens
aaggcagaacagctg

SEQ ID NO: 5480 - DNA, 15 bp, Homo sapiens
gaaggcagaacagct

SEQ ID NO: 5481 - DNA, 15 bp, Homo sapiens
tgaaggcagaacagc

SEQ ID NO: 5482 - DNA, 15 bp, Homo sapiens
gtgaaggcagaacag

SEQ ID NO: 5483 - DNA, 15 bp, Homo sapiens
agtgaaggcagaaca

SEQ ID NO: 5484 - DNA, 15 bp, Homo sapiens
cagtgaaggcagaac

SEQ ID NO: 5485 - DNA, 15 bp, Homo sapiens
ccagtgaaggcagaa

SEQ ID NO: 5486 - DNA, 15 bp, Homo sapiens
gccagtgaaggcaga

SEQ ID NO: 5487 - DNA, 15 bp, Homo sapiens
ggccagtgaaggcag

SEQ ID NO: 5488 - DNA, 15 bp, Homo sapiens
aggccagtgaaggca

SEQ ID NO: 5489 - DNA, 15 bp, Homo sapiens
gaggccagtgaaggc

SEQ ID NO: 5490 - DNA, 15 bp, Homo sapiens
tgaggccagtgaagg

SEQ ID NO: 5491 - DNA, 15 bp, Homo sapiens
ctgaggccagtgaag

SEQ ID NO: 5492 - DNA, 15 bp, Homo sapiens
gctgaggccagtgaa

SEQ ID NO: 5493 - DNA, 15 bp, Homo sapiens
ggctgaggccagtga

SEQ ID NO: 5494 - DNA, 15 bp, Homo sapiens
tggctgaggccagtg

SEQ ID NO: 5495 - DNA, 15 bp, Homo sapiens
ctggctgaggccagt

SEQ ID NO: 5496 - DNA, 15 bp, Homo sapiens
actggctgaggccag

SEQ ID NO: 5497 - DNA, 15 bp, Homo sapiens
gactggctgaggcca

SEQ ID NO: 5498 - DNA, 15 bp, Homo sapiens
cgactggctgaggcc

SEQ ID NO: 5499 - DNA, 15 bp, Homo sapiens
tcgactggctgaggc

SEQ ID NO: 5500 - DNA, 15 bp, Homo sapiens
ctcgactggctgagg

SEQ ID NO: 5501 - DNA, 15 bp, Homo sapiens
cctcgactggctgag

SEQ ID NO: 5502 - DNA, 15 bp, Homo sapiens
ccctcgactggctga

SEQ ID NO: 5503 - DNA, 15 bp, Homo sapiens
tccctcgactggctg

SEQ ID NO: 5504 - DNA, 15 bp, Homo sapiens
ctccctcgactggct

SEQ ID NO: 5505 - DNA, 15 bp, Homo sapiens
gctccctcgactggc

SEQ ID NO: 5506 - DNA, 15 bp, Homo sapiens
agctccctcgactgg

SEQ ID NO: 5507 - DNA, 15 bp, Homo sapiens
gagctccctcgactg

SEQ ID NO: 5508 - DNA, 15 bp, Homo sapiens
ggagctccctcgact

SEQ ID NO: 5509 - DNA, 15 bp, Homo sapiens
aggagctccctcgac

SEQ ID NO: 5510 - DNA, 15 bp, Homo sapiens
taggagctccctcga

SEQ ID NO: 5511 - DNA, 15 bp, Homo sapiens
gtaggagctccctcg

SEQ ID NO: 5512 - DNA, 15 bp, Homo sapiens
cgtaggagctccctc

SEQ ID NO: 5513 - DNA, 15 bp, Homo sapiens
tcgtaggagctccct

SEQ ID NO: 5514 - DNA, 15 bp, Homo sapiens
ctcgtaggagctccc

SEQ ID NO: 5515 - DNA, 15 bp, Homo sapiens
cctcgtaggagctcc

SEQ ID NO: 5516 - DNA, 15 bp, Homo sapiens
acctcgtaggagctc

SEQ ID NO: 5517 - DNA, 15 bp, Homo sapiens
aacctcgtaggagct

SEQ ID NO: 5518 - DNA, 15 bp, Homo sapiens
taacctcgtaggagc

SEQ ID NO: 5519 - DNA, 15 bp, Homo sapiens
ataacctcgtaggag

SEQ ID NO: 5520 - DNA, 15 bp, Homo sapiens
gataacctcgtagga

SEQ ID NO: 5521 - DNA, 15 bp, Homo sapiens
agataacctcgtagg

SEQ ID NO: 5522 - DNA, 15 bp, Homo sapiens
cagataacctcgtag

SEQ ID NO: 5523 - DNA, 15 bp, Homo sapiens
gcagataacctcgta

SEQ ID NO: 5524 - DNA, 15 bp, Homo sapiens
cgcagataacctcgt

SEQ ID NO: 5525 - DNA, 15 bp, Homo sapiens
tcgcagataacctcg

SEQ ID NO: 5526 - DNA, 15 bp, Homo sapiens
ctcgcagataacctc

SEQ ID NO: 5527 - DNA, 15 bp, Homo sapiens
gctcgcagataacct

SEQ ID NO: 5528 - DNA, 15 bp, Homo sapiens
ggctcgcagataacc

SEQ ID NO: 5529 - DNA, 15 bp, Homo sapiens
gggctcgcagataac

SEQ ID NO: 5530 - DNA, 15 bp, Homo sapiens
tgggctcgcagataa

SEQ ID NO: 5531 - DNA, 15 bp, Homo sapiens
ctgggctcgcagata

SEQ ID NO: 5532 - DNA, 15 bp, Homo sapiens
gctgggctcgcagat

SEQ ID NO: 5533 - DNA, 15 bp, Homo sapiens
tgctgggctcgcaga

SEQ ID NO: 5534 - DNA, 15 bp, Homo sapiens
ttgctgggctcgcag

SEQ ID NO: 5535 - DNA, 15 bp, Homo sapiens
tttgctgggctcgca

SEQ ID NO: 5536 - DNA, 15 bp, Homo sapiens
atttgctgggctcgc

SEQ ID NO: 5537 - DNA, 15 bp, Homo sapiens
gatttgctgggctcg

SEQ ID NO: 5538 - DNA, 15 bp, Homo sapiens
agatttgctgggctc

SEQ ID NO: 5539 - DNA, 15 bp, Homo sapiens
aagatttgctgggct

SEQ ID NO: 5540 - DNA, 15 bp, Homo sapiens
caagatttgctgggc

SEQ ID NO: 5541 - DNA, 15 bp, Homo sapiens
ccaagatttgctggg

SEQ ID NO: 5542 - DNA, 15 bp, Homo sapiens
cccaagatttgctgg

SEQ ID NO: 5543 - DNA, 15 bp, Homo sapiens
ccccaagatttgctg

SEQ ID NO: 5544 - DNA, 15 bp, Homo sapiens
cccccaagatttgct

SEQ ID NO: 5545 - DNA, 15 bp, Homo sapiens
acccccaagatttgc

SEQ ID NO: 5546 - DNA, 15 bp, Homo sapiens
gacccccaagatttg

SEQ ID NO: 5547 - DNA, 15 bp, Homo sapiens
ggacccccaagattt

SEQ ID NO: 5548 - DNA, 15 bp, Homo sapiens
aggacccccaagatt

SEQ ID NO: 5549 - DNA, 15 bp, Homo sapiens
taggacccccaagat

SEQ ID NO: 5550 - DNA, 15 bp, Homo sapiens
ctaggacccccaaga

SEQ ID NO: 5551 - DNA, 15 bp, Homo sapiens
gctaggacccccaag

SEQ ID NO: 5552 - DNA, 15 bp, Homo sapiens
ggctaggacccccaa

SEQ ID NO: 5553 - DNA, 15 bp, Homo sapiens
tggctaggaccccca

SEQ ID NO: 5554 - DNA, 15 bp, Homo sapiens
ttggctaggaccccc

SEQ ID NO: 5555 - DNA, 15 bp, Homo sapiens
tttggctaggacccc

SEQ ID NO: 5556 - DNA, 15 bp, Homo sapiens
atttggctaggaccc

SEQ ID NO: 5557 - DNA, 15 bp, Homo sapiens
catttggctaggacc

SEQ ID NO: 5558 - DNA, 15 bp, Homo sapiens
gcatttggctaggac

SEQ ID NO: 5559 - DNA, 15 bp, Homo sapiens
tgcatttggctagga

SEQ ID NO: 5560 - DNA, 15 bp, Homo sapiens
ctgcatttggctagg

SEQ ID NO: 5561 - DNA, 15 bp, Homo sapiens
actgcatttggctag

SEQ ID NO: 5562 - DNA, 15 bp, Homo sapiens
cactgcatttggcta

SEQ ID NO: 5563 - DNA, 15 bp, Homo sapiens
gcactgcatttggct

SEQ ID NO: 5564 - DNA, 15 bp, Homo sapiens
cgcactgcatttggc

SEQ ID NO: 5565 - DNA, 15 bp, Homo sapiens
gcgcactgcatttgg

SEQ ID NO: 5566 - DNA, 15 bp, Homo sapiens
tgcgcactgcatttg

SEQ ID NO: 5567 - DNA, 15 bp, Homo sapiens
ttgcgcactgcattt

SEQ ID NO: 5568 - DNA, 15 bp, Homo sapiens
gttgcgcactgcatt

SEQ ID NO: 5569 - DNA, 15 bp, Homo sapiens
cgttgcgcactgcat

SEQ ID NO: 5570 - DNA, 15 bp, Homo sapiens
acgttgcgcactgca

SEQ ID NO: 5571 - DNA, 15 bp, Homo sapiens
aacgttgcgcactgc

SEQ ID NO: 5572 - DNA, 15 bp, Homo sapiens
gaacgttgcgcactg

SEQ ID NO: 5573 - DNA, 15 bp, Homo sapiens
agaacgttgcgcact

SEQ ID NO: 5574 - DNA, 15 bp, Homo sapiens
gagaacgttgcgcac

SEQ ID NO: 5575 - DNA, 15 bp, Homo sapiens
agagaacgttgcgca

SEQ ID NO: 5576 - DNA, 15 bp, Homo sapiens
gagagaacgttgcgc

SEQ ID NO: 5577 - DNA, 15 bp, Homo sapiens
agagagaacgttgcg

SEQ ID NO: 5578 - DNA, 15 bp, Homo sapiens
gagagagaacgttgc

SEQ ID NO: 5579 - DNA, 15 bp, Homo sapiens
tgagagagaacgttg

SEQ ID NO: 5580 - DNA, 15 bp, Homo sapiens
gtgagagagaacgtt

SEQ ID NO: 5581 - DNA, 15 bp, Homo sapiens
agtgagagagaacgt

SEQ ID NO: 5582 - DNA, 15 bp, Homo sapiens
aagtgagagagaacg

SEQ ID NO: 5583 - DNA, 15 bp, Homo sapiens
caagtgagagagaac

SEQ ID NO: 5584 - DNA, 15 bp, Homo sapiens
ccaagtgagagagaa

SEQ ID NO: 5585 - DNA, 15 bp, Homo sapiens
tccaagtgagagaga

SEQ ID NO: 5586 - DNA, 15 bp, Homo sapiens
ctccaagtgagagag

SEQ ID NO: 5587 - DNA, 15 bp, Homo sapiens
cctccaagtgagaga

SEQ ID NO: 5588 - DNA, 15 bp, Homo sapiens
gcctccaagtgagag

SEQ ID NO: 5589 - DNA, 15 bp, Homo sapiens
ggcctccaagtgaga

SEQ ID NO: 5590 - DNA, 15 bp, Homo sapiens
cggcctccaagtgag

SEQ ID NO: 5591 - DNA, 15 bp, Homo sapiens
gcggcctccaagtga

SEQ ID NO: 5592 - DNA, 15 bp, Homo sapiens
ggcggcctccaagtg

SEQ ID NO: 5593 - DNA, 15 bp, Homo sapiens
tggcggcctccaagt

SEQ ID NO: 5594 - DNA, 15 bp, Homo sapiens
atggcggcctccaag

SEQ ID NO: 5595 - DNA, 15 bp, Homo sapiens
aatggcggcctccaa

SEQ ID NO: 5596 - DNA, 15 bp, Homo sapiens
gatgtctgtcatttc

SEQ ID NO: 5597 - DNA, 15 bp, Homo sapiens
ggatgtctgtcattt

SEQ ID NO: 5598 - DNA, 15 bp, Homo sapiens
gggatgtctgtcatt

SEQ ID NO: 5599 - DNA, 15 bp, Homo sapiens
tgggatgtctgtcat

SEQ ID NO: 5600 - DNA, 15 bp, Homo sapiens
ctgggatgtctgtca

SEQ ID NO: 5601 - DNA, 15 bp, Homo sapiens
gctgggatgtctgtc

SEQ ID NO: 5602 - DNA, 15 bp, Homo sapiens
tgctgggatgtctgt

SEQ ID NO: 5603 - DNA, 15 bp, Homo sapiens
ctgctgggatgtctg

SEQ ID NO: 5604 - DNA, 15 bp, Homo sapiens
gctgctgggatgtct

SEQ ID NO: 5605 - DNA, 15 bp, Homo sapiens
agctgctgggatgtc

SEQ ID NO: 5606 - DNA, 15 bp, Homo sapiens
tagctgctgggatgt

SEQ ID NO: 5607 - DNA, 15 bp, Homo sapiens
gtagctgctgggatg

SEQ ID NO: 5608 - DNA, 15 bp, Homo sapiens
tgtagctgctgggat

SEQ ID NO: 5609 - DNA, 15 bp, Homo sapiens
gtgtagctgctggga

SEQ ID NO: 5610 - DNA, 15 bp, Homo sapiens
tgtgtagctgctggg

SEQ ID NO: 5611 - DNA, 15 bp, Homo sapiens
atgtgtagctgctgg

SEQ ID NO: 5612 - DNA, 15 bp, Homo sapiens
catgtgtagctgctg

SEQ ID NO: 5613 - DNA, 15 bp, Homo sapiens
gcatgtgtagctgct

SEQ ID NO: 5614 - DNA, 15 bp, Homo sapiens
agcatgtgtagctgc

SEQ ID NO: 5615 - DNA, 15 bp, Homo sapiens
cagcatgtgtagctg

SEQ ID NO: 5616 - DNA, 15 bp, Homo sapiens
ccagcatgtgtagct

SEQ ID NO: 5617 - DNA, 15 bp, Homo sapiens
gccagcatgtgtagc

SEQ ID NO: 5618 - DNA, 15 bp, Homo sapiens
agccagcatgtgtag

SEQ ID NO: 5619 - DNA, 15 bp, Homo sapiens
cagccagcatgtgta

SEQ ID NO: 5620 - DNA, 15 bp, Homo sapiens
gcagccagcatgtgt

SEQ ID NO: 5621 - DNA, 15 bp, Homo sapiens
tgcagccagcatgtg

SEQ ID NO: 5622 - DNA, 15 bp, Homo sapiens
gtgcagccagcatgt

SEQ ID NO: 5623 - DNA, 15 bp, Homo sapiens
cgtgcagccagcatg

SEQ ID NO: 5624 - DNA, 15 bp, Homo sapiens
acgtgcagccagcat

SEQ ID NO: 5625 - DNA, 15 bp, Homo sapiens
gacgtgcagccagca

SEQ ID NO: 5626 - DNA, 15 bp, Homo sapiens
agacgtgcagccagc

SEQ ID NO: 5627 - DNA, 15 bp, Homo sapiens
gagacgtgcagccag

SEQ ID NO: 5628 - DNA, 15 bp, Homo sapiens
agagacgtgcagcca

SEQ ID NO: 5629 - DNA, 15 bp, Homo sapiens
aagagacgtgcagcc

SEQ ID NO: 5630 - DNA, 15 bp, Homo sapiens
caagagacgtgcagc

SEQ ID NO: 5631 - DNA, 15 bp, Homo sapiens
gcaagagacgtgcag

SEQ ID NO: 5632 - DNA, 15 bp, Homo sapiens
ggcaagagacgtgca

SEQ ID NO: 5633 - DNA, 15 bp, Homo sapiens
tggcaagagacgtgc

SEQ ID NO: 5634 - DNA, 15 bp, Homo sapiens
ttggcaagagacgtg

SEQ ID NO: 5635 - DNA, 15 bp, Homo sapiens
tttggcaagagacgt

SEQ ID NO: 5636 - DNA, 15 bp, Homo sapiens
atttggcaagagacg

SEQ ID NO: 5637 - DNA, 15 bp, Homo sapiens
catttggcaagagac

SEQ ID NO: 5638 - DNA, 15 bp, Homo sapiens
gcatttggcaagaga

SEQ ID NO: 5639 - DNA, 15 bp, Homo sapiens
ggcatttggcaagag

SEQ ID NO: 5640 - DNA, 15 bp, Homo sapiens
tggcatttggcaaga

SEQ ID NO: 5641 - DNA, 15 bp, Homo sapiens
ctggcatttggcaag

SEQ ID NO: 5642 - DNA, 15 bp, Homo sapiens
cctggcatttggcaa

SEQ ID NO: 5643 - DNA, 15 bp, Homo sapiens
tcctggcatttggca

SEQ ID NO: 5644 - DNA, 15 bp, Homo sapiens
ctcctggcatttggc

SEQ ID NO: 5645 - DNA, 15 bp, Homo sapiens
cctcctggcatttgg

SEQ ID NO: 5646 - DNA, 15 bp, Homo sapiens
acctcctggcatttg

SEQ ID NO: 5647 - DNA, 15 bp, Homo sapiens
tacctcctggcattt

SEQ ID NO: 5648 - DNA, 15 bp, Homo sapiens
ttacctcctggcatt

SEQ ID NO: 5649 - DNA, 15 bp, Homo sapiens
attacctcctggcat

SEQ ID NO: 5650 - DNA, 15 bp, Homo sapiens
aattacctcctggca

SEQ ID NO: 5651 - DNA, 15 bp, Homo sapiens
aaattacctcctggc

SEQ ID NO: 5652 - DNA, 15 bp, Homo sapiens
aaaattacctcctgg

SEQ ID NO: 5653 - DNA, 15 bp, Homo sapiens
aaaaattacctcctg

SEQ ID NO: 5654 - DNA, 15 bp, Homo sapiens
aaaaaattacctcct

SEQ ID NO: 5655 - DNA, 15 bp, Homo sapiens
taaaaaattacctcc

SEQ ID NO: 5656 - DNA, 15 bp, Homo sapiens
ctaaaaaattacctc

SEQ ID NO: 5657 - DNA, 15 bp, Homo sapiens
cctaaaaaattacct

SEQ ID NO: 5658 - DNA, 15 bp, Homo sapiens
ccctaaaaaattacc

SEQ ID NO: 5659 - DNA, 15 bp, Homo sapiens
accctaaaaaattac

SEQ ID NO: 5660 - DNA, 15 bp, Homo sapiens
gaccctaaaaaatta

SEQ ID NO: 5661 - DNA, 15 bp, Homo sapiens
ggaccctaaaaaatt

SEQ ID NO: 5662 - DNA, 15 bp, Homo sapiens
gggaccctaaaaaat

SEQ ID NO: 5663 - DNA, 15 bp, Homo sapiens
agggaccctaaaaaa

SEQ ID NO: 5664 - DNA, 15 bp, Homo sapiens
gagggaccctaaaaa

SEQ ID NO: 5665 - DNA, 15 bp, Homo sapiens
ggagggaccctaaaa

SEQ ID NO: 5666 - DNA, 15 bp, Homo sapiens
aggagggaccctaaa

SEQ ID NO: 5667 - DNA, 15 bp, Homo sapiens
aaggagggaccctaa

SEQ ID NO: 5668 - DNA, 15 bp, Homo sapiens
taaggagggacccta

SEQ ID NO: 5669 - DNA, 15 bp, Homo sapiens
ctaaggagggaccct

SEQ ID NO: 5670 - DNA, 15 bp, Homo sapiens
cctaaggagggaccc

SEQ ID NO: 5671 - DNA, 15 bp, Homo sapiens
ccctaaggagggacc

SEQ ID NO: 5672 - DNA, 15 bp, Homo sapiens
tccctaaggagggac

SEQ ID NO: 5673 - DNA, 15 bp, Homo sapiens
ttccctaaggaggga

SEQ ID NO: 5674 - DNA, 15 bp, Homo sapiens
tttccctaaggaggg

SEQ ID NO: 5675 - DNA, 15 bp, Homo sapiens
ctttccctaaggagg

SEQ ID NO: 5676 - DNA, 15 bp, Homo sapiens
cctttccctaaggag

SEQ ID NO: 5677 - DNA, 15 bp, Homo sapiens
ccctttccctaagga

SEQ ID NO: 5678 - DNA, 15 bp, Homo sapiens
cccctttccctaagg

SEQ ID NO: 5679 - DNA, 15 bp, Homo sapiens
gcccctttccctaag

SEQ ID NO: 5680 - DNA, 15 bp, Homo sapiens
agcccctttccctaa

SEQ ID NO: 5681 - DNA, 15 bp, Homo sapiens
cagcccctttcccta

SEQ ID NO: 5682 - DNA, 15 bp, Homo sapiens
ccagcccctttccct

SEQ ID NO: 5683 - DNA, 15 bp, Homo sapiens
tccagcccctttccc

SEQ ID NO: 5684 - DNA, 15 bp, Homo sapiens
ttccagcccctttcc

SEQ ID NO: 5685 - DNA, 15 bp, Homo sapiens
cttccagcccctttc

SEQ ID NO: 5686 - DNA, 15 bp, Homo sapiens
acttccagccccttt

SEQ ID NO: 5687 - DNA, 15 bp, Homo sapiens
aacttccagcccctt

SEQ ID NO: 5688 - DNA, 15 bp, Homo sapiens
aaacttccagcccct

SEQ ID NO: 5689 - DNA, 15 bp, Homo sapiens
aaaacttccagcccc

SEQ ID NO: 5690 - DNA, 15 bp, Homo sapiens
taaaacttccagccc

SEQ ID NO: 5691 - DNA, 15 bp, Homo sapiens
ataaaacttccagcc

SEQ ID NO: 5692 - DNA, 15 bp, Homo sapiens
aataaaacttccagc

SEQ ID NO: 5693 - DNA, 15 bp, Homo sapiens
taataaaacttccag

SEQ ID NO: 5694 - DNA, 15 bp, Homo sapiens
ataataaaacttcca

SEQ ID NO: 5695 - DNA, 15 bp, Homo sapiens
aataataaaacttcc

SEQ ID NO: 5696 - DNA, 15 bp, Homo sapiens
caataataaaacttc

SEQ ID NO: 5697 - DNA, 15 bp, Homo sapiens
gcaataataaaactt

SEQ ID NO: 5698 - DNA, 15 bp, Homo sapiens
agcaataataaaact

SEQ ID NO: 5699 - DNA, 15 bp, Homo sapiens
cagcaataataaaac

SEQ ID NO: 5700 - DNA, 15 bp, Homo sapiens
acagcaataataaaa

SEQ ID NO: 5701 - DNA, 15 bp, Homo sapiens
aacagcaataataaa

SEQ ID NO: 5702 - DNA, 15 bp, Homo sapiens
taacagcaataataa

SEQ ID NO: 5703 - DNA, 15 bp, Homo sapiens
gtaacagcaataata

SEQ ID NO: 5704 - DNA, 15 bp, Homo sapiens
agtaacagcaataat

SEQ ID NO: 5705 - DNA, 15 bp, Homo sapiens
tagtaacagcaataa

SEQ ID NO: 5706 - DNA, 15 bp, Homo sapiens
gtagtaacagcaata

SEQ ID NO: 5707 - DNA, 15 bp, Homo sapiens
agtagtaacagcaat

SEQ ID NO: 5708 - DNA, 15 bp, Homo sapiens
cagtagtaacagcaa

SEQ ID NO: 5709 - DNA, 15 bp, Homo sapiens
gcagtagtaacagca

SEQ ID NO: 5710 - DNA, 15 bp, Homo sapiens
agcagtagtaacagc

SEQ ID NO: 5711 - DNA, 15 bp, Homo sapiens
gagcagtagtaacag

SEQ ID NO: 5712 - DNA, 15 bp, Homo sapiens
cgagcagtagtaaca

SEQ ID NO: 5713 - DNA, 15 bp, Homo sapiens
acgagcagtagtaac

SEQ ID NO: 5714 - DNA, 15 bp, Homo sapiens
cacgagcagtagtaa

SEQ ID NO: 5715 - DNA, 15 bp, Homo sapiens
tcacgagcagtagta

SEQ ID NO: 5716 - DNA, 15 bp, Homo sapiens
ttcacgagcagtagt

SEQ ID NO: 5717 - DNA, 15 bp, Homo sapiens
gttcacgagcagtag

SEQ ID NO: 5718 - DNA, 15 bp, Homo sapiens
agttcacgagcagta

SEQ ID NO: 5719 - DNA, 15 bp, Homo sapiens
gagttcacgagcagt

SEQ ID NO: 5720 - DNA, 15 bp, Homo sapiens
tgagttcacgagcag

SEQ ID NO: 5721 - DNA, 15 bp, Homo sapiens
atgagttcacgagca

SEQ ID NO: 5722 - DNA, 15 bp, Homo sapiens
aatgagttcacgagc

SEQ ID NO: 5723 - DNA, 15 bp, Homo sapiens
aaatgagttcacgag

SEQ ID NO: 5724 - DNA, 15 bp, Homo sapiens
gaaatgagttcacga

SEQ ID NO: 5725 - DNA, 15 bp, Homo sapiens
tgaaatgagttcacg

SEQ ID NO: 5726 - DNA, 15 bp, Homo sapiens
ctgaaatgagttcac

SEQ ID NO: 5727 - DNA, 15 bp, Homo sapiens
gctgaaatgagttca

SEQ ID NO: 5728 - DNA, 15 bp, Homo sapiens
ggctgaaatgagttc

SEQ ID NO: 5729 - DNA, 15 bp, Homo sapiens
aggctgaaatgagtt

SEQ ID NO: 5730 - DNA, 15 bp, Homo sapiens
aaggctgaaatgagt

SEQ ID NO: 5731 - DNA, 15 bp, Homo sapiens
taaggctgaaatgag

SEQ ID NO: 5732 - DNA, 15 bp, Homo sapiens
ctaaggctgaaatga

SEQ ID NO: 5733 - DNA, 15 bp, Homo sapiens
tctaaggctgaaatg

SEQ ID NO: 5734 - DNA, 15 bp, Homo sapiens
ttctaaggctgaaat

SEQ ID NO: 5735 - DNA, 15 bp, Homo sapiens
cttctaaggctgaaa

SEQ ID NO: 5736 - DNA, 15 bp, Homo sapiens
acttctaaggctgaa

SEQ ID NO: 5737 - DNA, 15 bp, Homo sapiens
aacttctaaggctga

SEQ ID NO: 5738 - DNA, 15 bp, Homo sapiens
gaacttctaaggctg

SEQ ID NO: 5739 - DNA, 15 bp, Homo sapiens
agaacttctaaggct

SEQ ID NO: 5740 - DNA, 15 bp, Homo sapiens
aagaacttctaaggc

SEQ ID NO: 5741 - DNA, 15 bp, Homo sapiens
caagaacttctaagg

SEQ ID NO: 5742 - DNA, 15 bp, Homo sapiens
ccaagaacttctaag

SEQ ID NO: 5743 - DNA, 15 bp, Homo sapiens
gccaagaacttctaa

SEQ ID NO: 5744 - DNA, 15 bp, Homo sapiens
agccaagaacttcta

SEQ ID NO: 5745 - DNA, 15 bp, Homo sapiens
aagccaagaacttct

SEQ ID NO: 5746 - DNA, 15 bp, Homo sapiens
caagccaagaacttc

SEQ ID NO: 5747 - DNA, 15 bp, Homo sapiens
acaagccaagaactt

SEQ ID NO: 5748 - DNA, 15 bp, Homo sapiens
tacaagccaagaact

SEQ ID NO: 5749 - DNA, 15 bp, Homo sapiens
ctacaagccaagaac

SEQ ID NO: 5750 - DNA, 15 bp, Homo sapiens
actacaagccaagaa

SEQ ID NO: 5751 - DNA, 15 bp, Homo sapiens
aactacaagccaaga

SEQ ID NO: 5752 - DNA, 15 bp, Homo sapiens
aaactacaagccaag

SEQ ID NO: 5753 - DNA, 15 bp, Homo sapiens
aaaactacaagccaa

SEQ ID NO: 5754 - DNA, 15 bp, Homo sapiens
aaaaactacaagcca

SEQ ID NO: 5755 - DNA, 15 bp, Homo sapiens
caaaaactacaagcc

SEQ ID NO: 5756 - DNA, 15 bp, Homo sapiens
acaaaaactacaagc

SEQ ID NO: 5757 - DNA, 15 bp, Homo sapiens
aacaaaaactacaag

SEQ ID NO: 5758 - DNA, 15 bp, Homo sapiens
caacaaaaactacaa

SEQ ID NO: 5759 - DNA, 15 bp, Homo sapiens
acaacaaaaactaca

SEQ ID NO: 5760 - DNA, 15 bp, Homo sapiens
tacaacaaaaactac

SEQ ID NO: 5761 - DNA, 15 bp, Homo sapiens
gtacaacaaaaacta

SEQ ID NO: 5762 - DNA, 15 bp, Homo sapiens
agtacaacaaaaact

SEQ ID NO: 5763 - DNA, 15 bp, Homo sapiens
gagtacaacaaaaac

SEQ ID NO: 5764 - DNA, 15 bp, Homo sapiens
tgagtacaacaaaaa

SEQ ID NO: 5765 - DNA, 15 bp, Homo sapiens
atgagtacaacaaaa

SEQ ID NO: 5766 - DNA, 15 bp, Homo sapiens
catgagtacaacaaa

SEQ ID NO: 5767 - DNA, 15 bp, Homo sapiens
tcatgagtacaacaa

SEQ ID NO: 5768 - DNA, 15 bp, Homo sapiens
ttcatgagtacaaca

SEQ ID NO: 5769 - DNA, 15 bp, Homo sapiens
tttcatgagtacaac

SEQ ID NO: 5770 - DNA, 15 bp, Homo sapiens
ttttcatgagtacaa

SEQ ID NO: 5771 - DNA, 15 bp, Homo sapiens
attttcatgagtaca

SEQ ID NO: 5772 - DNA, 15 bp, Homo sapiens
cattttcatgagtac

SEQ ID NO: 5773 - DNA, 15 bp, Homo sapiens
gcattttcatgagta

SEQ ID NO: 5774 - DNA, 15 bp, Homo sapiens
agcattttcatgagt

SEQ ID NO: 5775 - DNA, 15 bp, Homo sapiens
gagcattttcatgag

SEQ ID NO: 5776 - DNA, 15 bp, Homo sapiens
ggagcattttcatga

SEQ ID NO: 5777 - DNA, 15 bp, Homo sapiens
gggagcattttcatg

SEQ ID NO: 5778 - DNA, 15 bp, Homo sapiens
ggggagcattttcat

SEQ ID NO: 5779 - DNA, 15 bp, Homo sapiens
gggggagcattttca

SEQ ID NO: 5780 - DNA, 15 bp, Homo sapiens
tgggggagcattttc

SEQ ID NO: 5781 - DNA, 15 bp, Homo sapiens
atgggggagcatttt

SEQ ID NO: 5782 - DNA, 15 bp, Homo sapiens
tatgggggagcattt

SEQ ID NO: 5783 - DNA, 15 bp, Homo sapiens
atatgggggagcatt

SEQ ID NO: 5784 - DNA, 15 bp, Homo sapiens
tatatgggggagcat

SEQ ID NO: 5785 - DNA, 15 bp, Homo sapiens
atatatgggggagca

SEQ ID NO: 5786 - DNA, 15 bp, Homo sapiens
tatatatgggggagc

SEQ ID NO: 5787 - DNA, 15 bp, Homo sapiens
atatatatgggggag

SEQ ID NO: 5788 - DNA, 15 bp, Homo sapiens
catatatatggggga

SEQ ID NO: 5789 - DNA, 15 bp, Homo sapiens
tcatatatatggggg

SEQ ID NO: 5790 - DNA, 15 bp, Homo sapiens
atcatatatatgggg

SEQ ID NO: 5791 - DNA, 15 bp, Homo sapiens
gatcatatatatggg

SEQ ID NO: 5792 - DNA, 15 bp, Homo sapiens
tgatcatatatatgg

SEQ ID NO: 5793 - DNA, 15 bp, Homo sapiens
atgatcatatatatg

SEQ ID NO: 5794 - DNA, 15 bp, Homo sapiens
aatgatcatatatat

SEQ ID NO: 5795 - DNA, 15 bp, Homo sapiens
gaatgatcatatata

SEQ ID NO: 5796 - DNA, 15 bp, Homo sapiens
agaatgatcatatat

SEQ ID NO: 5797 - DNA, 15 bp, Homo sapiens
gagaatgatcatata

SEQ ID NO: 5798 - DNA, 15 bp, Homo sapiens
cgagaatgatcatat

SEQ ID NO: 5799 - DNA, 15 bp, Homo sapiens
gcgagaatgatcata

SEQ ID NO: 5800 - DNA, 15 bp, Homo sapiens
agcgagaatgatcat

SEQ ID NO: 5801 - DNA, 15 bp, Homo sapiens
aagcgagaatgatca

SEQ ID NO: 5802 - DNA, 15 bp, Homo sapiens
taagcgagaatgatc

SEQ ID NO: 5803 - DNA, 15 bp, Homo sapiens
gtaagcgagaatgat

SEQ ID NO: 5804 - DNA, 15 bp, Homo sapiens
agtaagcgagaatga

SEQ ID NO: 5805 - DNA, 15 bp, Homo sapiens
tagtaagcgagaatg

SEQ ID NO: 5806 - DNA, 15 bp, Homo sapiens
atagtaagcgagaat

SEQ ID NO: 5807 - DNA, 15 bp, Homo sapiens
tatagtaagcgagaa

SEQ ID NO: 5808 - DNA, 15 bp, Homo sapiens
ttatagtaagcgaga

SEQ ID NO: 5809 - DNA, 15 bp, Homo sapiens
gttatagtaagcgag

SEQ ID NO: 5810 - DNA, 15 bp, Homo sapiens
tgttatagtaagcga

SEQ ID NO: 5811 - DNA, 15 bp, Homo sapiens
atgttatagtaagcg

SEQ ID NO: 5812 - DNA, 15 bp, Homo sapiens
gatgttatagtaagc

SEQ ID NO: 5813 - DNA, 15 bp, Homo sapiens
ggatgttatagtaag

SEQ ID NO: 5814 - DNA, 15 bp, Homo sapiens
aggatgttatagtaa

SEQ ID NO: 5815 - DNA, 15 bp, Homo sapiens
aaggatgttatagta

SEQ ID NO: 5816 - DNA, 15 bp, Homo sapiens
caaggatgttatagt

SEQ ID NO: 5817 - DNA, 15 bp, Homo sapiens
gcaaggatgttatag

SEQ ID NO: 5818 - DNA, 15 bp, Homo sapiens
agcaaggatgttata

SEQ ID NO: 5819 - DNA, 15 bp, Homo sapiens
aagcaaggatgttat

SEQ ID NO: 5820 - DNA, 15 bp, Homo sapiens
taagcaaggatgtta

SEQ ID NO: 5821 - DNA, 15 bp, Homo sapiens
gtaagcaaggatgtt

SEQ ID NO: 5822 - DNA, 15 bp, Homo sapiens
agtaagcaaggatgt

SEQ ID NO: 5823 - DNA, 15 bp, Homo sapiens
tagtaagcaaggatg

SEQ ID NO: 5824 - DNA, 15 bp, Homo sapiens
ttagtaagcaaggat

SEQ ID NO: 5825 - DNA, 15 bp, Homo sapiens
tttagtaagcaagga

SEQ ID NO: 5826 - DNA, 15 bp, Homo sapiens
atttagtaagcaagg

SEQ ID NO: 5827 - DNA, 15 bp, Homo sapiens
catttagtaagcaag

SEQ ID NO: 5828 - DNA, 15 bp, Homo sapiens
tcatttagtaagcaa

SEQ ID NO: 5829 - DNA, 15 bp, Homo sapiens
ctcatttagtaagca

SEQ ID NO: 5830 - DNA, 15 bp, Homo sapiens
actcatttagtaagc

SEQ ID NO: 5831 - DNA, 15 bp, Homo sapiens
aactcatttagtaag

SEQ ID NO: 5832 - DNA, 15 bp, Homo sapiens
taactcatttagtaa

SEQ ID NO: 5833 - DNA, 15 bp, Homo sapiens
ttaactcatttagta

SEQ ID NO: 5834 - DNA, 15 bp, Homo sapiens
gttaactcatttagt

SEQ ID NO: 5835 - DNA, 15 bp, Homo sapiens
tgttaactcatttag

SEQ ID NO: 5836 - DNA, 15 bp, Homo sapiens
ctgttaactcattta

SEQ ID NO: 5837 - DNA, 15 bp, Homo sapiens
cctgttaactcattt

SEQ ID NO: 5838 - DNA, 15 bp, Homo sapiens
ccctgttaactcatt

SEQ ID NO: 5839 - DNA, 15 bp, Homo sapiens
gccctgttaactcat

SEQ ID NO: 5840 - DNA, 15 bp, Homo sapiens
agccctgttaactca

SEQ ID NO: 5841 - DNA, 15 bp, Homo sapiens
aagccctgttaactc

SEQ ID NO: 5842 - DNA, 15 bp, Homo sapiens
aaagccctgttaact

SEQ ID NO: 5843 - DNA, 15 bp, Homo sapiens
taaagccctgttaac

SEQ ID NO: 5844 - DNA, 15 bp, Homo sapiens
ataaagccctgttaa

SEQ ID NO: 5845 - DNA, 15 bp, Homo sapiens
cataaagccctgtta

SEQ ID NO: 5846 - DNA, 15 bp, Homo sapiens
ccataaagccctgtt

SEQ ID NO: 5847 - DNA, 15 bp, Homo sapiens
accataaagccctgt

SEQ ID NO: 5848 - DNA, 15 bp, Homo sapiens
caccataaagccctg

SEQ ID NO: 5849 - DNA, 15 bp, Homo sapiens
acaccataaagccct

SEQ ID NO: 5850 - DNA, 15 bp, Homo sapiens
cacaccataaagccc

SEQ ID NO: 5851 - DNA, 15 bp, Homo sapiens
acacaccataaagcc

SEQ ID NO: 5852 - DNA, 15 bp, Homo sapiens
tacacaccataaagc

SEQ ID NO: 5853 - DNA, 15 bp, Homo sapiens
atacacaccataaag

SEQ ID NO: 5854 - DNA, 15 bp, Homo sapiens
gatacacaccataaa

SEQ ID NO: 5855 - DNA, 15 bp, Homo sapiens
cgatacacaccataa

SEQ ID NO: 5856 - DNA, 15 bp, Homo sapiens
acgatacacaccata

SEQ ID NO: 5857 - DNA, 15 bp, Homo sapiens
cacgatacacaccat

SEQ ID NO: 5858 - DNA, 15 bp, Homo sapiens
tcacgatacacacca

SEQ ID NO: 5859 - DNA, 15 bp, Homo sapiens
ttcacgatacacacc

SEQ ID NO: 5860 - DNA, 15 bp, Homo sapiens
tttcacgatacacac

SEQ ID NO: 5861 - DNA, 15 bp, Homo sapiens
gtttcacgatacaca

SEQ ID NO: 5862 - DNA, 15 bp, Homo sapiens
tgtttcacgatacac

SEQ ID NO: 5863 - DNA, 15 bp, Homo sapiens
gtgtttcacgataca

SEQ ID NO: 5864 - DNA, 15 bp, Homo sapiens
tgtgtttcacgatac

SEQ ID NO: 5865 - DNA, 15 bp, Homo sapiens
gtgtgtttcacgata

SEQ ID NO: 5866 - DNA, 15 bp, Homo sapiens
cgtgtgtttcacgat

SEQ ID NO: 5867 - DNA, 15 bp, Homo sapiens
acgtgtgtttcacga

SEQ ID NO: 5868 - DNA, 15 bp, Homo sapiens
cacgtgtgtttcacg

SEQ ID NO: 5869 - DNA, 15 bp, Homo sapiens
gcacgtgtgtttcac

SEQ ID NO: 5870 - DNA, 15 bp, Homo sapiens
tgcacgtgtgtttca

SEQ ID NO: 5871 - DNA, 15 bp, Homo sapiens
atgcacgtgtgtttc

SEQ ID NO: 5872 - DNA, 15 bp, Homo sapiens
aatgcacgtgtgttt

SEQ ID NO: 5873 - DNA, 15 bp, Homo sapiens
taatgcacgtgtgtt

SEQ ID NO: 5874 - DNA, 15 bp, Homo sapiens
ttaatgcacgtgtgt

SEQ ID NO: 5875 - DNA, 15 bp, Homo sapiens
tttaatgcacgtgtg

SEQ ID NO: 5876 - DNA, 15 bp, Homo sapiens
ctttaatgcacgtgt

SEQ ID NO: 5877 - DNA, 15 bp, Homo sapiens
tctttaatgcacgtg

SEQ ID NO: 5878 - DNA, 15 bp, Homo sapiens
gtctttaatgcacgt

SEQ ID NO: 5879 - DNA, 15 bp, Homo sapiens
ggtctttaatgcacg

SEQ ID NO: 5880 - DNA, 15 bp, Homo sapiens
gggtctttaatgcac

SEQ ID NO: 5881 - DNA, 15 bp, Homo sapiens
agggtctttaatgca

SEQ ID NO: 5882 - DNA, 15 bp, Homo sapiens
gagggtctttaatgc

SEQ ID NO: 5883 - DNA, 15 bp, Homo sapiens
agagggtctttaatg

SEQ ID NO: 5884 - DNA, 15 bp, Homo sapiens
cagagggtctttaat

SEQ ID NO: 5885 - DNA, 15 bp, Homo sapiens
ccagagggtctttaa

SEQ ID NO: 5886 - DNA, 15 bp, Homo sapiens
tccagagggtcttta

SEQ ID NO: 5887 - DNA, 15 bp, Homo sapiens
ttccagagggtcttt

SEQ ID NO: 5888 - DNA, 15 bp, Homo sapiens
cttccagagggtctt

SEQ ID NO: 5889 - DNA, 15 bp, Homo sapiens
ccttccagagggtct

SEQ ID NO: 5890 - DNA, 15 bp, Homo sapiens
accttccagagggtc

SEQ ID NO: 5891 - DNA, 15 bp, Homo sapiens
taccttccagagggt

SEQ ID NO: 5892 - DNA, 15 bp, Homo sapiens
ataccttccagaggg

SEQ ID NO: 5893 - DNA, 15 bp, Homo sapiens
aataccttccagagg

SEQ ID NO: 5894 - DNA, 15 bp, Homo sapiens
taataccttccagag

SEQ ID NO: 5895 - DNA, 15 bp, Homo sapiens
ctaataccttccaga

SEQ ID NO: 5896 - DNA, 15 bp, Homo sapiens
gctaataccttccag

SEQ ID NO: 5897 - DNA, 15 bp, Homo sapiens
agctaataccttcca

SEQ ID NO: 5898 - DNA, 15 bp, Homo sapiens
aagctaataccttcc

SEQ ID NO: 5899 - DNA, 15 bp, Homo sapiens
aaagctaataccttc

SEQ ID NO: 5900 - DNA, 15 bp, Homo sapiens
aaaagctaatacctt

SEQ ID NO: 5901 - DNA, 15 bp, Homo sapiens
gaaaagctaatacct

SEQ ID NO: 5902 - DNA, 15 bp, Homo sapiens
tgaaaagctaatacc

SEQ ID NO: 5903 - DNA, 15 bp, Homo sapiens
gtgaaaagctaatac

SEQ ID NO: 5904 - DNA, 15 bp, Homo sapiens
tgtgaaaagctaata

SEQ ID NO: 5905 - DNA, 15 bp, Homo sapiens
gtgtgaaaagctaat

SEQ ID NO: 5906 - DNA, 15 bp, Homo sapiens
agtgtgaaaagctaa

SEQ ID NO: 5907 - DNA, 15 bp, Homo sapiens
aagtgtgaaaagcta

SEQ ID NO: 5908 - DNA, 15 bp, Homo sapiens
aaagtgtgaaaagct

SEQ ID NO: 5909 - DNA, 15 bp, Homo sapiens
gaaagtgtgaaaagc

SEQ ID NO: 5910 - DNA, 15 bp, Homo sapiens
tgaaagtgtgaaaag

SEQ ID NO: 5911 - DNA, 15 bp, Homo sapiens
gtgaaagtgtgaaaa

SEQ ID NO: 5912 - DNA, 15 bp, Homo sapiens
tgtgaaagtgtgaaa

SEQ ID NO: 5913 - DNA, 15 bp, Homo sapiens
ttgtgaaagtgtgaa

SEQ ID NO: 5914 - DNA, 15 bp, Homo sapiens
gttgtgaaagtgtga

SEQ ID NO: 5915 - DNA, 15 bp, Homo sapiens
tgttgtgaaagtgtg

SEQ ID NO: 5916 - DNA, 15 bp, Homo sapiens
ttgttgtgaaagtgt

SEQ ID NO: 5917 - DNA, 15 bp, Homo sapiens
tttgttgtgaaagtg

SEQ ID NO: 5918 - DNA, 15 bp, Homo sapiens
ttttgttgtgaaagt

SEQ ID NO: 5919 - DNA, 15 bp, Homo sapiens
cttttgttgtgaaag

SEQ ID NO: 5920 - DNA, 15 bp, Homo sapiens
gcttttgttgtgaaa

SEQ ID NO: 5921 - DNA, 15 bp, Homo sapiens
agcttttgttgtgaa

SEQ ID NO: 5922 - DNA, 15 bp, Homo sapiens
aagcttttgttgtga

SEQ ID NO: 5923 - DNA, 15 bp, Homo sapiens
gaagcttttgttgtg

SEQ ID NO: 5924 - DNA, 15 bp, Homo sapiens
tgaagcttttgttgt

SEQ ID NO: 5925 - DNA, 15 bp, Homo sapiens
gtgaagcttttgttg

SEQ ID NO: 5926 - DNA, 15 bp, Homo sapiens
tgtgaagcttttgtt

SEQ ID NO: 5927 - DNA, 15 bp, Homo sapiens
gtgtgaagcttttgt

SEQ ID NO: 5928 - DNA, 15 bp, Homo sapiens
agtgtgaagcttttg

SEQ ID NO: 5929 - DNA, 15 bp, Homo sapiens
aagtgtgaagctttt

SEQ ID NO: 5930 - DNA, 15 bp, Homo sapiens
caagtgtgaagcttt

SEQ ID NO: 5931 - DNA, 15 bp, Homo sapiens
acaagtgtgaagctt

SEQ ID NO: 5932 - DNA, 15 bp, Homo sapiens
cacaagtgtgaagct

SEQ ID NO: 5933 - DNA, 15 bp, Homo sapiens
ccacaagtgtgaagc

SEQ ID NO: 5934 - DNA, 15 bp, Homo sapiens
accacaagtgtgaag

SEQ ID NO: 5935 - DNA, 15 bp, Homo sapiens
aaccacaagtgtgaa

SEQ ID NO: 5936 - DNA, 15 bp, Homo sapiens
taaccacaagtgtga

SEQ ID NO: 5937 - DNA, 15 bp, Homo sapiens
ataaccacaagtgtg

SEQ ID NO: 5938 - DNA, 15 bp, Homo sapiens
aataaccacaagtgt

SEQ ID NO: 5939 - DNA, 15 bp, Homo sapiens
taataaccacaagtg

SEQ ID NO: 5940 - DNA, 15 bp, Homo sapiens
ttaataaccacaagt

SEQ ID NO: 5941 - DNA, 15 bp, Homo sapiens
cttaataaccacaag

SEQ ID NO: 5942 - DNA, 15 bp, Homo sapiens
gcttaataaccacaa

SEQ ID NO: 5943 - DNA, 15 bp, Homo sapiens
agcttaataaccaca

SEQ ID NO: 5944 - DNA, 15 bp, Homo sapiens
tagcttaataaccac

SEQ ID NO: 5945 - DNA, 15 bp, Homo sapiens
atagcttaataacca

SEQ ID NO: 5946 - DNA, 15 bp, Homo sapiens
aatagcttaataacc

SEQ ID NO: 5947 - DNA, 15 bp, Homo sapiens
aaatagcttaataac

SEQ ID NO: 5948 - DNA, 15 bp, Homo sapiens
aaaatagcttaataa

SEQ ID NO: 5949 - DNA, 15 bp, Homo sapiens
gaaaatagcttaata

SEQ ID NO: 5950 - DNA, 15 bp, Homo sapiens
agaaaatagcttaat

SEQ ID NO: 5951 - DNA, 15 bp, Homo sapiens
gagaaaatagcttaa

SEQ ID NO: 5952 - DNA, 15 bp, Homo sapiens
agagaaaatagctta

SEQ ID NO: 5953 - DNA, 15 bp, Homo sapiens
tagagaaaatagctt

SEQ ID NO: 5954 - DNA, 15 bp, Homo sapiens
ttagagaaaatagct

SEQ ID NO: 5955 - DNA, 15 bp, Homo sapiens
gttagagaaaatagc

SEQ ID NO: 5956 - DNA, 15 bp, Homo sapiens
ggttagagaaaatag

SEQ ID NO: 5957 - DNA, 15 bp, Homo sapiens
tggttagagaaaata

SEQ ID NO: 5958 - DNA, 15 bp, Homo sapiens
ctggttagagaaaat

SEQ ID NO: 5959 - DNA, 15 bp, Homo sapiens
actggttagagaaaa

SEQ ID NO: 5960 - DNA, 15 bp, Homo sapiens
aactggttagagaaa

SEQ ID NO: 5961 - DNA, 15 bp, Homo sapiens
gaactggttagagaa

SEQ ID NO: 5962 - DNA, 15 bp, Homo sapiens
ggaactggttagaga

SEQ ID NO: 5963 - DNA, 15 bp, Homo sapiens
gggaactggttagag

SEQ ID NO: 5964 - DNA, 15 bp, Homo sapiens
agggaactggttaga

SEQ ID NO: 5965 - DNA, 15 bp, Homo sapiens
aagggaactggttag

SEQ ID NO: 5966 - DNA, 15 bp, Homo sapiens
aaagggaactggtta

SEQ ID NO: 5967 - DNA, 15 bp, Homo sapiens
gaaagggaactggtt

SEQ ID NO: 5968 - DNA, 15 bp, Homo sapiens
tgaaagggaactggt

SEQ ID NO: 5969 - DNA, 15 bp, Homo sapiens
ttgaaagggaactgg

SEQ ID NO: 5970 - DNA, 15 bp, Homo sapiens
cttgaaagggaactg

SEQ ID NO: 5971 - DNA, 15 bp, Homo sapiens
gcttgaaagggaact

SEQ ID NO: 5972 - DNA, 15 bp, Homo sapiens
tgcttgaaagggaac

SEQ ID NO: 5973 - DNA, 15 bp, Homo sapiens
ttgcttgaaagggaa

SEQ ID NO: 5974 - DNA, 15 bp, Homo sapiens
tttgcttgaaaggga

SEQ ID NO: 5975 - DNA, 15 bp, Homo sapiens
ttttgcttgaaaggg

SEQ ID NO: 5976 - DNA, 15 bp, Homo sapiens
attttgcttgaaagg

SEQ ID NO: 5977 - DNA, 15 bp, Homo sapiens
cattttgcttgaaag

SEQ ID NO: 5978 - DNA, 15 bp, Homo sapiens
gcattttgcttgaaa

SEQ ID NO: 5979 - DNA, 15 bp, Homo sapiens
tgcattttgcttgaa

SEQ ID NO: 5980 - DNA, 15 bp, Homo sapiens
atgcattttgcttga

SEQ ID NO: 5981 - DNA, 15 bp, Homo sapiens
tatgcattttgcttg

SEQ ID NO: 5982 - DNA, 15 bp, Homo sapiens
gtatgcattttgctt

SEQ ID NO: 5983 - DNA, 15 bp, Homo sapiens
tgtatgcattttgct

SEQ ID NO: 5984 - DNA, 15 bp, Homo sapiens
atgtatgcattttgc

SEQ ID NO: 5985 - DNA, 15 bp, Homo sapiens
aatgtatgcattttg

SEQ ID NO: 5986 - DNA, 15 bp, Homo sapiens
caatgtatgcatttt

SEQ ID NO: 5987 - DNA, 15 bp, Homo sapiens
ccaatgtatgcattt

SEQ ID NO: 5988 - DNA, 15 bp, Homo sapiens
accaatgtatgcatt

SEQ ID NO: 5989 - DNA, 15 bp, Homo sapiens
gaccaatgtatgcat

SEQ ID NO: 5990 - DNA, 15 bp, Homo sapiens
agaccaatgtatgca

SEQ ID NO: 5991 - DNA, 15 bp, Homo sapiens
gagaccaatgtatgc

SEQ ID NO: 5992 - DNA, 15 bp, Homo sapiens
agagaccaatgtatg

SEQ ID NO: 5993 - DNA, 15 bp, Homo sapiens
cagagaccaatgtat

SEQ ID NO: 5994 - DNA, 15 bp, Homo sapiens
acagagaccaatgta

SEQ ID NO: 5995 - DNA, 15 bp, Homo sapiens
tacagagaccaatgt

SEQ ID NO: 5996 - DNA, 15 bp, Homo sapiens
ctacagagaccaatg

SEQ ID NO: 5997 - DNA, 15 bp, Homo sapiens
cctacagagaccaat

SEQ ID NO: 5998 - DNA, 15 bp, Homo sapiens
acctacagagaccaa

SEQ ID NO: 5999 - DNA, 15 bp, Homo sapiens
cacctacagagacca

SEQ ID NO: 6000 - DNA, 15 bp, Homo sapiens
tcacctacagagacc

SEQ ID NO: 6001 - DNA, 15 bp, Homo sapiens
atcacctacagagac

SEQ ID NO: 6002 - DNA, 15 bp, Homo sapiens
catcacctacagaga

SEQ ID NO: 6003 - DNA, 15 bp, Homo sapiens
ccatcacctacagag

SEQ ID NO: 6004 - DNA, 15 bp, Homo sapiens
cccatcacctacaga

SEQ ID NO: 6005 - DNA, 15 bp, Homo sapiens
acccatcacctacag

SEQ ID NO: 6006 - DNA, 15 bp, Homo sapiens
aacccatcacctaca

SEQ ID NO: 6007 - DNA, 15 bp, Homo sapiens
taacccatcacctac

SEQ ID NO: 6008 - DNA, 15 bp, Homo sapiens
ttaacccatcaccta

SEQ ID NO: 6009 - DNA, 15 bp, Homo sapiens
attaacccatcacct

SEQ ID NO: 6010 - DNA, 15 bp, Homo sapiens
cattaacccatcacc

SEQ ID NO: 6011 - DNA, 15 bp, Homo sapiens
gcattaacccatcac

SEQ ID NO: 6012 - DNA, 15 bp, Homo sapiens
tgcattaacccatca

SEQ ID NO: 6013 - DNA, 15 bp, Homo sapiens
atgcattaacccatc

SEQ ID NO: 6014 - DNA, 15 bp, Homo sapiens
catgcattaacccat

SEQ ID NO: 6015 - DNA, 15 bp, Homo sapiens
ccatgcattaaccca

SEQ ID NO: 6016 - DNA, 15 bp, Homo sapiens
tccatgcattaaccc

SEQ ID NO: 6017 - DNA, 15 bp, Homo sapiens
ttccatgcattaacc

SEQ ID NO: 6018 - DNA, 15 bp, Homo sapiens
tttccatgcattaac

SEQ ID NO: 6019 - DNA, 15 bp, Homo sapiens
atttccatgcattaa

SEQ ID NO: 6020 - DNA, 15 bp, Homo sapiens
tatttccatgcatta

SEQ ID NO: 6021 - DNA, 15 bp, Homo sapiens
ctatttccatgcatt

SEQ ID NO: 6022 - DNA, 15 bp, Homo sapiens
actatttccatgcat

SEQ ID NO: 6023 - DNA, 15 bp, Homo sapiens
aactatttccatgca

SEQ ID NO: 6024 - DNA, 15 bp, Homo sapiens
aaactatttccatgc

SEQ ID NO: 6025 - DNA, 15 bp, Homo sapiens
gaaactatttccatg

SEQ ID NO: 6026 - DNA, 15 bp, Homo sapiens
agaaactatttccat

SEQ ID NO: 6027 - DNA, 15 bp, Homo sapiens
gagaaactatttcca

SEQ ID NO: 6028 - DNA, 15 bp, Homo sapiens
ggagaaactatttcc

SEQ ID NO: 6029 - DNA, 15 bp, Homo sapiens
aggagaaactatttc

SEQ ID NO: 6030 - DNA, 15 bp, Homo sapiens
aaggagaaactattt

SEQ ID NO: 6031 - DNA, 15 bp, Homo sapiens
gaaggagaaactatt

SEQ ID NO: 6032 - DNA, 15 bp, Homo sapiens
ggaaggagaaactat

SEQ ID NO: 6033 - DNA, 15 bp, Homo sapiens
gggaaggagaaacta

SEQ ID NO: 6034 - DNA, 15 bp, Homo sapiens
agggaaggagaaact

SEQ ID NO: 6035 - DNA, 15 bp, Homo sapiens
cagggaaggagaaac

SEQ ID NO: 6036 - DNA, 15 bp, Homo sapiens
ccagggaaggagaaa

SEQ ID NO: 6037 - DNA, 15 bp, Homo sapiens
tccagggaaggagaa

SEQ ID NO: 6038 - DNA, 15 bp, Homo sapiens
ttccagggaaggaga

SEQ ID NO: 6039 - DNA, 15 bp, Homo sapiens
gttccagggaaggag

SEQ ID NO: 6040 - DNA, 15 bp, Homo sapiens
agttccagggaagga

SEQ ID NO: 6041 - DNA, 15 bp, Homo sapiens
cagttccagggaagg

SEQ ID NO: 6042 - DNA, 15 bp, Homo sapiens
ccagttccagggaag

SEQ ID NO: 6043 - DNA, 15 bp, Homo sapiens
cccagttccagggaa

SEQ ID NO: 6044 - DNA, 15 bp, Homo sapiens
tcccagttccaggga

SEQ ID NO: 6045 - DNA, 15 bp, Homo sapiens
ttcccagttccaggg

SEQ ID NO: 6046 - DNA, 15 bp, Homo sapiens
attcccagttccagg

SEQ ID NO: 6047 - DNA, 15 bp, Homo sapiens
tattcccagttccag

SEQ ID NO: 6048 - DNA, 15 bp, Homo sapiens
ctattcccagttcca

SEQ ID NO: 6049 - DNA, 15 bp, Homo sapiens
actattcccagttcc

SEQ ID NO: 6050 - DNA, 15 bp, Homo sapiens
cactattcccagttc

SEQ ID NO: 6051 - DNA, 15 bp, Homo sapiens
ccactattcccagtt

SEQ ID NO: 6052 - DNA, 15 bp, Homo sapiens
cccactattcccagt

SEQ ID NO: 6053 - DNA, 15 bp, Homo sapiens
acccactattcccag

SEQ ID NO: 6054 - DNA, 15 bp, Homo sapiens
cacccactattccca

SEQ ID NO: 6055 - DNA, 15 bp, Homo sapiens
tcacccactattccc

SEQ ID NO: 6056 - DNA, 15 bp, Homo sapiens
ctcacccactattcc

SEQ ID NO: 6057 - DNA, 15 bp, Homo sapiens
tctcacccactattc

SEQ ID NO: 6058 - DNA, 15 bp, Homo sapiens
atctcacccactatt

SEQ ID NO: 6059 - DNA, 15 bp, Homo sapiens
tatctcacccactat

SEQ ID NO: 6060 - DNA, 15 bp, Homo sapiens
ctatctcacccacta

SEQ ID NO: 6061 - DNA, 15 bp, Homo sapiens
actatctcacccact

SEQ ID NO: 6062 - DNA, 15 bp, Homo sapiens
cactatctcacccac

SEQ ID NO: 6063 - DNA, 15 bp, Homo sapiens
acactatctcaccca

SEQ ID NO: 6064 - DNA, 15 bp, Homo sapiens
tacactatctcaccc

SEQ ID NO: 6065 - DNA, 15 bp, Homo sapiens
atacactatctcacc

SEQ ID NO: 6066 - DNA, 15 bp, Homo sapiens
aatacactatctcac

SEQ ID NO: 6067 - DNA, 15 bp, Homo sapiens
aaatacactatctca

SEQ ID NO: 6068 - DNA, 15 bp, Homo sapiens
aaaatacactatctc

SEQ ID NO: 6069 - DNA, 15 bp, Homo sapiens
aaaaatacactatct

SEQ ID NO: 6070 - DNA, 15 bp, Homo sapiens
aaaaaatacactatc

SEQ ID NO: 6071 - DNA, 15 bp, Homo sapiens
taaaaaatacactat

SEQ ID NO: 6072 - DNA, 15 bp, Homo sapiens
ttaaaaaatacacta

SEQ ID NO: 6073 - DNA, 15 bp, Homo sapiens
attaaaaaatacact

SEQ ID NO: 6074 - DNA, 15 bp, Homo sapiens
cattaaaaaatacac

SEQ ID NO: 6075 - DNA, 15 bp, Homo sapiens
acattaaaaaataca

SEQ ID NO: 6076 - DNA, 15 bp, Homo sapiens
tacattaaaaaatac

SEQ ID NO: 6077 - DNA, 15 bp, Homo sapiens
ttacattaaaaaata

SEQ ID NO: 6078 - DNA, 15 bp, Homo sapiens
tttacattaaaaaat

SEQ ID NO: 6079 - DNA, 15 bp, Homo sapiens
ctttacattaaaaaa

SEQ ID NO: 6080 - DNA, 15 bp, Homo sapiens
tctttacattaaaaa

SEQ ID NO: 6081 - DNA, 15 bp, Homo sapiens
gtctttacattaaaa

SEQ ID NO: 6082 - DNA, 15 bp, Homo sapiens
tgtctttacattaaa

SEQ ID NO: 6083 - DNA, 15 bp, Homo sapiens
ctgtctttacattaa

SEQ ID NO: 6084 - DNA, 15 bp, Homo sapiens
cctgtctttacatta

SEQ ID NO: 6085 - DNA, 15 bp, Homo sapiens
gcctgtctttacatt

SEQ ID NO: 6086 - DNA, 15 bp, Homo sapiens
tgcctgtctttacat

SEQ ID NO: 6087 - DNA, 15 bp, Homo sapiens
gtgcctgtctttaca

SEQ ID NO: 6088 - DNA, 15 bp, Homo sapiens
tgtgcctgtctttac

SEQ ID NO: 6089 - DNA, 15 bp, Homo sapiens
ttgtgcctgtcttta

SEQ ID NO: 6090 - DNA, 15 bp, Homo sapiens
tttgtgcctgtcttt

SEQ ID NO: 6091 - DNA, 15 bp, Homo sapiens
atttgtgcctgtctt

SEQ ID NO: 6092 - DNA, 15 bp, Homo sapiens
catttgtgcctgtct

SEQ ID NO: 6093 - DNA, 15 bp, Homo sapiens
gcatttgtgcctgtc

SEQ ID NO: 6094 - DNA, 15 bp, Homo sapiens
agcatttgtgcctgt

SEQ ID NO: 6095 - DNA, 15 bp, Homo sapiens
aagcatttgtgcctg

SEQ ID NO: 6096 - DNA, 15 bp, Homo sapiens
aaagcatttgtgcct

SEQ ID NO: 6097 - DNA, 15 bp, Homo sapiens
aaaagcatttgtgcc

SEQ ID NO: 6098 - DNA, 15 bp, Homo sapiens
aaaaagcatttgtgc

SEQ ID NO: 6099 - DNA, 15 bp, Homo sapiens
aaaaaagcatttgtg

SEQ ID NO: 6100 - DNA, 15 bp, Homo sapiens
aaaaaaagcatttgt

SEQ ID NO: 6101 - DNA, 15 bp, Homo sapiens
caaaaaaagcatttg

SEQ ID NO: 6102 - DNA, 15 bp, Homo sapiens
acaaaaaaagcattt

SEQ ID NO: 6103 - DNA, 15 bp, Homo sapiens
aacaaaaaaagcatt

SEQ ID NO: 6104 - DNA, 15 bp, Homo sapiens
caacaaaaaaagcat

SEQ ID NO: 6105 - DNA, 15 bp, Homo sapiens
tcaacaaaaaaagca

SEQ ID NO: 6106 - DNA, 15 bp, Homo sapiens
atcaacaaaaaaagc

SEQ ID NO: 6107 - DNA, 15 bp, Homo sapiens
tatcaacaaaaaaag

SEQ ID NO: 6108 - DNA, 15 bp, Homo sapiens
ttatcaacaaaaaaa

SEQ ID NO: 6109 - DNA, 15 bp, Homo sapiens
tttatcaacaaaaaa

SEQ ID NO: 6110 - DNA, 15 bp, Homo sapiens
atttatcaacaaaaa

SEQ ID NO: 6111 - DNA, 15 bp, Homo sapiens
tatttatcaacaaaa

SEQ ID NO: 6112 - DNA, 15 bp, Homo sapiens
gtatttatcaacaaa

SEQ ID NO: 6113 - DNA, 15 bp, Homo sapiens
agtatttatcaacaa

SEQ ID NO: 6114 - DNA, 15 bp, Homo sapiens
tagtatttatcaaca

SEQ ID NO: 6115 - DNA, 15 bp, Homo sapiens
atagtatttatcaac

SEQ ID NO: 6116 - DNA, 15 bp, Homo sapiens
aatagtatttatcaa

SEQ ID NO: 6117 - DNA, 15 bp, Homo sapiens
aaatagtatttatca

SEQ ID NO: 6118 - DNA, 15 bp, Homo sapiens
aaaatagtatttatc

SEQ ID NO: 6119 - DNA, 15 bp, Homo sapiens
taaaatagtatttat

SEQ ID NO: 6120 - DNA, 15 bp, Homo sapiens
gtaaaatagtattta

SEQ ID NO: 6121 - DNA, 15 bp, Homo sapiens
tgtaaaatagtattt

SEQ ID NO: 6122 - DNA, 15 bp, Homo sapiens
ttgtaaaatagtatt

SEQ ID NO: 6123 - DNA, 15 bp, Homo sapiens
cttgtaaaatagtat

SEQ ID NO: 6124 - DNA, 15 bp, Homo sapiens
gcttgtaaaatagta

SEQ ID NO: 6125 - DNA, 15 bp, Homo sapiens
agcttgtaaaatagt

SEQ ID NO: 6126 - DNA, 15 bp, Homo sapiens
tagcttgtaaaatag

SEQ ID NO: 6127 - DNA, 15 bp, Homo sapiens
ttagcttgtaaaata

SEQ ID NO: 6128 - DNA, 15 bp, Homo sapiens
attagcttgtaaaat

SEQ ID NO: 6129 - DNA, 15 bp, Homo sapiens
aattagcttgtaaaa

SEQ ID NO: 6130 - DNA, 15 bp, Homo sapiens
taattagcttgtaaa

SEQ ID NO: 6131 - DNA, 15 bp, Homo sapiens
ataattagcttgtaa

SEQ ID NO: 6132 - DNA, 15 bp, Homo sapiens
tataattagcttgta

SEQ ID NO: 6133 - DNA, 15 bp, Homo sapiens
ttataattagcttgt

SEQ ID NO: 6134 - DNA, 15 bp, Homo sapiens
cttataattagcttg

SEQ ID NO: 6135 - DNA, 15 bp, Homo sapiens
acttataattagctt

SEQ ID NO: 6136 - DNA, 15 bp, Homo sapiens
aacttataattagct

SEQ ID NO: 6137 - DNA, 15 bp, Homo sapiens
taacttataattagc

SEQ ID NO: 6138 - DNA, 15 bp, Homo sapiens
ttaacttataattag

SEQ ID NO: 6139 - DNA, 15 bp, Homo sapiens
cttaacttataatta

SEQ ID NO: 6140 - DNA, 15 bp, Homo sapiens
gcttaacttataatt

SEQ ID NO: 6141 - DNA, 15 bp, Homo sapiens
tgcttaacttataat

SEQ ID NO: 6142 - DNA, 15 bp, Homo sapiens
gtgcttaacttataa

SEQ ID NO: 6143 - DNA, 15 bp, Homo sapiens
agtgcttaacttata

SEQ ID NO: 6144 - DNA, 15 bp, Homo sapiens
cagtgcttaacttat

SEQ ID NO: 6145 - DNA, 15 bp, Homo sapiens
acagtgcttaactta

SEQ ID NO: 6146 - DNA, 15 bp, Homo sapiens
aacagtgcttaactt

SEQ ID NO: 6147 - DNA, 15 bp, Homo sapiens
taacagtgcttaact

SEQ ID NO: 6148 - DNA, 15 bp, Homo sapiens
gtaacagtgcttaac

SEQ ID NO: 6149 - DNA, 15 bp, Homo sapiens
agtaacagtgcttaa

SEQ ID NO: 6150 - DNA, 15 bp, Homo sapiens
aagtaacagtgctta

SEQ ID NO: 6151 - DNA, 15 bp, Homo sapiens
caagtaacagtgctt

SEQ ID NO: 6152 - DNA, 15 bp, Homo sapiens
tcaagtaacagtgct

SEQ ID NO: 6153 - DNA, 15 bp, Homo sapiens
ctcaagtaacagtgc

SEQ ID NO: 6154 - DNA, 15 bp, Homo sapiens
tctcaagtaacagtg

SEQ ID NO: 6155 - DNA, 15 bp, Homo sapiens
atctcaagtaacagt

SEQ ID NO: 6156 - DNA, 15 bp, Homo sapiens
catctcaagtaacag

SEQ ID NO: 6157 - DNA, 15 bp, Homo sapiens
tcatctcaagtaaca

SEQ ID NO: 6158 - DNA, 15 bp, Homo sapiens
ttcatctcaagtaac

SEQ ID NO: 6159 - DNA, 15 bp, Homo sapiens
tttcatctcaagtaa

SEQ ID NO: 6160 - DNA, 15 bp, Homo sapiens
atttcatctcaagta

SEQ ID NO: 6161 - DNA, 15 bp, Homo sapiens
tatttcatctcaagt

SEQ ID NO: 6162 - DNA, 15 bp, Homo sapiens
atatttcatctcaag

SEQ ID NO: 6163 - DNA, 15 bp, Homo sapiens
tatatttcatctcaa

SEQ ID NO: 6164 - DNA, 15 bp, Homo sapiens
gtatatttcatctca

SEQ ID NO: 6165 - DNA, 15 bp, Homo sapiens
tgtatatttcatctc

SEQ ID NO: 6166 - DNA, 15 bp, Homo sapiens
ctgtatatttcatct

SEQ ID NO: 6167 - DNA, 15 bp, Homo sapiens
cctgtatatttcatc

SEQ ID NO: 6168 - DNA, 15 bp, Homo sapiens
ccctgtatatttcat

SEQ ID NO: 6169 - DNA, 15 bp, Homo sapiens
gccctgtatatttca

SEQ ID NO: 6170 - DNA, 15 bp, Homo sapiens
agccctgtatatttc

SEQ ID NO: 6171 - DNA, 15 bp, Homo sapiens
aagccctgtatattt

SEQ ID NO: 6172 - DNA, 15 bp, Homo sapiens
gaagccctgtatatt

SEQ ID NO: 6173 - DNA, 15 bp, Homo sapiens
tgaagccctgtatat

SEQ ID NO: 6174 - DNA, 15 bp, Homo sapiens
ttgaagccctgtata

SEQ ID NO: 6175 - DNA, 15 bp, Homo sapiens
tttgaagccctgtat

SEQ ID NO: 6176 - DNA, 15 bp, Homo sapiens
ctttgaagccctgta

SEQ ID NO: 6177 - DNA, 15 bp, Homo sapiens
tctttgaagccctgt

SEQ ID NO: 6178 - DNA, 15 bp, Homo sapiens
atctttgaagccctg

SEQ ID NO: 6179 - DNA, 15 bp, Homo sapiens
gatctttgaagccct

SEQ ID NO: 6180 - DNA, 15 bp, Homo sapiens
tgatctttgaagccc

SEQ ID NO: 6181 - DNA, 15 bp, Homo sapiens
atgatctttgaagcc

SEQ ID NO: 6182 - DNA, 15 bp, Homo sapiens
tatgatctttgaagc

SEQ ID NO: 6183 - DNA, 15 bp, Homo sapiens
ttatgatctttgaag

SEQ ID NO: 6184 - DNA, 15 bp, Homo sapiens
attatgatctttgaa

SEQ ID NO: 6185 - DNA, 15 bp, Homo sapiens
gattatgatctttga

SEQ ID NO: 6186 - DNA, 15 bp, Homo sapiens
agattatgatctttg

SEQ ID NO: 6187 - DNA, 15 bp, Homo sapiens
tagattatgatcttt

SEQ ID NO: 6188 - DNA, 15 bp, Homo sapiens
ttagattatgatctt

SEQ ID NO: 6189 - DNA, 15 bp, Homo sapiens
tttagattatgatct

SEQ ID NO: 6190 - DNA, 15 bp, Homo sapiens
atttagattatgatc

SEQ ID NO: 6191 - DNA, 15 bp, Homo sapiens
tatttagattatgat

SEQ ID NO: 6192 - DNA, 15 bp, Homo sapiens
ttatttagattatga

SEQ ID NO: 6193 - DNA, 15 bp, Homo sapiens
attatttagattatg

SEQ ID NO: 6194 - DNA, 15 bp, Homo sapiens
aattatttagattat

SEQ ID NO: 6195 - DNA, 15 bp, Homo sapiens
taattatttagatta

SEQ ID NO: 6196 - DNA, 15 bp, Homo sapiens
ataattatttagatt

SEQ ID NO: 6197 - DNA, 15 bp, Homo sapiens
cataattatttagat

SEQ ID NO: 6198 - DNA, 15 bp, Homo sapiens
gcataattatttaga

SEQ ID NO: 6199 - DNA, 15 bp, Homo sapiens
tgcataattatttag

SEQ ID NO: 6200 - DNA, 15 bp, Homo sapiens
gtgcataattattta

SEQ ID NO: 6201 - DNA, 15 bp, Homo sapiens
tgtgcataattattt

SEQ ID NO: 6202 - DNA, 15 bp, Homo sapiens
ctgtgcataattatt

SEQ ID NO: 6203 - DNA, 15 bp, Homo sapiens
gctgtgcataattat

SEQ ID NO: 6204 - DNA, 15 bp, Homo sapiens
agctgtgcataatta

SEQ ID NO: 6205 - DNA, 15 bp, Homo sapiens
tagctgtgcataatt

SEQ ID NO: 6206 - DNA, 15 bp, Homo sapiens
ttagctgtgcataat

SEQ ID NO: 6207 - DNA, 15 bp, Homo sapiens
attagctgtgcataa

SEQ ID NO: 6208 - DNA, 15 bp, Homo sapiens
cattagctgtgcata

SEQ ID NO: 6209 - DNA, 15 bp, Homo sapiens
ccattagctgtgcat

SEQ ID NO: 6210 - DNA, 15 bp, Homo sapiens
accattagctgtgca

SEQ ID NO: 6211 - DNA, 15 bp, Homo sapiens
aaccattagctgtgc

SEQ ID NO: 6212 - DNA, 15 bp, Homo sapiens
taaccattagctgtg

SEQ ID NO: 6213 - DNA, 15 bp, Homo sapiens
ataaccattagctgt

SEQ ID NO: 6214 - DNA, 15 bp, Homo sapiens
tataaccattagctg

SEQ ID NO: 6215 - DNA, 15 bp, Homo sapiens
gtataaccattagct

SEQ ID NO: 6216 - DNA, 15 bp, Homo sapiens
ggtataaccattagc

SEQ ID NO: 6217 - DNA, 15 bp, Homo sapiens
aggtataaccattag

SEQ ID NO: 6218 - DNA, 15 bp, Homo sapiens
caggtataaccatta

SEQ ID NO: 6219 - DNA, 15 bp, Homo sapiens
acaggtataaccatt

SEQ ID NO: 6220 - DNA, 15 bp, Homo sapiens
cacaggtataaccat

SEQ ID NO: 6221 - DNA, 15 bp, Homo sapiens
tcacaggtataacca

SEQ ID NO: 6222 - DNA, 15 bp, Homo sapiens
ttcacaggtataacc

SEQ ID NO: 6223 - DNA, 15 bp, Homo sapiens
cttcacaggtataac

SEQ ID NO: 6224 - DNA, 15 bp, Homo sapiens
acttcacaggtataa

SEQ ID NO: 6225 - DNA, 15 bp, Homo sapiens
tacttcacaggtata

SEQ ID NO: 6226 - DNA, 15 bp, Homo sapiens
ttacttcacaggtat

SEQ ID NO: 6227 - DNA, 15 bp, Homo sapiens
tttacttcacaggta

SEQ ID NO: 6228 - DNA, 15 bp, Homo sapiens
ctttacttcacaggt

SEQ ID NO: 6229 - DNA, 15 bp, Homo sapiens
actttacttcacagg

SEQ ID NO: 6230 - DNA, 15 bp, Homo sapiens
tactttacttcacag

SEQ ID NO: 6231 - DNA, 15 bp, Homo sapiens
ctactttacttcaca

SEQ ID NO: 6232 - DNA, 15 bp, Homo sapiens
actactttacttcac

SEQ ID NO: 6233 - DNA, 15 bp, Homo sapiens
cactactttacttca

SEQ ID NO: 6234 - DNA, 15 bp, Homo sapiens
ccactactttacttc

SEQ ID NO: 6235 - DNA, 15 bp, Homo sapiens
tccactactttactt

SEQ ID NO: 6236 - DNA, 15 bp, Homo sapiens
atccactactttact

SEQ ID NO: 6237 - DNA, 15 bp, Homo sapiens
gatccactactttac

SEQ ID NO: 6238 - DNA, 15 bp, Homo sapiens
ggatccactacttta

SEQ ID NO: 6239 - DNA, 15 bp, Homo sapiens
aggatccactacttt

SEQ ID NO: 6240 - DNA, 15 bp, Homo sapiens
caggatccactactt

SEQ ID NO: 6241 - DNA, 15 bp, Homo sapiens
tcaggatccactact

SEQ ID NO: 6242 - DNA, 15 bp, Homo sapiens
ctcaggatccactac

SEQ ID NO: 6243 - DNA, 15 bp, Homo sapiens
cctcaggatccacta

SEQ ID NO: 6244 - DNA, 15 bp, Homo sapiens
acctcaggatccact

SEQ ID NO: 6245 - DNA, 15 bp, Homo sapiens
cacctcaggatccac

SEQ ID NO: 6246 - DNA, 15 bp, Homo sapiens
acacctcaggatcca

SEQ ID NO: 6247 - DNA, 15 bp, Homo sapiens
tacacctcaggatcc

SEQ ID NO: 6248 - DNA, 15 bp, Homo sapiens
ttacacctcaggatc

SEQ ID NO: 6249 - DNA, 15 bp, Homo sapiens
attacacctcaggat

SEQ ID NO: 6250 - DNA, 15 bp, Homo sapiens
aattacacctcagga

SEQ ID NO: 6251 - DNA, 15 bp, Homo sapiens
aaattacacctcagg

SEQ ID NO: 6252 - DNA, 15 bp, Homo sapiens
aaaattacacctcag

SEQ ID NO: 6253 - DNA, 15 bp, Homo sapiens
taaaattacacctca

SEQ ID NO: 6254 - DNA, 15 bp, Homo sapiens
ataaaattacacctc

SEQ ID NO: 6255 - DNA, 15 bp, Homo sapiens
tataaaattacacct

SEQ ID NO: 6256 - DNA, 15 bp, Homo sapiens
ctataaaattacacc

SEQ ID NO: 6257 - DNA, 15 bp, Homo sapiens
actataaaattacac

SEQ ID NO: 6258 - DNA, 15 bp, Homo sapiens
tactataaaattaca

SEQ ID NO: 6259 - DNA, 15 bp, Homo sapiens
atactataaaattac

SEQ ID NO: 6260 - DNA, 15 bp, Homo sapiens
aatactataaaatta

SEQ ID NO: 6261 - DNA, 15 bp, Homo sapiens
taatactataaaatt

SEQ ID NO: 6262 - DNA, 15 bp, Homo sapiens
ctaatactataaaat

SEQ ID NO: 6263 - DNA, 15 bp, Homo sapiens
gctaatactataaaa

SEQ ID NO: 6264 - DNA, 15 bp, Homo sapiens
agctaatactataaa

SEQ ID NO: 6265 - DNA, 15 bp, Homo sapiens
cagctaatactataa

SEQ ID NO: 6266 - DNA, 15 bp, Homo sapiens
gcagctaatactata

SEQ ID NO: 6267 - DNA, 15 bp, Homo sapiens
tgcagctaatactat

SEQ ID NO: 6268 - DNA, 15 bp, Homo sapiens
atgcagctaatacta

SEQ ID NO: 6269 - DNA, 15 bp, Homo sapiens
aatgcagctaatact

SEQ ID NO: 6270 - DNA, 15 bp, Homo sapiens
aaatgcagctaatac

SEQ ID NO: 6271 - DNA, 15 bp, Homo sapiens
gaaatgcagctaata

SEQ ID NO: 6272 - DNA, 15 bp, Homo sapiens
tgaaatgcagctaat

SEQ ID NO: 6273 - DNA, 15 bp, Homo sapiens
ctgaaatgcagctaa

SEQ ID NO: 6274 - DNA, 15 bp, Homo sapiens
actgaaatgcagcta

SEQ ID NO: 6275 - DNA, 15 bp, Homo sapiens
tactgaaatgcagct

SEQ ID NO: 6276 - DNA, 15 bp, Homo sapiens
ctactgaaatgcagc

SEQ ID NO: 6277 - DNA, 15 bp, Homo sapiens
tctactgaaatgcag

SEQ ID NO: 6278 - DNA, 15 bp, Homo sapiens
atctactgaaatgca

SEQ ID NO: 6279 - DNA, 15 bp, Homo sapiens
catctactgaaatgc

SEQ ID NO: 6280 - DNA, 15 bp, Homo sapiens
ccatctactgaaatg

SEQ ID NO: 6281 - DNA, 15 bp, Homo sapiens
accatctactgaaat

SEQ ID NO: 6282 - DNA, 15 bp, Homo sapiens
caccatctactgaaa

SEQ ID NO: 6283 - DNA, 15 bp, Homo sapiens
acaccatctactgaa

SEQ ID NO: 6284 - DNA, 15 bp, Homo sapiens
cacaccatctactga

SEQ ID NO: 6285 - DNA, 15 bp, Homo sapiens
tcacaccatctactg

SEQ ID NO: 6286 - DNA, 15 bp, Homo sapiens
atcacaccatctact

SEQ ID NO: 6287 - DNA, 15 bp, Homo sapiens
catcacaccatctac

SEQ ID NO: 6288 - DNA, 15 bp, Homo sapiens
tcatcacaccatcta

SEQ ID NO: 6289 - DNA, 15 bp, Homo sapiens
ttcatcacaccatct

SEQ ID NO: 6290 - DNA, 15 bp, Homo sapiens
cttcatcacaccatc

SEQ ID NO: 6291 - DNA, 15 bp, Homo sapiens
tcttcatcacaccat

SEQ ID NO: 6292 - DNA, 15 bp, Homo sapiens
ctcttcatcacacca

SEQ ID NO: 6293 - DNA, 15 bp, Homo sapiens
actcttcatcacacc

SEQ ID NO: 6294 - DNA, 15 bp, Homo sapiens
aactcttcatcacac

SEQ ID NO: 6295 - DNA, 15 bp, Homo sapiens
aaactcttcatcaca

SEQ ID NO: 6296 - DNA, 15 bp, Homo sapiens
taaactcttcatcac

SEQ ID NO: 6297 - DNA, 15 bp, Homo sapiens
ttaaactcttcatca

SEQ ID NO: 6298 - DNA, 15 bp, Homo sapiens
attaaactcttcatc

SEQ ID NO: 6299 - DNA, 15 bp, Homo sapiens
cattaaactcttcat

SEQ ID NO: 6300 - DNA, 15 bp, Homo sapiens
gcattaaactcttca

SEQ ID NO: 6301 - DNA, 15 bp, Homo sapiens
tgcattaaactcttc

SEQ ID NO: 6302 - DNA, 15 bp, Homo sapiens
atgcattaaactctt

SEQ ID NO: 6303 - DNA, 15 bp, Homo sapiens
tatgcattaaactct

SEQ ID NO: 6304 - DNA, 15 bp, Homo sapiens
ctatgcattaaactc

SEQ ID NO: 6305 - DNA, 15 bp, Homo sapiens
cctatgcattaaact

SEQ ID NO: 6306 - DNA, 15 bp, Homo sapiens
tcctatgcattaaac

SEQ ID NO: 6307 - DNA, 15 bp, Homo sapiens
atcctatgcattaaa

SEQ ID NO: 6308 - DNA, 15 bp, Homo sapiens
aatcctatgcattaa

SEQ ID NO: 6309 - DNA, 15 bp, Homo sapiens
taatcctatgcatta

SEQ ID NO: 6310 - DNA, 15 bp, Homo sapiens
ttaatcctatgcatt

SEQ ID NO: 6311 - DNA, 15 bp, Homo sapiens
tttaatcctatgcat

SEQ ID NO: 6312 - DNA, 15 bp, Homo sapiens
atttaatcctatgca

SEQ ID NO: 6313 - DNA, 15 bp, Homo sapiens
catttaatcctatgc

SEQ ID NO: 6314 - DNA, 15 bp, Homo sapiens
tcatttaatcctatg

SEQ ID NO: 6315 - DNA, 15 bp, Homo sapiens
ctcatttaatcctat

SEQ ID NO: 6316 - DNA, 15 bp, Homo sapiens
tctcatttaatccta

SEQ ID NO: 6317 - DNA, 15 bp, Homo sapiens
ttctcatttaatcct

SEQ ID NO: 6318 - DNA, 15 bp, Homo sapiens
cttctcatttaatcc

SEQ ID NO: 6319 - DNA, 15 bp, Homo sapiens
acttctcatttaatc

SEQ ID NO: 6320 - DNA, 15 bp, Homo sapiens
aacttctcatttaat

SEQ ID NO: 6321 - DNA, 15 bp, Homo sapiens
taacttctcatttaa

SEQ ID NO: 6322 - DNA, 15 bp, Homo sapiens
gtaacttctcattta

SEQ ID NO: 6323 - DNA, 15 bp, Homo sapiens
cgtaacttctcattt

SEQ ID NO: 6324 - DNA, 15 bp, Homo sapiens
tcgtaacttctcatt

SEQ ID NO: 6325 - DNA, 15 bp, Homo sapiens
ctcgtaacttctcat

SEQ ID NO: 6326 - DNA, 15 bp, Homo sapiens
cctcgtaacttctca

SEQ ID NO: 6327 - DNA, 15 bp, Homo sapiens
tcctcgtaacttctc

SEQ ID NO: 6328 - DNA, 15 bp, Homo sapiens
ctcctcgtaacttct

SEQ ID NO: 6329 - DNA, 15 bp, Homo sapiens
actcctcgtaacttc

SEQ ID NO: 6330 - DNA, 15 bp, Homo sapiens
aactcctcgtaactt

SEQ ID NO: 6331 - DNA, 15 bp, Homo sapiens
aaactcctcgtaact

SEQ ID NO: 6332 - DNA, 15 bp, Homo sapiens
caaactcctcgtaac

SEQ ID NO: 6333 - DNA, 15 bp, Homo sapiens
acaaactcctcgtaa

SEQ ID NO: 6334 - DNA, 15 bp, Homo sapiens
aacaaactcctcgta

SEQ ID NO: 6335 - DNA, 15 bp, Homo sapiens
aaacaaactcctcgt

SEQ ID NO: 6336 - DNA, 15 bp, Homo sapiens
taaacaaactcctcg

SEQ ID NO: 6337 - DNA, 15 bp, Homo sapiens
ttaaacaaactcctc

SEQ ID NO: 6338 - DNA, 15 bp, Homo sapiens
tttaaacaaactcct

SEQ ID NO: 6339 - DNA, 15 bp, Homo sapiens
ctttaaacaaactcc

SEQ ID NO: 6340 - DNA, 15 bp, Homo sapiens
actttaaacaaactc

SEQ ID NO: 6341 - DNA, 15 bp, Homo sapiens
aactttaaacaaact

SEQ ID NO: 6342 - DNA, 15 bp, Homo sapiens
taactttaaacaaac

SEQ ID NO: 6343 - DNA, 15 bp, Homo sapiens
ttaactttaaacaaa

SEQ ID NO: 6344 - DNA, 15 bp, Homo sapiens
attaactttaaacaa

SEQ ID NO: 6345 - DNA, 15 bp, Homo sapiens
cattaactttaaaca

SEQ ID NO: 6346 - DNA, 15 bp, Homo sapiens
acattaactttaaac

SEQ ID NO: 6347 - DNA, 15 bp, Homo sapiens
tacattaactttaaa

SEQ ID NO: 6348 - DNA, 15 bp, Homo sapiens
gtacattaactttaa

SEQ ID NO: 6349 - DNA, 15 bp, Homo sapiens
ggtacattaacttta

SEQ ID NO: 6350 - DNA, 15 bp, Homo sapiens
cggtacattaacttt

SEQ ID NO: 6351 - DNA, 15 bp, Homo sapiens
tcggtacattaactt

SEQ ID NO: 6352 - DNA, 15 bp, Homo sapiens
ctcggtacattaact

SEQ ID NO: 6353 - DNA, 15 bp, Homo sapiens
cctcggtacattaac

SEQ ID NO: 6354 - DNA, 15 bp, Homo sapiens
acctcggtacattaa

SEQ ID NO: 6355 - DNA, 15 bp, Homo sapiens
tacctcggtacatta

SEQ ID NO: 6356 - DNA, 15 bp, Homo sapiens
ttacctcggtacatt

SEQ ID NO: 6357 - DNA, 15 bp, Homo sapiens
cttacctcggtacat

SEQ ID NO: 6358 - DNA, 15 bp, Homo sapiens
acttacctcggtaca

SEQ ID NO: 6359 - DNA, 15 bp, Homo sapiens
aacttacctcggtac

SEQ ID NO: 6360 - DNA, 15 bp, Homo sapiens
aaacttacctcggta

SEQ ID NO: 6361 - DNA, 15 bp, Homo sapiens
aaaacttacctcggt

SEQ ID NO: 6362 - DNA, 15 bp, Homo sapiens
gaaaacttacctcgg

SEQ ID NO: 6363 - DNA, 15 bp, Homo sapiens
tgaaaacttacctcg

SEQ ID NO: 6364 - DNA, 15 bp, Homo sapiens
ctgaaaacttacctc

SEQ ID NO: 6365 - DNA, 15 bp, Homo sapiens
actgaaaacttacct

SEQ ID NO: 6366 - DNA, 15 bp, Homo sapiens
cactgaaaacttacc

SEQ ID NO: 6367 - DNA, 15 bp, Homo sapiens
acactgaaaacttac

SEQ ID NO: 6368 - DNA, 15 bp, Homo sapiens
aacactgaaaactta

SEQ ID NO: 6369 - DNA, 15 bp, Homo sapiens
taacactgaaaactt

SEQ ID NO: 6370 - DNA, 15 bp, Homo sapiens
ttaacactgaaaact

SEQ ID NO: 6371 - DNA, 15 bp, Homo sapiens
cttaacactgaaaac

SEQ ID NO: 6372 - DNA, 15 bp, Homo sapiens
acttaacactgaaaa

SEQ ID NO: 6373 - DNA, 15 bp, Homo sapiens
aacttaacactgaaa

SEQ ID NO: 6374 - DNA, 15 bp, Homo sapiens
aaacttaacactgaa

SEQ ID NO: 6375 - DNA, 15 bp, Homo sapiens
aaaacttaacactga

SEQ ID NO: 6376 - DNA, 15 bp, Homo sapiens
aaaaacttaacactg

SEQ ID NO: 6377 - DNA, 15 bp, Homo sapiens
caaaaacttaacact

SEQ ID NO: 6378 - DNA, 15 bp, Homo sapiens
ccaaaaacttaacac

SEQ ID NO: 6379 - DNA, 15 bp, Homo sapiens
cccaaaaacttaaca

SEQ ID NO: 6380 - DNA, 15 bp, Homo sapiens
tcccaaaaacttaac

SEQ ID NO: 6381 - DNA, 15 bp, Homo sapiens
ctcccaaaaacttaa

SEQ ID NO: 6382 - DNA, 15 bp, Homo sapiens
tctcccaaaaactta

SEQ ID NO: 6383 - DNA, 15 bp, Homo sapiens
atctcccaaaaactt

SEQ ID NO: 6384 - DNA, 15 bp, Homo sapiens
aatctcccaaaaact

SEQ ID NO: 6385 - DNA, 15 bp, Homo sapiens
aaatctcccaaaaac

SEQ ID NO: 6386 - DNA, 15 bp, Homo sapiens
caaatctcccaaaaa

SEQ ID NO: 6387 - DNA, 15 bp, Homo sapiens
acaaatctcccaaaa

SEQ ID NO: 6388 - DNA, 15 bp, Homo sapiens
aacaaatctcccaaa

SEQ ID NO: 6389 - DNA, 15 bp, Homo sapiens
aaacaaatctcccaa

SEQ ID NO: 6390 - DNA, 15 bp, Homo sapiens
aaaacaaatctccca

SEQ ID NO: 6391 - DNA, 15 bp, Homo sapiens
caaaacaaatctccc

SEQ ID NO: 6392 - DNA, 15 bp, Homo sapiens
ccaaaacaaatctcc

SEQ ID NO: 6393 - DNA, 15 bp, Homo sapiens
cccaaaacaaatctc

SEQ ID NO: 6394 - DNA, 15 bp, Homo sapiens
tcccaaaacaaatct

SEQ ID NO: 6395 - DNA, 15 bp, Homo sapiens
ctcccaaaacaaatc

SEQ ID NO: 6396 - DNA, 15 bp, Homo sapiens
tctcccaaaacaaat

SEQ ID NO: 6397 - DNA, 15 bp, Homo sapiens
ctctcccaaaacaaa

SEQ ID NO: 6398 - DNA, 15 bp, Homo sapiens
cctctcccaaaacaa

SEQ ID NO: 6399 - DNA, 15 bp, Homo sapiens
tcctctcccaaaaca

SEQ ID NO: 6400 - DNA, 15 bp, Homo sapiens
atcctctcccaaaac

SEQ ID NO: 6401 - DNA, 15 bp, Homo sapiens
catcctctcccaaaa

SEQ ID NO: 6402 - DNA, 15 bp, Homo sapiens
tcatcctctcccaaa

SEQ ID NO: 6403 - DNA, 15 bp, Homo sapiens
ctcatcctctcccaa

SEQ ID NO: 6404 - DNA, 15 bp, Homo sapiens
actcatcctctccca

SEQ ID NO: 6405 - DNA, 15 bp, Homo sapiens
aactcatcctctccc

SEQ ID NO: 6406 - DNA, 15 bp, Homo sapiens
caactcatcctctcc

SEQ ID NO: 6407 - DNA, 15 bp, Homo sapiens
ccaactcatcctctc

SEQ ID NO: 6408 - DNA, 15 bp, Homo sapiens
cccaactcatcctct

SEQ ID NO: 6409 - DNA, 15 bp, Homo sapiens
ccccaactcatcctc

SEQ ID NO: 6410 - DNA, 15 bp, Homo sapiens
accccaactcatcct

SEQ ID NO: 6411 - DNA, 15 bp, Homo sapiens
aaccccaactcatcc

SEQ ID NO: 6412 - DNA, 15 bp, Homo sapiens
caaccccaactcatc

SEQ ID NO: 6413 - DNA, 15 bp, Homo sapiens
ccaaccccaactcat

SEQ ID NO: 6414 - DNA, 15 bp, Homo sapiens
cccaaccccaactca

SEQ ID NO: 6415 - DNA, 15 bp, Homo sapiens
ccccaaccccaactc

SEQ ID NO: 6416 - DNA, 15 bp, Homo sapiens
cccccaaccccaact

SEQ ID NO: 6417 - DNA, 15 bp, Homo sapiens
tcccccaaccccaac

SEQ ID NO: 6418 - DNA, 15 bp, Homo sapiens
ctcccccaaccccaa

SEQ ID NO: 6419 - DNA, 15 bp, Homo sapiens
cctcccccaacccca

SEQ ID NO: 6420 - DNA, 15 bp, Homo sapiens
tcctcccccaacccc

SEQ ID NO: 6421 - DNA, 15 bp, Homo sapiens
ttcctcccccaaccc

SEQ ID NO: 6422 - DNA, 15 bp, Homo sapiens
tttcctcccccaacc

SEQ ID NO: 6423 - DNA, 15 bp, Homo sapiens
ctttcctcccccaac

SEQ ID NO: 6424 - DNA, 15 bp, Homo sapiens
cctttcctcccccaa

SEQ ID NO: 6425 - DNA, 15 bp, Homo sapiens
tcctttcctccccca

SEQ ID NO: 6426 - DNA, 15 bp, Homo sapiens
gtcctttcctccccc

SEQ ID NO: 6427 - DNA, 15 bp, Homo sapiens
agtcctttcctcccc

SEQ ID NO: 6428 - DNA, 15 bp, Homo sapiens
aagtcctttcctccc

SEQ ID NO: 6429 - DNA, 15 bp, Homo sapiens
taagtcctttcctcc

SEQ ID NO: 6430 - DNA, 15 bp, Homo sapiens
ctaagtcctttcctc

SEQ ID NO: 6431 - DNA, 15 bp, Homo sapiens
gctaagtcctttcct

SEQ ID NO: 6432 - DNA, 15 bp, Homo sapiens
ggctaagtcctttcc

SEQ ID NO: 6433 - DNA, 15 bp, Homo sapiens
tggctaagtcctttc

SEQ ID NO: 6434 - DNA, 15 bp, Homo sapiens
ctggctaagtccttt

SEQ ID NO: 6435 - DNA, 15 bp, Homo sapiens
tctggctaagtcctt

SEQ ID NO: 6436 - DNA, 15 bp, Homo sapiens
atctggctaagtcct

SEQ ID NO: 6437 - DNA, 15 bp, Homo sapiens
catctggctaagtcc

SEQ ID NO: 6438 - DNA, 15 bp, Homo sapiens
acatctggctaagtc

SEQ ID NO: 6439 - DNA, 15 bp, Homo sapiens
cacatctggctaagt

SEQ ID NO: 6440 - DNA, 15 bp, Homo sapiens
tcacatctggctaag

SEQ ID NO: 6441 - DNA, 15 bp, Homo sapiens
ctcacatctggctaa

SEQ ID NO: 6442 - DNA, 15 bp, Homo sapiens
actcacatctggcta

SEQ ID NO: 6443 - DNA, 15 bp, Homo sapiens
aactcacatctggct

SEQ ID NO: 6444 - DNA, 15 bp, Homo sapiens
aaactcacatctggc

SEQ ID NO: 6445 - DNA, 15 bp, Homo sapiens
gaaactcacatctgg

SEQ ID NO: 6446 - DNA, 15 bp, Homo sapiens
agaaactcacatctg

SEQ ID NO: 6447 - DNA, 15 bp, Homo sapiens
aagaaactcacatct

SEQ ID NO: 6448 - DNA, 15 bp, Homo sapiens
taagaaactcacatc

SEQ ID NO: 6449 - DNA, 15 bp, Homo sapiens
ttaagaaactcacat

SEQ ID NO: 6450 - DNA, 15 bp, Homo sapiens
tttaagaaactcaca

SEQ ID NO: 6451 - DNA, 15 bp, Homo sapiens
atttaagaaactcac

SEQ ID NO: 6452 - DNA, 15 bp, Homo sapiens
aatttaagaaactca

SEQ ID NO: 6453 - DNA, 15 bp, Homo sapiens
caatttaagaaactc

SEQ ID NO: 6454 - DNA, 15 bp, Homo sapiens
tcaatttaagaaact

SEQ ID NO: 6455 - DNA, 15 bp, Homo sapiens
ttcaatttaagaaac

SEQ ID NO: 6456 - DNA, 15 bp, Homo sapiens
cttcaatttaagaaa

SEQ ID NO: 6457 - DNA, 15 bp, Homo sapiens
gcttcaatttaagaa

SEQ ID NO: 6458 - DNA, 15 bp, Homo sapiens
tgcttcaatttaaga

SEQ ID NO: 6459 - DNA, 15 bp, Homo sapiens
atgcttcaatttaag

SEQ ID NO: 6460 - DNA, 15 bp, Homo sapiens
tatgcttcaatttaa

SEQ ID NO: 6461 - DNA, 15 bp, Homo sapiens
ttatgcttcaattta

SEQ ID NO: 6462 - DNA, 15 bp, Homo sapiens
tttatgcttcaattt

SEQ ID NO: 6463 - DNA, 15 bp, Homo sapiens
ttttatgcttcaatt

SEQ ID NO: 6464 - DNA, 15 bp, Homo sapiens
attttatgcttcaat

SEQ ID NO: 6465 - DNA, 15 bp, Homo sapiens
aattttatgcttcaa

SEQ ID NO: 6466 - DNA, 15 bp, Homo sapiens
aaattttatgcttca

SEQ ID NO: 6467 - DNA, 15 bp, Homo sapiens
taaattttatgcttc

SEQ ID NO: 6468 - DNA, 15 bp, Homo sapiens
gtaaattttatgctt

SEQ ID NO: 6469 - DNA, 15 bp, Homo sapiens
tgtaaattttatgct

SEQ ID NO: 6470 - DNA, 15 bp, Homo sapiens
ttgtaaattttatgc

SEQ ID NO: 6471 - DNA, 15 bp, Homo sapiens
attgtaaattttatg

SEQ ID NO: 6472 - DNA, 15 bp, Homo sapiens
aattgtaaattttat

SEQ ID NO: 6473 - DNA, 15 bp, Homo sapiens
aaattgtaaatttta

SEQ ID NO: 6474 - DNA, 15 bp, Homo sapiens
taaattgtaaatttt

SEQ ID NO: 6475 - DNA, 15 bp, Homo sapiens
ataaattgtaaattt

SEQ ID NO: 6476 - DNA, 15 bp, Homo sapiens
cataaattgtaaatt

SEQ ID NO: 6477 - DNA, 15 bp, Homo sapiens
acataaattgtaaat

SEQ ID NO: 6478 - DNA, 15 bp, Homo sapiens
tacataaattgtaaa

SEQ ID NO: 6479 - DNA, 15 bp, Homo sapiens
ctacataaattgtaa

SEQ ID NO: 6480 - DNA, 15 bp, Homo sapiens
actacataaattgta

SEQ ID NO: 6481 - DNA, 15 bp, Homo sapiens
gactacataaattgt

SEQ ID NO: 6482 - DNA, 15 bp, Homo sapiens
ggactacataaattg

SEQ ID NO: 6483 - DNA, 15 bp, Homo sapiens
tggactacataaatt

SEQ ID NO: 6484 - DNA, 15 bp, Homo sapiens
atggactacataaat

SEQ ID NO: 6485 - DNA, 15 bp, Homo sapiens
tatggactacataaa

SEQ ID NO: 6486 - DNA, 15 bp, Homo sapiens
ttatggactacataa

SEQ ID NO: 6487 - DNA, 15 bp, Homo sapiens
attatggactacata

SEQ ID NO: 6488 - DNA, 15 bp, Homo sapiens
aattatggactacat

SEQ ID NO: 6489 - DNA, 15 bp, Homo sapiens
aaattatggactaca

SEQ ID NO: 6490 - DNA, 15 bp, Homo sapiens
aaaattatggactac

SEQ ID NO: 6491 - DNA, 15 bp, Homo sapiens
gaaaattatggacta

SEQ ID NO: 6492 - DNA, 15 bp, Homo sapiens
agaaaattatggact

SEQ ID NO: 6493 - DNA, 15 bp, Homo sapiens
gagaaaattatggac

SEQ ID NO: 6494 - DNA, 15 bp, Homo sapiens
agagaaaattatgga

SEQ ID NO: 6495 - DNA, 15 bp, Homo sapiens
cagagaaaattatgg

SEQ ID NO: 6496 - DNA, 15 bp, Homo sapiens
ccagagaaaattatg

SEQ ID NO: 6497 - DNA, 15 bp, Homo sapiens
tccagagaaaattat

SEQ ID NO: 6498 - DNA, 15 bp, Homo sapiens
gtccagagaaaatta

SEQ ID NO: 6499 - DNA, 15 bp, Homo sapiens
tgtccagagaaaatt

SEQ ID NO: 6500 - DNA, 15 bp, Homo sapiens
atgtccagagaaaat

SEQ ID NO: 6501 - DNA, 15 bp, Homo sapiens
aatgtccagagaaaa

SEQ ID NO: 6502 - DNA, 15 bp, Homo sapiens
gaatgtccagagaaa

SEQ ID NO: 6503 - DNA, 15 bp, Homo sapiens
agaatgtccagagaa

SEQ ID NO: 6504 - DNA, 15 bp, Homo sapiens
tagaatgtccagaga

SEQ ID NO: 6505 - DNA, 15 bp, Homo sapiens
gtagaatgtccagag

SEQ ID NO: 6506 - DNA, 15 bp, Homo sapiens
tgtagaatgtccaga

SEQ ID NO: 6507 - DNA, 15 bp, Homo sapiens
ctgtagaatgtccag

SEQ ID NO: 6508 - DNA, 15 bp, Homo sapiens
actgtagaatgtcca

SEQ ID NO: 6509 - DNA, 15 bp, Homo sapiens
gactgtagaatgtcc

SEQ ID NO: 6510 - DNA, 15 bp, Homo sapiens
agactgtagaatgtc

SEQ ID NO: 6511 - DNA, 15 bp, Homo sapiens
aagactgtagaatgt

SEQ ID NO: 6512 - DNA, 15 bp, Homo sapiens
taagactgtagaatg

SEQ ID NO: 6513 - DNA, 15 bp, Homo sapiens
ctaagactgtagaat

SEQ ID NO: 6514 - DNA, 15 bp, Homo sapiens
actaagactgtagaa

SEQ ID NO: 6515 - DNA, 15 bp, Homo sapiens
aactaagactgtaga

SEQ ID NO: 6516 - DNA, 15 bp, Homo sapiens
gaactaagactgtag

SEQ ID NO: 6517 - DNA, 15 bp, Homo sapiens
tgaactaagactgta

SEQ ID NO: 6518 - DNA, 15 bp, Homo sapiens
atgaactaagactgt

SEQ ID NO: 6519 - DNA, 15 bp, Homo sapiens
catgaactaagactg

SEQ ID NO: 6520 - DNA, 15 bp, Homo sapiens
gcatgaactaagact

SEQ ID NO: 6521 - DNA, 15 bp, Homo sapiens
ggcatgaactaagac

SEQ ID NO: 6522 - DNA, 15 bp, Homo sapiens
aggcatgaactaaga

SEQ ID NO: 6523 - DNA, 15 bp, Homo sapiens
caggcatgaactaag

SEQ ID NO: 6524 - DNA, 15 bp, Homo sapiens
tcaggcatgaactaa

SEQ ID NO: 6525 - DNA, 15 bp, Homo sapiens
ttcaggcatgaacta

SEQ ID NO: 6526 - DNA, 15 bp, Homo sapiens
cttcaggcatgaact

SEQ ID NO: 6527 - DNA, 15 bp, Homo sapiens
tcttcaggcatgaac

SEQ ID NO: 6528 - DNA, 15 bp, Homo sapiens
gtcttcaggcatgaa

SEQ ID NO: 6529 - DNA, 15 bp, Homo sapiens
ggtcttcaggcatga

SEQ ID NO: 6530 - DNA, 15 bp, Homo sapiens
tggtcttcaggcatg

SEQ ID NO: 6531 - DNA, 15 bp, Homo sapiens
gtggtcttcaggcat

SEQ ID NO: 6532 - DNA, 15 bp, Homo sapiens
agtggtcttcaggca

SEQ ID NO: 6533 - DNA, 15 bp, Homo sapiens
cagtggtcttcaggc

SEQ ID NO: 6534 - DNA, 15 bp, Homo sapiens
tcagtggtcttcagg

SEQ ID NO: 6535 - DNA, 15 bp, Homo sapiens
ttcagtggtcttcag

SEQ ID NO: 6536 - DNA, 15 bp, Homo sapiens
tttcagtggtcttca

SEQ ID NO: 6537 - DNA, 15 bp, Homo sapiens
atttcagtggtcttc

SEQ ID NO: 6538 - DNA, 15 bp, Homo sapiens
tatttcagtggtctt

SEQ ID NO: 6539 - DNA, 15 bp, Homo sapiens
ttatttcagtggtct

SEQ ID NO: 6540 - DNA, 15 bp, Homo sapiens
attatttcagtggtc

SEQ ID NO: 6541 - DNA, 15 bp, Homo sapiens
cattatttcagtggt

SEQ ID NO: 6542 - DNA, 15 bp, Homo sapiens
gcattatttcagtgg

SEQ ID NO: 6543 - DNA, 15 bp, Homo sapiens
agcattatttcagtg

SEQ ID NO: 6544 - DNA, 15 bp, Homo sapiens
cagcattatttcagt

SEQ ID NO: 6545 - DNA, 15 bp, Homo sapiens
tcagcattatttcag

SEQ ID NO: 6546 - DNA, 15 bp, Homo sapiens
ctcagcattatttca

SEQ ID NO: 6547 - DNA, 15 bp, Homo sapiens
actcagcattatttc

SEQ ID NO: 6548 - DNA, 15 bp, Homo sapiens
aactcagcattattt

SEQ ID NO: 6549 - DNA, 15 bp, Homo sapiens
caactcagcattatt

SEQ ID NO: 6550 - DNA, 15 bp, Homo sapiens
tcaactcagcattat

SEQ ID NO: 6551 - DNA, 15 bp, Homo sapiens
atcaactcagcatta

SEQ ID NO: 6552 - DNA, 15 bp, Homo sapiens
tatcaactcagcatt

SEQ ID NO: 6553 - DNA, 15 bp, Homo sapiens
ttatcaactcagcat

SEQ ID NO: 6554 - DNA, 15 bp, Homo sapiens
cttatcaactcagca

SEQ ID NO: 6555 - DNA, 15 bp, Homo sapiens
acttatcaactcagc

SEQ ID NO: 6556 - DNA, 15 bp, Homo sapiens
cacttatcaactcag

SEQ ID NO: 6557 - DNA, 15 bp, Homo sapiens
ccacttatcaactca

SEQ ID NO: 6558 - DNA, 15 bp, Homo sapiens
accacttatcaactc

SEQ ID NO: 6559 - DNA, 15 bp, Homo sapiens
aaccacttatcaact

SEQ ID NO: 6560 - DNA, 15 bp, Homo sapiens
gaaccacttatcaac

SEQ ID NO: 6561 - DNA, 15 bp, Homo sapiens
agaaccacttatcaa

SEQ ID NO: 6562 - DNA, 15 bp, Homo sapiens
gagaaccacttatca

SEQ ID NO: 6563 - DNA, 15 bp, Homo sapiens
agagaaccacttatc

SEQ ID NO: 6564 - DNA, 15 bp, Homo sapiens
aagagaaccacttat

SEQ ID NO: 6565 - DNA, 15 bp, Homo sapiens
caagagaaccactta

SEQ ID NO: 6566 - DNA, 15 bp, Homo sapiens
tcaagagaaccactt

SEQ ID NO: 6567 - DNA, 15 bp, Homo sapiens
gtcaagagaaccact

SEQ ID NO: 6568 - DNA, 15 bp, Homo sapiens
agtcaagagaaccac

SEQ ID NO: 6569 - DNA, 15 bp, Homo sapiens
aagtcaagagaacca

SEQ ID NO: 6570 - DNA, 15 bp, Homo sapiens
aaagtcaagagaacc

SEQ ID NO: 6571 - DNA, 15 bp, Homo sapiens
caaagtcaagagaac

SEQ ID NO: 6572 - DNA, 15 bp, Homo sapiens
acaaagtcaagagaa

SEQ ID NO: 6573 - DNA, 15 bp, Homo sapiens
aacaaagtcaagaga

SEQ ID NO: 6574 - DNA, 15 bp, Homo sapiens
aaacaaagtcaagag

SEQ ID NO: 6575 - DNA, 15 bp, Homo sapiens
taaacaaagtcaaga

SEQ ID NO: 6576 - DNA, 15 bp, Homo sapiens
ctaaacaaagtcaag

SEQ ID NO: 6577 - DNA, 15 bp, Homo sapiens
actaaacaaagtcaa

SEQ ID NO: 6578 - DNA, 15 bp, Homo sapiens
tactaaacaaagtca

SEQ ID NO: 6579 - DNA, 15 bp, Homo sapiens
atactaaacaaagtc

SEQ ID NO: 6580 - DNA, 15 bp, Homo sapiens
aatactaaacaaagt

SEQ ID NO: 6581 - DNA, 15 bp, Homo sapiens
gaatactaaacaaag

SEQ ID NO: 6582 - DNA, 15 bp, Homo sapiens
agaatactaaacaaa

SEQ ID NO: 6583 - DNA, 15 bp, Homo sapiens
aagaatactaaacaa

SEQ ID NO: 6584 - DNA, 15 bp, Homo sapiens
aaagaatactaaaca

SEQ ID NO: 6585 - DNA, 15 bp, Homo sapiens
taaagaatactaaac

SEQ ID NO: 6586 - DNA, 15 bp, Homo sapiens
gtaaagaatactaaa

SEQ ID NO: 6587 - DNA, 15 bp, Homo sapiens
agtaaagaatactaa

SEQ ID NO: 6588 - DNA, 15 bp, Homo sapiens
gagtaaagaatacta

SEQ ID NO: 6589 - DNA, 15 bp, Homo sapiens
tgagtaaagaatact

SEQ ID NO: 6590 - DNA, 15 bp, Homo sapiens
ttgagtaaagaatac

SEQ ID NO: 6591 - DNA, 15 bp, Homo sapiens
gttgagtaaagaata

SEQ ID NO: 6592 - DNA, 15 bp, Homo sapiens
ggttgagtaaagaat

SEQ ID NO: 6593 - DNA, 15 bp, Homo sapiens
gggttgagtaaagaa

SEQ ID NO: 6594 - DNA, 15 bp, Homo sapiens
agggttgagtaaaga

SEQ ID NO: 6595 - DNA, 15 bp, Homo sapiens
tagggttgagtaaag

SEQ ID NO: 6596 - DNA, 15 bp, Homo sapiens
atagggttgagtaaa

SEQ ID NO: 6597 - DNA, 15 bp, Homo sapiens
gatagggttgagtaa

SEQ ID NO: 6598 - DNA, 15 bp, Homo sapiens
ggatagggttgagta

SEQ ID NO: 6599 - DNA, 15 bp, Homo sapiens
tggatagggttgagt

SEQ ID NO: 6600 - DNA, 15 bp, Homo sapiens
atggatagggttgag

SEQ ID NO: 6601 - DNA, 15 bp, Homo sapiens
catggatagggttga

SEQ ID NO: 6602 - DNA, 15 bp, Homo sapiens
tcatggatagggttg

SEQ ID NO: 6603 - DNA, 15 bp, Homo sapiens
ttcatggatagggtt

SEQ ID NO: 6604 - DNA, 15 bp, Homo sapiens
cttcatggatagggt

SEQ ID NO: 6605 - DNA, 15 bp, Homo sapiens
acttcatggataggg

SEQ ID NO: 6606 - DNA, 15 bp, Homo sapiens
aacttcatggatagg

SEQ ID NO: 6607 - DNA, 15 bp, Homo sapiens
gaacttcatggatag

SEQ ID NO: 6608 - DNA, 15 bp, Homo sapiens
agaacttcatggata

SEQ ID NO: 6609 - DNA, 15 bp, Homo sapiens
aagaacttcatggat

SEQ ID NO: 6610 - DNA, 15 bp, Homo sapiens
gaagaacttcatgga

SEQ ID NO: 6611 - DNA, 15 bp, Homo sapiens
tgaagaacttcatgg

SEQ ID NO: 6612 - DNA, 15 bp, Homo sapiens
ttgaagaacttcatg

SEQ ID NO: 6613 - DNA, 15 bp, Homo sapiens
attgaagaacttcat

SEQ ID NO: 6614 - DNA, 15 bp, Homo sapiens
cattgaagaacttca

SEQ ID NO: 6615 - DNA, 15 bp, Homo sapiens
tcattgaagaacttc

SEQ ID NO: 6616 - DNA, 15 bp, Homo sapiens
ttcattgaagaactt

SEQ ID NO: 6617 - DNA, 15 bp, Homo sapiens
cttcattgaagaact

SEQ ID NO: 6618 - DNA, 15 bp, Homo sapiens
gcttcattgaagaac

SEQ ID NO: 6619 - DNA, 15 bp, Homo sapiens
agcttcattgaagaa

SEQ ID NO: 6620 - DNA, 15 bp, Homo sapiens
aagcttcattgaaga

SEQ ID NO: 6621 - DNA, 15 bp, Homo sapiens
aaagcttcattgaag

SEQ ID NO: 6622 - DNA, 15 bp, Homo sapiens
aaaagcttcattgaa

SEQ ID NO: 6623 - DNA, 15 bp, Homo sapiens
caaaagcttcattga

SEQ ID NO: 6624 - DNA, 15 bp, Homo sapiens
tcaaaagcttcattg

SEQ ID NO: 6625 - DNA, 15 bp, Homo sapiens
atcaaaagcttcatt

SEQ ID NO: 6626 - DNA, 15 bp, Homo sapiens
tatcaaaagcttcat

SEQ ID NO: 6627 - DNA, 15 bp, Homo sapiens
ttatcaaaagcttca

SEQ ID NO: 6628 - DNA, 15 bp, Homo sapiens
attatcaaaagcttc

SEQ ID NO: 6629 - DNA, 15 bp, Homo sapiens
aattatcaaaagctt

SEQ ID NO: 6630 - DNA, 15 bp, Homo sapiens
aaattatcaaaagct

SEQ ID NO: 6631 - DNA, 15 bp, Homo sapiens
taaattatcaaaagc

SEQ ID NO: 6632 - DNA, 15 bp, Homo sapiens
ataaattatcaaaag

SEQ ID NO: 6633 - DNA, 15 bp, Homo sapiens
aataaattatcaaaa

SEQ ID NO: 6634 - DNA, 15 bp, Homo sapiens
caataaattatcaaa

SEQ ID NO: 6635 - DNA, 15 bp, Homo sapiens
gcaataaattatcaa

SEQ ID NO: 6636 - DNA, 15 bp, Homo sapiens
tgcaataaattatca

SEQ ID NO: 6637 - DNA, 15 bp, Homo sapiens
ttgcaataaattatc

SEQ ID NO: 6638 - DNA, 15 bp, Homo sapiens
tttgcaataaattat

SEQ ID NO: 6639 - DNA, 15 bp, Homo sapiens
ttttgcaataaatta

SEQ ID NO: 6640 - DNA, 15 bp, Homo sapiens
attttgcaataaatt

SEQ ID NO: 6641 - DNA, 15 bp, Homo sapiens
tattttgcaataaat

SEQ ID NO: 6642 - DNA, 15 bp, Homo sapiens
gtattttgcaataaa

SEQ ID NO: 6643 - DNA, 15 bp, Homo sapiens
tgtattttgcaataa

SEQ ID NO: 6644 - DNA, 15 bp, Homo sapiens
atgtattttgcaata

SEQ ID NO: 6645 - DNA, 15 bp, Homo sapiens
aatgtattttgcaat

SEQ ID NO: 6646 - DNA, 15 bp, Homo sapiens
aaatgtattttgcaa

SEQ ID NO: 6647 - DNA, 15 bp, Homo sapiens
aaaatgtattttgca

SEQ ID NO: 6648 - DNA, 15 bp, Homo sapiens
gaaaatgtattttgc

SEQ ID NO: 6649 - DNA, 15 bp, Homo sapiens
ggaaaatgtattttg

SEQ ID NO: 6650 - DNA, 15 bp, Homo sapiens
tggaaaatgtatttt

SEQ ID NO: 6651 - DNA, 15 bp, Homo sapiens
gtggaaaatgtattt

SEQ ID NO: 6652 - DNA, 15 bp, Homo sapiens
tgtggaaaatgtatt

SEQ ID NO: 6653 - DNA, 15 bp, Homo sapiens
ttgtggaaaatgtat

SEQ ID NO: 6654 - DNA, 15 bp, Homo sapiens
tttgtggaaaatgta

SEQ ID NO: 6655 - DNA, 15 bp, Homo sapiens
ctttgtggaaaatgt

SEQ ID NO: 6656 - DNA, 15 bp, Homo sapiens
tctttgtggaaaatg

SEQ ID NO: 6657 - DNA, 15 bp, Homo sapiens
ttctttgtggaaaat

SEQ ID NO: 6658 - DNA, 15 bp, Homo sapiens
cttctttgtggaaaa

SEQ ID NO: 6659 - DNA, 15 bp, Homo sapiens
acttctttgtggaaa

SEQ ID NO: 6660 - DNA, 15 bp, Homo sapiens
gacttctttgtggaa

SEQ ID NO: 6661 - DNA, 15 bp, Homo sapiens
tgacttctttgtgga

SEQ ID NO: 6662 - DNA, 15 bp, Homo sapiens
atgacttctttgtgg

SEQ ID NO: 6663 - DNA, 15 bp, Homo sapiens
aatgacttctttgtg

SEQ ID NO: 6664 - DNA, 15 bp, Homo sapiens
taatgacttctttgt

SEQ ID NO: 6665 - DNA, 15 bp, Homo sapiens
ataatgacttctttg

SEQ ID NO: 6666 - DNA, 15 bp, Homo sapiens
cataatgacttcttt

SEQ ID NO: 6667 - DNA, 15 bp, Homo sapiens
tcataatgacttctt

SEQ ID NO: 6668 - DNA, 15 bp, Homo sapiens
atcataatgacttct

SEQ ID NO: 6669 - DNA, 15 bp, Homo sapiens
aatcataatgacttc

SEQ ID NO: 6670 - DNA, 15 bp, Homo sapiens
caatcataatgactt

SEQ ID NO: 6671 - DNA, 15 bp, Homo sapiens
ccaatcataatgact

SEQ ID NO: 6672 - DNA, 15 bp, Homo sapiens
accaatcataatgac

SEQ ID NO: 6673 - DNA, 15 bp, Homo sapiens
aaccaatcataatga

SEQ ID NO: 6674 - DNA, 15 bp, Homo sapiens
aaaccaatcataatg

SEQ ID NO: 6675 - DNA, 15 bp, Homo sapiens
caaaccaatcataat

SEQ ID NO: 6676 - DNA, 15 bp, Homo sapiens
tcaaaccaatcataa

SEQ ID NO: 6677 - DNA, 15 bp, Homo sapiens
ttcaaaccaatcata

SEQ ID NO: 6678 - DNA, 15 bp, Homo sapiens
gttcaaaccaatcat

SEQ ID NO: 6679 - DNA, 15 bp, Homo sapiens
agttcaaaccaatca

SEQ ID NO: 6680 - DNA, 15 bp, Homo sapiens
tagttcaaaccaatc

SEQ ID NO: 6681 - DNA, 15 bp, Homo sapiens
ctagttcaaaccaat

SEQ ID NO: 6682 - DNA, 15 bp, Homo sapiens
actagttcaaaccaa

SEQ ID NO: 6683 - DNA, 15 bp, Homo sapiens
cactagttcaaacca

SEQ ID NO: 6684 - DNA, 15 bp, Homo sapiens
ccactagttcaaacc

SEQ ID NO: 6685 - DNA, 15 bp, Homo sapiens
tccactagttcaaac

SEQ ID NO: 6686 - DNA, 15 bp, Homo sapiens
ttccactagttcaaa

SEQ ID NO: 6687 - DNA, 15 bp, Homo sapiens
gttccactagttcaa

SEQ ID NO: 6688 - DNA, 15 bp, Homo sapiens
tgttccactagttca

SEQ ID NO: 6689 - DNA, 15 bp, Homo sapiens
gtgttccactagttc

SEQ ID NO: 6690 - DNA, 15 bp, Homo sapiens
tgtgttccactagtt

SEQ ID NO: 6691 - DNA, 15 bp, Homo sapiens
ttgtgttccactagt

SEQ ID NO: 6692 - DNA, 15 bp, Homo sapiens
tttgtgttccactag

SEQ ID NO: 6693 - DNA, 15 bp, Homo sapiens
atttgtgttccacta

SEQ ID NO: 6694 - DNA, 15 bp, Homo sapiens
catttgtgttccact

SEQ ID NO: 6695 - DNA, 15 bp, Homo sapiens
acatttgtgttccac

SEQ ID NO: 6696 - DNA, 15 bp, Homo sapiens
cacatttgtgttcca

SEQ ID NO: 6697 - DNA, 15 bp, Homo sapiens
tcacatttgtgttcc

SEQ ID NO: 6698 - DNA, 15 bp, Homo sapiens
ctcacatttgtgttc

SEQ ID NO: 6699 - DNA, 15 bp, Homo sapiens
cctcacatttgtgtt

SEQ ID NO: 6700 - DNA, 15 bp, Homo sapiens
acctcacatttgtgt

SEQ ID NO: 6701 - DNA, 15 bp, Homo sapiens
aacctcacatttgtg

SEQ ID NO: 6702 - DNA, 15 bp, Homo sapiens
taacctcacatttgt

SEQ ID NO: 6703 - DNA, 15 bp, Homo sapiens
ataacctcacatttg

SEQ ID NO: 6704 - DNA, 15 bp, Homo sapiens
tataacctcacattt

SEQ ID NO: 6705 - DNA, 15 bp, Homo sapiens
ttataacctcacatt

SEQ ID NO: 6706 - DNA, 15 bp, Homo sapiens
tttataacctcacat

SEQ ID NO: 6707 - DNA, 15 bp, Homo sapiens
ctttataacctcaca

SEQ ID NO: 6708 - DNA, 15 bp, Homo sapiens
tctttataacctcac

SEQ ID NO: 6709 - DNA, 15 bp, Homo sapiens
ctctttataacctca

SEQ ID NO: 6710 - DNA, 15 bp, Homo sapiens
cctctttataacctc

SEQ ID NO: 6711 - DNA, 15 bp, Homo sapiens
acctctttataacct

SEQ ID NO: 6712 - DNA, 15 bp, Homo sapiens
aacctctttataacc

SEQ ID NO: 6713 - DNA, 15 bp, Homo sapiens
gaacctctttataac

SEQ ID NO: 6714 - DNA, 15 bp, Homo sapiens
cgaacctctttataa

SEQ ID NO: 6715 - DNA, 15 bp, Homo sapiens
gcgaacctctttata

SEQ ID NO: 6716 - DNA, 15 bp, Homo sapiens
ggcgaacctctttat

SEQ ID NO: 6717 - DNA, 15 bp, Homo sapiens
aggcgaacctcttta

SEQ ID NO: 6718 - DNA, 15 bp, Homo sapiens
aaggcgaacctcttt

SEQ ID NO: 6719 - DNA, 15 bp, Homo sapiens
taaggcgaacctctt

SEQ ID NO: 6720 - DNA, 15 bp, Homo sapiens
ctaaggcgaacctct

SEQ ID NO: 6721 - DNA, 15 bp, Homo sapiens
gctaaggcgaacctc

SEQ ID NO: 6722 - DNA, 15 bp, Homo sapiens
ggctaaggcgaacct

SEQ ID NO: 6723 - DNA, 15 bp, Homo sapiens
tggctaaggcgaacc

SEQ ID NO: 6724 - DNA, 15 bp, Homo sapiens
ctggctaaggcgaac

SEQ ID NO: 6725 - DNA, 15 bp, Homo sapiens
cctggctaaggcgaa

SEQ ID NO: 6726 - DNA, 15 bp, Homo sapiens
ccctggctaaggcga

SEQ ID NO: 6727 - DNA, 15 bp, Homo sapiens
cccctggctaaggcg

SEQ ID NO: 6728 - DNA, 15 bp, Homo sapiens
gcccctggctaaggc

SEQ ID NO: 6729 - DNA, 15 bp, Homo sapiens
agcccctggctaagg

SEQ ID NO: 6730 - DNA, 15 bp, Homo sapiens
gagcccctggctaag

SEQ ID NO: 6731 - DNA, 15 bp, Homo sapiens
ggagcccctggctaa

SEQ ID NO: 6732 - DNA, 15 bp, Homo sapiens
aggagcccctggcta

SEQ ID NO: 6733 - DNA, 15 bp, Homo sapiens
aaggagcccctggct

SEQ ID NO: 6734 - DNA, 15 bp, Homo sapiens
aaaggagcccctggc

SEQ ID NO: 6735 - DNA, 15 bp, Homo sapiens
taaaggagcccctgg

SEQ ID NO: 6736 - DNA, 15 bp, Homo sapiens
ctaaaggagcccctg

SEQ ID NO: 6737 - DNA, 15 bp, Homo sapiens
gctaaaggagcccct

SEQ ID NO: 6738 - DNA, 15 bp, Homo sapiens
agctaaaggagcccc

SEQ ID NO: 6739 - DNA, 15 bp, Homo sapiens
cagctaaaggagccc

SEQ ID NO: 6740 - DNA, 15 bp, Homo sapiens
gcagctaaaggagcc

SEQ ID NO: 6741 - DNA, 15 bp, Homo sapiens
tgcagctaaaggagc

SEQ ID NO: 6742 - DNA, 15 bp, Homo sapiens
ttgcagctaaaggag

SEQ ID NO: 6743 - DNA, 15 bp, Homo sapiens
tttgcagctaaagga

SEQ ID NO: 6744 - DNA, 15 bp, Homo sapiens
ctttgcagctaaagg

SEQ ID NO: 6745 - DNA, 15 bp, Homo sapiens
gctttgcagctaaag

SEQ ID NO: 6746 - DNA, 15 bp, Homo sapiens
tgctttgcagctaaa

SEQ ID NO: 6747 - DNA, 15 bp, Homo sapiens
ctgctttgcagctaa

SEQ ID NO: 6748 - DNA, 15 bp, Homo sapiens
actgctttgcagcta

SEQ ID NO: 6749 - DNA, 15 bp, Homo sapiens
aactgctttgcagct

SEQ ID NO: 6750 - DNA, 15 bp, Homo sapiens
aaactgctttgcagc

SEQ ID NO: 6751 - DNA, 15 bp, Homo sapiens
aaaactgctttgcag

SEQ ID NO: 6752 - DNA, 15 bp, Homo sapiens
aaaaactgctttgca

SEQ ID NO: 6753 - DNA, 15 bp, Homo sapiens
aaaaaactgctttgc

SEQ ID NO: 6754 - DNA, 15 bp, Homo sapiens
caaaaaactgctttg

SEQ ID NO: 6755 - DNA, 15 bp, Homo sapiens
gcaaaaaactgcttt

SEQ ID NO: 6756 - DNA, 15 bp, Homo sapiens
agcaaaaaactgctt

SEQ ID NO: 6757 - DNA, 15 bp, Homo sapiens
gagcaaaaaactgct

SEQ ID NO: 6758 - DNA, 15 bp, Homo sapiens
tgagcaaaaaactgc

SEQ ID NO: 6759 - DNA, 15 bp, Homo sapiens
ctgagcaaaaaactg

SEQ ID NO: 6760 - DNA, 15 bp, Homo sapiens
gctgagcaaaaaact

SEQ ID NO: 6761 - DNA, 15 bp, Homo sapiens
tgctgagcaaaaaac

SEQ ID NO: 6762 - DNA, 15 bp, Homo sapiens
ttgctgagcaaaaaa

SEQ ID NO: 6763 - DNA, 15 bp, Homo sapiens
gttgctgagcaaaaa

SEQ ID NO: 6764 - DNA, 15 bp, Homo sapiens
agttgctgagcaaaa

SEQ ID NO: 6765 - DNA, 15 bp, Homo sapiens
aagttgctgagcaaa

SEQ ID NO: 6766 - DNA, 15 bp, Homo sapiens
caagttgctgagcaa

SEQ ID NO: 6767 - DNA, 15 bp, Homo sapiens
ccaagttgctgagca

SEQ ID NO: 6768 - DNA, 15 bp, Homo sapiens
cccaagttgctgagc

SEQ ID NO: 6769 - DNA, 15 bp, Homo sapiens
ccccaagttgctgag

SEQ ID NO: 6770 - DNA, 15 bp, Homo sapiens
accccaagttgctga

SEQ ID NO: 6771 - DNA, 15 bp, Homo sapiens
taccccaagttgctg

SEQ ID NO: 6772 - DNA, 15 bp, Homo sapiens
ctaccccaagttgct

SEQ ID NO: 6773 - DNA, 15 bp, Homo sapiens
tctaccccaagttgc

SEQ ID NO: 6774 - DNA, 15 bp, Homo sapiens
ctctaccccaagttg

SEQ ID NO: 6775 - DNA, 15 bp, Homo sapiens
tctctaccccaagtt

SEQ ID NO: 6776 - DNA, 15 bp, Homo sapiens
atctctaccccaagt

SEQ ID NO: 6777 - DNA, 15 bp, Homo sapiens
gatctctaccccaag

SEQ ID NO: 6778 - DNA, 15 bp, Homo sapiens
tgatctctaccccaa

SEQ ID NO: 6779 - DNA, 15 bp, Homo sapiens
ctgatctctacccca

SEQ ID NO: 6780 - DNA, 15 bp, Homo sapiens
actgatctctacccc

SEQ ID NO: 6781 - DNA, 15 bp, Homo sapiens
cactgatctctaccc

SEQ ID NO: 6782 - DNA, 15 bp, Homo sapiens
acactgatctctacc

SEQ ID NO: 6783 - DNA, 15 bp, Homo sapiens
cacactgatctctac

SEQ ID NO: 6784 - DNA, 15 bp, Homo sapiens
acacactgatctcta

SEQ ID NO: 6785 - DNA, 15 bp, Homo sapiens
gacacactgatctct

SEQ ID NO: 6786 - DNA, 15 bp, Homo sapiens
agacacactgatctc

SEQ ID NO: 6787 - DNA, 15 bp, Homo sapiens
aagacacactgatct

SEQ ID NO: 6788 - DNA, 15 bp, Homo sapiens
caagacacactgatc

SEQ ID NO: 6789 - DNA, 15 bp, Homo sapiens
tcaagacacactgat

SEQ ID NO: 6790 - DNA, 15 bp, Homo sapiens
ttcaagacacactga

SEQ ID NO: 6791 - DNA, 15 bp, Homo sapiens
cttcaagacacactg

SEQ ID NO: 6792 - DNA, 15 bp, Homo sapiens
acttcaagacacact

SEQ ID NO: 6793 - DNA, 15 bp, Homo sapiens
aacttcaagacacac

SEQ ID NO: 6794 - DNA, 15 bp, Homo sapiens
aaacttcaagacaca

SEQ ID NO: 6795 - DNA, 15 bp, Homo sapiens
aaaacttcaagacac

SEQ ID NO: 6796 - DNA, 15 bp, Homo sapiens
caaaacttcaagaca

SEQ ID NO: 6797 - DNA, 15 bp, Homo sapiens
acaaaacttcaagac

SEQ ID NO: 6798 - DNA, 15 bp, Homo sapiens
aacaaaacttcaaga

SEQ ID NO: 6799 - DNA, 15 bp, Homo sapiens
aaacaaaacttcaag

SEQ ID NO: 6800 - DNA, 15 bp, Homo sapiens
aaaacaaaacttcaa

SEQ ID NO: 6801 - DNA, 15 bp, Homo sapiens
caaaacaaaacttca

SEQ ID NO: 6802 - DNA, 15 bp, Homo sapiens
gcaaaacaaaacttc

SEQ ID NO: 6803 - DNA, 15 bp, Homo sapiens
tgcaaaacaaaactt

SEQ ID NO: 6804 - DNA, 15 bp, Homo sapiens
ttgcaaaacaaaact

SEQ ID NO: 6805 - DNA, 15 bp, Homo sapiens
tttgcaaaacaaaac

SEQ ID NO: 6806 - DNA, 15 bp, Homo sapiens
ttttgcaaaacaaaa

SEQ ID NO: 6807 - DNA, 15 bp, Homo sapiens
gttttgcaaaacaaa

SEQ ID NO: 6808 - DNA, 15 bp, Homo sapiens
agttttgcaaaacaa

SEQ ID NO: 6809 - DNA, 15 bp, Homo sapiens
aagttttgcaaaaca

SEQ ID NO: 6810 - DNA, 15 bp, Homo sapiens
aaagttttgcaaaac

SEQ ID NO: 6811 - DNA, 15 bp, Homo sapiens
caaagttttgcaaaa

SEQ ID NO: 6812 - DNA, 15 bp, Homo sapiens
acaaagttttgcaaa

SEQ ID NO: 6813 - DNA, 15 bp, Homo sapiens
aacaaagttttgcaa

SEQ ID NO: 6814 - DNA, 15 bp, Homo sapiens
gaacaaagttttgca

SEQ ID NO: 6815 - DNA, 15 bp, Homo sapiens
agaacaaagttttgc

SEQ ID NO: 6816 - DNA, 15 bp, Homo sapiens
tagaacaaagttttg

SEQ ID NO: 6817 - DNA, 15 bp, Homo sapiens
ttagaacaaagtttt

SEQ ID NO: 6818 - DNA, 15 bp, Homo sapiens
attagaacaaagttt

SEQ ID NO: 6819 - DNA, 15 bp, Homo sapiens
cattagaacaaagtt

SEQ ID NO: 6820 - DNA, 15 bp, Homo sapiens
tcattagaacaaagt

SEQ ID NO: 6821 - DNA, 15 bp, Homo sapiens
ctcattagaacaaag

SEQ ID NO: 6822 - DNA, 15 bp, Homo sapiens
tctcattagaacaaa

SEQ ID NO: 6823 - DNA, 15 bp, Homo sapiens
ttctcattagaacaa

SEQ ID NO: 6824 - DNA, 15 bp, Homo sapiens
tttctcattagaaca

SEQ ID NO: 6825 - DNA, 15 bp, Homo sapiens
ctttctcattagaac

SEQ ID NO: 6826 - DNA, 15 bp, Homo sapiens
actttctcattagaa

SEQ ID NO: 6827 - DNA, 15 bp, Homo sapiens
gactttctcattaga

SEQ ID NO: 6828 - DNA, 15 bp, Homo sapiens
tgactttctcattag

SEQ ID NO: 6829 - DNA, 15 bp, Homo sapiens
ttgactttctcatta

SEQ ID NO: 6830 - DNA, 15 bp, Homo sapiens
cttgactttctcatt

SEQ ID NO: 6831 - DNA, 15 bp, Homo sapiens
acttgactttctcat

SEQ ID NO: 6832 - DNA, 15 bp, Homo sapiens
gacttgactttctca

SEQ ID NO: 6833 - DNA, 15 bp, Homo sapiens
agacttgactttctc

SEQ ID NO: 6834 - DNA, 15 bp, Homo sapiens
aagacttgactttct

SEQ ID NO: 6835 - DNA, 15 bp, Homo sapiens
taagacttgactttc

SEQ ID NO: 6836 - DNA, 15 bp, Homo sapiens
ctaagacttgacttt

SEQ ID NO: 6837 - DNA, 15 bp, Homo sapiens
cctaagacttgactt

SEQ ID NO: 6838 - DNA, 15 bp, Homo sapiens
tcctaagacttgact

SEQ ID NO: 6839 - DNA, 15 bp, Homo sapiens
ctcctaagacttgac

SEQ ID NO: 6840 - DNA, 15 bp, Homo sapiens
cctcctaagacttga

SEQ ID NO: 6841 - DNA, 15 bp, Homo sapiens
tcctcctaagacttg

SEQ ID NO: 6842 - DNA, 15 bp, Homo sapiens
ttcctcctaagactt

SEQ ID NO: 6843 - DNA, 15 bp, Homo sapiens
attcctcctaagact

SEQ ID NO: 6844 - DNA, 15 bp, Homo sapiens
cattcctcctaagac

SEQ ID NO: 6845 - DNA, 15 bp, Homo sapiens
acattcctcctaaga

SEQ ID NO: 6846 - DNA, 15 bp, Homo sapiens
tacattcctcctaag

SEQ ID NO: 6847 - DNA, 15 bp, Homo sapiens
atacattcctcctaa

SEQ ID NO: 6848 - DNA, 15 bp, Homo sapiens
tatacattcctccta

SEQ ID NO: 6849 - DNA, 15 bp, Homo sapiens
ctatacattcctcct

SEQ ID NO: 6850 - DNA, 15 bp, Homo sapiens
actatacattcctcc

SEQ ID NO: 6851 - DNA, 15 bp, Homo sapiens
tactatacattcctc

SEQ ID NO: 6852 - DNA, 15 bp, Homo sapiens
ctactatacattcct

SEQ ID NO: 6853 - DNA, 15 bp, Homo sapiens
actactatacattcc

SEQ ID NO: 6854 - DNA, 15 bp, Homo sapiens
aactactatacattc

SEQ ID NO: 6855 - DNA, 15 bp, Homo sapiens
caactactatacatt

SEQ ID NO: 6856 - DNA, 15 bp, Homo sapiens
tcaactactatacat

SEQ ID NO: 6857 - DNA, 15 bp, Homo sapiens
ctcaactactataca

SEQ ID NO: 6858 - DNA, 15 bp, Homo sapiens
actcaactactatac

SEQ ID NO: 6859 - DNA, 15 bp, Homo sapiens
cactcaactactata

SEQ ID NO: 6860 - DNA, 15 bp, Homo sapiens
acactcaactactat

SEQ ID NO: 6861 - DNA, 15 bp, Homo sapiens
aacactcaactacta

SEQ ID NO: 6862 - DNA, 15 bp, Homo sapiens
aaacactcaactact

SEQ ID NO: 6863 - DNA, 15 bp, Homo sapiens
caaacactcaactac

SEQ ID NO: 6864 - DNA, 15 bp, Homo sapiens
acaaacactcaacta

SEQ ID NO: 6865 - DNA, 15 bp, Homo sapiens
tacaaacactcaact

SEQ ID NO: 6866 - DNA, 15 bp, Homo sapiens
atacaaacactcaac

SEQ ID NO: 6867 - DNA, 15 bp, Homo sapiens
aatacaaacactcaa

SEQ ID NO: 6868 - DNA, 15 bp, Homo sapiens
taatacaaacactca

SEQ ID NO: 6869 - DNA, 15 bp, Homo sapiens
ttaatacaaacactc

SEQ ID NO: 6870 - DNA, 15 bp, Homo sapiens
gttaatacaaacact

SEQ ID NO: 6871 - DNA, 15 bp, Homo sapiens
tgttaatacaaacac

SEQ ID NO: 6872 - DNA, 15 bp, Homo sapiens
gtgttaatacaaaca

SEQ ID NO: 6873 - DNA, 15 bp, Homo sapiens
agtgttaatacaaac

SEQ ID NO: 6874 - DNA, 15 bp, Homo sapiens
cagtgttaatacaaa

SEQ ID NO: 6875 - DNA, 15 bp, Homo sapiens
acagtgttaatacaa

SEQ ID NO: 6876 - DNA, 15 bp, Homo sapiens
aacagtgttaataca

SEQ ID NO: 6877 - DNA, 15 bp, Homo sapiens
aaacagtgttaatac

SEQ ID NO: 6878 - DNA, 15 bp, Homo sapiens
aaaacagtgttaata

SEQ ID NO: 6879 - DNA, 15 bp, Homo sapiens
gaaaacagtgttaat

SEQ ID NO: 6880 - DNA, 15 bp, Homo sapiens
tgaaaacagtgttaa

SEQ ID NO: 6881 - DNA, 15 bp, Homo sapiens
atgaaaacagtgtta

SEQ ID NO: 6882 - DNA, 15 bp, Homo sapiens
tatgaaaacagtgtt

SEQ ID NO: 6883 - DNA, 15 bp, Homo sapiens
atatgaaaacagtgt

SEQ ID NO: 6884 - DNA, 15 bp, Homo sapiens
aatatgaaaacagtg

SEQ ID NO: 6885 - DNA, 15 bp, Homo sapiens
aaatatgaaaacagt

SEQ ID NO: 6886 - DNA, 15 bp, Homo sapiens
aaaatatgaaaacag

SEQ ID NO: 6887 - DNA, 15 bp, Homo sapiens
gaaaatatgaaaaca

SEQ ID NO: 6888 - DNA, 15 bp, Homo sapiens
ggaaaatatgaaaac

SEQ ID NO: 6889 - DNA, 15 bp, Homo sapiens
aggaaaatatgaaaa

SEQ ID NO: 6890 - DNA, 15 bp, Homo sapiens
aaggaaaatatgaaa

SEQ ID NO: 6891 - DNA, 15 bp, Homo sapiens
aaaggaaaatatgaa

SEQ ID NO: 6892 - DNA, 15 bp, Homo sapiens
aaaaggaaaatatga

SEQ ID NO: 6893 - DNA, 15 bp, Homo sapiens
taaaaggaaaatatg

SEQ ID NO: 6894 - DNA, 15 bp, Homo sapiens
ataaaaggaaaatat

SEQ ID NO: 6895 - DNA, 15 bp, Homo sapiens
cataaaaggaaaata

SEQ ID NO: 6896 - DNA, 15 bp, Homo sapiens
acataaaaggaaaat

SEQ ID NO: 6897 - DNA, 15 bp, Homo sapiens
gacataaaaggaaaa

SEQ ID NO: 6898 - DNA, 15 bp, Homo sapiens
agacataaaaggaaa

SEQ ID NO: 6899 - DNA, 15 bp, Homo sapiens
gagacataaaaggaa

SEQ ID NO: 6900 - DNA, 15 bp, Homo sapiens
agagacataaaagga

SEQ ID NO: 6901 - DNA, 15 bp, Homo sapiens
cagagacataaaagg

SEQ ID NO: 6902 - DNA, 15 bp, Homo sapiens
tcagagacataaaag

SEQ ID NO: 6903 - DNA, 15 bp, Homo sapiens
atcagagacataaaa

SEQ ID NO: 6904 - DNA, 15 bp, Homo sapiens
aatcagagacataaa

SEQ ID NO: 6905 - DNA, 15 bp, Homo sapiens
aaatcagagacataa

SEQ ID NO: 6906 - DNA, 15 bp, Homo sapiens
aaaatcagagacata

SEQ ID NO: 6907 - DNA, 15 bp, Homo sapiens
aaaaatcagagacat

SEQ ID NO: 6908 - DNA, 15 bp, Homo sapiens
gaaaaatcagagaca

SEQ ID NO: 6909 - DNA, 15 bp, Homo sapiens
agaaaaatcagagac

SEQ ID NO: 6910 - DNA, 15 bp, Homo sapiens
cagaaaaatcagaga

SEQ ID NO: 6911 - DNA, 15 bp, Homo sapiens
tcagaaaaatcagag

SEQ ID NO: 6912 - DNA, 15 bp, Homo sapiens
ttcagaaaaatcaga

SEQ ID NO: 6913 - DNA, 15 bp, Homo sapiens
cttcagaaaaatcag

SEQ ID NO: 6914 - DNA, 15 bp, Homo sapiens
tcttcagaaaaatca

SEQ ID NO: 6915 - DNA, 15 bp, Homo sapiens
gtcttcagaaaaatc

SEQ ID NO: 6916 - DNA, 15 bp, Homo sapiens
tgtcttcagaaaaat

SEQ ID NO: 6917 - DNA, 15 bp, Homo sapiens
ttgtcttcagaaaaa

SEQ ID NO: 6918 - DNA, 15 bp, Homo sapiens
cttgtcttcagaaaa

SEQ ID NO: 6919 - DNA, 15 bp, Homo sapiens
acttgtcttcagaaa

SEQ ID NO: 6920 - DNA, 15 bp, Homo sapiens
aacttgtcttcagaa

SEQ ID NO: 6921 - DNA, 15 bp, Homo sapiens
gaacttgtcttcaga

SEQ ID NO: 6922 - DNA, 15 bp, Homo sapiens
tgaacttgtcttcag

SEQ ID NO: 6923 - DNA, 15 bp, Homo sapiens
ttgaacttgtcttca

SEQ ID NO: 6924 - DNA, 15 bp, Homo sapiens
cttgaacttgtcttc

SEQ ID NO: 6925 - DNA, 15 bp, Homo sapiens
ccttgaacttgtctt

SEQ ID NO: 6926 - DNA, 15 bp, Homo sapiens
tccttgaacttgtct

SEQ ID NO: 6927 - DNA, 15 bp, Homo sapiens
ttccttgaacttgtc

SEQ ID NO: 6928 - DNA, 15 bp, Homo sapiens
attccttgaacttgt

SEQ ID NO: 6929 - DNA, 15 bp, Homo sapiens
tattccttgaacttg

SEQ ID NO: 6930 - DNA, 15 bp, Homo sapiens
atattccttgaactt

SEQ ID NO: 6931 - DNA, 15 bp, Homo sapiens
tatattccttgaact

SEQ ID NO: 6932 - DNA, 15 bp, Homo sapiens
atatattccttgaac

SEQ ID NO: 6933 - DNA, 15 bp, Homo sapiens
aatatattccttgaa

SEQ ID NO: 6934 - DNA, 15 bp, Homo sapiens
aaatatattccttga

SEQ ID NO: 6935 - DNA, 15 bp, Homo sapiens
gaaatatattccttg

SEQ ID NO: 6936 - DNA, 15 bp, Homo sapiens
agaaatatattcctt

SEQ ID NO: 6937 - DNA, 15 bp, Homo sapiens
gagaaatatattcct

SEQ ID NO: 6938 - DNA, 15 bp, Homo sapiens
agagaaatatattcc

SEQ ID NO: 6939 - DNA, 15 bp, Homo sapiens
cagagaaatatattc

SEQ ID NO: 6940 - DNA, 15 bp, Homo sapiens
acagagaaatatatt

SEQ ID NO: 6941 - DNA, 15 bp, Homo sapiens
cacagagaaatatat

SEQ ID NO: 6942 - DNA, 15 bp, Homo sapiens
ccacagagaaatata

SEQ ID NO: 6943 - DNA, 15 bp, Homo sapiens
cccacagagaaatat

SEQ ID NO: 6944 - DNA, 15 bp, Homo sapiens
ccccacagagaaata

SEQ ID NO: 6945 - DNA, 15 bp, Homo sapiens
gccccacagagaaat

SEQ ID NO: 6946 - DNA, 15 bp, Homo sapiens
tgccccacagagaaa

SEQ ID NO: 6947 - DNA, 15 bp, Homo sapiens
ttgccccacagagaa

SEQ ID NO: 6948 - DNA, 15 bp, Homo sapiens
gttgccccacagaga

SEQ ID NO: 6949 - DNA, 15 bp, Homo sapiens
tgttgccccacagag

SEQ ID NO: 6950 - DNA, 15 bp, Homo sapiens
ctgttgccccacaga

SEQ ID NO: 6951 - DNA, 15 bp, Homo sapiens
tctgttgccccacag

SEQ ID NO: 6952 - DNA, 15 bp, Homo sapiens
atctgttgccccaca

SEQ ID NO: 6953 - DNA, 15 bp, Homo sapiens
tatctgttgccccac

SEQ ID NO: 6954 - DNA, 15 bp, Homo sapiens
gtatctgttgcccca

SEQ ID NO: 6955 - DNA, 15 bp, Homo sapiens
tgtatctgttgcccc

SEQ ID NO: 6956 - DNA, 15 bp, Homo sapiens
ctgtatctgttgccc

SEQ ID NO: 6957 - DNA, 15 bp, Homo sapiens
actgtatctgttgcc

SEQ ID NO: 6958 - DNA, 15 bp, Homo sapiens
aactgtatctgttgc

SEQ ID NO: 6959 - DNA, 15 bp, Homo sapiens
aaactgtatctgttg

SEQ ID NO: 6960 - DNA, 15 bp, Homo sapiens
aaaactgtatctgtt

SEQ ID NO: 6961 - DNA, 15 bp, Homo sapiens
aaaaactgtatctgt

SEQ ID NO: 6962 - DNA, 15 bp, Homo sapiens
aaaaaactgtatctg

SEQ ID NO: 6963 - DNA, 15 bp, Homo sapiens
gaaaaaactgtatct

SEQ ID NO: 6964 - DNA, 15 bp, Homo sapiens
tgaaaaaactgtatc

SEQ ID NO: 6965 - DNA, 15 bp, Homo sapiens
gtgaaaaaactgtat

SEQ ID NO: 6966 - DNA, 15 bp, Homo sapiens
agtgaaaaaactgta

SEQ ID NO: 6967 - DNA, 15 bp, Homo sapiens
aagtgaaaaaactgt

SEQ ID NO: 6968 - DNA, 15 bp, Homo sapiens
aaagtgaaaaaactg

SEQ ID NO: 6969 - DNA, 15 bp, Homo sapiens
aaaagtgaaaaaact

SEQ ID NO: 6970 - DNA, 15 bp, Homo sapiens
gaaaagtgaaaaaac

SEQ ID NO: 6971 - DNA, 15 bp, Homo sapiens
ggaaaagtgaaaaaa

SEQ ID NO: 6972 - DNA, 15 bp, Homo sapiens
aggaaaagtgaaaaa

SEQ ID NO: 6973 - DNA, 15 bp, Homo sapiens
gaggaaaagtgaaaa

SEQ ID NO: 6974 - DNA, 15 bp, Homo sapiens
tgaggaaaagtgaaa

SEQ ID NO: 6975 - DNA, 15 bp, Homo sapiens
ttgaggaaaagtgaa

SEQ ID NO: 6976 - DNA, 15 bp, Homo sapiens
attgaggaaaagtga

SEQ ID NO: 6977 - DNA, 15 bp, Homo sapiens
aattgaggaaaagtg

SEQ ID NO: 6978 - DNA, 15 bp, Homo sapiens
aaattgaggaaaagt

SEQ ID NO: 6979 - DNA, 15 bp, Homo sapiens
aaaattgaggaaaag

SEQ ID NO: 6980 - DNA, 15 bp, Homo sapiens
taaaattgaggaaaa

SEQ ID NO: 6981 - DNA, 15 bp, Homo sapiens
ctaaaattgaggaaa

SEQ ID NO: 6982 - DNA, 15 bp, Homo sapiens
actaaaattgaggaa

SEQ ID NO: 6983 - DNA, 15 bp, Homo sapiens
gactaaaattgagga

SEQ ID NO: 6984 - DNA, 15 bp, Homo sapiens
agactaaaattgagg

SEQ ID NO: 6985 - DNA, 15 bp, Homo sapiens
gagactaaaattgag

SEQ ID NO: 6986 - DNA, 15 bp, Homo sapiens
ggagactaaaattga

SEQ ID NO: 6987 - DNA, 15 bp, Homo sapiens
aggagactaaaattg

SEQ ID NO: 6988 - DNA, 15 bp, Homo sapiens
aaggagactaaaatt

SEQ ID NO: 6989 - DNA, 15 bp, Homo sapiens
taaggagactaaaat

SEQ ID NO: 6990 - DNA, 15 bp, Homo sapiens
gtaaggagactaaaa

SEQ ID NO: 6991 - DNA, 15 bp, Homo sapiens
tgtaaggagactaaa

SEQ ID NO: 6992 - DNA, 15 bp, Homo sapiens
gtgtaaggagactaa

SEQ ID NO: 6993 - DNA, 15 bp, Homo sapiens
agtgtaaggagacta

SEQ ID NO: 6994 - DNA, 15 bp, Homo sapiens
gagtgtaaggagact

SEQ ID NO: 6995 - DNA, 15 bp, Homo sapiens
agagtgtaaggagac

SEQ ID NO: 6996 - DNA, 15 bp, Homo sapiens
cagagtgtaaggaga

SEQ ID NO: 6997 - DNA, 15 bp, Homo sapiens
ccagagtgtaaggag

SEQ ID NO: 6998 - DNA, 15 bp, Homo sapiens
cccagagtgtaagga

SEQ ID NO: 6999 - DNA, 15 bp, Homo sapiens
tcccagagtgtaagg

SEQ ID NO: 7000 - DNA, 15 bp, Homo sapiens
ctcccagagtgtaag

SEQ ID NO: 7001 - DNA, 15 bp, Homo sapiens
cctcccagagtgtaa

SEQ ID NO: 7002 - DNA, 15 bp, Homo sapiens
tcctcccagagtgta

SEQ ID NO: 7003 - DNA, 15 bp, Homo sapiens
atcctcccagagtgt

SEQ ID NO: 7004 - DNA, 15 bp, Homo sapiens
aatcctcccagagtg

SEQ ID NO: 7005 - DNA, 15 bp, Homo sapiens
taatcctcccagagt

SEQ ID NO: 7006 - DNA, 15 bp, Homo sapiens
ttaatcctcccagag

SEQ ID NO: 7007 - DNA, 15 bp, Homo sapiens
gttaatcctcccaga

SEQ ID NO: 7008 - DNA, 15 bp, Homo sapiens
agttaatcctcccag

SEQ ID NO: 7009 - DNA, 15 bp, Homo sapiens
aagttaatcctccca

SEQ ID NO: 7010 - DNA, 15 bp, Homo sapiens
caagttaatcctccc

SEQ ID NO: 7011 - DNA, 15 bp, Homo sapiens
tcaagttaatcctcc

SEQ ID NO: 7012 - DNA, 15 bp, Homo sapiens
gtcaagttaatcctc

SEQ ID NO: 7013 - DNA, 15 bp, Homo sapiens
tgtcaagttaatcct

SEQ ID NO: 7014 - DNA, 15 bp, Homo sapiens
ttgtcaagttaatcc

SEQ ID NO: 7015 - DNA, 15 bp, Homo sapiens
tttgtcaagttaatc

SEQ ID NO: 7016 - DNA, 15 bp, Homo sapiens
atttgtcaagttaat

SEQ ID NO: 7017 - DNA, 15 bp, Homo sapiens
catttgtcaagttaa

SEQ ID NO: 7018 - DNA, 15 bp, Homo sapiens
tcatttgtcaagtta

SEQ ID NO: 7019 - DNA, 15 bp, Homo sapiens
atcatttgtcaagtt

SEQ ID NO: 7020 - DNA, 15 bp, Homo sapiens
tatcatttgtcaagt

SEQ ID NO: 7021 - DNA, 15 bp, Homo sapiens
gtatcatttgtcaag

SEQ ID NO: 7022 - DNA, 15 bp, Homo sapiens
ggtatcatttgtcaa

SEQ ID NO: 7023 - DNA, 15 bp, Homo sapiens
aggtatcatttgtca

SEQ ID NO: 7024 - DNA, 15 bp, Homo sapiens
aaggtatcatttgtc

SEQ ID NO: 7025 - DNA, 15 bp, Homo sapiens
taaggtatcatttgt

SEQ ID NO: 7026 - DNA, 15 bp, Homo sapiens
ctaaggtatcatttg

SEQ ID NO: 7027 - DNA, 15 bp, Homo sapiens
actaaggtatcattt

SEQ ID NO: 7028 - DNA, 15 bp, Homo sapiens
cactaaggtatcatt

SEQ ID NO: 7029 - DNA, 15 bp, Homo sapiens
tcactaaggtatcat

SEQ ID NO: 7030 - DNA, 15 bp, Homo sapiens
ttcactaaggtatca

SEQ ID NO: 7031 - DNA, 15 bp, Homo sapiens
attcactaaggtatc

SEQ ID NO: 7032 - DNA, 15 bp, Homo sapiens
tattcactaaggtat

SEQ ID NO: 7033 - DNA, 15 bp, Homo sapiens
ttattcactaaggta

SEQ ID NO: 7034 - DNA, 15 bp, Homo sapiens
gttattcactaaggt

SEQ ID NO: 7035 - DNA, 15 bp, Homo sapiens
agttattcactaagg

SEQ ID NO: 7036 - DNA, 15 bp, Homo sapiens
cagttattcactaag

SEQ ID NO: 7037 - DNA, 15 bp, Homo sapiens
tcagttattcactaa

SEQ ID NO: 7038 - DNA, 15 bp, Homo sapiens
atcagttattcacta

SEQ ID NO: 7039 - DNA, 15 bp, Homo sapiens
aatcagttattcact

SEQ ID NO: 7040 - DNA, 15 bp, Homo sapiens
taatcagttattcac

SEQ ID NO: 7041 - DNA, 15 bp, Homo sapiens
ataatcagttattca

SEQ ID NO: 7042 - DNA, 15 bp, Homo sapiens
aataatcagttattc

SEQ ID NO: 7043 - DNA, 15 bp, Homo sapiens
aaataatcagttatt

SEQ ID NO: 7044 - DNA, 15 bp, Homo sapiens
aaaataatcagttat

SEQ ID NO: 7045 - DNA, 15 bp, Homo sapiens
aaaaataatcagtta

SEQ ID NO: 7046 - DNA, 15 bp, Homo sapiens
taaaaataatcagtt

SEQ ID NO: 7047 - DNA, 15 bp, Homo sapiens
ataaaaataatcagt

SEQ ID NO: 7048 - DNA, 15 bp, Homo sapiens
gataaaaataatcag

SEQ ID NO: 7049 - DNA, 15 bp, Homo sapiens
tgataaaaataatca

SEQ ID NO: 7050 - DNA, 15 bp, Homo sapiens
ttgataaaaataatc

SEQ ID NO: 7051 - DNA, 15 bp, Homo sapiens
tttgataaaaataat

SEQ ID NO: 7052 - DNA, 15 bp, Homo sapiens
ttttgataaaaataa

SEQ ID NO: 7053 - DNA, 15 bp, Homo sapiens
attttgataaaaata

SEQ ID NO: 7054 - DNA, 15 bp, Homo sapiens
gattttgataaaaat

SEQ ID NO: 7055 - DNA, 15 bp, Homo sapiens
tgattttgataaaaa

SEQ ID NO: 7056 - DNA, 15 bp, Homo sapiens
gtgattttgataaaa

SEQ ID NO: 7057 - DNA, 15 bp, Homo sapiens
agtgattttgataaa

SEQ ID NO: 7058 - DNA, 15 bp, Homo sapiens
gagtgattttgataa

SEQ ID NO: 7059 - DNA, 15 bp, Homo sapiens
tgagtgattttgata

SEQ ID NO: 7060 - DNA, 15 bp, Homo sapiens
gtgagtgattttgat

SEQ ID NO: 7061 - DNA, 15 bp, Homo sapiens
tgtgagtgattttga

SEQ ID NO: 7062 - DNA, 15 bp, Homo sapiens
atgtgagtgattttg

SEQ ID NO: 7063 - DNA, 15 bp, Homo sapiens
catgtgagtgatttt

SEQ ID NO: 7064 - DNA, 15 bp, Homo sapiens
acatgtgagtgattt

SEQ ID NO: 7065 - DNA, 15 bp, Homo sapiens
cacatgtgagtgatt

SEQ ID NO: 7066 - DNA, 15 bp, Homo sapiens
acacatgtgagtgat

SEQ ID NO: 7067 - DNA, 15 bp, Homo sapiens
aacacatgtgagtga

SEQ ID NO: 7068 - DNA, 15 bp, Homo sapiens
caacacatgtgagtg

SEQ ID NO: 7069 - DNA, 15 bp, Homo sapiens
ccaacacatgtgagt

SEQ ID NO: 7070 - DNA, 15 bp, Homo sapiens
accaacacatgtgag

SEQ ID NO: 7071 - DNA, 15 bp, Homo sapiens
aaccaacacatgtga

SEQ ID NO: 7072 - DNA, 15 bp, Homo sapiens
aaaccaacacatgtg

SEQ ID NO: 7073 - DNA, 15 bp, Homo sapiens
taaaccaacacatgt

SEQ ID NO: 7074 - DNA, 15 bp, Homo sapiens
gtaaaccaacacatg

SEQ ID NO: 7075 - DNA, 15 bp, Homo sapiens
agtaaaccaacacat

SEQ ID NO: 7076 - DNA, 15 bp, Homo sapiens
cagtaaaccaacaca

SEQ ID NO: 7077 - DNA, 15 bp, Homo sapiens
tcagtaaaccaacac

SEQ ID NO: 7078 - DNA, 15 bp, Homo sapiens
ctcagtaaaccaaca

SEQ ID NO: 7079 - DNA, 15 bp, Homo sapiens
actcagtaaaccaac

SEQ ID NO: 7080 - DNA, 15 bp, Homo sapiens
cactcagtaaaccaa

SEQ ID NO: 7081 - DNA, 15 bp, Homo sapiens
gcactcagtaaacca

SEQ ID NO: 7082 - DNA, 15 bp, Homo sapiens
ggcactcagtaaacc

SEQ ID NO: 7083 - DNA, 15 bp, Homo sapiens
aggcactcagtaaac

SEQ ID NO: 7084 - DNA, 15 bp, Homo sapiens
aaggcactcagtaaa

SEQ ID NO: 7085 - DNA, 15 bp, Homo sapiens
aaaggcactcagtaa

SEQ ID NO: 7086 - DNA, 15 bp, Homo sapiens
aaaaggcactcagta

SEQ ID NO: 7087 - DNA, 15 bp, Homo sapiens
aaaaaggcactcagt

SEQ ID NO: 7088 - DNA, 15 bp, Homo sapiens
caaaaaggcactcag

SEQ ID NO: 7089 - DNA, 15 bp, Homo sapiens
ccaaaaaggcactca

SEQ ID NO: 7090 - DNA, 15 bp, Homo sapiens
tccaaaaaggcactc

SEQ ID NO: 7091 - DNA, 15 bp, Homo sapiens
atccaaaaaggcact

SEQ ID NO: 7092 - DNA, 15 bp, Homo sapiens
catccaaaaaggcac

SEQ ID NO: 7093 - DNA, 15 bp, Homo sapiens
tcatccaaaaaggca

SEQ ID NO: 7094 - DNA, 15 bp, Homo sapiens
ctcatccaaaaaggc

SEQ ID NO: 7095 - DNA, 15 bp, Homo sapiens
actcatccaaaaagg

SEQ ID NO: 7096 - DNA, 15 bp, Homo sapiens
cactcatccaaaaag

SEQ ID NO: 7097 - DNA, 15 bp, Homo sapiens
acactcatccaaaaa

SEQ ID NO: 7098 - DNA, 15 bp, Homo sapiens
aacactcatccaaaa

SEQ ID NO: 7099 - DNA, 15 bp, Homo sapiens
aaacactcatccaaa

SEQ ID NO: 7100 - DNA, 15 bp, Homo sapiens
aaaacactcatccaa

SEQ ID NO: 7101 - DNA, 15 bp, Homo sapiens
taaaacactcatcca

SEQ ID NO: 7102 - DNA, 15 bp, Homo sapiens
ataaaacactcatcc

SEQ ID NO: 7103 - DNA, 15 bp, Homo sapiens
cataaaacactcatc

SEQ ID NO: 7104 - DNA, 15 bp, Homo sapiens
gcataaaacactcat

SEQ ID NO: 7105 - DNA, 15 bp, Homo sapiens
ggcataaaacactca

SEQ ID NO: 7106 - DNA, 15 bp, Homo sapiens
tggcataaaacactc

SEQ ID NO: 7107 - DNA, 15 bp, Homo sapiens
atggcataaaacact

SEQ ID NO: 7108 - DNA, 15 bp, Homo sapiens
tatggcataaaacac

SEQ ID NO: 7109 - DNA, 15 bp, Homo sapiens
atatggcataaaaca

SEQ ID NO: 7110 - DNA, 15 bp, Homo sapiens
catatggcataaaac

SEQ ID NO: 7111 - DNA, 15 bp, Homo sapiens
acatatggcataaaa

SEQ ID NO: 7112 - DNA, 15 bp, Homo sapiens
cacatatggcataaa

SEQ ID NO: 7113 - DNA, 15 bp, Homo sapiens
acacatatggcataa

SEQ ID NO: 7114 - DNA, 15 bp, Homo sapiens
aacacatatggcata

SEQ ID NO: 7115 - DNA, 15 bp, Homo sapiens
aaacacatatggcat

SEQ ID NO: 7116 - DNA, 15 bp, Homo sapiens
aaaacacatatggca

SEQ ID NO: 7117 - DNA, 15 bp, Homo sapiens
aaaaacacatatggc

SEQ ID NO: 7118 - DNA, 15 bp, Homo sapiens
taaaaacacatatgg

SEQ ID NO: 7119 - DNA, 15 bp, Homo sapiens
ttaaaaacacatatg

SEQ ID NO: 7120 - DNA, 15 bp, Homo sapiens
attaaaaacacatat

SEQ ID NO: 7121 - DNA, 15 bp, Homo sapiens
cattaaaaacacata

SEQ ID NO: 7122 - DNA, 15 bp, Homo sapiens
ccattaaaaacacat

SEQ ID NO: 7123 - DNA, 15 bp, Homo sapiens
tccattaaaaacaca

SEQ ID NO: 7124 - DNA, 15 bp, Homo sapiens
ttccattaaaaacac

SEQ ID NO: 7125 - DNA, 15 bp, Homo sapiens
tttccattaaaaaca

SEQ ID NO: 7126 - DNA, 15 bp, Homo sapiens
atttccattaaaaac

SEQ ID NO: 7127 - DNA, 15 bp, Homo sapiens
aatttccattaaaaa

SEQ ID NO: 7128 - DNA, 15 bp, Homo sapiens
taatttccattaaaa

SEQ ID NO: 7129 - DNA, 15 bp, Homo sapiens
ttaatttccattaaa

SEQ ID NO: 7130 - DNA, 15 bp, Homo sapiens
tttaatttccattaa

SEQ ID NO: 7131 - DNA, 15 bp, Homo sapiens
ctttaatttccatta

SEQ ID NO: 7132 - DNA, 15 bp, Homo sapiens
actttaatttccatt

SEQ ID NO: 7133 - DNA, 15 bp, Homo sapiens
cactttaatttccat

SEQ ID NO: 7134 - DNA, 15 bp, Homo sapiens
acactttaatttcca

SEQ ID NO: 7135 - DNA, 15 bp, Homo sapiens
tttcttaatccagtc

SEQ ID NO: 7136 - DNA, 15 bp, Homo sapiens
ttttcttaatccagt

SEQ ID NO: 7137 - DNA, 15 bp, Homo sapiens
attttcttaatccag

SEQ ID NO: 7138 - DNA, 15 bp, Homo sapiens
cattttcttaatcca

SEQ ID NO: 7139 - DNA, 15 bp, Homo sapiens
acattttcttaatcc

SEQ ID NO: 7140 - DNA, 15 bp, Homo sapiens
cacattttcttaatc

SEQ ID NO: 7141 - DNA, 15 bp, Homo sapiens
ccacattttcttaat

SEQ ID NO: 7142 - DNA, 15 bp, Homo sapiens
gccacattttcttaa

SEQ ID NO: 7143 - DNA, 15 bp, Homo sapiens
tgccacattttctta

SEQ ID NO: 7144 - DNA, 15 bp, Homo sapiens
gtgccacattttctt

SEQ ID NO: 7145 - DNA, 15 bp, Homo sapiens
tgtgccacattttct

SEQ ID NO: 7146 - DNA, 15 bp, Homo sapiens
atgtgccacattttc

SEQ ID NO: 7147 - DNA, 15 bp, Homo sapiens
tatgtgccacatttt

SEQ ID NO: 7148 - DNA, 15 bp, Homo sapiens
atatgtgccacattt

SEQ ID NO: 7149 - DNA, 15 bp, Homo sapiens
tatatgtgccacatt

SEQ ID NO: 7150 - DNA, 15 bp, Homo sapiens
gtatatgtgccacat

SEQ ID NO: 7151 - DNA, 15 bp, Homo sapiens
tgtatatgtgccaca

SEQ ID NO: 7152 - DNA, 15 bp, Homo sapiens
gtgtatatgtgccac

SEQ ID NO: 7153 - DNA, 15 bp, Homo sapiens
ggtgtatatgtgcca

SEQ ID NO: 7154 - DNA, 15 bp, Homo sapiens
tggtgtatatgtgcc

SEQ ID NO: 7155 - DNA, 15 bp, Homo sapiens
atggtgtatatgtgc

SEQ ID NO: 7156 - DNA, 15 bp, Homo sapiens
catggtgtatatgtg

SEQ ID NO: 7157 - DNA, 15 bp, Homo sapiens
ccatggtgtatatgt

SEQ ID NO: 7158 - DNA, 15 bp, Homo sapiens
tccatggtgtatatg

SEQ ID NO: 7159 - DNA, 15 bp, Homo sapiens
ttccatggtgtatat

SEQ ID NO: 7160 - DNA, 15 bp, Homo sapiens
attccatggtgtata

SEQ ID NO: 7161 - DNA, 15 bp, Homo sapiens
tattccatggtgtat

SEQ ID NO: 7162 - DNA, 15 bp, Homo sapiens
gtattccatggtgta

SEQ ID NO: 7163 - DNA, 15 bp, Homo sapiens
agtattccatggtgt

SEQ ID NO: 7164 - DNA, 15 bp, Homo sapiens
tagtattccatggtg

SEQ ID NO: 7165 - DNA, 15 bp, Homo sapiens
atagtattccatggt

SEQ ID NO: 7166 - DNA, 15 bp, Homo sapiens
catagtattccatgg

SEQ ID NO: 7167 - DNA, 15 bp, Homo sapiens
gcatagtattccatg

SEQ ID NO: 7168 - DNA, 15 bp, Homo sapiens
tgcatagtattccat

SEQ ID NO: 7169 - DNA, 15 bp, Homo sapiens
ctgcatagtattcca

SEQ ID NO: 7170 - DNA, 15 bp, Homo sapiens
gctgcatagtattcc

SEQ ID NO: 7171 - DNA, 15 bp, Homo sapiens
ggctgcatagtattc

SEQ ID NO: 7172 - DNA, 15 bp, Homo sapiens
tggctgcatagtatt

SEQ ID NO: 7173 - DNA, 15 bp, Homo sapiens
atggctgcatagtat

SEQ ID NO: 7174 - DNA, 15 bp, Homo sapiens
tatggctgcatagta

SEQ ID NO: 7175 - DNA, 15 bp, Homo sapiens
ttatggctgcatagt

SEQ ID NO: 7176 - DNA, 15 bp, Homo sapiens
tttatggctgcatag

SEQ ID NO: 7177 - DNA, 15 bp, Homo sapiens
ttttatggctgcata

SEQ ID NO: 7178 - DNA, 15 bp, Homo sapiens
tttttatggctgcat

SEQ ID NO: 7179 - DNA, 15 bp, Homo sapiens
ttttttatggctgca

SEQ ID NO: 7180 - DNA, 15 bp, Homo sapiens
attttttatggctgc

SEQ ID NO: 7181 - DNA, 15 bp, Homo sapiens
cattttttatggctg

SEQ ID NO: 7182 - DNA, 15 bp, Homo sapiens
tcattttttatggct

SEQ ID NO: 7183 - DNA, 15 bp, Homo sapiens
atcattttttatggc

SEQ ID NO: 7184 - DNA, 15 bp, Homo sapiens
catcattttttatgg

SEQ ID NO: 7185 - DNA, 15 bp, Homo sapiens
tcatcattttttatg

SEQ ID NO: 7186 - DNA, 15 bp, Homo sapiens
ctcatcattttttat

SEQ ID NO: 7187 - DNA, 15 bp, Homo sapiens
actcatcatttttta

SEQ ID NO: 7188 - DNA, 15 bp, Homo sapiens
aactcatcatttttt

SEQ ID NO: 7189 - DNA, 15 bp, Homo sapiens
gaactcatcattttt

SEQ ID NO: 7190 - DNA, 15 bp, Homo sapiens
tgaactcatcatttt

SEQ ID NO: 7191 - DNA, 15 bp, Homo sapiens
atgaactcatcattt

SEQ ID NO: 7192 - DNA, 15 bp, Homo sapiens
catgaactcatcatt

SEQ ID NO: 7193 - DNA, 15 bp, Homo sapiens
acatgaactcatcat

SEQ ID NO: 7194 - DNA, 15 bp, Homo sapiens
gacatgaactcatca

SEQ ID NO: 7195 - DNA, 15 bp, Homo sapiens
ggacatgaactcatc

SEQ ID NO: 7196 - DNA, 15 bp, Homo sapiens
aggacatgaactcat

SEQ ID NO: 7197 - DNA, 15 bp, Homo sapiens
aaggacatgaactca

SEQ ID NO: 7198 - DNA, 15 bp, Homo sapiens
aaaggacatgaactc

SEQ ID NO: 7199 - DNA, 15 bp, Homo sapiens
caaaggacatgaact

SEQ ID NO: 7200 - DNA, 15 bp, Homo sapiens
acaaaggacatgaac

SEQ ID NO: 7201 - DNA, 15 bp, Homo sapiens
tacaaaggacatgaa

SEQ ID NO: 7202 - DNA, 15 bp, Homo sapiens
ctacaaaggacatga

SEQ ID NO: 7203 - DNA, 15 bp, Homo sapiens
cctacaaaggacatg

SEQ ID NO: 7204 - DNA, 15 bp, Homo sapiens
ccctacaaaggacat

SEQ ID NO: 7205 - DNA, 15 bp, Homo sapiens
tccctacaaaggaca

SEQ ID NO: 7206 - DNA, 15 bp, Homo sapiens
gtccctacaaaggac

SEQ ID NO: 7207 - DNA, 15 bp, Homo sapiens
tgtccctacaaagga

SEQ ID NO: 7208 - DNA, 15 bp, Homo sapiens
atgtccctacaaagg

SEQ ID NO: 7209 - DNA, 15 bp, Homo sapiens
catgtccctacaaag

SEQ ID NO: 7210 - DNA, 15 bp, Homo sapiens
ccatgtccctacaaa

SEQ ID NO: 7211 - DNA, 15 bp, Homo sapiens
tccatgtccctacaa

SEQ ID NO: 7212 - DNA, 15 bp, Homo sapiens
atccatgtccctaca

SEQ ID NO: 7213 - DNA, 15 bp, Homo sapiens
catccatgtccctac

SEQ ID NO: 7214 - DNA, 15 bp, Homo sapiens
tcatccatgtcccta

SEQ ID NO: 7215 - DNA, 15 bp, Homo sapiens
ttcatccatgtccct

SEQ ID NO: 7216 - DNA, 15 bp, Homo sapiens
tttcatccatgtccc

SEQ ID NO: 7217 - DNA, 15 bp, Homo sapiens
atttcatccatgtcc

SEQ ID NO: 7218 - DNA, 15 bp, Homo sapiens
aatttcatccatgtc

SEQ ID NO: 7219 - DNA, 15 bp, Homo sapiens
caatttcatccatgt

SEQ ID NO: 7220 - DNA, 15 bp, Homo sapiens
ccaatttcatccatg

SEQ ID NO: 7221 - DNA, 15 bp, Homo sapiens
tccaatttcatccat

SEQ ID NO: 7222 - DNA, 15 bp, Homo sapiens
ttccaatttcatcca

SEQ ID NO: 7223 - DNA, 15 bp, Homo sapiens
tttccaatttcatcc

SEQ ID NO: 7224 - DNA, 15 bp, Homo sapiens
atttccaatttcatc

SEQ ID NO: 7225 - DNA, 15 bp, Homo sapiens
gatttccaatttcat

SEQ ID NO: 7226 - DNA, 15 bp, Homo sapiens
tgatttccaatttca

SEQ ID NO: 7227 - DNA, 15 bp, Homo sapiens
atgatttccaatttc

SEQ ID NO: 7228 - DNA, 15 bp, Homo sapiens
gatgatttccaattt

SEQ ID NO: 7229 - DNA, 15 bp, Homo sapiens
tgatgatttccaatt

SEQ ID NO: 7230 - DNA, 15 bp, Homo sapiens
atgatgatttccaat

SEQ ID NO: 7231 - DNA, 15 bp, Homo sapiens
aatgatgatttccaa

SEQ ID NO: 7232 - DNA, 15 bp, Homo sapiens
gaatgatgatttcca

SEQ ID NO: 7233 - DNA, 15 bp, Homo sapiens
agaatgatgatttcc

SEQ ID NO: 7234 - DNA, 15 bp, Homo sapiens
gagaatgatgatttc

SEQ ID NO: 7235 - DNA, 15 bp, Homo sapiens
tgagaatgatgattt

SEQ ID NO: 7236 - DNA, 15 bp, Homo sapiens
ctgagaatgatgatt

SEQ ID NO: 7237 - DNA, 15 bp, Homo sapiens
actgagaatgatgat

SEQ ID NO: 7238 - DNA, 15 bp, Homo sapiens
tactgagaatgatga

SEQ ID NO: 7239 - DNA, 15 bp, Homo sapiens
ttactgagaatgatg

SEQ ID NO: 7240 - DNA, 15 bp, Homo sapiens
tttactgagaatgat

SEQ ID NO: 7241 - DNA, 15 bp, Homo sapiens
gtttactgagaatga

SEQ ID NO: 7242 - DNA, 15 bp, Homo sapiens
agtttactgagaatg

SEQ ID NO: 7243 - DNA, 15 bp, Homo sapiens
tagtttactgagaat

SEQ ID NO: 7244 - DNA, 15 bp, Homo sapiens
atagtttactgagaa

SEQ ID NO: 7245 - DNA, 15 bp, Homo sapiens
aatagtttactgaga

SEQ ID NO: 7246 - DNA, 15 bp, Homo sapiens
caatagtttactgag

SEQ ID NO: 7247 - DNA, 15 bp, Homo sapiens
gcaatagtttactga

SEQ ID NO: 7248 - DNA, 15 bp, Homo sapiens
tgcaatagtttactg

SEQ ID NO: 7249 - DNA, 15 bp, Homo sapiens
ttgcaatagtttact

SEQ ID NO: 7250 - DNA, 15 bp, Homo sapiens
cttgcaatagtttac

SEQ ID NO: 7251 - DNA, 15 bp, Homo sapiens
tcttgcaatagttta

SEQ ID NO: 7252 - DNA, 15 bp, Homo sapiens
ttcttgcaatagttt

SEQ ID NO: 7253 - DNA, 15 bp, Homo sapiens
gttcttgcaatagtt

SEQ ID NO: 7254 - DNA, 15 bp, Homo sapiens
tgttcttgcaatagt

SEQ ID NO: 7255 - DNA, 15 bp, Homo sapiens
ttgttcttgcaatag

SEQ ID NO: 7256 - DNA, 15 bp, Homo sapiens
tttgttcttgcaata

SEQ ID NO: 7257 - DNA, 15 bp, Homo sapiens
ttttgttcttgcaat

SEQ ID NO: 7258 - DNA, 15 bp, Homo sapiens
tttttgttcttgcaa

SEQ ID NO: 7259 - DNA, 15 bp, Homo sapiens
ttttttgttcttgca

SEQ ID NO: 7260 - DNA, 15 bp, Homo sapiens
gttttttgttcttgc

SEQ ID NO: 7261 - DNA, 15 bp, Homo sapiens
ggttttttgttcttg

SEQ ID NO: 7262 - DNA, 15 bp, Homo sapiens
tggttttttgttctt

SEQ ID NO: 7263 - DNA, 15 bp, Homo sapiens
ttggttttttgttct

SEQ ID NO: 7264 - DNA, 15 bp, Homo sapiens
tttggttttttgttc

SEQ ID NO: 7265 - DNA, 15 bp, Homo sapiens
gtttggttttttgtt

SEQ ID NO: 7266 - DNA, 15 bp, Homo sapiens
tgtttggttttttgt

SEQ ID NO: 7267 - DNA, 15 bp, Homo sapiens
gtgtttggttttttg

SEQ ID NO: 7268 - DNA, 15 bp, Homo sapiens
agtgtttggtttttt

SEQ ID NO: 7269 - DNA, 15 bp, Homo sapiens
cagtgtttggttttt

SEQ ID NO: 7270 - DNA, 15 bp, Homo sapiens
gcagtgtttggtttt

SEQ ID NO: 7271 - DNA, 15 bp, Homo sapiens
tgcagtgtttggttt

SEQ ID NO: 7272 - DNA, 15 bp, Homo sapiens
atgcagtgtttggtt

SEQ ID NO: 7273 - DNA, 15 bp, Homo sapiens
tatgcagtgtttggt

SEQ ID NO: 7274 - DNA, 15 bp, Homo sapiens
atatgcagtgtttgg

SEQ ID NO: 7275 - DNA, 15 bp, Homo sapiens
aatatgcagtgtttg

SEQ ID NO: 7276 - DNA, 15 bp, Homo sapiens
gaatatgcagtgttt

SEQ ID NO: 7277 - DNA, 15 bp, Homo sapiens
agaatatgcagtgtt

SEQ ID NO: 7278 - DNA, 15 bp, Homo sapiens
gagaatatgcagtgt

SEQ ID NO: 7279 - DNA, 15 bp, Homo sapiens
tgagaatatgcagtg

SEQ ID NO: 7280 - DNA, 15 bp, Homo sapiens
gtgagaatatgcagt

SEQ ID NO: 7281 - DNA, 15 bp, Homo sapiens
agtgagaatatgcag

SEQ ID NO: 7282 - DNA, 15 bp, Homo sapiens
gagtgagaatatgca

SEQ ID NO: 7283 - DNA, 15 bp, Homo sapiens
tgagtgagaatatgc

SEQ ID NO: 7284 - DNA, 15 bp, Homo sapiens
atgagtgagaatatg

SEQ ID NO: 7285 - DNA, 15 bp, Homo sapiens
tatgagtgagaatat

SEQ ID NO: 7286 - DNA, 15 bp, Homo sapiens
ctatgagtgagaata

SEQ ID NO: 7287 - DNA, 15 bp, Homo sapiens
cctatgagtgagaat

SEQ ID NO: 7288 - DNA, 15 bp, Homo sapiens
acctatgagtgagaa

SEQ ID NO: 7289 - DNA, 15 bp, Homo sapiens
cacctatgagtgaga

SEQ ID NO: 7290 - DNA, 15 bp, Homo sapiens
ccacctatgagtgag

SEQ ID NO: 7291 - DNA, 15 bp, Homo sapiens
cccacctatgagtga

SEQ ID NO: 7292 - DNA, 15 bp, Homo sapiens
tcccacctatgagtg

SEQ ID NO: 7293 - DNA, 15 bp, Homo sapiens
ttcccacctatgagt

SEQ ID NO: 7294 - DNA, 15 bp, Homo sapiens
attcccacctatgag

SEQ ID NO: 7295 - DNA, 15 bp, Homo sapiens
aattcccacctatga

SEQ ID NO: 7296 - DNA, 15 bp, Homo sapiens
caattcccacctatg

SEQ ID NO: 7297 - DNA, 15 bp, Homo sapiens
tcaattcccacctat

SEQ ID NO: 7298 - DNA, 15 bp, Homo sapiens
ttcaattcccaccta

SEQ ID NO: 7299 - DNA, 15 bp, Homo sapiens
gttcaattcccacct

SEQ ID NO: 7300 - DNA, 15 bp, Homo sapiens
tgttcaattcccacc

SEQ ID NO: 7301 - DNA, 15 bp, Homo sapiens
ttgttcaattcccac

SEQ ID NO: 7302 - DNA, 15 bp, Homo sapiens
attgttcaattccca

SEQ ID NO: 7303 - DNA, 15 bp, Homo sapiens
cattgttcaattccc

SEQ ID NO: 7304 - DNA, 15 bp, Homo sapiens
tcattgttcaattcc

SEQ ID NO: 7305 - DNA, 15 bp, Homo sapiens
ctcattgttcaattc

SEQ ID NO: 7306 - DNA, 15 bp, Homo sapiens
tctcattgttcaatt

SEQ ID NO: 7307 - DNA, 15 bp, Homo sapiens
atctcattgttcaat

SEQ ID NO: 7308 - DNA, 15 bp, Homo sapiens
gatctcattgttcaa

SEQ ID NO: 7309 - DNA, 15 bp, Homo sapiens
tgatctcattgttca

SEQ ID NO: 7310 - DNA, 15 bp, Homo sapiens
gtgatctcattgttc

SEQ ID NO: 7311 - DNA, 15 bp, Homo sapiens
tgtgatctcattgtt

SEQ ID NO: 7312 - DNA, 15 bp, Homo sapiens
atgtgatctcattgt

SEQ ID NO: 7313 - DNA, 15 bp, Homo sapiens
catgtgatctcattg

SEQ ID NO: 7314 - DNA, 15 bp, Homo sapiens
ccatgtgatctcatt

SEQ ID NO: 7315 - DNA, 15 bp, Homo sapiens
tccatgtgatctcat

SEQ ID NO: 7316 - DNA, 15 bp, Homo sapiens
gtccatgtgatctca

SEQ ID NO: 7317 - DNA, 15 bp, Homo sapiens
tgtccatgtgatctc

SEQ ID NO: 7318 - DNA, 15 bp, Homo sapiens
gtgtccatgtgatct

SEQ ID NO: 7319 - DNA, 15 bp, Homo sapiens
tgtgtccatgtgatc

SEQ ID NO: 7320 - DNA, 15 bp, Homo sapiens
ctgtgtccatgtgat

SEQ ID NO: 7321 - DNA, 15 bp, Homo sapiens
cctgtgtccatgtga

SEQ ID NO: 7322 - DNA, 15 bp, Homo sapiens
tcctgtgtccatgtg

SEQ ID NO: 7323 - DNA, 15 bp, Homo sapiens
ttcctgtgtccatgt

SEQ ID NO: 7324 - DNA, 15 bp, Homo sapiens
cttcctgtgtccatg

SEQ ID NO: 7325 - DNA, 15 bp, Homo sapiens
ccttcctgtgtccat

SEQ ID NO: 7326 - DNA, 15 bp, Homo sapiens
cccttcctgtgtcca

SEQ ID NO: 7327 - DNA, 15 bp, Homo sapiens
ccccttcctgtgtcc

SEQ ID NO: 7328 - DNA, 15 bp, Homo sapiens
tccccttcctgtgtc

SEQ ID NO: 7329 - DNA, 15 bp, Homo sapiens
ttccccttcctgtgt

SEQ ID NO: 7330 - DNA, 15 bp, Homo sapiens
attccccttcctgtg

SEQ ID NO: 7331 - DNA, 15 bp, Homo sapiens
tattccccttcctgt

SEQ ID NO: 7332 - DNA, 15 bp, Homo sapiens
atattccccttcctg

SEQ ID NO: 7333 - DNA, 15 bp, Homo sapiens
gatattccccttcct

SEQ ID NO: 7334 - DNA, 15 bp, Homo sapiens
tgatattccccttcc

SEQ ID NO: 7335 - DNA, 15 bp, Homo sapiens
gtgatattccccttc

SEQ ID NO: 7336 - DNA, 15 bp, Homo sapiens
tgtgatattcccctt

SEQ ID NO: 7337 - DNA, 15 bp, Homo sapiens
gtgtgatattcccct

SEQ ID NO: 7338 - DNA, 15 bp, Homo sapiens
agtgtgatattcccc

SEQ ID NO: 7339 - DNA, 15 bp, Homo sapiens
gagtgtgatattccc

SEQ ID NO: 7340 - DNA, 15 bp, Homo sapiens
agagtgtgatattcc

SEQ ID NO: 7341 - DNA, 15 bp, Homo sapiens
cagagtgtgatattc

SEQ ID NO: 7342 - DNA, 15 bp, Homo sapiens
ccagagtgtgatatt

SEQ ID NO: 7343 - DNA, 15 bp, Homo sapiens
cccagagtgtgatat

SEQ ID NO: 7344 - DNA, 15 bp, Homo sapiens
ccccagagtgtgata

SEQ ID NO: 7345 - DNA, 15 bp, Homo sapiens
tccccagagtgtgat

SEQ ID NO: 7346 - DNA, 15 bp, Homo sapiens
gtccccagagtgtga

SEQ ID NO: 7347 - DNA, 15 bp, Homo sapiens
agtccccagagtgtg

SEQ ID NO: 7348 - DNA, 15 bp, Homo sapiens
cagtccccagagtgt

SEQ ID NO: 7349 - DNA, 15 bp, Homo sapiens
acagtccccagagtg

SEQ ID NO: 7350 - DNA, 15 bp, Homo sapiens
aacagtccccagagt

SEQ ID NO: 7351 - DNA, 15 bp, Homo sapiens
caacagtccccagag

SEQ ID NO: 7352 - DNA, 15 bp, Homo sapiens
acaacagtccccaga

SEQ ID NO: 7353 - DNA, 15 bp, Homo sapiens
cacaacagtccccag

SEQ ID NO: 7354 - DNA, 15 bp, Homo sapiens
ccacaacagtcccca

SEQ ID NO: 7355 - DNA, 15 bp, Homo sapiens
cccacaacagtcccc

SEQ ID NO: 7356 - DNA, 15 bp, Homo sapiens
ccccacaacagtccc

SEQ ID NO: 7357 - DNA, 15 bp, Homo sapiens
accccacaacagtcc

SEQ ID NO: 7358 - DNA, 15 bp, Homo sapiens
caccccacaacagtc

SEQ ID NO: 7359 - DNA, 15 bp, Homo sapiens
ccaccccacaacagt

SEQ ID NO: 7360 - DNA, 15 bp, Homo sapiens
cccaccccacaacag

SEQ ID NO: 7361 - DNA, 15 bp, Homo sapiens
ccccaccccacaaca

SEQ ID NO: 7362 - DNA, 15 bp, Homo sapiens
cccccaccccacaac

SEQ ID NO: 7363 - DNA, 15 bp, Homo sapiens
ccccccaccccacaa

SEQ ID NO: 7364 - DNA, 15 bp, Homo sapiens
tccccccaccccaca

SEQ ID NO: 7365 - DNA, 15 bp, Homo sapiens
ctccccccaccccac

SEQ ID NO: 7366 - DNA, 15 bp, Homo sapiens
cctccccccacccca

SEQ ID NO: 7367 - DNA, 15 bp, Homo sapiens
ccctccccccacccc

SEQ ID NO: 7368 - DNA, 15 bp, Homo sapiens
cccctccccccaccc

SEQ ID NO: 7369 - DNA, 15 bp, Homo sapiens
ccccctccccccacc

SEQ ID NO: 7370 - DNA, 15 bp, Homo sapiens
cccccctccccccac

SEQ ID NO: 7371 - DNA, 15 bp, Homo sapiens
tcccccctcccccca

SEQ ID NO: 7372 - DNA, 15 bp, Homo sapiens
ctcccccctcccccc

SEQ ID NO: 7373 - DNA, 15 bp, Homo sapiens
cctcccccctccccc

SEQ ID NO: 7374 - DNA, 15 bp, Homo sapiens
ccctcccccctcccc

SEQ ID NO: 7375 - DNA, 15 bp, Homo sapiens
tccctcccccctccc

SEQ ID NO: 7376 - DNA, 15 bp, Homo sapiens
ctccctcccccctcc

SEQ ID NO: 7377 - DNA, 15 bp, Homo sapiens
tctccctcccccctc

SEQ ID NO: 7378 - DNA, 15 bp, Homo sapiens
ctctccctcccccct

SEQ ID NO: 7379 - DNA, 15 bp, Homo sapiens
gctctccctcccccc

SEQ ID NO: 7380 - DNA, 15 bp, Homo sapiens
tgctctccctccccc

SEQ ID NO: 7381 - DNA, 15 bp, Homo sapiens
atgctctccctcccc

SEQ ID NO: 7382 - DNA, 15 bp, Homo sapiens
aatgctctccctccc

SEQ ID NO: 7383 - DNA, 15 bp, Homo sapiens
caatgctctccctcc

SEQ ID NO: 7384 - DNA, 15 bp, Homo sapiens
ccaatgctctccctc

SEQ ID NO: 7385 - DNA, 15 bp, Homo sapiens
cccaatgctctccct

SEQ ID NO: 7386 - DNA, 15 bp, Homo sapiens
tcccaatgctctccc

SEQ ID NO: 7387 - DNA, 15 bp, Homo sapiens
ctcccaatgctctcc

SEQ ID NO: 7388 - DNA, 15 bp, Homo sapiens
tctcccaatgctctc

SEQ ID NO: 7389 - DNA, 15 bp, Homo sapiens
atctcccaatgctct

SEQ ID NO: 7390 - DNA, 15 bp, Homo sapiens
tatctcccaatgctc

SEQ ID NO: 7391 - DNA, 15 bp, Homo sapiens
atatctcccaatgct

SEQ ID NO: 7392 - DNA, 15 bp, Homo sapiens
tatatctcccaatgc

SEQ ID NO: 7393 - DNA, 15 bp, Homo sapiens
gtatatctcccaatg

SEQ ID NO: 7394 - DNA, 15 bp, Homo sapiens
ggtatatctcccaat

SEQ ID NO: 7395 - DNA, 15 bp, Homo sapiens
aggtatatctcccaa

SEQ ID NO: 7396 - DNA, 15 bp, Homo sapiens
taggtatatctccca

SEQ ID NO: 7397 - DNA, 15 bp, Homo sapiens
ttaggtatatctccc

SEQ ID NO: 7398 - DNA, 15 bp, Homo sapiens
attaggtatatctcc

SEQ ID NO: 7399 - DNA, 15 bp, Homo sapiens
cattaggtatatctc

SEQ ID NO: 7400 - DNA, 15 bp, Homo sapiens
gcattaggtatatct

SEQ ID NO: 7401 - DNA, 15 bp, Homo sapiens
agcattaggtatatc

SEQ ID NO: 7402 - DNA, 15 bp, Homo sapiens
tagcattaggtatat

SEQ ID NO: 7403 - DNA, 15 bp, Homo sapiens
ctagcattaggtata

SEQ ID NO: 7404 - DNA, 15 bp, Homo sapiens
tctagcattaggtat

SEQ ID NO: 7405 - DNA, 15 bp, Homo sapiens
atctagcattaggta

SEQ ID NO: 7406 - DNA, 15 bp, Homo sapiens
catctagcattaggt

SEQ ID NO: 7407 - DNA, 15 bp, Homo sapiens
tcatctagcattagg

SEQ ID NO: 7408 - DNA, 15 bp, Homo sapiens
gtcatctagcattag

SEQ ID NO: 7409 - DNA, 15 bp, Homo sapiens
cgtcatctagcatta

SEQ ID NO: 7410 - DNA, 15 bp, Homo sapiens
tcgtcatctagcatt

SEQ ID NO: 7411 - DNA, 15 bp, Homo sapiens
ctcgtcatctagcat

SEQ ID NO: 7412 - DNA, 15 bp, Homo sapiens
actcgtcatctagca

SEQ ID NO: 7413 - DNA, 15 bp, Homo sapiens
aactcgtcatctagc

SEQ ID NO: 7414 - DNA, 15 bp, Homo sapiens
taactcgtcatctag

SEQ ID NO: 7415 - DNA, 15 bp, Homo sapiens
ctaactcgtcatcta

SEQ ID NO: 7416 - DNA, 15 bp, Homo sapiens
actaactcgtcatct

SEQ ID NO: 7417 - DNA, 15 bp, Homo sapiens
cactaactcgtcatc

SEQ ID NO: 7418 - DNA, 15 bp, Homo sapiens
ccactaactcgtcat

SEQ ID NO: 7419 - DNA, 15 bp, Homo sapiens
cccactaactcgtca

SEQ ID NO: 7420 - DNA, 15 bp, Homo sapiens
acccactaactcgtc

SEQ ID NO: 7421 - DNA, 15 bp, Homo sapiens
cacccactaactcgt

SEQ ID NO: 7422 - DNA, 15 bp, Homo sapiens
gcacccactaactcg

SEQ ID NO: 7423 - DNA, 15 bp, Homo sapiens
tgcacccactaactc

SEQ ID NO: 7424 - DNA, 15 bp, Homo sapiens
ctgcacccactaact

SEQ ID NO: 7425 - DNA, 15 bp, Homo sapiens
gctgcacccactaac

SEQ ID NO: 7426 - DNA, 15 bp, Homo sapiens
tgctgcacccactaa

SEQ ID NO: 7427 - DNA, 15 bp, Homo sapiens
gtgctgcacccacta

SEQ ID NO: 7428 - DNA, 15 bp, Homo sapiens
tgtgctgcacccact

SEQ ID NO: 7429 - DNA, 15 bp, Homo sapiens
gtgtgctgcacccac

SEQ ID NO: 7430 - DNA, 15 bp, Homo sapiens
ggtgtgctgcaccca

SEQ ID NO: 7431 - DNA, 15 bp, Homo sapiens
tggtgtgctgcaccc

SEQ ID NO: 7432 - DNA, 15 bp, Homo sapiens
ctggtgtgctgcacc

SEQ ID NO: 7433 - DNA, 15 bp, Homo sapiens
gctggtgtgctgcac

SEQ ID NO: 7434 - DNA, 15 bp, Homo sapiens
tgctggtgtgctgca

SEQ ID NO: 7435 - DNA, 15 bp, Homo sapiens
atgctggtgtgctgc

SEQ ID NO: 7436 - DNA, 15 bp, Homo sapiens
catgctggtgtgctg

SEQ ID NO: 7437 - DNA, 15 bp, Homo sapiens
ccatgctggtgtgct

SEQ ID NO: 7438 - DNA, 15 bp, Homo sapiens
gccatgctggtgtgc

SEQ ID NO: 7439 - DNA, 15 bp, Homo sapiens
tgccatgctggtgtg

SEQ ID NO: 7440 - DNA, 15 bp, Homo sapiens
gtgccatgctggtgt

SEQ ID NO: 7441 - DNA, 15 bp, Homo sapiens
tgtgccatgctggtg

SEQ ID NO: 7442 - DNA, 15 bp, Homo sapiens
atgtgccatgctggt

SEQ ID NO: 7443 - DNA, 15 bp, Homo sapiens
catgtgccatgctgg

SEQ ID NO: 7444 - DNA, 15 bp, Homo sapiens
acatgtgccatgctg

SEQ ID NO: 7445 - DNA, 15 bp, Homo sapiens
tacatgtgccatgct

SEQ ID NO: 7446 - DNA, 15 bp, Homo sapiens
atacatgtgccatgc

SEQ ID NO: 7447 - DNA, 15 bp, Homo sapiens
tatacatgtgccatg

SEQ ID NO: 7448 - DNA, 15 bp, Homo sapiens
gtatacatgtgccat

SEQ ID NO: 7449 - DNA, 15 bp, Homo sapiens
ggtatacatgtgcca

SEQ ID NO: 7450 - DNA, 15 bp, Homo sapiens
aggtatacatgtgcc

SEQ ID NO: 7451 - DNA, 15 bp, Homo sapiens
taggtatacatgtgc

SEQ ID NO: 7452 - DNA, 15 bp, Homo sapiens
ataggtatacatgtg

SEQ ID NO: 7453 - DNA, 15 bp, Homo sapiens
cataggtatacatgt

SEQ ID NO: 7454 - DNA, 15 bp, Homo sapiens
acataggtatacatg

SEQ ID NO: 7455 - DNA, 15 bp, Homo sapiens
tacataggtatacat

SEQ ID NO: 7456 - DNA, 15 bp, Homo sapiens
ttacataggtataca

SEQ ID NO: 7457 - DNA, 15 bp, Homo sapiens
gttacataggtatac

SEQ ID NO: 7458 - DNA, 15 bp, Homo sapiens
agttacataggtata

SEQ ID NO: 7459 - DNA, 15 bp, Homo sapiens
tagttacataggtat

SEQ ID NO: 7460 - DNA, 15 bp, Homo sapiens
ttagttacataggta

SEQ ID NO: 7461 - DNA, 15 bp, Homo sapiens
gttagttacataggt

SEQ ID NO: 7462 - DNA, 15 bp, Homo sapiens
ggttagttacatagg

SEQ ID NO: 7463 - DNA, 15 bp, Homo sapiens
aggttagttacatag

SEQ ID NO: 7464 - DNA, 15 bp, Homo sapiens
caggttagttacata

SEQ ID NO: 7465 - DNA, 15 bp, Homo sapiens
gcaggttagttacat

SEQ ID NO: 7466 - DNA, 15 bp, Homo sapiens
tgcaggttagttaca

SEQ ID NO: 7467 - DNA, 15 bp, Homo sapiens
gtgcaggttagttac

SEQ ID NO: 7468 - DNA, 15 bp, Homo sapiens
tgtgcaggttagtta

SEQ ID NO: 7469 - DNA, 15 bp, Homo sapiens
atgtgcaggttagtt

SEQ ID NO: 7470 - DNA, 15 bp, Homo sapiens
aatgtgcaggttagt

SEQ ID NO: 7471 - DNA, 15 bp, Homo sapiens
caatgtgcaggttag

SEQ ID NO: 7472 - DNA, 15 bp, Homo sapiens
acaatgtgcaggtta

SEQ ID NO: 7473 - DNA, 15 bp, Homo sapiens
cacaatgtgcaggtt

SEQ ID NO: 7474 - DNA, 15 bp, Homo sapiens
gcacaatgtgcaggt

SEQ ID NO: 7475 - DNA, 15 bp, Homo sapiens
tgcacaatgtgcagg

SEQ ID NO: 7476 - DNA, 15 bp, Homo sapiens
gtgcacaatgtgcag

SEQ ID NO: 7477 - DNA, 15 bp, Homo sapiens
tgtgcacaatgtgca

SEQ ID NO: 7478 - DNA, 15 bp, Homo sapiens
atgtgcacaatgtgc

SEQ ID NO: 7479 - DNA, 15 bp, Homo sapiens
catgtgcacaatgtg

SEQ ID NO: 7480 - DNA, 15 bp, Homo sapiens
acatgtgcacaatgt

SEQ ID NO: 7481 - DNA, 15 bp, Homo sapiens
tacatgtgcacaatg

SEQ ID NO: 7482 - DNA, 15 bp, Homo sapiens
gtacatgtgcacaat

SEQ ID NO: 7483 - DNA, 15 bp, Homo sapiens
ggtacatgtgcacaa

SEQ ID NO: 7484 - DNA, 15 bp, Homo sapiens
gggtacatgtgcaca

SEQ ID NO: 7485 - DNA, 15 bp, Homo sapiens
agggtacatgtgcac

SEQ ID NO: 7486 - DNA, 15 bp, Homo sapiens
tagggtacatgtgca

SEQ ID NO: 7487 - DNA, 15 bp, Homo sapiens
ttagggtacatgtgc

SEQ ID NO: 7488 - DNA, 15 bp, Homo sapiens
tttagggtacatgtg

SEQ ID NO: 7489 - DNA, 15 bp, Homo sapiens
ttttagggtacatgt

SEQ ID NO: 7490 - DNA, 15 bp, Homo sapiens
gttttagggtacatg

SEQ ID NO: 7491 - DNA, 15 bp, Homo sapiens
agttttagggtacat

SEQ ID NO: 7492 - DNA, 15 bp, Homo sapiens
aagttttagggtaca

SEQ ID NO: 7493 - DNA, 15 bp, Homo sapiens
taagttttagggtac

SEQ ID NO: 7494 - DNA, 15 bp, Homo sapiens
ttaagttttagggta

SEQ ID NO: 7495 - DNA, 15 bp, Homo sapiens
tttaagttttagggt

SEQ ID NO: 7496 - DNA, 15 bp, Homo sapiens
ctttaagttttaggg

SEQ ID NO: 7497 - DNA, 15 bp, Homo sapiens
actttaagttttagg

SEQ ID NO: 7498 - DNA, 15 bp, Homo sapiens
tactttaagttttag

SEQ ID NO: 7499 - DNA, 15 bp, Homo sapiens
atactttaagtttta

SEQ ID NO: 7500 - DNA, 15 bp, Homo sapiens
tatactttaagtttt

SEQ ID NO: 7501 - DNA, 15 bp, Homo sapiens
atatactttaagttt

SEQ ID NO: 7502 - DNA, 15 bp, Homo sapiens
tatatactttaagtt

SEQ ID NO: 7503 - DNA, 15 bp, Homo sapiens
ttatatactttaagt

SEQ ID NO: 7504 - DNA, 15 bp, Homo sapiens
tttatatactttaag

SEQ ID NO: 7505 - DNA, 15 bp, Homo sapiens
ttttatatactttaa

SEQ ID NO: 7506 - DNA, 15 bp, Homo sapiens
tttttatatacttta

SEQ ID NO: 7507 - DNA, 15 bp, Homo sapiens
ttttttatatacttt

SEQ ID NO: 7508 - DNA, 15 bp, Homo sapiens
attttttatatactt

SEQ ID NO: 7509 - DNA, 15 bp, Homo sapiens
tattttttatatact

SEQ ID NO: 7510 - DNA, 15 bp, Homo sapiens
ttattttttatatac

SEQ ID NO: 7511 - DNA, 15 bp, Homo sapiens
attattttttatata

SEQ ID NO: 7512 - DNA, 15 bp, Homo sapiens
tattattttttatat

SEQ ID NO: 7513 - DNA, 15 bp, Homo sapiens
ttattattttttata

SEQ ID NO: 7514 - DNA, 15 bp, Homo sapiens
attattattttttat

SEQ ID NO: 7515 - DNA, 15 bp, Homo sapiens
tattattatttttta

SEQ ID NO: 7516 - DNA, 15 bp, Homo sapiens
ttattattatttttt

SEQ ID NO: 7517 - DNA, 15 bp, Homo sapiens
attattattattttt

SEQ ID NO: 7518 - DNA, 15 bp, Homo sapiens
tattattattatttt

SEQ ID NO: 7519 - DNA, 15 bp, Homo sapiens
ttattattattattt

SEQ ID NO: 7520 - DNA, 15 bp, Homo sapiens
attattattattatt

SEQ ID NO: 7521 - DNA, 15 bp, Homo sapiens
tattattattattat

SEQ ID NO: 7522 - DNA, 15 bp, Homo sapiens
ttattattattatta

SEQ ID NO: 7523 - DNA, 15 bp, Homo sapiens
gattattattattat

SEQ ID NO: 7524 - DNA, 15 bp, Homo sapiens
ggattattattatta

SEQ ID NO: 7525 - DNA, 15 bp, Homo sapiens
gggattattattatt

SEQ ID NO: 7526 - DNA, 15 bp, Homo sapiens
tgggattattattat

SEQ ID NO: 7527 - DNA, 15 bp, Homo sapiens
ttgggattattatta

SEQ ID NO: 7528 - DNA, 15 bp, Homo sapiens
attgggattattatt

SEQ ID NO: 7529 - DNA, 15 bp, Homo sapiens
aattgggattattat

SEQ ID NO: 7530 - DNA, 15 bp, Homo sapiens
gaattgggattatta

SEQ ID NO: 7531 - DNA, 15 bp, Homo sapiens
agaattgggattatt

SEQ ID NO: 7532 - DNA, 15 bp, Homo sapiens
aagaattgggattat

SEQ ID NO: 7533 - DNA, 15 bp, Homo sapiens
caagaattgggatta

SEQ ID NO: 7534 - DNA, 15 bp, Homo sapiens
acaagaattgggatt

SEQ ID NO: 7535 - DNA, 15 bp, Homo sapiens
cacaagaattgggat

SEQ ID NO: 7536 - DNA, 15 bp, Homo sapiens
tcacaagaattggga

SEQ ID NO: 7537 - DNA, 15 bp, Homo sapiens
ctcacaagaattggg

SEQ ID NO: 7538 - DNA, 15 bp, Homo sapiens
actcacaagaattgg

SEQ ID NO: 7539 - DNA, 15 bp, Homo sapiens
aactcacaagaattg

SEQ ID NO: 7540 - DNA, 15 bp, Homo sapiens
aaactcacaagaatt

SEQ ID NO: 7541 - DNA, 15 bp, Homo sapiens
aaaactcacaagaat

SEQ ID NO: 7542 - DNA, 15 bp, Homo sapiens
aaaaactcacaagaa

SEQ ID NO: 7543 - DNA, 15 bp, Homo sapiens
aaaaaactcacaaga

SEQ ID NO: 7544 - DNA, 15 bp, Homo sapiens
aaaaaaactcacaag

SEQ ID NO: 7545 - DNA, 15 bp, Homo sapiens
aaaaaaaactcacaa

SEQ ID NO: 7546 - DNA, 15 bp, Homo sapiens
aaaaaaaaactcaca

SEQ ID NO: 7547 - DNA, 15 bp, Homo sapiens
aaaaaaaaaactcac

SEQ ID NO: 7548 - DNA, 15 bp, Homo sapiens
aaaaaaaaaaactca

SEQ ID NO: 7549 - DNA, 15 bp, Homo sapiens
aaaaaaaaaaaactc

SEQ ID NO: 7550 - DNA, 15 bp, Homo sapiens
aaaaaaaaaaaaact

SEQ ID NO: 7551 - DNA, 15 bp, Homo sapiens
aaaaaaaaaaaaaac

SEQ ID NO: 7552 - DNA, 15 bp, Homo sapiens
cgtctcaaaaaaaaa

SEQ ID NO: 7553 - DNA, 15 bp, Homo sapiens
ccgtctcaaaaaaaa

SEQ ID NO: 7554 - DNA, 15 bp, Homo sapiens
tccgtctcaaaaaaa

SEQ ID NO: 7555 - DNA, 15 bp, Homo sapiens
ctccgtctcaaaaaa

SEQ ID NO: 7556 - DNA, 15 bp, Homo sapiens
actccgtctcaaaaa

SEQ ID NO: 7557 - DNA, 15 bp, Homo sapiens
aactccgtctcaaaa

SEQ ID NO: 7558 - DNA, 15 bp, Homo sapiens
aaactccgtctcaaa

SEQ ID NO: 7559 - DNA, 15 bp, Homo sapiens
gaaactccgtctcaa

SEQ ID NO: 7560 - DNA, 15 bp, Homo sapiens
cgaaactccgtctca

SEQ ID NO: 7561 - DNA, 15 bp, Homo sapiens
gcgaaactccgtctc

SEQ ID NO: 7562 - DNA, 15 bp, Homo sapiens
agcgaaactccgtct

SEQ ID NO: 7563 - DNA, 15 bp, Homo sapiens
gagcgaaactccgtc

SEQ ID NO: 7564 - DNA, 15 bp, Homo sapiens
agagcgaaactccgt

SEQ ID NO: 7565 - DNA, 15 bp, Homo sapiens
aagagcgaaactccg

SEQ ID NO: 7566 - DNA, 15 bp, Homo sapiens
caagagcgaaactcc

SEQ ID NO: 7567 - DNA, 15 bp, Homo sapiens
acaagagcgaaactc

SEQ ID NO: 7568 - DNA, 15 bp, Homo sapiens
gacaagagcgaaact

SEQ ID NO: 7569 - DNA, 15 bp, Homo sapiens
tgacaagagcgaaac

SEQ ID NO: 7570 - DNA, 15 bp, Homo sapiens
gtgacaagagcgaaa

SEQ ID NO: 7571 - DNA, 15 bp, Homo sapiens
ggtgacaagagcgaa

SEQ ID NO: 7572 - DNA, 15 bp, Homo sapiens
gggtgacaagagcga

SEQ ID NO: 7573 - DNA, 15 bp, Homo sapiens
tgggtgacaagagcg

SEQ ID NO: 7574 - DNA, 15 bp, Homo sapiens
ctgggtgacaagagc

SEQ ID NO: 7575 - DNA, 15 bp, Homo sapiens
cctgggtgacaagag

SEQ ID NO: 7576 - DNA, 15 bp, Homo sapiens
gcctgggtgacaaga

SEQ ID NO: 7577 - DNA, 15 bp, Homo sapiens
agcctgggtgacaag

SEQ ID NO: 7578 - DNA, 15 bp, Homo sapiens
cagcctgggtgacaa

SEQ ID NO: 7579 - DNA, 15 bp, Homo sapiens
ttgcactccagcctg

SEQ ID NO: 7580 - DNA, 15 bp, Homo sapiens
attgcactccagcct

SEQ ID NO: 7581 - DNA, 15 bp, Homo sapiens
cattgcactccagcc

SEQ ID NO: 7582 - DNA, 15 bp, Homo sapiens
ccattgcactccagc

SEQ ID NO: 7583 - DNA, 15 bp, Homo sapiens
accattgcactccag

SEQ ID NO: 7584 - DNA, 15 bp, Homo sapiens
caccattgcactcca

SEQ ID NO: 7585 - DNA, 15 bp, Homo sapiens
gcaccattgcactcc

SEQ ID NO: 7586 - DNA, 15 bp, Homo sapiens
ggcaccattgcactc

SEQ ID NO: 7587 - DNA, 15 bp, Homo sapiens
tggcaccattgcact

SEQ ID NO: 7588 - DNA, 15 bp, Homo sapiens
atggcaccattgcac

SEQ ID NO: 7589 - DNA, 15 bp, Homo sapiens
gatggcaccattgca

SEQ ID NO: 7590 - DNA, 15 bp, Homo sapiens
agatggcaccattgc

SEQ ID NO: 7591 - DNA, 15 bp, Homo sapiens
cagatggcaccattg

SEQ ID NO: 7592 - DNA, 15 bp, Homo sapiens
tcagatggcaccatt

SEQ ID NO: 7593 - DNA, 15 bp, Homo sapiens
ctcagatggcaccat

SEQ ID NO: 7594 - DNA, 15 bp, Homo sapiens
gctcagatggcacca

SEQ ID NO: 7595 - DNA, 15 bp, Homo sapiens
agctcagatggcacc

SEQ ID NO: 7596 - DNA, 15 bp, Homo sapiens
gagctcagatggcac

SEQ ID NO: 7597 - DNA, 15 bp, Homo sapiens
tgagctcagatggca

SEQ ID NO: 7598 - DNA, 15 bp, Homo sapiens
gtgagctcagatggc

SEQ ID NO: 7599 - DNA, 15 bp, Homo sapiens
agtgagctcagatgg

SEQ ID NO: 7600 - DNA, 15 bp, Homo sapiens
cagtgagctcagatg

SEQ ID NO: 7601 - DNA, 15 bp, Homo sapiens
gcagtgagctcagat

SEQ ID NO: 7602 - DNA, 15 bp, Homo sapiens
tgcagtgagctcaga

SEQ ID NO: 7603 - DNA, 15 bp, Homo sapiens
ttgcagtgagctcag

SEQ ID NO: 7604 - DNA, 15 bp, Homo sapiens
attgcagtgagctca

SEQ ID NO: 7605 - DNA, 15 bp, Homo sapiens
gattgcagtgagctc

SEQ ID NO: 7606 - DNA, 15 bp, Homo sapiens
agattgcagtgagct

SEQ ID NO: 7607 - DNA, 15 bp, Homo sapiens
gagattgcagtgagc

SEQ ID NO: 7608 - DNA, 15 bp, Homo sapiens
ggagattgcagtgag

SEQ ID NO: 7609 - DNA, 15 bp, Homo sapiens
cggagattgcagtga

SEQ ID NO: 7610 - DNA, 15 bp, Homo sapiens
gcggagattgcagtg

SEQ ID NO: 7611 - DNA, 15 bp, Homo sapiens
ggcggagattgcagt

SEQ ID NO: 7612 - DNA, 15 bp, Homo sapiens
aggcggagattgcag

SEQ ID NO: 7613 - DNA, 15 bp, Homo sapiens
gaggcggagattgca

SEQ ID NO: 7614 - DNA, 15 bp, Homo sapiens
ggaggcggagattgc

SEQ ID NO: 7615 - DNA, 15 bp, Homo sapiens
gggaggcggagattg

SEQ ID NO: 7616 - DNA, 15 bp, Homo sapiens
tgggaggcggagatt

SEQ ID NO: 7617 - DNA, 15 bp, Homo sapiens
ctgggaggcggagat

SEQ ID NO: 7618 - DNA, 15 bp, Homo sapiens
cctgggaggcggaga

SEQ ID NO: 7619 - DNA, 15 bp, Homo sapiens
acctgggaggcggag

SEQ ID NO: 7620 - DNA, 15 bp, Homo sapiens
aacctgggaggcgga

SEQ ID NO: 7621 - DNA, 15 bp, Homo sapiens
gaacctgggaggcgg

SEQ ID NO: 7622 - DNA, 15 bp, Homo sapiens
tgaacctgggaggcg

SEQ ID NO: 7623 - DNA, 15 bp, Homo sapiens
gtgaacctgggaggc

SEQ ID NO: 7624 - DNA, 15 bp, Homo sapiens
cgtgaacctgggagg

SEQ ID NO: 7625 - DNA, 15 bp, Homo sapiens
gcgtgaacctgggag

SEQ ID NO: 7626 - DNA, 15 bp, Homo sapiens
cgcgtgaacctggga

SEQ ID NO: 7627 - DNA, 15 bp, Homo sapiens
tcgcgtgaacctggg

SEQ ID NO: 7628 - DNA, 15 bp, Homo sapiens
atcgcgtgaacctgg

SEQ ID NO: 7629 - DNA, 15 bp, Homo sapiens
aatcgcgtgaacctg

SEQ ID NO: 7630 - DNA, 15 bp, Homo sapiens
gaatcgcgtgaacct

SEQ ID NO: 7631 - DNA, 15 bp, Homo sapiens
agaatcgcgtgaacc

SEQ ID NO: 7632 - DNA, 15 bp, Homo sapiens
gagaatcgcgtgaac

SEQ ID NO: 7633 - DNA, 15 bp, Homo sapiens
ggagaatcgcgtgaa

SEQ ID NO: 7634 - DNA, 15 bp, Homo sapiens
aggagaatcgcgtga

SEQ ID NO: 7635 - DNA, 15 bp, Homo sapiens
caggagaatcgcgtg

SEQ ID NO: 7636 - DNA, 15 bp, Homo sapiens
gcaggagaatcgcgt

SEQ ID NO: 7637 - DNA, 15 bp, Homo sapiens
ggcaggagaatcgcg

SEQ ID NO: 7638 - DNA, 15 bp, Homo sapiens
aggcaggagaatcgc

SEQ ID NO: 7639 - DNA, 15 bp, Homo sapiens
gaggcaggagaatcg

SEQ ID NO: 7640 - DNA, 15 bp, Homo sapiens
tgaggcaggagaatc

SEQ ID NO: 7641 - DNA, 15 bp, Homo sapiens
ctgaggcaggagaat

SEQ ID NO: 7642 - DNA, 15 bp, Homo sapiens
aggaggctgaggcag

SEQ ID NO: 7643 - DNA, 15 bp, Homo sapiens
caggaggctgaggca

SEQ ID NO: 7644 - DNA, 15 bp, Homo sapiens
tcaggaggctgaggc

SEQ ID NO: 7645 - DNA, 15 bp, Homo sapiens
ctcaggaggctgagg

SEQ ID NO: 7646 - DNA, 15 bp, Homo sapiens
actcaggaggctgag

SEQ ID NO: 7647 - DNA, 15 bp, Homo sapiens
tactcaggaggctga

SEQ ID NO: 7648 - DNA, 15 bp, Homo sapiens
ctactcaggaggctg

SEQ ID NO: 7649 - DNA, 15 bp, Homo sapiens
gctactcaggaggct

SEQ ID NO: 7650 - DNA, 15 bp, Homo sapiens
agctactcaggaggc

SEQ ID NO: 7651 - DNA, 15 bp, Homo sapiens
cagctactcaggagg

SEQ ID NO: 7652 - DNA, 15 bp, Homo sapiens
ccagctactcaggag

SEQ ID NO: 7653 - DNA, 15 bp, Homo sapiens
cccagctactcagga

SEQ ID NO: 7654 - DNA, 15 bp, Homo sapiens
tcccagctactcagg

SEQ ID NO: 7655 - DNA, 15 bp, Homo sapiens
ttgtaatcccagcta

SEQ ID NO: 7656 - DNA, 15 bp, Homo sapiens
cttgtaatcccagct

SEQ ID NO: 7657 - DNA, 15 bp, Homo sapiens
gcttgtaatcccagc

SEQ ID NO: 7658 - DNA, 15 bp, Homo sapiens
tgcttgtaatcccag

SEQ ID NO: 7659 - DNA, 15 bp, Homo sapiens
ctgcttgtaatccca

SEQ ID NO: 7660 - DNA, 15 bp, Homo sapiens
cctgcttgtaatccc

SEQ ID NO: 7661 - DNA, 15 bp, Homo sapiens
acctgcttgtaatcc

SEQ ID NO: 7662 - DNA, 15 bp, Homo sapiens
cacctgcttgtaatc

SEQ ID NO: 7663 - DNA, 15 bp, Homo sapiens
gcacctgcttgtaat

SEQ ID NO: 7664 - DNA, 15 bp, Homo sapiens
ggcacctgcttgtaa

SEQ ID NO: 7665 - DNA, 15 bp, Homo sapiens
tggcacctgcttgta

SEQ ID NO: 7666 - DNA, 15 bp, Homo sapiens
gtggcacctgcttgt

SEQ ID NO: 7667 - DNA, 15 bp, Homo sapiens
ggtggcacctgcttg

SEQ ID NO: 7668 - DNA, 15 bp, Homo sapiens
tggtggcacctgctt

SEQ ID NO: 7669 - DNA, 15 bp, Homo sapiens
atggtggcacctgct

SEQ ID NO: 7670 - DNA, 15 bp, Homo sapiens
catggtggcacctgc

SEQ ID NO: 7671 - DNA, 15 bp, Homo sapiens
gcatggtggcacctg

SEQ ID NO: 7672 - DNA, 15 bp, Homo sapiens
ggcatggtggcacct

SEQ ID NO: 7673 - DNA, 15 bp, Homo sapiens
aggcatggtggcacc

SEQ ID NO: 7674 - DNA, 15 bp, Homo sapiens
caggcatggtggcac

SEQ ID NO: 7675 - DNA, 15 bp, Homo sapiens
ccaggcatggtggca

SEQ ID NO: 7676 - DNA, 15 bp, Homo sapiens
accaggcatggtggc

SEQ ID NO: 7677 - DNA, 15 bp, Homo sapiens
caccaggcatggtgg

SEQ ID NO: 7678 - DNA, 15 bp, Homo sapiens
tcaccaggcatggtg

SEQ ID NO: 7679 - DNA, 15 bp, Homo sapiens
ttcaccaggcatggt

SEQ ID NO: 7680 - DNA, 15 bp, Homo sapiens
attcaccaggcatgg

SEQ ID NO: 7681 - DNA, 15 bp, Homo sapiens
aattcaccaggcatg

SEQ ID NO: 7682 - DNA, 15 bp, Homo sapiens
aaattcaccaggcat

SEQ ID NO: 7683 - DNA, 15 bp, Homo sapiens
aaaattcaccaggca

SEQ ID NO: 7684 - DNA, 15 bp, Homo sapiens
aaaaattcaccaggc

SEQ ID NO: 7685 - DNA, 15 bp, Homo sapiens
caaaaattcaccagg

SEQ ID NO: 7686 - DNA, 15 bp, Homo sapiens
acaaaaattcaccag

SEQ ID NO: 7687 - DNA, 15 bp, Homo sapiens
tacaaaaattcacca

SEQ ID NO: 7688 - DNA, 15 bp, Homo sapiens
atacaaaaattcacc

SEQ ID NO: 7689 - DNA, 15 bp, Homo sapiens
aatacaaaaattcac

SEQ ID NO: 7690 - DNA, 15 bp, Homo sapiens
aaatacaaaaattca

SEQ ID NO: 7691 - DNA, 15 bp, Homo sapiens
aaaatacaaaaattc

SEQ ID NO: 7692 - DNA, 15 bp, Homo sapiens
aaaaaaatacaaaaa

SEQ ID NO: 7693 - DNA, 15 bp, Homo sapiens
taaaaaaatacaaaa

SEQ ID NO: 7694 - DNA, 15 bp, Homo sapiens
ctaaaaaaatacaaa

SEQ ID NO: 7695 - DNA, 15 bp, Homo sapiens
actaaaaaaatacaa

SEQ ID NO: 7696 - DNA, 15 bp, Homo sapiens
tactaaaaaaataca

SEQ ID NO: 7697 - DNA, 15 bp, Homo sapiens
ctactaaaaaaatac

SEQ ID NO: 7698 - DNA, 15 bp, Homo sapiens
tctactaaaaaaata

SEQ ID NO: 7699 - DNA, 15 bp, Homo sapiens
ctctactaaaaaaat

SEQ ID NO: 7700 - DNA, 15 bp, Homo sapiens
tctctactaaaaaaa

SEQ ID NO: 7701 - DNA, 15 bp, Homo sapiens
gtctctactaaaaaa

SEQ ID NO: 7702 - DNA, 15 bp, Homo sapiens
acctgtctctactaa

SEQ ID NO: 7703 - DNA, 15 bp, Homo sapiens
aacctgtctctacta

SEQ ID NO: 7704 - DNA, 15 bp, Homo sapiens
aaacctgtctctact

SEQ ID NO: 7705 - DNA, 15 bp, Homo sapiens
aaaacctgtctctac

SEQ ID NO: 7706 - DNA, 15 bp, Homo sapiens
gaaaacctgtctcta

SEQ ID NO: 7707 - DNA, 15 bp, Homo sapiens
tgaaaacctgtctct

SEQ ID NO: 7708 - DNA, 15 bp, Homo sapiens
gtgaaaacctgtctc

SEQ ID NO: 7709 - DNA, 15 bp, Homo sapiens
ggtgaaaacctgtct

SEQ ID NO: 7710 - DNA, 15 bp, Homo sapiens
tggtgaaaacctgtc

SEQ ID NO: 7711 - DNA, 15 bp, Homo sapiens
atggtgaaaacctgt

SEQ ID NO: 7712 - DNA, 15 bp, Homo sapiens
catggtgaaaacctg

SEQ ID NO: 7713 - DNA, 15 bp, Homo sapiens
acatggtgaaaacct

SEQ ID NO: 7714 - DNA, 15 bp, Homo sapiens
aacatggtgaaaacc

SEQ ID NO: 7715 - DNA, 15 bp, Homo sapiens
caacatggtgaaaac

SEQ ID NO: 7716 - DNA, 15 bp, Homo sapiens
ccaacatggtgaaaa

SEQ ID NO: 7717 - DNA, 15 bp, Homo sapiens
aagaccagcctggcc

SEQ ID NO: 7718 - DNA, 15 bp, Homo sapiens
caagaccagcctggc

SEQ ID NO: 7719 - DNA, 15 bp, Homo sapiens
tcaagaccagcctgg

SEQ ID NO: 7720 - DNA, 15 bp, Homo sapiens
ttcaagaccagcctg

SEQ ID NO: 7721 - DNA, 15 bp, Homo sapiens
gttcaagaccagcct

SEQ ID NO: 7722 - DNA, 15 bp, Homo sapiens
agttcaagaccagcc

SEQ ID NO: 7723 - DNA, 15 bp, Homo sapiens
gagttcaagaccagc

SEQ ID NO: 7724 - DNA, 15 bp, Homo sapiens
ggagttcaagaccag

SEQ ID NO: 7725 - DNA, 15 bp, Homo sapiens
aggagttcaagacca

SEQ ID NO: 7726 - DNA, 15 bp, Homo sapiens
caggagttcaagacc

SEQ ID NO: 7727 - DNA, 15 bp, Homo sapiens
tcaggagttcaagac

SEQ ID NO: 7728 - DNA, 15 bp, Homo sapiens
gtcaggagttcaaga

SEQ ID NO: 7729 - DNA, 15 bp, Homo sapiens
ggtcaggagttcaag

SEQ ID NO: 7730 - DNA, 15 bp, Homo sapiens
aggtcaggagttcaa

SEQ ID NO: 7731 - DNA, 15 bp, Homo sapiens
gaggtcaggagttca

SEQ ID NO: 7732 - DNA, 15 bp, Homo sapiens
ttgaggtcaggagtt

SEQ ID NO: 7733 - DNA, 15 bp, Homo sapiens
cttgaggtcaggagt

SEQ ID NO: 7734 - DNA, 15 bp, Homo sapiens
acttgaggtcaggag

SEQ ID NO: 7735 - DNA, 15 bp, Homo sapiens
cacttgaggtcagga

SEQ ID NO: 7736 - DNA, 15 bp, Homo sapiens
tcacttgaggtcagg

SEQ ID NO: 7737 - DNA, 15 bp, Homo sapiens
atcacttgaggtcag

SEQ ID NO: 7738 - DNA, 15 bp, Homo sapiens
catcacttgaggtca

SEQ ID NO: 7739 - DNA, 15 bp, Homo sapiens
acatcacttgaggtc

SEQ ID NO: 7740 - DNA, 15 bp, Homo sapiens
cacatcacttgaggt

SEQ ID NO: 7741 - DNA, 15 bp, Homo sapiens
gcacatcacttgagg

SEQ ID NO: 7742 - DNA, 15 bp, Homo sapiens
ggcacatcacttgag

SEQ ID NO: 7743 - DNA, 15 bp, Homo sapiens
gggcacatcacttga

SEQ ID NO: 7744 - DNA, 15 bp, Homo sapiens
tgggcacatcacttg

SEQ ID NO: 7745 - DNA, 15 bp, Homo sapiens
gtgggcacatcactt

SEQ ID NO: 7746 - DNA, 15 bp, Homo sapiens
ggtgggcacatcact

SEQ ID NO: 7747 - DNA, 15 bp, Homo sapiens
aggtgggcacatcac

SEQ ID NO: 7748 - DNA, 15 bp, Homo sapiens
gaggtgggcacatca

SEQ ID NO: 7749 - DNA, 15 bp, Homo sapiens
tgaggtgggcacatc

SEQ ID NO: 7750 - DNA, 15 bp, Homo sapiens
ctgaggtgggcacat

SEQ ID NO: 7751 - DNA, 15 bp, Homo sapiens
gctgaggtgggcaca

SEQ ID NO: 7752 - DNA, 15 bp, Homo sapiens
ggctgaggtgggcac

SEQ ID NO: 7753 - DNA, 15 bp, Homo sapiens
aggctgaggtgggca

SEQ ID NO: 7754 - DNA, 15 bp, Homo sapiens
gaggctgaggtgggc

SEQ ID NO: 7755 - DNA, 15 bp, Homo sapiens
ggaggctgaggtggg

SEQ ID NO: 7756 - DNA, 15 bp, Homo sapiens
gggaggctgaggtgg

SEQ ID NO: 7757 - DNA, 15 bp, Homo sapiens
tgggaggctgaggtg

SEQ ID NO: 7758 - DNA, 15 bp, Homo sapiens
ttgggaggctgaggt

SEQ ID NO: 7759 - DNA, 15 bp, Homo sapiens
tttgggaggctgagg

SEQ ID NO: 7760 - DNA, 15 bp, Homo sapiens
tagcactttgggagg

SEQ ID NO: 7761 - DNA, 15 bp, Homo sapiens
ctagcactttgggag

SEQ ID NO: 7762 - DNA, 15 bp, Homo sapiens
cctagcactttggga

SEQ ID NO: 7763 - DNA, 15 bp, Homo sapiens
tcctagcactttggg

SEQ ID NO: 7764 - DNA, 15 bp, Homo sapiens
atcctagcactttgg

SEQ ID NO: 7765 - DNA, 15 bp, Homo sapiens
aatcctagcactttg

SEQ ID NO: 7766 - DNA, 15 bp, Homo sapiens
taatcctagcacttt

SEQ ID NO: 7767 - DNA, 15 bp, Homo sapiens
gtaatcctagcactt

SEQ ID NO: 7768 - DNA, 15 bp, Homo sapiens
tgtaatcctagcact

SEQ ID NO: 7769 - DNA, 15 bp, Homo sapiens
ctgtaatcctagcac

SEQ ID NO: 7770 - DNA, 15 bp, Homo sapiens
cctgtaatcctagca

SEQ ID NO: 7771 - DNA, 15 bp, Homo sapiens
gcctgtaatcctagc

SEQ ID NO: 7772 - DNA, 15 bp, Homo sapiens
cgcctgtaatcctag

SEQ ID NO: 7773 - DNA, 15 bp, Homo sapiens
acgcctgtaatccta

SEQ ID NO: 7774 - DNA, 15 bp, Homo sapiens
cacgcctgtaatcct

SEQ ID NO: 7775 - DNA, 15 bp, Homo sapiens
agtggctcacgcctg

SEQ ID NO: 7776 - DNA, 15 bp, Homo sapiens
cagtggctcacgcct

SEQ ID NO: 7777 - DNA, 15 bp, Homo sapiens
gcagtggctcacgcc

SEQ ID NO: 7778 - DNA, 15 bp, Homo sapiens
tgcagtggctcacgc

SEQ ID NO: 7779 - DNA, 15 bp, Homo sapiens
gtgcagtggctcacg

SEQ ID NO: 7780 - DNA, 15 bp, Homo sapiens
ggtgcagtggctcac

SEQ ID NO: 7781 - DNA, 15 bp, Homo sapiens
gggtgcagtggctca

SEQ ID NO: 7782 - DNA, 15 bp, Homo sapiens
cgggtgcagtggctc

SEQ ID NO: 7783 - DNA, 15 bp, Homo sapiens
tcgggtgcagtggct

SEQ ID NO: 7784 - DNA, 15 bp, Homo sapiens
gtcgggtgcagtggc

SEQ ID NO: 7785 - DNA, 15 bp, Homo sapiens
ggtcgggtgcagtgg

SEQ ID NO: 7786 - DNA, 15 bp, Homo sapiens
tggtcgggtgcagtg

SEQ ID NO: 7787 - DNA, 15 bp, Homo sapiens
ctggtcgggtgcagt

SEQ ID NO: 7788 - DNA, 15 bp, Homo sapiens
tctggtcgggtgcag

SEQ ID NO: 7789 - DNA, 15 bp, Homo sapiens
ttctggtcgggtgca

SEQ ID NO: 7790 - DNA, 15 bp, Homo sapiens
gttctggtcgggtgc

SEQ ID NO: 7791 - DNA, 15 bp, Homo sapiens
tgttctggtcgggtg

SEQ ID NO: 7792 - DNA, 15 bp, Homo sapiens
ttgttctggtcgggt

SEQ ID NO: 7793 - DNA, 15 bp, Homo sapiens
attgttctggtcggg

SEQ ID NO: 7794 - DNA, 15 bp, Homo sapiens
gattgttctggtcgg

SEQ ID NO: 7795 - DNA, 15 bp, Homo sapiens
ggattgttctggtcg

SEQ ID NO: 7796 - DNA, 15 bp, Homo sapiens
gggattgttctggtc

SEQ ID NO: 7797 - DNA, 15 bp, Homo sapiens
tgggattgttctggt

SEQ ID NO: 7798 - DNA, 15 bp, Homo sapiens
ttgggattgttctgg

SEQ ID NO: 7799 - DNA, 15 bp, Homo sapiens
attgggattgttctg

SEQ ID NO: 7800 - DNA, 15 bp, Homo sapiens
aattgggattgttct

SEQ ID NO: 7801 - DNA, 15 bp, Homo sapiens
gaattgggattgttc

SEQ ID NO: 7802 - DNA, 15 bp, Homo sapiens
agaattgggattgtt

SEQ ID NO: 7803 - DNA, 15 bp, Homo sapiens
tagaattgggattgt

SEQ ID NO: 7804 - DNA, 15 bp, Homo sapiens
atagaattgggattg

SEQ ID NO: 7805 - DNA, 15 bp, Homo sapiens
gatagaattgggatt

SEQ ID NO: 7806 - DNA, 15 bp, Homo sapiens
agatagaattgggat

SEQ ID NO: 7807 - DNA, 15 bp, Homo sapiens
cagatagaattggga

SEQ ID NO: 7808 - DNA, 15 bp, Homo sapiens
acagatagaattggg

SEQ ID NO: 7809 - DNA, 15 bp, Homo sapiens
tacagatagaattgg

SEQ ID NO: 7810 - DNA, 15 bp, Homo sapiens
atacagatagaattg

SEQ ID NO: 7811 - DNA, 15 bp, Homo sapiens
gatacagatagaatt

SEQ ID NO: 7812 - DNA, 15 bp, Homo sapiens
tgatacagatagaat

SEQ ID NO: 7813 - DNA, 15 bp, Homo sapiens
gtgatacagatagaa

SEQ ID NO: 7814 - DNA, 15 bp, Homo sapiens
tgtgatacagataga

SEQ ID NO: 7815 - DNA, 15 bp, Homo sapiens
gtgtgatacagatag

SEQ ID NO: 7816 - DNA, 15 bp, Homo sapiens
tgtgtgatacagata

SEQ ID NO: 7817 - DNA, 15 bp, Homo sapiens
ctgtgtgatacagat

SEQ ID NO: 7818 - DNA, 15 bp, Homo sapiens
actgtgtgatacaga

SEQ ID NO: 7819 - DNA, 15 bp, Homo sapiens
cactgtgtgatacag

SEQ ID NO: 7820 - DNA, 15 bp, Homo sapiens
acactgtgtgataca

SEQ ID NO: 7821 - DNA, 15 bp, Homo sapiens
cacactgtgtgatac

SEQ ID NO: 7822 - DNA, 15 bp, Homo sapiens
acacactgtgtgata

SEQ ID NO: 7823 - DNA, 15 bp, Homo sapiens
aacacactgtgtgat

SEQ ID NO: 7824 - DNA, 15 bp, Homo sapiens
aaacacactgtgtga

SEQ ID NO: 7825 - DNA, 15 bp, Homo sapiens
gaaacacactgtgtg

SEQ ID NO: 7826 - DNA, 15 bp, Homo sapiens
agaaacacactgtgt

SEQ ID NO: 7827 - DNA, 15 bp, Homo sapiens
gagaaacacactgtg

SEQ ID NO: 7828 - DNA, 15 bp, Homo sapiens
tgagaaacacactgt

SEQ ID NO: 7829 - DNA, 15 bp, Homo sapiens
atgagaaacacactg

SEQ ID NO: 7830 - DNA, 15 bp, Homo sapiens
gatgagaaacacact

SEQ ID NO: 7831 - DNA, 15 bp, Homo sapiens
agatgagaaacacac

SEQ ID NO: 7832 - DNA, 15 bp, Homo sapiens
tagatgagaaacaca

SEQ ID NO: 7833 - DNA, 15 bp, Homo sapiens
ctagatgagaaacac

SEQ ID NO: 7834 - DNA, 15 bp, Homo sapiens
cctagatgagaaaca

SEQ ID NO: 7835 - DNA, 15 bp, Homo sapiens
tcctagatgagaaac

SEQ ID NO: 7836 - DNA, 15 bp, Homo sapiens
atcctagatgagaaa

SEQ ID NO: 7837 - DNA, 15 bp, Homo sapiens
tatcctagatgagaa

SEQ ID NO: 7838 - DNA, 15 bp, Homo sapiens
gtatcctagatgaga

SEQ ID NO: 7839 - DNA, 15 bp, Homo sapiens
tgtatcctagatgag

SEQ ID NO: 7840 - DNA, 15 bp, Homo sapiens
ctgtatcctagatga

SEQ ID NO: 7841 - DNA, 15 bp, Homo sapiens
tctgtatcctagatg

SEQ ID NO: 7842 - DNA, 15 bp, Homo sapiens
gtctgtatcctagat

SEQ ID NO: 7843 - DNA, 15 bp, Homo sapiens
agtctgtatcctaga

SEQ ID NO: 7844 - DNA, 15 bp, Homo sapiens
gagtctgtatcctag

SEQ ID NO: 7845 - DNA, 15 bp, Homo sapiens
tgagtctgtatccta

SEQ ID NO: 7846 - DNA, 15 bp, Homo sapiens
gtgagtctgtatcct

SEQ ID NO: 7847 - DNA, 15 bp, Homo sapiens
agtgagtctgtatcc

SEQ ID NO: 7848 - DNA, 15 bp, Homo sapiens
cagtgagtctgtatc

SEQ ID NO: 7849 - DNA, 15 bp, Homo sapiens
ccagtgagtctgtat

SEQ ID NO: 7850 - DNA, 15 bp, Homo sapiens
cccagtgagtctgta

SEQ ID NO: 7851 - DNA, 15 bp, Homo sapiens
gcccagtgagtctgt

SEQ ID NO: 7852 - DNA, 15 bp, Homo sapiens
tgcccagtgagtctg

SEQ ID NO: 7853 - DNA, 15 bp, Homo sapiens
ctgcccagtgagtct

SEQ ID NO: 7854 - DNA, 15 bp, Homo sapiens
gctgcccagtgagtc

SEQ ID NO: 7855 - DNA, 15 bp, Homo sapiens
tgctgcccagtgagt

SEQ ID NO: 7856 - DNA, 15 bp, Homo sapiens
ctgctgcccagtgag

SEQ ID NO: 7857 - DNA, 15 bp, Homo sapiens
gctgctgcccagtga

SEQ ID NO: 7858 - DNA, 15 bp, Homo sapiens
ggctgctgcccagtg

SEQ ID NO: 7859 - DNA, 15 bp, Homo sapiens
cggctgctgcccagt

SEQ ID NO: 7860 - DNA, 15 bp, Homo sapiens
acggctgctgcccag

SEQ ID NO: 7861 - DNA, 15 bp, Homo sapiens
cacggctgctgccca

SEQ ID NO: 7862 - DNA, 15 bp, Homo sapiens
acacggctgctgccc

SEQ ID NO: 7863 - DNA, 15 bp, Homo sapiens
gacacggctgctgcc

SEQ ID NO: 7864 - DNA, 15 bp, Homo sapiens
agacacggctgctgc

SEQ ID NO: 7865 - DNA, 15 bp, Homo sapiens
cagacacggctgctg

SEQ ID NO: 7866 - DNA, 15 bp, Homo sapiens
gcagacacggctgct

SEQ ID NO: 7867 - DNA, 15 bp, Homo sapiens
ggcagacacggctgc

SEQ ID NO: 7868 - DNA, 15 bp, Homo sapiens
gggcagacacggctg

SEQ ID NO: 7869 - DNA, 15 bp, Homo sapiens
agggcagacacggct

SEQ ID NO: 7870 - DNA, 15 bp, Homo sapiens
cagggcagacacggc

SEQ ID NO: 7871 - DNA, 15 bp, Homo sapiens
ccagggcagacacgg

SEQ ID NO: 7872 - DNA, 15 bp, Homo sapiens
tccagggcagacacg

SEQ ID NO: 7873 - DNA, 15 bp, Homo sapiens
ttccagggcagacac

SEQ ID NO: 7874 - DNA, 15 bp, Homo sapiens
tttccagggcagaca

SEQ ID NO: 7875 - DNA, 15 bp, Homo sapiens
ctttccagggcagac

SEQ ID NO: 7876 - DNA, 15 bp, Homo sapiens
actttccagggcaga

SEQ ID NO: 7877 - DNA, 15 bp, Homo sapiens
cactttccagggcag

SEQ ID NO: 7878 - DNA, 15 bp, Homo sapiens
ccactttccagggca

SEQ ID NO: 7879 - DNA, 15 bp, Homo sapiens
cccactttccagggc

SEQ ID NO: 7880 - DNA, 15 bp, Homo sapiens
ccccactttccaggg

SEQ ID NO: 7881 - DNA, 15 bp, Homo sapiens
cccccactttccagg

SEQ ID NO: 7882 - DNA, 15 bp, Homo sapiens
gcccccactttccag

SEQ ID NO: 7883 - DNA, 15 bp, Homo sapiens
tgcccccactttcca

SEQ ID NO: 7884 - DNA, 15 bp, Homo sapiens
atgcccccactttcc

SEQ ID NO: 7885 - DNA, 15 bp, Homo sapiens
gatgcccccactttc

SEQ ID NO: 7886 - DNA, 15 bp, Homo sapiens
tgatgcccccacttt

SEQ ID NO: 7887 - DNA, 15 bp, Homo sapiens
ctgatgcccccactt

SEQ ID NO: 7888 - DNA, 15 bp, Homo sapiens
cctgatgcccccact

SEQ ID NO: 7889 - DNA, 15 bp, Homo sapiens
ccctgatgcccccac

SEQ ID NO: 7890 - DNA, 15 bp, Homo sapiens
tccctgatgccccca

SEQ ID NO: 7891 - DNA, 15 bp, Homo sapiens
ctccctgatgccccc

SEQ ID NO: 7892 - DNA, 15 bp, Homo sapiens
cctccctgatgcccc

SEQ ID NO: 7893 - DNA, 15 bp, Homo sapiens
tcctccctgatgccc

SEQ ID NO: 7894 - DNA, 15 bp, Homo sapiens
ctcctccctgatgcc

SEQ ID NO: 7895 - DNA, 15 bp, Homo sapiens
cctcctccctgatgc

SEQ ID NO: 7896 - DNA, 15 bp, Homo sapiens
tcctcctccctgatg

SEQ ID NO: 7897 - DNA, 15 bp, Homo sapiens
ctcctcctccctgat

SEQ ID NO: 7898 - DNA, 15 bp, Homo sapiens
cctcctcctccctga

SEQ ID NO: 7899 - DNA, 15 bp, Homo sapiens
tcctcctcctccctg

SEQ ID NO: 7900 - DNA, 15 bp, Homo sapiens
ttcctcctcctccct

SEQ ID NO: 7901 - DNA, 15 bp, Homo sapiens
attcctcctcctccc

SEQ ID NO: 7902 - DNA, 15 bp, Homo sapiens
cattcctcctcctcc

SEQ ID NO: 7903 - DNA, 15 bp, Homo sapiens
acattcctcctcctc

SEQ ID NO: 7904 - DNA, 15 bp, Homo sapiens
cacattcctcctcct

SEQ ID NO: 7905 - DNA, 15 bp, Homo sapiens
acacattcctcctcc

SEQ ID NO: 7906 - DNA, 15 bp, Homo sapiens
cacacattcctcctc

SEQ ID NO: 7907 - DNA, 15 bp, Homo sapiens
tcacacattcctcct

SEQ ID NO: 7908 - DNA, 15 bp, Homo sapiens
ttcacacattcctcc

SEQ ID NO: 7909 - DNA, 15 bp, Homo sapiens
gttcacacattcctc

SEQ ID NO: 7910 - DNA, 15 bp, Homo sapiens
ggttcacacattcct

SEQ ID NO: 7911 - DNA, 15 bp, Homo sapiens
aggttcacacattcc

SEQ ID NO: 7912 - DNA, 15 bp, Homo sapiens
taggttcacacattc

SEQ ID NO: 7913 - DNA, 15 bp, Homo sapiens
ttaggttcacacatt

SEQ ID NO: 7914 - DNA, 15 bp, Homo sapiens
tttaggttcacacat

SEQ ID NO: 7915 - DNA, 15 bp, Homo sapiens
gtttaggttcacaca

SEQ ID NO: 7916 - DNA, 15 bp, Homo sapiens
tgtttaggttcacac

SEQ ID NO: 7917 - DNA, 15 bp, Homo sapiens
gtgtttaggttcaca

SEQ ID NO: 7918 - DNA, 15 bp, Homo sapiens
tgtgtttaggttcac

SEQ ID NO: 7919 - DNA, 15 bp, Homo sapiens
atgtgtttaggttca

SEQ ID NO: 7920 - DNA, 15 bp, Homo sapiens
catgtgtttaggttc

SEQ ID NO: 7921 - DNA, 15 bp, Homo sapiens
ccatgtgtttaggtt

SEQ ID NO: 7922 - DNA, 15 bp, Homo sapiens
tccatgtgtttaggt

SEQ ID NO: 7923 - DNA, 15 bp, Homo sapiens
ttccatgtgtttagg

SEQ ID NO: 7924 - DNA, 15 bp, Homo sapiens
cttccatgtgtttag

SEQ ID NO: 7925 - DNA, 15 bp, Homo sapiens
tcttccatgtgttta

SEQ ID NO: 7926 - DNA, 15 bp, Homo sapiens
gtcttccatgtgttt

SEQ ID NO: 7927 - DNA, 15 bp, Homo sapiens
ggtcttccatgtgtt

SEQ ID NO: 7928 - DNA, 15 bp, Homo sapiens
aggtcttccatgtgt

SEQ ID NO: 7929 - DNA, 15 bp, Homo sapiens
aaggtcttccatgtg

SEQ ID NO: 7930 - DNA, 15 bp, Homo sapiens
gaaggtcttccatgt

SEQ ID NO: 7931 - DNA, 15 bp, Homo sapiens
tgaaggtcttccatg

SEQ ID NO: 7932 - DNA, 15 bp, Homo sapiens
ttgaaggtcttccat

SEQ ID NO: 7933 - DNA, 15 bp, Homo sapiens
tttgaaggtcttcca

SEQ ID NO: 7934 - DNA, 15 bp, Homo sapiens
ttttgaaggtcttcc

SEQ ID NO: 7935 - DNA, 15 bp, Homo sapiens
cttttgaaggtcttc

SEQ ID NO: 7936 - DNA, 15 bp, Homo sapiens
gcttttgaaggtctt

SEQ ID NO: 7937 - DNA, 15 bp, Homo sapiens
tgcttttgaaggtct

SEQ ID NO: 7938 - DNA, 15 bp, Homo sapiens
gtgcttttgaaggtc

SEQ ID NO: 7939 - DNA, 15 bp, Homo sapiens
ggtgcttttgaaggt

SEQ ID NO: 7940 - DNA, 15 bp, Homo sapiens
tggtgcttttgaagg

SEQ ID NO: 7941 - DNA, 15 bp, Homo sapiens
ctggtgcttttgaag

SEQ ID NO: 7942 - DNA, 15 bp, Homo sapiens
tctggtgcttttgaa

SEQ ID NO: 7943 - DNA, 15 bp, Homo sapiens
ttctggtgcttttga

SEQ ID NO: 7944 - DNA, 15 bp, Homo sapiens
gttctggtgcttttg

SEQ ID NO: 7945 - DNA, 15 bp, Homo sapiens
tgttctggtgctttt

SEQ ID NO: 7946 - DNA, 15 bp, Homo sapiens
gtgttctggtgcttt

SEQ ID NO: 7947 - DNA, 15 bp, Homo sapiens
tgtgttctggtgctt

SEQ ID NO: 7948 - DNA, 15 bp, Homo sapiens
ctgtgttctggtgct

SEQ ID NO: 7949 - DNA, 15 bp, Homo sapiens
actgtgttctggtgc

SEQ ID NO: 7950 - DNA, 15 bp, Homo sapiens
gactgtgttctggtg

SEQ ID NO: 7951 - DNA, 15 bp, Homo sapiens
agactgtgttctggt

SEQ ID NO: 7952 - DNA, 15 bp, Homo sapiens
aagactgtgttctgg

SEQ ID NO: 7953 - DNA, 15 bp, Homo sapiens
aaagactgtgttctg

SEQ ID NO: 7954 - DNA, 15 bp, Homo sapiens
gaaagactgtgttct

SEQ ID NO: 7955 - DNA, 15 bp, Homo sapiens
tgaaagactgtgttc

SEQ ID NO: 7956 - DNA, 15 bp, Homo sapiens
ctgaaagactgtgtt

SEQ ID NO: 7957 - DNA, 15 bp, Homo sapiens
gctgaaagactgtgt

SEQ ID NO: 7958 - DNA, 15 bp, Homo sapiens
tgctgaaagactgtg

SEQ ID NO: 7959 - DNA, 15 bp, Homo sapiens
gtgctgaaagactgt

SEQ ID NO: 7960 - DNA, 15 bp, Homo sapiens
tgtgctgaaagactg

SEQ ID NO: 7961 - DNA, 15 bp, Homo sapiens
ctgtgctgaaagact

SEQ ID NO: 7962 - DNA, 15 bp, Homo sapiens
tctgtgctgaaagac

SEQ ID NO: 7963 - DNA, 15 bp, Homo sapiens
ttctgtgctgaaaga

SEQ ID NO: 7964 - DNA, 15 bp, Homo sapiens
attctgtgctgaaag

SEQ ID NO: 7965 - DNA, 15 bp, Homo sapiens
aattctgtgctgaaa

SEQ ID NO: 7966 - DNA, 15 bp, Homo sapiens
gaattctgtgctgaa

SEQ ID NO: 7967 - DNA, 15 bp, Homo sapiens
agaattctgtgctga

SEQ ID NO: 7968 - DNA, 15 bp, Homo sapiens
aagaattctgtgctg

SEQ ID NO: 7969 - DNA, 15 bp, Homo sapiens
aaagaattctgtgct

SEQ ID NO: 7970 - DNA, 15 bp, Homo sapiens
taaagaattctgtgc

SEQ ID NO: 7971 - DNA, 15 bp, Homo sapiens
gtaaagaattctgtg

SEQ ID NO: 7972 - DNA, 15 bp, Homo sapiens
tgtaaagaattctgt

SEQ ID NO: 7973 - DNA, 15 bp, Homo sapiens
atgtaaagaattctg

SEQ ID NO: 7974 - DNA, 15 bp, Homo sapiens
gatgtaaagaattct

SEQ ID NO: 7975 - DNA, 15 bp, Homo sapiens
ggatgtaaagaattc

SEQ ID NO: 7976 - DNA, 15 bp, Homo sapiens
aggatgtaaagaatt

SEQ ID NO: 7977 - DNA, 15 bp, Homo sapiens
aaggatgtaaagaat

SEQ ID NO: 7978 - DNA, 15 bp, Homo sapiens
taaggatgtaaagaa

SEQ ID NO: 7979 - DNA, 15 bp, Homo sapiens
ttaaggatgtaaaga

SEQ ID NO: 7980 - DNA, 15 bp, Homo sapiens
gttaaggatgtaaag

SEQ ID NO: 7981 - DNA, 15 bp, Homo sapiens
agttaaggatgtaaa

SEQ ID NO: 7982 - DNA, 15 bp, Homo sapiens
aagttaaggatgtaa

SEQ ID NO: 7983 - DNA, 15 bp, Homo sapiens
caagttaaggatgta

SEQ ID NO: 7984 - DNA, 15 bp, Homo sapiens
gcaagttaaggatgt

SEQ ID NO: 7985 - DNA, 15 bp, Homo sapiens
tgcaagttaaggatg

SEQ ID NO: 7986 - DNA, 15 bp, Homo sapiens
gtgcaagttaaggat

SEQ ID NO: 7987 - DNA, 15 bp, Homo sapiens
agtgcaagttaagga

SEQ ID NO: 7988 - DNA, 15 bp, Homo sapiens
aagtgcaagttaagg

SEQ ID NO: 7989 - DNA, 15 bp, Homo sapiens
caagtgcaagttaag

SEQ ID NO: 7990 - DNA, 15 bp, Homo sapiens
acaagtgcaagttaa

SEQ ID NO: 7991 - DNA, 15 bp, Homo sapiens
cacaagtgcaagtta

SEQ ID NO: 7992 - DNA, 15 bp, Homo sapiens
gcacaagtgcaagtt

SEQ ID NO: 7993 - DNA, 15 bp, Homo sapiens
agcacaagtgcaagt

SEQ ID NO: 7994 - DNA, 15 bp, Homo sapiens
tagcacaagtgcaag

SEQ ID NO: 7995 - DNA, 15 bp, Homo sapiens
ttagcacaagtgcaa

SEQ ID NO: 7996 - DNA, 15 bp, Homo sapiens
attagcacaagtgca

SEQ ID NO: 7997 - DNA, 15 bp, Homo sapiens
cattagcacaagtgc

SEQ ID NO: 7998 - DNA, 15 bp, Homo sapiens
tcattagcacaagtg

SEQ ID NO: 7999 - DNA, 15 bp, Homo sapiens
ttcattagcacaagt

SEQ ID NO: 8000 - DNA, 15 bp, Homo sapiens
cttcattagcacaag

SEQ ID NO: 8001 - DNA, 15 bp, Homo sapiens
tcttcattagcacaa

SEQ ID NO: 8002 - DNA, 15 bp, Homo sapiens
gtcttcattagcaca

SEQ ID NO: 8003 - DNA, 15 bp, Homo sapiens
agtcttcattagcac

SEQ ID NO: 8004 - DNA, 15 bp, Homo sapiens
gagtcttcattagca

SEQ ID NO: 8005 - DNA, 15 bp, Homo sapiens
agagtcttcattagc

SEQ ID NO: 8006 - DNA, 15 bp, Homo sapiens
tagagtcttcattag

SEQ ID NO: 8007 - DNA, 15 bp, Homo sapiens
gtagagtcttcatta

SEQ ID NO: 8008 - DNA, 15 bp, Homo sapiens
ggtagagtcttcatt

SEQ ID NO: 8009 - DNA, 15 bp, Homo sapiens
aggtagagtcttcat

SEQ ID NO: 8010 - DNA, 15 bp, Homo sapiens
gaggtagagtcttca

SEQ ID NO: 8011 - DNA, 15 bp, Homo sapiens
ggaggtagagtcttc

SEQ ID NO: 8012 - DNA, 15 bp, Homo sapiens
aggaggtagagtctt

SEQ ID NO: 8013 - DNA, 15 bp, Homo sapiens
caggaggtagagtct

SEQ ID NO: 8014 - DNA, 15 bp, Homo sapiens
acaggaggtagagtc

SEQ ID NO: 8015 - DNA, 15 bp, Homo sapiens
aacaggaggtagagt

SEQ ID NO: 8016 - DNA, 15 bp, Homo sapiens
gaacaggaggtagag

SEQ ID NO: 8017 - DNA, 15 bp, Homo sapiens
agaacaggaggtaga

SEQ ID NO: 8018 - DNA, 15 bp, Homo sapiens
aagaacaggaggtag

SEQ ID NO: 8019 - DNA, 15 bp, Homo sapiens
aaagaacaggaggta

SEQ ID NO: 8020 - DNA, 15 bp, Homo sapiens
aaaagaacaggaggt

SEQ ID NO: 8021 - DNA, 15 bp, Homo sapiens
gaaaagaacaggagg

SEQ ID NO: 8022 - DNA, 15 bp, Homo sapiens
ggaaaagaacaggag

SEQ ID NO: 8023 - DNA, 15 bp, Homo sapiens
aggaaaagaacagga

SEQ ID NO: 8024 - DNA, 15 bp, Homo sapiens
aaggaaaagaacagg

SEQ ID NO: 8025 - DNA, 15 bp, Homo sapiens
gaaggaaaagaacag

SEQ ID NO: 8026 - DNA, 15 bp, Homo sapiens
agaaggaaaagaaca

SEQ ID NO: 8027 - DNA, 15 bp, Homo sapiens
cagaaggaaaagaac

SEQ ID NO: 8028 - DNA, 15 bp, Homo sapiens
acagaaggaaaagaa

SEQ ID NO: 8029 - DNA, 15 bp, Homo sapiens
cacagaaggaaaaga

SEQ ID NO: 8030 - DNA, 15 bp, Homo sapiens
tcacagaaggaaaag

SEQ ID NO: 8031 - DNA, 15 bp, Homo sapiens
gtcacagaaggaaaa

SEQ ID NO: 8032 - DNA, 15 bp, Homo sapiens
tgtcacagaaggaaa

SEQ ID NO: 8033 - DNA, 15 bp, Homo sapiens
ttgtcacagaaggaa

SEQ ID NO: 8034 - DNA, 15 bp, Homo sapiens
tttgtcacagaagga

SEQ ID NO: 8035 - DNA, 15 bp, Homo sapiens
ttttgtcacagaagg

SEQ ID NO: 8036 - DNA, 15 bp, Homo sapiens
gttttgtcacagaag

SEQ ID NO: 8037 - DNA, 15 bp, Homo sapiens
tgttttgtcacagaa

SEQ ID NO: 8038 - DNA, 15 bp, Homo sapiens
ttgttttgtcacaga

SEQ ID NO: 8039 - DNA, 15 bp, Homo sapiens
cttgttttgtcacag

SEQ ID NO: 8040 - DNA, 15 bp, Homo sapiens
acttgttttgtcaca

SEQ ID NO: 8041 - DNA, 15 bp, Homo sapiens
aacttgttttgtcac

SEQ ID NO: 8042 - DNA, 15 bp, Homo sapiens
taacttgttttgtca

SEQ ID NO: 8043 - DNA, 15 bp, Homo sapiens
ataacttgttttgtc

SEQ ID NO: 8044 - DNA, 15 bp, Homo sapiens
gataacttgttttgt

SEQ ID NO: 8045 - DNA, 15 bp, Homo sapiens
agataacttgttttg

SEQ ID NO: 8046 - DNA, 15 bp, Homo sapiens
cagataacttgtttt

SEQ ID NO: 8047 - DNA, 15 bp, Homo sapiens
acagataacttgttt

SEQ ID NO: 8048 - DNA, 15 bp, Homo sapiens
gacagataacttgtt

SEQ ID NO: 8049 - DNA, 15 bp, Homo sapiens
agacagataacttgt

SEQ ID NO: 8050 - DNA, 15 bp, Homo sapiens
cagacagataacttg

SEQ ID NO: 8051 - DNA, 15 bp, Homo sapiens
ccagacagataactt

SEQ ID NO: 8052 - DNA, 15 bp, Homo sapiens
cccagacagataact

SEQ ID NO: 8053 - DNA, 15 bp, Homo sapiens
tcccagacagataac

SEQ ID NO: 8054 - DNA, 15 bp, Homo sapiens
ttcccagacagataa

SEQ ID NO: 8055 - DNA, 15 bp, Homo sapiens
cttcccagacagata

SEQ ID NO: 8056 - DNA, 15 bp, Homo sapiens
tcttcccagacagat

SEQ ID NO: 8057 - DNA, 15 bp, Homo sapiens
gtcttcccagacaga

SEQ ID NO: 8058 - DNA, 15 bp, Homo sapiens
tgtcttcccagacag

SEQ ID NO: 8059 - DNA, 15 bp, Homo sapiens
atgtcttcccagaca

SEQ ID NO: 8060 - DNA, 15 bp, Homo sapiens
catgtcttcccagac

SEQ ID NO: 8061 - DNA, 15 bp, Homo sapiens
ccatgtcttcccaga

SEQ ID NO: 8062 - DNA, 15 bp, Homo sapiens
gccatgtcttcccag

SEQ ID NO: 8063 - DNA, 15 bp, Homo sapiens
tgccatgtcttccca

SEQ ID NO: 8064 - DNA, 15 bp, Homo sapiens
gtgccatgtcttccc

SEQ ID NO: 8065 - DNA, 15 bp, Homo sapiens
tgtgccatgtcttcc

SEQ ID NO: 8066 - DNA, 15 bp, Homo sapiens
ttgtgccatgtcttc

SEQ ID NO: 8067 - DNA, 15 bp, Homo sapiens
attgtgccatgtctt

SEQ ID NO: 8068 - DNA, 15 bp, Homo sapiens
aattgtgccatgtct

SEQ ID NO: 8069 - DNA, 15 bp, Homo sapiens
aaattgtgccatgtc

SEQ ID NO: 8070 - DNA, 15 bp, Homo sapiens
taaattgtgccatgt

SEQ ID NO: 8071 - DNA, 15 bp, Homo sapiens
ataaattgtgccatg

SEQ ID NO: 8072 - DNA, 15 bp, Homo sapiens
aataaattgtgccat

SEQ ID NO: 8073 - DNA, 15 bp, Homo sapiens
aaataaattgtgcca

SEQ ID NO: 8074 - DNA, 15 bp, Homo sapiens
taaataaattgtgcc

SEQ ID NO: 8075 - DNA, 15 bp, Homo sapiens
ataaataaattgtgc

SEQ ID NO: 8076 - DNA, 15 bp, Homo sapiens
tataaataaattgtg

SEQ ID NO: 8077 - DNA, 15 bp, Homo sapiens
gtataaataaattgt

SEQ ID NO: 8078 - DNA, 15 bp, Homo sapiens
tgtataaataaattg

SEQ ID NO: 8079 - DNA, 15 bp, Homo sapiens
ttgtataaataaatt

SEQ ID NO: 8080 - DNA, 15 bp, Homo sapiens
gttgtataaataaat

SEQ ID NO: 8081 - DNA, 15 bp, Homo sapiens
tgttgtataaataaa

SEQ ID NO: 8082 - DNA, 15 bp, Homo sapiens
atgttgtataaataa

SEQ ID NO: 8083 - DNA, 15 bp, Homo sapiens
aatgttgtataaata

SEQ ID NO: 8084 - DNA, 15 bp, Homo sapiens
aaatgttgtataaat

SEQ ID NO: 8085 - DNA, 15 bp, Homo sapiens
aaaatgttgtataaa

SEQ ID NO: 8086 - DNA, 15 bp, Homo sapiens
aaaaatgttgtataa

SEQ ID NO: 8087 - DNA, 15 bp, Homo sapiens
taaaaatgttgtata

SEQ ID NO: 8088 - DNA, 15 bp, Homo sapiens
ataaaaatgttgtat

SEQ ID NO: 8089 - DNA, 15 bp, Homo sapiens
cataaaaatgttgta

SEQ ID NO: 8090 - DNA, 15 bp, Homo sapiens
ccataaaaatgttgt

SEQ ID NO: 8091 - DNA, 15 bp, Homo sapiens
gccataaaaatgttg

SEQ ID NO: 8092 - DNA, 15 bp, Homo sapiens
agccataaaaatgtt

SEQ ID NO: 8093 - DNA, 15 bp, Homo sapiens
aagccataaaaatgt

SEQ ID NO: 8094 - DNA, 15 bp, Homo sapiens
caagccataaaaatg

SEQ ID NO: 8095 - DNA, 15 bp, Homo sapiens
gcaagccataaaaat

SEQ ID NO: 8096 - DNA, 15 bp, Homo sapiens
tgcaagccataaaaa

SEQ ID NO: 8097 - DNA, 15 bp, Homo sapiens
ctgcaagccataaaa

SEQ ID NO: 8098 - DNA, 15 bp, Homo sapiens
tctgcaagccataaa

SEQ ID NO: 8099 - DNA, 15 bp, Homo sapiens
atctgcaagccataa

SEQ ID NO: 8100 - DNA, 15 bp, Homo sapiens
catctgcaagccata

SEQ ID NO: 8101 - DNA, 15 bp, Homo sapiens
tcatctgcaagccat

SEQ ID NO: 8102 - DNA, 15 bp, Homo sapiens
gtcatctgcaagcca

SEQ ID NO: 8103 - DNA, 15 bp, Homo sapiens
agtcatctgcaagcc

SEQ ID NO: 8104 - DNA, 15 bp, Homo sapiens
gagtcatctgcaagc

SEQ ID NO: 8105 - DNA, 15 bp, Homo sapiens
ggagtcatctgcaag

SEQ ID NO: 8106 - DNA, 15 bp, Homo sapiens
cggagtcatctgcaa

SEQ ID NO: 8107 - DNA, 15 bp, Homo sapiens
gcggagtcatctgca

SEQ ID NO: 8108 - DNA, 15 bp, Homo sapiens
agcggagtcatctgc

SEQ ID NO: 8109 - DNA, 15 bp, Homo sapiens
cagcggagtcatctg

SEQ ID NO: 8110 - DNA, 15 bp, Homo sapiens
ccagcggagtcatct

SEQ ID NO: 8111 - DNA, 15 bp, Homo sapiens
tccagcggagtcatc

SEQ ID NO: 8112 - DNA, 15 bp, Homo sapiens
atccagcggagtcat

SEQ ID NO: 8113 - DNA, 15 bp, Homo sapiens
gatccagcggagtca

SEQ ID NO: 8114 - DNA, 15 bp, Homo sapiens
ggatccagcggagtc

SEQ ID NO: 8115 - DNA, 15 bp, Homo sapiens
aggatccagcggagt

SEQ ID NO: 8116 - DNA, 15 bp, Homo sapiens
gaggatccagcggag

SEQ ID NO: 8117 - DNA, 15 bp, Homo sapiens
ggaggatccagcgga

SEQ ID NO: 8118 - DNA, 15 bp, Homo sapiens
gggaggatccagcgg

SEQ ID NO: 8119 - DNA, 15 bp, Homo sapiens
agggaggatccagcg

SEQ ID NO: 8120 - DNA, 15 bp, Homo sapiens
gagggaggatccagc

SEQ ID NO: 8121 - DNA, 15 bp, Homo sapiens
tgagggaggatccag

SEQ ID NO: 8122 - DNA, 15 bp, Homo sapiens
ctgagggaggatcca

SEQ ID NO: 8123 - DNA, 15 bp, Homo sapiens
tctgagggaggatcc

SEQ ID NO: 8124 - DNA, 15 bp, Homo sapiens
ttctgagggaggatc

SEQ ID NO: 8125 - DNA, 15 bp, Homo sapiens
attctgagggaggat

SEQ ID NO: 8126 - DNA, 15 bp, Homo sapiens
aattctgagggagga

SEQ ID NO: 8127 - DNA, 15 bp, Homo sapiens
caattctgagggagg

SEQ ID NO: 8128 - DNA, 15 bp, Homo sapiens
gcaattctgagggag

SEQ ID NO: 8129 - DNA, 15 bp, Homo sapiens
ggcaattctgaggga

SEQ ID NO: 8130 - DNA, 15 bp, Homo sapiens
gggcaattctgaggg

SEQ ID NO: 8131 - DNA, 15 bp, Homo sapiens
agggcaattctgagg

SEQ ID NO: 8132 - DNA, 15 bp, Homo sapiens
aagggcaattctgag

SEQ ID NO: 8133 - DNA, 15 bp, Homo sapiens
gaagggcaattctga

SEQ ID NO: 8134 - DNA, 15 bp, Homo sapiens
tgaagggcaattctg

SEQ ID NO: 8135 - DNA, 15 bp, Homo sapiens
atgaagggcaattct

SEQ ID NO: 8136 - DNA, 15 bp, Homo sapiens
tatgaagggcaattc

SEQ ID NO: 8137 - DNA, 15 bp, Homo sapiens
ctatgaagggcaatt

SEQ ID NO: 8138 - DNA, 15 bp, Homo sapiens
cctatgaagggcaat

SEQ ID NO: 8139 - DNA, 15 bp, Homo sapiens
ccctatgaagggcaa

SEQ ID NO: 8140 - DNA, 15 bp, Homo sapiens
tccctatgaagggca

SEQ ID NO: 8141 - DNA, 15 bp, Homo sapiens
ttccctatgaagggc

SEQ ID NO: 8142 - DNA, 15 bp, Homo sapiens
cttccctatgaaggg

SEQ ID NO: 8143 - DNA, 15 bp, Homo sapiens
acttccctatgaagg

SEQ ID NO: 8144 - DNA, 15 bp, Homo sapiens
aacttccctatgaag

SEQ ID NO: 8145 - DNA, 15 bp, Homo sapiens
gaacttccctatgaa

SEQ ID NO: 8146 - DNA, 15 bp, Homo sapiens
tgaacttccctatga

SEQ ID NO: 8147 - DNA, 15 bp, Homo sapiens
ctgaacttccctatg

SEQ ID NO: 8148 - DNA, 15 bp, Homo sapiens
actgaacttccctat

SEQ ID NO: 8149 - DNA, 15 bp, Homo sapiens
cactgaacttcccta

SEQ ID NO: 8150 - DNA, 15 bp, Homo sapiens
ccactgaacttccct

SEQ ID NO: 8151 - DNA, 15 bp, Homo sapiens
gccactgaacttccc

SEQ ID NO: 8152 - DNA, 15 bp, Homo sapiens
ggccactgaacttcc

SEQ ID NO: 8153 - DNA, 15 bp, Homo sapiens
tggccactgaacttc

SEQ ID NO: 8154 - DNA, 15 bp, Homo sapiens
gtggccactgaactt

SEQ ID NO: 8155 - DNA, 15 bp, Homo sapiens
agtggccactgaact

SEQ ID NO: 8156 - DNA, 15 bp, Homo sapiens
gagtggccactgaac

SEQ ID NO: 8157 - DNA, 15 bp, Homo sapiens
tgagtggccactgaa

SEQ ID NO: 8158 - DNA, 15 bp, Homo sapiens
ttgagtggccactga

SEQ ID NO: 8159 - DNA, 15 bp, Homo sapiens
cttgagtggccactg

SEQ ID NO: 8160 - DNA, 15 bp, Homo sapiens
acttgagtggccact

SEQ ID NO: 8161 - DNA, 15 bp, Homo sapiens
cacttgagtggccac

SEQ ID NO: 8162 - DNA, 15 bp, Homo sapiens
ccacttgagtggcca

SEQ ID NO: 8163 - DNA, 15 bp, Homo sapiens
accacttgagtggcc

SEQ ID NO: 8164 - DNA, 15 bp, Homo sapiens
aaccacttgagtggc

SEQ ID NO: 8165 - DNA, 15 bp, Homo sapiens
taaccacttgagtgg

SEQ ID NO: 8166 - DNA, 15 bp, Homo sapiens
ctaaccacttgagtg

SEQ ID NO: 8167 - DNA, 15 bp, Homo sapiens
gctaaccacttgagt

SEQ ID NO: 8168 - DNA, 15 bp, Homo sapiens
tgctaaccacttgag

SEQ ID NO: 8169 - DNA, 15 bp, Homo sapiens
ttgctaaccacttga

SEQ ID NO: 8170 - DNA, 15 bp, Homo sapiens
tttgctaaccacttg

SEQ ID NO: 8171 - DNA, 15 bp, Homo sapiens
ttttgctaaccactt

SEQ ID NO: 8172 - DNA, 15 bp, Homo sapiens
attttgctaaccact

SEQ ID NO: 8173 - DNA, 15 bp, Homo sapiens
gattttgctaaccac

SEQ ID NO: 8174 - DNA, 15 bp, Homo sapiens
tgattttgctaacca

SEQ ID NO: 8175 - DNA, 15 bp, Homo sapiens
ttgattttgctaacc

SEQ ID NO: 8176 - DNA, 15 bp, Homo sapiens
cttgattttgctaac

SEQ ID NO: 8177 - DNA, 15 bp, Homo sapiens
ccttgattttgctaa

SEQ ID NO: 8178 - DNA, 15 bp, Homo sapiens
accttgattttgcta

SEQ ID NO: 8179 - DNA, 15 bp, Homo sapiens
caccttgattttgct

SEQ ID NO: 8180 - DNA, 15 bp, Homo sapiens
tcaccttgattttgc

SEQ ID NO: 8181 - DNA, 15 bp, Homo sapiens
ttcaccttgattttg

SEQ ID NO: 8182 - DNA, 15 bp, Homo sapiens
tttcaccttgatttt

SEQ ID NO: 8183 - DNA, 15 bp, Homo sapiens
ttttcaccttgattt

SEQ ID NO: 8184 - DNA, 15 bp, Homo sapiens
cttttcaccttgatt

SEQ ID NO: 8185 - DNA, 15 bp, Homo sapiens
acttttcaccttgat

SEQ ID NO: 8186 - DNA, 15 bp, Homo sapiens
aacttttcaccttga

SEQ ID NO: 8187 - DNA, 15 bp, Homo sapiens
aaacttttcaccttg

SEQ ID NO: 8188 - DNA, 15 bp, Homo sapiens
aaaacttttcacctt

SEQ ID NO: 8189 - DNA, 15 bp, Homo sapiens
aaaaacttttcacct

SEQ ID NO: 8190 - DNA, 15 bp, Homo sapiens
gaaaaacttttcacc

SEQ ID NO: 8191 - DNA, 15 bp, Homo sapiens
agaaaaacttttcac

SEQ ID NO: 8192 - DNA, 15 bp, Homo sapiens
aagaaaaacttttca

SEQ ID NO: 8193 - DNA, 15 bp, Homo sapiens
aaagaaaaacttttc

SEQ ID NO: 8194 - DNA, 15 bp, Homo sapiens
aaaagaaaaactttt

SEQ ID NO: 8195 - DNA, 15 bp, Homo sapiens
aaaaagaaaaacttt

SEQ ID NO: 8196 - DNA, 15 bp, Homo sapiens
taaaaagaaaaactt

SEQ ID NO: 8197 - DNA, 15 bp, Homo sapiens
ataaaaagaaaaact

SEQ ID NO: 8198 - DNA, 15 bp, Homo sapiens
aataaaaagaaaaac

SEQ ID NO: 8199 - DNA, 15 bp, Homo sapiens
gaataaaaagaaaaa

SEQ ID NO: 8200 - DNA, 15 bp, Homo sapiens
tgaataaaaagaaaa

SEQ ID NO: 8201 - DNA, 15 bp, Homo sapiens
ttgaataaaaagaaa

SEQ ID NO: 8202 - DNA, 15 bp, Homo sapiens
tttgaataaaaagaa

SEQ ID NO: 8203 - DNA, 15 bp, Homo sapiens
ttttgaataaaaaga

SEQ ID NO: 8204 - DNA, 15 bp, Homo sapiens
attttgaataaaaag

SEQ ID NO: 8205 - DNA, 15 bp, Homo sapiens
cattttgaataaaaa

SEQ ID NO: 8206 - DNA, 15 bp, Homo sapiens
ccattttgaataaaa

SEQ ID NO: 8207 - DNA, 15 bp, Homo sapiens
cccattttgaataaa

SEQ ID NO: 8208 - DNA, 15 bp, Homo sapiens
tcccattttgaataa

SEQ ID NO: 8209 - DNA, 15 bp, Homo sapiens
atcccattttgaata

SEQ ID NO: 8210 - DNA, 15 bp, Homo sapiens
tatcccattttgaat

SEQ ID NO: 8211 - DNA, 15 bp, Homo sapiens
ttatcccattttgaa

SEQ ID NO: 8212 - DNA, 15 bp, Homo sapiens
tttatcccattttga

SEQ ID NO: 8213 - DNA, 15 bp, Homo sapiens
ttttatcccattttg

SEQ ID NO: 8214 - DNA, 15 bp, Homo sapiens
tttttatcccatttt

SEQ ID NO: 8215 - DNA, 15 bp, Homo sapiens
ctttttatcccattt

SEQ ID NO: 8216 - DNA, 15 bp, Homo sapiens
tctttttatcccatt

SEQ ID NO: 8217 - DNA, 15 bp, Homo sapiens
ttctttttatcccat

SEQ ID NO: 8218 - DNA, 15 bp, Homo sapiens
cttctttttatccca

SEQ ID NO: 8219 - DNA, 15 bp, Homo sapiens
gcttctttttatccc

SEQ ID NO: 8220 - DNA, 15 bp, Homo sapiens
tgcttctttttatcc

SEQ ID NO: 8221 - DNA, 15 bp, Homo sapiens
ctgcttctttttatc

SEQ ID NO: 8222 - DNA, 15 bp, Homo sapiens
gctgcttctttttat

SEQ ID NO: 8223 - DNA, 15 bp, Homo sapiens
agctgcttcttttta

SEQ ID NO: 8224 - DNA, 15 bp, Homo sapiens
cagctgcttcttttt

SEQ ID NO: 8225 - DNA, 15 bp, Homo sapiens
gcagctgcttctttt

SEQ ID NO: 8226 - DNA, 15 bp, Homo sapiens
ggcagctgcttcttt

SEQ ID NO: 8227 - DNA, 15 bp, Homo sapiens
aggcagctgcttctt

SEQ ID NO: 8228 - DNA, 15 bp, Homo sapiens
aaggcagctgcttct

SEQ ID NO: 8229 - DNA, 15 bp, Homo sapiens
aaaggcagctgcttc

SEQ ID NO: 8230 - DNA, 15 bp, Homo sapiens
aaaaggcagctgctt

SEQ ID NO: 8231 - DNA, 15 bp, Homo sapiens
caaaaggcagctgct

SEQ ID NO: 8232 - DNA, 15 bp, Homo sapiens
acaaaaggcagctgc

SEQ ID NO: 8233 - DNA, 15 bp, Homo sapiens
cacaaaaggcagctg

SEQ ID NO: 8234 - DNA, 15 bp, Homo sapiens
tcacaaaaggcagct

SEQ ID NO: 8235 - DNA, 15 bp, Homo sapiens
gtcacaaaaggcagc

SEQ ID NO: 8236 - DNA, 15 bp, Homo sapiens
agtcacaaaaggcag

SEQ ID NO: 8237 - DNA, 15 bp, Homo sapiens
aagtcacaaaaggca

SEQ ID NO: 8238 - DNA, 15 bp, Homo sapiens
aaagtcacaaaaggc

SEQ ID NO: 8239 - DNA, 15 bp, Homo sapiens
aaaagtcacaaaagg

SEQ ID NO: 8240 - DNA, 15 bp, Homo sapiens
taaaagtcacaaaag

SEQ ID NO: 8241 - DNA, 15 bp, Homo sapiens
ttaaaagtcacaaaa

SEQ ID NO: 8242 - DNA, 15 bp, Homo sapiens
cttaaaagtcacaaa

SEQ ID NO: 8243 - DNA, 15 bp, Homo sapiens
acttaaaagtcacaa

SEQ ID NO: 8244 - DNA, 15 bp, Homo sapiens
cacttaaaagtcaca

SEQ ID NO: 8245 - DNA, 15 bp, Homo sapiens
tcacttaaaagtcac

SEQ ID NO: 8246 - DNA, 15 bp, Homo sapiens
ctcacttaaaagtca

SEQ ID NO: 8247 - DNA, 15 bp, Homo sapiens
tctcacttaaaagtc

SEQ ID NO: 8248 - DNA, 15 bp, Homo sapiens
ttctcacttaaaagt

SEQ ID NO: 8249 - DNA, 15 bp, Homo sapiens
cttctcacttaaaag

SEQ ID NO: 8250 - DNA, 15 bp, Homo sapiens
gcttctcacttaaaa

SEQ ID NO: 8251 - DNA, 15 bp, Homo sapiens
agcttctcacttaaa

SEQ ID NO: 8252 - DNA, 15 bp, Homo sapiens
aagcttctcacttaa

SEQ ID NO: 8253 - DNA, 15 bp, Homo sapiens
aaagcttctcactta

SEQ ID NO: 8254 - DNA, 15 bp, Homo sapiens
gaaagcttctcactt

SEQ ID NO: 8255 - DNA, 15 bp, Homo sapiens
tgaaagcttctcact

SEQ ID NO: 8256 - DNA, 15 bp, Homo sapiens
atgaaagcttctcac

SEQ ID NO: 8257 - DNA, 15 bp, Homo sapiens
aatgaaagcttctca

SEQ ID NO: 8258 - DNA, 15 bp, Homo sapiens
taatgaaagcttctc

SEQ ID NO: 8259 - DNA, 15 bp, Homo sapiens
ataatgaaagcttct

SEQ ID NO: 8260 - DNA, 15 bp, Homo sapiens
cataatgaaagcttc

SEQ ID NO: 8261 - DNA, 15 bp, Homo sapiens
acataatgaaagctt

SEQ ID NO: 8262 - DNA, 15 bp, Homo sapiens
gacataatgaaagct

SEQ ID NO: 8263 - DNA, 15 bp, Homo sapiens
agacataatgaaagc

SEQ ID NO: 8264 - DNA, 15 bp, Homo sapiens
aagacataatgaaag

SEQ ID NO: 8265 - DNA, 15 bp, Homo sapiens
taagacataatgaaa

SEQ ID NO: 8266 - DNA, 15 bp, Homo sapiens
ctaagacataatgaa

SEQ ID NO: 8267 - DNA, 15 bp, Homo sapiens
gctaagacataatga

SEQ ID NO: 8268 - DNA, 15 bp, Homo sapiens
ggctaagacataatg

SEQ ID NO: 8269 - DNA, 15 bp, Homo sapiens
gggctaagacataat

SEQ ID NO: 8270 - DNA, 15 bp, Homo sapiens
agggctaagacataa

SEQ ID NO: 8271 - DNA, 15 bp, Homo sapiens
tagggctaagacata

SEQ ID NO: 8272 - DNA, 15 bp, Homo sapiens
gtagggctaagacat

SEQ ID NO: 8273 - DNA, 15 bp, Homo sapiens
tgtagggctaagaca

SEQ ID NO: 8274 - DNA, 15 bp, Homo sapiens
ctgtagggctaagac

SEQ ID NO: 8275 - DNA, 15 bp, Homo sapiens
actgtagggctaaga

SEQ ID NO: 8276 - DNA, 15 bp, Homo sapiens
cactgtagggctaag

SEQ ID NO: 8277 - DNA, 15 bp, Homo sapiens
acactgtagggctaa

SEQ ID NO: 8278 - DNA, 15 bp, Homo sapiens
cacactgtagggcta

SEQ ID NO: 8279 - DNA, 15 bp, Homo sapiens
acacactgtagggct

SEQ ID NO: 8280 - DNA, 15 bp, Homo sapiens
aacacactgtagggc

SEQ ID NO: 8281 - DNA, 15 bp, Homo sapiens
taacacactgtaggg

SEQ ID NO: 8282 - DNA, 15 bp, Homo sapiens
ataacacactgtagg

SEQ ID NO: 8283 - DNA, 15 bp, Homo sapiens
gataacacactgtag

SEQ ID NO: 8284 - DNA, 15 bp, Homo sapiens
tgataacacactgta

SEQ ID NO: 8285 - DNA, 15 bp, Homo sapiens
ttgataacacactgt

SEQ ID NO: 8286 - DNA, 15 bp, Homo sapiens
attgataacacactg

SEQ ID NO: 8287 - DNA, 15 bp, Homo sapiens
tattgataacacact

SEQ ID NO: 8288 - DNA, 15 bp, Homo sapiens
ttattgataacacac

SEQ ID NO: 8289 - DNA, 15 bp, Homo sapiens
attattgataacaca

SEQ ID NO: 8290 - DNA, 15 bp, Homo sapiens
gattattgataacac

SEQ ID NO: 8291 - DNA, 15 bp, Homo sapiens
tgattattgataaca

SEQ ID NO: 8292 - DNA, 15 bp, Homo sapiens
atgattattgataac

SEQ ID NO: 8293 - DNA, 15 bp, Homo sapiens
tatgattattgataa

SEQ ID NO: 8294 - DNA, 15 bp, Homo sapiens
atatgattattgata

SEQ ID NO: 8295 - DNA, 15 bp, Homo sapiens
gatatgattattgat

SEQ ID NO: 8296 - DNA, 15 bp, Homo sapiens
agatatgattattga

SEQ ID NO: 8297 - DNA, 15 bp, Homo sapiens
cagatatgattattg

SEQ ID NO: 8298 - DNA, 15 bp, Homo sapiens
acagatatgattatt

SEQ ID NO: 8299 - DNA, 15 bp, Homo sapiens
cacagatatgattat

SEQ ID NO: 8300 - DNA, 15 bp, Homo sapiens
acacagatatgatta

SEQ ID NO: 8301 - DNA, 15 bp, Homo sapiens
aacacagatatgatt

SEQ ID NO: 8302 - DNA, 15 bp, Homo sapiens
taacacagatatgat

SEQ ID NO: 8303 - DNA, 15 bp, Homo sapiens
ttaacacagatatga

SEQ ID NO: 8304 - DNA, 15 bp, Homo sapiens
tttaacacagatatg

SEQ ID NO: 8305 - DNA, 15 bp, Homo sapiens
atttaacacagatat

SEQ ID NO: 8306 - DNA, 15 bp, Homo sapiens
aatttaacacagata

SEQ ID NO: 8307 - DNA, 15 bp, Homo sapiens
caatttaacacagat

SEQ ID NO: 8308 - DNA, 15 bp, Homo sapiens
acaatttaacacaga

SEQ ID NO: 8309 - DNA, 15 bp, Homo sapiens
tacaatttaacacag

SEQ ID NO: 8310 - DNA, 15 bp, Homo sapiens
gtacaatttaacaca

SEQ ID NO: 8311 - DNA, 15 bp, Homo sapiens
agtacaatttaacac

SEQ ID NO: 8312 - DNA, 15 bp, Homo sapiens
aagtacaatttaaca

SEQ ID NO: 8313 - DNA, 15 bp, Homo sapiens
gaagtacaatttaac

SEQ ID NO: 8314 - DNA, 15 bp, Homo sapiens
tgaagtacaatttaa

SEQ ID NO: 8315 - DNA, 15 bp, Homo sapiens
gtgaagtacaattta

SEQ ID NO: 8316 - DNA, 15 bp, Homo sapiens
agtgaagtacaattt

SEQ ID NO: 8317 - DNA, 15 bp, Homo sapiens
aagtgaagtacaatt

SEQ ID NO: 8318 - DNA, 15 bp, Homo sapiens
aaagtgaagtacaat

SEQ ID NO: 8319 - DNA, 15 bp, Homo sapiens
caaagtgaagtacaa

SEQ ID NO: 8320 - DNA, 15 bp, Homo sapiens
acaaagtgaagtaca

SEQ ID NO: 8321 - DNA, 15 bp, Homo sapiens
tacaaagtgaagtac

SEQ ID NO: 8322 - DNA, 15 bp, Homo sapiens
atacaaagtgaagta

SEQ ID NO: 8323 - DNA, 15 bp, Homo sapiens
tatacaaagtgaagt

SEQ ID NO: 8324 - DNA, 15 bp, Homo sapiens
atatacaaagtgaag

SEQ ID NO: 8325 - DNA, 15 bp, Homo sapiens
gatatacaaagtgaa

SEQ ID NO: 8326 - DNA, 15 bp, Homo sapiens
tgatatacaaagtga

SEQ ID NO: 8327 - DNA, 15 bp, Homo sapiens
gtgatatacaaagtg

SEQ ID NO: 8328 - DNA, 15 bp, Homo sapiens
ggtgatatacaaagt

SEQ ID NO: 8329 - DNA, 15 bp, Homo sapiens
tggtgatatacaaag

SEQ ID NO: 8330 - DNA, 15 bp, Homo sapiens
atggtgatatacaaa

SEQ ID NO: 8331 - DNA, 15 bp, Homo sapiens
aatggtgatatacaa

SEQ ID NO: 8332 - DNA, 15 bp, Homo sapiens
caatggtgatataca

SEQ ID NO: 8333 - DNA, 15 bp, Homo sapiens
acaatggtgatatac

SEQ ID NO: 8334 - DNA, 15 bp, Homo sapiens
tacaatggtgatata

SEQ ID NO: 8335 - DNA, 15 bp, Homo sapiens
ttacaatggtgatat

SEQ ID NO: 8336 - DNA, 15 bp, Homo sapiens
cttacaatggtgata

SEQ ID NO: 8337 - DNA, 15 bp, Homo sapiens
acttacaatggtgat

SEQ ID NO: 8338 - DNA, 15 bp, Homo sapiens
aacttacaatggtga

SEQ ID NO: 8339 - DNA, 15 bp, Homo sapiens
aaacttacaatggtg

SEQ ID NO: 8340 - DNA, 15 bp, Homo sapiens
aaaacttacaatggt

SEQ ID NO: 8341 - DNA, 15 bp, Homo sapiens
taaaacttacaatgg

SEQ ID NO: 8342 - DNA, 15 bp, Homo sapiens
ttaaaacttacaatg

SEQ ID NO: 8343 - DNA, 15 bp, Homo sapiens
gttaaaacttacaat

SEQ ID NO: 8344 - DNA, 15 bp, Homo sapiens
ggttaaaacttacaa

SEQ ID NO: 8345 - DNA, 15 bp, Homo sapiens
cggttaaaacttaca

SEQ ID NO: 8346 - DNA, 15 bp, Homo sapiens
acggttaaaacttac

SEQ ID NO: 8347 - DNA, 15 bp, Homo sapiens
tacggttaaaactta

SEQ ID NO: 8348 - DNA, 15 bp, Homo sapiens
atacggttaaaactt

SEQ ID NO: 8349 - DNA, 15 bp, Homo sapiens
tatacggttaaaact

SEQ ID NO: 8350 - DNA, 15 bp, Homo sapiens
gtatacggttaaaac

SEQ ID NO: 8351 - DNA, 15 bp, Homo sapiens
tgtatacggttaaaa

SEQ ID NO: 8352 - DNA, 15 bp, Homo sapiens
atgtatacggttaaa

SEQ ID NO: 8353 - DNA, 15 bp, Homo sapiens
aatgtatacggttaa

SEQ ID NO: 8354 - DNA, 15 bp, Homo sapiens
taatgtatacggtta

SEQ ID NO: 8355 - DNA, 15 bp, Homo sapiens
ataatgtatacggtt

SEQ ID NO: 8356 - DNA, 15 bp, Homo sapiens
tataatgtatacggt

SEQ ID NO: 8357 - DNA, 15 bp, Homo sapiens
ctataatgtatacgg

SEQ ID NO: 8358 - DNA, 15 bp, Homo sapiens
cctataatgtatacg

SEQ ID NO: 8359 - DNA, 15 bp, Homo sapiens
gcctataatgtatac

SEQ ID NO: 8360 - DNA, 15 bp, Homo sapiens
agcctataatgtata

SEQ ID NO: 8361 - DNA, 15 bp, Homo sapiens
aagcctataatgtat

SEQ ID NO: 8362 - DNA, 15 bp, Homo sapiens
aaagcctataatgta

SEQ ID NO: 8363 - DNA, 15 bp, Homo sapiens
aaaagcctataatgt

SEQ ID NO: 8364 - DNA, 15 bp, Homo sapiens
aaaaagcctataatg

SEQ ID NO: 8365 - DNA, 15 bp, Homo sapiens
gaaaaagcctataat

SEQ ID NO: 8366 - DNA, 15 bp, Homo sapiens
ggaaaaagcctataa

SEQ ID NO: 8367 - DNA, 15 bp, Homo sapiens
tggaaaaagcctata

SEQ ID NO: 8368 - DNA, 15 bp, Homo sapiens
atggaaaaagcctat

SEQ ID NO: 8369 - DNA, 15 bp, Homo sapiens
aatggaaaaagccta

SEQ ID NO: 8370 - DNA, 15 bp, Homo sapiens
aaatggaaaaagcct

SEQ ID NO: 8371 - DNA, 15 bp, Homo sapiens
aaaatggaaaaagcc

SEQ ID NO: 8372 - DNA, 15 bp, Homo sapiens
aaaaatggaaaaagc

SEQ ID NO: 8373 - DNA, 15 bp, Homo sapiens
taaaaatggaaaaag

SEQ ID NO: 8374 - DNA, 15 bp, Homo sapiens
ataaaaatggaaaaa

SEQ ID NO: 8375 - DNA, 15 bp, Homo sapiens
aataaaaatggaaaa

SEQ ID NO: 8376 - DNA, 15 bp, Homo sapiens
aaataaaaatggaaa

SEQ ID NO: 8377 - DNA, 15 bp, Homo sapiens
aaaataaaaatggaa

SEQ ID NO: 8378 - DNA, 15 bp, Homo sapiens
taaaataaaaatgga

SEQ ID NO: 8379 - DNA, 15 bp, Homo sapiens
ttaaaataaaaatgg

SEQ ID NO: 8380 - DNA, 15 bp, Homo sapiens
tttaaaataaaaatg

SEQ ID NO: 8381 - DNA, 15 bp, Homo sapiens
ttttaaaataaaaat

SEQ ID NO: 8382 - DNA, 15 bp, Homo sapiens
tttttaaaataaaaa

SEQ ID NO: 8383 - DNA, 15 bp, Homo sapiens
gtttttaaaataaaa

SEQ ID NO: 8384 - DNA, 15 bp, Homo sapiens
agtttttaaaataaa

SEQ ID NO: 8385 - DNA, 15 bp, Homo sapiens
cagtttttaaaataa

SEQ ID NO: 8386 - DNA, 15 bp, Homo sapiens
acagtttttaaaata

SEQ ID NO: 8387 - DNA, 15 bp, Homo sapiens
aacagtttttaaaat

SEQ ID NO: 8388 - DNA, 15 bp, Homo sapiens
aaacagtttttaaaa

SEQ ID NO: 8389 - DNA, 15 bp, Homo sapiens
taaacagtttttaaa

SEQ ID NO: 8390 - DNA, 15 bp, Homo sapiens
ttaaacagtttttaa

SEQ ID NO: 8391 - DNA, 15 bp, Homo sapiens
cttaaacagttttta

SEQ ID NO: 8392 - DNA, 15 bp, Homo sapiens
ccttaaacagttttt

SEQ ID NO: 8393 - DNA, 15 bp, Homo sapiens
accttaaacagtttt

SEQ ID NO: 8394 - DNA, 15 bp, Homo sapiens
caccttaaacagttt

SEQ ID NO: 8395 - DNA, 15 bp, Homo sapiens
acaccttaaacagtt

SEQ ID NO: 8396 - DNA, 15 bp, Homo sapiens
tacaccttaaacagt

SEQ ID NO: 8397 - DNA, 15 bp, Homo sapiens
ctacaccttaaacag

SEQ ID NO: 8398 - DNA, 15 bp, Homo sapiens
gctacaccttaaaca

SEQ ID NO: 8399 - DNA, 15 bp, Homo sapiens
agctacaccttaaac

SEQ ID NO: 8400 - DNA, 15 bp, Homo sapiens
aagctacaccttaaa

SEQ ID NO: 8401 - DNA, 15 bp, Homo sapiens
aaagctacaccttaa

SEQ ID NO: 8402 - DNA, 15 bp, Homo sapiens
aaaagctacacctta

SEQ ID NO: 8403 - DNA, 15 bp, Homo sapiens
aaaaagctacacctt

SEQ ID NO: 8404 - DNA, 15 bp, Homo sapiens
taaaaagctacacct

SEQ ID NO: 8405 - DNA, 15 bp, Homo sapiens
ttaaaaagctacacc

SEQ ID NO: 8406 - DNA, 15 bp, Homo sapiens
cttaaaaagctacac

SEQ ID NO: 8407 - DNA, 15 bp, Homo sapiens
ccttaaaaagctaca

SEQ ID NO: 8408 - DNA, 15 bp, Homo sapiens
tccttaaaaagctac

SEQ ID NO: 8409 - DNA, 15 bp, Homo sapiens
atccttaaaaagcta

SEQ ID NO: 8410 - DNA, 15 bp, Homo sapiens
aatccttaaaaagct

SEQ ID NO: 8411 - DNA, 15 bp, Homo sapiens
gaatccttaaaaagc

SEQ ID NO: 8412 - DNA, 15 bp, Homo sapiens
agaatccttaaaaag

SEQ ID NO: 8413 - DNA, 15 bp, Homo sapiens
cagaatccttaaaaa

SEQ ID NO: 8414 - DNA, 15 bp, Homo sapiens
acagaatccttaaaa

SEQ ID NO: 8415 - DNA, 15 bp, Homo sapiens
aacagaatccttaaa

SEQ ID NO: 8416 - DNA, 15 bp, Homo sapiens
aaacagaatccttaa

SEQ ID NO: 8417 - DNA, 15 bp, Homo sapiens
aaaacagaatcctta

SEQ ID NO: 8418 - DNA, 15 bp, Homo sapiens
aaaaacagaatcctt

SEQ ID NO: 8419 - DNA, 15 bp, Homo sapiens
caaaaacagaatcct

SEQ ID NO: 8420 - DNA, 15 bp, Homo sapiens
gcaaaaacagaatcc

SEQ ID NO: 8421 - DNA, 15 bp, Homo sapiens
agcaaaaacagaatc

SEQ ID NO: 8422 - DNA, 15 bp, Homo sapiens
gagcaaaaacagaat

SEQ ID NO: 8423 - DNA, 15 bp, Homo sapiens
agagcaaaaacagaa

SEQ ID NO: 8424 - DNA, 15 bp, Homo sapiens
aagagcaaaaacaga

SEQ ID NO: 8425 - DNA, 15 bp, Homo sapiens
taagagcaaaaacag

SEQ ID NO: 8426 - DNA, 15 bp, Homo sapiens
ataagagcaaaaaca

SEQ ID NO: 8427 - DNA, 15 bp, Homo sapiens
aataagagcaaaaac

SEQ ID NO: 8428 - DNA, 15 bp, Homo sapiens
aaataagagcaaaaa

SEQ ID NO: 8429 - DNA, 15 bp, Homo sapiens
aaaataagagcaaaa

SEQ ID NO: 8430 - DNA, 15 bp, Homo sapiens
aaaaataagagcaaa

SEQ ID NO: 8431 - DNA, 15 bp, Homo sapiens
aaaaaataagagcaa

SEQ ID NO: 8432 - DNA, 15 bp, Homo sapiens
taaaaaataagagca

SEQ ID NO: 8433 - DNA, 15 bp, Homo sapiens
gtaaaaaataagagc

SEQ ID NO: 8434 - DNA, 15 bp, Homo sapiens
ggtaaaaaataagag

SEQ ID NO: 8435 - DNA, 15 bp, Homo sapiens
aggtaaaaaataaga

SEQ ID NO: 8436 - DNA, 15 bp, Homo sapiens
caggtaaaaaataag

SEQ ID NO: 8437 - DNA, 15 bp, Homo sapiens
acaggtaaaaaataa

SEQ ID NO: 8438 - DNA, 15 bp, Homo sapiens
cacaggtaaaaaata

SEQ ID NO: 8439 - DNA, 15 bp, Homo sapiens
acacaggtaaaaaat

SEQ ID NO: 8440 - DNA, 15 bp, Homo sapiens
gacacaggtaaaaaa

SEQ ID NO: 8441 - DNA, 15 bp, Homo sapiens
agacacaggtaaaaa

SEQ ID NO: 8442 - DNA, 15 bp, Homo sapiens
aagacacaggtaaaa

SEQ ID NO: 8443 - DNA, 15 bp, Homo sapiens
caagacacaggtaaa

SEQ ID NO: 8444 - DNA, 15 bp, Homo sapiens
ccaagacacaggtaa

SEQ ID NO: 8445 - DNA, 15 bp, Homo sapiens
accaagacacaggta

SEQ ID NO: 8446 - DNA, 15 bp, Homo sapiens
gaccaagacacaggt

SEQ ID NO: 8447 - DNA, 15 bp, Homo sapiens
agaccaagacacagg

SEQ ID NO: 8448 - DNA, 15 bp, Homo sapiens
aagaccaagacacag

SEQ ID NO: 8449 - DNA, 15 bp, Homo sapiens
aaagaccaagacaca

SEQ ID NO: 8450 - DNA, 15 bp, Homo sapiens
gaaagaccaagacac

SEQ ID NO: 8451 - DNA, 15 bp, Homo sapiens
agaaagaccaagaca

SEQ ID NO: 8452 - DNA, 15 bp, Homo sapiens
aagaaagaccaagac

SEQ ID NO: 8453 - DNA, 15 bp, Homo sapiens
taagaaagaccaaga

SEQ ID NO: 8454 - DNA, 15 bp, Homo sapiens
ataagaaagaccaag

SEQ ID NO: 8455 - DNA, 15 bp, Homo sapiens
gataagaaagaccaa

SEQ ID NO: 8456 - DNA, 15 bp, Homo sapiens
tgataagaaagacca

SEQ ID NO: 8457 - DNA, 15 bp, Homo sapiens
atgataagaaagacc

SEQ ID NO: 8458 - DNA, 15 bp, Homo sapiens
catgataagaaagac

SEQ ID NO: 8459 - DNA, 15 bp, Homo sapiens
ccatgataagaaaga

SEQ ID NO: 8460 - DNA, 15 bp, Homo sapiens
tccatgataagaaag

SEQ ID NO: 8461 - DNA, 15 bp, Homo sapiens
ctccatgataagaaa

SEQ ID NO: 8462 - DNA, 15 bp, Homo sapiens
cctccatgataagaa

SEQ ID NO: 8463 - DNA, 15 bp, Homo sapiens
acctccatgataaga

SEQ ID NO: 8464 - DNA, 15 bp, Homo sapiens
cacctccatgataag

SEQ ID NO: 8465 - DNA, 15 bp, Homo sapiens
tcacctccatgataa

SEQ ID NO: 8466 - DNA, 15 bp, Homo sapiens
ttcacctccatgata

SEQ ID NO: 8467 - DNA, 15 bp, Homo sapiens
tttcacctccatgat

SEQ ID NO: 8468 - DNA, 15 bp, Homo sapiens
ttttcacctccatga

SEQ ID NO: 8469 - DNA, 15 bp, Homo sapiens
gttttcacctccatg

SEQ ID NO: 8470 - DNA, 15 bp, Homo sapiens
tgttttcacctccat

SEQ ID NO: 8471 - DNA, 15 bp, Homo sapiens
ctgttttcacctcca

SEQ ID NO: 8472 - DNA, 15 bp, Homo sapiens
actgttttcacctcc

SEQ ID NO: 8473 - DNA, 15 bp, Homo sapiens
tactgttttcacctc

SEQ ID NO: 8474 - DNA, 15 bp, Homo sapiens
ttactgttttcacct

SEQ ID NO: 8475 - DNA, 15 bp, Homo sapiens
attactgttttcacc

SEQ ID NO: 8476 - DNA, 15 bp, Homo sapiens
tattactgttttcac

SEQ ID NO: 8477 - DNA, 15 bp, Homo sapiens
gtattactgttttca

SEQ ID NO: 8478 - DNA, 15 bp, Homo sapiens
agtattactgttttc

SEQ ID NO: 8479 - DNA, 15 bp, Homo sapiens
cagtattactgtttt

SEQ ID NO: 8480 - DNA, 15 bp, Homo sapiens
tcagtattactgttt

SEQ ID NO: 8481 - DNA, 15 bp, Homo sapiens
ttcagtattactgtt

SEQ ID NO: 8482 - DNA, 15 bp, Homo sapiens
cttcagtattactgt

SEQ ID NO: 8483 - DNA, 15 bp, Homo sapiens
tcttcagtattactg

SEQ ID NO: 8484 - DNA, 15 bp, Homo sapiens
gtcttcagtattact

SEQ ID NO: 8485 - DNA, 15 bp, Homo sapiens
ggtcttcagtattac

SEQ ID NO: 8486 - DNA, 15 bp, Homo sapiens
aggtcttcagtatta

SEQ ID NO: 8487 - DNA, 15 bp, Homo sapiens
aaggtcttcagtatt

SEQ ID NO: 8488 - DNA, 15 bp, Homo sapiens
taaggtcttcagtat

SEQ ID NO: 8489 - DNA, 15 bp, Homo sapiens
ttaaggtcttcagta

SEQ ID NO: 8490 - DNA, 15 bp, Homo sapiens
attaaggtcttcagt

SEQ ID NO: 8491 - DNA, 15 bp, Homo sapiens
cattaaggtcttcag

SEQ ID NO: 8492 - DNA, 15 bp, Homo sapiens
acattaaggtcttca

SEQ ID NO: 8493 - DNA, 15 bp, Homo sapiens
cacattaaggtcttc

SEQ ID NO: 8494 - DNA, 15 bp, Homo sapiens
tcacattaaggtctt

SEQ ID NO: 8495 - DNA, 15 bp, Homo sapiens
ctcacattaaggtct

SEQ ID NO: 8496 - DNA, 15 bp, Homo sapiens
actcacattaaggtc

SEQ ID NO: 8497 - DNA, 15 bp, Homo sapiens
aactcacattaaggt

SEQ ID NO: 8498 - DNA, 15 bp, Homo sapiens
aaactcacattaagg

SEQ ID NO: 8499 - DNA, 15 bp, Homo sapiens
taaactcacattaag

SEQ ID NO: 8500 - DNA, 15 bp, Homo sapiens
ctaaactcacattaa

SEQ ID NO: 8501 - DNA, 15 bp, Homo sapiens
cctaaactcacatta

SEQ ID NO: 8502 - DNA, 15 bp, Homo sapiens
tcctaaactcacatt

SEQ ID NO: 8503 - DNA, 15 bp, Homo sapiens
ctcctaaactcacat

SEQ ID NO: 8504 - DNA, 15 bp, Homo sapiens
tctcctaaactcaca

SEQ ID NO: 8505 - DNA, 15 bp, Homo sapiens
ttctcctaaactcac

SEQ ID NO: 8506 - DNA, 15 bp, Homo sapiens
tttctcctaaactca

SEQ ID NO: 8507 - DNA, 15 bp, Homo sapiens
ttttctcctaaactc

SEQ ID NO: 8508 - DNA, 15 bp, Homo sapiens
cttttctcctaaact

SEQ ID NO: 8509 - DNA, 15 bp, Homo sapiens
tcttttctcctaaac

SEQ ID NO: 8510 - DNA, 15 bp, Homo sapiens
atcttttctcctaaa

SEQ ID NO: 8511 - DNA, 15 bp, Homo sapiens
catcttttctcctaa

SEQ ID NO: 8512 - DNA, 15 bp, Homo sapiens
acatcttttctccta

SEQ ID NO: 8513 - DNA, 15 bp, Homo sapiens
aacatcttttctcct

SEQ ID NO: 8514 - DNA, 15 bp, Homo sapiens
taacatcttttctcc

SEQ ID NO: 8515 - DNA, 15 bp, Homo sapiens
ttaacatcttttctc

SEQ ID NO: 8516 - DNA, 15 bp, Homo sapiens
attaacatcttttct

SEQ ID NO: 8517 - DNA, 15 bp, Homo sapiens
gattaacatcttttc

SEQ ID NO: 8518 - DNA, 15 bp, Homo sapiens
tgattaacatctttt

SEQ ID NO: 8519 - DNA, 15 bp, Homo sapiens
gtgattaacatcttt

SEQ ID NO: 8520 - DNA, 15 bp, Homo sapiens
ggtgattaacatctt

SEQ ID NO: 8521 - DNA, 15 bp, Homo sapiens
tggtgattaacatct

SEQ ID NO: 8522 - DNA, 15 bp, Homo sapiens
ctggtgattaacatc

SEQ ID NO: 8523 - DNA, 15 bp, Homo sapiens
actggtgattaacat

SEQ ID NO: 8524 - DNA, 15 bp, Homo sapiens
aactggtgattaaca

SEQ ID NO: 8525 - DNA, 15 bp, Homo sapiens
aaactggtgattaac

SEQ ID NO: 8526 - DNA, 15 bp, Homo sapiens
gaaactggtgattaa

SEQ ID NO: 8527 - DNA, 15 bp, Homo sapiens
ggaaactggtgatta

SEQ ID NO: 8528 - DNA, 15 bp, Homo sapiens
aggaaactggtgatt

SEQ ID NO: 8529 - DNA, 15 bp, Homo sapiens
caggaaactggtgat

SEQ ID NO: 8530 - DNA, 15 bp, Homo sapiens
gcaggaaactggtga

SEQ ID NO: 8531 - DNA, 15 bp, Homo sapiens
agcaggaaactggtg

SEQ ID NO: 8532 - DNA, 15 bp, Homo sapiens
tagcaggaaactggt

SEQ ID NO: 8533 - DNA, 15 bp, Homo sapiens
gtagcaggaaactgg

SEQ ID NO: 8534 - DNA, 15 bp, Homo sapiens
agtagcaggaaactg

SEQ ID NO: 8535 - DNA, 15 bp, Homo sapiens
cagtagcaggaaact

SEQ ID NO: 8536 - DNA, 15 bp, Homo sapiens
ccagtagcaggaaac

SEQ ID NO: 8537 - DNA, 15 bp, Homo sapiens
accagtagcaggaaa

SEQ ID NO: 8538 - DNA, 15 bp, Homo sapiens
aaccagtagcaggaa

SEQ ID NO: 8539 - DNA, 15 bp, Homo sapiens
aaaccagtagcagga

SEQ ID NO: 8540 - DNA, 15 bp, Homo sapiens
aaaaccagtagcagg

SEQ ID NO: 8541 - DNA, 15 bp, Homo sapiens
taaaaccagtagcag

SEQ ID NO: 8542 - DNA, 15 bp, Homo sapiens
ttaaaaccagtagca

SEQ ID NO: 8543 - DNA, 15 bp, Homo sapiens
tttaaaaccagtagc

SEQ ID NO: 8544 - DNA, 15 bp, Homo sapiens
atttaaaaccagtag

SEQ ID NO: 8545 - DNA, 15 bp, Homo sapiens
aatttaaaaccagta

SEQ ID NO: 8546 - DNA, 15 bp, Homo sapiens
aaatttaaaaccagt

SEQ ID NO: 8547 - DNA, 15 bp, Homo sapiens
gaaatttaaaaccag

SEQ ID NO: 8548 - DNA, 15 bp, Homo sapiens
tgaaatttaaaacca

SEQ ID NO: 8549 - DNA, 15 bp, Homo sapiens
atgaaatttaaaacc

SEQ ID NO: 8550 - DNA, 15 bp, Homo sapiens
tatgaaatttaaaac

SEQ ID NO: 8551 - DNA, 15 bp, Homo sapiens
ctatgaaatttaaaa

SEQ ID NO: 8552 - DNA, 15 bp, Homo sapiens
tctatgaaatttaaa

SEQ ID NO: 8553 - DNA, 15 bp, Homo sapiens
ctctatgaaatttaa

SEQ ID NO: 8554 - DNA, 15 bp, Homo sapiens
cctctatgaaattta

SEQ ID NO: 8555 - DNA, 15 bp, Homo sapiens
tcctctatgaaattt

SEQ ID NO: 8556 - DNA, 15 bp, Homo sapiens
ttcctctatgaaatt

SEQ ID NO: 8557 - DNA, 15 bp, Homo sapiens
cttcctctatgaaat

SEQ ID NO: 8558 - DNA, 15 bp, Homo sapiens
gcttcctctatgaaa

SEQ ID NO: 8559 - DNA, 15 bp, Homo sapiens
ggcttcctctatgaa

SEQ ID NO: 8560 - DNA, 15 bp, Homo sapiens
tggcttcctctatga

SEQ ID NO: 8561 - DNA, 15 bp, Homo sapiens
gtggcttcctctatg

SEQ ID NO: 8562 - DNA, 15 bp, Homo sapiens
tgtggcttcctctat

SEQ ID NO: 8563 - DNA, 15 bp, Homo sapiens
gtgtggcttcctcta

SEQ ID NO: 8564 - DNA, 15 bp, Homo sapiens
agtgtggcttcctct

SEQ ID NO: 8565 - DNA, 15 bp, Homo sapiens
aagtgtggcttcctc

SEQ ID NO: 8566 - DNA, 15 bp, Homo sapiens
taagtgtggcttcct

SEQ ID NO: 8567 - DNA, 15 bp, Homo sapiens
ataagtgtggcttcc

SEQ ID NO: 8568 - DNA, 15 bp, Homo sapiens
aataagtgtggcttc

SEQ ID NO: 8569 - DNA, 15 bp, Homo sapiens
aaataagtgtggctt

SEQ ID NO: 8570 - DNA, 15 bp, Homo sapiens
aaaataagtgtggct

SEQ ID NO: 8571 - DNA, 15 bp, Homo sapiens
caaaataagtgtggc

SEQ ID NO: 8572 - DNA, 15 bp, Homo sapiens
acaaaataagtgtgg

SEQ ID NO: 8573 - DNA, 15 bp, Homo sapiens
gacaaaataagtgtg

SEQ ID NO: 8574 - DNA, 15 bp, Homo sapiens
tgacaaaataagtgt

SEQ ID NO: 8575 - DNA, 15 bp, Homo sapiens
atgacaaaataagtg

SEQ ID NO: 8576 - DNA, 15 bp, Homo sapiens
gatgacaaaataagt

SEQ ID NO: 8577 - DNA, 15 bp, Homo sapiens
tgatgacaaaataag

SEQ ID NO: 8578 - DNA, 15 bp, Homo sapiens
ctgatgacaaaataa

SEQ ID NO: 8579 - DNA, 15 bp, Homo sapiens
tctgatgacaaaata

SEQ ID NO: 8580 - DNA, 15 bp, Homo sapiens
ttctgatgacaaaat

SEQ ID NO: 8581 - DNA, 15 bp, Homo sapiens
tttctgatgacaaaa

SEQ ID NO: 8582 - DNA, 15 bp, Homo sapiens
atttctgatgacaaa

SEQ ID NO: 8583 - DNA, 15 bp, Homo sapiens
aatttctgatgacaa

SEQ ID NO: 8584 - DNA, 15 bp, Homo sapiens
gaatttctgatgaca

SEQ ID NO: 8585 - DNA, 15 bp, Homo sapiens
agaatttctgatgac

SEQ ID NO: 8586 - DNA, 15 bp, Homo sapiens
aagaatttctgatga

SEQ ID NO: 8587 - DNA, 15 bp, Homo sapiens
taagaatttctgatg

SEQ ID NO: 8588 - DNA, 15 bp, Homo sapiens
ataagaatttctgat

SEQ ID NO: 8589 - DNA, 15 bp, Homo sapiens
tataagaatttctga

SEQ ID NO: 8590 - DNA, 15 bp, Homo sapiens
atataagaatttctg

SEQ ID NO: 8591 - DNA, 15 bp, Homo sapiens
aatataagaatttct

SEQ ID NO: 8592 - DNA, 15 bp, Homo sapiens
aaatataagaatttc

SEQ ID NO: 8593 - DNA, 15 bp, Homo sapiens
aaaatataagaattt

SEQ ID NO: 8594 - DNA, 15 bp, Homo sapiens
aaaaatataagaatt

SEQ ID NO: 8595 - DNA, 15 bp, Homo sapiens
aaaaaatataagaat

SEQ ID NO: 8596 - DNA, 15 bp, Homo sapiens
caaaaaatataagaa

SEQ ID NO: 8597 - DNA, 15 bp, Homo sapiens
acaaaaaatataaga

SEQ ID NO: 8598 - DNA, 15 bp, Homo sapiens
aacaaaaaatataag

SEQ ID NO: 8599 - DNA, 15 bp, Homo sapiens
aaacaaaaaatataa

SEQ ID NO: 8600 - DNA, 15 bp, Homo sapiens
taaacaaaaaatata

SEQ ID NO: 8601 - DNA, 15 bp, Homo sapiens
ttaaacaaaaaatat

SEQ ID NO: 8602 - DNA, 15 bp, Homo sapiens
tttaaacaaaaaata

SEQ ID NO: 8603 - DNA, 15 bp, Homo sapiens
atttaaacaaaaaat

SEQ ID NO: 8604 - DNA, 15 bp, Homo sapiens
aatttaaacaaaaaa

SEQ ID NO: 8605 - DNA, 15 bp, Homo sapiens
gaatttaaacaaaaa

SEQ ID NO: 8606 - DNA, 15 bp, Homo sapiens
agaatttaaacaaaa

SEQ ID NO: 8607 - DNA, 15 bp, Homo sapiens
gagaatttaaacaaa

SEQ ID NO: 8608 - DNA, 15 bp, Homo sapiens
tgagaatttaaacaa

SEQ ID NO: 8609 - DNA, 15 bp, Homo sapiens
atgagaatttaaaca

SEQ ID NO: 8610 - DNA, 15 bp, Homo sapiens
gatgagaatttaaac

SEQ ID NO: 8611 - DNA, 15 bp, Homo sapiens
agatgagaatttaaa

SEQ ID NO: 8612 - DNA, 15 bp, Homo sapiens
gagatgagaatttaa

SEQ ID NO: 8613 - DNA, 15 bp, Homo sapiens
ggagatgagaattta

SEQ ID NO: 8614 - DNA, 15 bp, Homo sapiens
gggagatgagaattt

SEQ ID NO: 8615 - DNA, 15 bp, Homo sapiens
agggagatgagaatt

SEQ ID NO: 8616 - DNA, 15 bp, Homo sapiens
gagggagatgagaat

SEQ ID NO: 8617 - DNA, 15 bp, Homo sapiens
ggagggagatgagaa

SEQ ID NO: 8618 - DNA, 15 bp, Homo sapiens
gggagggagatgaga

SEQ ID NO: 8619 - DNA, 15 bp, Homo sapiens
ggggagggagatgag

SEQ ID NO: 8620 - DNA, 15 bp, Homo sapiens
aggggagggagatga

SEQ ID NO: 8621 - DNA, 15 bp, Homo sapiens
gaggggagggagatg

SEQ ID NO: 8622 - DNA, 15 bp, Homo sapiens
agaggggagggagat

SEQ ID NO: 8623 - DNA, 15 bp, Homo sapiens
aagaggggagggaga

SEQ ID NO: 8624 - DNA, 15 bp, Homo sapiens
caagaggggagggag

SEQ ID NO: 8625 - DNA, 15 bp, Homo sapiens
gcaagaggggaggga

SEQ ID NO: 8626 - DNA, 15 bp, Homo sapiens
ggcaagaggggaggg

SEQ ID NO: 8627 - DNA, 15 bp, Homo sapiens
gggcaagaggggagg

SEQ ID NO: 8628 - DNA, 15 bp, Homo sapiens
tgggcaagaggggag

SEQ ID NO: 8629 - DNA, 15 bp, Homo sapiens
ctgggcaagagggga

SEQ ID NO: 8630 - DNA, 15 bp, Homo sapiens
tctgggcaagagggg

SEQ ID NO: 8631 - DNA, 15 bp, Homo sapiens
atctgggcaagaggg

SEQ ID NO: 8632 - DNA, 15 bp, Homo sapiens
gatctgggcaagagg

SEQ ID NO: 8633 - DNA, 15 bp, Homo sapiens
agatctgggcaagag

SEQ ID NO: 8634 - DNA, 15 bp, Homo sapiens
cagatctgggcaaga

SEQ ID NO: 8635 - DNA, 15 bp, Homo sapiens
ccagatctgggcaag

SEQ ID NO: 8636 - DNA, 15 bp, Homo sapiens
accagatctgggcaa

SEQ ID NO: 8637 - DNA, 15 bp, Homo sapiens
aaccagatctgggca

SEQ ID NO: 8638 - DNA, 15 bp, Homo sapiens
aaaccagatctgggc

SEQ ID NO: 8639 - DNA, 15 bp, Homo sapiens
aaaaccagatctggg

SEQ ID NO: 8640 - DNA, 15 bp, Homo sapiens
aaaaaccagatctgg

SEQ ID NO: 8641 - DNA, 15 bp, Homo sapiens
aaaaaaccagatctg

SEQ ID NO: 8642 - DNA, 15 bp, Homo sapiens
caaaaaaccagatct

SEQ ID NO: 8643 - DNA, 15 bp, Homo sapiens
ccaaaaaaccagatc

SEQ ID NO: 8644 - DNA, 15 bp, Homo sapiens
gccaaaaaaccagat

SEQ ID NO: 8645 - DNA, 15 bp, Homo sapiens
agccaaaaaaccaga

SEQ ID NO: 8646 - DNA, 15 bp, Homo sapiens
tagccaaaaaaccag

SEQ ID NO: 8647 - DNA, 15 bp, Homo sapiens
ctagccaaaaaacca

SEQ ID NO: 8648 - DNA, 15 bp, Homo sapiens
tctagccaaaaaacc

SEQ ID NO: 8649 - DNA, 15 bp, Homo sapiens
ttctagccaaaaaac

SEQ ID NO: 8650 - DNA, 15 bp, Homo sapiens
tttctagccaaaaaa

SEQ ID NO: 8651 - DNA, 15 bp, Homo sapiens
gtttctagccaaaaa

SEQ ID NO: 8652 - DNA, 15 bp, Homo sapiens
tgtttctagccaaaa

SEQ ID NO: 8653 - DNA, 15 bp, Homo sapiens
ttgtttctagccaaa

SEQ ID NO: 8654 - DNA, 15 bp, Homo sapiens
gttgtttctagccaa

SEQ ID NO: 8655 - DNA, 15 bp, Homo sapiens
agttgtttctagcca

SEQ ID NO: 8656 - DNA, 15 bp, Homo sapiens
aagttgtttctagcc

SEQ ID NO: 8657 - DNA, 15 bp, Homo sapiens
taagttgtttctagc

SEQ ID NO: 8658 - DNA, 15 bp, Homo sapiens
gtaagttgtttctag

SEQ ID NO: 8659 - DNA, 15 bp, Homo sapiens
tgtaagttgtttcta

SEQ ID NO: 8660 - DNA, 15 bp, Homo sapiens
ctgtaagttgtttct

SEQ ID NO: 8661 - DNA, 15 bp, Homo sapiens
actgtaagttgtttc

SEQ ID NO: 8662 - DNA, 15 bp, Homo sapiens
tactgtaagttgttt

SEQ ID NO: 8663 - DNA, 15 bp, Homo sapiens
ttactgtaagttgtt

SEQ ID NO: 8664 - DNA, 15 bp, Homo sapiens
gttactgtaagttgt

SEQ ID NO: 8665 - DNA, 15 bp, Homo sapiens
agttactgtaagttg

SEQ ID NO: 8666 - DNA, 15 bp, Homo sapiens
aagttactgtaagtt

SEQ ID NO: 8667 - DNA, 15 bp, Homo sapiens
gaagttactgtaagt

SEQ ID NO: 8668 - DNA, 15 bp, Homo sapiens
tgaagttactgtaag

SEQ ID NO: 8669 - DNA, 15 bp, Homo sapiens
ttgaagttactgtaa

SEQ ID NO: 8670 - DNA, 15 bp, Homo sapiens
tttgaagttactgta

SEQ ID NO: 8671 - DNA, 15 bp, Homo sapiens
atttgaagttactgt

SEQ ID NO: 8672 - DNA, 15 bp, Homo sapiens
aatttgaagttactg

SEQ ID NO: 8673 - DNA, 15 bp, Homo sapiens
taatttgaagttact

SEQ ID NO: 8674 - DNA, 15 bp, Homo sapiens
ttaatttgaagttac

SEQ ID NO: 8675 - DNA, 15 bp, Homo sapiens
cttaatttgaagtta

SEQ ID NO: 8676 - DNA, 15 bp, Homo sapiens
gcttaatttgaagtt

SEQ ID NO: 8677 - DNA, 15 bp, Homo sapiens
tgcttaatttgaagt

SEQ ID NO: 8678 - DNA, 15 bp, Homo sapiens
atgcttaatttgaag

SEQ ID NO: 8679 - DNA, 15 bp, Homo sapiens
aatgcttaatttgaa

SEQ ID NO: 8680 - DNA, 15 bp, Homo sapiens
aaatgcttaatttga

SEQ ID NO: 8681 - DNA, 15 bp, Homo sapiens
aaaatgcttaatttg

SEQ ID NO: 8682 - DNA, 15 bp, Homo sapiens
taaaatgcttaattt

SEQ ID NO: 8683 - DNA, 15 bp, Homo sapiens
ttaaaatgcttaatt

SEQ ID NO: 8684 - DNA, 15 bp, Homo sapiens
attaaaatgcttaat

SEQ ID NO: 8685 - DNA, 15 bp, Homo sapiens
aattaaaatgcttaa

SEQ ID NO: 8686 - DNA, 15 bp, Homo sapiens
gaattaaaatgctta

SEQ ID NO: 8687 - DNA, 15 bp, Homo sapiens
agaattaaaatgctt

SEQ ID NO: 8688 - DNA, 15 bp, Homo sapiens
tagaattaaaatgct

SEQ ID NO: 8689 - DNA, 15 bp, Homo sapiens
ttagaattaaaatgc

SEQ ID NO: 8690 - DNA, 15 bp, Homo sapiens
cttagaattaaaatg

SEQ ID NO: 8691 - DNA, 15 bp, Homo sapiens
ccttagaattaaaat

SEQ ID NO: 8692 - DNA, 15 bp, Homo sapiens
tccttagaattaaaa

SEQ ID NO: 8693 - DNA, 15 bp, Homo sapiens
ttccttagaattaaa

SEQ ID NO: 8694 - DNA, 15 bp, Homo sapiens
attccttagaattaa

SEQ ID NO: 8695 - DNA, 15 bp, Homo sapiens
cattccttagaatta

SEQ ID NO: 8696 - DNA, 15 bp, Homo sapiens
ccattccttagaatt

SEQ ID NO: 8697 - DNA, 15 bp, Homo sapiens
accattccttagaat

SEQ ID NO: 8698 - DNA, 15 bp, Homo sapiens
gaccattccttagaa

SEQ ID NO: 8699 - DNA, 15 bp, Homo sapiens
agaccattccttaga

SEQ ID NO: 8700 - DNA, 15 bp, Homo sapiens
aagaccattccttag

SEQ ID NO: 8701 - DNA, 15 bp, Homo sapiens
taagaccattcctta

SEQ ID NO: 8702 - DNA, 15 bp, Homo sapiens
ttaagaccattcctt

SEQ ID NO: 8703 - DNA, 15 bp, Homo sapiens
cttaagaccattcct

SEQ ID NO: 8704 - DNA, 15 bp, Homo sapiens
acttaagaccattcc

SEQ ID NO: 8705 - DNA, 15 bp, Homo sapiens
cacttaagaccattc

SEQ ID NO: 8706 - DNA, 15 bp, Homo sapiens
tcacttaagaccatt

SEQ ID NO: 8707 - DNA, 15 bp, Homo sapiens
ttcacttaagaccat

SEQ ID NO: 8708 - DNA, 15 bp, Homo sapiens
gttcacttaagacca

SEQ ID NO: 8709 - DNA, 15 bp, Homo sapiens
ggttcacttaagacc

SEQ ID NO: 8710 - DNA, 15 bp, Homo sapiens
tggttcacttaagac

SEQ ID NO: 8711 - DNA, 15 bp, Homo sapiens
ttggttcacttaaga

SEQ ID NO: 8712 - DNA, 15 bp, Homo sapiens
attggttcacttaag

SEQ ID NO: 8713 - DNA, 15 bp, Homo sapiens
cattggttcacttaa

SEQ ID NO: 8714 - DNA, 15 bp, Homo sapiens
acattggttcactta

SEQ ID NO: 8715 - DNA, 15 bp, Homo sapiens
tacattggttcactt

SEQ ID NO: 8716 - DNA, 15 bp, Homo sapiens
atacattggttcact

SEQ ID NO: 8717 - DNA, 15 bp, Homo sapiens
tatacattggttcac

SEQ ID NO: 8718 - DNA, 15 bp, Homo sapiens
atatacattggttca

SEQ ID NO: 8719 - DNA, 15 bp, Homo sapiens
tatatacattggttc

SEQ ID NO: 8720 - DNA, 15 bp, Homo sapiens
ctatatacattggtt

SEQ ID NO: 8721 - DNA, 15 bp, Homo sapiens
tctatatacattggt

SEQ ID NO: 8722 - DNA, 15 bp, Homo sapiens
ctctatatacattgg

SEQ ID NO: 8723 - DNA, 15 bp, Homo sapiens
actctatatacattg

SEQ ID NO: 8724 - DNA, 15 bp, Homo sapiens
aactctatatacatt

SEQ ID NO: 8725 - DNA, 15 bp, Homo sapiens
aaactctatatacat

SEQ ID NO: 8726 - DNA, 15 bp, Homo sapiens
aaaactctatataca

SEQ ID NO: 8727 - DNA, 15 bp, Homo sapiens
taaaactctatatac

SEQ ID NO: 8728 - DNA, 15 bp, Homo sapiens
ataaaactctatata

SEQ ID NO: 8729 - DNA, 15 bp, Homo sapiens
gataaaactctatat

SEQ ID NO: 8730 - DNA, 15 bp, Homo sapiens
agataaaactctata

SEQ ID NO: 8731 - DNA, 15 bp, Homo sapiens
aagataaaactctat

SEQ ID NO: 8732 - DNA, 15 bp, Homo sapiens
aaagataaaactcta

SEQ ID NO: 8733 - DNA, 15 bp, Homo sapiens
taaagataaaactct

SEQ ID NO: 8734 - DNA, 15 bp, Homo sapiens
gtaaagataaaactc

SEQ ID NO: 8735 - DNA, 15 bp, Homo sapiens
agtaaagataaaact

SEQ ID NO: 8736 - DNA, 15 bp, Homo sapiens
aagtaaagataaaac

SEQ ID NO: 8737 - DNA, 15 bp, Homo sapiens
aaagtaaagataaaa

SEQ ID NO: 8738 - DNA, 15 bp, Homo sapiens
aaaagtaaagataaa

SEQ ID NO: 8739 - DNA, 15 bp, Homo sapiens
taaaagtaaagataa

SEQ ID NO: 8740 - DNA, 15 bp, Homo sapiens
ttaaaagtaaagata

SEQ ID NO: 8741 - DNA, 15 bp, Homo sapiens
tttaaaagtaaagat

SEQ ID NO: 8742 - DNA, 15 bp, Homo sapiens
ttttaaaagtaaaga

SEQ ID NO: 8743 - DNA, 15 bp, Homo sapiens
cttttaaaagtaaag

SEQ ID NO: 8744 - DNA, 15 bp, Homo sapiens
ccttttaaaagtaaa

SEQ ID NO: 8745 - DNA, 15 bp, Homo sapiens
accttttaaaagtaa

SEQ ID NO: 8746 - DNA, 15 bp, Homo sapiens
gaccttttaaaagta

SEQ ID NO: 8747 - DNA, 15 bp, Homo sapiens
agaccttttaaaagt

SEQ ID NO: 8748 - DNA, 15 bp, Homo sapiens
gagaccttttaaaag

SEQ ID NO: 8749 - DNA, 15 bp, Homo sapiens
agagaccttttaaaa

SEQ ID NO: 8750 - DNA, 15 bp, Homo sapiens
tagagaccttttaaa

SEQ ID NO: 8751 - DNA, 15 bp, Homo sapiens
ttagagaccttttaa

SEQ ID NO: 8752 - DNA, 15 bp, Homo sapiens
tttagagacctttta

SEQ ID NO: 8753 - DNA, 15 bp, Homo sapiens
ctttagagacctttt

SEQ ID NO: 8754 - DNA, 15 bp, Homo sapiens
gctttagagaccttt

SEQ ID NO: 8755 - DNA, 15 bp, Homo sapiens
tgctttagagacctt

SEQ ID NO: 8756 - DNA, 15 bp, Homo sapiens
atgctttagagacct

SEQ ID NO: 8757 - DNA, 15 bp, Homo sapiens
aatgctttagagacc

SEQ ID NO: 8758 - DNA, 15 bp, Homo sapiens
aaatgctttagagac

SEQ ID NO: 8759 - DNA, 15 bp, Homo sapiens
aaaatgctttagaga

SEQ ID NO: 8760 - DNA, 15 bp, Homo sapiens
aaaaatgctttagag

SEQ ID NO: 8761 - DNA, 15 bp, Homo sapiens
gaaaaatgctttaga

SEQ ID NO: 8762 - DNA, 15 bp, Homo sapiens
agaaaaatgctttag

SEQ ID NO: 8763 - DNA, 15 bp, Homo sapiens
aagaaaaatgcttta

SEQ ID NO: 8764 - DNA, 15 bp, Homo sapiens
gaagaaaaatgcttt

SEQ ID NO: 8765 - DNA, 15 bp, Homo sapiens
agaagaaaaatgctt

SEQ ID NO: 8766 - DNA, 15 bp, Homo sapiens
aagaagaaaaatgct

SEQ ID NO: 8767 - DNA, 15 bp, Homo sapiens
taagaagaaaaatgc

SEQ ID NO: 8768 - DNA, 15 bp, Homo sapiens
ataagaagaaaaatg

SEQ ID NO: 8769 - DNA, 15 bp, Homo sapiens
cataagaagaaaaat

SEQ ID NO: 8770 - DNA, 15 bp, Homo sapiens
ccataagaagaaaaa

SEQ ID NO: 8771 - DNA, 15 bp, Homo sapiens
cccataagaagaaaa

SEQ ID NO: 8772 - DNA, 15 bp, Homo sapiens
ccccataagaagaaa

SEQ ID NO: 8773 - DNA, 15 bp, Homo sapiens
tccccataagaagaa

SEQ ID NO: 8774 - DNA, 15 bp, Homo sapiens
ttccccataagaaga

SEQ ID NO: 8775 - DNA, 15 bp, Homo sapiens
tttccccataagaag

SEQ ID NO: 8776 - DNA, 15 bp, Homo sapiens
atttccccataagaa

SEQ ID NO: 8777 - DNA, 15 bp, Homo sapiens
tatttccccataaga

SEQ ID NO: 8778 - DNA, 15 bp, Homo sapiens
ttatttccccataag

SEQ ID NO: 8779 - DNA, 15 bp, Homo sapiens
tttatttccccataa

SEQ ID NO: 8780 - DNA, 15 bp, Homo sapiens
atttatttccccata

SEQ ID NO: 8781 - DNA, 15 bp, Homo sapiens
aatttatttccccat

SEQ ID NO: 8782 - DNA, 15 bp, Homo sapiens
caatttatttcccca

SEQ ID NO: 8783 - DNA, 15 bp, Homo sapiens
ccaatttatttcccc

SEQ ID NO: 8784 - DNA, 15 bp, Homo sapiens
cccaatttatttccc

SEQ ID NO: 8785 - DNA, 15 bp, Homo sapiens
acccaatttatttcc

SEQ ID NO: 8786 - DNA, 15 bp, Homo sapiens
tacccaatttatttc

SEQ ID NO: 8787 - DNA, 15 bp, Homo sapiens
ctacccaatttattt

SEQ ID NO: 8788 - DNA, 15 bp, Homo sapiens
actacccaatttatt

SEQ ID NO: 8789 - DNA, 15 bp, Homo sapiens
aactacccaatttat

SEQ ID NO: 8790 - DNA, 15 bp, Homo sapiens
aaactacccaattta

SEQ ID NO: 8791 - DNA, 15 bp, Homo sapiens
taaactacccaattt

SEQ ID NO: 8792 - DNA, 15 bp, Homo sapiens
gtaaactacccaatt

SEQ ID NO: 8793 - DNA, 15 bp, Homo sapiens
ggtaaactacccaat

SEQ ID NO: 8794 - DNA, 15 bp, Homo sapiens
aggtaaactacccaa

SEQ ID NO: 8795 - DNA, 15 bp, Homo sapiens
gaggtaaactaccca

SEQ ID NO: 8796 - DNA, 15 bp, Homo sapiens
cgaggtaaactaccc

SEQ ID NO: 8797 - DNA, 15 bp, Homo sapiens
acgaggtaaactacc

SEQ ID NO: 8798 - DNA, 15 bp, Homo sapiens
gacgaggtaaactac

SEQ ID NO: 8799 - DNA, 15 bp, Homo sapiens
tgacgaggtaaacta

SEQ ID NO: 8800 - DNA, 15 bp, Homo sapiens
ctgacgaggtaaact

SEQ ID NO: 8801 - DNA, 15 bp, Homo sapiens
actgacgaggtaaac

SEQ ID NO: 8802 - DNA, 15 bp, Homo sapiens
tactgacgaggtaaa

SEQ ID NO: 8803 - DNA, 15 bp, Homo sapiens
ctactgacgaggtaa

SEQ ID NO: 8804 - DNA, 15 bp, Homo sapiens
tctactgacgaggta

SEQ ID NO: 8805 - DNA, 15 bp, Homo sapiens
ttctactgacgaggt

SEQ ID NO: 8806 - DNA, 15 bp, Homo sapiens
tttctactgacgagg

SEQ ID NO: 8807 - DNA, 15 bp, Homo sapiens
ttttctactgacgag

SEQ ID NO: 8808 - DNA, 15 bp, Homo sapiens
tttttctactgacga

SEQ ID NO: 8809 - DNA, 15 bp, Homo sapiens
ttttttctactgacg

SEQ ID NO: 8810 - DNA, 15 bp, Homo sapiens
attttttctactgac

SEQ ID NO: 8811 - DNA, 15 bp, Homo sapiens
tattttttctactga

SEQ ID NO: 8812 - DNA, 15 bp, Homo sapiens
atattttttctactg

SEQ ID NO: 8813 - DNA, 15 bp, Homo sapiens
tatattttttctact

SEQ ID NO: 8814 - DNA, 15 bp, Homo sapiens
ctatattttttctac

SEQ ID NO: 8815 - DNA, 15 bp, Homo sapiens
cctatattttttcta

SEQ ID NO: 8816 - DNA, 15 bp, Homo sapiens
ccctatattttttct

SEQ ID NO: 8817 - DNA, 15 bp, Homo sapiens
tccctatattttttc

SEQ ID NO: 8818 - DNA, 15 bp, Homo sapiens
atccctatatttttt

SEQ ID NO: 8819 - DNA, 15 bp, Homo sapiens
aatccctatattttt

SEQ ID NO: 8820 - DNA, 15 bp, Homo sapiens
aaatccctatatttt

SEQ ID NO: 8821 - DNA, 15 bp, Homo sapiens
caaatccctatattt

SEQ ID NO: 8822 - DNA, 15 bp, Homo sapiens
acaaatccctatatt

SEQ ID NO: 8823 - DNA, 15 bp, Homo sapiens
cacaaatccctatat

SEQ ID NO: 8824 - DNA, 15 bp, Homo sapiens
acacaaatccctata

SEQ ID NO: 8825 - DNA, 15 bp, Homo sapiens
gacacaaatccctat

SEQ ID NO: 8826 - DNA, 15 bp, Homo sapiens
agacacaaatcccta

SEQ ID NO: 8827 - DNA, 15 bp, Homo sapiens
aagacacaaatccct

SEQ ID NO: 8828 - DNA, 15 bp, Homo sapiens
aaagacacaaatccc

SEQ ID NO: 8829 - DNA, 15 bp, Homo sapiens
caaagacacaaatcc

SEQ ID NO: 8830 - DNA, 15 bp, Homo sapiens
gcaaagacacaaatc

SEQ ID NO: 8831 - DNA, 15 bp, Homo sapiens
tgcaaagacacaaat

SEQ ID NO: 8832 - DNA, 15 bp, Homo sapiens
gtgcaaagacacaaa

SEQ ID NO: 8833 - DNA, 15 bp, Homo sapiens
agtgcaaagacacaa

SEQ ID NO: 8834 - DNA, 15 bp, Homo sapiens
tagtgcaaagacaca

SEQ ID NO: 8835 - DNA, 15 bp, Homo sapiens
ttagtgcaaagacac

SEQ ID NO: 8836 - DNA, 15 bp, Homo sapiens
tttagtgcaaagaca

SEQ ID NO: 8837 - DNA, 15 bp, Homo sapiens
ctttagtgcaaagac

SEQ ID NO: 8838 - DNA, 15 bp, Homo sapiens
actttagtgcaaaga

SEQ ID NO: 8839 - DNA, 15 bp, Homo sapiens
tactttagtgcaaag

SEQ ID NO: 8840 - DNA, 15 bp, Homo sapiens
ttactttagtgcaaa

SEQ ID NO: 8841 - DNA, 15 bp, Homo sapiens
attactttagtgcaa

SEQ ID NO: 8842 - DNA, 15 bp, Homo sapiens
aattactttagtgca

SEQ ID NO: 8843 - DNA, 15 bp, Homo sapiens
aaattactttagtgc

SEQ ID NO: 8844 - DNA, 15 bp, Homo sapiens
gaaattactttagtg

SEQ ID NO: 8845 - DNA, 15 bp, Homo sapiens
tgaaattactttagt

SEQ ID NO: 8846 - DNA, 15 bp, Homo sapiens
ctgaaattactttag

SEQ ID NO: 8847 - DNA, 15 bp, Homo sapiens
cctgaaattacttta

SEQ ID NO: 8848 - DNA, 15 bp, Homo sapiens
ccctgaaattacttt

SEQ ID NO: 8849 - DNA, 15 bp, Homo sapiens
accctgaaattactt

SEQ ID NO: 8850 - DNA, 15 bp, Homo sapiens
aaccctgaaattact

SEQ ID NO: 8851 - DNA, 15 bp, Homo sapiens
caaccctgaaattac

SEQ ID NO: 8852 - DNA, 15 bp, Homo sapiens
ccaaccctgaaatta

SEQ ID NO: 8853 - DNA, 15 bp, Homo sapiens
accaaccctgaaatt

SEQ ID NO: 8854 - DNA, 15 bp, Homo sapiens
gaccaaccctgaaat

SEQ ID NO: 8855 - DNA, 15 bp, Homo sapiens
agaccaaccctgaaa

SEQ ID NO: 8856 - DNA, 15 bp, Homo sapiens
aagaccaaccctgaa

SEQ ID NO: 8857 - DNA, 15 bp, Homo sapiens
gaagaccaaccctga

SEQ ID NO: 8858 - DNA, 15 bp, Homo sapiens
agaagaccaaccctg

SEQ ID NO: 8859 - DNA, 15 bp, Homo sapiens
aagaagaccaaccct

SEQ ID NO: 8860 - DNA, 15 bp, Homo sapiens
aaagaagaccaaccc

SEQ ID NO: 8861 - DNA, 15 bp, Homo sapiens
aaaagaagaccaacc

SEQ ID NO: 8862 - DNA, 15 bp, Homo sapiens
taaaagaagaccaac

SEQ ID NO: 8863 - DNA, 15 bp, Homo sapiens
ctaaaagaagaccaa

SEQ ID NO: 8864 - DNA, 15 bp, Homo sapiens
gctaaaagaagacca

SEQ ID NO: 8865 - DNA, 15 bp, Homo sapiens
agctaaaagaagacc

SEQ ID NO: 8866 - DNA, 15 bp, Homo sapiens
cagctaaaagaagac

SEQ ID NO: 8867 - DNA, 15 bp, Homo sapiens
acagctaaaagaaga

SEQ ID NO: 8868 - DNA, 15 bp, Homo sapiens
gacagctaaaagaag

SEQ ID NO: 8869 - DNA, 15 bp, Homo sapiens
ggacagctaaaagaa

SEQ ID NO: 8870 - DNA, 15 bp, Homo sapiens
aggacagctaaaaga

SEQ ID NO: 8871 - DNA, 15 bp, Homo sapiens
aaggacagctaaaag

SEQ ID NO: 8872 - DNA, 15 bp, Homo sapiens
taaggacagctaaaa

SEQ ID NO: 8873 - DNA, 15 bp, Homo sapiens
ctaaggacagctaaa

SEQ ID NO: 8874 - DNA, 15 bp, Homo sapiens
actaaggacagctaa

SEQ ID NO: 8875 - DNA, 15 bp, Homo sapiens
aactaaggacagcta

SEQ ID NO: 8876 - DNA, 15 bp, Homo sapiens
aaactaaggacagct

SEQ ID NO: 8877 - DNA, 15 bp, Homo sapiens
aaaactaaggacagc

SEQ ID NO: 8878 - DNA, 15 bp, Homo sapiens
caaaactaaggacag

SEQ ID NO: 8879 - DNA, 15 bp, Homo sapiens
ccaaaactaaggaca

SEQ ID NO: 8880 - DNA, 15 bp, Homo sapiens
cccaaaactaaggac

SEQ ID NO: 8881 - DNA, 15 bp, Homo sapiens
tcccaaaactaagga

SEQ ID NO: 8882 - DNA, 15 bp, Homo sapiens
atcccaaaactaagg

SEQ ID NO: 8883 - DNA, 15 bp, Homo sapiens
aatcccaaaactaag

SEQ ID NO: 8884 - DNA, 15 bp, Homo sapiens
taatcccaaaactaa

SEQ ID NO: 8885 - DNA, 15 bp, Homo sapiens
ataatcccaaaacta

SEQ ID NO: 8886 - DNA, 15 bp, Homo sapiens
aataatcccaaaact

SEQ ID NO: 8887 - DNA, 15 bp, Homo sapiens
aaataatcccaaaac

SEQ ID NO: 8888 - DNA, 15 bp, Homo sapiens
aaaataatcccaaaa

SEQ ID NO: 8889 - DNA, 15 bp, Homo sapiens
aaaaataatcccaaa

SEQ ID NO: 8890 - DNA, 15 bp, Homo sapiens
caaaaataatcccaa

SEQ ID NO: 8891 - DNA, 15 bp, Homo sapiens
acaaaaataatccca

SEQ ID NO: 8892 - DNA, 15 bp, Homo sapiens
aacaaaaataatccc

SEQ ID NO: 8893 - DNA, 15 bp, Homo sapiens
aaacaaaaataatcc

SEQ ID NO: 8894 - DNA, 15 bp, Homo sapiens
aaaacaaaaataatc

SEQ ID NO: 8895 - DNA, 15 bp, Homo sapiens
aaaaacaaaaataat

SEQ ID NO: 8896 - DNA, 15 bp, Homo sapiens
gaaaaacaaaaataa

SEQ ID NO: 8897 - DNA, 15 bp, Homo sapiens
tgaaaaacaaaaata

SEQ ID NO: 8898 - DNA, 15 bp, Homo sapiens
ctgaaaaacaaaaat

SEQ ID NO: 8899 - DNA, 15 bp, Homo sapiens
tctgaaaaacaaaaa

SEQ ID NO: 8900 - DNA, 15 bp, Homo sapiens
ttctgaaaaacaaaa

SEQ ID NO: 8901 - DNA, 15 bp, Homo sapiens
attctgaaaaacaaa

SEQ ID NO: 8902 - DNA, 15 bp, Homo sapiens
tattctgaaaaacaa

SEQ ID NO: 8903 - DNA, 15 bp, Homo sapiens
ttattctgaaaaaca

SEQ ID NO: 8904 - DNA, 15 bp, Homo sapiens
tttattctgaaaaac

SEQ ID NO: 8905 - DNA, 15 bp, Homo sapiens
ttttattctgaaaaa

SEQ ID NO: 8906 - DNA, 15 bp, Homo sapiens
attttattctgaaaa

SEQ ID NO: 8907 - DNA, 15 bp, Homo sapiens
cattttattctgaaa

SEQ ID NO: 8908 - DNA, 15 bp, Homo sapiens
ccattttattctgaa

SEQ ID NO: 8909 - DNA, 15 bp, Homo sapiens
gccattttattctga

SEQ ID NO: 8910 - DNA, 15 bp, Homo sapiens
tgccattttattctg

SEQ ID NO: 8911 - DNA, 15 bp, Homo sapiens
gtgccattttattct

SEQ ID NO: 8912 - DNA, 15 bp, Homo sapiens
tgtgccattttattc

SEQ ID NO: 8913 - DNA, 15 bp, Homo sapiens
ctgtgccattttatt

SEQ ID NO: 8914 - DNA, 15 bp, Homo sapiens
cctgtgccattttat

SEQ ID NO: 8915 - DNA, 15 bp, Homo sapiens
acctgtgccatttta

SEQ ID NO: 8916 - DNA, 15 bp, Homo sapiens
gacctgtgccatttt

SEQ ID NO: 8917 - DNA, 15 bp, Homo sapiens
tgacctgtgccattt

SEQ ID NO: 8918 - DNA, 15 bp, Homo sapiens
ctgacctgtgccatt

SEQ ID NO: 8919 - DNA, 15 bp, Homo sapiens
tctgacctgtgccat

SEQ ID NO: 8920 - DNA, 15 bp, Homo sapiens
atctgacctgtgcca

SEQ ID NO: 8921 - DNA, 15 bp, Homo sapiens
tatctgacctgtgcc

SEQ ID NO: 8922 - DNA, 15 bp, Homo sapiens
gtatctgacctgtgc

SEQ ID NO: 8923 - DNA, 15 bp, Homo sapiens
agtatctgacctgtg

SEQ ID NO: 8924 - DNA, 15 bp, Homo sapiens
aagtatctgacctgt

SEQ ID NO: 8925 - DNA, 15 bp, Homo sapiens
aaagtatctgacctg

SEQ ID NO: 8926 - DNA, 15 bp, Homo sapiens
aaaagtatctgacct

SEQ ID NO: 8927 - DNA, 15 bp, Homo sapiens
taaaagtatctgacc

SEQ ID NO: 8928 - DNA, 15 bp, Homo sapiens
ttaaaagtatctgac

SEQ ID NO: 8929 - DNA, 15 bp, Homo sapiens
attaaaagtatctga

SEQ ID NO: 8930 - DNA, 15 bp, Homo sapiens
gattaaaagtatctg

SEQ ID NO: 8931 - DNA, 15 bp, Homo sapiens
ggattaaaagtatct

SEQ ID NO: 8932 - DNA, 15 bp, Homo sapiens
gggattaaaagtatc

SEQ ID NO: 8933 - DNA, 15 bp, Homo sapiens
ggggattaaaagtat

SEQ ID NO: 8934 - DNA, 15 bp, Homo sapiens
aggggattaaaagta

SEQ ID NO: 8935 - DNA, 15 bp, Homo sapiens
caggggattaaaagt

SEQ ID NO: 8936 - DNA, 15 bp, Homo sapiens
tcaggggattaaaag

SEQ ID NO: 8937 - DNA, 15 bp, Homo sapiens
ttcaggggattaaaa

SEQ ID NO: 8938 - DNA, 15 bp, Homo sapiens
tttcaggggattaaa

SEQ ID NO: 8939 - DNA, 15 bp, Homo sapiens
ctttcaggggattaa

SEQ ID NO: 8940 - DNA, 15 bp, Homo sapiens
actttcaggggatta

SEQ ID NO: 8941 - DNA, 15 bp, Homo sapiens
tactttcaggggatt

SEQ ID NO: 8942 - DNA, 15 bp, Homo sapiens
ttactttcaggggat

SEQ ID NO: 8943 - DNA, 15 bp, Homo sapiens
attactttcagggga

SEQ ID NO: 8944 - DNA, 15 bp, Homo sapiens
gattactttcagggg

SEQ ID NO: 8945 - DNA, 15 bp, Homo sapiens
agattactttcaggg

SEQ ID NO: 8946 - DNA, 15 bp, Homo sapiens
tagattactttcagg

SEQ ID NO: 8947 - DNA, 15 bp, Homo sapiens
ttagattactttcag

SEQ ID NO: 8948 - DNA, 15 bp, Homo sapiens
tttagattactttca

SEQ ID NO: 8949 - DNA, 15 bp, Homo sapiens
ctttagattactttc

SEQ ID NO: 8950 - DNA, 15 bp, Homo sapiens
gctttagattacttt

SEQ ID NO: 8951 - DNA, 15 bp, Homo sapiens
agctttagattactt

SEQ ID NO: 8952 - DNA, 15 bp, Homo sapiens
tagctttagattact

SEQ ID NO: 8953 - DNA, 15 bp, Homo sapiens
atagctttagattac

SEQ ID NO: 8954 - DNA, 15 bp, Homo sapiens
tatagctttagatta

SEQ ID NO: 8955 - DNA, 15 bp, Homo sapiens
ctatagctttagatt

SEQ ID NO: 8956 - DNA, 15 bp, Homo sapiens
tctatagctttagat

SEQ ID NO: 8957 - DNA, 15 bp, Homo sapiens
ttctatagctttaga

SEQ ID NO: 8958 - DNA, 15 bp, Homo sapiens
tttctatagctttag

SEQ ID NO: 8959 - DNA, 15 bp, Homo sapiens
atttctatagcttta

SEQ ID NO: 8960 - DNA, 15 bp, Homo sapiens
catttctatagcttt

SEQ ID NO: 8961 - DNA, 15 bp, Homo sapiens
ccatttctatagctt

SEQ ID NO: 8962 - DNA, 15 bp, Homo sapiens
tccatttctatagct

SEQ ID NO: 8963 - DNA, 15 bp, Homo sapiens
ctccatttctatagc

SEQ ID NO: 8964 - DNA, 15 bp, Homo sapiens
gctccatttctatag

SEQ ID NO: 8965 - DNA, 15 bp, Homo sapiens
agctccatttctata

SEQ ID NO: 8966 - DNA, 15 bp, Homo sapiens
cagctccatttctat

SEQ ID NO: 8967 - DNA, 15 bp, Homo sapiens
acagctccatttcta

SEQ ID NO: 8968 - DNA, 15 bp, Homo sapiens
cacagctccatttct

SEQ ID NO: 8969 - DNA, 15 bp, Homo sapiens
ccacagctccatttc

SEQ ID NO: 8970 - DNA, 15 bp, Homo sapiens
gccacagctccattt

SEQ ID NO: 8971 - DNA, 15 bp, Homo sapiens
agccacagctccatt

SEQ ID NO: 8972 - DNA, 15 bp, Homo sapiens
cagccacagctccat

SEQ ID NO: 8973 - DNA, 15 bp, Homo sapiens
acagccacagctcca

SEQ ID NO: 8974 - DNA, 15 bp, Homo sapiens
gacagccacagctcc

SEQ ID NO: 8975 - DNA, 15 bp, Homo sapiens
cgacagccacagctc

SEQ ID NO: 8976 - DNA, 15 bp, Homo sapiens
gcgacagccacagct

SEQ ID NO: 8977 - DNA, 15 bp, Homo sapiens
tgcgacagccacagc

SEQ ID NO: 8978 - DNA, 15 bp, Homo sapiens
ctgcgacagccacag

SEQ ID NO: 8979 - DNA, 15 bp, Homo sapiens
tctgcgacagccaca

SEQ ID NO: 8980 - DNA, 15 bp, Homo sapiens
ctctgcgacagccac

SEQ ID NO: 8981 - DNA, 15 bp, Homo sapiens
tctctgcgacagcca

SEQ ID NO: 8982 - DNA, 15 bp, Homo sapiens
gtctctgcgacagcc

SEQ ID NO: 8983 - DNA, 15 bp, Homo sapiens
agtctctgcgacagc

SEQ ID NO: 8984 - DNA, 15 bp, Homo sapiens
aagtctctgcgacag

SEQ ID NO: 8985 - DNA, 15 bp, Homo sapiens
taagtctctgcgaca

SEQ ID NO: 8986 - DNA, 15 bp, Homo sapiens
gtaagtctctgcgac

SEQ ID NO: 8987 - DNA, 15 bp, Homo sapiens
agtaagtctctgcga

SEQ ID NO: 8988 - DNA, 15 bp, Homo sapiens
tagtaagtctctgcg

SEQ ID NO: 8989 - DNA, 15 bp, Homo sapiens
ctagtaagtctctgc

SEQ ID NO: 8990 - DNA, 15 bp, Homo sapiens
cctagtaagtctctg

SEQ ID NO: 8991 - DNA, 15 bp, Homo sapiens
tcctagtaagtctct

SEQ ID NO: 8992 - DNA, 15 bp, Homo sapiens
atcctagtaagtctc

SEQ ID NO: 8993 - DNA, 15 bp, Homo sapiens
catcctagtaagtct

SEQ ID NO: 8994 - DNA, 15 bp, Homo sapiens
tcatcctagtaagtc

SEQ ID NO: 8995 - DNA, 15 bp, Homo sapiens
ttcatcctagtaagt

SEQ ID NO: 8996 - DNA, 15 bp, Homo sapiens
cttcatcctagtaag

SEQ ID NO: 8997 - DNA, 15 bp, Homo sapiens
ccttcatcctagtaa

SEQ ID NO: 8998 - DNA, 15 bp, Homo sapiens
accttcatcctagta

SEQ ID NO: 8999 - DNA, 15 bp, Homo sapiens
aaccttcatcctagt

SEQ ID NO: 9000 - DNA, 15 bp, Homo sapiens
caaccttcatcctag

SEQ ID NO: 9001 - DNA, 15 bp, Homo sapiens
ccaaccttcatccta

SEQ ID NO: 9002 - DNA, 15 bp, Homo sapiens
accaaccttcatcct

SEQ ID NO: 9003 - DNA, 15 bp, Homo sapiens
caccaaccttcatcc

SEQ ID NO: 9004 - DNA, 15 bp, Homo sapiens
acaccaaccttcatc

SEQ ID NO: 9005 - DNA, 15 bp, Homo sapiens
tacaccaaccttcat

SEQ ID NO: 9006 - DNA, 15 bp, Homo sapiens
ctacaccaaccttca

SEQ ID NO: 9007 - DNA, 15 bp, Homo sapiens
tctacaccaaccttc

SEQ ID NO: 9008 - DNA, 15 bp, Homo sapiens
ttctacaccaacctt

SEQ ID NO: 9009 - DNA, 15 bp, Homo sapiens
tttctacaccaacct

SEQ ID NO: 9010 - DNA, 15 bp, Homo sapiens
ttttctacaccaacc

SEQ ID NO: 9011 - DNA, 15 bp, Homo sapiens
tttttctacaccaac

SEQ ID NO: 9012 - DNA, 15 bp, Homo sapiens
gtttttctacaccaa

SEQ ID NO: 9013 - DNA, 15 bp, Homo sapiens
agtttttctacacca

SEQ ID NO: 9014 - DNA, 15 bp, Homo sapiens
tagtttttctacacc

SEQ ID NO: 9015 - DNA, 15 bp, Homo sapiens
ttagtttttctacac

SEQ ID NO: 9016 - DNA, 15 bp, Homo sapiens
cttagtttttctaca

SEQ ID NO: 9017 - DNA, 15 bp, Homo sapiens
ccttagtttttctac

SEQ ID NO: 9018 - DNA, 15 bp, Homo sapiens
tccttagtttttcta

SEQ ID NO: 9019 - DNA, 15 bp, Homo sapiens
ctccttagtttttct

SEQ ID NO: 9020 - DNA, 15 bp, Homo sapiens
actccttagtttttc

SEQ ID NO: 9021 - DNA, 15 bp, Homo sapiens
tactccttagttttt

SEQ ID NO: 9022 - DNA, 15 bp, Homo sapiens
ctactccttagtttt

SEQ ID NO: 9023 - DNA, 15 bp, Homo sapiens
actactccttagttt

SEQ ID NO: 9024 - DNA, 15 bp, Homo sapiens
tactactccttagtt

SEQ ID NO: 9025 - DNA, 15 bp, Homo sapiens
ctactactccttagt

SEQ ID NO: 9026 - DNA, 15 bp, Homo sapiens
gctactactccttag

SEQ ID NO: 9027 - DNA, 15 bp, Homo sapiens
tgctactactcctta

SEQ ID NO: 9028 - DNA, 15 bp, Homo sapiens
ctgctactactcctt

SEQ ID NO: 9029 - DNA, 15 bp, Homo sapiens
actgctactactcct

SEQ ID NO: 9030 - DNA, 15 bp, Homo sapiens
tactgctactactcc

SEQ ID NO: 9031 - DNA, 15 bp, Homo sapiens
atactgctactactc

SEQ ID NO: 9032 - DNA, 15 bp, Homo sapiens
aatactgctactact

SEQ ID NO: 9033 - DNA, 15 bp, Homo sapiens
gaatactgctactac

SEQ ID NO: 9034 - DNA, 15 bp, Homo sapiens
tgaatactgctacta

SEQ ID NO: 9035 - DNA, 15 bp, Homo sapiens
ctgaatactgctact

SEQ ID NO: 9036 - DNA, 15 bp, Homo sapiens
actgaatactgctac

SEQ ID NO: 9037 - DNA, 15 bp, Homo sapiens
cactgaatactgcta

SEQ ID NO: 9038 - DNA, 15 bp, Homo sapiens
acactgaatactgct

SEQ ID NO: 9039 - DNA, 15 bp, Homo sapiens
gacactgaatactgc

SEQ ID NO: 9040 - DNA, 15 bp, Homo sapiens
ggacactgaatactg

SEQ ID NO: 9041 - DNA, 15 bp, Homo sapiens
gggacactgaatact

SEQ ID NO: 9042 - DNA, 15 bp, Homo sapiens
cgggacactgaatac

SEQ ID NO: 9043 - DNA, 15 bp, Homo sapiens
acgggacactgaata

SEQ ID NO: 9044 - DNA, 15 bp, Homo sapiens
cacgggacactgaat

SEQ ID NO: 9045 - DNA, 15 bp, Homo sapiens
acacgggacactgaa

SEQ ID NO: 9046 - DNA, 15 bp, Homo sapiens
gacacgggacactga

SEQ ID NO: 9047 - DNA, 15 bp, Homo sapiens
agacacgggacactg

SEQ ID NO: 9048 - DNA, 15 bp, Homo sapiens
aagacacgggacact

SEQ ID NO: 9049 - DNA, 15 bp, Homo sapiens
aaagacacgggacac

SEQ ID NO: 9050 - DNA, 15 bp, Homo sapiens
gaaagacacgggaca

SEQ ID NO: 9051 - DNA, 15 bp, Homo sapiens
ggaaagacacgggac

SEQ ID NO: 9052 - DNA, 15 bp, Homo sapiens
gggaaagacacggga

SEQ ID NO: 9053 - DNA, 15 bp, Homo sapiens
ggggaaagacacggg

SEQ ID NO: 9054 - DNA, 15 bp, Homo sapiens
tggggaaagacacgg

SEQ ID NO: 9055 - DNA, 15 bp, Homo sapiens
ctggggaaagacacg

SEQ ID NO: 9056 - DNA, 15 bp, Homo sapiens
tctggggaaagacac

SEQ ID NO: 9057 - DNA, 15 bp, Homo sapiens
ttctggggaaagaca

SEQ ID NO: 9058 - DNA, 15 bp, Homo sapiens
cttctggggaaagac

SEQ ID NO: 9059 - DNA, 15 bp, Homo sapiens
tcttctggggaaaga

SEQ ID NO: 9060 - DNA, 15 bp, Homo sapiens
ttcttctggggaaag

SEQ ID NO: 9061 - DNA, 15 bp, Homo sapiens
gttcttctggggaaa

SEQ ID NO: 9062 - DNA, 15 bp, Homo sapiens
tgttcttctggggaa

SEQ ID NO: 9063 - DNA, 15 bp, Homo sapiens
gtgttcttctgggga

SEQ ID NO: 9064 - DNA, 15 bp, Homo sapiens
agtgttcttctgggg

SEQ ID NO: 9065 - DNA, 15 bp, Homo sapiens
cagtgttcttctggg

SEQ ID NO: 9066 - DNA, 15 bp, Homo sapiens
ccagtgttcttctgg

SEQ ID NO: 9067 - DNA, 15 bp, Homo sapiens
gccagtgttcttctg

SEQ ID NO: 9068 - DNA, 15 bp, Homo sapiens
tgccagtgttcttct

SEQ ID NO: 9069 - DNA, 15 bp, Homo sapiens
ctgccagtgttcttc

SEQ ID NO: 9070 - DNA, 15 bp, Homo sapiens
tctgccagtgttctt

SEQ ID NO: 9071 - DNA, 15 bp, Homo sapiens
ttctgccagtgttct

SEQ ID NO: 9072 - DNA, 15 bp, Homo sapiens
gttctgccagtgttc

SEQ ID NO: 9073 - DNA, 15 bp, Homo sapiens
tgttctgccagtgtt

SEQ ID NO: 9074 - DNA, 15 bp, Homo sapiens
gtgttctgccagtgt

SEQ ID NO: 9075 - DNA, 15 bp, Homo sapiens
ggtgttctgccagtg

SEQ ID NO: 9076 - DNA, 15 bp, Homo sapiens
tggtgttctgccagt

SEQ ID NO: 9077 - DNA, 15 bp, Homo sapiens
ctggtgttctgccag

SEQ ID NO: 9078 - DNA, 15 bp, Homo sapiens
cctggtgttctgcca

SEQ ID NO: 9079 - DNA, 15 bp, Homo sapiens
ccctggtgttctgcc

SEQ ID NO: 9080 - DNA, 15 bp, Homo sapiens
cccctggtgttctgc

SEQ ID NO: 9081 - DNA, 15 bp, Homo sapiens
gcccctggtgttctg

SEQ ID NO: 9082 - DNA, 15 bp, Homo sapiens
tgcccctggtgttct

SEQ ID NO: 9083 - DNA, 15 bp, Homo sapiens
ctgcccctggtgttc

SEQ ID NO: 9084 - DNA, 15 bp, Homo sapiens
tctgcccctggtgtt

SEQ ID NO: 9085 - DNA, 15 bp, Homo sapiens
ttctgcccctggtgt

SEQ ID NO: 9086 - DNA, 15 bp, Homo sapiens
gttctgcccctggtg

SEQ ID NO: 9087 - DNA, 15 bp, Homo sapiens
tgttctgcccctggt

SEQ ID NO: 9088 - DNA, 15 bp, Homo sapiens
gtgttctgcccctgg

SEQ ID NO: 9089 - DNA, 15 bp, Homo sapiens
agtgttctgcccctg

SEQ ID NO: 9090 - DNA, 15 bp, Homo sapiens
cagtgttctgcccct

SEQ ID NO: 9091 - DNA, 15 bp, Homo sapiens
acagtgttctgcccc

SEQ ID NO: 9092 - DNA, 15 bp, Homo sapiens
gacagtgttctgccc

SEQ ID NO: 9093 - DNA, 15 bp, Homo sapiens
tgacagtgttctgcc

SEQ ID NO: 9094 - DNA, 15 bp, Homo sapiens
gtgacagtgttctgc

SEQ ID NO: 9095 - DNA, 15 bp, Homo sapiens
tgtgacagtgttctg

SEQ ID NO: 9096 - DNA, 15 bp, Homo sapiens
gtgtgacagtgttct

SEQ ID NO: 9097 - DNA, 15 bp, Homo sapiens
tgtgtgacagtgttc

SEQ ID NO: 9098 - DNA, 15 bp, Homo sapiens
gtgtgtgacagtgtt

SEQ ID NO: 9099 - DNA, 15 bp, Homo sapiens
agtgtgtgacagtgt

SEQ ID NO: 9100 - DNA, 15 bp, Homo sapiens
tagtgtgtgacagtg

SEQ ID NO: 9101 - DNA, 15 bp, Homo sapiens
atagtgtgtgacagt

SEQ ID NO: 9102 - DNA, 15 bp, Homo sapiens
aatagtgtgtgacag

SEQ ID NO: 9103 - DNA, 15 bp, Homo sapiens
gaatagtgtgtgaca

SEQ ID NO: 9104 - DNA, 15 bp, Homo sapiens
tgaatagtgtgtgac

SEQ ID NO: 9105 - DNA, 15 bp, Homo sapiens
ctgaatagtgtgtga

SEQ ID NO: 9106 - DNA, 15 bp, Homo sapiens
tctgaatagtgtgtg

SEQ ID NO: 9107 - DNA, 15 bp, Homo sapiens
ctctgaatagtgtgt

SEQ ID NO: 9108 - DNA, 15 bp, Homo sapiens
gctctgaatagtgtg

SEQ ID NO: 9109 - DNA, 15 bp, Homo sapiens
tgctctgaatagtgt

SEQ ID NO: 9110 - DNA, 15 bp, Homo sapiens
ctgctctgaatagtg

SEQ ID NO: 9111 - DNA, 15 bp, Homo sapiens
gctgctctgaatagt

SEQ ID NO: 9112 - DNA, 15 bp, Homo sapiens
cgctgctctgaatag

SEQ ID NO: 9113 - DNA, 15 bp, Homo sapiens
tcgctgctctgaata

SEQ ID NO: 9114 - DNA, 15 bp, Homo sapiens
atcgctgctctgaat

SEQ ID NO: 9115 - DNA, 15 bp, Homo sapiens
aatcgctgctctgaa

SEQ ID NO: 9116 - DNA, 15 bp, Homo sapiens
aaatcgctgctctga

SEQ ID NO: 9117 - DNA, 15 bp, Homo sapiens
gaaatcgctgctctg

SEQ ID NO: 9118 - DNA, 15 bp, Homo sapiens
tgaaatcgctgctct

SEQ ID NO: 9119 - DNA, 15 bp, Homo sapiens
ctgaaatcgctgctc

SEQ ID NO: 9120 - DNA, 15 bp, Homo sapiens
cctgaaatcgctgct

SEQ ID NO: 9121 - DNA, 15 bp, Homo sapiens
tcctgaaatcgctgc

SEQ ID NO: 9122 - DNA, 15 bp, Homo sapiens
ctcctgaaatcgctg

SEQ ID NO: 9123 - DNA, 15 bp, Homo sapiens
gctcctgaaatcgct

SEQ ID NO: 9124 - DNA, 15 bp, Homo sapiens
tgctcctgaaatcgc

SEQ ID NO: 9125 - DNA, 15 bp, Homo sapiens
gtgctcctgaaatcg

SEQ ID NO: 9126 - DNA, 15 bp, Homo sapiens
tgtgctcctgaaatc

SEQ ID NO: 9127 - DNA, 15 bp, Homo sapiens
gtgtgctcctgaaat

SEQ ID NO: 9128 - DNA, 15 bp, Homo sapiens
ggtgtgctcctgaaa

SEQ ID NO: 9129 - DNA, 15 bp, Homo sapiens
tggtgtgctcctgaa

SEQ ID NO: 9130 - DNA, 15 bp, Homo sapiens
ttggtgtgctcctga

SEQ ID NO: 9131 - DNA, 15 bp, Homo sapiens
cttggtgtgctcctg

SEQ ID NO: 9132 - DNA, 15 bp, Homo sapiens
ccttggtgtgctcct

SEQ ID NO: 9133 - DNA, 15 bp, Homo sapiens
gccttggtgtgctcc

SEQ ID NO: 9134 - DNA, 15 bp, Homo sapiens
cgccttggtgtgctc

SEQ ID NO: 9135 - DNA, 15 bp, Homo sapiens
ccgccttggtgtgct

SEQ ID NO: 9136 - DNA, 15 bp, Homo sapiens
cccgccttggtgtgc

SEQ ID NO: 9137 - DNA, 15 bp, Homo sapiens
gcccgccttggtgtg

SEQ ID NO: 9138 - DNA, 15 bp, Homo sapiens
ggcccgccttggtgt

SEQ ID NO: 9139 - DNA, 15 bp, Homo sapiens
tggcccgccttggtg

SEQ ID NO: 9140 - DNA, 15 bp, Homo sapiens
ctggcccgccttggt

SEQ ID NO: 9141 - DNA, 15 bp, Homo sapiens
cctggcccgccttgg

SEQ ID NO: 9142 - DNA, 15 bp, Homo sapiens
acctggcccgccttg

SEQ ID NO: 9143 - DNA, 15 bp, Homo sapiens
cacctggcccgcctt

SEQ ID NO: 9144 - DNA, 15 bp, Homo sapiens
ccacctggcccgcct

SEQ ID NO: 9145 - DNA, 15 bp, Homo sapiens
accacctggcccgcc

SEQ ID NO: 9146 - DNA, 15 bp, Homo sapiens
gaccacctggcccgc

SEQ ID NO: 9147 - DNA, 15 bp, Homo sapiens
tgaccacctggcccg

SEQ ID NO: 9148 - DNA, 15 bp, Homo sapiens
ttgaccacctggccc

SEQ ID NO: 9149 - DNA, 15 bp, Homo sapiens
cttgaccacctggcc

SEQ ID NO: 9150 - DNA, 15 bp, Homo sapiens
ccttgaccacctggc

SEQ ID NO: 9151 - DNA, 15 bp, Homo sapiens
cccttgaccacctgg

SEQ ID NO: 9152 - DNA, 15 bp, Homo sapiens
ccccttgaccacctg

SEQ ID NO: 9153 - DNA, 15 bp, Homo sapiens
gccccttgaccacct

SEQ ID NO: 9154 - DNA, 15 bp, Homo sapiens
agccccttgaccacc

SEQ ID NO: 9155 - DNA, 15 bp, Homo sapiens
aagccccttgaccac

SEQ ID NO: 9156 - DNA, 15 bp, Homo sapiens
gaagccccttgacca

SEQ ID NO: 9157 - DNA, 15 bp, Homo sapiens
ggaagccccttgacc

SEQ ID NO: 9158 - DNA, 15 bp, Homo sapiens
gggaagccccttgac

SEQ ID NO: 9159 - DNA, 15 bp, Homo sapiens
tgggaagccccttga

SEQ ID NO: 9160 - DNA, 15 bp, Homo sapiens
ctgggaagccccttg

SEQ ID NO: 9161 - DNA, 15 bp, Homo sapiens
cctgggaagcccctt

SEQ ID NO: 9162 - DNA, 15 bp, Homo sapiens
ccctgggaagcccct

SEQ ID NO: 9163 - DNA, 15 bp, Homo sapiens
cccctgggaagcccc

SEQ ID NO: 9164 - DNA, 15 bp, Homo sapiens
tcccctgggaagccc

SEQ ID NO: 9165 - DNA, 15 bp, Homo sapiens
atcccctgggaagcc

SEQ ID NO: 9166 - DNA, 15 bp, Homo sapiens
catcccctgggaagc

SEQ ID NO: 9167 - DNA, 15 bp, Homo sapiens
acatcccctgggaag

SEQ ID NO: 9168 - DNA, 15 bp, Homo sapiens
gacatcccctgggaa

SEQ ID NO: 9169 - DNA, 15 bp, Homo sapiens
tgacatcccctggga

SEQ ID NO: 9170 - DNA, 15 bp, Homo sapiens
atgacatcccctggg

SEQ ID NO: 9171 - DNA, 15 bp, Homo sapiens
tatgacatcccctgg

SEQ ID NO: 9172 - DNA, 15 bp, Homo sapiens
gtatgacatcccctg

SEQ ID NO: 9173 - DNA, 15 bp, Homo sapiens
tgtatgacatcccct

SEQ ID NO: 9174 - DNA, 15 bp, Homo sapiens
ttgtatgacatcccc

SEQ ID NO: 9175 - DNA, 15 bp, Homo sapiens
cttgtatgacatccc

SEQ ID NO: 9176 - DNA, 15 bp, Homo sapiens
ccttgtatgacatcc

SEQ ID NO: 9177 - DNA, 15 bp, Homo sapiens
gccttgtatgacatc

SEQ ID NO: 9178 - DNA, 15 bp, Homo sapiens
tgccttgtatgacat

SEQ ID NO: 9179 - DNA, 15 bp, Homo sapiens
gtgccttgtatgaca

SEQ ID NO: 9180 - DNA, 15 bp, Homo sapiens
tgtgccttgtatgac

SEQ ID NO: 9181 - DNA, 15 bp, Homo sapiens
atgtgccttgtatga

SEQ ID NO: 9182 - DNA, 15 bp, Homo sapiens
catgtgccttgtatg

SEQ ID NO: 9183 - DNA, 15 bp, Homo sapiens
ccatgtgccttgtat

SEQ ID NO: 9184 - DNA, 15 bp, Homo sapiens
tccatgtgccttgta

SEQ ID NO: 9185 - DNA, 15 bp, Homo sapiens
ttccatgtgccttgt

SEQ ID NO: 9186 - DNA, 15 bp, Homo sapiens
tttccatgtgccttg

SEQ ID NO: 9187 - DNA, 15 bp, Homo sapiens
ctttccatgtgcctt

SEQ ID NO: 9188 - DNA, 15 bp, Homo sapiens
tctttccatgtgcct

SEQ ID NO: 9189 - DNA, 15 bp, Homo sapiens
ttctttccatgtgcc

SEQ ID NO: 9190 - DNA, 15 bp, Homo sapiens
gttctttccatgtgc

SEQ ID NO: 9191 - DNA, 15 bp, Homo sapiens
agttctttccatgtg

SEQ ID NO: 9192 - DNA, 15 bp, Homo sapiens
cagttctttccatgt

SEQ ID NO: 9193 - DNA, 15 bp, Homo sapiens
ccagttctttccatg

SEQ ID NO: 9194 - DNA, 15 bp, Homo sapiens
accagttctttccat

SEQ ID NO: 9195 - DNA, 15 bp, Homo sapiens
aaccagttctttcca

SEQ ID NO: 9196 - DNA, 15 bp, Homo sapiens
aaaccagttctttcc

SEQ ID NO: 9197 - DNA, 15 bp, Homo sapiens
taaaccagttctttc

SEQ ID NO: 9198 - DNA, 15 bp, Homo sapiens
ctaaaccagttcttt

SEQ ID NO: 9199 - DNA, 15 bp, Homo sapiens
cctaaaccagttctt

SEQ ID NO: 9200 - DNA, 15 bp, Homo sapiens
tcctaaaccagttct

SEQ ID NO: 9201 - DNA, 15 bp, Homo sapiens
gtcctaaaccagttc

SEQ ID NO: 9202 - DNA, 15 bp, Homo sapiens
ggtcctaaaccagtt

SEQ ID NO: 9203 - DNA, 15 bp, Homo sapiens
tggtcctaaaccagt

SEQ ID NO: 9204 - DNA, 15 bp, Homo sapiens
ctggtcctaaaccag

SEQ ID NO: 9205 - DNA, 15 bp, Homo sapiens
cctggtcctaaacca

SEQ ID NO: 9206 - DNA, 15 bp, Homo sapiens
acctggtcctaaacc

SEQ ID NO: 9207 - DNA, 15 bp, Homo sapiens
aacctggtcctaaac

SEQ ID NO: 9208 - DNA, 15 bp, Homo sapiens
aaacctggtcctaaa

SEQ ID NO: 9209 - DNA, 15 bp, Homo sapiens
caaacctggtcctaa

SEQ ID NO: 9210 - DNA, 15 bp, Homo sapiens
ccaaacctggtccta

SEQ ID NO: 9211 - DNA, 15 bp, Homo sapiens
gccaaacctggtcct

SEQ ID NO: 9212 - DNA, 15 bp, Homo sapiens
tgccaaacctggtcc

SEQ ID NO: 9213 - DNA, 15 bp, Homo sapiens
gtgccaaacctggtc

SEQ ID NO: 9214 - DNA, 15 bp, Homo sapiens
tgtgccaaacctggt

SEQ ID NO: 9215 - DNA, 15 bp, Homo sapiens
ctgtgccaaacctgg

SEQ ID NO: 9216 - DNA, 15 bp, Homo sapiens
cctgtgccaaacctg

SEQ ID NO: 9217 - DNA, 15 bp, Homo sapiens
acctgtgccaaacct

SEQ ID NO: 9218 - DNA, 15 bp, Homo sapiens
aacctgtgccaaacc

SEQ ID NO: 9219 - DNA, 15 bp, Homo sapiens
gaacctgtgccaaac

SEQ ID NO: 9220 - DNA, 15 bp, Homo sapiens
tgaacctgtgccaaa

SEQ ID NO: 9221 - DNA, 15 bp, Homo sapiens
gtgaacctgtgccaa

SEQ ID NO: 9222 - DNA, 15 bp, Homo sapiens
agtgaacctgtgcca

SEQ ID NO: 9223 - DNA, 15 bp, Homo sapiens
cagtgaacctgtgcc

SEQ ID NO: 9224 - DNA, 15 bp, Homo sapiens
tcagtgaacctgtgc

SEQ ID NO: 9225 - DNA, 15 bp, Homo sapiens
gtcagtgaacctgtg

SEQ ID NO: 9226 - DNA, 15 bp, Homo sapiens
tgtcagtgaacctgt

SEQ ID NO: 9227 - DNA, 15 bp, Homo sapiens
ttgtcagtgaacctg

SEQ ID NO: 9228 - DNA, 15 bp, Homo sapiens
tttgtcagtgaacct

SEQ ID NO: 9229 - DNA, 15 bp, Homo sapiens
ttttgtcagtgaacc

SEQ ID NO: 9230 - DNA, 15 bp, Homo sapiens
tttttgtcagtgaac

SEQ ID NO: 9231 - DNA, 15 bp, Homo sapiens
ctttttgtcagtgaa

SEQ ID NO: 9232 - DNA, 15 bp, Homo sapiens
actttttgtcagtga

SEQ ID NO: 9233 - DNA, 15 bp, Homo sapiens
cactttttgtcagtg

SEQ ID NO: 9234 - DNA, 15 bp, Homo sapiens
ccactttttgtcagt

SEQ ID NO: 9235 - DNA, 15 bp, Homo sapiens
cccactttttgtcag

SEQ ID NO: 9236 - DNA, 15 bp, Homo sapiens
ccccactttttgtca

SEQ ID NO: 9237 - DNA, 15 bp, Homo sapiens
accccactttttgtc

SEQ ID NO: 9238 - DNA, 15 bp, Homo sapiens
caccccactttttgt

SEQ ID NO: 9239 - DNA, 15 bp, Homo sapiens
tcaccccactttttg

SEQ ID NO: 9240 - DNA, 15 bp, Homo sapiens
atcaccccacttttt

SEQ ID NO: 9241 - DNA, 15 bp, Homo sapiens
catcaccccactttt

SEQ ID NO: 9242 - DNA, 15 bp, Homo sapiens
tcatcaccccacttt

SEQ ID NO: 9243 - DNA, 15 bp, Homo sapiens
atcatcaccccactt

SEQ ID NO: 9244 - DNA, 15 bp, Homo sapiens
aatcatcaccccact

SEQ ID NO: 9245 - DNA, 15 bp, Homo sapiens
caatcatcaccccac

SEQ ID NO: 9246 - DNA, 15 bp, Homo sapiens
tcaatcatcacccca

SEQ ID NO: 9247 - DNA, 15 bp, Homo sapiens
ctcaatcatcacccc

SEQ ID NO: 9248 - DNA, 15 bp, Homo sapiens
tctcaatcatcaccc

SEQ ID NO: 9249 - DNA, 15 bp, Homo sapiens
ctctcaatcatcacc

SEQ ID NO: 9250 - DNA, 15 bp, Homo sapiens
cctctcaatcatcac

SEQ ID NO: 9251 - DNA, 15 bp, Homo sapiens
ccctctcaatcatca

SEQ ID NO: 9252 - DNA, 15 bp, Homo sapiens
tccctctcaatcatc

SEQ ID NO: 9253 - DNA, 15 bp, Homo sapiens
atccctctcaatcat

SEQ ID NO: 9254 - DNA, 15 bp, Homo sapiens
gatccctctcaatca

SEQ ID NO: 9255 - DNA, 15 bp, Homo sapiens
tgatccctctcaatc

SEQ ID NO: 9256 - DNA, 15 bp, Homo sapiens
atgatccctctcaat

SEQ ID NO: 9257 - DNA, 15 bp, Homo sapiens
tatgatccctctcaa

SEQ ID NO: 9258 - DNA, 15 bp, Homo sapiens
ctatgatccctctca

SEQ ID NO: 9259 - DNA, 15 bp, Homo sapiens
tctatgatccctctc

SEQ ID NO: 9260 - DNA, 15 bp, Homo sapiens
atctatgatccctct

SEQ ID NO: 9261 - DNA, 15 bp, Homo sapiens
aatctatgatccctc

SEQ ID NO: 9262 - DNA, 15 bp, Homo sapiens
aaatctatgatccct

SEQ ID NO: 9263 - DNA, 15 bp, Homo sapiens
gaaatctatgatccc

SEQ ID NO: 9264 - DNA, 15 bp, Homo sapiens
ggaaatctatgatcc

SEQ ID NO: 9265 - DNA, 15 bp, Homo sapiens
aggaaatctatgatc

SEQ ID NO: 9266 - DNA, 15 bp, Homo sapiens
aaggaaatctatgat

SEQ ID NO: 9267 - DNA, 15 bp, Homo sapiens
aaaggaaatctatga

SEQ ID NO: 9268 - DNA, 15 bp, Homo sapiens
taaaggaaatctatg

SEQ ID NO: 9269 - DNA, 15 bp, Homo sapiens
ataaaggaaatctat

SEQ ID NO: 9270 - DNA, 15 bp, Homo sapiens
tataaaggaaatcta

SEQ ID NO: 9271 - DNA, 15 bp, Homo sapiens
ctataaaggaaatct

SEQ ID NO: 9272 - DNA, 15 bp, Homo sapiens
actataaaggaaatc

SEQ ID NO: 9273 - DNA, 15 bp, Homo sapiens
gactataaaggaaat

SEQ ID NO: 9274 - DNA, 15 bp, Homo sapiens
ggactataaaggaaa

SEQ ID NO: 9275 - DNA, 15 bp, Homo sapiens
gggactataaaggaa

SEQ ID NO: 9276 - DNA, 15 bp, Homo sapiens
tgggactataaagga

SEQ ID NO: 9277 - DNA, 15 bp, Homo sapiens
ctgggactataaagg

SEQ ID NO: 9278 - DNA, 15 bp, Homo sapiens
cctgggactataaag

SEQ ID NO: 9279 - DNA, 15 bp, Homo sapiens
ccctgggactataaa

SEQ ID NO: 9280 - DNA, 15 bp, Homo sapiens
cccctgggactataa

SEQ ID NO: 9281 - DNA, 15 bp, Homo sapiens
gcccctgggactata

SEQ ID NO: 9282 - DNA, 15 bp, Homo sapiens
tgcccctgggactat

SEQ ID NO: 9283 - DNA, 15 bp, Homo sapiens
ctgcccctgggacta

SEQ ID NO: 9284 - DNA, 15 bp, Homo sapiens
tctgcccctgggact

SEQ ID NO: 9285 - DNA, 15 bp, Homo sapiens
ttctgcccctgggac

SEQ ID NO: 9286 - DNA, 15 bp, Homo sapiens
attctgcccctggga

SEQ ID NO: 9287 - DNA, 15 bp, Homo sapiens
gattctgcccctggg

SEQ ID NO: 9288 - DNA, 15 bp, Homo sapiens
tgattctgcccctgg

SEQ ID NO: 9289 - DNA, 15 bp, Homo sapiens
ttgattctgcccctg

SEQ ID NO: 9290 - DNA, 15 bp, Homo sapiens
cttgattctgcccct

SEQ ID NO: 9291 - DNA, 15 bp, Homo sapiens
tcttgattctgcccc

SEQ ID NO: 9292 - DNA, 15 bp, Homo sapiens
atcttgattctgccc

SEQ ID NO: 9293 - DNA, 15 bp, Homo sapiens
aatcttgattctgcc

SEQ ID NO: 9294 - DNA, 15 bp, Homo sapiens
caatcttgattctgc

SEQ ID NO: 9295 - DNA, 15 bp, Homo sapiens
tcaatcttgattctg

SEQ ID NO: 9296 - DNA, 15 bp, Homo sapiens
ttcaatcttgattct

SEQ ID NO: 9297 - DNA, 15 bp, Homo sapiens
cttcaatcttgattc

SEQ ID NO: 9298 - DNA, 15 bp, Homo sapiens
acttcaatcttgatt

SEQ ID NO: 9299 - DNA, 15 bp, Homo sapiens
cacttcaatcttgat

SEQ ID NO: 9300 - DNA, 15 bp, Homo sapiens
ccacttcaatcttga

SEQ ID NO: 9301 - DNA, 15 bp, Homo sapiens
cccacttcaatcttg

SEQ ID NO: 9302 - DNA, 15 bp, Homo sapiens
ccccacttcaatctt

SEQ ID NO: 9303 - DNA, 15 bp, Homo sapiens
gccccacttcaatct

SEQ ID NO: 9304 - DNA, 15 bp, Homo sapiens
agccccacttcaatc

SEQ ID NO: 9305 - DNA, 15 bp, Homo sapiens
aagccccacttcaat

SEQ ID NO: 9306 - DNA, 15 bp, Homo sapiens
taagccccacttcaa

SEQ ID NO: 9307 - DNA, 15 bp, Homo sapiens
ctaagccccacttca

SEQ ID NO: 9308 - DNA, 15 bp, Homo sapiens
tctaagccccacttc

SEQ ID NO: 9309 - DNA, 15 bp, Homo sapiens
ttctaagccccactt

SEQ ID NO: 9310 - DNA, 15 bp, Homo sapiens
cttctaagccccact

SEQ ID NO: 9311 - DNA, 15 bp, Homo sapiens
ccttctaagccccac

SEQ ID NO: 9312 - DNA, 15 bp, Homo sapiens
cccttctaagcccca

SEQ ID NO: 9313 - DNA, 15 bp, Homo sapiens
tcccttctaagcccc

SEQ ID NO: 9314 - DNA, 15 bp, Homo sapiens
ttcccttctaagccc

SEQ ID NO: 9315 - DNA, 15 bp, Homo sapiens
gttcccttctaagcc

SEQ ID NO: 9316 - DNA, 15 bp, Homo sapiens
tgttcccttctaagc

SEQ ID NO: 9317 - DNA, 15 bp, Homo sapiens
atgttcccttctaag

SEQ ID NO: 9318 - DNA, 15 bp, Homo sapiens
aatgttcccttctaa

SEQ ID NO: 9319 - DNA, 15 bp, Homo sapiens
aaatgttcccttcta

SEQ ID NO: 9320 - DNA, 15 bp, Homo sapiens
gaaatgttcccttct

SEQ ID NO: 9321 - DNA, 15 bp, Homo sapiens
tgaaatgttcccttc

SEQ ID NO: 9322 - DNA, 15 bp, Homo sapiens
ttgaaatgttccctt

SEQ ID NO: 9323 - DNA, 15 bp, Homo sapiens
attgaaatgttccct

SEQ ID NO: 9324 - DNA, 15 bp, Homo sapiens
aattgaaatgttccc

SEQ ID NO: 9325 - DNA, 15 bp, Homo sapiens
gaattgaaatgttcc

SEQ ID NO: 9326 - DNA, 15 bp, Homo sapiens
ggaattgaaatgttc

SEQ ID NO: 9327 - DNA, 15 bp, Homo sapiens
gggaattgaaatgtt

SEQ ID NO: 9328 - DNA, 15 bp, Homo sapiens
agggaattgaaatgt

SEQ ID NO: 9329 - DNA, 15 bp, Homo sapiens
tagggaattgaaatg

SEQ ID NO: 9330 - DNA, 15 bp, Homo sapiens
gtagggaattgaaat

SEQ ID NO: 9331 - DNA, 15 bp, Homo sapiens
cgtagggaattgaaa

SEQ ID NO: 9332 - DNA, 15 bp, Homo sapiens
tcgtagggaattgaa

SEQ ID NO: 9333 - DNA, 15 bp, Homo sapiens
ctcgtagggaattga

SEQ ID NO: 9334 - DNA, 15 bp, Homo sapiens
cctcgtagggaattg

SEQ ID NO: 9335 - DNA, 15 bp, Homo sapiens
tcctcgtagggaatt

SEQ ID NO: 9336 - DNA, 15 bp, Homo sapiens
ttcctcgtagggaat

SEQ ID NO: 9337 - DNA, 15 bp, Homo sapiens
attcctcgtagggaa

SEQ ID NO: 9338 - DNA, 15 bp, Homo sapiens
tattcctcgtaggga

SEQ ID NO: 9339 - DNA, 15 bp, Homo sapiens
ctattcctcgtaggg

SEQ ID NO: 9340 - DNA, 15 bp, Homo sapiens
gctattcctcgtagg

SEQ ID NO: 9341 - DNA, 15 bp, Homo sapiens
tgctattcctcgtag

SEQ ID NO: 9342 - DNA, 15 bp, Homo sapiens
atgctattcctcgta

SEQ ID NO: 9343 - DNA, 15 bp, Homo sapiens
gatgctattcctcgt

SEQ ID NO: 9344 - DNA, 15 bp, Homo sapiens
cgatgctattcctcg

SEQ ID NO: 9345 - DNA, 15 bp, Homo sapiens
acgatgctattcctc

SEQ ID NO: 9346 - DNA, 15 bp, Homo sapiens
tacgatgctattcct

SEQ ID NO: 9347 - DNA, 15 bp, Homo sapiens
ctacgatgctattcc

SEQ ID NO: 9348 - DNA, 15 bp, Homo sapiens
gctacgatgctattc

SEQ ID NO: 9349 - DNA, 15 bp, Homo sapiens
tgctacgatgctatt

SEQ ID NO: 9350 - DNA, 15 bp, Homo sapiens
gtgctacgatgctat

SEQ ID NO: 9351 - DNA, 15 bp, Homo sapiens
agtgctacgatgcta

SEQ ID NO: 9352 - DNA, 15 bp, Homo sapiens
gagtgctacgatgct

SEQ ID NO: 9353 - DNA, 15 bp, Homo sapiens
tgagtgctacgatgc

SEQ ID NO: 9354 - DNA, 15 bp, Homo sapiens
ctgagtgctacgatg

SEQ ID NO: 9355 - DNA, 15 bp, Homo sapiens
actgagtgctacgat

SEQ ID NO: 9356 - DNA, 15 bp, Homo sapiens
cactgagtgctacga

SEQ ID NO: 9357 - DNA, 15 bp, Homo sapiens
acactgagtgctacg

SEQ ID NO: 9358 - DNA, 15 bp, Homo sapiens
aacactgagtgctac

SEQ ID NO: 9359 - DNA, 15 bp, Homo sapiens
gaacactgagtgcta

SEQ ID NO: 9360 - DNA, 15 bp, Homo sapiens
agaacactgagtgct

SEQ ID NO: 9361 - DNA, 15 bp, Homo sapiens
aagaacactgagtgc

SEQ ID NO: 9362 - DNA, 15 bp, Homo sapiens
gaagaacactgagtg

SEQ ID NO: 9363 - DNA, 15 bp, Homo sapiens
tgaagaacactgagt

SEQ ID NO: 9364 - DNA, 15 bp, Homo sapiens
ctgaagaacactgag

SEQ ID NO: 9365 - DNA, 15 bp, Homo sapiens
gctgaagaacactga

SEQ ID NO: 9366 - DNA, 15 bp, Homo sapiens
cgctgaagaacactg

SEQ ID NO: 9367 - DNA, 15 bp, Homo sapiens
tcgctgaagaacact

SEQ ID NO: 9368 - DNA, 15 bp, Homo sapiens
ctcgctgaagaacac

SEQ ID NO: 9369 - DNA, 15 bp, Homo sapiens
cctcgctgaagaaca

SEQ ID NO: 9370 - DNA, 15 bp, Homo sapiens
tcctcgctgaagaac

SEQ ID NO: 9371 - DNA, 15 bp, Homo sapiens
gtcctcgctgaagaa

SEQ ID NO: 9372 - DNA, 15 bp, Homo sapiens
tgtcctcgctgaaga

SEQ ID NO: 9373 - DNA, 15 bp, Homo sapiens
ctgtcctcgctgaag

SEQ ID NO: 9374 - DNA, 15 bp, Homo sapiens
gctgtcctcgctgaa

SEQ ID NO: 9375 - DNA, 15 bp, Homo sapiens
tgctgtcctcgctga

SEQ ID NO: 9376 - DNA, 15 bp, Homo sapiens
ctgctgtcctcgctg

SEQ ID NO: 9377 - DNA, 15 bp, Homo sapiens
actgctgtcctcgct

SEQ ID NO: 9378 - DNA, 15 bp, Homo sapiens
cactgctgtcctcgc

SEQ ID NO: 9379 - DNA, 15 bp, Homo sapiens
gcactgctgtcctcg

SEQ ID NO: 9380 - DNA, 15 bp, Homo sapiens
ggcactgctgtcctc

SEQ ID NO: 9381 - DNA, 15 bp, Homo sapiens
aggcactgctgtcct

SEQ ID NO: 9382 - DNA, 15 bp, Homo sapiens
aaggcactgctgtcc

SEQ ID NO: 9383 - DNA, 15 bp, Homo sapiens
taaggcactgctgtc

SEQ ID NO: 9384 - DNA, 15 bp, Homo sapiens
ctaaggcactgctgt

SEQ ID NO: 9385 - DNA, 15 bp, Homo sapiens
cctaaggcactgctg

SEQ ID NO: 9386 - DNA, 15 bp, Homo sapiens
tcctaaggcactgct

SEQ ID NO: 9387 - DNA, 15 bp, Homo sapiens
ttcctaaggcactgc

SEQ ID NO: 9388 - DNA, 15 bp, Homo sapiens
tttcctaaggcactg

SEQ ID NO: 9389 - DNA, 15 bp, Homo sapiens
atttcctaaggcact

SEQ ID NO: 9390 - DNA, 15 bp, Homo sapiens
catttcctaaggcac

SEQ ID NO: 9391 - DNA, 15 bp, Homo sapiens
acatttcctaaggca

SEQ ID NO: 9392 - DNA, 15 bp, Homo sapiens
cacatttcctaaggc

SEQ ID NO: 9393 - DNA, 15 bp, Homo sapiens
gcacatttcctaagg

SEQ ID NO: 9394 - DNA, 15 bp, Homo sapiens
tgcacatttcctaag

SEQ ID NO: 9395 - DNA, 15 bp, Homo sapiens
atgcacatttcctaa

SEQ ID NO: 9396 - DNA, 15 bp, Homo sapiens
gatgcacatttccta

SEQ ID NO: 9397 - DNA, 15 bp, Homo sapiens
agatgcacatttcct

SEQ ID NO: 9398 - DNA, 15 bp, Homo sapiens
cagatgcacatttcc

SEQ ID NO: 9399 - DNA, 15 bp, Homo sapiens
acagatgcacatttc

SEQ ID NO: 9400 - DNA, 15 bp, Homo sapiens
gacagatgcacattt

SEQ ID NO: 9401 - DNA, 15 bp, Homo sapiens
ggacagatgcacatt

SEQ ID NO: 9402 - DNA, 15 bp, Homo sapiens
gggacagatgcacat

SEQ ID NO: 9403 - DNA, 15 bp, Homo sapiens
tgggacagatgcaca

SEQ ID NO: 9404 - DNA, 15 bp, Homo sapiens
ctgggacagatgcac

SEQ ID NO: 9405 - DNA, 15 bp, Homo sapiens
cctgggacagatgca

SEQ ID NO: 9406 - DNA, 15 bp, Homo sapiens
tcctgggacagatgc

SEQ ID NO: 9407 - DNA, 15 bp, Homo sapiens
ttcctgggacagatg

SEQ ID NO: 9408 - DNA, 15 bp, Homo sapiens
cttcctgggacagat

SEQ ID NO: 9409 - DNA, 15 bp, Homo sapiens
gcttcctgggacaga

SEQ ID NO: 9410 - DNA, 15 bp, Homo sapiens
cgcttcctgggacag

SEQ ID NO: 9411 - DNA, 15 bp, Homo sapiens
ccgcttcctgggaca

SEQ ID NO: 9412 - DNA, 15 bp, Homo sapiens
cccgcttcctgggac

SEQ ID NO: 9413 - DNA, 15 bp, Homo sapiens
gcccgcttcctggga

SEQ ID NO: 9414 - DNA, 15 bp, Homo sapiens
tgcccgcttcctggg

SEQ ID NO: 9415 - DNA, 15 bp, Homo sapiens
gtgcccgcttcctgg

SEQ ID NO: 9416 - DNA, 15 bp, Homo sapiens
tgtgcccgcttcctg

SEQ ID NO: 9417 - DNA, 15 bp, Homo sapiens
gtgtgcccgcttcct

SEQ ID NO: 9418 - DNA, 15 bp, Homo sapiens
tgtgtgcccgcttcc

SEQ ID NO: 9419 - DNA, 15 bp, Homo sapiens
ctgtgtgcccgcttc

SEQ ID NO: 9420 - DNA, 15 bp, Homo sapiens
cctgtgtgcccgctt

SEQ ID NO: 9421 - DNA, 15 bp, Homo sapiens
gcctgtgtgcccgct

SEQ ID NO: 9422 - DNA, 15 bp, Homo sapiens
agcctgtgtgcccgc

SEQ ID NO: 9423 - DNA, 15 bp, Homo sapiens
cagcctgtgtgcccg

SEQ ID NO: 9424 - DNA, 15 bp, Homo sapiens
ccagcctgtgtgccc

SEQ ID NO: 9425 - DNA, 15 bp, Homo sapiens
cccagcctgtgtgcc

SEQ ID NO: 9426 - DNA, 15 bp, Homo sapiens
tcccagcctgtgtgc

SEQ ID NO: 9427 - DNA, 15 bp, Homo sapiens
ctcccagcctgtgtg

SEQ ID NO: 9428 - DNA, 15 bp, Homo sapiens
actcccagcctgtgt

SEQ ID NO: 9429 - DNA, 15 bp, Homo sapiens
gactcccagcctgtg

SEQ ID NO: 9430 - DNA, 15 bp, Homo sapiens
agactcccagcctgt

SEQ ID NO: 9431 - DNA, 15 bp, Homo sapiens
aagactcccagcctg

SEQ ID NO: 9432 - DNA, 15 bp, Homo sapiens
taagactcccagcct

SEQ ID NO: 9433 - DNA, 15 bp, Homo sapiens
ctaagactcccagcc

SEQ ID NO: 9434 - DNA, 15 bp, Homo sapiens
tctaagactcccagc

SEQ ID NO: 9435 - DNA, 15 bp, Homo sapiens
ctctaagactcccag

SEQ ID NO: 9436 - DNA, 15 bp, Homo sapiens
cctctaagactccca

SEQ ID NO: 9437 - DNA, 15 bp, Homo sapiens
ccctctaagactccc

SEQ ID NO: 9438 - DNA, 15 bp, Homo sapiens
gccctctaagactcc

SEQ ID NO: 9439 - DNA, 15 bp, Homo sapiens
agccctctaagactc

SEQ ID NO: 9440 - DNA, 15 bp, Homo sapiens
gagccctctaagact

SEQ ID NO: 9441 - DNA, 15 bp, Homo sapiens
ggagccctctaagac

SEQ ID NO: 9442 - DNA, 15 bp, Homo sapiens
aggagccctctaaga

SEQ ID NO: 9443 - DNA, 15 bp, Homo sapiens
caggagccctctaag

SEQ ID NO: 9444 - DNA, 15 bp, Homo sapiens
gcaggagccctctaa

SEQ ID NO: 9445 - DNA, 15 bp, Homo sapiens
agcaggagccctcta

SEQ ID NO: 9446 - DNA, 15 bp, Homo sapiens
gagcaggagccctct

SEQ ID NO: 9447 - DNA, 15 bp, Homo sapiens
tgagcaggagccctc

SEQ ID NO: 9448 - DNA, 15 bp, Homo sapiens
ctgagcaggagccct

SEQ ID NO: 9449 - DNA, 15 bp, Homo sapiens
cctgagcaggagccc

SEQ ID NO: 9450 - DNA, 15 bp, Homo sapiens
acctgagcaggagcc

SEQ ID NO: 9451 - DNA, 15 bp, Homo sapiens
gacctgagcaggagc

SEQ ID NO: 9452 - DNA, 15 bp, Homo sapiens
agacctgagcaggag

SEQ ID NO: 9453 - DNA, 15 bp, Homo sapiens
gagacctgagcagga

SEQ ID NO: 9454 - DNA, 15 bp, Homo sapiens
ggagacctgagcagg

SEQ ID NO: 9455 - DNA, 15 bp, Homo sapiens
gggagacctgagcag

SEQ ID NO: 9456 - DNA, 15 bp, Homo sapiens
tgggagacctgagca

SEQ ID NO: 9457 - DNA, 15 bp, Homo sapiens
gtgggagacctgagc

SEQ ID NO: 9458 - DNA, 15 bp, Homo sapiens
tgtgggagacctgag

SEQ ID NO: 9459 - DNA, 15 bp, Homo sapiens
atgtgggagacctga

SEQ ID NO: 9460 - DNA, 15 bp, Homo sapiens
catgtgggagacctg

SEQ ID NO: 9461 - DNA, 15 bp, Homo sapiens
ccatgtgggagacct

SEQ ID NO: 9462 - DNA, 15 bp, Homo sapiens
accatgtgggagacc

SEQ ID NO: 9463 - DNA, 15 bp, Homo sapiens
caccatgtgggagac

SEQ ID NO: 9464 - DNA, 15 bp, Homo sapiens
gcaccatgtgggaga

SEQ ID NO: 9465 - DNA, 15 bp, Homo sapiens
tgcaccatgtgggag

SEQ ID NO: 9466 - DNA, 15 bp, Homo sapiens
ttgcaccatgtggga

SEQ ID NO: 9467 - DNA, 15 bp, Homo sapiens
cttgcaccatgtggg

SEQ ID NO: 9468 - DNA, 15 bp, Homo sapiens
tcttgcaccatgtgg

SEQ ID NO: 9469 - DNA, 15 bp, Homo sapiens
atcttgcaccatgtg

SEQ ID NO: 9470 - DNA, 15 bp, Homo sapiens
catcttgcaccatgt

SEQ ID NO: 9471 - DNA, 15 bp, Homo sapiens
gcatcttgcaccatg

SEQ ID NO: 9472 - DNA, 15 bp, Homo sapiens
agcatcttgcaccat

SEQ ID NO: 9473 - DNA, 15 bp, Homo sapiens
cagcatcttgcacca

SEQ ID NO: 9474 - DNA, 15 bp, Homo sapiens
ccagcatcttgcacc

SEQ ID NO: 9475 - DNA, 15 bp, Homo sapiens
cccagcatcttgcac

SEQ ID NO: 9476 - DNA, 15 bp, Homo sapiens
gcccagcatcttgca

SEQ ID NO: 9477 - DNA, 15 bp, Homo sapiens
agcccagcatcttgc

SEQ ID NO: 9478 - DNA, 15 bp, Homo sapiens
aagcccagcatcttg

SEQ ID NO: 9479 - DNA, 15 bp, Homo sapiens
gaagcccagcatctt

SEQ ID NO: 9480 - DNA, 15 bp, Homo sapiens
agaagcccagcatct

SEQ ID NO: 9481 - DNA, 15 bp, Homo sapiens
cagaagcccagcatc

SEQ ID NO: 9482 - DNA, 15 bp, Homo sapiens
acagaagcccagcat

SEQ ID NO: 9483 - DNA, 15 bp, Homo sapiens
gacagaagcccagca

SEQ ID NO: 9484 - DNA, 15 bp, Homo sapiens
cgacagaagcccagc

SEQ ID NO: 9485 - DNA, 15 bp, Homo sapiens
acgacagaagcccag

SEQ ID NO: 9486 - DNA, 15 bp, Homo sapiens
cacgacagaagccca

SEQ ID NO: 9487 - DNA, 15 bp, Homo sapiens
tcacgacagaagccc

SEQ ID NO: 9488 - DNA, 15 bp, Homo sapiens
gtcacgacagaagcc

SEQ ID NO: 9489 - DNA, 15 bp, Homo sapiens
agtcacgacagaagc

SEQ ID NO: 9490 - DNA, 15 bp, Homo sapiens
gagtcacgacagaag

SEQ ID NO: 9491 - DNA, 15 bp, Homo sapiens
tgagtcacgacagaa

SEQ ID NO: 9492 - DNA, 15 bp, Homo sapiens
ctgagtcacgacaga

SEQ ID NO: 9493 - DNA, 15 bp, Homo sapiens
gctgagtcacgacag

SEQ ID NO: 9494 - DNA, 15 bp, Homo sapiens
agctgagtcacgaca

SEQ ID NO: 9495 - DNA, 15 bp, Homo sapiens
cagctgagtcacgac

SEQ ID NO: 9496 - DNA, 15 bp, Homo sapiens
ccagctgagtcacga

SEQ ID NO: 9497 - DNA, 15 bp, Homo sapiens
cccagctgagtcacg

SEQ ID NO: 9498 - DNA, 15 bp, Homo sapiens
ccccagctgagtcac

SEQ ID NO: 9499 - DNA, 15 bp, Homo sapiens
tccccagctgagtca

SEQ ID NO: 9500 - DNA, 15 bp, Homo sapiens
atccccagctgagtc

SEQ ID NO: 9501 - DNA, 15 bp, Homo sapiens
catccccagctgagt

SEQ ID NO: 9502 - DNA, 15 bp, Homo sapiens
acatccccagctgag

SEQ ID NO: 9503 - DNA, 15 bp, Homo sapiens
gacatccccagctga

SEQ ID NO: 9504 - DNA, 15 bp, Homo sapiens
ggacatccccagctg

SEQ ID NO: 9505 - DNA, 15 bp, Homo sapiens
aggacatccccagct

SEQ ID NO: 9506 - DNA, 15 bp, Homo sapiens
aaggacatccccagc

SEQ ID NO: 9507 - DNA, 15 bp, Homo sapiens
caaggacatccccag

SEQ ID NO: 9508 - DNA, 15 bp, Homo sapiens
tcaaggacatcccca

SEQ ID NO: 9509 - DNA, 15 bp, Homo sapiens
ctcaaggacatcccc

SEQ ID NO: 9510 - DNA, 15 bp, Homo sapiens
actcaaggacatccc

SEQ ID NO: 9511 - DNA, 15 bp, Homo sapiens
tactcaaggacatcc

SEQ ID NO: 9512 - DNA, 15 bp, Homo sapiens
atactcaaggacatc

SEQ ID NO: 9513 - DNA, 15 bp, Homo sapiens
tatactcaaggacat

SEQ ID NO: 9514 - DNA, 15 bp, Homo sapiens
ctatactcaaggaca

SEQ ID NO: 9515 - DNA, 15 bp, Homo sapiens
cctatactcaaggac

SEQ ID NO: 9516 - DNA, 15 bp, Homo sapiens
ccctatactcaagga

SEQ ID NO: 9517 - DNA, 15 bp, Homo sapiens
tccctatactcaagg

SEQ ID NO: 9518 - DNA, 15 bp, Homo sapiens
atccctatactcaag

SEQ ID NO: 9519 - DNA, 15 bp, Homo sapiens
gatccctatactcaa

SEQ ID NO: 9520 - DNA, 15 bp, Homo sapiens
tgatccctatactca

SEQ ID NO: 9521 - DNA, 15 bp, Homo sapiens
gtgatccctatactc

SEQ ID NO: 9522 - DNA, 15 bp, Homo sapiens
tgtgatccctatact

SEQ ID NO: 9523 - DNA, 15 bp, Homo sapiens
ctgtgatccctatac

SEQ ID NO: 9524 - DNA, 15 bp, Homo sapiens
gctgtgatccctata

SEQ ID NO: 9525 - DNA, 15 bp, Homo sapiens
agctgtgatccctat

SEQ ID NO: 9526 - DNA, 15 bp, Homo sapiens
gagctgtgatcccta

SEQ ID NO: 9527 - DNA, 15 bp, Homo sapiens
tgagctgtgatccct

SEQ ID NO: 9528 - DNA, 15 bp, Homo sapiens
ctgagctgtgatccc

SEQ ID NO: 9529 - DNA, 15 bp, Homo sapiens
actgagctgtgatcc

SEQ ID NO: 9530 - DNA, 15 bp, Homo sapiens
gactgagctgtgatc

SEQ ID NO: 9531 - DNA, 15 bp, Homo sapiens
agactgagctgtgat

SEQ ID NO: 9532 - DNA, 15 bp, Homo sapiens
cagactgagctgtga

SEQ ID NO: 9533 - DNA, 15 bp, Homo sapiens
ccagactgagctgtg

SEQ ID NO: 9534 - DNA, 15 bp, Homo sapiens
cccagactgagctgt

SEQ ID NO: 9535 - DNA, 15 bp, Homo sapiens
acccagactgagctg

SEQ ID NO: 9536 - DNA, 15 bp, Homo sapiens
aacccagactgagct

SEQ ID NO: 9537 - DNA, 15 bp, Homo sapiens
aaacccagactgagc

SEQ ID NO: 9538 - DNA, 15 bp, Homo sapiens
caaacccagactgag

SEQ ID NO: 9539 - DNA, 15 bp, Homo sapiens
gcaaacccagactga

SEQ ID NO: 9540 - DNA, 15 bp, Homo sapiens
agcaaacccagactg

SEQ ID NO: 9541 - DNA, 15 bp, Homo sapiens
gagcaaacccagact

SEQ ID NO: 9542 - DNA, 15 bp, Homo sapiens
ggagcaaacccagac

SEQ ID NO: 9543 - DNA, 15 bp, Homo sapiens
aggagcaaacccaga

SEQ ID NO: 9544 - DNA, 15 bp, Homo sapiens
caggagcaaacccag

SEQ ID NO: 9545 - DNA, 15 bp, Homo sapiens
ccaggagcaaaccca

SEQ ID NO: 9546 - DNA, 15 bp, Homo sapiens
gccaggagcaaaccc

SEQ ID NO: 9547 - DNA, 15 bp, Homo sapiens
agccaggagcaaacc

SEQ ID NO: 9548 - DNA, 15 bp, Homo sapiens
aagccaggagcaaac

SEQ ID NO: 9549 - DNA, 15 bp, Homo sapiens
caagccaggagcaaa

SEQ ID NO: 9550 - DNA, 15 bp, Homo sapiens
acaagccaggagcaa

SEQ ID NO: 9551 - DNA, 15 bp, Homo sapiens
gacaagccaggagca

SEQ ID NO: 9552 - DNA, 15 bp, Homo sapiens
ggacaagccaggagc

SEQ ID NO: 9553 - DNA, 15 bp, Homo sapiens
gggacaagccaggag

SEQ ID NO: 9554 - DNA, 15 bp, Homo sapiens
ggggacaagccagga

SEQ ID NO: 9555 - DNA, 15 bp, Homo sapiens
tggggacaagccagg

SEQ ID NO: 9556 - DNA, 15 bp, Homo sapiens
ctggggacaagccag

SEQ ID NO: 9557 - DNA, 15 bp, Homo sapiens
gctggggacaagcca

SEQ ID NO: 9558 - DNA, 15 bp, Homo sapiens
agctggggacaagcc

SEQ ID NO: 9559 - DNA, 15 bp, Homo sapiens
cagctggggacaagc

SEQ ID NO: 9560 - DNA, 15 bp, Homo sapiens
gcagctggggacaag

SEQ ID NO: 9561 - DNA, 15 bp, Homo sapiens
agcagctggggacaa

SEQ ID NO: 9562 - DNA, 15 bp, Homo sapiens
tagcagctggggaca

SEQ ID NO: 9563 - DNA, 15 bp, Homo sapiens
ctagcagctggggac

SEQ ID NO: 9564 - DNA, 15 bp, Homo sapiens
actagcagctgggga

SEQ ID NO: 9565 - DNA, 15 bp, Homo sapiens
tactagcagctgggg

SEQ ID NO: 9566 - DNA, 15 bp, Homo sapiens
ttactagcagctggg

SEQ ID NO: 9567 - DNA, 15 bp, Homo sapiens
tttactagcagctgg

SEQ ID NO: 9568 - DNA, 15 bp, Homo sapiens
atttactagcagctg

SEQ ID NO: 9569 - DNA, 15 bp, Homo sapiens
tatttactagcagct

SEQ ID NO: 9570 - DNA, 15 bp, Homo sapiens
atatttactagcagc

SEQ ID NO: 9571 - DNA, 15 bp, Homo sapiens
catatttactagcag

SEQ ID NO: 9572 - DNA, 15 bp, Homo sapiens
acatatttactagca

SEQ ID NO: 9573 - DNA, 15 bp, Homo sapiens
aacatatttactagc

SEQ ID NO: 9574 - DNA, 15 bp, Homo sapiens
taacatatttactag

SEQ ID NO: 9575 - DNA, 15 bp, Homo sapiens
ttaacatatttacta

SEQ ID NO: 9576 - DNA, 15 bp, Homo sapiens
attaacatatttact

SEQ ID NO: 9577 - DNA, 15 bp, Homo sapiens
tattaacatatttac

SEQ ID NO: 9578 - DNA, 15 bp, Homo sapiens
atattaacatattta

SEQ ID NO: 9579 - DNA, 15 bp, Homo sapiens
catattaacatattt

SEQ ID NO: 9580 - DNA, 15 bp, Homo sapiens
acatattaacatatt

SEQ ID NO: 9581 - DNA, 15 bp, Homo sapiens
cacatattaacatat

SEQ ID NO: 9582 - DNA, 15 bp, Homo sapiens
acacatattaacata

SEQ ID NO: 9583 - DNA, 15 bp, Homo sapiens
cacacatattaacat

SEQ ID NO: 9584 - DNA, 15 bp, Homo sapiens
acacacatattaaca

SEQ ID NO: 9585 - DNA, 15 bp, Homo sapiens
gacacacatattaac

SEQ ID NO: 9586 - DNA, 15 bp, Homo sapiens
cgacacacatattaa

SEQ ID NO: 9587 - DNA, 15 bp, Homo sapiens
ccgacacacatatta

SEQ ID NO: 9588 - DNA, 15 bp, Homo sapiens
cccgacacacatatt

SEQ ID NO: 9589 - DNA, 15 bp, Homo sapiens
ccccgacacacatat

SEQ ID NO: 9590 - DNA, 15 bp, Homo sapiens
tccccgacacacata

SEQ ID NO: 9591 - DNA, 15 bp, Homo sapiens
gtccccgacacacat

SEQ ID NO: 9592 - DNA, 15 bp, Homo sapiens
tgtccccgacacaca

SEQ ID NO: 9593 - DNA, 15 bp, Homo sapiens
ctgtccccgacacac

SEQ ID NO: 9594 - DNA, 15 bp, Homo sapiens
gctgtccccgacaca

SEQ ID NO: 9595 - DNA, 15 bp, Homo sapiens
agctgtccccgacac

SEQ ID NO: 9596 - DNA, 15 bp, Homo sapiens
gagctgtccccgaca

SEQ ID NO: 9597 - DNA, 15 bp, Homo sapiens
agagctgtccccgac

SEQ ID NO: 9598 - DNA, 15 bp, Homo sapiens
cagagctgtccccga

SEQ ID NO: 9599 - DNA, 15 bp, Homo sapiens
ccagagctgtccccg

SEQ ID NO: 9600 - DNA, 15 bp, Homo sapiens
accagagctgtcccc

SEQ ID NO: 9601 - DNA, 15 bp, Homo sapiens
caccagagctgtccc

SEQ ID NO: 9602 - DNA, 15 bp, Homo sapiens
tcaccagagctgtcc

SEQ ID NO: 9603 - DNA, 15 bp, Homo sapiens
gtcaccagagctgtc

SEQ ID NO: 9604 - DNA, 15 bp, Homo sapiens
tgtcaccagagctgt

SEQ ID NO: 9605 - DNA, 15 bp, Homo sapiens
atgtcaccagagctg

SEQ ID NO: 9606 - DNA, 15 bp, Homo sapiens
catgtcaccagagct

SEQ ID NO: 9607 - DNA, 15 bp, Homo sapiens
ccatgtcaccagagc

SEQ ID NO: 9608 - DNA, 15 bp, Homo sapiens
tccatgtcaccagag

SEQ ID NO: 9609 - DNA, 15 bp, Homo sapiens
atccatgtcaccaga

SEQ ID NO: 9610 - DNA, 15 bp, Homo sapiens
tatccatgtcaccag

SEQ ID NO: 9611 - DNA, 15 bp, Homo sapiens
ttatccatgtcacca

SEQ ID NO: 9612 - DNA, 15 bp, Homo sapiens
attatccatgtcacc

SEQ ID NO: 9613 - DNA, 15 bp, Homo sapiens
aattatccatgtcac

SEQ ID NO: 9614 - DNA, 15 bp, Homo sapiens
taattatccatgtca

SEQ ID NO: 9615 - DNA, 15 bp, Homo sapiens
ctaattatccatgtc

SEQ ID NO: 9616 - DNA, 15 bp, Homo sapiens
actaattatccatgt

SEQ ID NO: 9617 - DNA, 15 bp, Homo sapiens
aactaattatccatg

SEQ ID NO: 9618 - DNA, 15 bp, Homo sapiens
aaactaattatccat

SEQ ID NO: 9619 - DNA, 15 bp, Homo sapiens
aaaactaattatcca

SEQ ID NO: 9620 - DNA, 15 bp, Homo sapiens
aaaaactaattatcc

SEQ ID NO: 9621 - DNA, 15 bp, Homo sapiens
gaaaaactaattatc

SEQ ID NO: 9622 - DNA, 15 bp, Homo sapiens
agaaaaactaattat

SEQ ID NO: 9623 - DNA, 15 bp, Homo sapiens
cagaaaaactaatta

SEQ ID NO: 9624 - DNA, 15 bp, Homo sapiens
tcagaaaaactaatt

SEQ ID NO: 9625 - DNA, 15 bp, Homo sapiens
atcagaaaaactaat

SEQ ID NO: 9626 - DNA, 15 bp, Homo sapiens
catcagaaaaactaa

SEQ ID NO: 9627 - DNA, 15 bp, Homo sapiens
acatcagaaaaacta

SEQ ID NO: 9628 - DNA, 15 bp, Homo sapiens
aacatcagaaaaact

SEQ ID NO: 9629 - DNA, 15 bp, Homo sapiens
caacatcagaaaaac

SEQ ID NO: 9630 - DNA, 15 bp, Homo sapiens
tcaacatcagaaaaa

SEQ ID NO: 9631 - DNA, 15 bp, Homo sapiens
ttcaacatcagaaaa

SEQ ID NO: 9632 - DNA, 15 bp, Homo sapiens
attcaacatcagaaa

SEQ ID NO: 9633 - DNA, 15 bp, Homo sapiens
cattcaacatcagaa

SEQ ID NO: 9634 - DNA, 15 bp, Homo sapiens
tcattcaacatcaga

SEQ ID NO: 9635 - DNA, 15 bp, Homo sapiens
ctcattcaacatcag

SEQ ID NO: 9636 - DNA, 15 bp, Homo sapiens
tctcattcaacatca

SEQ ID NO: 9637 - DNA, 15 bp, Homo sapiens
ttctcattcaacatc

SEQ ID NO: 9638 - DNA, 15 bp, Homo sapiens
tttctcattcaacat

SEQ ID NO: 9639 - DNA, 15 bp, Homo sapiens
atttctcattcaaca

SEQ ID NO: 9640 - DNA, 15 bp, Homo sapiens
catttctcattcaac

SEQ ID NO: 9641 - DNA, 15 bp, Homo sapiens
tcatttctcattcaa

SEQ ID NO: 9642 - DNA, 15 bp, Homo sapiens
ctcatttctcattca

SEQ ID NO: 9643 - DNA, 15 bp, Homo sapiens
actcatttctcattc

SEQ ID NO: 9644 - DNA, 15 bp, Homo sapiens
tactcatttctcatt

SEQ ID NO: 9645 - DNA, 15 bp, Homo sapiens
ttactcatttctcat

SEQ ID NO: 9646 - DNA, 15 bp, Homo sapiens
tttactcatttctca

SEQ ID NO: 9647 - DNA, 15 bp, Homo sapiens
ttttactcatttctc

SEQ ID NO: 9648 - DNA, 15 bp, Homo sapiens
tttttactcatttct

SEQ ID NO: 9649 - DNA, 15 bp, Homo sapiens
ctttttactcatttc

SEQ ID NO: 9650 - DNA, 15 bp, Homo sapiens
cctttttactcattt

SEQ ID NO: 9651 - DNA, 15 bp, Homo sapiens
gcctttttactcatt

SEQ ID NO: 9652 - DNA, 15 bp, Homo sapiens
tgcctttttactcat

SEQ ID NO: 9653 - DNA, 15 bp, Homo sapiens
atgcctttttactca

SEQ ID NO: 9654 - DNA, 15 bp, Homo sapiens
tatgcctttttactc

SEQ ID NO: 9655 - DNA, 15 bp, Homo sapiens
ttatgcctttttact

SEQ ID NO: 9656 - DNA, 15 bp, Homo sapiens
gttatgcctttttac

SEQ ID NO: 9657 - DNA, 15 bp, Homo sapiens
tgttatgccttttta

SEQ ID NO: 9658 - DNA, 15 bp, Homo sapiens
gtgttatgccttttt

SEQ ID NO: 9659 - DNA, 15 bp, Homo sapiens
tgtgttatgcctttt

SEQ ID NO: 9660 - DNA, 15 bp, Homo sapiens
atgtgttatgccttt

SEQ ID NO: 9661 - DNA, 15 bp, Homo sapiens
aatgtgttatgcctt

SEQ ID NO: 9662 - DNA, 15 bp, Homo sapiens
taatgtgttatgcct

SEQ ID NO: 9663 - DNA, 15 bp, Homo sapiens
ttaatgtgttatgcc

SEQ ID NO: 9664 - DNA, 15 bp, Homo sapiens
attaatgtgttatgc

SEQ ID NO: 9665 - DNA, 15 bp, Homo sapiens
gattaatgtgttatg

SEQ ID NO: 9666 - DNA, 15 bp, Homo sapiens
agattaatgtgttat

SEQ ID NO: 9667 - DNA, 15 bp, Homo sapiens
aagattaatgtgtta

SEQ ID NO: 9668 - DNA, 15 bp, Homo sapiens
taagattaatgtgtt

SEQ ID NO: 9669 - DNA, 15 bp, Homo sapiens
ttaagattaatgtgt

SEQ ID NO: 9670 - DNA, 15 bp, Homo sapiens
attaagattaatgtg

SEQ ID NO: 9671 - DNA, 15 bp, Homo sapiens
cattaagattaatgt

SEQ ID NO: 9672 - DNA, 15 bp, Homo sapiens
acattaagattaatg

SEQ ID NO: 9673 - DNA, 15 bp, Homo sapiens
gacattaagattaat

SEQ ID NO: 9674 - DNA, 15 bp, Homo sapiens
agacattaagattaa

SEQ ID NO: 9675 - DNA, 15 bp, Homo sapiens
aagacattaagatta

SEQ ID NO: 9676 - DNA, 15 bp, Homo sapiens
aaagacattaagatt

SEQ ID NO: 9677 - DNA, 15 bp, Homo sapiens
taaagacattaagat

SEQ ID NO: 9678 - DNA, 15 bp, Homo sapiens
ctaaagacattaaga

SEQ ID NO: 9679 - DNA, 15 bp, Homo sapiens
tctaaagacattaag

SEQ ID NO: 9680 - DNA, 15 bp, Homo sapiens
gtctaaagacattaa

SEQ ID NO: 9681 - DNA, 15 bp, Homo sapiens
agtctaaagacatta

SEQ ID NO: 9682 - DNA, 15 bp, Homo sapiens
aagtctaaagacatt

SEQ ID NO: 9683 - DNA, 15 bp, Homo sapiens
caagtctaaagacat

SEQ ID NO: 9684 - DNA, 15 bp, Homo sapiens
acaagtctaaagaca

SEQ ID NO: 9685 - DNA, 15 bp, Homo sapiens
tacaagtctaaagac

SEQ ID NO: 9686 - DNA, 15 bp, Homo sapiens
atacaagtctaaaga

SEQ ID NO: 9687 - DNA, 15 bp, Homo sapiens
aatacaagtctaaag

SEQ ID NO: 9688 - DNA, 15 bp, Homo sapiens
aaatacaagtctaaa

SEQ ID NO: 9689 - DNA, 15 bp, Homo sapiens
aaaatacaagtctaa

SEQ ID NO: 9690 - DNA, 15 bp, Homo sapiens
aaaaatacaagtcta

SEQ ID NO: 9691 - DNA, 15 bp, Homo sapiens
taaaaatacaagtct

SEQ ID NO: 9692 - DNA, 15 bp, Homo sapiens
ataaaaatacaagtc

SEQ ID NO: 9693 - DNA, 15 bp, Homo sapiens
aataaaaatacaagt

SEQ ID NO: 9694 - DNA, 15 bp, Homo sapiens
taataaaaatacaag

SEQ ID NO: 9695 - DNA, 15 bp, Homo sapiens
ataataaaaatacaa

SEQ ID NO: 9696 - DNA, 15 bp, Homo sapiens
tataataaaaataca

SEQ ID NO: 9697 - DNA, 15 bp, Homo sapiens
ttataataaaaatac

SEQ ID NO: 9698 - DNA, 15 bp, Homo sapiens
cttataataaaaata

SEQ ID NO: 9699 - DNA, 15 bp, Homo sapiens
ccttataataaaaat

SEQ ID NO: 9700 - DNA, 15 bp, Homo sapiens
cccttataataaaaa

SEQ ID NO: 9701 - DNA, 15 bp, Homo sapiens
tcccttataataaaa

SEQ ID NO: 9702 - DNA, 15 bp, Homo sapiens
gtcccttataataaa

SEQ ID NO: 9703 - DNA, 15 bp, Homo sapiens
tgtcccttataataa

SEQ ID NO: 9704 - DNA, 15 bp, Homo sapiens
ctgtcccttataata

SEQ ID NO: 9705 - DNA, 15 bp, Homo sapiens
tctgtcccttataat

SEQ ID NO: 9706 - DNA, 15 bp, Homo sapiens
atctgtcccttataa

SEQ ID NO: 9707 - DNA, 15 bp, Homo sapiens
tatctgtcccttata

SEQ ID NO: 9708 - DNA, 15 bp, Homo sapiens
ttatctgtcccttat

SEQ ID NO: 9709 - DNA, 15 bp, Homo sapiens
attatctgtccctta

SEQ ID NO: 9710 - DNA, 15 bp, Homo sapiens
tattatctgtccctt

SEQ ID NO: 9711 - DNA, 15 bp, Homo sapiens
ctattatctgtccct

SEQ ID NO: 9712 - DNA, 15 bp, Homo sapiens
actattatctgtccc

SEQ ID NO: 9713 - DNA, 15 bp, Homo sapiens
cactattatctgtcc

SEQ ID NO: 9714 - DNA, 15 bp, Homo sapiens
tcactattatctgtc

SEQ ID NO: 9715 - DNA, 15 bp, Homo sapiens
ttcactattatctgt

SEQ ID NO: 9716 - DNA, 15 bp, Homo sapiens
attcactattatctg

SEQ ID NO: 9717 - DNA, 15 bp, Homo sapiens
cattcactattatct

SEQ ID NO: 9718 - DNA, 15 bp, Homo sapiens
tcattcactattatc

SEQ ID NO: 9719 - DNA, 15 bp, Homo sapiens
ctcattcactattat

SEQ ID NO: 9720 - DNA, 15 bp, Homo sapiens
cctcattcactatta

SEQ ID NO: 9721 - DNA, 15 bp, Homo sapiens
ccctcattcactatt

SEQ ID NO: 9722 - DNA, 15 bp, Homo sapiens
tccctcattcactat

SEQ ID NO: 9723 - DNA, 15 bp, Homo sapiens
ttccctcattcacta

SEQ ID NO: 9724 - DNA, 15 bp, Homo sapiens
tttccctcattcact

SEQ ID NO: 9725 - DNA, 15 bp, Homo sapiens
ttttccctcattcac

SEQ ID NO: 9726 - DNA, 15 bp, Homo sapiens
tttttccctcattca

SEQ ID NO: 9727 - DNA, 15 bp, Homo sapiens
ttttttccctcattc

SEQ ID NO: 9728 - DNA, 15 bp, Homo sapiens
attttttccctcatt

SEQ ID NO: 9729 - DNA, 15 bp, Homo sapiens
gattttttccctcat

SEQ ID NO: 9730 - DNA, 15 bp, Homo sapiens
agattttttccctca

SEQ ID NO: 9731 - DNA, 15 bp, Homo sapiens
gagattttttccctc

SEQ ID NO: 9732 - DNA, 15 bp, Homo sapiens
tgagattttttccct

SEQ ID NO: 9733 - DNA, 15 bp, Homo sapiens
atgagattttttccc

SEQ ID NO: 9734 - DNA, 15 bp, Homo sapiens
catgagattttttcc

SEQ ID NO: 9735 - DNA, 15 bp, Homo sapiens
tcatgagattttttc

SEQ ID NO: 9736 - DNA, 15 bp, Homo sapiens
ttcatgagatttttt

SEQ ID NO: 9737 - DNA, 15 bp, Homo sapiens
gttcatgagattttt

SEQ ID NO: 9738 - DNA, 15 bp, Homo sapiens
tgttcatgagatttt

SEQ ID NO: 9739 - DNA, 15 bp, Homo sapiens
gtgttcatgagattt

SEQ ID NO: 9740 - DNA, 15 bp, Homo sapiens
agtgttcatgagatt

SEQ ID NO: 9741 - DNA, 15 bp, Homo sapiens
tagtgttcatgagat

SEQ ID NO: 9742 - DNA, 15 bp, Homo sapiens
ctagtgttcatgaga

SEQ ID NO: 9743 - DNA, 15 bp, Homo sapiens
actagtgttcatgag

SEQ ID NO: 9744 - DNA, 15 bp, Homo sapiens
aactagtgttcatga

SEQ ID NO: 9745 - DNA, 15 bp, Homo sapiens
aaactagtgttcatg

SEQ ID NO: 9746 - DNA, 15 bp, Homo sapiens
gaaactagtgttcat

SEQ ID NO: 9747 - DNA, 15 bp, Homo sapiens
ggaaactagtgttca

SEQ ID NO: 9748 - DNA, 15 bp, Homo sapiens
tggaaactagtgttc

SEQ ID NO: 9749 - DNA, 15 bp, Homo sapiens
ctggaaactagtgtt

SEQ ID NO: 9750 - DNA, 15 bp, Homo sapiens
tctggaaactagtgt

SEQ ID NO: 9751 - DNA, 15 bp, Homo sapiens
gtctggaaactagtg

SEQ ID NO: 9752 - DNA, 15 bp, Homo sapiens
agtctggaaactagt

SEQ ID NO: 9753 - DNA, 15 bp, Homo sapiens
aagtctggaaactag

SEQ ID NO: 9754 - DNA, 15 bp, Homo sapiens
gaagtctggaaacta

SEQ ID NO: 9755 - DNA, 15 bp, Homo sapiens
agaagtctggaaact

SEQ ID NO: 9756 - DNA, 15 bp, Homo sapiens
cagaagtctggaaac

SEQ ID NO: 9757 - DNA, 15 bp, Homo sapiens
acagaagtctggaaa

SEQ ID NO: 9758 - DNA, 15 bp, Homo sapiens
gacagaagtctggaa

SEQ ID NO: 9759 - DNA, 15 bp, Homo sapiens
ggacagaagtctgga

SEQ ID NO: 9760 - DNA, 15 bp, Homo sapiens
tggacagaagtctgg

SEQ ID NO: 9761 - DNA, 15 bp, Homo sapiens
ttggacagaagtctg

SEQ ID NO: 9762 - DNA, 15 bp, Homo sapiens
gttggacagaagtct

SEQ ID NO: 9763 - DNA, 15 bp, Homo sapiens
agttggacagaagtc

SEQ ID NO: 9764 - DNA, 15 bp, Homo sapiens
aagttggacagaagt

SEQ ID NO: 9765 - DNA, 15 bp, Homo sapiens
gaagttggacagaag

SEQ ID NO: 9766 - DNA, 15 bp, Homo sapiens
tgaagttggacagaa

SEQ ID NO: 9767 - DNA, 15 bp, Homo sapiens
gtgaagttggacaga

SEQ ID NO: 9768 - DNA, 15 bp, Homo sapiens
tgtgaagttggacag

SEQ ID NO: 9769 - DNA, 15 bp, Homo sapiens
ctgtgaagttggaca

SEQ ID NO: 9770 - DNA, 15 bp, Homo sapiens
gctgtgaagttggac

SEQ ID NO: 9771 - DNA, 15 bp, Homo sapiens
ggctgtgaagttgga

SEQ ID NO: 9772 - DNA, 15 bp, Homo sapiens
aggctgtgaagttgg

SEQ ID NO: 9773 - DNA, 15 bp, Homo sapiens
aaggctgtgaagttg

SEQ ID NO: 9774 - DNA, 15 bp, Homo sapiens
caaggctgtgaagtt

SEQ ID NO: 9775 - DNA, 15 bp, Homo sapiens
ccaaggctgtgaagt

SEQ ID NO: 9776 - DNA, 15 bp, Homo sapiens
accaaggctgtgaag

SEQ ID NO: 9777 - DNA, 15 bp, Homo sapiens
aaccaaggctgtgaa

SEQ ID NO: 9778 - DNA, 15 bp, Homo sapiens
aaaccaaggctgtga

SEQ ID NO: 9779 - DNA, 15 bp, Homo sapiens
taaaccaaggctgtg

SEQ ID NO: 9780 - DNA, 15 bp, Homo sapiens
gtaaaccaaggctgt

SEQ ID NO: 9781 - DNA, 15 bp, Homo sapiens
agtaaaccaaggctg

SEQ ID NO: 9782 - DNA, 15 bp, Homo sapiens
cagtaaaccaaggct

SEQ ID NO: 9783 - DNA, 15 bp, Homo sapiens
ccagtaaaccaaggc

SEQ ID NO: 9784 - DNA, 15 bp, Homo sapiens
gccagtaaaccaagg

SEQ ID NO: 9785 - DNA, 15 bp, Homo sapiens
tgccagtaaaccaag

SEQ ID NO: 9786 - DNA, 15 bp, Homo sapiens
ctgccagtaaaccaa

SEQ ID NO: 9787 - DNA, 15 bp, Homo sapiens
actgccagtaaacca

SEQ ID NO: 9788 - DNA, 15 bp, Homo sapiens
aactgccagtaaacc

SEQ ID NO: 9789 - DNA, 15 bp, Homo sapiens
aaactgccagtaaac

SEQ ID NO: 9790 - DNA, 15 bp, Homo sapiens
gaaactgccagtaaa

SEQ ID NO: 9791 - DNA, 15 bp, Homo sapiens
ggaaactgccagtaa

SEQ ID NO: 9792 - DNA, 15 bp, Homo sapiens
tggaaactgccagta

SEQ ID NO: 9793 - DNA, 15 bp, Homo sapiens
ttggaaactgccagt

SEQ ID NO: 9794 - DNA, 15 bp, Homo sapiens
tttggaaactgccag

SEQ ID NO: 9795 - DNA, 15 bp, Homo sapiens
atttggaaactgcca

SEQ ID NO: 9796 - DNA, 15 bp, Homo sapiens
catttggaaactgcc

SEQ ID NO: 9797 - DNA, 15 bp, Homo sapiens
ccatttggaaactgc

SEQ ID NO: 9798 - DNA, 15 bp, Homo sapiens
accatttggaaactg

SEQ ID NO: 9799 - DNA, 15 bp, Homo sapiens
gaccatttggaaact

SEQ ID NO: 9800 - DNA, 15 bp, Homo sapiens
tgaccatttggaaac

SEQ ID NO: 9801 - DNA, 15 bp, Homo sapiens
ctgaccatttggaaa

SEQ ID NO: 9802 - DNA, 15 bp, Homo sapiens
cctgaccatttggaa

SEQ ID NO: 9803 - DNA, 15 bp, Homo sapiens
gcctgaccatttgga

SEQ ID NO: 9804 - DNA, 15 bp, Homo sapiens
agcctgaccatttgg

SEQ ID NO: 9805 - DNA, 15 bp, Homo sapiens
cagcctgaccatttg

SEQ ID NO: 9806 - DNA, 15 bp, Homo sapiens
ccagcctgaccattt

SEQ ID NO: 9807 - DNA, 15 bp, Homo sapiens
tccagcctgaccatt

SEQ ID NO: 9808 - DNA, 15 bp, Homo sapiens
ttccagcctgaccat

SEQ ID NO: 9809 - DNA, 15 bp, Homo sapiens
tttccagcctgacca

SEQ ID NO: 9810 - DNA, 15 bp, Homo sapiens
atttccagcctgacc

SEQ ID NO: 9811 - DNA, 15 bp, Homo sapiens
aatttccagcctgac

SEQ ID NO: 9812 - DNA, 15 bp, Homo sapiens
caatttccagcctga

SEQ ID NO: 9813 - DNA, 15 bp, Homo sapiens
tcaatttccagcctg

SEQ ID NO: 9814 - DNA, 15 bp, Homo sapiens
atcaatttccagcct

SEQ ID NO: 9815 - DNA, 15 bp, Homo sapiens
catcaatttccagcc

SEQ ID NO: 9816 - DNA, 15 bp, Homo sapiens
tcatcaatttccagc

SEQ ID NO: 9817 - DNA, 15 bp, Homo sapiens
ttcatcaatttccag

SEQ ID NO: 9818 - DNA, 15 bp, Homo sapiens
tttcatcaatttcca

SEQ ID NO: 9819 - DNA, 15 bp, Homo sapiens
ctttcatcaatttcc

SEQ ID NO: 9820 - DNA, 15 bp, Homo sapiens
gctttcatcaatttc

SEQ ID NO: 9821 - DNA, 15 bp, Homo sapiens
agctttcatcaattt

SEQ ID NO: 9822 - DNA, 15 bp, Homo sapiens
cagctttcatcaatt

SEQ ID NO: 9823 - DNA, 15 bp, Homo sapiens
acagctttcatcaat

SEQ ID NO: 9824 - DNA, 15 bp, Homo sapiens
aacagctttcatcaa

SEQ ID NO: 9825 - DNA, 15 bp, Homo sapiens
aaacagctttcatca

SEQ ID NO: 9826 - DNA, 15 bp, Homo sapiens
gaaacagctttcatc

SEQ ID NO: 9827 - DNA, 15 bp, Homo sapiens
agaaacagctttcat

SEQ ID NO: 9828 - DNA, 15 bp, Homo sapiens
aagaaacagctttca

SEQ ID NO: 9829 - DNA, 15 bp, Homo sapiens
aaagaaacagctttc

SEQ ID NO: 9830 - DNA, 15 bp, Homo sapiens
aaaagaaacagcttt

SEQ ID NO: 9831 - DNA, 15 bp, Homo sapiens
caaaagaaacagctt

SEQ ID NO: 9832 - DNA, 15 bp, Homo sapiens
tcaaaagaaacagct

SEQ ID NO: 9833 - DNA, 15 bp, Homo sapiens
gtcaaaagaaacagc

SEQ ID NO: 9834 - DNA, 15 bp, Homo sapiens
ggtcaaaagaaacag

SEQ ID NO: 9835 - DNA, 15 bp, Homo sapiens
tggtcaaaagaaaca

SEQ ID NO: 9836 - DNA, 15 bp, Homo sapiens
atggtcaaaagaaac

SEQ ID NO: 9837 - DNA, 15 bp, Homo sapiens
catggtcaaaagaaa

SEQ ID NO: 9838 - DNA, 15 bp, Homo sapiens
ccatggtcaaaagaa

SEQ ID NO: 9839 - DNA, 15 bp, Homo sapiens
gccatggtcaaaaga

SEQ ID NO: 9840 - DNA, 15 bp, Homo sapiens
agccatggtcaaaag

SEQ ID NO: 9841 - DNA, 15 bp, Homo sapiens
gagccatggtcaaaa

SEQ ID NO: 9842 - DNA, 15 bp, Homo sapiens
ggagccatggtcaaa

SEQ ID NO: 9843 - DNA, 15 bp, Homo sapiens
tggagccatggtcaa

SEQ ID NO: 9844 - DNA, 15 bp, Homo sapiens
atggagccatggtca

SEQ ID NO: 9845 - DNA, 15 bp, Homo sapiens
tatggagccatggtc

SEQ ID NO: 9846 - DNA, 15 bp, Homo sapiens
ttatggagccatggt

SEQ ID NO: 9847 - DNA, 15 bp, Homo sapiens
tttatggagccatgg

SEQ ID NO: 9848 - DNA, 15 bp, Homo sapiens
ctttatggagccatg

SEQ ID NO: 9849 - DNA, 15 bp, Homo sapiens
cctttatggagccat

SEQ ID NO: 9850 - DNA, 15 bp, Homo sapiens
gcctttatggagcca

SEQ ID NO: 9851 - DNA, 15 bp, Homo sapiens
tgcctttatggagcc

SEQ ID NO: 9852 - DNA, 15 bp, Homo sapiens
ttgcctttatggagc

SEQ ID NO: 9853 - DNA, 15 bp, Homo sapiens
attgcctttatggag

SEQ ID NO: 9854 - DNA, 15 bp, Homo sapiens
cattgcctttatgga

SEQ ID NO: 9855 - DNA, 15 bp, Homo sapiens
ccattgcctttatgg

SEQ ID NO: 9856 - DNA, 15 bp, Homo sapiens
cccattgcctttatg

SEQ ID NO: 9857 - DNA, 15 bp, Homo sapiens
gcccattgcctttat

SEQ ID NO: 9858 - DNA, 15 bp, Homo sapiens
tgcccattgccttta

SEQ ID NO: 9859 - DNA, 15 bp, Homo sapiens
ctgcccattgccttt

SEQ ID NO: 9860 - DNA, 15 bp, Homo sapiens
actgcccattgcctt

SEQ ID NO: 9861 - DNA, 15 bp, Homo sapiens
cactgcccattgcct

SEQ ID NO: 9862 - DNA, 15 bp, Homo sapiens
gcactgcccattgcc

SEQ ID NO: 9863 - DNA, 15 bp, Homo sapiens
tgcactgcccattgc

SEQ ID NO: 9864 - DNA, 15 bp, Homo sapiens
gtgcactgcccattg

SEQ ID NO: 9865 - DNA, 15 bp, Homo sapiens
cgtgcactgcccatt

SEQ ID NO: 9866 - DNA, 15 bp, Homo sapiens
acgtgcactgcccat

SEQ ID NO: 9867 - DNA, 15 bp, Homo sapiens
aacgtgcactgccca

SEQ ID NO: 9868 - DNA, 15 bp, Homo sapiens
caacgtgcactgccc

SEQ ID NO: 9869 - DNA, 15 bp, Homo sapiens
tcaacgtgcactgcc

SEQ ID NO: 9870 - DNA, 15 bp, Homo sapiens
ttcaacgtgcactgc

SEQ ID NO: 9871 - DNA, 15 bp, Homo sapiens
tttcaacgtgcactg

SEQ ID NO: 9872 - DNA, 15 bp, Homo sapiens
ctttcaacgtgcact

SEQ ID NO: 9873 - DNA, 15 bp, Homo sapiens
tctttcaacgtgcac

SEQ ID NO: 9874 - DNA, 15 bp, Homo sapiens
ctctttcaacgtgca

SEQ ID NO: 9875 - DNA, 15 bp, Homo sapiens
actctttcaacgtgc

SEQ ID NO: 9876 - DNA, 15 bp, Homo sapiens
tactctttcaacgtg

SEQ ID NO: 9877 - DNA, 15 bp, Homo sapiens
ttactctttcaacgt

SEQ ID NO: 9878 - DNA, 15 bp, Homo sapiens
cttactctttcaacg

SEQ ID NO: 9879 - DNA, 15 bp, Homo sapiens
acttactctttcaac

SEQ ID NO: 9880 - DNA, 15 bp, Homo sapiens
tacttactctttcaa

SEQ ID NO: 9881 - DNA, 15 bp, Homo sapiens
atacttactctttca

SEQ ID NO: 9882 - DNA, 15 bp, Homo sapiens
catacttactctttc

SEQ ID NO: 9883 - DNA, 15 bp, Homo sapiens
tcatacttactcttt

SEQ ID NO: 9884 - DNA, 15 bp, Homo sapiens
ttcatacttactctt

SEQ ID NO: 9885 - DNA, 15 bp, Homo sapiens
tttcatacttactct

SEQ ID NO: 9886 - DNA, 15 bp, Homo sapiens
ttttcatacttactc

SEQ ID NO: 9887 - DNA, 15 bp, Homo sapiens
gttttcatacttact

SEQ ID NO: 9888 - DNA, 15 bp, Homo sapiens
tgttttcatacttac

SEQ ID NO: 9889 - DNA, 15 bp, Homo sapiens
gtgttttcatactta

SEQ ID NO: 9890 - DNA, 15 bp, Homo sapiens
agtgttttcatactt

SEQ ID NO: 9891 - DNA, 15 bp, Homo sapiens
cagtgttttcatact

SEQ ID NO: 9892 - DNA, 15 bp, Homo sapiens
ccagtgttttcatac

SEQ ID NO: 9893 - DNA, 15 bp, Homo sapiens
gccagtgttttcata

SEQ ID NO: 9894 - DNA, 15 bp, Homo sapiens
ggccagtgttttcat

SEQ ID NO: 9895 - DNA, 15 bp, Homo sapiens
aggccagtgttttca

SEQ ID NO: 9896 - DNA, 15 bp, Homo sapiens
gaggccagtgttttc

SEQ ID NO: 9897 - DNA, 15 bp, Homo sapiens
tgaggccagtgtttt

SEQ ID NO: 9898 - DNA, 15 bp, Homo sapiens
atgaggccagtgttt

SEQ ID NO: 9899 - DNA, 15 bp, Homo sapiens
gatgaggccagtgtt

SEQ ID NO: 9900 - DNA, 15 bp, Homo sapiens
agatgaggccagtgt

SEQ ID NO: 9901 - DNA, 15 bp, Homo sapiens
gagatgaggccagtg

SEQ ID NO: 9902 - DNA, 15 bp, Homo sapiens
tgagatgaggccagt

SEQ ID NO: 9903 - DNA, 15 bp, Homo sapiens
atgagatgaggccag

SEQ ID NO: 9904 - DNA, 15 bp, Homo sapiens
tatgagatgaggcca

SEQ ID NO: 9905 - DNA, 15 bp, Homo sapiens
ttatgagatgaggcc

SEQ ID NO: 9906 - DNA, 15 bp, Homo sapiens
tttatgagatgaggc

SEQ ID NO: 9907 - DNA, 15 bp, Homo sapiens
gtttatgagatgagg

SEQ ID NO: 9908 - DNA, 15 bp, Homo sapiens
agtttatgagatgag

SEQ ID NO: 9909 - DNA, 15 bp, Homo sapiens
aagtttatgagatga

SEQ ID NO: 9910 - DNA, 15 bp, Homo sapiens
aaagtttatgagatg

SEQ ID NO: 9911 - DNA, 15 bp, Homo sapiens
taaagtttatgagat

SEQ ID NO: 9912 - DNA, 15 bp, Homo sapiens
ataaagtttatgaga

SEQ ID NO: 9913 - DNA, 15 bp, Homo sapiens
aataaagtttatgag

SEQ ID NO: 9914 - DNA, 15 bp, Homo sapiens
taataaagtttatga

SEQ ID NO: 9915 - DNA, 15 bp, Homo sapiens
ataataaagtttatg

SEQ ID NO: 9916 - DNA, 15 bp, Homo sapiens
aataataaagtttat

SEQ ID NO: 9917 - DNA, 15 bp, Homo sapiens
caataataaagttta

SEQ ID NO: 9918 - DNA, 15 bp, Homo sapiens
tcaataataaagttt

SEQ ID NO: 9919 - DNA, 15 bp, Homo sapiens
atcaataataaagtt

SEQ ID NO: 9920 - DNA, 15 bp, Homo sapiens
tatcaataataaagt

SEQ ID NO: 9921 - DNA, 15 bp, Homo sapiens
ctatcaataataaag

SEQ ID NO: 9922 - DNA, 15 bp, Homo sapiens
actatcaataataaa

SEQ ID NO: 9923 - DNA, 15 bp, Homo sapiens
tactatcaataataa

SEQ ID NO: 9924 - DNA, 15 bp, Homo sapiens
atactatcaataata

SEQ ID NO: 9925 - DNA, 15 bp, Homo sapiens
aatactatcaataat

SEQ ID NO: 9926 - DNA, 15 bp, Homo sapiens
aaatactatcaataa

SEQ ID NO: 9927 - DNA, 15 bp, Homo sapiens
aaaatactatcaata

SEQ ID NO: 9928 - DNA, 15 bp, Homo sapiens
taaaatactatcaat

SEQ ID NO: 9929 - DNA, 15 bp, Homo sapiens
ataaaatactatcaa

SEQ ID NO: 9930 - DNA, 15 bp, Homo sapiens
gataaaatactatca

SEQ ID NO: 9931 - DNA, 15 bp, Homo sapiens
ggataaaatactatc

SEQ ID NO: 9932 - DNA, 15 bp, Homo sapiens
aggataaaatactat

SEQ ID NO: 9933 - DNA, 15 bp, Homo sapiens
taggataaaatacta

SEQ ID NO: 9934 - DNA, 15 bp, Homo sapiens
ctaggataaaatact

SEQ ID NO: 9935 - DNA, 15 bp, Homo sapiens
gctaggataaaatac

SEQ ID NO: 9936 - DNA, 15 bp, Homo sapiens
tgctaggataaaata

SEQ ID NO: 9937 - DNA, 15 bp, Homo sapiens
ctgctaggataaaat

SEQ ID NO: 9938 - DNA, 15 bp, Homo sapiens
gctgctaggataaaa

SEQ ID NO: 9939 - DNA, 15 bp, Homo sapiens
agctgctaggataaa

SEQ ID NO: 9940 - DNA, 15 bp, Homo sapiens
cagctgctaggataa

SEQ ID NO: 9941 - DNA, 15 bp, Homo sapiens
acagctgctaggata

SEQ ID NO: 9942 - DNA, 15 bp, Homo sapiens
aacagctgctaggat

SEQ ID NO: 9943 - DNA, 15 bp, Homo sapiens
aaacagctgctagga

SEQ ID NO: 9944 - DNA, 15 bp, Homo sapiens
aaaacagctgctagg

SEQ ID NO: 9945 - DNA, 15 bp, Homo sapiens
aaaaacagctgctag

SEQ ID NO: 9946 - DNA, 15 bp, Homo sapiens
caaaaacagctgcta

SEQ ID NO: 9947 - DNA, 15 bp, Homo sapiens
tcaaaaacagctgct

SEQ ID NO: 9948 - DNA, 15 bp, Homo sapiens
ttcaaaaacagctgc

SEQ ID NO: 9949 - DNA, 15 bp, Homo sapiens
cttcaaaaacagctg

SEQ ID NO: 9950 - DNA, 15 bp, Homo sapiens
gcttcaaaaacagct

SEQ ID NO: 9951 - DNA, 15 bp, Homo sapiens
tgcttcaaaaacagc

SEQ ID NO: 9952 - DNA, 15 bp, Homo sapiens
gtgcttcaaaaacag

SEQ ID NO: 9953 - DNA, 15 bp, Homo sapiens
agtgcttcaaaaaca

SEQ ID NO: 9954 - DNA, 15 bp, Homo sapiens
cagtgcttcaaaaac

SEQ ID NO: 9955 - DNA, 15 bp, Homo sapiens
acagtgcttcaaaaa

SEQ ID NO: 9956 - DNA, 15 bp, Homo sapiens
gacagtgcttcaaaa

SEQ ID NO: 9957 - DNA, 15 bp, Homo sapiens
agacagtgcttcaaa

SEQ ID NO: 9958 - DNA, 15 bp, Homo sapiens
aagacagtgcttcaa

SEQ ID NO: 9959 - DNA, 15 bp, Homo sapiens
caagacagtgcttca

SEQ ID NO: 9960 - DNA, 15 bp, Homo sapiens
tcaagacagtgcttc

SEQ ID NO: 9961 - DNA, 15 bp, Homo sapiens
ttcaagacagtgctt

SEQ ID NO: 9962 - DNA, 15 bp, Homo sapiens
attcaagacagtgct

SEQ ID NO: 9963 - DNA, 15 bp, Homo sapiens
aattcaagacagtgc

SEQ ID NO: 9964 - DNA, 15 bp, Homo sapiens
gaattcaagacagtg

SEQ ID NO: 9965 - DNA, 15 bp, Homo sapiens
tgaattcaagacagt

SEQ ID NO: 9966 - DNA, 15 bp, Homo sapiens
atgaattcaagacag

SEQ ID NO: 9967 - DNA, 15 bp, Homo sapiens
catgaattcaagaca

SEQ ID NO: 9968 - DNA, 15 bp, Homo sapiens
acatgaattcaagac

SEQ ID NO: 9969 - DNA, 15 bp, Homo sapiens
cacatgaattcaaga

SEQ ID NO: 9970 - DNA, 15 bp, Homo sapiens
tcacatgaattcaag

SEQ ID NO: 9971 - DNA, 15 bp, Homo sapiens
gtcacatgaattcaa

SEQ ID NO: 9972 - DNA, 15 bp, Homo sapiens
agtcacatgaattca

SEQ ID NO: 9973 - DNA, 15 bp, Homo sapiens
cagtcacatgaattc

SEQ ID NO: 9974 - DNA, 15 bp, Homo sapiens
gcagtcacatgaatt

SEQ ID NO: 9975 - DNA, 15 bp, Homo sapiens
ggcagtcacatgaat

SEQ ID NO: 9976 - DNA, 15 bp, Homo sapiens
gggcagtcacatgaa

SEQ ID NO: 9977 - DNA, 15 bp, Homo sapiens
tgggcagtcacatga

SEQ ID NO: 9978 - DNA, 15 bp, Homo sapiens
ctgggcagtcacatg

SEQ ID NO: 9979 - DNA, 15 bp, Homo sapiens
cctgggcagtcacat

SEQ ID NO: 9980 - DNA, 15 bp, Homo sapiens
gcctgggcagtcaca

SEQ ID NO: 9981 - DNA, 15 bp, Homo sapiens
agcctgggcagtcac

SEQ ID NO: 9982 - DNA, 15 bp, Homo sapiens
aagcctgggcagtca

SEQ ID NO: 9983 - DNA, 15 bp, Homo sapiens
aaagcctgggcagtc

SEQ ID NO: 9984 - DNA, 15 bp, Homo sapiens
aaaagcctgggcagt

SEQ ID NO: 9985 - DNA, 15 bp, Homo sapiens
caaaagcctgggcag

SEQ ID NO: 9986 - DNA, 15 bp, Homo sapiens
tcaaaagcctgggca

SEQ ID NO: 9987 - DNA, 15 bp, Homo sapiens
gtcaaaagcctgggc

SEQ ID NO: 9988 - DNA, 15 bp, Homo sapiens
tgtcaaaagcctggg

SEQ ID NO: 9989 - DNA, 15 bp, Homo sapiens
gtgtcaaaagcctgg

SEQ ID NO: 9990 - DNA, 15 bp, Homo sapiens
tgtgtcaaaagcctg

SEQ ID NO: 9991 - DNA, 15 bp, Homo sapiens
ttgtgtcaaaagcct

SEQ ID NO: 9992 - DNA, 15 bp, Homo sapiens
tttgtgtcaaaagcc

SEQ ID NO: 9993 - DNA, 15 bp, Homo sapiens
atttgtgtcaaaagc

SEQ ID NO: 9994 - DNA, 15 bp, Homo sapiens
catttgtgtcaaaag

SEQ ID NO: 9995 - DNA, 15 bp, Homo sapiens
acatttgtgtcaaaa

SEQ ID NO: 9996 - DNA, 15 bp, Homo sapiens
cacatttgtgtcaaa

SEQ ID NO: 9997 - DNA, 15 bp, Homo sapiens
acacatttgtgtcaa

SEQ ID NO: 9998 - DNA, 15 bp, Homo sapiens
aacacatttgtgtca

SEQ ID NO: 9999 - DNA, 15 bp, Homo sapiens
gaacacatttgtgtc

SEQ ID NO: 10000 - DNA, 15 bp, Homo sapiens
ggaacacatttgtgt

SEQ ID NO: 10001 - DNA, 15 bp, Homo sapiens
tggaacacatttgtg

SEQ ID NO: 10002 - DNA, 15 bp, Homo sapiens
ctggaacacatttgt

SEQ ID NO: 10003 - DNA, 15 bp, Homo sapiens
cctggaacacatttg

SEQ ID NO: 10004 - DNA, 15 bp, Homo sapiens
ccctggaacacattt

SEQ ID NO: 10005 - DNA, 15 bp, Homo sapiens
tccctggaacacatt

SEQ ID NO: 10006 - DNA, 15 bp, Homo sapiens
ctccctggaacacat

SEQ ID NO: 10007 - DNA, 15 bp, Homo sapiens
tctccctggaacaca

SEQ ID NO: 10008 - DNA, 15 bp, Homo sapiens
gtctccctggaacac

SEQ ID NO: 10009 - DNA, 15 bp, Homo sapiens
tgtctccctggaaca

SEQ ID NO: 10010 - DNA, 15 bp, Homo sapiens
ctgtctccctggaac

SEQ ID NO: 10011 - DNA, 15 bp, Homo sapiens
tctgtctccctggaa

SEQ ID NO: 10012 - DNA, 15 bp, Homo sapiens
atctgtctccctgga

SEQ ID NO: 10013 - DNA, 15 bp, Homo sapiens
aatctgtctccctgg

SEQ ID NO: 10014 - DNA, 15 bp, Homo sapiens
caatctgtctccctg

SEQ ID NO: 10015 - DNA, 15 bp, Homo sapiens
tcaatctgtctccct

SEQ ID NO: 10016 - DNA, 15 bp, Homo sapiens
ctcaatctgtctccc

SEQ ID NO: 10017 - DNA, 15 bp, Homo sapiens
cctcaatctgtctcc

SEQ ID NO: 10018 - DNA, 15 bp, Homo sapiens
tcctcaatctgtctc

SEQ ID NO: 10019 - DNA, 15 bp, Homo sapiens
ttcctcaatctgtct

SEQ ID NO: 10020 - DNA, 15 bp, Homo sapiens
attcctcaatctgtc

SEQ ID NO: 10021 - DNA, 15 bp, Homo sapiens
gattcctcaatctgt

SEQ ID NO: 10022 - DNA, 15 bp, Homo sapiens
agattcctcaatctg

SEQ ID NO: 10023 - DNA, 15 bp, Homo sapiens
aagattcctcaatct

SEQ ID NO: 10024 - DNA, 15 bp, Homo sapiens
aaagattcctcaatc

SEQ ID NO: 10025 - DNA, 15 bp, Homo sapiens
caaagattcctcaat

SEQ ID NO: 10026 - DNA, 15 bp, Homo sapiens
tcaaagattcctcaa

SEQ ID NO: 10027 - DNA, 15 bp, Homo sapiens
ctcaaagattcctca

SEQ ID NO: 10028 - DNA, 15 bp, Homo sapiens
actcaaagattcctc

SEQ ID NO: 10029 - DNA, 15 bp, Homo sapiens
tactcaaagattcct

SEQ ID NO: 10030 - DNA, 15 bp, Homo sapiens
gtactcaaagattcc

SEQ ID NO: 10031 - DNA, 15 bp, Homo sapiens
agtactcaaagattc

SEQ ID NO: 10032 - DNA, 15 bp, Homo sapiens
tagtactcaaagatt

SEQ ID NO: 10033 - DNA, 15 bp, Homo sapiens
ttagtactcaaagat

SEQ ID NO: 10034 - DNA, 15 bp, Homo sapiens
attagtactcaaaga

SEQ ID NO: 10035 - DNA, 15 bp, Homo sapiens
cattagtactcaaag

SEQ ID NO: 10036 - DNA, 15 bp, Homo sapiens
gcattagtactcaaa

SEQ ID NO: 10037 - DNA, 15 bp, Homo sapiens
agcattagtactcaa

SEQ ID NO: 10038 - DNA, 15 bp, Homo sapiens
cagcattagtactca

SEQ ID NO: 10039 - DNA, 15 bp, Homo sapiens
acagcattagtactc

SEQ ID NO: 10040 - DNA, 15 bp, Homo sapiens
acagagtcaggaaat

SEQ ID NO: 10041 - DNA, 15 bp, Homo sapiens
cacagagtcaggaaa

SEQ ID NO: 10042 - DNA, 15 bp, Homo sapiens
tcacagagtcaggaa

SEQ ID NO: 10043 - DNA, 15 bp, Homo sapiens
atcacagagtcagga

SEQ ID NO: 10044 - DNA, 15 bp, Homo sapiens
gatcacagagtcagg

SEQ ID NO: 10045 - DNA, 15 bp, Homo sapiens
agatcacagagtcag

SEQ ID NO: 10046 - DNA, 15 bp, Homo sapiens
cagatcacagagtca

SEQ ID NO: 10047 - DNA, 15 bp, Homo sapiens
gcagatcacagagtc

SEQ ID NO: 10048 - DNA, 15 bp, Homo sapiens
ggcagatcacagagt

SEQ ID NO: 10049 - DNA, 15 bp, Homo sapiens
aggcagatcacagag

SEQ ID NO: 10050 - DNA, 15 bp, Homo sapiens
caggcagatcacaga

SEQ ID NO: 10051 - DNA, 15 bp, Homo sapiens
gcaggcagatcacag

SEQ ID NO: 10052 - DNA, 15 bp, Homo sapiens
ggcaggcagatcaca

SEQ ID NO: 10053 - DNA, 15 bp, Homo sapiens
aggcaggcagatcac

SEQ ID NO: 10054 - DNA, 15 bp, Homo sapiens
gaggcaggcagatca

SEQ ID NO: 10055 - DNA, 15 bp, Homo sapiens
cgaggcaggcagatc

SEQ ID NO: 10056 - DNA, 15 bp, Homo sapiens
ccgaggcaggcagat

SEQ ID NO: 10057 - DNA, 15 bp, Homo sapiens
gccgaggcaggcaga

SEQ ID NO: 10058 - DNA, 15 bp, Homo sapiens
ggccgaggcaggcag

SEQ ID NO: 10059 - DNA, 15 bp, Homo sapiens
aggccgaggcaggca

SEQ ID NO: 10060 - DNA, 15 bp, Homo sapiens
gaggccgaggcaggc

SEQ ID NO: 10061 - DNA, 15 bp, Homo sapiens
ggaggccgaggcagg

SEQ ID NO: 10062 - DNA, 15 bp, Homo sapiens
gggaggccgaggcag

SEQ ID NO: 10063 - DNA, 15 bp, Homo sapiens
tgggaggccgaggca

SEQ ID NO: 10064 - DNA, 15 bp, Homo sapiens
ttgggaggccgaggc

SEQ ID NO: 10065 - DNA, 15 bp, Homo sapiens
acctgtaatcccagc

SEQ ID NO: 10066 - DNA, 15 bp, Homo sapiens
cacctgtaatcccag

SEQ ID NO: 10067 - DNA, 15 bp, Homo sapiens
acacctgtaatccca

SEQ ID NO: 10068 - DNA, 15 bp, Homo sapiens
cacacctgtaatccc

SEQ ID NO: 10069 - DNA, 15 bp, Homo sapiens
tcacacctgtaatcc

SEQ ID NO: 10070 - DNA, 15 bp, Homo sapiens
ctcacacctgtaatc

SEQ ID NO: 10071 - DNA, 15 bp, Homo sapiens
gctcacacctgtaat

SEQ ID NO: 10072 - DNA, 15 bp, Homo sapiens
ggctcacacctgtaa

SEQ ID NO: 10073 - DNA, 15 bp, Homo sapiens
aggctcacacctgta

SEQ ID NO: 10074 - DNA, 15 bp, Homo sapiens
gaggctcacacctgt

SEQ ID NO: 10075 - DNA, 15 bp, Homo sapiens
agaggctcacacctg

SEQ ID NO: 10076 - DNA, 15 bp, Homo sapiens
cagaggctcacacct

SEQ ID NO: 10077 - DNA, 15 bp, Homo sapiens
gcagaggctcacacc

SEQ ID NO: 10078 - DNA, 15 bp, Homo sapiens
cgcagaggctcacac

SEQ ID NO: 10079 - DNA, 15 bp, Homo sapiens
gcgcagaggctcaca

SEQ ID NO: 10080 - DNA, 15 bp, Homo sapiens
ggcgcagaggctcac

SEQ ID NO: 10081 - DNA, 15 bp, Homo sapiens
aggcgcagaggctca

SEQ ID NO: 10082 - DNA, 15 bp, Homo sapiens
caggcgcagaggctc

SEQ ID NO: 10083 - DNA, 15 bp, Homo sapiens
ccaggcgcagaggct

SEQ ID NO: 10084 - DNA, 15 bp, Homo sapiens
gccaggcgcagaggc

SEQ ID NO: 10085 - DNA, 15 bp, Homo sapiens
ggccaggcgcagagg

SEQ ID NO: 10086 - DNA, 15 bp, Homo sapiens
cggccaggcgcagag

SEQ ID NO: 10087 - DNA, 15 bp, Homo sapiens
gcggccaggcgcaga

SEQ ID NO: 10088 - DNA, 15 bp, Homo sapiens
tgcggccaggcgcag

SEQ ID NO: 10089 - DNA, 15 bp, Homo sapiens
atgcggccaggcgca

SEQ ID NO: 10090 - DNA, 15 bp, Homo sapiens
catgcggccaggcgc

SEQ ID NO: 10091 - DNA, 15 bp, Homo sapiens
ccatgcggccaggcg

SEQ ID NO: 10092 - DNA, 15 bp, Homo sapiens
cccatgcggccaggc

SEQ ID NO: 10093 - DNA, 15 bp, Homo sapiens
tcccatgcggccagg

SEQ ID NO: 10094 - DNA, 15 bp, Homo sapiens
ctcccatgcggccag

SEQ ID NO: 10095 - DNA, 15 bp, Homo sapiens
tctcccatgcggcca

SEQ ID NO: 10096 - DNA, 15 bp, Homo sapiens
gtctcccatgcggcc

SEQ ID NO: 10097 - DNA, 15 bp, Homo sapiens
tgtctcccatgcggc

SEQ ID NO: 10098 - DNA, 15 bp, Homo sapiens
atgtctcccatgcgg

SEQ ID NO: 10099 - DNA, 15 bp, Homo sapiens
aatgtctcccatgcg

SEQ ID NO: 10100 - DNA, 15 bp, Homo sapiens
aaatgtctcccatgc

SEQ ID NO: 10101 - DNA, 15 bp, Homo sapiens
aaaatgtctcccatg

SEQ ID NO: 10102 - DNA, 15 bp, Homo sapiens
aaaaatgtctcccat

SEQ ID NO: 10103 - DNA, 15 bp, Homo sapiens
taaaaatgtctccca

SEQ ID NO: 10104 - DNA, 15 bp, Homo sapiens
ttaaaaatgtctccc

SEQ ID NO: 10105 - DNA, 15 bp, Homo sapiens
tttaaaaatgtctcc

SEQ ID NO: 10106 - DNA, 15 bp, Homo sapiens
atttaaaaatgtctc

SEQ ID NO: 10107 - DNA, 15 bp, Homo sapiens
catttaaaaatgtct

SEQ ID NO: 10108 - DNA, 15 bp, Homo sapiens
acatttaaaaatgtc

SEQ ID NO: 10109 - DNA, 15 bp, Homo sapiens
cacatttaaaaatgt

SEQ ID NO: 10110 - DNA, 15 bp, Homo sapiens
acacatttaaaaatg

SEQ ID NO: 10111 - DNA, 15 bp, Homo sapiens
tacacatttaaaaat

SEQ ID NO: 10112 - DNA, 15 bp, Homo sapiens
ctacacatttaaaaa

SEQ ID NO: 10113 - DNA, 15 bp, Homo sapiens
tctacacatttaaaa

SEQ ID NO: 10114 - DNA, 15 bp, Homo sapiens
gtctacacatttaaa

SEQ ID NO: 10115 - DNA, 15 bp, Homo sapiens
agtctacacatttaa

SEQ ID NO: 10116 - DNA, 15 bp, Homo sapiens
aagtctacacattta

SEQ ID NO: 10117 - DNA, 15 bp, Homo sapiens
aaagtctacacattt

SEQ ID NO: 10118 - DNA, 15 bp, Homo sapiens
caaagtctacacatt

SEQ ID NO: 10119 - DNA, 15 bp, Homo sapiens
tcaaagtctacacat

SEQ ID NO: 10120 - DNA, 15 bp, Homo sapiens
gtcaaagtctacaca

SEQ ID NO: 10121 - DNA, 15 bp, Homo sapiens
agtcaaagtctacac

SEQ ID NO: 10122 - DNA, 15 bp, Homo sapiens
gagtcaaagtctaca

SEQ ID NO: 10123 - DNA, 15 bp, Homo sapiens
ggagtcaaagtctac

SEQ ID NO: 10124 - DNA, 15 bp, Homo sapiens
tggagtcaaagtcta

SEQ ID NO: 10125 - DNA, 15 bp, Homo sapiens
ctggagtcaaagtct

SEQ ID NO: 10126 - DNA, 15 bp, Homo sapiens
cctggagtcaaagtc

SEQ ID NO: 10127 - DNA, 15 bp, Homo sapiens
tcctggagtcaaagt

SEQ ID NO: 10128 - DNA, 15 bp, Homo sapiens
ctcctggagtcaaag

SEQ ID NO: 10129 - DNA, 15 bp, Homo sapiens
actcctggagtcaaa

SEQ ID NO: 10130 - DNA, 15 bp, Homo sapiens
aactcctggagtcaa

SEQ ID NO: 10131 - DNA, 15 bp, Homo sapiens
taactcctggagtca

SEQ ID NO: 10132 - DNA, 15 bp, Homo sapiens
ctaactcctggagtc

SEQ ID NO: 10133 - DNA, 15 bp, Homo sapiens
actaactcctggagt

SEQ ID NO: 10134 - DNA, 15 bp, Homo sapiens
tactaactcctggag

SEQ ID NO: 10135 - DNA, 15 bp, Homo sapiens
gtactaactcctgga

SEQ ID NO: 10136 - DNA, 15 bp, Homo sapiens
ggtactaactcctgg

SEQ ID NO: 10137 - DNA, 15 bp, Homo sapiens
tggtactaactcctg

SEQ ID NO: 10138 - DNA, 15 bp, Homo sapiens
atggtactaactcct

SEQ ID NO: 10139 - DNA, 15 bp, Homo sapiens
aatggtactaactcc

SEQ ID NO: 10140 - DNA, 15 bp, Homo sapiens
caatggtactaactc

SEQ ID NO: 10141 - DNA, 15 bp, Homo sapiens
ccaatggtactaact

SEQ ID NO: 10142 - DNA, 15 bp, Homo sapiens
cccaatggtactaac

SEQ ID NO: 10143 - DNA, 15 bp, Homo sapiens
tcccaatggtactaa

SEQ ID NO: 10144 - DNA, 15 bp, Homo sapiens
ttcccaatggtacta

SEQ ID NO: 10145 - DNA, 15 bp, Homo sapiens
gttcccaatggtact

SEQ ID NO: 10146 - DNA, 15 bp, Homo sapiens
tgttcccaatggtac

SEQ ID NO: 10147 - DNA, 15 bp, Homo sapiens
gtgttcccaatggta

SEQ ID NO: 10148 - DNA, 15 bp, Homo sapiens
ggtgttcccaatggt

SEQ ID NO: 10149 - DNA, 15 bp, Homo sapiens
aggtgttcccaatgg

SEQ ID NO: 10150 - DNA, 15 bp, Homo sapiens
caggtgttcccaatg

SEQ ID NO: 10151 - DNA, 15 bp, Homo sapiens
acaggtgttcccaat

SEQ ID NO: 10152 - DNA, 15 bp, Homo sapiens
cacaggtgttcccaa

SEQ ID NO: 10153 - DNA, 15 bp, Homo sapiens
tcacaggtgttccca

SEQ ID NO: 10154 - DNA, 15 bp, Homo sapiens
gtcacaggtgttccc

SEQ ID NO: 10155 - DNA, 15 bp, Homo sapiens
agtcacaggtgttcc

SEQ ID NO: 10156 - DNA, 15 bp, Homo sapiens
cagtcacaggtgttc

SEQ ID NO: 10157 - DNA, 15 bp, Homo sapiens
gcagtcacaggtgtt

SEQ ID NO: 10158 - DNA, 15 bp, Homo sapiens
agcagtcacaggtgt

SEQ ID NO: 10159 - DNA, 15 bp, Homo sapiens
aagcagtcacaggtg

SEQ ID NO: 10160 - DNA, 15 bp, Homo sapiens
gaagcagtcacaggt

SEQ ID NO: 10161 - DNA, 15 bp, Homo sapiens
ggaagcagtcacagg

SEQ ID NO: 10162 - DNA, 15 bp, Homo sapiens
cggaagcagtcacag

SEQ ID NO: 10163 - DNA, 15 bp, Homo sapiens
gcggaagcagtcaca

SEQ ID NO: 10164 - DNA, 15 bp, Homo sapiens
agcggaagcagtcac

SEQ ID NO: 10165 - DNA, 15 bp, Homo sapiens
tagcggaagcagtca

SEQ ID NO: 10166 - DNA, 15 bp, Homo sapiens
ttagcggaagcagtc

SEQ ID NO: 10167 - DNA, 15 bp, Homo sapiens
tttagcggaagcagt

SEQ ID NO: 10168 - DNA, 15 bp, Homo sapiens
ctttagcggaagcag

SEQ ID NO: 10169 - DNA, 15 bp, Homo sapiens
cctttagcggaagca

SEQ ID NO: 10170 - DNA, 15 bp, Homo sapiens
ccctttagcggaagc

SEQ ID NO: 10171 - DNA, 15 bp, Homo sapiens
accctttagcggaag

SEQ ID NO: 10172 - DNA, 15 bp, Homo sapiens
taccctttagcggaa

SEQ ID NO: 10173 - DNA, 15 bp, Homo sapiens
gtaccctttagcgga

SEQ ID NO: 10174 - DNA, 15 bp, Homo sapiens
tgtaccctttagcgg

SEQ ID NO: 10175 - DNA, 15 bp, Homo sapiens
gtgtaccctttagcg

SEQ ID NO: 10176 - DNA, 15 bp, Homo sapiens
agtgtaccctttagc

SEQ ID NO: 10177 - DNA, 15 bp, Homo sapiens
tagtgtaccctttag

SEQ ID NO: 10178 - DNA, 15 bp, Homo sapiens
ctagtgtacccttta

SEQ ID NO: 10179 - DNA, 15 bp, Homo sapiens
gctagtgtacccttt

SEQ ID NO: 10180 - DNA, 15 bp, Homo sapiens
tgctagtgtaccctt

SEQ ID NO: 10181 - DNA, 15 bp, Homo sapiens
ttgctagtgtaccct

SEQ ID NO: 10182 - DNA, 15 bp, Homo sapiens
tttgctagtgtaccc

SEQ ID NO: 10183 - DNA, 15 bp, Homo sapiens
atttgctagtgtacc

SEQ ID NO: 10184 - DNA, 15 bp, Homo sapiens
catttgctagtgtac

SEQ ID NO: 10185 - DNA, 15 bp, Homo sapiens
acatttgctagtgta

SEQ ID NO: 10186 - DNA, 15 bp, Homo sapiens
cacatttgctagtgt

SEQ ID NO: 10187 - DNA, 15 bp, Homo sapiens
acacatttgctagtg

SEQ ID NO: 10188 - DNA, 15 bp, Homo sapiens
cacacatttgctagt

SEQ ID NO: 10189 - DNA, 15 bp, Homo sapiens
tcacacatttgctag

SEQ ID NO: 10190 - DNA, 15 bp, Homo sapiens
atcacacatttgcta

SEQ ID NO: 10191 - DNA, 15 bp, Homo sapiens
tatcacacatttgct

SEQ ID NO: 10192 - DNA, 15 bp, Homo sapiens
atatcacacatttgc

SEQ ID NO: 10193 - DNA, 15 bp, Homo sapiens
tatatcacacatttg

SEQ ID NO: 10194 - DNA, 15 bp, Homo sapiens
ctatatcacacattt

SEQ ID NO: 10195 - DNA, 15 bp, Homo sapiens
actatatcacacatt

SEQ ID NO: 10196 - DNA, 15 bp, Homo sapiens
cactatatcacacat

SEQ ID NO: 10197 - DNA, 15 bp, Homo sapiens
acactatatcacaca

SEQ ID NO: 10198 - DNA, 15 bp, Homo sapiens
tacactatatcacac

SEQ ID NO: 10199 - DNA, 15 bp, Homo sapiens
atacactatatcaca

SEQ ID NO: 10200 - DNA, 15 bp, Homo sapiens
aatacactatatcac

SEQ ID NO: 10201 - DNA, 15 bp, Homo sapiens
aaatacactatatca

SEQ ID NO: 10202 - DNA, 15 bp, Homo sapiens
taaatacactatatc

SEQ ID NO: 10203 - DNA, 15 bp, Homo sapiens
gtaaatacactatat

SEQ ID NO: 10204 - DNA, 15 bp, Homo sapiens
agtaaatacactata

SEQ ID NO: 10205 - DNA, 15 bp, Homo sapiens
aagtaaatacactat

SEQ ID NO: 10206 - DNA, 15 bp, Homo sapiens
caagtaaatacacta

SEQ ID NO: 10207 - DNA, 15 bp, Homo sapiens
acaagtaaatacact

SEQ ID NO: 10208 - DNA, 15 bp, Homo sapiens
aacaagtaaatacac

SEQ ID NO: 10209 - DNA, 15 bp, Homo sapiens
gaacaagtaaataca

SEQ ID NO: 10210 - DNA, 15 bp, Homo sapiens
tgaacaagtaaatac

SEQ ID NO: 10211 - DNA, 15 bp, Homo sapiens
gtgaacaagtaaata

SEQ ID NO: 10212 - DNA, 15 bp, Homo sapiens
tgtgaacaagtaaat

SEQ ID NO: 10213 - DNA, 15 bp, Homo sapiens
ctgtgaacaagtaaa

SEQ ID NO: 10214 - DNA, 15 bp, Homo sapiens
tctgtgaacaagtaa

SEQ ID NO: 10215 - DNA, 15 bp, Homo sapiens
ctctgtgaacaagta

SEQ ID NO: 10216 - DNA, 15 bp, Homo sapiens
actctgtgaacaagt

SEQ ID NO: 10217 - DNA, 15 bp, Homo sapiens
aactctgtgaacaag

SEQ ID NO: 10218 - DNA, 15 bp, Homo sapiens
aaactctgtgaacaa

SEQ ID NO: 10219 - DNA, 15 bp, Homo sapiens
aaaactctgtgaaca

SEQ ID NO: 10220 - DNA, 15 bp, Homo sapiens
taaaactctgtgaac

SEQ ID NO: 10221 - DNA, 15 bp, Homo sapiens
ttaaaactctgtgaa

SEQ ID NO: 10222 - DNA, 15 bp, Homo sapiens
tttaaaactctgtga

SEQ ID NO: 10223 - DNA, 15 bp, Homo sapiens
gtttaaaactctgtg

SEQ ID NO: 10224 - DNA, 15 bp, Homo sapiens
tgtttaaaactctgt

SEQ ID NO: 10225 - DNA, 15 bp, Homo sapiens
gtgtttaaaactctg

SEQ ID NO: 10226 - DNA, 15 bp, Homo sapiens
ggtgtttaaaactct

SEQ ID NO: 10227 - DNA, 15 bp, Homo sapiens
aggtgtttaaaactc

SEQ ID NO: 10228 - DNA, 15 bp, Homo sapiens
gaggtgtttaaaact

SEQ ID NO: 10229 - DNA, 15 bp, Homo sapiens
tgaggtgtttaaaac

SEQ ID NO: 10230 - DNA, 15 bp, Homo sapiens
atgaggtgtttaaaa

SEQ ID NO: 10231 - DNA, 15 bp, Homo sapiens
tatgaggtgtttaaa

SEQ ID NO: 10232 - DNA, 15 bp, Homo sapiens
atatgaggtgtttaa

SEQ ID NO: 10233 - DNA, 15 bp, Homo sapiens
tatatgaggtgttta

SEQ ID NO: 10234 - DNA, 15 bp, Homo sapiens
ttatatgaggtgttt

SEQ ID NO: 10235 - DNA, 15 bp, Homo sapiens
tttatatgaggtgtt

SEQ ID NO: 10236 - DNA, 15 bp, Homo sapiens
ctttatatgaggtgt

SEQ ID NO: 10237 - DNA, 15 bp, Homo sapiens
cctttatatgaggtg

SEQ ID NO: 10238 - DNA, 15 bp, Homo sapiens
acctttatatgaggt

SEQ ID NO: 10239 - DNA, 15 bp, Homo sapiens
tacctttatatgagg

SEQ ID NO: 10240 - DNA, 15 bp, Homo sapiens
atacctttatatgag

SEQ ID NO: 10241 - DNA, 15 bp, Homo sapiens
aatacctttatatga

SEQ ID NO: 10242 - DNA, 15 bp, Homo sapiens
taatacctttatatg

SEQ ID NO: 10243 - DNA, 15 bp, Homo sapiens
ttaatacctttatat

SEQ ID NO: 10244 - DNA, 15 bp, Homo sapiens
attaatacctttata

SEQ ID NO: 10245 - DNA, 15 bp, Homo sapiens
aattaatacctttat

SEQ ID NO: 10246 - DNA, 15 bp, Homo sapiens
gaattaataccttta

SEQ ID NO: 10247 - DNA, 15 bp, Homo sapiens
tgaattaataccttt

SEQ ID NO: 10248 - DNA, 15 bp, Homo sapiens
ctgaattaatacctt

SEQ ID NO: 10249 - DNA, 15 bp, Homo sapiens
actgaattaatacct

SEQ ID NO: 10250 - DNA, 15 bp, Homo sapiens
aactgaattaatacc

SEQ ID NO: 10251 - DNA, 15 bp, Homo sapiens
caactgaattaatac

SEQ ID NO: 10252 - DNA, 15 bp, Homo sapiens
tcaactgaattaata

SEQ ID NO: 10253 - DNA, 15 bp, Homo sapiens
atcaactgaattaat

SEQ ID NO: 10254 - DNA, 15 bp, Homo sapiens
aatcaactgaattaa

SEQ ID NO: 10255 - DNA, 15 bp, Homo sapiens
aaatcaactgaatta

SEQ ID NO: 10256 - DNA, 15 bp, Homo sapiens
taaatcaactgaatt

SEQ ID NO: 10257 - DNA, 15 bp, Homo sapiens
ataaatcaactgaat

SEQ ID NO: 10258 - DNA, 15 bp, Homo sapiens
gataaatcaactgaa

SEQ ID NO: 10259 - DNA, 15 bp, Homo sapiens
ggataaatcaactga

SEQ ID NO: 10260 - DNA, 15 bp, Homo sapiens
tggataaatcaactg

SEQ ID NO: 10261 - DNA, 15 bp, Homo sapiens
ttggataaatcaact

SEQ ID NO: 10262 - DNA, 15 bp, Homo sapiens
tttggataaatcaac

SEQ ID NO: 10263 - DNA, 15 bp, Homo sapiens
ttttggataaatcaa

SEQ ID NO: 10264 - DNA, 15 bp, Homo sapiens
cttttggataaatca

SEQ ID NO: 10265 - DNA, 15 bp, Homo sapiens
ccttttggataaatc

SEQ ID NO: 10266 - DNA, 15 bp, Homo sapiens
tccttttggataaat

SEQ ID NO: 10267 - DNA, 15 bp, Homo sapiens
ttccttttggataaa

SEQ ID NO: 10268 - DNA, 15 bp, Homo sapiens
cttccttttggataa

SEQ ID NO: 10269 - DNA, 15 bp, Homo sapiens
tcttccttttggata

SEQ ID NO: 10270 - DNA, 15 bp, Homo sapiens
gtcttccttttggat

SEQ ID NO: 10271 - DNA, 15 bp, Homo sapiens
tgtcttccttttgga

SEQ ID NO: 10272 - DNA, 15 bp, Homo sapiens
gtgtcttccttttgg

SEQ ID NO: 10273 - DNA, 15 bp, Homo sapiens
agtgtcttccttttg

SEQ ID NO: 10274 - DNA, 15 bp, Homo sapiens
tagtgtcttcctttt

SEQ ID NO: 10275 - DNA, 15 bp, Homo sapiens
ttagtgtcttccttt

SEQ ID NO: 10276 - DNA, 15 bp, Homo sapiens
attagtgtcttcctt

SEQ ID NO: 10277 - DNA, 15 bp, Homo sapiens
aattagtgtcttcct

SEQ ID NO: 10278 - DNA, 15 bp, Homo sapiens
gaattagtgtcttcc

SEQ ID NO: 10279 - DNA, 15 bp, Homo sapiens
agaattagtgtcttc

SEQ ID NO: 10280 - DNA, 15 bp, Homo sapiens
aagaattagtgtctt

SEQ ID NO: 10281 - DNA, 15 bp, Homo sapiens
taagaattagtgtct

SEQ ID NO: 10282 - DNA, 15 bp, Homo sapiens
ataagaattagtgtc

SEQ ID NO: 10283 - DNA, 15 bp, Homo sapiens
aataagaattagtgt

SEQ ID NO: 10284 - DNA, 15 bp, Homo sapiens
aaataagaattagtg

SEQ ID NO: 10285 - DNA, 15 bp, Homo sapiens
aaaataagaattagt

SEQ ID NO: 10286 - DNA, 15 bp, Homo sapiens
caaaataagaattag

SEQ ID NO: 10287 - DNA, 15 bp, Homo sapiens
acaaaataagaatta

SEQ ID NO: 10288 - DNA, 15 bp, Homo sapiens
cacaaaataagaatt

SEQ ID NO: 10289 - DNA, 15 bp, Homo sapiens
ccacaaaataagaat

SEQ ID NO: 10290 - DNA, 15 bp, Homo sapiens
tccacaaaataagaa

SEQ ID NO: 10291 - DNA, 15 bp, Homo sapiens
ttccacaaaataaga

SEQ ID NO: 10292 - DNA, 15 bp, Homo sapiens
tttccacaaaataag

SEQ ID NO: 10293 - DNA, 15 bp, Homo sapiens
ttttccacaaaataa

SEQ ID NO: 10294 - DNA, 15 bp, Homo sapiens
attttccacaaaata

SEQ ID NO: 10295 - DNA, 15 bp, Homo sapiens
cattttccacaaaat

SEQ ID NO: 10296 - DNA, 15 bp, Homo sapiens
acattttccacaaaa

SEQ ID NO: 10297 - DNA, 15 bp, Homo sapiens
aacattttccacaaa

SEQ ID NO: 10298 - DNA, 15 bp, Homo sapiens
taacattttccacaa

SEQ ID NO: 10299 - DNA, 15 bp, Homo sapiens
ataacattttccaca

SEQ ID NO: 10300 - DNA, 15 bp, Homo sapiens
tataacattttccac

SEQ ID NO: 10301 - DNA, 15 bp, Homo sapiens
ctataacattttcca

SEQ ID NO: 10302 - DNA, 15 bp, Homo sapiens
actataacattttcc

SEQ ID NO: 10303 - DNA, 15 bp, Homo sapiens
aactataacattttc

SEQ ID NO: 10304 - DNA, 15 bp, Homo sapiens
caactataacatttt

SEQ ID NO: 10305 - DNA, 15 bp, Homo sapiens
acaactataacattt

SEQ ID NO: 10306 - DNA, 15 bp, Homo sapiens
aacaactataacatt

SEQ ID NO: 10307 - DNA, 15 bp, Homo sapiens
taacaactataacat

SEQ ID NO: 10308 - DNA, 15 bp, Homo sapiens
ttaacaactataaca

SEQ ID NO: 10309 - DNA, 15 bp, Homo sapiens
attaacaactataac

SEQ ID NO: 10310 - DNA, 15 bp, Homo sapiens
tattaacaactataa

SEQ ID NO: 10311 - DNA, 15 bp, Homo sapiens
atattaacaactata

SEQ ID NO: 10312 - DNA, 15 bp, Homo sapiens
gatattaacaactat

SEQ ID NO: 10313 - DNA, 15 bp, Homo sapiens
tgatattaacaacta

SEQ ID NO: 10314 - DNA, 15 bp, Homo sapiens
atgatattaacaact

SEQ ID NO: 10315 - DNA, 15 bp, Homo sapiens
aatgatattaacaac

SEQ ID NO: 10316 - DNA, 15 bp, Homo sapiens
aaatgatattaacaa

SEQ ID NO: 10317 - DNA, 15 bp, Homo sapiens
taaatgatattaaca

SEQ ID NO: 10318 - DNA, 15 bp, Homo sapiens
ataaatgatattaac

SEQ ID NO: 10319 - DNA, 15 bp, Homo sapiens
aataaatgatattaa

SEQ ID NO: 10320 - DNA, 15 bp, Homo sapiens
gaataaatgatatta

SEQ ID NO: 10321 - DNA, 15 bp, Homo sapiens
agaataaatgatatt

SEQ ID NO: 10322 - DNA, 15 bp, Homo sapiens
aagaataaatgatat

SEQ ID NO: 10323 - DNA, 15 bp, Homo sapiens
taagaataaatgata

SEQ ID NO: 10324 - DNA, 15 bp, Homo sapiens
gtaagaataaatgat

SEQ ID NO: 10325 - DNA, 15 bp, Homo sapiens
ggtaagaataaatga

SEQ ID NO: 10326 - DNA, 15 bp, Homo sapiens
gggtaagaataaatg

SEQ ID NO: 10327 - DNA, 15 bp, Homo sapiens
ggggtaagaataaat

SEQ ID NO: 10328 - DNA, 15 bp, Homo sapiens
aggggtaagaataaa

SEQ ID NO: 10329 - DNA, 15 bp, Homo sapiens
aaggggtaagaataa

SEQ ID NO: 10330 - DNA, 15 bp, Homo sapiens
gaaggggtaagaata

SEQ ID NO: 10331 - DNA, 15 bp, Homo sapiens
agaaggggtaagaat

SEQ ID NO: 10332 - DNA, 15 bp, Homo sapiens
gagaaggggtaagaa

SEQ ID NO: 10333 - DNA, 15 bp, Homo sapiens
agagaaggggtaaga

SEQ ID NO: 10334 - DNA, 15 bp, Homo sapiens
aagagaaggggtaag

SEQ ID NO: 10335 - DNA, 15 bp, Homo sapiens
aaagagaaggggtaa

SEQ ID NO: 10336 - DNA, 15 bp, Homo sapiens
aaaagagaaggggta

SEQ ID NO: 10337 - DNA, 15 bp, Homo sapiens
taaaagagaaggggt

SEQ ID NO: 10338 - DNA, 15 bp, Homo sapiens
ctaaaagagaagggg

SEQ ID NO: 10339 - DNA, 15 bp, Homo sapiens
gctaaaagagaaggg

SEQ ID NO: 10340 - DNA, 15 bp, Homo sapiens
agctaaaagagaagg

SEQ ID NO: 10341 - DNA, 15 bp, Homo sapiens
gagctaaaagagaag

SEQ ID NO: 10342 - DNA, 15 bp, Homo sapiens
agagctaaaagagaa

SEQ ID NO: 10343 - DNA, 15 bp, Homo sapiens
aagagctaaaagaga

SEQ ID NO: 10344 - DNA, 15 bp, Homo sapiens
aaagagctaaaagag

SEQ ID NO: 10345 - DNA, 15 bp, Homo sapiens
aaaagagctaaaaga

SEQ ID NO: 10346 - DNA, 15 bp, Homo sapiens
aaaaagagctaaaag

SEQ ID NO: 10347 - DNA, 15 bp, Homo sapiens
aaaaaagagctaaaa

SEQ ID NO: 10348 - DNA, 15 bp, Homo sapiens
aaaaaaagagctaaa

SEQ ID NO: 10349 - DNA, 15 bp, Homo sapiens
aaaaaaaagagctaa

SEQ ID NO: 10350 - DNA, 15 bp, Homo sapiens
gaaaaaaaagagcta

SEQ ID NO: 10351 - DNA, 15 bp, Homo sapiens
agaaaaaaaagagct

SEQ ID NO: 10352 - DNA, 15 bp, Homo sapiens
cagaaaaaaaagagc

SEQ ID NO: 10353 - DNA, 15 bp, Homo sapiens
tcagaaaaaaaagag

SEQ ID NO: 10354 - DNA, 15 bp, Homo sapiens
ttcagaaaaaaaaga

SEQ ID NO: 10355 - DNA, 15 bp, Homo sapiens
gttcagaaaaaaaag

SEQ ID NO: 10356 - DNA, 15 bp, Homo sapiens
cgttcagaaaaaaaa

SEQ ID NO: 10357 - DNA, 15 bp, Homo sapiens
acgttcagaaaaaaa

SEQ ID NO: 10358 - DNA, 15 bp, Homo sapiens
aacgttcagaaaaaa

SEQ ID NO: 10359 - DNA, 15 bp, Homo sapiens
caacgttcagaaaaa

SEQ ID NO: 10360 - DNA, 15 bp, Homo sapiens
acaacgttcagaaaa

SEQ ID NO: 10361 - DNA, 15 bp, Homo sapiens
aacaacgttcagaaa

SEQ ID NO: 10362 - DNA, 15 bp, Homo sapiens
caacaacgttcagaa

SEQ ID NO: 10363 - DNA, 15 bp, Homo sapiens
acaacaacgttcaga

SEQ ID NO: 10364 - DNA, 15 bp, Homo sapiens
aacaacaacgttcag

SEQ ID NO: 10365 - DNA, 15 bp, Homo sapiens
aaacaacaacgttca

SEQ ID NO: 10366 - DNA, 15 bp, Homo sapiens
aaaacaacaacgttc

SEQ ID NO: 10367 - DNA, 15 bp, Homo sapiens
taaaacaacaacgtt

SEQ ID NO: 10368 - DNA, 15 bp, Homo sapiens
ataaaacaacaacgt

SEQ ID NO: 10369 - DNA, 15 bp, Homo sapiens
tataaaacaacaacg

SEQ ID NO: 10370 - DNA, 15 bp, Homo sapiens
atataaaacaacaac

SEQ ID NO: 10371 - DNA, 15 bp, Homo sapiens
tatataaaacaacaa

SEQ ID NO: 10372 - DNA, 15 bp, Homo sapiens
ttatataaaacaaca

SEQ ID NO: 10373 - DNA, 15 bp, Homo sapiens
cttatataaaacaac

SEQ ID NO: 10374 - DNA, 15 bp, Homo sapiens
acttatataaaacaa

SEQ ID NO: 10375 - DNA, 15 bp, Homo sapiens
tacttatataaaaca

SEQ ID NO: 10376 - DNA, 15 bp, Homo sapiens
gtacttatataaaac

SEQ ID NO: 10377 - DNA, 15 bp, Homo sapiens
ggtacttatataaaa

SEQ ID NO: 10378 - DNA, 15 bp, Homo sapiens
aggtacttatataaa

SEQ ID NO: 10379 - DNA, 15 bp, Homo sapiens
gaggtacttatataa

SEQ ID NO: 10380 - DNA, 15 bp, Homo sapiens
agaggtacttatata

SEQ ID NO: 10381 - DNA, 15 bp, Homo sapiens
aagaggtacttatat

SEQ ID NO: 10382 - DNA, 15 bp, Homo sapiens
taagaggtacttata

SEQ ID NO: 10383 - DNA, 15 bp, Homo sapiens
ttaagaggtacttat

SEQ ID NO: 10384 - DNA, 15 bp, Homo sapiens
tttaagaggtactta

SEQ ID NO: 10385 - DNA, 15 bp, Homo sapiens
ttttaagaggtactt

SEQ ID NO: 10386 - DNA, 15 bp, Homo sapiens
cttttaagaggtact

SEQ ID NO: 10387 - DNA, 15 bp, Homo sapiens
acttttaagaggtac

SEQ ID NO: 10388 - DNA, 15 bp, Homo sapiens
aacttttaagaggta

SEQ ID NO: 10389 - DNA, 15 bp, Homo sapiens
aaacttttaagaggt

SEQ ID NO: 10390 - DNA, 15 bp, Homo sapiens
aaaacttttaagagg

SEQ ID NO: 10391 - DNA, 15 bp, Homo sapiens
aaaaacttttaagag

SEQ ID NO: 10392 - DNA, 15 bp, Homo sapiens
aaaaaacttttaaga

SEQ ID NO: 10393 - DNA, 15 bp, Homo sapiens
aaaaaaacttttaag

SEQ ID NO: 10394 - DNA, 15 bp, Homo sapiens
aaaaaaaacttttaa

SEQ ID NO: 10395 - DNA, 15 bp, Homo sapiens
aaaaaaaaactttta

SEQ ID NO: 10396 - DNA, 15 bp, Homo sapiens
taaaaaaaaactttt

SEQ ID NO: 10397 - DNA, 15 bp, Homo sapiens
ttaaaaaaaaacttt

SEQ ID NO: 10398 - DNA, 15 bp, Homo sapiens
attaaaaaaaaactt

SEQ ID NO: 10399 - DNA, 15 bp, Homo sapiens
gattaaaaaaaaact

SEQ ID NO: 10400 - DNA, 15 bp, Homo sapiens
agattaaaaaaaaac

SEQ ID NO: 10401 - DNA, 15 bp, Homo sapiens
cagattaaaaaaaaa

SEQ ID NO: 10402 - DNA, 15 bp, Homo sapiens
acagattaaaaaaaa

SEQ ID NO: 10403 - DNA, 15 bp, Homo sapiens
aacagattaaaaaaa

SEQ ID NO: 10404 - DNA, 15 bp, Homo sapiens
aaacagattaaaaaa

SEQ ID NO: 10405 - DNA, 15 bp, Homo sapiens
aaaacagattaaaaa

SEQ ID NO: 10406 - DNA, 15 bp, Homo sapiens
gaaaacagattaaaa

SEQ ID NO: 10407 - DNA, 15 bp, Homo sapiens
agaaaacagattaaa

SEQ ID NO: 10408 - DNA, 15 bp, Homo sapiens
tagaaaacagattaa

SEQ ID NO: 10409 - DNA, 15 bp, Homo sapiens
ctagaaaacagatta

SEQ ID NO: 10410 - DNA, 15 bp, Homo sapiens
cctagaaaacagatt

SEQ ID NO: 10411 - DNA, 15 bp, Homo sapiens
ccctagaaaacagat

SEQ ID NO: 10412 - DNA, 15 bp, Homo sapiens
cccctagaaaacaga

SEQ ID NO: 10413 - DNA, 15 bp, Homo sapiens
tcccctagaaaacag

SEQ ID NO: 10414 - DNA, 15 bp, Homo sapiens
ctcccctagaaaaca

SEQ ID NO: 10415 - DNA, 15 bp, Homo sapiens
cctcccctagaaaac

SEQ ID NO: 10416 - DNA, 15 bp, Homo sapiens
acctcccctagaaaa

SEQ ID NO: 10417 - DNA, 15 bp, Homo sapiens
gacctcccctagaaa

SEQ ID NO: 10418 - DNA, 15 bp, Homo sapiens
tgacctcccctagaa

SEQ ID NO: 10419 - DNA, 15 bp, Homo sapiens
atgacctcccctaga

SEQ ID NO: 10420 - DNA, 15 bp, Homo sapiens
catgacctcccctag

SEQ ID NO: 10421 - DNA, 15 bp, Homo sapiens
gcatgacctccccta

SEQ ID NO: 10422 - DNA, 15 bp, Homo sapiens
agcatgacctcccct

SEQ ID NO: 10423 - DNA, 15 bp, Homo sapiens
aagcatgacctcccc

SEQ ID NO: 10424 - DNA, 15 bp, Homo sapiens
caagcatgacctccc

SEQ ID NO: 10425 - DNA, 15 bp, Homo sapiens
ccaagcatgacctcc

SEQ ID NO: 10426 - DNA, 15 bp, Homo sapiens
accaagcatgacctc

SEQ ID NO: 10427 - DNA, 15 bp, Homo sapiens
aaccaagcatgacct

SEQ ID NO: 10428 - DNA, 15 bp, Homo sapiens
taaccaagcatgacc

SEQ ID NO: 10429 - DNA, 15 bp, Homo sapiens
ttaaccaagcatgac

SEQ ID NO: 10430 - DNA, 15 bp, Homo sapiens
attaaccaagcatga

SEQ ID NO: 10431 - DNA, 15 bp, Homo sapiens
aattaaccaagcatg

SEQ ID NO: 10432 - DNA, 15 bp, Homo sapiens
caattaaccaagcat

SEQ ID NO: 10433 - DNA, 15 bp, Homo sapiens
acaattaaccaagca

SEQ ID NO: 10434 - DNA, 15 bp, Homo sapiens
aacaattaaccaagc

SEQ ID NO: 10435 - DNA, 15 bp, Homo sapiens
caacaattaaccaag

SEQ ID NO: 10436 - DNA, 15 bp, Homo sapiens
gcaacaattaaccaa

SEQ ID NO: 10437 - DNA, 15 bp, Homo sapiens
agcaacaattaacca

SEQ ID NO: 10438 - DNA, 15 bp, Homo sapiens
tagcaacaattaacc

SEQ ID NO: 10439 - DNA, 15 bp, Homo sapiens
ttagcaacaattaac

SEQ ID NO: 10440 - DNA, 15 bp, Homo sapiens
cttagcaacaattaa

SEQ ID NO: 10441 - DNA, 15 bp, Homo sapiens
acttagcaacaatta

SEQ ID NO: 10442 - DNA, 15 bp, Homo sapiens
tacttagcaacaatt

SEQ ID NO: 10443 - DNA, 15 bp, Homo sapiens
ttacttagcaacaat

SEQ ID NO: 10444 - DNA, 15 bp, Homo sapiens
tttacttagcaacaa

SEQ ID NO: 10445 - DNA, 15 bp, Homo sapiens
atttacttagcaaca

SEQ ID NO: 10446 - DNA, 15 bp, Homo sapiens
catttacttagcaac

SEQ ID NO: 10447 - DNA, 15 bp, Homo sapiens
ccatttacttagcaa

SEQ ID NO: 10448 - DNA, 15 bp, Homo sapiens
tccatttacttagca

SEQ ID NO: 10449 - DNA, 15 bp, Homo sapiens
atccatttacttagc

SEQ ID NO: 10450 - DNA, 15 bp, Homo sapiens
aatccatttacttag

SEQ ID NO: 10451 - DNA, 15 bp, Homo sapiens
aaatccatttactta

SEQ ID NO: 10452 - DNA, 15 bp, Homo sapiens
aaaatccatttactt

SEQ ID NO: 10453 - DNA, 15 bp, Homo sapiens
taaaatccatttact

SEQ ID NO: 10454 - DNA, 15 bp, Homo sapiens
gtaaaatccatttac

SEQ ID NO: 10455 - DNA, 15 bp, Homo sapiens
ggtaaaatccattta

SEQ ID NO: 10456 - DNA, 15 bp, Homo sapiens
aggtaaaatccattt

SEQ ID NO: 10457 - DNA, 15 bp, Homo sapiens
aaggtaaaatccatt

SEQ ID NO: 10458 - DNA, 15 bp, Homo sapiens
aaaggtaaaatccat

SEQ ID NO: 10459 - DNA, 15 bp, Homo sapiens
caaaggtaaaatcca

SEQ ID NO: 10460 - DNA, 15 bp, Homo sapiens
tcaaaggtaaaatcc

SEQ ID NO: 10461 - DNA, 15 bp, Homo sapiens
atcaaaggtaaaatc

SEQ ID NO: 10462 - DNA, 15 bp, Homo sapiens
aatcaaaggtaaaat

SEQ ID NO: 10463 - DNA, 15 bp, Homo sapiens
taatcaaaggtaaaa

SEQ ID NO: 10464 - DNA, 15 bp, Homo sapiens
ataatcaaaggtaaa

SEQ ID NO: 10465 - DNA, 15 bp, Homo sapiens
aataatcaaaggtaa

SEQ ID NO: 10466 - DNA, 15 bp, Homo sapiens
taataatcaaaggta

SEQ ID NO: 10467 - DNA, 15 bp, Homo sapiens
ataataatcaaaggt

SEQ ID NO: 10468 - DNA, 15 bp, Homo sapiens
aataataatcaaagg

SEQ ID NO: 10469 - DNA, 15 bp, Homo sapiens
aaataataatcaaag

SEQ ID NO: 10470 - DNA, 15 bp, Homo sapiens
aaaataataatcaaa

SEQ ID NO: 10471 - DNA, 15 bp, Homo sapiens
aaaaataataatcaa

SEQ ID NO: 10472 - DNA, 15 bp, Homo sapiens
gaaaaataataatca

SEQ ID NO: 10473 - DNA, 15 bp, Homo sapiens
agaaaaataataatc

SEQ ID NO: 10474 - DNA, 15 bp, Homo sapiens
cagaaaaataataat

SEQ ID NO: 10475 - DNA, 15 bp, Homo sapiens
gcagaaaaataataa

SEQ ID NO: 10476 - DNA, 15 bp, Homo sapiens
ggcagaaaaataata

SEQ ID NO: 10477 - DNA, 15 bp, Homo sapiens
aggcagaaaaataat

SEQ ID NO: 10478 - DNA, 15 bp, Homo sapiens
aaggcagaaaaataa

SEQ ID NO: 10479 - DNA, 15 bp, Homo sapiens
aaaggcagaaaaata

SEQ ID NO: 10480 - DNA, 15 bp, Homo sapiens
taaaggcagaaaaat

SEQ ID NO: 10481 - DNA, 15 bp, Homo sapiens
ataaaggcagaaaaa

SEQ ID NO: 10482 - DNA, 15 bp, Homo sapiens
tataaaggcagaaaa

SEQ ID NO: 10483 - DNA, 15 bp, Homo sapiens
gtataaaggcagaaa

SEQ ID NO: 10484 - DNA, 15 bp, Homo sapiens
tgtataaaggcagaa

SEQ ID NO: 10485 - DNA, 15 bp, Homo sapiens
ttgtataaaggcaga

SEQ ID NO: 10486 - DNA, 15 bp, Homo sapiens
attgtataaaggcag

SEQ ID NO: 10487 - DNA, 15 bp, Homo sapiens
cattgtataaaggca

SEQ ID NO: 10488 - DNA, 15 bp, Homo sapiens
acattgtataaaggc

SEQ ID NO: 10489 - DNA, 15 bp, Homo sapiens
cacattgtataaagg

SEQ ID NO: 10490 - DNA, 15 bp, Homo sapiens
acacattgtataaag

SEQ ID NO: 10491 - DNA, 15 bp, Homo sapiens
aacacattgtataaa

SEQ ID NO: 10492 - DNA, 15 bp, Homo sapiens
aaacacattgtataa

SEQ ID NO: 10493 - DNA, 15 bp, Homo sapiens
aaaacacattgtata

SEQ ID NO: 10494 - DNA, 15 bp, Homo sapiens
taaaacacattgtat

SEQ ID NO: 10495 - DNA, 15 bp, Homo sapiens
ctaaaacacattgta

SEQ ID NO: 10496 - DNA, 15 bp, Homo sapiens
cctaaaacacattgt

SEQ ID NO: 10497 - DNA, 15 bp, Homo sapiens
gcctaaaacacattg

SEQ ID NO: 10498 - DNA, 15 bp, Homo sapiens
agcctaaaacacatt

SEQ ID NO: 10499 - DNA, 15 bp, Homo sapiens
aagcctaaaacacat

SEQ ID NO: 10500 - DNA, 15 bp, Homo sapiens
gaagcctaaaacaca

SEQ ID NO: 10501 - DNA, 15 bp, Homo sapiens
agaagcctaaaacac

SEQ ID NO: 10502 - DNA, 15 bp, Homo sapiens
aagaagcctaaaaca

SEQ ID NO: 10503 - DNA, 15 bp, Homo sapiens
aaagaagcctaaaac

SEQ ID NO: 10504 - DNA, 15 bp, Homo sapiens
aaaagaagcctaaaa

SEQ ID NO: 10505 - DNA, 15 bp, Homo sapiens
taaaagaagcctaaa

SEQ ID NO: 10506 - DNA, 15 bp, Homo sapiens
ctaaaagaagcctaa

SEQ ID NO: 10507 - DNA, 15 bp, Homo sapiens
tctaaaagaagccta

SEQ ID NO: 10508 - DNA, 15 bp, Homo sapiens
gtctaaaagaagcct

SEQ ID NO: 10509 - DNA, 15 bp, Homo sapiens
tgtctaaaagaagcc

SEQ ID NO: 10510 - DNA, 15 bp, Homo sapiens
ttgtctaaaagaagc

SEQ ID NO: 10511 - DNA, 15 bp, Homo sapiens
tttgtctaaaagaag

SEQ ID NO: 10512 - DNA, 15 bp, Homo sapiens
atttgtctaaaagaa

SEQ ID NO: 10513 - DNA, 15 bp, Homo sapiens
tatttgtctaaaaga

SEQ ID NO: 10514 - DNA, 15 bp, Homo sapiens
ctatttgtctaaaag

SEQ ID NO: 10515 - DNA, 15 bp, Homo sapiens
tctatttgtctaaaa

SEQ ID NO: 10516 - DNA, 15 bp, Homo sapiens
gtctatttgtctaaa

SEQ ID NO: 10517 - DNA, 15 bp, Homo sapiens
tgtctatttgtctaa

SEQ ID NO: 10518 - DNA, 15 bp, Homo sapiens
atgtctatttgtcta

SEQ ID NO: 10519 - DNA, 15 bp, Homo sapiens
aatgtctatttgtct

SEQ ID NO: 10520 - DNA, 15 bp, Homo sapiens
aaatgtctatttgtc

SEQ ID NO: 10521 - DNA, 15 bp, Homo sapiens
aaaatgtctatttgt

SEQ ID NO: 10522 - DNA, 15 bp, Homo sapiens
gaaaatgtctatttg

SEQ ID NO: 10523 - DNA, 15 bp, Homo sapiens
ggaaaatgtctattt

SEQ ID NO: 10524 - DNA, 15 bp, Homo sapiens
gggaaaatgtctatt

SEQ ID NO: 10525 - DNA, 15 bp, Homo sapiens
tgggaaaatgtctat

SEQ ID NO: 10526 - DNA, 15 bp, Homo sapiens
atgggaaaatgtcta

SEQ ID NO: 10527 - DNA, 15 bp, Homo sapiens
aatgggaaaatgtct

SEQ ID NO: 10528 - DNA, 15 bp, Homo sapiens
taatgggaaaatgtc

SEQ ID NO: 10529 - DNA, 15 bp, Homo sapiens
gtaatgggaaaatgt

SEQ ID NO: 10530 - DNA, 15 bp, Homo sapiens
tgtaatgggaaaatg

SEQ ID NO: 10531 - DNA, 15 bp, Homo sapiens
ttgtaatgggaaaat

SEQ ID NO: 10532 - DNA, 15 bp, Homo sapiens
tttgtaatgggaaaa

SEQ ID NO: 10533 - DNA, 15 bp, Homo sapiens
ctttgtaatgggaaa

SEQ ID NO: 10534 - DNA, 15 bp, Homo sapiens
cctttgtaatgggaa

SEQ ID NO: 10535 - DNA, 15 bp, Homo sapiens
tcctttgtaatggga

SEQ ID NO: 10536 - DNA, 15 bp, Homo sapiens
gtcctttgtaatggg

SEQ ID NO: 10537 - DNA, 15 bp, Homo sapiens
tgtcctttgtaatgg

SEQ ID NO: 10538 - DNA, 15 bp, Homo sapiens
gtgtcctttgtaatg

SEQ ID NO: 10539 - DNA, 15 bp, Homo sapiens
agtgtcctttgtaat

SEQ ID NO: 10540 - DNA, 15 bp, Homo sapiens
tagtgtcctttgtaa

SEQ ID NO: 10541 - DNA, 15 bp, Homo sapiens
atagtgtcctttgta

SEQ ID NO: 10542 - DNA, 15 bp, Homo sapiens
gatagtgtcctttgt

SEQ ID NO: 10543 - DNA, 15 bp, Homo sapiens
tgatagtgtcctttg

SEQ ID NO: 10544 - DNA, 15 bp, Homo sapiens
ctgatagtgtccttt

SEQ ID NO: 10545 - DNA, 15 bp, Homo sapiens
actgatagtgtcctt

SEQ ID NO: 10546 - DNA, 15 bp, Homo sapiens
aactgatagtgtcct

SEQ ID NO: 10547 - DNA, 15 bp, Homo sapiens
gaactgatagtgtcc

SEQ ID NO: 10548 - DNA, 15 bp, Homo sapiens
agaactgatagtgtc

SEQ ID NO: 10549 - DNA, 15 bp, Homo sapiens
aagaactgatagtgt

SEQ ID NO: 10550 - DNA, 15 bp, Homo sapiens
gaagaactgatagtg

SEQ ID NO: 10551 - DNA, 15 bp, Homo sapiens
tgaagaactgatagt

SEQ ID NO: 10552 - DNA, 15 bp, Homo sapiens
ctgaagaactgatag

SEQ ID NO: 10553 - DNA, 15 bp, Homo sapiens
actgaagaactgata

SEQ ID NO: 10554 - DNA, 15 bp, Homo sapiens
tactgaagaactgat

SEQ ID NO: 10555 - DNA, 15 bp, Homo sapiens
atactgaagaactga

SEQ ID NO: 10556 - DNA, 15 bp, Homo sapiens
catactgaagaactg

SEQ ID NO: 10557 - DNA, 15 bp, Homo sapiens
ccatactgaagaact

SEQ ID NO: 10558 - DNA, 15 bp, Homo sapiens
tccatactgaagaac

SEQ ID NO: 10559 - DNA, 15 bp, Homo sapiens
ttccatactgaagaa

SEQ ID NO: 10560 - DNA, 15 bp, Homo sapiens
attccatactgaaga

SEQ ID NO: 10561 - DNA, 15 bp, Homo sapiens
aattccatactgaag

SEQ ID NO: 10562 - DNA, 15 bp, Homo sapiens
aaattccatactgaa

SEQ ID NO: 10563 - DNA, 15 bp, Homo sapiens
gaaattccatactga

SEQ ID NO: 10564 - DNA, 15 bp, Homo sapiens
agaaattccatactg

SEQ ID NO: 10565 - DNA, 15 bp, Homo sapiens
cagaaattccatact

SEQ ID NO: 10566 - DNA, 15 bp, Homo sapiens
acagaaattccatac

SEQ ID NO: 10567 - DNA, 15 bp, Homo sapiens
tacagaaattccata

SEQ ID NO: 10568 - DNA, 15 bp, Homo sapiens
ttacagaaattccat

SEQ ID NO: 10569 - DNA, 15 bp, Homo sapiens
cttacagaaattcca

SEQ ID NO: 10570 - DNA, 15 bp, Homo sapiens
tcttacagaaattcc

SEQ ID NO: 10571 - DNA, 15 bp, Homo sapiens
ctcttacagaaattc

SEQ ID NO: 10572 - DNA, 15 bp, Homo sapiens
actcttacagaaatt

SEQ ID NO: 10573 - DNA, 15 bp, Homo sapiens
gactcttacagaaat

SEQ ID NO: 10574 - DNA, 15 bp, Homo sapiens
tgactcttacagaaa

SEQ ID NO: 10575 - DNA, 15 bp, Homo sapiens
ttgactcttacagaa

SEQ ID NO: 10576 - DNA, 15 bp, Homo sapiens
cttgactcttacaga

SEQ ID NO: 10577 - DNA, 15 bp, Homo sapiens
tcttgactcttacag

SEQ ID NO: 10578 - DNA, 15 bp, Homo sapiens
ttcttgactcttaca

SEQ ID NO: 10579 - DNA, 15 bp, Homo sapiens
tttcttgactcttac

SEQ ID NO: 10580 - DNA, 15 bp, Homo sapiens
ttttcttgactctta

SEQ ID NO: 10581 - DNA, 15 bp, Homo sapiens
gttttcttgactctt

SEQ ID NO: 10582 - DNA, 15 bp, Homo sapiens
tgttttcttgactct

SEQ ID NO: 10583 - DNA, 15 bp, Homo sapiens
gtgttttcttgactc

SEQ ID NO: 10584 - DNA, 15 bp, Homo sapiens
tgtgttttcttgact

SEQ ID NO: 10585 - DNA, 15 bp, Homo sapiens
gtgtgttttcttgac

SEQ ID NO: 10586 - DNA, 15 bp, Homo sapiens
tgtgtgttttcttga

SEQ ID NO: 10587 - DNA, 15 bp, Homo sapiens
atgtgtgttttcttg

SEQ ID NO: 10588 - DNA, 15 bp, Homo sapiens
gatgtgtgttttctt

SEQ ID NO: 10589 - DNA, 15 bp, Homo sapiens
cgatgtgtgttttct

SEQ ID NO: 10590 - DNA, 15 bp, Homo sapiens
ccgatgtgtgttttc

SEQ ID NO: 10591 - DNA, 15 bp, Homo sapiens
tccgatgtgtgtttt

SEQ ID NO: 10592 - DNA, 15 bp, Homo sapiens
atccgatgtgtgttt

SEQ ID NO: 10593 - DNA, 15 bp, Homo sapiens
gatccgatgtgtgtt

SEQ ID NO: 10594 - DNA, 15 bp, Homo sapiens
agatccgatgtgtgt

SEQ ID NO: 10595 - DNA, 15 bp, Homo sapiens
aagatccgatgtgtg

SEQ ID NO: 10596 - DNA, 15 bp, Homo sapiens
gaagatccgatgtgt

SEQ ID NO: 10597 - DNA, 15 bp, Homo sapiens
ggaagatccgatgtg

SEQ ID NO: 10598 - DNA, 15 bp, Homo sapiens
aggaagatccgatgt

SEQ ID NO: 10599 - DNA, 15 bp, Homo sapiens
taggaagatccgatg

SEQ ID NO: 10600 - DNA, 15 bp, Homo sapiens
gtaggaagatccgat

SEQ ID NO: 10601 - DNA, 15 bp, Homo sapiens
ggtaggaagatccga

SEQ ID NO: 10602 - DNA, 15 bp, Homo sapiens
aggtaggaagatccg

SEQ ID NO: 10603 - DNA, 15 bp, Homo sapiens
aaggtaggaagatcc

SEQ ID NO: 10604 - DNA, 15 bp, Homo sapiens
aaaggtaggaagatc

SEQ ID NO: 10605 - DNA, 15 bp, Homo sapiens
gaaaggtaggaagat

SEQ ID NO: 10606 - DNA, 15 bp, Homo sapiens
agaaaggtaggaaga

SEQ ID NO: 10607 - DNA, 15 bp, Homo sapiens
cagaaaggtaggaag

SEQ ID NO: 10608 - DNA, 15 bp, Homo sapiens
acagaaaggtaggaa

SEQ ID NO: 10609 - DNA, 15 bp, Homo sapiens
cacagaaaggtagga

SEQ ID NO: 10610 - DNA, 15 bp, Homo sapiens
ccacagaaaggtagg

SEQ ID NO: 10611 - DNA, 15 bp, Homo sapiens
cccacagaaaggtag

SEQ ID NO: 10612 - DNA, 15 bp, Homo sapiens
ccccacagaaaggta

SEQ ID NO: 10613 - DNA, 15 bp, Homo sapiens
cccccacagaaaggt

SEQ ID NO: 10614 - DNA, 15 bp, Homo sapiens
acccccacagaaagg

SEQ ID NO: 10615 - DNA, 15 bp, Homo sapiens
cacccccacagaaag

SEQ ID NO: 10616 - DNA, 15 bp, Homo sapiens
acacccccacagaaa

SEQ ID NO: 10617 - DNA, 15 bp, Homo sapiens
aacacccccacagaa

SEQ ID NO: 10618 - DNA, 15 bp, Homo sapiens
aaacacccccacaga

SEQ ID NO: 10619 - DNA, 15 bp, Homo sapiens
caaacacccccacag

SEQ ID NO: 10620 - DNA, 15 bp, Homo sapiens
tcaaacacccccaca

SEQ ID NO: 10621 - DNA, 15 bp, Homo sapiens
ctcaaacacccccac

SEQ ID NO: 10622 - DNA, 15 bp, Homo sapiens
cctcaaacaccccca

SEQ ID NO: 10623 - DNA, 15 bp, Homo sapiens
tcctcaaacaccccc

SEQ ID NO: 10624 - DNA, 15 bp, Homo sapiens
ctcctcaaacacccc

SEQ ID NO: 10625 - DNA, 15 bp, Homo sapiens
tctcctcaaacaccc

SEQ ID NO: 10626 - DNA, 15 bp, Homo sapiens
ctctcctcaaacacc

SEQ ID NO: 10627 - DNA, 15 bp, Homo sapiens
actctcctcaaacac

SEQ ID NO: 10628 - DNA, 15 bp, Homo sapiens
cactctcctcaaaca

SEQ ID NO: 10629 - DNA, 15 bp, Homo sapiens
gcactctcctcaaac

SEQ ID NO: 10630 - DNA, 15 bp, Homo sapiens
agcactctcctcaaa

SEQ ID NO: 10631 - DNA, 15 bp, Homo sapiens
cagcactctcctcaa

SEQ ID NO: 10632 - DNA, 15 bp, Homo sapiens
acagcactctcctca

SEQ ID NO: 10633 - DNA, 15 bp, Homo sapiens
tacagcactctcctc

SEQ ID NO: 10634 - DNA, 15 bp, Homo sapiens
ctacagcactctcct

SEQ ID NO: 10635 - DNA, 15 bp, Homo sapiens
actacagcactctcc

SEQ ID NO: 10636 - DNA, 15 bp, Homo sapiens
tactacagcactctc

SEQ ID NO: 10637 - DNA, 15 bp, Homo sapiens
ttactacagcactct

SEQ ID NO: 10638 - DNA, 15 bp, Homo sapiens
attactacagcactc

SEQ ID NO: 10639 - DNA, 15 bp, Homo sapiens
cattactacagcact

SEQ ID NO: 10640 - DNA, 15 bp, Homo sapiens
tcattactacagcac

SEQ ID NO: 10641 - DNA, 15 bp, Homo sapiens
atcattactacagca

SEQ ID NO: 10642 - DNA, 15 bp, Homo sapiens
aatcattactacagc

SEQ ID NO: 10643 - DNA, 15 bp, Homo sapiens
gaatcattactacag

SEQ ID NO: 10644 - DNA, 15 bp, Homo sapiens
agaatcattactaca

SEQ ID NO: 10645 - DNA, 15 bp, Homo sapiens
cagaatcattactac

SEQ ID NO: 10646 - DNA, 15 bp, Homo sapiens
acagaatcattacta

SEQ ID NO: 10647 - DNA, 15 bp, Homo sapiens
aacagaatcattact

SEQ ID NO: 10648 - DNA, 15 bp, Homo sapiens
caacagaatcattac

SEQ ID NO: 10649 - DNA, 15 bp, Homo sapiens
acaacagaatcatta

SEQ ID NO: 10650 - DNA, 15 bp, Homo sapiens
tacaacagaatcatt

SEQ ID NO: 10651 - DNA, 15 bp, Homo sapiens
ttacaacagaatcat

SEQ ID NO: 10652 - DNA, 15 bp, Homo sapiens
tttacaacagaatca

SEQ ID NO: 10653 - DNA, 15 bp, Homo sapiens
ttttacaacagaatc

SEQ ID NO: 10654 - DNA, 15 bp, Homo sapiens
attttacaacagaat

SEQ ID NO: 10655 - DNA, 15 bp, Homo sapiens
cattttacaacagaa

SEQ ID NO: 10656 - DNA, 15 bp, Homo sapiens
ccattttacaacaga

SEQ ID NO: 10657 - DNA, 15 bp, Homo sapiens
cccattttacaacag

SEQ ID NO: 10658 - DNA, 15 bp, Homo sapiens
tcccattttacaaca

SEQ ID NO: 10659 - DNA, 15 bp, Homo sapiens
ttcccattttacaac

SEQ ID NO: 10660 - DNA, 15 bp, Homo sapiens
cttcccattttacaa

SEQ ID NO: 10661 - DNA, 15 bp, Homo sapiens
acttcccattttaca

SEQ ID NO: 10662 - DNA, 15 bp, Homo sapiens
cacttcccattttac

SEQ ID NO: 10663 - DNA, 15 bp, Homo sapiens
acacttcccatttta

SEQ ID NO: 10664 - DNA, 15 bp, Homo sapiens
cacacttcccatttt

SEQ ID NO: 10665 - DNA, 15 bp, Homo sapiens
tcacacttcccattt

SEQ ID NO: 10666 - DNA, 15 bp, Homo sapiens
gtcacacttcccatt

SEQ ID NO: 10667 - DNA, 15 bp, Homo sapiens
tgtcacacttcccat

SEQ ID NO: 10668 - DNA, 15 bp, Homo sapiens
atgtcacacttccca

SEQ ID NO: 10669 - DNA, 15 bp, Homo sapiens
aatgtcacacttccc

SEQ ID NO: 10670 - DNA, 15 bp, Homo sapiens
caatgtcacacttcc

SEQ ID NO: 10671 - DNA, 15 bp, Homo sapiens
tcaatgtcacacttc

SEQ ID NO: 10672 - DNA, 15 bp, Homo sapiens
atcaatgtcacactt

SEQ ID NO: 10673 - DNA, 15 bp, Homo sapiens
catcaatgtcacact

SEQ ID NO: 10674 - DNA, 15 bp, Homo sapiens
ccatcaatgtcacac

SEQ ID NO: 10675 - DNA, 15 bp, Homo sapiens
tccatcaatgtcaca

SEQ ID NO: 10676 - DNA, 15 bp, Homo sapiens
gtccatcaatgtcac

SEQ ID NO: 10677 - DNA, 15 bp, Homo sapiens
agtccatcaatgtca

SEQ ID NO: 10678 - DNA, 15 bp, Homo sapiens
aagtccatcaatgtc

SEQ ID NO: 10679 - DNA, 15 bp, Homo sapiens
taagtccatcaatgt

SEQ ID NO: 10680 - DNA, 15 bp, Homo sapiens
ttaagtccatcaatg

SEQ ID NO: 10681 - DNA, 15 bp, Homo sapiens
cttaagtccatcaat

SEQ ID NO: 10682 - DNA, 15 bp, Homo sapiens
tcttaagtccatcaa

SEQ ID NO: 10683 - DNA, 15 bp, Homo sapiens
ttcttaagtccatca

SEQ ID NO: 10684 - DNA, 15 bp, Homo sapiens
attcttaagtccatc

SEQ ID NO: 10685 - DNA, 15 bp, Homo sapiens
aattcttaagtccat

SEQ ID NO: 10686 - DNA, 15 bp, Homo sapiens
aaattcttaagtcca

SEQ ID NO: 10687 - DNA, 15 bp, Homo sapiens
gaaattcttaagtcc

SEQ ID NO: 10688 - DNA, 15 bp, Homo sapiens
agaaattcttaagtc

SEQ ID NO: 10689 - DNA, 15 bp, Homo sapiens
aagaaattcttaagt

SEQ ID NO: 10690 - DNA, 15 bp, Homo sapiens
taagaaattcttaag

SEQ ID NO: 10691 - DNA, 15 bp, Homo sapiens
ttaagaaattcttaa

SEQ ID NO: 10692 - DNA, 15 bp, Homo sapiens
tttaagaaattctta

SEQ ID NO: 10693 - DNA, 15 bp, Homo sapiens
ttttaagaaattctt

SEQ ID NO: 10694 - DNA, 15 bp, Homo sapiens
attttaagaaattct

SEQ ID NO: 10695 - DNA, 15 bp, Homo sapiens
tattttaagaaattc

SEQ ID NO: 10696 - DNA, 15 bp, Homo sapiens
gtattttaagaaatt

SEQ ID NO: 10697 - DNA, 15 bp, Homo sapiens
agtattttaagaaat

SEQ ID NO: 10698 - DNA, 15 bp, Homo sapiens
cagtattttaagaaa

SEQ ID NO: 10699 - DNA, 15 bp, Homo sapiens
acagtattttaagaa

SEQ ID NO: 10700 - DNA, 15 bp, Homo sapiens
gacagtattttaaga

SEQ ID NO: 10701 - DNA, 15 bp, Homo sapiens
agacagtattttaag

SEQ ID NO: 10702 - DNA, 15 bp, Homo sapiens
aagacagtattttaa

SEQ ID NO: 10703 - DNA, 15 bp, Homo sapiens
taagacagtatttta

SEQ ID NO: 10704 - DNA, 15 bp, Homo sapiens
ttaagacagtatttt

SEQ ID NO: 10705 - DNA, 15 bp, Homo sapiens
cttaagacagtattt

SEQ ID NO: 10706 - DNA, 15 bp, Homo sapiens
gcttaagacagtatt

SEQ ID NO: 10707 - DNA, 15 bp, Homo sapiens
agcttaagacagtat

SEQ ID NO: 10708 - DNA, 15 bp, Homo sapiens
cagcttaagacagta

SEQ ID NO: 10709 - DNA, 15 bp, Homo sapiens
ccagcttaagacagt

SEQ ID NO: 10710 - DNA, 15 bp, Homo sapiens
gccagcttaagacag

SEQ ID NO: 10711 - DNA, 15 bp, Homo sapiens
tgccagcttaagaca

SEQ ID NO: 10712 - DNA, 15 bp, Homo sapiens
ttgccagcttaagac

SEQ ID NO: 10713 - DNA, 15 bp, Homo sapiens
tttgccagcttaaga

SEQ ID NO: 10714 - DNA, 15 bp, Homo sapiens
ttttgccagcttaag

SEQ ID NO: 10715 - DNA, 15 bp, Homo sapiens
gttttgccagcttaa

SEQ ID NO: 10716 - DNA, 15 bp, Homo sapiens
agttttgccagctta

SEQ ID NO: 10717 - DNA, 15 bp, Homo sapiens
gagttttgccagctt

SEQ ID NO: 10718 - DNA, 15 bp, Homo sapiens
ggagttttgccagct

SEQ ID NO: 10719 - DNA, 15 bp, Homo sapiens
aggagttttgccagc

SEQ ID NO: 10720 - DNA, 15 bp, Homo sapiens
caggagttttgccag

SEQ ID NO: 10721 - DNA, 15 bp, Homo sapiens
ccaggagttttgcca

SEQ ID NO: 10722 - DNA, 15 bp, Homo sapiens
gccaggagttttgcc

SEQ ID NO: 10723 - DNA, 15 bp, Homo sapiens
tgccaggagttttgc

SEQ ID NO: 10724 - DNA, 15 bp, Homo sapiens
atgccaggagttttg

SEQ ID NO: 10725 - DNA, 15 bp, Homo sapiens
gatgccaggagtttt

SEQ ID NO: 10726 - DNA, 15 bp, Homo sapiens
ggatgccaggagttt

SEQ ID NO: 10727 - DNA, 15 bp, Homo sapiens
aggatgccaggagtt

SEQ ID NO: 10728 - DNA, 15 bp, Homo sapiens
gaggatgccaggagt

SEQ ID NO: 10729 - DNA, 15 bp, Homo sapiens
ggaggatgccaggag

SEQ ID NO: 10730 - DNA, 15 bp, Homo sapiens
tggaggatgccagga

SEQ ID NO: 10731 - DNA, 15 bp, Homo sapiens
gtggaggatgccagg

SEQ ID NO: 10732 - DNA, 15 bp, Homo sapiens
ggtggaggatgccag

SEQ ID NO: 10733 - DNA, 15 bp, Homo sapiens
aggtggaggatgcca

SEQ ID NO: 10734 - DNA, 15 bp, Homo sapiens
caggtggaggatgcc

SEQ ID NO: 10735 - DNA, 15 bp, Homo sapiens
tcaggtggaggatgc

SEQ ID NO: 10736 - DNA, 15 bp, Homo sapiens
gtcaggtggaggatg

SEQ ID NO: 10737 - DNA, 15 bp, Homo sapiens
tgtcaggtggaggat

SEQ ID NO: 10738 - DNA, 15 bp, Homo sapiens
atgtcaggtggagga

SEQ ID NO: 10739 - DNA, 15 bp, Homo sapiens
tatgtcaggtggagg

SEQ ID NO: 10740 - DNA, 15 bp, Homo sapiens
ttatgtcaggtggag

SEQ ID NO: 10741 - DNA, 15 bp, Homo sapiens
tttatgtcaggtgga

SEQ ID NO: 10742 - DNA, 15 bp, Homo sapiens
gtttatgtcaggtgg

SEQ ID NO: 10743 - DNA, 15 bp, Homo sapiens
ggtttatgtcaggtg

SEQ ID NO: 10744 - DNA, 15 bp, Homo sapiens
tggtttatgtcaggt

SEQ ID NO: 10745 - DNA, 15 bp, Homo sapiens
ctggtttatgtcagg

SEQ ID NO: 10746 - DNA, 15 bp, Homo sapiens
actggtttatgtcag

SEQ ID NO: 10747 - DNA, 15 bp, Homo sapiens
aactggtttatgtca

SEQ ID NO: 10748 - DNA, 15 bp, Homo sapiens
gaactggtttatgtc

SEQ ID NO: 10749 - DNA, 15 bp, Homo sapiens
tgaactggtttatgt

SEQ ID NO: 10750 - DNA, 15 bp, Homo sapiens
gtgaactggtttatg

SEQ ID NO: 10751 - DNA, 15 bp, Homo sapiens
tgtgaactggtttat

SEQ ID NO: 10752 - DNA, 15 bp, Homo sapiens
ctgtgaactggttta

SEQ ID NO: 10753 - DNA, 15 bp, Homo sapiens
tctgtgaactggttt

SEQ ID NO: 10754 - DNA, 15 bp, Homo sapiens
ttctgtgaactggtt

SEQ ID NO: 10755 - DNA, 15 bp, Homo sapiens
gttctgtgaactggt

SEQ ID NO: 10756 - DNA, 15 bp, Homo sapiens
tgttctgtgaactgg

SEQ ID NO: 10757 - DNA, 15 bp, Homo sapiens
atgttctgtgaactg

SEQ ID NO: 10758 - DNA, 15 bp, Homo sapiens
aatgttctgtgaact

SEQ ID NO: 10759 - DNA, 15 bp, Homo sapiens
gaatgttctgtgaac

SEQ ID NO: 10760 - DNA, 15 bp, Homo sapiens
ggaatgttctgtgaa

SEQ ID NO: 10761 - DNA, 15 bp, Homo sapiens
tggaatgttctgtga

SEQ ID NO: 10762 - DNA, 15 bp, Homo sapiens
ctggaatgttctgtg

SEQ ID NO: 10763 - DNA, 15 bp, Homo sapiens
gctggaatgttctgt

SEQ ID NO: 10764 - DNA, 15 bp, Homo sapiens
ggctggaatgttctg

SEQ ID NO: 10765 - DNA, 15 bp, Homo sapiens
aggctggaatgttct

SEQ ID NO: 10766 - DNA, 15 bp, Homo sapiens
taggctggaatgttc

SEQ ID NO: 10767 - DNA, 15 bp, Homo sapiens
ctaggctggaatgtt

SEQ ID NO: 10768 - DNA, 15 bp, Homo sapiens
tctaggctggaatgt

SEQ ID NO: 10769 - DNA, 15 bp, Homo sapiens
atctaggctggaatg

SEQ ID NO: 10770 - DNA, 15 bp, Homo sapiens
gatctaggctggaat

SEQ ID NO: 10771 - DNA, 15 bp, Homo sapiens
agatctaggctggaa

SEQ ID NO: 10772 - DNA, 15 bp, Homo sapiens
cagatctaggctgga

SEQ ID NO: 10773 - DNA, 15 bp, Homo sapiens
tcagatctaggctgg

SEQ ID NO: 10774 - DNA, 15 bp, Homo sapiens
ttcagatctaggctg

SEQ ID NO: 10775 - DNA, 15 bp, Homo sapiens
tttcagatctaggct

SEQ ID NO: 10776 - DNA, 15 bp, Homo sapiens
atttcagatctaggc

SEQ ID NO: 10777 - DNA, 15 bp, Homo sapiens
catttcagatctagg

SEQ ID NO: 10778 - DNA, 15 bp, Homo sapiens
ccatttcagatctag

SEQ ID NO: 10779 - DNA, 15 bp, Homo sapiens
accatttcagatcta

SEQ ID NO: 10780 - DNA, 15 bp, Homo sapiens
taccatttcagatct

SEQ ID NO: 10781 - DNA, 15 bp, Homo sapiens
ttaccatttcagatc

SEQ ID NO: 10782 - DNA, 15 bp, Homo sapiens
attaccatttcagat

SEQ ID NO: 10783 - DNA, 15 bp, Homo sapiens
aattaccatttcaga

SEQ ID NO: 10784 - DNA, 15 bp, Homo sapiens
aaattaccatttcag

SEQ ID NO: 10785 - DNA, 15 bp, Homo sapiens
aaaattaccatttca

SEQ ID NO: 10786 - DNA, 15 bp, Homo sapiens
aaaaattaccatttc

SEQ ID NO: 10787 - DNA, 15 bp, Homo sapiens
aaaaaattaccattt

SEQ ID NO: 10788 - DNA, 15 bp, Homo sapiens
aaaaaaattaccatt

SEQ ID NO: 10789 - DNA, 15 bp, Homo sapiens
caaaaaaattaccat

SEQ ID NO: 10790 - DNA, 15 bp, Homo sapiens
ccaaaaaaattacca

SEQ ID NO: 10791 - DNA, 15 bp, Homo sapiens
tccaaaaaaattacc

SEQ ID NO: 10792 - DNA, 15 bp, Homo sapiens
ttccaaaaaaattac

SEQ ID NO: 10793 - DNA, 15 bp, Homo sapiens
gttccaaaaaaatta

SEQ ID NO: 10794 - DNA, 15 bp, Homo sapiens
agttccaaaaaaatt

SEQ ID NO: 10795 - DNA, 15 bp, Homo sapiens
aagttccaaaaaaat

SEQ ID NO: 10796 - DNA, 15 bp, Homo sapiens
aaagttccaaaaaaa

SEQ ID NO: 10797 - DNA, 15 bp, Homo sapiens
caaagttccaaaaaa

SEQ ID NO: 10798 - DNA, 15 bp, Homo sapiens
ccaaagttccaaaaa

SEQ ID NO: 10799 - DNA, 15 bp, Homo sapiens
accaaagttccaaaa

SEQ ID NO: 10800 - DNA, 15 bp, Homo sapiens
aaccaaagttccaaa

SEQ ID NO: 10801 - DNA, 15 bp, Homo sapiens
caaccaaagttccaa

SEQ ID NO: 10802 - DNA, 15 bp, Homo sapiens
ccaaccaaagttcca

SEQ ID NO: 10803 - DNA, 15 bp, Homo sapiens
accaaccaaagttcc

SEQ ID NO: 10804 - DNA, 15 bp, Homo sapiens
aaccaaccaaagttc

SEQ ID NO: 10805 - DNA, 15 bp, Homo sapiens
aaaccaaccaaagtt

SEQ ID NO: 10806 - DNA, 15 bp, Homo sapiens
aaaaccaaccaaagt

SEQ ID NO: 10807 - DNA, 15 bp, Homo sapiens
taaaaccaaccaaag

SEQ ID NO: 10808 - DNA, 15 bp, Homo sapiens
ataaaaccaaccaaa

SEQ ID NO: 10809 - DNA, 15 bp, Homo sapiens
tataaaaccaaccaa

SEQ ID NO: 10810 - DNA, 15 bp, Homo sapiens
ttataaaaccaacca

SEQ ID NO: 10811 - DNA, 15 bp, Homo sapiens
gttataaaaccaacc

SEQ ID NO: 10812 - DNA, 15 bp, Homo sapiens
agttataaaaccaac

SEQ ID NO: 10813 - DNA, 15 bp, Homo sapiens
aagttataaaaccaa

SEQ ID NO: 10814 - DNA, 15 bp, Homo sapiens
caagttataaaacca

SEQ ID NO: 10815 - DNA, 15 bp, Homo sapiens
acaagttataaaacc

SEQ ID NO: 10816 - DNA, 15 bp, Homo sapiens
gacaagttataaaac

SEQ ID NO: 10817 - DNA, 15 bp, Homo sapiens
tgacaagttataaaa

SEQ ID NO: 10818 - DNA, 15 bp, Homo sapiens
gtgacaagttataaa

SEQ ID NO: 10819 - DNA, 15 bp, Homo sapiens
agtgacaagttataa

SEQ ID NO: 10820 - DNA, 15 bp, Homo sapiens
cagtgacaagttata

SEQ ID NO: 10821 - DNA, 15 bp, Homo sapiens
tcagtgacaagttat

SEQ ID NO: 10822 - DNA, 15 bp, Homo sapiens
ttcagtgacaagtta

SEQ ID NO: 10823 - DNA, 15 bp, Homo sapiens
cttcagtgacaagtt

SEQ ID NO: 10824 - DNA, 15 bp, Homo sapiens
acttcagtgacaagt

SEQ ID NO: 10825 - DNA, 15 bp, Homo sapiens
tacttcagtgacaag

SEQ ID NO: 10826 - DNA, 15 bp, Homo sapiens
ttacttcagtgacaa

SEQ ID NO: 10827 - DNA, 15 bp, Homo sapiens
gttacttcagtgaca

SEQ ID NO: 10828 - DNA, 15 bp, Homo sapiens
ggttacttcagtgac

SEQ ID NO: 10829 - DNA, 15 bp, Homo sapiens
tggttacttcagtga

SEQ ID NO: 10830 - DNA, 15 bp, Homo sapiens
atggttacttcagtg

SEQ ID NO: 10831 - DNA, 15 bp, Homo sapiens
aatggttacttcagt

SEQ ID NO: 10832 - DNA, 15 bp, Homo sapiens
gaatggttacttcag

SEQ ID NO: 10833 - DNA, 15 bp, Homo sapiens
ggaatggttacttca

SEQ ID NO: 10834 - DNA, 15 bp, Homo sapiens
gggaatggttacttc

SEQ ID NO: 10835 - DNA, 15 bp, Homo sapiens
agggaatggttactt

SEQ ID NO: 10836 - DNA, 15 bp, Homo sapiens
gagggaatggttact

SEQ ID NO: 10837 - DNA, 15 bp, Homo sapiens
ggagggaatggttac

SEQ ID NO: 10838 - DNA, 15 bp, Homo sapiens
tggagggaatggtta

SEQ ID NO: 10839 - DNA, 15 bp, Homo sapiens
ctggagggaatggtt

SEQ ID NO: 10840 - DNA, 15 bp, Homo sapiens
actggagggaatggt

SEQ ID NO: 10841 - DNA, 15 bp, Homo sapiens
aactggagggaatgg

SEQ ID NO: 10842 - DNA, 15 bp, Homo sapiens
gaactggagggaatg

SEQ ID NO: 10843 - DNA, 15 bp, Homo sapiens
ggaactggagggaat

SEQ ID NO: 10844 - DNA, 15 bp, Homo sapiens
aggaactggagggaa

SEQ ID NO: 10845 - DNA, 15 bp, Homo sapiens
gaggaactggaggga

SEQ ID NO: 10846 - DNA, 15 bp, Homo sapiens
agaggaactggaggg

SEQ ID NO: 10847 - DNA, 15 bp, Homo sapiens
cagaggaactggagg

SEQ ID NO: 10848 - DNA, 15 bp, Homo sapiens
gcagaggaactggag

SEQ ID NO: 10849 - DNA, 15 bp, Homo sapiens
ggcagaggaactgga

SEQ ID NO: 10850 - DNA, 15 bp, Homo sapiens
aggcagaggaactgg

SEQ ID NO: 10851 - DNA, 15 bp, Homo sapiens
aaggcagaggaactg

SEQ ID NO: 10852 - DNA, 15 bp, Homo sapiens
caaggcagaggaact

SEQ ID NO: 10853 - DNA, 15 bp, Homo sapiens
ccaaggcagaggaac

SEQ ID NO: 10854 - DNA, 15 bp, Homo sapiens
accaaggcagaggaa

SEQ ID NO: 10855 - DNA, 15 bp, Homo sapiens
aaccaaggcagagga

SEQ ID NO: 10856 - DNA, 15 bp, Homo sapiens
aaaccaaggcagagg

SEQ ID NO: 10857 - DNA, 15 bp, Homo sapiens
taaaccaaggcagag

SEQ ID NO: 10858 - DNA, 15 bp, Homo sapiens
gtaaaccaaggcaga

SEQ ID NO: 10859 - DNA, 15 bp, Homo sapiens
ggtaaaccaaggcag

SEQ ID NO: 10860 - DNA, 15 bp, Homo sapiens
aggtaaaccaaggca

SEQ ID NO: 10861 - DNA, 15 bp, Homo sapiens
taggtaaaccaaggc

SEQ ID NO: 10862 - DNA, 15 bp, Homo sapiens
ttaggtaaaccaagg

SEQ ID NO: 10863 - DNA, 15 bp, Homo sapiens
tttaggtaaaccaag

SEQ ID NO: 10864 - DNA, 15 bp, Homo sapiens
ctttaggtaaaccaa

SEQ ID NO: 10865 - DNA, 15 bp, Homo sapiens
cctttaggtaaacca

SEQ ID NO: 10866 - DNA, 15 bp, Homo sapiens
ccctttaggtaaacc

SEQ ID NO: 10867 - DNA, 15 bp, Homo sapiens
tccctttaggtaaac

SEQ ID NO: 10868 - DNA, 15 bp, Homo sapiens
atccctttaggtaaa

SEQ ID NO: 10869 - DNA, 15 bp, Homo sapiens
aatccctttaggtaa

SEQ ID NO: 10870 - DNA, 15 bp, Homo sapiens
aaatccctttaggta

SEQ ID NO: 10871 - DNA, 15 bp, Homo sapiens
aaaatccctttaggt

SEQ ID NO: 10872 - DNA, 15 bp, Homo sapiens
caaaatccctttagg

SEQ ID NO: 10873 - DNA, 15 bp, Homo sapiens
ccaaaatccctttag

SEQ ID NO: 10874 - DNA, 15 bp, Homo sapiens
accaaaatcccttta

SEQ ID NO: 10875 - DNA, 15 bp, Homo sapiens
caccaaaatcccttt

SEQ ID NO: 10876 - DNA, 15 bp, Homo sapiens
acaccaaaatccctt

SEQ ID NO: 10877 - DNA, 15 bp, Homo sapiens
aacaccaaaatccct

SEQ ID NO: 10878 - DNA, 15 bp, Homo sapiens
gaacaccaaaatccc

SEQ ID NO: 10879 - DNA, 15 bp, Homo sapiens
ggaacaccaaaatcc

SEQ ID NO: 10880 - DNA, 15 bp, Homo sapiens
aggaacaccaaaatc

SEQ ID NO: 10881 - DNA, 15 bp, Homo sapiens
caggaacaccaaaat

SEQ ID NO: 10882 - DNA, 15 bp, Homo sapiens
acaggaacaccaaaa

SEQ ID NO: 10883 - DNA, 15 bp, Homo sapiens
cacaggaacaccaaa

SEQ ID NO: 10884 - DNA, 15 bp, Homo sapiens
acacaggaacaccaa

SEQ ID NO: 10885 - DNA, 15 bp, Homo sapiens
cacacaggaacacca

SEQ ID NO: 10886 - DNA, 15 bp, Homo sapiens
acacacaggaacacc

SEQ ID NO: 10887 - DNA, 15 bp, Homo sapiens
cacacacaggaacac

SEQ ID NO: 10888 - DNA, 15 bp, Homo sapiens
tcacacacaggaaca

SEQ ID NO: 10889 - DNA, 15 bp, Homo sapiens
gtcacacacaggaac

SEQ ID NO: 10890 - DNA, 15 bp, Homo sapiens
agtcacacacaggaa

SEQ ID NO: 10891 - DNA, 15 bp, Homo sapiens
cagtcacacacagga

SEQ ID NO: 10892 - DNA, 15 bp, Homo sapiens
ccagtcacacacagg

SEQ ID NO: 10893 - DNA, 15 bp, Homo sapiens
tccagtcacacacag

SEQ ID NO: 10894 - DNA, 15 bp, Homo sapiens
ttccagtcacacaca

SEQ ID NO: 10895 - DNA, 15 bp, Homo sapiens
cttccagtcacacac

SEQ ID NO: 10896 - DNA, 15 bp, Homo sapiens
acttccagtcacaca

SEQ ID NO: 10897 - DNA, 15 bp, Homo sapiens
cacttccagtcacac

SEQ ID NO: 10898 - DNA, 15 bp, Homo sapiens
ccacttccagtcaca

SEQ ID NO: 10899 - DNA, 15 bp, Homo sapiens
gccacttccagtcac

SEQ ID NO: 10900 - DNA, 15 bp, Homo sapiens
agccacttccagtca

SEQ ID NO: 10901 - DNA, 15 bp, Homo sapiens
cagccacttccagtc

SEQ ID NO: 10902 - DNA, 15 bp, Homo sapiens
acagccacttccagt

SEQ ID NO: 10903 - DNA, 15 bp, Homo sapiens
gacagccacttccag

SEQ ID NO: 10904 - DNA, 15 bp, Homo sapiens
agacagccacttcca

SEQ ID NO: 10905 - DNA, 15 bp, Homo sapiens
gagacagccacttcc

SEQ ID NO: 10906 - DNA, 15 bp, Homo sapiens
agagacagccacttc

SEQ ID NO: 10907 - DNA, 15 bp, Homo sapiens
tagagacagccactt

SEQ ID NO: 10908 - DNA, 15 bp, Homo sapiens
atagagacagccact

SEQ ID NO: 10909 - DNA, 15 bp, Homo sapiens
aatagagacagccac

SEQ ID NO: 10910 - DNA, 15 bp, Homo sapiens
caatagagacagcca

SEQ ID NO: 10911 - DNA, 15 bp, Homo sapiens
tcaatagagacagcc

SEQ ID NO: 10912 - DNA, 15 bp, Homo sapiens
gtcaatagagacagc

SEQ ID NO: 10913 - DNA, 15 bp, Homo sapiens
agtcaatagagacag

SEQ ID NO: 10914 - DNA, 15 bp, Homo sapiens
tagtcaatagagaca

SEQ ID NO: 10915 - DNA, 15 bp, Homo sapiens
ctagtcaatagagac

SEQ ID NO: 10916 - DNA, 15 bp, Homo sapiens
cctagtcaatagaga

SEQ ID NO: 10917 - DNA, 15 bp, Homo sapiens
tcctagtcaatagag

SEQ ID NO: 10918 - DNA, 15 bp, Homo sapiens
ttcctagtcaataga

SEQ ID NO: 10919 - DNA, 15 bp, Homo sapiens
cttcctagtcaatag

SEQ ID NO: 10920 - DNA, 15 bp, Homo sapiens
tcttcctagtcaata

SEQ ID NO: 10921 - DNA, 15 bp, Homo sapiens
ttcttcctagtcaat

SEQ ID NO: 10922 - DNA, 15 bp, Homo sapiens
gttcttcctagtcaa

SEQ ID NO: 10923 - DNA, 15 bp, Homo sapiens
agttcttcctagtca

SEQ ID NO: 10924 - DNA, 15 bp, Homo sapiens
cagttcttcctagtc

SEQ ID NO: 10925 - DNA, 15 bp, Homo sapiens
ccagttcttcctagt

SEQ ID NO: 10926 - DNA, 15 bp, Homo sapiens
accagttcttcctag

SEQ ID NO: 10927 - DNA, 15 bp, Homo sapiens
caccagttcttccta

SEQ ID NO: 10928 - DNA, 15 bp, Homo sapiens
tcaccagttcttcct

SEQ ID NO: 10929 - DNA, 15 bp, Homo sapiens
ctcaccagttcttcc

SEQ ID NO: 10930 - DNA, 15 bp, Homo sapiens
tctcaccagttcttc

SEQ ID NO: 10931 - DNA, 15 bp, Homo sapiens
ttctcaccagttctt

SEQ ID NO: 10932 - DNA, 15 bp, Homo sapiens
cttctcaccagttct

SEQ ID NO: 10933 - DNA, 15 bp, Homo sapiens
acttctcaccagttc

SEQ ID NO: 10934 - DNA, 15 bp, Homo sapiens
cacttctcaccagtt

SEQ ID NO: 10935 - DNA, 15 bp, Homo sapiens
ccacttctcaccagt

SEQ ID NO: 10936 - DNA, 15 bp, Homo sapiens
cccacttctcaccag

SEQ ID NO: 10937 - DNA, 15 bp, Homo sapiens
tcccacttctcacca

SEQ ID NO: 10938 - DNA, 15 bp, Homo sapiens
gtcccacttctcacc

SEQ ID NO: 10939 - DNA, 15 bp, Homo sapiens
ggtcccacttctcac

SEQ ID NO: 10940 - DNA, 15 bp, Homo sapiens
tggtcccacttctca

SEQ ID NO: 10941 - DNA, 15 bp, Homo sapiens
gtggtcccacttctc

SEQ ID NO: 10942 - DNA, 15 bp, Homo sapiens
tgtggtcccacttct

SEQ ID NO: 10943 - DNA, 15 bp, Homo sapiens
ctgtggtcccacttc

SEQ ID NO: 10944 - DNA, 15 bp, Homo sapiens
actgtggtcccactt

SEQ ID NO: 10945 - DNA, 15 bp, Homo sapiens
cactgtggtcccact

SEQ ID NO: 10946 - DNA, 15 bp, Homo sapiens
acactgtggtcccac

SEQ ID NO: 10947 - DNA, 15 bp, Homo sapiens
tacactgtggtccca

SEQ ID NO: 10948 - DNA, 15 bp, Homo sapiens
atacactgtggtccc

SEQ ID NO: 10949 - DNA, 15 bp, Homo sapiens
aatacactgtggtcc

SEQ ID NO: 10950 - DNA, 15 bp, Homo sapiens
gaatacactgtggtc

SEQ ID NO: 10951 - DNA, 15 bp, Homo sapiens
tgaatacactgtggt

SEQ ID NO: 10952 - DNA, 15 bp, Homo sapiens
ctgaatacactgtgg

SEQ ID NO: 10953 - DNA, 15 bp, Homo sapiens
cctgaatacactgtg

SEQ ID NO: 10954 - DNA, 15 bp, Homo sapiens
tcctgaatacactgt

SEQ ID NO: 10955 - DNA, 15 bp, Homo sapiens
atcctgaatacactg

SEQ ID NO: 10956 - DNA, 15 bp, Homo sapiens
gatcctgaatacact

SEQ ID NO: 10957 - DNA, 15 bp, Homo sapiens
tgatcctgaatacac

SEQ ID NO: 10958 - DNA, 15 bp, Homo sapiens
ttgatcctgaataca

SEQ ID NO: 10959 - DNA, 15 bp, Homo sapiens
tttgatcctgaatac

SEQ ID NO: 10960 - DNA, 15 bp, Homo sapiens
ctttgatcctgaata

SEQ ID NO: 10961 - DNA, 15 bp, Homo sapiens
actttgatcctgaat

SEQ ID NO: 10962 - DNA, 15 bp, Homo sapiens
cactttgatcctgaa

SEQ ID NO: 10963 - DNA, 15 bp, Homo sapiens
ccactttgatcctga

SEQ ID NO: 10964 - DNA, 15 bp, Homo sapiens
cccactttgatcctg

SEQ ID NO: 10965 - DNA, 15 bp, Homo sapiens
ccccactttgatcct

SEQ ID NO: 10966 - DNA, 15 bp, Homo sapiens
tccccactttgatcc

SEQ ID NO: 10967 - DNA, 15 bp, Homo sapiens
ctccccactttgatc

SEQ ID NO: 10968 - DNA, 15 bp, Homo sapiens
cctccccactttgat

SEQ ID NO: 10969 - DNA, 15 bp, Homo sapiens
tcctccccactttga

SEQ ID NO: 10970 - DNA, 15 bp, Homo sapiens
gtcctccccactttg

SEQ ID NO: 10971 - DNA, 15 bp, Homo sapiens
tgtcctccccacttt

SEQ ID NO: 10972 - DNA, 15 bp, Homo sapiens
atgtcctccccactt

SEQ ID NO: 10973 - DNA, 15 bp, Homo sapiens
catgtcctccccact

SEQ ID NO: 10974 - DNA, 15 bp, Homo sapiens
tcatgtcctccccac

SEQ ID NO: 10975 - DNA, 15 bp, Homo sapiens
ctcatgtcctcccca

SEQ ID NO: 10976 - DNA, 15 bp, Homo sapiens
actcatgtcctcccc

SEQ ID NO: 10977 - DNA, 15 bp, Homo sapiens
gactcatgtcctccc

SEQ ID NO: 10978 - DNA, 15 bp, Homo sapiens
ggactcatgtcctcc

SEQ ID NO: 10979 - DNA, 15 bp, Homo sapiens
gggactcatgtcctc

SEQ ID NO: 10980 - DNA, 15 bp, Homo sapiens
agggactcatgtcct

SEQ ID NO: 10981 - DNA, 15 bp, Homo sapiens
aagggactcatgtcc

SEQ ID NO: 10982 - DNA, 15 bp, Homo sapiens
aaagggactcatgtc

SEQ ID NO: 10983 - DNA, 15 bp, Homo sapiens
taaagggactcatgt

SEQ ID NO: 10984 - DNA, 15 bp, Homo sapiens
ttaaagggactcatg

SEQ ID NO: 10985 - DNA, 15 bp, Homo sapiens
cttaaagggactcat

SEQ ID NO: 10986 - DNA, 15 bp, Homo sapiens
tcttaaagggactca

SEQ ID NO: 10987 - DNA, 15 bp, Homo sapiens
ctcttaaagggactc

SEQ ID NO: 10988 - DNA, 15 bp, Homo sapiens
cctcttaaagggact

SEQ ID NO: 10989 - DNA, 15 bp, Homo sapiens
ccctcttaaagggac

SEQ ID NO: 10990 - DNA, 15 bp, Homo sapiens
accctcttaaaggga

SEQ ID NO: 10991 - DNA, 15 bp, Homo sapiens
taccctcttaaaggg

SEQ ID NO: 10992 - DNA, 15 bp, Homo sapiens
ctaccctcttaaagg

SEQ ID NO: 10993 - DNA, 15 bp, Homo sapiens
cctaccctcttaaag

SEQ ID NO: 10994 - DNA, 15 bp, Homo sapiens
acctaccctcttaaa

SEQ ID NO: 10995 - DNA, 15 bp, Homo sapiens
cacctaccctcttaa

SEQ ID NO: 10996 - DNA, 15 bp, Homo sapiens
tcacctaccctctta

SEQ ID NO: 10997 - DNA, 15 bp, Homo sapiens
ttcacctaccctctt

SEQ ID NO: 10998 - DNA, 15 bp, Homo sapiens
attcacctaccctct

SEQ ID NO: 10999 - DNA, 15 bp, Homo sapiens
tattcacctaccctc

SEQ ID NO: 11000 - DNA, 15 bp, Homo sapiens
gtattcacctaccct

SEQ ID NO: 11001 - DNA, 15 bp, Homo sapiens
tgtattcacctaccc

SEQ ID NO: 11002 - DNA, 15 bp, Homo sapiens
gtgtattcacctacc

SEQ ID NO: 11003 - DNA, 15 bp, Homo sapiens
agtgtattcacctac

SEQ ID NO: 11004 - DNA, 15 bp, Homo sapiens
gagtgtattcaccta

SEQ ID NO: 11005 - DNA, 15 bp, Homo sapiens
tgagtgtattcacct

SEQ ID NO: 11006 - DNA, 15 bp, Homo sapiens
ttgagtgtattcacc

SEQ ID NO: 11007 - DNA, 15 bp, Homo sapiens
cttgagtgtattcac

SEQ ID NO: 11008 - DNA, 15 bp, Homo sapiens
acttgagtgtattca

SEQ ID NO: 11009 - DNA, 15 bp, Homo sapiens
gacttgagtgtattc

SEQ ID NO: 11010 - DNA, 15 bp, Homo sapiens
ggacttgagtgtatt

SEQ ID NO: 11011 - DNA, 15 bp, Homo sapiens
gggacttgagtgtat

SEQ ID NO: 11012 - DNA, 15 bp, Homo sapiens
cgggacttgagtgta

SEQ ID NO: 11013 - DNA, 15 bp, Homo sapiens
tcgggacttgagtgt

SEQ ID NO: 11014 - DNA, 15 bp, Homo sapiens
atcgggacttgagtg

SEQ ID NO: 11015 - DNA, 15 bp, Homo sapiens
aatcgggacttgagt

SEQ ID NO: 11016 - DNA, 15 bp, Homo sapiens
gaatcgggacttgag

SEQ ID NO: 11017 - DNA, 15 bp, Homo sapiens
agaatcgggacttga

SEQ ID NO: 11018 - DNA, 15 bp, Homo sapiens
cagaatcgggacttg

SEQ ID NO: 11019 - DNA, 15 bp, Homo sapiens
ccagaatcgggactt

SEQ ID NO: 11020 - DNA, 15 bp, Homo sapiens
accagaatcgggact

SEQ ID NO: 11021 - DNA, 15 bp, Homo sapiens
taccagaatcgggac

SEQ ID NO: 11022 - DNA, 15 bp, Homo sapiens
ataccagaatcggga

SEQ ID NO: 11023 - DNA, 15 bp, Homo sapiens
aataccagaatcggg

SEQ ID NO: 11024 - DNA, 15 bp, Homo sapiens
caataccagaatcgg

SEQ ID NO: 11025 - DNA, 15 bp, Homo sapiens
acaataccagaatcg

SEQ ID NO: 11026 - DNA, 15 bp, Homo sapiens
cacaataccagaatc

SEQ ID NO: 11027 - DNA, 15 bp, Homo sapiens
acacaataccagaat

SEQ ID NO: 11028 - DNA, 15 bp, Homo sapiens
gacacaataccagaa

SEQ ID NO: 11029 - DNA, 15 bp, Homo sapiens
ggacacaataccaga

SEQ ID NO: 11030 - DNA, 15 bp, Homo sapiens
tggacacaataccag

SEQ ID NO: 11031 - DNA, 15 bp, Homo sapiens
ctggacacaatacca

SEQ ID NO: 11032 - DNA, 15 bp, Homo sapiens
tctggacacaatacc

SEQ ID NO: 11033 - DNA, 15 bp, Homo sapiens
ttctggacacaatac

SEQ ID NO: 11034 - DNA, 15 bp, Homo sapiens
attctggacacaata

SEQ ID NO: 11035 - DNA, 15 bp, Homo sapiens
gattctggacacaat

SEQ ID NO: 11036 - DNA, 15 bp, Homo sapiens
ggattctggacacaa

SEQ ID NO: 11037 - DNA, 15 bp, Homo sapiens
tggattctggacaca

SEQ ID NO: 11038 - DNA, 15 bp, Homo sapiens
ttggattctggacac

SEQ ID NO: 11039 - DNA, 15 bp, Homo sapiens
gttggattctggaca

SEQ ID NO: 11040 - DNA, 15 bp, Homo sapiens
tgttggattctggac

SEQ ID NO: 11041 - DNA, 15 bp, Homo sapiens
ctgttggattctgga

SEQ ID NO: 11042 - DNA, 15 bp, Homo sapiens
cctgttggattctgg

SEQ ID NO: 11043 - DNA, 15 bp, Homo sapiens
tcctgttggattctg

SEQ ID NO: 11044 - DNA, 15 bp, Homo sapiens
gtcctgttggattct

SEQ ID NO: 11045 - DNA, 15 bp, Homo sapiens
tgtcctgttggattc

SEQ ID NO: 11046 - DNA, 15 bp, Homo sapiens
ctgtcctgttggatt

SEQ ID NO: 11047 - DNA, 15 bp, Homo sapiens
tctgtcctgttggat

SEQ ID NO: 11048 - DNA, 15 bp, Homo sapiens
atctgtcctgttgga

SEQ ID NO: 11049 - DNA, 15 bp, Homo sapiens
gatctgtcctgttgg

SEQ ID NO: 11050 - DNA, 15 bp, Homo sapiens
tgatctgtcctgttg

SEQ ID NO: 11051 - DNA, 15 bp, Homo sapiens
atgatctgtcctgtt

SEQ ID NO: 11052 - DNA, 15 bp, Homo sapiens
aatgatctgtcctgt

SEQ ID NO: 11053 - DNA, 15 bp, Homo sapiens
aaatgatctgtcctg

SEQ ID NO: 11054 - DNA, 15 bp, Homo sapiens
gaaatgatctgtcct

SEQ ID NO: 11055 - DNA, 15 bp, Homo sapiens
agaaatgatctgtcc

SEQ ID NO: 11056 - DNA, 15 bp, Homo sapiens
cagaaatgatctgtc

SEQ ID NO: 11057 - DNA, 15 bp, Homo sapiens
tcagaaatgatctgt

SEQ ID NO: 11058 - DNA, 15 bp, Homo sapiens
atcagaaatgatctg

SEQ ID NO: 11059 - DNA, 15 bp, Homo sapiens
catcagaaatgatct

SEQ ID NO: 11060 - DNA, 15 bp, Homo sapiens
ccatcagaaatgatc

SEQ ID NO: 11061 - DNA, 15 bp, Homo sapiens
cccatcagaaatgat

SEQ ID NO: 11062 - DNA, 15 bp, Homo sapiens
acccatcagaaatga

SEQ ID NO: 11063 - DNA, 15 bp, Homo sapiens
tacccatcagaaatg

SEQ ID NO: 11064 - DNA, 15 bp, Homo sapiens
atacccatcagaaat

SEQ ID NO: 11065 - DNA, 15 bp, Homo sapiens
catacccatcagaaa

SEQ ID NO: 11066 - DNA, 15 bp, Homo sapiens
ccatacccatcagaa

SEQ ID NO: 11067 - DNA, 15 bp, Homo sapiens
tccatacccatcaga

SEQ ID NO: 11068 - DNA, 15 bp, Homo sapiens
ctccatacccatcag

SEQ ID NO: 11069 - DNA, 15 bp, Homo sapiens
tctccatacccatca

SEQ ID NO: 11070 - DNA, 15 bp, Homo sapiens
gtctccatacccatc

SEQ ID NO: 11071 - DNA, 15 bp, Homo sapiens
tgtctccatacccat

SEQ ID NO: 11072 - DNA, 15 bp, Homo sapiens
atgtctccataccca

SEQ ID NO: 11073 - DNA, 15 bp, Homo sapiens
gatgtctccataccc

SEQ ID NO: 11074 - DNA, 15 bp, Homo sapiens
agatgtctccatacc

SEQ ID NO: 11075 - DNA, 15 bp, Homo sapiens
gagatgtctccatac

SEQ ID NO: 11076 - DNA, 15 bp, Homo sapiens
agagatgtctccata

SEQ ID NO: 11077 - DNA, 15 bp, Homo sapiens
cagagatgtctccat

SEQ ID NO: 11078 - DNA, 15 bp, Homo sapiens
tcagagatgtctcca

SEQ ID NO: 11079 - DNA, 15 bp, Homo sapiens
ttcagagatgtctcc

SEQ ID NO: 11080 - DNA, 15 bp, Homo sapiens
gttcagagatgtctc

SEQ ID NO: 11081 - DNA, 15 bp, Homo sapiens
ggttcagagatgtct

SEQ ID NO: 11082 - DNA, 15 bp, Homo sapiens
aggttcagagatgtc

SEQ ID NO: 11083 - DNA, 15 bp, Homo sapiens
taggttcagagatgt

SEQ ID NO: 11084 - DNA, 15 bp, Homo sapiens
ctaggttcagagatg

SEQ ID NO: 11085 - DNA, 15 bp, Homo sapiens
cctaggttcagagat

SEQ ID NO: 11086 - DNA, 15 bp, Homo sapiens
gcctaggttcagaga

SEQ ID NO: 11087 - DNA, 15 bp, Homo sapiens
tgcctaggttcagag

SEQ ID NO: 11088 - DNA, 15 bp, Homo sapiens
ttgcctaggttcaga

SEQ ID NO: 11089 - DNA, 15 bp, Homo sapiens
attgcctaggttcag

SEQ ID NO: 11090 - DNA, 15 bp, Homo sapiens
cattgcctaggttca

SEQ ID NO: 11091 - DNA, 15 bp, Homo sapiens
tcattgcctaggttc

SEQ ID NO: 11092 - DNA, 15 bp, Homo sapiens
ttcattgcctaggtt

SEQ ID NO: 11093 - DNA, 15 bp, Homo sapiens
gttcattgcctaggt

SEQ ID NO: 11094 - DNA, 15 bp, Homo sapiens
agttcattgcctagg

SEQ ID NO: 11095 - DNA, 15 bp, Homo sapiens
cagttcattgcctag

SEQ ID NO: 11096 - DNA, 15 bp, Homo sapiens
tcagttcattgccta

SEQ ID NO: 11097 - DNA, 15 bp, Homo sapiens
gtcagttcattgcct

SEQ ID NO: 11098 - DNA, 15 bp, Homo sapiens
ggtcagttcattgcc

SEQ ID NO: 11099 - DNA, 15 bp, Homo sapiens
tggtcagttcattgc

SEQ ID NO: 11100 - DNA, 15 bp, Homo sapiens
atggtcagttcattg

SEQ ID NO: 11101 - DNA, 15 bp, Homo sapiens
gatggtcagttcatt

SEQ ID NO: 11102 - DNA, 15 bp, Homo sapiens
ggatggtcagttcat

SEQ ID NO: 11103 - DNA, 15 bp, Homo sapiens
gggatggtcagttca

SEQ ID NO: 11104 - DNA, 15 bp, Homo sapiens
ggggatggtcagttc

SEQ ID NO: 11105 - DNA, 15 bp, Homo sapiens
aggggatggtcagtt

SEQ ID NO: 11106 - DNA, 15 bp, Homo sapiens
caggggatggtcagt

SEQ ID NO: 11107 - DNA, 15 bp, Homo sapiens
ccaggggatggtcag

SEQ ID NO: 11108 - DNA, 15 bp, Homo sapiens
cccaggggatggtca

SEQ ID NO: 11109 - DNA, 15 bp, Homo sapiens
gcccaggggatggtc

SEQ ID NO: 11110 - DNA, 15 bp, Homo sapiens
ggcccaggggatggt

SEQ ID NO: 11111 - DNA, 15 bp, Homo sapiens
aggcccaggggatgg

SEQ ID NO: 11112 - DNA, 15 bp, Homo sapiens
caggcccaggggatg

SEQ ID NO: 11113 - DNA, 15 bp, Homo sapiens
acaggcccaggggat

SEQ ID NO: 11114 - DNA, 15 bp, Homo sapiens
gacaggcccagggga

SEQ ID NO: 11115 - DNA, 15 bp, Homo sapiens
agacaggcccagggg

SEQ ID NO: 11116 - DNA, 15 bp, Homo sapiens
gagacaggcccaggg

SEQ ID NO: 11117 - DNA, 15 bp, Homo sapiens
ggagacaggcccagg

SEQ ID NO: 11118 - DNA, 15 bp, Homo sapiens
aggagacaggcccag

SEQ ID NO: 11119 - DNA, 15 bp, Homo sapiens
aaggagacaggccca

SEQ ID NO: 11120 - DNA, 15 bp, Homo sapiens
gaaggagacaggccc

SEQ ID NO: 11121 - DNA, 15 bp, Homo sapiens
ggaaggagacaggcc

SEQ ID NO: 11122 - DNA, 15 bp, Homo sapiens
gggaaggagacaggc

SEQ ID NO: 11123 - DNA, 15 bp, Homo sapiens
cgggaaggagacagg

SEQ ID NO: 11124 - DNA, 15 bp, Homo sapiens
acgggaaggagacag

SEQ ID NO: 11125 - DNA, 15 bp, Homo sapiens
gacgggaaggagaca

SEQ ID NO: 11126 - DNA, 15 bp, Homo sapiens
agacgggaaggagac

SEQ ID NO: 11127 - DNA, 15 bp, Homo sapiens
cagacgggaaggaga

SEQ ID NO: 11128 - DNA, 15 bp, Homo sapiens
ccagacgggaaggag

SEQ ID NO: 11129 - DNA, 15 bp, Homo sapiens
tccagacgggaagga

SEQ ID NO: 11130 - DNA, 15 bp, Homo sapiens
ttccagacgggaagg

SEQ ID NO: 11131 - DNA, 15 bp, Homo sapiens
cttccagacgggaag

SEQ ID NO: 11132 - DNA, 15 bp, Homo sapiens
ccttccagacgggaa

SEQ ID NO: 11133 - DNA, 15 bp, Homo sapiens
cccttccagacggga

SEQ ID NO: 11134 - DNA, 15 bp, Homo sapiens
ccccttccagacggg

SEQ ID NO: 11135 - DNA, 15 bp, Homo sapiens
gccccttccagacgg

SEQ ID NO: 11136 - DNA, 15 bp, Homo sapiens
agccccttccagacg

SEQ ID NO: 11137 - DNA, 15 bp, Homo sapiens
aagccccttccagac

SEQ ID NO: 11138 - DNA, 15 bp, Homo sapiens
aaagccccttccaga

SEQ ID NO: 11139 - DNA, 15 bp, Homo sapiens
caaagccccttccag

SEQ ID NO: 11140 - DNA, 15 bp, Homo sapiens
acaaagccccttcca

SEQ ID NO: 11141 - DNA, 15 bp, Homo sapiens
tacaaagccccttcc

SEQ ID NO: 11142 - DNA, 15 bp, Homo sapiens
ctacaaagccccttc

SEQ ID NO: 11143 - DNA, 15 bp, Homo sapiens
tctacaaagcccctt

SEQ ID NO: 11144 - DNA, 15 bp, Homo sapiens
gtctacaaagcccct

SEQ ID NO: 11145 - DNA, 15 bp, Homo sapiens
tgtctacaaagcccc

SEQ ID NO: 11146 - DNA, 15 bp, Homo sapiens
gtgtctacaaagccc

SEQ ID NO: 11147 - DNA, 15 bp, Homo sapiens
ggtgtctacaaagcc

SEQ ID NO: 11148 - DNA, 15 bp, Homo sapiens
gggtgtctacaaagc

SEQ ID NO: 11149 - DNA, 15 bp, Homo sapiens
agggtgtctacaaag

SEQ ID NO: 11150 - DNA, 15 bp, Homo sapiens
gagggtgtctacaaa

SEQ ID NO: 11151 - DNA, 15 bp, Homo sapiens
cgagggtgtctacaa

SEQ ID NO: 11152 - DNA, 15 bp, Homo sapiens
ccgagggtgtctaca

SEQ ID NO: 11153 - DNA, 15 bp, Homo sapiens
cccgagggtgtctac

SEQ ID NO: 11154 - DNA, 15 bp, Homo sapiens
ccccgagggtgtcta

SEQ ID NO: 11155 - DNA, 15 bp, Homo sapiens
gccccgagggtgtct

SEQ ID NO: 11156 - DNA, 15 bp, Homo sapiens
tgccccgagggtgtc

SEQ ID NO: 11157 - DNA, 15 bp, Homo sapiens
ttgccccgagggtgt

SEQ ID NO: 11158 - DNA, 15 bp, Homo sapiens
cttgccccgagggtg

SEQ ID NO: 11159 - DNA, 15 bp, Homo sapiens
tcttgccccgagggt

SEQ ID NO: 11160 - DNA, 15 bp, Homo sapiens
atcttgccccgaggg

SEQ ID NO: 11161 - DNA, 15 bp, Homo sapiens
gatcttgccccgagg

SEQ ID NO: 11162 - DNA, 15 bp, Homo sapiens
agatcttgccccgag

SEQ ID NO: 11163 - DNA, 15 bp, Homo sapiens
cagatcttgccccga

SEQ ID NO: 11164 - DNA, 15 bp, Homo sapiens
gcagatcttgccccg

SEQ ID NO: 11165 - DNA, 15 bp, Homo sapiens
ggcagatcttgcccc

SEQ ID NO: 11166 - DNA, 15 bp, Homo sapiens
aggcagatcttgccc

SEQ ID NO: 11167 - DNA, 15 bp, Homo sapiens
aaggcagatcttgcc

SEQ ID NO: 11168 - DNA, 15 bp, Homo sapiens
taaggcagatcttgc

SEQ ID NO: 11169 - DNA, 15 bp, Homo sapiens
ctaaggcagatcttg

SEQ ID NO: 11170 - DNA, 15 bp, Homo sapiens
tctaaggcagatctt

SEQ ID NO: 11171 - DNA, 15 bp, Homo sapiens
atctaaggcagatct

SEQ ID NO: 11172 - DNA, 15 bp, Homo sapiens
catctaaggcagatc

SEQ ID NO: 11173 - DNA, 15 bp, Homo sapiens
ccatctaaggcagat

SEQ ID NO: 11174 - DNA, 15 bp, Homo sapiens
cccatctaaggcaga

SEQ ID NO: 11175 - DNA, 15 bp, Homo sapiens
ccccatctaaggcag

SEQ ID NO: 11176 - DNA, 15 bp, Homo sapiens
gccccatctaaggca

SEQ ID NO: 11177 - DNA, 15 bp, Homo sapiens
agccccatctaaggc

SEQ ID NO: 11178 - DNA, 15 bp, Homo sapiens
cagccccatctaagg

SEQ ID NO: 11179 - DNA, 15 bp, Homo sapiens
gcagccccatctaag

SEQ ID NO: 11180 - DNA, 15 bp, Homo sapiens
ggcagccccatctaa

SEQ ID NO: 11181 - DNA, 15 bp, Homo sapiens
aggcagccccatcta

SEQ ID NO: 11182 - DNA, 15 bp, Homo sapiens
caggcagccccatct

SEQ ID NO: 11183 - DNA, 15 bp, Homo sapiens
tcaggcagccccatc

SEQ ID NO: 11184 - DNA, 15 bp, Homo sapiens
ctcaggcagccccat

SEQ ID NO: 11185 - DNA, 15 bp, Homo sapiens
tctcaggcagcccca

SEQ ID NO: 11186 - DNA, 15 bp, Homo sapiens
ctctcaggcagcccc

SEQ ID NO: 11187 - DNA, 15 bp, Homo sapiens
tctctcaggcagccc

SEQ ID NO: 11188 - DNA, 15 bp, Homo sapiens
ttctctcaggcagcc

SEQ ID NO: 11189 - DNA, 15 bp, Homo sapiens
tttctctcaggcagc

SEQ ID NO: 11190 - DNA, 15 bp, Homo sapiens
ctttctctcaggcag

SEQ ID NO: 11191 - DNA, 15 bp, Homo sapiens
tctttctctcaggca

SEQ ID NO: 11192 - DNA, 15 bp, Homo sapiens
ctctttctctcaggc

SEQ ID NO: 11193 - DNA, 15 bp, Homo sapiens
cctctttctctcagg

SEQ ID NO: 11194 - DNA, 15 bp, Homo sapiens
acctctttctctcag

SEQ ID NO: 11195 - DNA, 15 bp, Homo sapiens
cacctctttctctca

SEQ ID NO: 11196 - DNA, 15 bp, Homo sapiens
ccacctctttctctc

SEQ ID NO: 11197 - DNA, 15 bp, Homo sapiens
gccacctctttctct

SEQ ID NO: 11198 - DNA, 15 bp, Homo sapiens
tgccacctctttctc

SEQ ID NO: 11199 - DNA, 15 bp, Homo sapiens
ctgccacctctttct

SEQ ID NO: 11200 - DNA, 15 bp, Homo sapiens
actgccacctctttc

SEQ ID NO: 11201 - DNA, 15 bp, Homo sapiens
tactgccacctcttt

SEQ ID NO: 11202 - DNA, 15 bp, Homo sapiens
ctactgccacctctt

SEQ ID NO: 11203 - DNA, 15 bp, Homo sapiens
cctactgccacctct

SEQ ID NO: 11204 - DNA, 15 bp, Homo sapiens
gcctactgccacctc

SEQ ID NO: 11205 - DNA, 15 bp, Homo sapiens
ggcctactgccacct

SEQ ID NO: 11206 - DNA, 15 bp, Homo sapiens
aggcctactgccacc

SEQ ID NO: 11207 - DNA, 15 bp, Homo sapiens
aaggcctactgccac

SEQ ID NO: 11208 - DNA, 15 bp, Homo sapiens
caaggcctactgcca

SEQ ID NO: 11209 - DNA, 15 bp, Homo sapiens
gcaaggcctactgcc

SEQ ID NO: 11210 - DNA, 15 bp, Homo sapiens
ggcaaggcctactgc

SEQ ID NO: 11211 - DNA, 15 bp, Homo sapiens
aggcaaggcctactg

SEQ ID NO: 11212 - DNA, 15 bp, Homo sapiens
caggcaaggcctact

SEQ ID NO: 11213 - DNA, 15 bp, Homo sapiens
ccaggcaaggcctac

SEQ ID NO: 11214 - DNA, 15 bp, Homo sapiens
accaggcaaggccta

SEQ ID NO: 11215 - DNA, 15 bp, Homo sapiens
caccaggcaaggcct

SEQ ID NO: 11216 - DNA, 15 bp, Homo sapiens
gcaccaggcaaggcc

SEQ ID NO: 11217 - DNA, 15 bp, Homo sapiens
ggcaccaggcaaggc

SEQ ID NO: 11218 - DNA, 15 bp, Homo sapiens
gggcaccaggcaagg

SEQ ID NO: 11219 - DNA, 15 bp, Homo sapiens
tgggcaccaggcaag

SEQ ID NO: 11220 - DNA, 15 bp, Homo sapiens
gtgggcaccaggcaa

SEQ ID NO: 11221 - DNA, 15 bp, Homo sapiens
tgtgggcaccaggca

SEQ ID NO: 11222 - DNA, 15 bp, Homo sapiens
ctgtgggcaccaggc

SEQ ID NO: 11223 - DNA, 15 bp, Homo sapiens
actgtgggcaccagg

SEQ ID NO: 11224 - DNA, 15 bp, Homo sapiens
cactgtgggcaccag

SEQ ID NO: 11225 - DNA, 15 bp, Homo sapiens
acactgtgggcacca

SEQ ID NO: 11226 - DNA, 15 bp, Homo sapiens
gacactgtgggcacc

SEQ ID NO: 11227 - DNA, 15 bp, Homo sapiens
agacactgtgggcac

SEQ ID NO: 11228 - DNA, 15 bp, Homo sapiens
gagacactgtgggca

SEQ ID NO: 11229 - DNA, 15 bp, Homo sapiens
ggagacactgtgggc

SEQ ID NO: 11230 - DNA, 15 bp, Homo sapiens
gggagacactgtggg

SEQ ID NO: 11231 - DNA, 15 bp, Homo sapiens
agggagacactgtgg

SEQ ID NO: 11232 - DNA, 15 bp, Homo sapiens
cagggagacactgtg

SEQ ID NO: 11233 - DNA, 15 bp, Homo sapiens
gcagggagacactgt

SEQ ID NO: 11234 - DNA, 15 bp, Homo sapiens
agcagggagacactg

SEQ ID NO: 11235 - DNA, 15 bp, Homo sapiens
cagcagggagacact

SEQ ID NO: 11236 - DNA, 15 bp, Homo sapiens
gcagcagggagacac

SEQ ID NO: 11237 - DNA, 15 bp, Homo sapiens
ggcagcagggagaca

SEQ ID NO: 11238 - DNA, 15 bp, Homo sapiens
tggcagcagggagac

SEQ ID NO: 11239 - DNA, 15 bp, Homo sapiens
ttggcagcagggaga

SEQ ID NO: 11240 - DNA, 15 bp, Homo sapiens
cttggcagcagggag

SEQ ID NO: 11241 - DNA, 15 bp, Homo sapiens
tcttggcagcaggga

SEQ ID NO: 11242 - DNA, 15 bp, Homo sapiens
ctcttggcagcaggg

SEQ ID NO: 11243 - DNA, 15 bp, Homo sapiens
gctcttggcagcagg

SEQ ID NO: 11244 - DNA, 15 bp, Homo sapiens
agctcttggcagcag

SEQ ID NO: 11245 - DNA, 15 bp, Homo sapiens
gagctcttggcagca

SEQ ID NO: 11246 - DNA, 15 bp, Homo sapiens
agagctcttggcagc

SEQ ID NO: 11247 - DNA, 15 bp, Homo sapiens
cagagctcttggcag

SEQ ID NO: 11248 - DNA, 15 bp, Homo sapiens
ccagagctcttggca

SEQ ID NO: 11249 - DNA, 15 bp, Homo sapiens
cccagagctcttggc

SEQ ID NO: 11250 - DNA, 15 bp, Homo sapiens
acccagagctcttgg

SEQ ID NO: 11251 - DNA, 15 bp, Homo sapiens
tacccagagctcttg

SEQ ID NO: 11252 - DNA, 15 bp, Homo sapiens
gtacccagagctctt

SEQ ID NO: 11253 - DNA, 15 bp, Homo sapiens
agtacccagagctct

SEQ ID NO: 11254 - DNA, 15 bp, Homo sapiens
cagtacccagagctc

SEQ ID NO: 11255 - DNA, 15 bp, Homo sapiens
tcagtacccagagct

SEQ ID NO: 11256 - DNA, 15 bp, Homo sapiens
ctcagtacccagagc

SEQ ID NO: 11257 - DNA, 15 bp, Homo sapiens
tctcagtacccagag

SEQ ID NO: 11258 - DNA, 15 bp, Homo sapiens
atctcagtacccaga

SEQ ID NO: 11259 - DNA, 15 bp, Homo sapiens
tatctcagtacccag

SEQ ID NO: 11260 - DNA, 15 bp, Homo sapiens
ttatctcagtaccca

SEQ ID NO: 11261 - DNA, 15 bp, Homo sapiens
cttatctcagtaccc

SEQ ID NO: 11262 - DNA, 15 bp, Homo sapiens
gcttatctcagtacc

SEQ ID NO: 11263 - DNA, 15 bp, Homo sapiens
agcttatctcagtac

SEQ ID NO: 11264 - DNA, 15 bp, Homo sapiens
aagcttatctcagta

SEQ ID NO: 11265 - DNA, 15 bp, Homo sapiens
caagcttatctcagt

SEQ ID NO: 11266 - DNA, 15 bp, Homo sapiens
gcaagcttatctcag

SEQ ID NO: 11267 - DNA, 15 bp, Homo sapiens
tgcaagcttatctca

SEQ ID NO: 11268 - DNA, 15 bp, Homo sapiens
gtgcaagcttatctc

SEQ ID NO: 11269 - DNA, 15 bp, Homo sapiens
tgtgcaagcttatct

SEQ ID NO: 11270 - DNA, 15 bp, Homo sapiens
atgtgcaagcttatc

SEQ ID NO: 11271 - DNA, 15 bp, Homo sapiens
aatgtgcaagcttat

SEQ ID NO: 11272 - DNA, 15 bp, Homo sapiens
gaatgtgcaagctta

SEQ ID NO: 11273 - DNA, 15 bp, Homo sapiens
agaatgtgcaagctt

SEQ ID NO: 11274 - DNA, 15 bp, Homo sapiens
gagaatgtgcaagct

SEQ ID NO: 11275 - DNA, 15 bp, Homo sapiens
tgagaatgtgcaagc

SEQ ID NO: 11276 - DNA, 15 bp, Homo sapiens
ttgagaatgtgcaag

SEQ ID NO: 11277 - DNA, 15 bp, Homo sapiens
cttgagaatgtgcaa

SEQ ID NO: 11278 - DNA, 15 bp, Homo sapiens
ccttgagaatgtgca

SEQ ID NO: 11279 - DNA, 15 bp, Homo sapiens
tccttgagaatgtgc

SEQ ID NO: 11280 - DNA, 15 bp, Homo sapiens
atccttgagaatgtg

SEQ ID NO: 11281 - DNA, 15 bp, Homo sapiens
aatccttgagaatgt

SEQ ID NO: 11282 - DNA, 15 bp, Homo sapiens
gaatccttgagaatg

SEQ ID NO: 11283 - DNA, 15 bp, Homo sapiens
agaatccttgagaat

SEQ ID NO: 11284 - DNA, 15 bp, Homo sapiens
cagaatccttgagaa

SEQ ID NO: 11285 - DNA, 15 bp, Homo sapiens
acagaatccttgaga

SEQ ID NO: 11286 - DNA, 15 bp, Homo sapiens
aacagaatccttgag

SEQ ID NO: 11287 - DNA, 15 bp, Homo sapiens
taacagaatccttga

SEQ ID NO: 11288 - DNA, 15 bp, Homo sapiens
ctaacagaatccttg

SEQ ID NO: 11289 - DNA, 15 bp, Homo sapiens
tctaacagaatcctt

SEQ ID NO: 11290 - DNA, 15 bp, Homo sapiens
ctctaacagaatcct

SEQ ID NO: 11291 - DNA, 15 bp, Homo sapiens
tctctaacagaatcc

SEQ ID NO: 11292 - DNA, 15 bp, Homo sapiens
atctctaacagaatc

SEQ ID NO: 11293 - DNA, 15 bp, Homo sapiens
aatctctaacagaat

SEQ ID NO: 11294 - DNA, 15 bp, Homo sapiens
aaatctctaacagaa

SEQ ID NO: 11295 - DNA, 15 bp, Homo sapiens
aaaatctctaacaga

SEQ ID NO: 11296 - DNA, 15 bp, Homo sapiens
caaaatctctaacag

SEQ ID NO: 11297 - DNA, 15 bp, Homo sapiens
tcaaaatctctaaca

SEQ ID NO: 11298 - DNA, 15 bp, Homo sapiens
gtcaaaatctctaac

SEQ ID NO: 11299 - DNA, 15 bp, Homo sapiens
ggtcaaaatctctaa

SEQ ID NO: 11300 - DNA, 15 bp, Homo sapiens
cggtcaaaatctcta

SEQ ID NO: 11301 - DNA, 15 bp, Homo sapiens
gcggtcaaaatctct

SEQ ID NO: 11302 - DNA, 15 bp, Homo sapiens
tgcggtcaaaatctc

SEQ ID NO: 11303 - DNA, 15 bp, Homo sapiens
ctgcggtcaaaatct

SEQ ID NO: 11304 - DNA, 15 bp, Homo sapiens
tctgcggtcaaaatc

SEQ ID NO: 11305 - DNA, 15 bp, Homo sapiens
ctctgcggtcaaaat

SEQ ID NO: 11306 - DNA, 15 bp, Homo sapiens
gctctgcggtcaaaa

SEQ ID NO: 11307 - DNA, 15 bp, Homo sapiens
agctctgcggtcaaa

SEQ ID NO: 11308 - DNA, 15 bp, Homo sapiens
cagctctgcggtcaa

SEQ ID NO: 11309 - DNA, 15 bp, Homo sapiens
ccagctctgcggtca

SEQ ID NO: 11310 - DNA, 15 bp, Homo sapiens
accagctctgcggtc

SEQ ID NO: 11311 - DNA, 15 bp, Homo sapiens
aaccagctctgcggt

SEQ ID NO: 11312 - DNA, 15 bp, Homo sapiens
caaccagctctgcgg

SEQ ID NO: 11313 - DNA, 15 bp, Homo sapiens
acaaccagctctgcg

SEQ ID NO: 11314 - DNA, 15 bp, Homo sapiens
cacaaccagctctgc

SEQ ID NO: 11315 - DNA, 15 bp, Homo sapiens
acacaaccagctctg

SEQ ID NO: 11316 - DNA, 15 bp, Homo sapiens
aacacaaccagctct

SEQ ID NO: 11317 - DNA, 15 bp, Homo sapiens
taacacaaccagctc

SEQ ID NO: 11318 - DNA, 15 bp, Homo sapiens
ttaacacaaccagct

SEQ ID NO: 11319 - DNA, 15 bp, Homo sapiens
tttaacacaaccagc

SEQ ID NO: 11320 - DNA, 15 bp, Homo sapiens
ctttaacacaaccag

SEQ ID NO: 11321 - DNA, 15 bp, Homo sapiens
cctttaacacaacca

SEQ ID NO: 11322 - DNA, 15 bp, Homo sapiens
tcctttaacacaacc

SEQ ID NO: 11323 - DNA, 15 bp, Homo sapiens
atcctttaacacaac

SEQ ID NO: 11324 - DNA, 15 bp, Homo sapiens
tatcctttaacacaa

SEQ ID NO: 11325 - DNA, 15 bp, Homo sapiens
atatcctttaacaca

SEQ ID NO: 11326 - DNA, 15 bp, Homo sapiens
aatatcctttaacac

SEQ ID NO: 11327 - DNA, 15 bp, Homo sapiens
taatatcctttaaca

SEQ ID NO: 11328 - DNA, 15 bp, Homo sapiens
ataatatcctttaac

SEQ ID NO: 11329 - DNA, 15 bp, Homo sapiens
tataatatcctttaa

SEQ ID NO: 11330 - DNA, 15 bp, Homo sapiens
gtataatatccttta

SEQ ID NO: 11331 - DNA, 15 bp, Homo sapiens
tgtataatatccttt

SEQ ID NO: 11332 - DNA, 15 bp, Homo sapiens
ttgtataatatcctt

SEQ ID NO: 11333 - DNA, 15 bp, Homo sapiens
cttgtataatatcct

SEQ ID NO: 11334 - DNA, 15 bp, Homo sapiens
acttgtataatatcc

SEQ ID NO: 11335 - DNA, 15 bp, Homo sapiens
aacttgtataatatc

SEQ ID NO: 11336 - DNA, 15 bp, Homo sapiens
aaacttgtataatat

SEQ ID NO: 11337 - DNA, 15 bp, Homo sapiens
gaaacttgtataata

SEQ ID NO: 11338 - DNA, 15 bp, Homo sapiens
agaaacttgtataat

SEQ ID NO: 11339 - DNA, 15 bp, Homo sapiens
gagaaacttgtataa

SEQ ID NO: 11340 - DNA, 15 bp, Homo sapiens
agagaaacttgtata

SEQ ID NO: 11341 - DNA, 15 bp, Homo sapiens
aagagaaacttgtat

SEQ ID NO: 11342 - DNA, 15 bp, Homo sapiens
aaagagaaacttgta

SEQ ID NO: 11343 - DNA, 15 bp, Homo sapiens
taaagagaaacttgt

SEQ ID NO: 11344 - DNA, 15 bp, Homo sapiens
ttaaagagaaacttg

SEQ ID NO: 11345 - DNA, 15 bp, Homo sapiens
tttaaagagaaactt

SEQ ID NO: 11346 - DNA, 15 bp, Homo sapiens
ctttaaagagaaact

SEQ ID NO: 11347 - DNA, 15 bp, Homo sapiens
gctttaaagagaaac

SEQ ID NO: 11348 - DNA, 15 bp, Homo sapiens
tgctttaaagagaaa

SEQ ID NO: 11349 - DNA, 15 bp, Homo sapiens
atgctttaaagagaa

SEQ ID NO: 11350 - DNA, 15 bp, Homo sapiens
catgctttaaagaga

SEQ ID NO: 11351 - DNA, 15 bp, Homo sapiens
gcatgctttaaagag

SEQ ID NO: 11352 - DNA, 15 bp, Homo sapiens
tgcatgctttaaaga

SEQ ID NO: 11353 - DNA, 15 bp, Homo sapiens
ttgcatgctttaaag

SEQ ID NO: 11354 - DNA, 15 bp, Homo sapiens
attgcatgctttaaa

SEQ ID NO: 11355 - DNA, 15 bp, Homo sapiens
tattgcatgctttaa

SEQ ID NO: 11356 - DNA, 15 bp, Homo sapiens
atattgcatgcttta

SEQ ID NO: 11357 - DNA, 15 bp, Homo sapiens
catattgcatgcttt

SEQ ID NO: 11358 - DNA, 15 bp, Homo sapiens
tcatattgcatgctt

SEQ ID NO: 11359 - DNA, 15 bp, Homo sapiens
ttcatattgcatgct

SEQ ID NO: 11360 - DNA, 15 bp, Homo sapiens
attcatattgcatgc

SEQ ID NO: 11361 - DNA, 15 bp, Homo sapiens
cattcatattgcatg

SEQ ID NO: 11362 - DNA, 15 bp, Homo sapiens
gcattcatattgcat

SEQ ID NO: 11363 - DNA, 15 bp, Homo sapiens
tgcattcatattgca

SEQ ID NO: 11364 - DNA, 15 bp, Homo sapiens
atgcattcatattgc

SEQ ID NO: 11365 - DNA, 15 bp, Homo sapiens
catgcattcatattg

SEQ ID NO: 11366 - DNA, 15 bp, Homo sapiens
tcatgcattcatatt

SEQ ID NO: 11367 - DNA, 15 bp, Homo sapiens
gtcatgcattcatat

SEQ ID NO: 11368 - DNA, 15 bp, Homo sapiens
agtcatgcattcata

SEQ ID NO: 11369 - DNA, 15 bp, Homo sapiens
gagtcatgcattcat

SEQ ID NO: 11370 - DNA, 15 bp, Homo sapiens
ggagtcatgcattca

SEQ ID NO: 11371 - DNA, 15 bp, Homo sapiens
tggagtcatgcattc

SEQ ID NO: 11372 - DNA, 15 bp, Homo sapiens
gtggagtcatgcatt

SEQ ID NO: 11373 - DNA, 15 bp, Homo sapiens
tgtggagtcatgcat

SEQ ID NO: 11374 - DNA, 15 bp, Homo sapiens
ttgtggagtcatgca

SEQ ID NO: 11375 - DNA, 15 bp, Homo sapiens
cttgtggagtcatgc

SEQ ID NO: 11376 - DNA, 15 bp, Homo sapiens
ccttgtggagtcatg

SEQ ID NO: 11377 - DNA, 15 bp, Homo sapiens
gccttgtggagtcat

SEQ ID NO: 11378 - DNA, 15 bp, Homo sapiens
agccttgtggagtca

SEQ ID NO: 11379 - DNA, 15 bp, Homo sapiens
aagccttgtggagtc

SEQ ID NO: 11380 - DNA, 15 bp, Homo sapiens
aaagccttgtggagt

SEQ ID NO: 11381 - DNA, 15 bp, Homo sapiens
gaaagccttgtggag

SEQ ID NO: 11382 - DNA, 15 bp, Homo sapiens
ggaaagccttgtgga

SEQ ID NO: 11383 - DNA, 15 bp, Homo sapiens
aggaaagccttgtgg

SEQ ID NO: 11384 - DNA, 15 bp, Homo sapiens
caggaaagccttgtg

SEQ ID NO: 11385 - DNA, 15 bp, Homo sapiens
acaggaaagccttgt

SEQ ID NO: 11386 - DNA, 15 bp, Homo sapiens
cacaggaaagccttg

SEQ ID NO: 11387 - DNA, 15 bp, Homo sapiens
ccacaggaaagcctt

SEQ ID NO: 11388 - DNA, 15 bp, Homo sapiens
cccacaggaaagcct

SEQ ID NO: 11389 - DNA, 15 bp, Homo sapiens
gcccacaggaaagcc

SEQ ID NO: 11390 - DNA, 15 bp, Homo sapiens
ggcccacaggaaagc

SEQ ID NO: 11391 - DNA, 15 bp, Homo sapiens
aggcccacaggaaag

SEQ ID NO: 11392 - DNA, 15 bp, Homo sapiens
caggcccacaggaaa

SEQ ID NO: 11393 - DNA, 15 bp, Homo sapiens
gcaggcccacaggaa

SEQ ID NO: 11394 - DNA, 15 bp, Homo sapiens
ggcaggcccacagga

SEQ ID NO: 11395 - DNA, 15 bp, Homo sapiens
gggcaggcccacagg

SEQ ID NO: 11396 - DNA, 15 bp, Homo sapiens
tgggcaggcccacag

SEQ ID NO: 11397 - DNA, 15 bp, Homo sapiens
ctgggcaggcccaca

SEQ ID NO: 11398 - DNA, 15 bp, Homo sapiens
tctgggcaggcccac

SEQ ID NO: 11399 - DNA, 15 bp, Homo sapiens
atctgggcaggccca

SEQ ID NO: 11400 - DNA, 15 bp, Homo sapiens
catctgggcaggccc

SEQ ID NO: 11401 - DNA, 15 bp, Homo sapiens
ccatctgggcaggcc

SEQ ID NO: 11402 - DNA, 15 bp, Homo sapiens
tccatctgggcaggc

SEQ ID NO: 11403 - DNA, 15 bp, Homo sapiens
gtccatctgggcagg

SEQ ID NO: 11404 - DNA, 15 bp, Homo sapiens
ggtccatctgggcag

SEQ ID NO: 11405 - DNA, 15 bp, Homo sapiens
aggtccatctgggca

SEQ ID NO: 11406 - DNA, 15 bp, Homo sapiens
caggtccatctgggc

SEQ ID NO: 11407 - DNA, 15 bp, Homo sapiens
ccaggtccatctggg

SEQ ID NO: 11408 - DNA, 15 bp, Homo sapiens
accaggtccatctgg

SEQ ID NO: 11409 - DNA, 15 bp, Homo sapiens
caccaggtccatctg

SEQ ID NO: 11410 - DNA, 15 bp, Homo sapiens
ccaccaggtccatct

SEQ ID NO: 11411 - DNA, 15 bp, Homo sapiens
tccaccaggtccatc

SEQ ID NO: 11412 - DNA, 15 bp, Homo sapiens
atccaccaggtccat

SEQ ID NO: 11413 - DNA, 15 bp, Homo sapiens
catccaccaggtcca

SEQ ID NO: 11414 - DNA, 15 bp, Homo sapiens
gcatccaccaggtcc

SEQ ID NO: 11415 - DNA, 15 bp, Homo sapiens
tgcatccaccaggtc

SEQ ID NO: 11416 - DNA, 15 bp, Homo sapiens
gtgcatccaccaggt

SEQ ID NO: 11417 - DNA, 15 bp, Homo sapiens
ggtgcatccaccagg

SEQ ID NO: 11418 - DNA, 15 bp, Homo sapiens
aggtgcatccaccag

SEQ ID NO: 11419 - DNA, 15 bp, Homo sapiens
gaggtgcatccacca

SEQ ID NO: 11420 - DNA, 15 bp, Homo sapiens
ggaggtgcatccacc

SEQ ID NO: 11421 - DNA, 15 bp, Homo sapiens
tggaggtgcatccac

SEQ ID NO: 11422 - DNA, 15 bp, Homo sapiens
atggaggtgcatcca

SEQ ID NO: 11423 - DNA, 15 bp, Homo sapiens
catggaggtgcatcc

SEQ ID NO: 11424 - DNA, 15 bp, Homo sapiens
ccatggaggtgcatc

SEQ ID NO: 11425 - DNA, 15 bp, Homo sapiens
gccatggaggtgcat

SEQ ID NO: 11426 - DNA, 15 bp, Homo sapiens
agccatggaggtgca

SEQ ID NO: 11427 - DNA, 15 bp, Homo sapiens
cagccatggaggtgc

SEQ ID NO: 11428 - DNA, 15 bp, Homo sapiens
gcagccatggaggtg

SEQ ID NO: 11429 - DNA, 15 bp, Homo sapiens
ggcagccatggaggt

SEQ ID NO: 11430 - DNA, 15 bp, Homo sapiens
tggcagccatggagg

SEQ ID NO: 11431 - DNA, 15 bp, Homo sapiens
atggcagccatggag

SEQ ID NO: 11432 - DNA, 15 bp, Homo sapiens
catggcagccatgga

SEQ ID NO: 11433 - DNA, 15 bp, Homo sapiens
tcatggcagccatgg

SEQ ID NO: 11434 - DNA, 15 bp, Homo sapiens
ctcatggcagccatg

SEQ ID NO: 11435 - DNA, 15 bp, Homo sapiens
actcatggcagccat

SEQ ID NO: 11436 - DNA, 15 bp, Homo sapiens
cactcatggcagcca

SEQ ID NO: 11437 - DNA, 15 bp, Homo sapiens
ccactcatggcagcc

SEQ ID NO: 11438 - DNA, 15 bp, Homo sapiens
accactcatggcagc

SEQ ID NO: 11439 - DNA, 15 bp, Homo sapiens
gaccactcatggcag

SEQ ID NO: 11440 - DNA, 15 bp, Homo sapiens
tgaccactcatggca

SEQ ID NO: 11441 - DNA, 15 bp, Homo sapiens
ctgaccactcatggc

SEQ ID NO: 11442 - DNA, 15 bp, Homo sapiens
actgaccactcatgg

SEQ ID NO: 11443 - DNA, 15 bp, Homo sapiens
cactgaccactcatg

SEQ ID NO: 11444 - DNA, 15 bp, Homo sapiens
tcactgaccactcat

SEQ ID NO: 11445 - DNA, 15 bp, Homo sapiens
gtcactgaccactca

SEQ ID NO: 11446 - DNA, 15 bp, Homo sapiens
tgtcactgaccactc

SEQ ID NO: 11447 - DNA, 15 bp, Homo sapiens
ttgtcactgaccact

SEQ ID NO: 11448 - DNA, 15 bp, Homo sapiens
cttgtcactgaccac

SEQ ID NO: 11449 - DNA, 15 bp, Homo sapiens
tcttgtcactgacca

SEQ ID NO: 11450 - DNA, 15 bp, Homo sapiens
gtcttgtcactgacc

SEQ ID NO: 11451 - DNA, 15 bp, Homo sapiens
tgtcttgtcactgac

SEQ ID NO: 11452 - DNA, 15 bp, Homo sapiens
atgtcttgtcactga

SEQ ID NO: 11453 - DNA, 15 bp, Homo sapiens
tatgtcttgtcactg

SEQ ID NO: 11454 - DNA, 15 bp, Homo sapiens
ctatgtcttgtcact

SEQ ID NO: 11455 - DNA, 15 bp, Homo sapiens
cctatgtcttgtcac

SEQ ID NO: 11456 - DNA, 15 bp, Homo sapiens
gcctatgtcttgtca

SEQ ID NO: 11457 - DNA, 15 bp, Homo sapiens
agcctatgtcttgtc

SEQ ID NO: 11458 - DNA, 15 bp, Homo sapiens
tagcctatgtcttgt

SEQ ID NO: 11459 - DNA, 15 bp, Homo sapiens
ttagcctatgtcttg

SEQ ID NO: 11460 - DNA, 15 bp, Homo sapiens
cttagcctatgtctt

SEQ ID NO: 11461 - DNA, 15 bp, Homo sapiens
ccttagcctatgtct

SEQ ID NO: 11462 - DNA, 15 bp, Homo sapiens
gccttagcctatgtc

SEQ ID NO: 11463 - DNA, 15 bp, Homo sapiens
agccttagcctatgt

SEQ ID NO: 11464 - DNA, 15 bp, Homo sapiens
cagccttagcctatg

SEQ ID NO: 11465 - DNA, 15 bp, Homo sapiens
ccagccttagcctat

SEQ ID NO: 11466 - DNA, 15 bp, Homo sapiens
gccagccttagccta

SEQ ID NO: 11467 - DNA, 15 bp, Homo sapiens
tgccagccttagcct

SEQ ID NO: 11468 - DNA, 15 bp, Homo sapiens
atgccagccttagcc

SEQ ID NO: 11469 - DNA, 15 bp, Homo sapiens
catgccagccttagc

SEQ ID NO: 11470 - DNA, 15 bp, Homo sapiens
ccatgccagccttag

SEQ ID NO: 11471 - DNA, 15 bp, Homo sapiens
cccatgccagcctta

SEQ ID NO: 11472 - DNA, 15 bp, Homo sapiens
ccccatgccagcctt

SEQ ID NO: 11473 - DNA, 15 bp, Homo sapiens
tccccatgccagcct

SEQ ID NO: 11474 - DNA, 15 bp, Homo sapiens
gtccccatgccagcc

SEQ ID NO: 11475 - DNA, 15 bp, Homo sapiens
agtccccatgccagc

SEQ ID NO: 11476 - DNA, 15 bp, Homo sapiens
cagtccccatgccag

SEQ ID NO: 11477 - DNA, 15 bp, Homo sapiens
ccagtccccatgcca

SEQ ID NO: 11478 - DNA, 15 bp, Homo sapiens
tccagtccccatgcc

SEQ ID NO: 11479 - DNA, 15 bp, Homo sapiens
ctccagtccccatgc

SEQ ID NO: 11480 - DNA, 15 bp, Homo sapiens
actccagtccccatg

SEQ ID NO: 11481 - DNA, 15 bp, Homo sapiens
cactccagtccccat

SEQ ID NO: 11482 - DNA, 15 bp, Homo sapiens
gcactccagtcccca

SEQ ID NO: 11483 - DNA, 15 bp, Homo sapiens
tgcactccagtcccc

SEQ ID NO: 11484 - DNA, 15 bp, Homo sapiens
atgcactccagtccc

SEQ ID NO: 11485 - DNA, 15 bp, Homo sapiens
gatgcactccagtcc

SEQ ID NO: 11486 - DNA, 15 bp, Homo sapiens
ggatgcactccagtc

SEQ ID NO: 11487 - DNA, 15 bp, Homo sapiens
gggatgcactccagt

SEQ ID NO: 11488 - DNA, 15 bp, Homo sapiens
tgggatgcactccag

SEQ ID NO: 11489 - DNA, 15 bp, Homo sapiens
ctgggatgcactcca

SEQ ID NO: 11490 - DNA, 15 bp, Homo sapiens
actgggatgcactcc

SEQ ID NO: 11491 - DNA, 15 bp, Homo sapiens
gactgggatgcactc

SEQ ID NO: 11492 - DNA, 15 bp, Homo sapiens
ggactgggatgcact

SEQ ID NO: 11493 - DNA, 15 bp, Homo sapiens
gggactgggatgcac

SEQ ID NO: 11494 - DNA, 15 bp, Homo sapiens
ggggactgggatgca

SEQ ID NO: 11495 - DNA, 15 bp, Homo sapiens
cggggactgggatgc

SEQ ID NO: 11496 - DNA, 15 bp, Homo sapiens
ccggggactgggatg

SEQ ID NO: 11497 - DNA, 15 bp, Homo sapiens
gccggggactgggat

SEQ ID NO: 11498 - DNA, 15 bp, Homo sapiens
ggccggggactggga

SEQ ID NO: 11499 - DNA, 15 bp, Homo sapiens
tggccggggactggg

SEQ ID NO: 11500 - DNA, 15 bp, Homo sapiens
atggccggggactgg

SEQ ID NO: 11501 - DNA, 15 bp, Homo sapiens
gatggccggggactg

SEQ ID NO: 11502 - DNA, 15 bp, Homo sapiens
ggatggccggggact

SEQ ID NO: 11503 - DNA, 15 bp, Homo sapiens
aggatggccggggac

SEQ ID NO: 11504 - DNA, 15 bp, Homo sapiens
gaggatggccgggga

SEQ ID NO: 11505 - DNA, 15 bp, Homo sapiens
agaggatggccgggg

SEQ ID NO: 11506 - DNA, 15 bp, Homo sapiens
aagaggatggccggg

SEQ ID NO: 11507 - DNA, 15 bp, Homo sapiens
caagaggatggccgg

SEQ ID NO: 11508 - DNA, 15 bp, Homo sapiens
acaagaggatggccg

SEQ ID NO: 11509 - DNA, 15 bp, Homo sapiens
cacaagaggatggcc

SEQ ID NO: 11510 - DNA, 15 bp, Homo sapiens
tcacaagaggatggc

SEQ ID NO: 11511 - DNA, 15 bp, Homo sapiens
ttcacaagaggatgg

SEQ ID NO: 11512 - DNA, 15 bp, Homo sapiens
cttcacaagaggatg

SEQ ID NO: 11513 - DNA, 15 bp, Homo sapiens
ccttcacaagaggat

SEQ ID NO: 11514 - DNA, 15 bp, Homo sapiens
gccttcacaagagga

SEQ ID NO: 11515 - DNA, 15 bp, Homo sapiens
agccttcacaagagg

SEQ ID NO: 11516 - DNA, 15 bp, Homo sapiens
cagccttcacaagag

SEQ ID NO: 11517 - DNA, 15 bp, Homo sapiens
acagccttcacaaga

SEQ ID NO: 11518 - DNA, 15 bp, Homo sapiens
gacagccttcacaag

SEQ ID NO: 11519 - DNA, 15 bp, Homo sapiens
tgacagccttcacaa

SEQ ID NO: 11520 - DNA, 15 bp, Homo sapiens
ttgacagccttcaca

SEQ ID NO: 11521 - DNA, 15 bp, Homo sapiens
cttgacagccttcac

SEQ ID NO: 11522 - DNA, 15 bp, Homo sapiens
ccttgacagccttca

SEQ ID NO: 11523 - DNA, 15 bp, Homo sapiens
accttgacagccttc

SEQ ID NO: 11524 - DNA, 15 bp, Homo sapiens
caccttgacagcctt

SEQ ID NO: 11525 - DNA, 15 bp, Homo sapiens
ccaccttgacagcct

SEQ ID NO: 11526 - DNA, 15 bp, Homo sapiens
cccaccttgacagcc

SEQ ID NO: 11527 - DNA, 15 bp, Homo sapiens
ccccaccttgacagc

SEQ ID NO: 11528 - DNA, 15 bp, Homo sapiens
tccccaccttgacag

SEQ ID NO: 11529 - DNA, 15 bp, Homo sapiens
ttccccaccttgaca

SEQ ID NO: 11530 - DNA, 15 bp, Homo sapiens
attccccaccttgac

SEQ ID NO: 11531 - DNA, 15 bp, Homo sapiens
tattccccaccttga

SEQ ID NO: 11532 - DNA, 15 bp, Homo sapiens
ctattccccaccttg

SEQ ID NO: 11533 - DNA, 15 bp, Homo sapiens
actattccccacctt

SEQ ID NO: 11534 - DNA, 15 bp, Homo sapiens
aactattccccacct

SEQ ID NO: 11535 - DNA, 15 bp, Homo sapiens
aaactattccccacc

SEQ ID NO: 11536 - DNA, 15 bp, Homo sapiens
caaactattccccac

SEQ ID NO: 11537 - DNA, 15 bp, Homo sapiens
tcaaactattcccca

SEQ ID NO: 11538 - DNA, 15 bp, Homo sapiens
ctcaaactattcccc

SEQ ID NO: 11539 - DNA, 15 bp, Homo sapiens
actcaaactattccc

SEQ ID NO: 11540 - DNA, 15 bp, Homo sapiens
gactcaaactattcc

SEQ ID NO: 11541 - DNA, 15 bp, Homo sapiens
tgactcaaactattc

SEQ ID NO: 11542 - DNA, 15 bp, Homo sapiens
atgactcaaactatt

SEQ ID NO: 11543 - DNA, 15 bp, Homo sapiens
tatgactcaaactat

SEQ ID NO: 11544 - DNA, 15 bp, Homo sapiens
atatgactcaaacta

SEQ ID NO: 11545 - DNA, 15 bp, Homo sapiens
catatgactcaaact

SEQ ID NO: 11546 - DNA, 15 bp, Homo sapiens
gcatatgactcaaac

SEQ ID NO: 11547 - DNA, 15 bp, Homo sapiens
tgcatatgactcaaa

SEQ ID NO: 11548 - DNA, 15 bp, Homo sapiens
ctgcatatgactcaa

SEQ ID NO: 11549 - DNA, 15 bp, Homo sapiens
tctgcatatgactca

SEQ ID NO: 11550 - DNA, 15 bp, Homo sapiens
atctgcatatgactc

SEQ ID NO: 11551 - DNA, 15 bp, Homo sapiens
catctgcatatgact

SEQ ID NO: 11552 - DNA, 15 bp, Homo sapiens
tcatctgcatatgac

SEQ ID NO: 11553 - DNA, 15 bp, Homo sapiens
ttcatctgcatatga

SEQ ID NO: 11554 - DNA, 15 bp, Homo sapiens
tttcatctgcatatg

SEQ ID NO: 11555 - DNA, 15 bp, Homo sapiens
gtttcatctgcatat

SEQ ID NO: 11556 - DNA, 15 bp, Homo sapiens
ggtttcatctgcata

SEQ ID NO: 11557 - DNA, 15 bp, Homo sapiens
aggtttcatctgcat

SEQ ID NO: 11558 - DNA, 15 bp, Homo sapiens
taggtttcatctgca

SEQ ID NO: 11559 - DNA, 15 bp, Homo sapiens
ctaggtttcatctgc

SEQ ID NO: 11560 - DNA, 15 bp, Homo sapiens
cctaggtttcatctg

SEQ ID NO: 11561 - DNA, 15 bp, Homo sapiens
gcctaggtttcatct

SEQ ID NO: 11562 - DNA, 15 bp, Homo sapiens
agcctaggtttcatc

SEQ ID NO: 11563 - DNA, 15 bp, Homo sapiens
cagcctaggtttcat

SEQ ID NO: 11564 - DNA, 15 bp, Homo sapiens
gcagcctaggtttca

SEQ ID NO: 11565 - DNA, 15 bp, Homo sapiens
agcagcctaggtttc

SEQ ID NO: 11566 - DNA, 15 bp, Homo sapiens
cagcagcctaggttt

SEQ ID NO: 11567 - DNA, 15 bp, Homo sapiens
ccagcagcctaggtt

SEQ ID NO: 11568 - DNA, 15 bp, Homo sapiens
cccagcagcctaggt

SEQ ID NO: 11569 - DNA, 15 bp, Homo sapiens
acccagcagcctagg

SEQ ID NO: 11570 - DNA, 15 bp, Homo sapiens
aacccagcagcctag

SEQ ID NO: 11571 - DNA, 15 bp, Homo sapiens
caacccagcagccta

SEQ ID NO: 11572 - DNA, 15 bp, Homo sapiens
acaacccagcagcct

SEQ ID NO: 11573 - DNA, 15 bp, Homo sapiens
gacaacccagcagcc

SEQ ID NO: 11574 - DNA, 15 bp, Homo sapiens
agacaacccagcagc

SEQ ID NO: 11575 - DNA, 15 bp, Homo sapiens
aagacaacccagcag

SEQ ID NO: 11576 - DNA, 15 bp, Homo sapiens
aaagacaacccagca

SEQ ID NO: 11577 - DNA, 15 bp, Homo sapiens
caaagacaacccagc

SEQ ID NO: 11578 - DNA, 15 bp, Homo sapiens
acaaagacaacccag

SEQ ID NO: 11579 - DNA, 15 bp, Homo sapiens
aacaaagacaaccca

SEQ ID NO: 11580 - DNA, 15 bp, Homo sapiens
taacaaagacaaccc

SEQ ID NO: 11581 - DNA, 15 bp, Homo sapiens
gtaacaaagacaacc

SEQ ID NO: 11582 - DNA, 15 bp, Homo sapiens
ggtaacaaagacaac

SEQ ID NO: 11583 - DNA, 15 bp, Homo sapiens
aggtaacaaagacaa

SEQ ID NO: 11584 - DNA, 15 bp, Homo sapiens
aaggtaacaaagaca

SEQ ID NO: 11585 - DNA, 15 bp, Homo sapiens
caaggtaacaaagac

SEQ ID NO: 11586 - DNA, 15 bp, Homo sapiens
gcaaggtaacaaaga

SEQ ID NO: 11587 - DNA, 15 bp, Homo sapiens
ggcaaggtaacaaag

SEQ ID NO: 11588 - DNA, 15 bp, Homo sapiens
aggcaaggtaacaaa

SEQ ID NO: 11589 - DNA, 15 bp, Homo sapiens
gaggcaaggtaacaa

SEQ ID NO: 11590 - DNA, 15 bp, Homo sapiens
agaggcaaggtaaca

SEQ ID NO: 11591 - DNA, 15 bp, Homo sapiens
gagaggcaaggtaac

SEQ ID NO: 11592 - DNA, 15 bp, Homo sapiens
agagaggcaaggtaa

SEQ ID NO: 11593 - DNA, 15 bp, Homo sapiens
cagagaggcaaggta

SEQ ID NO: 11594 - DNA, 15 bp, Homo sapiens
acagagaggcaaggt

SEQ ID NO: 11595 - DNA, 15 bp, Homo sapiens
aacagagaggcaagg

SEQ ID NO: 11596 - DNA, 15 bp, Homo sapiens
caacagagaggcaag

SEQ ID NO: 11597 - DNA, 15 bp, Homo sapiens
tcaacagagaggcaa

SEQ ID NO: 11598 - DNA, 15 bp, Homo sapiens
ctcaacagagaggca

SEQ ID NO: 11599 - DNA, 15 bp, Homo sapiens
cctcaacagagaggc

SEQ ID NO: 11600 - DNA, 15 bp, Homo sapiens
tcctcaacagagagg

SEQ ID NO: 11601 - DNA, 15 bp, Homo sapiens
atcctcaacagagag

SEQ ID NO: 11602 - DNA, 15 bp, Homo sapiens
catcctcaacagaga

SEQ ID NO: 11603 - DNA, 15 bp, Homo sapiens
acatcctcaacagag

SEQ ID NO: 11604 - DNA, 15 bp, Homo sapiens
cacatcctcaacaga

SEQ ID NO: 11605 - DNA, 15 bp, Homo sapiens
tcacatcctcaacag

SEQ ID NO: 11606 - DNA, 15 bp, Homo sapiens
atcacatcctcaaca

SEQ ID NO: 11607 - DNA, 15 bp, Homo sapiens
tatcacatcctcaac

SEQ ID NO: 11608 - DNA, 15 bp, Homo sapiens
ctatcacatcctcaa

SEQ ID NO: 11609 - DNA, 15 bp, Homo sapiens
gctatcacatcctca

SEQ ID NO: 11610 - DNA, 15 bp, Homo sapiens
tgctatcacatcctc

SEQ ID NO: 11611 - DNA, 15 bp, Homo sapiens
ctgctatcacatcct

SEQ ID NO: 11612 - DNA, 15 bp, Homo sapiens
gctgctatcacatcc

SEQ ID NO: 11613 - DNA, 15 bp, Homo sapiens
tgctgctatcacatc

SEQ ID NO: 11614 - DNA, 15 bp, Homo sapiens
gtgctgctatcacat

SEQ ID NO: 11615 - DNA, 15 bp, Homo sapiens
ggtgctgctatcaca

SEQ ID NO: 11616 - DNA, 15 bp, Homo sapiens
aggtgctgctatcac

SEQ ID NO: 11617 - DNA, 15 bp, Homo sapiens
taggtgctgctatca

SEQ ID NO: 11618 - DNA, 15 bp, Homo sapiens
ttaggtgctgctatc

SEQ ID NO: 11619 - DNA, 15 bp, Homo sapiens
gttaggtgctgctat

SEQ ID NO: 11620 - DNA, 15 bp, Homo sapiens
tgttaggtgctgcta

SEQ ID NO: 11621 - DNA, 15 bp, Homo sapiens
ctgttaggtgctgct

SEQ ID NO: 11622 - DNA, 15 bp, Homo sapiens
cctgttaggtgctgc

SEQ ID NO: 11623 - DNA, 15 bp, Homo sapiens
acctgttaggtgctg

SEQ ID NO: 11624 - DNA, 15 bp, Homo sapiens
aacctgttaggtgct

SEQ ID NO: 11625 - DNA, 15 bp, Homo sapiens
gaacctgttaggtgc

SEQ ID NO: 11626 - DNA, 15 bp, Homo sapiens
tgaacctgttaggtg

SEQ ID NO: 11627 - DNA, 15 bp, Homo sapiens
atgaacctgttaggt

SEQ ID NO: 11628 - DNA, 15 bp, Homo sapiens
tatgaacctgttagg

SEQ ID NO: 11629 - DNA, 15 bp, Homo sapiens
ctatgaacctgttag

SEQ ID NO: 11630 - DNA, 15 bp, Homo sapiens
gctatgaacctgtta

SEQ ID NO: 11631 - DNA, 15 bp, Homo sapiens
ggctatgaacctgtt

SEQ ID NO: 11632 - DNA, 15 bp, Homo sapiens
aggctatgaacctgt

SEQ ID NO: 11633 - DNA, 15 bp, Homo sapiens
caggctatgaacctg

SEQ ID NO: 11634 - DNA, 15 bp, Homo sapiens
gcaggctatgaacct

SEQ ID NO: 11635 - DNA, 15 bp, Homo sapiens
ggcaggctatgaacc

SEQ ID NO: 11636 - DNA, 15 bp, Homo sapiens
aggcaggctatgaac

SEQ ID NO: 11637 - DNA, 15 bp, Homo sapiens
gaggcaggctatgaa

SEQ ID NO: 11638 - DNA, 15 bp, Homo sapiens
ggaggcaggctatga

SEQ ID NO: 11639 - DNA, 15 bp, Homo sapiens
gggaggcaggctatg

SEQ ID NO: 11640 - DNA, 15 bp, Homo sapiens
ggggaggcaggctat

SEQ ID NO: 11641 - DNA, 15 bp, Homo sapiens
aggggaggcaggcta

SEQ ID NO: 11642 - DNA, 15 bp, Homo sapiens
gaggggaggcaggct

SEQ ID NO: 11643 - DNA, 15 bp, Homo sapiens
ggaggggaggcaggc

SEQ ID NO: 11644 - DNA, 15 bp, Homo sapiens
aggaggggaggcagg

SEQ ID NO: 11645 - DNA, 15 bp, Homo sapiens
gaggaggggaggcag

SEQ ID NO: 11646 - DNA, 15 bp, Homo sapiens
agaggaggggaggca

SEQ ID NO: 11647 - DNA, 15 bp, Homo sapiens
aagaggaggggaggc

SEQ ID NO: 11648 - DNA, 15 bp, Homo sapiens
gaagaggaggggagg

SEQ ID NO: 11649 - DNA, 15 bp, Homo sapiens
agaagaggaggggag

SEQ ID NO: 11650 - DNA, 15 bp, Homo sapiens
gagaagaggagggga

SEQ ID NO: 11651 - DNA, 15 bp, Homo sapiens
ggagaagaggagggg

SEQ ID NO: 11652 - DNA, 15 bp, Homo sapiens
gggagaagaggaggg

SEQ ID NO: 11653 - DNA, 15 bp, Homo sapiens
tgggagaagaggagg

SEQ ID NO: 11654 - DNA, 15 bp, Homo sapiens
ttgggagaagaggag

SEQ ID NO: 11655 - DNA, 15 bp, Homo sapiens
attgggagaagagga

SEQ ID NO: 11656 - DNA, 15 bp, Homo sapiens
cattgggagaagagg

SEQ ID NO: 11657 - DNA, 15 bp, Homo sapiens
acattgggagaagag

SEQ ID NO: 11658 - DNA, 15 bp, Homo sapiens
gacattgggagaaga

SEQ ID NO: 11659 - DNA, 15 bp, Homo sapiens
tgacattgggagaag

SEQ ID NO: 11660 - DNA, 15 bp, Homo sapiens
atgacattgggagaa

SEQ ID NO: 11661 - DNA, 15 bp, Homo sapiens
aatgacattgggaga

SEQ ID NO: 11662 - DNA, 15 bp, Homo sapiens
aaatgacattgggag

SEQ ID NO: 11663 - DNA, 15 bp, Homo sapiens
gaaatgacattggga

SEQ ID NO: 11664 - DNA, 15 bp, Homo sapiens
tgaaatgacattggg

SEQ ID NO: 11665 - DNA, 15 bp, Homo sapiens
gtgaaatgacattgg

SEQ ID NO: 11666 - DNA, 15 bp, Homo sapiens
tgtgaaatgacattg

SEQ ID NO: 11667 - DNA, 15 bp, Homo sapiens
ctgtgaaatgacatt

SEQ ID NO: 11668 - DNA, 15 bp, Homo sapiens
actgtgaaatgacat

SEQ ID NO: 11669 - DNA, 15 bp, Homo sapiens
aactgtgaaatgaca

SEQ ID NO: 11670 - DNA, 15 bp, Homo sapiens
aaactgtgaaatgac

SEQ ID NO: 11671 - DNA, 15 bp, Homo sapiens
taaactgtgaaatga

SEQ ID NO: 11672 - DNA, 15 bp, Homo sapiens
ttaaactgtgaaatg

SEQ ID NO: 11673 - DNA, 15 bp, Homo sapiens
attaaactgtgaaat

SEQ ID NO: 11674 - DNA, 15 bp, Homo sapiens
cattaaactgtgaaa

SEQ ID NO: 11675 - DNA, 15 bp, Homo sapiens
acattaaactgtgaa

SEQ ID NO: 11676 - DNA, 15 bp, Homo sapiens
aacattaaactgtga

SEQ ID NO: 11677 - DNA, 15 bp, Homo sapiens
aaacattaaactgtg

SEQ ID NO: 11678 - DNA, 15 bp, Homo sapiens
taaacattaaactgt

SEQ ID NO: 11679 - DNA, 15 bp, Homo sapiens
ttaaacattaaactg

SEQ ID NO: 11680 - DNA, 15 bp, Homo sapiens
cttaaacattaaact

SEQ ID NO: 11681 - DNA, 15 bp, Homo sapiens
gcttaaacattaaac

SEQ ID NO: 11682 - DNA, 15 bp, Homo sapiens
cgcttaaacattaaa

SEQ ID NO: 11683 - DNA, 15 bp, Homo sapiens
acgcttaaacattaa

SEQ ID NO: 11684 - DNA, 15 bp, Homo sapiens
tacgcttaaacatta

SEQ ID NO: 11685 - DNA, 15 bp, Homo sapiens
atacgcttaaacatt

SEQ ID NO: 11686 - DNA, 15 bp, Homo sapiens
catacgcttaaacat

SEQ ID NO: 11687 - DNA, 15 bp, Homo sapiens
acatacgcttaaaca

SEQ ID NO: 11688 - DNA, 15 bp, Homo sapiens
aacatacgcttaaac

SEQ ID NO: 11689 - DNA, 15 bp, Homo sapiens
aaacatacgcttaaa

SEQ ID NO: 11690 - DNA, 15 bp, Homo sapiens
taaacatacgcttaa

SEQ ID NO: 11691 - DNA, 15 bp, Homo sapiens
ttaaacatacgctta

SEQ ID NO: 11692 - DNA, 15 bp, Homo sapiens
cttaaacatacgctt

SEQ ID NO: 11693 - DNA, 15 bp, Homo sapiens
tcttaaacatacgct

SEQ ID NO: 11694 - DNA, 15 bp, Homo sapiens
atcttaaacatacgc

SEQ ID NO: 11695 - DNA, 15 bp, Homo sapiens
catcttaaacatacg

SEQ ID NO: 11696 - DNA, 15 bp, Homo sapiens
ccatcttaaacatac

SEQ ID NO: 11697 - DNA, 15 bp, Homo sapiens
accatcttaaacata

SEQ ID NO: 11698 - DNA, 15 bp, Homo sapiens
gaccatcttaaacat

SEQ ID NO: 11699 - DNA, 15 bp, Homo sapiens
tgaccatcttaaaca

SEQ ID NO: 11700 - DNA, 15 bp, Homo sapiens
atgaccatcttaaac

SEQ ID NO: 11701 - DNA, 15 bp, Homo sapiens
catgaccatcttaaa

SEQ ID NO: 11702 - DNA, 15 bp, Homo sapiens
acatgaccatcttaa

SEQ ID NO: 11703 - DNA, 15 bp, Homo sapiens
gacatgaccatctta

SEQ ID NO: 11704 - DNA, 15 bp, Homo sapiens
agacatgaccatctt

SEQ ID NO: 11705 - DNA, 15 bp, Homo sapiens
cagacatgaccatct

SEQ ID NO: 11706 - DNA, 15 bp, Homo sapiens
acagacatgaccatc

SEQ ID NO: 11707 - DNA, 15 bp, Homo sapiens
cacagacatgaccat

SEQ ID NO: 11708 - DNA, 15 bp, Homo sapiens
acacagacatgacca

SEQ ID NO: 11709 - DNA, 15 bp, Homo sapiens
aacacagacatgacc

SEQ ID NO: 11710 - DNA, 15 bp, Homo sapiens
aaacacagacatgac

SEQ ID NO: 11711 - DNA, 15 bp, Homo sapiens
gaaacacagacatga

SEQ ID NO: 11712 - DNA, 15 bp, Homo sapiens
ggaaacacagacatg

SEQ ID NO: 11713 - DNA, 15 bp, Homo sapiens
tggaaacacagacat

SEQ ID NO: 11714 - DNA, 15 bp, Homo sapiens
ttggaaacacagaca

SEQ ID NO: 11715 - DNA, 15 bp, Homo sapiens
attggaaacacagac

SEQ ID NO: 11716 - DNA, 15 bp, Homo sapiens
tattggaaacacaga

SEQ ID NO: 11717 - DNA, 15 bp, Homo sapiens
ttattggaaacacag

SEQ ID NO: 11718 - DNA, 15 bp, Homo sapiens
cttattggaaacaca

SEQ ID NO: 11719 - DNA, 15 bp, Homo sapiens
tcttattggaaacac

SEQ ID NO: 11720 - DNA, 15 bp, Homo sapiens
atcttattggaaaca

SEQ ID NO: 11721 - DNA, 15 bp, Homo sapiens
catcttattggaaac

SEQ ID NO: 11722 - DNA, 15 bp, Homo sapiens
gcatcttattggaaa

SEQ ID NO: 11723 - DNA, 15 bp, Homo sapiens
tgcatcttattggaa

SEQ ID NO: 11724 - DNA, 15 bp, Homo sapiens
ttgcatcttattgga

SEQ ID NO: 11725 - DNA, 15 bp, Homo sapiens
gttgcatcttattgg

SEQ ID NO: 11726 - DNA, 15 bp, Homo sapiens
ggttgcatcttattg

SEQ ID NO: 11727 - DNA, 15 bp, Homo sapiens
aggttgcatcttatt

SEQ ID NO: 11728 - DNA, 15 bp, Homo sapiens
taggttgcatcttat

SEQ ID NO: 11729 - DNA, 15 bp, Homo sapiens
ataggttgcatctta

SEQ ID NO: 11730 - DNA, 15 bp, Homo sapiens
aataggttgcatctt

SEQ ID NO: 11731 - DNA, 15 bp, Homo sapiens
caataggttgcatct

SEQ ID NO: 11732 - DNA, 15 bp, Homo sapiens
acaataggttgcatc

SEQ ID NO: 11733 - DNA, 15 bp, Homo sapiens
aacaataggttgcat

SEQ ID NO: 11734 - DNA, 15 bp, Homo sapiens
gaacaataggttgca

SEQ ID NO: 11735 - DNA, 15 bp, Homo sapiens
ggaacaataggttgc

SEQ ID NO: 11736 - DNA, 15 bp, Homo sapiens
gggaacaataggttg

SEQ ID NO: 11737 - DNA, 15 bp, Homo sapiens
tgggaacaataggtt

SEQ ID NO: 11738 - DNA, 15 bp, Homo sapiens
atgggaacaataggt

SEQ ID NO: 11739 - DNA, 15 bp, Homo sapiens
catgggaacaatagg

SEQ ID NO: 11740 - DNA, 15 bp, Homo sapiens
gcatgggaacaatag

SEQ ID NO: 11741 - DNA, 15 bp, Homo sapiens
agcatgggaacaata

SEQ ID NO: 11742 - DNA, 15 bp, Homo sapiens
aagcatgggaacaat

SEQ ID NO: 11743 - DNA, 15 bp, Homo sapiens
aaagcatgggaacaa

SEQ ID NO: 11744 - DNA, 15 bp, Homo sapiens
aaaagcatgggaaca

SEQ ID NO: 11745 - DNA, 15 bp, Homo sapiens
caaaagcatgggaac

SEQ ID NO: 11746 - DNA, 15 bp, Homo sapiens
ccaaaagcatgggaa

SEQ ID NO: 11747 - DNA, 15 bp, Homo sapiens
accaaaagcatggga

SEQ ID NO: 11748 - DNA, 15 bp, Homo sapiens
taccaaaagcatggg

SEQ ID NO: 11749 - DNA, 15 bp, Homo sapiens
ttaccaaaagcatgg

SEQ ID NO: 11750 - DNA, 15 bp, Homo sapiens
tttaccaaaagcatg

SEQ ID NO: 11751 - DNA, 15 bp, Homo sapiens
atttaccaaaagcat

SEQ ID NO: 11752 - DNA, 15 bp, Homo sapiens
aatttaccaaaagca

SEQ ID NO: 11753 - DNA, 15 bp, Homo sapiens
taatttaccaaaagc

SEQ ID NO: 11754 - DNA, 15 bp, Homo sapiens
ttaatttaccaaaag

SEQ ID NO: 11755 - DNA, 15 bp, Homo sapiens
tttaatttaccaaaa

SEQ ID NO: 11756 - DNA, 15 bp, Homo sapiens
atttaatttaccaaa

SEQ ID NO: 11757 - DNA, 15 bp, Homo sapiens
aatttaatttaccaa

SEQ ID NO: 11758 - DNA, 15 bp, Homo sapiens
aaatttaatttacca

SEQ ID NO: 11759 - DNA, 15 bp, Homo sapiens
caaatttaatttacc

SEQ ID NO: 11760 - DNA, 15 bp, Homo sapiens
acaaatttaatttac

SEQ ID NO: 11761 - DNA, 15 bp, Homo sapiens
gacaaatttaattta

SEQ ID NO: 11762 - DNA, 15 bp, Homo sapiens
agacaaatttaattt

SEQ ID NO: 11763 - DNA, 15 bp, Homo sapiens
cagacaaatttaatt

SEQ ID NO: 11764 - DNA, 15 bp, Homo sapiens
tcagacaaatttaat

SEQ ID NO: 11765 - DNA, 15 bp, Homo sapiens
atcagacaaatttaa

SEQ ID NO: 11766 - DNA, 15 bp, Homo sapiens
aatcagacaaattta

SEQ ID NO: 11767 - DNA, 15 bp, Homo sapiens
caatcagacaaattt

SEQ ID NO: 11768 - DNA, 15 bp, Homo sapiens
gcaatcagacaaatt

SEQ ID NO: 11769 - DNA, 15 bp, Homo sapiens
tgcaatcagacaaat

SEQ ID NO: 11770 - DNA, 15 bp, Homo sapiens
ctgcaatcagacaaa

SEQ ID NO: 11771 - DNA, 15 bp, Homo sapiens
actgcaatcagacaa

SEQ ID NO: 11772 - DNA, 15 bp, Homo sapiens
tactgcaatcagaca

SEQ ID NO: 11773 - DNA, 15 bp, Homo sapiens
atactgcaatcagac

SEQ ID NO: 11774 - DNA, 15 bp, Homo sapiens
aatactgcaatcaga

SEQ ID NO: 11775 - DNA, 15 bp, Homo sapiens
aaatactgcaatcag

SEQ ID NO: 11776 - DNA, 15 bp, Homo sapiens
taaatactgcaatca

SEQ ID NO: 11777 - DNA, 15 bp, Homo sapiens
gtaaatactgcaatc

SEQ ID NO: 11778 - DNA, 15 bp, Homo sapiens
tgtaaatactgcaat

SEQ ID NO: 11779 - DNA, 15 bp, Homo sapiens
ttgtaaatactgcaa

SEQ ID NO: 11780 - DNA, 15 bp, Homo sapiens
cttgtaaatactgca

SEQ ID NO: 11781 - DNA, 15 bp, Homo sapiens
ccttgtaaatactgc

SEQ ID NO: 11782 - DNA, 15 bp, Homo sapiens
accttgtaaatactg

SEQ ID NO: 11783 - DNA, 15 bp, Homo sapiens
aaccttgtaaatact

SEQ ID NO: 11784 - DNA, 15 bp, Homo sapiens
aaaccttgtaaatac

SEQ ID NO: 11785 - DNA, 15 bp, Homo sapiens
aaaaccttgtaaata

SEQ ID NO: 11786 - DNA, 15 bp, Homo sapiens
caaaaccttgtaaat

SEQ ID NO: 11787 - DNA, 15 bp, Homo sapiens
acaaaaccttgtaaa

SEQ ID NO: 11788 - DNA, 15 bp, Homo sapiens
gacaaaaccttgtaa

SEQ ID NO: 11789 - DNA, 15 bp, Homo sapiens
tgacaaaaccttgta

SEQ ID NO: 11790 - DNA, 15 bp, Homo sapiens
atgacaaaaccttgt

SEQ ID NO: 11791 - DNA, 15 bp, Homo sapiens
aatgacaaaaccttg

SEQ ID NO: 11792 - DNA, 15 bp, Homo sapiens
caatgacaaaacctt

SEQ ID NO: 11793 - DNA, 15 bp, Homo sapiens
acaatgacaaaacct

SEQ ID NO: 11794 - DNA, 15 bp, Homo sapiens
cacaatgacaaaacc

SEQ ID NO: 11795 - DNA, 15 bp, Homo sapiens
gcacaatgacaaaac

SEQ ID NO: 11796 - DNA, 15 bp, Homo sapiens
tgcacaatgacaaaa

SEQ ID NO: 11797 - DNA, 15 bp, Homo sapiens
atgcacaatgacaaa

SEQ ID NO: 11798 - DNA, 15 bp, Homo sapiens
gatgcacaatgacaa

SEQ ID NO: 11799 - DNA, 15 bp, Homo sapiens
agatgcacaatgaca

SEQ ID NO: 11800 - DNA, 15 bp, Homo sapiens
aagatgcacaatgac

SEQ ID NO: 11801 - DNA, 15 bp, Homo sapiens
aaagatgcacaatga

SEQ ID NO: 11802 - DNA, 15 bp, Homo sapiens
aaaagatgcacaatg

SEQ ID NO: 11803 - DNA, 15 bp, Homo sapiens
caaaagatgcacaat

SEQ ID NO: 11804 - DNA, 15 bp, Homo sapiens
gcaaaagatgcacaa

SEQ ID NO: 11805 - DNA, 15 bp, Homo sapiens
tgcaaaagatgcaca

SEQ ID NO: 11806 - DNA, 15 bp, Homo sapiens
atgcaaaagatgcac

SEQ ID NO: 11807 - DNA, 15 bp, Homo sapiens
tatgcaaaagatgca

SEQ ID NO: 11808 - DNA, 15 bp, Homo sapiens
atatgcaaaagatgc

SEQ ID NO: 11809 - DNA, 15 bp, Homo sapiens
gatatgcaaaagatg

SEQ ID NO: 11810 - DNA, 15 bp, Homo sapiens
agatatgcaaaagat

SEQ ID NO: 11811 - DNA, 15 bp, Homo sapiens
aagatatgcaaaaga

SEQ ID NO: 11812 - DNA, 15 bp, Homo sapiens
taagatatgcaaaag

SEQ ID NO: 11813 - DNA, 15 bp, Homo sapiens
ttaagatatgcaaaa

SEQ ID NO: 11814 - DNA, 15 bp, Homo sapiens
tttaagatatgcaaa

SEQ ID NO: 11815 - DNA, 15 bp, Homo sapiens
ttttaagatatgcaa

SEQ ID NO: 11816 - DNA, 15 bp, Homo sapiens
tttttaagatatgca

SEQ ID NO: 11817 - DNA, 15 bp, Homo sapiens
atttttaagatatgc

SEQ ID NO: 11818 - DNA, 15 bp, Homo sapiens
tatttttaagatatg

SEQ ID NO: 11819 - DNA, 15 bp, Homo sapiens
ttatttttaagatat

SEQ ID NO: 11820 - DNA, 15 bp, Homo sapiens
attatttttaagata

SEQ ID NO: 11821 - DNA, 15 bp, Homo sapiens
aattatttttaagat

SEQ ID NO: 11822 - DNA, 15 bp, Homo sapiens
gaattatttttaaga

SEQ ID NO: 11823 - DNA, 15 bp, Homo sapiens
tgaattatttttaag

SEQ ID NO: 11824 - DNA, 15 bp, Homo sapiens
ctgaattatttttaa

SEQ ID NO: 11825 - DNA, 15 bp, Homo sapiens
actgaattattttta

SEQ ID NO: 11826 - DNA, 15 bp, Homo sapiens
cactgaattattttt

SEQ ID NO: 11827 - DNA, 15 bp, Homo sapiens
gcactgaattatttt

SEQ ID NO: 11828 - DNA, 15 bp, Homo sapiens
tgcactgaattattt

SEQ ID NO: 11829 - DNA, 15 bp, Homo sapiens
ttgcactgaattatt

SEQ ID NO: 11830 - DNA, 15 bp, Homo sapiens
tttgcactgaattat

SEQ ID NO: 11831 - DNA, 15 bp, Homo sapiens
ttttgcactgaatta

SEQ ID NO: 11832 - DNA, 15 bp, Homo sapiens
tttttgcactgaatt

SEQ ID NO: 11833 - DNA, 15 bp, Homo sapiens
atttttgcactgaat

SEQ ID NO: 11834 - DNA, 15 bp, Homo sapiens
tatttttgcactgaa

SEQ ID NO: 11835 - DNA, 15 bp, Homo sapiens
gtatttttgcactga

SEQ ID NO: 11836 - DNA, 15 bp, Homo sapiens
tgtatttttgcactg

SEQ ID NO: 11837 - DNA, 15 bp, Homo sapiens
ctgtatttttgcact

SEQ ID NO: 11838 - DNA, 15 bp, Homo sapiens
actgtatttttgcac

SEQ ID NO: 11839 - DNA, 15 bp, Homo sapiens
gactgtatttttgca

SEQ ID NO: 11840 - DNA, 15 bp, Homo sapiens
tgactgtatttttgc

SEQ ID NO: 11841 - DNA, 15 bp, Homo sapiens
gtgactgtatttttg

SEQ ID NO: 11842 - DNA, 15 bp, Homo sapiens
tgtgactgtattttt

SEQ ID NO: 11843 - DNA, 15 bp, Homo sapiens
ttgtgactgtatttt

SEQ ID NO: 11844 - DNA, 15 bp, Homo sapiens
tttgtgactgtattt

SEQ ID NO: 11845 - DNA, 15 bp, Homo sapiens
atttgtgactgtatt

SEQ ID NO: 11846 - DNA, 15 bp, Homo sapiens
gatttgtgactgtat

SEQ ID NO: 11847 - DNA, 15 bp, Homo sapiens
tgatttgtgactgta

SEQ ID NO: 11848 - DNA, 15 bp, Homo sapiens
atgatttgtgactgt

SEQ ID NO: 11849 - DNA, 15 bp, Homo sapiens
aatgatttgtgactg

SEQ ID NO: 11850 - DNA, 15 bp, Homo sapiens
taatgatttgtgact

SEQ ID NO: 11851 - DNA, 15 bp, Homo sapiens
ttaatgatttgtgac

SEQ ID NO: 11852 - DNA, 15 bp, Homo sapiens
tttaatgatttgtga

SEQ ID NO: 11853 - DNA, 15 bp, Homo sapiens
ctttaatgatttgtg

SEQ ID NO: 11854 - DNA, 15 bp, Homo sapiens
cctttaatgatttgt

SEQ ID NO: 11855 - DNA, 15 bp, Homo sapiens
tcctttaatgatttg

SEQ ID NO: 11856 - DNA, 15 bp, Homo sapiens
gtcctttaatgattt

SEQ ID NO: 11857 - DNA, 15 bp, Homo sapiens
agtcctttaatgatt

SEQ ID NO: 11858 - DNA, 15 bp, Homo sapiens
aagtcctttaatgat

SEQ ID NO: 11859 - DNA, 15 bp, Homo sapiens
aaagtcctttaatga

SEQ ID NO: 11860 - DNA, 15 bp, Homo sapiens
taaagtcctttaatg

SEQ ID NO: 11861 - DNA, 15 bp, Homo sapiens
ctaaagtcctttaat

SEQ ID NO: 11862 - DNA, 15 bp, Homo sapiens
gctaaagtcctttaa

SEQ ID NO: 11863 - DNA, 15 bp, Homo sapiens
agctaaagtccttta

SEQ ID NO: 11864 - DNA, 15 bp, Homo sapiens
aagctaaagtccttt

SEQ ID NO: 11865 - DNA, 15 bp, Homo sapiens
aaagctaaagtcctt

SEQ ID NO: 11866 - DNA, 15 bp, Homo sapiens
caaagctaaagtcct

SEQ ID NO: 11867 - DNA, 15 bp, Homo sapiens
acaaagctaaagtcc

SEQ ID NO: 11868 - DNA, 15 bp, Homo sapiens
aacaaagctaaagtc

SEQ ID NO: 11869 - DNA, 15 bp, Homo sapiens
taacaaagctaaagt

SEQ ID NO: 11870 - DNA, 15 bp, Homo sapiens
ctaacaaagctaaag

SEQ ID NO: 11871 - DNA, 15 bp, Homo sapiens
actaacaaagctaaa

SEQ ID NO: 11872 - DNA, 15 bp, Homo sapiens
tactaacaaagctaa

SEQ ID NO: 11873 - DNA, 15 bp, Homo sapiens
ctactaacaaagcta

SEQ ID NO: 11874 - DNA, 15 bp, Homo sapiens
cctactaacaaagct

SEQ ID NO: 11875 - DNA, 15 bp, Homo sapiens
gcctactaacaaagc

SEQ ID NO: 11876 - DNA, 15 bp, Homo sapiens
agcctactaacaaag

SEQ ID NO: 11877 - DNA, 15 bp, Homo sapiens
cagcctactaacaaa

SEQ ID NO: 11878 - DNA, 15 bp, Homo sapiens
ccagcctactaacaa

SEQ ID NO: 11879 - DNA, 15 bp, Homo sapiens
cccagcctactaaca

SEQ ID NO: 11880 - DNA, 15 bp, Homo sapiens
tcccagcctactaac

SEQ ID NO: 11881 - DNA, 15 bp, Homo sapiens
atcccagcctactaa

SEQ ID NO: 11882 - DNA, 15 bp, Homo sapiens
tatcccagcctacta

SEQ ID NO: 11883 - DNA, 15 bp, Homo sapiens
atatcccagcctact

SEQ ID NO: 11884 - DNA, 15 bp, Homo sapiens
aatatcccagcctac

SEQ ID NO: 11885 - DNA, 15 bp, Homo sapiens
taatatcccagccta

SEQ ID NO: 11886 - DNA, 15 bp, Homo sapiens
ctaatatcccagcct

SEQ ID NO: 11887 - DNA, 15 bp, Homo sapiens
cctaatatcccagcc

SEQ ID NO: 11888 - DNA, 15 bp, Homo sapiens
ccctaatatcccagc

SEQ ID NO: 11889 - DNA, 15 bp, Homo sapiens
cccctaatatcccag

SEQ ID NO: 11890 - DNA, 15 bp, Homo sapiens
ccccctaatatccca

SEQ ID NO: 11891 - DNA, 15 bp, Homo sapiens
tccccctaatatccc

SEQ ID NO: 11892 - DNA, 15 bp, Homo sapiens
ttccccctaatatcc

SEQ ID NO: 11893 - DNA, 15 bp, Homo sapiens
cttccccctaatatc

SEQ ID NO: 11894 - DNA, 15 bp, Homo sapiens
ccttccccctaatat

SEQ ID NO: 11895 - DNA, 15 bp, Homo sapiens
tccttccccctaata

SEQ ID NO: 11896 - DNA, 15 bp, Homo sapiens
ctccttccccctaat

SEQ ID NO: 11897 - DNA, 15 bp, Homo sapiens
actccttccccctaa

SEQ ID NO: 11898 - DNA, 15 bp, Homo sapiens
tactccttcccccta

SEQ ID NO: 11899 - DNA, 15 bp, Homo sapiens
ctactccttccccct

SEQ ID NO: 11900 - DNA, 15 bp, Homo sapiens
cctactccttccccc

SEQ ID NO: 11901 - DNA, 15 bp, Homo sapiens
ccctactccttcccc

SEQ ID NO: 11902 - DNA, 15 bp, Homo sapiens
tccctactccttccc

SEQ ID NO: 11903 - DNA, 15 bp, Homo sapiens
atccctactccttcc

SEQ ID NO: 11904 - DNA, 15 bp, Homo sapiens
tatccctactccttc

SEQ ID NO: 11905 - DNA, 15 bp, Homo sapiens
ctatccctactcctt

SEQ ID NO: 11906 - DNA, 15 bp, Homo sapiens
tctatccctactcct

SEQ ID NO: 11907 - DNA, 15 bp, Homo sapiens
atctatccctactcc

SEQ ID NO: 11908 - DNA, 15 bp, Homo sapiens
aatctatccctactc

SEQ ID NO: 11909 - DNA, 15 bp, Homo sapiens
gaatctatccctact

SEQ ID NO: 11910 - DNA, 15 bp, Homo sapiens
agaatctatccctac

SEQ ID NO: 11911 - DNA, 15 bp, Homo sapiens
tagaatctatcccta

SEQ ID NO: 11912 - DNA, 15 bp, Homo sapiens
ctagaatctatccct

SEQ ID NO: 11913 - DNA, 15 bp, Homo sapiens
cctagaatctatccc

SEQ ID NO: 11914 - DNA, 15 bp, Homo sapiens
acctagaatctatcc

SEQ ID NO: 11915 - DNA, 15 bp, Homo sapiens
aacctagaatctatc

SEQ ID NO: 11916 - DNA, 15 bp, Homo sapiens
taacctagaatctat

SEQ ID NO: 11917 - DNA, 15 bp, Homo sapiens
ataacctagaatcta

SEQ ID NO: 11918 - DNA, 15 bp, Homo sapiens
tataacctagaatct

SEQ ID NO: 11919 - DNA, 15 bp, Homo sapiens
ttataacctagaatc

SEQ ID NO: 11920 - DNA, 15 bp, Homo sapiens
gttataacctagaat

SEQ ID NO: 11921 - DNA, 15 bp, Homo sapiens
ggttataacctagaa

SEQ ID NO: 11922 - DNA, 15 bp, Homo sapiens
gggttataacctaga

SEQ ID NO: 11923 - DNA, 15 bp, Homo sapiens
tgggttataacctag

SEQ ID NO: 11924 - DNA, 15 bp, Homo sapiens
ttgggttataaccta

SEQ ID NO: 11925 - DNA, 15 bp, Homo sapiens
attgggttataacct

SEQ ID NO: 11926 - DNA, 15 bp, Homo sapiens
aattgggttataacc

SEQ ID NO: 11927 - DNA, 15 bp, Homo sapiens
aaattgggttataac

SEQ ID NO: 11928 - DNA, 15 bp, Homo sapiens
aaaattgggttataa

SEQ ID NO: 11929 - DNA, 15 bp, Homo sapiens
aaaaattgggttata

SEQ ID NO: 11930 - DNA, 15 bp, Homo sapiens
gaaaaattgggttat

SEQ ID NO: 11931 - DNA, 15 bp, Homo sapiens
agaaaaattgggtta

SEQ ID NO: 11932 - DNA, 15 bp, Homo sapiens
tagaaaaattgggtt

SEQ ID NO: 11933 - DNA, 15 bp, Homo sapiens
ttagaaaaattgggt

SEQ ID NO: 11934 - DNA, 15 bp, Homo sapiens
tttagaaaaattggg

SEQ ID NO: 11935 - DNA, 15 bp, Homo sapiens
ttttagaaaaattgg

SEQ ID NO: 11936 - DNA, 15 bp, Homo sapiens
gttttagaaaaattg

SEQ ID NO: 11937 - DNA, 15 bp, Homo sapiens
tgttttagaaaaatt

SEQ ID NO: 11938 - DNA, 15 bp, Homo sapiens
ttgttttagaaaaat

SEQ ID NO: 11939 - DNA, 15 bp, Homo sapiens
tttgttttagaaaaa

SEQ ID NO: 11940 - DNA, 15 bp, Homo sapiens
ctttgttttagaaaa

SEQ ID NO: 11941 - DNA, 15 bp, Homo sapiens
cctttgttttagaaa

SEQ ID NO: 11942 - DNA, 15 bp, Homo sapiens
acctttgttttagaa

SEQ ID NO: 11943 - DNA, 15 bp, Homo sapiens
tacctttgttttaga

SEQ ID NO: 11944 - DNA, 15 bp, Homo sapiens
ttacctttgttttag

SEQ ID NO: 11945 - DNA, 15 bp, Homo sapiens
tttacctttgtttta

SEQ ID NO: 11946 - DNA, 15 bp, Homo sapiens
atttacctttgtttt

SEQ ID NO: 11947 - DNA, 15 bp, Homo sapiens
tatttacctttgttt

SEQ ID NO: 11948 - DNA, 15 bp, Homo sapiens
atatttacctttgtt

SEQ ID NO: 11949 - DNA, 15 bp, Homo sapiens
tatatttacctttgt

SEQ ID NO: 11950 - DNA, 15 bp, Homo sapiens
atatatttacctttg

SEQ ID NO: 11951 - DNA, 15 bp, Homo sapiens
aatatatttaccttt

SEQ ID NO: 11952 - DNA, 15 bp, Homo sapiens
gaatatatttacctt

SEQ ID NO: 11953 - DNA, 15 bp, Homo sapiens
tgaatatatttacct

SEQ ID NO: 11954 - DNA, 15 bp, Homo sapiens
ctgaatatatttacc

SEQ ID NO: 11955 - DNA, 15 bp, Homo sapiens
tctgaatatatttac

SEQ ID NO: 11956 - DNA, 15 bp, Homo sapiens
atctgaatatattta

SEQ ID NO: 11957 - DNA, 15 bp, Homo sapiens
aatctgaatatattt

SEQ ID NO: 11958 - DNA, 15 bp, Homo sapiens
aaatctgaatatatt

SEQ ID NO: 11959 - DNA, 15 bp, Homo sapiens
aaaatctgaatatat

SEQ ID NO: 11960 - DNA, 15 bp, Homo sapiens
taaaatctgaatata

SEQ ID NO: 11961 - DNA, 15 bp, Homo sapiens
ataaaatctgaatat

SEQ ID NO: 11962 - DNA, 15 bp, Homo sapiens
tataaaatctgaata

SEQ ID NO: 11963 - DNA, 15 bp, Homo sapiens
ttataaaatctgaat

SEQ ID NO: 11964 - DNA, 15 bp, Homo sapiens
tttataaaatctgaa

SEQ ID NO: 11965 - DNA, 15 bp, Homo sapiens
atttataaaatctga

SEQ ID NO: 11966 - DNA, 15 bp, Homo sapiens
tatttataaaatctg

SEQ ID NO: 11967 - DNA, 15 bp, Homo sapiens
ctatttataaaatct

SEQ ID NO: 11968 - DNA, 15 bp, Homo sapiens
gctatttataaaatc

SEQ ID NO: 11969 - DNA, 15 bp, Homo sapiens
cgctatttataaaat

SEQ ID NO: 11970 - DNA, 15 bp, Homo sapiens
gcgctatttataaaa

SEQ ID NO: 11971 - DNA, 15 bp, Homo sapiens
tgcgctatttataaa

SEQ ID NO: 11972 - DNA, 15 bp, Homo sapiens
ttgcgctatttataa

SEQ ID NO: 11973 - DNA, 15 bp, Homo sapiens
tttgcgctatttata

SEQ ID NO: 11974 - DNA, 15 bp, Homo sapiens
ttttgcgctatttat

SEQ ID NO: 11975 - DNA, 15 bp, Homo sapiens
gttttgcgctattta

SEQ ID NO: 11976 - DNA, 15 bp, Homo sapiens
tgttttgcgctattt

SEQ ID NO: 11977 - DNA, 15 bp, Homo sapiens
gtgttttgcgctatt

SEQ ID NO: 11978 - DNA, 15 bp, Homo sapiens
tgtgttttgcgctat

SEQ ID NO: 11979 - DNA, 15 bp, Homo sapiens
ttgtgttttgcgcta

SEQ ID NO: 11980 - DNA, 15 bp, Homo sapiens
cttgtgttttgcgct

SEQ ID NO: 11981 - DNA, 15 bp, Homo sapiens
ccttgtgttttgcgc

SEQ ID NO: 11982 - DNA, 15 bp, Homo sapiens
gccttgtgttttgcg

SEQ ID NO: 11983 - DNA, 15 bp, Homo sapiens
agccttgtgttttgc

SEQ ID NO: 11984 - DNA, 15 bp, Homo sapiens
cagccttgtgttttg

SEQ ID NO: 11985 - DNA, 15 bp, Homo sapiens
ccagccttgtgtttt

SEQ ID NO: 11986 - DNA, 15 bp, Homo sapiens
cccagccttgtgttt

SEQ ID NO: 11987 - DNA, 15 bp, Homo sapiens
acccagccttgtgtt

SEQ ID NO: 11988 - DNA, 15 bp, Homo sapiens
tacccagccttgtgt

SEQ ID NO: 11989 - DNA, 15 bp, Homo sapiens
gtacccagccttgtg

SEQ ID NO: 11990 - DNA, 15 bp, Homo sapiens
cgtacccagccttgt

SEQ ID NO: 11991 - DNA, 15 bp, Homo sapiens
ccgtacccagccttg

SEQ ID NO: 11992 - DNA, 15 bp, Homo sapiens
accgtacccagcctt

SEQ ID NO: 11993 - DNA, 15 bp, Homo sapiens
caccgtacccagcct

SEQ ID NO: 11994 - DNA, 15 bp, Homo sapiens
ccaccgtacccagcc

SEQ ID NO: 11995 - DNA, 15 bp, Homo sapiens
gccaccgtacccagc

SEQ ID NO: 11996 - DNA, 15 bp, Homo sapiens
agccaccgtacccag

SEQ ID NO: 11997 - DNA, 15 bp, Homo sapiens
gagccaccgtaccca

SEQ ID NO: 11998 - DNA, 15 bp, Homo sapiens
tgagccaccgtaccc

SEQ ID NO: 11999 - DNA, 15 bp, Homo sapiens
gtgagccaccgtacc

SEQ ID NO: 12000 - DNA, 15 bp, Homo sapiens
tgtgagccaccgtac

SEQ ID NO: 12001 - DNA, 15 bp, Homo sapiens
gtgtgagccaccgta

SEQ ID NO: 12002 - DNA, 15 bp, Homo sapiens
ggtgtgagccaccgt

SEQ ID NO: 12003 - DNA, 15 bp, Homo sapiens
aggtgtgagccaccg

SEQ ID NO: 12004 - DNA, 15 bp, Homo sapiens
caggtgtgagccacc

SEQ ID NO: 12005 - DNA, 15 bp, Homo sapiens
acaggtgtgagccac

SEQ ID NO: 12006 - DNA, 15 bp, Homo sapiens
tacaggtgtgagcca

SEQ ID NO: 12007 - DNA, 15 bp, Homo sapiens
ttacaggtgtgagcc

SEQ ID NO: 12008 - DNA, 15 bp, Homo sapiens
attacaggtgtgagc

SEQ ID NO: 12009 - DNA, 15 bp, Homo sapiens
gattacaggtgtgag

SEQ ID NO: 12010 - DNA, 15 bp, Homo sapiens
ggattacaggtgtga

SEQ ID NO: 12011 - DNA, 15 bp, Homo sapiens
gggattacaggtgtg

SEQ ID NO: 12012 - DNA, 15 bp, Homo sapiens
tgggattacaggtgt

SEQ ID NO: 12013 - DNA, 15 bp, Homo sapiens
ctgggattacaggtg

SEQ ID NO: 12014 - DNA, 15 bp, Homo sapiens
gctgggattacaggt

SEQ ID NO: 12015 - DNA, 15 bp, Homo sapiens
tgctgggattacagg

SEQ ID NO: 12016 - DNA, 15 bp, Homo sapiens
gtgctgggattacag

SEQ ID NO: 12017 - DNA, 15 bp, Homo sapiens
agtgctgggattaca

SEQ ID NO: 12018 - DNA, 15 bp, Homo sapiens
aagtgctgggattac

SEQ ID NO: 12019 - DNA, 15 bp, Homo sapiens
aaagtgctgggatta

SEQ ID NO: 12020 - DNA, 15 bp, Homo sapiens
caaagtgctgggatt

SEQ ID NO: 12021 - DNA, 15 bp, Homo sapiens
ccaaagtgctgggat

SEQ ID NO: 12022 - DNA, 15 bp, Homo sapiens
cccaaagtgctggga

SEQ ID NO: 12023 - DNA, 15 bp, Homo sapiens
tcccaaagtgctggg

SEQ ID NO: 12024 - DNA, 15 bp, Homo sapiens
ctcccaaagtgctgg

SEQ ID NO: 12025 - DNA, 15 bp, Homo sapiens
cctcccaaagtgctg

SEQ ID NO: 12026 - DNA, 15 bp, Homo sapiens
gcctcccaaagtgct

SEQ ID NO: 12027 - DNA, 15 bp, Homo sapiens
agcctcccaaagtgc

SEQ ID NO: 12028 - DNA, 15 bp, Homo sapiens
cagcctcccaaagtg

SEQ ID NO: 12029 - DNA, 15 bp, Homo sapiens
tcagcctcccaaagt

SEQ ID NO: 12030 - DNA, 15 bp, Homo sapiens
ctcagcctcccaaag

SEQ ID NO: 12031 - DNA, 15 bp, Homo sapiens
cctcagcctcccaaa

SEQ ID NO: 12032 - DNA, 15 bp, Homo sapiens
gcctcagcctcccaa

SEQ ID NO: 12033 - DNA, 15 bp, Homo sapiens
cgcctcagcctccca

SEQ ID NO: 12034 - DNA, 15 bp, Homo sapiens
ccgcctcagcctccc

SEQ ID NO: 12035 - DNA, 15 bp, Homo sapiens
cccgcctcagcctcc

SEQ ID NO: 12036 - DNA, 15 bp, Homo sapiens
acccgcctcagcctc

SEQ ID NO: 12037 - DNA, 15 bp, Homo sapiens
cacccgcctcagcct

SEQ ID NO: 12038 - DNA, 15 bp, Homo sapiens
ccacccgcctcagcc

SEQ ID NO: 12039 - DNA, 15 bp, Homo sapiens
tccacccgcctcagc

SEQ ID NO: 12040 - DNA, 15 bp, Homo sapiens
atccacccgcctcag

SEQ ID NO: 12041 - DNA, 15 bp, Homo sapiens
gatccacccgcctca

SEQ ID NO: 12042 - DNA, 15 bp, Homo sapiens
tgatccacccgcctc

SEQ ID NO: 12043 - DNA, 15 bp, Homo sapiens
gtgatccacccgcct

SEQ ID NO: 12044 - DNA, 15 bp, Homo sapiens
ggtgatccacccgcc

SEQ ID NO: 12045 - DNA, 15 bp, Homo sapiens
tggtgatccacccgc

SEQ ID NO: 12046 - DNA, 15 bp, Homo sapiens
ctggtgatccacccg

SEQ ID NO: 12047 - DNA, 15 bp, Homo sapiens
tctggtgatccaccc

SEQ ID NO: 12048 - DNA, 15 bp, Homo sapiens
ctctggtgatccacc

SEQ ID NO: 12049 - DNA, 15 bp, Homo sapiens
cctctggtgatccac

SEQ ID NO: 12050 - DNA, 15 bp, Homo sapiens
acctctggtgatcca

SEQ ID NO: 12051 - DNA, 15 bp, Homo sapiens
gacctctggtgatcc

SEQ ID NO: 12052 - DNA, 15 bp, Homo sapiens
tgacctctggtgatc

SEQ ID NO: 12053 - DNA, 15 bp, Homo sapiens
gtgacctctggtgat

SEQ ID NO: 12054 - DNA, 15 bp, Homo sapiens
cgtgacctctggtga

SEQ ID NO: 12055 - DNA, 15 bp, Homo sapiens
tcgtgacctctggtg

SEQ ID NO: 12056 - DNA, 15 bp, Homo sapiens
ctcgtgacctctggt

SEQ ID NO: 12057 - DNA, 15 bp, Homo sapiens
actcgtgacctctgg

SEQ ID NO: 12058 - DNA, 15 bp, Homo sapiens
aactcgtgacctctg

SEQ ID NO: 12059 - DNA, 15 bp, Homo sapiens
aaactcgtgacctct

SEQ ID NO: 12060 - DNA, 15 bp, Homo sapiens
taaactcgtgacctc

SEQ ID NO: 12061 - DNA, 15 bp, Homo sapiens
ttaaactcgtgacct

SEQ ID NO: 12062 - DNA, 15 bp, Homo sapiens
cttaaactcgtgacc

SEQ ID NO: 12063 - DNA, 15 bp, Homo sapiens
tcttaaactcgtgac

SEQ ID NO: 12064 - DNA, 15 bp, Homo sapiens
gtcttaaactcgtga

SEQ ID NO: 12065 - DNA, 15 bp, Homo sapiens
ggtcttaaactcgtg

SEQ ID NO: 12066 - DNA, 15 bp, Homo sapiens
tggtcttaaactcgt

SEQ ID NO: 12067 - DNA, 15 bp, Homo sapiens
ctggtcttaaactcg

SEQ ID NO: 12068 - DNA, 15 bp, Homo sapiens
gctggtcttaaactc

SEQ ID NO: 12069 - DNA, 15 bp, Homo sapiens
ggctggtcttaaact

SEQ ID NO: 12070 - DNA, 15 bp, Homo sapiens
aggctggtcttaaac

SEQ ID NO: 12071 - DNA, 15 bp, Homo sapiens
caggctggtcttaaa

SEQ ID NO: 12072 - DNA, 15 bp, Homo sapiens
ccaggctggtcttaa

SEQ ID NO: 12073 - DNA, 15 bp, Homo sapiens
gccaggctggtctta

SEQ ID NO: 12074 - DNA, 15 bp, Homo sapiens
agccaggctggtctt

SEQ ID NO: 12075 - DNA, 15 bp, Homo sapiens
tagccaggctggtct

SEQ ID NO: 12076 - DNA, 15 bp, Homo sapiens
ttagccaggctggtc

SEQ ID NO: 12077 - DNA, 15 bp, Homo sapiens
cttagccaggctggt

SEQ ID NO: 12078 - DNA, 15 bp, Homo sapiens
tcttagccaggctgg

SEQ ID NO: 12079 - DNA, 15 bp, Homo sapiens
atcttagccaggctg

SEQ ID NO: 12080 - DNA, 15 bp, Homo sapiens
catcttagccaggct

SEQ ID NO: 12081 - DNA, 15 bp, Homo sapiens
ccatcttagccaggc

SEQ ID NO: 12082 - DNA, 15 bp, Homo sapiens
accatcttagccagg

SEQ ID NO: 12083 - DNA, 15 bp, Homo sapiens
caccatcttagccag

SEQ ID NO: 12084 - DNA, 15 bp, Homo sapiens
tcaccatcttagcca

SEQ ID NO: 12085 - DNA, 15 bp, Homo sapiens
ttcaccatcttagcc

SEQ ID NO: 12086 - DNA, 15 bp, Homo sapiens
cttcaccatcttagc

SEQ ID NO: 12087 - DNA, 15 bp, Homo sapiens
gcttcaccatcttag

SEQ ID NO: 12088 - DNA, 15 bp, Homo sapiens
ggcttcaccatctta

SEQ ID NO: 12089 - DNA, 15 bp, Homo sapiens
gggcttcaccatctt

SEQ ID NO: 12090 - DNA, 15 bp, Homo sapiens
ggggcttcaccatct

SEQ ID NO: 12091 - DNA, 15 bp, Homo sapiens
cggggcttcaccatc

SEQ ID NO: 12092 - DNA, 15 bp, Homo sapiens
acggggcttcaccat

SEQ ID NO: 12093 - DNA, 15 bp, Homo sapiens
gacggggcttcacca

SEQ ID NO: 12094 - DNA, 15 bp, Homo sapiens
agacggggcttcacc

SEQ ID NO: 12095 - DNA, 15 bp, Homo sapiens
gagacggggcttcac

SEQ ID NO: 12096 - DNA, 15 bp, Homo sapiens
agagacggggcttca

SEQ ID NO: 12097 - DNA, 15 bp, Homo sapiens
tagagacggggcttc

SEQ ID NO: 12098 - DNA, 15 bp, Homo sapiens
gtagagacggggctt

SEQ ID NO: 12099 - DNA, 15 bp, Homo sapiens
agtagagacggggct

SEQ ID NO: 12100 - DNA, 15 bp, Homo sapiens
tagtagagacggggc

SEQ ID NO: 12101 - DNA, 15 bp, Homo sapiens
ttagtagagacgggg

SEQ ID NO: 12102 - DNA, 15 bp, Homo sapiens
tttagtagagacggg

SEQ ID NO: 12103 - DNA, 15 bp, Homo sapiens
ttttagtagagacgg

SEQ ID NO: 12104 - DNA, 15 bp, Homo sapiens
cttttagtagagacg

SEQ ID NO: 12105 - DNA, 15 bp, Homo sapiens
acttttagtagagac

SEQ ID NO: 12106 - DNA, 15 bp, Homo sapiens
tacttttagtagaga

SEQ ID NO: 12107 - DNA, 15 bp, Homo sapiens
gtacttttagtagag

SEQ ID NO: 12108 - DNA, 15 bp, Homo sapiens
tgtacttttagtaga

SEQ ID NO: 12109 - DNA, 15 bp, Homo sapiens
ttgtacttttagtag

SEQ ID NO: 12110 - DNA, 15 bp, Homo sapiens
tttgtacttttagta

SEQ ID NO: 12111 - DNA, 15 bp, Homo sapiens
ttttgtacttttagt

SEQ ID NO: 12112 - DNA, 15 bp, Homo sapiens
tttttgtacttttag

SEQ ID NO: 12113 - DNA, 15 bp, Homo sapiens
ttttttgtactttta

SEQ ID NO: 12114 - DNA, 15 bp, Homo sapiens
attttttgtactttt

SEQ ID NO: 12115 - DNA, 15 bp, Homo sapiens
aattttttgtacttt

SEQ ID NO: 12116 - DNA, 15 bp, Homo sapiens
taattttttgtactt

SEQ ID NO: 12117 - DNA, 15 bp, Homo sapiens
ctaattttttgtact

SEQ ID NO: 12118 - DNA, 15 bp, Homo sapiens
gctaattttttgtac

SEQ ID NO: 12119 - DNA, 15 bp, Homo sapiens
agctaattttttgta

SEQ ID NO: 12120 - DNA, 15 bp, Homo sapiens
cagctaattttttgt

SEQ ID NO: 12121 - DNA, 15 bp, Homo sapiens
ccagctaattttttg

SEQ ID NO: 12122 - DNA, 15 bp, Homo sapiens
cccagctaatttttt

SEQ ID NO: 12123 - DNA, 15 bp, Homo sapiens
acccagctaattttt

SEQ ID NO: 12124 - DNA, 15 bp, Homo sapiens
cacccagctaatttt

SEQ ID NO: 12125 - DNA, 15 bp, Homo sapiens
acacccagctaattt

SEQ ID NO: 12126 - DNA, 15 bp, Homo sapiens
cacacccagctaatt

SEQ ID NO: 12127 - DNA, 15 bp, Homo sapiens
ccacacccagctaat

SEQ ID NO: 12128 - DNA, 15 bp, Homo sapiens
accacacccagctaa

SEQ ID NO: 12129 - DNA, 15 bp, Homo sapiens
caccacacccagcta

SEQ ID NO: 12130 - DNA, 15 bp, Homo sapiens
ccaccacacccagct

SEQ ID NO: 12131 - DNA, 15 bp, Homo sapiens
accaccacacccagc

SEQ ID NO: 12132 - DNA, 15 bp, Homo sapiens
caccaccacacccag

SEQ ID NO: 12133 - DNA, 15 bp, Homo sapiens
ccaccaccacaccca

SEQ ID NO: 12134 - DNA, 15 bp, Homo sapiens
cccaccaccacaccc

SEQ ID NO: 12135 - DNA, 15 bp, Homo sapiens
acccaccaccacacc

SEQ ID NO: 12136 - DNA, 15 bp, Homo sapiens
cacccaccaccacac

SEQ ID NO: 12137 - DNA, 15 bp, Homo sapiens
gcacccaccaccaca

SEQ ID NO: 12138 - DNA, 15 bp, Homo sapiens
ggcacccaccaccac

SEQ ID NO: 12139 - DNA, 15 bp, Homo sapiens
aggcacccaccacca

SEQ ID NO: 12140 - DNA, 15 bp, Homo sapiens
caggcacccaccacc

SEQ ID NO: 12141 - DNA, 15 bp, Homo sapiens
acaggcacccaccac

SEQ ID NO: 12142 - DNA, 15 bp, Homo sapiens
tacaggcacccacca

SEQ ID NO: 12143 - DNA, 15 bp, Homo sapiens
ttacaggcacccacc

SEQ ID NO: 12144 - DNA, 15 bp, Homo sapiens
attacaggcacccac

SEQ ID NO: 12145 - DNA, 15 bp, Homo sapiens
gattacaggcaccca

SEQ ID NO: 12146 - DNA, 15 bp, Homo sapiens
ggattacaggcaccc

SEQ ID NO: 12147 - DNA, 15 bp, Homo sapiens
gggattacaggcacc

SEQ ID NO: 12148 - DNA, 15 bp, Homo sapiens
tgggattacaggcac

SEQ ID NO: 12149 - DNA, 15 bp, Homo sapiens
ctgggattacaggca

SEQ ID NO: 12150 - DNA, 15 bp, Homo sapiens
gctgggattacaggc

SEQ ID NO: 12151 - DNA, 15 bp, Homo sapiens
agctgggattacagg

SEQ ID NO: 12152 - DNA, 15 bp, Homo sapiens
tagctgggattacag

SEQ ID NO: 12153 - DNA, 15 bp, Homo sapiens
gtagctgggattaca

SEQ ID NO: 12154 - DNA, 15 bp, Homo sapiens
agtagctgggattac

SEQ ID NO: 12155 - DNA, 15 bp, Homo sapiens
gagtagctgggatta

SEQ ID NO: 12156 - DNA, 15 bp, Homo sapiens
cgagtagctgggatt

SEQ ID NO: 12157 - DNA, 15 bp, Homo sapiens
ccgagtagctgggat

SEQ ID NO: 12158 - DNA, 15 bp, Homo sapiens
cccgagtagctggga

SEQ ID NO: 12159 - DNA, 15 bp, Homo sapiens
tcccgagtagctggg

SEQ ID NO: 12160 - DNA, 15 bp, Homo sapiens
ctcccgagtagctgg

SEQ ID NO: 12161 - DNA, 15 bp, Homo sapiens
cctcccgagtagctg

SEQ ID NO: 12162 - DNA, 15 bp, Homo sapiens
gcctcccgagtagct

SEQ ID NO: 12163 - DNA, 15 bp, Homo sapiens
agcctcccgagtagc

SEQ ID NO: 12164 - DNA, 15 bp, Homo sapiens
cagcctcccgagtag

SEQ ID NO: 12165 - DNA, 15 bp, Homo sapiens
tcagcctcccgagta

SEQ ID NO: 12166 - DNA, 15 bp, Homo sapiens
ctcagcctcccgagt

SEQ ID NO: 12167 - DNA, 15 bp, Homo sapiens
cctcagcctcccgag

SEQ ID NO: 12168 - DNA, 15 bp, Homo sapiens
gcctcagcctcccga

SEQ ID NO: 12169 - DNA, 15 bp, Homo sapiens
tgcctcagcctcccg

SEQ ID NO: 12170 - DNA, 15 bp, Homo sapiens
ctgcctcagcctccc

SEQ ID NO: 12171 - DNA, 15 bp, Homo sapiens
cctgcctcagcctcc

SEQ ID NO: 12172 - DNA, 15 bp, Homo sapiens
tcctgcctcagcctc

SEQ ID NO: 12173 - DNA, 15 bp, Homo sapiens
ctcctgcctcagcct

SEQ ID NO: 12174 - DNA, 15 bp, Homo sapiens
tctcctgcctcagcc

SEQ ID NO: 12175 - DNA, 15 bp, Homo sapiens
ttctcctgcctcagc

SEQ ID NO: 12176 - DNA, 15 bp, Homo sapiens
attctcctgcctcag

SEQ ID NO: 12177 - DNA, 15 bp, Homo sapiens
aattctcctgcctca

SEQ ID NO: 12178 - DNA, 15 bp, Homo sapiens
caattctcctgcctc

SEQ ID NO: 12179 - DNA, 15 bp, Homo sapiens
gcaattctcctgcct

SEQ ID NO: 12180 - DNA, 15 bp, Homo sapiens
agcaattctcctgcc

SEQ ID NO: 12181 - DNA, 15 bp, Homo sapiens
aagcaattctcctgc

SEQ ID NO: 12182 - DNA, 15 bp, Homo sapiens
caagcaattctcctg

SEQ ID NO: 12183 - DNA, 15 bp, Homo sapiens
tcaagcaattctcct

SEQ ID NO: 12184 - DNA, 15 bp, Homo sapiens
ttcaagcaattctcc

SEQ ID NO: 12185 - DNA, 15 bp, Homo sapiens
gttcaagcaattctc

SEQ ID NO: 12186 - DNA, 15 bp, Homo sapiens
ggttcaagcaattct

SEQ ID NO: 12187 - DNA, 15 bp, Homo sapiens
aggttcaagcaattc

SEQ ID NO: 12188 - DNA, 15 bp, Homo sapiens
caggttcaagcaatt

SEQ ID NO: 12189 - DNA, 15 bp, Homo sapiens
ccaggttcaagcaat

SEQ ID NO: 12190 - DNA, 15 bp, Homo sapiens
tccaggttcaagcaa

SEQ ID NO: 12191 - DNA, 15 bp, Homo sapiens
ttccaggttcaagca

SEQ ID NO: 12192 - DNA, 15 bp, Homo sapiens
cttccaggttcaagc

SEQ ID NO: 12193 - DNA, 15 bp, Homo sapiens
ccttccaggttcaag

SEQ ID NO: 12194 - DNA, 15 bp, Homo sapiens
gccttccaggttcaa

SEQ ID NO: 12195 - DNA, 15 bp, Homo sapiens
cgccttccaggttca

SEQ ID NO: 12196 - DNA, 15 bp, Homo sapiens
gcgccttccaggttc

SEQ ID NO: 12197 - DNA, 15 bp, Homo sapiens
tgcgccttccaggtt

SEQ ID NO: 12198 - DNA, 15 bp, Homo sapiens
ctgcgccttccaggt

SEQ ID NO: 12199 - DNA, 15 bp, Homo sapiens
cctgcgccttccagg

SEQ ID NO: 12200 - DNA, 15 bp, Homo sapiens
acctgcgccttccag

SEQ ID NO: 12201 - DNA, 15 bp, Homo sapiens
aacctgcgccttcca

SEQ ID NO: 12202 - DNA, 15 bp, Homo sapiens
caacctgcgccttcc

SEQ ID NO: 12203 - DNA, 15 bp, Homo sapiens
gcaacctgcgccttc

SEQ ID NO: 12204 - DNA, 15 bp, Homo sapiens
tgcaacctgcgcctt

SEQ ID NO: 12205 - DNA, 15 bp, Homo sapiens
ctgcaacctgcgcct

SEQ ID NO: 12206 - DNA, 15 bp, Homo sapiens
actgcaacctgcgcc

SEQ ID NO: 12207 - DNA, 15 bp, Homo sapiens
cactgcaacctgcgc

SEQ ID NO: 12208 - DNA, 15 bp, Homo sapiens
tcactgcaacctgcg

SEQ ID NO: 12209 - DNA, 15 bp, Homo sapiens
ttcactgcaacctgc

SEQ ID NO: 12210 - DNA, 15 bp, Homo sapiens
gttcactgcaacctg

SEQ ID NO: 12211 - DNA, 15 bp, Homo sapiens
agttcactgcaacct

SEQ ID NO: 12212 - DNA, 15 bp, Homo sapiens
cagttcactgcaacc

SEQ ID NO: 12213 - DNA, 15 bp, Homo sapiens
tcagttcactgcaac

SEQ ID NO: 12214 - DNA, 15 bp, Homo sapiens
ctcagttcactgcaa

SEQ ID NO: 12215 - DNA, 15 bp, Homo sapiens
tctcagttcactgca

SEQ ID NO: 12216 - DNA, 15 bp, Homo sapiens
atctcagttcactgc

SEQ ID NO: 12217 - DNA, 15 bp, Homo sapiens
aatctcagttcactg

SEQ ID NO: 12218 - DNA, 15 bp, Homo sapiens
caatctcagttcact

SEQ ID NO: 12219 - DNA, 15 bp, Homo sapiens
gcaatctcagttcac

SEQ ID NO: 12220 - DNA, 15 bp, Homo sapiens
tgcaatctcagttca

SEQ ID NO: 12221 - DNA, 15 bp, Homo sapiens
gtgcaatctcagttc

SEQ ID NO: 12222 - DNA, 15 bp, Homo sapiens
ggtgcaatctcagtt

SEQ ID NO: 12223 - DNA, 15 bp, Homo sapiens
tggtgcaatctcagt

SEQ ID NO: 12224 - DNA, 15 bp, Homo sapiens
atggtgcaatctcag

SEQ ID NO: 12225 - DNA, 15 bp, Homo sapiens
aatggtgcaatctca

SEQ ID NO: 12226 - DNA, 15 bp, Homo sapiens
caatggtgcaatctc

SEQ ID NO: 12227 - DNA, 15 bp, Homo sapiens
gcaatggtgcaatct

SEQ ID NO: 12228 - DNA, 15 bp, Homo sapiens
tgcaatggtgcaatc

SEQ ID NO: 12229 - DNA, 15 bp, Homo sapiens
gtgcaatggtgcaat

SEQ ID NO: 12230 - DNA, 15 bp, Homo sapiens
agtgcaatggtgcaa

SEQ ID NO: 12231 - DNA, 15 bp, Homo sapiens
gagtgcaatggtgca

SEQ ID NO: 12232 - DNA, 15 bp, Homo sapiens
agagtgcaatggtgc

SEQ ID NO: 12233 - DNA, 15 bp, Homo sapiens
tagagtgcaatggtg

SEQ ID NO: 12234 - DNA, 15 bp, Homo sapiens
ctagagtgcaatggt

SEQ ID NO: 12235 - DNA, 15 bp, Homo sapiens
gctagagtgcaatgg

SEQ ID NO: 12236 - DNA, 15 bp, Homo sapiens
ggctagagtgcaatg

SEQ ID NO: 12237 - DNA, 15 bp, Homo sapiens
aggctagagtgcaat

SEQ ID NO: 12238 - DNA, 15 bp, Homo sapiens
gaggctagagtgcaa

SEQ ID NO: 12239 - DNA, 15 bp, Homo sapiens
ggaggctagagtgca

SEQ ID NO: 12240 - DNA, 15 bp, Homo sapiens
tggaggctagagtgc

SEQ ID NO: 12241 - DNA, 15 bp, Homo sapiens
gtggaggctagagtg

SEQ ID NO: 12242 - DNA, 15 bp, Homo sapiens
tgtggaggctagagt

SEQ ID NO: 12243 - DNA, 15 bp, Homo sapiens
ttgtggaggctagag

SEQ ID NO: 12244 - DNA, 15 bp, Homo sapiens
cttgtggaggctaga

SEQ ID NO: 12245 - DNA, 15 bp, Homo sapiens
tcttgtggaggctag

SEQ ID NO: 12246 - DNA, 15 bp, Homo sapiens
ctcttgtggaggcta

SEQ ID NO: 12247 - DNA, 15 bp, Homo sapiens
gctcttgtggaggct

SEQ ID NO: 12248 - DNA, 15 bp, Homo sapiens
cgctcttgtggaggc

SEQ ID NO: 12249 - DNA, 15 bp, Homo sapiens
tcgctcttgtggagg

SEQ ID NO: 12250 - DNA, 15 bp, Homo sapiens
ttcgctcttgtggag

SEQ ID NO: 12251 - DNA, 15 bp, Homo sapiens
tttcgctcttgtgga

SEQ ID NO: 12252 - DNA, 15 bp, Homo sapiens
gtttcgctcttgtgg

SEQ ID NO: 12253 - DNA, 15 bp, Homo sapiens
agtttcgctcttgtg

SEQ ID NO: 12254 - DNA, 15 bp, Homo sapiens
gagtttcgctcttgt

SEQ ID NO: 12255 - DNA, 15 bp, Homo sapiens
ggagtttcgctcttg

SEQ ID NO: 12256 - DNA, 15 bp, Homo sapiens
tggagtttcgctctt

SEQ ID NO: 12257 - DNA, 15 bp, Homo sapiens
atggagtttcgctct

SEQ ID NO: 12258 - DNA, 15 bp, Homo sapiens
gatggagtttcgctc

SEQ ID NO: 12259 - DNA, 15 bp, Homo sapiens
agatggagtttcgct

SEQ ID NO: 12260 - DNA, 15 bp, Homo sapiens
tagatggagtttcgc

SEQ ID NO: 12261 - DNA, 15 bp, Homo sapiens
ttagatggagtttcg

SEQ ID NO: 12262 - DNA, 15 bp, Homo sapiens
tttagatggagtttc

SEQ ID NO: 12263 - DNA, 15 bp, Homo sapiens
ttttagatggagttt

SEQ ID NO: 12264 - DNA, 15 bp, Homo sapiens
tttttagatggagtt

SEQ ID NO: 12265 - DNA, 15 bp, Homo sapiens
ttttttagatggagt

SEQ ID NO: 12266 - DNA, 15 bp, Homo sapiens
tttttttagatggag

SEQ ID NO: 12267 - DNA, 15 bp, Homo sapiens
ttttttttagatgga

SEQ ID NO: 12268 - DNA, 15 bp, Homo sapiens
tttttttttagatgg

SEQ ID NO: 12269 - DNA, 15 bp, Homo sapiens
ttttttttttagatg

SEQ ID NO: 12270 - DNA, 15 bp, Homo sapiens
tttttttttttagat

SEQ ID NO: 12271 - DNA, 15 bp, Homo sapiens
atttttttttttaga

SEQ ID NO: 12272 - DNA, 15 bp, Homo sapiens
tatttttttttttag

SEQ ID NO: 12273 - DNA, 15 bp, Homo sapiens
ctattttttttttta

SEQ ID NO: 12274 - DNA, 15 bp, Homo sapiens
actattttttttttt

SEQ ID NO: 12275 - DNA, 15 bp, Homo sapiens
aactatttttttttt

SEQ ID NO: 12276 - DNA, 15 bp, Homo sapiens
gaactattttttttt

SEQ ID NO: 12277 - DNA, 15 bp, Homo sapiens
tgaactatttttttt

SEQ ID NO: 12278 - DNA, 15 bp, Homo sapiens
ttgaactattttttt

SEQ ID NO: 12279 - DNA, 15 bp, Homo sapiens
tttgaactatttttt

SEQ ID NO: 12280 - DNA, 15 bp, Homo sapiens
ttttgaactattttt

SEQ ID NO: 12281 - DNA, 15 bp, Homo sapiens
gttttgaactatttt

SEQ ID NO: 12282 - DNA, 15 bp, Homo sapiens
tgttttgaactattt

SEQ ID NO: 12283 - DNA, 15 bp, Homo sapiens
gtgttttgaactatt

SEQ ID NO: 12284 - DNA, 15 bp, Homo sapiens
agtgttttgaactat

SEQ ID NO: 12285 - DNA, 15 bp, Homo sapiens
cagtgttttgaacta

SEQ ID NO: 12286 - DNA, 15 bp, Homo sapiens
ccagtgttttgaact

SEQ ID NO: 12287 - DNA, 15 bp, Homo sapiens
tccagtgttttgaac

SEQ ID NO: 12288 - DNA, 15 bp, Homo sapiens
atccagtgttttgaa

SEQ ID NO: 12289 - DNA, 15 bp, Homo sapiens
catccagtgttttga

SEQ ID NO: 12290 - DNA, 15 bp, Homo sapiens
tcatccagtgttttg

SEQ ID NO: 12291 - DNA, 15 bp, Homo sapiens
atcatccagtgtttt

SEQ ID NO: 12292 - DNA, 15 bp, Homo sapiens
catcatccagtgttt

SEQ ID NO: 12293 - DNA, 15 bp, Homo sapiens
gcatcatccagtgtt

SEQ ID NO: 12294 - DNA, 15 bp, Homo sapiens
agcatcatccagtgt

SEQ ID NO: 12295 - DNA, 15 bp, Homo sapiens
cagcatcatccagtg

SEQ ID NO: 12296 - DNA, 15 bp, Homo sapiens
acagcatcatccagt

SEQ ID NO: 12297 - DNA, 15 bp, Homo sapiens
cacagcatcatccag

SEQ ID NO: 12298 - DNA, 15 bp, Homo sapiens
ccacagcatcatcca

SEQ ID NO: 12299 - DNA, 15 bp, Homo sapiens
tccacagcatcatcc

SEQ ID NO: 12300 - DNA, 15 bp, Homo sapiens
atccacagcatcatc

SEQ ID NO: 12301 - DNA, 15 bp, Homo sapiens
tatccacagcatcat

SEQ ID NO: 12302 - DNA, 15 bp, Homo sapiens
ctatccacagcatca

SEQ ID NO: 12303 - DNA, 15 bp, Homo sapiens
actatccacagcatc

SEQ ID NO: 12304 - DNA, 15 bp, Homo sapiens
cactatccacagcat

SEQ ID NO: 12305 - DNA, 15 bp, Homo sapiens
tcactatccacagca

SEQ ID NO: 12306 - DNA, 15 bp, Homo sapiens
gtcactatccacagc

SEQ ID NO: 12307 - DNA, 15 bp, Homo sapiens
tgtcactatccacag

SEQ ID NO: 12308 - DNA, 15 bp, Homo sapiens
gtgtcactatccaca

SEQ ID NO: 12309 - DNA, 15 bp, Homo sapiens
ggtgtcactatccac

SEQ ID NO: 12310 - DNA, 15 bp, Homo sapiens
cggtgtcactatcca

SEQ ID NO: 12311 - DNA, 15 bp, Homo sapiens
acggtgtcactatcc

SEQ ID NO: 12312 - DNA, 15 bp, Homo sapiens
cacggtgtcactatc

SEQ ID NO: 12313 - DNA, 15 bp, Homo sapiens
tcacggtgtcactat

SEQ ID NO: 12314 - DNA, 15 bp, Homo sapiens
atcacggtgtcacta

SEQ ID NO: 12315 - DNA, 15 bp, Homo sapiens
gatcacggtgtcact

SEQ ID NO: 12316 - DNA, 15 bp, Homo sapiens
agatcacggtgtcac

SEQ ID NO: 12317 - DNA, 15 bp, Homo sapiens
aagatcacggtgtca

SEQ ID NO: 12318 - DNA, 15 bp, Homo sapiens
gaagatcacggtgtc

SEQ ID NO: 12319 - DNA, 15 bp, Homo sapiens
tgaagatcacggtgt

SEQ ID NO: 12320 - DNA, 15 bp, Homo sapiens
ttgaagatcacggtg

SEQ ID NO: 12321 - DNA, 15 bp, Homo sapiens
tttgaagatcacggt

SEQ ID NO: 12322 - DNA, 15 bp, Homo sapiens
ctttgaagatcacgg

SEQ ID NO: 12323 - DNA, 15 bp, Homo sapiens
gctttgaagatcacg

SEQ ID NO: 12324 - DNA, 15 bp, Homo sapiens
ggctttgaagatcac

SEQ ID NO: 12325 - DNA, 15 bp, Homo sapiens
tggctttgaagatca

SEQ ID NO: 12326 - DNA, 15 bp, Homo sapiens
gtggctttgaagatc

SEQ ID NO: 12327 - DNA, 15 bp, Homo sapiens
tgtggctttgaagat

SEQ ID NO: 12328 - DNA, 15 bp, Homo sapiens
ctgtggctttgaaga

SEQ ID NO: 12329 - DNA, 15 bp, Homo sapiens
tctgtggctttgaag

SEQ ID NO: 12330 - DNA, 15 bp, Homo sapiens
gtctgtggctttgaa

SEQ ID NO: 12331 - DNA, 15 bp, Homo sapiens
tgtctgtggctttga

SEQ ID NO: 12332 - DNA, 15 bp, Homo sapiens
gtgtctgtggctttg

SEQ ID NO: 12333 - DNA, 15 bp, Homo sapiens
ggtgtctgtggcttt

SEQ ID NO: 12334 - DNA, 15 bp, Homo sapiens
gggtgtctgtggctt

SEQ ID NO: 12335 - DNA, 15 bp, Homo sapiens
cgggtgtctgtggct

SEQ ID NO: 12336 - DNA, 15 bp, Homo sapiens
acgggtgtctgtggc

SEQ ID NO: 12337 - DNA, 15 bp, Homo sapiens
gacgggtgtctgtgg

SEQ ID NO: 12338 - DNA, 15 bp, Homo sapiens
agacgggtgtctgtg

SEQ ID NO: 12339 - DNA, 15 bp, Homo sapiens
aagacgggtgtctgt

SEQ ID NO: 12340 - DNA, 15 bp, Homo sapiens
caagacgggtgtctg

SEQ ID NO: 12341 - DNA, 15 bp, Homo sapiens
tcaagacgggtgtct

SEQ ID NO: 12342 - DNA, 15 bp, Homo sapiens
atcaagacgggtgtc

SEQ ID NO: 12343 - DNA, 15 bp, Homo sapiens
tatcaagacgggtgt

SEQ ID NO: 12344 - DNA, 15 bp, Homo sapiens
gtatcaagacgggtg

SEQ ID NO: 12345 - DNA, 15 bp, Homo sapiens
agtatcaagacgggt

SEQ ID NO: 12346 - DNA, 15 bp, Homo sapiens
aagtatcaagacggg

SEQ ID NO: 12347 - DNA, 15 bp, Homo sapiens
caagtatcaagacgg

SEQ ID NO: 12348 - DNA, 15 bp, Homo sapiens
acaagtatcaagacg

SEQ ID NO: 12349 - DNA, 15 bp, Homo sapiens
aacaagtatcaagac

SEQ ID NO: 12350 - DNA, 15 bp, Homo sapiens
taacaagtatcaaga

SEQ ID NO: 12351 - DNA, 15 bp, Homo sapiens
ctaacaagtatcaag

SEQ ID NO: 12352 - DNA, 15 bp, Homo sapiens
tctaacaagtatcaa

SEQ ID NO: 12353 - DNA, 15 bp, Homo sapiens
atctaacaagtatca

SEQ ID NO: 12354 - DNA, 15 bp, Homo sapiens
aatctaacaagtatc

SEQ ID NO: 12355 - DNA, 15 bp, Homo sapiens
taatctaacaagtat

SEQ ID NO: 12356 - DNA, 15 bp, Homo sapiens
ttaatctaacaagta

SEQ ID NO: 12357 - DNA, 15 bp, Homo sapiens
tttaatctaacaagt

SEQ ID NO: 12358 - DNA, 15 bp, Homo sapiens
ttttaatctaacaag

SEQ ID NO: 12359 - DNA, 15 bp, Homo sapiens
tttttaatctaacaa

SEQ ID NO: 12360 - DNA, 15 bp, Homo sapiens
gtttttaatctaaca

SEQ ID NO: 12361 - DNA, 15 bp, Homo sapiens
tgtttttaatctaac

SEQ ID NO: 12362 - DNA, 15 bp, Homo sapiens
ctgtttttaatctaa

SEQ ID NO: 12363 - DNA, 15 bp, Homo sapiens
actgtttttaatcta

SEQ ID NO: 12364 - DNA, 15 bp, Homo sapiens
gactgtttttaatct

SEQ ID NO: 12365 - DNA, 15 bp, Homo sapiens
ggactgtttttaatc

SEQ ID NO: 12366 - DNA, 15 bp, Homo sapiens
tggactgtttttaat

SEQ ID NO: 12367 - DNA, 15 bp, Homo sapiens
atggactgtttttaa

SEQ ID NO: 12368 - DNA, 15 bp, Homo sapiens
aatggactgttttta

SEQ ID NO: 12369 - DNA, 15 bp, Homo sapiens
caatggactgttttt

SEQ ID NO: 12370 - DNA, 15 bp, Homo sapiens
acaatggactgtttt

SEQ ID NO: 12371 - DNA, 15 bp, Homo sapiens
gacaatggactgttt

SEQ ID NO: 12372 - DNA, 15 bp, Homo sapiens
agacaatggactgtt

SEQ ID NO: 12373 - DNA, 15 bp, Homo sapiens
cagacaatggactgt

SEQ ID NO: 12374 - DNA, 15 bp, Homo sapiens
ccagacaatggactg

SEQ ID NO: 12375 - DNA, 15 bp, Homo sapiens
tccagacaatggact

SEQ ID NO: 12376 - DNA, 15 bp, Homo sapiens
ttccagacaatggac

SEQ ID NO: 12377 - DNA, 15 bp, Homo sapiens
attccagacaatgga

SEQ ID NO: 12378 - DNA, 15 bp, Homo sapiens
gattccagacaatgg

SEQ ID NO: 12379 - DNA, 15 bp, Homo sapiens
tgattccagacaatg

SEQ ID NO: 12380 - DNA, 15 bp, Homo sapiens
gtgattccagacaat

SEQ ID NO: 12381 - DNA, 15 bp, Homo sapiens
tgtgattccagacaa

SEQ ID NO: 12382 - DNA, 15 bp, Homo sapiens
gtgtgattccagaca

SEQ ID NO: 12383 - DNA, 15 bp, Homo sapiens
agtgtgattccagac

SEQ ID NO: 12384 - DNA, 15 bp, Homo sapiens
aagtgtgattccaga

SEQ ID NO: 12385 - DNA, 15 bp, Homo sapiens
taagtgtgattccag

SEQ ID NO: 12386 - DNA, 15 bp, Homo sapiens
ttaagtgtgattcca

SEQ ID NO: 12387 - DNA, 15 bp, Homo sapiens
attaagtgtgattcc

SEQ ID NO: 12388 - DNA, 15 bp, Homo sapiens
cattaagtgtgattc

SEQ ID NO: 12389 - DNA, 15 bp, Homo sapiens
ccattaagtgtgatt

SEQ ID NO: 12390 - DNA, 15 bp, Homo sapiens
accattaagtgtgat

SEQ ID NO: 12391 - DNA, 15 bp, Homo sapiens
gaccattaagtgtga

SEQ ID NO: 12392 - DNA, 15 bp, Homo sapiens
ggaccattaagtgtg

SEQ ID NO: 12393 - DNA, 15 bp, Homo sapiens
tggaccattaagtgt

SEQ ID NO: 12394 - DNA, 15 bp, Homo sapiens
atggaccattaagtg

SEQ ID NO: 12395 - DNA, 15 bp, Homo sapiens
aatggaccattaagt

SEQ ID NO: 12396 - DNA, 15 bp, Homo sapiens
caatggaccattaag

SEQ ID NO: 12397 - DNA, 15 bp, Homo sapiens
acaatggaccattaa

SEQ ID NO: 12398 - DNA, 15 bp, Homo sapiens
aacaatggaccatta

SEQ ID NO: 12399 - DNA, 15 bp, Homo sapiens
taacaatggaccatt

SEQ ID NO: 12400 - DNA, 15 bp, Homo sapiens
ttaacaatggaccat

SEQ ID NO: 12401 - DNA, 15 bp, Homo sapiens
tttaacaatggacca

SEQ ID NO: 12402 - DNA, 15 bp, Homo sapiens
atttaacaatggacc

SEQ ID NO: 12403 - DNA, 15 bp, Homo sapiens
tatttaacaatggac

SEQ ID NO: 12404 - DNA, 15 bp, Homo sapiens
atatttaacaatgga

SEQ ID NO: 12405 - DNA, 15 bp, Homo sapiens
aatatttaacaatgg

SEQ ID NO: 12406 - DNA, 15 bp, Homo sapiens
caatatttaacaatg

SEQ ID NO: 12407 - DNA, 15 bp, Homo sapiens
ccaatatttaacaat

SEQ ID NO: 12408 - DNA, 15 bp, Homo sapiens
cccaatatttaacaa

SEQ ID NO: 12409 - DNA, 15 bp, Homo sapiens
ccccaatatttaaca

SEQ ID NO: 12410 - DNA, 15 bp, Homo sapiens
cccccaatatttaac

SEQ ID NO: 12411 - DNA, 15 bp, Homo sapiens
gcccccaatatttaa

SEQ ID NO: 12412 - DNA, 15 bp, Homo sapiens
tgcccccaatattta

SEQ ID NO: 12413 - DNA, 15 bp, Homo sapiens
ctgcccccaatattt

SEQ ID NO: 12414 - DNA, 15 bp, Homo sapiens
tctgcccccaatatt

SEQ ID NO: 12415 - DNA, 15 bp, Homo sapiens
ttctgcccccaatat

SEQ ID NO: 12416 - DNA, 15 bp, Homo sapiens
tttctgcccccaata

SEQ ID NO: 12417 - DNA, 15 bp, Homo sapiens
atttctgcccccaat

SEQ ID NO: 12418 - DNA, 15 bp, Homo sapiens
gatttctgcccccaa

SEQ ID NO: 12419 - DNA, 15 bp, Homo sapiens
agatttctgccccca

SEQ ID NO: 12420 - DNA, 15 bp, Homo sapiens
cagatttctgccccc

SEQ ID NO: 12421 - DNA, 15 bp, Homo sapiens
ccagatttctgcccc

SEQ ID NO: 12422 - DNA, 15 bp, Homo sapiens
cccagatttctgccc

SEQ ID NO: 12423 - DNA, 15 bp, Homo sapiens
tcccagatttctgcc

SEQ ID NO: 12424 - DNA, 15 bp, Homo sapiens
ttcccagatttctgc

SEQ ID NO: 12425 - DNA, 15 bp, Homo sapiens
cttcccagatttctg

SEQ ID NO: 12426 - DNA, 15 bp, Homo sapiens
ccttcccagatttct

SEQ ID NO: 12427 - DNA, 15 bp, Homo sapiens
accttcccagatttc

SEQ ID NO: 12428 - DNA, 15 bp, Homo sapiens
taccttcccagattt

SEQ ID NO: 12429 - DNA, 15 bp, Homo sapiens
ttaccttcccagatt

SEQ ID NO: 12430 - DNA, 15 bp, Homo sapiens
attaccttcccagat

SEQ ID NO: 12431 - DNA, 15 bp, Homo sapiens
cattaccttcccaga

SEQ ID NO: 12432 - DNA, 15 bp, Homo sapiens
ccattaccttcccag

SEQ ID NO: 12433 - DNA, 15 bp, Homo sapiens
cccattaccttccca

SEQ ID NO: 12434 - DNA, 15 bp, Homo sapiens
tcccattaccttccc

SEQ ID NO: 12435 - DNA, 15 bp, Homo sapiens
ctcccattaccttcc

SEQ ID NO: 12436 - DNA, 15 bp, Homo sapiens
cctcccattaccttc

SEQ ID NO: 12437 - DNA, 15 bp, Homo sapiens
gcctcccattacctt

SEQ ID NO: 12438 - DNA, 15 bp, Homo sapiens
ggcctcccattacct

SEQ ID NO: 12439 - DNA, 15 bp, Homo sapiens
cggcctcccattacc

SEQ ID NO: 12440 - DNA, 15 bp, Homo sapiens
acggcctcccattac

SEQ ID NO: 12441 - DNA, 15 bp, Homo sapiens
aacggcctcccatta

SEQ ID NO: 12442 - DNA, 15 bp, Homo sapiens
aaacggcctcccatt

SEQ ID NO: 12443 - DNA, 15 bp, Homo sapiens
aaaacggcctcccat

SEQ ID NO: 12444 - DNA, 15 bp, Homo sapiens
caaaacggcctccca

SEQ ID NO: 12445 - DNA, 15 bp, Homo sapiens
ccaaaacggcctccc

SEQ ID NO: 12446 - DNA, 15 bp, Homo sapiens
cccaaaacggcctcc

SEQ ID NO: 12447 - DNA, 15 bp, Homo sapiens
tcccaaaacggcctc

SEQ ID NO: 12448 - DNA, 15 bp, Homo sapiens
ttcccaaaacggcct

SEQ ID NO: 12449 - DNA, 15 bp, Homo sapiens
tttcccaaaacggcc

SEQ ID NO: 12450 - DNA, 15 bp, Homo sapiens
atttcccaaaacggc

SEQ ID NO: 12451 - DNA, 15 bp, Homo sapiens
tatttcccaaaacgg

SEQ ID NO: 12452 - DNA, 15 bp, Homo sapiens
ttatttcccaaaacg

SEQ ID NO: 12453 - DNA, 15 bp, Homo sapiens
attatttcccaaaac

SEQ ID NO: 12454 - DNA, 15 bp, Homo sapiens
cattatttcccaaaa

SEQ ID NO: 12455 - DNA, 15 bp, Homo sapiens
tcattatttcccaaa

SEQ ID NO: 12456 - DNA, 15 bp, Homo sapiens
ttcattatttcccaa

SEQ ID NO: 12457 - DNA, 15 bp, Homo sapiens
attcattatttccca

SEQ ID NO: 12458 - DNA, 15 bp, Homo sapiens
aattcattatttccc

SEQ ID NO: 12459 - DNA, 15 bp, Homo sapiens
gaattcattatttcc

SEQ ID NO: 12460 - DNA, 15 bp, Homo sapiens
tgaattcattatttc

SEQ ID NO: 12461 - DNA, 15 bp, Homo sapiens
ttgaattcattattt

SEQ ID NO: 12462 - DNA, 15 bp, Homo sapiens
tttgaattcattatt

SEQ ID NO: 12463 - DNA, 15 bp, Homo sapiens
atttgaattcattat

SEQ ID NO: 12464 - DNA, 15 bp, Homo sapiens
aatttgaattcatta

SEQ ID NO: 12465 - DNA, 15 bp, Homo sapiens
taatttgaattcatt

SEQ ID NO: 12466 - DNA, 15 bp, Homo sapiens
gtaatttgaattcat

SEQ ID NO: 12467 - DNA, 15 bp, Homo sapiens
ggtaatttgaattca

SEQ ID NO: 12468 - DNA, 15 bp, Homo sapiens
aggtaatttgaattc

SEQ ID NO: 12469 - DNA, 15 bp, Homo sapiens
caggtaatttgaatt

SEQ ID NO: 12470 - DNA, 15 bp, Homo sapiens
gcaggtaatttgaat

SEQ ID NO: 12471 - DNA, 15 bp, Homo sapiens
agcaggtaatttgaa

SEQ ID NO: 12472 - DNA, 15 bp, Homo sapiens
cagcaggtaatttga

SEQ ID NO: 12473 - DNA, 15 bp, Homo sapiens
acagcaggtaatttg

SEQ ID NO: 12474 - DNA, 15 bp, Homo sapiens
gacagcaggtaattt

SEQ ID NO: 12475 - DNA, 15 bp, Homo sapiens
agacagcaggtaatt

SEQ ID NO: 12476 - DNA, 15 bp, Homo sapiens
aagacagcaggtaat

SEQ ID NO: 12477 - DNA, 15 bp, Homo sapiens
gaagacagcaggtaa

SEQ ID NO: 12478 - DNA, 15 bp, Homo sapiens
tgaagacagcaggta

SEQ ID NO: 12479 - DNA, 15 bp, Homo sapiens
gtgaagacagcaggt

SEQ ID NO: 12480 - DNA, 15 bp, Homo sapiens
tgtgaagacagcagg

SEQ ID NO: 12481 - DNA, 15 bp, Homo sapiens
ttgtgaagacagcag

SEQ ID NO: 12482 - DNA, 15 bp, Homo sapiens
cttgtgaagacagca

SEQ ID NO: 12483 - DNA, 15 bp, Homo sapiens
ccttgtgaagacagc

SEQ ID NO: 12484 - DNA, 15 bp, Homo sapiens
cccttgtgaagacag

SEQ ID NO: 12485 - DNA, 15 bp, Homo sapiens
tcccttgtgaagaca

SEQ ID NO: 12486 - DNA, 15 bp, Homo sapiens
ttcccttgtgaagac

SEQ ID NO: 12487 - DNA, 15 bp, Homo sapiens
attcccttgtgaaga

SEQ ID NO: 12488 - DNA, 15 bp, Homo sapiens
aattcccttgtgaag

SEQ ID NO: 12489 - DNA, 15 bp, Homo sapiens
taattcccttgtgaa

SEQ ID NO: 12490 - DNA, 15 bp, Homo sapiens
ataattcccttgtga

SEQ ID NO: 12491 - DNA, 15 bp, Homo sapiens
gataattcccttgtg

SEQ ID NO: 12492 - DNA, 15 bp, Homo sapiens
ggataattcccttgt

SEQ ID NO: 12493 - DNA, 15 bp, Homo sapiens
aggataattcccttg

SEQ ID NO: 12494 - DNA, 15 bp, Homo sapiens
gaggataattccctt

SEQ ID NO: 12495 - DNA, 15 bp, Homo sapiens
agaggataattccct

SEQ ID NO: 12496 - DNA, 15 bp, Homo sapiens
gagaggataattccc

SEQ ID NO: 12497 - DNA, 15 bp, Homo sapiens
agagaggataattcc

SEQ ID NO: 12498 - DNA, 15 bp, Homo sapiens
aagagaggataattc

SEQ ID NO: 12499 - DNA, 15 bp, Homo sapiens
caagagaggataatt

SEQ ID NO: 12500 - DNA, 15 bp, Homo sapiens
ccaagagaggataat

SEQ ID NO: 12501 - DNA, 15 bp, Homo sapiens
gccaagagaggataa

SEQ ID NO: 12502 - DNA, 15 bp, Homo sapiens
tgccaagagaggata

SEQ ID NO: 12503 - DNA, 15 bp, Homo sapiens
ttgccaagagaggat

SEQ ID NO: 12504 - DNA, 15 bp, Homo sapiens
cttgccaagagagga

SEQ ID NO: 12505 - DNA, 15 bp, Homo sapiens
gcttgccaagagagg

SEQ ID NO: 12506 - DNA, 15 bp, Homo sapiens
cgcttgccaagagag

SEQ ID NO: 12507 - DNA, 15 bp, Homo sapiens
tcgcttgccaagaga

SEQ ID NO: 12508 - DNA, 15 bp, Homo sapiens
ctcgcttgccaagag

SEQ ID NO: 12509 - DNA, 15 bp, Homo sapiens
actcgcttgccaaga

SEQ ID NO: 12510 - DNA, 15 bp, Homo sapiens
cactcgcttgccaag

SEQ ID NO: 12511 - DNA, 15 bp, Homo sapiens
acactcgcttgccaa

SEQ ID NO: 12512 - DNA, 15 bp, Homo sapiens
tacactcgcttgcca

SEQ ID NO: 12513 - DNA, 15 bp, Homo sapiens
atacactcgcttgcc

SEQ ID NO: 12514 - DNA, 15 bp, Homo sapiens
gatacactcgcttgc

SEQ ID NO: 12515 - DNA, 15 bp, Homo sapiens
agatacactcgcttg

SEQ ID NO: 12516 - DNA, 15 bp, Homo sapiens
gagatacactcgctt

SEQ ID NO: 12517 - DNA, 15 bp, Homo sapiens
tgagatacactcgct

SEQ ID NO: 12518 - DNA, 15 bp, Homo sapiens
gtgagatacactcgc

SEQ ID NO: 12519 - DNA, 15 bp, Homo sapiens
agtgagatacactcg

SEQ ID NO: 12520 - DNA, 15 bp, Homo sapiens
cagtgagatacactc

SEQ ID NO: 12521 - DNA, 15 bp, Homo sapiens
acagtgagatacact

SEQ ID NO: 12522 - DNA, 15 bp, Homo sapiens
cacagtgagatacac

SEQ ID NO: 12523 - DNA, 15 bp, Homo sapiens
gcacagtgagataca

SEQ ID NO: 12524 - DNA, 15 bp, Homo sapiens
agcacagtgagatac

SEQ ID NO: 12525 - DNA, 15 bp, Homo sapiens
cagcacagtgagata

SEQ ID NO: 12526 - DNA, 15 bp, Homo sapiens
gcagcacagtgagat

SEQ ID NO: 12527 - DNA, 15 bp, Homo sapiens
agcagcacagtgaga

SEQ ID NO: 12528 - DNA, 15 bp, Homo sapiens
aagcagcacagtgag

SEQ ID NO: 12529 - DNA, 15 bp, Homo sapiens
aaagcagcacagtga

SEQ ID NO: 12530 - DNA, 15 bp, Homo sapiens
taaagcagcacagtg

SEQ ID NO: 12531 - DNA, 15 bp, Homo sapiens
ctaaagcagcacagt

SEQ ID NO: 12532 - DNA, 15 bp, Homo sapiens
cctaaagcagcacag

SEQ ID NO: 12533 - DNA, 15 bp, Homo sapiens
tcctaaagcagcaca

SEQ ID NO: 12534 - DNA, 15 bp, Homo sapiens
atcctaaagcagcac

SEQ ID NO: 12535 - DNA, 15 bp, Homo sapiens
catcctaaagcagca

SEQ ID NO: 12536 - DNA, 15 bp, Homo sapiens
ccatcctaaagcagc

SEQ ID NO: 12537 - DNA, 15 bp, Homo sapiens
tccatcctaaagcag

SEQ ID NO: 12538 - DNA, 15 bp, Homo sapiens
atccatcctaaagca

SEQ ID NO: 12539 - DNA, 15 bp, Homo sapiens
tatccatcctaaagc

SEQ ID NO: 12540 - DNA, 15 bp, Homo sapiens
atatccatcctaaag

SEQ ID NO: 12541 - DNA, 15 bp, Homo sapiens
aatatccatcctaaa

SEQ ID NO: 12542 - DNA, 15 bp, Homo sapiens
taatatccatcctaa

SEQ ID NO: 12543 - DNA, 15 bp, Homo sapiens
ttaatatccatccta

SEQ ID NO: 12544 - DNA, 15 bp, Homo sapiens
gttaatatccatcct

SEQ ID NO: 12545 - DNA, 15 bp, Homo sapiens
ggttaatatccatcc

SEQ ID NO: 12546 - DNA, 15 bp, Homo sapiens
aggttaatatccatc

SEQ ID NO: 12547 - DNA, 15 bp, Homo sapiens
aaggttaatatccat

SEQ ID NO: 12548 - DNA, 15 bp, Homo sapiens
aaaggttaatatcca

SEQ ID NO: 12549 - DNA, 15 bp, Homo sapiens
aaaaggttaatatcc

SEQ ID NO: 12550 - DNA, 15 bp, Homo sapiens
taaaaggttaatatc

SEQ ID NO: 12551 - DNA, 15 bp, Homo sapiens
ttaaaaggttaatat

SEQ ID NO: 12552 - DNA, 15 bp, Homo sapiens
tttaaaaggttaata

SEQ ID NO: 12553 - DNA, 15 bp, Homo sapiens
atttaaaaggttaat

SEQ ID NO: 12554 - DNA, 15 bp, Homo sapiens
catttaaaaggttaa

SEQ ID NO: 12555 - DNA, 15 bp, Homo sapiens
acatttaaaaggtta

SEQ ID NO: 12556 - DNA, 15 bp, Homo sapiens
aacatttaaaaggtt

SEQ ID NO: 12557 - DNA, 15 bp, Homo sapiens
caacatttaaaaggt

SEQ ID NO: 12558 - DNA, 15 bp, Homo sapiens
tcaacatttaaaagg

SEQ ID NO: 12559 - DNA, 15 bp, Homo sapiens
ctcaacatttaaaag

SEQ ID NO: 12560 - DNA, 15 bp, Homo sapiens
actcaacatttaaaa

SEQ ID NO: 12561 - DNA, 15 bp, Homo sapiens
cactcaacatttaaa

SEQ ID NO: 12562 - DNA, 15 bp, Homo sapiens
acactcaacatttaa

SEQ ID NO: 12563 - DNA, 15 bp, Homo sapiens
gacactcaacattta

SEQ ID NO: 12564 - DNA, 15 bp, Homo sapiens
agacactcaacattt

SEQ ID NO: 12565 - DNA, 15 bp, Homo sapiens
aagacactcaacatt

SEQ ID NO: 12566 - DNA, 15 bp, Homo sapiens
aaagacactcaacat

SEQ ID NO: 12567 - DNA, 15 bp, Homo sapiens
taaagacactcaaca

SEQ ID NO: 12568 - DNA, 15 bp, Homo sapiens
ataaagacactcaac

SEQ ID NO: 12569 - DNA, 15 bp, Homo sapiens
aataaagacactcaa

SEQ ID NO: 12570 - DNA, 15 bp, Homo sapiens
aaataaagacactca

SEQ ID NO: 12571 - DNA, 15 bp, Homo sapiens
caaataaagacactc

SEQ ID NO: 12572 - DNA, 15 bp, Homo sapiens
gcaaataaagacact

SEQ ID NO: 12573 - DNA, 15 bp, Homo sapiens
agcaaataaagacac

SEQ ID NO: 12574 - DNA, 15 bp, Homo sapiens
aagcaaataaagaca

SEQ ID NO: 12575 - DNA, 15 bp, Homo sapiens
taagcaaataaagac

SEQ ID NO: 12576 - DNA, 15 bp, Homo sapiens
ttaagcaaataaaga

SEQ ID NO: 12577 - DNA, 15 bp, Homo sapiens
attaagcaaataaag

SEQ ID NO: 12578 - DNA, 15 bp, Homo sapiens
cattaagcaaataaa

SEQ ID NO: 12579 - DNA, 15 bp, Homo sapiens
gcattaagcaaataa

SEQ ID NO: 12580 - DNA, 15 bp, Homo sapiens
agcattaagcaaata

SEQ ID NO: 12581 - DNA, 15 bp, Homo sapiens
tagcattaagcaaat

SEQ ID NO: 12582 - DNA, 15 bp, Homo sapiens
atagcattaagcaaa

SEQ ID NO: 12583 - DNA, 15 bp, Homo sapiens
aatagcattaagcaa

SEQ ID NO: 12584 - DNA, 15 bp, Homo sapiens
taatagcattaagca

SEQ ID NO: 12585 - DNA, 15 bp, Homo sapiens
gtaatagcattaagc

SEQ ID NO: 12586 - DNA, 15 bp, Homo sapiens
tgtaatagcattaag

SEQ ID NO: 12587 - DNA, 15 bp, Homo sapiens
ttgtaatagcattaa

SEQ ID NO: 12588 - DNA, 15 bp, Homo sapiens
attgtaatagcatta

SEQ ID NO: 12589 - DNA, 15 bp, Homo sapiens
cattgtaatagcatt

SEQ ID NO: 12590 - DNA, 15 bp, Homo sapiens
gcattgtaatagcat

SEQ ID NO: 12591 - DNA, 15 bp, Homo sapiens
ggcattgtaatagca

SEQ ID NO: 12592 - DNA, 15 bp, Homo sapiens
aggcattgtaatagc

SEQ ID NO: 12593 - DNA, 15 bp, Homo sapiens
aaggcattgtaatag

SEQ ID NO: 12594 - DNA, 15 bp, Homo sapiens
caaggcattgtaata

SEQ ID NO: 12595 - DNA, 15 bp, Homo sapiens
acaaggcattgtaat

SEQ ID NO: 12596 - DNA, 15 bp, Homo sapiens
gacaaggcattgtaa

SEQ ID NO: 12597 - DNA, 15 bp, Homo sapiens
agacaaggcattgta

SEQ ID NO: 12598 - DNA, 15 bp, Homo sapiens
tagacaaggcattgt

SEQ ID NO: 12599 - DNA, 15 bp, Homo sapiens
ttagacaaggcattg

SEQ ID NO: 12600 - DNA, 15 bp, Homo sapiens
tttagacaaggcatt

SEQ ID NO: 12601 - DNA, 15 bp, Homo sapiens
ctttagacaaggcat

SEQ ID NO: 12602 - DNA, 15 bp, Homo sapiens
actttagacaaggca

SEQ ID NO: 12603 - DNA, 15 bp, Homo sapiens
cactttagacaaggc

SEQ ID NO: 12604 - DNA, 15 bp, Homo sapiens
acactttagacaagg

SEQ ID NO: 12605 - DNA, 15 bp, Homo sapiens
aacactttagacaag

SEQ ID NO: 12606 - DNA, 15 bp, Homo sapiens
taacactttagacaa

SEQ ID NO: 12607 - DNA, 15 bp, Homo sapiens
ctaacactttagaca

SEQ ID NO: 12608 - DNA, 15 bp, Homo sapiens
actaacactttagac

SEQ ID NO: 12609 - DNA, 15 bp, Homo sapiens
gactaacactttaga

SEQ ID NO: 12610 - DNA, 15 bp, Homo sapiens
agactaacactttag

SEQ ID NO: 12611 - DNA, 15 bp, Homo sapiens
aagactaacacttta

SEQ ID NO: 12612 - DNA, 15 bp, Homo sapiens
aaagactaacacttt

SEQ ID NO: 12613 - DNA, 15 bp, Homo sapiens
aaaagactaacactt

SEQ ID NO: 12614 - DNA, 15 bp, Homo sapiens
taaaagactaacact

SEQ ID NO: 12615 - DNA, 15 bp, Homo sapiens
ataaaagactaacac

SEQ ID NO: 12616 - DNA, 15 bp, Homo sapiens
aataaaagactaaca

SEQ ID NO: 12617 - DNA, 15 bp, Homo sapiens
caataaaagactaac

SEQ ID NO: 12618 - DNA, 15 bp, Homo sapiens
gcaataaaagactaa

SEQ ID NO: 12619 - DNA, 15 bp, Homo sapiens
ggcaataaaagacta

SEQ ID NO: 12620 - DNA, 15 bp, Homo sapiens
tggcaataaaagact

SEQ ID NO: 12621 - DNA, 15 bp, Homo sapiens
gtggcaataaaagac

SEQ ID NO: 12622 - DNA, 15 bp, Homo sapiens
cgtggcaataaaaga

SEQ ID NO: 12623 - DNA, 15 bp, Homo sapiens
tcgtggcaataaaag

SEQ ID NO: 12624 - DNA, 15 bp, Homo sapiens
ctcgtggcaataaaa

SEQ ID NO: 12625 - DNA, 15 bp, Homo sapiens
gctcgtggcaataaa

SEQ ID NO: 12626 - DNA, 15 bp, Homo sapiens
ggctcgtggcaataa

SEQ ID NO: 12627 - DNA, 15 bp, Homo sapiens
aggctcgtggcaata

SEQ ID NO: 12628 - DNA, 15 bp, Homo sapiens
aaggctcgtggcaat

SEQ ID NO: 12629 - DNA, 15 bp, Homo sapiens
caaggctcgtggcaa

SEQ ID NO: 12630 - DNA, 15 bp, Homo sapiens
gcaaggctcgtggca

SEQ ID NO: 12631 - DNA, 15 bp, Homo sapiens
tgcaaggctcgtggc

SEQ ID NO: 12632 - DNA, 15 bp, Homo sapiens
ttgcaaggctcgtgg

SEQ ID NO: 12633 - DNA, 15 bp, Homo sapiens
tttgcaaggctcgtg

SEQ ID NO: 12634 - DNA, 15 bp, Homo sapiens
ctttgcaaggctcgt

SEQ ID NO: 12635 - DNA, 15 bp, Homo sapiens
gctttgcaaggctcg

SEQ ID NO: 12636 - DNA, 15 bp, Homo sapiens
ggctttgcaaggctc

SEQ ID NO: 12637 - DNA, 15 bp, Homo sapiens
aggctttgcaaggct

SEQ ID NO: 12638 - DNA, 15 bp, Homo sapiens
caggctttgcaaggc

SEQ ID NO: 12639 - DNA, 15 bp, Homo sapiens
tcaggctttgcaagg

SEQ ID NO: 12640 - DNA, 15 bp, Homo sapiens
gtcaggctttgcaag

SEQ ID NO: 12641 - DNA, 15 bp, Homo sapiens
tgtcaggctttgcaa

SEQ ID NO: 12642 - DNA, 15 bp, Homo sapiens
ctgtcaggctttgca

SEQ ID NO: 12643 - DNA, 15 bp, Homo sapiens
cctgtcaggctttgc

SEQ ID NO: 12644 - DNA, 15 bp, Homo sapiens
tcctgtcaggctttg

SEQ ID NO: 12645 - DNA, 15 bp, Homo sapiens
atcctgtcaggcttt

SEQ ID NO: 12646 - DNA, 15 bp, Homo sapiens
tatcctgtcaggctt

SEQ ID NO: 12647 - DNA, 15 bp, Homo sapiens
atatcctgtcaggct

SEQ ID NO: 12648 - DNA, 15 bp, Homo sapiens
aatatcctgtcaggc

SEQ ID NO: 12649 - DNA, 15 bp, Homo sapiens
aaatatcctgtcagg

SEQ ID NO: 12650 - DNA, 15 bp, Homo sapiens
aaaatatcctgtcag

SEQ ID NO: 12651 - DNA, 15 bp, Homo sapiens
gaaaatatcctgtca

SEQ ID NO: 12652 - DNA, 15 bp, Homo sapiens
ggaaaatatcctgtc

SEQ ID NO: 12653 - DNA, 15 bp, Homo sapiens
gggaaaatatcctgt

SEQ ID NO: 12654 - DNA, 15 bp, Homo sapiens
cgggaaaatatcctg

SEQ ID NO: 12655 - DNA, 15 bp, Homo sapiens
acgggaaaatatcct

SEQ ID NO: 12656 - DNA, 15 bp, Homo sapiens
aacgggaaaatatcc

SEQ ID NO: 12657 - DNA, 15 bp, Homo sapiens
aaacgggaaaatatc

SEQ ID NO: 12658 - DNA, 15 bp, Homo sapiens
aaaacgggaaaatat

SEQ ID NO: 12659 - DNA, 15 bp, Homo sapiens
aaaaacgggaaaata

SEQ ID NO: 12660 - DNA, 15 bp, Homo sapiens
gaaaaacgggaaaat

SEQ ID NO: 12661 - DNA, 15 bp, Homo sapiens
ggaaaaacgggaaaa

SEQ ID NO: 12662 - DNA, 15 bp, Homo sapiens
tggaaaaacgggaaa

SEQ ID NO: 12663 - DNA, 15 bp, Homo sapiens
ctggaaaaacgggaa

SEQ ID NO: 12664 - DNA, 15 bp, Homo sapiens
actggaaaaacggga

SEQ ID NO: 12665 - DNA, 15 bp, Homo sapiens
aactggaaaaacggg

SEQ ID NO: 12666 - DNA, 15 bp, Homo sapiens
taactggaaaaacgg

SEQ ID NO: 12667 - DNA, 15 bp, Homo sapiens
ctaactggaaaaacg

SEQ ID NO: 12668 - DNA, 15 bp, Homo sapiens
tctaactggaaaaac

SEQ ID NO: 12669 - DNA, 15 bp, Homo sapiens
ctctaactggaaaaa

SEQ ID NO: 12670 - DNA, 15 bp, Homo sapiens
tctctaactggaaaa

SEQ ID NO: 12671 - DNA, 15 bp, Homo sapiens
ttctctaactggaaa

SEQ ID NO: 12672 - DNA, 15 bp, Homo sapiens
tttctctaactggaa

SEQ ID NO: 12673 - DNA, 15 bp, Homo sapiens
atttctctaactgga

SEQ ID NO: 12674 - DNA, 15 bp, Homo sapiens
tatttctctaactgg

SEQ ID NO: 12675 - DNA, 15 bp, Homo sapiens
ctatttctctaactg

SEQ ID NO: 12676 - DNA, 15 bp, Homo sapiens
tctatttctctaact

SEQ ID NO: 12677 - DNA, 15 bp, Homo sapiens
ctctatttctctaac

SEQ ID NO: 12678 - DNA, 15 bp, Homo sapiens
cctctatttctctaa

SEQ ID NO: 12679 - DNA, 15 bp, Homo sapiens
tcctctatttctcta

SEQ ID NO: 12680 - DNA, 15 bp, Homo sapiens
ttcctctatttctct

SEQ ID NO: 12681 - DNA, 15 bp, Homo sapiens
cttcctctatttctc

SEQ ID NO: 12682 - DNA, 15 bp, Homo sapiens
acttcctctatttct

SEQ ID NO: 12683 - DNA, 15 bp, Homo sapiens
aacttcctctatttc

SEQ ID NO: 12684 - DNA, 15 bp, Homo sapiens
caacttcctctattt

SEQ ID NO: 12685 - DNA, 15 bp, Homo sapiens
acaacttcctctatt

SEQ ID NO: 12686 - DNA, 15 bp, Homo sapiens
gacaacttcctctat

SEQ ID NO: 12687 - DNA, 15 bp, Homo sapiens
cgacaacttcctcta

SEQ ID NO: 12688 - DNA, 15 bp, Homo sapiens
acgacaacttcctct

SEQ ID NO: 12689 - DNA, 15 bp, Homo sapiens
cacgacaacttcctc

SEQ ID NO: 12690 - DNA, 15 bp, Homo sapiens
acacgacaacttcct

SEQ ID NO: 12691 - DNA, 15 bp, Homo sapiens
tacacgacaacttcc

SEQ ID NO: 12692 - DNA, 15 bp, Homo sapiens
ctacacgacaacttc

SEQ ID NO: 12693 - DNA, 15 bp, Homo sapiens
actacacgacaactt

SEQ ID NO: 12694 - DNA, 15 bp, Homo sapiens
aactacacgacaact

SEQ ID NO: 12695 - DNA, 15 bp, Homo sapiens
caactacacgacaac

SEQ ID NO: 12696 - DNA, 15 bp, Homo sapiens
acaactacacgacaa

SEQ ID NO: 12697 - DNA, 15 bp, Homo sapiens
gacaactacacgaca

SEQ ID NO: 12698 - DNA, 15 bp, Homo sapiens
tgacaactacacgac

SEQ ID NO: 12699 - DNA, 15 bp, Homo sapiens
atgacaactacacga

SEQ ID NO: 12700 - DNA, 15 bp, Homo sapiens
catgacaactacacg

SEQ ID NO: 12701 - DNA, 15 bp, Homo sapiens
acatgacaactacac

SEQ ID NO: 12702 - DNA, 15 bp, Homo sapiens
tacatgacaactaca

SEQ ID NO: 12703 - DNA, 15 bp, Homo sapiens
atacatgacaactac

SEQ ID NO: 12704 - DNA, 15 bp, Homo sapiens
aatacatgacaacta

SEQ ID NO: 12705 - DNA, 15 bp, Homo sapiens
gaatacatgacaact

SEQ ID NO: 12706 - DNA, 15 bp, Homo sapiens
tgaatacatgacaac

SEQ ID NO: 12707 - DNA, 15 bp, Homo sapiens
ctgaatacatgacaa

SEQ ID NO: 12708 - DNA, 15 bp, Homo sapiens
actgaatacatgaca

SEQ ID NO: 12709 - DNA, 15 bp, Homo sapiens
gactgaatacatgac

SEQ ID NO: 12710 - DNA, 15 bp, Homo sapiens
ggactgaatacatga

SEQ ID NO: 12711 - DNA, 15 bp, Homo sapiens
tggactgaatacatg

SEQ ID NO: 12712 - DNA, 15 bp, Homo sapiens
gtggactgaatacat

SEQ ID NO: 12713 - DNA, 15 bp, Homo sapiens
agtggactgaataca

SEQ ID NO: 12714 - DNA, 15 bp, Homo sapiens
aagtggactgaatac

SEQ ID NO: 12715 - DNA, 15 bp, Homo sapiens
taagtggactgaata

SEQ ID NO: 12716 - DNA, 15 bp, Homo sapiens
ttaagtggactgaat

SEQ ID NO: 12717 - DNA, 15 bp, Homo sapiens
cttaagtggactgaa

SEQ ID NO: 12718 - DNA, 15 bp, Homo sapiens
ccttaagtggactga

SEQ ID NO: 12719 - DNA, 15 bp, Homo sapiens
cccttaagtggactg

SEQ ID NO: 12720 - DNA, 15 bp, Homo sapiens
gcccttaagtggact

SEQ ID NO: 12721 - DNA, 15 bp, Homo sapiens
tgcccttaagtggac

SEQ ID NO: 12722 - DNA, 15 bp, Homo sapiens
ctgcccttaagtgga

SEQ ID NO: 12723 - DNA, 15 bp, Homo sapiens
actgcccttaagtgg

SEQ ID NO: 12724 - DNA, 15 bp, Homo sapiens
cactgcccttaagtg

SEQ ID NO: 12725 - DNA, 15 bp, Homo sapiens
ccactgcccttaagt

SEQ ID NO: 12726 - DNA, 15 bp, Homo sapiens
cccactgcccttaag

SEQ ID NO: 12727 - DNA, 15 bp, Homo sapiens
ccccactgcccttaa

SEQ ID NO: 12728 - DNA, 15 bp, Homo sapiens
tccccactgccctta

SEQ ID NO: 12729 - DNA, 15 bp, Homo sapiens
ttccccactgccctt

SEQ ID NO: 12730 - DNA, 15 bp, Homo sapiens
cttccccactgccct

SEQ ID NO: 12731 - DNA, 15 bp, Homo sapiens
gcttccccactgccc

SEQ ID NO: 12732 - DNA, 15 bp, Homo sapiens
cgcttccccactgcc

SEQ ID NO: 12733 - DNA, 15 bp, Homo sapiens
acgcttccccactgc

SEQ ID NO: 12734 - DNA, 15 bp, Homo sapiens
aacgcttccccactg

SEQ ID NO: 12735 - DNA, 15 bp, Homo sapiens
aaacgcttccccact

SEQ ID NO: 12736 - DNA, 15 bp, Homo sapiens
caaacgcttccccac

SEQ ID NO: 12737 - DNA, 15 bp, Homo sapiens
tcaaacgcttcccca

SEQ ID NO: 12738 - DNA, 15 bp, Homo sapiens
ctcaaacgcttcccc

SEQ ID NO: 12739 - DNA, 15 bp, Homo sapiens
tctcaaacgcttccc

SEQ ID NO: 12740 - DNA, 15 bp, Homo sapiens
gtctcaaacgcttcc

SEQ ID NO: 12741 - DNA, 15 bp, Homo sapiens
cgtctcaaacgcttc

SEQ ID NO: 12742 - DNA, 15 bp, Homo sapiens
ccgtctcaaacgctt

SEQ ID NO: 12743 - DNA, 15 bp, Homo sapiens
tccgtctcaaacgct

SEQ ID NO: 12744 - DNA, 15 bp, Homo sapiens
ctccgtctcaaacgc

SEQ ID NO: 12745 - DNA, 15 bp, Homo sapiens
gctccgtctcaaacg

SEQ ID NO: 12746 - DNA, 15 bp, Homo sapiens
agctccgtctcaaac

SEQ ID NO: 12747 - DNA, 15 bp, Homo sapiens
cagctccgtctcaaa

SEQ ID NO: 12748 - DNA, 15 bp, Homo sapiens
acagctccgtctcaa

SEQ ID NO: 12749 - DNA, 15 bp, Homo sapiens
cacagctccgtctca

SEQ ID NO: 12750 - DNA, 15 bp, Homo sapiens
ccacagctccgtctc

SEQ ID NO: 12751 - DNA, 15 bp, Homo sapiens
tccacagctccgtct

SEQ ID NO: 12752 - DNA, 15 bp, Homo sapiens
ctccacagctccgtc

SEQ ID NO: 12753 - DNA, 15 bp, Homo sapiens
cctccacagctccgt

SEQ ID NO: 12754 - DNA, 15 bp, Homo sapiens
gcctccacagctccg

SEQ ID NO: 12755 - DNA, 15 bp, Homo sapiens
agcctccacagctcc

SEQ ID NO: 12756 - DNA, 15 bp, Homo sapiens
cagcctccacagctc

SEQ ID NO: 12757 - DNA, 15 bp, Homo sapiens
tcagcctccacagct

SEQ ID NO: 12758 - DNA, 15 bp, Homo sapiens
ttcagcctccacagc

SEQ ID NO: 12759 - DNA, 15 bp, Homo sapiens
attcagcctccacag

SEQ ID NO: 12760 - DNA, 15 bp, Homo sapiens
gattcagcctccaca

SEQ ID NO: 12761 - DNA, 15 bp, Homo sapiens
ggattcagcctccac

SEQ ID NO: 12762 - DNA, 15 bp, Homo sapiens
aggattcagcctcca

SEQ ID NO: 12763 - DNA, 15 bp, Homo sapiens
aaggattcagcctcc

SEQ ID NO: 12764 - DNA, 15 bp, Homo sapiens
caaggattcagcctc

SEQ ID NO: 12765 - DNA, 15 bp, Homo sapiens
tcaaggattcagcct

SEQ ID NO: 12766 - DNA, 15 bp, Homo sapiens
ttcaaggattcagcc

SEQ ID NO: 12767 - DNA, 15 bp, Homo sapiens
cttcaaggattcagc

SEQ ID NO: 12768 - DNA, 15 bp, Homo sapiens
ccttcaaggattcag

SEQ ID NO: 12769 - DNA, 15 bp, Homo sapiens
tccttcaaggattca

SEQ ID NO: 12770 - DNA, 15 bp, Homo sapiens
ctccttcaaggattc

SEQ ID NO: 12771 - DNA, 15 bp, Homo sapiens
cctccttcaaggatt

SEQ ID NO: 12772 - DNA, 15 bp, Homo sapiens
tcctccttcaaggat

SEQ ID NO: 12773 - DNA, 15 bp, Homo sapiens
ctcctccttcaagga

SEQ ID NO: 12774 - DNA, 15 bp, Homo sapiens
cctcctccttcaagg

SEQ ID NO: 12775 - DNA, 15 bp, Homo sapiens
acctcctccttcaag

SEQ ID NO: 12776 - DNA, 15 bp, Homo sapiens
cacctcctccttcaa

SEQ ID NO: 12777 - DNA, 15 bp, Homo sapiens
tcacctcctccttca

SEQ ID NO: 12778 - DNA, 15 bp, Homo sapiens
ctcacctcctccttc

SEQ ID NO: 12779 - DNA, 15 bp, Homo sapiens
tctcacctcctcctt

SEQ ID NO: 12780 - DNA, 15 bp, Homo sapiens
ctctcacctcctcct

SEQ ID NO: 12781 - DNA, 15 bp, Homo sapiens
tctctcacctcctcc

SEQ ID NO: 12782 - DNA, 15 bp, Homo sapiens
ctctctcacctcctc

SEQ ID NO: 12783 - DNA, 15 bp, Homo sapiens
cctctctcacctcct

SEQ ID NO: 12784 - DNA, 15 bp, Homo sapiens
gcctctctcacctcc

SEQ ID NO: 12785 - DNA, 15 bp, Homo sapiens
tgcctctctcacctc

SEQ ID NO: 12786 - DNA, 15 bp, Homo sapiens
gtgcctctctcacct

SEQ ID NO: 12787 - DNA, 15 bp, Homo sapiens
tgtgcctctctcacc

SEQ ID NO: 12788 - DNA, 15 bp, Homo sapiens
ctgtgcctctctcac

SEQ ID NO: 12789 - DNA, 15 bp, Homo sapiens
cctgtgcctctctca

SEQ ID NO: 12790 - DNA, 15 bp, Homo sapiens
acctgtgcctctctc

SEQ ID NO: 12791 - DNA, 15 bp, Homo sapiens
cacctgtgcctctct

SEQ ID NO: 12792 - DNA, 15 bp, Homo sapiens
tcacctgtgcctctc

SEQ ID NO: 12793 - DNA, 15 bp, Homo sapiens
ctcacctgtgcctct

SEQ ID NO: 12794 - DNA, 15 bp, Homo sapiens
gctcacctgtgcctc

SEQ ID NO: 12795 - DNA, 15 bp, Homo sapiens
cgctcacctgtgcct

SEQ ID NO: 12796 - DNA, 15 bp, Homo sapiens
gcgctcacctgtgcc

SEQ ID NO: 12797 - DNA, 15 bp, Homo sapiens
tgcgctcacctgtgc

SEQ ID NO: 12798 - DNA, 15 bp, Homo sapiens
ttgcgctcacctgtg

SEQ ID NO: 12799 - DNA, 15 bp, Homo sapiens
tttgcgctcacctgt

SEQ ID NO: 12800 - DNA, 15 bp, Homo sapiens
ctttgcgctcacctg

SEQ ID NO: 12801 - DNA, 15 bp, Homo sapiens
actttgcgctcacct

SEQ ID NO: 12802 - DNA, 15 bp, Homo sapiens
gactttgcgctcacc

SEQ ID NO: 12803 - DNA, 15 bp, Homo sapiens
ggactttgcgctcac

SEQ ID NO: 12804 - DNA, 15 bp, Homo sapiens
gggactttgcgctca

SEQ ID NO: 12805 - DNA, 15 bp, Homo sapiens
tgggactttgcgctc

SEQ ID NO: 12806 - DNA, 15 bp, Homo sapiens
ctgggactttgcgct

SEQ ID NO: 12807 - DNA, 15 bp, Homo sapiens
actgggactttgcgc

SEQ ID NO: 12808 - DNA, 15 bp, Homo sapiens
cactgggactttgcg

SEQ ID NO: 12809 - DNA, 15 bp, Homo sapiens
gcactgggactttgc

SEQ ID NO: 12810 - DNA, 15 bp, Homo sapiens
tgcactgggactttg

SEQ ID NO: 12811 - DNA, 15 bp, Homo sapiens
atgcactgggacttt

SEQ ID NO: 12812 - DNA, 15 bp, Homo sapiens
catgcactgggactt

SEQ ID NO: 12813 - DNA, 15 bp, Homo sapiens
acatgcactgggact

SEQ ID NO: 12814 - DNA, 15 bp, Homo sapiens
gacatgcactgggac

SEQ ID NO: 12815 - DNA, 15 bp, Homo sapiens
ggacatgcactggga

SEQ ID NO: 12816 - DNA, 15 bp, Homo sapiens
gggacatgcactggg

SEQ ID NO: 12817 - DNA, 15 bp, Homo sapiens
ggggacatgcactgg

SEQ ID NO: 12818 - DNA, 15 bp, Homo sapiens
aggggacatgcactg

SEQ ID NO: 12819 - DNA, 15 bp, Homo sapiens
gaggggacatgcact

SEQ ID NO: 12820 - DNA, 15 bp, Homo sapiens
agaggggacatgcac

SEQ ID NO: 12821 - DNA, 15 bp, Homo sapiens
aagaggggacatgca

SEQ ID NO: 12822 - DNA, 15 bp, Homo sapiens
gaagaggggacatgc

SEQ ID NO: 12823 - DNA, 15 bp, Homo sapiens
agaagaggggacatg

SEQ ID NO: 12824 - DNA, 15 bp, Homo sapiens
gagaagaggggacat

SEQ ID NO: 12825 - DNA, 15 bp, Homo sapiens
agagaagaggggaca

SEQ ID NO: 12826 - DNA, 15 bp, Homo sapiens
gagagaagaggggac

SEQ ID NO: 12827 - DNA, 15 bp, Homo sapiens
ggagagaagagggga

SEQ ID NO: 12828 - DNA, 15 bp, Homo sapiens
gggagagaagagggg

SEQ ID NO: 12829 - DNA, 15 bp, Homo sapiens
cgggagagaagaggg

SEQ ID NO: 12830 - DNA, 15 bp, Homo sapiens
tcgggagagaagagg

SEQ ID NO: 12831 - DNA, 15 bp, Homo sapiens
atcgggagagaagag

SEQ ID NO: 12832 - DNA, 15 bp, Homo sapiens
catcgggagagaaga

SEQ ID NO: 12833 - DNA, 15 bp, Homo sapiens
gcatcgggagagaag

SEQ ID NO: 12834 - DNA, 15 bp, Homo sapiens
tgcatcgggagagaa

SEQ ID NO: 12835 - DNA, 15 bp, Homo sapiens
ctgcatcgggagaga

SEQ ID NO: 12836 - DNA, 15 bp, Homo sapiens
actgcatcgggagag

SEQ ID NO: 12837 - DNA, 15 bp, Homo sapiens
cactgcatcgggaga

SEQ ID NO: 12838 - DNA, 15 bp, Homo sapiens
acactgcatcgggag

SEQ ID NO: 12839 - DNA, 15 bp, Homo sapiens
gacactgcatcggga

SEQ ID NO: 12840 - DNA, 15 bp, Homo sapiens
tgacactgcatcggg

SEQ ID NO: 12841 - DNA, 15 bp, Homo sapiens
atgacactgcatcgg

SEQ ID NO: 12842 - DNA, 15 bp, Homo sapiens
aatgacactgcatcg

SEQ ID NO: 12843 - DNA, 15 bp, Homo sapiens
gaatgacactgcatc

SEQ ID NO: 12844 - DNA, 15 bp, Homo sapiens
ggaatgacactgcat

SEQ ID NO: 12845 - DNA, 15 bp, Homo sapiens
gggaatgacactgca

SEQ ID NO: 12846 - DNA, 15 bp, Homo sapiens
tgggaatgacactgc

SEQ ID NO: 12847 - DNA, 15 bp, Homo sapiens
ctgggaatgacactg

SEQ ID NO: 12848 - DNA, 15 bp, Homo sapiens
cctgggaatgacact

SEQ ID NO: 12849 - DNA, 15 bp, Homo sapiens
acctgggaatgacac

SEQ ID NO: 12850 - DNA, 15 bp, Homo sapiens
cacctgggaatgaca

SEQ ID NO: 12851 - DNA, 15 bp, Homo sapiens
tcacctgggaatgac

SEQ ID NO: 12852 - DNA, 15 bp, Homo sapiens
ttcacctgggaatga

SEQ ID NO: 12853 - DNA, 15 bp, Homo sapiens
gttcacctgggaatg

SEQ ID NO: 12854 - DNA, 15 bp, Homo sapiens
ggttcacctgggaat

SEQ ID NO: 12855 - DNA, 15 bp, Homo sapiens
aggttcacctgggaa

SEQ ID NO: 12856 - DNA, 15 bp, Homo sapiens
caggttcacctggga

SEQ ID NO: 12857 - DNA, 15 bp, Homo sapiens
gcaggttcacctggg

SEQ ID NO: 12858 - DNA, 15 bp, Homo sapiens
ggcaggttcacctgg

SEQ ID NO: 12859 - DNA, 15 bp, Homo sapiens
cggcaggttcacctg

SEQ ID NO: 12860 - DNA, 15 bp, Homo sapiens
ccggcaggttcacct

SEQ ID NO: 12861 - DNA, 15 bp, Homo sapiens
cccggcaggttcacc

SEQ ID NO: 12862 - DNA, 15 bp, Homo sapiens
gcccggcaggttcac

SEQ ID NO: 12863 - DNA, 15 bp, Homo sapiens
agcccggcaggttca

SEQ ID NO: 12864 - DNA, 15 bp, Homo sapiens
cagcccggcaggttc

SEQ ID NO: 12865 - DNA, 15 bp, Homo sapiens
tcagcccggcaggtt

SEQ ID NO: 12866 - DNA, 15 bp, Homo sapiens
ttcagcccggcaggt

SEQ ID NO: 12867 - DNA, 15 bp, Homo sapiens
gttcagcccggcagg

SEQ ID NO: 12868 - DNA, 15 bp, Homo sapiens
cgttcagcccggcag

SEQ ID NO: 12869 - DNA, 15 bp, Homo sapiens
ccgttcagcccggca

SEQ ID NO: 12870 - DNA, 15 bp, Homo sapiens
gccgttcagcccggc

SEQ ID NO: 12871 - DNA, 15 bp, Homo sapiens
ggccgttcagcccgg

SEQ ID NO: 12872 - DNA, 15 bp, Homo sapiens
aggccgttcagcccg

SEQ ID NO: 12873 - DNA, 15 bp, Homo sapiens
caggccgttcagccc

SEQ ID NO: 12874 - DNA, 15 bp, Homo sapiens
ccaggccgttcagcc

SEQ ID NO: 12875 - DNA, 15 bp, Homo sapiens
gccaggccgttcagc

SEQ ID NO: 12876 - DNA, 15 bp, Homo sapiens
ggccaggccgttcag

SEQ ID NO: 12877 - DNA, 15 bp, Homo sapiens
gggccaggccgttca

SEQ ID NO: 12878 - DNA, 15 bp, Homo sapiens
ggggccaggccgttc

SEQ ID NO: 12879 - DNA, 15 bp, Homo sapiens
aggggccaggccgtt

SEQ ID NO: 12880 - DNA, 15 bp, Homo sapiens
gaggggccaggccgt

SEQ ID NO: 12881 - DNA, 15 bp, Homo sapiens
agaggggccaggccg

SEQ ID NO: 12882 - DNA, 15 bp, Homo sapiens
tagaggggccaggcc

SEQ ID NO: 12883 - DNA, 15 bp, Homo sapiens
atagaggggccaggc

SEQ ID NO: 12884 - DNA, 15 bp, Homo sapiens
aatagaggggccagg

SEQ ID NO: 12885 - DNA, 15 bp, Homo sapiens
gaatagaggggccag

SEQ ID NO: 12886 - DNA, 15 bp, Homo sapiens
tgaatagaggggcca

SEQ ID NO: 12887 - DNA, 15 bp, Homo sapiens
ctgaatagaggggcc

SEQ ID NO: 12888 - DNA, 15 bp, Homo sapiens
actgaatagaggggc

SEQ ID NO: 12889 - DNA, 15 bp, Homo sapiens
gactgaatagagggg

SEQ ID NO: 12890 - DNA, 15 bp, Homo sapiens
cgactgaatagaggg

SEQ ID NO: 12891 - DNA, 15 bp, Homo sapiens
ccgactgaatagagg

SEQ ID NO: 12892 - DNA, 15 bp, Homo sapiens
tccgactgaatagag

SEQ ID NO: 12893 - DNA, 15 bp, Homo sapiens
ctccgactgaataga

SEQ ID NO: 12894 - DNA, 15 bp, Homo sapiens
actccgactgaatag

SEQ ID NO: 12895 - DNA, 15 bp, Homo sapiens
aactccgactgaata

SEQ ID NO: 12896 - DNA, 15 bp, Homo sapiens
aaactccgactgaat

SEQ ID NO: 12897 - DNA, 15 bp, Homo sapiens
aaaactccgactgaa

SEQ ID NO: 12898 - DNA, 15 bp, Homo sapiens
taaaactccgactga

SEQ ID NO: 12899 - DNA, 15 bp, Homo sapiens
gtaaaactccgactg

SEQ ID NO: 12900 - DNA, 15 bp, Homo sapiens
agtaaaactccgact

SEQ ID NO: 12901 - DNA, 15 bp, Homo sapiens
tagtaaaactccgac

SEQ ID NO: 12902 - DNA, 15 bp, Homo sapiens
gtagtaaaactccga

SEQ ID NO: 12903 - DNA, 15 bp, Homo sapiens
agtagtaaaactccg

SEQ ID NO: 12904 - DNA, 15 bp, Homo sapiens
gagtagtaaaactcc

SEQ ID NO: 12905 - DNA, 15 bp, Homo sapiens
ggagtagtaaaactc

SEQ ID NO: 12906 - DNA, 15 bp, Homo sapiens
tggagtagtaaaact

SEQ ID NO: 12907 - DNA, 15 bp, Homo sapiens
ctggagtagtaaaac

SEQ ID NO: 12908 - DNA, 15 bp, Homo sapiens
actggagtagtaaaa

SEQ ID NO: 12909 - DNA, 15 bp, Homo sapiens
cactggagtagtaaa

SEQ ID NO: 12910 - DNA, 15 bp, Homo sapiens
ccactggagtagtaa

SEQ ID NO: 12911 - DNA, 15 bp, Homo sapiens
tccactggagtagta

SEQ ID NO: 12912 - DNA, 15 bp, Homo sapiens
atccactggagtagt

SEQ ID NO: 12913 - DNA, 15 bp, Homo sapiens
aatccactggagtag

SEQ ID NO: 12914 - DNA, 15 bp, Homo sapiens
aaatccactggagta

SEQ ID NO: 12915 - DNA, 15 bp, Homo sapiens
aaaatccactggagt

SEQ ID NO: 12916 - DNA, 15 bp, Homo sapiens
caaaatccactggag

SEQ ID NO: 12917 - DNA, 15 bp, Homo sapiens
ccaaaatccactgga

SEQ ID NO: 12918 - DNA, 15 bp, Homo sapiens
accaaaatccactgg

SEQ ID NO: 12919 - DNA, 15 bp, Homo sapiens
taccaaaatccactg

SEQ ID NO: 12920 - DNA, 15 bp, Homo sapiens
ttaccaaaatccact

SEQ ID NO: 12921 - DNA, 15 bp, Homo sapiens
gttaccaaaatccac

SEQ ID NO: 12922 - DNA, 15 bp, Homo sapiens
agttaccaaaatcca

SEQ ID NO: 12923 - DNA, 15 bp, Homo sapiens
aagttaccaaaatcc

SEQ ID NO: 12924 - DNA, 15 bp, Homo sapiens
gaagttaccaaaatc

SEQ ID NO: 12925 - DNA, 15 bp, Homo sapiens
tgaagttaccaaaat

SEQ ID NO: 12926 - DNA, 15 bp, Homo sapiens
atgaagttaccaaaa

SEQ ID NO: 12927 - DNA, 15 bp, Homo sapiens
aatgaagttaccaaa

SEQ ID NO: 12928 - DNA, 15 bp, Homo sapiens
aaatgaagttaccaa

SEQ ID NO: 12929 - DNA, 15 bp, Homo sapiens
caaatgaagttacca

SEQ ID NO: 12930 - DNA, 15 bp, Homo sapiens
ccaaatgaagttacc

SEQ ID NO: 12931 - DNA, 15 bp, Homo sapiens
tccaaatgaagttac

SEQ ID NO: 12932 - DNA, 15 bp, Homo sapiens
ttccaaatgaagtta

SEQ ID NO: 12933 - DNA, 15 bp, Homo sapiens
tttccaaatgaagtt

SEQ ID NO: 12934 - DNA, 15 bp, Homo sapiens
atttccaaatgaagt

SEQ ID NO: 12935 - DNA, 15 bp, Homo sapiens
tatttccaaatgaag

SEQ ID NO: 12936 - DNA, 15 bp, Homo sapiens
ttatttccaaatgaa

SEQ ID NO: 12937 - DNA, 15 bp, Homo sapiens
attatttccaaatga

SEQ ID NO: 12938 - DNA, 15 bp, Homo sapiens
aattatttccaaatg

SEQ ID NO: 12939 - DNA, 15 bp, Homo sapiens
aaattatttccaaat

SEQ ID NO: 12940 - DNA, 15 bp, Homo sapiens
gaaattatttccaaa

SEQ ID NO: 12941 - DNA, 15 bp, Homo sapiens
tgaaattatttccaa

SEQ ID NO: 12942 - DNA, 15 bp, Homo sapiens
ctgaaattatttcca

SEQ ID NO: 12943 - DNA, 15 bp, Homo sapiens
tctgaaattatttcc

SEQ ID NO: 12944 - DNA, 15 bp, Homo sapiens
gtctgaaattatttc

SEQ ID NO: 12945 - DNA, 15 bp, Homo sapiens
agtctgaaattattt

SEQ ID NO: 12946 - DNA, 15 bp, Homo sapiens
aagtctgaaattatt

SEQ ID NO: 12947 - DNA, 15 bp, Homo sapiens
taagtctgaaattat

SEQ ID NO: 12948 - DNA, 15 bp, Homo sapiens
gtaagtctgaaatta

SEQ ID NO: 12949 - DNA, 15 bp, Homo sapiens
tgtaagtctgaaatt

SEQ ID NO: 12950 - DNA, 15 bp, Homo sapiens
ttgtaagtctgaaat

SEQ ID NO: 12951 - DNA, 15 bp, Homo sapiens
tttgtaagtctgaaa

SEQ ID NO: 12952 - DNA, 15 bp, Homo sapiens
ttttgtaagtctgaa

SEQ ID NO: 12953 - DNA, 15 bp, Homo sapiens
tttttgtaagtctga

SEQ ID NO: 12954 - DNA, 15 bp, Homo sapiens
atttttgtaagtctg

SEQ ID NO: 12955 - DNA, 15 bp, Homo sapiens
catttttgtaagtct

SEQ ID NO: 12956 - DNA, 15 bp, Homo sapiens
acatttttgtaagtc

SEQ ID NO: 12957 - DNA, 15 bp, Homo sapiens
aacatttttgtaagt

SEQ ID NO: 12958 - DNA, 15 bp, Homo sapiens
caacatttttgtaag

SEQ ID NO: 12959 - DNA, 15 bp, Homo sapiens
gcaacatttttgtaa

SEQ ID NO: 12960 - DNA, 15 bp, Homo sapiens
tgcaacatttttgta

SEQ ID NO: 12961 - DNA, 15 bp, Homo sapiens
ttgcaacatttttgt

SEQ ID NO: 12962 - DNA, 15 bp, Homo sapiens
cttgcaacatttttg

SEQ ID NO: 12963 - DNA, 15 bp, Homo sapiens
tcttgcaacattttt

SEQ ID NO: 12964 - DNA, 15 bp, Homo sapiens
ttcttgcaacatttt

SEQ ID NO: 12965 - DNA, 15 bp, Homo sapiens
attcttgcaacattt

SEQ ID NO: 12966 - DNA, 15 bp, Homo sapiens
cattcttgcaacatt

SEQ ID NO: 12967 - DNA, 15 bp, Homo sapiens
tcattcttgcaacat

SEQ ID NO: 12968 - DNA, 15 bp, Homo sapiens
gtcattcttgcaaca

SEQ ID NO: 12969 - DNA, 15 bp, Homo sapiens
tgtcattcttgcaac

SEQ ID NO: 12970 - DNA, 15 bp, Homo sapiens
gtgtcattcttgcaa

SEQ ID NO: 12971 - DNA, 15 bp, Homo sapiens
tgtgtcattcttgca

SEQ ID NO: 12972 - DNA, 15 bp, Homo sapiens
ttgtgtcattcttgc

SEQ ID NO: 12973 - DNA, 15 bp, Homo sapiens
tttgtgtcattcttg

SEQ ID NO: 12974 - DNA, 15 bp, Homo sapiens
ctttgtgtcattctt

SEQ ID NO: 12975 - DNA, 15 bp, Homo sapiens
tctttgtgtcattct

SEQ ID NO: 12976 - DNA, 15 bp, Homo sapiens
ttctttgtgtcattc

SEQ ID NO: 12977 - DNA, 15 bp, Homo sapiens
gttctttgtgtcatt

SEQ ID NO: 12978 - DNA, 15 bp, Homo sapiens
ggttctttgtgtcat

SEQ ID NO: 12979 - DNA, 15 bp, Homo sapiens
tggttctttgtgtca

SEQ ID NO: 12980 - DNA, 15 bp, Homo sapiens
gtggttctttgtgtc

SEQ ID NO: 12981 - DNA, 15 bp, Homo sapiens
ggtggttctttgtgt

SEQ ID NO: 12982 - DNA, 15 bp, Homo sapiens
gggtggttctttgtg

SEQ ID NO: 12983 - DNA, 15 bp, Homo sapiens
agggtggttctttgt

SEQ ID NO: 12984 - DNA, 15 bp, Homo sapiens
aagggtggttctttg

SEQ ID NO: 12985 - DNA, 15 bp, Homo sapiens
aaagggtggttcttt

SEQ ID NO: 12986 - DNA, 15 bp, Homo sapiens
aaaagggtggttctt

SEQ ID NO: 12987 - DNA, 15 bp, Homo sapiens
taaaagggtggttct

SEQ ID NO: 12988 - DNA, 15 bp, Homo sapiens
ataaaagggtggttc

SEQ ID NO: 12989 - DNA, 15 bp, Homo sapiens
tataaaagggtggtt

SEQ ID NO: 12990 - DNA, 15 bp, Homo sapiens
atataaaagggtggt

SEQ ID NO: 12991 - DNA, 15 bp, Homo sapiens
gatataaaagggtgg

SEQ ID NO: 12992 - DNA, 15 bp, Homo sapiens
agatataaaagggtg

SEQ ID NO: 12993 - DNA, 15 bp, Homo sapiens
cagatataaaagggt

SEQ ID NO: 12994 - DNA, 15 bp, Homo sapiens
gcagatataaaaggg

SEQ ID NO: 12995 - DNA, 15 bp, Homo sapiens
ggcagatataaaagg

SEQ ID NO: 12996 - DNA, 15 bp, Homo sapiens
gggcagatataaaag

SEQ ID NO: 12997 - DNA, 15 bp, Homo sapiens
ggggcagatataaaa

SEQ ID NO: 12998 - DNA, 15 bp, Homo sapiens
tggggcagatataaa

SEQ ID NO: 12999 - DNA, 15 bp, Homo sapiens
gtggggcagatataa

SEQ ID NO: 13000 - DNA, 15 bp, Homo sapiens
agtggggcagatata

SEQ ID NO: 13001 - DNA, 15 bp, Homo sapiens
aagtggggcagatat

SEQ ID NO: 13002 - DNA, 15 bp, Homo sapiens
caagtggggcagata

SEQ ID NO: 13003 - DNA, 15 bp, Homo sapiens
acaagtggggcagat

SEQ ID NO: 13004 - DNA, 15 bp, Homo sapiens
aacaagtggggcaga

SEQ ID NO: 13005 - DNA, 15 bp, Homo sapiens
aaacaagtggggcag

SEQ ID NO: 13006 - DNA, 15 bp, Homo sapiens
aaaacaagtggggca

SEQ ID NO: 13007 - DNA, 15 bp, Homo sapiens
gaaaacaagtggggc

SEQ ID NO: 13008 - DNA, 15 bp, Homo sapiens
tgaaaacaagtgggg

SEQ ID NO: 13009 - DNA, 15 bp, Homo sapiens
atgaaaacaagtggg

SEQ ID NO: 13010 - DNA, 15 bp, Homo sapiens
catgaaaacaagtgg

SEQ ID NO: 13011 - DNA, 15 bp, Homo sapiens
acatgaaaacaagtg

SEQ ID NO: 13012 - DNA, 15 bp, Homo sapiens
aacatgaaaacaagt

SEQ ID NO: 13013 - DNA, 15 bp, Homo sapiens
aaacatgaaaacaag

SEQ ID NO: 13014 - DNA, 15 bp, Homo sapiens
aaaacatgaaaacaa

SEQ ID NO: 13015 - DNA, 15 bp, Homo sapiens
gaaaacatgaaaaca

SEQ ID NO: 13016 - DNA, 15 bp, Homo sapiens
ggaaaacatgaaaac

SEQ ID NO: 13017 - DNA, 15 bp, Homo sapiens
gggaaaacatgaaaa

SEQ ID NO: 13018 - DNA, 15 bp, Homo sapiens
agggaaaacatgaaa

SEQ ID NO: 13019 - DNA, 15 bp, Homo sapiens
gagggaaaacatgaa

SEQ ID NO: 13020 - DNA, 15 bp, Homo sapiens
agagggaaaacatga

SEQ ID NO: 13021 - DNA, 15 bp, Homo sapiens
aagagggaaaacatg

SEQ ID NO: 13022 - DNA, 15 bp, Homo sapiens
aaagagggaaaacat

SEQ ID NO: 13023 - DNA, 15 bp, Homo sapiens
caaagagggaaaaca

SEQ ID NO: 13024 - DNA, 15 bp, Homo sapiens
gcaaagagggaaaac

SEQ ID NO: 13025 - DNA, 15 bp, Homo sapiens
tgcaaagagggaaaa

SEQ ID NO: 13026 - DNA, 15 bp, Homo sapiens
gtgcaaagagggaaa

SEQ ID NO: 13027 - DNA, 15 bp, Homo sapiens
tgtgcaaagagggaa

SEQ ID NO: 13028 - DNA, 15 bp, Homo sapiens
gtgtgcaaagaggga

SEQ ID NO: 13029 - DNA, 15 bp, Homo sapiens
tgtgtgcaaagaggg

SEQ ID NO: 13030 - DNA, 15 bp, Homo sapiens
atgtgtgcaaagagg

SEQ ID NO: 13031 - DNA, 15 bp, Homo sapiens
catgtgtgcaaagag

SEQ ID NO: 13032 - DNA, 15 bp, Homo sapiens
acatgtgtgcaaaga

SEQ ID NO: 13033 - DNA, 15 bp, Homo sapiens
tacatgtgtgcaaag

SEQ ID NO: 13034 - DNA, 15 bp, Homo sapiens
gtacatgtgtgcaaa

SEQ ID NO: 13035 - DNA, 15 bp, Homo sapiens
tgtacatgtgtgcaa

SEQ ID NO: 13036 - DNA, 15 bp, Homo sapiens
ttgtacatgtgtgca

SEQ ID NO: 13037 - DNA, 15 bp, Homo sapiens
attgtacatgtgtgc

SEQ ID NO: 13038 - DNA, 15 bp, Homo sapiens
aattgtacatgtgtg

SEQ ID NO: 13039 - DNA, 15 bp, Homo sapiens
aaattgtacatgtgt

SEQ ID NO: 13040 - DNA, 15 bp, Homo sapiens
taaattgtacatgtg

SEQ ID NO: 13041 - DNA, 15 bp, Homo sapiens
ataaattgtacatgt

SEQ ID NO: 13042 - DNA, 15 bp, Homo sapiens
aataaattgtacatg

SEQ ID NO: 13043 - DNA, 15 bp, Homo sapiens
aaataaattgtacat

SEQ ID NO: 13044 - DNA, 15 bp, Homo sapiens
gaaataaattgtaca

SEQ ID NO: 13045 - DNA, 15 bp, Homo sapiens
tgaaataaattgtac

SEQ ID NO: 13046 - DNA, 15 bp, Homo sapiens
ctgaaataaattgta

SEQ ID NO: 13047 - DNA, 15 bp, Homo sapiens
tctgaaataaattgt

SEQ ID NO: 13048 - DNA, 15 bp, Homo sapiens
ttctgaaataaattg

SEQ ID NO: 13049 - DNA, 15 bp, Homo sapiens
tttctgaaataaatt

SEQ ID NO: 13050 - DNA, 15 bp, Homo sapiens
ttttctgaaataaat

SEQ ID NO: 13051 - DNA, 15 bp, Homo sapiens
tttttctgaaataaa

SEQ ID NO: 13052 - DNA, 15 bp, Homo sapiens
ttttttctgaaataa

SEQ ID NO: 13053 - DNA, 15 bp, Homo sapiens
gttttttctgaaata

SEQ ID NO: 13054 - DNA, 15 bp, Homo sapiens
agttttttctgaaat

SEQ ID NO: 13055 - DNA, 15 bp, Homo sapiens
tagttttttctgaaa

SEQ ID NO: 13056 - DNA, 15 bp, Homo sapiens
gtagttttttctgaa

SEQ ID NO: 13057 - DNA, 15 bp, Homo sapiens
tgtagttttttctga

SEQ ID NO: 13058 - DNA, 15 bp, Homo sapiens
ctgtagttttttctg

SEQ ID NO: 13059 - DNA, 15 bp, Homo sapiens
tctgtagttttttct

SEQ ID NO: 13060 - DNA, 15 bp, Homo sapiens
gtctgtagttttttc

SEQ ID NO: 13061 - DNA, 15 bp, Homo sapiens
tgtctgtagtttttt

SEQ ID NO: 13062 - DNA, 15 bp, Homo sapiens
atgtctgtagttttt

SEQ ID NO: 13063 - DNA, 15 bp, Homo sapiens
catgtctgtagtttt

SEQ ID NO: 13064 - DNA, 15 bp, Homo sapiens
tcatgtctgtagttt

SEQ ID NO: 13065 - DNA, 15 bp, Homo sapiens
atcatgtctgtagtt

SEQ ID NO: 13066 - DNA, 15 bp, Homo sapiens
tatcatgtctgtagt

SEQ ID NO: 13067 - DNA, 15 bp, Homo sapiens
gtatcatgtctgtag

SEQ ID NO: 13068 - DNA, 15 bp, Homo sapiens
agtatcatgtctgta

SEQ ID NO: 13069 - DNA, 15 bp, Homo sapiens
cagtatcatgtctgt

SEQ ID NO: 13070 - DNA, 15 bp, Homo sapiens
gcagtatcatgtctg

SEQ ID NO: 13071 - DNA, 15 bp, Homo sapiens
agcagtatcatgtct

SEQ ID NO: 13072 - DNA, 15 bp, Homo sapiens
aagcagtatcatgtc

SEQ ID NO: 13073 - DNA, 15 bp, Homo sapiens
aaagcagtatcatgt

SEQ ID NO: 13074 - DNA, 15 bp, Homo sapiens
aaaagcagtatcatg

SEQ ID NO: 13075 - DNA, 15 bp, Homo sapiens
gaaaagcagtatcat

SEQ ID NO: 13076 - DNA, 15 bp, Homo sapiens
ggaaaagcagtatca

SEQ ID NO: 13077 - DNA, 15 bp, Homo sapiens
aggaaaagcagtatc

SEQ ID NO: 13078 - DNA, 15 bp, Homo sapiens
taggaaaagcagtat

SEQ ID NO: 13079 - DNA, 15 bp, Homo sapiens
gtaggaaaagcagta

SEQ ID NO: 13080 - DNA, 15 bp, Homo sapiens
tgtaggaaaagcagt

SEQ ID NO: 13081 - DNA, 15 bp, Homo sapiens
gtgtaggaaaagcag

SEQ ID NO: 13082 - DNA, 15 bp, Homo sapiens
agtgtaggaaaagca

SEQ ID NO: 13083 - DNA, 15 bp, Homo sapiens
tagtgtaggaaaagc

SEQ ID NO: 13084 - DNA, 15 bp, Homo sapiens
ttagtgtaggaaaag

SEQ ID NO: 13085 - DNA, 15 bp, Homo sapiens
tttagtgtaggaaaa

SEQ ID NO: 13086 - DNA, 15 bp, Homo sapiens
ttttagtgtaggaaa

SEQ ID NO: 13087 - DNA, 15 bp, Homo sapiens
tttttagtgtaggaa

SEQ ID NO: 13088 - DNA, 15 bp, Homo sapiens
atttttagtgtagga

SEQ ID NO: 13089 - DNA, 15 bp, Homo sapiens
tatttttagtgtagg

SEQ ID NO: 13090 - DNA, 15 bp, Homo sapiens
gtatttttagtgtag

SEQ ID NO: 13091 - DNA, 15 bp, Homo sapiens
agtatttttagtgta

SEQ ID NO: 13092 - DNA, 15 bp, Homo sapiens
aagtatttttagtgt

SEQ ID NO: 13093 - DNA, 15 bp, Homo sapiens
gaagtatttttagtg

SEQ ID NO: 13094 - DNA, 15 bp, Homo sapiens
tgaagtatttttagt

SEQ ID NO: 13095 - DNA, 15 bp, Homo sapiens
ctgaagtatttttag

SEQ ID NO: 13096 - DNA, 15 bp, Homo sapiens
actgaagtattttta

SEQ ID NO: 13097 - DNA, 15 bp, Homo sapiens
cactgaagtattttt

SEQ ID NO: 13098 - DNA, 15 bp, Homo sapiens
acactgaagtatttt

SEQ ID NO: 13099 - DNA, 15 bp, Homo sapiens
tacactgaagtattt

SEQ ID NO: 13100 - DNA, 15 bp, Homo sapiens
atacactgaagtatt

SEQ ID NO: 13101 - DNA, 15 bp, Homo sapiens
tatacactgaagtat

SEQ ID NO: 13102 - DNA, 15 bp, Homo sapiens
atatacactgaagta

SEQ ID NO: 13103 - DNA, 15 bp, Homo sapiens
aatatacactgaagt

SEQ ID NO: 13104 - DNA, 15 bp, Homo sapiens
aaatatacactgaag

SEQ ID NO: 13105 - DNA, 15 bp, Homo sapiens
gaaatatacactgaa

SEQ ID NO: 13106 - DNA, 15 bp, Homo sapiens
ggaaatatacactga

SEQ ID NO: 13107 - DNA, 15 bp, Homo sapiens
gggaaatatacactg

SEQ ID NO: 13108 - DNA, 15 bp, Homo sapiens
tgggaaatatacact

SEQ ID NO: 13109 - DNA, 15 bp, Homo sapiens
ttgggaaatatacac

SEQ ID NO: 13110 - DNA, 15 bp, Homo sapiens
tttgggaaatataca

SEQ ID NO: 13111 - DNA, 15 bp, Homo sapiens
ttttgggaaatatac

SEQ ID NO: 13112 - DNA, 15 bp, Homo sapiens
tttttgggaaatata

SEQ ID NO: 13113 - DNA, 15 bp, Homo sapiens
atttttgggaaatat

SEQ ID NO: 13114 - DNA, 15 bp, Homo sapiens
tatttttgggaaata

SEQ ID NO: 13115 - DNA, 15 bp, Homo sapiens
ctatttttgggaaat

SEQ ID NO: 13116 - DNA, 15 bp, Homo sapiens
cctatttttgggaaa

SEQ ID NO: 13117 - DNA, 15 bp, Homo sapiens
tcctatttttgggaa

SEQ ID NO: 13118 - DNA, 15 bp, Homo sapiens
ctcctatttttggga

SEQ ID NO: 13119 - DNA, 15 bp, Homo sapiens
actcctatttttggg

SEQ ID NO: 13120 - DNA, 15 bp, Homo sapiens
tactcctatttttgg

SEQ ID NO: 13121 - DNA, 15 bp, Homo sapiens
ttactcctatttttg

SEQ ID NO: 13122 - DNA, 15 bp, Homo sapiens
attactcctattttt

SEQ ID NO: 13123 - DNA, 15 bp, Homo sapiens
gattactcctatttt

SEQ ID NO: 13124 - DNA, 15 bp, Homo sapiens
ggattactcctattt

SEQ ID NO: 13125 - DNA, 15 bp, Homo sapiens
gggattactcctatt

SEQ ID NO: 13126 - DNA, 15 bp, Homo sapiens
agggattactcctat

SEQ ID NO: 13127 - DNA, 15 bp, Homo sapiens
aagggattactccta

SEQ ID NO: 13128 - DNA, 15 bp, Homo sapiens
taagggattactcct

SEQ ID NO: 13129 - DNA, 15 bp, Homo sapiens
ataagggattactcc

SEQ ID NO: 13130 - DNA, 15 bp, Homo sapiens
cataagggattactc

SEQ ID NO: 13131 - DNA, 15 bp, Homo sapiens
acataagggattact

SEQ ID NO: 13132 - DNA, 15 bp, Homo sapiens
tacataagggattac

SEQ ID NO: 13133 - DNA, 15 bp, Homo sapiens
ttacataagggatta

SEQ ID NO: 13134 - DNA, 15 bp, Homo sapiens
gttacataagggatt

SEQ ID NO: 13135 - DNA, 15 bp, Homo sapiens
ggttacataagggat

SEQ ID NO: 13136 - DNA, 15 bp, Homo sapiens
tggttacataaggga

SEQ ID NO: 13137 - DNA, 15 bp, Homo sapiens
gtggttacataaggg

SEQ ID NO: 13138 - DNA, 15 bp, Homo sapiens
tgtggttacataagg

SEQ ID NO: 13139 - DNA, 15 bp, Homo sapiens
ctgtggttacataag

SEQ ID NO: 13140 - DNA, 15 bp, Homo sapiens
actgtggttacataa

SEQ ID NO: 13141 - DNA, 15 bp, Homo sapiens
cactgtggttacata

SEQ ID NO: 13142 - DNA, 15 bp, Homo sapiens
acactgtggttacat

SEQ ID NO: 13143 - DNA, 15 bp, Homo sapiens
tacactgtggttaca

SEQ ID NO: 13144 - DNA, 15 bp, Homo sapiens
ttacactgtggttac

SEQ ID NO: 13145 - DNA, 15 bp, Homo sapiens
attacactgtggtta

SEQ ID NO: 13146 - DNA, 15 bp, Homo sapiens
aattacactgtggtt

SEQ ID NO: 13147 - DNA, 15 bp, Homo sapiens
taattacactgtggt

SEQ ID NO: 13148 - DNA, 15 bp, Homo sapiens
ataattacactgtgg

SEQ ID NO: 13149 - DNA, 15 bp, Homo sapiens
gataattacactgtg

SEQ ID NO: 13150 - DNA, 15 bp, Homo sapiens
tgataattacactgt

SEQ ID NO: 13151 - DNA, 15 bp, Homo sapiens
ttgataattacactg

SEQ ID NO: 13152 - DNA, 15 bp, Homo sapiens
tttgataattacact

SEQ ID NO: 13153 - DNA, 15 bp, Homo sapiens
ttttgataattacac

SEQ ID NO: 13154 - DNA, 15 bp, Homo sapiens
attttgataattaca

SEQ ID NO: 13155 - DNA, 15 bp, Homo sapiens
aattttgataattac

SEQ ID NO: 13156 - DNA, 15 bp, Homo sapiens
gaattttgataatta

SEQ ID NO: 13157 - DNA, 15 bp, Homo sapiens
tgaattttgataatt

SEQ ID NO: 13158 - DNA, 15 bp, Homo sapiens
gtgaattttgataat

SEQ ID NO: 13159 - DNA, 15 bp, Homo sapiens
tgtgaattttgataa

SEQ ID NO: 13160 - DNA, 15 bp, Homo sapiens
ttgtgaattttgata

SEQ ID NO: 13161 - DNA, 15 bp, Homo sapiens
tttgtgaattttgat

SEQ ID NO: 13162 - DNA, 15 bp, Homo sapiens
atttgtgaattttga

SEQ ID NO: 13163 - DNA, 15 bp, Homo sapiens
tatttgtgaattttg

SEQ ID NO: 13164 - DNA, 15 bp, Homo sapiens
ctatttgtgaatttt

SEQ ID NO: 13165 - DNA, 15 bp, Homo sapiens
actatttgtgaattt

SEQ ID NO: 13166 - DNA, 15 bp, Homo sapiens
cactatttgtgaatt

SEQ ID NO: 13167 - DNA, 15 bp, Homo sapiens
acactatttgtgaat

SEQ ID NO: 13168 - DNA, 15 bp, Homo sapiens
aacactatttgtgaa

SEQ ID NO: 13169 - DNA, 15 bp, Homo sapiens
taacactatttgtga

SEQ ID NO: 13170 - DNA, 15 bp, Homo sapiens
gtaacactatttgtg

SEQ ID NO: 13171 - DNA, 15 bp, Homo sapiens
tgtaacactatttgt

SEQ ID NO: 13172 - DNA, 15 bp, Homo sapiens
ttgtaacactatttg

SEQ ID NO: 13173 - DNA, 15 bp, Homo sapiens
tttgtaacactattt

SEQ ID NO: 13174 - DNA, 15 bp, Homo sapiens
ttttgtaacactatt

SEQ ID NO: 13175 - DNA, 15 bp, Homo sapiens
gttttgtaacactat

SEQ ID NO: 13176 - DNA, 15 bp, Homo sapiens
agttttgtaacacta

SEQ ID NO: 13177 - DNA, 15 bp, Homo sapiens
tagttttgtaacact

SEQ ID NO: 13178 - DNA, 15 bp, Homo sapiens
atagttttgtaacac

SEQ ID NO: 13179 - DNA, 15 bp, Homo sapiens
aatagttttgtaaca

SEQ ID NO: 13180 - DNA, 15 bp, Homo sapiens
taatagttttgtaac

SEQ ID NO: 13181 - DNA, 15 bp, Homo sapiens
ataatagttttgtaa

SEQ ID NO: 13182 - DNA, 15 bp, Homo sapiens
gataatagttttgta

SEQ ID NO: 13183 - DNA, 15 bp, Homo sapiens
agataatagttttgt

SEQ ID NO: 13184 - DNA, 15 bp, Homo sapiens
cagataatagttttg

SEQ ID NO: 13185 - DNA, 15 bp, Homo sapiens
tcagataatagtttt

SEQ ID NO: 13186 - DNA, 15 bp, Homo sapiens
atcagataatagttt

SEQ ID NO: 13187 - DNA, 15 bp, Homo sapiens
gatcagataatagtt

SEQ ID NO: 13188 - DNA, 15 bp, Homo sapiens
agatcagataatagt

SEQ ID NO: 13189 - DNA, 15 bp, Homo sapiens
tagatcagataatag

SEQ ID NO: 13190 - DNA, 15 bp, Homo sapiens
atagatcagataata

SEQ ID NO: 13191 - DNA, 15 bp, Homo sapiens
catagatcagataat

SEQ ID NO: 13192 - DNA, 15 bp, Homo sapiens
ccatagatcagataa

SEQ ID NO: 13193 - DNA, 15 bp, Homo sapiens
tccatagatcagata

SEQ ID NO: 13194 - DNA, 15 bp, Homo sapiens
gtccatagatcagat

SEQ ID NO: 13195 - DNA, 15 bp, Homo sapiens
ggtccatagatcaga

SEQ ID NO: 13196 - DNA, 15 bp, Homo sapiens
aggtccatagatcag

SEQ ID NO: 13197 - DNA, 15 bp, Homo sapiens
aaggtccatagatca

SEQ ID NO: 13198 - DNA, 15 bp, Homo sapiens
taaggtccatagatc

SEQ ID NO: 13199 - DNA, 15 bp, Homo sapiens
ataaggtccatagat

SEQ ID NO: 13200 - DNA, 15 bp, Homo sapiens
aataaggtccataga

SEQ ID NO: 13201 - DNA, 15 bp, Homo sapiens
gaataaggtccatag

SEQ ID NO: 13202 - DNA, 15 bp, Homo sapiens
tgaataaggtccata

SEQ ID NO: 13203 - DNA, 15 bp, Homo sapiens
ctgaataaggtccat

SEQ ID NO: 13204 - DNA, 15 bp, Homo sapiens
tctgaataaggtcca

SEQ ID NO: 13205 - DNA, 15 bp, Homo sapiens
atctgaataaggtcc

SEQ ID NO: 13206 - DNA, 15 bp, Homo sapiens
aatctgaataaggtc

SEQ ID NO: 13207 - DNA, 15 bp, Homo sapiens
aaatctgaataaggt

SEQ ID NO: 13208 - DNA, 15 bp, Homo sapiens
aaaatctgaataagg

SEQ ID NO: 13209 - DNA, 15 bp, Homo sapiens
taaaatctgaataag

SEQ ID NO: 13210 - DNA, 15 bp, Homo sapiens
gtaaaatctgaataa

SEQ ID NO: 13211 - DNA, 15 bp, Homo sapiens
ggtaaaatctgaata

SEQ ID NO: 13212 - DNA, 15 bp, Homo sapiens
tggtaaaatctgaat

SEQ ID NO: 13213 - DNA, 15 bp, Homo sapiens
gtggtaaaatctgaa

SEQ ID NO: 13214 - DNA, 15 bp, Homo sapiens
agtggtaaaatctga

SEQ ID NO: 13215 - DNA, 15 bp, Homo sapiens
aagtggtaaaatctg

SEQ ID NO: 13216 - DNA, 15 bp, Homo sapiens
caagtggtaaaatct

SEQ ID NO: 13217 - DNA, 15 bp, Homo sapiens
acaagtggtaaaatc

SEQ ID NO: 13218 - DNA, 15 bp, Homo sapiens
gacaagtggtaaaat

SEQ ID NO: 13219 - DNA, 15 bp, Homo sapiens
ggacaagtggtaaaa

SEQ ID NO: 13220 - DNA, 15 bp, Homo sapiens
gggacaagtggtaaa

SEQ ID NO: 13221 - DNA, 15 bp, Homo sapiens
tgggacaagtggtaa

SEQ ID NO: 13222 - DNA, 15 bp, Homo sapiens
ttgggacaagtggta

SEQ ID NO: 13223 - DNA, 15 bp, Homo sapiens
gttgggacaagtggt

SEQ ID NO: 13224 - DNA, 15 bp, Homo sapiens
tgttgggacaagtgg

SEQ ID NO: 13225 - DNA, 15 bp, Homo sapiens
ttgttgggacaagtg

SEQ ID NO: 13226 - DNA, 15 bp, Homo sapiens
attgttgggacaagt

SEQ ID NO: 13227 - DNA, 15 bp, Homo sapiens
cattgttgggacaag

SEQ ID NO: 13228 - DNA, 15 bp, Homo sapiens
gcattgttgggacaa

SEQ ID NO: 13229 - DNA, 15 bp, Homo sapiens
ggcattgttgggaca

SEQ ID NO: 13230 - DNA, 15 bp, Homo sapiens
gggcattgttgggac

SEQ ID NO: 13231 - DNA, 15 bp, Homo sapiens
agggcattgttggga

SEQ ID NO: 13232 - DNA, 15 bp, Homo sapiens
aagggcattgttggg

SEQ ID NO: 13233 - DNA, 15 bp, Homo sapiens
gaagggcattgttgg

SEQ ID NO: 13234 - DNA, 15 bp, Homo sapiens
agaagggcattgttg

SEQ ID NO: 13235 - DNA, 15 bp, Homo sapiens
gagaagggcattgtt

SEQ ID NO: 13236 - DNA, 15 bp, Homo sapiens
tgagaagggcattgt

SEQ ID NO: 13237 - DNA, 15 bp, Homo sapiens
ctgagaagggcattg

SEQ ID NO: 13238 - DNA, 15 bp, Homo sapiens
tctgagaagggcatt

SEQ ID NO: 13239 - DNA, 15 bp, Homo sapiens
ttctgagaagggcat

SEQ ID NO: 13240 - DNA, 15 bp, Homo sapiens
tttctgagaagggca

SEQ ID NO: 13241 - DNA, 15 bp, Homo sapiens
ttttctgagaagggc

SEQ ID NO: 13242 - DNA, 15 bp, Homo sapiens
tttttctgagaaggg

SEQ ID NO: 13243 - DNA, 15 bp, Homo sapiens
ttttttctgagaagg

SEQ ID NO: 13244 - DNA, 15 bp, Homo sapiens
tttttttctgagaag

SEQ ID NO: 13245 - DNA, 15 bp, Homo sapiens
ttttttttctgagaa

SEQ ID NO: 13246 - DNA, 15 bp, Homo sapiens
tttttttttctgaga

SEQ ID NO: 13247 - DNA, 15 bp, Homo sapiens
ttttttttttctgag

SEQ ID NO: 13248 - DNA, 15 bp, Homo sapiens
tttttttttttctga

SEQ ID NO: 13249 - DNA, 15 bp, Homo sapiens
ttttttttttttctg

SEQ ID NO: 13250 - DNA, 15 bp, Homo sapiens
tttttttttttttct

SEQ ID NO: 13251 - DNA, 15 bp, Homo sapiens
ttttttttttttttc

SEQ ID NO: 13252 - DNA, 15 bp, Homo sapiens
ttttttttttttttt

SEQ ID NO: 13253 - DNA, 15 bp, Homo sapiens
ctttttttttttttt

SEQ ID NO: 13254 - DNA, 15 bp, Homo sapiens
tcttttttttttttt

SEQ ID NO: 13255 - DNA, 15 bp, Homo sapiens
ttctttttttttttt

SEQ ID NO: 13256 - DNA, 15 bp, Homo sapiens
tttcttttttttttt

SEQ ID NO: 13257 - DNA, 15 bp, Homo sapiens
ttttctttttttttt

SEQ ID NO: 13258 - DNA, 15 bp, Homo sapiens
tttttcttttttttt

SEQ ID NO: 13259 - DNA, 15 bp, Homo sapiens
ttttttctttttttt

SEQ ID NO: 13260 - DNA, 15 bp, Homo sapiens
attttttcttttttt

SEQ ID NO: 13261 - DNA, 15 bp, Homo sapiens
cattttttctttttt

SEQ ID NO: 13262 - DNA, 15 bp, Homo sapiens
acattttttcttttt

SEQ ID NO: 13263 - DNA, 15 bp, Homo sapiens
tacattttttctttt

SEQ ID NO: 13264 - DNA, 15 bp, Homo sapiens
atacattttttcttt

SEQ ID NO: 13265 - DNA, 15 bp, Homo sapiens
aatacattttttctt

SEQ ID NO: 13266 - DNA, 15 bp, Homo sapiens
aaatacattttttct

SEQ ID NO: 13267 - DNA, 15 bp, Homo sapiens
aaaatacattttttc

SEQ ID NO: 13268 - DNA, 15 bp, Homo sapiens
gaaaatacatttttt

SEQ ID NO: 13269 - DNA, 15 bp, Homo sapiens
agaaaatacattttt

SEQ ID NO: 13270 - DNA, 15 bp, Homo sapiens
cagaaaatacatttt

SEQ ID NO: 13271 - DNA, 15 bp, Homo sapiens
ccagaaaatacattt

SEQ ID NO: 13272 - DNA, 15 bp, Homo sapiens
gccagaaaatacatt

SEQ ID NO: 13273 - DNA, 15 bp, Homo sapiens
ggccagaaaatacat

SEQ ID NO: 13274 - DNA, 15 bp, Homo sapiens
aggccagaaaataca

SEQ ID NO: 13275 - DNA, 15 bp, Homo sapiens
taggccagaaaatac

SEQ ID NO: 13276 - DNA, 15 bp, Homo sapiens
ttaggccagaaaata

SEQ ID NO: 13277 - DNA, 15 bp, Homo sapiens
cttaggccagaaaat

SEQ ID NO: 13278 - DNA, 15 bp, Homo sapiens
tcttaggccagaaaa

SEQ ID NO: 13279 - DNA, 15 bp, Homo sapiens
ctcttaggccagaaa

SEQ ID NO: 13280 - DNA, 15 bp, Homo sapiens
gctcttaggccagaa

SEQ ID NO: 13281 - DNA, 15 bp, Homo sapiens
ggctcttaggccaga

SEQ ID NO: 13282 - DNA, 15 bp, Homo sapiens
tggctcttaggccag

SEQ ID NO: 13283 - DNA, 15 bp, Homo sapiens
ttggctcttaggcca

SEQ ID NO: 13284 - DNA, 15 bp, Homo sapiens
attggctcttaggcc

SEQ ID NO: 13285 - DNA, 15 bp, Homo sapiens
cattggctcttaggc

SEQ ID NO: 13286 - DNA, 15 bp, Homo sapiens
acattggctcttagg

SEQ ID NO: 13287 - DNA, 15 bp, Homo sapiens
tacattggctcttag

SEQ ID NO: 13288 - DNA, 15 bp, Homo sapiens
ctacattggctctta

SEQ ID NO: 13289 - DNA, 15 bp, Homo sapiens
cctacattggctctt

SEQ ID NO: 13290 - DNA, 15 bp, Homo sapiens
tcctacattggctct

SEQ ID NO: 13291 - DNA, 15 bp, Homo sapiens
atcctacattggctc

SEQ ID NO: 13292 - DNA, 15 bp, Homo sapiens
tatcctacattggct

SEQ ID NO: 13293 - DNA, 15 bp, Homo sapiens
ttatcctacattggc

SEQ ID NO: 13294 - DNA, 15 bp, Homo sapiens
attatcctacattgg

SEQ ID NO: 13295 - DNA, 15 bp, Homo sapiens
cattatcctacattg

SEQ ID NO: 13296 - DNA, 15 bp, Homo sapiens
gcattatcctacatt

SEQ ID NO: 13297 - DNA, 15 bp, Homo sapiens
tgcattatcctacat

SEQ ID NO: 13298 - DNA, 15 bp, Homo sapiens
atgcattatcctaca

SEQ ID NO: 13299 - DNA, 15 bp, Homo sapiens
aatgcattatcctac

SEQ ID NO: 13300 - DNA, 15 bp, Homo sapiens
caatgcattatccta

SEQ ID NO: 13301 - DNA, 15 bp, Homo sapiens
tcaatgcattatcct

SEQ ID NO: 13302 - DNA, 15 bp, Homo sapiens
ttcaatgcattatcc

SEQ ID NO: 13303 - DNA, 15 bp, Homo sapiens
attcaatgcattatc

SEQ ID NO: 13304 - DNA, 15 bp, Homo sapiens
aattcaatgcattat

SEQ ID NO: 13305 - DNA, 15 bp, Homo sapiens
gaattcaatgcatta

SEQ ID NO: 13306 - DNA, 15 bp, Homo sapiens
tgaattcaatgcatt

SEQ ID NO: 13307 - DNA, 15 bp, Homo sapiens
gtgaattcaatgcat

SEQ ID NO: 13308 - DNA, 15 bp, Homo sapiens
cgtgaattcaatgca

SEQ ID NO: 13309 - DNA, 15 bp, Homo sapiens
acgtgaattcaatgc

SEQ ID NO: 13310 - DNA, 15 bp, Homo sapiens
cacgtgaattcaatg

SEQ ID NO: 13311 - DNA, 15 bp, Homo sapiens
acacgtgaattcaat

SEQ ID NO: 13312 - DNA, 15 bp, Homo sapiens
aacacgtgaattcaa

SEQ ID NO: 13313 - DNA, 15 bp, Homo sapiens
aaacacgtgaattca

SEQ ID NO: 13314 - DNA, 15 bp, Homo sapiens
aaaacacgtgaattc

SEQ ID NO: 13315 - DNA, 15 bp, Homo sapiens
taaaacacgtgaatt

SEQ ID NO: 13316 - DNA, 15 bp, Homo sapiens
gtaaaacacgtgaat

SEQ ID NO: 13317 - DNA, 15 bp, Homo sapiens
ggtaaaacacgtgaa

SEQ ID NO: 13318 - DNA, 15 bp, Homo sapiens
aggtaaaacacgtga

SEQ ID NO: 13319 - DNA, 15 bp, Homo sapiens
gaggtaaaacacgtg

SEQ ID NO: 13320 - DNA, 15 bp, Homo sapiens
agaggtaaaacacgt

SEQ ID NO: 13321 - DNA, 15 bp, Homo sapiens
cagaggtaaaacacg

SEQ ID NO: 13322 - DNA, 15 bp, Homo sapiens
ccagaggtaaaacac

SEQ ID NO: 13323 - DNA, 15 bp, Homo sapiens
accagaggtaaaaca

SEQ ID NO: 13324 - DNA, 15 bp, Homo sapiens
aaccagaggtaaaac

SEQ ID NO: 13325 - DNA, 15 bp, Homo sapiens
gaaccagaggtaaaa

SEQ ID NO: 13326 - DNA, 15 bp, Homo sapiens
ggaaccagaggtaaa

SEQ ID NO: 13327 - DNA, 15 bp, Homo sapiens
cggaaccagaggtaa

SEQ ID NO: 13328 - DNA, 15 bp, Homo sapiens
acggaaccagaggta

SEQ ID NO: 13329 - DNA, 15 bp, Homo sapiens
aacggaaccagaggt

SEQ ID NO: 13330 - DNA, 15 bp, Homo sapiens
taacggaaccagagg

SEQ ID NO: 13331 - DNA, 15 bp, Homo sapiens
ttaacggaaccagag

SEQ ID NO: 13332 - DNA, 15 bp, Homo sapiens
attaacggaaccaga

SEQ ID NO: 13333 - DNA, 15 bp, Homo sapiens
aattaacggaaccag

SEQ ID NO: 13334 - DNA, 15 bp, Homo sapiens
aaattaacggaacca

SEQ ID NO: 13335 - DNA, 15 bp, Homo sapiens
caaattaacggaacc

SEQ ID NO: 13336 - DNA, 15 bp, Homo sapiens
ccaaattaacggaac

SEQ ID NO: 13337 - DNA, 15 bp, Homo sapiens
tccaaattaacggaa

SEQ ID NO: 13338 - DNA, 15 bp, Homo sapiens
ttccaaattaacgga

SEQ ID NO: 13339 - DNA, 15 bp, Homo sapiens
gttccaaattaacgg

SEQ ID NO: 13340 - DNA, 15 bp, Homo sapiens
ggttccaaattaacg

SEQ ID NO: 13341 - DNA, 15 bp, Homo sapiens
cggttccaaattaac

SEQ ID NO: 13342 - DNA, 15 bp, Homo sapiens
acggttccaaattaa

SEQ ID NO: 13343 - DNA, 15 bp, Homo sapiens
aacggttccaaatta

SEQ ID NO: 13344 - DNA, 15 bp, Homo sapiens
gaacggttccaaatt

SEQ ID NO: 13345 - DNA, 15 bp, Homo sapiens
ggaacggttccaaat

SEQ ID NO: 13346 - DNA, 15 bp, Homo sapiens
aggaacggttccaaa

SEQ ID NO: 13347 - DNA, 15 bp, Homo sapiens
gaggaacggttccaa

SEQ ID NO: 13348 - DNA, 15 bp, Homo sapiens
agaggaacggttcca

SEQ ID NO: 13349 - DNA, 15 bp, Homo sapiens
cagaggaacggttcc

SEQ ID NO: 13350 - DNA, 15 bp, Homo sapiens
acagaggaacggttc

SEQ ID NO: 13351 - DNA, 15 bp, Homo sapiens
gacagaggaacggtt

SEQ ID NO: 13352 - DNA, 15 bp, Homo sapiens
agacagaggaacggt

SEQ ID NO: 13353 - DNA, 15 bp, Homo sapiens
aagacagaggaacgg

SEQ ID NO: 13354 - DNA, 15 bp, Homo sapiens
aaagacagaggaacg

SEQ ID NO: 13355 - DNA, 15 bp, Homo sapiens
caaagacagaggaac

SEQ ID NO: 13356 - DNA, 15 bp, Homo sapiens
acaaagacagaggaa

SEQ ID NO: 13357 - DNA, 15 bp, Homo sapiens
gacaaagacagagga

SEQ ID NO: 13358 - DNA, 15 bp, Homo sapiens
agacaaagacagagg

SEQ ID NO: 13359 - DNA, 15 bp, Homo sapiens
aagacaaagacagag

SEQ ID NO: 13360 - DNA, 15 bp, Homo sapiens
aaagacaaagacaga

SEQ ID NO: 13361 - DNA, 15 bp, Homo sapiens
aaaagacaaagacag

SEQ ID NO: 13362 - DNA, 15 bp, Homo sapiens
taaaagacaaagaca

SEQ ID NO: 13363 - DNA, 15 bp, Homo sapiens
ataaaagacaaagac

SEQ ID NO: 13364 - DNA, 15 bp, Homo sapiens
cataaaagacaaaga

SEQ ID NO: 13365 - DNA, 15 bp, Homo sapiens
tcataaaagacaaag

SEQ ID NO: 13366 - DNA, 15 bp, Homo sapiens
gtcataaaagacaaa

SEQ ID NO: 13367 - DNA, 15 bp, Homo sapiens
tgtcataaaagacaa

SEQ ID NO: 13368 - DNA, 15 bp, Homo sapiens
ctgtcataaaagaca

SEQ ID NO: 13369 - DNA, 15 bp, Homo sapiens
actgtcataaaagac

SEQ ID NO: 13370 - DNA, 15 bp, Homo sapiens
cactgtcataaaaga

SEQ ID NO: 13371 - DNA, 15 bp, Homo sapiens
tcactgtcataaaag

SEQ ID NO: 13372 - DNA, 15 bp, Homo sapiens
gtcactgtcataaaa

SEQ ID NO: 13373 - DNA, 15 bp, Homo sapiens
tgtcactgtcataaa

SEQ ID NO: 13374 - DNA, 15 bp, Homo sapiens
atgtcactgtcataa

SEQ ID NO: 13375 - DNA, 15 bp, Homo sapiens
aatgtcactgtcata

SEQ ID NO: 13376 - DNA, 15 bp, Homo sapiens
aaatgtcactgtcat

SEQ ID NO: 13377 - DNA, 15 bp, Homo sapiens
aaaatgtcactgtca

SEQ ID NO: 13378 - DNA, 15 bp, Homo sapiens
aaaaatgtcactgtc

SEQ ID NO: 13379 - DNA, 15 bp, Homo sapiens
caaaaatgtcactgt

SEQ ID NO: 13380 - DNA, 15 bp, Homo sapiens
tcaaaaatgtcactg

SEQ ID NO: 13381 - DNA, 15 bp, Homo sapiens
ttcaaaaatgtcact

SEQ ID NO: 13382 - DNA, 15 bp, Homo sapiens
cttcaaaaatgtcac

SEQ ID NO: 13383 - DNA, 15 bp, Homo sapiens
ccttcaaaaatgtca

SEQ ID NO: 13384 - DNA, 15 bp, Homo sapiens
tccttcaaaaatgtc

SEQ ID NO: 13385 - DNA, 15 bp, Homo sapiens
atccttcaaaaatgt

SEQ ID NO: 13386 - DNA, 15 bp, Homo sapiens
gatccttcaaaaatg

SEQ ID NO: 13387 - DNA, 15 bp, Homo sapiens
tgatccttcaaaaat

SEQ ID NO: 13388 - DNA, 15 bp, Homo sapiens
ctgatccttcaaaaa

SEQ ID NO: 13389 - DNA, 15 bp, Homo sapiens
cctgatccttcaaaa

SEQ ID NO: 13390 - DNA, 15 bp, Homo sapiens
ccctgatccttcaaa

SEQ ID NO: 13391 - DNA, 15 bp, Homo sapiens
gccctgatccttcaa

SEQ ID NO: 13392 - DNA, 15 bp, Homo sapiens
tgccctgatccttca

SEQ ID NO: 13393 - DNA, 15 bp, Homo sapiens
ctgccctgatccttc

SEQ ID NO: 13394 - DNA, 15 bp, Homo sapiens
actgccctgatcctt

SEQ ID NO: 13395 - DNA, 15 bp, Homo sapiens
aactgccctgatcct

SEQ ID NO: 13396 - DNA, 15 bp, Homo sapiens
caactgccctgatcc

SEQ ID NO: 13397 - DNA, 15 bp, Homo sapiens
acaactgccctgatc

SEQ ID NO: 13398 - DNA, 15 bp, Homo sapiens
tacaactgccctgat

SEQ ID NO: 13399 - DNA, 15 bp, Homo sapiens
ttacaactgccctga

SEQ ID NO: 13400 - DNA, 15 bp, Homo sapiens
attacaactgccctg

SEQ ID NO: 13401 - DNA, 15 bp, Homo sapiens
aattacaactgccct

SEQ ID NO: 13402 - DNA, 15 bp, Homo sapiens
aaattacaactgccc

SEQ ID NO: 13403 - DNA, 15 bp, Homo sapiens
caaattacaactgcc

SEQ ID NO: 13404 - DNA, 15 bp, Homo sapiens
gcaaattacaactgc

SEQ ID NO: 13405 - DNA, 15 bp, Homo sapiens
tgcaaattacaactg

SEQ ID NO: 13406 - DNA, 15 bp, Homo sapiens
ctgcaaattacaact

SEQ ID NO: 13407 - DNA, 15 bp, Homo sapiens
tctgcaaattacaac

SEQ ID NO: 13408 - DNA, 15 bp, Homo sapiens
gtctgcaaattacaa

SEQ ID NO: 13409 - DNA, 15 bp, Homo sapiens
agtctgcaaattaca

SEQ ID NO: 13410 - DNA, 15 bp, Homo sapiens
gagtctgcaaattac

SEQ ID NO: 13411 - DNA, 15 bp, Homo sapiens
ggagtctgcaaatta

SEQ ID NO: 13412 - DNA, 15 bp, Homo sapiens
gggagtctgcaaatt

SEQ ID NO: 13413 - DNA, 15 bp, Homo sapiens
agggagtctgcaaat

SEQ ID NO: 13414 - DNA, 15 bp, Homo sapiens
cagggagtctgcaaa

SEQ ID NO: 13415 - DNA, 15 bp, Homo sapiens
tcagggagtctgcaa

SEQ ID NO: 13416 - DNA, 15 bp, Homo sapiens
ctcagggagtctgca

SEQ ID NO: 13417 - DNA, 15 bp, Homo sapiens
actcagggagtctgc

SEQ ID NO: 13418 - DNA, 15 bp, Homo sapiens
aactcagggagtctg

SEQ ID NO: 13419 - DNA, 15 bp, Homo sapiens
aaactcagggagtct

SEQ ID NO: 13420 - DNA, 15 bp, Homo sapiens
caaactcagggagtc

SEQ ID NO: 13421 - DNA, 15 bp, Homo sapiens
tcaaactcagggagt

SEQ ID NO: 13422 - DNA, 15 bp, Homo sapiens
atcaaactcagggag

SEQ ID NO: 13423 - DNA, 15 bp, Homo sapiens
aatcaaactcaggga

SEQ ID NO: 13424 - DNA, 15 bp, Homo sapiens
aaatcaaactcaggg

SEQ ID NO: 13425 - DNA, 15 bp, Homo sapiens
taaatcaaactcagg

SEQ ID NO: 13426 - DNA, 15 bp, Homo sapiens
ataaatcaaactcag

SEQ ID NO: 13427 - DNA, 15 bp, Homo sapiens
gataaatcaaactca

SEQ ID NO: 13428 - DNA, 15 bp, Homo sapiens
agataaatcaaactc

SEQ ID NO: 13429 - DNA, 15 bp, Homo sapiens
cagataaatcaaact

SEQ ID NO: 13430 - DNA, 15 bp, Homo sapiens
tcagataaatcaaac

SEQ ID NO: 13431 - DNA, 15 bp, Homo sapiens
atcagataaatcaaa

SEQ ID NO: 13432 - DNA, 15 bp, Homo sapiens
tatcagataaatcaa

SEQ ID NO: 13433 - DNA, 15 bp, Homo sapiens
atatcagataaatca

SEQ ID NO: 13434 - DNA, 15 bp, Homo sapiens
aatatcagataaatc

SEQ ID NO: 13435 - DNA, 15 bp, Homo sapiens
aaatatcagataaat

SEQ ID NO: 13436 - DNA, 15 bp, Homo sapiens
gaaatatcagataaa

SEQ ID NO: 13437 - DNA, 15 bp, Homo sapiens
agaaatatcagataa

SEQ ID NO: 13438 - DNA, 15 bp, Homo sapiens
cagaaatatcagata

SEQ ID NO: 13439 - DNA, 15 bp, Homo sapiens
gcagaaatatcagat

SEQ ID NO: 13440 - DNA, 15 bp, Homo sapiens
tgcagaaatatcaga

SEQ ID NO: 13441 - DNA, 15 bp, Homo sapiens
atgcagaaatatcag

SEQ ID NO: 13442 - DNA, 15 bp, Homo sapiens
catgcagaaatatca

SEQ ID NO: 13443 - DNA, 15 bp, Homo sapiens
tcatgcagaaatatc

SEQ ID NO: 13444 - DNA, 15 bp, Homo sapiens
atcatgcagaaatat

SEQ ID NO: 13445 - DNA, 15 bp, Homo sapiens
catcatgcagaaata

SEQ ID NO: 13446 - DNA, 15 bp, Homo sapiens
tcatcatgcagaaat

SEQ ID NO: 13447 - DNA, 15 bp, Homo sapiens
ctcatcatgcagaaa

SEQ ID NO: 13448 - DNA, 15 bp, Homo sapiens
tctcatcatgcagaa

SEQ ID NO: 13449 - DNA, 15 bp, Homo sapiens
gtctcatcatgcaga

SEQ ID NO: 13450 - DNA, 15 bp, Homo sapiens
agtctcatcatgcag

SEQ ID NO: 13451 - DNA, 15 bp, Homo sapiens
gagtctcatcatgca

SEQ ID NO: 13452 - DNA, 15 bp, Homo sapiens
tgagtctcatcatgc

SEQ ID NO: 13453 - DNA, 15 bp, Homo sapiens
ctgagtctcatcatg

SEQ ID NO: 13454 - DNA, 15 bp, Homo sapiens
cctgagtctcatcat

SEQ ID NO: 13455 - DNA, 15 bp, Homo sapiens
acctgagtctcatca

SEQ ID NO: 13456 - DNA, 15 bp, Homo sapiens
aacctgagtctcatc

SEQ ID NO: 13457 - DNA, 15 bp, Homo sapiens
aaacctgagtctcat

SEQ ID NO: 13458 - DNA, 15 bp, Homo sapiens
aaaacctgagtctca

SEQ ID NO: 13459 - DNA, 15 bp, Homo sapiens
caaaacctgagtctc

SEQ ID NO: 13460 - DNA, 15 bp, Homo sapiens
gcaaaacctgagtct

SEQ ID NO: 13461 - DNA, 15 bp, Homo sapiens
tgcaaaacctgagtc

SEQ ID NO: 13462 - DNA, 15 bp, Homo sapiens
atgcaaaacctgagt

SEQ ID NO: 13463 - DNA, 15 bp, Homo sapiens
aatgcaaaacctgag

SEQ ID NO: 13464 - DNA, 15 bp, Homo sapiens
aaatgcaaaacctga

SEQ ID NO: 13465 - DNA, 15 bp, Homo sapiens
gaaatgcaaaacctg

SEQ ID NO: 13466 - DNA, 15 bp, Homo sapiens
agaaatgcaaaacct

SEQ ID NO: 13467 - DNA, 15 bp, Homo sapiens
cagaaatgcaaaacc

SEQ ID NO: 13468 - DNA, 15 bp, Homo sapiens
tcagaaatgcaaaac

SEQ ID NO: 13469 - DNA, 15 bp, Homo sapiens
atcagaaatgcaaaa

SEQ ID NO: 13470 - DNA, 15 bp, Homo sapiens
catcagaaatgcaaa

SEQ ID NO: 13471 - DNA, 15 bp, Homo sapiens
ccatcagaaatgcaa

SEQ ID NO: 13472 - DNA, 15 bp, Homo sapiens
cccatcagaaatgca

SEQ ID NO: 13473 - DNA, 15 bp, Homo sapiens
tcccatcagaaatgc

SEQ ID NO: 13474 - DNA, 15 bp, Homo sapiens
ctcccatcagaaatg

SEQ ID NO: 13475 - DNA, 15 bp, Homo sapiens
gctcccatcagaaat

SEQ ID NO: 13476 - DNA, 15 bp, Homo sapiens
tgctcccatcagaaa

SEQ ID NO: 13477 - DNA, 15 bp, Homo sapiens
gtgctcccatcagaa

SEQ ID NO: 13478 - DNA, 15 bp, Homo sapiens
agtgctcccatcaga

SEQ ID NO: 13479 - DNA, 15 bp, Homo sapiens
gagtgctcccatcag

SEQ ID NO: 13480 - DNA, 15 bp, Homo sapiens
ggagtgctcccatca

SEQ ID NO: 13481 - DNA, 15 bp, Homo sapiens
tggagtgctcccatc

SEQ ID NO: 13482 - DNA, 15 bp, Homo sapiens
ctggagtgctcccat

SEQ ID NO: 13483 - DNA, 15 bp, Homo sapiens
tctggagtgctccca

SEQ ID NO: 13484 - DNA, 15 bp, Homo sapiens
ctctggagtgctccc

SEQ ID NO: 13485 - DNA, 15 bp, Homo sapiens
cctctggagtgctcc

SEQ ID NO: 13486 - DNA, 15 bp, Homo sapiens
acctctggagtgctc

SEQ ID NO: 13487 - DNA, 15 bp, Homo sapiens
cacctctggagtgct

SEQ ID NO: 13488 - DNA, 15 bp, Homo sapiens
tcacctctggagtgc

SEQ ID NO: 13489 - DNA, 15 bp, Homo sapiens
atcacctctggagtg

SEQ ID NO: 13490 - DNA, 15 bp, Homo sapiens
catcacctctggagt

SEQ ID NO: 13491 - DNA, 15 bp, Homo sapiens
acatcacctctggag

SEQ ID NO: 13492 - DNA, 15 bp, Homo sapiens
cacatcacctctgga

SEQ ID NO: 13493 - DNA, 15 bp, Homo sapiens
acacatcacctctgg

SEQ ID NO: 13494 - DNA, 15 bp, Homo sapiens
gacacatcacctctg

SEQ ID NO: 13495 - DNA, 15 bp, Homo sapiens
tgacacatcacctct

SEQ ID NO: 13496 - DNA, 15 bp, Homo sapiens
ctgacacatcacctc

SEQ ID NO: 13497 - DNA, 15 bp, Homo sapiens
actgacacatcacct

SEQ ID NO: 13498 - DNA, 15 bp, Homo sapiens
cactgacacatcacc

SEQ ID NO: 13499 - DNA, 15 bp, Homo sapiens
acactgacacatcac

SEQ ID NO: 13500 - DNA, 15 bp, Homo sapiens
cacactgacacatca

SEQ ID NO: 13501 - DNA, 15 bp, Homo sapiens
ccacactgacacatc

SEQ ID NO: 13502 - DNA, 15 bp, Homo sapiens
gccacactgacacat

SEQ ID NO: 13503 - DNA, 15 bp, Homo sapiens
tgccacactgacaca

SEQ ID NO: 13504 - DNA, 15 bp, Homo sapiens
gtgccacactgacac

SEQ ID NO: 13505 - DNA, 15 bp, Homo sapiens
tgtgccacactgaca

SEQ ID NO: 13506 - DNA, 15 bp, Homo sapiens
ctgtgccacactgac

SEQ ID NO: 13507 - DNA, 15 bp, Homo sapiens
gctgtgccacactga

SEQ ID NO: 13508 - DNA, 15 bp, Homo sapiens
tgctgtgccacactg

SEQ ID NO: 13509 - DNA, 15 bp, Homo sapiens
ctgctgtgccacact

SEQ ID NO: 13510 - DNA, 15 bp, Homo sapiens
cctgctgtgccacac

SEQ ID NO: 13511 - DNA, 15 bp, Homo sapiens
tcctgctgtgccaca

SEQ ID NO: 13512 - DNA, 15 bp, Homo sapiens
ttcctgctgtgccac

SEQ ID NO: 13513 - DNA, 15 bp, Homo sapiens
cttcctgctgtgcca

SEQ ID NO: 13514 - DNA, 15 bp, Homo sapiens
gcttcctgctgtgcc

SEQ ID NO: 13515 - DNA, 15 bp, Homo sapiens
tgcttcctgctgtgc

SEQ ID NO: 13516 - DNA, 15 bp, Homo sapiens
gtgcttcctgctgtg

SEQ ID NO: 13517 - DNA, 15 bp, Homo sapiens
tgtgcttcctgctgt

SEQ ID NO: 13518 - DNA, 15 bp, Homo sapiens
atgtgcttcctgctg

SEQ ID NO: 13519 - DNA, 15 bp, Homo sapiens
catgtgcttcctgct

SEQ ID NO: 13520 - DNA, 15 bp, Homo sapiens
tcatgtgcttcctgc

SEQ ID NO: 13521 - DNA, 15 bp, Homo sapiens
atcatgtgcttcctg

SEQ ID NO: 13522 - DNA, 15 bp, Homo sapiens
catcatgtgcttcct

SEQ ID NO: 13523 - DNA, 15 bp, Homo sapiens
acatcatgtgcttcc

SEQ ID NO: 13524 - DNA, 15 bp, Homo sapiens
gacatcatgtgcttc

SEQ ID NO: 13525 - DNA, 15 bp, Homo sapiens
ggacatcatgtgctt

SEQ ID NO: 13526 - DNA, 15 bp, Homo sapiens
tggacatcatgtgct

SEQ ID NO: 13527 - DNA, 15 bp, Homo sapiens
atggacatcatgtgc

SEQ ID NO: 13528 - DNA, 15 bp, Homo sapiens
aatggacatcatgtg

SEQ ID NO: 13529 - DNA, 15 bp, Homo sapiens
aaatggacatcatgt

SEQ ID NO: 13530 - DNA, 15 bp, Homo sapiens
caaatggacatcatg

SEQ ID NO: 13531 - DNA, 15 bp, Homo sapiens
acaaatggacatcat

SEQ ID NO: 13532 - DNA, 15 bp, Homo sapiens
gacaaatggacatca

SEQ ID NO: 13533 - DNA, 15 bp, Homo sapiens
ggacaaatggacatc

SEQ ID NO: 13534 - DNA, 15 bp, Homo sapiens
aggacaaatggacat

SEQ ID NO: 13535 - DNA, 15 bp, Homo sapiens
caggacaaatggaca

SEQ ID NO: 13536 - DNA, 15 bp, Homo sapiens
acaggacaaatggac

SEQ ID NO: 13537 - DNA, 15 bp, Homo sapiens
aacaggacaaatgga

SEQ ID NO: 13538 - DNA, 15 bp, Homo sapiens
taacaggacaaatgg

SEQ ID NO: 13539 - DNA, 15 bp, Homo sapiens
gtaacaggacaaatg

SEQ ID NO: 13540 - DNA, 15 bp, Homo sapiens
agtaacaggacaaat

SEQ ID NO: 13541 - DNA, 15 bp, Homo sapiens
cagtaacaggacaaa

SEQ ID NO: 13542 - DNA, 15 bp, Homo sapiens
tcagtaacaggacaa

SEQ ID NO: 13543 - DNA, 15 bp, Homo sapiens
atcagtaacaggaca

SEQ ID NO: 13544 - DNA, 15 bp, Homo sapiens
catcagtaacaggac

SEQ ID NO: 13545 - DNA, 15 bp, Homo sapiens
tcatcagtaacagga

SEQ ID NO: 13546 - DNA, 15 bp, Homo sapiens
ctcatcagtaacagg

SEQ ID NO: 13547 - DNA, 15 bp, Homo sapiens
cctcatcagtaacag

SEQ ID NO: 13548 - DNA, 15 bp, Homo sapiens
acctcatcagtaaca

SEQ ID NO: 13549 - DNA, 15 bp, Homo sapiens
aacctcatcagtaac

SEQ ID NO: 13550 - DNA, 15 bp, Homo sapiens
gaacctcatcagtaa

SEQ ID NO: 13551 - DNA, 15 bp, Homo sapiens
tgaacctcatcagta

SEQ ID NO: 13552 - DNA, 15 bp, Homo sapiens
gtgaacctcatcagt

SEQ ID NO: 13553 - DNA, 15 bp, Homo sapiens
agtgaacctcatcag

SEQ ID NO: 13554 - DNA, 15 bp, Homo sapiens
aagtgaacctcatca

SEQ ID NO: 13555 - DNA, 15 bp, Homo sapiens
aaagtgaacctcatc

SEQ ID NO: 13556 - DNA, 15 bp, Homo sapiens
caaagtgaacctcat

SEQ ID NO: 13557 - DNA, 15 bp, Homo sapiens
tcaaagtgaacctca

SEQ ID NO: 13558 - DNA, 15 bp, Homo sapiens
atcaaagtgaacctc

SEQ ID NO: 13559 - DNA, 15 bp, Homo sapiens
gatcaaagtgaacct

SEQ ID NO: 13560 - DNA, 15 bp, Homo sapiens
ggatcaaagtgaacc

SEQ ID NO: 13561 - DNA, 15 bp, Homo sapiens
tggatcaaagtgaac

SEQ ID NO: 13562 - DNA, 15 bp, Homo sapiens
ttggatcaaagtgaa

SEQ ID NO: 13563 - DNA, 15 bp, Homo sapiens
cttggatcaaagtga

SEQ ID NO: 13564 - DNA, 15 bp, Homo sapiens
ccttggatcaaagtg

SEQ ID NO: 13565 - DNA, 15 bp, Homo sapiens
accttggatcaaagt

SEQ ID NO: 13566 - DNA, 15 bp, Homo sapiens
caccttggatcaaag

SEQ ID NO: 13567 - DNA, 15 bp, Homo sapiens
ccaccttggatcaaa

SEQ ID NO: 13568 - DNA, 15 bp, Homo sapiens
tccaccttggatcaa

SEQ ID NO: 13569 - DNA, 15 bp, Homo sapiens
atccaccttggatca

SEQ ID NO: 13570 - DNA, 15 bp, Homo sapiens
gatccaccttggatc

SEQ ID NO: 13571 - DNA, 15 bp, Homo sapiens
agatccaccttggat

SEQ ID NO: 13572 - DNA, 15 bp, Homo sapiens
aagatccaccttgga

SEQ ID NO: 13573 - DNA, 15 bp, Homo sapiens
caagatccaccttgg

SEQ ID NO: 13574 - DNA, 15 bp, Homo sapiens
ccaagatccaccttg

SEQ ID NO: 13575 - DNA, 15 bp, Homo sapiens
tccaagatccacctt

SEQ ID NO: 13576 - DNA, 15 bp, Homo sapiens
atccaagatccacct

SEQ ID NO: 13577 - DNA, 15 bp, Homo sapiens
gatccaagatccacc

SEQ ID NO: 13578 - DNA, 15 bp, Homo sapiens
tgatccaagatccac

SEQ ID NO: 13579 - DNA, 15 bp, Homo sapiens
ttgatccaagatcca

SEQ ID NO: 13580 - DNA, 15 bp, Homo sapiens
tttgatccaagatcc

SEQ ID NO: 13581 - DNA, 15 bp, Homo sapiens
ctttgatccaagatc

SEQ ID NO: 13582 - DNA, 15 bp, Homo sapiens
tctttgatccaagat

SEQ ID NO: 13583 - DNA, 15 bp, Homo sapiens
atctttgatccaaga

SEQ ID NO: 13584 - DNA, 15 bp, Homo sapiens
gatctttgatccaag

SEQ ID NO: 13585 - DNA, 15 bp, Homo sapiens
agatctttgatccaa

SEQ ID NO: 13586 - DNA, 15 bp, Homo sapiens
aagatctttgatcca

SEQ ID NO: 13587 - DNA, 15 bp, Homo sapiens
gaagatctttgatcc

SEQ ID NO: 13588 - DNA, 15 bp, Homo sapiens
ggaagatctttgatc

SEQ ID NO: 13589 - DNA, 15 bp, Homo sapiens
tggaagatctttgat

SEQ ID NO: 13590 - DNA, 15 bp, Homo sapiens
gtggaagatctttga

SEQ ID NO: 13591 - DNA, 15 bp, Homo sapiens
tgtggaagatctttg

SEQ ID NO: 13592 - DNA, 15 bp, Homo sapiens
ctgtggaagatcttt

SEQ ID NO: 13593 - DNA, 15 bp, Homo sapiens
actgtggaagatctt

SEQ ID NO: 13594 - DNA, 15 bp, Homo sapiens
gactgtggaagatct

SEQ ID NO: 13595 - DNA, 15 bp, Homo sapiens
agactgtggaagatc

SEQ ID NO: 13596 - DNA, 15 bp, Homo sapiens
aagactgtggaagat

SEQ ID NO: 13597 - DNA, 15 bp, Homo sapiens
gaagactgtggaaga

SEQ ID NO: 13598 - DNA, 15 bp, Homo sapiens
ggaagactgtggaag

SEQ ID NO: 13599 - DNA, 15 bp, Homo sapiens
tggaagactgtggaa

SEQ ID NO: 13600 - DNA, 15 bp, Homo sapiens
gtggaagactgtgga

SEQ ID NO: 13601 - DNA, 15 bp, Homo sapiens
agtggaagactgtgg

SEQ ID NO: 13602 - DNA, 15 bp, Homo sapiens
cagtggaagactgtg

SEQ ID NO: 13603 - DNA, 15 bp, Homo sapiens
acagtggaagactgt

SEQ ID NO: 13604 - DNA, 15 bp, Homo sapiens
cacagtggaagactg

SEQ ID NO: 13605 - DNA, 15 bp, Homo sapiens
tcacagtggaagact

SEQ ID NO: 13606 - DNA, 15 bp, Homo sapiens
ttcacagtggaagac

SEQ ID NO: 13607 - DNA, 15 bp, Homo sapiens
cttcacagtggaaga

SEQ ID NO: 13608 - DNA, 15 bp, Homo sapiens
acttcacagtggaag

SEQ ID NO: 13609 - DNA, 15 bp, Homo sapiens
aacttcacagtggaa

SEQ ID NO: 13610 - DNA, 15 bp, Homo sapiens
taacttcacagtgga

SEQ ID NO: 13611 - DNA, 15 bp, Homo sapiens
ctaacttcacagtgg

SEQ ID NO: 13612 - DNA, 15 bp, Homo sapiens
actaacttcacagtg

SEQ ID NO: 13613 - DNA, 15 bp, Homo sapiens
tactaacttcacagt

SEQ ID NO: 13614 - DNA, 15 bp, Homo sapiens
gtactaacttcacag

SEQ ID NO: 13615 - DNA, 15 bp, Homo sapiens
agtactaacttcaca

SEQ ID NO: 13616 - DNA, 15 bp, Homo sapiens
aagtactaacttcac

SEQ ID NO: 13617 - DNA, 15 bp, Homo sapiens
aaagtactaacttca

SEQ ID NO: 13618 - DNA, 15 bp, Homo sapiens
aaaagtactaacttc

SEQ ID NO: 13619 - DNA, 15 bp, Homo sapiens
gaaaagtactaactt

SEQ ID NO: 13620 - DNA, 15 bp, Homo sapiens
ggaaaagtactaact

SEQ ID NO: 13621 - DNA, 15 bp, Homo sapiens
tggaaaagtactaac

SEQ ID NO: 13622 - DNA, 15 bp, Homo sapiens
atggaaaagtactaa

SEQ ID NO: 13623 - DNA, 15 bp, Homo sapiens
aatggaaaagtacta

SEQ ID NO: 13624 - DNA, 15 bp, Homo sapiens
aaatggaaaagtact

SEQ ID NO: 13625 - DNA, 15 bp, Homo sapiens
caaatggaaaagtac

SEQ ID NO: 13626 - DNA, 15 bp, Homo sapiens
acaaatggaaaagta

SEQ ID NO: 13627 - DNA, 15 bp, Homo sapiens
tacaaatggaaaagt

SEQ ID NO: 13628 - DNA, 15 bp, Homo sapiens
ttacaaatggaaaag

SEQ ID NO: 13629 - DNA, 15 bp, Homo sapiens
attacaaatggaaaa

SEQ ID NO: 13630 - DNA, 15 bp, Homo sapiens
tattacaaatggaaa

SEQ ID NO: 13631 - DNA, 15 bp, Homo sapiens
ctattacaaatggaa

SEQ ID NO: 13632 - DNA, 15 bp, Homo sapiens
cctattacaaatgga

SEQ ID NO: 13633 - DNA, 15 bp, Homo sapiens
tcctattacaaatgg

SEQ ID NO: 13634 - DNA, 15 bp, Homo sapiens
gtcctattacaaatg

SEQ ID NO: 13635 - DNA, 15 bp, Homo sapiens
tgtcctattacaaat

SEQ ID NO: 13636 - DNA, 15 bp, Homo sapiens
ctgtcctattacaaa

SEQ ID NO: 13637 - DNA, 15 bp, Homo sapiens
tctgtcctattacaa

SEQ ID NO: 13638 - DNA, 15 bp, Homo sapiens
ctctgtcctattaca

SEQ ID NO: 13639 - DNA, 15 bp, Homo sapiens
tctctgtcctattac

SEQ ID NO: 13640 - DNA, 15 bp, Homo sapiens
atctctgtcctatta

SEQ ID NO: 13641 - DNA, 15 bp, Homo sapiens
aatctctgtcctatt

SEQ ID NO: 13642 - DNA, 15 bp, Homo sapiens
taatctctgtcctat

SEQ ID NO: 13643 - DNA, 15 bp, Homo sapiens
ataatctctgtccta

SEQ ID NO: 13644 - DNA, 15 bp, Homo sapiens
tataatctctgtcct

SEQ ID NO: 13645 - DNA, 15 bp, Homo sapiens
ttataatctctgtcc

SEQ ID NO: 13646 - DNA, 15 bp, Homo sapiens
tttataatctctgtc

SEQ ID NO: 13647 - DNA, 15 bp, Homo sapiens
ctttataatctctgt

SEQ ID NO: 13648 - DNA, 15 bp, Homo sapiens
cctttataatctctg

SEQ ID NO: 13649 - DNA, 15 bp, Homo sapiens
tcctttataatctct

SEQ ID NO: 13650 - DNA, 15 bp, Homo sapiens
gtcctttataatctc

SEQ ID NO: 13651 - DNA, 15 bp, Homo sapiens
tgtcctttataatct

SEQ ID NO: 13652 - DNA, 15 bp, Homo sapiens
ttgtcctttataatc

SEQ ID NO: 13653 - DNA, 15 bp, Homo sapiens
tttgtcctttataat

SEQ ID NO: 13654 - DNA, 15 bp, Homo sapiens
ctttgtcctttataa

SEQ ID NO: 13655 - DNA, 15 bp, Homo sapiens
tctttgtcctttata

SEQ ID NO: 13656 - DNA, 15 bp, Homo sapiens
ctctttgtcctttat

SEQ ID NO: 13657 - DNA, 15 bp, Homo sapiens
gctctttgtccttta

SEQ ID NO: 13658 - DNA, 15 bp, Homo sapiens
agctctttgtccttt

SEQ ID NO: 13659 - DNA, 15 bp, Homo sapiens
aagctctttgtcctt

SEQ ID NO: 13660 - DNA, 15 bp, Homo sapiens
aaagctctttgtcct

SEQ ID NO: 13661 - DNA, 15 bp, Homo sapiens
gaaagctctttgtcc

SEQ ID NO: 13662 - DNA, 15 bp, Homo sapiens
ggaaagctctttgtc

SEQ ID NO: 13663 - DNA, 15 bp, Homo sapiens
aggaaagctctttgt

SEQ ID NO: 13664 - DNA, 15 bp, Homo sapiens
aaggaaagctctttg

SEQ ID NO: 13665 - DNA, 15 bp, Homo sapiens
aaaggaaagctcttt

SEQ ID NO: 13666 - DNA, 15 bp, Homo sapiens
gaaaggaaagctctt

SEQ ID NO: 13667 - DNA, 15 bp, Homo sapiens
agaaaggaaagctct

SEQ ID NO: 13668 - DNA, 15 bp, Homo sapiens
gagaaaggaaagctc

SEQ ID NO: 13669 - DNA, 15 bp, Homo sapiens
agagaaaggaaagct

SEQ ID NO: 13670 - DNA, 15 bp, Homo sapiens
gagagaaaggaaagc

SEQ ID NO: 13671 - DNA, 15 bp, Homo sapiens
agagagaaaggaaag

SEQ ID NO: 13672 - DNA, 15 bp, Homo sapiens
aagagagaaaggaaa

SEQ ID NO: 13673 - DNA, 15 bp, Homo sapiens
taagagagaaaggaa

SEQ ID NO: 13674 - DNA, 15 bp, Homo sapiens
ataagagagaaagga

SEQ ID NO: 13675 - DNA, 15 bp, Homo sapiens
tataagagagaaagg

SEQ ID NO: 13676 - DNA, 15 bp, Homo sapiens
atataagagagaaag

SEQ ID NO: 13677 - DNA, 15 bp, Homo sapiens
tatataagagagaaa

SEQ ID NO: 13678 - DNA, 15 bp, Homo sapiens
ctatataagagagaa

SEQ ID NO: 13679 - DNA, 15 bp, Homo sapiens
actatataagagaga

SEQ ID NO: 13680 - DNA, 15 bp, Homo sapiens
aactatataagagag

SEQ ID NO: 13681 - DNA, 15 bp, Homo sapiens
taactatataagaga

SEQ ID NO: 13682 - DNA, 15 bp, Homo sapiens
ataactatataagag

SEQ ID NO: 13683 - DNA, 15 bp, Homo sapiens
aataactatataaga

SEQ ID NO: 13684 - DNA, 15 bp, Homo sapiens
aaataactatataag

SEQ ID NO: 13685 - DNA, 15 bp, Homo sapiens
taaataactatataa

SEQ ID NO: 13686 - DNA, 15 bp, Homo sapiens
ctaaataactatata

SEQ ID NO: 13687 - DNA, 15 bp, Homo sapiens
actaaataactatat

SEQ ID NO: 13688 - DNA, 15 bp, Homo sapiens
tactaaataactata

SEQ ID NO: 13689 - DNA, 15 bp, Homo sapiens
atactaaataactat

SEQ ID NO: 13690 - DNA, 15 bp, Homo sapiens
tatactaaataacta

SEQ ID NO: 13691 - DNA, 15 bp, Homo sapiens
ttatactaaataact

SEQ ID NO: 13692 - DNA, 15 bp, Homo sapiens
gttatactaaataac

SEQ ID NO: 13693 - DNA, 15 bp, Homo sapiens
tgttatactaaataa

SEQ ID NO: 13694 - DNA, 15 bp, Homo sapiens
ttgttatactaaata

SEQ ID NO: 13695 - DNA, 15 bp, Homo sapiens
gttgttatactaaat

SEQ ID NO: 13696 - DNA, 15 bp, Homo sapiens
agttgttatactaaa

SEQ ID NO: 13697 - DNA, 15 bp, Homo sapiens
aagttgttatactaa

SEQ ID NO: 13698 - DNA, 15 bp, Homo sapiens
caagttgttatacta

SEQ ID NO: 13699 - DNA, 15 bp, Homo sapiens
ccaagttgttatact

SEQ ID NO: 13700 - DNA, 15 bp, Homo sapiens
tccaagttgttatac

SEQ ID NO: 13701 - DNA, 15 bp, Homo sapiens
atccaagttgttata

SEQ ID NO: 13702 - DNA, 15 bp, Homo sapiens
aatccaagttgttat

SEQ ID NO: 13703 - DNA, 15 bp, Homo sapiens
gaatccaagttgtta

SEQ ID NO: 13704 - DNA, 15 bp, Homo sapiens
tgaatccaagttgtt

SEQ ID NO: 13705 - DNA, 15 bp, Homo sapiens
atgaatccaagttgt

SEQ ID NO: 13706 - DNA, 15 bp, Homo sapiens
tatgaatccaagttg

SEQ ID NO: 13707 - DNA, 15 bp, Homo sapiens
ctatgaatccaagtt

SEQ ID NO: 13708 - DNA, 15 bp, Homo sapiens
tctatgaatccaagt

SEQ ID NO: 13709 - DNA, 15 bp, Homo sapiens
atctatgaatccaag

SEQ ID NO: 13710 - DNA, 15 bp, Homo sapiens
aatctatgaatccaa

SEQ ID NO: 13711 - DNA, 15 bp, Homo sapiens
gaatctatgaatcca

SEQ ID NO: 13712 - DNA, 15 bp, Homo sapiens
ggaatctatgaatcc

SEQ ID NO: 13713 - DNA, 15 bp, Homo sapiens
aggaatctatgaatc

SEQ ID NO: 13714 - DNA, 15 bp, Homo sapiens
caggaatctatgaat

SEQ ID NO: 13715 - DNA, 15 bp, Homo sapiens
acaggaatctatgaa

SEQ ID NO: 13716 - DNA, 15 bp, Homo sapiens
aacaggaatctatga

SEQ ID NO: 13717 - DNA, 15 bp, Homo sapiens
aaacaggaatctatg

SEQ ID NO: 13718 - DNA, 15 bp, Homo sapiens
aaaacaggaatctat

SEQ ID NO: 13719 - DNA, 15 bp, Homo sapiens
taaaacaggaatcta

SEQ ID NO: 13720 - DNA, 15 bp, Homo sapiens
ataaaacaggaatct

SEQ ID NO: 13721 - DNA, 15 bp, Homo sapiens
aataaaacaggaatc

SEQ ID NO: 13722 - DNA, 15 bp, Homo sapiens
gaataaaacaggaat

SEQ ID NO: 13723 - DNA, 15 bp, Homo sapiens
tgaataaaacaggaa

SEQ ID NO: 13724 - DNA, 15 bp, Homo sapiens
ttgaataaaacagga

SEQ ID NO: 13725 - DNA, 15 bp, Homo sapiens
attgaataaaacagg

SEQ ID NO: 13726 - DNA, 15 bp, Homo sapiens
cattgaataaaacag

SEQ ID NO: 13727 - DNA, 15 bp, Homo sapiens
ccattgaataaaaca

SEQ ID NO: 13728 - DNA, 15 bp, Homo sapiens
cccattgaataaaac

SEQ ID NO: 13729 - DNA, 15 bp, Homo sapiens
gcccattgaataaaa

SEQ ID NO: 13730 - DNA, 15 bp, Homo sapiens
agcccattgaataaa

SEQ ID NO: 13731 - DNA, 15 bp, Homo sapiens
cagcccattgaataa

SEQ ID NO: 13732 - DNA, 15 bp, Homo sapiens
gcagcccattgaata

SEQ ID NO: 13733 - DNA, 15 bp, Homo sapiens
tgcagcccattgaat

SEQ ID NO: 13734 - DNA, 15 bp, Homo sapiens
ttgcagcccattgaa

SEQ ID NO: 13735 - DNA, 15 bp, Homo sapiens
attgcagcccattga

SEQ ID NO: 13736 - DNA, 15 bp, Homo sapiens
cattgcagcccattg

SEQ ID NO: 13737 - DNA, 15 bp, Homo sapiens
gcattgcagcccatt

SEQ ID NO: 13738 - DNA, 15 bp, Homo sapiens
cgcattgcagcccat

SEQ ID NO: 13739 - DNA, 15 bp, Homo sapiens
acgcattgcagccca

SEQ ID NO: 13740 - DNA, 15 bp, Homo sapiens
aacgcattgcagccc

SEQ ID NO: 13741 - DNA, 15 bp, Homo sapiens
taacgcattgcagcc

SEQ ID NO: 13742 - DNA, 15 bp, Homo sapiens
gtaacgcattgcagc

SEQ ID NO: 13743 - DNA, 15 bp, Homo sapiens
agtaacgcattgcag

SEQ ID NO: 13744 - DNA, 15 bp, Homo sapiens
cagtaacgcattgca

SEQ ID NO: 13745 - DNA, 15 bp, Homo sapiens
acagtaacgcattgc

SEQ ID NO: 13746 - DNA, 15 bp, Homo sapiens
gacagtaacgcattg

SEQ ID NO: 13747 - DNA, 15 bp, Homo sapiens
tgacagtaacgcatt

SEQ ID NO: 13748 - DNA, 15 bp, Homo sapiens
ttgacagtaacgcat

SEQ ID NO: 13749 - DNA, 15 bp, Homo sapiens
attgacagtaacgca

SEQ ID NO: 13750 - DNA, 15 bp, Homo sapiens
tattgacagtaacgc

SEQ ID NO: 13751 - DNA, 15 bp, Homo sapiens
atattgacagtaacg

SEQ ID NO: 13752 - DNA, 15 bp, Homo sapiens
aatattgacagtaac

SEQ ID NO: 13753 - DNA, 15 bp, Homo sapiens
aaatattgacagtaa

SEQ ID NO: 13754 - DNA, 15 bp, Homo sapiens
taaatattgacagta

SEQ ID NO: 13755 - DNA, 15 bp, Homo sapiens
ataaatattgacagt

SEQ ID NO: 13756 - DNA, 15 bp, Homo sapiens
aataaatattgacag

SEQ ID NO: 13757 - DNA, 15 bp, Homo sapiens
aaataaatattgaca

SEQ ID NO: 13758 - DNA, 15 bp, Homo sapiens
aaaataaatattgac

SEQ ID NO: 13759 - DNA, 15 bp, Homo sapiens
caaaataaatattga

SEQ ID NO: 13760 - DNA, 15 bp, Homo sapiens
tcaaaataaatattg

SEQ ID NO: 13761 - DNA, 15 bp, Homo sapiens
atcaaaataaatatt

SEQ ID NO: 13762 - DNA, 15 bp, Homo sapiens
catcaaaataaatat

SEQ ID NO: 13763 - DNA, 15 bp, Homo sapiens
gcatcaaaataaata

SEQ ID NO: 13764 - DNA, 15 bp, Homo sapiens
agcatcaaaataaat

SEQ ID NO: 13765 - DNA, 15 bp, Homo sapiens
gagcatcaaaataaa

SEQ ID NO: 13766 - DNA, 15 bp, Homo sapiens
tgagcatcaaaataa

SEQ ID NO: 13767 - DNA, 15 bp, Homo sapiens
ctgagcatcaaaata

SEQ ID NO: 13768 - DNA, 15 bp, Homo sapiens
tctgagcatcaaaat

SEQ ID NO: 13769 - DNA, 15 bp, Homo sapiens
atctgagcatcaaaa

SEQ ID NO: 13770 - DNA, 15 bp, Homo sapiens
aatctgagcatcaaa

SEQ ID NO: 13771 - DNA, 15 bp, Homo sapiens
gaatctgagcatcaa

SEQ ID NO: 13772 - DNA, 15 bp, Homo sapiens
agaatctgagcatca

SEQ ID NO: 13773 - DNA, 15 bp, Homo sapiens
aagaatctgagcatc

SEQ ID NO: 13774 - DNA, 15 bp, Homo sapiens
taagaatctgagcat

SEQ ID NO: 13775 - DNA, 15 bp, Homo sapiens
ttaagaatctgagca

SEQ ID NO: 13776 - DNA, 15 bp, Homo sapiens
attaagaatctgagc

SEQ ID NO: 13777 - DNA, 15 bp, Homo sapiens
cattaagaatctgag

SEQ ID NO: 13778 - DNA, 15 bp, Homo sapiens
tcattaagaatctga

SEQ ID NO: 13779 - DNA, 15 bp, Homo sapiens
atcattaagaatctg

SEQ ID NO: 13780 - DNA, 15 bp, Homo sapiens
aatcattaagaatct

SEQ ID NO: 13781 - DNA, 15 bp, Homo sapiens
aaatcattaagaatc

SEQ ID NO: 13782 - DNA, 15 bp, Homo sapiens
caaatcattaagaat

SEQ ID NO: 13783 - DNA, 15 bp, Homo sapiens
ccaaatcattaagaa

SEQ ID NO: 13784 - DNA, 15 bp, Homo sapiens
gccaaatcattaaga

SEQ ID NO: 13785 - DNA, 15 bp, Homo sapiens
cgccaaatcattaag

SEQ ID NO: 13786 - DNA, 15 bp, Homo sapiens
ccgccaaatcattaa

SEQ ID NO: 13787 - DNA, 15 bp, Homo sapiens
cccgccaaatcatta

SEQ ID NO: 13788 - DNA, 15 bp, Homo sapiens
tcccgccaaatcatt

SEQ ID NO: 13789 - DNA, 15 bp, Homo sapiens
ctcccgccaaatcat

SEQ ID NO: 13790 - DNA, 15 bp, Homo sapiens
cctcccgccaaatca

SEQ ID NO: 13791 - DNA, 15 bp, Homo sapiens
gcctcccgccaaatc

SEQ ID NO: 13792 - DNA, 15 bp, Homo sapiens
tgcctcccgccaaat

SEQ ID NO: 13793 - DNA, 15 bp, Homo sapiens
gtgcctcccgccaaa

SEQ ID NO: 13794 - DNA, 15 bp, Homo sapiens
ggtgcctcccgccaa

SEQ ID NO: 13795 - DNA, 15 bp, Homo sapiens
tggtgcctcccgcca

SEQ ID NO: 13796 - DNA, 15 bp, Homo sapiens
ctggtgcctcccgcc

SEQ ID NO: 13797 - DNA, 15 bp, Homo sapiens
actggtgcctcccgc

SEQ ID NO: 13798 - DNA, 15 bp, Homo sapiens
tactggtgcctcccg

SEQ ID NO: 13799 - DNA, 15 bp, Homo sapiens
ctactggtgcctccc

SEQ ID NO: 13800 - DNA, 15 bp, Homo sapiens
actactggtgcctcc

SEQ ID NO: 13801 - DNA, 15 bp, Homo sapiens
cactactggtgcctc

SEQ ID NO: 13802 - DNA, 15 bp, Homo sapiens
gcactactggtgcct

SEQ ID NO: 13803 - DNA, 15 bp, Homo sapiens
tgcactactggtgcc

SEQ ID NO: 13804 - DNA, 15 bp, Homo sapiens
ctgcactactggtgc

SEQ ID NO: 13805 - DNA, 15 bp, Homo sapiens
cctgcactactggtg

SEQ ID NO: 13806 - DNA, 15 bp, Homo sapiens
gcctgcactactggt

SEQ ID NO: 13807 - DNA, 15 bp, Homo sapiens
tgcctgcactactgg

SEQ ID NO: 13808 - DNA, 15 bp, Homo sapiens
gtgcctgcactactg

SEQ ID NO: 13809 - DNA, 15 bp, Homo sapiens
tgtgcctgcactact

SEQ ID NO: 13810 - DNA, 15 bp, Homo sapiens
ctgtgcctgcactac

SEQ ID NO: 13811 - DNA, 15 bp, Homo sapiens
cctgtgcctgcacta

SEQ ID NO: 13812 - DNA, 15 bp, Homo sapiens
ccctgtgcctgcact

SEQ ID NO: 13813 - DNA, 15 bp, Homo sapiens
tccctgtgcctgcac

SEQ ID NO: 13814 - DNA, 15 bp, Homo sapiens
ctccctgtgcctgca

SEQ ID NO: 13815 - DNA, 15 bp, Homo sapiens
tctccctgtgcctgc

SEQ ID NO: 13816 - DNA, 15 bp, Homo sapiens
ttctccctgtgcctg

SEQ ID NO: 13817 - DNA, 15 bp, Homo sapiens
gttctccctgtgcct

SEQ ID NO: 13818 - DNA, 15 bp, Homo sapiens
ggttctccctgtgcc

SEQ ID NO: 13819 - DNA, 15 bp, Homo sapiens
tggttctccctgtgc

SEQ ID NO: 13820 - DNA, 15 bp, Homo sapiens
ctggttctccctgtg

SEQ ID NO: 13821 - DNA, 15 bp, Homo sapiens
actggttctccctgt

SEQ ID NO: 13822 - DNA, 15 bp, Homo sapiens
aactggttctccctg

SEQ ID NO: 13823 - DNA, 15 bp, Homo sapiens
caactggttctccct

SEQ ID NO: 13824 - DNA, 15 bp, Homo sapiens
acaactggttctccc

SEQ ID NO: 13825 - DNA, 15 bp, Homo sapiens
cacaactggttctcc

SEQ ID NO: 13826 - DNA, 15 bp, Homo sapiens
ccacaactggttctc

SEQ ID NO: 13827 - DNA, 15 bp, Homo sapiens
cccacaactggttct

SEQ ID NO: 13828 - DNA, 15 bp, Homo sapiens
tcccacaactggttc

SEQ ID NO: 13829 - DNA, 15 bp, Homo sapiens
gtcccacaactggtt

SEQ ID NO: 13830 - DNA, 15 bp, Homo sapiens
tgtcccacaactggt

SEQ ID NO: 13831 - DNA, 15 bp, Homo sapiens
ttgtcccacaactgg

SEQ ID NO: 13832 - DNA, 15 bp, Homo sapiens
tttgtcccacaactg

SEQ ID NO: 13833 - DNA, 15 bp, Homo sapiens
ctttgtcccacaact

SEQ ID NO: 13834 - DNA, 15 bp, Homo sapiens
gctttgtcccacaac

SEQ ID NO: 13835 - DNA, 15 bp, Homo sapiens
ggctttgtcccacaa

SEQ ID NO: 13836 - DNA, 15 bp, Homo sapiens
gggctttgtcccaca

SEQ ID NO: 13837 - DNA, 15 bp, Homo sapiens
tgggctttgtcccac

SEQ ID NO: 13838 - DNA, 15 bp, Homo sapiens
ctgggctttgtccca

SEQ ID NO: 13839 - DNA, 15 bp, Homo sapiens
cctgggctttgtccc

SEQ ID NO: 13840 - DNA, 15 bp, Homo sapiens
ccctgggctttgtcc

SEQ ID NO: 13841 - DNA, 15 bp, Homo sapiens
cccctgggctttgtc

SEQ ID NO: 13842 - DNA, 15 bp, Homo sapiens
gcccctgggctttgt

SEQ ID NO: 13843 - DNA, 15 bp, Homo sapiens
agcccctgggctttg

SEQ ID NO: 13844 - DNA, 15 bp, Homo sapiens
cagcccctgggcttt

SEQ ID NO: 13845 - DNA, 15 bp, Homo sapiens
acagcccctgggctt

SEQ ID NO: 13846 - DNA, 15 bp, Homo sapiens
cacagcccctgggct

SEQ ID NO: 13847 - DNA, 15 bp, Homo sapiens
tcacagcccctgggc

SEQ ID NO: 13848 - DNA, 15 bp, Homo sapiens
ttcacagcccctggg

SEQ ID NO: 13849 - DNA, 15 bp, Homo sapiens
cttcacagcccctgg

SEQ ID NO: 13850 - DNA, 15 bp, Homo sapiens
ccttcacagcccctg

SEQ ID NO: 13851 - DNA, 15 bp, Homo sapiens
accttcacagcccct

SEQ ID NO: 13852 - DNA, 15 bp, Homo sapiens
gaccttcacagcccc

SEQ ID NO: 13853 - DNA, 15 bp, Homo sapiens
tgaccttcacagccc

SEQ ID NO: 13854 - DNA, 15 bp, Homo sapiens
gtgaccttcacagcc

SEQ ID NO: 13855 - DNA, 15 bp, Homo sapiens
cgtgaccttcacagc

SEQ ID NO: 13856 - DNA, 15 bp, Homo sapiens
ccgtgaccttcacag

SEQ ID NO: 13857 - DNA, 15 bp, Homo sapiens
tccgtgaccttcaca

SEQ ID NO: 13858 - DNA, 15 bp, Homo sapiens
ctccgtgaccttcac

SEQ ID NO: 13859 - DNA, 15 bp, Homo sapiens
gctccgtgaccttca

SEQ ID NO: 13860 - DNA, 15 bp, Homo sapiens
agctccgtgaccttc

SEQ ID NO: 13861 - DNA, 15 bp, Homo sapiens
gagctccgtgacctt

SEQ ID NO: 13862 - DNA, 15 bp, Homo sapiens
agagctccgtgacct

SEQ ID NO: 13863 - DNA, 15 bp, Homo sapiens
aagagctccgtgacc

SEQ ID NO: 13864 - DNA, 15 bp, Homo sapiens
taagagctccgtgac

SEQ ID NO: 13865 - DNA, 15 bp, Homo sapiens
ttaagagctccgtga

SEQ ID NO: 13866 - DNA, 15 bp, Homo sapiens
tttaagagctccgtg

SEQ ID NO: 13867 - DNA, 15 bp, Homo sapiens
ttttaagagctccgt

SEQ ID NO: 13868 - DNA, 15 bp, Homo sapiens
cttttaagagctccg

SEQ ID NO: 13869 - DNA, 15 bp, Homo sapiens
acttttaagagctcc

SEQ ID NO: 13870 - DNA, 15 bp, Homo sapiens
gacttttaagagctc

SEQ ID NO: 13871 - DNA, 15 bp, Homo sapiens
tgacttttaagagct

SEQ ID NO: 13872 - DNA, 15 bp, Homo sapiens
atgacttttaagagc

SEQ ID NO: 13873 - DNA, 15 bp, Homo sapiens
aatgacttttaagag

SEQ ID NO: 13874 - DNA, 15 bp, Homo sapiens
aaatgacttttaaga

SEQ ID NO: 13875 - DNA, 15 bp, Homo sapiens
caaatgacttttaag

SEQ ID NO: 13876 - DNA, 15 bp, Homo sapiens
acaaatgacttttaa

SEQ ID NO: 13877 - DNA, 15 bp, Homo sapiens
aacaaatgactttta

SEQ ID NO: 13878 - DNA, 15 bp, Homo sapiens
caacaaatgactttt

SEQ ID NO: 13879 - DNA, 15 bp, Homo sapiens
gcaacaaatgacttt

SEQ ID NO: 13880 - DNA, 15 bp, Homo sapiens
cgcaacaaatgactt

SEQ ID NO: 13881 - DNA, 15 bp, Homo sapiens
ccgcaacaaatgact

SEQ ID NO: 13882 - DNA, 15 bp, Homo sapiens
tccgcaacaaatgac

SEQ ID NO: 13883 - DNA, 15 bp, Homo sapiens
ttccgcaacaaatga

SEQ ID NO: 13884 - DNA, 15 bp, Homo sapiens
attccgcaacaaatg

SEQ ID NO: 13885 - DNA, 15 bp, Homo sapiens
cattccgcaacaaat

SEQ ID NO: 13886 - DNA, 15 bp, Homo sapiens
tcattccgcaacaaa

SEQ ID NO: 13887 - DNA, 15 bp, Homo sapiens
ttcattccgcaacaa

SEQ ID NO: 13888 - DNA, 15 bp, Homo sapiens
gttcattccgcaaca

SEQ ID NO: 13889 - DNA, 15 bp, Homo sapiens
agttcattccgcaac

SEQ ID NO: 13890 - DNA, 15 bp, Homo sapiens
aagttcattccgcaa

SEQ ID NO: 13891 - DNA, 15 bp, Homo sapiens
aaagttcattccgca

SEQ ID NO: 13892 - DNA, 15 bp, Homo sapiens
caaagttcattccgc

SEQ ID NO: 13893 - DNA, 15 bp, Homo sapiens
ccaaagttcattccg

SEQ ID NO: 13894 - DNA, 15 bp, Homo sapiens
gccaaagttcattcc

SEQ ID NO: 13895 - DNA, 15 bp, Homo sapiens
ggccaaagttcattc

SEQ ID NO: 13896 - DNA, 15 bp, Homo sapiens
tggccaaagttcatt

SEQ ID NO: 13897 - DNA, 15 bp, Homo sapiens
ctggccaaagttcat

SEQ ID NO: 13898 - DNA, 15 bp, Homo sapiens
tctggccaaagttca

SEQ ID NO: 13899 - DNA, 15 bp, Homo sapiens
ctctggccaaagttc

SEQ ID NO: 13900 - DNA, 15 bp, Homo sapiens
cctctggccaaagtt

SEQ ID NO: 13901 - DNA, 15 bp, Homo sapiens
ccctctggccaaagt

SEQ ID NO: 13902 - DNA, 15 bp, Homo sapiens
gccctctggccaaag

SEQ ID NO: 13903 - DNA, 15 bp, Homo sapiens
agccctctggccaaa

SEQ ID NO: 13904 - DNA, 15 bp, Homo sapiens
tagccctctggccaa

SEQ ID NO: 13905 - DNA, 15 bp, Homo sapiens
gtagccctctggcca

SEQ ID NO: 13906 - DNA, 15 bp, Homo sapiens
agtagccctctggcc

SEQ ID NO: 13907 - DNA, 15 bp, Homo sapiens
cagtagccctctggc

SEQ ID NO: 13908 - DNA, 15 bp, Homo sapiens
tcagtagccctctgg

SEQ ID NO: 13909 - DNA, 15 bp, Homo sapiens
gtcagtagccctctg

SEQ ID NO: 13910 - DNA, 15 bp, Homo sapiens
ggtcagtagccctct

SEQ ID NO: 13911 - DNA, 15 bp, Homo sapiens
gggtcagtagccctc

SEQ ID NO: 13912 - DNA, 15 bp, Homo sapiens
agggtcagtagccct

SEQ ID NO: 13913 - DNA, 15 bp, Homo sapiens
gagggtcagtagccc

SEQ ID NO: 13914 - DNA, 15 bp, Homo sapiens
tgagggtcagtagcc

SEQ ID NO: 13915 - DNA, 15 bp, Homo sapiens
gtgagggtcagtagc

SEQ ID NO: 13916 - DNA, 15 bp, Homo sapiens
tgtgagggtcagtag

SEQ ID NO: 13917 - DNA, 15 bp, Homo sapiens
ctgtgagggtcagta

SEQ ID NO: 13918 - DNA, 15 bp, Homo sapiens
gctgtgagggtcagt

SEQ ID NO: 13919 - DNA, 15 bp, Homo sapiens
agctgtgagggtcag

SEQ ID NO: 13920 - DNA, 15 bp, Homo sapiens
gagctgtgagggtca

SEQ ID NO: 13921 - DNA, 15 bp, Homo sapiens
agagctgtgagggtc

SEQ ID NO: 13922 - DNA, 15 bp, Homo sapiens
aagagctgtgagggt

SEQ ID NO: 13923 - DNA, 15 bp, Homo sapiens
gaagagctgtgaggg

SEQ ID NO: 13924 - DNA, 15 bp, Homo sapiens
ggaagagctgtgagg

SEQ ID NO: 13925 - DNA, 15 bp, Homo sapiens
aggaagagctgtgag

SEQ ID NO: 13926 - DNA, 15 bp, Homo sapiens
taggaagagctgtga

SEQ ID NO: 13927 - DNA, 15 bp, Homo sapiens
ataggaagagctgtg

SEQ ID NO: 13928 - DNA, 15 bp, Homo sapiens
cataggaagagctgt

SEQ ID NO: 13929 - DNA, 15 bp, Homo sapiens
gcataggaagagctg

SEQ ID NO: 13930 - DNA, 15 bp, Homo sapiens
tgcataggaagagct

SEQ ID NO: 13931 - DNA, 15 bp, Homo sapiens
ctgcataggaagagc

SEQ ID NO: 13932 - DNA, 15 bp, Homo sapiens
cctgcataggaagag

SEQ ID NO: 13933 - DNA, 15 bp, Homo sapiens
acctgcataggaaga

SEQ ID NO: 13934 - DNA, 15 bp, Homo sapiens
gacctgcataggaag

SEQ ID NO: 13935 - DNA, 15 bp, Homo sapiens
agacctgcataggaa

SEQ ID NO: 13936 - DNA, 15 bp, Homo sapiens
cagacctgcatagga

SEQ ID NO: 13937 - DNA, 15 bp, Homo sapiens
gcagacctgcatagg

SEQ ID NO: 13938 - DNA, 15 bp, Homo sapiens
agcagacctgcatag

SEQ ID NO: 13939 - DNA, 15 bp, Homo sapiens
cagcagacctgcata

SEQ ID NO: 13940 - DNA, 15 bp, Homo sapiens
acagcagacctgcat

SEQ ID NO: 13941 - DNA, 15 bp, Homo sapiens
cacagcagacctgca

SEQ ID NO: 13942 - DNA, 15 bp, Homo sapiens
gcacagcagacctgc

SEQ ID NO: 13943 - DNA, 15 bp, Homo sapiens
tgcacagcagacctg

SEQ ID NO: 13944 - DNA, 15 bp, Homo sapiens
ctgcacagcagacct

SEQ ID NO: 13945 - DNA, 15 bp, Homo sapiens
cctgcacagcagacc

SEQ ID NO: 13946 - DNA, 15 bp, Homo sapiens
ccctgcacagcagac

SEQ ID NO: 13947 - DNA, 15 bp, Homo sapiens
gccctgcacagcaga

SEQ ID NO: 13948 - DNA, 15 bp, Homo sapiens
tgccctgcacagcag

SEQ ID NO: 13949 - DNA, 15 bp, Homo sapiens
gtgccctgcacagca

SEQ ID NO: 13950 - DNA, 15 bp, Homo sapiens
agtgccctgcacagc

SEQ ID NO: 13951 - DNA, 15 bp, Homo sapiens
gagtgccctgcacag

SEQ ID NO: 13952 - DNA, 15 bp, Homo sapiens
agagtgccctgcaca

SEQ ID NO: 13953 - DNA, 15 bp, Homo sapiens
aagagtgccctgcac

SEQ ID NO: 13954 - DNA, 15 bp, Homo sapiens
taagagtgccctgca

SEQ ID NO: 13955 - DNA, 15 bp, Homo sapiens
ttaagagtgccctgc

SEQ ID NO: 13956 - DNA, 15 bp, Homo sapiens
tttaagagtgccctg

SEQ ID NO: 13957 - DNA, 15 bp, Homo sapiens
ttttaagagtgccct

SEQ ID NO: 13958 - DNA, 15 bp, Homo sapiens
cttttaagagtgccc

SEQ ID NO: 13959 - DNA, 15 bp, Homo sapiens
tcttttaagagtgcc

SEQ ID NO: 13960 - DNA, 15 bp, Homo sapiens
gtcttttaagagtgc

SEQ ID NO: 13961 - DNA, 15 bp, Homo sapiens
agtcttttaagagtg

SEQ ID NO: 13962 - DNA, 15 bp, Homo sapiens
gagtcttttaagagt

SEQ ID NO: 13963 - DNA, 15 bp, Homo sapiens
ggagtcttttaagag

SEQ ID NO: 13964 - DNA, 15 bp, Homo sapiens
tggagtcttttaaga

SEQ ID NO: 13965 - DNA, 15 bp, Homo sapiens
ttggagtcttttaag

SEQ ID NO: 13966 - DNA, 15 bp, Homo sapiens
cttggagtcttttaa

SEQ ID NO: 13967 - DNA, 15 bp, Homo sapiens
gcttggagtctttta

SEQ ID NO: 13968 - DNA, 15 bp, Homo sapiens
agcttggagtctttt

SEQ ID NO: 13969 - DNA, 15 bp, Homo sapiens
aagcttggagtcttt

SEQ ID NO: 13970 - DNA, 15 bp, Homo sapiens
caagcttggagtctt

SEQ ID NO: 13971 - DNA, 15 bp, Homo sapiens
acaagcttggagtct

SEQ ID NO: 13972 - DNA, 15 bp, Homo sapiens
cacaagcttggagtc

SEQ ID NO: 13973 - DNA, 15 bp, Homo sapiens
tcacaagcttggagt

SEQ ID NO: 13974 - DNA, 15 bp, Homo sapiens
ctcacaagcttggag

SEQ ID NO: 13975 - DNA, 15 bp, Homo sapiens
tctcacaagcttgga

SEQ ID NO: 13976 - DNA, 15 bp, Homo sapiens
gtctcacaagcttgg

SEQ ID NO: 13977 - DNA, 15 bp, Homo sapiens
agtctcacaagcttg

SEQ ID NO: 13978 - DNA, 15 bp, Homo sapiens
gagtctcacaagctt

SEQ ID NO: 13979 - DNA, 15 bp, Homo sapiens
ggagtctcacaagct

SEQ ID NO: 13980 - DNA, 15 bp, Homo sapiens
aggagtctcacaagc

SEQ ID NO: 13981 - DNA, 15 bp, Homo sapiens
aaggagtctcacaag

SEQ ID NO: 13982 - DNA, 15 bp, Homo sapiens
taaggagtctcacaa

SEQ ID NO: 13983 - DNA, 15 bp, Homo sapiens
ctaaggagtctcaca

SEQ ID NO: 13984 - DNA, 15 bp, Homo sapiens
actaaggagtctcac

SEQ ID NO: 13985 - DNA, 15 bp, Homo sapiens
cactaaggagtctca

SEQ ID NO: 13986 - DNA, 15 bp, Homo sapiens
ccactaaggagtctc

SEQ ID NO: 13987 - DNA, 15 bp, Homo sapiens
gccactaaggagtct

SEQ ID NO: 13988 - DNA, 15 bp, Homo sapiens
cgccactaaggagtc

SEQ ID NO: 13989 - DNA, 15 bp, Homo sapiens
tcgccactaaggagt

SEQ ID NO: 13990 - DNA, 15 bp, Homo sapiens
ctcgccactaaggag

SEQ ID NO: 13991 - DNA, 15 bp, Homo sapiens
actcgccactaagga

SEQ ID NO: 13992 - DNA, 15 bp, Homo sapiens
tactcgccactaagg

SEQ ID NO: 13993 - DNA, 15 bp, Homo sapiens
ctactcgccactaag

SEQ ID NO: 13994 - DNA, 15 bp, Homo sapiens
cctactcgccactaa

SEQ ID NO: 13995 - DNA, 15 bp, Homo sapiens
ccctactcgccacta

SEQ ID NO: 13996 - DNA, 15 bp, Homo sapiens
tccctactcgccact

SEQ ID NO: 13997 - DNA, 15 bp, Homo sapiens
ctccctactcgccac

SEQ ID NO: 13998 - DNA, 15 bp, Homo sapiens
cctccctactcgcca

SEQ ID NO: 13999 - DNA, 15 bp, Homo sapiens
gcctccctactcgcc

SEQ ID NO: 14000 - DNA, 15 bp, Homo sapiens
agcctccctactcgc

SEQ ID NO: 14001 - DNA, 15 bp, Homo sapiens
tagcctccctactcg

SEQ ID NO: 14002 - DNA, 15 bp, Homo sapiens
atagcctccctactc

SEQ ID NO: 14003 - DNA, 15 bp, Homo sapiens
aatagcctccctact

SEQ ID NO: 14004 - DNA, 15 bp, Homo sapiens
caatagcctccctac

SEQ ID NO: 14005 - DNA, 15 bp, Homo sapiens
ccaatagcctcccta

SEQ ID NO: 14006 - DNA, 15 bp, Homo sapiens
accaatagcctccct

SEQ ID NO: 14007 - DNA, 15 bp, Homo sapiens
taccaatagcctccc

SEQ ID NO: 14008 - DNA, 15 bp, Homo sapiens
ttaccaatagcctcc

SEQ ID NO: 14009 - DNA, 15 bp, Homo sapiens
tttaccaatagcctc

SEQ ID NO: 14010 - DNA, 15 bp, Homo sapiens
ctttaccaatagcct

SEQ ID NO: 14011 - DNA, 15 bp, Homo sapiens
cctttaccaatagcc

SEQ ID NO: 14012 - DNA, 15 bp, Homo sapiens
gcctttaccaatagc

SEQ ID NO: 14013 - DNA, 15 bp, Homo sapiens
agcctttaccaatag

SEQ ID NO: 14014 - DNA, 15 bp, Homo sapiens
tagcctttaccaata

SEQ ID NO: 14015 - DNA, 15 bp, Homo sapiens
ctagcctttaccaat

SEQ ID NO: 14016 - DNA, 15 bp, Homo sapiens
cctagcctttaccaa

SEQ ID NO: 14017 - DNA, 15 bp, Homo sapiens
acctagcctttacca

SEQ ID NO: 14018 - DNA, 15 bp, Homo sapiens
tacctagcctttacc

SEQ ID NO: 14019 - DNA, 15 bp, Homo sapiens
ctacctagcctttac

SEQ ID NO: 14020 - DNA, 15 bp, Homo sapiens
gctacctagccttta

SEQ ID NO: 14021 - DNA, 15 bp, Homo sapiens
cgctacctagccttt

SEQ ID NO: 14022 - DNA, 15 bp, Homo sapiens
acgctacctagcctt

SEQ ID NO: 14023 - DNA, 15 bp, Homo sapiens
tacgctacctagcct

SEQ ID NO: 14024 - DNA, 15 bp, Homo sapiens
ttacgctacctagcc

SEQ ID NO: 14025 - DNA, 15 bp, Homo sapiens
cttacgctacctagc

SEQ ID NO: 14026 - DNA, 15 bp, Homo sapiens
ccttacgctacctag

SEQ ID NO: 14027 - DNA, 15 bp, Homo sapiens
tccttacgctaccta

SEQ ID NO: 14028 - DNA, 15 bp, Homo sapiens
atccttacgctacct

SEQ ID NO: 14029 - DNA, 15 bp, Homo sapiens
catccttacgctacc

SEQ ID NO: 14030 - DNA, 15 bp, Homo sapiens
acatccttacgctac

SEQ ID NO: 14031 - DNA, 15 bp, Homo sapiens
aacatccttacgcta

SEQ ID NO: 14032 - DNA, 15 bp, Homo sapiens
taacatccttacgct

SEQ ID NO: 14033 - DNA, 15 bp, Homo sapiens
ctaacatccttacgc

SEQ ID NO: 14034 - DNA, 15 bp, Homo sapiens
actaacatccttacg

SEQ ID NO: 14035 - DNA, 15 bp, Homo sapiens
tactaacatccttac

SEQ ID NO: 14036 - DNA, 15 bp, Homo sapiens
ctactaacatcctta

SEQ ID NO: 14037 - DNA, 15 bp, Homo sapiens
cctactaacatcctt

SEQ ID NO: 14038 - DNA, 15 bp, Homo sapiens
gcctactaacatcct

SEQ ID NO: 14039 - DNA, 15 bp, Homo sapiens
tgcctactaacatcc

SEQ ID NO: 14040 - DNA, 15 bp, Homo sapiens
atgcctactaacatc

SEQ ID NO: 14041 - DNA, 15 bp, Homo sapiens
catgcctactaacat

SEQ ID NO: 14042 - DNA, 15 bp, Homo sapiens
ccatgcctactaaca

SEQ ID NO: 14043 - DNA, 15 bp, Homo sapiens
tccatgcctactaac

SEQ ID NO: 14044 - DNA, 15 bp, Homo sapiens
ctccatgcctactaa

SEQ ID NO: 14045 - DNA, 15 bp, Homo sapiens
cctccatgcctacta

SEQ ID NO: 14046 - DNA, 15 bp, Homo sapiens
ccctccatgcctact

SEQ ID NO: 14047 - DNA, 15 bp, Homo sapiens
tccctccatgcctac

SEQ ID NO: 14048 - DNA, 15 bp, Homo sapiens
ttccctccatgccta

SEQ ID NO: 14049 - DNA, 15 bp, Homo sapiens
cttccctccatgcct

SEQ ID NO: 14050 - DNA, 15 bp, Homo sapiens
tcttccctccatgcc

SEQ ID NO: 14051 - DNA, 15 bp, Homo sapiens
ctcttccctccatgc

SEQ ID NO: 14052 - DNA, 15 bp, Homo sapiens
tctcttccctccatg

SEQ ID NO: 14053 - DNA, 15 bp, Homo sapiens
ttctcttccctccat

SEQ ID NO: 14054 - DNA, 15 bp, Homo sapiens
cttctcttccctcca

SEQ ID NO: 14055 - DNA, 15 bp, Homo sapiens
acttctcttccctcc

SEQ ID NO: 14056 - DNA, 15 bp, Homo sapiens
aacttctcttccctc

SEQ ID NO: 14057 - DNA, 15 bp, Homo sapiens
gaacttctcttccct

SEQ ID NO: 14058 - DNA, 15 bp, Homo sapiens
agaacttctcttccc

SEQ ID NO: 14059 - DNA, 15 bp, Homo sapiens
gagaacttctcttcc

SEQ ID NO: 14060 - DNA, 15 bp, Homo sapiens
agagaacttctcttc

SEQ ID NO: 14061 - DNA, 15 bp, Homo sapiens
cagagaacttctctt

SEQ ID NO: 14062 - DNA, 15 bp, Homo sapiens
tcagagaacttctct

SEQ ID NO: 14063 - DNA, 15 bp, Homo sapiens
ctcagagaacttctc

SEQ ID NO: 14064 - DNA, 15 bp, Homo sapiens
tctcagagaacttct

SEQ ID NO: 14065 - DNA, 15 bp, Homo sapiens
ttctcagagaacttc

SEQ ID NO: 14066 - DNA, 15 bp, Homo sapiens
tttctcagagaactt

SEQ ID NO: 14067 - DNA, 15 bp, Homo sapiens
gtttctcagagaact

SEQ ID NO: 14068 - DNA, 15 bp, Homo sapiens
agtttctcagagaac

SEQ ID NO: 14069 - DNA, 15 bp, Homo sapiens
tagtttctcagagaa

SEQ ID NO: 14070 - DNA, 15 bp, Homo sapiens
ttagtttctcagaga

SEQ ID NO: 14071 - DNA, 15 bp, Homo sapiens
tttagtttctcagag

SEQ ID NO: 14072 - DNA, 15 bp, Homo sapiens
atttagtttctcaga

SEQ ID NO: 14073 - DNA, 15 bp, Homo sapiens
tatttagtttctcag

SEQ ID NO: 14074 - DNA, 15 bp, Homo sapiens
atatttagtttctca

SEQ ID NO: 14075 - DNA, 15 bp, Homo sapiens
aatatttagtttctc

SEQ ID NO: 14076 - DNA, 15 bp, Homo sapiens
aaatatttagtttct

SEQ ID NO: 14077 - DNA, 15 bp, Homo sapiens
aaaatatttagtttc

SEQ ID NO: 14078 - DNA, 15 bp, Homo sapiens
caaaatatttagttt

SEQ ID NO: 14079 - DNA, 15 bp, Homo sapiens
ccaaaatatttagtt

SEQ ID NO: 14080 - DNA, 15 bp, Homo sapiens
tccaaaatatttagt

SEQ ID NO: 14081 - DNA, 15 bp, Homo sapiens
ttccaaaatatttag

SEQ ID NO: 14082 - DNA, 15 bp, Homo sapiens
attccaaaatattta

SEQ ID NO: 14083 - DNA, 15 bp, Homo sapiens
aattccaaaatattt

SEQ ID NO: 14084 - DNA, 15 bp, Homo sapiens
aaattccaaaatatt

SEQ ID NO: 14085 - DNA, 15 bp, Homo sapiens
caaattccaaaatat

SEQ ID NO: 14086 - DNA, 15 bp, Homo sapiens
acaaattccaaaata

SEQ ID NO: 14087 - DNA, 15 bp, Homo sapiens
cacaaattccaaaat

SEQ ID NO: 14088 - DNA, 15 bp, Homo sapiens
tcacaaattccaaaa

SEQ ID NO: 14089 - DNA, 15 bp, Homo sapiens
ctcacaaattccaaa

SEQ ID NO: 14090 - DNA, 15 bp, Homo sapiens
tctcacaaattccaa

SEQ ID NO: 14091 - DNA, 15 bp, Homo sapiens
ttctcacaaattcca

SEQ ID NO: 14092 - DNA, 15 bp, Homo sapiens
tttctcacaaattcc

SEQ ID NO: 14093 - DNA, 15 bp, Homo sapiens
ctttctcacaaattc

SEQ ID NO: 14094 - DNA, 15 bp, Homo sapiens
actttctcacaaatt

SEQ ID NO: 14095 - DNA, 15 bp, Homo sapiens
cactttctcacaaat

SEQ ID NO: 14096 - DNA, 15 bp, Homo sapiens
tcactttctcacaaa

SEQ ID NO: 14097 - DNA, 15 bp, Homo sapiens
ctcactttctcacaa

SEQ ID NO: 14098 - DNA, 15 bp, Homo sapiens
gctcactttctcaca

SEQ ID NO: 14099 - DNA, 15 bp, Homo sapiens
tgctcactttctcac

SEQ ID NO: 14100 - DNA, 15 bp, Homo sapiens
ctgctcactttctca

SEQ ID NO: 14101 - DNA, 15 bp, Homo sapiens
gctgctcactttctc

SEQ ID NO: 14102 - DNA, 15 bp, Homo sapiens
agctgctcactttct

SEQ ID NO: 14103 - DNA, 15 bp, Homo sapiens
aagctgctcactttc

SEQ ID NO: 14104 - DNA, 15 bp, Homo sapiens
caagctgctcacttt

SEQ ID NO: 14105 - DNA, 15 bp, Homo sapiens
gcaagctgctcactt

SEQ ID NO: 14106 - DNA, 15 bp, Homo sapiens
ggcaagctgctcact

SEQ ID NO: 14107 - DNA, 15 bp, Homo sapiens
aggcaagctgctcac

SEQ ID NO: 14108 - DNA, 15 bp, Homo sapiens
aaggcaagctgctca

SEQ ID NO: 14109 - DNA, 15 bp, Homo sapiens
aaaggcaagctgctc

SEQ ID NO: 14110 - DNA, 15 bp, Homo sapiens
taaaggcaagctgct

SEQ ID NO: 14111 - DNA, 15 bp, Homo sapiens
gtaaaggcaagctgc

SEQ ID NO: 14112 - DNA, 15 bp, Homo sapiens
ggtaaaggcaagctg

SEQ ID NO: 14113 - DNA, 15 bp, Homo sapiens
aggtaaaggcaagct

SEQ ID NO: 14114 - DNA, 15 bp, Homo sapiens
caggtaaaggcaagc

SEQ ID NO: 14115 - DNA, 15 bp, Homo sapiens
tcaggtaaaggcaag

SEQ ID NO: 14116 - DNA, 15 bp, Homo sapiens
ctcaggtaaaggcaa

SEQ ID NO: 14117 - DNA, 15 bp, Homo sapiens
actcaggtaaaggca

SEQ ID NO: 14118 - DNA, 15 bp, Homo sapiens
cactcaggtaaaggc

SEQ ID NO: 14119 - DNA, 15 bp, Homo sapiens
ccactcaggtaaagg

SEQ ID NO: 14120 - DNA, 15 bp, Homo sapiens
accactcaggtaaag

SEQ ID NO: 14121 - DNA, 15 bp, Homo sapiens
caccactcaggtaaa

SEQ ID NO: 14122 - DNA, 15 bp, Homo sapiens
gcaccactcaggtaa

SEQ ID NO: 14123 - DNA, 15 bp, Homo sapiens
tgcaccactcaggta

SEQ ID NO: 14124 - DNA, 15 bp, Homo sapiens
ctgcaccactcaggt

SEQ ID NO: 14125 - DNA, 15 bp, Homo sapiens
actgcaccactcagg

SEQ ID NO: 14126 - DNA, 15 bp, Homo sapiens
cactgcaccactcag

SEQ ID NO: 14127 - DNA, 15 bp, Homo sapiens
acactgcaccactca

SEQ ID NO: 14128 - DNA, 15 bp, Homo sapiens
aacactgcaccactc

SEQ ID NO: 14129 - DNA, 15 bp, Homo sapiens
aaacactgcaccact

SEQ ID NO: 14130 - DNA, 15 bp, Homo sapiens
caaacactgcaccac

SEQ ID NO: 14131 - DNA, 15 bp, Homo sapiens
acaaacactgcacca

SEQ ID NO: 14132 - DNA, 15 bp, Homo sapiens
tacaaacactgcacc

SEQ ID NO: 14133 - DNA, 15 bp, Homo sapiens
atacaaacactgcac

SEQ ID NO: 14134 - DNA, 15 bp, Homo sapiens
aatacaaacactgca

SEQ ID NO: 14135 - DNA, 15 bp, Homo sapiens
aaatacaaacactgc

SEQ ID NO: 14136 - DNA, 15 bp, Homo sapiens
gaaatacaaacactg

SEQ ID NO: 14137 - DNA, 15 bp, Homo sapiens
agaaatacaaacact

SEQ ID NO: 14138 - DNA, 15 bp, Homo sapiens
cagaaatacaaacac

SEQ ID NO: 14139 - DNA, 15 bp, Homo sapiens
gcagaaatacaaaca

SEQ ID NO: 14140 - DNA, 15 bp, Homo sapiens
tgcagaaatacaaac

SEQ ID NO: 14141 - DNA, 15 bp, Homo sapiens
ctgcagaaatacaaa

SEQ ID NO: 14142 - DNA, 15 bp, Homo sapiens
gctgcagaaatacaa

SEQ ID NO: 14143 - DNA, 15 bp, Homo sapiens
ggctgcagaaataca

SEQ ID NO: 14144 - DNA, 15 bp, Homo sapiens
aggctgcagaaatac

SEQ ID NO: 14145 - DNA, 15 bp, Homo sapiens
caggctgcagaaata

SEQ ID NO: 14146 - DNA, 15 bp, Homo sapiens
gcaggctgcagaaat

SEQ ID NO: 14147 - DNA, 15 bp, Homo sapiens
tgcaggctgcagaaa

SEQ ID NO: 14148 - DNA, 15 bp, Homo sapiens
gtgcaggctgcagaa

SEQ ID NO: 14149 - DNA, 15 bp, Homo sapiens
ggtgcaggctgcaga

SEQ ID NO: 14150 - DNA, 15 bp, Homo sapiens
aggtgcaggctgcag

SEQ ID NO: 14151 - DNA, 15 bp, Homo sapiens
aaggtgcaggctgca

SEQ ID NO: 14152 - DNA, 15 bp, Homo sapiens
gaaggtgcaggctgc

SEQ ID NO: 14153 - DNA, 15 bp, Homo sapiens
agaaggtgcaggctg

SEQ ID NO: 14154 - DNA, 15 bp, Homo sapiens
gagaaggtgcaggct

SEQ ID NO: 14155 - DNA, 15 bp, Homo sapiens
agagaaggtgcaggc

SEQ ID NO: 14156 - DNA, 15 bp, Homo sapiens
aagagaaggtgcagg

SEQ ID NO: 14157 - DNA, 15 bp, Homo sapiens
gaagagaaggtgcag

SEQ ID NO: 14158 - DNA, 15 bp, Homo sapiens
ggaagagaaggtgca

SEQ ID NO: 14159 - DNA, 15 bp, Homo sapiens
aggaagagaaggtgc

SEQ ID NO: 14160 - DNA, 15 bp, Homo sapiens
caggaagagaaggtg

SEQ ID NO: 14161 - DNA, 15 bp, Homo sapiens
ccaggaagagaaggt

SEQ ID NO: 14162 - DNA, 15 bp, Homo sapiens
accaggaagagaagg

SEQ ID NO: 14163 - DNA, 15 bp, Homo sapiens
caccaggaagagaag

SEQ ID NO: 14164 - DNA, 15 bp, Homo sapiens
tcaccaggaagagaa

SEQ ID NO: 14165 - DNA, 15 bp, Homo sapiens
ctcaccaggaagaga

SEQ ID NO: 14166 - DNA, 15 bp, Homo sapiens
actcaccaggaagag

SEQ ID NO: 14167 - DNA, 15 bp, Homo sapiens
cactcaccaggaaga

SEQ ID NO: 14168 - DNA, 15 bp, Homo sapiens
acactcaccaggaag

SEQ ID NO: 14169 - DNA, 15 bp, Homo sapiens
cacactcaccaggaa

SEQ ID NO: 14170 - DNA, 15 bp, Homo sapiens
acacactcaccagga

SEQ ID NO: 14171 - DNA, 15 bp, Homo sapiens
gacacactcaccagg

SEQ ID NO: 14172 - DNA, 15 bp, Homo sapiens
tgacacactcaccag

SEQ ID NO: 14173 - DNA, 15 bp, Homo sapiens
ctgacacactcacca

SEQ ID NO: 14174 - DNA, 15 bp, Homo sapiens
gctgacacactcacc

SEQ ID NO: 14175 - DNA, 15 bp, Homo sapiens
ggctgacacactcac

SEQ ID NO: 14176 - DNA, 15 bp, Homo sapiens
gggctgacacactca

SEQ ID NO: 14177 - DNA, 15 bp, Homo sapiens
tgggctgacacactc

SEQ ID NO: 14178 - DNA, 15 bp, Homo sapiens
ttgggctgacacact

SEQ ID NO: 14179 - DNA, 15 bp, Homo sapiens
cttgggctgacacac

SEQ ID NO: 14180 - DNA, 15 bp, Homo sapiens
tcttgggctgacaca

SEQ ID NO: 14181 - DNA, 15 bp, Homo sapiens
gtcttgggctgacac

SEQ ID NO: 14182 - DNA, 15 bp, Homo sapiens
tgtcttgggctgaca

SEQ ID NO: 14183 - DNA, 15 bp, Homo sapiens
ctgtcttgggctgac

SEQ ID NO: 14184 - DNA, 15 bp, Homo sapiens
gctgtcttgggctga

SEQ ID NO: 14185 - DNA, 15 bp, Homo sapiens
ggctgtcttgggctg

SEQ ID NO: 14186 - DNA, 15 bp, Homo sapiens
tggctgtcttgggct

SEQ ID NO: 14187 - DNA, 15 bp, Homo sapiens
ctggctgtcttgggc

SEQ ID NO: 14188 - DNA, 15 bp, Homo sapiens
tctggctgtcttggg

SEQ ID NO: 14189 - DNA, 15 bp, Homo sapiens
gtctggctgtcttgg

SEQ ID NO: 14190 - DNA, 15 bp, Homo sapiens
agtctggctgtcttg

SEQ ID NO: 14191 - DNA, 15 bp, Homo sapiens
cagtctggctgtctt

SEQ ID NO: 14192 - DNA, 15 bp, Homo sapiens
acagtctggctgtct

SEQ ID NO: 14193 - DNA, 15 bp, Homo sapiens
aacagtctggctgtc

SEQ ID NO: 14194 - DNA, 15 bp, Homo sapiens
gaacagtctggctgt

SEQ ID NO: 14195 - DNA, 15 bp, Homo sapiens
agaacagtctggctg

SEQ ID NO: 14196 - DNA, 15 bp, Homo sapiens
aagaacagtctggct

SEQ ID NO: 14197 - DNA, 15 bp, Homo sapiens
gaagaacagtctggc

SEQ ID NO: 14198 - DNA, 15 bp, Homo sapiens
tgaagaacagtctgg

SEQ ID NO: 14199 - DNA, 15 bp, Homo sapiens
ctgaagaacagtctg

SEQ ID NO: 14200 - DNA, 15 bp, Homo sapiens
actgaagaacagtct

SEQ ID NO: 14201 - DNA, 15 bp, Homo sapiens
tactgaagaacagtc

SEQ ID NO: 14202 - DNA, 15 bp, Homo sapiens
ctactgaagaacagt

SEQ ID NO: 14203 - DNA, 15 bp, Homo sapiens
gctactgaagaacag

SEQ ID NO: 14204 - DNA, 15 bp, Homo sapiens
cgctactgaagaaca

SEQ ID NO: 14205 - DNA, 15 bp, Homo sapiens
ccgctactgaagaac

SEQ ID NO: 14206 - DNA, 15 bp, Homo sapiens
accgctactgaagaa

SEQ ID NO: 14207 - DNA, 15 bp, Homo sapiens
aaccgctactgaaga

SEQ ID NO: 14208 - DNA, 15 bp, Homo sapiens
caaccgctactgaag

SEQ ID NO: 14209 - DNA, 15 bp, Homo sapiens
gcaaccgctactgaa

SEQ ID NO: 14210 - DNA, 15 bp, Homo sapiens
ggcaaccgctactga

SEQ ID NO: 14211 - DNA, 15 bp, Homo sapiens
tggcaaccgctactg

SEQ ID NO: 14212 - DNA, 15 bp, Homo sapiens
ctggcaaccgctact

SEQ ID NO: 14213 - DNA, 15 bp, Homo sapiens
actggcaaccgctac

SEQ ID NO: 14214 - DNA, 15 bp, Homo sapiens
aactggcaaccgcta

SEQ ID NO: 14215 - DNA, 15 bp, Homo sapiens
aaactggcaaccgct

SEQ ID NO: 14216 - DNA, 15 bp, Homo sapiens
gaaactggcaaccgc

SEQ ID NO: 14217 - DNA, 15 bp, Homo sapiens
agaaactggcaaccg

SEQ ID NO: 14218 - DNA, 15 bp, Homo sapiens
aagaaactggcaacc

SEQ ID NO: 14219 - DNA, 15 bp, Homo sapiens
aaagaaactggcaac

SEQ ID NO: 14220 - DNA, 15 bp, Homo sapiens
gaaagaaactggcaa

SEQ ID NO: 14221 - DNA, 15 bp, Homo sapiens
tgaaagaaactggca

SEQ ID NO: 14222 - DNA, 15 bp, Homo sapiens
atgaaagaaactggc

SEQ ID NO: 14223 - DNA, 15 bp, Homo sapiens
gatgaaagaaactgg

SEQ ID NO: 14224 - DNA, 15 bp, Homo sapiens
tgatgaaagaaactg

SEQ ID NO: 14225 - DNA, 15 bp, Homo sapiens
gtgatgaaagaaact

SEQ ID NO: 14226 - DNA, 15 bp, Homo sapiens
ggtgatgaaagaaac

SEQ ID NO: 14227 - DNA, 15 bp, Homo sapiens
gggtgatgaaagaaa

SEQ ID NO: 14228 - DNA, 15 bp, Homo sapiens
tgggtgatgaaagaa

SEQ ID NO: 14229 - DNA, 15 bp, Homo sapiens
ttgggtgatgaaaga

SEQ ID NO: 14230 - DNA, 15 bp, Homo sapiens
tttgggtgatgaaag

SEQ ID NO: 14231 - DNA, 15 bp, Homo sapiens
gtttgggtgatgaaa

SEQ ID NO: 14232 - DNA, 15 bp, Homo sapiens
agtttgggtgatgaa

SEQ ID NO: 14233 - DNA, 15 bp, Homo sapiens
cagtttgggtgatga

SEQ ID NO: 14234 - DNA, 15 bp, Homo sapiens
acagtttgggtgatg

SEQ ID NO: 14235 - DNA, 15 bp, Homo sapiens
cacagtttgggtgat

SEQ ID NO: 14236 - DNA, 15 bp, Homo sapiens
acacagtttgggtga

SEQ ID NO: 14237 - DNA, 15 bp, Homo sapiens
cacacagtttgggtg

SEQ ID NO: 14238 - DNA, 15 bp, Homo sapiens
tcacacagtttgggt

SEQ ID NO: 14239 - DNA, 15 bp, Homo sapiens
ctcacacagtttggg

SEQ ID NO: 14240 - DNA, 15 bp, Homo sapiens
gctcacacagtttgg

SEQ ID NO: 14241 - DNA, 15 bp, Homo sapiens
cgctcacacagtttg

SEQ ID NO: 14242 - DNA, 15 bp, Homo sapiens
gcgctcacacagttt

SEQ ID NO: 14243 - DNA, 15 bp, Homo sapiens
tgcgctcacacagtt

SEQ ID NO: 14244 - DNA, 15 bp, Homo sapiens
atgcgctcacacagt

SEQ ID NO: 14245 - DNA, 15 bp, Homo sapiens
catgcgctcacacag

SEQ ID NO: 14246 - DNA, 15 bp, Homo sapiens
acatgcgctcacaca

SEQ ID NO: 14247 - DNA, 15 bp, Homo sapiens
tacatgcgctcacac

SEQ ID NO: 14248 - DNA, 15 bp, Homo sapiens
gtacatgcgctcaca

SEQ ID NO: 14249 - DNA, 15 bp, Homo sapiens
ggtacatgcgctcac

SEQ ID NO: 14250 - DNA, 15 bp, Homo sapiens
cggtacatgcgctca

SEQ ID NO: 14251 - DNA, 15 bp, Homo sapiens
ccggtacatgcgctc

SEQ ID NO: 14252 - DNA, 15 bp, Homo sapiens
accggtacatgcgct

SEQ ID NO: 14253 - DNA, 15 bp, Homo sapiens
aaccggtacatgcgc

SEQ ID NO: 14254 - DNA, 15 bp, Homo sapiens
gaaccggtacatgcg

SEQ ID NO: 14255 - DNA, 15 bp, Homo sapiens
tgaaccggtacatgc

SEQ ID NO: 14256 - DNA, 15 bp, Homo sapiens
atgaaccggtacatg

SEQ ID NO: 14257 - DNA, 15 bp, Homo sapiens
gatgaaccggtacat

SEQ ID NO: 14258 - DNA, 15 bp, Homo sapiens
agatgaaccggtaca

SEQ ID NO: 14259 - DNA, 15 bp, Homo sapiens
cagatgaaccggtac

SEQ ID NO: 14260 - DNA, 15 bp, Homo sapiens
gcagatgaaccggta

SEQ ID NO: 14261 - DNA, 15 bp, Homo sapiens
agcagatgaaccggt

SEQ ID NO: 14262 - DNA, 15 bp, Homo sapiens
cagcagatgaaccgg

SEQ ID NO: 14263 - DNA, 15 bp, Homo sapiens
ccagcagatgaaccg

SEQ ID NO: 14264 - DNA, 15 bp, Homo sapiens
tccagcagatgaacc

SEQ ID NO: 14265 - DNA, 15 bp, Homo sapiens
gtccagcagatgaac

SEQ ID NO: 14266 - DNA, 15 bp, Homo sapiens
cgtccagcagatgaa

SEQ ID NO: 14267 - DNA, 15 bp, Homo sapiens
gcgtccagcagatga

SEQ ID NO: 14268 - DNA, 15 bp, Homo sapiens
tgcgtccagcagatg

SEQ ID NO: 14269 - DNA, 15 bp, Homo sapiens
ctgcgtccagcagat

SEQ ID NO: 14270 - DNA, 15 bp, Homo sapiens
actgcgtccagcaga

SEQ ID NO: 14271 - DNA, 15 bp, Homo sapiens
cactgcgtccagcag

SEQ ID NO: 14272 - DNA, 15 bp, Homo sapiens
gcactgcgtccagca

SEQ ID NO: 14273 - DNA, 15 bp, Homo sapiens
ggcactgcgtccagc

SEQ ID NO: 14274 - DNA, 15 bp, Homo sapiens
tggcactgcgtccag

SEQ ID NO: 14275 - DNA, 15 bp, Homo sapiens
ctggcactgcgtcca

SEQ ID NO: 14276 - DNA, 15 bp, Homo sapiens
gctggcactgcgtcc

SEQ ID NO: 14277 - DNA, 15 bp, Homo sapiens
tgctggcactgcgtc

SEQ ID NO: 14278 - DNA, 15 bp, Homo sapiens
ttgctggcactgcgt

SEQ ID NO: 14279 - DNA, 15 bp, Homo sapiens
cttgctggcactgcg

SEQ ID NO: 14280 - DNA, 15 bp, Homo sapiens
acttgctggcactgc

SEQ ID NO: 14281 - DNA, 15 bp, Homo sapiens
cacttgctggcactg

SEQ ID NO: 14282 - DNA, 15 bp, Homo sapiens
acacttgctggcact

SEQ ID NO: 14283 - DNA, 15 bp, Homo sapiens
tacacttgctggcac

SEQ ID NO: 14284 - DNA, 15 bp, Homo sapiens
ctacacttgctggca

SEQ ID NO: 14285 - DNA, 15 bp, Homo sapiens
tctacacttgctggc

SEQ ID NO: 14286 - DNA, 15 bp, Homo sapiens
atctacacttgctgg

SEQ ID NO: 14287 - DNA, 15 bp, Homo sapiens
aatctacacttgctg

SEQ ID NO: 14288 - DNA, 15 bp, Homo sapiens
caatctacacttgct

SEQ ID NO: 14289 - DNA, 15 bp, Homo sapiens
gcaatctacacttgc

SEQ ID NO: 14290 - DNA, 15 bp, Homo sapiens
cgcaatctacacttg

SEQ ID NO: 14291 - DNA, 15 bp, Homo sapiens
tcgcaatctacactt

SEQ ID NO: 14292 - DNA, 15 bp, Homo sapiens
gtcgcaatctacact

SEQ ID NO: 14293 - DNA, 15 bp, Homo sapiens
ggtcgcaatctacac

SEQ ID NO: 14294 - DNA, 15 bp, Homo sapiens
gggtcgcaatctaca

SEQ ID NO: 14295 - DNA, 15 bp, Homo sapiens
agggtcgcaatctac

SEQ ID NO: 14296 - DNA, 15 bp, Homo sapiens
gagggtcgcaatcta

SEQ ID NO: 14297 - DNA, 15 bp, Homo sapiens
agagggtcgcaatct

SEQ ID NO: 14298 - DNA, 15 bp, Homo sapiens
cagagggtcgcaatc

SEQ ID NO: 14299 - DNA, 15 bp, Homo sapiens
acagagggtcgcaat

SEQ ID NO: 14300 - DNA, 15 bp, Homo sapiens
tacagagggtcgcaa

SEQ ID NO: 14301 - DNA, 15 bp, Homo sapiens
ctacagagggtcgca

SEQ ID NO: 14302 - DNA, 15 bp, Homo sapiens
tctacagagggtcgc

SEQ ID NO: 14303 - DNA, 15 bp, Homo sapiens
atctacagagggtcg

SEQ ID NO: 14304 - DNA, 15 bp, Homo sapiens
catctacagagggtc

SEQ ID NO: 14305 - DNA, 15 bp, Homo sapiens
acatctacagagggt

SEQ ID NO: 14306 - DNA, 15 bp, Homo sapiens
cacatctacagaggg

SEQ ID NO: 14307 - DNA, 15 bp, Homo sapiens
ccacatctacagagg

SEQ ID NO: 14308 - DNA, 15 bp, Homo sapiens
cccacatctacagag

SEQ ID NO: 14309 - DNA, 15 bp, Homo sapiens
gcccacatctacaga

SEQ ID NO: 14310 - DNA, 15 bp, Homo sapiens
ggcccacatctacag

SEQ ID NO: 14311 - DNA, 15 bp, Homo sapiens
cggcccacatctaca

SEQ ID NO: 14312 - DNA, 15 bp, Homo sapiens
ccggcccacatctac

SEQ ID NO: 14313 - DNA, 15 bp, Homo sapiens
tccggcccacatcta

SEQ ID NO: 14314 - DNA, 15 bp, Homo sapiens
ctccggcccacatct

SEQ ID NO: 14315 - DNA, 15 bp, Homo sapiens
cctccggcccacatc

SEQ ID NO: 14316 - DNA, 15 bp, Homo sapiens
acctccggcccacat

SEQ ID NO: 14317 - DNA, 15 bp, Homo sapiens
tacctccggcccaca

SEQ ID NO: 14318 - DNA, 15 bp, Homo sapiens
gtacctccggcccac

SEQ ID NO: 14319 - DNA, 15 bp, Homo sapiens
agtacctccggccca

SEQ ID NO: 14320 - DNA, 15 bp, Homo sapiens
cagtacctccggccc

SEQ ID NO: 14321 - DNA, 15 bp, Homo sapiens
ccagtacctccggcc

SEQ ID NO: 14322 - DNA, 15 bp, Homo sapiens
tccagtacctccggc

SEQ ID NO: 14323 - DNA, 15 bp, Homo sapiens
ttccagtacctccgg

SEQ ID NO: 14324 - DNA, 15 bp, Homo sapiens
cttccagtacctccg

SEQ ID NO: 14325 - DNA, 15 bp, Homo sapiens
ccttccagtacctcc

SEQ ID NO: 14326 - DNA, 15 bp, Homo sapiens
tccttccagtacctc

SEQ ID NO: 14327 - DNA, 15 bp, Homo sapiens
atccttccagtacct

SEQ ID NO: 14328 - DNA, 15 bp, Homo sapiens
tatccttccagtacc

SEQ ID NO: 14329 - DNA, 15 bp, Homo sapiens
ctatccttccagtac

SEQ ID NO: 14330 - DNA, 15 bp, Homo sapiens
actatccttccagta

SEQ ID NO: 14331 - DNA, 15 bp, Homo sapiens
cactatccttccagt

SEQ ID NO: 14332 - DNA, 15 bp, Homo sapiens
acactatccttccag

SEQ ID NO: 14333 - DNA, 15 bp, Homo sapiens
gacactatccttcca

SEQ ID NO: 14334 - DNA, 15 bp, Homo sapiens
agacactatccttcc

SEQ ID NO: 14335 - DNA, 15 bp, Homo sapiens
tagacactatccttc

SEQ ID NO: 14336 - DNA, 15 bp, Homo sapiens
gtagacactatcctt

SEQ ID NO: 14337 - DNA, 15 bp, Homo sapiens
agtagacactatcct

SEQ ID NO: 14338 - DNA, 15 bp, Homo sapiens
aagtagacactatcc

SEQ ID NO: 14339 - DNA, 15 bp, Homo sapiens
caagtagacactatc

SEQ ID NO: 14340 - DNA, 15 bp, Homo sapiens
ccaagtagacactat

SEQ ID NO: 14341 - DNA, 15 bp, Homo sapiens
cccaagtagacacta

SEQ ID NO: 14342 - DNA, 15 bp, Homo sapiens
acccaagtagacact

SEQ ID NO: 14343 - DNA, 15 bp, Homo sapiens
cacccaagtagacac

SEQ ID NO: 14344 - DNA, 15 bp, Homo sapiens
ccacccaagtagaca

SEQ ID NO: 14345 - DNA, 15 bp, Homo sapiens
cccacccaagtagac

SEQ ID NO: 14346 - DNA, 15 bp, Homo sapiens
tcccacccaagtaga

SEQ ID NO: 14347 - DNA, 15 bp, Homo sapiens
ctcccacccaagtag

SEQ ID NO: 14348 - DNA, 15 bp, Homo sapiens
actcccacccaagta

SEQ ID NO: 14349 - DNA, 15 bp, Homo sapiens
gactcccacccaagt

SEQ ID NO: 14350 - DNA, 15 bp, Homo sapiens
agactcccacccaag

SEQ ID NO: 14351 - DNA, 15 bp, Homo sapiens
aagactcccacccaa

SEQ ID NO: 14352 - DNA, 15 bp, Homo sapiens
caagactcccaccca

SEQ ID NO: 14353 - DNA, 15 bp, Homo sapiens
tcaagactcccaccc

SEQ ID NO: 14354 - DNA, 15 bp, Homo sapiens
gtcaagactcccacc

SEQ ID NO: 14355 - DNA, 15 bp, Homo sapiens
ggtcaagactcccac

SEQ ID NO: 14356 - DNA, 15 bp, Homo sapiens
tggtcaagactccca

SEQ ID NO: 14357 - DNA, 15 bp, Homo sapiens
atggtcaagactccc

SEQ ID NO: 14358 - DNA, 15 bp, Homo sapiens
catggtcaagactcc

SEQ ID NO: 14359 - DNA, 15 bp, Homo sapiens
ccatggtcaagactc

SEQ ID NO: 14360 - DNA, 15 bp, Homo sapiens
cccatggtcaagact

SEQ ID NO: 14361 - DNA, 15 bp, Homo sapiens
gcccatggtcaagac

SEQ ID NO: 14362 - DNA, 15 bp, Homo sapiens
agcccatggtcaaga

SEQ ID NO: 14363 - DNA, 15 bp, Homo sapiens
cagcccatggtcaag

SEQ ID NO: 14364 - DNA, 15 bp, Homo sapiens
ccagcccatggtcaa

SEQ ID NO: 14365 - DNA, 15 bp, Homo sapiens
cccagcccatggtca

SEQ ID NO: 14366 - DNA, 15 bp, Homo sapiens
ccccagcccatggtc

SEQ ID NO: 14367 - DNA, 15 bp, Homo sapiens
gccccagcccatggt

SEQ ID NO: 14368 - DNA, 15 bp, Homo sapiens
agccccagcccatgg

SEQ ID NO: 14369 - DNA, 15 bp, Homo sapiens
cagccccagcccatg

SEQ ID NO: 14370 - DNA, 15 bp, Homo sapiens
gcagccccagcccat

SEQ ID NO: 14371 - DNA, 15 bp, Homo sapiens
tgcagccccagccca

SEQ ID NO: 14372 - DNA, 15 bp, Homo sapiens
ctgcagccccagccc

SEQ ID NO: 14373 - DNA, 15 bp, Homo sapiens
actgcagccccagcc

SEQ ID NO: 14374 - DNA, 15 bp, Homo sapiens
gactgcagccccagc

SEQ ID NO: 14375 - DNA, 15 bp, Homo sapiens
tgactgcagccccag

SEQ ID NO: 14376 - DNA, 15 bp, Homo sapiens
ctgactgcagcccca

SEQ ID NO: 14377 - DNA, 15 bp, Homo sapiens
tctgactgcagcccc

SEQ ID NO: 14378 - DNA, 15 bp, Homo sapiens
ttctgactgcagccc

SEQ ID NO: 14379 - DNA, 15 bp, Homo sapiens
cttctgactgcagcc

SEQ ID NO: 14380 - DNA, 15 bp, Homo sapiens
gcttctgactgcagc

SEQ ID NO: 14381 - DNA, 15 bp, Homo sapiens
ggcttctgactgcag

SEQ ID NO: 14382 - DNA, 15 bp, Homo sapiens
gggcttctgactgca

SEQ ID NO: 14383 - DNA, 15 bp, Homo sapiens
agggcttctgactgc

SEQ ID NO: 14384 - DNA, 15 bp, Homo sapiens
aagggcttctgactg

SEQ ID NO: 14385 - DNA, 15 bp, Homo sapiens
taagggcttctgact

SEQ ID NO: 14386 - DNA, 15 bp, Homo sapiens
ctaagggcttctgac

SEQ ID NO: 14387 - DNA, 15 bp, Homo sapiens
tctaagggcttctga

SEQ ID NO: 14388 - DNA, 15 bp, Homo sapiens
ttctaagggcttctg

SEQ ID NO: 14389 - DNA, 15 bp, Homo sapiens
attctaagggcttct

SEQ ID NO: 14390 - DNA, 15 bp, Homo sapiens
cattctaagggcttc

SEQ ID NO: 14391 - DNA, 15 bp, Homo sapiens
acattctaagggctt

SEQ ID NO: 14392 - DNA, 15 bp, Homo sapiens
tacattctaagggct

SEQ ID NO: 14393 - DNA, 15 bp, Homo sapiens
ttacattctaagggc

SEQ ID NO: 14394 - DNA, 15 bp, Homo sapiens
tttacattctaaggg

SEQ ID NO: 14395 - DNA, 15 bp, Homo sapiens
ttttacattctaagg

SEQ ID NO: 14396 - DNA, 15 bp, Homo sapiens
tttttacattctaag

SEQ ID NO: 14397 - DNA, 15 bp, Homo sapiens
atttttacattctaa

SEQ ID NO: 14398 - DNA, 15 bp, Homo sapiens
catttttacattcta

SEQ ID NO: 14399 - DNA, 15 bp, Homo sapiens
gcatttttacattct

SEQ ID NO: 14400 - DNA, 15 bp, Homo sapiens
agcatttttacattc

SEQ ID NO: 14401 - DNA, 15 bp, Homo sapiens
aagcatttttacatt

SEQ ID NO: 14402 - DNA, 15 bp, Homo sapiens
taagcatttttacat

SEQ ID NO: 14403 - DNA, 15 bp, Homo sapiens
gtaagcatttttaca

SEQ ID NO: 14404 - DNA, 15 bp, Homo sapiens
agtaagcatttttac

SEQ ID NO: 14405 - DNA, 15 bp, Homo sapiens
gagtaagcattttta

SEQ ID NO: 14406 - DNA, 15 bp, Homo sapiens
agagtaagcattttt

SEQ ID NO: 14407 - DNA, 15 bp, Homo sapiens
aagagtaagcatttt

SEQ ID NO: 14408 - DNA, 15 bp, Homo sapiens
caagagtaagcattt

SEQ ID NO: 14409 - DNA, 15 bp, Homo sapiens
ccaagagtaagcatt

SEQ ID NO: 14410 - DNA, 15 bp, Homo sapiens
tccaagagtaagcat

SEQ ID NO: 14411 - DNA, 15 bp, Homo sapiens
ttccaagagtaagca

SEQ ID NO: 14412 - DNA, 15 bp, Homo sapiens
attccaagagtaagc

SEQ ID NO: 14413 - DNA, 15 bp, Homo sapiens
tattccaagagtaag

SEQ ID NO: 14414 - DNA, 15 bp, Homo sapiens
ttattccaagagtaa

SEQ ID NO: 14415 - DNA, 15 bp, Homo sapiens
gttattccaagagta

SEQ ID NO: 14416 - DNA, 15 bp, Homo sapiens
agttattccaagagt

SEQ ID NO: 14417 - DNA, 15 bp, Homo sapiens
cagttattccaagag

SEQ ID NO: 14418 - DNA, 15 bp, Homo sapiens
ccagttattccaaga

SEQ ID NO: 14419 - DNA, 15 bp, Homo sapiens
tccagttattccaag

SEQ ID NO: 14420 - DNA, 15 bp, Homo sapiens
gtccagttattccaa

SEQ ID NO: 14421 - DNA, 15 bp, Homo sapiens
ggtccagttattcca

SEQ ID NO: 14422 - DNA, 15 bp, Homo sapiens
gggtccagttattcc

SEQ ID NO: 14423 - DNA, 15 bp, Homo sapiens
tgggtccagttattc

SEQ ID NO: 14424 - DNA, 15 bp, Homo sapiens
atgggtccagttatt

SEQ ID NO: 14425 - DNA, 15 bp, Homo sapiens
aatgggtccagttat

SEQ ID NO: 14426 - DNA, 15 bp, Homo sapiens
gaatgggtccagtta

SEQ ID NO: 14427 - DNA, 15 bp, Homo sapiens
agaatgggtccagtt

SEQ ID NO: 14428 - DNA, 15 bp, Homo sapiens
cagaatgggtccagt

SEQ ID NO: 14429 - DNA, 15 bp, Homo sapiens
gcagaatgggtccag

SEQ ID NO: 14430 - DNA, 15 bp, Homo sapiens
tgcagaatgggtcca

SEQ ID NO: 14431 - DNA, 15 bp, Homo sapiens
ttgcagaatgggtcc

SEQ ID NO: 14432 - DNA, 15 bp, Homo sapiens
gttgcagaatgggtc

SEQ ID NO: 14433 - DNA, 15 bp, Homo sapiens
ggttgcagaatgggt

SEQ ID NO: 14434 - DNA, 15 bp, Homo sapiens
tggttgcagaatggg

SEQ ID NO: 14435 - DNA, 15 bp, Homo sapiens
ttggttgcagaatgg

SEQ ID NO: 14436 - DNA, 15 bp, Homo sapiens
gttggttgcagaatg

SEQ ID NO: 14437 - DNA, 15 bp, Homo sapiens
tgttggttgcagaat

SEQ ID NO: 14438 - DNA, 15 bp, Homo sapiens
atgttggttgcagaa

SEQ ID NO: 14439 - DNA, 15 bp, Homo sapiens
catgttggttgcaga

SEQ ID NO: 14440 - DNA, 15 bp, Homo sapiens
gcatgttggttgcag

SEQ ID NO: 14441 - DNA, 15 bp, Homo sapiens
ggcatgttggttgca

SEQ ID NO: 14442 - DNA, 15 bp, Homo sapiens
aggcatgttggttgc

SEQ ID NO: 14443 - DNA, 15 bp, Homo sapiens
gaggcatgttggttg

SEQ ID NO: 14444 - DNA, 15 bp, Homo sapiens
ggaggcatgttggtt

SEQ ID NO: 14445 - DNA, 15 bp, Homo sapiens
gggaggcatgttggt

SEQ ID NO: 14446 - DNA, 15 bp, Homo sapiens
agggaggcatgttgg

SEQ ID NO: 14447 - DNA, 15 bp, Homo sapiens
gagggaggcatgttg

SEQ ID NO: 14448 - DNA, 15 bp, Homo sapiens
agagggaggcatgtt

SEQ ID NO: 14449 - DNA, 15 bp, Homo sapiens
aagagggaggcatgt

SEQ ID NO: 14450 - DNA, 15 bp, Homo sapiens
aaagagggaggcatg

SEQ ID NO: 14451 - DNA, 15 bp, Homo sapiens
gaaagagggaggcat

SEQ ID NO: 14452 - DNA, 15 bp, Homo sapiens
ggaaagagggaggca

SEQ ID NO: 14453 - DNA, 15 bp, Homo sapiens
gggaaagagggaggc

SEQ ID NO: 14454 - DNA, 15 bp, Homo sapiens
ggggaaagagggagg

SEQ ID NO: 14455 - DNA, 15 bp, Homo sapiens
aggggaaagagggag

SEQ ID NO: 14456 - DNA, 15 bp, Homo sapiens
gaggggaaagaggga

SEQ ID NO: 14457 - DNA, 15 bp, Homo sapiens
ggaggggaaagaggg

SEQ ID NO: 14458 - DNA, 15 bp, Homo sapiens
tggaggggaaagagg

SEQ ID NO: 14459 - DNA, 15 bp, Homo sapiens
atggaggggaaagag

SEQ ID NO: 14460 - DNA, 15 bp, Homo sapiens
tatggaggggaaaga

SEQ ID NO: 14461 - DNA, 15 bp, Homo sapiens
ttatggaggggaaag

SEQ ID NO: 14462 - DNA, 15 bp, Homo sapiens
gttatggaggggaaa

SEQ ID NO: 14463 - DNA, 15 bp, Homo sapiens
ggttatggaggggaa

SEQ ID NO: 14464 - DNA, 15 bp, Homo sapiens
gggttatggagggga

SEQ ID NO: 14465 - DNA, 15 bp, Homo sapiens
ggggttatggagggg

SEQ ID NO: 14466 - DNA, 15 bp, Homo sapiens
aggggttatggaggg

SEQ ID NO: 14467 - DNA, 15 bp, Homo sapiens
taggggttatggagg

SEQ ID NO: 14468 - DNA, 15 bp, Homo sapiens
ttaggggttatggag

SEQ ID NO: 14469 - DNA, 15 bp, Homo sapiens
attaggggttatgga

SEQ ID NO: 14470 - DNA, 15 bp, Homo sapiens
tattaggggttatgg

SEQ ID NO: 14471 - DNA, 15 bp, Homo sapiens
gtattaggggttatg

SEQ ID NO: 14472 - DNA, 15 bp, Homo sapiens
agtattaggggttat

SEQ ID NO: 14473 - DNA, 15 bp, Homo sapiens
cagtattaggggtta

SEQ ID NO: 14474 - DNA, 15 bp, Homo sapiens
tcagtattaggggtt

SEQ ID NO: 14475 - DNA, 15 bp, Homo sapiens
ttcagtattaggggt

SEQ ID NO: 14476 - DNA, 15 bp, Homo sapiens
cttcagtattagggg

SEQ ID NO: 14477 - DNA, 15 bp, Homo sapiens
gcttcagtattaggg

SEQ ID NO: 14478 - DNA, 15 bp, Homo sapiens
agcttcagtattagg

SEQ ID NO: 14479 - DNA, 15 bp, Homo sapiens
cagcttcagtattag

SEQ ID NO: 14480 - DNA, 15 bp, Homo sapiens
ccagcttcagtatta

SEQ ID NO: 14481 - DNA, 15 bp, Homo sapiens
tccagcttcagtatt

SEQ ID NO: 14482 - DNA, 15 bp, Homo sapiens
ctccagcttcagtat

SEQ ID NO: 14483 - DNA, 15 bp, Homo sapiens
actccagcttcagta

SEQ ID NO: 14484 - DNA, 15 bp, Homo sapiens
aactccagcttcagt

SEQ ID NO: 14485 - DNA, 15 bp, Homo sapiens
caactccagcttcag

SEQ ID NO: 14486 - DNA, 15 bp, Homo sapiens
acaactccagcttca

SEQ ID NO: 14487 - DNA, 15 bp, Homo sapiens
aacaactccagcttc

SEQ ID NO: 14488 - DNA, 15 bp, Homo sapiens
aaacaactccagctt

SEQ ID NO: 14489 - DNA, 15 bp, Homo sapiens
taaacaactccagct

SEQ ID NO: 14490 - DNA, 15 bp, Homo sapiens
gtaaacaactccagc

SEQ ID NO: 14491 - DNA, 15 bp, Homo sapiens
ggtaaacaactccag

SEQ ID NO: 14492 - DNA, 15 bp, Homo sapiens
aggtaaacaactcca

SEQ ID NO: 14493 - DNA, 15 bp, Homo sapiens
aaggtaaacaactcc

SEQ ID NO: 14494 - DNA, 15 bp, Homo sapiens
gaaggtaaacaactc

SEQ ID NO: 14495 - DNA, 15 bp, Homo sapiens
agaaggtaaacaact

SEQ ID NO: 14496 - DNA, 15 bp, Homo sapiens
cagaaggtaaacaac

SEQ ID NO: 14497 - DNA, 15 bp, Homo sapiens
acagaaggtaaacaa

SEQ ID NO: 14498 - DNA, 15 bp, Homo sapiens
cacagaaggtaaaca

SEQ ID NO: 14499 - DNA, 15 bp, Homo sapiens
ccacagaaggtaaac

SEQ ID NO: 14500 - DNA, 15 bp, Homo sapiens
gccacagaaggtaaa

SEQ ID NO: 14501 - DNA, 15 bp, Homo sapiens
agccacagaaggtaa

SEQ ID NO: 14502 - DNA, 15 bp, Homo sapiens
aagccacagaaggta

SEQ ID NO: 14503 - DNA, 15 bp, Homo sapiens
gaagccacagaaggt

SEQ ID NO: 14504 - DNA, 15 bp, Homo sapiens
agaagccacagaagg

SEQ ID NO: 14505 - DNA, 15 bp, Homo sapiens
tagaagccacagaag

SEQ ID NO: 14506 - DNA, 15 bp, Homo sapiens
ctagaagccacagaa

SEQ ID NO: 14507 - DNA, 15 bp, Homo sapiens
cctagaagccacaga

SEQ ID NO: 14508 - DNA, 15 bp, Homo sapiens
acctagaagccacag

SEQ ID NO: 14509 - DNA, 15 bp, Homo sapiens
aacctagaagccaca

SEQ ID NO: 14510 - DNA, 15 bp, Homo sapiens
gaacctagaagccac

SEQ ID NO: 14511 - DNA, 15 bp, Homo sapiens
agaacctagaagcca

SEQ ID NO: 14512 - DNA, 15 bp, Homo sapiens
aagaacctagaagcc

SEQ ID NO: 14513 - DNA, 15 bp, Homo sapiens
gaagaacctagaagc

SEQ ID NO: 14514 - DNA, 15 bp, Homo sapiens
tgaagaacctagaag

SEQ ID NO: 14515 - DNA, 15 bp, Homo sapiens
gtgaagaacctagaa

SEQ ID NO: 14516 - DNA, 15 bp, Homo sapiens
tgtgaagaacctaga

SEQ ID NO: 14517 - DNA, 15 bp, Homo sapiens
ctgtgaagaacctag

SEQ ID NO: 14518 - DNA, 15 bp, Homo sapiens
actgtgaagaaccta

SEQ ID NO: 14519 - DNA, 15 bp, Homo sapiens
gactgtgaagaacct

SEQ ID NO: 14520 - DNA, 15 bp, Homo sapiens
tgactgtgaagaacc

SEQ ID NO: 14521 - DNA, 15 bp, Homo sapiens
ctgactgtgaagaac

SEQ ID NO: 14522 - DNA, 15 bp, Homo sapiens
cctgactgtgaagaa

SEQ ID NO: 14523 - DNA, 15 bp, Homo sapiens
acctgactgtgaaga

SEQ ID NO: 14524 - DNA, 15 bp, Homo sapiens
aacctgactgtgaag

SEQ ID NO: 14525 - DNA, 15 bp, Homo sapiens
caacctgactgtgaa

SEQ ID NO: 14526 - DNA, 15 bp, Homo sapiens
acaacctgactgtga

SEQ ID NO: 14527 - DNA, 15 bp, Homo sapiens
gacaacctgactgtg

SEQ ID NO: 14528 - DNA, 15 bp, Homo sapiens
ggacaacctgactgt

SEQ ID NO: 14529 - DNA, 15 bp, Homo sapiens
tggacaacctgactg

SEQ ID NO: 14530 - DNA, 15 bp, Homo sapiens
ctggacaacctgact

SEQ ID NO: 14531 - DNA, 15 bp, Homo sapiens
gctggacaacctgac

SEQ ID NO: 14532 - DNA, 15 bp, Homo sapiens
agctggacaacctga

SEQ ID NO: 14533 - DNA, 15 bp, Homo sapiens
gagctggacaacctg

SEQ ID NO: 14534 - DNA, 15 bp, Homo sapiens
tgagctggacaacct

SEQ ID NO: 14535 - DNA, 15 bp, Homo sapiens
ttgagctggacaacc

SEQ ID NO: 14536 - DNA, 15 bp, Homo sapiens
cttgagctggacaac

SEQ ID NO: 14537 - DNA, 15 bp, Homo sapiens
acttgagctggacaa

SEQ ID NO: 14538 - DNA, 15 bp, Homo sapiens
gacttgagctggaca

SEQ ID NO: 14539 - DNA, 15 bp, Homo sapiens
tgacttgagctggac

SEQ ID NO: 14540 - DNA, 15 bp, Homo sapiens
gtgacttgagctgga

SEQ ID NO: 14541 - DNA, 15 bp, Homo sapiens
agtgacttgagctgg

SEQ ID NO: 14542 - DNA, 15 bp, Homo sapiens
gagtgacttgagctg

SEQ ID NO: 14543 - DNA, 15 bp, Homo sapiens
ggagtgacttgagct

SEQ ID NO: 14544 - DNA, 15 bp, Homo sapiens
tggagtgacttgagc

SEQ ID NO: 14545 - DNA, 15 bp, Homo sapiens
atggagtgacttgag

SEQ ID NO: 14546 - DNA, 15 bp, Homo sapiens
catggagtgacttga

SEQ ID NO: 14547 - DNA, 15 bp, Homo sapiens
acatggagtgacttg

SEQ ID NO: 14548 - DNA, 15 bp, Homo sapiens
cacatggagtgactt

SEQ ID NO: 14549 - DNA, 15 bp, Homo sapiens
gcacatggagtgact

SEQ ID NO: 14550 - DNA, 15 bp, Homo sapiens
tgcacatggagtgac

SEQ ID NO: 14551 - DNA, 15 bp, Homo sapiens
ctgcacatggagtga

SEQ ID NO: 14552 - DNA, 15 bp, Homo sapiens
cctgcacatggagtg

SEQ ID NO: 14553 - DNA, 15 bp, Homo sapiens
tcctgcacatggagt

SEQ ID NO: 14554 - DNA, 15 bp, Homo sapiens
ttcctgcacatggag

SEQ ID NO: 14555 - DNA, 15 bp, Homo sapiens
gttcctgcacatgga

SEQ ID NO: 14556 - DNA, 15 bp, Homo sapiens
tgttcctgcacatgg

SEQ ID NO: 14557 - DNA, 15 bp, Homo sapiens
gtgttcctgcacatg

SEQ ID NO: 14558 - DNA, 15 bp, Homo sapiens
agtgttcctgcacat

SEQ ID NO: 14559 - DNA, 15 bp, Homo sapiens
cagtgttcctgcaca

SEQ ID NO: 14560 - DNA, 15 bp, Homo sapiens
gcagtgttcctgcac

SEQ ID NO: 14561 - DNA, 15 bp, Homo sapiens
agcagtgttcctgca

SEQ ID NO: 14562 - DNA, 15 bp, Homo sapiens
gagcagtgttcctgc

SEQ ID NO: 14563 - DNA, 15 bp, Homo sapiens
agagcagtgttcctg

SEQ ID NO: 14564 - DNA, 15 bp, Homo sapiens
aagagcagtgttcct

SEQ ID NO: 14565 - DNA, 15 bp, Homo sapiens
caagagcagtgttcc

SEQ ID NO: 14566 - DNA, 15 bp, Homo sapiens
ccaagagcagtgttc

SEQ ID NO: 14567 - DNA, 15 bp, Homo sapiens
gccaagagcagtgtt

SEQ ID NO: 14568 - DNA, 15 bp, Homo sapiens
agccaagagcagtgt

SEQ ID NO: 14569 - DNA, 15 bp, Homo sapiens
tagccaagagcagtg

SEQ ID NO: 14570 - DNA, 15 bp, Homo sapiens
ttagccaagagcagt

SEQ ID NO: 14571 - DNA, 15 bp, Homo sapiens
gttagccaagagcag

SEQ ID NO: 14572 - DNA, 15 bp, Homo sapiens
agttagccaagagca

SEQ ID NO: 14573 - DNA, 15 bp, Homo sapiens
cagttagccaagagc

SEQ ID NO: 14574 - DNA, 15 bp, Homo sapiens
acagttagccaagag

SEQ ID NO: 14575 - DNA, 15 bp, Homo sapiens
cacagttagccaaga

SEQ ID NO: 14576 - DNA, 15 bp, Homo sapiens
tcacagttagccaag

SEQ ID NO: 14577 - DNA, 15 bp, Homo sapiens
gtcacagttagccaa

SEQ ID NO: 14578 - DNA, 15 bp, Homo sapiens
ggtcacagttagcca

SEQ ID NO: 14579 - DNA, 15 bp, Homo sapiens
aggtcacagttagcc

SEQ ID NO: 14580 - DNA, 15 bp, Homo sapiens
caggtcacagttagc

SEQ ID NO: 14581 - DNA, 15 bp, Homo sapiens
ccaggtcacagttag

SEQ ID NO: 14582 - DNA, 15 bp, Homo sapiens
cccaggtcacagtta

SEQ ID NO: 14583 - DNA, 15 bp, Homo sapiens
gcccaggtcacagtt

SEQ ID NO: 14584 - DNA, 15 bp, Homo sapiens
tgcccaggtcacagt

SEQ ID NO: 14585 - DNA, 15 bp, Homo sapiens
atgcccaggtcacag

SEQ ID NO: 14586 - DNA, 15 bp, Homo sapiens
catgcccaggtcaca

SEQ ID NO: 14587 - DNA, 15 bp, Homo sapiens
acatgcccaggtcac

SEQ ID NO: 14588 - DNA, 15 bp, Homo sapiens
gacatgcccaggtca

SEQ ID NO: 14589 - DNA, 15 bp, Homo sapiens
ggacatgcccaggtc

SEQ ID NO: 14590 - DNA, 15 bp, Homo sapiens
aggacatgcccaggt

SEQ ID NO: 14591 - DNA, 15 bp, Homo sapiens
caggacatgcccagg

SEQ ID NO: 14592 - DNA, 15 bp, Homo sapiens
ccaggacatgcccag

SEQ ID NO: 14593 - DNA, 15 bp, Homo sapiens
accaggacatgccca

SEQ ID NO: 14594 - DNA, 15 bp, Homo sapiens
caccaggacatgccc

SEQ ID NO: 14595 - DNA, 15 bp, Homo sapiens
ccaccaggacatgcc

SEQ ID NO: 14596 - DNA, 15 bp, Homo sapiens
accaccaggacatgc

SEQ ID NO: 14597 - DNA, 15 bp, Homo sapiens
caccaccaggacatg

SEQ ID NO: 14598 - DNA, 15 bp, Homo sapiens
ccaccaccaggacat

SEQ ID NO: 14599 - DNA, 15 bp, Homo sapiens
cccaccaccaggaca

SEQ ID NO: 14600 - DNA, 15 bp, Homo sapiens
gcccaccaccaggac

SEQ ID NO: 14601 - DNA, 15 bp, Homo sapiens
agcccaccaccagga

SEQ ID NO: 14602 - DNA, 15 bp, Homo sapiens
cagcccaccaccagg

SEQ ID NO: 14603 - DNA, 15 bp, Homo sapiens
gcagcccaccaccag

SEQ ID NO: 14604 - DNA, 15 bp, Homo sapiens
tgcagcccaccacca

SEQ ID NO: 14605 - DNA, 15 bp, Homo sapiens
ctgcagcccaccacc

SEQ ID NO: 14606 - DNA, 15 bp, Homo sapiens
actgcagcccaccac

SEQ ID NO: 14607 - DNA, 15 bp, Homo sapiens
cactgcagcccacca

SEQ ID NO: 14608 - DNA, 15 bp, Homo sapiens
ccactgcagcccacc

SEQ ID NO: 14609 - DNA, 15 bp, Homo sapiens
tccactgcagcccac

SEQ ID NO: 14610 - DNA, 15 bp, Homo sapiens
gtccactgcagccca

SEQ ID NO: 14611 - DNA, 15 bp, Homo sapiens
tgtccactgcagccc

SEQ ID NO: 14612 - DNA, 15 bp, Homo sapiens
ctgtccactgcagcc

SEQ ID NO: 14613 - DNA, 15 bp, Homo sapiens
gctgtccactgcagc

SEQ ID NO: 14614 - DNA, 15 bp, Homo sapiens
tgctgtccactgcag

SEQ ID NO: 14615 - DNA, 15 bp, Homo sapiens
ctgctgtccactgca

SEQ ID NO: 14616 - DNA, 15 bp, Homo sapiens
gctgctgtccactgc

SEQ ID NO: 14617 - DNA, 15 bp, Homo sapiens
tgctgctgtccactg

SEQ ID NO: 14618 - DNA, 15 bp, Homo sapiens
gtgctgctgtccact

SEQ ID NO: 14619 - DNA, 15 bp, Homo sapiens
tgtgctgctgtccac

SEQ ID NO: 14620 - DNA, 15 bp, Homo sapiens
atgtgctgctgtcca

SEQ ID NO: 14621 - DNA, 15 bp, Homo sapiens
catgtgctgctgtcc

SEQ ID NO: 14622 - DNA, 15 bp, Homo sapiens
tcatgtgctgctgtc

SEQ ID NO: 14623 - DNA, 15 bp, Homo sapiens
ttcatgtgctgctgt

SEQ ID NO: 14624 - DNA, 15 bp, Homo sapiens
cttcatgtgctgctg

SEQ ID NO: 14625 - DNA, 15 bp, Homo sapiens
gcttcatgtgctgct

SEQ ID NO: 14626 - DNA, 15 bp, Homo sapiens
agcttcatgtgctgc

SEQ ID NO: 14627 - DNA, 15 bp, Homo sapiens
cagcttcatgtgctg

SEQ ID NO: 14628 - DNA, 15 bp, Homo sapiens
gcagcttcatgtgct

SEQ ID NO: 14629 - DNA, 15 bp, Homo sapiens
agcagcttcatgtgc

SEQ ID NO: 14630 - DNA, 15 bp, Homo sapiens
gagcagcttcatgtg

SEQ ID NO: 14631 - DNA, 15 bp, Homo sapiens
agagcagcttcatgt

SEQ ID NO: 14632 - DNA, 15 bp, Homo sapiens
gagagcagcttcatg

SEQ ID NO: 14633 - DNA, 15 bp, Homo sapiens
ggagagcagcttcat

SEQ ID NO: 14634 - DNA, 15 bp, Homo sapiens
tggagagcagcttca

SEQ ID NO: 14635 - DNA, 15 bp, Homo sapiens
ctggagagcagcttc

SEQ ID NO: 14636 - DNA, 15 bp, Homo sapiens
tctggagagcagctt

SEQ ID NO: 14637 - DNA, 15 bp, Homo sapiens
atctggagagcagct

SEQ ID NO: 14638 - DNA, 15 bp, Homo sapiens
catctggagagcagc

SEQ ID NO: 14639 - DNA, 15 bp, Homo sapiens
tcatctggagagcag

SEQ ID NO: 14640 - DNA, 15 bp, Homo sapiens
ctcatctggagagca

SEQ ID NO: 14641 - DNA, 15 bp, Homo sapiens
cctcatctggagagc

SEQ ID NO: 14642 - DNA, 15 bp, Homo sapiens
gcctcatctggagag

SEQ ID NO: 14643 - DNA, 15 bp, Homo sapiens
ggcctcatctggaga

SEQ ID NO: 14644 - DNA, 15 bp, Homo sapiens
tggcctcatctggag

SEQ ID NO: 14645 - DNA, 15 bp, Homo sapiens
ctggcctcatctgga

SEQ ID NO: 14646 - DNA, 15 bp, Homo sapiens
gctggcctcatctgg

SEQ ID NO: 14647 - DNA, 15 bp, Homo sapiens
tgctggcctcatctg

SEQ ID NO: 14648 - DNA, 15 bp, Homo sapiens
ctgctggcctcatct

SEQ ID NO: 14649 - DNA, 15 bp, Homo sapiens
actgctggcctcatc

SEQ ID NO: 14650 - DNA, 15 bp, Homo sapiens
cactgctggcctcat

SEQ ID NO: 14651 - DNA, 15 bp, Homo sapiens
tcactgctggcctca

SEQ ID NO: 14652 - DNA, 15 bp, Homo sapiens
ttcactgctggcctc

SEQ ID NO: 14653 - DNA, 15 bp, Homo sapiens
attcactgctggcct

SEQ ID NO: 14654 - DNA, 15 bp, Homo sapiens
tattcactgctggcc

SEQ ID NO: 14655 - DNA, 15 bp, Homo sapiens
ttattcactgctggc

SEQ ID NO: 14656 - DNA, 15 bp, Homo sapiens
tttattcactgctgg

SEQ ID NO: 14657 - DNA, 15 bp, Homo sapiens
ttttattcactgctg

SEQ ID NO: 14658 - DNA, 15 bp, Homo sapiens
tttttattcactgct

SEQ ID NO: 14659 - DNA, 15 bp, Homo sapiens
gtttttattcactgc

SEQ ID NO: 14660 - DNA, 15 bp, Homo sapiens
ggtttttattcactg

SEQ ID NO: 14661 - DNA, 15 bp, Homo sapiens
gggtttttattcact

SEQ ID NO: 14662 - DNA, 15 bp, Homo sapiens
agggtttttattcac

SEQ ID NO: 14663 - DNA, 15 bp, Homo sapiens
aagggtttttattca

SEQ ID NO: 14664 - DNA, 15 bp, Homo sapiens
aaagggtttttattc

SEQ ID NO: 14665 - DNA, 15 bp, Homo sapiens
gaaagggtttttatt

SEQ ID NO: 14666 - DNA, 15 bp, Homo sapiens
tgaaagggtttttat

SEQ ID NO: 14667 - DNA, 15 bp, Homo sapiens
atgaaagggttttta

SEQ ID NO: 14668 - DNA, 15 bp, Homo sapiens
aatgaaagggttttt

SEQ ID NO: 14669 - DNA, 15 bp, Homo sapiens
caatgaaagggtttt

SEQ ID NO: 14670 - DNA, 15 bp, Homo sapiens
acaatgaaagggttt

SEQ ID NO: 14671 - DNA, 15 bp, Homo sapiens
aacaatgaaagggtt

SEQ ID NO: 14672 - DNA, 15 bp, Homo sapiens
aaacaatgaaagggt

SEQ ID NO: 14673 - DNA, 15 bp, Homo sapiens
caaacaatgaaaggg

SEQ ID NO: 14674 - DNA, 15 bp, Homo sapiens
tcaaacaatgaaagg

SEQ ID NO: 14675 - DNA, 15 bp, Homo sapiens
atcaaacaatgaaag

SEQ ID NO: 14676 - DNA, 15 bp, Homo sapiens
gatcaaacaatgaaa

SEQ ID NO: 14677 - DNA, 15 bp, Homo sapiens
tgatcaaacaatgaa

SEQ ID NO: 14678 - DNA, 15 bp, Homo sapiens
gtgatcaaacaatga

SEQ ID NO: 14679 - DNA, 15 bp, Homo sapiens
tgtgatcaaacaatg

SEQ ID NO: 14680 - DNA, 15 bp, Homo sapiens
ttgtgatcaaacaat

SEQ ID NO: 14681 - DNA, 15 bp, Homo sapiens
cttgtgatcaaacaa

SEQ ID NO: 14682 - DNA, 15 bp, Homo sapiens
tcttgtgatcaaaca

SEQ ID NO: 14683 - DNA, 15 bp, Homo sapiens
ttcttgtgatcaaac

SEQ ID NO: 14684 - DNA, 15 bp, Homo sapiens
tttcttgtgatcaaa

SEQ ID NO: 14685 - DNA, 15 bp, Homo sapiens
gtttcttgtgatcaa

SEQ ID NO: 14686 - DNA, 15 bp, Homo sapiens
tgtttcttgtgatca

SEQ ID NO: 14687 - DNA, 15 bp, Homo sapiens
ctgtttcttgtgatc

SEQ ID NO: 14688 - DNA, 15 bp, Homo sapiens
actgtttcttgtgat

SEQ ID NO: 14689 - DNA, 15 bp, Homo sapiens
cactgtttcttgtga

SEQ ID NO: 14690 - DNA, 15 bp, Homo sapiens
tcactgtttcttgtg

SEQ ID NO: 14691 - DNA, 15 bp, Homo sapiens
atcactgtttcttgt

SEQ ID NO: 14692 - DNA, 15 bp, Homo sapiens
gatcactgtttcttg

SEQ ID NO: 14693 - DNA, 15 bp, Homo sapiens
agatcactgtttctt

SEQ ID NO: 14694 - DNA, 15 bp, Homo sapiens
aagatcactgtttct

SEQ ID NO: 14695 - DNA, 15 bp, Homo sapiens
aaagatcactgtttc

SEQ ID NO: 14696 - DNA, 15 bp, Homo sapiens
aaaagatcactgttt

SEQ ID NO: 14697 - DNA, 15 bp, Homo sapiens
caaaagatcactgtt

SEQ ID NO: 14698 - DNA, 15 bp, Homo sapiens
acaaaagatcactgt

SEQ ID NO: 14699 - DNA, 15 bp, Homo sapiens
aacaaaagatcactg

SEQ ID NO: 14700 - DNA, 15 bp, Homo sapiens
aaacaaaagatcact

SEQ ID NO: 14701 - DNA, 15 bp, Homo sapiens
taaacaaaagatcac

SEQ ID NO: 14702 - DNA, 15 bp, Homo sapiens
gtaaacaaaagatca

SEQ ID NO: 14703 - DNA, 15 bp, Homo sapiens
tgtaaacaaaagatc

SEQ ID NO: 14704 - DNA, 15 bp, Homo sapiens
gtgtaaacaaaagat

SEQ ID NO: 14705 - DNA, 15 bp, Homo sapiens
agtgtaaacaaaaga

SEQ ID NO: 14706 - DNA, 15 bp, Homo sapiens
cagtgtaaacaaaag

SEQ ID NO: 14707 - DNA, 15 bp, Homo sapiens
gcagtgtaaacaaaa

SEQ ID NO: 14708 - DNA, 15 bp, Homo sapiens
ggcagtgtaaacaaa

SEQ ID NO: 14709 - DNA, 15 bp, Homo sapiens
aggcagtgtaaacaa

SEQ ID NO: 14710 - DNA, 15 bp, Homo sapiens
taggcagtgtaaaca

SEQ ID NO: 14711 - DNA, 15 bp, Homo sapiens
gtaggcagtgtaaac

SEQ ID NO: 14712 - DNA, 15 bp, Homo sapiens
agtaggcagtgtaaa

SEQ ID NO: 14713 - DNA, 15 bp, Homo sapiens
aagtaggcagtgtaa

SEQ ID NO: 14714 - DNA, 15 bp, Homo sapiens
gaagtaggcagtgta

SEQ ID NO: 14715 - DNA, 15 bp, Homo sapiens
ggaagtaggcagtgt

SEQ ID NO: 14716 - DNA, 15 bp, Homo sapiens
aggaagtaggcagtg

SEQ ID NO: 14717 - DNA, 15 bp, Homo sapiens
taggaagtaggcagt

SEQ ID NO: 14718 - DNA, 15 bp, Homo sapiens
gtaggaagtaggcag

SEQ ID NO: 14719 - DNA, 15 bp, Homo sapiens
agtaggaagtaggca

SEQ ID NO: 14720 - DNA, 15 bp, Homo sapiens
gagtaggaagtaggc

SEQ ID NO: 14721 - DNA, 15 bp, Homo sapiens
agagtaggaagtagg

SEQ ID NO: 14722 - DNA, 15 bp, Homo sapiens
cagagtaggaagtag

SEQ ID NO: 14723 - DNA, 15 bp, Homo sapiens
acagagtaggaagta

SEQ ID NO: 14724 - DNA, 15 bp, Homo sapiens
gacagagtaggaagt

SEQ ID NO: 14725 - DNA, 15 bp, Homo sapiens
ggacagagtaggaag

SEQ ID NO: 14726 - DNA, 15 bp, Homo sapiens
tggacagagtaggaa

SEQ ID NO: 14727 - DNA, 15 bp, Homo sapiens
ctggacagagtagga

SEQ ID NO: 14728 - DNA, 15 bp, Homo sapiens
cctggacagagtagg

SEQ ID NO: 14729 - DNA, 15 bp, Homo sapiens
ccctggacagagtag

SEQ ID NO: 14730 - DNA, 15 bp, Homo sapiens
gccctggacagagta

SEQ ID NO: 14731 - DNA, 15 bp, Homo sapiens
tgccctggacagagt

SEQ ID NO: 14732 - DNA, 15 bp, Homo sapiens
atgccctggacagag

SEQ ID NO: 14733 - DNA, 15 bp, Homo sapiens
catgccctggacaga

SEQ ID NO: 14734 - DNA, 15 bp, Homo sapiens
acatgccctggacag

SEQ ID NO: 14735 - DNA, 15 bp, Homo sapiens
cacatgccctggaca

SEQ ID NO: 14736 - DNA, 15 bp, Homo sapiens
gcacatgccctggac

SEQ ID NO: 14737 - DNA, 15 bp, Homo sapiens
tgcacatgccctgga

SEQ ID NO: 14738 - DNA, 15 bp, Homo sapiens
ctgcacatgccctgg

SEQ ID NO: 14739 - DNA, 15 bp, Homo sapiens
tctgcacatgccctg

SEQ ID NO: 14740 - DNA, 15 bp, Homo sapiens
gtctgcacatgccct

SEQ ID NO: 14741 - DNA, 15 bp, Homo sapiens
tgtctgcacatgccc

SEQ ID NO: 14742 - DNA, 15 bp, Homo sapiens
ctgtctgcacatgcc

SEQ ID NO: 14743 - DNA, 15 bp, Homo sapiens
cctgtctgcacatgc

SEQ ID NO: 14744 - DNA, 15 bp, Homo sapiens
tcctgtctgcacatg

SEQ ID NO: 14745 - DNA, 15 bp, Homo sapiens
ttcctgtctgcacat

SEQ ID NO: 14746 - DNA, 15 bp, Homo sapiens
attcctgtctgcaca

SEQ ID NO: 14747 - DNA, 15 bp, Homo sapiens
aattcctgtctgcac

SEQ ID NO: 14748 - DNA, 15 bp, Homo sapiens
caattcctgtctgca

SEQ ID NO: 14749 - DNA, 15 bp, Homo sapiens
tcaattcctgtctgc

SEQ ID NO: 14750 - DNA, 15 bp, Homo sapiens
atcaattcctgtctg

SEQ ID NO: 14751 - DNA, 15 bp, Homo sapiens
aatcaattcctgtct

SEQ ID NO: 14752 - DNA, 15 bp, Homo sapiens
caatcaattcctgtc

SEQ ID NO: 14753 - DNA, 15 bp, Homo sapiens
tcaatcaattcctgt

SEQ ID NO: 14754 - DNA, 15 bp, Homo sapiens
ttcaatcaattcctg

SEQ ID NO: 14755 - DNA, 15 bp, Homo sapiens
cttcaatcaattcct

SEQ ID NO: 14756 - DNA, 15 bp, Homo sapiens
acttcaatcaattcc

SEQ ID NO: 14757 - DNA, 15 bp, Homo sapiens
cacttcaatcaattc

SEQ ID NO: 14758 - DNA, 15 bp, Homo sapiens
gcacttcaatcaatt

SEQ ID NO: 14759 - DNA, 15 bp, Homo sapiens
tgcacttcaatcaat

SEQ ID NO: 14760 - DNA, 15 bp, Homo sapiens
atgcacttcaatcaa

SEQ ID NO: 14761 - DNA, 15 bp, Homo sapiens
catgcacttcaatca

SEQ ID NO: 14762 - DNA, 15 bp, Homo sapiens
acatgcacttcaatc

SEQ ID NO: 14763 - DNA, 15 bp, Homo sapiens
tacatgcacttcaat

SEQ ID NO: 14764 - DNA, 15 bp, Homo sapiens
ctacatgcacttcaa

SEQ ID NO: 14765 - DNA, 15 bp, Homo sapiens
tctacatgcacttca

SEQ ID NO: 14766 - DNA, 15 bp, Homo sapiens
gtctacatgcacttc

SEQ ID NO: 14767 - DNA, 15 bp, Homo sapiens
ggtctacatgcactt

SEQ ID NO: 14768 - DNA, 15 bp, Homo sapiens
tggtctacatgcact

SEQ ID NO: 14769 - DNA, 15 bp, Homo sapiens
ttggtctacatgcac

SEQ ID NO: 14770 - DNA, 15 bp, Homo sapiens
tttggtctacatgca

SEQ ID NO: 14771 - DNA, 15 bp, Homo sapiens
ttttggtctacatgc

SEQ ID NO: 14772 - DNA, 15 bp, Homo sapiens
attttggtctacatg

SEQ ID NO: 14773 - DNA, 15 bp, Homo sapiens
gattttggtctacat

SEQ ID NO: 14774 - DNA, 15 bp, Homo sapiens
agattttggtctaca

SEQ ID NO: 14775 - DNA, 15 bp, Homo sapiens
tagattttggtctac

SEQ ID NO: 14776 - DNA, 15 bp, Homo sapiens
ctagattttggtcta

SEQ ID NO: 14777 - DNA, 15 bp, Homo sapiens
gctagattttggtct

SEQ ID NO: 14778 - DNA, 15 bp, Homo sapiens
ggctagattttggtc

SEQ ID NO: 14779 - DNA, 15 bp, Homo sapiens
gggctagattttggt

SEQ ID NO: 14780 - DNA, 15 bp, Homo sapiens
agggctagattttgg

SEQ ID NO: 14781 - DNA, 15 bp, Homo sapiens
cagggctagattttg

SEQ ID NO: 14782 - DNA, 15 bp, Homo sapiens
tcagggctagatttt

SEQ ID NO: 14783 - DNA, 15 bp, Homo sapiens
ttcagggctagattt

SEQ ID NO: 14784 - DNA, 15 bp, Homo sapiens
attcagggctagatt

SEQ ID NO: 14785 - DNA, 15 bp, Homo sapiens
cattcagggctagat

SEQ ID NO: 14786 - DNA, 15 bp, Homo sapiens
tcattcagggctaga

SEQ ID NO: 14787 - DNA, 15 bp, Homo sapiens
ctcattcagggctag

SEQ ID NO: 14788 - DNA, 15 bp, Homo sapiens
tctcattcagggcta

SEQ ID NO: 14789 - DNA, 15 bp, Homo sapiens
gtctcattcagggct

SEQ ID NO: 14790 - DNA, 15 bp, Homo sapiens
tgtctcattcagggc

SEQ ID NO: 14791 - DNA, 15 bp, Homo sapiens
ttgtctcattcaggg

SEQ ID NO: 14792 - DNA, 15 bp, Homo sapiens
tttgtctcattcagg

SEQ ID NO: 14793 - DNA, 15 bp, Homo sapiens
ctttgtctcattcag

SEQ ID NO: 14794 - DNA, 15 bp, Homo sapiens
actttgtctcattca

SEQ ID NO: 14795 - DNA, 15 bp, Homo sapiens
tactttgtctcattc

SEQ ID NO: 14796 - DNA, 15 bp, Homo sapiens
ctactttgtctcatt

SEQ ID NO: 14797 - DNA, 15 bp, Homo sapiens
tctactttgtctcat

SEQ ID NO: 14798 - DNA, 15 bp, Homo sapiens
ctctactttgtctca

SEQ ID NO: 14799 - DNA, 15 bp, Homo sapiens
actctactttgtctc

SEQ ID NO: 14800 - DNA, 15 bp, Homo sapiens
aactctactttgtct

SEQ ID NO: 14801 - DNA, 15 bp, Homo sapiens
caactctactttgtc

SEQ ID NO: 14802 - DNA, 15 bp, Homo sapiens
tcaactctactttgt

SEQ ID NO: 14803 - DNA, 15 bp, Homo sapiens
ctcaactctactttg

SEQ ID NO: 14804 - DNA, 15 bp, Homo sapiens
tctcaactctacttt

SEQ ID NO: 14805 - DNA, 15 bp, Homo sapiens
ttctcaactctactt

SEQ ID NO: 14806 - DNA, 15 bp, Homo sapiens
cttctcaactctact

SEQ ID NO: 14807 - DNA, 15 bp, Homo sapiens
ccttctcaactctac

SEQ ID NO: 14808 - DNA, 15 bp, Homo sapiens
accttctcaactcta

SEQ ID NO: 14809 - DNA, 15 bp, Homo sapiens
caccttctcaactct

SEQ ID NO: 14810 - DNA, 15 bp, Homo sapiens
tcaccttctcaactc

SEQ ID NO: 14811 - DNA, 15 bp, Homo sapiens
gtcaccttctcaact

SEQ ID NO: 14812 - DNA, 15 bp, Homo sapiens
agtcaccttctcaac

SEQ ID NO: 14813 - DNA, 15 bp, Homo sapiens
aagtcaccttctcaa

SEQ ID NO: 14814 - DNA, 15 bp, Homo sapiens
caagtcaccttctca

SEQ ID NO: 14815 - DNA, 15 bp, Homo sapiens
gcaagtcaccttctc

SEQ ID NO: 14816 - DNA, 15 bp, Homo sapiens
tgcaagtcaccttct

SEQ ID NO: 14817 - DNA, 15 bp, Homo sapiens
ctgcaagtcaccttc

SEQ ID NO: 14818 - DNA, 15 bp, Homo sapiens
tctgcaagtcacctt

SEQ ID NO: 14819 - DNA, 15 bp, Homo sapiens
gtctgcaagtcacct

SEQ ID NO: 14820 - DNA, 15 bp, Homo sapiens
agtctgcaagtcacc

SEQ ID NO: 14821 - DNA, 15 bp, Homo sapiens
cagtctgcaagtcac

SEQ ID NO: 14822 - DNA, 15 bp, Homo sapiens
tcagtctgcaagtca

SEQ ID NO: 14823 - DNA, 15 bp, Homo sapiens
atcagtctgcaagtc

SEQ ID NO: 14824 - DNA, 15 bp, Homo sapiens
aatcagtctgcaagt

SEQ ID NO: 14825 - DNA, 15 bp, Homo sapiens
aaatcagtctgcaag

SEQ ID NO: 14826 - DNA, 15 bp, Homo sapiens
aaaatcagtctgcaa

SEQ ID NO: 14827 - DNA, 15 bp, Homo sapiens
caaaatcagtctgca

SEQ ID NO: 14828 - DNA, 15 bp, Homo sapiens
tcaaaatcagtctgc

SEQ ID NO: 14829 - DNA, 15 bp, Homo sapiens
atcaaaatcagtctg

SEQ ID NO: 14830 - DNA, 15 bp, Homo sapiens
catcaaaatcagtct

SEQ ID NO: 14831 - DNA, 15 bp, Homo sapiens
ccatcaaaatcagtc

SEQ ID NO: 14832 - DNA, 15 bp, Homo sapiens
tccatcaaaatcagt

SEQ ID NO: 14833 - DNA, 15 bp, Homo sapiens
ttccatcaaaatcag

SEQ ID NO: 14834 - DNA, 15 bp, Homo sapiens
tttccatcaaaatca

SEQ ID NO: 14835 - DNA, 15 bp, Homo sapiens
ctttccatcaaaatc

SEQ ID NO: 14836 - DNA, 15 bp, Homo sapiens
tctttccatcaaaat

SEQ ID NO: 14837 - DNA, 15 bp, Homo sapiens
ttctttccatcaaaa

SEQ ID NO: 14838 - DNA, 15 bp, Homo sapiens
attctttccatcaaa

SEQ ID NO: 14839 - DNA, 15 bp, Homo sapiens
aattctttccatcaa

SEQ ID NO: 14840 - DNA, 15 bp, Homo sapiens
aaattctttccatca

SEQ ID NO: 14841 - DNA, 15 bp, Homo sapiens
taaattctttccatc

SEQ ID NO: 14842 - DNA, 15 bp, Homo sapiens
ttaaattctttccat

SEQ ID NO: 14843 - DNA, 15 bp, Homo sapiens
gttaaattctttcca

SEQ ID NO: 14844 - DNA, 15 bp, Homo sapiens
cgttaaattctttcc

SEQ ID NO: 14845 - DNA, 15 bp, Homo sapiens
acgttaaattctttc

SEQ ID NO: 14846 - DNA, 15 bp, Homo sapiens
cacgttaaattcttt

SEQ ID NO: 14847 - DNA, 15 bp, Homo sapiens
acacgttaaattctt

SEQ ID NO: 14848 - DNA, 15 bp, Homo sapiens
gacacgttaaattct

SEQ ID NO: 14849 - DNA, 15 bp, Homo sapiens
tgacacgttaaattc

SEQ ID NO: 14850 - DNA, 15 bp, Homo sapiens
atgacacgttaaatt

SEQ ID NO: 14851 - DNA, 15 bp, Homo sapiens
aatgacacgttaaat

SEQ ID NO: 14852 - DNA, 15 bp, Homo sapiens
taatgacacgttaaa

SEQ ID NO: 14853 - DNA, 15 bp, Homo sapiens
gtaatgacacgttaa

SEQ ID NO: 14854 - DNA, 15 bp, Homo sapiens
tgtaatgacacgtta

SEQ ID NO: 14855 - DNA, 15 bp, Homo sapiens
atgtaatgacacgtt

SEQ ID NO: 14856 - DNA, 15 bp, Homo sapiens
aatgtaatgacacgt

SEQ ID NO: 14857 - DNA, 15 bp, Homo sapiens
taatgtaatgacacg

SEQ ID NO: 14858 - DNA, 15 bp, Homo sapiens
ctaatgtaatgacac

SEQ ID NO: 14859 - DNA, 15 bp, Homo sapiens
gctaatgtaatgaca

SEQ ID NO: 14860 - DNA, 15 bp, Homo sapiens
tgctaatgtaatgac

SEQ ID NO: 14861 - DNA, 15 bp, Homo sapiens
atgctaatgtaatga

SEQ ID NO: 14862 - DNA, 15 bp, Homo sapiens
aatgctaatgtaatg

SEQ ID NO: 14863 - DNA, 15 bp, Homo sapiens
aaatgctaatgtaat

SEQ ID NO: 14864 - DNA, 15 bp, Homo sapiens
aaaatgctaatgtaa

SEQ ID NO: 14865 - DNA, 15 bp, Homo sapiens
gaaaatgctaatgta

SEQ ID NO: 14866 - DNA, 15 bp, Homo sapiens
ggaaaatgctaatgt

SEQ ID NO: 14867 - DNA, 15 bp, Homo sapiens
aggaaaatgctaatg

SEQ ID NO: 14868 - DNA, 15 bp, Homo sapiens
caggaaaatgctaat

SEQ ID NO: 14869 - DNA, 15 bp, Homo sapiens
acaggaaaatgctaa

SEQ ID NO: 14870 - DNA, 15 bp, Homo sapiens
cacaggaaaatgcta

SEQ ID NO: 14871 - DNA, 15 bp, Homo sapiens
gcacaggaaaatgct

SEQ ID NO: 14872 - DNA, 15 bp, Homo sapiens
agcacaggaaaatgc

SEQ ID NO: 14873 - DNA, 15 bp, Homo sapiens
gagcacaggaaaatg

SEQ ID NO: 14874 - DNA, 15 bp, Homo sapiens
agagcacaggaaaat

SEQ ID NO: 14875 - DNA, 15 bp, Homo sapiens
cagagcacaggaaaa

SEQ ID NO: 14876 - DNA, 15 bp, Homo sapiens
acagagcacaggaaa

SEQ ID NO: 14877 - DNA, 15 bp, Homo sapiens
tacagagcacaggaa

SEQ ID NO: 14878 - DNA, 15 bp, Homo sapiens
atacagagcacagga

SEQ ID NO: 14879 - DNA, 15 bp, Homo sapiens
catacagagcacagg

SEQ ID NO: 14880 - DNA, 15 bp, Homo sapiens
tcatacagagcacag

SEQ ID NO: 14881 - DNA, 15 bp, Homo sapiens
ttcatacagagcaca

SEQ ID NO: 14882 - DNA, 15 bp, Homo sapiens
attcatacagagcac

SEQ ID NO: 14883 - DNA, 15 bp, Homo sapiens
aattcatacagagca

SEQ ID NO: 14884 - DNA, 15 bp, Homo sapiens
aaattcatacagagc

SEQ ID NO: 14885 - DNA, 15 bp, Homo sapiens
caaattcatacagag

SEQ ID NO: 14886 - DNA, 15 bp, Homo sapiens
tcaaattcatacaga

SEQ ID NO: 14887 - DNA, 15 bp, Homo sapiens
ttcaaattcatacag

SEQ ID NO: 14888 - DNA, 15 bp, Homo sapiens
tttcaaattcataca

SEQ ID NO: 14889 - DNA, 15 bp, Homo sapiens
atttcaaattcatac

SEQ ID NO: 14890 - DNA, 15 bp, Homo sapiens
tatttcaaattcata

SEQ ID NO: 14891 - DNA, 15 bp, Homo sapiens
gtatttcaaattcat

SEQ ID NO: 14892 - DNA, 15 bp, Homo sapiens
agtatttcaaattca

SEQ ID NO: 14893 - DNA, 15 bp, Homo sapiens
aagtatttcaaattc

SEQ ID NO: 14894 - DNA, 15 bp, Homo sapiens
taagtatttcaaatt

SEQ ID NO: 14895 - DNA, 15 bp, Homo sapiens
ataagtatttcaaat

SEQ ID NO: 14896 - DNA, 15 bp, Homo sapiens
tataagtatttcaaa

SEQ ID NO: 14897 - DNA, 15 bp, Homo sapiens
atataagtatttcaa

SEQ ID NO: 14898 - DNA, 15 bp, Homo sapiens
catataagtatttca

SEQ ID NO: 14899 - DNA, 15 bp, Homo sapiens
gcatataagtatttc

SEQ ID NO: 14900 - DNA, 15 bp, Homo sapiens
agcatataagtattt

SEQ ID NO: 14901 - DNA, 15 bp, Homo sapiens
gagcatataagtatt

SEQ ID NO: 14902 - DNA, 15 bp, Homo sapiens
agagcatataagtat

SEQ ID NO: 14903 - DNA, 15 bp, Homo sapiens
gagagcatataagta

SEQ ID NO: 14904 - DNA, 15 bp, Homo sapiens
ggagagcatataagt

SEQ ID NO: 14905 - DNA, 15 bp, Homo sapiens
aggagagcatataag

SEQ ID NO: 14906 - DNA, 15 bp, Homo sapiens
aaggagagcatataa

SEQ ID NO: 14907 - DNA, 15 bp, Homo sapiens
gaaggagagcatata

SEQ ID NO: 14908 - DNA, 15 bp, Homo sapiens
agaaggagagcatat

SEQ ID NO: 14909 - DNA, 15 bp, Homo sapiens
aagaaggagagcata

SEQ ID NO: 14910 - DNA, 15 bp, Homo sapiens
caagaaggagagcat

SEQ ID NO: 14911 - DNA, 15 bp, Homo sapiens
tcaagaaggagagca

SEQ ID NO: 14912 - DNA, 15 bp, Homo sapiens
ctcaagaaggagagc

SEQ ID NO: 14913 - DNA, 15 bp, Homo sapiens
tctcaagaaggagag

SEQ ID NO: 14914 - DNA, 15 bp, Homo sapiens
ttctcaagaaggaga

SEQ ID NO: 14915 - DNA, 15 bp, Homo sapiens
cttctcaagaaggag

SEQ ID NO: 14916 - DNA, 15 bp, Homo sapiens
acttctcaagaagga

SEQ ID NO: 14917 - DNA, 15 bp, Homo sapiens
cacttctcaagaagg

SEQ ID NO: 14918 - DNA, 15 bp, Homo sapiens
tcacttctcaagaag

SEQ ID NO: 14919 - DNA, 15 bp, Homo sapiens
ttcacttctcaagaa

SEQ ID NO: 14920 - DNA, 15 bp, Homo sapiens
tttcacttctcaaga

SEQ ID NO: 14921 - DNA, 15 bp, Homo sapiens
atttcacttctcaag

SEQ ID NO: 14922 - DNA, 15 bp, Homo sapiens
gatttcacttctcaa

SEQ ID NO: 14923 - DNA, 15 bp, Homo sapiens
ggatttcacttctca

SEQ ID NO: 14924 - DNA, 15 bp, Homo sapiens
gggatttcacttctc

SEQ ID NO: 14925 - DNA, 15 bp, Homo sapiens
ggggatttcacttct

SEQ ID NO: 14926 - DNA, 15 bp, Homo sapiens
tggggatttcacttc

SEQ ID NO: 14927 - DNA, 15 bp, Homo sapiens
ctggggatttcactt

SEQ ID NO: 14928 - DNA, 15 bp, Homo sapiens
actggggatttcact

SEQ ID NO: 14929 - DNA, 15 bp, Homo sapiens
cactggggatttcac

SEQ ID NO: 14930 - DNA, 15 bp, Homo sapiens
gcactggggatttca

SEQ ID NO: 14931 - DNA, 15 bp, Homo sapiens
agcactggggatttc

SEQ ID NO: 14932 - DNA, 15 bp, Homo sapiens
tagcactggggattt

SEQ ID NO: 14933 - DNA, 15 bp, Homo sapiens
atagcactggggatt

SEQ ID NO: 14934 - DNA, 15 bp, Homo sapiens
gatagcactggggat

SEQ ID NO: 14935 - DNA, 15 bp, Homo sapiens
agatagcactgggga

SEQ ID NO: 14936 - DNA, 15 bp, Homo sapiens
gagatagcactgggg

SEQ ID NO: 14937 - DNA, 15 bp, Homo sapiens
tgagatagcactggg

SEQ ID NO: 14938 - DNA, 15 bp, Homo sapiens
atgagatagcactgg

SEQ ID NO: 14939 - DNA, 15 bp, Homo sapiens
aatgagatagcactg

SEQ ID NO: 14940 - DNA, 15 bp, Homo sapiens
gaatgagatagcact

SEQ ID NO: 14941 - DNA, 15 bp, Homo sapiens
agaatgagatagcac

SEQ ID NO: 14942 - DNA, 15 bp, Homo sapiens
aagaatgagatagca

SEQ ID NO: 14943 - DNA, 15 bp, Homo sapiens
caagaatgagatagc

SEQ ID NO: 14944 - DNA, 15 bp, Homo sapiens
acaagaatgagatag

SEQ ID NO: 14945 - DNA, 15 bp, Homo sapiens
aacaagaatgagata

SEQ ID NO: 14946 - DNA, 15 bp, Homo sapiens
aaacaagaatgagat

SEQ ID NO: 14947 - DNA, 15 bp, Homo sapiens
aaaacaagaatgaga

SEQ ID NO: 14948 - DNA, 15 bp, Homo sapiens
aaaaacaagaatgag

SEQ ID NO: 14949 - DNA, 15 bp, Homo sapiens
taaaaacaagaatga

SEQ ID NO: 14950 - DNA, 15 bp, Homo sapiens
ataaaaacaagaatg

SEQ ID NO: 14951 - DNA, 15 bp, Homo sapiens
tataaaaacaagaat

SEQ ID NO: 14952 - DNA, 15 bp, Homo sapiens
ttataaaaacaagaa

SEQ ID NO: 14953 - DNA, 15 bp, Homo sapiens
tttataaaaacaaga

SEQ ID NO: 14954 - DNA, 15 bp, Homo sapiens
atttataaaaacaag

SEQ ID NO: 14955 - DNA, 15 bp, Homo sapiens
catttataaaaacaa

SEQ ID NO: 14956 - DNA, 15 bp, Homo sapiens
ccatttataaaaaca

SEQ ID NO: 14957 - DNA, 15 bp, Homo sapiens
accatttataaaaac

SEQ ID NO: 14958 - DNA, 15 bp, Homo sapiens
taccatttataaaaa

SEQ ID NO: 14959 - DNA, 15 bp, Homo sapiens
ctaccatttataaaa

SEQ ID NO: 14960 - DNA, 15 bp, Homo sapiens
actaccatttataaa

SEQ ID NO: 14961 - DNA, 15 bp, Homo sapiens
gactaccatttataa

SEQ ID NO: 14962 - DNA, 15 bp, Homo sapiens
tgactaccatttata

SEQ ID NO: 14963 - DNA, 15 bp, Homo sapiens
gtgactaccatttat

SEQ ID NO: 14964 - DNA, 15 bp, Homo sapiens
agtgactaccattta

SEQ ID NO: 14965 - DNA, 15 bp, Homo sapiens
gagtgactaccattt

SEQ ID NO: 14966 - DNA, 15 bp, Homo sapiens
agagtgactaccatt

SEQ ID NO: 14967 - DNA, 15 bp, Homo sapiens
aagagtgactaccat

SEQ ID NO: 14968 - DNA, 15 bp, Homo sapiens
gaagagtgactacca

SEQ ID NO: 14969 - DNA, 15 bp, Homo sapiens
agaagagtgactacc

SEQ ID NO: 14970 - DNA, 15 bp, Homo sapiens
cagaagagtgactac

SEQ ID NO: 14971 - DNA, 15 bp, Homo sapiens
acagaagagtgacta

SEQ ID NO: 14972 - DNA, 15 bp, Homo sapiens
cacagaagagtgact

SEQ ID NO: 14973 - DNA, 15 bp, Homo sapiens
tcacagaagagtgac

SEQ ID NO: 14974 - DNA, 15 bp, Homo sapiens
ttcacagaagagtga

SEQ ID NO: 14975 - DNA, 15 bp, Homo sapiens
attcacagaagagtg

SEQ ID NO: 14976 - DNA, 15 bp, Homo sapiens
tattcacagaagagt

SEQ ID NO: 14977 - DNA, 15 bp, Homo sapiens
ttattcacagaagag

SEQ ID NO: 14978 - DNA, 15 bp, Homo sapiens
attattcacagaaga

SEQ ID NO: 14979 - DNA, 15 bp, Homo sapiens
cattattcacagaag

SEQ ID NO: 14980 - DNA, 15 bp, Homo sapiens
acattattcacagaa

SEQ ID NO: 14981 - DNA, 15 bp, Homo sapiens
tacattattcacaga

SEQ ID NO: 14982 - DNA, 15 bp, Homo sapiens
gtacattattcacag

SEQ ID NO: 14983 - DNA, 15 bp, Homo sapiens
tgtacattattcaca

SEQ ID NO: 14984 - DNA, 15 bp, Homo sapiens
ttgtacattattcac

SEQ ID NO: 14985 - DNA, 15 bp, Homo sapiens
tttgtacattattca

SEQ ID NO: 14986 - DNA, 15 bp, Homo sapiens
ctttgtacattattc

SEQ ID NO: 14987 - DNA, 15 bp, Homo sapiens
cctttgtacattatt

SEQ ID NO: 14988 - DNA, 15 bp, Homo sapiens
gcctttgtacattat

SEQ ID NO: 14989 - DNA, 15 bp, Homo sapiens
tgcctttgtacatta

SEQ ID NO: 14990 - DNA, 15 bp, Homo sapiens
ttgcctttgtacatt

SEQ ID NO: 14991 - DNA, 15 bp, Homo sapiens
cttgcctttgtacat

SEQ ID NO: 14992 - DNA, 15 bp, Homo sapiens
ccttgcctttgtaca

SEQ ID NO: 14993 - DNA, 15 bp, Homo sapiens
tccttgcctttgtac

SEQ ID NO: 14994 - DNA, 15 bp, Homo sapiens
gtccttgcctttgta

SEQ ID NO: 14995 - DNA, 15 bp, Homo sapiens
agtccttgcctttgt

SEQ ID NO: 14996 - DNA, 15 bp, Homo sapiens
tagtccttgcctttg

SEQ ID NO: 14997 - DNA, 15 bp, Homo sapiens
ttagtccttgccttt

SEQ ID NO: 14998 - DNA, 15 bp, Homo sapiens
tttagtccttgcctt

SEQ ID NO: 14999 - DNA, 15 bp, Homo sapiens
ctttagtccttgcct

SEQ ID NO: 15000 - DNA, 15 bp, Homo sapiens
actttagtccttgcc

SEQ ID NO: 15001 - DNA, 15 bp, Homo sapiens
aactttagtccttgc

SEQ ID NO: 15002 - DNA, 15 bp, Homo sapiens
aaactttagtccttg

SEQ ID NO: 15003 - DNA, 15 bp, Homo sapiens
taaactttagtcctt

SEQ ID NO: 15004 - DNA, 15 bp, Homo sapiens
ctaaactttagtcct

SEQ ID NO: 15005 - DNA, 15 bp, Homo sapiens
gctaaactttagtcc

SEQ ID NO: 15006 - DNA, 15 bp, Homo sapiens
ggctaaactttagtc

SEQ ID NO: 15007 - DNA, 15 bp, Homo sapiens
aggctaaactttagt

SEQ ID NO: 15008 - DNA, 15 bp, Homo sapiens
caggctaaactttag

SEQ ID NO: 15009 - DNA, 15 bp, Homo sapiens
gcaggctaaacttta

SEQ ID NO: 15010 - DNA, 15 bp, Homo sapiens
agcaggctaaacttt

SEQ ID NO: 15011 - DNA, 15 bp, Homo sapiens
aagcaggctaaactt

SEQ ID NO: 15012 - DNA, 15 bp, Homo sapiens
caagcaggctaaact

SEQ ID NO: 15013 - DNA, 15 bp, Homo sapiens
ccaagcaggctaaac

SEQ ID NO: 15014 - DNA, 15 bp, Homo sapiens
accaagcaggctaaa

SEQ ID NO: 15015 - DNA, 15 bp, Homo sapiens
taccaagcaggctaa

SEQ ID NO: 15016 - DNA, 15 bp, Homo sapiens
ttaccaagcaggcta

SEQ ID NO: 15017 - DNA, 15 bp, Homo sapiens
attaccaagcaggct

SEQ ID NO: 15018 - DNA, 15 bp, Homo sapiens
aattaccaagcaggc

SEQ ID NO: 15019 - DNA, 15 bp, Homo sapiens
caattaccaagcagg

SEQ ID NO: 15020 - DNA, 15 bp, Homo sapiens
gcaattaccaagcag

SEQ ID NO: 15021 - DNA, 15 bp, Homo sapiens
tgcaattaccaagca

SEQ ID NO: 15022 - DNA, 15 bp, Homo sapiens
gtgcaattaccaagc

SEQ ID NO: 15023 - DNA, 15 bp, Homo sapiens
tgtgcaattaccaag

SEQ ID NO: 15024 - DNA, 15 bp, Homo sapiens
ttgtgcaattaccaa

SEQ ID NO: 15025 - DNA, 15 bp, Homo sapiens
tttgtgcaattacca

SEQ ID NO: 15026 - DNA, 15 bp, Homo sapiens
gtttgtgcaattacc

SEQ ID NO: 15027 - DNA, 15 bp, Homo sapiens
agtttgtgcaattac

SEQ ID NO: 15028 - DNA, 15 bp, Homo sapiens
cagtttgtgcaatta

SEQ ID NO: 15029 - DNA, 15 bp, Homo sapiens
tcagtttgtgcaatt

SEQ ID NO: 15030 - DNA, 15 bp, Homo sapiens
ttcagtttgtgcaat

SEQ ID NO: 15031 - DNA, 15 bp, Homo sapiens
gttcagtttgtgcaa

SEQ ID NO: 15032 - DNA, 15 bp, Homo sapiens
tgttcagtttgtgca

SEQ ID NO: 15033 - DNA, 15 bp, Homo sapiens
gtgttcagtttgtgc

SEQ ID NO: 15034 - DNA, 15 bp, Homo sapiens
tgtgttcagtttgtg

SEQ ID NO: 15035 - DNA, 15 bp, Homo sapiens
ttgtgttcagtttgt

SEQ ID NO: 15036 - DNA, 15 bp, Homo sapiens
tttgtgttcagtttg

SEQ ID NO: 15037 - DNA, 15 bp, Homo sapiens
gtttgtgttcagttt

SEQ ID NO: 15038 - DNA, 15 bp, Homo sapiens
ggtttgtgttcagtt

SEQ ID NO: 15039 - DNA, 15 bp, Homo sapiens
gggtttgtgttcagt

SEQ ID NO: 15040 - DNA, 15 bp, Homo sapiens
tgggtttgtgttcag

SEQ ID NO: 15041 - DNA, 15 bp, Homo sapiens
ttgggtttgtgttca

SEQ ID NO: 15042 - DNA, 15 bp, Homo sapiens
tttgggtttgtgttc

SEQ ID NO: 15043 - DNA, 15 bp, Homo sapiens
gtttgggtttgtgtt

SEQ ID NO: 15044 - DNA, 15 bp, Homo sapiens
cgtttgggtttgtgt

SEQ ID NO: 15045 - DNA, 15 bp, Homo sapiens
acgtttgggtttgtg

SEQ ID NO: 15046 - DNA, 15 bp, Homo sapiens
cacgtttgggtttgt

SEQ ID NO: 15047 - DNA, 15 bp, Homo sapiens
acacgtttgggtttg

SEQ ID NO: 15048 - DNA, 15 bp, Homo sapiens
cacacgtttgggttt

SEQ ID NO: 15049 - DNA, 15 bp, Homo sapiens
acacacgtttgggtt

SEQ ID NO: 15050 - DNA, 15 bp, Homo sapiens
aacacacgtttgggt

SEQ ID NO: 15051 - DNA, 15 bp, Homo sapiens
gaacacacgtttggg

SEQ ID NO: 15052 - DNA, 15 bp, Homo sapiens
agaacacacgtttgg

SEQ ID NO: 15053 - DNA, 15 bp, Homo sapiens
gagaacacacgtttg

SEQ ID NO: 15054 - DNA, 15 bp, Homo sapiens
tgagaacacacgttt

SEQ ID NO: 15055 - DNA, 15 bp, Homo sapiens
ctgagaacacacgtt

SEQ ID NO: 15056 - DNA, 15 bp, Homo sapiens
gctgagaacacacgt

SEQ ID NO: 15057 - DNA, 15 bp, Homo sapiens
cgctgagaacacacg

SEQ ID NO: 15058 - DNA, 15 bp, Homo sapiens
acgctgagaacacac

SEQ ID NO: 15059 - DNA, 15 bp, Homo sapiens
tacgctgagaacaca

SEQ ID NO: 15060 - DNA, 15 bp, Homo sapiens
gtacgctgagaacac

SEQ ID NO: 15061 - DNA, 15 bp, Homo sapiens
agtacgctgagaaca

SEQ ID NO: 15062 - DNA, 15 bp, Homo sapiens
aagtacgctgagaac

SEQ ID NO: 15063 - DNA, 15 bp, Homo sapiens
aaagtacgctgagaa

SEQ ID NO: 15064 - DNA, 15 bp, Homo sapiens
caaagtacgctgaga

SEQ ID NO: 15065 - DNA, 15 bp, Homo sapiens
ccaaagtacgctgag

SEQ ID NO: 15066 - DNA, 15 bp, Homo sapiens
tccaaagtacgctga

SEQ ID NO: 15067 - DNA, 15 bp, Homo sapiens
ctccaaagtacgctg

SEQ ID NO: 15068 - DNA, 15 bp, Homo sapiens
cctccaaagtacgct

SEQ ID NO: 15069 - DNA, 15 bp, Homo sapiens
acctccaaagtacgc

SEQ ID NO: 15070 - DNA, 15 bp, Homo sapiens
gacctccaaagtacg

SEQ ID NO: 15071 - DNA, 15 bp, Homo sapiens
agacctccaaagtac

SEQ ID NO: 15072 - DNA, 15 bp, Homo sapiens
aagacctccaaagta

SEQ ID NO: 15073 - DNA, 15 bp, Homo sapiens
gaagacctccaaagt

SEQ ID NO: 15074 - DNA, 15 bp, Homo sapiens
tgaagacctccaaag

SEQ ID NO: 15075 - DNA, 15 bp, Homo sapiens
atgaagacctccaaa

SEQ ID NO: 15076 - DNA, 15 bp, Homo sapiens
aatgaagacctccaa

SEQ ID NO: 15077 - DNA, 15 bp, Homo sapiens
taatgaagacctcca

SEQ ID NO: 15078 - DNA, 15 bp, Homo sapiens
ttaatgaagacctcc

SEQ ID NO: 15079 - DNA, 15 bp, Homo sapiens
attaatgaagacctc

SEQ ID NO: 15080 - DNA, 15 bp, Homo sapiens
aattaatgaagacct

SEQ ID NO: 15081 - DNA, 15 bp, Homo sapiens
caattaatgaagacc

SEQ ID NO: 15082 - DNA, 15 bp, Homo sapiens
tcaattaatgaagac

SEQ ID NO: 15083 - DNA, 15 bp, Homo sapiens
ttcaattaatgaaga

SEQ ID NO: 15084 - DNA, 15 bp, Homo sapiens
attcaattaatgaag

SEQ ID NO: 15085 - DNA, 15 bp, Homo sapiens
cattcaattaatgaa

SEQ ID NO: 15086 - DNA, 15 bp, Homo sapiens
acattcaattaatga

SEQ ID NO: 15087 - DNA, 15 bp, Homo sapiens
aacattcaattaatg

SEQ ID NO: 15088 - DNA, 15 bp, Homo sapiens
caacattcaattaat

SEQ ID NO: 15089 - DNA, 15 bp, Homo sapiens
ccaacattcaattaa

SEQ ID NO: 15090 - DNA, 15 bp, Homo sapiens
tccaacattcaatta

SEQ ID NO: 15091 - DNA, 15 bp, Homo sapiens
ctccaacattcaatt

SEQ ID NO: 15092 - DNA, 15 bp, Homo sapiens
actccaacattcaat

SEQ ID NO: 15093 - DNA, 15 bp, Homo sapiens
aactccaacattcaa

SEQ ID NO: 15094 - DNA, 15 bp, Homo sapiens
aaactccaacattca

SEQ ID NO: 15095 - DNA, 15 bp, Homo sapiens
taaactccaacattc

SEQ ID NO: 15096 - DNA, 15 bp, Homo sapiens
ctaaactccaacatt

SEQ ID NO: 15097 - DNA, 15 bp, Homo sapiens
actaaactccaacat

SEQ ID NO: 15098 - DNA, 15 bp, Homo sapiens
tactaaactccaaca

SEQ ID NO: 15099 - DNA, 15 bp, Homo sapiens
ttactaaactccaac

SEQ ID NO: 15100 - DNA, 15 bp, Homo sapiens
tttactaaactccaa

SEQ ID NO: 15101 - DNA, 15 bp, Homo sapiens
ttttactaaactcca

SEQ ID NO: 15102 - DNA, 15 bp, Homo sapiens
cttttactaaactcc

SEQ ID NO: 15103 - DNA, 15 bp, Homo sapiens
tcttttactaaactc

SEQ ID NO: 15104 - DNA, 15 bp, Homo sapiens
ttcttttactaaact

SEQ ID NO: 15105 - DNA, 15 bp, Homo sapiens
cttcttttactaaac

SEQ ID NO: 15106 - DNA, 15 bp, Homo sapiens
acttcttttactaaa

SEQ ID NO: 15107 - DNA, 15 bp, Homo sapiens
aacttcttttactaa

SEQ ID NO: 15108 - DNA, 15 bp, Homo sapiens
caacttcttttacta

SEQ ID NO: 15109 - DNA, 15 bp, Homo sapiens
gcaacttcttttact

SEQ ID NO: 15110 - DNA, 15 bp, Homo sapiens
agcaacttcttttac

SEQ ID NO: 15111 - DNA, 15 bp, Homo sapiens
aagcaacttctttta

SEQ ID NO: 15112 - DNA, 15 bp, Homo sapiens
aaagcaacttctttt

SEQ ID NO: 15113 - DNA, 15 bp, Homo sapiens
gaaagcaacttcttt

SEQ ID NO: 15114 - DNA, 15 bp, Homo sapiens
agaaagcaacttctt

SEQ ID NO: 15115 - DNA, 15 bp, Homo sapiens
cagaaagcaacttct

SEQ ID NO: 15116 - DNA, 15 bp, Homo sapiens
acagaaagcaacttc

SEQ ID NO: 15117 - DNA, 15 bp, Homo sapiens
aacagaaagcaactt

SEQ ID NO: 15118 - DNA, 15 bp, Homo sapiens
taacagaaagcaact

SEQ ID NO: 15119 - DNA, 15 bp, Homo sapiens
gtaacagaaagcaac

SEQ ID NO: 15120 - DNA, 15 bp, Homo sapiens
agtaacagaaagcaa

SEQ ID NO: 15121 - DNA, 15 bp, Homo sapiens
cagtaacagaaagca

SEQ ID NO: 15122 - DNA, 15 bp, Homo sapiens
ccagtaacagaaagc

SEQ ID NO: 15123 - DNA, 15 bp, Homo sapiens
gccagtaacagaaag

SEQ ID NO: 15124 - DNA, 15 bp, Homo sapiens
agccagtaacagaaa

SEQ ID NO: 15125 - DNA, 15 bp, Homo sapiens
cagccagtaacagaa

SEQ ID NO: 15126 - DNA, 15 bp, Homo sapiens
acagccagtaacaga

SEQ ID NO: 15127 - DNA, 15 bp, Homo sapiens
cacagccagtaacag

SEQ ID NO: 15128 - DNA, 15 bp, Homo sapiens
tcacagccagtaaca

SEQ ID NO: 15129 - DNA, 15 bp, Homo sapiens
ttcacagccagtaac

SEQ ID NO: 15130 - DNA, 15 bp, Homo sapiens
tttcacagccagtaa

SEQ ID NO: 15131 - DNA, 15 bp, Homo sapiens
ttttcacagccagta

SEQ ID NO: 15132 - DNA, 15 bp, Homo sapiens
cttttcacagccagt

SEQ ID NO: 15133 - DNA, 15 bp, Homo sapiens
tcttttcacagccag

SEQ ID NO: 15134 - DNA, 15 bp, Homo sapiens
ctcttttcacagcca

SEQ ID NO: 15135 - DNA, 15 bp, Homo sapiens
actcttttcacagcc

SEQ ID NO: 15136 - DNA, 15 bp, Homo sapiens
gactcttttcacagc

SEQ ID NO: 15137 - DNA, 15 bp, Homo sapiens
cgactcttttcacag

SEQ ID NO: 15138 - DNA, 15 bp, Homo sapiens
acgactcttttcaca

SEQ ID NO: 15139 - DNA, 15 bp, Homo sapiens
cacgactcttttcac

SEQ ID NO: 15140 - DNA, 15 bp, Homo sapiens
ccacgactcttttca

SEQ ID NO: 15141 - DNA, 15 bp, Homo sapiens
tccacgactcttttc

SEQ ID NO: 15142 - DNA, 15 bp, Homo sapiens
ttccacgactctttt

SEQ ID NO: 15143 - DNA, 15 bp, Homo sapiens
tttccacgactcttt

SEQ ID NO: 15144 - DNA, 15 bp, Homo sapiens
atttccacgactctt

SEQ ID NO: 15145 - DNA, 15 bp, Homo sapiens
gatttccacgactct

SEQ ID NO: 15146 - DNA, 15 bp, Homo sapiens
agatttccacgactc

SEQ ID NO: 15147 - DNA, 15 bp, Homo sapiens
cagatttccacgact

SEQ ID NO: 15148 - DNA, 15 bp, Homo sapiens
gcagatttccacgac

SEQ ID NO: 15149 - DNA, 15 bp, Homo sapiens
tgcagatttccacga

SEQ ID NO: 15150 - DNA, 15 bp, Homo sapiens
gtgcagatttccacg

SEQ ID NO: 15151 - DNA, 15 bp, Homo sapiens
tgtgcagatttccac

SEQ ID NO: 15152 - DNA, 15 bp, Homo sapiens
atgtgcagatttcca

SEQ ID NO: 15153 - DNA, 15 bp, Homo sapiens
gatgtgcagatttcc

SEQ ID NO: 15154 - DNA, 15 bp, Homo sapiens
tgatgtgcagatttc

SEQ ID NO: 15155 - DNA, 15 bp, Homo sapiens
ctgatgtgcagattt

SEQ ID NO: 15156 - DNA, 15 bp, Homo sapiens
tctgatgtgcagatt

SEQ ID NO: 15157 - DNA, 15 bp, Homo sapiens
atctgatgtgcagat

SEQ ID NO: 15158 - DNA, 15 bp, Homo sapiens
tatctgatgtgcaga

SEQ ID NO: 15159 - DNA, 15 bp, Homo sapiens
atatctgatgtgcag

SEQ ID NO: 15160 - DNA, 15 bp, Homo sapiens
aatatctgatgtgca

SEQ ID NO: 15161 - DNA, 15 bp, Homo sapiens
taatatctgatgtgc

SEQ ID NO: 15162 - DNA, 15 bp, Homo sapiens
ttaatatctgatgtg

SEQ ID NO: 15163 - DNA, 15 bp, Homo sapiens
tttaatatctgatgt

SEQ ID NO: 15164 - DNA, 15 bp, Homo sapiens
atttaatatctgatg

SEQ ID NO: 15165 - DNA, 15 bp, Homo sapiens
aatttaatatctgat

SEQ ID NO: 15166 - DNA, 15 bp, Homo sapiens
gaatttaatatctga

SEQ ID NO: 15167 - DNA, 15 bp, Homo sapiens
tgaatttaatatctg

SEQ ID NO: 15168 - DNA, 15 bp, Homo sapiens
ttgaatttaatatct

SEQ ID NO: 15169 - DNA, 15 bp, Homo sapiens
tttgaatttaatatc

SEQ ID NO: 15170 - DNA, 15 bp, Homo sapiens
atttgaatttaatat

SEQ ID NO: 15171 - DNA, 15 bp, Homo sapiens
aatttgaatttaata

SEQ ID NO: 15172 - DNA, 15 bp, Homo sapiens
taatttgaatttaat

SEQ ID NO: 15173 - DNA, 15 bp, Homo sapiens
ctaatttgaatttaa

SEQ ID NO: 15174 - DNA, 15 bp, Homo sapiens
tctaatttgaattta

SEQ ID NO: 15175 - DNA, 15 bp, Homo sapiens
gtctaatttgaattt

SEQ ID NO: 15176 - DNA, 15 bp, Homo sapiens
ggtctaatttgaatt

SEQ ID NO: 15177 - DNA, 15 bp, Homo sapiens
aggtctaatttgaat

SEQ ID NO: 15178 - DNA, 15 bp, Homo sapiens
taggtctaatttgaa

SEQ ID NO: 15179 - DNA, 15 bp, Homo sapiens
ttaggtctaatttga

SEQ ID NO: 15180 - DNA, 15 bp, Homo sapiens
gttaggtctaatttg

SEQ ID NO: 15181 - DNA, 15 bp, Homo sapiens
agttaggtctaattt

SEQ ID NO: 15182 - DNA, 15 bp, Homo sapiens
gagttaggtctaatt

SEQ ID NO: 15183 - DNA, 15 bp, Homo sapiens
tgagttaggtctaat

SEQ ID NO: 15184 - DNA, 15 bp, Homo sapiens
atgagttaggtctaa

SEQ ID NO: 15185 - DNA, 15 bp, Homo sapiens
catgagttaggtcta

SEQ ID NO: 15186 - DNA, 15 bp, Homo sapiens
gcatgagttaggtct

SEQ ID NO: 15187 - DNA, 15 bp, Homo sapiens
tgcatgagttaggtc

SEQ ID NO: 15188 - DNA, 15 bp, Homo sapiens
ttgcatgagttaggt

SEQ ID NO: 15189 - DNA, 15 bp, Homo sapiens
attgcatgagttagg

SEQ ID NO: 15190 - DNA, 15 bp, Homo sapiens
cattgcatgagttag

SEQ ID NO: 15191 - DNA, 15 bp, Homo sapiens
tcattgcatgagtta

SEQ ID NO: 15192 - DNA, 15 bp, Homo sapiens
atcattgcatgagtt

SEQ ID NO: 15193 - DNA, 15 bp, Homo sapiens
tatcattgcatgagt

SEQ ID NO: 15194 - DNA, 15 bp, Homo sapiens
ctatcattgcatgag

SEQ ID NO: 15195 - DNA, 15 bp, Homo sapiens
cctatcattgcatga

SEQ ID NO: 15196 - DNA, 15 bp, Homo sapiens
acctatcattgcatg

SEQ ID NO: 15197 - DNA, 15 bp, Homo sapiens
aacctatcattgcat

SEQ ID NO: 15198 - DNA, 15 bp, Homo sapiens
caacctatcattgca

SEQ ID NO: 15199 - DNA, 15 bp, Homo sapiens
gcaacctatcattgc

SEQ ID NO: 15200 - DNA, 15 bp, Homo sapiens
ggcaacctatcattg

SEQ ID NO: 15201 - DNA, 15 bp, Homo sapiens
gggcaacctatcatt

SEQ ID NO: 15202 - DNA, 15 bp, Homo sapiens
ggggcaacctatcat

SEQ ID NO: 15203 - DNA, 15 bp, Homo sapiens
tggggcaacctatca

SEQ ID NO: 15204 - DNA, 15 bp, Homo sapiens
gtggggcaacctatc

SEQ ID NO: 15205 - DNA, 15 bp, Homo sapiens
tgtggggcaacctat

SEQ ID NO: 15206 - DNA, 15 bp, Homo sapiens
gtgtggggcaaccta

SEQ ID NO: 15207 - DNA, 15 bp, Homo sapiens
agtgtggggcaacct

SEQ ID NO: 15208 - DNA, 15 bp, Homo sapiens
aagtgtggggcaacc

SEQ ID NO: 15209 - DNA, 15 bp, Homo sapiens
gaagtgtggggcaac

SEQ ID NO: 15210 - DNA, 15 bp, Homo sapiens
tgaagtgtggggcaa

SEQ ID NO: 15211 - DNA, 15 bp, Homo sapiens
gtgaagtgtggggca

SEQ ID NO: 15212 - DNA, 15 bp, Homo sapiens
agtgaagtgtggggc

SEQ ID NO: 15213 - DNA, 15 bp, Homo sapiens
gagtgaagtgtgggg

SEQ ID NO: 15214 - DNA, 15 bp, Homo sapiens
tgagtgaagtgtggg

SEQ ID NO: 15215 - DNA, 15 bp, Homo sapiens
gtgagtgaagtgtgg

SEQ ID NO: 15216 - DNA, 15 bp, Homo sapiens
tgtgagtgaagtgtg

SEQ ID NO: 15217 - DNA, 15 bp, Homo sapiens
atgtgagtgaagtgt

SEQ ID NO: 15218 - DNA, 15 bp, Homo sapiens
catgtgagtgaagtg

SEQ ID NO: 15219 - DNA, 15 bp, Homo sapiens
tcatgtgagtgaagt

SEQ ID NO: 15220 - DNA, 15 bp, Homo sapiens
ctcatgtgagtgaag

SEQ ID NO: 15221 - DNA, 15 bp, Homo sapiens
actcatgtgagtgaa

SEQ ID NO: 15222 - DNA, 15 bp, Homo sapiens
aactcatgtgagtga

SEQ ID NO: 15223 - DNA, 15 bp, Homo sapiens
caactcatgtgagtg

SEQ ID NO: 15224 - DNA, 15 bp, Homo sapiens
tcaactcatgtgagt

SEQ ID NO: 15225 - DNA, 15 bp, Homo sapiens
atcaactcatgtgag

SEQ ID NO: 15226 - DNA, 15 bp, Homo sapiens
tatcaactcatgtga

SEQ ID NO: 15227 - DNA, 15 bp, Homo sapiens
ctatcaactcatgtg

SEQ ID NO: 15228 - DNA, 15 bp, Homo sapiens
tctatcaactcatgt

SEQ ID NO: 15229 - DNA, 15 bp, Homo sapiens
ttctatcaactcatg

SEQ ID NO: 15230 - DNA, 15 bp, Homo sapiens
attctatcaactcat

SEQ ID NO: 15231 - DNA, 15 bp, Homo sapiens
cattctatcaactca

SEQ ID NO: 15232 - DNA, 15 bp, Homo sapiens
acattctatcaactc

SEQ ID NO: 15233 - DNA, 15 bp, Homo sapiens
gacattctatcaact

SEQ ID NO: 15234 - DNA, 15 bp, Homo sapiens
tgacattctatcaac

SEQ ID NO: 15235 - DNA, 15 bp, Homo sapiens
ctgacattctatcaa

SEQ ID NO: 15236 - DNA, 15 bp, Homo sapiens
actgacattctatca

SEQ ID NO: 15237 - DNA, 15 bp, Homo sapiens
aactgacattctatc

SEQ ID NO: 15238 - DNA, 15 bp, Homo sapiens
aaactgacattctat

SEQ ID NO: 15239 - DNA, 15 bp, Homo sapiens
aaaactgacattcta

SEQ ID NO: 15240 - DNA, 15 bp, Homo sapiens
gaaaactgacattct

SEQ ID NO: 15241 - DNA, 15 bp, Homo sapiens
tgaaaactgacattc

SEQ ID NO: 15242 - DNA, 15 bp, Homo sapiens
atgaaaactgacatt

SEQ ID NO: 15243 - DNA, 15 bp, Homo sapiens
tatgaaaactgacat

SEQ ID NO: 15244 - DNA, 15 bp, Homo sapiens
ttatgaaaactgaca

SEQ ID NO: 15245 - DNA, 15 bp, Homo sapiens
gttatgaaaactgac

SEQ ID NO: 15246 - DNA, 15 bp, Homo sapiens
tgttatgaaaactga

SEQ ID NO: 15247 - DNA, 15 bp, Homo sapiens
ttgttatgaaaactg

SEQ ID NO: 15248 - DNA, 15 bp, Homo sapiens
tttgttatgaaaact

SEQ ID NO: 15249 - DNA, 15 bp, Homo sapiens
ttttgttatgaaaac

SEQ ID NO: 15250 - DNA, 15 bp, Homo sapiens
cttttgttatgaaaa

SEQ ID NO: 15251 - DNA, 15 bp, Homo sapiens
gcttttgttatgaaa

SEQ ID NO: 15252 - DNA, 15 bp, Homo sapiens
tgcttttgttatgaa

SEQ ID NO: 15253 - DNA, 15 bp, Homo sapiens
ctgcttttgttatga

SEQ ID NO: 15254 - DNA, 15 bp, Homo sapiens
actgcttttgttatg

SEQ ID NO: 15255 - DNA, 15 bp, Homo sapiens
gactgcttttgttat

SEQ ID NO: 15256 - DNA, 15 bp, Homo sapiens
tgactgcttttgtta

SEQ ID NO: 15257 - DNA, 15 bp, Homo sapiens
atgactgcttttgtt

SEQ ID NO: 15258 - DNA, 15 bp, Homo sapiens
catgactgcttttgt

SEQ ID NO: 15259 - DNA, 15 bp, Homo sapiens
tcatgactgcttttg

SEQ ID NO: 15260 - DNA, 15 bp, Homo sapiens
ctcatgactgctttt

SEQ ID NO: 15261 - DNA, 15 bp, Homo sapiens
cctcatgactgcttt

SEQ ID NO: 15262 - DNA, 15 bp, Homo sapiens
tcctcatgactgctt

SEQ ID NO: 15263 - DNA, 15 bp, Homo sapiens
ctcctcatgactgct

SEQ ID NO: 15264 - DNA, 15 bp, Homo sapiens
gctcctcatgactgc

SEQ ID NO: 15265 - DNA, 15 bp, Homo sapiens
agctcctcatgactg

SEQ ID NO: 15266 - DNA, 15 bp, Homo sapiens
aagctcctcatgact

SEQ ID NO: 15267 - DNA, 15 bp, Homo sapiens
taagctcctcatgac

SEQ ID NO: 15268 - DNA, 15 bp, Homo sapiens
ctaagctcctcatga

SEQ ID NO: 15269 - DNA, 15 bp, Homo sapiens
tctaagctcctcatg

SEQ ID NO: 15270 - DNA, 15 bp, Homo sapiens
atctaagctcctcat

SEQ ID NO: 15271 - DNA, 15 bp, Homo sapiens
tatctaagctcctca

SEQ ID NO: 15272 - DNA, 15 bp, Homo sapiens
ttatctaagctcctc

SEQ ID NO: 15273 - DNA, 15 bp, Homo sapiens
tttatctaagctcct

SEQ ID NO: 15274 - DNA, 15 bp, Homo sapiens
atttatctaagctcc

SEQ ID NO: 15275 - DNA, 15 bp, Homo sapiens
aatttatctaagctc

SEQ ID NO: 15276 - DNA, 15 bp, Homo sapiens
caatttatctaagct

SEQ ID NO: 15277 - DNA, 15 bp, Homo sapiens
ccaatttatctaagc

SEQ ID NO: 15278 - DNA, 15 bp, Homo sapiens
accaatttatctaag

SEQ ID NO: 15279 - DNA, 15 bp, Homo sapiens
taccaatttatctaa

SEQ ID NO: 15280 - DNA, 15 bp, Homo sapiens
gtaccaatttatcta

SEQ ID NO: 15281 - DNA, 15 bp, Homo sapiens
ggtaccaatttatct

SEQ ID NO: 15282 - DNA, 15 bp, Homo sapiens
aggtaccaatttatc

SEQ ID NO: 15283 - DNA, 15 bp, Homo sapiens
caggtaccaatttat

SEQ ID NO: 15284 - DNA, 15 bp, Homo sapiens
gcaggtaccaattta

SEQ ID NO: 15285 - DNA, 15 bp, Homo sapiens
ggcaggtaccaattt

SEQ ID NO: 15286 - DNA, 15 bp, Homo sapiens
tggcaggtaccaatt

SEQ ID NO: 15287 - DNA, 15 bp, Homo sapiens
atggcaggtaccaat

SEQ ID NO: 15288 - DNA, 15 bp, Homo sapiens
aatggcaggtaccaa

SEQ ID NO: 15289 - DNA, 15 bp, Homo sapiens
caatggcaggtacca

SEQ ID NO: 15290 - DNA, 15 bp, Homo sapiens
tcaatggcaggtacc

SEQ ID NO: 15291 - DNA, 15 bp, Homo sapiens
atcaatggcaggtac

SEQ ID NO: 15292 - DNA, 15 bp, Homo sapiens
gatcaatggcaggta

SEQ ID NO: 15293 - DNA, 15 bp, Homo sapiens
tgatcaatggcaggt

SEQ ID NO: 15294 - DNA, 15 bp, Homo sapiens
ctgatcaatggcagg

SEQ ID NO: 15295 - DNA, 15 bp, Homo sapiens
actgatcaatggcag

SEQ ID NO: 15296 - DNA, 15 bp, Homo sapiens
cactgatcaatggca

SEQ ID NO: 15297 - DNA, 15 bp, Homo sapiens
ccactgatcaatggc

SEQ ID NO: 15298 - DNA, 15 bp, Homo sapiens
gccactgatcaatgg

SEQ ID NO: 15299 - DNA, 15 bp, Homo sapiens
tgccactgatcaatg

SEQ ID NO: 15300 - DNA, 15 bp, Homo sapiens
gtgccactgatcaat

SEQ ID NO: 15301 - DNA, 15 bp, Homo sapiens
cgtgccactgatcaa

SEQ ID NO: 15302 - DNA, 15 bp, Homo sapiens
ccgtgccactgatca

SEQ ID NO: 15303 - DNA, 15 bp, Homo sapiens
accgtgccactgatc

SEQ ID NO: 15304 - DNA, 15 bp, Homo sapiens
aaccgtgccactgat

SEQ ID NO: 15305 - DNA, 15 bp, Homo sapiens
aaaccgtgccactga

SEQ ID NO: 15306 - DNA, 15 bp, Homo sapiens
aaaaccgtgccactg

SEQ ID NO: 15307 - DNA, 15 bp, Homo sapiens
gaaaaccgtgccact

SEQ ID NO: 15308 - DNA, 15 bp, Homo sapiens
tgaaaaccgtgccac

SEQ ID NO: 15309 - DNA, 15 bp, Homo sapiens
atgaaaaccgtgcca

SEQ ID NO: 15310 - DNA, 15 bp, Homo sapiens
aatgaaaaccgtgcc

SEQ ID NO: 15311 - DNA, 15 bp, Homo sapiens
gaatgaaaaccgtgc

SEQ ID NO: 15312 - DNA, 15 bp, Homo sapiens
tgaatgaaaaccgtg

SEQ ID NO: 15313 - DNA, 15 bp, Homo sapiens
ctgaatgaaaaccgt

SEQ ID NO: 15314 - DNA, 15 bp, Homo sapiens
cctgaatgaaaaccg

SEQ ID NO: 15315 - DNA, 15 bp, Homo sapiens
acctgaatgaaaacc

SEQ ID NO: 15316 - DNA, 15 bp, Homo sapiens
aacctgaatgaaaac

SEQ ID NO: 15317 - DNA, 15 bp, Homo sapiens
gaacctgaatgaaaa

SEQ ID NO: 15318 - DNA, 15 bp, Homo sapiens
tgaacctgaatgaaa

SEQ ID NO: 15319 - DNA, 15 bp, Homo sapiens
ctgaacctgaatgaa

SEQ ID NO: 15320 - DNA, 15 bp, Homo sapiens
gctgaacctgaatga

SEQ ID NO: 15321 - DNA, 15 bp, Homo sapiens
tgctgaacctgaatg

SEQ ID NO: 15322 - DNA, 15 bp, Homo sapiens
ttgctgaacctgaat

SEQ ID NO: 15323 - DNA, 15 bp, Homo sapiens
cttgctgaacctgaa

SEQ ID NO: 15324 - DNA, 15 bp, Homo sapiens
tcttgctgaacctga

SEQ ID NO: 15325 - DNA, 15 bp, Homo sapiens
ctcttgctgaacctg

SEQ ID NO: 15326 - DNA, 15 bp, Homo sapiens
actcttgctgaacct

SEQ ID NO: 15327 - DNA, 15 bp, Homo sapiens
aactcttgctgaacc

SEQ ID NO: 15328 - DNA, 15 bp, Homo sapiens
aaactcttgctgaac

SEQ ID NO: 15329 - DNA, 15 bp, Homo sapiens
aaaactcttgctgaa

SEQ ID NO: 15330 - DNA, 15 bp, Homo sapiens
gaaaactcttgctga

SEQ ID NO: 15331 - DNA, 15 bp, Homo sapiens
ggaaaactcttgctg

SEQ ID NO: 15332 - DNA, 15 bp, Homo sapiens
aggaaaactcttgct

SEQ ID NO: 15333 - DNA, 15 bp, Homo sapiens
aaggaaaactcttgc

SEQ ID NO: 15334 - DNA, 15 bp, Homo sapiens
taaggaaaactcttg

SEQ ID NO: 15335 - DNA, 15 bp, Homo sapiens
ttaaggaaaactctt

SEQ ID NO: 15336 - DNA, 15 bp, Homo sapiens
tttaaggaaaactct

SEQ ID NO: 15337 - DNA, 15 bp, Homo sapiens
ctttaaggaaaactc

SEQ ID NO: 15338 - DNA, 15 bp, Homo sapiens
gctttaaggaaaact

SEQ ID NO: 15339 - DNA, 15 bp, Homo sapiens
agctttaaggaaaac

SEQ ID NO: 15340 - DNA, 15 bp, Homo sapiens
cagctttaaggaaaa

SEQ ID NO: 15341 - DNA, 15 bp, Homo sapiens
ccagctttaaggaaa

SEQ ID NO: 15342 - DNA, 15 bp, Homo sapiens
tccagctttaaggaa

SEQ ID NO: 15343 - DNA, 15 bp, Homo sapiens
ctccagctttaagga

SEQ ID NO: 15344 - DNA, 15 bp, Homo sapiens
cctccagctttaagg

SEQ ID NO: 15345 - DNA, 15 bp, Homo sapiens
tcctccagctttaag

SEQ ID NO: 15346 - DNA, 15 bp, Homo sapiens
ctcctccagctttaa

SEQ ID NO: 15347 - DNA, 15 bp, Homo sapiens
cctcctccagcttta

SEQ ID NO: 15348 - DNA, 15 bp, Homo sapiens
gcctcctccagcttt

SEQ ID NO: 15349 - DNA, 15 bp, Homo sapiens
tgcctcctccagctt

SEQ ID NO: 15350 - DNA, 15 bp, Homo sapiens
ctgcctcctccagct

SEQ ID NO: 15351 - DNA, 15 bp, Homo sapiens
gctgcctcctccagc

SEQ ID NO: 15352 - DNA, 15 bp, Homo sapiens
agctgcctcctccag

SEQ ID NO: 15353 - DNA, 15 bp, Homo sapiens
gagctgcctcctcca

SEQ ID NO: 15354 - DNA, 15 bp, Homo sapiens
tgagctgcctcctcc

SEQ ID NO: 15355 - DNA, 15 bp, Homo sapiens
ctgagctgcctcctc

SEQ ID NO: 15356 - DNA, 15 bp, Homo sapiens
actgagctgcctcct

SEQ ID NO: 15357 - DNA, 15 bp, Homo sapiens
cactgagctgcctcc

SEQ ID NO: 15358 - DNA, 15 bp, Homo sapiens
acactgagctgcctc

SEQ ID NO: 15359 - DNA, 15 bp, Homo sapiens
aacactgagctgcct

SEQ ID NO: 15360 - DNA, 15 bp, Homo sapiens
aaacactgagctgcc

SEQ ID NO: 15361 - DNA, 15 bp, Homo sapiens
caaacactgagctgc

SEQ ID NO: 15362 - DNA, 15 bp, Homo sapiens
ccaaacactgagctg

SEQ ID NO: 15363 - DNA, 15 bp, Homo sapiens
cccaaacactgagct

SEQ ID NO: 15364 - DNA, 15 bp, Homo sapiens
acccaaacactgagc

SEQ ID NO: 15365 - DNA, 15 bp, Homo sapiens
aacccaaacactgag

SEQ ID NO: 15366 - DNA, 15 bp, Homo sapiens
aaacccaaacactga

SEQ ID NO: 15367 - DNA, 15 bp, Homo sapiens
taaacccaaacactg

SEQ ID NO: 15368 - DNA, 15 bp, Homo sapiens
ctaaacccaaacact

SEQ ID NO: 15369 - DNA, 15 bp, Homo sapiens
cctaaacccaaacac

SEQ ID NO: 15370 - DNA, 15 bp, Homo sapiens
tcctaaacccaaaca

SEQ ID NO: 15371 - DNA, 15 bp, Homo sapiens
ctcctaaacccaaac

SEQ ID NO: 15372 - DNA, 15 bp, Homo sapiens
gctcctaaacccaaa

SEQ ID NO: 15373 - DNA, 15 bp, Homo sapiens
ggctcctaaacccaa

SEQ ID NO: 15374 - DNA, 15 bp, Homo sapiens
aggctcctaaaccca

SEQ ID NO: 15375 - DNA, 15 bp, Homo sapiens
aaggctcctaaaccc

SEQ ID NO: 15376 - DNA, 15 bp, Homo sapiens
aaaggctcctaaacc

SEQ ID NO: 15377 - DNA, 15 bp, Homo sapiens
gaaaggctcctaaac

SEQ ID NO: 15378 - DNA, 15 bp, Homo sapiens
agaaaggctcctaaa

SEQ ID NO: 15379 - DNA, 15 bp, Homo sapiens
aagaaaggctcctaa

SEQ ID NO: 15380 - DNA, 15 bp, Homo sapiens
aaagaaaggctccta

SEQ ID NO: 15381 - DNA, 15 bp, Homo sapiens
gaaagaaaggctcct

SEQ ID NO: 15382 - DNA, 15 bp, Homo sapiens
ggaaagaaaggctcc

SEQ ID NO: 15383 - DNA, 15 bp, Homo sapiens
aggaaagaaaggctc

SEQ ID NO: 15384 - DNA, 15 bp, Homo sapiens
caggaaagaaaggct

SEQ ID NO: 15385 - DNA, 15 bp, Homo sapiens
acaggaaagaaaggc

SEQ ID NO: 15386 - DNA, 15 bp, Homo sapiens
gacaggaaagaaagg

SEQ ID NO: 15387 - DNA, 15 bp, Homo sapiens
agacaggaaagaaag

SEQ ID NO: 15388 - DNA, 15 bp, Homo sapiens
aagacaggaaagaaa

SEQ ID NO: 15389 - DNA, 15 bp, Homo sapiens
taagacaggaaagaa

SEQ ID NO: 15390 - DNA, 15 bp, Homo sapiens
ctaagacaggaaaga

SEQ ID NO: 15391 - DNA, 15 bp, Homo sapiens
tctaagacaggaaag

SEQ ID NO: 15392 - DNA, 15 bp, Homo sapiens
gtctaagacaggaaa

SEQ ID NO: 15393 - DNA, 15 bp, Homo sapiens
agtctaagacaggaa

SEQ ID NO: 15394 - DNA, 15 bp, Homo sapiens
tagtctaagacagga

SEQ ID NO: 15395 - DNA, 15 bp, Homo sapiens
gtagtctaagacagg

SEQ ID NO: 15396 - DNA, 15 bp, Homo sapiens
ggtagtctaagacag

SEQ ID NO: 15397 - DNA, 15 bp, Homo sapiens
gggtagtctaagaca

SEQ ID NO: 15398 - DNA, 15 bp, Homo sapiens
ggggtagtctaagac

SEQ ID NO: 15399 - DNA, 15 bp, Homo sapiens
cggggtagtctaaga

SEQ ID NO: 15400 - DNA, 15 bp, Homo sapiens
acggggtagtctaag

SEQ ID NO: 15401 - DNA, 15 bp, Homo sapiens
aacggggtagtctaa

SEQ ID NO: 15402 - DNA, 15 bp, Homo sapiens
aaacggggtagtcta

SEQ ID NO: 15403 - DNA, 15 bp, Homo sapiens
gaaacggggtagtct

SEQ ID NO: 15404 - DNA, 15 bp, Homo sapiens
ggaaacggggtagtc

SEQ ID NO: 15405 - DNA, 15 bp, Homo sapiens
cggaaacggggtagt

SEQ ID NO: 15406 - DNA, 15 bp, Homo sapiens
acggaaacggggtag

SEQ ID NO: 15407 - DNA, 15 bp, Homo sapiens
gacggaaacggggta

SEQ ID NO: 15408 - DNA, 15 bp, Homo sapiens
ggacggaaacggggt

SEQ ID NO: 15409 - DNA, 15 bp, Homo sapiens
gggacggaaacgggg

SEQ ID NO: 15410 - DNA, 15 bp, Homo sapiens
tgggacggaaacggg

SEQ ID NO: 15411 - DNA, 15 bp, Homo sapiens
ctgggacggaaacgg

SEQ ID NO: 15412 - DNA, 15 bp, Homo sapiens
tctgggacggaaacg

SEQ ID NO: 15413 - DNA, 15 bp, Homo sapiens
ttctgggacggaaac

SEQ ID NO: 15414 - DNA, 15 bp, Homo sapiens
cttctgggacggaaa

SEQ ID NO: 15415 - DNA, 15 bp, Homo sapiens
acttctgggacggaa

SEQ ID NO: 15416 - DNA, 15 bp, Homo sapiens
tacttctgggacgga

SEQ ID NO: 15417 - DNA, 15 bp, Homo sapiens
gtacttctgggacgg

SEQ ID NO: 15418 - DNA, 15 bp, Homo sapiens
tgtacttctgggacg

SEQ ID NO: 15419 - DNA, 15 bp, Homo sapiens
ttgtacttctgggac

SEQ ID NO: 15420 - DNA, 15 bp, Homo sapiens
attgtacttctggga

SEQ ID NO: 15421 - DNA, 15 bp, Homo sapiens
cattgtacttctggg

SEQ ID NO: 15422 - DNA, 15 bp, Homo sapiens
ccattgtacttctgg

SEQ ID NO: 15423 - DNA, 15 bp, Homo sapiens
gccattgtacttctg

SEQ ID NO: 15424 - DNA, 15 bp, Homo sapiens
ggccattgtacttct

SEQ ID NO: 15425 - DNA, 15 bp, Homo sapiens
tggccattgtacttc

SEQ ID NO: 15426 - DNA, 15 bp, Homo sapiens
ctggccattgtactt

SEQ ID NO: 15427 - DNA, 15 bp, Homo sapiens
tctggccattgtact

SEQ ID NO: 15428 - DNA, 15 bp, Homo sapiens
ctctggccattgtac

SEQ ID NO: 15429 - DNA, 15 bp, Homo sapiens
cctctggccattgta

SEQ ID NO: 15430 - DNA, 15 bp, Homo sapiens
acctctggccattgt

SEQ ID NO: 15431 - DNA, 15 bp, Homo sapiens
cacctctggccattg

SEQ ID NO: 15432 - DNA, 15 bp, Homo sapiens
tcacctctggccatt

SEQ ID NO: 15433 - DNA, 15 bp, Homo sapiens
atcacctctggccat

SEQ ID NO: 15434 - DNA, 15 bp, Homo sapiens
catcacctctggcca

SEQ ID NO: 15435 - DNA, 15 bp, Homo sapiens
tcatcacctctggcc

SEQ ID NO: 15436 - DNA, 15 bp, Homo sapiens
ctcatcacctctggc

SEQ ID NO: 15437 - DNA, 15 bp, Homo sapiens
gctcatcacctctgg

SEQ ID NO: 15438 - DNA, 15 bp, Homo sapiens
agctcatcacctctg

SEQ ID NO: 15439 - DNA, 15 bp, Homo sapiens
gagctcatcacctct

SEQ ID NO: 15440 - DNA, 15 bp, Homo sapiens
ggagctcatcacctc

SEQ ID NO: 15441 - DNA, 15 bp, Homo sapiens
aggagctcatcacct

SEQ ID NO: 15442 - DNA, 15 bp, Homo sapiens
aaggagctcatcacc

SEQ ID NO: 15443 - DNA, 15 bp, Homo sapiens
caaggagctcatcac

SEQ ID NO: 15444 - DNA, 15 bp, Homo sapiens
ccaaggagctcatca

SEQ ID NO: 15445 - DNA, 15 bp, Homo sapiens
accaaggagctcatc

SEQ ID NO: 15446 - DNA, 15 bp, Homo sapiens
aaccaaggagctcat

SEQ ID NO: 15447 - DNA, 15 bp, Homo sapiens
gaaccaaggagctca

SEQ ID NO: 15448 - DNA, 15 bp, Homo sapiens
agaaccaaggagctc

SEQ ID NO: 15449 - DNA, 15 bp, Homo sapiens
aagaaccaaggagct

SEQ ID NO: 15450 - DNA, 15 bp, Homo sapiens
gaagaaccaaggagc

SEQ ID NO: 15451 - DNA, 15 bp, Homo sapiens
ggaagaaccaaggag

SEQ ID NO: 15452 - DNA, 15 bp, Homo sapiens
gggaagaaccaagga

SEQ ID NO: 15453 - DNA, 15 bp, Homo sapiens
ggggaagaaccaagg

SEQ ID NO: 15454 - DNA, 15 bp, Homo sapiens
aggggaagaaccaag

SEQ ID NO: 15455 - DNA, 15 bp, Homo sapiens
gaggggaagaaccaa

SEQ ID NO: 15456 - DNA, 15 bp, Homo sapiens
tgaggggaagaacca

SEQ ID NO: 15457 - DNA, 15 bp, Homo sapiens
ctgaggggaagaacc

SEQ ID NO: 15458 - DNA, 15 bp, Homo sapiens
tctgaggggaagaac

SEQ ID NO: 15459 - DNA, 15 bp, Homo sapiens
gtctgaggggaagaa

SEQ ID NO: 15460 - DNA, 15 bp, Homo sapiens
agtctgaggggaaga

SEQ ID NO: 15461 - DNA, 15 bp, Homo sapiens
aagtctgaggggaag

SEQ ID NO: 15462 - DNA, 15 bp, Homo sapiens
aaagtctgaggggaa

SEQ ID NO: 15463 - DNA, 15 bp, Homo sapiens
aaaagtctgagggga

SEQ ID NO: 15464 - DNA, 15 bp, Homo sapiens
caaaagtctgagggg

SEQ ID NO: 15465 - DNA, 15 bp, Homo sapiens
ccaaaagtctgaggg

SEQ ID NO: 15466 - DNA, 15 bp, Homo sapiens
cccaaaagtctgagg

SEQ ID NO: 15467 - DNA, 15 bp, Homo sapiens
tcccaaaagtctgag

SEQ ID NO: 15468 - DNA, 15 bp, Homo sapiens
ctcccaaaagtctga

SEQ ID NO: 15469 - DNA, 15 bp, Homo sapiens
tctcccaaaagtctg

SEQ ID NO: 15470 - DNA, 15 bp, Homo sapiens
ttctcccaaaagtct

SEQ ID NO: 15471 - DNA, 15 bp, Homo sapiens
gttctcccaaaagtc

SEQ ID NO: 15472 - DNA, 15 bp, Homo sapiens
tgttctcccaaaagt

SEQ ID NO: 15473 - DNA, 15 bp, Homo sapiens
atgttctcccaaaag

SEQ ID NO: 15474 - DNA, 15 bp, Homo sapiens
catgttctcccaaaa

SEQ ID NO: 15475 - DNA, 15 bp, Homo sapiens
acatgttctcccaaa

SEQ ID NO: 15476 - DNA, 15 bp, Homo sapiens
cacatgttctcccaa

SEQ ID NO: 15477 - DNA, 15 bp, Homo sapiens
ccacatgttctccca

SEQ ID NO: 15478 - DNA, 15 bp, Homo sapiens
gccacatgttctccc

SEQ ID NO: 15479 - DNA, 15 bp, Homo sapiens
agccacatgttctcc

SEQ ID NO: 15480 - DNA, 15 bp, Homo sapiens
cagccacatgttctc

SEQ ID NO: 15481 - DNA, 15 bp, Homo sapiens
ccagccacatgttct

SEQ ID NO: 15482 - DNA, 15 bp, Homo sapiens
cccagccacatgttc

SEQ ID NO: 15483 - DNA, 15 bp, Homo sapiens
tcccagccacatgtt

SEQ ID NO: 15484 - DNA, 15 bp, Homo sapiens
atcccagccacatgt

SEQ ID NO: 15485 - DNA, 15 bp, Homo sapiens
aatcccagccacatg

SEQ ID NO: 15486 - DNA, 15 bp, Homo sapiens
taatcccagccacat

SEQ ID NO: 15487 - DNA, 15 bp, Homo sapiens
ataatcccagccaca

SEQ ID NO: 15488 - DNA, 15 bp, Homo sapiens
cataatcccagccac

SEQ ID NO: 15489 - DNA, 15 bp, Homo sapiens
acataatcccagcca

SEQ ID NO: 15490 - DNA, 15 bp, Homo sapiens
cacataatcccagcc

SEQ ID NO: 15491 - DNA, 15 bp, Homo sapiens
ccacataatcccagc

SEQ ID NO: 15492 - DNA, 15 bp, Homo sapiens
tccacataatcccag

SEQ ID NO: 15493 - DNA, 15 bp, Homo sapiens
gtccacataatccca

SEQ ID NO: 15494 - DNA, 15 bp, Homo sapiens
agtccacataatccc

SEQ ID NO: 15495 - DNA, 15 bp, Homo sapiens
tagtccacataatcc

SEQ ID NO: 15496 - DNA, 15 bp, Homo sapiens
atagtccacataatc

SEQ ID NO: 15497 - DNA, 15 bp, Homo sapiens
catagtccacataat

SEQ ID NO: 15498 - DNA, 15 bp, Homo sapiens
ccatagtccacataa

SEQ ID NO: 15499 - DNA, 15 bp, Homo sapiens
tccatagtccacata

SEQ ID NO: 15500 - DNA, 15 bp, Homo sapiens
atccatagtccacat

SEQ ID NO: 15501 - DNA, 15 bp, Homo sapiens
aatccatagtccaca

SEQ ID NO: 15502 - DNA, 15 bp, Homo sapiens
caatccatagtccac

SEQ ID NO: 15503 - DNA, 15 bp, Homo sapiens
gcaatccatagtcca

SEQ ID NO: 15504 - DNA, 15 bp, Homo sapiens
agcaatccatagtcc

SEQ ID NO: 15505 - DNA, 15 bp, Homo sapiens
cagcaatccatagtc

SEQ ID NO: 15506 - DNA, 15 bp, Homo sapiens
ccagcaatccatagt

SEQ ID NO: 15507 - DNA, 15 bp, Homo sapiens
accagcaatccatag

SEQ ID NO: 15508 - DNA, 15 bp, Homo sapiens
aaccagcaatccata

SEQ ID NO: 15509 - DNA, 15 bp, Homo sapiens
aaaccagcaatccat

SEQ ID NO: 15510 - DNA, 15 bp, Homo sapiens
aaaaccagcaatcca

SEQ ID NO: 15511 - DNA, 15 bp, Homo sapiens
gaaaaccagcaatcc

SEQ ID NO: 15512 - DNA, 15 bp, Homo sapiens
ggaaaaccagcaatc

SEQ ID NO: 15513 - DNA, 15 bp, Homo sapiens
tggaaaaccagcaat

SEQ ID NO: 15514 - DNA, 15 bp, Homo sapiens
ttggaaaaccagcaa

SEQ ID NO: 15515 - DNA, 15 bp, Homo sapiens
tttggaaaaccagca

SEQ ID NO: 15516 - DNA, 15 bp, Homo sapiens
gtttggaaaaccagc

SEQ ID NO: 15517 - DNA, 15 bp, Homo sapiens
tgtttggaaaaccag

SEQ ID NO: 15518 - DNA, 15 bp, Homo sapiens
ttgtttggaaaacca

SEQ ID NO: 15519 - DNA, 15 bp, Homo sapiens
cttgtttggaaaacc

SEQ ID NO: 15520 - DNA, 15 bp, Homo sapiens
gcttgtttggaaaac

SEQ ID NO: 15521 - DNA, 15 bp, Homo sapiens
cgcttgtttggaaaa

SEQ ID NO: 15522 - DNA, 15 bp, Homo sapiens
gcgcttgtttggaaa

SEQ ID NO: 15523 - DNA, 15 bp, Homo sapiens
cgcgcttgtttggaa

SEQ ID NO: 15524 - DNA, 15 bp, Homo sapiens
acgcgcttgtttgga

SEQ ID NO: 15525 - DNA, 15 bp, Homo sapiens
aacgcgcttgtttgg

SEQ ID NO: 15526 - DNA, 15 bp, Homo sapiens
gaacgcgcttgtttg

SEQ ID NO: 15527 - DNA, 15 bp, Homo sapiens
agaacgcgcttgttt

SEQ ID NO: 15528 - DNA, 15 bp, Homo sapiens
cagaacgcgcttgtt

SEQ ID NO: 15529 - DNA, 15 bp, Homo sapiens
acagaacgcgcttgt

SEQ ID NO: 15530 - DNA, 15 bp, Homo sapiens
aacagaacgcgcttg

SEQ ID NO: 15531 - DNA, 15 bp, Homo sapiens
taacagaacgcgctt

SEQ ID NO: 15532 - DNA, 15 bp, Homo sapiens
gtaacagaacgcgct

SEQ ID NO: 15533 - DNA, 15 bp, Homo sapiens
agtaacagaacgcgc

SEQ ID NO: 15534 - DNA, 15 bp, Homo sapiens
gagtaacagaacgcg

SEQ ID NO: 15535 - DNA, 15 bp, Homo sapiens
cgagtaacagaacgc

SEQ ID NO: 15536 - DNA, 15 bp, Homo sapiens
acgagtaacagaacg

SEQ ID NO: 15537 - DNA, 15 bp, Homo sapiens
aacgagtaacagaac

SEQ ID NO: 15538 - DNA, 15 bp, Homo sapiens
caacgagtaacagaa

SEQ ID NO: 15539 - DNA, 15 bp, Homo sapiens
tcaacgagtaacaga

SEQ ID NO: 15540 - DNA, 15 bp, Homo sapiens
ttcaacgagtaacag

SEQ ID NO: 15541 - DNA, 15 bp, Homo sapiens
cttcaacgagtaaca

SEQ ID NO: 15542 - DNA, 15 bp, Homo sapiens
gcttcaacgagtaac

SEQ ID NO: 15543 - DNA, 15 bp, Homo sapiens
ggcttcaacgagtaa

SEQ ID NO: 15544 - DNA, 15 bp, Homo sapiens
tggcttcaacgagta

SEQ ID NO: 15545 - DNA, 15 bp, Homo sapiens
ctggcttcaacgagt

SEQ ID NO: 15546 - DNA, 15 bp, Homo sapiens
tctggcttcaacgag

SEQ ID NO: 15547 - DNA, 15 bp, Homo sapiens
ctctggcttcaacga

SEQ ID NO: 15548 - DNA, 15 bp, Homo sapiens
actctggcttcaacg

SEQ ID NO: 15549 - DNA, 15 bp, Homo sapiens
cactctggcttcaac

SEQ ID NO: 15550 - DNA, 15 bp, Homo sapiens
acactctggcttcaa

SEQ ID NO: 15551 - DNA, 15 bp, Homo sapiens
cacactctggcttca

SEQ ID NO: 15552 - DNA, 15 bp, Homo sapiens
tcacactctggcttc

SEQ ID NO: 15553 - DNA, 15 bp, Homo sapiens
atcacactctggctt

SEQ ID NO: 15554 - DNA, 15 bp, Homo sapiens
gatcacactctggct

SEQ ID NO: 15555 - DNA, 15 bp, Homo sapiens
agatcacactctggc

SEQ ID NO: 15556 - DNA, 15 bp, Homo sapiens
gagatcacactctgg

SEQ ID NO: 15557 - DNA, 15 bp, Homo sapiens
cgagatcacactctg

SEQ ID NO: 15558 - DNA, 15 bp, Homo sapiens
acgagatcacactct

SEQ ID NO: 15559 - DNA, 15 bp, Homo sapiens
tacgagatcacactc

SEQ ID NO: 15560 - DNA, 15 bp, Homo sapiens
ctacgagatcacact

SEQ ID NO: 15561 - DNA, 15 bp, Homo sapiens
cctacgagatcacac

SEQ ID NO: 15562 - DNA, 15 bp, Homo sapiens
tcctacgagatcaca

SEQ ID NO: 15563 - DNA, 15 bp, Homo sapiens
ttcctacgagatcac

SEQ ID NO: 15564 - DNA, 15 bp, Homo sapiens
tttcctacgagatca

SEQ ID NO: 15565 - DNA, 15 bp, Homo sapiens
ttttcctacgagatc

SEQ ID NO: 15566 - DNA, 15 bp, Homo sapiens
gttttcctacgagat

SEQ ID NO: 15567 - DNA, 15 bp, Homo sapiens
tgttttcctacgaga

SEQ ID NO: 15568 - DNA, 15 bp, Homo sapiens
gtgttttcctacgag

SEQ ID NO: 15569 - DNA, 15 bp, Homo sapiens
cgtgttttcctacga

SEQ ID NO: 15570 - DNA, 15 bp, Homo sapiens
tcgtgttttcctacg

SEQ ID NO: 15571 - DNA, 15 bp, Homo sapiens
gtcgtgttttcctac

SEQ ID NO: 15572 - DNA, 15 bp, Homo sapiens
agtcgtgttttccta

SEQ ID NO: 15573 - DNA, 15 bp, Homo sapiens
gagtcgtgttttcct

SEQ ID NO: 15574 - DNA, 15 bp, Homo sapiens
tgagtcgtgttttcc

SEQ ID NO: 15575 - DNA, 15 bp, Homo sapiens
gtgagtcgtgttttc

SEQ ID NO: 15576 - DNA, 15 bp, Homo sapiens
tgtgagtcgtgtttt

SEQ ID NO: 15577 - DNA, 15 bp, Homo sapiens
ctgtgagtcgtgttt

SEQ ID NO: 15578 - DNA, 15 bp, Homo sapiens
tctgtgagtcgtgtt

SEQ ID NO: 15579 - DNA, 15 bp, Homo sapiens
ctctgtgagtcgtgt

SEQ ID NO: 15580 - DNA, 15 bp, Homo sapiens
tctctgtgagtcgtg

SEQ ID NO: 15581 - DNA, 15 bp, Homo sapiens
ttctctgtgagtcgt

SEQ ID NO: 15582 - DNA, 15 bp, Homo sapiens
cttctctgtgagtcg

SEQ ID NO: 15583 - DNA, 15 bp, Homo sapiens
acttctctgtgagtc

SEQ ID NO: 15584 - DNA, 15 bp, Homo sapiens
cacttctctgtgagt

SEQ ID NO: 15585 - DNA, 15 bp, Homo sapiens
acacttctctgtgag

SEQ ID NO: 15586 - DNA, 15 bp, Homo sapiens
cacacttctctgtga

SEQ ID NO: 15587 - DNA, 15 bp, Homo sapiens
ccacacttctctgtg

SEQ ID NO: 15588 - DNA, 15 bp, Homo sapiens
cccacacttctctgt

SEQ ID NO: 15589 - DNA, 15 bp, Homo sapiens
ccccacacttctctg

SEQ ID NO: 15590 - DNA, 15 bp, Homo sapiens
tccccacacttctct

SEQ ID NO: 15591 - DNA, 15 bp, Homo sapiens
gtccccacacttctc

SEQ ID NO: 15592 - DNA, 15 bp, Homo sapiens
agtccccacacttct

SEQ ID NO: 15593 - DNA, 15 bp, Homo sapiens
aagtccccacacttc

SEQ ID NO: 15594 - DNA, 15 bp, Homo sapiens
aaagtccccacactt

SEQ ID NO: 15595 - DNA, 15 bp, Homo sapiens
caaagtccccacact

SEQ ID NO: 15596 - DNA, 15 bp, Homo sapiens
ccaaagtccccacac

SEQ ID NO: 15597 - DNA, 15 bp, Homo sapiens
cccaaagtccccaca

SEQ ID NO: 15598 - DNA, 15 bp, Homo sapiens
ccccaaagtccccac

SEQ ID NO: 15599 - DNA, 15 bp, Homo sapiens
accccaaagtcccca

SEQ ID NO: 15600 - DNA, 15 bp, Homo sapiens
gaccccaaagtcccc

SEQ ID NO: 15601 - DNA, 15 bp, Homo sapiens
tgaccccaaagtccc

SEQ ID NO: 15602 - DNA, 15 bp, Homo sapiens
ctgaccccaaagtcc

SEQ ID NO: 15603 - DNA, 15 bp, Homo sapiens
tctgaccccaaagtc

SEQ ID NO: 15604 - DNA, 15 bp, Homo sapiens
gtctgaccccaaagt

SEQ ID NO: 15605 - DNA, 15 bp, Homo sapiens
ggtctgaccccaaag

SEQ ID NO: 15606 - DNA, 15 bp, Homo sapiens
aggtctgaccccaaa

SEQ ID NO: 15607 - DNA, 15 bp, Homo sapiens
taggtctgaccccaa

SEQ ID NO: 15608 - DNA, 15 bp, Homo sapiens
ctaggtctgacccca

SEQ ID NO: 15609 - DNA, 15 bp, Homo sapiens
tctaggtctgacccc

SEQ ID NO: 15610 - DNA, 15 bp, Homo sapiens
ctctaggtctgaccc

SEQ ID NO: 15611 - DNA, 15 bp, Homo sapiens
gctctaggtctgacc

SEQ ID NO: 15612 - DNA, 15 bp, Homo sapiens
ggctctaggtctgac

SEQ ID NO: 15613 - DNA, 15 bp, Homo sapiens
gggctctaggtctga

SEQ ID NO: 15614 - DNA, 15 bp, Homo sapiens
agggctctaggtctg

SEQ ID NO: 15615 - DNA, 15 bp, Homo sapiens
cagggctctaggtct

SEQ ID NO: 15616 - DNA, 15 bp, Homo sapiens
tcagggctctaggtc

SEQ ID NO: 15617 - DNA, 15 bp, Homo sapiens
gtcagggctctaggt

SEQ ID NO: 15618 - DNA, 15 bp, Homo sapiens
agtcagggctctagg

SEQ ID NO: 15619 - DNA, 15 bp, Homo sapiens
gagtcagggctctag

SEQ ID NO: 15620 - DNA, 15 bp, Homo sapiens
agagtcagggctcta

SEQ ID NO: 15621 - DNA, 15 bp, Homo sapiens
tagagtcagggctct

SEQ ID NO: 15622 - DNA, 15 bp, Homo sapiens
gtagagtcagggctc

SEQ ID NO: 15623 - DNA, 15 bp, Homo sapiens
ggtagagtcagggct

SEQ ID NO: 15624 - DNA, 15 bp, Homo sapiens
gggtagagtcagggc

SEQ ID NO: 15625 - DNA, 15 bp, Homo sapiens
agggtagagtcaggg

SEQ ID NO: 15626 - DNA, 15 bp, Homo sapiens
aagggtagagtcagg

SEQ ID NO: 15627 - DNA, 15 bp, Homo sapiens
taagggtagagtcag

SEQ ID NO: 15628 - DNA, 15 bp, Homo sapiens
ttaagggtagagtca

SEQ ID NO: 15629 - DNA, 15 bp, Homo sapiens
gttaagggtagagtc

SEQ ID NO: 15630 - DNA, 15 bp, Homo sapiens
ggttaagggtagagt

SEQ ID NO: 15631 - DNA, 15 bp, Homo sapiens
aggttaagggtagag

SEQ ID NO: 15632 - DNA, 15 bp, Homo sapiens
aaggttaagggtaga

SEQ ID NO: 15633 - DNA, 15 bp, Homo sapiens
aaaggttaagggtag

SEQ ID NO: 15634 - DNA, 15 bp, Homo sapiens
taaaggttaagggta

SEQ ID NO: 15635 - DNA, 15 bp, Homo sapiens
ctaaaggttaagggt

SEQ ID NO: 15636 - DNA, 15 bp, Homo sapiens
cctaaaggttaaggg

SEQ ID NO: 15637 - DNA, 15 bp, Homo sapiens
tcctaaaggttaagg

SEQ ID NO: 15638 - DNA, 15 bp, Homo sapiens
ctcctaaaggttaag

SEQ ID NO: 15639 - DNA, 15 bp, Homo sapiens
cctcctaaaggttaa

SEQ ID NO: 15640 - DNA, 15 bp, Homo sapiens
gcctcctaaaggtta

SEQ ID NO: 15641 - DNA, 15 bp, Homo sapiens
ggcctcctaaaggtt

SEQ ID NO: 15642 - DNA, 15 bp, Homo sapiens
tggcctcctaaaggt

SEQ ID NO: 15643 - DNA, 15 bp, Homo sapiens
ttggcctcctaaagg

SEQ ID NO: 15644 - DNA, 15 bp, Homo sapiens
attggcctcctaaag

SEQ ID NO: 15645 - DNA, 15 bp, Homo sapiens
aattggcctcctaaa

SEQ ID NO: 15646 - DNA, 15 bp, Homo sapiens
caattggcctcctaa

SEQ ID NO: 15647 - DNA, 15 bp, Homo sapiens
acaattggcctccta

SEQ ID NO: 15648 - DNA, 15 bp, Homo sapiens
gacaattggcctcct

SEQ ID NO: 15649 - DNA, 15 bp, Homo sapiens
agacaattggcctcc

SEQ ID NO: 15650 - DNA, 15 bp, Homo sapiens
cagacaattggcctc

SEQ ID NO: 15651 - DNA, 15 bp, Homo sapiens
ccagacaattggcct

SEQ ID NO: 15652 - DNA, 15 bp, Homo sapiens
accagacaattggcc

SEQ ID NO: 15653 - DNA, 15 bp, Homo sapiens
gaccagacaattggc

SEQ ID NO: 15654 - DNA, 15 bp, Homo sapiens
agaccagacaattgg

SEQ ID NO: 15655 - DNA, 15 bp, Homo sapiens
tagaccagacaattg

SEQ ID NO: 15656 - DNA, 15 bp, Homo sapiens
atagaccagacaatt

SEQ ID NO: 15657 - DNA, 15 bp, Homo sapiens
gatagaccagacaat

SEQ ID NO: 15658 - DNA, 15 bp, Homo sapiens
ggatagaccagacaa

SEQ ID NO: 15659 - DNA, 15 bp, Homo sapiens
gggatagaccagaca

SEQ ID NO: 15660 - DNA, 15 bp, Homo sapiens
agggatagaccagac

SEQ ID NO: 15661 - DNA, 15 bp, Homo sapiens
aagggatagaccaga

SEQ ID NO: 15662 - DNA, 15 bp, Homo sapiens
taagggatagaccag

SEQ ID NO: 15663 - DNA, 15 bp, Homo sapiens
ctaagggatagacca

SEQ ID NO: 15664 - DNA, 15 bp, Homo sapiens
cctaagggatagacc

SEQ ID NO: 15665 - DNA, 15 bp, Homo sapiens
gcctaagggatagac

SEQ ID NO: 15666 - DNA, 15 bp, Homo sapiens
tgcctaagggataga

SEQ ID NO: 15667 - DNA, 15 bp, Homo sapiens
atgcctaagggatag

SEQ ID NO: 15668 - DNA, 15 bp, Homo sapiens
catgcctaagggata

SEQ ID NO: 15669 - DNA, 15 bp, Homo sapiens
acatgcctaagggat

SEQ ID NO: 15670 - DNA, 15 bp, Homo sapiens
tacatgcctaaggga

SEQ ID NO: 15671 - DNA, 15 bp, Homo sapiens
ctacatgcctaaggg

SEQ ID NO: 15672 - DNA, 15 bp, Homo sapiens
actacatgcctaagg

SEQ ID NO: 15673 - DNA, 15 bp, Homo sapiens
cactacatgcctaag

SEQ ID NO: 15674 - DNA, 15 bp, Homo sapiens
ccactacatgcctaa

SEQ ID NO: 15675 - DNA, 15 bp, Homo sapiens
tccactacatgccta

SEQ ID NO: 15676 - DNA, 15 bp, Homo sapiens
ctccactacatgcct

SEQ ID NO: 15677 - DNA, 15 bp, Homo sapiens
tctccactacatgcc

SEQ ID NO: 15678 - DNA, 15 bp, Homo sapiens
atctccactacatgc

SEQ ID NO: 15679 - DNA, 15 bp, Homo sapiens
aatctccactacatg

SEQ ID NO: 15680 - DNA, 15 bp, Homo sapiens
taatctccactacat

SEQ ID NO: 15681 - DNA, 15 bp, Homo sapiens
ttaatctccactaca

SEQ ID NO: 15682 - DNA, 15 bp, Homo sapiens
cttaatctccactac

SEQ ID NO: 15683 - DNA, 15 bp, Homo sapiens
acttaatctccacta

SEQ ID NO: 15684 - DNA, 15 bp, Homo sapiens
tacttaatctccact

SEQ ID NO: 15685 - DNA, 15 bp, Homo sapiens
ttacttaatctccac

SEQ ID NO: 15686 - DNA, 15 bp, Homo sapiens
cttacttaatctcca

SEQ ID NO: 15687 - DNA, 15 bp, Homo sapiens
tcttacttaatctcc

SEQ ID NO: 15688 - DNA, 15 bp, Homo sapiens
ttcttacttaatctc

SEQ ID NO: 15689 - DNA, 15 bp, Homo sapiens
gttcttacttaatct

SEQ ID NO: 15690 - DNA, 15 bp, Homo sapiens
tgttcttacttaatc

SEQ ID NO: 15691 - DNA, 15 bp, Homo sapiens
atgttcttacttaat

SEQ ID NO: 15692 - DNA, 15 bp, Homo sapiens
aatgttcttacttaa

SEQ ID NO: 15693 - DNA, 15 bp, Homo sapiens
aaatgttcttactta

SEQ ID NO: 15694 - DNA, 15 bp, Homo sapiens
taaatgttcttactt

SEQ ID NO: 15695 - DNA, 15 bp, Homo sapiens
ctaaatgttcttact

SEQ ID NO: 15696 - DNA, 15 bp, Homo sapiens
tctaaatgttcttac

SEQ ID NO: 15697 - DNA, 15 bp, Homo sapiens
ctctaaatgttctta

SEQ ID NO: 15698 - DNA, 15 bp, Homo sapiens
tctctaaatgttctt

SEQ ID NO: 15699 - DNA, 15 bp, Homo sapiens
atctctaaatgttct

SEQ ID NO: 15700 - DNA, 15 bp, Homo sapiens
catctctaaatgttc

SEQ ID NO: 15701 - DNA, 15 bp, Homo sapiens
ccatctctaaatgtt

SEQ ID NO: 15702 - DNA, 15 bp, Homo sapiens
tccatctctaaatgt

SEQ ID NO: 15703 - DNA, 15 bp, Homo sapiens
ctccatctctaaatg

SEQ ID NO: 15704 - DNA, 15 bp, Homo sapiens
gctccatctctaaat

SEQ ID NO: 15705 - DNA, 15 bp, Homo sapiens
agctccatctctaaa

SEQ ID NO: 15706 - DNA, 15 bp, Homo sapiens
tagctccatctctaa

SEQ ID NO: 15707 - DNA, 15 bp, Homo sapiens
ctagctccatctcta

SEQ ID NO: 15708 - DNA, 15 bp, Homo sapiens
tctagctccatctct

SEQ ID NO: 15709 - DNA, 15 bp, Homo sapiens
ttctagctccatctc

SEQ ID NO: 15710 - DNA, 15 bp, Homo sapiens
tttctagctccatct

SEQ ID NO: 15711 - DNA, 15 bp, Homo sapiens
ttttctagctccatc

SEQ ID NO: 15712 - DNA, 15 bp, Homo sapiens
attttctagctccat

SEQ ID NO: 15713 - DNA, 15 bp, Homo sapiens
aattttctagctcca

SEQ ID NO: 15714 - DNA, 15 bp, Homo sapiens
gaattttctagctcc

SEQ ID NO: 15715 - DNA, 15 bp, Homo sapiens
agaattttctagctc

SEQ ID NO: 15716 - DNA, 15 bp, Homo sapiens
aagaattttctagct

SEQ ID NO: 15717 - DNA, 15 bp, Homo sapiens
taagaattttctagc

SEQ ID NO: 15718 - DNA, 15 bp, Homo sapiens
ataagaattttctag

SEQ ID NO: 15719 - DNA, 15 bp, Homo sapiens
aataagaattttcta

SEQ ID NO: 15720 - DNA, 15 bp, Homo sapiens
taataagaattttct

SEQ ID NO: 15721 - DNA, 15 bp, Homo sapiens
ataataagaattttc

SEQ ID NO: 15722 - DNA, 15 bp, Homo sapiens
gataataagaatttt

SEQ ID NO: 15723 - DNA, 15 bp, Homo sapiens
tgataataagaattt

SEQ ID NO: 15724 - DNA, 15 bp, Homo sapiens
atgataataagaatt

SEQ ID NO: 15725 - DNA, 15 bp, Homo sapiens
gatgataataagaat

SEQ ID NO: 15726 - DNA, 15 bp, Homo sapiens
agatgataataagaa

SEQ ID NO: 15727 - DNA, 15 bp, Homo sapiens
cagatgataataaga

SEQ ID NO: 15728 - DNA, 15 bp, Homo sapiens
acagatgataataag

SEQ ID NO: 15729 - DNA, 15 bp, Homo sapiens
aacagatgataataa

SEQ ID NO: 15730 - DNA, 15 bp, Homo sapiens
taacagatgataata

SEQ ID NO: 15731 - DNA, 15 bp, Homo sapiens
ataacagatgataat

SEQ ID NO: 15732 - DNA, 15 bp, Homo sapiens
gataacagatgataa

SEQ ID NO: 15733 - DNA, 15 bp, Homo sapiens
cgataacagatgata

SEQ ID NO: 15734 - DNA, 15 bp, Homo sapiens
acgataacagatgat

SEQ ID NO: 15735 - DNA, 15 bp, Homo sapiens
tacgataacagatga

SEQ ID NO: 15736 - DNA, 15 bp, Homo sapiens
ttacgataacagatg

SEQ ID NO: 15737 - DNA, 15 bp, Homo sapiens
attacgataacagat

SEQ ID NO: 15738 - DNA, 15 bp, Homo sapiens
aattacgataacaga

SEQ ID NO: 15739 - DNA, 15 bp, Homo sapiens
gaattacgataacag

SEQ ID NO: 15740 - DNA, 15 bp, Homo sapiens
agaattacgataaca

SEQ ID NO: 15741 - DNA, 15 bp, Homo sapiens
cagaattacgataac

SEQ ID NO: 15742 - DNA, 15 bp, Homo sapiens
acagaattacgataa

SEQ ID NO: 15743 - DNA, 15 bp, Homo sapiens
aacagaattacgata

SEQ ID NO: 15744 - DNA, 15 bp, Homo sapiens
aaacagaattacgat

SEQ ID NO: 15745 - DNA, 15 bp, Homo sapiens
gaaacagaattacga

SEQ ID NO: 15746 - DNA, 15 bp, Homo sapiens
ggaaacagaattacg

SEQ ID NO: 15747 - DNA, 15 bp, Homo sapiens
aggaaacagaattac

SEQ ID NO: 15748 - DNA, 15 bp, Homo sapiens
gaggaaacagaatta

SEQ ID NO: 15749 - DNA, 15 bp, Homo sapiens
agaggaaacagaatt

SEQ ID NO: 15750 - DNA, 15 bp, Homo sapiens
gagaggaaacagaat

SEQ ID NO: 15751 - DNA, 15 bp, Homo sapiens
tgagaggaaacagaa

SEQ ID NO: 15752 - DNA, 15 bp, Homo sapiens
gtgagaggaaacaga

SEQ ID NO: 15753 - DNA, 15 bp, Homo sapiens
agtgagaggaaacag

SEQ ID NO: 15754 - DNA, 15 bp, Homo sapiens
aagtgagaggaaaca

SEQ ID NO: 15755 - DNA, 15 bp, Homo sapiens
aaagtgagaggaaac

SEQ ID NO: 15756 - DNA, 15 bp, Homo sapiens
caaagtgagaggaaa

SEQ ID NO: 15757 - DNA, 15 bp, Homo sapiens
tcaaagtgagaggaa

SEQ ID NO: 15758 - DNA, 15 bp, Homo sapiens
ttcaaagtgagagga

SEQ ID NO: 15759 - DNA, 15 bp, Homo sapiens
gttcaaagtgagagg

SEQ ID NO: 15760 - DNA, 15 bp, Homo sapiens
agttcaaagtgagag

SEQ ID NO: 15761 - DNA, 15 bp, Homo sapiens
cagttcaaagtgaga

SEQ ID NO: 15762 - DNA, 15 bp, Homo sapiens
acagttcaaagtgag

SEQ ID NO: 15763 - DNA, 15 bp, Homo sapiens
tacagttcaaagtga

SEQ ID NO: 15764 - DNA, 15 bp, Homo sapiens
ttacagttcaaagtg

SEQ ID NO: 15765 - DNA, 15 bp, Homo sapiens
attacagttcaaagt

SEQ ID NO: 15766 - DNA, 15 bp, Homo sapiens
aattacagttcaaag

SEQ ID NO: 15767 - DNA, 15 bp, Homo sapiens
caattacagttcaaa

SEQ ID NO: 15768 - DNA, 15 bp, Homo sapiens
tcaattacagttcaa

SEQ ID NO: 15769 - DNA, 15 bp, Homo sapiens
ttcaattacagttca

SEQ ID NO: 15770 - DNA, 15 bp, Homo sapiens
tttcaattacagttc

SEQ ID NO: 15771 - DNA, 15 bp, Homo sapiens
gtttcaattacagtt

SEQ ID NO: 15772 - DNA, 15 bp, Homo sapiens
tgtttcaattacagt

SEQ ID NO: 15773 - DNA, 15 bp, Homo sapiens
atgtttcaattacag

SEQ ID NO: 15774 - DNA, 15 bp, Homo sapiens
aatgtttcaattaca

SEQ ID NO: 15775 - DNA, 15 bp, Homo sapiens
aaatgtttcaattac

SEQ ID NO: 15776 - DNA, 15 bp, Homo sapiens
aaaatgtttcaatta

SEQ ID NO: 15777 - DNA, 15 bp, Homo sapiens
aaaaatgtttcaatt

SEQ ID NO: 15778 - DNA, 15 bp, Homo sapiens
gaaaaatgtttcaat

SEQ ID NO: 15779 - DNA, 15 bp, Homo sapiens
tgaaaaatgtttcaa

SEQ ID NO: 15780 - DNA, 15 bp, Homo sapiens
ttgaaaaatgtttca

SEQ ID NO: 15781 - DNA, 15 bp, Homo sapiens
attgaaaaatgtttc

SEQ ID NO: 15782 - DNA, 15 bp, Homo sapiens
cattgaaaaatgttt

SEQ ID NO: 15783 - DNA, 15 bp, Homo sapiens
ccattgaaaaatgtt

SEQ ID NO: 15784 - DNA, 15 bp, Homo sapiens
cccattgaaaaatgt

SEQ ID NO: 15785 - DNA, 15 bp, Homo sapiens
acccattgaaaaatg

SEQ ID NO: 15786 - DNA, 15 bp, Homo sapiens
gacccattgaaaaat

SEQ ID NO: 15787 - DNA, 15 bp, Homo sapiens
agacccattgaaaaa

SEQ ID NO: 15788 - DNA, 15 bp, Homo sapiens
aagacccattgaaaa

SEQ ID NO: 15789 - DNA, 15 bp, Homo sapiens
gaagacccattgaaa

SEQ ID NO: 15790 - DNA, 15 bp, Homo sapiens
cgaagacccattgaa

SEQ ID NO: 15791 - DNA, 15 bp, Homo sapiens
ccgaagacccattga

SEQ ID NO: 15792 - DNA, 15 bp, Homo sapiens
gccgaagacccattg

SEQ ID NO: 15793 - DNA, 15 bp, Homo sapiens
cgccgaagacccatt

SEQ ID NO: 15794 - DNA, 15 bp, Homo sapiens
acgccgaagacccat

SEQ ID NO: 15795 - DNA, 15 bp, Homo sapiens
aacgccgaagaccca

SEQ ID NO: 15796 - DNA, 15 bp, Homo sapiens
aaacgccgaagaccc

SEQ ID NO: 15797 - DNA, 15 bp, Homo sapiens
taaacgccgaagacc

SEQ ID NO: 15798 - DNA, 15 bp, Homo sapiens
ctaaacgccgaagac

SEQ ID NO: 15799 - DNA, 15 bp, Homo sapiens
tctaaacgccgaaga

SEQ ID NO: 15800 - DNA, 15 bp, Homo sapiens
ttctaaacgccgaag

SEQ ID NO: 15801 - DNA, 15 bp, Homo sapiens
tttctaaacgccgaa

SEQ ID NO: 15802 - DNA, 15 bp, Homo sapiens
ctttctaaacgccga

SEQ ID NO: 15803 - DNA, 15 bp, Homo sapiens
cctttctaaacgccg

SEQ ID NO: 15804 - DNA, 15 bp, Homo sapiens
ccctttctaaacgcc

SEQ ID NO: 15805 - DNA, 15 bp, Homo sapiens
tccctttctaaacgc

SEQ ID NO: 15806 - DNA, 15 bp, Homo sapiens
ctccctttctaaacg

SEQ ID NO: 15807 - DNA, 15 bp, Homo sapiens
tctccctttctaaac

SEQ ID NO: 15808 - DNA, 15 bp, Homo sapiens
atctccctttctaaa

SEQ ID NO: 15809 - DNA, 15 bp, Homo sapiens
catctccctttctaa

SEQ ID NO: 15810 - DNA, 15 bp, Homo sapiens
gcatctccctttcta

SEQ ID NO: 15811 - DNA, 15 bp, Homo sapiens
ggcatctccctttct

SEQ ID NO: 15812 - DNA, 15 bp, Homo sapiens
tggcatctccctttc

SEQ ID NO: 15813 - DNA, 15 bp, Homo sapiens
ctggcatctcccttt

SEQ ID NO: 15814 - DNA, 15 bp, Homo sapiens
cctggcatctccctt

SEQ ID NO: 15815 - DNA, 15 bp, Homo sapiens
tcctggcatctccct

SEQ ID NO: 15816 - DNA, 15 bp, Homo sapiens
ttcctggcatctccc

SEQ ID NO: 15817 - DNA, 15 bp, Homo sapiens
gttcctggcatctcc

SEQ ID NO: 15818 - DNA, 15 bp, Homo sapiens
agttcctggcatctc

SEQ ID NO: 15819 - DNA, 15 bp, Homo sapiens
gagttcctggcatct

SEQ ID NO: 15820 - DNA, 15 bp, Homo sapiens
agagttcctggcatc

SEQ ID NO: 15821 - DNA, 15 bp, Homo sapiens
cagagttcctggcat

SEQ ID NO: 15822 - DNA, 15 bp, Homo sapiens
acagagttcctggca

SEQ ID NO: 15823 - DNA, 15 bp, Homo sapiens
aacagagttcctggc

SEQ ID NO: 15824 - DNA, 15 bp, Homo sapiens
gaacagagttcctgg

SEQ ID NO: 15825 - DNA, 15 bp, Homo sapiens
tgaacagagttcctg

SEQ ID NO: 15826 - DNA, 15 bp, Homo sapiens
gtgaacagagttcct

SEQ ID NO: 15827 - DNA, 15 bp, Homo sapiens
ggtgaacagagttcc

SEQ ID NO: 15828 - DNA, 15 bp, Homo sapiens
aggtgaacagagttc

SEQ ID NO: 15829 - DNA, 15 bp, Homo sapiens
caggtgaacagagtt

SEQ ID NO: 15830 - DNA, 15 bp, Homo sapiens
acaggtgaacagagt

SEQ ID NO: 15831 - DNA, 15 bp, Homo sapiens
gacaggtgaacagag

SEQ ID NO: 15832 - DNA, 15 bp, Homo sapiens
agacaggtgaacaga

SEQ ID NO: 15833 - DNA, 15 bp, Homo sapiens
tagacaggtgaacag

SEQ ID NO: 15834 - DNA, 15 bp, Homo sapiens
atagacaggtgaaca

SEQ ID NO: 15835 - DNA, 15 bp, Homo sapiens
gatagacaggtgaac

SEQ ID NO: 15836 - DNA, 15 bp, Homo sapiens
agatagacaggtgaa

SEQ ID NO: 15837 - DNA, 15 bp, Homo sapiens
aagatagacaggtga

SEQ ID NO: 15838 - DNA, 15 bp, Homo sapiens
aaagatagacaggtg

SEQ ID NO: 15839 - DNA, 15 bp, Homo sapiens
aaaagatagacaggt

SEQ ID NO: 15840 - DNA, 15 bp, Homo sapiens
taaaagatagacagg

SEQ ID NO: 15841 - DNA, 15 bp, Homo sapiens
ttaaaagatagacag

SEQ ID NO: 15842 - DNA, 15 bp, Homo sapiens
tttaaaagatagaca

SEQ ID NO: 15843 - DNA, 15 bp, Homo sapiens
atttaaaagatagac

SEQ ID NO: 15844 - DNA, 15 bp, Homo sapiens
tatttaaaagataga

SEQ ID NO: 15845 - DNA, 15 bp, Homo sapiens
gtatttaaaagatag

SEQ ID NO: 15846 - DNA, 15 bp, Homo sapiens
agtatttaaaagata

SEQ ID NO: 15847 - DNA, 15 bp, Homo sapiens
gagtatttaaaagat

SEQ ID NO: 15848 - DNA, 15 bp, Homo sapiens
agagtatttaaaaga

SEQ ID NO: 15849 - DNA, 15 bp, Homo sapiens
cagagtatttaaaag

SEQ ID NO: 15850 - DNA, 15 bp, Homo sapiens
ccagagtatttaaaa

SEQ ID NO: 15851 - DNA, 15 bp, Homo sapiens
tccagagtatttaaa

SEQ ID NO: 15852 - DNA, 15 bp, Homo sapiens
ttccagagtatttaa

SEQ ID NO: 15853 - DNA, 15 bp, Homo sapiens
gttccagagtattta

SEQ ID NO: 15854 - DNA, 15 bp, Homo sapiens
agttccagagtattt

SEQ ID NO: 15855 - DNA, 15 bp, Homo sapiens
cagttccagagtatt

SEQ ID NO: 15856 - DNA, 15 bp, Homo sapiens
gcagttccagagtat

SEQ ID NO: 15857 - DNA, 15 bp, Homo sapiens
agcagttccagagta

SEQ ID NO: 15858 - DNA, 15 bp, Homo sapiens
aagcagttccagagt

SEQ ID NO: 15859 - DNA, 15 bp, Homo sapiens
aaagcagttccagag

SEQ ID NO: 15860 - DNA, 15 bp, Homo sapiens
aaaagcagttccaga

SEQ ID NO: 15861 - DNA, 15 bp, Homo sapiens
aaaaagcagttccag

SEQ ID NO: 15862 - DNA, 15 bp, Homo sapiens
taaaaagcagttcca

SEQ ID NO: 15863 - DNA, 15 bp, Homo sapiens
ttaaaaagcagttcc

SEQ ID NO: 15864 - DNA, 15 bp, Homo sapiens
tttaaaaagcagttc

SEQ ID NO: 15865 - DNA, 15 bp, Homo sapiens
gtttaaaaagcagtt

SEQ ID NO: 15866 - DNA, 15 bp, Homo sapiens
tgtttaaaaagcagt

SEQ ID NO: 15867 - DNA, 15 bp, Homo sapiens
ttgtttaaaaagcag

SEQ ID NO: 15868 - DNA, 15 bp, Homo sapiens
cttgtttaaaaagca

SEQ ID NO: 15869 - DNA, 15 bp, Homo sapiens
acttgtttaaaaagc

SEQ ID NO: 15870 - DNA, 15 bp, Homo sapiens
aacttgtttaaaaag

SEQ ID NO: 15871 - DNA, 15 bp, Homo sapiens
caacttgtttaaaaa

SEQ ID NO: 15872 - DNA, 15 bp, Homo sapiens
acaacttgtttaaaa

SEQ ID NO: 15873 - DNA, 15 bp, Homo sapiens
cacaacttgtttaaa

SEQ ID NO: 15874 - DNA, 15 bp, Homo sapiens
acacaacttgtttaa

SEQ ID NO: 15875 - DNA, 15 bp, Homo sapiens
cacacaacttgttta

SEQ ID NO: 15876 - DNA, 15 bp, Homo sapiens
acacacaacttgttt

SEQ ID NO: 15877 - DNA, 15 bp, Homo sapiens
aacacacaacttgtt

SEQ ID NO: 15878 - DNA, 15 bp, Homo sapiens
aaacacacaacttgt

SEQ ID NO: 15879 - DNA, 15 bp, Homo sapiens
caaacacacaacttg

SEQ ID NO: 15880 - DNA, 15 bp, Homo sapiens
tcaaacacacaactt

SEQ ID NO: 15881 - DNA, 15 bp, Homo sapiens
gtcaaacacacaact

SEQ ID NO: 15882 - DNA, 15 bp, Homo sapiens
ggtcaaacacacaac

SEQ ID NO: 15883 - DNA, 15 bp, Homo sapiens
gggtcaaacacacaa

SEQ ID NO: 15884 - DNA, 15 bp, Homo sapiens
agggtcaaacacaca

SEQ ID NO: 15885 - DNA, 15 bp, Homo sapiens
tagggtcaaacacac

SEQ ID NO: 15886 - DNA, 15 bp, Homo sapiens
gtagggtcaaacaca

SEQ ID NO: 15887 - DNA, 15 bp, Homo sapiens
agtagggtcaaacac

SEQ ID NO: 15888 - DNA, 15 bp, Homo sapiens
cagtagggtcaaaca

SEQ ID NO: 15889 - DNA, 15 bp, Homo sapiens
gcagtagggtcaaac

SEQ ID NO: 15890 - DNA, 15 bp, Homo sapiens
tgcagtagggtcaaa

SEQ ID NO: 15891 - DNA, 15 bp, Homo sapiens
gtgcagtagggtcaa

SEQ ID NO: 15892 - DNA, 15 bp, Homo sapiens
tgtgcagtagggtca

SEQ ID NO: 15893 - DNA, 15 bp, Homo sapiens
atgtgcagtagggtc

SEQ ID NO: 15894 - DNA, 15 bp, Homo sapiens
catgtgcagtagggt

SEQ ID NO: 15895 - DNA, 15 bp, Homo sapiens
gcatgtgcagtaggg

SEQ ID NO: 15896 - DNA, 15 bp, Homo sapiens
agcatgtgcagtagg

SEQ ID NO: 15897 - DNA, 15 bp, Homo sapiens
cagcatgtgcagtag

SEQ ID NO: 15898 - DNA, 15 bp, Homo sapiens
acagcatgtgcagta

SEQ ID NO: 15899 - DNA, 15 bp, Homo sapiens
cacagcatgtgcagt

SEQ ID NO: 15900 - DNA, 15 bp, Homo sapiens
acacagcatgtgcag

SEQ ID NO: 15901 - DNA, 15 bp, Homo sapiens
gacacagcatgtgca

SEQ ID NO: 15902 - DNA, 15 bp, Homo sapiens
agacacagcatgtgc

SEQ ID NO: 15903 - DNA, 15 bp, Homo sapiens
cagacacagcatgtg

SEQ ID NO: 15904 - DNA, 15 bp, Homo sapiens
ccagacacagcatgt

SEQ ID NO: 15905 - DNA, 15 bp, Homo sapiens
cccagacacagcatg

SEQ ID NO: 15906 - DNA, 15 bp, Homo sapiens
acccagacacagcat

SEQ ID NO: 15907 - DNA, 15 bp, Homo sapiens
cacccagacacagca

SEQ ID NO: 15908 - DNA, 15 bp, Homo sapiens
acacccagacacagc

SEQ ID NO: 15909 - DNA, 15 bp, Homo sapiens
tacacccagacacag

SEQ ID NO: 15910 - DNA, 15 bp, Homo sapiens
ctacacccagacaca

SEQ ID NO: 15911 - DNA, 15 bp, Homo sapiens
cctacacccagacac

SEQ ID NO: 15912 - DNA, 15 bp, Homo sapiens
gcctacacccagaca

SEQ ID NO: 15913 - DNA, 15 bp, Homo sapiens
tgcctacacccagac

SEQ ID NO: 15914 - DNA, 15 bp, Homo sapiens
ttgcctacacccaga

SEQ ID NO: 15915 - DNA, 15 bp, Homo sapiens
tttgcctacacccag

SEQ ID NO: 15916 - DNA, 15 bp, Homo sapiens
atttgcctacaccca

SEQ ID NO: 15917 - DNA, 15 bp, Homo sapiens
tatttgcctacaccc

SEQ ID NO: 15918 - DNA, 15 bp, Homo sapiens
atatttgcctacacc

SEQ ID NO: 15919 - DNA, 15 bp, Homo sapiens
catatttgcctacac

SEQ ID NO: 15920 - DNA, 15 bp, Homo sapiens
tcatatttgcctaca

SEQ ID NO: 15921 - DNA, 15 bp, Homo sapiens
ctcatatttgcctac

SEQ ID NO: 15922 - DNA, 15 bp, Homo sapiens
tctcatatttgccta

SEQ ID NO: 15923 - DNA, 15 bp, Homo sapiens
atctcatatttgcct

SEQ ID NO: 15924 - DNA, 15 bp, Homo sapiens
catctcatatttgcc

SEQ ID NO: 15925 - DNA, 15 bp, Homo sapiens
tcatctcatatttgc

SEQ ID NO: 15926 - DNA, 15 bp, Homo sapiens
ctcatctcatatttg

SEQ ID NO: 15927 - DNA, 15 bp, Homo sapiens
cctcatctcatattt

SEQ ID NO: 15928 - DNA, 15 bp, Homo sapiens
gcctcatctcatatt

SEQ ID NO: 15929 - DNA, 15 bp, Homo sapiens
agcctcatctcatat

SEQ ID NO: 15930 - DNA, 15 bp, Homo sapiens
cagcctcatctcata

SEQ ID NO: 15931 - DNA, 15 bp, Homo sapiens
tcagcctcatctcat

SEQ ID NO: 15932 - DNA, 15 bp, Homo sapiens
ctcagcctcatctca

SEQ ID NO: 15933 - DNA, 15 bp, Homo sapiens
cctcagcctcatctc

SEQ ID NO: 15934 - DNA, 15 bp, Homo sapiens
gcctcagcctcatct

SEQ ID NO: 15935 - DNA, 15 bp, Homo sapiens
tgcctcagcctcatc

SEQ ID NO: 15936 - DNA, 15 bp, Homo sapiens
gtgcctcagcctcat

SEQ ID NO: 15937 - DNA, 15 bp, Homo sapiens
agtgcctcagcctca

SEQ ID NO: 15938 - DNA, 15 bp, Homo sapiens
cagtgcctcagcctc

SEQ ID NO: 15939 - DNA, 15 bp, Homo sapiens
ccagtgcctcagcct

SEQ ID NO: 15940 - DNA, 15 bp, Homo sapiens
accagtgcctcagcc

SEQ ID NO: 15941 - DNA, 15 bp, Homo sapiens
caccagtgcctcagc

SEQ ID NO: 15942 - DNA, 15 bp, Homo sapiens
acaccagtgcctcag

SEQ ID NO: 15943 - DNA, 15 bp, Homo sapiens
cacaccagtgcctca

SEQ ID NO: 15944 - DNA, 15 bp, Homo sapiens
acacaccagtgcctc

SEQ ID NO: 15945 - DNA, 15 bp, Homo sapiens
cacacaccagtgcct

SEQ ID NO: 15946 - DNA, 15 bp, Homo sapiens
acacacaccagtgcc

SEQ ID NO: 15947 - DNA, 15 bp, Homo sapiens
aacacacaccagtgc

SEQ ID NO: 15948 - DNA, 15 bp, Homo sapiens
aaacacacaccagtg

SEQ ID NO: 15949 - DNA, 15 bp, Homo sapiens
taaacacacaccagt

SEQ ID NO: 15950 - DNA, 15 bp, Homo sapiens
ttaaacacacaccag

SEQ ID NO: 15951 - DNA, 15 bp, Homo sapiens
tttaaacacacacca

SEQ ID NO: 15952 - DNA, 15 bp, Homo sapiens
atttaaacacacacc

SEQ ID NO: 15953 - DNA, 15 bp, Homo sapiens
catttaaacacacac

SEQ ID NO: 15954 - DNA, 15 bp, Homo sapiens
ccatttaaacacaca

SEQ ID NO: 15955 - DNA, 15 bp, Homo sapiens
gccatttaaacacac

SEQ ID NO: 15956 - DNA, 15 bp, Homo sapiens
agccatttaaacaca

SEQ ID NO: 15957 - DNA, 15 bp, Homo sapiens
cagccatttaaacac

SEQ ID NO: 15958 - DNA, 15 bp, Homo sapiens
ccagccatttaaaca

SEQ ID NO: 15959 - DNA, 15 bp, Homo sapiens
tccagccatttaaac

SEQ ID NO: 15960 - DNA, 15 bp, Homo sapiens
atccagccatttaaa

SEQ ID NO: 15961 - DNA, 15 bp, Homo sapiens
catccagccatttaa

SEQ ID NO: 15962 - DNA, 15 bp, Homo sapiens
ccatccagccattta

SEQ ID NO: 15963 - DNA, 15 bp, Homo sapiens
cccatccagccattt

SEQ ID NO: 15964 - DNA, 15 bp, Homo sapiens
gcccatccagccatt

SEQ ID NO: 15965 - DNA, 15 bp, Homo sapiens
tgcccatccagccat

SEQ ID NO: 15966 - DNA, 15 bp, Homo sapiens
atgcccatccagcca

SEQ ID NO: 15967 - DNA, 15 bp, Homo sapiens
gatgcccatccagcc

SEQ ID NO: 15968 - DNA, 15 bp, Homo sapiens
cgatgcccatccagc

SEQ ID NO: 15969 - DNA, 15 bp, Homo sapiens
ccgatgcccatccag

SEQ ID NO: 15970 - DNA, 15 bp, Homo sapiens
cccgatgcccatcca

SEQ ID NO: 15971 - DNA, 15 bp, Homo sapiens
gcccgatgcccatcc

SEQ ID NO: 15972 - DNA, 15 bp, Homo sapiens
agcccgatgcccatc

SEQ ID NO: 15973 - DNA, 15 bp, Homo sapiens
tagcccgatgcccat

SEQ ID NO: 15974 - DNA, 15 bp, Homo sapiens
ttagcccgatgccca

SEQ ID NO: 15975 - DNA, 15 bp, Homo sapiens
tttagcccgatgccc

SEQ ID NO: 15976 - DNA, 15 bp, Homo sapiens
ctttagcccgatgcc

SEQ ID NO: 15977 - DNA, 15 bp, Homo sapiens
cctttagcccgatgc

SEQ ID NO: 15978 - DNA, 15 bp, Homo sapiens
tcctttagcccgatg

SEQ ID NO: 15979 - DNA, 15 bp, Homo sapiens
gtcctttagcccgat

SEQ ID NO: 15980 - DNA, 15 bp, Homo sapiens
agtcctttagcccga

SEQ ID NO: 15981 - DNA, 15 bp, Homo sapiens
aagtcctttagcccg

SEQ ID NO: 15982 - DNA, 15 bp, Homo sapiens
caagtcctttagccc

SEQ ID NO: 15983 - DNA, 15 bp, Homo sapiens
acaagtcctttagcc

SEQ ID NO: 15984 - DNA, 15 bp, Homo sapiens
cacaagtcctttagc

SEQ ID NO: 15985 - DNA, 15 bp, Homo sapiens
gcacaagtcctttag

SEQ ID NO: 15986 - DNA, 15 bp, Homo sapiens
agcacaagtccttta

SEQ ID NO: 15987 - DNA, 15 bp, Homo sapiens
aagcacaagtccttt

SEQ ID NO: 15988 - DNA, 15 bp, Homo sapiens
caagcacaagtcctt

SEQ ID NO: 15989 - DNA, 15 bp, Homo sapiens
acaagcacaagtcct

SEQ ID NO: 15990 - DNA, 15 bp, Homo sapiens
aacaagcacaagtcc

SEQ ID NO: 15991 - DNA, 15 bp, Homo sapiens
aaacaagcacaagtc

SEQ ID NO: 15992 - DNA, 15 bp, Homo sapiens
caaacaagcacaagt

SEQ ID NO: 15993 - DNA, 15 bp, Homo sapiens
gcaaacaagcacaag

SEQ ID NO: 15994 - DNA, 15 bp, Homo sapiens
tgcaaacaagcacaa

SEQ ID NO: 15995 - DNA, 15 bp, Homo sapiens
gtgcaaacaagcaca

SEQ ID NO: 15996 - DNA, 15 bp, Homo sapiens
ggtgcaaacaagcac

SEQ ID NO: 15997 - DNA, 15 bp, Homo sapiens
tggtgcaaacaagca

SEQ ID NO: 15998 - DNA, 15 bp, Homo sapiens
gtggtgcaaacaagc

SEQ ID NO: 15999 - DNA, 15 bp, Homo sapiens
cgtggtgcaaacaag

SEQ ID NO: 16000 - DNA, 15 bp, Homo sapiens
acgtggtgcaaacaa

SEQ ID NO: 16001 - DNA, 15 bp, Homo sapiens
cacgtggtgcaaaca

SEQ ID NO: 16002 - DNA, 15 bp, Homo sapiens
acacgtggtgcaaac

SEQ ID NO: 16003 - DNA, 15 bp, Homo sapiens
cacacgtggtgcaaa

SEQ ID NO: 16004 - DNA, 15 bp, Homo sapiens
tcacacgtggtgcaa

SEQ ID NO: 16005 - DNA, 15 bp, Homo sapiens
ctcacacgtggtgca

SEQ ID NO: 16006 - DNA, 15 bp, Homo sapiens
actcacacgtggtgc

SEQ ID NO: 16007 - DNA, 15 bp, Homo sapiens
cactcacacgtggtg

SEQ ID NO: 16008 - DNA, 15 bp, Homo sapiens
gcactcacacgtggt

SEQ ID NO: 16009 - DNA, 15 bp, Homo sapiens
agcactcacacgtgg

SEQ ID NO: 16010 - DNA, 15 bp, Homo sapiens
gagcactcacacgtg

SEQ ID NO: 16011 - DNA, 15 bp, Homo sapiens
tgagcactcacacgt

SEQ ID NO: 16012 - DNA, 15 bp, Homo sapiens
atgagcactcacacg

SEQ ID NO: 16013 - DNA, 15 bp, Homo sapiens
gatgagcactcacac

SEQ ID NO: 16014 - DNA, 15 bp, Homo sapiens
agatgagcactcaca

SEQ ID NO: 16015 - DNA, 15 bp, Homo sapiens
cagatgagcactcac

SEQ ID NO: 16016 - DNA, 15 bp, Homo sapiens
acagatgagcactca

SEQ ID NO: 16017 - DNA, 15 bp, Homo sapiens
aacagatgagcactc

SEQ ID NO: 16018 - DNA, 15 bp, Homo sapiens
aaacagatgagcact

SEQ ID NO: 16019 - DNA, 15 bp, Homo sapiens
caaacagatgagcac

SEQ ID NO: 16020 - DNA, 15 bp, Homo sapiens
ccaaacagatgagca

SEQ ID NO: 16021 - DNA, 15 bp, Homo sapiens
gccaaacagatgagc

SEQ ID NO: 16022 - DNA, 15 bp, Homo sapiens
tgccaaacagatgag

SEQ ID NO: 16023 - DNA, 15 bp, Homo sapiens
ctgccaaacagatga

SEQ ID NO: 16024 - DNA, 15 bp, Homo sapiens
cctgccaaacagatg

SEQ ID NO: 16025 - DNA, 15 bp, Homo sapiens
acctgccaaacagat

SEQ ID NO: 16026 - DNA, 15 bp, Homo sapiens
cacctgccaaacaga

SEQ ID NO: 16027 - DNA, 15 bp, Homo sapiens
gcacctgccaaacag

SEQ ID NO: 16028 - DNA, 15 bp, Homo sapiens
ggcacctgccaaaca

SEQ ID NO: 16029 - DNA, 15 bp, Homo sapiens
aggcacctgccaaac

SEQ ID NO: 16030 - DNA, 15 bp, Homo sapiens
taggcacctgccaaa

SEQ ID NO: 16031 - DNA, 15 bp, Homo sapiens
gtaggcacctgccaa

SEQ ID NO: 16032 - DNA, 15 bp, Homo sapiens
tgtaggcacctgcca

SEQ ID NO: 16033 - DNA, 15 bp, Homo sapiens
gtgtaggcacctgcc

SEQ ID NO: 16034 - DNA, 15 bp, Homo sapiens
ggtgtaggcacctgc

SEQ ID NO: 16035 - DNA, 15 bp, Homo sapiens
aggtgtaggcacctg

SEQ ID NO: 16036 - DNA, 15 bp, Homo sapiens
caggtgtaggcacct

SEQ ID NO: 16037 - DNA, 15 bp, Homo sapiens
gcaggtgtaggcacc

SEQ ID NO: 16038 - DNA, 15 bp, Homo sapiens
tgcaggtgtaggcac

SEQ ID NO: 16039 - DNA, 15 bp, Homo sapiens
ctgcaggtgtaggca

SEQ ID NO: 16040 - DNA, 15 bp, Homo sapiens
cctgcaggtgtaggc

SEQ ID NO: 16041 - DNA, 15 bp, Homo sapiens
ccctgcaggtgtagg

SEQ ID NO: 16042 - DNA, 15 bp, Homo sapiens
gccctgcaggtgtag

SEQ ID NO: 16043 - DNA, 15 bp, Homo sapiens
agccctgcaggtgta

SEQ ID NO: 16044 - DNA, 15 bp, Homo sapiens
cagccctgcaggtgt

SEQ ID NO: 16045 - DNA, 15 bp, Homo sapiens
gcagccctgcaggtg

SEQ ID NO: 16046 - DNA, 15 bp, Homo sapiens
ggcagccctgcaggt

SEQ ID NO: 16047 - DNA, 15 bp, Homo sapiens
aggcagccctgcagg

SEQ ID NO: 16048 - DNA, 15 bp, Homo sapiens
aaggcagccctgcag

SEQ ID NO: 16049 - DNA, 15 bp, Homo sapiens
caaggcagccctgca

SEQ ID NO: 16050 - DNA, 15 bp, Homo sapiens
gcaaggcagccctgc

SEQ ID NO: 16051 - DNA, 15 bp, Homo sapiens
tgcaaggcagccctg

SEQ ID NO: 16052 - DNA, 15 bp, Homo sapiens
ctgcaaggcagccct

SEQ ID NO: 16053 - DNA, 15 bp, Homo sapiens
gctgcaaggcagccc

SEQ ID NO: 16054 - DNA, 15 bp, Homo sapiens
agctgcaaggcagcc

SEQ ID NO: 16055 - DNA, 15 bp, Homo sapiens
gagctgcaaggcagc

SEQ ID NO: 16056 - DNA, 15 bp, Homo sapiens
agagctgcaaggcag

SEQ ID NO: 16057 - DNA, 15 bp, Homo sapiens
cagagctgcaaggca

SEQ ID NO: 16058 - DNA, 15 bp, Homo sapiens
ccagagctgcaaggc

SEQ ID NO: 16059 - DNA, 15 bp, Homo sapiens
tccagagctgcaagg

SEQ ID NO: 16060 - DNA, 15 bp, Homo sapiens
atccagagctgcaag

SEQ ID NO: 16061 - DNA, 15 bp, Homo sapiens
gatccagagctgcaa

SEQ ID NO: 16062 - DNA, 15 bp, Homo sapiens
tgatccagagctgca

SEQ ID NO: 16063 - DNA, 15 bp, Homo sapiens
ttgatccagagctgc

SEQ ID NO: 16064 - DNA, 15 bp, Homo sapiens
cttgatccagagctg

SEQ ID NO: 16065 - DNA, 15 bp, Homo sapiens
ccttgatccagagct

SEQ ID NO: 16066 - DNA, 15 bp, Homo sapiens
gccttgatccagagc

SEQ ID NO: 16067 - DNA, 15 bp, Homo sapiens
ggccttgatccagag

SEQ ID NO: 16068 - DNA, 15 bp, Homo sapiens
tggccttgatccaga

SEQ ID NO: 16069 - DNA, 15 bp, Homo sapiens
atggccttgatccag

SEQ ID NO: 16070 - DNA, 15 bp, Homo sapiens
aatggccttgatcca

SEQ ID NO: 16071 - DNA, 15 bp, Homo sapiens
taatggccttgatcc

SEQ ID NO: 16072 - DNA, 15 bp, Homo sapiens
ttaatggccttgatc

SEQ ID NO: 16073 - DNA, 15 bp, Homo sapiens
gttaatggccttgat

SEQ ID NO: 16074 - DNA, 15 bp, Homo sapiens
tgttaatggccttga

SEQ ID NO: 16075 - DNA, 15 bp, Homo sapiens
gtgttaatggccttg

SEQ ID NO: 16076 - DNA, 15 bp, Homo sapiens
tgtgttaatggcctt

SEQ ID NO: 16077 - DNA, 15 bp, Homo sapiens
atgtgttaatggcct

SEQ ID NO: 16078 - DNA, 15 bp, Homo sapiens
tatgtgttaatggcc

SEQ ID NO: 16079 - DNA, 15 bp, Homo sapiens
ttatgtgttaatggc

SEQ ID NO: 16080 - DNA, 15 bp, Homo sapiens
gttatgtgttaatgg

SEQ ID NO: 16081 - DNA, 15 bp, Homo sapiens
ggttatgtgttaatg

SEQ ID NO: 16082 - DNA, 15 bp, Homo sapiens
tggttatgtgttaat

SEQ ID NO: 16083 - DNA, 15 bp, Homo sapiens
atggttatgtgttaa

SEQ ID NO: 16084 - DNA, 15 bp, Homo sapiens
catggttatgtgtta

SEQ ID NO: 16085 - DNA, 15 bp, Homo sapiens
tcatggttatgtgtt

SEQ ID NO: 16086 - DNA, 15 bp, Homo sapiens
ctcatggttatgtgt

SEQ ID NO: 16087 - DNA, 15 bp, Homo sapiens
cctcatggttatgtg

SEQ ID NO: 16088 - DNA, 15 bp, Homo sapiens
tcctcatggttatgt

SEQ ID NO: 16089 - DNA, 15 bp, Homo sapiens
ttcctcatggttatg

SEQ ID NO: 16090 - DNA, 15 bp, Homo sapiens
cttcctcatggttat

SEQ ID NO: 16091 - DNA, 15 bp, Homo sapiens
ccttcctcatggtta

SEQ ID NO: 16092 - DNA, 15 bp, Homo sapiens
tccttcctcatggtt

SEQ ID NO: 16093 - DNA, 15 bp, Homo sapiens
ctccttcctcatggt

SEQ ID NO: 16094 - DNA, 15 bp, Homo sapiens
tctccttcctcatgg

SEQ ID NO: 16095 - DNA, 15 bp, Homo sapiens
atctccttcctcatg

SEQ ID NO: 16096 - DNA, 15 bp, Homo sapiens
catctccttcctcat

SEQ ID NO: 16097 - DNA, 15 bp, Homo sapiens
gcatctccttcctca

SEQ ID NO: 16098 - DNA, 15 bp, Homo sapiens
tgcatctccttcctc

SEQ ID NO: 16099 - DNA, 15 bp, Homo sapiens
ctgcatctccttcct

SEQ ID NO: 16100 - DNA, 15 bp, Homo sapiens
cctgcatctccttcc

SEQ ID NO: 16101 - DNA, 15 bp, Homo sapiens
acctgcatctccttc

SEQ ID NO: 16102 - DNA, 15 bp, Homo sapiens
cacctgcatctcctt

SEQ ID NO: 16103 - DNA, 15 bp, Homo sapiens
gcacctgcatctcct

SEQ ID NO: 16104 - DNA, 15 bp, Homo sapiens
ggcacctgcatctcc

SEQ ID NO: 16105 - DNA, 15 bp, Homo sapiens
aggcacctgcatctc

SEQ ID NO: 16106 - DNA, 15 bp, Homo sapiens
caggcacctgcatct

SEQ ID NO: 16107 - DNA, 15 bp, Homo sapiens
ccaggcacctgcatc

SEQ ID NO: 16108 - DNA, 15 bp, Homo sapiens
tccaggcacctgcat

SEQ ID NO: 16109 - DNA, 15 bp, Homo sapiens
ttccaggcacctgca

SEQ ID NO: 16110 - DNA, 15 bp, Homo sapiens
cttccaggcacctgc

SEQ ID NO: 16111 - DNA, 15 bp, Homo sapiens
ccttccaggcacctg

SEQ ID NO: 16112 - DNA, 15 bp, Homo sapiens
cccttccaggcacct

SEQ ID NO: 16113 - DNA, 15 bp, Homo sapiens
ccccttccaggcacc

SEQ ID NO: 16114 - DNA, 15 bp, Homo sapiens
tccccttccaggcac

SEQ ID NO: 16115 - DNA, 15 bp, Homo sapiens
gtccccttccaggca

SEQ ID NO: 16116 - DNA, 15 bp, Homo sapiens
agtccccttccaggc

SEQ ID NO: 16117 - DNA, 15 bp, Homo sapiens
aagtccccttccagg

SEQ ID NO: 16118 - DNA, 15 bp, Homo sapiens
gaagtccccttccag

SEQ ID NO: 16119 - DNA, 15 bp, Homo sapiens
tgaagtccccttcca

SEQ ID NO: 16120 - DNA, 15 bp, Homo sapiens
ctgaagtccccttcc

SEQ ID NO: 16121 - DNA, 15 bp, Homo sapiens
cctgaagtccccttc

SEQ ID NO: 16122 - DNA, 15 bp, Homo sapiens
tcctgaagtcccctt

SEQ ID NO: 16123 - DNA, 15 bp, Homo sapiens
ctcctgaagtcccct

SEQ ID NO: 16124 - DNA, 15 bp, Homo sapiens
cctcctgaagtcccc

SEQ ID NO: 16125 - DNA, 15 bp, Homo sapiens
acctcctgaagtccc

SEQ ID NO: 16126 - DNA, 15 bp, Homo sapiens
gacctcctgaagtcc

SEQ ID NO: 16127 - DNA, 15 bp, Homo sapiens
agacctcctgaagtc

SEQ ID NO: 16128 - DNA, 15 bp, Homo sapiens
tagacctcctgaagt

SEQ ID NO: 16129 - DNA, 15 bp, Homo sapiens
ttagacctcctgaag

SEQ ID NO: 16130 - DNA, 15 bp, Homo sapiens
gttagacctcctgaa

SEQ ID NO: 16131 - DNA, 15 bp, Homo sapiens
agttagacctcctga

SEQ ID NO: 16132 - DNA, 15 bp, Homo sapiens
cagttagacctcctg

SEQ ID NO: 16133 - DNA, 15 bp, Homo sapiens
ccagttagacctcct

SEQ ID NO: 16134 - DNA, 15 bp, Homo sapiens
cccagttagacctcc

SEQ ID NO: 16135 - DNA, 15 bp, Homo sapiens
ccccagttagacctc

SEQ ID NO: 16136 - DNA, 15 bp, Homo sapiens
accccagttagacct

SEQ ID NO: 16137 - DNA, 15 bp, Homo sapiens
aaccccagttagacc

SEQ ID NO: 16138 - DNA, 15 bp, Homo sapiens
aaaccccagttagac

SEQ ID NO: 16139 - DNA, 15 bp, Homo sapiens
aaaaccccagttaga

SEQ ID NO: 16140 - DNA, 15 bp, Homo sapiens
aaaaaccccagttag

SEQ ID NO: 16141 - DNA, 15 bp, Homo sapiens
aaaaaaccccagtta

SEQ ID NO: 16142 - DNA, 15 bp, Homo sapiens
aaaaaaaccccagtt

SEQ ID NO: 16143 - DNA, 15 bp, Homo sapiens
aaaaaaaaccccagt

SEQ ID NO: 16144 - DNA, 15 bp, Homo sapiens
taaaaaaaaccccag

SEQ ID NO: 16145 - DNA, 15 bp, Homo sapiens
ttaaaaaaaacccca

SEQ ID NO: 16146 - DNA, 15 bp, Homo sapiens
tttaaaaaaaacccc

SEQ ID NO: 16147 - DNA, 15 bp, Homo sapiens
atttaaaaaaaaccc

SEQ ID NO: 16148 - DNA, 15 bp, Homo sapiens
gatttaaaaaaaacc

SEQ ID NO: 16149 - DNA, 15 bp, Homo sapiens
agatttaaaaaaaac

SEQ ID NO: 16150 - DNA, 15 bp, Homo sapiens
gagatttaaaaaaaa

SEQ ID NO: 16151 - DNA, 15 bp, Homo sapiens
agagatttaaaaaaa

SEQ ID NO: 16152 - DNA, 15 bp, Homo sapiens
aagagatttaaaaaa

SEQ ID NO: 16153 - DNA, 15 bp, Homo sapiens
caagagatttaaaaa

SEQ ID NO: 16154 - DNA, 15 bp, Homo sapiens
tcaagagatttaaaa

SEQ ID NO: 16155 - DNA, 15 bp, Homo sapiens
ctcaagagatttaaa

SEQ ID NO: 16156 - DNA, 15 bp, Homo sapiens
cctcaagagatttaa

SEQ ID NO: 16157 - DNA, 15 bp, Homo sapiens
tcctcaagagattta

SEQ ID NO: 16158 - DNA, 15 bp, Homo sapiens
ctcctcaagagattt

SEQ ID NO: 16159 - DNA, 15 bp, Homo sapiens
cctcctcaagagatt

SEQ ID NO: 16160 - DNA, 15 bp, Homo sapiens
tcctcctcaagagat

SEQ ID NO: 16161 - DNA, 15 bp, Homo sapiens
ttcctcctcaagaga

SEQ ID NO: 16162 - DNA, 15 bp, Homo sapiens
tttcctcctcaagag

SEQ ID NO: 16163 - DNA, 15 bp, Homo sapiens
atttcctcctcaaga

SEQ ID NO: 16164 - DNA, 15 bp, Homo sapiens
catttcctcctcaag

SEQ ID NO: 16165 - DNA, 15 bp, Homo sapiens
tcatttcctcctcaa

SEQ ID NO: 16166 - DNA, 15 bp, Homo sapiens
ttcatttcctcctca

SEQ ID NO: 16167 - DNA, 15 bp, Homo sapiens
cttcatttcctcctc

SEQ ID NO: 16168 - DNA, 15 bp, Homo sapiens
tcttcatttcctcct

SEQ ID NO: 16169 - DNA, 15 bp, Homo sapiens
atcttcatttcctcc

SEQ ID NO: 16170 - DNA, 15 bp, Homo sapiens
catcttcatttcctc

SEQ ID NO: 16171 - DNA, 15 bp, Homo sapiens
gcatcttcatttcct

SEQ ID NO: 16172 - DNA, 15 bp, Homo sapiens
tgcatcttcatttcc

SEQ ID NO: 16173 - DNA, 15 bp, Homo sapiens
gtgcatcttcatttc

SEQ ID NO: 16174 - DNA, 15 bp, Homo sapiens
tgtgcatcttcattt

SEQ ID NO: 16175 - DNA, 15 bp, Homo sapiens
gtgtgcatcttcatt

SEQ ID NO: 16176 - DNA, 15 bp, Homo sapiens
tgtgtgcatcttcat

SEQ ID NO: 16177 - DNA, 15 bp, Homo sapiens
ttgtgtgcatcttca

SEQ ID NO: 16178 - DNA, 15 bp, Homo sapiens
tttgtgtgcatcttc

SEQ ID NO: 16179 - DNA, 15 bp, Homo sapiens
gtttgtgtgcatctt

SEQ ID NO: 16180 - DNA, 15 bp, Homo sapiens
agtttgtgtgcatct

SEQ ID NO: 16181 - DNA, 15 bp, Homo sapiens
tagtttgtgtgcatc

SEQ ID NO: 16182 - DNA, 15 bp, Homo sapiens
ttagtttgtgtgcat

SEQ ID NO: 16183 - DNA, 15 bp, Homo sapiens
cttagtttgtgtgca

SEQ ID NO: 16184 - DNA, 15 bp, Homo sapiens
ccttagtttgtgtgc

SEQ ID NO: 16185 - DNA, 15 bp, Homo sapiens
gccttagtttgtgtg

SEQ ID NO: 16186 - DNA, 15 bp, Homo sapiens
agccttagtttgtgt

SEQ ID NO: 16187 - DNA, 15 bp, Homo sapiens
aagccttagtttgtg

SEQ ID NO: 16188 - DNA, 15 bp, Homo sapiens
caagccttagtttgt

SEQ ID NO: 16189 - DNA, 15 bp, Homo sapiens
ccaagccttagtttg

SEQ ID NO: 16190 - DNA, 15 bp, Homo sapiens
gccaagccttagttt

SEQ ID NO: 16191 - DNA, 15 bp, Homo sapiens
ggccaagccttagtt

SEQ ID NO: 16192 - DNA, 15 bp, Homo sapiens
gggccaagccttagt

SEQ ID NO: 16193 - DNA, 15 bp, Homo sapiens
agggccaagccttag

SEQ ID NO: 16194 - DNA, 15 bp, Homo sapiens
cagggccaagcctta

SEQ ID NO: 16195 - DNA, 15 bp, Homo sapiens
gcagggccaagcctt

SEQ ID NO: 16196 - DNA, 15 bp, Homo sapiens
agcagggccaagcct

SEQ ID NO: 16197 - DNA, 15 bp, Homo sapiens
cagcagggccaagcc

SEQ ID NO: 16198 - DNA, 15 bp, Homo sapiens
gcagcagggccaagc

SEQ ID NO: 16199 - DNA, 15 bp, Homo sapiens
tgcagcagggccaag

SEQ ID NO: 16200 - DNA, 15 bp, Homo sapiens
ctgcagcagggccaa

SEQ ID NO: 16201 - DNA, 15 bp, Homo sapiens
tctgcagcagggcca

SEQ ID NO: 16202 - DNA, 15 bp, Homo sapiens
gtctgcagcagggcc

SEQ ID NO: 16203 - DNA, 15 bp, Homo sapiens
cgtctgcagcagggc

SEQ ID NO: 16204 - DNA, 15 bp, Homo sapiens
acgtctgcagcaggg

SEQ ID NO: 16205 - DNA, 15 bp, Homo sapiens
aacgtctgcagcagg

SEQ ID NO: 16206 - DNA, 15 bp, Homo sapiens
gaacgtctgcagcag

SEQ ID NO: 16207 - DNA, 15 bp, Homo sapiens
tgaacgtctgcagca

SEQ ID NO: 16208 - DNA, 15 bp, Homo sapiens
ttgaacgtctgcagc

SEQ ID NO: 16209 - DNA, 15 bp, Homo sapiens
tttgaacgtctgcag

SEQ ID NO: 16210 - DNA, 15 bp, Homo sapiens
ttttgaacgtctgca

SEQ ID NO: 16211 - DNA, 15 bp, Homo sapiens
tttttgaacgtctgc

SEQ ID NO: 16212 - DNA, 15 bp, Homo sapiens
atttttgaacgtctg

SEQ ID NO: 16213 - DNA, 15 bp, Homo sapiens
tatttttgaacgtct

SEQ ID NO: 16214 - DNA, 15 bp, Homo sapiens
ttatttttgaacgtc

SEQ ID NO: 16215 - DNA, 15 bp, Homo sapiens
attatttttgaacgt

SEQ ID NO: 16216 - DNA, 15 bp, Homo sapiens
tattatttttgaacg

SEQ ID NO: 16217 - DNA, 15 bp, Homo sapiens
ttattatttttgaac

SEQ ID NO: 16218 - DNA, 15 bp, Homo sapiens
cttattatttttgaa

SEQ ID NO: 16219 - DNA, 15 bp, Homo sapiens
gcttattatttttga

SEQ ID NO: 16220 - DNA, 15 bp, Homo sapiens
agcttattatttttg

SEQ ID NO: 16221 - DNA, 15 bp, Homo sapiens
aagcttattattttt

SEQ ID NO: 16222 - DNA, 15 bp, Homo sapiens
gaagcttattatttt

SEQ ID NO: 16223 - DNA, 15 bp, Homo sapiens
agaagcttattattt

SEQ ID NO: 16224 - DNA, 15 bp, Homo sapiens
gagaagcttattatt

SEQ ID NO: 16225 - DNA, 15 bp, Homo sapiens
tgagaagcttattat

SEQ ID NO: 16226 - DNA, 15 bp, Homo sapiens
atgagaagcttatta

SEQ ID NO: 16227 - DNA, 15 bp, Homo sapiens
tatgagaagcttatt

SEQ ID NO: 16228 - DNA, 15 bp, Homo sapiens
atatgagaagcttat

SEQ ID NO: 16229 - DNA, 15 bp, Homo sapiens
gatatgagaagctta

SEQ ID NO: 16230 - DNA, 15 bp, Homo sapiens
tgatatgagaagctt

SEQ ID NO: 16231 - DNA, 15 bp, Homo sapiens
atgatatgagaagct

SEQ ID NO: 16232 - DNA, 15 bp, Homo sapiens
gatgatatgagaagc

SEQ ID NO: 16233 - DNA, 15 bp, Homo sapiens
ggatgatatgagaag

SEQ ID NO: 16234 - DNA, 15 bp, Homo sapiens
aggatgatatgagaa

SEQ ID NO: 16235 - DNA, 15 bp, Homo sapiens
aaggatgatatgaga

SEQ ID NO: 16236 - DNA, 15 bp, Homo sapiens
gaaggatgatatgag

SEQ ID NO: 16237 - DNA, 15 bp, Homo sapiens
tgaaggatgatatga

SEQ ID NO: 16238 - DNA, 15 bp, Homo sapiens
gtgaaggatgatatg

SEQ ID NO: 16239 - DNA, 15 bp, Homo sapiens
agtgaaggatgatat

SEQ ID NO: 16240 - DNA, 15 bp, Homo sapiens
tagtgaaggatgata

SEQ ID NO: 16241 - DNA, 15 bp, Homo sapiens
ctagtgaaggatgat

SEQ ID NO: 16242 - DNA, 15 bp, Homo sapiens
tctagtgaaggatga

SEQ ID NO: 16243 - DNA, 15 bp, Homo sapiens
gtctagtgaaggatg

SEQ ID NO: 16244 - DNA, 15 bp, Homo sapiens
agtctagtgaaggat

SEQ ID NO: 16245 - DNA, 15 bp, Homo sapiens
aagtctagtgaagga

SEQ ID NO: 16246 - DNA, 15 bp, Homo sapiens
gaagtctagtgaagg

SEQ ID NO: 16247 - DNA, 15 bp, Homo sapiens
agaagtctagtgaag

SEQ ID NO: 16248 - DNA, 15 bp, Homo sapiens
tagaagtctagtgaa

SEQ ID NO: 16249 - DNA, 15 bp, Homo sapiens
gtagaagtctagtga

SEQ ID NO: 16250 - DNA, 15 bp, Homo sapiens
ggtagaagtctagtg

SEQ ID NO: 16251 - DNA, 15 bp, Homo sapiens
tggtagaagtctagt

SEQ ID NO: 16252 - DNA, 15 bp, Homo sapiens
gtggtagaagtctag

SEQ ID NO: 16253 - DNA, 15 bp, Homo sapiens
ggtggtagaagtcta

SEQ ID NO: 16254 - DNA, 15 bp, Homo sapiens
aggtggtagaagtct

SEQ ID NO: 16255 - DNA, 15 bp, Homo sapiens
caggtggtagaagtc

SEQ ID NO: 16256 - DNA, 15 bp, Homo sapiens
tcaggtggtagaagt

SEQ ID NO: 16257 - DNA, 15 bp, Homo sapiens
ttcaggtggtagaag

SEQ ID NO: 16258 - DNA, 15 bp, Homo sapiens
tttcaggtggtagaa

SEQ ID NO: 16259 - DNA, 15 bp, Homo sapiens
gtttcaggtggtaga

SEQ ID NO: 16260 - DNA, 15 bp, Homo sapiens
tgtttcaggtggtag

SEQ ID NO: 16261 - DNA, 15 bp, Homo sapiens
ttgtttcaggtggta

SEQ ID NO: 16262 - DNA, 15 bp, Homo sapiens
tttgtttcaggtggt

SEQ ID NO: 16263 - DNA, 15 bp, Homo sapiens
ctttgtttcaggtgg

SEQ ID NO: 16264 - DNA, 15 bp, Homo sapiens
actttgtttcaggtg

SEQ ID NO: 16265 - DNA, 15 bp, Homo sapiens
cactttgtttcaggt

SEQ ID NO: 16266 - DNA, 15 bp, Homo sapiens
ccactttgtttcagg

SEQ ID NO: 16267 - DNA, 15 bp, Homo sapiens
tccactttgtttcag

SEQ ID NO: 16268 - DNA, 15 bp, Homo sapiens
ctccactttgtttca

SEQ ID NO: 16269 - DNA, 15 bp, Homo sapiens
tctccactttgtttc

SEQ ID NO: 16270 - DNA, 15 bp, Homo sapiens
ctctccactttgttt

SEQ ID NO: 16271 - DNA, 15 bp, Homo sapiens
cctctccactttgtt

SEQ ID NO: 16272 - DNA, 15 bp, Homo sapiens
acctctccactttgt

SEQ ID NO: 16273 - DNA, 15 bp, Homo sapiens
aacctctccactttg

SEQ ID NO: 16274 - DNA, 15 bp, Homo sapiens
aaacctctccacttt

SEQ ID NO: 16275 - DNA, 15 bp, Homo sapiens
aaaacctctccactt

SEQ ID NO: 16276 - DNA, 15 bp, Homo sapiens
taaaacctctccact

SEQ ID NO: 16277 - DNA, 15 bp, Homo sapiens
ctaaaacctctccac

SEQ ID NO: 16278 - DNA, 15 bp, Homo sapiens
actaaaacctctcca

SEQ ID NO: 16279 - DNA, 15 bp, Homo sapiens
aactaaaacctctcc

SEQ ID NO: 16280 - DNA, 15 bp, Homo sapiens
caactaaaacctctc

SEQ ID NO: 16281 - DNA, 15 bp, Homo sapiens
acaactaaaacctct

SEQ ID NO: 16282 - DNA, 15 bp, Homo sapiens
cacaactaaaacctc

SEQ ID NO: 16283 - DNA, 15 bp, Homo sapiens
ccacaactaaaacct

SEQ ID NO: 16284 - DNA, 15 bp, Homo sapiens
accacaactaaaacc

SEQ ID NO: 16285 - DNA, 15 bp, Homo sapiens
aaccacaactaaaac

SEQ ID NO: 16286 - DNA, 15 bp, Homo sapiens
taaccacaactaaaa

SEQ ID NO: 16287 - DNA, 15 bp, Homo sapiens
ttaaccacaactaaa

SEQ ID NO: 16288 - DNA, 15 bp, Homo sapiens
tttaaccacaactaa

SEQ ID NO: 16289 - DNA, 15 bp, Homo sapiens
gtttaaccacaacta

SEQ ID NO: 16290 - DNA, 15 bp, Homo sapiens
agtttaaccacaact

SEQ ID NO: 16291 - DNA, 15 bp, Homo sapiens
tagtttaaccacaac

SEQ ID NO: 16292 - DNA, 15 bp, Homo sapiens
atagtttaaccacaa

SEQ ID NO: 16293 - DNA, 15 bp, Homo sapiens
catagtttaaccaca

SEQ ID NO: 16294 - DNA, 15 bp, Homo sapiens
acatagtttaaccac

SEQ ID NO: 16295 - DNA, 15 bp, Homo sapiens
aacatagtttaacca

SEQ ID NO: 16296 - DNA, 15 bp, Homo sapiens
taacatagtttaacc

SEQ ID NO: 16297 - DNA, 15 bp, Homo sapiens
gtaacatagtttaac

SEQ ID NO: 16298 - DNA, 15 bp, Homo sapiens
cgtaacatagtttaa

SEQ ID NO: 16299 - DNA, 15 bp, Homo sapiens
acgtaacatagttta

SEQ ID NO: 16300 - DNA, 15 bp, Homo sapiens
gacgtaacatagttt

SEQ ID NO: 16301 - DNA, 15 bp, Homo sapiens
agacgtaacatagtt

SEQ ID NO: 16302 - DNA, 15 bp, Homo sapiens
gagacgtaacatagt

SEQ ID NO: 16303 - DNA, 15 bp, Homo sapiens
tgagacgtaacatag

SEQ ID NO: 16304 - DNA, 15 bp, Homo sapiens
gtgagacgtaacata

SEQ ID NO: 16305 - DNA, 15 bp, Homo sapiens
agtgagacgtaacat

SEQ ID NO: 16306 - DNA, 15 bp, Homo sapiens
aagtgagacgtaaca

SEQ ID NO: 16307 - DNA, 15 bp, Homo sapiens
taagtgagacgtaac

SEQ ID NO: 16308 - DNA, 15 bp, Homo sapiens
ctaagtgagacgtaa

SEQ ID NO: 16309 - DNA, 15 bp, Homo sapiens
gctaagtgagacgta

SEQ ID NO: 16310 - DNA, 15 bp, Homo sapiens
agctaagtgagacgt

SEQ ID NO: 16311 - DNA, 15 bp, Homo sapiens
aagctaagtgagacg

SEQ ID NO: 16312 - DNA, 15 bp, Homo sapiens
aaagctaagtgagac

SEQ ID NO: 16313 - DNA, 15 bp, Homo sapiens
aaaagctaagtgaga

SEQ ID NO: 16314 - DNA, 15 bp, Homo sapiens
aaaaagctaagtgag

SEQ ID NO: 16315 - DNA, 15 bp, Homo sapiens
aaaaaagctaagtga

SEQ ID NO: 16316 - DNA, 15 bp, Homo sapiens
gaaaaaagctaagtg

SEQ ID NO: 16317 - DNA, 15 bp, Homo sapiens
agaaaaaagctaagt

SEQ ID NO: 16318 - DNA, 15 bp, Homo sapiens
cagaaaaaagctaag

SEQ ID NO: 16319 - DNA, 15 bp, Homo sapiens
tcagaaaaaagctaa

SEQ ID NO: 16320 - DNA, 15 bp, Homo sapiens
ctcagaaaaaagcta

SEQ ID NO: 16321 - DNA, 15 bp, Homo sapiens
cctcagaaaaaagct

SEQ ID NO: 16322 - DNA, 15 bp, Homo sapiens
gcctcagaaaaaagc

SEQ ID NO: 16323 - DNA, 15 bp, Homo sapiens
agcctcagaaaaaag

SEQ ID NO: 16324 - DNA, 15 bp, Homo sapiens
cagcctcagaaaaaa

SEQ ID NO: 16325 - DNA, 15 bp, Homo sapiens
tcagcctcagaaaaa

SEQ ID NO: 16326 - DNA, 15 bp, Homo sapiens
ttcagcctcagaaaa

SEQ ID NO: 16327 - DNA, 15 bp, Homo sapiens
tttcagcctcagaaa

SEQ ID NO: 16328 - DNA, 15 bp, Homo sapiens
gtttcagcctcagaa

SEQ ID NO: 16329 - DNA, 15 bp, Homo sapiens
tgtttcagcctcaga

SEQ ID NO: 16330 - DNA, 15 bp, Homo sapiens
atgtttcagcctcag

SEQ ID NO: 16331 - DNA, 15 bp, Homo sapiens
aatgtttcagcctca

SEQ ID NO: 16332 - DNA, 15 bp, Homo sapiens
aaatgtttcagcctc

SEQ ID NO: 16333 - DNA, 15 bp, Homo sapiens
aaaatgtttcagcct

SEQ ID NO: 16334 - DNA, 15 bp, Homo sapiens
caaaatgtttcagcc

SEQ ID NO: 16335 - DNA, 15 bp, Homo sapiens
ccaaaatgtttcagc

SEQ ID NO: 16336 - DNA, 15 bp, Homo sapiens
tccaaaatgtttcag

SEQ ID NO: 16337 - DNA, 15 bp, Homo sapiens
ttccaaaatgtttca

SEQ ID NO: 16338 - DNA, 15 bp, Homo sapiens
gttccaaaatgtttc

SEQ ID NO: 16339 - DNA, 15 bp, Homo sapiens
tgttccaaaatgttt

SEQ ID NO: 16340 - DNA, 15 bp, Homo sapiens
ctgttccaaaatgtt

SEQ ID NO: 16341 - DNA, 15 bp, Homo sapiens
actgttccaaaatgt

SEQ ID NO: 16342 - DNA, 15 bp, Homo sapiens
cactgttccaaaatg

SEQ ID NO: 16343 - DNA, 15 bp, Homo sapiens
acactgttccaaaat

SEQ ID NO: 16344 - DNA, 15 bp, Homo sapiens
cacactgttccaaaa

SEQ ID NO: 16345 - DNA, 15 bp, Homo sapiens
acacactgttccaaa

SEQ ID NO: 16346 - DNA, 15 bp, Homo sapiens
aacacactgttccaa

SEQ ID NO: 16347 - DNA, 15 bp, Homo sapiens
aaacacactgttcca

SEQ ID NO: 16348 - DNA, 15 bp, Homo sapiens
gaaacacactgttcc

SEQ ID NO: 16349 - DNA, 15 bp, Homo sapiens
agaaacacactgttc

SEQ ID NO: 16350 - DNA, 15 bp, Homo sapiens
aagaaacacactgtt

SEQ ID NO: 16351 - DNA, 15 bp, Homo sapiens
gaagaaacacactgt

SEQ ID NO: 16352 - DNA, 15 bp, Homo sapiens
agaagaaacacactg

SEQ ID NO: 16353 - DNA, 15 bp, Homo sapiens
gagaagaaacacact

SEQ ID NO: 16354 - DNA, 15 bp, Homo sapiens
agagaagaaacacac

SEQ ID NO: 16355 - DNA, 15 bp, Homo sapiens
cagagaagaaacaca

SEQ ID NO: 16356 - DNA, 15 bp, Homo sapiens
tcagagaagaaacac

SEQ ID NO: 16357 - DNA, 15 bp, Homo sapiens
ttcagagaagaaaca

SEQ ID NO: 16358 - DNA, 15 bp, Homo sapiens
attcagagaagaaac

SEQ ID NO: 16359 - DNA, 15 bp, Homo sapiens
gattcagagaagaaa

SEQ ID NO: 16360 - DNA, 15 bp, Homo sapiens
agattcagagaagaa

SEQ ID NO: 16361 - DNA, 15 bp, Homo sapiens
tagattcagagaaga

SEQ ID NO: 16362 - DNA, 15 bp, Homo sapiens
ttagattcagagaag

SEQ ID NO: 16363 - DNA, 15 bp, Homo sapiens
attagattcagagaa

SEQ ID NO: 16364 - DNA, 15 bp, Homo sapiens
tattagattcagaga

SEQ ID NO: 16365 - DNA, 15 bp, Homo sapiens
atattagattcagag

SEQ ID NO: 16366 - DNA, 15 bp, Homo sapiens
aatattagattcaga

SEQ ID NO: 16367 - DNA, 15 bp, Homo sapiens
gaatattagattcag

SEQ ID NO: 16368 - DNA, 15 bp, Homo sapiens
ggaatattagattca

SEQ ID NO: 16369 - DNA, 15 bp, Homo sapiens
tggaatattagattc

SEQ ID NO: 16370 - DNA, 15 bp, Homo sapiens
ttggaatattagatt

SEQ ID NO: 16371 - DNA, 15 bp, Homo sapiens
gttggaatattagat

SEQ ID NO: 16372 - DNA, 15 bp, Homo sapiens
agttggaatattaga

SEQ ID NO: 16373 - DNA, 15 bp, Homo sapiens
tagttggaatattag

SEQ ID NO: 16374 - DNA, 15 bp, Homo sapiens
gtagttggaatatta

SEQ ID NO: 16375 - DNA, 15 bp, Homo sapiens
agtagttggaatatt

SEQ ID NO: 16376 - DNA, 15 bp, Homo sapiens
cagtagttggaatat

SEQ ID NO: 16377 - DNA, 15 bp, Homo sapiens
ccagtagttggaata

SEQ ID NO: 16378 - DNA, 15 bp, Homo sapiens
accagtagttggaat

SEQ ID NO: 16379 - DNA, 15 bp, Homo sapiens
caccagtagttggaa

SEQ ID NO: 16380 - DNA, 15 bp, Homo sapiens
gcaccagtagttgga

SEQ ID NO: 16381 - DNA, 15 bp, Homo sapiens
ggcaccagtagttgg

SEQ ID NO: 16382 - DNA, 15 bp, Homo sapiens
aggcaccagtagttg

SEQ ID NO: 16383 - DNA, 15 bp, Homo sapiens
gaggcaccagtagtt

SEQ ID NO: 16384 - DNA, 15 bp, Homo sapiens
tgaggcaccagtagt

SEQ ID NO: 16385 - DNA, 15 bp, Homo sapiens
gtgaggcaccagtag

SEQ ID NO: 16386 - DNA, 15 bp, Homo sapiens
tgtgaggcaccagta

SEQ ID NO: 16387 - DNA, 15 bp, Homo sapiens
gtgtgaggcaccagt

SEQ ID NO: 16388 - DNA, 15 bp, Homo sapiens
tgtgtgaggcaccag

SEQ ID NO: 16389 - DNA, 15 bp, Homo sapiens
ctgtgtgaggcacca

SEQ ID NO: 16390 - DNA, 15 bp, Homo sapiens
tctgtgtgaggcacc

SEQ ID NO: 16391 - DNA, 15 bp, Homo sapiens
atctgtgtgaggcac

SEQ ID NO: 16392 - DNA, 15 bp, Homo sapiens
catctgtgtgaggca

SEQ ID NO: 16393 - DNA, 15 bp, Homo sapiens
acatctgtgtgaggc

SEQ ID NO: 16394 - DNA, 15 bp, Homo sapiens
gacatctgtgtgagg

SEQ ID NO: 16395 - DNA, 15 bp, Homo sapiens
tgacatctgtgtgag

SEQ ID NO: 16396 - DNA, 15 bp, Homo sapiens
ctgacatctgtgtga

SEQ ID NO: 16397 - DNA, 15 bp, Homo sapiens
tctgacatctgtgtg

SEQ ID NO: 16398 - DNA, 15 bp, Homo sapiens
ttctgacatctgtgt

SEQ ID NO: 16399 - DNA, 15 bp, Homo sapiens
gttctgacatctgtg

SEQ ID NO: 16400 - DNA, 15 bp, Homo sapiens
tgttctgacatctgt

SEQ ID NO: 16401 - DNA, 15 bp, Homo sapiens
ttgttctgacatctg

SEQ ID NO: 16402 - DNA, 15 bp, Homo sapiens
attgttctgacatct

SEQ ID NO: 16403 - DNA, 15 bp, Homo sapiens
gattgttctgacatc

SEQ ID NO: 16404 - DNA, 15 bp, Homo sapiens
agattgttctgacat

SEQ ID NO: 16405 - DNA, 15 bp, Homo sapiens
cagattgttctgaca

SEQ ID NO: 16406 - DNA, 15 bp, Homo sapiens
acagattgttctgac

SEQ ID NO: 16407 - DNA, 15 bp, Homo sapiens
gacagattgttctga

SEQ ID NO: 16408 - DNA, 15 bp, Homo sapiens
agacagattgttctg

SEQ ID NO: 16409 - DNA, 15 bp, Homo sapiens
gagacagattgttct

SEQ ID NO: 16410 - DNA, 15 bp, Homo sapiens
agagacagattgttc

SEQ ID NO: 16411 - DNA, 15 bp, Homo sapiens
aagagacagattgtt

SEQ ID NO: 16412 - DNA, 15 bp, Homo sapiens
gaagagacagattgt

SEQ ID NO: 16413 - DNA, 15 bp, Homo sapiens
agaagagacagattg

SEQ ID NO: 16414 - DNA, 15 bp, Homo sapiens
gagaagagacagatt

SEQ ID NO: 16415 - DNA, 15 bp, Homo sapiens
agagaagagacagat

SEQ ID NO: 16416 - DNA, 15 bp, Homo sapiens
cagagaagagacaga

SEQ ID NO: 16417 - DNA, 15 bp, Homo sapiens
acagagaagagacag

SEQ ID NO: 16418 - DNA, 15 bp, Homo sapiens
cacagagaagagaca

SEQ ID NO: 16419 - DNA, 15 bp, Homo sapiens
ccacagagaagagac

SEQ ID NO: 16420 - DNA, 15 bp, Homo sapiens
accacagagaagaga

SEQ ID NO: 16421 - DNA, 15 bp, Homo sapiens
aaccacagagaagag

SEQ ID NO: 16422 - DNA, 15 bp, Homo sapiens
caaccacagagaaga

SEQ ID NO: 16423 - DNA, 15 bp, Homo sapiens
ccaaccacagagaag

SEQ ID NO: 16424 - DNA, 15 bp, Homo sapiens
gccaaccacagagaa

SEQ ID NO: 16425 - DNA, 15 bp, Homo sapiens
ggccaaccacagaga

SEQ ID NO: 16426 - DNA, 15 bp, Homo sapiens
tggccaaccacagag

SEQ ID NO: 16427 - DNA, 15 bp, Homo sapiens
atggccaaccacaga

SEQ ID NO: 16428 - DNA, 15 bp, Homo sapiens
tatggccaaccacag

SEQ ID NO: 16429 - DNA, 15 bp, Homo sapiens
ctatggccaaccaca

SEQ ID NO: 16430 - DNA, 15 bp, Homo sapiens
tctatggccaaccac

SEQ ID NO: 16431 - DNA, 15 bp, Homo sapiens
ttctatggccaacca

SEQ ID NO: 16432 - DNA, 15 bp, Homo sapiens
gttctatggccaacc

SEQ ID NO: 16433 - DNA, 15 bp, Homo sapiens
tgttctatggccaac

SEQ ID NO: 16434 - DNA, 15 bp, Homo sapiens
ctgttctatggccaa

SEQ ID NO: 16435 - DNA, 15 bp, Homo sapiens
actgttctatggcca

SEQ ID NO: 16436 - DNA, 15 bp, Homo sapiens
cactgttctatggcc

SEQ ID NO: 16437 - DNA, 15 bp, Homo sapiens
tcactgttctatggc

SEQ ID NO: 16438 - DNA, 15 bp, Homo sapiens
gtcactgttctatgg

SEQ ID NO: 16439 - DNA, 15 bp, Homo sapiens
cgtcactgttctatg

SEQ ID NO: 16440 - DNA, 15 bp, Homo sapiens
tcgtcactgttctat

SEQ ID NO: 16441 - DNA, 15 bp, Homo sapiens
atcgtcactgttcta

SEQ ID NO: 16442 - DNA, 15 bp, Homo sapiens
aatcgtcactgttct

SEQ ID NO: 16443 - DNA, 15 bp, Homo sapiens
aaatcgtcactgttc

SEQ ID NO: 16444 - DNA, 15 bp, Homo sapiens
gaaatcgtcactgtt

SEQ ID NO: 16445 - DNA, 15 bp, Homo sapiens
tgaaatcgtcactgt

SEQ ID NO: 16446 - DNA, 15 bp, Homo sapiens
ctgaaatcgtcactg

SEQ ID NO: 16447 - DNA, 15 bp, Homo sapiens
tctgaaatcgtcact

SEQ ID NO: 16448 - DNA, 15 bp, Homo sapiens
ttctgaaatcgtcac

SEQ ID NO: 16449 - DNA, 15 bp, Homo sapiens
cttctgaaatcgtca

SEQ ID NO: 16450 - DNA, 15 bp, Homo sapiens
acttctgaaatcgtc

SEQ ID NO: 16451 - DNA, 15 bp, Homo sapiens
cacttctgaaatcgt

SEQ ID NO: 16452 - DNA, 15 bp, Homo sapiens
ccacttctgaaatcg

SEQ ID NO: 16453 - DNA, 15 bp, Homo sapiens
gccacttctgaaatc

SEQ ID NO: 16454 - DNA, 15 bp, Homo sapiens
tgccacttctgaaat

SEQ ID NO: 16455 - DNA, 15 bp, Homo sapiens
ctgccacttctgaaa

SEQ ID NO: 16456 - DNA, 15 bp, Homo sapiens
cctgccacttctgaa

SEQ ID NO: 16457 - DNA, 15 bp, Homo sapiens
acctgccacttctga

SEQ ID NO: 16458 - DNA, 15 bp, Homo sapiens
cacctgccacttctg

SEQ ID NO: 16459 - DNA, 15 bp, Homo sapiens
ccacctgccacttct

SEQ ID NO: 16460 - DNA, 15 bp, Homo sapiens
cccacctgccacttc

SEQ ID NO: 16461 - DNA, 15 bp, Homo sapiens
tcccacctgccactt

SEQ ID NO: 16462 - DNA, 15 bp, Homo sapiens
ctcccacctgccact

SEQ ID NO: 16463 - DNA, 15 bp, Homo sapiens
actcccacctgccac

SEQ ID NO: 16464 - DNA, 15 bp, Homo sapiens
aactcccacctgcca

SEQ ID NO: 16465 - DNA, 15 bp, Homo sapiens
caactcccacctgcc

SEQ ID NO: 16466 - DNA, 15 bp, Homo sapiens
acaactcccacctgc

SEQ ID NO: 16467 - DNA, 15 bp, Homo sapiens
aacaactcccacctg

SEQ ID NO: 16468 - DNA, 15 bp, Homo sapiens
gaacaactcccacct

SEQ ID NO: 16469 - DNA, 15 bp, Homo sapiens
ggaacaactcccacc

SEQ ID NO: 16470 - DNA, 15 bp, Homo sapiens
gggaacaactcccac

SEQ ID NO: 16471 - DNA, 15 bp, Homo sapiens
ggggaacaactccca

SEQ ID NO: 16472 - DNA, 15 bp, Homo sapiens
tggggaacaactccc

SEQ ID NO: 16473 - DNA, 15 bp, Homo sapiens
ctggggaacaactcc

SEQ ID NO: 16474 - DNA, 15 bp, Homo sapiens
actggggaacaactc

SEQ ID NO: 16475 - DNA, 15 bp, Homo sapiens
aactggggaacaact

SEQ ID NO: 16476 - DNA, 15 bp, Homo sapiens
aaactggggaacaac

SEQ ID NO: 16477 - DNA, 15 bp, Homo sapiens
taaactggggaacaa

SEQ ID NO: 16478 - DNA, 15 bp, Homo sapiens
ctaaactggggaaca

SEQ ID NO: 16479 - DNA, 15 bp, Homo sapiens
gctaaactggggaac

SEQ ID NO: 16480 - DNA, 15 bp, Homo sapiens
ggctaaactggggaa

SEQ ID NO: 16481 - DNA, 15 bp, Homo sapiens
tggctaaactgggga

SEQ ID NO: 16482 - DNA, 15 bp, Homo sapiens
ctggctaaactgggg

SEQ ID NO: 16483 - DNA, 15 bp, Homo sapiens
gctggctaaactggg

SEQ ID NO: 16484 - DNA, 15 bp, Homo sapiens
tgctggctaaactgg

SEQ ID NO: 16485 - DNA, 15 bp, Homo sapiens
gtgctggctaaactg

SEQ ID NO: 16486 - DNA, 15 bp, Homo sapiens
ggtgctggctaaact

SEQ ID NO: 16487 - DNA, 15 bp, Homo sapiens
tggtgctggctaaac

SEQ ID NO: 16488 - DNA, 15 bp, Homo sapiens
ctggtgctggctaaa

SEQ ID NO: 16489 - DNA, 15 bp, Homo sapiens
cctggtgctggctaa

SEQ ID NO: 16490 - DNA, 15 bp, Homo sapiens
acctggtgctggcta

SEQ ID NO: 16491 - DNA, 15 bp, Homo sapiens
gacctggtgctggct

SEQ ID NO: 16492 - DNA, 15 bp, Homo sapiens
agacctggtgctggc

SEQ ID NO: 16493 - DNA, 15 bp, Homo sapiens
cagacctggtgctgg

SEQ ID NO: 16494 - DNA, 15 bp, Homo sapiens
ccagacctggtgctg

SEQ ID NO: 16495 - DNA, 15 bp, Homo sapiens
tccagacctggtgct

SEQ ID NO: 16496 - DNA, 15 bp, Homo sapiens
ctccagacctggtgc

SEQ ID NO: 16497 - DNA, 15 bp, Homo sapiens
actccagacctggtg

SEQ ID NO: 16498 - DNA, 15 bp, Homo sapiens
gactccagacctggt

SEQ ID NO: 16499 - DNA, 15 bp, Homo sapiens
agactccagacctgg

SEQ ID NO: 16500 - DNA, 15 bp, Homo sapiens
cagactccagacctg

SEQ ID NO: 16501 - DNA, 15 bp, Homo sapiens
tcagactccagacct

SEQ ID NO: 16502 - DNA, 15 bp, Homo sapiens
gtcagactccagacc

SEQ ID NO: 16503 - DNA, 15 bp, Homo sapiens
tgtcagactccagac

SEQ ID NO: 16504 - DNA, 15 bp, Homo sapiens
ctgtcagactccaga

SEQ ID NO: 16505 - DNA, 15 bp, Homo sapiens
cctgtcagactccag

SEQ ID NO: 16506 - DNA, 15 bp, Homo sapiens
gcctgtcagactcca

SEQ ID NO: 16507 - DNA, 15 bp, Homo sapiens
agcctgtcagactcc

SEQ ID NO: 16508 - DNA, 15 bp, Homo sapiens
tagcctgtcagactc

SEQ ID NO: 16509 - DNA, 15 bp, Homo sapiens
ctagcctgtcagact

SEQ ID NO: 16510 - DNA, 15 bp, Homo sapiens
tctagcctgtcagac

SEQ ID NO: 16511 - DNA, 15 bp, Homo sapiens
ctctagcctgtcaga

SEQ ID NO: 16512 - DNA, 15 bp, Homo sapiens
tctctagcctgtcag

SEQ ID NO: 16513 - DNA, 15 bp, Homo sapiens
gtctctagcctgtca

SEQ ID NO: 16514 - DNA, 15 bp, Homo sapiens
ggtctctagcctgtc

SEQ ID NO: 16515 - DNA, 15 bp, Homo sapiens
aggtctctagcctgt

SEQ ID NO: 16516 - DNA, 15 bp, Homo sapiens
taggtctctagcctg

SEQ ID NO: 16517 - DNA, 15 bp, Homo sapiens
gtaggtctctagcct

SEQ ID NO: 16518 - DNA, 15 bp, Homo sapiens
ggtaggtctctagcc

SEQ ID NO: 16519 - DNA, 15 bp, Homo sapiens
tggtaggtctctagc

SEQ ID NO: 16520 - DNA, 15 bp, Homo sapiens
ttggtaggtctctag

SEQ ID NO: 16521 - DNA, 15 bp, Homo sapiens
cttggtaggtctcta

SEQ ID NO: 16522 - DNA, 15 bp, Homo sapiens
acttggtaggtctct

SEQ ID NO: 16523 - DNA, 15 bp, Homo sapiens
cacttggtaggtctc

SEQ ID NO: 16524 - DNA, 15 bp, Homo sapiens
ccacttggtaggtct

SEQ ID NO: 16525 - DNA, 15 bp, Homo sapiens
tccacttggtaggtc

SEQ ID NO: 16526 - DNA, 15 bp, Homo sapiens
ctccacttggtaggt

SEQ ID NO: 16527 - DNA, 15 bp, Homo sapiens
cctccacttggtagg

SEQ ID NO: 16528 - DNA, 15 bp, Homo sapiens
ccctccacttggtag

SEQ ID NO: 16529 - DNA, 15 bp, Homo sapiens
gccctccacttggta

SEQ ID NO: 16530 - DNA, 15 bp, Homo sapiens
agccctccacttggt

SEQ ID NO: 16531 - DNA, 15 bp, Homo sapiens
cagccctccacttgg

SEQ ID NO: 16532 - DNA, 15 bp, Homo sapiens
acagccctccacttg

SEQ ID NO: 16533 - DNA, 15 bp, Homo sapiens
cacagccctccactt

SEQ ID NO: 16534 - DNA, 15 bp, Homo sapiens
gcacagccctccact

SEQ ID NO: 16535 - DNA, 15 bp, Homo sapiens
agcacagccctccac

SEQ ID NO: 16536 - DNA, 15 bp, Homo sapiens
cagcacagccctcca

SEQ ID NO: 16537 - DNA, 15 bp, Homo sapiens
acagcacagccctcc

SEQ ID NO: 16538 - DNA, 15 bp, Homo sapiens
cacagcacagccctc

SEQ ID NO: 16539 - DNA, 15 bp, Homo sapiens
gcacagcacagccct

SEQ ID NO: 16540 - DNA, 15 bp, Homo sapiens
agcacagcacagccc

SEQ ID NO: 16541 - DNA, 15 bp, Homo sapiens
cagcacagcacagcc

SEQ ID NO: 16542 - DNA, 15 bp, Homo sapiens
gcagcacagcacagc

SEQ ID NO: 16543 - DNA, 15 bp, Homo sapiens
ggcagcacagcacag

SEQ ID NO: 16544 - DNA, 15 bp, Homo sapiens
aggcagcacagcaca

SEQ ID NO: 16545 - DNA, 15 bp, Homo sapiens
caggcagcacagcac

SEQ ID NO: 16546 - DNA, 15 bp, Homo sapiens
tcaggcagcacagca

SEQ ID NO: 16547 - DNA, 15 bp, Homo sapiens
ttcaggcagcacagc

SEQ ID NO: 16548 - DNA, 15 bp, Homo sapiens
cttcaggcagcacag

SEQ ID NO: 16549 - DNA, 15 bp, Homo sapiens
tcttcaggcagcaca

SEQ ID NO: 16550 - DNA, 15 bp, Homo sapiens
ctcttcaggcagcac

SEQ ID NO: 16551 - DNA, 15 bp, Homo sapiens
gctcttcaggcagca

SEQ ID NO: 16552 - DNA, 15 bp, Homo sapiens
ggctcttcaggcagc

SEQ ID NO: 16553 - DNA, 15 bp, Homo sapiens
aggctcttcaggcag

SEQ ID NO: 16554 - DNA, 15 bp, Homo sapiens
gaggctcttcaggca

SEQ ID NO: 16555 - DNA, 15 bp, Homo sapiens
tgaggctcttcaggc

SEQ ID NO: 16556 - DNA, 15 bp, Homo sapiens
ctgaggctcttcagg

SEQ ID NO: 16557 - DNA, 15 bp, Homo sapiens
actgaggctcttcag

SEQ ID NO: 16558 - DNA, 15 bp, Homo sapiens
cactgaggctcttca

SEQ ID NO: 16559 - DNA, 15 bp, Homo sapiens
gcactgaggctcttc

SEQ ID NO: 16560 - DNA, 15 bp, Homo sapiens
tgcactgaggctctt

SEQ ID NO: 16561 - DNA, 15 bp, Homo sapiens
gtgcactgaggctct

SEQ ID NO: 16562 - DNA, 15 bp, Homo sapiens
tgtgcactgaggctc

SEQ ID NO: 16563 - DNA, 15 bp, Homo sapiens
ctgtgcactgaggct

SEQ ID NO: 16564 - DNA, 15 bp, Homo sapiens
gctgtgcactgaggc

SEQ ID NO: 16565 - DNA, 15 bp, Homo sapiens
ggctgtgcactgagg

SEQ ID NO: 16566 - DNA, 15 bp, Homo sapiens
aggctgtgcactgag

SEQ ID NO: 16567 - DNA, 15 bp, Homo sapiens
gaggctgtgcactga

SEQ ID NO: 16568 - DNA, 15 bp, Homo sapiens
tgaggctgtgcactg

SEQ ID NO: 16569 - DNA, 15 bp, Homo sapiens
gtgaggctgtgcact

SEQ ID NO: 16570 - DNA, 15 bp, Homo sapiens
ggtgaggctgtgcac

SEQ ID NO: 16571 - DNA, 15 bp, Homo sapiens
aggtgaggctgtgca

SEQ ID NO: 16572 - DNA, 15 bp, Homo sapiens
caggtgaggctgtgc

SEQ ID NO: 16573 - DNA, 15 bp, Homo sapiens
ccaggtgaggctgtg

SEQ ID NO: 16574 - DNA, 15 bp, Homo sapiens
tccaggtgaggctgt

SEQ ID NO: 16575 - DNA, 15 bp, Homo sapiens
gtccaggtgaggctg

SEQ ID NO: 16576 - DNA, 15 bp, Homo sapiens
tgtccaggtgaggct

SEQ ID NO: 16577 - DNA, 15 bp, Homo sapiens
atgtccaggtgaggc

SEQ ID NO: 16578 - DNA, 15 bp, Homo sapiens
aatgtccaggtgagg

SEQ ID NO: 16579 - DNA, 15 bp, Homo sapiens
gaatgtccaggtgag

SEQ ID NO: 16580 - DNA, 15 bp, Homo sapiens
tgaatgtccaggtga

SEQ ID NO: 16581 - DNA, 15 bp, Homo sapiens
gtgaatgtccaggtg

SEQ ID NO: 16582 - DNA, 15 bp, Homo sapiens
agtgaatgtccaggt

SEQ ID NO: 16583 - DNA, 15 bp, Homo sapiens
cagtgaatgtccagg

SEQ ID NO: 16584 - DNA, 15 bp, Homo sapiens
ccagtgaatgtccag

SEQ ID NO: 16585 - DNA, 15 bp, Homo sapiens
tccagtgaatgtcca

SEQ ID NO: 16586 - DNA, 15 bp, Homo sapiens
ctccagtgaatgtcc

SEQ ID NO: 16587 - DNA, 15 bp, Homo sapiens
tctccagtgaatgtc

SEQ ID NO: 16588 - DNA, 15 bp, Homo sapiens
ttctccagtgaatgt

SEQ ID NO: 16589 - DNA, 15 bp, Homo sapiens
cttctccagtgaatg

SEQ ID NO: 16590 - DNA, 15 bp, Homo sapiens
tcttctccagtgaat

SEQ ID NO: 16591 - DNA, 15 bp, Homo sapiens
ctcttctccagtgaa

SEQ ID NO: 16592 - DNA, 15 bp, Homo sapiens
tctcttctccagtga

SEQ ID NO: 16593 - DNA, 15 bp, Homo sapiens
atctcttctccagtg

SEQ ID NO: 16594 - DNA, 15 bp, Homo sapiens
aatctcttctccagt

SEQ ID NO: 16595 - DNA, 15 bp, Homo sapiens
aaatctcttctccag

SEQ ID NO: 16596 - DNA, 15 bp, Homo sapiens
caaatctcttctcca

SEQ ID NO: 16597 - DNA, 15 bp, Homo sapiens
acaaatctcttctcc

SEQ ID NO: 16598 - DNA, 15 bp, Homo sapiens
cacaaatctcttctc

SEQ ID NO: 16599 - DNA, 15 bp, Homo sapiens
acacaaatctcttct

SEQ ID NO: 16600 - DNA, 15 bp, Homo sapiens
gacacaaatctcttc

SEQ ID NO: 16601 - DNA, 15 bp, Homo sapiens
tgacacaaatctctt

SEQ ID NO: 16602 - DNA, 15 bp, Homo sapiens
gtgacacaaatctct

SEQ ID NO: 16603 - DNA, 15 bp, Homo sapiens
tgtgacacaaatctc

SEQ ID NO: 16604 - DNA, 15 bp, Homo sapiens
ttgtgacacaaatct

SEQ ID NO: 16605 - DNA, 15 bp, Homo sapiens
attgtgacacaaatc

SEQ ID NO: 16606 - DNA, 15 bp, Homo sapiens
tattgtgacacaaat

SEQ ID NO: 16607 - DNA, 15 bp, Homo sapiens
ttattgtgacacaaa

SEQ ID NO: 16608 - DNA, 15 bp, Homo sapiens
cttattgtgacacaa

SEQ ID NO: 16609 - DNA, 15 bp, Homo sapiens
gcttattgtgacaca

SEQ ID NO: 16610 - DNA, 15 bp, Homo sapiens
ggcttattgtgacac

SEQ ID NO: 16611 - DNA, 15 bp, Homo sapiens
aggcttattgtgaca

SEQ ID NO: 16612 - DNA, 15 bp, Homo sapiens
aaggcttattgtgac

SEQ ID NO: 16613 - DNA, 15 bp, Homo sapiens
taaggcttattgtga

SEQ ID NO: 16614 - DNA, 15 bp, Homo sapiens
ttaaggcttattgtg

SEQ ID NO: 16615 - DNA, 15 bp, Homo sapiens
gttaaggcttattgt

SEQ ID NO: 16616 - DNA, 15 bp, Homo sapiens
agttaaggcttattg

SEQ ID NO: 16617 - DNA, 15 bp, Homo sapiens
tagttaaggcttatt

SEQ ID NO: 16618 - DNA, 15 bp, Homo sapiens
atagttaaggcttat

SEQ ID NO: 16619 - DNA, 15 bp, Homo sapiens
gatagttaaggctta

SEQ ID NO: 16620 - DNA, 15 bp, Homo sapiens
tgatagttaaggctt

SEQ ID NO: 16621 - DNA, 15 bp, Homo sapiens
atgatagttaaggct

SEQ ID NO: 16622 - DNA, 15 bp, Homo sapiens
tatgatagttaaggc

SEQ ID NO: 16623 - DNA, 15 bp, Homo sapiens
ttatgatagttaagg

SEQ ID NO: 16624 - DNA, 15 bp, Homo sapiens
attatgatagttaag

SEQ ID NO: 16625 - DNA, 15 bp, Homo sapiens
aattatgatagttaa

SEQ ID NO: 16626 - DNA, 15 bp, Homo sapiens
aaattatgatagtta

SEQ ID NO: 16627 - DNA, 15 bp, Homo sapiens
gaaattatgatagtt

SEQ ID NO: 16628 - DNA, 15 bp, Homo sapiens
agaaattatgatagt

SEQ ID NO: 16629 - DNA, 15 bp, Homo sapiens
aagaaattatgatag

SEQ ID NO: 16630 - DNA, 15 bp, Homo sapiens
aaagaaattatgata

SEQ ID NO: 16631 - DNA, 15 bp, Homo sapiens
caaagaaattatgat

SEQ ID NO: 16632 - DNA, 15 bp, Homo sapiens
tcaaagaaattatga

SEQ ID NO: 16633 - DNA, 15 bp, Homo sapiens
ttcaaagaaattatg

SEQ ID NO: 16634 - DNA, 15 bp, Homo sapiens
tttcaaagaaattat

SEQ ID NO: 16635 - DNA, 15 bp, Homo sapiens
atttcaaagaaatta

SEQ ID NO: 16636 - DNA, 15 bp, Homo sapiens
tatttcaaagaaatt

SEQ ID NO: 16637 - DNA, 15 bp, Homo sapiens
ctatttcaaagaaat

SEQ ID NO: 16638 - DNA, 15 bp, Homo sapiens
actatttcaaagaaa

SEQ ID NO: 16639 - DNA, 15 bp, Homo sapiens
cactatttcaaagaa

SEQ ID NO: 16640 - DNA, 15 bp, Homo sapiens
acactatttcaaaga

SEQ ID NO: 16641 - DNA, 15 bp, Homo sapiens
cacactatttcaaag

SEQ ID NO: 16642 - DNA, 15 bp, Homo sapiens
acacactatttcaaa

SEQ ID NO: 16643 - DNA, 15 bp, Homo sapiens
gacacactatttcaa

SEQ ID NO: 16644 - DNA, 15 bp, Homo sapiens
tgacacactatttca

SEQ ID NO: 16645 - DNA, 15 bp, Homo sapiens
ttgacacactatttc

SEQ ID NO: 16646 - DNA, 15 bp, Homo sapiens
tttgacacactattt

SEQ ID NO: 16647 - DNA, 15 bp, Homo sapiens
ttttgacacactatt

SEQ ID NO: 16648 - DNA, 15 bp, Homo sapiens
tttttgacacactat

SEQ ID NO: 16649 - DNA, 15 bp, Homo sapiens
atttttgacacacta

SEQ ID NO: 16650 - DNA, 15 bp, Homo sapiens
tatttttgacacact

SEQ ID NO: 16651 - DNA, 15 bp, Homo sapiens
ctatttttgacacac

SEQ ID NO: 16652 - DNA, 15 bp, Homo sapiens
cctatttttgacaca

SEQ ID NO: 16653 - DNA, 15 bp, Homo sapiens
tcctatttttgacac

SEQ ID NO: 16654 - DNA, 15 bp, Homo sapiens
atcctatttttgaca

SEQ ID NO: 16655 - DNA, 15 bp, Homo sapiens
tatcctatttttgac

SEQ ID NO: 16656 - DNA, 15 bp, Homo sapiens
ttatcctatttttga

SEQ ID NO: 16657 - DNA, 15 bp, Homo sapiens
tttatcctatttttg

SEQ ID NO: 16658 - DNA, 15 bp, Homo sapiens
ttttatcctattttt

SEQ ID NO: 16659 - DNA, 15 bp, Homo sapiens
cttttatcctatttt

SEQ ID NO: 16660 - DNA, 15 bp, Homo sapiens
acttttatcctattt

SEQ ID NO: 16661 - DNA, 15 bp, Homo sapiens
aacttttatcctatt

SEQ ID NO: 16662 - DNA, 15 bp, Homo sapiens
aaacttttatcctat

SEQ ID NO: 16663 - DNA, 15 bp, Homo sapiens
caaacttttatccta

SEQ ID NO: 16664 - DNA, 15 bp, Homo sapiens
ccaaacttttatcct

SEQ ID NO: 16665 - DNA, 15 bp, Homo sapiens
accaaacttttatcc

SEQ ID NO: 16666 - DNA, 15 bp, Homo sapiens
aaccaaacttttatc

SEQ ID NO: 16667 - DNA, 15 bp, Homo sapiens
aaaccaaacttttat

SEQ ID NO: 16668 - DNA, 15 bp, Homo sapiens
taaaccaaactttta

SEQ ID NO: 16669 - DNA, 15 bp, Homo sapiens
ataaaccaaactttt

SEQ ID NO: 16670 - DNA, 15 bp, Homo sapiens
cataaaccaaacttt

SEQ ID NO: 16671 - DNA, 15 bp, Homo sapiens
gcataaaccaaactt

SEQ ID NO: 16672 - DNA, 15 bp, Homo sapiens
tgcataaaccaaact

SEQ ID NO: 16673 - DNA, 15 bp, Homo sapiens
ttgcataaaccaaac

SEQ ID NO: 16674 - DNA, 15 bp, Homo sapiens
tttgcataaaccaaa

SEQ ID NO: 16675 - DNA, 15 bp, Homo sapiens
atttgcataaaccaa

SEQ ID NO: 16676 - DNA, 15 bp, Homo sapiens
catttgcataaacca

SEQ ID NO: 16677 - DNA, 15 bp, Homo sapiens
acatttgcataaacc

SEQ ID NO: 16678 - DNA, 15 bp, Homo sapiens
tacatttgcataaac

SEQ ID NO: 16679 - DNA, 15 bp, Homo sapiens
ctacatttgcataaa

SEQ ID NO: 16680 - DNA, 15 bp, Homo sapiens
actacatttgcataa

SEQ ID NO: 16681 - DNA, 15 bp, Homo sapiens
aactacatttgcata

SEQ ID NO: 16682 - DNA, 15 bp, Homo sapiens
aaactacatttgcat

SEQ ID NO: 16683 - DNA, 15 bp, Homo sapiens
aaaactacatttgca

SEQ ID NO: 16684 - DNA, 15 bp, Homo sapiens
aaaaactacatttgc

SEQ ID NO: 16685 - DNA, 15 bp, Homo sapiens
taaaaactacatttg

SEQ ID NO: 16686 - DNA, 15 bp, Homo sapiens
ataaaaactacattt

SEQ ID NO: 16687 - DNA, 15 bp, Homo sapiens
gataaaaactacatt

SEQ ID NO: 16688 - DNA, 15 bp, Homo sapiens
agataaaaactacat

SEQ ID NO: 16689 - DNA, 15 bp, Homo sapiens
cagataaaaactaca

SEQ ID NO: 16690 - DNA, 15 bp, Homo sapiens
tcagataaaaactac

SEQ ID NO: 16691 - DNA, 15 bp, Homo sapiens
gtcagataaaaacta

SEQ ID NO: 16692 - DNA, 15 bp, Homo sapiens
agtcagataaaaact

SEQ ID NO: 16693 - DNA, 15 bp, Homo sapiens
aagtcagataaaaac

SEQ ID NO: 16694 - DNA, 15 bp, Homo sapiens
gaagtcagataaaaa

SEQ ID NO: 16695 - DNA, 15 bp, Homo sapiens
agaagtcagataaaa

SEQ ID NO: 16696 - DNA, 15 bp, Homo sapiens
cagaagtcagataaa

SEQ ID NO: 16697 - DNA, 15 bp, Homo sapiens
tcagaagtcagataa

SEQ ID NO: 16698 - DNA, 15 bp, Homo sapiens
ttcagaagtcagata

SEQ ID NO: 16699 - DNA, 15 bp, Homo sapiens
cttcagaagtcagat

SEQ ID NO: 16700 - DNA, 15 bp, Homo sapiens
tcttcagaagtcaga

SEQ ID NO: 16701 - DNA, 15 bp, Homo sapiens
gtcttcagaagtcag

SEQ ID NO: 16702 - DNA, 15 bp, Homo sapiens
ggtcttcagaagtca

SEQ ID NO: 16703 - DNA, 15 bp, Homo sapiens
tggtcttcagaagtc

SEQ ID NO: 16704 - DNA, 15 bp, Homo sapiens
gtggtcttcagaagt

SEQ ID NO: 16705 - DNA, 15 bp, Homo sapiens
tgtggtcttcagaag

SEQ ID NO: 16706 - DNA, 15 bp, Homo sapiens
atgtggtcttcagaa

SEQ ID NO: 16707 - DNA, 15 bp, Homo sapiens
aatgtggtcttcaga

SEQ ID NO: 16708 - DNA, 15 bp, Homo sapiens
caatgtggtcttcag

SEQ ID NO: 16709 - DNA, 15 bp, Homo sapiens
acaatgtggtcttca

SEQ ID NO: 16710 - DNA, 15 bp, Homo sapiens
gacaatgtggtcttc

SEQ ID NO: 16711 - DNA, 15 bp, Homo sapiens
tgacaatgtggtctt

SEQ ID NO: 16712 - DNA, 15 bp, Homo sapiens
gtgacaatgtggtct

SEQ ID NO: 16713 - DNA, 15 bp, Homo sapiens
ggtgacaatgtggtc

SEQ ID NO: 16714 - DNA, 15 bp, Homo sapiens
tggtgacaatgtggt

SEQ ID NO: 16715 - DNA, 15 bp, Homo sapiens
atggtgacaatgtgg

SEQ ID NO: 16716 - DNA, 15 bp, Homo sapiens
tatggtgacaatgtg

SEQ ID NO: 16717 - DNA, 15 bp, Homo sapiens
ctatggtgacaatgt

SEQ ID NO: 16718 - DNA, 15 bp, Homo sapiens
gctatggtgacaatg

SEQ ID NO: 16719 - DNA, 15 bp, Homo sapiens
tgctatggtgacaat

SEQ ID NO: 16720 - DNA, 15 bp, Homo sapiens
ctgctatggtgacaa

SEQ ID NO: 16721 - DNA, 15 bp, Homo sapiens
tctgctatggtgaca

SEQ ID NO: 16722 - DNA, 15 bp, Homo sapiens
atctgctatggtgac

SEQ ID NO: 16723 - DNA, 15 bp, Homo sapiens
gatctgctatggtga

SEQ ID NO: 16724 - DNA, 15 bp, Homo sapiens
tgatctgctatggtg

SEQ ID NO: 16725 - DNA, 15 bp, Homo sapiens
ctgatctgctatggt

SEQ ID NO: 16726 - DNA, 15 bp, Homo sapiens
gctgatctgctatgg

SEQ ID NO: 16727 - DNA, 15 bp, Homo sapiens
agctgatctgctatg

SEQ ID NO: 16728 - DNA, 15 bp, Homo sapiens
cagctgatctgctat

SEQ ID NO: 16729 - DNA, 15 bp, Homo sapiens
gcagctgatctgcta

SEQ ID NO: 16730 - DNA, 15 bp, Homo sapiens
tgcagctgatctgct

SEQ ID NO: 16731 - DNA, 15 bp, Homo sapiens
ctgcagctgatctgc

SEQ ID NO: 16732 - DNA, 15 bp, Homo sapiens
gctgcagctgatctg

SEQ ID NO: 16733 - DNA, 15 bp, Homo sapiens
tgctgcagctgatct

SEQ ID NO: 16734 - DNA, 15 bp, Homo sapiens
gtgctgcagctgatc

SEQ ID NO: 16735 - DNA, 15 bp, Homo sapiens
ggtgctgcagctgat

SEQ ID NO: 16736 - DNA, 15 bp, Homo sapiens
gggtgctgcagctga

SEQ ID NO: 16737 - DNA, 15 bp, Homo sapiens
tgggtgctgcagctg

SEQ ID NO: 16738 - DNA, 15 bp, Homo sapiens
atgggtgctgcagct

SEQ ID NO: 16739 - DNA, 15 bp, Homo sapiens
tatgggtgctgcagc

SEQ ID NO: 16740 - DNA, 15 bp, Homo sapiens
ctatgggtgctgcag

SEQ ID NO: 16741 - DNA, 15 bp, Homo sapiens
gctatgggtgctgca

SEQ ID NO: 16742 - DNA, 15 bp, Homo sapiens
agctatgggtgctgc

SEQ ID NO: 16743 - DNA, 15 bp, Homo sapiens
aagctatgggtgctg

SEQ ID NO: 16744 - DNA, 15 bp, Homo sapiens
aaagctatgggtgct

SEQ ID NO: 16745 - DNA, 15 bp, Homo sapiens
caaagctatgggtgc

SEQ ID NO: 16746 - DNA, 15 bp, Homo sapiens
gcaaagctatgggtg

SEQ ID NO: 16747 - DNA, 15 bp, Homo sapiens
tgcaaagctatgggt

SEQ ID NO: 16748 - DNA, 15 bp, Homo sapiens
ttgcaaagctatggg

SEQ ID NO: 16749 - DNA, 15 bp, Homo sapiens
gttgcaaagctatgg

SEQ ID NO: 16750 - DNA, 15 bp, Homo sapiens
cgttgcaaagctatg

SEQ ID NO: 16751 - DNA, 15 bp, Homo sapiens
gcgttgcaaagctat

SEQ ID NO: 16752 - DNA, 15 bp, Homo sapiens
agcgttgcaaagcta

SEQ ID NO: 16753 - DNA, 15 bp, Homo sapiens
tagcgttgcaaagct

SEQ ID NO: 16754 - DNA, 15 bp, Homo sapiens
ctagcgttgcaaagc

SEQ ID NO: 16755 - DNA, 15 bp, Homo sapiens
cctagcgttgcaaag

SEQ ID NO: 16756 - DNA, 15 bp, Homo sapiens
ccctagcgttgcaaa

SEQ ID NO: 16757 - DNA, 15 bp, Homo sapiens
cccctagcgttgcaa

SEQ ID NO: 16758 - DNA, 15 bp, Homo sapiens
tcccctagcgttgca

SEQ ID NO: 16759 - DNA, 15 bp, Homo sapiens
ctcccctagcgttgc

SEQ ID NO: 16760 - DNA, 15 bp, Homo sapiens
tctcccctagcgttg

SEQ ID NO: 16761 - DNA, 15 bp, Homo sapiens
ctctcccctagcgtt

SEQ ID NO: 16762 - DNA, 15 bp, Homo sapiens
actctcccctagcgt

SEQ ID NO: 16763 - DNA, 15 bp, Homo sapiens
cactctcccctagcg

SEQ ID NO: 16764 - DNA, 15 bp, Homo sapiens
gcactctcccctagc

SEQ ID NO: 16765 - DNA, 15 bp, Homo sapiens
agcactctcccctag

SEQ ID NO: 16766 - DNA, 15 bp, Homo sapiens
gagcactctccccta

SEQ ID NO: 16767 - DNA, 15 bp, Homo sapiens
agagcactctcccct

SEQ ID NO: 16768 - DNA, 15 bp, Homo sapiens
gagagcactctcccc

SEQ ID NO: 16769 - DNA, 15 bp, Homo sapiens
ggagagcactctccc

SEQ ID NO: 16770 - DNA, 15 bp, Homo sapiens
aggagagcactctcc

SEQ ID NO: 16771 - DNA, 15 bp, Homo sapiens
caggagagcactctc

SEQ ID NO: 16772 - DNA, 15 bp, Homo sapiens
ccaggagagcactct

SEQ ID NO: 16773 - DNA, 15 bp, Homo sapiens
accaggagagcactc

SEQ ID NO: 16774 - DNA, 15 bp, Homo sapiens
aaccaggagagcact

SEQ ID NO: 16775 - DNA, 15 bp, Homo sapiens
aaaccaggagagcac

SEQ ID NO: 16776 - DNA, 15 bp, Homo sapiens
caaaccaggagagca

SEQ ID NO: 16777 - DNA, 15 bp, Homo sapiens
ccaaaccaggagagc

SEQ ID NO: 16778 - DNA, 15 bp, Homo sapiens
cccaaaccaggagag

SEQ ID NO: 16779 - DNA, 15 bp, Homo sapiens
ccccaaaccaggaga

SEQ ID NO: 16780 - DNA, 15 bp, Homo sapiens
accccaaaccaggag

SEQ ID NO: 16781 - DNA, 15 bp, Homo sapiens
caccccaaaccagga

SEQ ID NO: 16782 - DNA, 15 bp, Homo sapiens
tcaccccaaaccagg

SEQ ID NO: 16783 - DNA, 15 bp, Homo sapiens
ttcaccccaaaccag

SEQ ID NO: 16784 - DNA, 15 bp, Homo sapiens
cttcaccccaaacca

SEQ ID NO: 16785 - DNA, 15 bp, Homo sapiens
ccttcaccccaaacc

SEQ ID NO: 16786 - DNA, 15 bp, Homo sapiens
accttcaccccaaac

SEQ ID NO: 16787 - DNA, 15 bp, Homo sapiens
taccttcaccccaaa

SEQ ID NO: 16788 - DNA, 15 bp, Homo sapiens
gtaccttcaccccaa

SEQ ID NO: 16789 - DNA, 15 bp, Homo sapiens
ggtaccttcacccca

SEQ ID NO: 16790 - DNA, 15 bp, Homo sapiens
tggtaccttcacccc

SEQ ID NO: 16791 - DNA, 15 bp, Homo sapiens
atggtaccttcaccc

SEQ ID NO: 16792 - DNA, 15 bp, Homo sapiens
catggtaccttcacc

SEQ ID NO: 16793 - DNA, 15 bp, Homo sapiens
gcatggtaccttcac

SEQ ID NO: 16794 - DNA, 15 bp, Homo sapiens
tgcatggtaccttca

SEQ ID NO: 16795 - DNA, 15 bp, Homo sapiens
atgcatggtaccttc

SEQ ID NO: 16796 - DNA, 15 bp, Homo sapiens
gatgcatggtacctt

SEQ ID NO: 16797 - DNA, 15 bp, Homo sapiens
agatgcatggtacct

SEQ ID NO: 16798 - DNA, 15 bp, Homo sapiens
cagatgcatggtacc

SEQ ID NO: 16799 - DNA, 15 bp, Homo sapiens
ccagatgcatggtac

SEQ ID NO: 16800 - DNA, 15 bp, Homo sapiens
cccagatgcatggta

SEQ ID NO: 16801 - DNA, 15 bp, Homo sapiens
tcccagatgcatggt

SEQ ID NO: 16802 - DNA, 15 bp, Homo sapiens
ctcccagatgcatgg

SEQ ID NO: 16803 - DNA, 15 bp, Homo sapiens
cctcccagatgcatg

SEQ ID NO: 16804 - DNA, 15 bp, Homo sapiens
ccctcccagatgcat

SEQ ID NO: 16805 - DNA, 15 bp, Homo sapiens
tccctcccagatgca

SEQ ID NO: 16806 - DNA, 15 bp, Homo sapiens
ttccctcccagatgc

SEQ ID NO: 16807 - DNA, 15 bp, Homo sapiens
gttccctcccagatg

SEQ ID NO: 16808 - DNA, 15 bp, Homo sapiens
agttccctcccagat

SEQ ID NO: 16809 - DNA, 15 bp, Homo sapiens
aagttccctcccaga

SEQ ID NO: 16810 - DNA, 15 bp, Homo sapiens
gaagttccctcccag

SEQ ID NO: 16811 - DNA, 15 bp, Homo sapiens
ggaagttccctccca

SEQ ID NO: 16812 - DNA, 15 bp, Homo sapiens
aggaagttccctccc

SEQ ID NO: 16813 - DNA, 15 bp, Homo sapiens
taggaagttccctcc

SEQ ID NO: 16814 - DNA, 15 bp, Homo sapiens
ctaggaagttccctc

SEQ ID NO: 16815 - DNA, 15 bp, Homo sapiens
actaggaagttccct

SEQ ID NO: 16816 - DNA, 15 bp, Homo sapiens
cactaggaagttccc

SEQ ID NO: 16817 - DNA, 15 bp, Homo sapiens
gcactaggaagttcc

SEQ ID NO: 16818 - DNA, 15 bp, Homo sapiens
ggcactaggaagttc

SEQ ID NO: 16819 - DNA, 15 bp, Homo sapiens
gggcactaggaagtt

SEQ ID NO: 16820 - DNA, 15 bp, Homo sapiens
agggcactaggaagt

SEQ ID NO: 16821 - DNA, 15 bp, Homo sapiens
aagggcactaggaag

SEQ ID NO: 16822 - DNA, 15 bp, Homo sapiens
aaagggcactaggaa

SEQ ID NO: 16823 - DNA, 15 bp, Homo sapiens
gaaagggcactagga

SEQ ID NO: 16824 - DNA, 15 bp, Homo sapiens
ggaaagggcactagg

SEQ ID NO: 16825 - DNA, 15 bp, Homo sapiens
gggaaagggcactag

SEQ ID NO: 16826 - DNA, 15 bp, Homo sapiens
ggggaaagggcacta

SEQ ID NO: 16827 - DNA, 15 bp, Homo sapiens
tggggaaagggcact

SEQ ID NO: 16828 - DNA, 15 bp, Homo sapiens
ctggggaaagggcac

SEQ ID NO: 16829 - DNA, 15 bp, Homo sapiens
gctggggaaagggca

SEQ ID NO: 16830 - DNA, 15 bp, Homo sapiens
agctggggaaagggc

SEQ ID NO: 16831 - DNA, 15 bp, Homo sapiens
cagctggggaaaggg

SEQ ID NO: 16832 - DNA, 15 bp, Homo sapiens
acagctggggaaagg

SEQ ID NO: 16833 - DNA, 15 bp, Homo sapiens
cacagctggggaaag

SEQ ID NO: 16834 - DNA, 15 bp, Homo sapiens
ccacagctggggaaa

SEQ ID NO: 16835 - DNA, 15 bp, Homo sapiens
accacagctggggaa

SEQ ID NO: 16836 - DNA, 15 bp, Homo sapiens
caccacagctgggga

SEQ ID NO: 16837 - DNA, 15 bp, Homo sapiens
tcaccacagctgggg

SEQ ID NO: 16838 - DNA, 15 bp, Homo sapiens
gtcaccacagctggg

SEQ ID NO: 16839 - DNA, 15 bp, Homo sapiens
tgtcaccacagctgg

SEQ ID NO: 16840 - DNA, 15 bp, Homo sapiens
atgtcaccacagctg

SEQ ID NO: 16841 - DNA, 15 bp, Homo sapiens
gatgtcaccacagct

SEQ ID NO: 16842 - DNA, 15 bp, Homo sapiens
tgatgtcaccacagc

SEQ ID NO: 16843 - DNA, 15 bp, Homo sapiens
ttgatgtcaccacag

SEQ ID NO: 16844 - DNA, 15 bp, Homo sapiens
tttgatgtcaccaca

SEQ ID NO: 16845 - DNA, 15 bp, Homo sapiens
ctttgatgtcaccac

SEQ ID NO: 16846 - DNA, 15 bp, Homo sapiens
actttgatgtcacca

SEQ ID NO: 16847 - DNA, 15 bp, Homo sapiens
cactttgatgtcacc

SEQ ID NO: 16848 - DNA, 15 bp, Homo sapiens
gcactttgatgtcac

SEQ ID NO: 16849 - DNA, 15 bp, Homo sapiens
tgcactttgatgtca

SEQ ID NO: 16850 - DNA, 15 bp, Homo sapiens
ctgcactttgatgtc

SEQ ID NO: 16851 - DNA, 15 bp, Homo sapiens
gctgcactttgatgt

SEQ ID NO: 16852 - DNA, 15 bp, Homo sapiens
tgctgcactttgatg

SEQ ID NO: 16853 - DNA, 15 bp, Homo sapiens
ctgctgcactttgat

SEQ ID NO: 16854 - DNA, 15 bp, Homo sapiens
cctgctgcactttga

SEQ ID NO: 16855 - DNA, 15 bp, Homo sapiens
gcctgctgcactttg

SEQ ID NO: 16856 - DNA, 15 bp, Homo sapiens
tgcctgctgcacttt

SEQ ID NO: 16857 - DNA, 15 bp, Homo sapiens
gtgcctgctgcactt

SEQ ID NO: 16858 - DNA, 15 bp, Homo sapiens
tgtgcctgctgcact

SEQ ID NO: 16859 - DNA, 15 bp, Homo sapiens
ttgtgcctgctgcac

SEQ ID NO: 16860 - DNA, 15 bp, Homo sapiens
cttgtgcctgctgca

SEQ ID NO: 16861 - DNA, 15 bp, Homo sapiens
gcttgtgcctgctgc

SEQ ID NO: 16862 - DNA, 15 bp, Homo sapiens
agcttgtgcctgctg

SEQ ID NO: 16863 - DNA, 15 bp, Homo sapiens
tagcttgtgcctgct

SEQ ID NO: 16864 - DNA, 15 bp, Homo sapiens
atagcttgtgcctgc

SEQ ID NO: 16865 - DNA, 15 bp, Homo sapiens
catagcttgtgcctg

SEQ ID NO: 16866 - DNA, 15 bp, Homo sapiens
gcatagcttgtgcct

SEQ ID NO: 16867 - DNA, 15 bp, Homo sapiens
tgcatagcttgtgcc

SEQ ID NO: 16868 - DNA, 15 bp, Homo sapiens
ttgcatagcttgtgc

SEQ ID NO: 16869 - DNA, 15 bp, Homo sapiens
tttgcatagcttgtg

SEQ ID NO: 16870 - DNA, 15 bp, Homo sapiens
atttgcatagcttgt

SEQ ID NO: 16871 - DNA, 15 bp, Homo sapiens
tatttgcatagcttg

SEQ ID NO: 16872 - DNA, 15 bp, Homo sapiens
atatttgcatagctt

SEQ ID NO: 16873 - DNA, 15 bp, Homo sapiens
gatatttgcatagct

SEQ ID NO: 16874 - DNA, 15 bp, Homo sapiens
ggatatttgcatagc

SEQ ID NO: 16875 - DNA, 15 bp, Homo sapiens
tggatatttgcatag

SEQ ID NO: 16876 - DNA, 15 bp, Homo sapiens
atggatatttgcata

SEQ ID NO: 16877 - DNA, 15 bp, Homo sapiens
catggatatttgcat

SEQ ID NO: 16878 - DNA, 15 bp, Homo sapiens
acatggatatttgca

SEQ ID NO: 16879 - DNA, 15 bp, Homo sapiens
aacatggatatttgc

SEQ ID NO: 16880 - DNA, 15 bp, Homo sapiens
caacatggatatttg

SEQ ID NO: 16881 - DNA, 15 bp, Homo sapiens
gcaacatggatattt

SEQ ID NO: 16882 - DNA, 15 bp, Homo sapiens
ggcaacatggatatt

SEQ ID NO: 16883 - DNA, 15 bp, Homo sapiens
aggcaacatggatat

SEQ ID NO: 16884 - DNA, 15 bp, Homo sapiens
aaggcaacatggata

SEQ ID NO: 16885 - DNA, 15 bp, Homo sapiens
caaggcaacatggat

SEQ ID NO: 16886 - DNA, 15 bp, Homo sapiens
ccaaggcaacatgga

SEQ ID NO: 16887 - DNA, 15 bp, Homo sapiens
accaaggcaacatgg

SEQ ID NO: 16888 - DNA, 15 bp, Homo sapiens
caccaaggcaacatg

SEQ ID NO: 16889 - DNA, 15 bp, Homo sapiens
tcaccaaggcaacat

SEQ ID NO: 16890 - DNA, 15 bp, Homo sapiens
atcaccaaggcaaca

SEQ ID NO: 16891 - DNA, 15 bp, Homo sapiens
catcaccaaggcaac

SEQ ID NO: 16892 - DNA, 15 bp, Homo sapiens
tcatcaccaaggcaa

SEQ ID NO: 16893 - DNA, 15 bp, Homo sapiens
ttcatcaccaaggca

SEQ ID NO: 16894 - DNA, 15 bp, Homo sapiens
attcatcaccaaggc

SEQ ID NO: 16895 - DNA, 15 bp, Homo sapiens
tattcatcaccaagg

SEQ ID NO: 16896 - DNA, 15 bp, Homo sapiens
ctattcatcaccaag

SEQ ID NO: 16897 - DNA, 15 bp, Homo sapiens
tctattcatcaccaa

SEQ ID NO: 16898 - DNA, 15 bp, Homo sapiens
ttctattcatcacca

SEQ ID NO: 16899 - DNA, 15 bp, Homo sapiens
tttctattcatcacc

SEQ ID NO: 16900 - DNA, 15 bp, Homo sapiens
ctttctattcatcac

SEQ ID NO: 16901 - DNA, 15 bp, Homo sapiens
actttctattcatca

SEQ ID NO: 16902 - DNA, 15 bp, Homo sapiens
cactttctattcatc

SEQ ID NO: 16903 - DNA, 15 bp, Homo sapiens
ccactttctattcat

SEQ ID NO: 16904 - DNA, 15 bp, Homo sapiens
tccactttctattca

SEQ ID NO: 16905 - DNA, 15 bp, Homo sapiens
atccactttctattc

SEQ ID NO: 16906 - DNA, 15 bp, Homo sapiens
aatccactttctatt

SEQ ID NO: 16907 - DNA, 15 bp, Homo sapiens
aaatccactttctat

SEQ ID NO: 16908 - DNA, 15 bp, Homo sapiens
caaatccactttcta

SEQ ID NO: 16909 - DNA, 15 bp, Homo sapiens
ccaaatccactttct

SEQ ID NO: 16910 - DNA, 15 bp, Homo sapiens
accaaatccactttc

SEQ ID NO: 16911 - DNA, 15 bp, Homo sapiens
caccaaatccacttt

SEQ ID NO: 16912 - DNA, 15 bp, Homo sapiens
acaccaaatccactt

SEQ ID NO: 16913 - DNA, 15 bp, Homo sapiens
aacaccaaatccact

SEQ ID NO: 16914 - DNA, 15 bp, Homo sapiens
caacaccaaatccac

SEQ ID NO: 16915 - DNA, 15 bp, Homo sapiens
cccaacaccaaatcc

SEQ ID NO: 16916 - DNA, 15 bp, Homo sapiens
gcccaacaccaaatc

SEQ ID NO: 16917 - DNA, 15 bp, Homo sapiens
tgcccaacaccaaat

SEQ ID NO: 16918 - DNA, 15 bp, Homo sapiens
ctgcccaacaccaaa

SEQ ID NO: 16919 - DNA, 15 bp, Homo sapiens
actgcccaacaccaa

SEQ ID NO: 16920 - DNA, 15 bp, Homo sapiens
tactgcccaacacca

SEQ ID NO: 16921 - DNA, 15 bp, Homo sapiens
atactgcccaacacc

SEQ ID NO: 16922 - DNA, 15 bp, Homo sapiens
aatactgcccaacac

SEQ ID NO: 16923 - DNA, 15 bp, Homo sapiens
caatactgcccaaca

SEQ ID NO: 16924 - DNA, 15 bp, Homo sapiens
acaatactgcccaac

SEQ ID NO: 16925 - DNA, 15 bp, Homo sapiens
tacaatactgcccaa

SEQ ID NO: 16926 - DNA, 15 bp, Homo sapiens
ctacaatactgccca

SEQ ID NO: 16927 - DNA, 15 bp, Homo sapiens
gctacaatactgccc

SEQ ID NO: 16928 - DNA, 15 bp, Homo sapiens
tgctacaatactgcc

SEQ ID NO: 16929 - DNA, 15 bp, Homo sapiens
ttgctacaatactgc

SEQ ID NO: 16930 - DNA, 15 bp, Homo sapiens
attgctacaatactg

SEQ ID NO: 16931 - DNA, 15 bp, Homo sapiens
gattgctacaatact

SEQ ID NO: 16932 - DNA, 15 bp, Homo sapiens
agattgctacaatac

SEQ ID NO: 16933 - DNA, 15 bp, Homo sapiens
gagattgctacaata

SEQ ID NO: 16934 - DNA, 15 bp, Homo sapiens
ggagattgctacaat

SEQ ID NO: 16935 - DNA, 15 bp, Homo sapiens
aggagattgctacaa

SEQ ID NO: 16936 - DNA, 15 bp, Homo sapiens
gaggagattgctaca

SEQ ID NO: 16937 - DNA, 15 bp, Homo sapiens
agaggagattgctac

SEQ ID NO: 16938 - DNA, 15 bp, Homo sapiens
cagaggagattgcta

SEQ ID NO: 16939 - DNA, 15 bp, Homo sapiens
tcagaggagattgct

SEQ ID NO: 16940 - DNA, 15 bp, Homo sapiens
gtcagaggagattgc

SEQ ID NO: 16941 - DNA, 15 bp, Homo sapiens
tgtcagaggagattg

SEQ ID NO: 16942 - DNA, 15 bp, Homo sapiens
gtgtcagaggagatt

SEQ ID NO: 16943 - DNA, 15 bp, Homo sapiens
ggtgtcagaggagat

SEQ ID NO: 16944 - DNA, 15 bp, Homo sapiens
aggtgtcagaggaga

SEQ ID NO: 16945 - DNA, 15 bp, Homo sapiens
caggtgtcagaggag

SEQ ID NO: 16946 - DNA, 15 bp, Homo sapiens
tcaggtgtcagagga

SEQ ID NO: 16947 - DNA, 15 bp, Homo sapiens
ttcaggtgtcagagg

SEQ ID NO: 16948 - DNA, 15 bp, Homo sapiens
tttcaggtgtcagag

SEQ ID NO: 16949 - DNA, 15 bp, Homo sapiens
ttttcaggtgtcaga

SEQ ID NO: 16950 - DNA, 15 bp, Homo sapiens
gttttcaggtgtcag

SEQ ID NO: 16951 - DNA, 15 bp, Homo sapiens
tgttttcaggtgtca

SEQ ID NO: 16952 - DNA, 15 bp, Homo sapiens
ctgttttcaggtgtc

SEQ ID NO: 16953 - DNA, 15 bp, Homo sapiens
gctgttttcaggtgt

SEQ ID NO: 16954 - DNA, 15 bp, Homo sapiens
tgctgttttcaggtg

SEQ ID NO: 16955 - DNA, 15 bp, Homo sapiens
atgctgttttcaggt

SEQ ID NO: 16956 - DNA, 15 bp, Homo sapiens
catgctgttttcagg

SEQ ID NO: 16957 - DNA, 15 bp, Homo sapiens
gcatgctgttttcag

SEQ ID NO: 16958 - DNA, 15 bp, Homo sapiens
tgcatgctgttttca

SEQ ID NO: 16959 - DNA, 15 bp, Homo sapiens
atgcatgctgttttc

SEQ ID NO: 16960 - DNA, 15 bp, Homo sapiens
tatgcatgctgtttt

SEQ ID NO: 16961 - DNA, 15 bp, Homo sapiens
atatgcatgctgttt

SEQ ID NO: 16962 - DNA, 15 bp, Homo sapiens
catatgcatgctgtt

SEQ ID NO: 16963 - DNA, 15 bp, Homo sapiens
ccatatgcatgctgt

SEQ ID NO: 16964 - DNA, 15 bp, Homo sapiens
tccatatgcatgctg

SEQ ID NO: 16965 - DNA, 15 bp, Homo sapiens
ttccatatgcatgct

SEQ ID NO: 16966 - DNA, 15 bp, Homo sapiens
gttccatatgcatgc

SEQ ID NO: 16967 - DNA, 15 bp, Homo sapiens
ggttccatatgcatg

SEQ ID NO: 16968 - DNA, 15 bp, Homo sapiens
tggttccatatgcat

SEQ ID NO: 16969 - DNA, 15 bp, Homo sapiens
ctggttccatatgca

SEQ ID NO: 16970 - DNA, 15 bp, Homo sapiens
actggttccatatgc

SEQ ID NO: 16971 - DNA, 15 bp, Homo sapiens
cactggttccatatg

SEQ ID NO: 16972 - DNA, 15 bp, Homo sapiens
gcactggttccatat

SEQ ID NO: 16973 - DNA, 15 bp, Homo sapiens
agcactggttccata

SEQ ID NO: 16974 - DNA, 15 bp, Homo sapiens
cagcactggttccat

SEQ ID NO: 16975 - DNA, 15 bp, Homo sapiens
tcagcactggttcca

SEQ ID NO: 16976 - DNA, 15 bp, Homo sapiens
ttcagcactggttcc

SEQ ID NO: 16977 - DNA, 15 bp, Homo sapiens
tttcagcactggttc

SEQ ID NO: 16978 - DNA, 15 bp, Homo sapiens
atttcagcactggtt

SEQ ID NO: 16979 - DNA, 15 bp, Homo sapiens
tatttcagcactggt

SEQ ID NO: 16980 - DNA, 15 bp, Homo sapiens
gtatttcagcactgg

SEQ ID NO: 16981 - DNA, 15 bp, Homo sapiens
ggtatttcagcactg

SEQ ID NO: 16982 - DNA, 15 bp, Homo sapiens
tggtatttcagcact

SEQ ID NO: 16983 - DNA, 15 bp, Homo sapiens
ctggtatttcagcac

SEQ ID NO: 16984 - DNA, 15 bp, Homo sapiens
gctggtatttcagca

SEQ ID NO: 16985 - DNA, 15 bp, Homo sapiens
agctggtatttcagc

SEQ ID NO: 16986 - DNA, 15 bp, Homo sapiens
gagctggtatttcag

SEQ ID NO: 16987 - DNA, 15 bp, Homo sapiens
tgagctggtatttca

SEQ ID NO: 16988 - DNA, 15 bp, Homo sapiens
ctgagctggtatttc

SEQ ID NO: 16989 - DNA, 15 bp, Homo sapiens
gctgagctggtattt

SEQ ID NO: 16990 - DNA, 15 bp, Homo sapiens
agctgagctggtatt

SEQ ID NO: 16991 - DNA, 15 bp, Homo sapiens
cagctgagctggtat

SEQ ID NO: 16992 - DNA, 15 bp, Homo sapiens
gcagctgagctggta

SEQ ID NO: 16993 - DNA, 15 bp, Homo sapiens
ggcagctgagctggt

SEQ ID NO: 16994 - DNA, 15 bp, Homo sapiens
cggcagctgagctgg

SEQ ID NO: 16995 - DNA, 15 bp, Homo sapiens
acggcagctgagctg

SEQ ID NO: 16996 - DNA, 15 bp, Homo sapiens
aacggcagctgagct

SEQ ID NO: 16997 - DNA, 15 bp, Homo sapiens
aaacggcagctgagc

SEQ ID NO: 16998 - DNA, 15 bp, Homo sapiens
caaacggcagctgag

SEQ ID NO: 16999 - DNA, 15 bp, Homo sapiens
tcaaacggcagctga

SEQ ID NO: 17000 - DNA, 15 bp, Homo sapiens
gtcaaacggcagctg

SEQ ID NO: 17001 - DNA, 15 bp, Homo sapiens
agtcaaacggcagct

SEQ ID NO: 17002 - DNA, 15 bp, Homo sapiens
cagtcaaacggcagc

SEQ ID NO: 17003 - DNA, 15 bp, Homo sapiens
acagtcaaacggcag

SEQ ID NO: 17004 - DNA, 15 bp, Homo sapiens
cacagtcaaacggca

SEQ ID NO: 17005 - DNA, 15 bp, Homo sapiens
ccacagtcaaacggc

SEQ ID NO: 17006 - DNA, 15 bp, Homo sapiens
accacagtcaaacgg

SEQ ID NO: 17007 - DNA, 15 bp, Homo sapiens
aaccacagtcaaacg

SEQ ID NO: 17008 - DNA, 15 bp, Homo sapiens
caaccacagtcaaac

SEQ ID NO: 17009 - DNA, 15 bp, Homo sapiens
acaaccacagtcaaa

SEQ ID NO: 17010 - DNA, 15 bp, Homo sapiens
aacaaccacagtcaa

SEQ ID NO: 17011 - DNA, 15 bp, Homo sapiens
caacaaccacagtca

SEQ ID NO: 17012 - DNA, 15 bp, Homo sapiens
ccaacaaccacagtc

SEQ ID NO: 17013 - DNA, 15 bp, Homo sapiens
accaacaaccacagt

SEQ ID NO: 17014 - DNA, 15 bp, Homo sapiens
gaccaacaaccacag

SEQ ID NO: 17015 - DNA, 15 bp, Homo sapiens
agaccaacaaccaca

SEQ ID NO: 17016 - DNA, 15 bp, Homo sapiens
cagaccaacaaccac

SEQ ID NO: 17017 - DNA, 15 bp, Homo sapiens
tcagaccaacaacca

SEQ ID NO: 17018 - DNA, 15 bp, Homo sapiens
ttcagaccaacaacc

SEQ ID NO: 17019 - DNA, 15 bp, Homo sapiens
tttcagaccaacaac

SEQ ID NO: 17020 - DNA, 15 bp, Homo sapiens
ctttcagaccaacaa

SEQ ID NO: 17021 - DNA, 15 bp, Homo sapiens
actttcagaccaaca

SEQ ID NO: 17022 - DNA, 15 bp, Homo sapiens
cactttcagaccaac

SEQ ID NO: 17023 - DNA, 15 bp, Homo sapiens
ccactttcagaccaa

SEQ ID NO: 17024 - DNA, 15 bp, Homo sapiens
tccactttcagacca

SEQ ID NO: 17025 - DNA, 15 bp, Homo sapiens
ctccactttcagacc

SEQ ID NO: 17026 - DNA, 15 bp, Homo sapiens
tctccactttcagac

SEQ ID NO: 17027 - DNA, 15 bp, Homo sapiens
ctctccactttcaga

SEQ ID NO: 17028 - DNA, 15 bp, Homo sapiens
tctctccactttcag

SEQ ID NO: 17029 - DNA, 15 bp, Homo sapiens
ctctctccactttca

SEQ ID NO: 17030 - DNA, 15 bp, Homo sapiens
tctctctccactttc

SEQ ID NO: 17031 - DNA, 15 bp, Homo sapiens
gtctctctccacttt

SEQ ID NO: 17032 - DNA, 15 bp, Homo sapiens
ggtctctctccactt

SEQ ID NO: 17033 - DNA, 15 bp, Homo sapiens
tggtctctctccact

SEQ ID NO: 17034 - DNA, 15 bp, Homo sapiens
ctggtctctctccac

SEQ ID NO: 17035 - DNA, 15 bp, Homo sapiens
tctggtctctctcca

SEQ ID NO: 17036 - DNA, 15 bp, Homo sapiens
atctggtctctctcc

SEQ ID NO: 17037 - DNA, 15 bp, Homo sapiens
gatctggtctctctc

SEQ ID NO: 17038 - DNA, 15 bp, Homo sapiens
agatctggtctctct

SEQ ID NO: 17039 - DNA, 15 bp, Homo sapiens
aagatctggtctctc

SEQ ID NO: 17040 - DNA, 15 bp, Homo sapiens
gaagatctggtctct

SEQ ID NO: 17041 - DNA, 15 bp, Homo sapiens
ggaagatctggtctc

SEQ ID NO: 17042 - DNA, 15 bp, Homo sapiens
aggaagatctggtct

SEQ ID NO: 17043 - DNA, 15 bp, Homo sapiens
caggaagatctggtc

SEQ ID NO: 17044 - DNA, 15 bp, Homo sapiens
tcaggaagatctggt

SEQ ID NO: 17045 - DNA, 15 bp, Homo sapiens
ttcaggaagatctgg

SEQ ID NO: 17046 - DNA, 15 bp, Homo sapiens
cttcaggaagatctg

SEQ ID NO: 17047 - DNA, 15 bp, Homo sapiens
tcttcaggaagatct

SEQ ID NO: 17048 - DNA, 15 bp, Homo sapiens
ctcttcaggaagatc

SEQ ID NO: 17049 - DNA, 15 bp, Homo sapiens
gctcttcaggaagat

SEQ ID NO: 17050 - DNA, 15 bp, Homo sapiens
agctcttcaggaaga

SEQ ID NO: 17051 - DNA, 15 bp, Homo sapiens
gagctcttcaggaag

SEQ ID NO: 17052 - DNA, 15 bp, Homo sapiens
ggagctcttcaggaa

SEQ ID NO: 17053 - DNA, 15 bp, Homo sapiens
tggagctcttcagga

SEQ ID NO: 17054 - DNA, 15 bp, Homo sapiens
gtggagctcttcagg

SEQ ID NO: 17055 - DNA, 15 bp, Homo sapiens
tgtggagctcttcag

SEQ ID NO: 17056 - DNA, 15 bp, Homo sapiens
atgtggagctcttca

SEQ ID NO: 17057 - DNA, 15 bp, Homo sapiens
gatgtggagctcttc

SEQ ID NO: 17058 - DNA, 15 bp, Homo sapiens
tgatgtggagctctt

SEQ ID NO: 17059 - DNA, 15 bp, Homo sapiens
atgatgtggagctct

SEQ ID NO: 17060 - DNA, 15 bp, Homo sapiens
catgatgtggagctc

SEQ ID NO: 17061 - DNA, 15 bp, Homo sapiens
gcatgatgtggagct

SEQ ID NO: 17062 - DNA, 15 bp, Homo sapiens
agcatgatgtggagc

SEQ ID NO: 17063 - DNA, 15 bp, Homo sapiens
gagcatgatgtggag

SEQ ID NO: 17064 - DNA, 15 bp, Homo sapiens
tgagcatgatgtgga

SEQ ID NO: 17065 - DNA, 15 bp, Homo sapiens
ttgagcatgatgtgg

SEQ ID NO: 17066 - DNA, 15 bp, Homo sapiens
gttgagcatgatgtg

SEQ ID NO: 17067 - DNA, 15 bp, Homo sapiens
agttgagcatgatgt

SEQ ID NO: 17068 - DNA, 15 bp, Homo sapiens
cagttgagcatgatg

SEQ ID NO: 17069 - DNA, 15 bp, Homo sapiens
acagttgagcatgat

SEQ ID NO: 17070 - DNA, 15 bp, Homo sapiens
cacagttgagcatga

SEQ ID NO: 17071 - DNA, 15 bp, Homo sapiens
acacagttgagcatg

SEQ ID NO: 17072 - DNA, 15 bp, Homo sapiens
cacacagttgagcat

SEQ ID NO: 17073 - DNA, 15 bp, Homo sapiens
gcacacagttgagca

SEQ ID NO: 17074 - DNA, 15 bp, Homo sapiens
agcacacagttgagc

SEQ ID NO: 17075 - DNA, 15 bp, Homo sapiens
cagcacacagttgag

SEQ ID NO: 17076 - DNA, 15 bp, Homo sapiens
ccagcacacagttga

SEQ ID NO: 17077 - DNA, 15 bp, Homo sapiens
cccagcacacagttg

SEQ ID NO: 17078 - DNA, 15 bp, Homo sapiens
gcccagcacacagtt

SEQ ID NO: 17079 - DNA, 15 bp, Homo sapiens
ggcccagcacacagt

SEQ ID NO: 17080 - DNA, 15 bp, Homo sapiens
aggcccagcacacag

SEQ ID NO: 17081 - DNA, 15 bp, Homo sapiens
aaggcccagcacaca

SEQ ID NO: 17082 - DNA, 15 bp, Homo sapiens
aaaggcccagcacac

SEQ ID NO: 17083 - DNA, 15 bp, Homo sapiens
aaaaggcccagcaca

SEQ ID NO: 17084 - DNA, 15 bp, Homo sapiens
aaaaaggcccagcac

SEQ ID NO: 17085 - DNA, 15 bp, Homo sapiens
gaaaaaggcccagca

SEQ ID NO: 17086 - DNA, 15 bp, Homo sapiens
agaaaaaggcccagc

SEQ ID NO: 17087 - DNA, 15 bp, Homo sapiens
gagaaaaaggcccag

SEQ ID NO: 17088 - DNA, 15 bp, Homo sapiens
agagaaaaaggccca

SEQ ID NO: 17089 - DNA, 15 bp, Homo sapiens
gagagaaaaaggccc

SEQ ID NO: 17090 - DNA, 15 bp, Homo sapiens
agagagaaaaaggcc

SEQ ID NO: 17091 - DNA, 15 bp, Homo sapiens
cagagagaaaaaggc

SEQ ID NO: 17092 - DNA, 15 bp, Homo sapiens
tcagagagaaaaagg

SEQ ID NO: 17093 - DNA, 15 bp, Homo sapiens
gtcagagagaaaaag

SEQ ID NO: 17094 - DNA, 15 bp, Homo sapiens
agtcagagagaaaaa

SEQ ID NO: 17095 - DNA, 15 bp, Homo sapiens
aagtcagagagaaaa

SEQ ID NO: 17096 - DNA, 15 bp, Homo sapiens
gaagtcagagagaaa

SEQ ID NO: 17097 - DNA, 15 bp, Homo sapiens
agaagtcagagagaa

SEQ ID NO: 17098 - DNA, 15 bp, Homo sapiens
cagaagtcagagaga

SEQ ID NO: 17099 - DNA, 15 bp, Homo sapiens
acagaagtcagagag

SEQ ID NO: 17100 - DNA, 15 bp, Homo sapiens
cacagaagtcagaga

SEQ ID NO: 17101 - DNA, 15 bp, Homo sapiens
acacagaagtcagag

SEQ ID NO: 17102 - DNA, 15 bp, Homo sapiens
gacacagaagtcaga

SEQ ID NO: 17103 - DNA, 15 bp, Homo sapiens
tgacacagaagtcag

SEQ ID NO: 17104 - DNA, 15 bp, Homo sapiens
gtgacacagaagtca

SEQ ID NO: 17105 - DNA, 15 bp, Homo sapiens
agtgacacagaagtc

SEQ ID NO: 17106 - DNA, 15 bp, Homo sapiens
aagtgacacagaagt

SEQ ID NO: 17107 - DNA, 15 bp, Homo sapiens
taagtgacacagaag

SEQ ID NO: 17108 - DNA, 15 bp, Homo sapiens
ctaagtgacacagaa

SEQ ID NO: 17109 - DNA, 15 bp, Homo sapiens
actaagtgacacaga

SEQ ID NO: 17110 - DNA, 15 bp, Homo sapiens
aactaagtgacacag

SEQ ID NO: 17111 - DNA, 15 bp, Homo sapiens
caactaagtgacaca

SEQ ID NO: 17112 - DNA, 15 bp, Homo sapiens
gcaactaagtgacac

SEQ ID NO: 17113 - DNA, 15 bp, Homo sapiens
ggcaactaagtgaca

SEQ ID NO: 17114 - DNA, 15 bp, Homo sapiens
tggcaactaagtgac

SEQ ID NO: 17115 - DNA, 15 bp, Homo sapiens
ctggcaactaagtga

SEQ ID NO: 17116 - DNA, 15 bp, Homo sapiens
actggcaactaagtg

SEQ ID NO: 17117 - DNA, 15 bp, Homo sapiens
aactggcaactaagt

SEQ ID NO: 17118 - DNA, 15 bp, Homo sapiens
taactggcaactaag

SEQ ID NO: 17119 - DNA, 15 bp, Homo sapiens
ttaactggcaactaa

SEQ ID NO: 17120 - DNA, 15 bp, Homo sapiens
tttaactggcaacta

SEQ ID NO: 17121 - DNA, 15 bp, Homo sapiens
ttttaactggcaact

SEQ ID NO: 17122 - DNA, 15 bp, Homo sapiens
attttaactggcaac

SEQ ID NO: 17123 - DNA, 15 bp, Homo sapiens
cattttaactggcaa

SEQ ID NO: 17124 - DNA, 15 bp, Homo sapiens
gcattttaactggca

SEQ ID NO: 17125 - DNA, 15 bp, Homo sapiens
agcattttaactggc

SEQ ID NO: 17126 - DNA, 15 bp, Homo sapiens
cagcattttaactgg

SEQ ID NO: 17127 - DNA, 15 bp, Homo sapiens
acagcattttaactg

SEQ ID NO: 17128 - DNA, 15 bp, Homo sapiens
aacagcattttaact

SEQ ID NO: 17129 - DNA, 15 bp, Homo sapiens
aaacagcattttaac

SEQ ID NO: 17130 - DNA, 15 bp, Homo sapiens
taaacagcattttaa

SEQ ID NO: 17131 - DNA, 15 bp, Homo sapiens
ctaaacagcatttta

SEQ ID NO: 17132 - DNA, 15 bp, Homo sapiens
tctaaacagcatttt

SEQ ID NO: 17133 - DNA, 15 bp, Homo sapiens
gtctaaacagcattt

SEQ ID NO: 17134 - DNA, 15 bp, Homo sapiens
agtctaaacagcatt

SEQ ID NO: 17135 - DNA, 15 bp, Homo sapiens
cagtctaaacagcat

SEQ ID NO: 17136 - DNA, 15 bp, Homo sapiens
gcagtctaaacagca

SEQ ID NO: 17137 - DNA, 15 bp, Homo sapiens
agcagtctaaacagc

SEQ ID NO: 17138 - DNA, 15 bp, Homo sapiens
cagcagtctaaacag

SEQ ID NO: 17139 - DNA, 15 bp, Homo sapiens
ccagcagtctaaaca

SEQ ID NO: 17140 - DNA, 15 bp, Homo sapiens
cccagcagtctaaac

SEQ ID NO: 17141 - DNA, 15 bp, Homo sapiens
acccagcagtctaaa

SEQ ID NO: 17142 - DNA, 15 bp, Homo sapiens
aacccagcagtctaa

SEQ ID NO: 17143 - DNA, 15 bp, Homo sapiens
taacccagcagtcta

SEQ ID NO: 17144 - DNA, 15 bp, Homo sapiens
ataacccagcagtct

SEQ ID NO: 17145 - DNA, 15 bp, Homo sapiens
cataacccagcagtc

SEQ ID NO: 17146 - DNA, 15 bp, Homo sapiens
tcataacccagcagt

SEQ ID NO: 17147 - DNA, 15 bp, Homo sapiens
ttcataacccagcag

SEQ ID NO: 17148 - DNA, 15 bp, Homo sapiens
gttcataacccagca

SEQ ID NO: 17149 - DNA, 15 bp, Homo sapiens
cgttcataacccagc

SEQ ID NO: 17150 - DNA, 15 bp, Homo sapiens
tcgttcataacccag

SEQ ID NO: 17151 - DNA, 15 bp, Homo sapiens
ctcgttcataaccca

SEQ ID NO: 17152 - DNA, 15 bp, Homo sapiens
actcgttcataaccc

SEQ ID NO: 17153 - DNA, 15 bp, Homo sapiens
gactcgttcataacc

SEQ ID NO: 17154 - DNA, 15 bp, Homo sapiens
cgactcgttcataac

SEQ ID NO: 17155 - DNA, 15 bp, Homo sapiens
acgactcgttcataa

SEQ ID NO: 17156 - DNA, 15 bp, Homo sapiens
cacgactcgttcata

SEQ ID NO: 17157 - DNA, 15 bp, Homo sapiens
ccacgactcgttcat

SEQ ID NO: 17158 - DNA, 15 bp, Homo sapiens
tccacgactcgttca

SEQ ID NO: 17159 - DNA, 15 bp, Homo sapiens
ctccacgactcgttc

SEQ ID NO: 17160 - DNA, 15 bp, Homo sapiens
actccacgactcgtt

SEQ ID NO: 17161 - DNA, 15 bp, Homo sapiens
cactccacgactcgt

SEQ ID NO: 17162 - DNA, 15 bp, Homo sapiens
ccactccacgactcg

SEQ ID NO: 17163 - DNA, 15 bp, Homo sapiens
accactccacgactc

SEQ ID NO: 17164 - DNA, 15 bp, Homo sapiens
taccactccacgact

SEQ ID NO: 17165 - DNA, 15 bp, Homo sapiens
ctaccactccacgac

SEQ ID NO: 17166 - DNA, 15 bp, Homo sapiens
actaccactccacga

SEQ ID NO: 17167 - DNA, 15 bp, Homo sapiens
aactaccactccacg

SEQ ID NO: 17168 - DNA, 15 bp, Homo sapiens
gaactaccactccac

SEQ ID NO: 17169 - DNA, 15 bp, Homo sapiens
agaactaccactcca

SEQ ID NO: 17170 - DNA, 15 bp, Homo sapiens
tagaactaccactcc

SEQ ID NO: 17171 - DNA, 15 bp, Homo sapiens
ttagaactaccactc

SEQ ID NO: 17172 - DNA, 15 bp, Homo sapiens
gttagaactaccact

SEQ ID NO: 17173 - DNA, 15 bp, Homo sapiens
tgttagaactaccac

SEQ ID NO: 17174 - DNA, 15 bp, Homo sapiens
ctgttagaactacca

SEQ ID NO: 17175 - DNA, 15 bp, Homo sapiens
tctgttagaactacc

SEQ ID NO: 17176 - DNA, 15 bp, Homo sapiens
ttctgttagaactac

SEQ ID NO: 17177 - DNA, 15 bp, Homo sapiens
attctgttagaacta

SEQ ID NO: 17178 - DNA, 15 bp, Homo sapiens
gattctgttagaact

SEQ ID NO: 17179 - DNA, 15 bp, Homo sapiens
tgattctgttagaac

SEQ ID NO: 17180 - DNA, 15 bp, Homo sapiens
ctgattctgttagaa

SEQ ID NO: 17181 - DNA, 15 bp, Homo sapiens
cctgattctgttaga

SEQ ID NO: 17182 - DNA, 15 bp, Homo sapiens
ccctgattctgttag

SEQ ID NO: 17183 - DNA, 15 bp, Homo sapiens
cccctgattctgtta

SEQ ID NO: 17184 - DNA, 15 bp, Homo sapiens
ccccctgattctgtt

SEQ ID NO: 17185 - DNA, 15 bp, Homo sapiens
cccccctgattctgt

SEQ ID NO: 17186 - DNA, 15 bp, Homo sapiens
acccccctgattctg

SEQ ID NO: 17187 - DNA, 15 bp, Homo sapiens
cagtgactacagagg

SEQ ID NO: 17188 - DNA, 15 bp, Homo sapiens
ccagtgactacagag

SEQ ID NO: 17189 - DNA, 15 bp, Homo sapiens
gccagtgactacaga

SEQ ID NO: 17190 - DNA, 15 bp, Homo sapiens
agccagtgactacag

SEQ ID NO: 17191 - DNA, 15 bp, Homo sapiens
cagccagtgactaca

SEQ ID NO: 17192 - DNA, 15 bp, Homo sapiens
gcagccagtgactac

SEQ ID NO: 17193 - DNA, 15 bp, Homo sapiens
tgcagccagtgacta

SEQ ID NO: 17194 - DNA, 15 bp, Homo sapiens
ttgcagccagtgact

SEQ ID NO: 17195 - DNA, 15 bp, Homo sapiens
tttgcagccagtgac

SEQ ID NO: 17196 - DNA, 15 bp, Homo sapiens
ttttgcagccagtga

SEQ ID NO: 17197 - DNA, 15 bp, Homo sapiens
gttttgcagccagtg

SEQ ID NO: 17198 - DNA, 15 bp, Homo sapiens
tgttttgcagccagt

SEQ ID NO: 17199 - DNA, 15 bp, Homo sapiens
ctgttttgcagccag

SEQ ID NO: 17200 - DNA, 15 bp, Homo sapiens
gctgttttgcagcca

SEQ ID NO: 17201 - DNA, 15 bp, Homo sapiens
tgctgttttgcagcc

SEQ ID NO: 17202 - DNA, 15 bp, Homo sapiens
atgctgttttgcagc

SEQ ID NO: 17203 - DNA, 15 bp, Homo sapiens
tatgctgttttgcag

SEQ ID NO: 17204 - DNA, 15 bp, Homo sapiens
ctatgctgttttgca

SEQ ID NO: 17205 - DNA, 15 bp, Homo sapiens
cctatgctgttttgc

SEQ ID NO: 17206 - DNA, 15 bp, Homo sapiens
ccctatgctgttttg

SEQ ID NO: 17207 - DNA, 15 bp, Homo sapiens
tccctatgctgtttt

SEQ ID NO: 17208 - DNA, 15 bp, Homo sapiens
ttccctatgctgttt

SEQ ID NO: 17209 - DNA, 15 bp, Homo sapiens
attccctatgctgtt

SEQ ID NO: 17210 - DNA, 15 bp, Homo sapiens
cattccctatgctgt

SEQ ID NO: 17211 - DNA, 15 bp, Homo sapiens
gcattccctatgctg

SEQ ID NO: 17212 - DNA, 15 bp, Homo sapiens
agcattccctatgct

SEQ ID NO: 17213 - DNA, 15 bp, Homo sapiens
tagcattccctatgc

SEQ ID NO: 17214 - DNA, 15 bp, Homo sapiens
gtagcattccctatg

SEQ ID NO: 17215 - DNA, 15 bp, Homo sapiens
ggtagcattccctat

SEQ ID NO: 17216 - DNA, 15 bp, Homo sapiens
gggtagcattcccta

SEQ ID NO: 17217 - DNA, 15 bp, Homo sapiens
agggtagcattccct

SEQ ID NO: 17218 - DNA, 15 bp, Homo sapiens
cagggtagcattccc

SEQ ID NO: 17219 - DNA, 15 bp, Homo sapiens
ccagggtagcattcc

SEQ ID NO: 17220 - DNA, 15 bp, Homo sapiens
gccagggtagcattc

SEQ ID NO: 17221 - DNA, 15 bp, Homo sapiens
tgccagggtagcatt

SEQ ID NO: 17222 - DNA, 15 bp, Homo sapiens
gtgccagggtagcat

SEQ ID NO: 17223 - DNA, 15 bp, Homo sapiens
agtgccagggtagca

SEQ ID NO: 17224 - DNA, 15 bp, Homo sapiens
gagtgccagggtagc

SEQ ID NO: 17225 - DNA, 15 bp, Homo sapiens
tgagtgccagggtag

SEQ ID NO: 17226 - DNA, 15 bp, Homo sapiens
ctgagtgccagggta

SEQ ID NO: 17227 - DNA, 15 bp, Homo sapiens
cctgagtgccagggt

SEQ ID NO: 17228 - DNA, 15 bp, Homo sapiens
ccctgagtgccaggg

SEQ ID NO: 17229 - DNA, 15 bp, Homo sapiens
accctgagtgccagg

SEQ ID NO: 17230 - DNA, 15 bp, Homo sapiens
aaccctgagtgccag

SEQ ID NO: 17231 - DNA, 15 bp, Homo sapiens
caaccctgagtgcca

SEQ ID NO: 17232 - DNA, 15 bp, Homo sapiens
acaaccctgagtgcc

SEQ ID NO: 17233 - DNA, 15 bp, Homo sapiens
aacaaccctgagtgc

SEQ ID NO: 17234 - DNA, 15 bp, Homo sapiens
caacaaccctgagtg

SEQ ID NO: 17235 - DNA, 15 bp, Homo sapiens
acaacaaccctgagt

SEQ ID NO: 17236 - DNA, 15 bp, Homo sapiens
cacaacaaccctgag

SEQ ID NO: 17237 - DNA, 15 bp, Homo sapiens
ccacaacaaccctga

SEQ ID NO: 17238 - DNA, 15 bp, Homo sapiens
cccacaacaaccctg

SEQ ID NO: 17239 - DNA, 15 bp, Homo sapiens
ccccacaacaaccct

SEQ ID NO: 17240 - DNA, 15 bp, Homo sapiens
tccccacaacaaccc

SEQ ID NO: 17241 - DNA, 15 bp, Homo sapiens
gtccccacaacaacc

SEQ ID NO: 17242 - DNA, 15 bp, Homo sapiens
agtccccacaacaac

SEQ ID NO: 17243 - DNA, 15 bp, Homo sapiens
cagtccccacaacaa

SEQ ID NO: 17244 - DNA, 15 bp, Homo sapiens
tcagtccccacaaca

SEQ ID NO: 17245 - DNA, 15 bp, Homo sapiens
ttcagtccccacaac

SEQ ID NO: 17246 - DNA, 15 bp, Homo sapiens
tttcagtccccacaa

SEQ ID NO: 17247 - DNA, 15 bp, Homo sapiens
ttttcagtccccaca

SEQ ID NO: 17248 - DNA, 15 bp, Homo sapiens
cttttcagtccccac

SEQ ID NO: 17249 - DNA, 15 bp, Homo sapiens
gcttttcagtcccca

SEQ ID NO: 17250 - DNA, 15 bp, Homo sapiens
tgcttttcagtcccc

SEQ ID NO: 17251 - DNA, 15 bp, Homo sapiens
atgcttttcagtccc

SEQ ID NO: 17252 - DNA, 15 bp, Homo sapiens
catgcttttcagtcc

SEQ ID NO: 17253 - DNA, 15 bp, Homo sapiens
ccatgcttttcagtc

SEQ ID NO: 17254 - DNA, 15 bp, Homo sapiens
cccatgcttttcagt

SEQ ID NO: 17255 - DNA, 15 bp, Homo sapiens
gcccatgcttttcag

SEQ ID NO: 17256 - DNA, 15 bp, Homo sapiens
agcccatgcttttca

SEQ ID NO: 17257 - DNA, 15 bp, Homo sapiens
tagcccatgcttttc

SEQ ID NO: 17258 - DNA, 15 bp, Homo sapiens
ctagcccatgctttt

SEQ ID NO: 17259 - DNA, 15 bp, Homo sapiens
cctagcccatgcttt

SEQ ID NO: 17260 - DNA, 15 bp, Homo sapiens
acctagcccatgctt

SEQ ID NO: 17261 - DNA, 15 bp, Homo sapiens
aacctagcccatgct

SEQ ID NO: 17262 - DNA, 15 bp, Homo sapiens
taacctagcccatgc

SEQ ID NO: 17263 - DNA, 15 bp, Homo sapiens
ataacctagcccatg

SEQ ID NO: 17264 - DNA, 15 bp, Homo sapiens
aataacctagcccat

SEQ ID NO: 17265 - DNA, 15 bp, Homo sapiens
aaataacctagccca

SEQ ID NO: 17266 - DNA, 15 bp, Homo sapiens
gaaataacctagccc

SEQ ID NO: 17267 - DNA, 15 bp, Homo sapiens
tgaaataacctagcc

SEQ ID NO: 17268 - DNA, 15 bp, Homo sapiens
atgaaataacctagc

SEQ ID NO: 17269 - DNA, 15 bp, Homo sapiens
aatgaaataacctag

SEQ ID NO: 17270 - DNA, 15 bp, Homo sapiens
aaatgaaataaccta

SEQ ID NO: 17271 - DNA, 15 bp, Homo sapiens
taaatgaaataacct

SEQ ID NO: 17272 - DNA, 15 bp, Homo sapiens
ctaaatgaaataacc

SEQ ID NO: 17273 - DNA, 15 bp, Homo sapiens
actaaatgaaataac

SEQ ID NO: 17274 - DNA, 15 bp, Homo sapiens
cactaaatgaaataa

SEQ ID NO: 17275 - DNA, 15 bp, Homo sapiens
ccactaaatgaaata

SEQ ID NO: 17276 - DNA, 15 bp, Homo sapiens
accactaaatgaaat

SEQ ID NO: 17277 - DNA, 15 bp, Homo sapiens
caccactaaatgaaa

SEQ ID NO: 17278 - DNA, 15 bp, Homo sapiens
ccaccactaaatgaa

SEQ ID NO: 17279 - DNA, 15 bp, Homo sapiens
gccaccactaaatga

SEQ ID NO: 17280 - DNA, 15 bp, Homo sapiens
ggccaccactaaatg

SEQ ID NO: 17281 - DNA, 15 bp, Homo sapiens
tggccaccactaaat

SEQ ID NO: 17282 - DNA, 15 bp, Homo sapiens
atggccaccactaaa

SEQ ID NO: 17283 - DNA, 15 bp, Homo sapiens
catggccaccactaa

SEQ ID NO: 17284 - DNA, 15 bp, Homo sapiens
ccatggccaccacta

SEQ ID NO: 17285 - DNA, 15 bp, Homo sapiens
gccatggccaccact

SEQ ID NO: 17286 - DNA, 15 bp, Homo sapiens
tgccatggccaccac

SEQ ID NO: 17287 - DNA, 15 bp, Homo sapiens
ttgccatggccacca

SEQ ID NO: 17288 - DNA, 15 bp, Homo sapiens
attgccatggccacc

SEQ ID NO: 17289 - DNA, 15 bp, Homo sapiens
aattgccatggccac

SEQ ID NO: 17290 - DNA, 15 bp, Homo sapiens
gaattgccatggcca

SEQ ID NO: 17291 - DNA, 15 bp, Homo sapiens
agaattgccatggcc

SEQ ID NO: 17292 - DNA, 15 bp, Homo sapiens
aagaattgccatggc

SEQ ID NO: 17293 - DNA, 15 bp, Homo sapiens
gaagaattgccatgg

SEQ ID NO: 17294 - DNA, 15 bp, Homo sapiens
ggaagaattgccatg

SEQ ID NO: 17295 - DNA, 15 bp, Homo sapiens
tggaagaattgccat

SEQ ID NO: 17296 - DNA, 15 bp, Homo sapiens
atggaagaattgcca

SEQ ID NO: 17297 - DNA, 15 bp, Homo sapiens
gatggaagaattgcc

SEQ ID NO: 17298 - DNA, 15 bp, Homo sapiens
ggatggaagaattgc

SEQ ID NO: 17299 - DNA, 15 bp, Homo sapiens
gggatggaagaattg

SEQ ID NO: 17300 - DNA, 15 bp, Homo sapiens
ggggatggaagaatt

SEQ ID NO: 17301 - DNA, 15 bp, Homo sapiens
tggggatggaagaat

SEQ ID NO: 17302 - DNA, 15 bp, Homo sapiens
ttggggatggaagaa

SEQ ID NO: 17303 - DNA, 15 bp, Homo sapiens
cttggggatggaaga

SEQ ID NO: 17304 - DNA, 15 bp, Homo sapiens
gcttggggatggaag

SEQ ID NO: 17305 - DNA, 15 bp, Homo sapiens
agcttggggatggaa

SEQ ID NO: 17306 - DNA, 15 bp, Homo sapiens
aagcttggggatgga

SEQ ID NO: 17307 - DNA, 15 bp, Homo sapiens
caagcttggggatgg

SEQ ID NO: 17308 - DNA, 15 bp, Homo sapiens
ccaagcttggggatg

SEQ ID NO: 17309 - DNA, 15 bp, Homo sapiens
cccaagcttggggat

SEQ ID NO: 17310 - DNA, 15 bp, Homo sapiens
gcccaagcttgggga

SEQ ID NO: 17311 - DNA, 15 bp, Homo sapiens
tgcccaagcttgggg

SEQ ID NO: 17312 - DNA, 15 bp, Homo sapiens
gtgcccaagcttggg

SEQ ID NO: 17313 - DNA, 15 bp, Homo sapiens
tgtgcccaagcttgg

SEQ ID NO: 17314 - DNA, 15 bp, Homo sapiens
gtgtgcccaagcttg

SEQ ID NO: 17315 - DNA, 15 bp, Homo sapiens
tgtgtgcccaagctt

SEQ ID NO: 17316 - DNA, 15 bp, Homo sapiens
ttgtgtgcccaagct

SEQ ID NO: 17317 - DNA, 15 bp, Homo sapiens
tttgtgtgcccaagc

SEQ ID NO: 17318 - DNA, 15 bp, Homo sapiens
ctttgtgtgcccaag

SEQ ID NO: 17319 - DNA, 15 bp, Homo sapiens
actttgtgtgcccaa

SEQ ID NO: 17320 - DNA, 15 bp, Homo sapiens
gactttgtgtgccca

SEQ ID NO: 17321 - DNA, 15 bp, Homo sapiens
ggactttgtgtgccc

SEQ ID NO: 17322 - DNA, 15 bp, Homo sapiens
tggactttgtgtgcc

SEQ ID NO: 17323 - DNA, 15 bp, Homo sapiens
ttggactttgtgtgc

SEQ ID NO: 17324 - DNA, 15 bp, Homo sapiens
tttggactttgtgtg

SEQ ID NO: 17325 - DNA, 15 bp, Homo sapiens
ctttggactttgtgt

SEQ ID NO: 17326 - DNA, 15 bp, Homo sapiens
cctttggactttgtg

SEQ ID NO: 17327 - DNA, 15 bp, Homo sapiens
gcctttggactttgt

SEQ ID NO: 17328 - DNA, 15 bp, Homo sapiens
ggcctttggactttg

SEQ ID NO: 17329 - DNA, 15 bp, Homo sapiens
aggcctttggacttt

SEQ ID NO: 17330 - DNA, 15 bp, Homo sapiens
caggcctttggactt

SEQ ID NO: 17331 - DNA, 15 bp, Homo sapiens
ccaggcctttggact

SEQ ID NO: 17332 - DNA, 15 bp, Homo sapiens
tccaggcctttggac

SEQ ID NO: 17333 - DNA, 15 bp, Homo sapiens
ctccaggcctttgga

SEQ ID NO: 17334 - DNA, 15 bp, Homo sapiens
actccaggcctttgg

SEQ ID NO: 17335 - DNA, 15 bp, Homo sapiens
cactccaggcctttg

SEQ ID NO: 17336 - DNA, 15 bp, Homo sapiens
gcactccaggccttt

SEQ ID NO: 17337 - DNA, 15 bp, Homo sapiens
ggcactccaggcctt

SEQ ID NO: 17338 - DNA, 15 bp, Homo sapiens
gggcactccaggcct

SEQ ID NO: 17339 - DNA, 15 bp, Homo sapiens
agggcactccaggcc

SEQ ID NO: 17340 - DNA, 15 bp, Homo sapiens
tagggcactccaggc

SEQ ID NO: 17341 - DNA, 15 bp, Homo sapiens
ctagggcactccagg

SEQ ID NO: 17342 - DNA, 15 bp, Homo sapiens
cctagggcactccag

SEQ ID NO: 17343 - DNA, 15 bp, Homo sapiens
gcctagggcactcca

SEQ ID NO: 17344 - DNA, 15 bp, Homo sapiens
tgcctagggcactcc

SEQ ID NO: 17345 - DNA, 15 bp, Homo sapiens
ctgcctagggcactc

SEQ ID NO: 17346 - DNA, 15 bp, Homo sapiens
gctgcctagggcact

SEQ ID NO: 17347 - DNA, 15 bp, Homo sapiens
agctgcctagggcac

SEQ ID NO: 17348 - DNA, 15 bp, Homo sapiens
aagctgcctagggca

SEQ ID NO: 17349 - DNA, 15 bp, Homo sapiens
aaagctgcctagggc

SEQ ID NO: 17350 - DNA, 15 bp, Homo sapiens
aaaagctgcctaggg

SEQ ID NO: 17351 - DNA, 15 bp, Homo sapiens
gaaaagctgcctagg

SEQ ID NO: 17352 - DNA, 15 bp, Homo sapiens
tgaaaagctgcctag

SEQ ID NO: 17353 - DNA, 15 bp, Homo sapiens
ttgaaaagctgccta

SEQ ID NO: 17354 - DNA, 15 bp, Homo sapiens
tttgaaaagctgcct

SEQ ID NO: 17355 - DNA, 15 bp, Homo sapiens
ctttgaaaagctgcc

SEQ ID NO: 17356 - DNA, 15 bp, Homo sapiens
cctttgaaaagctgc

SEQ ID NO: 17357 - DNA, 15 bp, Homo sapiens
acctttgaaaagctg

SEQ ID NO: 17358 - DNA, 15 bp, Homo sapiens
aacctttgaaaagct

SEQ ID NO: 17359 - DNA, 15 bp, Homo sapiens
gaacctttgaaaagc

SEQ ID NO: 17360 - DNA, 15 bp, Homo sapiens
cgaacctttgaaaag

SEQ ID NO: 17361 - DNA, 15 bp, Homo sapiens
tcgaacctttgaaaa

SEQ ID NO: 17362 - DNA, 15 bp, Homo sapiens
gtcgaacctttgaaa

SEQ ID NO: 17363 - DNA, 15 bp, Homo sapiens
agtcgaacctttgaa

SEQ ID NO: 17364 - DNA, 15 bp, Homo sapiens
gagtcgaacctttga

SEQ ID NO: 17365 - DNA, 15 bp, Homo sapiens
ggagtcgaacctttg

SEQ ID NO: 17366 - DNA, 15 bp, Homo sapiens
aggagtcgaaccttt

SEQ ID NO: 17367 - DNA, 15 bp, Homo sapiens
gaggagtcgaacctt

SEQ ID NO: 17368 - DNA, 15 bp, Homo sapiens
agaggagtcgaacct

SEQ ID NO: 17369 - DNA, 15 bp, Homo sapiens
gagaggagtcgaacc

SEQ ID NO: 17370 - DNA, 15 bp, Homo sapiens
tgagaggagtcgaac

SEQ ID NO: 17371 - DNA, 15 bp, Homo sapiens
gtgagaggagtcgaa

SEQ ID NO: 17372 - DNA, 15 bp, Homo sapiens
agtgagaggagtcga

SEQ ID NO: 17373 - DNA, 15 bp, Homo sapiens
cagtgagaggagtcg

SEQ ID NO: 17374 - DNA, 15 bp, Homo sapiens
acagtgagaggagtc

SEQ ID NO: 17375 - DNA, 15 bp, Homo sapiens
aacagtgagaggagt

SEQ ID NO: 17376 - DNA, 15 bp, Homo sapiens
caacagtgagaggag

SEQ ID NO: 17377 - DNA, 15 bp, Homo sapiens
ccaacagtgagagga

SEQ ID NO: 17378 - DNA, 15 bp, Homo sapiens
tccaacagtgagagg

SEQ ID NO: 17379 - DNA, 15 bp, Homo sapiens
ctccaacagtgagag

SEQ ID NO: 17380 - DNA, 15 bp, Homo sapiens
tctccaacagtgaga

SEQ ID NO: 17381 - DNA, 15 bp, Homo sapiens
ctctccaacagtgag

SEQ ID NO: 17382 - DNA, 15 bp, Homo sapiens
actctccaacagtga

SEQ ID NO: 17383 - DNA, 15 bp, Homo sapiens
cactctccaacagtg

SEQ ID NO: 17384 - DNA, 15 bp, Homo sapiens
tcactctccaacagt

SEQ ID NO: 17385 - DNA, 15 bp, Homo sapiens
ttcactctccaacag

SEQ ID NO: 17386 - DNA, 15 bp, Homo sapiens
cttcactctccaaca

SEQ ID NO: 17387 - DNA, 15 bp, Homo sapiens
gcttcactctccaac

SEQ ID NO: 17388 - DNA, 15 bp, Homo sapiens
agcttcactctccaa

SEQ ID NO: 17389 - DNA, 15 bp, Homo sapiens
cagcttcactctcca

SEQ ID NO: 17390 - DNA, 15 bp, Homo sapiens
tcagcttcactctcc

SEQ ID NO: 17391 - DNA, 15 bp, Homo sapiens
ttcagcttcactctc

SEQ ID NO: 17392 - DNA, 15 bp, Homo sapiens
attcagcttcactct

SEQ ID NO: 17393 - DNA, 15 bp, Homo sapiens
gattcagcttcactc

SEQ ID NO: 17394 - DNA, 15 bp, Homo sapiens
ggattcagcttcact

SEQ ID NO: 17395 - DNA, 15 bp, Homo sapiens
tggattcagcttcac

SEQ ID NO: 17396 - DNA, 15 bp, Homo sapiens
ttggattcagcttca

SEQ ID NO: 17397 - DNA, 15 bp, Homo sapiens
tttggattcagcttc

SEQ ID NO: 17398 - DNA, 15 bp, Homo sapiens
ctttggattcagctt

SEQ ID NO: 17399 - DNA, 15 bp, Homo sapiens
gctttggattcagct

SEQ ID NO: 17400 - DNA, 15 bp, Homo sapiens
agctttggattcagc

SEQ ID NO: 17401 - DNA, 15 bp, Homo sapiens
cagctttggattcag

SEQ ID NO: 17402 - DNA, 15 bp, Homo sapiens
gcagctttggattca

SEQ ID NO: 17403 - DNA, 15 bp, Homo sapiens
tgcagctttggattc

SEQ ID NO: 17404 - DNA, 15 bp, Homo sapiens
atgcagctttggatt

SEQ ID NO: 17405 - DNA, 15 bp, Homo sapiens
aatgcagctttggat

SEQ ID NO: 17406 - DNA, 15 bp, Homo sapiens
gaatgcagctttgga

SEQ ID NO: 17407 - DNA, 15 bp, Homo sapiens
agaatgcagctttgg

SEQ ID NO: 17408 - DNA, 15 bp, Homo sapiens
tagaatgcagctttg

SEQ ID NO: 17409 - DNA, 15 bp, Homo sapiens
atagaatgcagcttt

SEQ ID NO: 17410 - DNA, 15 bp, Homo sapiens
tatagaatgcagctt

SEQ ID NO: 17411 - DNA, 15 bp, Homo sapiens
ctatagaatgcagct

SEQ ID NO: 17412 - DNA, 15 bp, Homo sapiens
actatagaatgcagc

SEQ ID NO: 17413 - DNA, 15 bp, Homo sapiens
aactatagaatgcag

SEQ ID NO: 17414 - DNA, 15 bp, Homo sapiens
caactatagaatgca

SEQ ID NO: 17415 - DNA, 15 bp, Homo sapiens
acaactatagaatgc

SEQ ID NO: 17416 - DNA, 15 bp, Homo sapiens
gacaactatagaatg

SEQ ID NO: 17417 - DNA, 15 bp, Homo sapiens
agacaactatagaat

SEQ ID NO: 17418 - DNA, 15 bp, Homo sapiens
cagacaactatagaa

SEQ ID NO: 17419 - DNA, 15 bp, Homo sapiens
gcagacaactataga

SEQ ID NO: 17420 - DNA, 15 bp, Homo sapiens
agcagacaactatag

SEQ ID NO: 17421 - DNA, 15 bp, Homo sapiens
cagcagacaactata

SEQ ID NO: 17422 - DNA, 15 bp, Homo sapiens
acagcagacaactat

SEQ ID NO: 17423 - DNA, 15 bp, Homo sapiens
aacagcagacaacta

SEQ ID NO: 17424 - DNA, 15 bp, Homo sapiens
gaacagcagacaact

SEQ ID NO: 17425 - DNA, 15 bp, Homo sapiens
tgaacagcagacaac

SEQ ID NO: 17426 - DNA, 15 bp, Homo sapiens
ttgaacagcagacaa

SEQ ID NO: 17427 - DNA, 15 bp, Homo sapiens
gttgaacagcagaca

SEQ ID NO: 17428 - DNA, 15 bp, Homo sapiens
ggttgaacagcagac

SEQ ID NO: 17429 - DNA, 15 bp, Homo sapiens
aggttgaacagcaga

SEQ ID NO: 17430 - DNA, 15 bp, Homo sapiens
caggttgaacagcag

SEQ ID NO: 17431 - DNA, 15 bp, Homo sapiens
tcaggttgaacagca

SEQ ID NO: 17432 - DNA, 15 bp, Homo sapiens
gtcaggttgaacagc

SEQ ID NO: 17433 - DNA, 15 bp, Homo sapiens
ggtcaggttgaacag

SEQ ID NO: 17434 - DNA, 15 bp, Homo sapiens
tggtcaggttgaaca

SEQ ID NO: 17435 - DNA, 15 bp, Homo sapiens
ctggtcaggttgaac

SEQ ID NO: 17436 - DNA, 15 bp, Homo sapiens
actggtcaggttgaa

SEQ ID NO: 17437 - DNA, 15 bp, Homo sapiens
aactggtcaggttga

SEQ ID NO: 17438 - DNA, 15 bp, Homo sapiens
gaactggtcaggttg

SEQ ID NO: 17439 - DNA, 15 bp, Homo sapiens
ggaactggtcaggtt

SEQ ID NO: 17440 - DNA, 15 bp, Homo sapiens
gggaactggtcaggt

SEQ ID NO: 17441 - DNA, 15 bp, Homo sapiens
agggaactggtcagg

SEQ ID NO: 17442 - DNA, 15 bp, Homo sapiens
cagggaactggtcag

SEQ ID NO: 17443 - DNA, 15 bp, Homo sapiens
ccagggaactggtca

SEQ ID NO: 17444 - DNA, 15 bp, Homo sapiens
cccagggaactggtc

SEQ ID NO: 17445 - DNA, 15 bp, Homo sapiens
ccccagggaactggt

SEQ ID NO: 17446 - DNA, 15 bp, Homo sapiens
gccccagggaactgg

SEQ ID NO: 17447 - DNA, 15 bp, Homo sapiens
ggccccagggaactg

SEQ ID NO: 17448 - DNA, 15 bp, Homo sapiens
tggccccagggaact

SEQ ID NO: 17449 - DNA, 15 bp, Homo sapiens
ctggccccagggaac

SEQ ID NO: 17450 - DNA, 15 bp, Homo sapiens
cctggccccagggaa

SEQ ID NO: 17451 - DNA, 15 bp, Homo sapiens
ccctggccccaggga

SEQ ID NO: 17452 - DNA, 15 bp, Homo sapiens
gccctggccccaggg

SEQ ID NO: 17453 - DNA, 15 bp, Homo sapiens
ggccctggccccagg

SEQ ID NO: 17454 - DNA, 15 bp, Homo sapiens
aggccctggccccag

SEQ ID NO: 17455 - DNA, 15 bp, Homo sapiens
gaggccctggcccca

SEQ ID NO: 17456 - DNA, 15 bp, Homo sapiens
agaggccctggcccc

SEQ ID NO: 17457 - DNA, 15 bp, Homo sapiens
tagaggccctggccc

SEQ ID NO: 17458 - DNA, 15 bp, Homo sapiens
atagaggccctggcc

SEQ ID NO: 17459 - DNA, 15 bp, Homo sapiens
aatagaggccctggc

SEQ ID NO: 17460 - DNA, 15 bp, Homo sapiens
caatagaggccctgg

SEQ ID NO: 17461 - DNA, 15 bp, Homo sapiens
acaatagaggccctg

SEQ ID NO: 17462 - DNA, 15 bp, Homo sapiens
aacaatagaggccct

SEQ ID NO: 17463 - DNA, 15 bp, Homo sapiens
aaacaatagaggccc

SEQ ID NO: 17464 - DNA, 15 bp, Homo sapiens
aaaacaatagaggcc

SEQ ID NO: 17465 - DNA, 15 bp, Homo sapiens
gaaaacaatagaggc

SEQ ID NO: 17466 - DNA, 15 bp, Homo sapiens
ggaaaacaatagagg

SEQ ID NO: 17467 - DNA, 15 bp, Homo sapiens
tggaaaacaatagag

SEQ ID NO: 17468 - DNA, 15 bp, Homo sapiens
ttggaaaacaataga

SEQ ID NO: 17469 - DNA, 15 bp, Homo sapiens
cttggaaaacaatag

SEQ ID NO: 17470 - DNA, 15 bp, Homo sapiens
gcttggaaaacaata

SEQ ID NO: 17471 - DNA, 15 bp, Homo sapiens
tgcttggaaaacaat

SEQ ID NO: 17472 - DNA, 15 bp, Homo sapiens
atgcttggaaaacaa

SEQ ID NO: 17473 - DNA, 15 bp, Homo sapiens
gatgcttggaaaaca

SEQ ID NO: 17474 - DNA, 15 bp, Homo sapiens
agatgcttggaaaac

SEQ ID NO: 17475 - DNA, 15 bp, Homo sapiens
cagatgcttggaaaa

SEQ ID NO: 17476 - DNA, 15 bp, Homo sapiens
gcagatgcttggaaa

SEQ ID NO: 17477 - DNA, 15 bp, Homo sapiens
agcagatgcttggaa

SEQ ID NO: 17478 - DNA, 15 bp, Homo sapiens
aagcagatgcttgga

SEQ ID NO: 17479 - DNA, 15 bp, Homo sapiens
gaagcagatgcttgg

SEQ ID NO: 17480 - DNA, 15 bp, Homo sapiens
ggaagcagatgcttg

SEQ ID NO: 17481 - DNA, 15 bp, Homo sapiens
gggaagcagatgctt

SEQ ID NO: 17482 - DNA, 15 bp, Homo sapiens
agggaagcagatgct

SEQ ID NO: 17483 - DNA, 15 bp, Homo sapiens
cagggaagcagatgc

SEQ ID NO: 17484 - DNA, 15 bp, Homo sapiens
ccagggaagcagatg

SEQ ID NO: 17485 - DNA, 15 bp, Homo sapiens
tccagggaagcagat

SEQ ID NO: 17486 - DNA, 15 bp, Homo sapiens
gtccagggaagcaga

SEQ ID NO: 17487 - DNA, 15 bp, Homo sapiens
agtccagggaagcag

SEQ ID NO: 17488 - DNA, 15 bp, Homo sapiens
cagtccagggaagca

SEQ ID NO: 17489 - DNA, 15 bp, Homo sapiens
tcagtccagggaagc

SEQ ID NO: 17490 - DNA, 15 bp, Homo sapiens
ctcagtccagggaag

SEQ ID NO: 17491 - DNA, 15 bp, Homo sapiens
gctcagtccagggaa

SEQ ID NO: 17492 - DNA, 15 bp, Homo sapiens
tgctcagtccaggga

SEQ ID NO: 17493 - DNA, 15 bp, Homo sapiens
ttgctcagtccaggg

SEQ ID NO: 17494 - DNA, 15 bp, Homo sapiens
cttgctcagtccagg

SEQ ID NO: 17495 - DNA, 15 bp, Homo sapiens
tcttgctcagtccag

SEQ ID NO: 17496 - DNA, 15 bp, Homo sapiens
ctcttgctcagtcca

SEQ ID NO: 17497 - DNA, 15 bp, Homo sapiens
tctcttgctcagtcc

SEQ ID NO: 17498 - DNA, 15 bp, Homo sapiens
ctctcttgctcagtc

SEQ ID NO: 17499 - DNA, 15 bp, Homo sapiens
actctcttgctcagt

SEQ ID NO: 17500 - DNA, 15 bp, Homo sapiens
cactctcttgctcag

SEQ ID NO: 17501 - DNA, 15 bp, Homo sapiens
ccactctcttgctca

SEQ ID NO: 17502 - DNA, 15 bp, Homo sapiens
accactctcttgctc

SEQ ID NO: 17503 - DNA, 15 bp, Homo sapiens
caccactctcttgct

SEQ ID NO: 17504 - DNA, 15 bp, Homo sapiens
acaccactctcttgc

SEQ ID NO: 17505 - DNA, 15 bp, Homo sapiens
aacaccactctcttg

SEQ ID NO: 17506 - DNA, 15 bp, Homo sapiens
gaacaccactctctt

SEQ ID NO: 17507 - DNA, 15 bp, Homo sapiens
agaacaccactctct

SEQ ID NO: 17508 - DNA, 15 bp, Homo sapiens
cagaacaccactctc

SEQ ID NO: 17509 - DNA, 15 bp, Homo sapiens
acagaacaccactct

SEQ ID NO: 17510 - DNA, 15 bp, Homo sapiens
cacagaacaccactc

SEQ ID NO: 17511 - DNA, 15 bp, Homo sapiens
tcacagaacaccact

SEQ ID NO: 17512 - DNA, 15 bp, Homo sapiens
atcacagaacaccac

SEQ ID NO: 17513 - DNA, 15 bp, Homo sapiens
aatcacagaacacca

SEQ ID NO: 17514 - DNA, 15 bp, Homo sapiens
taatcacagaacacc

SEQ ID NO: 17515 - DNA, 15 bp, Homo sapiens
ataatcacagaacac

SEQ ID NO: 17516 - DNA, 15 bp, Homo sapiens
aataatcacagaaca

SEQ ID NO: 17517 - DNA, 15 bp, Homo sapiens
aaataatcacagaac

SEQ ID NO: 17518 - DNA, 15 bp, Homo sapiens
aaaataatcacagaa

SEQ ID NO: 17519 - DNA, 15 bp, Homo sapiens
caaaataatcacaga

SEQ ID NO: 17520 - DNA, 15 bp, Homo sapiens
ccaaaataatcacag

SEQ ID NO: 17521 - DNA, 15 bp, Homo sapiens
gccaaaataatcaca

SEQ ID NO: 17522 - DNA, 15 bp, Homo sapiens
tgccaaaataatcac

SEQ ID NO: 17523 - DNA, 15 bp, Homo sapiens
atgccaaaataatca

SEQ ID NO: 17524 - DNA, 15 bp, Homo sapiens
aatgccaaaataatc

SEQ ID NO: 17525 - DNA, 15 bp, Homo sapiens
taatgccaaaataat

SEQ ID NO: 17526 - DNA, 15 bp, Homo sapiens
ctaatgccaaaataa

SEQ ID NO: 17527 - DNA, 15 bp, Homo sapiens
tctaatgccaaaata

SEQ ID NO: 17528 - DNA, 15 bp, Homo sapiens
ttctaatgccaaaat

SEQ ID NO: 17529 - DNA, 15 bp, Homo sapiens
attctaatgccaaaa

SEQ ID NO: 17530 - DNA, 15 bp, Homo sapiens
cattctaatgccaaa

SEQ ID NO: 17531 - DNA, 15 bp, Homo sapiens
acattctaatgccaa

SEQ ID NO: 17532 - DNA, 15 bp, Homo sapiens
gacattctaatgcca

SEQ ID NO: 17533 - DNA, 15 bp, Homo sapiens
tgacattctaatgcc

SEQ ID NO: 17534 - DNA, 15 bp, Homo sapiens
atgacattctaatgc

SEQ ID NO: 17535 - DNA, 15 bp, Homo sapiens
aatgacattctaatg

SEQ ID NO: 17536 - DNA, 15 bp, Homo sapiens
taatgacattctaat

SEQ ID NO: 17537 - DNA, 15 bp, Homo sapiens
ttaatgacattctaa

SEQ ID NO: 17538 - DNA, 15 bp, Homo sapiens
tttaatgacattcta

SEQ ID NO: 17539 - DNA, 15 bp, Homo sapiens
atttaatgacattct

SEQ ID NO: 17540 - DNA, 15 bp, Homo sapiens
aatttaatgacattc

SEQ ID NO: 17541 - DNA, 15 bp, Homo sapiens
gaatttaatgacatt

SEQ ID NO: 17542 - DNA, 15 bp, Homo sapiens
ggaatttaatgacat

SEQ ID NO: 17543 - DNA, 15 bp, Homo sapiens
gggaatttaatgaca

SEQ ID NO: 17544 - DNA, 15 bp, Homo sapiens
agggaatttaatgac

SEQ ID NO: 17545 - DNA, 15 bp, Homo sapiens
cagggaatttaatga

SEQ ID NO: 17546 - DNA, 15 bp, Homo sapiens
tcagggaatttaatg

SEQ ID NO: 17547 - DNA, 15 bp, Homo sapiens
gtcagggaatttaat

SEQ ID NO: 17548 - DNA, 15 bp, Homo sapiens
tgtcagggaatttaa

SEQ ID NO: 17549 - DNA, 15 bp, Homo sapiens
gtgtcagggaattta

SEQ ID NO: 17550 - DNA, 15 bp, Homo sapiens
agtgtcagggaattt

SEQ ID NO: 17551 - DNA, 15 bp, Homo sapiens
aagtgtcagggaatt

SEQ ID NO: 17552 - DNA, 15 bp, Homo sapiens
taagtgtcagggaat

SEQ ID NO: 17553 - DNA, 15 bp, Homo sapiens
ttaagtgtcagggaa

SEQ ID NO: 17554 - DNA, 15 bp, Homo sapiens
attaagtgtcaggga

SEQ ID NO: 17555 - DNA, 15 bp, Homo sapiens
aattaagtgtcaggg

SEQ ID NO: 17556 - DNA, 15 bp, Homo sapiens
caattaagtgtcagg

SEQ ID NO: 17557 - DNA, 15 bp, Homo sapiens
ccaattaagtgtcag

SEQ ID NO: 17558 - DNA, 15 bp, Homo sapiens
accaattaagtgtca

SEQ ID NO: 17559 - DNA, 15 bp, Homo sapiens
gaccaattaagtgtc

SEQ ID NO: 17560 - DNA, 15 bp, Homo sapiens
cgaccaattaagtgt

SEQ ID NO: 17561 - DNA, 15 bp, Homo sapiens
acgaccaattaagtg

SEQ ID NO: 17562 - DNA, 15 bp, Homo sapiens
gacgaccaattaagt

SEQ ID NO: 17563 - DNA, 15 bp, Homo sapiens
ggacgaccaattaag

SEQ ID NO: 17564 - DNA, 15 bp, Homo sapiens
gggacgaccaattaa

SEQ ID NO: 17565 - DNA, 15 bp, Homo sapiens
tgggacgaccaatta

SEQ ID NO: 17566 - DNA, 15 bp, Homo sapiens
ttgggacgaccaatt

SEQ ID NO: 17567 - DNA, 15 bp, Homo sapiens
cttgggacgaccaat

SEQ ID NO: 17568 - DNA, 15 bp, Homo sapiens
acttgggacgaccaa

SEQ ID NO: 17569 - DNA, 15 bp, Homo sapiens
cacttgggacgacca

SEQ ID NO: 17570 - DNA, 15 bp, Homo sapiens
acacttgggacgacc

SEQ ID NO: 17571 - DNA, 15 bp, Homo sapiens
tacacttgggacgac

SEQ ID NO: 17572 - DNA, 15 bp, Homo sapiens
ttacacttgggacga

SEQ ID NO: 17573 - DNA, 15 bp, Homo sapiens
tttacacttgggacg

SEQ ID NO: 17574 - DNA, 15 bp, Homo sapiens
atttacacttgggac

SEQ ID NO: 17575 - DNA, 15 bp, Homo sapiens
aatttacacttggga

SEQ ID NO: 17576 - DNA, 15 bp, Homo sapiens
caatttacacttggg

SEQ ID NO: 17577 - DNA, 15 bp, Homo sapiens
tcaatttacacttgg

SEQ ID NO: 17578 - DNA, 15 bp, Homo sapiens
ttcaatttacacttg

SEQ ID NO: 17579 - DNA, 15 bp, Homo sapiens
cttcaatttacactt

SEQ ID NO: 17580 - DNA, 15 bp, Homo sapiens
tcttcaatttacact

SEQ ID NO: 17581 - DNA, 15 bp, Homo sapiens
atcttcaatttacac

SEQ ID NO: 17582 - DNA, 15 bp, Homo sapiens
catcttcaatttaca

SEQ ID NO: 17583 - DNA, 15 bp, Homo sapiens
gcatcttcaatttac

SEQ ID NO: 17584 - DNA, 15 bp, Homo sapiens
agcatcttcaattta

SEQ ID NO: 17585 - DNA, 15 bp, Homo sapiens
aagcatcttcaattt

SEQ ID NO: 17586 - DNA, 15 bp, Homo sapiens
gaagcatcttcaatt

SEQ ID NO: 17587 - DNA, 15 bp, Homo sapiens
agaagcatcttcaat

SEQ ID NO: 17588 - DNA, 15 bp, Homo sapiens
cagaagcatcttcaa

SEQ ID NO: 17589 - DNA, 15 bp, Homo sapiens
gcagaagcatcttca

SEQ ID NO: 17590 - DNA, 15 bp, Homo sapiens
ggcagaagcatcttc

SEQ ID NO: 17591 - DNA, 15 bp, Homo sapiens
gggcagaagcatctt

SEQ ID NO: 17592 - DNA, 15 bp, Homo sapiens
agggcagaagcatct

SEQ ID NO: 17593 - DNA, 15 bp, Homo sapiens
cagggcagaagcatc

SEQ ID NO: 17594 - DNA, 15 bp, Homo sapiens
gcagggcagaagcat

SEQ ID NO: 17595 - DNA, 15 bp, Homo sapiens
tgcagggcagaagca

SEQ ID NO: 17596 - DNA, 15 bp, Homo sapiens
gtgcagggcagaagc

SEQ ID NO: 17597 - DNA, 15 bp, Homo sapiens
agtgcagggcagaag

SEQ ID NO: 17598 - DNA, 15 bp, Homo sapiens
aagtgcagggcagaa

SEQ ID NO: 17599 - DNA, 15 bp, Homo sapiens
taagtgcagggcaga

SEQ ID NO: 17600 - DNA, 15 bp, Homo sapiens
ttaagtgcagggcag

SEQ ID NO: 17601 - DNA, 15 bp, Homo sapiens
attaagtgcagggca

SEQ ID NO: 17602 - DNA, 15 bp, Homo sapiens
cattaagtgcagggc

SEQ ID NO: 17603 - DNA, 15 bp, Homo sapiens
acattaagtgcaggg

SEQ ID NO: 17604 - DNA, 15 bp, Homo sapiens
aacattaagtgcagg

SEQ ID NO: 17605 - DNA, 15 bp, Homo sapiens
gaacattaagtgcag

SEQ ID NO: 17606 - DNA, 15 bp, Homo sapiens
ggaacattaagtgca

SEQ ID NO: 17607 - DNA, 15 bp, Homo sapiens
aggaacattaagtgc

SEQ ID NO: 17608 - DNA, 15 bp, Homo sapiens
gaggaacattaagtg

SEQ ID NO: 17609 - DNA, 15 bp, Homo sapiens
cgaggaacattaagt

SEQ ID NO: 17610 - DNA, 15 bp, Homo sapiens
gcgaggaacattaag

SEQ ID NO: 17611 - DNA, 15 bp, Homo sapiens
agcgaggaacattaa

SEQ ID NO: 17612 - DNA, 15 bp, Homo sapiens
cagcgaggaacatta

SEQ ID NO: 17613 - DNA, 15 bp, Homo sapiens
gcagcgaggaacatt

SEQ ID NO: 17614 - DNA, 15 bp, Homo sapiens
tgcagcgaggaacat

SEQ ID NO: 17615 - DNA, 15 bp, Homo sapiens
ctgcagcgaggaaca

SEQ ID NO: 17616 - DNA, 15 bp, Homo sapiens
actgcagcgaggaac

SEQ ID NO: 17617 - DNA, 15 bp, Homo sapiens
cactgcagcgaggaa

SEQ ID NO: 17618 - DNA, 15 bp, Homo sapiens
ccactgcagcgagga

SEQ ID NO: 17619 - DNA, 15 bp, Homo sapiens
gccactgcagcgagg

SEQ ID NO: 17620 - DNA, 15 bp, Homo sapiens
tgccactgcagcgag

SEQ ID NO: 17621 - DNA, 15 bp, Homo sapiens
ctgccactgcagcga

SEQ ID NO: 17622 - DNA, 15 bp, Homo sapiens
gctgccactgcagcg

SEQ ID NO: 17623 - DNA, 15 bp, Homo sapiens
agctgccactgcagc

SEQ ID NO: 17624 - DNA, 15 bp, Homo sapiens
gagctgccactgcag

SEQ ID NO: 17625 - DNA, 15 bp, Homo sapiens
ggagctgccactgca

SEQ ID NO: 17626 - DNA, 15 bp, Homo sapiens
tggagctgccactgc

SEQ ID NO: 17627 - DNA, 15 bp, Homo sapiens
ctggagctgccactg

SEQ ID NO: 17628 - DNA, 15 bp, Homo sapiens
gctggagctgccact

SEQ ID NO: 17629 - DNA, 15 bp, Homo sapiens
ggctggagctgccac

SEQ ID NO: 17630 - DNA, 15 bp, Homo sapiens
gggctggagctgcca

SEQ ID NO: 17631 - DNA, 15 bp, Homo sapiens
ggggctggagctgcc

SEQ ID NO: 17632 - DNA, 15 bp, Homo sapiens
aggggctggagctgc

SEQ ID NO: 17633 - DNA, 15 bp, Homo sapiens
caggggctggagctg

SEQ ID NO: 17634 - DNA, 15 bp, Homo sapiens
ccaggggctggagct

SEQ ID NO: 17635 - DNA, 15 bp, Homo sapiens
gccaggggctggagc

SEQ ID NO: 17636 - DNA, 15 bp, Homo sapiens
tgccaggggctggag

SEQ ID NO: 17637 - DNA, 15 bp, Homo sapiens
ttgccaggggctgga

SEQ ID NO: 17638 - DNA, 15 bp, Homo sapiens
cttgccaggggctgg

SEQ ID NO: 17639 - DNA, 15 bp, Homo sapiens
ccttgccaggggctg

SEQ ID NO: 17640 - DNA, 15 bp, Homo sapiens
gccttgccaggggct

SEQ ID NO: 17641 - DNA, 15 bp, Homo sapiens
tgccttgccaggggc

SEQ ID NO: 17642 - DNA, 15 bp, Homo sapiens
ctgccttgccagggg

SEQ ID NO: 17643 - DNA, 15 bp, Homo sapiens
gctgccttgccaggg

SEQ ID NO: 17644 - DNA, 15 bp, Homo sapiens
tgctgccttgccagg

SEQ ID NO: 17645 - DNA, 15 bp, Homo sapiens
ctgctgccttgccag

SEQ ID NO: 17646 - DNA, 15 bp, Homo sapiens
cctgctgccttgcca

SEQ ID NO: 17647 - DNA, 15 bp, Homo sapiens
tcctgctgccttgcc

SEQ ID NO: 17648 - DNA, 15 bp, Homo sapiens
ttcctgctgccttgc

SEQ ID NO: 17649 - DNA, 15 bp, Homo sapiens
gttcctgctgccttg

SEQ ID NO: 17650 - DNA, 15 bp, Homo sapiens
ggttcctgctgcctt

SEQ ID NO: 17651 - DNA, 15 bp, Homo sapiens
gggttcctgctgcct

SEQ ID NO: 17652 - DNA, 15 bp, Homo sapiens
ggggttcctgctgcc

SEQ ID NO: 17653 - DNA, 15 bp, Homo sapiens
tggggttcctgctgc

SEQ ID NO: 17654 - DNA, 15 bp, Homo sapiens
gtggggttcctgctg

SEQ ID NO: 17655 - DNA, 15 bp, Homo sapiens
cgtggggttcctgct

SEQ ID NO: 17656 - DNA, 15 bp, Homo sapiens
gcgtggggttcctgc

SEQ ID NO: 17657 - DNA, 15 bp, Homo sapiens
agcgtggggttcctg

SEQ ID NO: 17658 - DNA, 15 bp, Homo sapiens
tagcgtggggttcct

SEQ ID NO: 17659 - DNA, 15 bp, Homo sapiens
ctagcgtggggttcc

SEQ ID NO: 17660 - DNA, 15 bp, Homo sapiens
cctagcgtggggttc

SEQ ID NO: 17661 - DNA, 15 bp, Homo sapiens
ccctagcgtggggtt

SEQ ID NO: 17662 - DNA, 15 bp, Homo sapiens
gccctagcgtggggt

SEQ ID NO: 17663 - DNA, 15 bp, Homo sapiens
tgccctagcgtgggg

SEQ ID NO: 17664 - DNA, 15 bp, Homo sapiens
atgccctagcgtggg

SEQ ID NO: 17665 - DNA, 15 bp, Homo sapiens
aatgccctagcgtgg

SEQ ID NO: 17666 - DNA, 15 bp, Homo sapiens
gaatgccctagcgtg

SEQ ID NO: 17667 - DNA, 15 bp, Homo sapiens
ggaatgccctagcgt

SEQ ID NO: 17668 - DNA, 15 bp, Homo sapiens
aggaatgccctagcg

SEQ ID NO: 17669 - DNA, 15 bp, Homo sapiens
caggaatgccctagc

SEQ ID NO: 17670 - DNA, 15 bp, Homo sapiens
acaggaatgccctag

SEQ ID NO: 17671 - DNA, 15 bp, Homo sapiens
cacaggaatgcccta

SEQ ID NO: 17672 - DNA, 15 bp, Homo sapiens
ccacaggaatgccct

SEQ ID NO: 17673 - DNA, 15 bp, Homo sapiens
accacaggaatgccc

SEQ ID NO: 17674 - DNA, 15 bp, Homo sapiens
taccacaggaatgcc

SEQ ID NO: 17675 - DNA, 15 bp, Homo sapiens
gtaccacaggaatgc

SEQ ID NO: 17676 - DNA, 15 bp, Homo sapiens
tgtaccacaggaatg

SEQ ID NO: 17677 - DNA, 15 bp, Homo sapiens
ctgtaccacaggaat

SEQ ID NO: 17678 - DNA, 15 bp, Homo sapiens
gctgtaccacaggaa

SEQ ID NO: 17679 - DNA, 15 bp, Homo sapiens
agctgtaccacagga

SEQ ID NO: 17680 - DNA, 15 bp, Homo sapiens
gagctgtaccacagg

SEQ ID NO: 17681 - DNA, 15 bp, Homo sapiens
ggagctgtaccacag

SEQ ID NO: 17682 - DNA, 15 bp, Homo sapiens
aggagctgtaccaca

SEQ ID NO: 17683 - DNA, 15 bp, Homo sapiens
gaggagctgtaccac

SEQ ID NO: 17684 - DNA, 15 bp, Homo sapiens
ggaggagctgtacca

SEQ ID NO: 17685 - DNA, 15 bp, Homo sapiens
gggaggagctgtacc

SEQ ID NO: 17686 - DNA, 15 bp, Homo sapiens
tgggaggagctgtac

SEQ ID NO: 17687 - DNA, 15 bp, Homo sapiens
ctgggaggagctgta

SEQ ID NO: 17688 - DNA, 15 bp, Homo sapiens
cctgggaggagctgt

SEQ ID NO: 17689 - DNA, 15 bp, Homo sapiens
acctgggaggagctg

SEQ ID NO: 17690 - DNA, 15 bp, Homo sapiens
aacctgggaggagct

SEQ ID NO: 17691 - DNA, 15 bp, Homo sapiens
caacctgggaggagc

SEQ ID NO: 17692 - DNA, 15 bp, Homo sapiens
gcaacctgggaggag

SEQ ID NO: 17693 - DNA, 15 bp, Homo sapiens
ggcaacctgggagga

SEQ ID NO: 17694 - DNA, 15 bp, Homo sapiens
tggcaacctgggagg

SEQ ID NO: 17695 - DNA, 15 bp, Homo sapiens
gtggcaacctgggag

SEQ ID NO: 17696 - DNA, 15 bp, Homo sapiens
ggtggcaacctggga

SEQ ID NO: 17697 - DNA, 15 bp, Homo sapiens
gggtggcaacctggg

SEQ ID NO: 17698 - DNA, 15 bp, Homo sapiens
tgggtggcaacctgg

SEQ ID NO: 17699 - DNA, 15 bp, Homo sapiens
ctgggtggcaacctg

SEQ ID NO: 17700 - DNA, 15 bp, Homo sapiens
tctgggtggcaacct

SEQ ID NO: 17701 - DNA, 15 bp, Homo sapiens
atctgggtggcaacc

SEQ ID NO: 17702 - DNA, 15 bp, Homo sapiens
catctgggtggcaac

SEQ ID NO: 17703 - DNA, 15 bp, Homo sapiens
tcatctgggtggcaa

SEQ ID NO: 17704 - DNA, 15 bp, Homo sapiens
ctcatctgggtggca

SEQ ID NO: 17705 - DNA, 15 bp, Homo sapiens
gctcatctgggtggc

SEQ ID NO: 17706 - DNA, 15 bp, Homo sapiens
agctcatctgggtgg

SEQ ID NO: 17707 - DNA, 15 bp, Homo sapiens
aagctcatctgggtg

SEQ ID NO: 17708 - DNA, 15 bp, Homo sapiens
caagctcatctgggt

SEQ ID NO: 17709 - DNA, 15 bp, Homo sapiens
acaagctcatctggg

SEQ ID NO: 17710 - DNA, 15 bp, Homo sapiens
cacaagctcatctgg

SEQ ID NO: 17711 - DNA, 15 bp, Homo sapiens
gcacaagctcatctg

SEQ ID NO: 17712 - DNA, 15 bp, Homo sapiens
ggcacaagctcatct

SEQ ID NO: 17713 - DNA, 15 bp, Homo sapiens
tggcacaagctcatc

SEQ ID NO: 17714 - DNA, 15 bp, Homo sapiens
atggcacaagctcat

SEQ ID NO: 17715 - DNA, 15 bp, Homo sapiens
gatggcacaagctca

SEQ ID NO: 17716 - DNA, 15 bp, Homo sapiens
agatggcacaagctc

SEQ ID NO: 17717 - DNA, 15 bp, Homo sapiens
cagatggcacaagct

SEQ ID NO: 17718 - DNA, 15 bp, Homo sapiens
ccagatggcacaagc

SEQ ID NO: 17719 - DNA, 15 bp, Homo sapiens
accagatggcacaag

SEQ ID NO: 17720 - DNA, 15 bp, Homo sapiens
caccagatggcacaa

SEQ ID NO: 17721 - DNA, 15 bp, Homo sapiens
acaccagatggcaca

SEQ ID NO: 17722 - DNA, 15 bp, Homo sapiens
gacaccagatggcac

SEQ ID NO: 17723 - DNA, 15 bp, Homo sapiens
tgacaccagatggca

SEQ ID NO: 17724 - DNA, 15 bp, Homo sapiens
atgacaccagatggc

SEQ ID NO: 17725 - DNA, 15 bp, Homo sapiens
catgacaccagatgg

SEQ ID NO: 17726 - DNA, 15 bp, Homo sapiens
ccatgacaccagatg

SEQ ID NO: 17727 - DNA, 15 bp, Homo sapiens
cccatgacaccagat

SEQ ID NO: 17728 - DNA, 15 bp, Homo sapiens
ccccatgacaccaga

SEQ ID NO: 17729 - DNA, 15 bp, Homo sapiens
tccccatgacaccag

SEQ ID NO: 17730 - DNA, 15 bp, Homo sapiens
gtccccatgacacca

SEQ ID NO: 17731 - DNA, 15 bp, Homo sapiens
tgtccccatgacacc

SEQ ID NO: 17732 - DNA, 15 bp, Homo sapiens
atgtccccatgacac

SEQ ID NO: 17733 - DNA, 15 bp, Homo sapiens
catgtccccatgaca

SEQ ID NO: 17734 - DNA, 15 bp, Homo sapiens
acatgtccccatgac

SEQ ID NO: 17735 - DNA, 15 bp, Homo sapiens
cacatgtccccatga

SEQ ID NO: 17736 - DNA, 15 bp, Homo sapiens
tcacatgtccccatg

SEQ ID NO: 17737 - DNA, 15 bp, Homo sapiens
ttcacatgtccccat

SEQ ID NO: 17738 - DNA, 15 bp, Homo sapiens
cttcacatgtcccca

SEQ ID NO: 17739 - DNA, 15 bp, Homo sapiens
tcttcacatgtcccc

SEQ ID NO: 17740 - DNA, 15 bp, Homo sapiens
ttcttcacatgtccc

SEQ ID NO: 17741 - DNA, 15 bp, Homo sapiens
gttcttcacatgtcc

SEQ ID NO: 17742 - DNA, 15 bp, Homo sapiens
agttcttcacatgtc

SEQ ID NO: 17743 - DNA, 15 bp, Homo sapiens
tagttcttcacatgt

SEQ ID NO: 17744 - DNA, 15 bp, Homo sapiens
atagttcttcacatg

SEQ ID NO: 17745 - DNA, 15 bp, Homo sapiens
aatagttcttcacat

SEQ ID NO: 17746 - DNA, 15 bp, Homo sapiens
aaatagttcttcaca

SEQ ID NO: 17747 - DNA, 15 bp, Homo sapiens
taaatagttcttcac

SEQ ID NO: 17748 - DNA, 15 bp, Homo sapiens
ctaaatagttcttca

SEQ ID NO: 17749 - DNA, 15 bp, Homo sapiens
cctaaatagttcttc

SEQ ID NO: 17750 - DNA, 15 bp, Homo sapiens
tcctaaatagttctt

SEQ ID NO: 17751 - DNA, 15 bp, Homo sapiens
ttcctaaatagttct

SEQ ID NO: 17752 - DNA, 15 bp, Homo sapiens
attcctaaatagttc

SEQ ID NO: 17753 - DNA, 15 bp, Homo sapiens
aattcctaaatagtt

SEQ ID NO: 17754 - DNA, 15 bp, Homo sapiens
gaattcctaaatagt

SEQ ID NO: 17755 - DNA, 15 bp, Homo sapiens
ggaattcctaaatag

SEQ ID NO: 17756 - DNA, 15 bp, Homo sapiens
gggaattcctaaata

SEQ ID NO: 17757 - DNA, 15 bp, Homo sapiens
agggaattcctaaat

SEQ ID NO: 17758 - DNA, 15 bp, Homo sapiens
cagggaattcctaaa

SEQ ID NO: 17759 - DNA, 15 bp, Homo sapiens
acagggaattcctaa

SEQ ID NO: 17760 - DNA, 15 bp, Homo sapiens
aacagggaattccta

SEQ ID NO: 17761 - DNA, 15 bp, Homo sapiens
caacagggaattcct

SEQ ID NO: 17762 - DNA, 15 bp, Homo sapiens
tcaacagggaattcc

SEQ ID NO: 17763 - DNA, 15 bp, Homo sapiens
ttcaacagggaattc

SEQ ID NO: 17764 - DNA, 15 bp, Homo sapiens
attcaacagggaatt

SEQ ID NO: 17765 - DNA, 15 bp, Homo sapiens
cattcaacagggaat

SEQ ID NO: 17766 - DNA, 15 bp, Homo sapiens
gcattcaacagggaa

SEQ ID NO: 17767 - DNA, 15 bp, Homo sapiens
agcattcaacaggga

SEQ ID NO: 17768 - DNA, 15 bp, Homo sapiens
gagcattcaacaggg

SEQ ID NO: 17769 - DNA, 15 bp, Homo sapiens
cgagcattcaacagg

SEQ ID NO: 17770 - DNA, 15 bp, Homo sapiens
tcgagcattcaacag

SEQ ID NO: 17771 - DNA, 15 bp, Homo sapiens
gtcgagcattcaaca

SEQ ID NO: 17772 - DNA, 15 bp, Homo sapiens
tgtcgagcattcaac

SEQ ID NO: 17773 - DNA, 15 bp, Homo sapiens
gtgtcgagcattcaa

SEQ ID NO: 17774 - DNA, 15 bp, Homo sapiens
ggtgtcgagcattca

SEQ ID NO: 17775 - DNA, 15 bp, Homo sapiens
cggtgtcgagcattc

SEQ ID NO: 17776 - DNA, 15 bp, Homo sapiens
acggtgtcgagcatt

SEQ ID NO: 17777 - DNA, 15 bp, Homo sapiens
gacggtgtcgagcat

SEQ ID NO: 17778 - DNA, 15 bp, Homo sapiens
agacggtgtcgagca

SEQ ID NO: 17779 - DNA, 15 bp, Homo sapiens
gagacggtgtcgagc

SEQ ID NO: 17780 - DNA, 15 bp, Homo sapiens
tgagacggtgtcgag

SEQ ID NO: 17781 - DNA, 15 bp, Homo sapiens
ttgagacggtgtcga

SEQ ID NO: 17782 - DNA, 15 bp, Homo sapiens
tttgagacggtgtcg

SEQ ID NO: 17783 - DNA, 15 bp, Homo sapiens
ctttgagacggtgtc

SEQ ID NO: 17784 - DNA, 15 bp, Homo sapiens
cctttgagacggtgt

SEQ ID NO: 17785 - DNA, 15 bp, Homo sapiens
ccctttgagacggtg

SEQ ID NO: 17786 - DNA, 15 bp, Homo sapiens
gccctttgagacggt

SEQ ID NO: 17787 - DNA, 15 bp, Homo sapiens
tgccctttgagacgg

SEQ ID NO: 17788 - DNA, 15 bp, Homo sapiens
atgccctttgagacg

SEQ ID NO: 17789 - DNA, 15 bp, Homo sapiens
aatgccctttgagac

SEQ ID NO: 17790 - DNA, 15 bp, Homo sapiens
caatgccctttgaga

SEQ ID NO: 17791 - DNA, 15 bp, Homo sapiens
acaatgccctttgag

SEQ ID NO: 17792 - DNA, 15 bp, Homo sapiens
aacaatgccctttga

SEQ ID NO: 17793 - DNA, 15 bp, Homo sapiens
gaacaatgccctttg

SEQ ID NO: 17794 - DNA, 15 bp, Homo sapiens
tgaacaatgcccttt

SEQ ID NO: 17795 - DNA, 15 bp, Homo sapiens
atgaacaatgccctt

SEQ ID NO: 17796 - DNA, 15 bp, Homo sapiens
tatgaacaatgccct

SEQ ID NO: 17797 - DNA, 15 bp, Homo sapiens
atatgaacaatgccc

SEQ ID NO: 17798 - DNA, 15 bp, Homo sapiens
gatatgaacaatgcc

SEQ ID NO: 17799 - DNA, 15 bp, Homo sapiens
agatatgaacaatgc

SEQ ID NO: 17800 - DNA, 15 bp, Homo sapiens
aagatatgaacaatg

SEQ ID NO: 17801 - DNA, 15 bp, Homo sapiens
gaagatatgaacaat

SEQ ID NO: 17802 - DNA, 15 bp, Homo sapiens
tgaagatatgaacaa

SEQ ID NO: 17803 - DNA, 15 bp, Homo sapiens
ctgaagatatgaaca

SEQ ID NO: 17804 - DNA, 15 bp, Homo sapiens
tctgaagatatgaac

SEQ ID NO: 17805 - DNA, 15 bp, Homo sapiens
ctctgaagatatgaa

SEQ ID NO: 17806 - DNA, 15 bp, Homo sapiens
tctctgaagatatga

SEQ ID NO: 17807 - DNA, 15 bp, Homo sapiens
ttctctgaagatatg

SEQ ID NO: 17808 - DNA, 15 bp, Homo sapiens
tttctctgaagatat

SEQ ID NO: 17809 - DNA, 15 bp, Homo sapiens
ctttctctgaagata

SEQ ID NO: 17810 - DNA, 15 bp, Homo sapiens
tctttctctgaagat

SEQ ID NO: 17811 - DNA, 15 bp, Homo sapiens
gtctttctctgaaga

SEQ ID NO: 17812 - DNA, 15 bp, Homo sapiens
agtctttctctgaag

SEQ ID NO: 17813 - DNA, 15 bp, Homo sapiens
cagtctttctctgaa

SEQ ID NO: 17814 - DNA, 15 bp, Homo sapiens
gcagtctttctctga

SEQ ID NO: 17815 - DNA, 15 bp, Homo sapiens
agcagtctttctctg

SEQ ID NO: 17816 - DNA, 15 bp, Homo sapiens
aagcagtctttctct

SEQ ID NO: 17817 - DNA, 15 bp, Homo sapiens
taagcagtctttctc

SEQ ID NO: 17818 - DNA, 15 bp, Homo sapiens
ttaagcagtctttct

SEQ ID NO: 17819 - DNA, 15 bp, Homo sapiens
cttaagcagtctttc

SEQ ID NO: 17820 - DNA, 15 bp, Homo sapiens
acttaagcagtcttt

SEQ ID NO: 17821 - DNA, 15 bp, Homo sapiens
gacttaagcagtctt

SEQ ID NO: 17822 - DNA, 15 bp, Homo sapiens
agacttaagcagtct

SEQ ID NO: 17823 - DNA, 15 bp, Homo sapiens
tagacttaagcagtc

SEQ ID NO: 17824 - DNA, 15 bp, Homo sapiens
atagacttaagcagt

SEQ ID NO: 17825 - DNA, 15 bp, Homo sapiens
catagacttaagcag

SEQ ID NO: 17826 - DNA, 15 bp, Homo sapiens
gcatagacttaagca

SEQ ID NO: 17827 - DNA, 15 bp, Homo sapiens
agcatagacttaagc

SEQ ID NO: 17828 - DNA, 15 bp, Homo sapiens
cagcatagacttaag

SEQ ID NO: 17829 - DNA, 15 bp, Homo sapiens
tcagcatagacttaa

SEQ ID NO: 17830 - DNA, 15 bp, Homo sapiens
ctcagcatagactta

SEQ ID NO: 17831 - DNA, 15 bp, Homo sapiens
cctcagcatagactt

SEQ ID NO: 17832 - DNA, 15 bp, Homo sapiens
tcctcagcatagact

SEQ ID NO: 17833 - DNA, 15 bp, Homo sapiens
ttcctcagcatagac

SEQ ID NO: 17834 - DNA, 15 bp, Homo sapiens
gttcctcagcataga

SEQ ID NO: 17835 - DNA, 15 bp, Homo sapiens
agttcctcagcatag

SEQ ID NO: 17836 - DNA, 15 bp, Homo sapiens
aagttcctcagcata

SEQ ID NO: 17837 - DNA, 15 bp, Homo sapiens
caagttcctcagcat

SEQ ID NO: 17838 - DNA, 15 bp, Homo sapiens
acaagttcctcagca

SEQ ID NO: 17839 - DNA, 15 bp, Homo sapiens
tacaagttcctcagc

SEQ ID NO: 17840 - DNA, 15 bp, Homo sapiens
ctacaagttcctcag

SEQ ID NO: 17841 - DNA, 15 bp, Homo sapiens
tctacaagttcctca

SEQ ID NO: 17842 - DNA, 15 bp, Homo sapiens
gtctacaagttcctc

SEQ ID NO: 17843 - DNA, 15 bp, Homo sapiens
tgtctacaagttcct

SEQ ID NO: 17844 - DNA, 15 bp, Homo sapiens
gtgtctacaagttcc

SEQ ID NO: 17845 - DNA, 15 bp, Homo sapiens
tgtgtctacaagttc

SEQ ID NO: 17846 - DNA, 15 bp, Homo sapiens
atgtgtctacaagtt

SEQ ID NO: 17847 - DNA, 15 bp, Homo sapiens
tatgtgtctacaagt

SEQ ID NO: 17848 - DNA, 15 bp, Homo sapiens
ttatgtgtctacaag

SEQ ID NO: 17849 - DNA, 15 bp, Homo sapiens
attatgtgtctacaa

SEQ ID NO: 17850 - DNA, 15 bp, Homo sapiens
gattatgtgtctaca

SEQ ID NO: 17851 - DNA, 15 bp, Homo sapiens
ggattatgtgtctac

SEQ ID NO: 17852 - DNA, 15 bp, Homo sapiens
aggattatgtgtcta

SEQ ID NO: 17853 - DNA, 15 bp, Homo sapiens
taggattatgtgtct

SEQ ID NO: 17854 - DNA, 15 bp, Homo sapiens
ataggattatgtgtc

SEQ ID NO: 17855 - DNA, 15 bp, Homo sapiens
cataggattatgtgt

SEQ ID NO: 17856 - DNA, 15 bp, Homo sapiens
gcataggattatgtg

SEQ ID NO: 17857 - DNA, 15 bp, Homo sapiens
ggcataggattatgt

SEQ ID NO: 17858 - DNA, 15 bp, Homo sapiens
aggcataggattatg

SEQ ID NO: 17859 - DNA, 15 bp, Homo sapiens
aaggcataggattat

SEQ ID NO: 17860 - DNA, 15 bp, Homo sapiens
aaaggcataggatta

SEQ ID NO: 17861 - DNA, 15 bp, Homo sapiens
taaaggcataggatt

SEQ ID NO: 17862 - DNA, 15 bp, Homo sapiens
gtaaaggcataggat

SEQ ID NO: 17863 - DNA, 15 bp, Homo sapiens
tgtaaaggcatagga

SEQ ID NO: 17864 - DNA, 15 bp, Homo sapiens
gtgtaaaggcatagg

SEQ ID NO: 17865 - DNA, 15 bp, Homo sapiens
agtgtaaaggcatag

SEQ ID NO: 17866 - DNA, 15 bp, Homo sapiens
aagtgtaaaggcata

SEQ ID NO: 17867 - DNA, 15 bp, Homo sapiens
taagtgtaaaggcat

SEQ ID NO: 17868 - DNA, 15 bp, Homo sapiens
ctaagtgtaaaggca

SEQ ID NO: 17869 - DNA, 15 bp, Homo sapiens
tctaagtgtaaaggc

SEQ ID NO: 17870 - DNA, 15 bp, Homo sapiens
ctctaagtgtaaagg

SEQ ID NO: 17871 - DNA, 15 bp, Homo sapiens
cctctaagtgtaaag

SEQ ID NO: 17872 - DNA, 15 bp, Homo sapiens
ccctctaagtgtaaa

SEQ ID NO: 17873 - DNA, 15 bp, Homo sapiens
gccctctaagtgtaa

SEQ ID NO: 17874 - DNA, 15 bp, Homo sapiens
tgccctctaagtgta

SEQ ID NO: 17875 - DNA, 15 bp, Homo sapiens
gtgccctctaagtgt

SEQ ID NO: 17876 - DNA, 15 bp, Homo sapiens
tgtgccctctaagtg

SEQ ID NO: 17877 - DNA, 15 bp, Homo sapiens
ctgtgccctctaagt

SEQ ID NO: 17878 - DNA, 15 bp, Homo sapiens
actgtgccctctaag

SEQ ID NO: 17879 - DNA, 15 bp, Homo sapiens
gactgtgccctctaa

SEQ ID NO: 17880 - DNA, 15 bp, Homo sapiens
agactgtgccctcta

SEQ ID NO: 17881 - DNA, 15 bp, Homo sapiens
cagactgtgccctct

SEQ ID NO: 17882 - DNA, 15 bp, Homo sapiens
acagactgtgccctc

SEQ ID NO: 17883 - DNA, 15 bp, Homo sapiens
cacagactgtgccct

SEQ ID NO: 17884 - DNA, 15 bp, Homo sapiens
ccacagactgtgccc

SEQ ID NO: 17885 - DNA, 15 bp, Homo sapiens
cccacagactgtgcc

SEQ ID NO: 17886 - DNA, 15 bp, Homo sapiens
ccccacagactgtgc

SEQ ID NO: 17887 - DNA, 15 bp, Homo sapiens
cccccacagactgtg

SEQ ID NO: 17888 - DNA, 15 bp, Homo sapiens
tcccccacagactgt

SEQ ID NO: 17889 - DNA, 15 bp, Homo sapiens
ctcccccacagactg

SEQ ID NO: 17890 - DNA, 15 bp, Homo sapiens
gctcccccacagact

SEQ ID NO: 17891 - DNA, 15 bp, Homo sapiens
tgctcccccacagac

SEQ ID NO: 17892 - DNA, 15 bp, Homo sapiens
ttgctcccccacaga

SEQ ID NO: 17893 - DNA, 15 bp, Homo sapiens
attgctcccccacag

SEQ ID NO: 17894 - DNA, 15 bp, Homo sapiens
gattgctcccccaca

SEQ ID NO: 17895 - DNA, 15 bp, Homo sapiens
ggattgctcccccac

SEQ ID NO: 17896 - DNA, 15 bp, Homo sapiens
aggattgctccccca

SEQ ID NO: 17897 - DNA, 15 bp, Homo sapiens
caggattgctccccc

SEQ ID NO: 17898 - DNA, 15 bp, Homo sapiens
gcaggattgctcccc

SEQ ID NO: 17899 - DNA, 15 bp, Homo sapiens
tgcaggattgctccc

SEQ ID NO: 17900 - DNA, 15 bp, Homo sapiens
ttgcaggattgctcc

SEQ ID NO: 17901 - DNA, 15 bp, Homo sapiens
gttgcaggattgctc

SEQ ID NO: 17902 - DNA, 15 bp, Homo sapiens
agttgcaggattgct

SEQ ID NO: 17903 - DNA, 15 bp, Homo sapiens
aagttgcaggattgc

SEQ ID NO: 17904 - DNA, 15 bp, Homo sapiens
caagttgcaggattg

SEQ ID NO: 17905 - DNA, 15 bp, Homo sapiens
ccaagttgcaggatt

SEQ ID NO: 17906 - DNA, 15 bp, Homo sapiens
gccaagttgcaggat

SEQ ID NO: 17907 - DNA, 15 bp, Homo sapiens
tgccaagttgcagga

SEQ ID NO: 17908 - DNA, 15 bp, Homo sapiens
atgccaagttgcagg

SEQ ID NO: 17909 - DNA, 15 bp, Homo sapiens
tatgccaagttgcag

SEQ ID NO: 17910 - DNA, 15 bp, Homo sapiens
ttatgccaagttgca

SEQ ID NO: 17911 - DNA, 15 bp, Homo sapiens
attatgccaagttgc

SEQ ID NO: 17912 - DNA, 15 bp, Homo sapiens
gattatgccaagttg

SEQ ID NO: 17913 - DNA, 15 bp, Homo sapiens
agattatgccaagtt

SEQ ID NO: 17914 - DNA, 15 bp, Homo sapiens
aagattatgccaagt

SEQ ID NO: 17915 - DNA, 15 bp, Homo sapiens
aaagattatgccaag

SEQ ID NO: 17916 - DNA, 15 bp, Homo sapiens
gaaagattatgccaa

SEQ ID NO: 17917 - DNA, 15 bp, Homo sapiens
ggaaagattatgcca

SEQ ID NO: 17918 - DNA, 15 bp, Homo sapiens
aggaaagattatgcc

SEQ ID NO: 17919 - DNA, 15 bp, Homo sapiens
aaggaaagattatgc

SEQ ID NO: 17920 - DNA, 15 bp, Homo sapiens
gaaggaaagattatg

SEQ ID NO: 17921 - DNA, 15 bp, Homo sapiens
agaaggaaagattat

SEQ ID NO: 17922 - DNA, 15 bp, Homo sapiens
cagaaggaaagatta

SEQ ID NO: 17923 - DNA, 15 bp, Homo sapiens
ccagaaggaaagatt

SEQ ID NO: 17924 - DNA, 15 bp, Homo sapiens
accagaaggaaagat

SEQ ID NO: 17925 - DNA, 15 bp, Homo sapiens
aaccagaaggaaaga

SEQ ID NO: 17926 - DNA, 15 bp, Homo sapiens
aaaccagaaggaaag

SEQ ID NO: 17927 - DNA, 15 bp, Homo sapiens
taaaccagaaggaaa

SEQ ID NO: 17928 - DNA, 15 bp, Homo sapiens
ataaaccagaaggaa

SEQ ID NO: 17929 - DNA, 15 bp, Homo sapiens
cataaaccagaagga

SEQ ID NO: 17930 - DNA, 15 bp, Homo sapiens
tcataaaccagaagg

SEQ ID NO: 17931 - DNA, 15 bp, Homo sapiens
atcataaaccagaag

SEQ ID NO: 17932 - DNA, 15 bp, Homo sapiens
tatcataaaccagaa

SEQ ID NO: 17933 - DNA, 15 bp, Homo sapiens
ttatcataaaccaga

SEQ ID NO: 17934 - DNA, 15 bp, Homo sapiens
tttatcataaaccag

SEQ ID NO: 17935 - DNA, 15 bp, Homo sapiens
atttatcataaacca

SEQ ID NO: 17936 - DNA, 15 bp, Homo sapiens
tatttatcataaacc

SEQ ID NO: 17937 - DNA, 15 bp, Homo sapiens
gtatttatcataaac

SEQ ID NO: 17938 - DNA, 15 bp, Homo sapiens
agtatttatcataaa

SEQ ID NO: 17939 - DNA, 15 bp, Homo sapiens
aagtatttatcataa

SEQ ID NO: 17940 - DNA, 15 bp, Homo sapiens
taagtatttatcata

SEQ ID NO: 17941 - DNA, 15 bp, Homo sapiens
ataagtatttatcat

SEQ ID NO: 17942 - DNA, 15 bp, Homo sapiens
gataagtatttatca

SEQ ID NO: 17943 - DNA, 15 bp, Homo sapiens
ggataagtatttatc

SEQ ID NO: 17944 - DNA, 15 bp, Homo sapiens
tggataagtatttat

SEQ ID NO: 17945 - DNA, 15 bp, Homo sapiens
gtggataagtattta

SEQ ID NO: 17946 - DNA, 15 bp, Homo sapiens
agtggataagtattt

SEQ ID NO: 17947 - DNA, 15 bp, Homo sapiens
tagtggataagtatt

SEQ ID NO: 17948 - DNA, 15 bp, Homo sapiens
gtagtggataagtat

SEQ ID NO: 17949 - DNA, 15 bp, Homo sapiens
agtagtggataagta

SEQ ID NO: 17950 - DNA, 15 bp, Homo sapiens
cagtagtggataagt

SEQ ID NO: 17951 - DNA, 15 bp, Homo sapiens
tcagtagtggataag

SEQ ID NO: 17952 - DNA, 15 bp, Homo sapiens
ctcagtagtggataa

SEQ ID NO: 17953 - DNA, 15 bp, Homo sapiens
tctcagtagtggata

SEQ ID NO: 17954 - DNA, 15 bp, Homo sapiens
atctcagtagtggat

SEQ ID NO: 17955 - DNA, 15 bp, Homo sapiens
aatctcagtagtgga

SEQ ID NO: 17956 - DNA, 15 bp, Homo sapiens
taatctcagtagtgg

SEQ ID NO: 17957 - DNA, 15 bp, Homo sapiens
ataatctcagtagtg

SEQ ID NO: 17958 - DNA, 15 bp, Homo sapiens
gataatctcagtagt

SEQ ID NO: 17959 - DNA, 15 bp, Homo sapiens
agataatctcagtag

SEQ ID NO: 17960 - DNA, 15 bp, Homo sapiens
aagataatctcagta

SEQ ID NO: 17961 - DNA, 15 bp, Homo sapiens
aaagataatctcagt

SEQ ID NO: 17962 - DNA, 15 bp, Homo sapiens
taaagataatctcag

SEQ ID NO: 17963 - DNA, 15 bp, Homo sapiens
gtaaagataatctca

SEQ ID NO: 17964 - DNA, 15 bp, Homo sapiens
agtaaagataatctc

SEQ ID NO: 17965 - DNA, 15 bp, Homo sapiens
cagtaaagataatct

SEQ ID NO: 17966 - DNA, 15 bp, Homo sapiens
tcagtaaagataatc

SEQ ID NO: 17967 - DNA, 15 bp, Homo sapiens
ttcagtaaagataat

SEQ ID NO: 17968 - DNA, 15 bp, Homo sapiens
gttcagtaaagataa

SEQ ID NO: 17969 - DNA, 15 bp, Homo sapiens
agttcagtaaagata

SEQ ID NO: 17970 - DNA, 15 bp, Homo sapiens
cagttcagtaaagat

SEQ ID NO: 17971 - DNA, 15 bp, Homo sapiens
gcagttcagtaaaga

SEQ ID NO: 17972 - DNA, 15 bp, Homo sapiens
agcagttcagtaaag

SEQ ID NO: 17973 - DNA, 15 bp, Homo sapiens
cagcagttcagtaaa

SEQ ID NO: 17974 - DNA, 15 bp, Homo sapiens
ccagcagttcagtaa

SEQ ID NO: 17975 - DNA, 15 bp, Homo sapiens
gccagcagttcagta

SEQ ID NO: 17976 - DNA, 15 bp, Homo sapiens
ggccagcagttcagt

SEQ ID NO: 17977 - DNA, 15 bp, Homo sapiens
gggccagcagttcag

SEQ ID NO: 17978 - DNA, 15 bp, Homo sapiens
ggggccagcagttca

SEQ ID NO: 17979 - DNA, 15 bp, Homo sapiens
aggggccagcagttc

SEQ ID NO: 17980 - DNA, 15 bp, Homo sapiens
aaggggccagcagtt

SEQ ID NO: 17981 - DNA, 15 bp, Homo sapiens
gaaggggccagcagt

SEQ ID NO: 17982 - DNA, 15 bp, Homo sapiens
agaaggggccagcag

SEQ ID NO: 17983 - DNA, 15 bp, Homo sapiens
cagaaggggccagca

SEQ ID NO: 17984 - DNA, 15 bp, Homo sapiens
gcagaaggggccagc

SEQ ID NO: 17985 - DNA, 15 bp, Homo sapiens
ggcagaaggggccag

SEQ ID NO: 17986 - DNA, 15 bp, Homo sapiens
aggcagaaggggcca

SEQ ID NO: 17987 - DNA, 15 bp, Homo sapiens
caggcagaaggggcc

SEQ ID NO: 17988 - DNA, 15 bp, Homo sapiens
acaggcagaaggggc

SEQ ID NO: 17989 - DNA, 15 bp, Homo sapiens
aacaggcagaagggg

SEQ ID NO: 17990 - DNA, 15 bp, Homo sapiens
caacaggcagaaggg

SEQ ID NO: 17991 - DNA, 15 bp, Homo sapiens
ccaacaggcagaagg

SEQ ID NO: 17992 - DNA, 15 bp, Homo sapiens
gccaacaggcagaag

SEQ ID NO: 17993 - DNA, 15 bp, Homo sapiens
ggccaacaggcagaa

SEQ ID NO: 17994 - DNA, 15 bp, Homo sapiens
aggccaacaggcaga

SEQ ID NO: 17995 - DNA, 15 bp, Homo sapiens
aaggccaacaggcag

SEQ ID NO: 17996 - DNA, 15 bp, Homo sapiens
caaggccaacaggca

SEQ ID NO: 17997 - DNA, 15 bp, Homo sapiens
gcaaggccaacaggc

SEQ ID NO: 17998 - DNA, 15 bp, Homo sapiens
agcaaggccaacagg

SEQ ID NO: 17999 - DNA, 15 bp, Homo sapiens
cagcaaggccaacag

SEQ ID NO: 18000 - DNA, 15 bp, Homo sapiens
gcagcaaggccaaca

SEQ ID NO: 18001 - DNA, 15 bp, Homo sapiens
ggcagcaaggccaac

SEQ ID NO: 18002 - DNA, 15 bp, Homo sapiens
aggcagcaaggccaa

SEQ ID NO: 18003 - DNA, 15 bp, Homo sapiens
gaggcagcaaggcca

SEQ ID NO: 18004 - DNA, 15 bp, Homo sapiens
agaggcagcaaggcc

SEQ ID NO: 18005 - DNA, 15 bp, Homo sapiens
cagaggcagcaaggc

SEQ ID NO: 18006 - DNA, 15 bp, Homo sapiens
gcagaggcagcaagg

SEQ ID NO: 18007 - DNA, 15 bp, Homo sapiens
ggcagaggcagcaag

SEQ ID NO: 18008 - DNA, 15 bp, Homo sapiens
gggcagaggcagcaa

SEQ ID NO: 18009 - DNA, 15 bp, Homo sapiens
tgggcagaggcagca

SEQ ID NO: 18010 - DNA, 15 bp, Homo sapiens
ctgggcagaggcagc

SEQ ID NO: 18011 - DNA, 15 bp, Homo sapiens
gctgggcagaggcag

SEQ ID NO: 18012 - DNA, 15 bp, Homo sapiens
agctgggcagaggca

SEQ ID NO: 18013 - DNA, 15 bp, Homo sapiens
aagctgggcagaggc

SEQ ID NO: 18014 - DNA, 15 bp, Homo sapiens
gaagctgggcagagg

SEQ ID NO: 18015 - DNA, 15 bp, Homo sapiens
agaagctgggcagag

SEQ ID NO: 18016 - DNA, 15 bp, Homo sapiens
gagaagctgggcaga

SEQ ID NO: 18017 - DNA, 15 bp, Homo sapiens
agagaagctgggcag

SEQ ID NO: 18018 - DNA, 15 bp, Homo sapiens
gagagaagctgggca

SEQ ID NO: 18019 - DNA, 15 bp, Homo sapiens
agagagaagctgggc

SEQ ID NO: 18020 - DNA, 15 bp, Homo sapiens
gagagagaagctggg

SEQ ID NO: 18021 - DNA, 15 bp, Homo sapiens
ggagagagaagctgg

SEQ ID NO: 18022 - DNA, 15 bp, Homo sapiens
tggagagagaagctg

SEQ ID NO: 18023 - DNA, 15 bp, Homo sapiens
gtggagagagaagct

SEQ ID NO: 18024 - DNA, 15 bp, Homo sapiens
ggtggagagagaagc

SEQ ID NO: 18025 - DNA, 15 bp, Homo sapiens
aggtggagagagaag

SEQ ID NO: 18026 - DNA, 15 bp, Homo sapiens
caggtggagagagaa

SEQ ID NO: 18027 - DNA, 15 bp, Homo sapiens
gcaggtggagagaga

SEQ ID NO: 18028 - DNA, 15 bp, Homo sapiens
tgcaggtggagagag

SEQ ID NO: 18029 - DNA, 15 bp, Homo sapiens
gtgcaggtggagaga

SEQ ID NO: 18030 - DNA, 15 bp, Homo sapiens
agtgcaggtggagag

SEQ ID NO: 18031 - DNA, 15 bp, Homo sapiens
cagtgcaggtggaga

SEQ ID NO: 18032 - DNA, 15 bp, Homo sapiens
gcagtgcaggtggag

SEQ ID NO: 18033 - DNA, 15 bp, Homo sapiens
ggcagtgcaggtgga

SEQ ID NO: 18034 - DNA, 15 bp, Homo sapiens
gggcagtgcaggtgg

SEQ ID NO: 18035 - DNA, 15 bp, Homo sapiens
tgggcagtgcaggtg

SEQ ID NO: 18036 - DNA, 15 bp, Homo sapiens
atgggcagtgcaggt

SEQ ID NO: 18037 - DNA, 15 bp, Homo sapiens
aatgggcagtgcagg

SEQ ID NO: 18038 - DNA, 15 bp, Homo sapiens
gaatgggcagtgcag

SEQ ID NO: 18039 - DNA, 15 bp, Homo sapiens
agaatgggcagtgca

SEQ ID NO: 18040 - DNA, 15 bp, Homo sapiens
gagaatgggcagtgc

SEQ ID NO: 18041 - DNA, 15 bp, Homo sapiens
ggagaatgggcagtg

SEQ ID NO: 18042 - DNA, 15 bp, Homo sapiens
aggagaatgggcagt

SEQ ID NO: 18043 - DNA, 15 bp, Homo sapiens
gaggagaatgggcag

SEQ ID NO: 18044 - DNA, 15 bp, Homo sapiens
agaggagaatgggca

SEQ ID NO: 18045 - DNA, 15 bp, Homo sapiens
aagaggagaatgggc

SEQ ID NO: 18046 - DNA, 15 bp, Homo sapiens
caagaggagaatggg

SEQ ID NO: 18047 - DNA, 15 bp, Homo sapiens
acaagaggagaatgg

SEQ ID NO: 18048 - DNA, 15 bp, Homo sapiens
gacaagaggagaatg

SEQ ID NO: 18049 - DNA, 15 bp, Homo sapiens
ggacaagaggagaat

SEQ ID NO: 18050 - DNA, 15 bp, Homo sapiens
aggacaagaggagaa

SEQ ID NO: 18051 - DNA, 15 bp, Homo sapiens
aaggacaagaggaga

SEQ ID NO: 18052 - DNA, 15 bp, Homo sapiens
gaaggacaagaggag

SEQ ID NO: 18053 - DNA, 15 bp, Homo sapiens
ggaaggacaagagga

SEQ ID NO: 18054 - DNA, 15 bp, Homo sapiens
tggaaggacaagagg

SEQ ID NO: 18055 - DNA, 15 bp, Homo sapiens
ttggaaggacaagag

SEQ ID NO: 18056 - DNA, 15 bp, Homo sapiens
cttggaaggacaaga

SEQ ID NO: 18057 - DNA, 15 bp, Homo sapiens
tcttggaaggacaag

SEQ ID NO: 18058 - DNA, 15 bp, Homo sapiens
ttcttggaaggacaa

SEQ ID NO: 18059 - DNA, 15 bp, Homo sapiens
tttcttggaaggaca

SEQ ID NO: 18060 - DNA, 15 bp, Homo sapiens
atttcttggaaggac

SEQ ID NO: 18061 - DNA, 15 bp, Homo sapiens
aatttcttggaagga

SEQ ID NO: 18062 - DNA, 15 bp, Homo sapiens
gaatttcttggaagg

SEQ ID NO: 18063 - DNA, 15 bp, Homo sapiens
agaatttcttggaag

SEQ ID NO: 18064 - DNA, 15 bp, Homo sapiens
gagaatttcttggaa

SEQ ID NO: 18065 - DNA, 15 bp, Homo sapiens
ggagaatttcttgga

SEQ ID NO: 18066 - DNA, 15 bp, Homo sapiens
aggagaatttcttgg

SEQ ID NO: 18067 - DNA, 15 bp, Homo sapiens
gaggagaatttcttg

SEQ ID NO: 18068 - DNA, 15 bp, Homo sapiens
agaggagaatttctt

SEQ ID NO: 18069 - DNA, 15 bp, Homo sapiens
aagaggagaatttct

SEQ ID NO: 18070 - DNA, 15 bp, Homo sapiens
gaagaggagaatttc

SEQ ID NO: 18071 - DNA, 15 bp, Homo sapiens
ggaagaggagaattt

SEQ ID NO: 18072 - DNA, 15 bp, Homo sapiens
aggaagaggagaatt

SEQ ID NO: 18073 - DNA, 15 bp, Homo sapiens
aaggaagaggagaat

SEQ ID NO: 18074 - DNA, 15 bp, Homo sapiens
aaaggaagaggagaa

SEQ ID NO: 18075 - DNA, 15 bp, Homo sapiens
caaaggaagaggaga

SEQ ID NO: 18076 - DNA, 15 bp, Homo sapiens
ccaaaggaagaggag

SEQ ID NO: 18077 - DNA, 15 bp, Homo sapiens
cccaaaggaagagga

SEQ ID NO: 18078 - DNA, 15 bp, Homo sapiens
ccccaaaggaagagg

SEQ ID NO: 18079 - DNA, 15 bp, Homo sapiens
gccccaaaggaagag

SEQ ID NO: 18080 - DNA, 15 bp, Homo sapiens
agccccaaaggaaga

SEQ ID NO: 18081 - DNA, 15 bp, Homo sapiens
aagccccaaaggaag

SEQ ID NO: 18082 - DNA, 15 bp, Homo sapiens
caagccccaaaggaa

SEQ ID NO: 18083 - DNA, 15 bp, Homo sapiens
tcaagccccaaagga

SEQ ID NO: 18084 - DNA, 15 bp, Homo sapiens
atcaagccccaaagg

SEQ ID NO: 18085 - DNA, 15 bp, Homo sapiens
catcaagccccaaag

SEQ ID NO: 18086 - DNA, 15 bp, Homo sapiens
acatcaagccccaaa

SEQ ID NO: 18087 - DNA, 15 bp, Homo sapiens
cacatcaagccccaa

SEQ ID NO: 18088 - DNA, 15 bp, Homo sapiens
ccacatcaagcccca

SEQ ID NO: 18089 - DNA, 15 bp, Homo sapiens
cccacatcaagcccc

SEQ ID NO: 18090 - DNA, 15 bp, Homo sapiens
ccccacatcaagccc

SEQ ID NO: 18091 - DNA, 15 bp, Homo sapiens
tccccacatcaagcc

SEQ ID NO: 18092 - DNA, 15 bp, Homo sapiens
atccccacatcaagc

SEQ ID NO: 18093 - DNA, 15 bp, Homo sapiens
aatccccacatcaag

SEQ ID NO: 18094 - DNA, 15 bp, Homo sapiens
gaatccccacatcaa

SEQ ID NO: 18095 - DNA, 15 bp, Homo sapiens
tgaatccccacatca

SEQ ID NO: 18096 - DNA, 15 bp, Homo sapiens
gtgaatccccacatc

SEQ ID NO: 18097 - DNA, 15 bp, Homo sapiens
ggtgaatccccacat

SEQ ID NO: 18098 - DNA, 15 bp, Homo sapiens
gggtgaatccccaca

SEQ ID NO: 18099 - DNA, 15 bp, Homo sapiens
agggtgaatccccac

SEQ ID NO: 18100 - DNA, 15 bp, Homo sapiens
cagggtgaatcccca

SEQ ID NO: 18101 - DNA, 15 bp, Homo sapiens
ccagggtgaatcccc

SEQ ID NO: 18102 - DNA, 15 bp, Homo sapiens
accagggtgaatccc

SEQ ID NO: 18103 - DNA, 15 bp, Homo sapiens
caccagggtgaatcc

SEQ ID NO: 18104 - DNA, 15 bp, Homo sapiens
gcaccagggtgaatc

SEQ ID NO: 18105 - DNA, 15 bp, Homo sapiens
ggcaccagggtgaat

SEQ ID NO: 18106 - DNA, 15 bp, Homo sapiens
aggcaccagggtgaa

SEQ ID NO: 18107 - DNA, 15 bp, Homo sapiens
aaggcaccagggtga

SEQ ID NO: 18108 - DNA, 15 bp, Homo sapiens
gaaggcaccagggtg

SEQ ID NO: 18109 - DNA, 15 bp, Homo sapiens
ggaaggcaccagggt

SEQ ID NO: 18110 - DNA, 15 bp, Homo sapiens
aggaaggcaccaggg

SEQ ID NO: 18111 - DNA, 15 bp, Homo sapiens
caggaaggcaccagg

SEQ ID NO: 18112 - DNA, 15 bp, Homo sapiens
gcaggaaggcaccag

SEQ ID NO: 18113 - DNA, 15 bp, Homo sapiens
ggcaggaaggcacca

SEQ ID NO: 18114 - DNA, 15 bp, Homo sapiens
gggcaggaaggcacc

SEQ ID NO: 18115 - DNA, 15 bp, Homo sapiens
agggcaggaaggcac

SEQ ID NO: 18116 - DNA, 15 bp, Homo sapiens
cagggcaggaaggca

SEQ ID NO: 18117 - DNA, 15 bp, Homo sapiens
ccagggcaggaaggc

SEQ ID NO: 18118 - DNA, 15 bp, Homo sapiens
gccagggcaggaagg

SEQ ID NO: 18119 - DNA, 15 bp, Homo sapiens
agccagggcaggaag

SEQ ID NO: 18120 - DNA, 15 bp, Homo sapiens
gagccagggcaggaa

SEQ ID NO: 18121 - DNA, 15 bp, Homo sapiens
ggagccagggcagga

SEQ ID NO: 18122 - DNA, 15 bp, Homo sapiens
gggagccagggcagg

SEQ ID NO: 18123 - DNA, 15 bp, Homo sapiens
ggggagccagggcag

SEQ ID NO: 18124 - DNA, 15 bp, Homo sapiens
gggggagccagggca

SEQ ID NO: 18125 - DNA, 15 bp, Homo sapiens
tgggggagccagggc

SEQ ID NO: 18126 - DNA, 15 bp, Homo sapiens
gtgggggagccaggg

SEQ ID NO: 18127 - DNA, 15 bp, Homo sapiens
agtgggggagccagg

SEQ ID NO: 18128 - DNA, 15 bp, Homo sapiens
aagtgggggagccag

SEQ ID NO: 18129 - DNA, 15 bp, Homo sapiens
gaagtgggggagcca

SEQ ID NO: 18130 - DNA, 15 bp, Homo sapiens
ggaagtgggggagcc

SEQ ID NO: 18131 - DNA, 15 bp, Homo sapiens
aggaagtgggggagc

SEQ ID NO: 18132 - DNA, 15 bp, Homo sapiens
gaggaagtgggggag

SEQ ID NO: 18133 - DNA, 15 bp, Homo sapiens
agaggaagtggggga

SEQ ID NO: 18134 - DNA, 15 bp, Homo sapiens
gagaggaagtggggg

SEQ ID NO: 18135 - DNA, 15 bp, Homo sapiens
agagaggaagtgggg

SEQ ID NO: 18136 - DNA, 15 bp, Homo sapiens
cagagaggaagtggg

SEQ ID NO: 18137 - DNA, 15 bp, Homo sapiens
ccagagaggaagtgg

SEQ ID NO: 18138 - DNA, 15 bp, Homo sapiens
gccagagaggaagtg

SEQ ID NO: 18139 - DNA, 15 bp, Homo sapiens
ggccagagaggaagt

SEQ ID NO: 18140 - DNA, 15 bp, Homo sapiens
tggccagagaggaag

SEQ ID NO: 18141 - DNA, 15 bp, Homo sapiens
ctggccagagaggaa

SEQ ID NO: 18142 - DNA, 15 bp, Homo sapiens
actggccagagagga

SEQ ID NO: 18143 - DNA, 15 bp, Homo sapiens
cactggccagagagg

SEQ ID NO: 18144 - DNA, 15 bp, Homo sapiens
ccactggccagagag

SEQ ID NO: 18145 - DNA, 15 bp, Homo sapiens
accactggccagaga

SEQ ID NO: 18146 - DNA, 15 bp, Homo sapiens
aaccactggccagag

SEQ ID NO: 18147 - DNA, 15 bp, Homo sapiens
aaaccactggccaga

SEQ ID NO: 18148 - DNA, 15 bp, Homo sapiens
aaaaccactggccag

SEQ ID NO: 18149 - DNA, 15 bp, Homo sapiens
aaaaaccactggcca

SEQ ID NO: 18150 - DNA, 15 bp, Homo sapiens
aaaaaaccactggcc

SEQ ID NO: 18151 - DNA, 15 bp, Homo sapiens
aaaaaaaccactggc

SEQ ID NO: 18152 - DNA, 15 bp, Homo sapiens
gaaaaaaaccactgg

SEQ ID NO: 18153 - DNA, 15 bp, Homo sapiens
ggaaaaaaaccactg

SEQ ID NO: 18154 - DNA, 15 bp, Homo sapiens
gggaaaaaaaccact

SEQ ID NO: 18155 - DNA, 15 bp, Homo sapiens
agggaaaaaaaccac

SEQ ID NO: 18156 - DNA, 15 bp, Homo sapiens
gagggaaaaaaacca

SEQ ID NO: 18157 - DNA, 15 bp, Homo sapiens
agagggaaaaaaacc

SEQ ID NO: 18158 - DNA, 15 bp, Homo sapiens
gagagggaaaaaaac

SEQ ID NO: 18159 - DNA, 15 bp, Homo sapiens
tgagagggaaaaaaa

SEQ ID NO: 18160 - DNA, 15 bp, Homo sapiens
atgagagggaaaaaa

SEQ ID NO: 18161 - DNA, 15 bp, Homo sapiens
aatgagagggaaaaa

SEQ ID NO: 18162 - DNA, 15 bp, Homo sapiens
aaatgagagggaaaa

SEQ ID NO: 18163 - DNA, 15 bp, Homo sapiens
aaaatgagagggaaa

SEQ ID NO: 18164 - DNA, 15 bp, Homo sapiens
taaaatgagagggaa

SEQ ID NO: 18165 - DNA, 15 bp, Homo sapiens
ataaaatgagaggga

SEQ ID NO: 18166 - DNA, 15 bp, Homo sapiens
aataaaatgagaggg

SEQ ID NO: 18167 - DNA, 15 bp, Homo sapiens
aaataaaatgagagg

SEQ ID NO: 18168 - DNA, 15 bp, Homo sapiens
caaataaaatgagag

SEQ ID NO: 18169 - DNA, 15 bp, Homo sapiens
gcaaataaaatgaga

SEQ ID NO: 18170 - DNA, 15 bp, Homo sapiens
ggcaaataaaatgag

SEQ ID NO: 18171 - DNA, 15 bp, Homo sapiens
aggcaaataaaatga

SEQ ID NO: 18172 - DNA, 15 bp, Homo sapiens
gaggcaaataaaatg

SEQ ID NO: 18173 - DNA, 15 bp, Homo sapiens
agaggcaaataaaat

SEQ ID NO: 18174 - DNA, 15 bp, Homo sapiens
cagaggcaaataaaa

SEQ ID NO: 18175 - DNA, 15 bp, Homo sapiens
acagaggcaaataaa

SEQ ID NO: 18176 - DNA, 15 bp, Homo sapiens
tacagaggcaaataa

SEQ ID NO: 18177 - DNA, 15 bp, Homo sapiens
atacagaggcaaata

SEQ ID NO: 18178 - DNA, 15 bp, Homo sapiens
aatacagaggcaaat

SEQ ID NO: 18179 - DNA, 15 bp, Homo sapiens
caatacagaggcaaa

SEQ ID NO: 18180 - DNA, 15 bp, Homo sapiens
acaatacagaggcaa

SEQ ID NO: 18181 - DNA, 15 bp, Homo sapiens
gacaatacagaggca

SEQ ID NO: 18182 - DNA, 15 bp, Homo sapiens
ggacaatacagaggc

SEQ ID NO: 18183 - DNA, 15 bp, Homo sapiens
aggacaatacagagg

SEQ ID NO: 18184 - DNA, 15 bp, Homo sapiens
aaggacaatacagag

SEQ ID NO: 18185 - DNA, 15 bp, Homo sapiens
taaggacaatacaga

SEQ ID NO: 18186 - DNA, 15 bp, Homo sapiens
gtaaggacaatacag

SEQ ID NO: 18187 - DNA, 15 bp, Homo sapiens
agtaaggacaataca

SEQ ID NO: 18188 - DNA, 15 bp, Homo sapiens
aagtaaggacaatac

SEQ ID NO: 18189 - DNA, 15 bp, Homo sapiens
aaagtaaggacaata

SEQ ID NO: 18190 - DNA, 15 bp, Homo sapiens
taaagtaaggacaat

SEQ ID NO: 18191 - DNA, 15 bp, Homo sapiens
ataaagtaaggacaa

SEQ ID NO: 18192 - DNA, 15 bp, Homo sapiens
aataaagtaaggaca

SEQ ID NO: 18193 - DNA, 15 bp, Homo sapiens
taataaagtaaggac

SEQ ID NO: 18194 - DNA, 15 bp, Homo sapiens
ataataaagtaagga

SEQ ID NO: 18195 - DNA, 15 bp, Homo sapiens
gataataaagtaagg

SEQ ID NO: 18196 - DNA, 15 bp, Homo sapiens
agataataaagtaag

SEQ ID NO: 18197 - DNA, 15 bp, Homo sapiens
aagataataaagtaa

SEQ ID NO: 18198 - DNA, 15 bp, Homo sapiens
caagataataaagta

SEQ ID NO: 18199 - DNA, 15 bp, Homo sapiens
acaagataataaagt

SEQ ID NO: 18200 - DNA, 15 bp, Homo sapiens
aacaagataataaag

SEQ ID NO: 18201 - DNA, 15 bp, Homo sapiens
aaacaagataataaa

SEQ ID NO: 18202 - DNA, 15 bp, Homo sapiens
taaacaagataataa

SEQ ID NO: 18203 - DNA, 15 bp, Homo sapiens
gtaaacaagataata

SEQ ID NO: 18204 - DNA, 15 bp, Homo sapiens
agtaaacaagataat

SEQ ID NO: 18205 - DNA, 15 bp, Homo sapiens
cagtaaacaagataa

SEQ ID NO: 18206 - DNA, 15 bp, Homo sapiens
acagtaaacaagata

SEQ ID NO: 18207 - DNA, 15 bp, Homo sapiens
aacagtaaacaagat

SEQ ID NO: 18208 - DNA, 15 bp, Homo sapiens
aaacagtaaacaaga

SEQ ID NO: 18209 - DNA, 15 bp, Homo sapiens
aaaacagtaaacaag

SEQ ID NO: 18210 - DNA, 15 bp, Homo sapiens
caaaacagtaaacaa

SEQ ID NO: 18211 - DNA, 15 bp, Homo sapiens
acaaaacagtaaaca

SEQ ID NO: 18212 - DNA, 15 bp, Homo sapiens
cacaaaacagtaaac

SEQ ID NO: 18213 - DNA, 15 bp, Homo sapiens
gcacaaaacagtaaa

SEQ ID NO: 18214 - DNA, 15 bp, Homo sapiens
agcacaaaacagtaa

SEQ ID NO: 18215 - DNA, 15 bp, Homo sapiens
cagcacaaaacagta

SEQ ID NO: 18216 - DNA, 15 bp, Homo sapiens
ccagcacaaaacagt

SEQ ID NO: 18217 - DNA, 15 bp, Homo sapiens
gccagcacaaaacag

SEQ ID NO: 18218 - DNA, 15 bp, Homo sapiens
cgccagcacaaaaca

SEQ ID NO: 18219 - DNA, 15 bp, Homo sapiens
tcgccagcacaaaac

SEQ ID NO: 18220 - DNA, 15 bp, Homo sapiens
gtcgccagcacaaaa

SEQ ID NO: 18221 - DNA, 15 bp, Homo sapiens
tgtcgccagcacaaa

SEQ ID NO: 18222 - DNA, 15 bp, Homo sapiens
gtgtcgccagcacaa

SEQ ID NO: 18223 - DNA, 15 bp, Homo sapiens
tgtgtcgccagcaca

SEQ ID NO: 18224 - DNA, 15 bp, Homo sapiens
ctgtgtcgccagcac

SEQ ID NO: 18225 - DNA, 15 bp, Homo sapiens
gctgtgtcgccagca

SEQ ID NO: 18226 - DNA, 15 bp, Homo sapiens
agctgtgtcgccagc

SEQ ID NO: 18227 - DNA, 15 bp, Homo sapiens
tagctgtgtcgccag

SEQ ID NO: 18228 - DNA, 15 bp, Homo sapiens
atagctgtgtcgcca

SEQ ID NO: 18229 - DNA, 15 bp, Homo sapiens
aatagctgtgtcgcc

SEQ ID NO: 18230 - DNA, 15 bp, Homo sapiens
taatagctgtgtcgc

SEQ ID NO: 18231 - DNA, 15 bp, Homo sapiens
gtaatagctgtgtcg

SEQ ID NO: 18232 - DNA, 15 bp, Homo sapiens
ggtaatagctgtgtc

SEQ ID NO: 18233 - DNA, 15 bp, Homo sapiens
tggtaatagctgtgt

SEQ ID NO: 18234 - DNA, 15 bp, Homo sapiens
atggtaatagctgtg

SEQ ID NO: 18235 - DNA, 15 bp, Homo sapiens
gatggtaatagctgt

SEQ ID NO: 18236 - DNA, 15 bp, Homo sapiens
tgatggtaatagctg

SEQ ID NO: 18237 - DNA, 15 bp, Homo sapiens
ctgatggtaatagct

SEQ ID NO: 18238 - DNA, 15 bp, Homo sapiens
tctgatggtaatagc

SEQ ID NO: 18239 - DNA, 15 bp, Homo sapiens
gtctgatggtaatag

SEQ ID NO: 18240 - DNA, 15 bp, Homo sapiens
ggtctgatggtaata

SEQ ID NO: 18241 - DNA, 15 bp, Homo sapiens
aggtctgatggtaat

SEQ ID NO: 18242 - DNA, 15 bp, Homo sapiens
taggtctgatggtaa

SEQ ID NO: 18243 - DNA, 15 bp, Homo sapiens
ctaggtctgatggta

SEQ ID NO: 18244 - DNA, 15 bp, Homo sapiens
actaggtctgatggt

SEQ ID NO: 18245 - DNA, 15 bp, Homo sapiens
cactaggtctgatgg

SEQ ID NO: 18246 - DNA, 15 bp, Homo sapiens
ccactaggtctgatg

SEQ ID NO: 18247 - DNA, 15 bp, Homo sapiens
cccactaggtctgat

SEQ ID NO: 18248 - DNA, 15 bp, Homo sapiens
acccactaggtctga

SEQ ID NO: 18249 - DNA, 15 bp, Homo sapiens
tacccactaggtctg

SEQ ID NO: 18250 - DNA, 15 bp, Homo sapiens
gtacccactaggtct

SEQ ID NO: 18251 - DNA, 15 bp, Homo sapiens
tgtacccactaggtc

SEQ ID NO: 18252 - DNA, 15 bp, Homo sapiens
gtgtacccactaggt

SEQ ID NO: 18253 - DNA, 15 bp, Homo sapiens
tgtgtacccactagg

SEQ ID NO: 18254 - DNA, 15 bp, Homo sapiens
ctgtgtacccactag

SEQ ID NO: 18255 - DNA, 15 bp, Homo sapiens
tctgtgtacccacta

SEQ ID NO: 18256 - DNA, 15 bp, Homo sapiens
gtctgtgtacccact

SEQ ID NO: 18257 - DNA, 15 bp, Homo sapiens
tgtctgtgtacccac

SEQ ID NO: 18258 - DNA, 15 bp, Homo sapiens
gtgtctgtgtaccca

SEQ ID NO: 18259 - DNA, 15 bp, Homo sapiens
cgtgtctgtgtaccc

SEQ ID NO: 18260 - DNA, 15 bp, Homo sapiens
acgtgtctgtgtacc

SEQ ID NO: 18261 - DNA, 15 bp, Homo sapiens
cacgtgtctgtgtac

SEQ ID NO: 18262 - DNA, 15 bp, Homo sapiens
gcacgtgtctgtgta

SEQ ID NO: 18263 - DNA, 15 bp, Homo sapiens
ggcacgtgtctgtgt

SEQ ID NO: 18264 - DNA, 15 bp, Homo sapiens
aggcacgtgtctgtg

SEQ ID NO: 18265 - DNA, 15 bp, Homo sapiens
aaggcacgtgtctgt

SEQ ID NO: 18266 - DNA, 15 bp, Homo sapiens
caaggcacgtgtctg

SEQ ID NO: 18267 - DNA, 15 bp, Homo sapiens
tcaaggcacgtgtct

SEQ ID NO: 18268 - DNA, 15 bp, Homo sapiens
ttcaaggcacgtgtc

SEQ ID NO: 18269 - DNA, 15 bp, Homo sapiens
cttcaaggcacgtgt

SEQ ID NO: 18270 - DNA, 15 bp, Homo sapiens
acttcaaggcacgtg

SEQ ID NO: 18271 - DNA, 15 bp, Homo sapiens
gacttcaaggcacgt

SEQ ID NO: 18272 - DNA, 15 bp, Homo sapiens
tgacttcaaggcacg

SEQ ID NO: 18273 - DNA, 15 bp, Homo sapiens
ctgacttcaaggcac

SEQ ID NO: 18274 - DNA, 15 bp, Homo sapiens
cctgacttcaaggca

SEQ ID NO: 18275 - DNA, 15 bp, Homo sapiens
gcctgacttcaaggc

SEQ ID NO: 18276 - DNA, 15 bp, Homo sapiens
ggcctgacttcaagg

SEQ ID NO: 18277 - DNA, 15 bp, Homo sapiens
gggcctgacttcaag

SEQ ID NO: 18278 - DNA, 15 bp, Homo sapiens
ggggcctgacttcaa

SEQ ID NO: 18279 - DNA, 15 bp, Homo sapiens
gggggcctgacttca

SEQ ID NO: 18280 - DNA, 15 bp, Homo sapiens
ggggggcctgacttc

SEQ ID NO: 18281 - DNA, 15 bp, Homo sapiens
tggggggcctgactt

SEQ ID NO: 18282 - DNA, 15 bp, Homo sapiens
gtggggggcctgact

SEQ ID NO: 18283 - DNA, 15 bp, Homo sapiens
ggtggggggcctgac

SEQ ID NO: 18284 - DNA, 15 bp, Homo sapiens
aggtggggggcctga

SEQ ID NO: 18285 - DNA, 15 bp, Homo sapiens
caggtggggggcctg

SEQ ID NO: 18286 - DNA, 15 bp, Homo sapiens
tcaggtggggggcct

SEQ ID NO: 18287 - DNA, 15 bp, Homo sapiens
atcaggtggggggcc

SEQ ID NO: 18288 - DNA, 15 bp, Homo sapiens
catcaggtggggggc

SEQ ID NO: 18289 - DNA, 15 bp, Homo sapiens
gcatcaggtgggggg

SEQ ID NO: 18290 - DNA, 15 bp, Homo sapiens
agcatcaggtggggg

SEQ ID NO: 18291 - DNA, 15 bp, Homo sapiens
cagcatcaggtgggg

SEQ ID NO: 18292 - DNA, 15 bp, Homo sapiens
ccagcatcaggtggg

SEQ ID NO: 18293 - DNA, 15 bp, Homo sapiens
accagcatcaggtgg

SEQ ID NO: 18294 - DNA, 15 bp, Homo sapiens
gaccagcatcaggtg

SEQ ID NO: 18295 - DNA, 15 bp, Homo sapiens
tgaccagcatcaggt

SEQ ID NO: 18296 - DNA, 15 bp, Homo sapiens
ctgaccagcatcagg

SEQ ID NO: 18297 - DNA, 15 bp, Homo sapiens
gctgaccagcatcag

SEQ ID NO: 18298 - DNA, 15 bp, Homo sapiens
tgctgaccagcatca

SEQ ID NO: 18299 - DNA, 15 bp, Homo sapiens
ttgctgaccagcatc

SEQ ID NO: 18300 - DNA, 15 bp, Homo sapiens
gttgctgaccagcat

SEQ ID NO: 18301 - DNA, 15 bp, Homo sapiens
tgttgctgaccagca

SEQ ID NO: 18302 - DNA, 15 bp, Homo sapiens
ctgttgctgaccagc

SEQ ID NO: 18303 - DNA, 15 bp, Homo sapiens
cctgttgctgaccag

SEQ ID NO: 18304 - DNA, 15 bp, Homo sapiens
ccctgttgctgacca

SEQ ID NO: 18305 - DNA, 15 bp, Homo sapiens
gccctgttgctgacc

SEQ ID NO: 18306 - DNA, 15 bp, Homo sapiens
ggccctgttgctgac

SEQ ID NO: 18307 - DNA, 15 bp, Homo sapiens
tggccctgttgctga

SEQ ID NO: 18308 - DNA, 15 bp, Homo sapiens
gtggccctgttgctg

SEQ ID NO: 18309 - DNA, 15 bp, Homo sapiens
agtggccctgttgct

SEQ ID NO: 18310 - DNA, 15 bp, Homo sapiens
cagtggccctgttgc

SEQ ID NO: 18311 - DNA, 15 bp, Homo sapiens
ccagtggccctgttg

SEQ ID NO: 18312 - DNA, 15 bp, Homo sapiens
tccagtggccctgtt

SEQ ID NO: 18313 - DNA, 15 bp, Homo sapiens
ctccagtggccctgt

SEQ ID NO: 18314 - DNA, 15 bp, Homo sapiens
gctccagtggccctg

SEQ ID NO: 18315 - DNA, 15 bp, Homo sapiens
ggctccagtggccct

SEQ ID NO: 18316 - DNA, 15 bp, Homo sapiens
gggctccagtggccc

SEQ ID NO: 18317 - DNA, 15 bp, Homo sapiens
ggggctccagtggcc

SEQ ID NO: 18318 - DNA, 15 bp, Homo sapiens
aggggctccagtggc

SEQ ID NO: 18319 - DNA, 15 bp, Homo sapiens
aaggggctccagtgg

SEQ ID NO: 18320 - DNA, 15 bp, Homo sapiens
taaggggctccagtg

SEQ ID NO: 18321 - DNA, 15 bp, Homo sapiens
gtaaggggctccagt

SEQ ID NO: 18322 - DNA, 15 bp, Homo sapiens
ggtaaggggctccag

SEQ ID NO: 18323 - DNA, 15 bp, Homo sapiens
gggtaaggggctcca

SEQ ID NO: 18324 - DNA, 15 bp, Homo sapiens
agggtaaggggctcc

SEQ ID NO: 18325 - DNA, 15 bp, Homo sapiens
cagggtaaggggctc

SEQ ID NO: 18326 - DNA, 15 bp, Homo sapiens
tcagggtaaggggct

SEQ ID NO: 18327 - DNA, 15 bp, Homo sapiens
ctcagggtaaggggc

SEQ ID NO: 18328 - DNA, 15 bp, Homo sapiens
tctcagggtaagggg

SEQ ID NO: 18329 - DNA, 15 bp, Homo sapiens
ctctcagggtaaggg

SEQ ID NO: 18330 - DNA, 15 bp, Homo sapiens
cctctcagggtaagg

SEQ ID NO: 18331 - DNA, 15 bp, Homo sapiens
ccctctcagggtaag

SEQ ID NO: 18332 - DNA, 15 bp, Homo sapiens
cccctctcagggtaa

SEQ ID NO: 18333 - DNA, 15 bp, Homo sapiens
gcccctctcagggta

SEQ ID NO: 18334 - DNA, 15 bp, Homo sapiens
tgcccctctcagggt

SEQ ID NO: 18335 - DNA, 15 bp, Homo sapiens
ctgcccctctcaggg

SEQ ID NO: 18336 - DNA, 15 bp, Homo sapiens
cctgcccctctcagg

SEQ ID NO: 18337 - DNA, 15 bp, Homo sapiens
ccctgcccctctcag

SEQ ID NO: 18338 - DNA, 15 bp, Homo sapiens
cccctgcccctctca

SEQ ID NO: 18339 - DNA, 15 bp, Homo sapiens
gcccctgcccctctc

SEQ ID NO: 18340 - DNA, 15 bp, Homo sapiens
agcccctgcccctct

SEQ ID NO: 18341 - DNA, 15 bp, Homo sapiens
cagcccctgcccctc

SEQ ID NO: 18342 - DNA, 15 bp, Homo sapiens
acagcccctgcccct

SEQ ID NO: 18343 - DNA, 15 bp, Homo sapiens
gacagcccctgcccc

SEQ ID NO: 18344 - DNA, 15 bp, Homo sapiens
tgacagcccctgccc

SEQ ID NO: 18345 - DNA, 15 bp, Homo sapiens
ctgacagcccctgcc

SEQ ID NO: 18346 - DNA, 15 bp, Homo sapiens
cctgacagcccctgc

SEQ ID NO: 18347 - DNA, 15 bp, Homo sapiens
tcctgacagcccctg

SEQ ID NO: 18348 - DNA, 15 bp, Homo sapiens
ttcctgacagcccct

SEQ ID NO: 18349 - DNA, 15 bp, Homo sapiens
gttcctgacagcccc

SEQ ID NO: 18350 - DNA, 15 bp, Homo sapiens
agttcctgacagccc

SEQ ID NO: 18351 - DNA, 15 bp, Homo sapiens
cagttcctgacagcc

SEQ ID NO: 18352 - DNA, 15 bp, Homo sapiens
ccagttcctgacagc

SEQ ID NO: 18353 - DNA, 15 bp, Homo sapiens
accagttcctgacag

SEQ ID NO: 18354 - DNA, 15 bp, Homo sapiens
aaccagttcctgaca

SEQ ID NO: 18355 - DNA, 15 bp, Homo sapiens
gaaccagttcctgac

SEQ ID NO: 18356 - DNA, 15 bp, Homo sapiens
ggaaccagttcctga

SEQ ID NO: 18357 - DNA, 15 bp, Homo sapiens
aggaaccagttcctg

SEQ ID NO: 18358 - DNA, 15 bp, Homo sapiens
caggaaccagttcct

SEQ ID NO: 18359 - DNA, 15 bp, Homo sapiens
ccaggaaccagttcc

SEQ ID NO: 18360 - DNA, 15 bp, Homo sapiens
tccaggaaccagttc

SEQ ID NO: 18361 - DNA, 15 bp, Homo sapiens
ctccaggaaccagtt

SEQ ID NO: 18362 - DNA, 15 bp, Homo sapiens
cctccaggaaccagt

SEQ ID NO: 18363 - DNA, 15 bp, Homo sapiens
ccctccaggaaccag

SEQ ID NO: 18364 - DNA, 15 bp, Homo sapiens
tccctccaggaacca

SEQ ID NO: 18365 - DNA, 15 bp, Homo sapiens
gtccctccaggaacc

SEQ ID NO: 18366 - DNA, 15 bp, Homo sapiens
tgtccctccaggaac

SEQ ID NO: 18367 - DNA, 15 bp, Homo sapiens
gtgtccctccaggaa

SEQ ID NO: 18368 - DNA, 15 bp, Homo sapiens
tgtgtccctccagga

SEQ ID NO: 18369 - DNA, 15 bp, Homo sapiens
gtgtgtccctccagg

SEQ ID NO: 18370 - DNA, 15 bp, Homo sapiens
tgtgtgtccctccag

SEQ ID NO: 18371 - DNA, 15 bp, Homo sapiens
ttgtgtgtccctcca

SEQ ID NO: 18372 - DNA, 15 bp, Homo sapiens
cttgtgtgtccctcc

SEQ ID NO: 18373 - DNA, 15 bp, Homo sapiens
ccttgtgtgtccctc

SEQ ID NO: 18374 - DNA, 15 bp, Homo sapiens
accttgtgtgtccct

SEQ ID NO: 18375 - DNA, 15 bp, Homo sapiens
aaccttgtgtgtccc

SEQ ID NO: 18376 - DNA, 15 bp, Homo sapiens
caaccttgtgtgtcc

SEQ ID NO: 18377 - DNA, 15 bp, Homo sapiens
acaaccttgtgtgtc

SEQ ID NO: 18378 - DNA, 15 bp, Homo sapiens
cacaaccttgtgtgt

SEQ ID NO: 18379 - DNA, 15 bp, Homo sapiens
tcacaaccttgtgtg

SEQ ID NO: 18380 - DNA, 15 bp, Homo sapiens
ttcacaaccttgtgt

SEQ ID NO: 18381 - DNA, 15 bp, Homo sapiens
attcacaaccttgtg

SEQ ID NO: 18382 - DNA, 15 bp, Homo sapiens
cattcacaaccttgt

SEQ ID NO: 18383 - DNA, 15 bp, Homo sapiens
acattcacaaccttg

SEQ ID NO: 18384 - DNA, 15 bp, Homo sapiens
aacattcacaacctt

SEQ ID NO: 18385 - DNA, 15 bp, Homo sapiens
caacattcacaacct

SEQ ID NO: 18386 - DNA, 15 bp, Homo sapiens
tcaacattcacaacc

SEQ ID NO: 18387 - DNA, 15 bp, Homo sapiens
ttcaacattcacaac

SEQ ID NO: 18388 - DNA, 15 bp, Homo sapiens
cttcaacattcacaa

SEQ ID NO: 18389 - DNA, 15 bp, Homo sapiens
ccttcaacattcaca

SEQ ID NO: 18390 - DNA, 15 bp, Homo sapiens
tccttcaacattcac

SEQ ID NO: 18391 - DNA, 15 bp, Homo sapiens
ctccttcaacattca

SEQ ID NO: 18392 - DNA, 15 bp, Homo sapiens
actccttcaacattc

SEQ ID NO: 18393 - DNA, 15 bp, Homo sapiens
gactccttcaacatt

SEQ ID NO: 18394 - DNA, 15 bp, Homo sapiens
tgactccttcaacat

SEQ ID NO: 18395 - DNA, 15 bp, Homo sapiens
atgactccttcaaca

SEQ ID NO: 18396 - DNA, 15 bp, Homo sapiens
gatgactccttcaac

SEQ ID NO: 18397 - DNA, 15 bp, Homo sapiens
agatgactccttcaa

SEQ ID NO: 18398 - DNA, 15 bp, Homo sapiens
aagatgactccttca

SEQ ID NO: 18399 - DNA, 15 bp, Homo sapiens
gaagatgactccttc

SEQ ID NO: 18400 - DNA, 15 bp, Homo sapiens
agaagatgactcctt

SEQ ID NO: 18401 - DNA, 15 bp, Homo sapiens
cagaagatgactcct

SEQ ID NO: 18402 - DNA, 15 bp, Homo sapiens
ccagaagatgactcc

SEQ ID NO: 18403 - DNA, 15 bp, Homo sapiens
tccagaagatgactc

SEQ ID NO: 18404 - DNA, 15 bp, Homo sapiens
gtccagaagatgact

SEQ ID NO: 18405 - DNA, 15 bp, Homo sapiens
tgtccagaagatgac

SEQ ID NO: 18406 - DNA, 15 bp, Homo sapiens
gtgtccagaagatga

SEQ ID NO: 18407 - DNA, 15 bp, Homo sapiens
tgtgtccagaagatg

SEQ ID NO: 18408 - DNA, 15 bp, Homo sapiens
atgtgtccagaagat

SEQ ID NO: 18409 - DNA, 15 bp, Homo sapiens
catgtgtccagaaga

SEQ ID NO: 18410 - DNA, 15 bp, Homo sapiens
ccatgtgtccagaag

SEQ ID NO: 18411 - DNA, 15 bp, Homo sapiens
cccatgtgtccagaa

SEQ ID NO: 18412 - DNA, 15 bp, Homo sapiens
tcccatgtgtccaga

SEQ ID NO: 18413 - DNA, 15 bp, Homo sapiens
atcccatgtgtccag

SEQ ID NO: 18414 - DNA, 15 bp, Homo sapiens
catcccatgtgtcca

SEQ ID NO: 18415 - DNA, 15 bp, Homo sapiens
ccatcccatgtgtcc

SEQ ID NO: 18416 - DNA, 15 bp, Homo sapiens
gccatcccatgtgtc

SEQ ID NO: 18417 - DNA, 15 bp, Homo sapiens
ggccatcccatgtgt

SEQ ID NO: 18418 - DNA, 15 bp, Homo sapiens
tggccatcccatgtg

SEQ ID NO: 18419 - DNA, 15 bp, Homo sapiens
gtggccatcccatgt

SEQ ID NO: 18420 - DNA, 15 bp, Homo sapiens
tgtggccatcccatg

SEQ ID NO: 18421 - DNA, 15 bp, Homo sapiens
ttgtggccatcccat

SEQ ID NO: 18422 - DNA, 15 bp, Homo sapiens
tttgtggccatccca

SEQ ID NO: 18423 - DNA, 15 bp, Homo sapiens
ttttgtggccatccc

SEQ ID NO: 18424 - DNA, 15 bp, Homo sapiens
cttttgtggccatcc

SEQ ID NO: 18425 - DNA, 15 bp, Homo sapiens
ccttttgtggccatc

SEQ ID NO: 18426 - DNA, 15 bp, Homo sapiens
gccttttgtggccat

SEQ ID NO: 18427 - DNA, 15 bp, Homo sapiens
tgccttttgtggcca

SEQ ID NO: 18428 - DNA, 15 bp, Homo sapiens
ctgccttttgtggcc

SEQ ID NO: 18429 - DNA, 15 bp, Homo sapiens
actgccttttgtggc

SEQ ID NO: 18430 - DNA, 15 bp, Homo sapiens
aactgccttttgtgg

SEQ ID NO: 18431 - DNA, 15 bp, Homo sapiens
taactgccttttgtg

SEQ ID NO: 18432 - DNA, 15 bp, Homo sapiens
gtaactgccttttgt

SEQ ID NO: 18433 - DNA, 15 bp, Homo sapiens
ggtaactgccttttg

SEQ ID NO: 18434 - DNA, 15 bp, Homo sapiens
aggtaactgcctttt

SEQ ID NO: 18435 - DNA, 15 bp, Homo sapiens
gaggtaactgccttt

SEQ ID NO: 18436 - DNA, 15 bp, Homo sapiens
ggaggtaactgcctt

SEQ ID NO: 18437 - DNA, 15 bp, Homo sapiens
tggaggtaactgcct

SEQ ID NO: 18438 - DNA, 15 bp, Homo sapiens
ctggaggtaactgcc

SEQ ID NO: 18439 - DNA, 15 bp, Homo sapiens
cctggaggtaactgc

SEQ ID NO: 18440 - DNA, 15 bp, Homo sapiens
acctggaggtaactg

SEQ ID NO: 18441 - DNA, 15 bp, Homo sapiens
tacctggaggtaact

SEQ ID NO: 18442 - DNA, 15 bp, Homo sapiens
ttacctggaggtaac

SEQ ID NO: 18443 - DNA, 15 bp, Homo sapiens
gttacctggaggtaa

SEQ ID NO: 18444 - DNA, 15 bp, Homo sapiens
ggttacctggaggta

SEQ ID NO: 18445 - DNA, 15 bp, Homo sapiens
gggttacctggaggt

SEQ ID NO: 18446 - DNA, 15 bp, Homo sapiens
tgggttacctggagg

SEQ ID NO: 18447 - DNA, 15 bp, Homo sapiens
ctgggttacctggag

SEQ ID NO: 18448 - DNA, 15 bp, Homo sapiens
actgggttacctgga

SEQ ID NO: 18449 - DNA, 15 bp, Homo sapiens
gactgggttacctgg

SEQ ID NO: 18450 - DNA, 15 bp, Homo sapiens
ggactgggttacctg

SEQ ID NO: 18451 - DNA, 15 bp, Homo sapiens
aggactgggttacct

SEQ ID NO: 18452 - DNA, 15 bp, Homo sapiens
gaggactgggttacc

SEQ ID NO: 18453 - DNA, 15 bp, Homo sapiens
tgaggactgggttac

SEQ ID NO: 18454 - DNA, 15 bp, Homo sapiens
atgaggactgggtta

SEQ ID NO: 18455 - DNA, 15 bp, Homo sapiens
tatgaggactgggtt

SEQ ID NO: 18456 - DNA, 15 bp, Homo sapiens
atatgaggactgggt

SEQ ID NO: 18457 - DNA, 15 bp, Homo sapiens
tatatgaggactggg

SEQ ID NO: 18458 - DNA, 15 bp, Homo sapiens
ctatatgaggactgg

SEQ ID NO: 18459 - DNA, 15 bp, Homo sapiens
gctatatgaggactg

SEQ ID NO: 18460 - DNA, 15 bp, Homo sapiens
agctatatgaggact

SEQ ID NO: 18461 - DNA, 15 bp, Homo sapiens
gagctatatgaggac

SEQ ID NO: 18462 - DNA, 15 bp, Homo sapiens
agagctatatgagga

SEQ ID NO: 18463 - DNA, 15 bp, Homo sapiens
aagagctatatgagg

SEQ ID NO: 18464 - DNA, 15 bp, Homo sapiens
caagagctatatgag

SEQ ID NO: 18465 - DNA, 15 bp, Homo sapiens
tcaagagctatatga

SEQ ID NO: 18466 - DNA, 15 bp, Homo sapiens
atcaagagctatatg

SEQ ID NO: 18467 - DNA, 15 bp, Homo sapiens
aatcaagagctatat

SEQ ID NO: 18468 - DNA, 15 bp, Homo sapiens
aaatcaagagctata

SEQ ID NO: 18469 - DNA, 15 bp, Homo sapiens
taaatcaagagctat

SEQ ID NO: 18470 - DNA, 15 bp, Homo sapiens
ctaaatcaagagcta

SEQ ID NO: 18471 - DNA, 15 bp, Homo sapiens
cctaaatcaagagct

SEQ ID NO: 18472 - DNA, 15 bp, Homo sapiens
gcctaaatcaagagc

SEQ ID NO: 18473 - DNA, 15 bp, Homo sapiens
agcctaaatcaagag

SEQ ID NO: 18474 - DNA, 15 bp, Homo sapiens
tagcctaaatcaaga

SEQ ID NO: 18475 - DNA, 15 bp, Homo sapiens
atagcctaaatcaag

SEQ ID NO: 18476 - DNA, 15 bp, Homo sapiens
catagcctaaatcaa

SEQ ID NO: 18477 - DNA, 15 bp, Homo sapiens
ccatagcctaaatca

SEQ ID NO: 18478 - DNA, 15 bp, Homo sapiens
tccatagcctaaatc

SEQ ID NO: 18479 - DNA, 15 bp, Homo sapiens
ctccatagcctaaat

SEQ ID NO: 18480 - DNA, 15 bp, Homo sapiens
tctccatagcctaaa

SEQ ID NO: 18481 - DNA, 15 bp, Homo sapiens
atctccatagcctaa

SEQ ID NO: 18482 - DNA, 15 bp, Homo sapiens
aatctccatagccta

SEQ ID NO: 18483 - DNA, 15 bp, Homo sapiens
taatctccatagcct

SEQ ID NO: 18484 - DNA, 15 bp, Homo sapiens
gtaatctccatagcc

SEQ ID NO: 18485 - DNA, 15 bp, Homo sapiens
tgtaatctccatagc

SEQ ID NO: 18486 - DNA, 15 bp, Homo sapiens
ctgtaatctccatag

SEQ ID NO: 18487 - DNA, 15 bp, Homo sapiens
actgtaatctccata

SEQ ID NO: 18488 - DNA, 15 bp, Homo sapiens
tactgtaatctccat

SEQ ID NO: 18489 - DNA, 15 bp, Homo sapiens
gtactgtaatctcca

SEQ ID NO: 18490 - DNA, 15 bp, Homo sapiens
ggtactgtaatctcc

SEQ ID NO: 18491 - DNA, 15 bp, Homo sapiens
gggtactgtaatctc

SEQ ID NO: 18492 - DNA, 15 bp, Homo sapiens
tgggtactgtaatct

SEQ ID NO: 18493 - DNA, 15 bp, Homo sapiens
ttgggtactgtaatc

SEQ ID NO: 18494 - DNA, 15 bp, Homo sapiens
gttgggtactgtaat

SEQ ID NO: 18495 - DNA, 15 bp, Homo sapiens
agttgggtactgtaa

SEQ ID NO: 18496 - DNA, 15 bp, Homo sapiens
cagttgggtactgta

SEQ ID NO: 18497 - DNA, 15 bp, Homo sapiens
ccagttgggtactgt

SEQ ID NO: 18498 - DNA, 15 bp, Homo sapiens
cccagttgggtactg

SEQ ID NO: 18499 - DNA, 15 bp, Homo sapiens
acccagttgggtact

SEQ ID NO: 18500 - DNA, 15 bp, Homo sapiens
cacccagttgggtac

SEQ ID NO: 18501 - DNA, 15 bp, Homo sapiens
ccacccagttgggta

SEQ ID NO: 18502 - DNA, 15 bp, Homo sapiens
cccacccagttgggt

SEQ ID NO: 18503 - DNA, 15 bp, Homo sapiens
ccccacccagttggg

SEQ ID NO: 18504 - DNA, 15 bp, Homo sapiens
gccccacccagttgg

SEQ ID NO: 18505 - DNA, 15 bp, Homo sapiens
ggccccacccagttg

SEQ ID NO: 18506 - DNA, 15 bp, Homo sapiens
gggccccacccagtt

SEQ ID NO: 18507 - DNA, 15 bp, Homo sapiens
agggccccacccagt

SEQ ID NO: 18508 - DNA, 15 bp, Homo sapiens
gagggccccacccag

SEQ ID NO: 18509 - DNA, 15 bp, Homo sapiens
ggagggccccaccca

SEQ ID NO: 18510 - DNA, 15 bp, Homo sapiens
aggagggccccaccc

SEQ ID NO: 18511 - DNA, 15 bp, Homo sapiens
gaggagggccccacc

SEQ ID NO: 18512 - DNA, 15 bp, Homo sapiens
agaggagggccccac

SEQ ID NO: 18513 - DNA, 15 bp, Homo sapiens
aagaggagggcccca

SEQ ID NO: 18514 - DNA, 15 bp, Homo sapiens
aaagaggagggcccc

SEQ ID NO: 18515 - DNA, 15 bp, Homo sapiens
caaagaggagggccc

SEQ ID NO: 18516 - DNA, 15 bp, Homo sapiens
acaaagaggagggcc

SEQ ID NO: 18517 - DNA, 15 bp, Homo sapiens
cacaaagaggagggc

SEQ ID NO: 18518 - DNA, 15 bp, Homo sapiens
gcacaaagaggaggg

SEQ ID NO: 18519 - DNA, 15 bp, Homo sapiens
tgcacaaagaggagg

SEQ ID NO: 18520 - DNA, 15 bp, Homo sapiens
gtgcacaaagaggag

SEQ ID NO: 18521 - DNA, 15 bp, Homo sapiens
agtgcacaaagagga

SEQ ID NO: 18522 - DNA, 15 bp, Homo sapiens
aagtgcacaaagagg

SEQ ID NO: 18523 - DNA, 15 bp, Homo sapiens
caagtgcacaaagag

SEQ ID NO: 18524 - DNA, 15 bp, Homo sapiens
acaagtgcacaaaga

SEQ ID NO: 18525 - DNA, 15 bp, Homo sapiens
cacaagtgcacaaag

SEQ ID NO: 18526 - DNA, 15 bp, Homo sapiens
tcacaagtgcacaaa

SEQ ID NO: 18527 - DNA, 15 bp, Homo sapiens
atcacaagtgcacaa

SEQ ID NO: 18528 - DNA, 15 bp, Homo sapiens
aatcacaagtgcaca

SEQ ID NO: 18529 - DNA, 15 bp, Homo sapiens
caatcacaagtgcac

SEQ ID NO: 18530 - DNA, 15 bp, Homo sapiens
acaatcacaagtgca

SEQ ID NO: 18531 - DNA, 15 bp, Homo sapiens
cacaatcacaagtgc

SEQ ID NO: 18532 - DNA, 15 bp, Homo sapiens
acacaatcacaagtg

SEQ ID NO: 18533 - DNA, 15 bp, Homo sapiens
cacacaatcacaagt

SEQ ID NO: 18534 - DNA, 15 bp, Homo sapiens
acacacaatcacaag

SEQ ID NO: 18535 - DNA, 15 bp, Homo sapiens
tacacacaatcacaa

SEQ ID NO: 18536 - DNA, 15 bp, Homo sapiens
atacacacaatcaca

SEQ ID NO: 18537 - DNA, 15 bp, Homo sapiens
catacacacaatcac

SEQ ID NO: 18538 - DNA, 15 bp, Homo sapiens
acatacacacaatca

SEQ ID NO: 18539 - DNA, 15 bp, Homo sapiens
cacatacacacaatc

SEQ ID NO: 18540 - DNA, 15 bp, Homo sapiens
acacatacacacaat

SEQ ID NO: 18541 - DNA, 15 bp, Homo sapiens
cacacatacacacaa

SEQ ID NO: 18542 - DNA, 15 bp, Homo sapiens
acacacatacacaca

SEQ ID NO: 18543 - DNA, 15 bp, Homo sapiens
gacacacatacacac

SEQ ID NO: 18544 - DNA, 15 bp, Homo sapiens
agacacacatacaca

SEQ ID NO: 18545 - DNA, 15 bp, Homo sapiens
cagacacacatacac

SEQ ID NO: 18546 - DNA, 15 bp, Homo sapiens
gcagacacacataca

SEQ ID NO: 18547 - DNA, 15 bp, Homo sapiens
cgcagacacacatac

SEQ ID NO: 18548 - DNA, 15 bp, Homo sapiens
acgcagacacacata

SEQ ID NO: 18549 - DNA, 15 bp, Homo sapiens
tacgcagacacacat

SEQ ID NO: 18550 - DNA, 15 bp, Homo sapiens
ctacgcagacacaca

SEQ ID NO: 18551 - DNA, 15 bp, Homo sapiens
tctacgcagacacac

SEQ ID NO: 18552 - DNA, 15 bp, Homo sapiens
ctctacgcagacaca

SEQ ID NO: 18553 - DNA, 15 bp, Homo sapiens
tctctacgcagacac

SEQ ID NO: 18554 - DNA, 15 bp, Homo sapiens
ttctctacgcagaca

SEQ ID NO: 18555 - DNA, 15 bp, Homo sapiens
tttctctacgcagac

SEQ ID NO: 18556 - DNA, 15 bp, Homo sapiens
ctttctctacgcaga

SEQ ID NO: 18557 - DNA, 15 bp, Homo sapiens
actttctctacgcag

SEQ ID NO: 18558 - DNA, 15 bp, Homo sapiens
cactttctctacgca

SEQ ID NO: 18559 - DNA, 15 bp, Homo sapiens
tcactttctctacgc

SEQ ID NO: 18560 - DNA, 15 bp, Homo sapiens
ctcactttctctacg

SEQ ID NO: 18561 - DNA, 15 bp, Homo sapiens
tctcactttctctac

SEQ ID NO: 18562 - DNA, 15 bp, Homo sapiens
ctctcactttctcta

SEQ ID NO: 18563 - DNA, 15 bp, Homo sapiens
tctctcactttctct

SEQ ID NO: 18564 - DNA, 15 bp, Homo sapiens
ctctctcactttctc

SEQ ID NO: 18565 - DNA, 15 bp, Homo sapiens
cctctctcactttct

SEQ ID NO: 18566 - DNA, 15 bp, Homo sapiens
tcctctctcactttc

SEQ ID NO: 18567 - DNA, 15 bp, Homo sapiens
ctcctctctcacttt

SEQ ID NO: 18568 - DNA, 15 bp, Homo sapiens
tctcctctctcactt

SEQ ID NO: 18569 - DNA, 15 bp, Homo sapiens
ctctcctctctcact

SEQ ID NO: 18570 - DNA, 15 bp, Homo sapiens
tctctcctctctcac

SEQ ID NO: 18571 - DNA, 15 bp, Homo sapiens
ttctctcctctctca

SEQ ID NO: 18572 - DNA, 15 bp, Homo sapiens
gttctctcctctctc

SEQ ID NO: 18573 - DNA, 15 bp, Homo sapiens
agttctctcctctct

SEQ ID NO: 18574 - DNA, 15 bp, Homo sapiens
cagttctctcctctc

SEQ ID NO: 18575 - DNA, 15 bp, Homo sapiens
acagttctctcctct

SEQ ID NO: 18576 - DNA, 15 bp, Homo sapiens
tacagttctctcctc

SEQ ID NO: 18577 - DNA, 15 bp, Homo sapiens
ctacagttctctcct

SEQ ID NO: 18578 - DNA, 15 bp, Homo sapiens
actacagttctctcc

SEQ ID NO: 18579 - DNA, 15 bp, Homo sapiens
tactacagttctctc

SEQ ID NO: 18580 - DNA, 15 bp, Homo sapiens
atactacagttctct

SEQ ID NO: 18581 - DNA, 15 bp, Homo sapiens
tatactacagttctc

SEQ ID NO: 18582 - DNA, 15 bp, Homo sapiens
atatactacagttct

SEQ ID NO: 18583 - DNA, 15 bp, Homo sapiens
catatactacagttc

SEQ ID NO: 18584 - DNA, 15 bp, Homo sapiens
ccatatactacagtt

SEQ ID NO: 18585 - DNA, 15 bp, Homo sapiens
accatatactacagt

SEQ ID NO: 18586 - DNA, 15 bp, Homo sapiens
gaccatatactacag

SEQ ID NO: 18587 - DNA, 15 bp, Homo sapiens
tgaccatatactaca

SEQ ID NO: 18588 - DNA, 15 bp, Homo sapiens
gtgaccatatactac

SEQ ID NO: 18589 - DNA, 15 bp, Homo sapiens
agtgaccatatacta

SEQ ID NO: 18590 - DNA, 15 bp, Homo sapiens
aagtgaccatatact

SEQ ID NO: 18591 - DNA, 15 bp, Homo sapiens
gaagtgaccatatac

SEQ ID NO: 18592 - DNA, 15 bp, Homo sapiens
tgaagtgaccatata

SEQ ID NO: 18593 - DNA, 15 bp, Homo sapiens
ctgaagtgaccatat

SEQ ID NO: 18594 - DNA, 15 bp, Homo sapiens
actgaagtgaccata

SEQ ID NO: 18595 - DNA, 15 bp, Homo sapiens
aactgaagtgaccat

SEQ ID NO: 18596 - DNA, 15 bp, Homo sapiens
caactgaagtgacca

SEQ ID NO: 18597 - DNA, 15 bp, Homo sapiens
acaactgaagtgacc

SEQ ID NO: 18598 - DNA, 15 bp, Homo sapiens
tacaactgaagtgac

SEQ ID NO: 18599 - DNA, 15 bp, Homo sapiens
ttacaactgaagtga

SEQ ID NO: 18600 - DNA, 15 bp, Homo sapiens
gttacaactgaagtg

SEQ ID NO: 18601 - DNA, 15 bp, Homo sapiens
agttacaactgaagt

SEQ ID NO: 18602 - DNA, 15 bp, Homo sapiens
aagttacaactgaag

SEQ ID NO: 18603 - DNA, 15 bp, Homo sapiens
taagttacaactgaa

SEQ ID NO: 18604 - DNA, 15 bp, Homo sapiens
gtaagttacaactga

SEQ ID NO: 18605 - DNA, 15 bp, Homo sapiens
agtaagttacaactg

SEQ ID NO: 18606 - DNA, 15 bp, Homo sapiens
tagtaagttacaact

SEQ ID NO: 18607 - DNA, 15 bp, Homo sapiens
ctagtaagttacaac

SEQ ID NO: 18608 - DNA, 15 bp, Homo sapiens
gctagtaagttacaa

SEQ ID NO: 18609 - DNA, 15 bp, Homo sapiens
tgctagtaagttaca

SEQ ID NO: 18610 - DNA, 15 bp, Homo sapiens
ttgctagtaagttac

SEQ ID NO: 18611 - DNA, 15 bp, Homo sapiens
tttgctagtaagtta

SEQ ID NO: 18612 - DNA, 15 bp, Homo sapiens
atttgctagtaagtt

SEQ ID NO: 18613 - DNA, 15 bp, Homo sapiens
aatttgctagtaagt

SEQ ID NO: 18614 - DNA, 15 bp, Homo sapiens
aaatttgctagtaag

SEQ ID NO: 18615 - DNA, 15 bp, Homo sapiens
caaatttgctagtaa

SEQ ID NO: 18616 - DNA, 15 bp, Homo sapiens
ccaaatttgctagta

SEQ ID NO: 18617 - DNA, 15 bp, Homo sapiens
accaaatttgctagt

SEQ ID NO: 18618 - DNA, 15 bp, Homo sapiens
gaccaaatttgctag

SEQ ID NO: 18619 - DNA, 15 bp, Homo sapiens
agaccaaatttgcta

SEQ ID NO: 18620 - DNA, 15 bp, Homo sapiens
aagaccaaatttgct

SEQ ID NO: 18621 - DNA, 15 bp, Homo sapiens
aaagaccaaatttgc

SEQ ID NO: 18622 - DNA, 15 bp, Homo sapiens
taaagaccaaatttg

SEQ ID NO: 18623 - DNA, 15 bp, Homo sapiens
ttaaagaccaaattt

SEQ ID NO: 18624 - DNA, 15 bp, Homo sapiens
tttaaagaccaaatt

SEQ ID NO: 18625 - DNA, 15 bp, Homo sapiens
ttttaaagaccaaat

SEQ ID NO: 18626 - DNA, 15 bp, Homo sapiens
tttttaaagaccaaa

SEQ ID NO: 18627 - DNA, 15 bp, Homo sapiens
atttttaaagaccaa

SEQ ID NO: 18628 - DNA, 15 bp, Homo sapiens
tatttttaaagacca

SEQ ID NO: 18629 - DNA, 15 bp, Homo sapiens
ttatttttaaagacc

SEQ ID NO: 18630 - DNA, 15 bp, Homo sapiens
attatttttaaagac

SEQ ID NO: 18631 - DNA, 15 bp, Homo sapiens
gattatttttaaaga

SEQ ID NO: 18632 - DNA, 15 bp, Homo sapiens
agattatttttaaag

SEQ ID NO: 18633 - DNA, 15 bp, Homo sapiens
gagattatttttaaa

SEQ ID NO: 18634 - DNA, 15 bp, Homo sapiens
ggagattatttttaa

SEQ ID NO: 18635 - DNA, 15 bp, Homo sapiens
aggagattattttta

SEQ ID NO: 18636 - DNA, 15 bp, Homo sapiens
aaggagattattttt

SEQ ID NO: 18637 - DNA, 15 bp, Homo sapiens
gaaggagattatttt

SEQ ID NO: 18638 - DNA, 15 bp, Homo sapiens
tgaaggagattattt

SEQ ID NO: 18639 - DNA, 15 bp, Homo sapiens
gtgaaggagattatt

SEQ ID NO: 18640 - DNA, 15 bp, Homo sapiens
ggtgaaggagattat

SEQ ID NO: 18641 - DNA, 15 bp, Homo sapiens
gggtgaaggagatta

SEQ ID NO: 18642 - DNA, 15 bp, Homo sapiens
tgggtgaaggagatt

SEQ ID NO: 18643 - DNA, 15 bp, Homo sapiens
ttgggtgaaggagat

SEQ ID NO: 18644 - DNA, 15 bp, Homo sapiens
tttgggtgaaggaga

SEQ ID NO: 18645 - DNA, 15 bp, Homo sapiens
atttgggtgaaggag

SEQ ID NO: 18646 - DNA, 15 bp, Homo sapiens
catttgggtgaagga

SEQ ID NO: 18647 - DNA, 15 bp, Homo sapiens
tcatttgggtgaagg

SEQ ID NO: 18648 - DNA, 15 bp, Homo sapiens
ctcatttgggtgaag

SEQ ID NO: 18649 - DNA, 15 bp, Homo sapiens
actcatttgggtgaa

SEQ ID NO: 18650 - DNA, 15 bp, Homo sapiens
aactcatttgggtga

SEQ ID NO: 18651 - DNA, 15 bp, Homo sapiens
caactcatttgggtg

SEQ ID NO: 18652 - DNA, 15 bp, Homo sapiens
acaactcatttgggt

SEQ ID NO: 18653 - DNA, 15 bp, Homo sapiens
aacaactcatttggg

SEQ ID NO: 18654 - DNA, 15 bp, Homo sapiens
taacaactcatttgg

SEQ ID NO: 18655 - DNA, 15 bp, Homo sapiens
ataacaactcatttg

SEQ ID NO: 18656 - DNA, 15 bp, Homo sapiens
tataacaactcattt

SEQ ID NO: 18657 - DNA, 15 bp, Homo sapiens
gtataacaactcatt

SEQ ID NO: 18658 - DNA, 15 bp, Homo sapiens
ggtataacaactcat

SEQ ID NO: 18659 - DNA, 15 bp, Homo sapiens
aggtataacaactca

SEQ ID NO: 18660 - DNA, 15 bp, Homo sapiens
aaggtataacaactc

SEQ ID NO: 18661 - DNA, 15 bp, Homo sapiens
aaaggtataacaact

SEQ ID NO: 18662 - DNA, 15 bp, Homo sapiens
gaaaggtataacaac

SEQ ID NO: 18663 - DNA, 15 bp, Homo sapiens
agaaaggtataacaa

SEQ ID NO: 18664 - DNA, 15 bp, Homo sapiens
tagaaaggtataaca

SEQ ID NO: 18665 - DNA, 15 bp, Homo sapiens
ttagaaaggtataac

SEQ ID NO: 18666 - DNA, 15 bp, Homo sapiens
tttagaaaggtataa

SEQ ID NO: 18667 - DNA, 15 bp, Homo sapiens
ctttagaaaggtata

SEQ ID NO: 18668 - DNA, 15 bp, Homo sapiens
actttagaaaggtat

SEQ ID NO: 18669 - DNA, 15 bp, Homo sapiens
tactttagaaaggta

SEQ ID NO: 18670 - DNA, 15 bp, Homo sapiens
atactttagaaaggt

SEQ ID NO: 18671 - DNA, 15 bp, Homo sapiens
aatactttagaaagg

SEQ ID NO: 18672 - DNA, 15 bp, Homo sapiens
aaatactttagaaag

SEQ ID NO: 18673 - DNA, 15 bp, Homo sapiens
aaaatactttagaaa

SEQ ID NO: 18674 - DNA, 15 bp, Homo sapiens
aaaaatactttagaa

SEQ ID NO: 18675 - DNA, 15 bp, Homo sapiens
caaaaatactttaga

SEQ ID NO: 18676 - DNA, 15 bp, Homo sapiens
gcaaaaatactttag

SEQ ID NO: 18677 - DNA, 15 bp, Homo sapiens
tgcaaaaatacttta

SEQ ID NO: 18678 - DNA, 15 bp, Homo sapiens
ttgcaaaaatacttt

SEQ ID NO: 18679 - DNA, 15 bp, Homo sapiens
attgcaaaaatactt

SEQ ID NO: 18680 - DNA, 15 bp, Homo sapiens
aattgcaaaaatact

SEQ ID NO: 18681 - DNA, 15 bp, Homo sapiens
aaattgcaaaaatac

SEQ ID NO: 18682 - DNA, 15 bp, Homo sapiens
taaattgcaaaaata

SEQ ID NO: 18683 - DNA, 15 bp, Homo sapiens
ctaaattgcaaaaat

SEQ ID NO: 18684 - DNA, 15 bp, Homo sapiens
tctaaattgcaaaaa

SEQ ID NO: 18685 - DNA, 15 bp, Homo sapiens
gtctaaattgcaaaa

SEQ ID NO: 18686 - DNA, 15 bp, Homo sapiens
agtctaaattgcaaa

SEQ ID NO: 18687 - DNA, 15 bp, Homo sapiens
tagtctaaattgcaa

SEQ ID NO: 18688 - DNA, 15 bp, Homo sapiens
ttagtctaaattgca

SEQ ID NO: 18689 - DNA, 15 bp, Homo sapiens
tttagtctaaattgc

SEQ ID NO: 18690 - DNA, 15 bp, Homo sapiens
ttttagtctaaattg

SEQ ID NO: 18691 - DNA, 15 bp, Homo sapiens
gttttagtctaaatt

SEQ ID NO: 18692 - DNA, 15 bp, Homo sapiens
tgttttagtctaaat

SEQ ID NO: 18693 - DNA, 15 bp, Homo sapiens
ctgttttagtctaaa

SEQ ID NO: 18694 - DNA, 15 bp, Homo sapiens
tctgttttagtctaa

SEQ ID NO: 18695 - DNA, 15 bp, Homo sapiens
ctctgttttagtcta

SEQ ID NO: 18696 - DNA, 15 bp, Homo sapiens
actctgttttagtct

SEQ ID NO: 18697 - DNA, 15 bp, Homo sapiens
aactctgttttagtc

SEQ ID NO: 18698 - DNA, 15 bp, Homo sapiens
taactctgttttagt

SEQ ID NO: 18699 - DNA, 15 bp, Homo sapiens
gtaactctgttttag

SEQ ID NO: 18700 - DNA, 15 bp, Homo sapiens
ggtaactctgtttta

SEQ ID NO: 18701 - DNA, 15 bp, Homo sapiens
gggtaactctgtttt

SEQ ID NO: 18702 - DNA, 15 bp, Homo sapiens
tgggtaactctgttt

SEQ ID NO: 18703 - DNA, 15 bp, Homo sapiens
ttgggtaactctgtt

SEQ ID NO: 18704 - DNA, 15 bp, Homo sapiens
gttgggtaactctgt

SEQ ID NO: 18705 - DNA, 15 bp, Homo sapiens
agttgggtaactctg

SEQ ID NO: 18706 - DNA, 15 bp, Homo sapiens
gagttgggtaactct

SEQ ID NO: 18707 - DNA, 15 bp, Homo sapiens
agagttgggtaactc

SEQ ID NO: 18708 - DNA, 15 bp, Homo sapiens
cagagttgggtaact

SEQ ID NO: 18709 - DNA, 15 bp, Homo sapiens
acagagttgggtaac

SEQ ID NO: 18710 - DNA, 15 bp, Homo sapiens
tacagagttgggtaa

SEQ ID NO: 18711 - DNA, 15 bp, Homo sapiens
ttacagagttgggta

SEQ ID NO: 18712 - DNA, 15 bp, Homo sapiens
cttacagagttgggt

SEQ ID NO: 18713 - DNA, 15 bp, Homo sapiens
tcttacagagttggg

SEQ ID NO: 18714 - DNA, 15 bp, Homo sapiens
ttcttacagagttgg

SEQ ID NO: 18715 - DNA, 15 bp, Homo sapiens
cttcttacagagttg

SEQ ID NO: 18716 - DNA, 15 bp, Homo sapiens
ccttcttacagagtt

SEQ ID NO: 18717 - DNA, 15 bp, Homo sapiens
tccttcttacagagt

SEQ ID NO: 18718 - DNA, 15 bp, Homo sapiens
atccttcttacagag

SEQ ID NO: 18719 - DNA, 15 bp, Homo sapiens
aatccttcttacaga

SEQ ID NO: 18720 - DNA, 15 bp, Homo sapiens
caatccttcttacag

SEQ ID NO: 18721 - DNA, 15 bp, Homo sapiens
acaatccttcttaca

SEQ ID NO: 18722 - DNA, 15 bp, Homo sapiens
aacaatccttcttac

SEQ ID NO: 18723 - DNA, 15 bp, Homo sapiens
aaacaatccttctta

SEQ ID NO: 18724 - DNA, 15 bp, Homo sapiens
aaaacaatccttctt

SEQ ID NO: 18725 - DNA, 15 bp, Homo sapiens
gaaaacaatccttct

SEQ ID NO: 18726 - DNA, 15 bp, Homo sapiens
tgaaaacaatccttc

SEQ ID NO: 18727 - DNA, 15 bp, Homo sapiens
gtgaaaacaatcctt

SEQ ID NO: 18728 - DNA, 15 bp, Homo sapiens
agtgaaaacaatcct

SEQ ID NO: 18729 - DNA, 15 bp, Homo sapiens
aagtgaaaacaatcc

SEQ ID NO: 18730 - DNA, 15 bp, Homo sapiens
taagtgaaaacaatc

SEQ ID NO: 18731 - DNA, 15 bp, Homo sapiens
ttaagtgaaaacaat

SEQ ID NO: 18732 - DNA, 15 bp, Homo sapiens
tttaagtgaaaacaa

SEQ ID NO: 18733 - DNA, 15 bp, Homo sapiens
ctttaagtgaaaaca

SEQ ID NO: 18734 - DNA, 15 bp, Homo sapiens
tctttaagtgaaaac

SEQ ID NO: 18735 - DNA, 15 bp, Homo sapiens
ctctttaagtgaaaa

SEQ ID NO: 18736 - DNA, 15 bp, Homo sapiens
actctttaagtgaaa

SEQ ID NO: 18737 - DNA, 15 bp, Homo sapiens
cactctttaagtgaa

SEQ ID NO: 18738 - DNA, 15 bp, Homo sapiens
tcactctttaagtga

SEQ ID NO: 18739 - DNA, 15 bp, Homo sapiens
gtcactctttaagtg

SEQ ID NO: 18740 - DNA, 15 bp, Homo sapiens
tgtcactctttaagt

SEQ ID NO: 18741 - DNA, 15 bp, Homo sapiens
ctgtcactctttaag

SEQ ID NO: 18742 - DNA, 15 bp, Homo sapiens
tctgtcactctttaa

SEQ ID NO: 18743 - DNA, 15 bp, Homo sapiens
gtctgtcactcttta

SEQ ID NO: 18744 - DNA, 15 bp, Homo sapiens
agtctgtcactcttt

SEQ ID NO: 18745 - DNA, 15 bp, Homo sapiens
cagtctgtcactctt

SEQ ID NO: 18746 - DNA, 15 bp, Homo sapiens
tcagtctgtcactct

SEQ ID NO: 18747 - DNA, 15 bp, Homo sapiens
ctcagtctgtcactc

SEQ ID NO: 18748 - DNA, 15 bp, Homo sapiens
tctcagtctgtcact

SEQ ID NO: 18749 - DNA, 15 bp, Homo sapiens
ctctcagtctgtcac

SEQ ID NO: 18750 - DNA, 15 bp, Homo sapiens
gctctcagtctgtca

SEQ ID NO: 18751 - DNA, 15 bp, Homo sapiens
tgctctcagtctgtc

SEQ ID NO: 18752 - DNA, 15 bp, Homo sapiens
atgctctcagtctgt

SEQ ID NO: 18753 - DNA, 15 bp, Homo sapiens
gatgctctcagtctg

SEQ ID NO: 18754 - DNA, 15 bp, Homo sapiens
tgatgctctcagtct

SEQ ID NO: 18755 - DNA, 15 bp, Homo sapiens
ctgatgctctcagtc

SEQ ID NO: 18756 - DNA, 15 bp, Homo sapiens
actgatgctctcagt

SEQ ID NO: 18757 - DNA, 15 bp, Homo sapiens
cactgatgctctcag

SEQ ID NO: 18758 - DNA, 15 bp, Homo sapiens
tcactgatgctctca

SEQ ID NO: 18759 - DNA, 15 bp, Homo sapiens
ttcactgatgctctc

SEQ ID NO: 18760 - DNA, 15 bp, Homo sapiens
tttcactgatgctct

SEQ ID NO: 18761 - DNA, 15 bp, Homo sapiens
ctttcactgatgctc

SEQ ID NO: 18762 - DNA, 15 bp, Homo sapiens
actttcactgatgct

SEQ ID NO: 18763 - DNA, 15 bp, Homo sapiens
cactttcactgatgc

SEQ ID NO: 18764 - DNA, 15 bp, Homo sapiens
acactttcactgatg

SEQ ID NO: 18765 - DNA, 15 bp, Homo sapiens
cacactttcactgat

SEQ ID NO: 18766 - DNA, 15 bp, Homo sapiens
acacactttcactga

SEQ ID NO: 18767 - DNA, 15 bp, Homo sapiens
tacacactttcactg

SEQ ID NO: 18768 - DNA, 15 bp, Homo sapiens
atacacactttcact

SEQ ID NO: 18769 - DNA, 15 bp, Homo sapiens
aatacacactttcac

SEQ ID NO: 18770 - DNA, 15 bp, Homo sapiens
taatacacactttca

SEQ ID NO: 18771 - DNA, 15 bp, Homo sapiens
ctaatacacactttc

SEQ ID NO: 18772 - DNA, 15 bp, Homo sapiens
actaatacacacttt

SEQ ID NO: 18773 - DNA, 15 bp, Homo sapiens
gactaatacacactt

SEQ ID NO: 18774 - DNA, 15 bp, Homo sapiens
tgactaatacacact

SEQ ID NO: 18775 - DNA, 15 bp, Homo sapiens
ctgactaatacacac

SEQ ID NO: 18776 - DNA, 15 bp, Homo sapiens
gctgactaatacaca

SEQ ID NO: 18777 - DNA, 15 bp, Homo sapiens
agctgactaatacac

SEQ ID NO: 18778 - DNA, 15 bp, Homo sapiens
tagctgactaataca

SEQ ID NO: 18779 - DNA, 15 bp, Homo sapiens
ctagctgactaatac

SEQ ID NO: 18780 - DNA, 15 bp, Homo sapiens
cctagctgactaata

SEQ ID NO: 18781 - DNA, 15 bp, Homo sapiens
ccctagctgactaat

SEQ ID NO: 18782 - DNA, 15 bp, Homo sapiens
gccctagctgactaa

SEQ ID NO: 18783 - DNA, 15 bp, Homo sapiens
agccctagctgacta

SEQ ID NO: 18784 - DNA, 15 bp, Homo sapiens
cagccctagctgact

SEQ ID NO: 18785 - DNA, 15 bp, Homo sapiens
gcagccctagctgac

SEQ ID NO: 18786 - DNA, 15 bp, Homo sapiens
agcagccctagctga

SEQ ID NO: 18787 - DNA, 15 bp, Homo sapiens
cagcagccctagctg

SEQ ID NO: 18788 - DNA, 15 bp, Homo sapiens
acagcagccctagct

SEQ ID NO: 18789 - DNA, 15 bp, Homo sapiens
cacagcagccctagc

SEQ ID NO: 18790 - DNA, 15 bp, Homo sapiens
gcacagcagccctag

SEQ ID NO: 18791 - DNA, 15 bp, Homo sapiens
tgcacagcagcccta

SEQ ID NO: 18792 - DNA, 15 bp, Homo sapiens
ctgcacagcagccct

SEQ ID NO: 18793 - DNA, 15 bp, Homo sapiens
tctgcacagcagccc

SEQ ID NO: 18794 - DNA, 15 bp, Homo sapiens
ctctgcacagcagcc

SEQ ID NO: 18795 - DNA, 15 bp, Homo sapiens
actctgcacagcagc

SEQ ID NO: 18796 - DNA, 15 bp, Homo sapiens
aactctgcacagcag

SEQ ID NO: 18797 - DNA, 15 bp, Homo sapiens
gaactctgcacagca

SEQ ID NO: 18798 - DNA, 15 bp, Homo sapiens
ggaactctgcacagc

SEQ ID NO: 18799 - DNA, 15 bp, Homo sapiens
tggaactctgcacag

SEQ ID NO: 18800 - DNA, 15 bp, Homo sapiens
ctggaactctgcaca

SEQ ID NO: 18801 - DNA, 15 bp, Homo sapiens
tctggaactctgcac

SEQ ID NO: 18802 - DNA, 15 bp, Homo sapiens
ctctggaactctgca

SEQ ID NO: 18803 - DNA, 15 bp, Homo sapiens
tctctggaactctgc

SEQ ID NO: 18804 - DNA, 15 bp, Homo sapiens
gtctctggaactctg

SEQ ID NO: 18805 - DNA, 15 bp, Homo sapiens
agtctctggaactct

SEQ ID NO: 18806 - DNA, 15 bp, Homo sapiens
cagtctctggaactc

SEQ ID NO: 18807 - DNA, 15 bp, Homo sapiens
ccagtctctggaact

SEQ ID NO: 18808 - DNA, 15 bp, Homo sapiens
cccagtctctggaac

SEQ ID NO: 18809 - DNA, 15 bp, Homo sapiens
acccagtctctggaa

SEQ ID NO: 18810 - DNA, 15 bp, Homo sapiens
cacccagtctctgga

SEQ ID NO: 18811 - DNA, 15 bp, Homo sapiens
ccacccagtctctgg

SEQ ID NO: 18812 - DNA, 15 bp, Homo sapiens
gccacccagtctctg

SEQ ID NO: 18813 - DNA, 15 bp, Homo sapiens
agccacccagtctct

SEQ ID NO: 18814 - DNA, 15 bp, Homo sapiens
gagccacccagtctc

SEQ ID NO: 18815 - DNA, 15 bp, Homo sapiens
tgagccacccagtct

SEQ ID NO: 18816 - DNA, 15 bp, Homo sapiens
gtgagccacccagtc

SEQ ID NO: 18817 - DNA, 15 bp, Homo sapiens
tgtgagccacccagt

SEQ ID NO: 18818 - DNA, 15 bp, Homo sapiens
gtgtgagccacccag

SEQ ID NO: 18819 - DNA, 15 bp, Homo sapiens
tgtgtgagccaccca

SEQ ID NO: 18820 - DNA, 15 bp, Homo sapiens
ttgtgtgagccaccc

SEQ ID NO: 18821 - DNA, 15 bp, Homo sapiens
gttgtgtgagccacc

SEQ ID NO: 18822 - DNA, 15 bp, Homo sapiens
tgttgtgtgagccac

SEQ ID NO: 18823 - DNA, 15 bp, Homo sapiens
ctgttgtgtgagcca

SEQ ID NO: 18824 - DNA, 15 bp, Homo sapiens
cctgttgtgtgagcc

SEQ ID NO: 18825 - DNA, 15 bp, Homo sapiens
tcctgttgtgtgagc

SEQ ID NO: 18826 - DNA, 15 bp, Homo sapiens
ttcctgttgtgtgag

SEQ ID NO: 18827 - DNA, 15 bp, Homo sapiens
attcctgttgtgtga

SEQ ID NO: 18828 - DNA, 15 bp, Homo sapiens
aattcctgttgtgtg

SEQ ID NO: 18829 - DNA, 15 bp, Homo sapiens
aaattcctgttgtgt

SEQ ID NO: 18830 - DNA, 15 bp, Homo sapiens
taaattcctgttgtg

SEQ ID NO: 18831 - DNA, 15 bp, Homo sapiens
ataaattcctgttgt

SEQ ID NO: 18832 - DNA, 15 bp, Homo sapiens
aataaattcctgttg

SEQ ID NO: 18833 - DNA, 15 bp, Homo sapiens
aaataaattcctgtt

SEQ ID NO: 18834 - DNA, 15 bp, Homo sapiens
aaaataaattcctgt

SEQ ID NO: 18835 - DNA, 15 bp, Homo sapiens
aaaaataaattcctg

SEQ ID NO: 18836 - DNA, 15 bp, Homo sapiens
gaaaaataaattcct

SEQ ID NO: 18837 - DNA, 15 bp, Homo sapiens
agaaaaataaattcc

SEQ ID NO: 18838 - DNA, 15 bp, Homo sapiens
aagaaaaataaattc

SEQ ID NO: 18839 - DNA, 15 bp, Homo sapiens
taagaaaaataaatt

SEQ ID NO: 18840 - DNA, 15 bp, Homo sapiens
ctaagaaaaataaat

SEQ ID NO: 18841 - DNA, 15 bp, Homo sapiens
actaagaaaaataaa

SEQ ID NO: 18842 - DNA, 15 bp, Homo sapiens
aactaagaaaaataa

SEQ ID NO: 18843 - DNA, 15 bp, Homo sapiens
gaactaagaaaaata

SEQ ID NO: 18844 - DNA, 15 bp, Homo sapiens
agaactaagaaaaat

SEQ ID NO: 18845 - DNA, 15 bp, Homo sapiens
cagaactaagaaaaa

SEQ ID NO: 18846 - DNA, 15 bp, Homo sapiens
ccagaactaagaaaa

SEQ ID NO: 18847 - DNA, 15 bp, Homo sapiens
tccagaactaagaaa

SEQ ID NO: 18848 - DNA, 15 bp, Homo sapiens
ctccagaactaagaa

SEQ ID NO: 18849 - DNA, 15 bp, Homo sapiens
cctccagaactaaga

SEQ ID NO: 18850 - DNA, 15 bp, Homo sapiens
gcctccagaactaag

SEQ ID NO: 18851 - DNA, 15 bp, Homo sapiens
agcctccagaactaa

SEQ ID NO: 18852 - DNA, 15 bp, Homo sapiens
cagcctccagaacta

SEQ ID NO: 18853 - DNA, 15 bp, Homo sapiens
ccagcctccagaact

SEQ ID NO: 18854 - DNA, 15 bp, Homo sapiens
tccagcctccagaac

SEQ ID NO: 18855 - DNA, 15 bp, Homo sapiens
ttccagcctccagaa

SEQ ID NO: 18856 - DNA, 15 bp, Homo sapiens
cttccagcctccaga

SEQ ID NO: 18857 - DNA, 15 bp, Homo sapiens
acttccagcctccag

SEQ ID NO: 18858 - DNA, 15 bp, Homo sapiens
gacttccagcctcca

SEQ ID NO: 18859 - DNA, 15 bp, Homo sapiens
agacttccagcctcc

SEQ ID NO: 18860 - DNA, 15 bp, Homo sapiens
cagacttccagcctc

SEQ ID NO: 18861 - DNA, 15 bp, Homo sapiens
acagacttccagcct

SEQ ID NO: 18862 - DNA, 15 bp, Homo sapiens
cacagacttccagcc

SEQ ID NO: 18863 - DNA, 15 bp, Homo sapiens
tcacagacttccagc

SEQ ID NO: 18864 - DNA, 15 bp, Homo sapiens
atcacagacttccag

SEQ ID NO: 18865 - DNA, 15 bp, Homo sapiens
gatcacagacttcca

SEQ ID NO: 18866 - DNA, 15 bp, Homo sapiens
tgatcacagacttcc

SEQ ID NO: 18867 - DNA, 15 bp, Homo sapiens
atgatcacagacttc

SEQ ID NO: 18868 - DNA, 15 bp, Homo sapiens
catgatcacagactt

SEQ ID NO: 18869 - DNA, 15 bp, Homo sapiens
ccatgatcacagact

SEQ ID NO: 18870 - DNA, 15 bp, Homo sapiens
accatgatcacagac

SEQ ID NO: 18871 - DNA, 15 bp, Homo sapiens
caccatgatcacaga

SEQ ID NO: 18872 - DNA, 15 bp, Homo sapiens
gcaccatgatcacag

SEQ ID NO: 18873 - DNA, 15 bp, Homo sapiens
tgcaccatgatcaca

SEQ ID NO: 18874 - DNA, 15 bp, Homo sapiens
ctgcaccatgatcac

SEQ ID NO: 18875 - DNA, 15 bp, Homo sapiens
tctgcaccatgatca

SEQ ID NO: 18876 - DNA, 15 bp, Homo sapiens
gtctgcaccatgatc

SEQ ID NO: 18877 - DNA, 15 bp, Homo sapiens
agtctgcaccatgat

SEQ ID NO: 18878 - DNA, 15 bp, Homo sapiens
aagtctgcaccatga

SEQ ID NO: 18879 - DNA, 15 bp, Homo sapiens
taagtctgcaccatg

SEQ ID NO: 18880 - DNA, 15 bp, Homo sapiens
ctaagtctgcaccat

SEQ ID NO: 18881 - DNA, 15 bp, Homo sapiens
gctaagtctgcacca

SEQ ID NO: 18882 - DNA, 15 bp, Homo sapiens
ggctaagtctgcacc

SEQ ID NO: 18883 - DNA, 15 bp, Homo sapiens
aggctaagtctgcac

SEQ ID NO: 18884 - DNA, 15 bp, Homo sapiens
gaggctaagtctgca

SEQ ID NO: 18885 - DNA, 15 bp, Homo sapiens
ggaggctaagtctgc

SEQ ID NO: 18886 - DNA, 15 bp, Homo sapiens
tggaggctaagtctg

SEQ ID NO: 18887 - DNA, 15 bp, Homo sapiens
ctggaggctaagtct

SEQ ID NO: 18888 - DNA, 15 bp, Homo sapiens
tctggaggctaagtc

SEQ ID NO: 18889 - DNA, 15 bp, Homo sapiens
gtctggaggctaagt

SEQ ID NO: 18890 - DNA, 15 bp, Homo sapiens
ggtctggaggctaag

SEQ ID NO: 18891 - DNA, 15 bp, Homo sapiens
aggtctggaggctaa

SEQ ID NO: 18892 - DNA, 15 bp, Homo sapiens
caggtctggaggcta

SEQ ID NO: 18893 - DNA, 15 bp, Homo sapiens
acaggtctggaggct

SEQ ID NO: 18894 - DNA, 15 bp, Homo sapiens
tacaggtctggaggc

SEQ ID NO: 18895 - DNA, 15 bp, Homo sapiens
ctacaggtctggagg

SEQ ID NO: 18896 - DNA, 15 bp, Homo sapiens
tctacaggtctggag

SEQ ID NO: 18897 - DNA, 15 bp, Homo sapiens
atctacaggtctgga

SEQ ID NO: 18898 - DNA, 15 bp, Homo sapiens
catctacaggtctgg

SEQ ID NO: 18899 - DNA, 15 bp, Homo sapiens
gcatctacaggtctg

SEQ ID NO: 18900 - DNA, 15 bp, Homo sapiens
agcatctacaggtct

SEQ ID NO: 18901 - DNA, 15 bp, Homo sapiens
cagcatctacaggtc

SEQ ID NO: 18902 - DNA, 15 bp, Homo sapiens
acagcatctacaggt

SEQ ID NO: 18903 - DNA, 15 bp, Homo sapiens
gacagcatctacagg

SEQ ID NO: 18904 - DNA, 15 bp, Homo sapiens
tgacagcatctacag

SEQ ID NO: 18905 - DNA, 15 bp, Homo sapiens
atgacagcatctaca

SEQ ID NO: 18906 - DNA, 15 bp, Homo sapiens
gatgacagcatctac

SEQ ID NO: 18907 - DNA, 15 bp, Homo sapiens
ggatgacagcatcta

SEQ ID NO: 18908 - DNA, 15 bp, Homo sapiens
gggatgacagcatct

SEQ ID NO: 18909 - DNA, 15 bp, Homo sapiens
ggggatgacagcatc

SEQ ID NO: 18910 - DNA, 15 bp, Homo sapiens
aggggatgacagcat

SEQ ID NO: 18911 - DNA, 15 bp, Homo sapiens
caggggatgacagca

SEQ ID NO: 18912 - DNA, 15 bp, Homo sapiens
acaggggatgacagc

SEQ ID NO: 18913 - DNA, 15 bp, Homo sapiens
cacaggggatgacag

SEQ ID NO: 18914 - DNA, 15 bp, Homo sapiens
acacaggggatgaca

SEQ ID NO: 18915 - DNA, 15 bp, Homo sapiens
gacacaggggatgac

SEQ ID NO: 18916 - DNA, 15 bp, Homo sapiens
agacacaggggatga

SEQ ID NO: 18917 - DNA, 15 bp, Homo sapiens
aagacacaggggatg

SEQ ID NO: 18918 - DNA, 15 bp, Homo sapiens
gaagacacaggggat

SEQ ID NO: 18919 - DNA, 15 bp, Homo sapiens
tgaagacacagggga

SEQ ID NO: 18920 - DNA, 15 bp, Homo sapiens
gtgaagacacagggg

SEQ ID NO: 18921 - DNA, 15 bp, Homo sapiens
cgtgaagacacaggg

SEQ ID NO: 18922 - DNA, 15 bp, Homo sapiens
acgtgaagacacagg

SEQ ID NO: 18923 - DNA, 15 bp, Homo sapiens
cacgtgaagacacag

SEQ ID NO: 18924 - DNA, 15 bp, Homo sapiens
ccacgtgaagacaca

SEQ ID NO: 18925 - DNA, 15 bp, Homo sapiens
accacgtgaagacac

SEQ ID NO: 18926 - DNA, 15 bp, Homo sapiens
gaccacgtgaagaca

SEQ ID NO: 18927 - DNA, 15 bp, Homo sapiens
agaccacgtgaagac

SEQ ID NO: 18928 - DNA, 15 bp, Homo sapiens
gagaccacgtgaaga

SEQ ID NO: 18929 - DNA, 15 bp, Homo sapiens
ggagaccacgtgaag

SEQ ID NO: 18930 - DNA, 15 bp, Homo sapiens
gggagaccacgtgaa

SEQ ID NO: 18931 - DNA, 15 bp, Homo sapiens
agggagaccacgtga

SEQ ID NO: 18932 - DNA, 15 bp, Homo sapiens
gagggagaccacgtg

SEQ ID NO: 18933 - DNA, 15 bp, Homo sapiens
ggagggagaccacgt

SEQ ID NO: 18934 - DNA, 15 bp, Homo sapiens
cggagggagaccacg

SEQ ID NO: 18935 - DNA, 15 bp, Homo sapiens
acggagggagaccac

SEQ ID NO: 18936 - DNA, 15 bp, Homo sapiens
cacggagggagacca

SEQ ID NO: 18937 - DNA, 15 bp, Homo sapiens
ccacggagggagacc

SEQ ID NO: 18938 - DNA, 15 bp, Homo sapiens
cccacggagggagac

SEQ ID NO: 18939 - DNA, 15 bp, Homo sapiens
acccacggagggaga

SEQ ID NO: 18940 - DNA, 15 bp, Homo sapiens
aacccacggagggag

SEQ ID NO: 18941 - DNA, 15 bp, Homo sapiens
aaacccacggaggga

SEQ ID NO: 18942 - DNA, 15 bp, Homo sapiens
gaaacccacggaggg

SEQ ID NO: 18943 - DNA, 15 bp, Homo sapiens
agaaacccacggagg

SEQ ID NO: 18944 - DNA, 15 bp, Homo sapiens
cagaaacccacggag

SEQ ID NO: 18945 - DNA, 15 bp, Homo sapiens
acagaaacccacgga

SEQ ID NO: 18946 - DNA, 15 bp, Homo sapiens
cacagaaacccacgg

SEQ ID NO: 18947 - DNA, 15 bp, Homo sapiens
acacagaaacccacg

SEQ ID NO: 18948 - DNA, 15 bp, Homo sapiens
gacacagaaacccac

SEQ ID NO: 18949 - DNA, 15 bp, Homo sapiens
ggacacagaaaccca

SEQ ID NO: 18950 - DNA, 15 bp, Homo sapiens
aggacacagaaaccc

SEQ ID NO: 18951 - DNA, 15 bp, Homo sapiens
caggacacagaaacc

SEQ ID NO: 18952 - DNA, 15 bp, Homo sapiens
tcaggacacagaaac

SEQ ID NO: 18953 - DNA, 15 bp, Homo sapiens
atcaggacacagaaa

SEQ ID NO: 18954 - DNA, 15 bp, Homo sapiens
aatcaggacacagaa

SEQ ID NO: 18955 - DNA, 15 bp, Homo sapiens
caatcaggacacaga

SEQ ID NO: 18956 - DNA, 15 bp, Homo sapiens
acaatcaggacacag

SEQ ID NO: 18957 - DNA, 15 bp, Homo sapiens
gacaatcaggacaca

SEQ ID NO: 18958 - DNA, 15 bp, Homo sapiens
agacaatcaggacac

SEQ ID NO: 18959 - DNA, 15 bp, Homo sapiens
gagacaatcaggaca

SEQ ID NO: 18960 - DNA, 15 bp, Homo sapiens
agagacaatcaggac

SEQ ID NO: 18961 - DNA, 15 bp, Homo sapiens
aagagacaatcagga

SEQ ID NO: 18962 - DNA, 15 bp, Homo sapiens
taagagacaatcagg

SEQ ID NO: 18963 - DNA, 15 bp, Homo sapiens
gtaagagacaatcag

SEQ ID NO: 18964 - DNA, 15 bp, Homo sapiens
ggtaagagacaatca

SEQ ID NO: 18965 - DNA, 15 bp, Homo sapiens
tggtaagagacaatc

SEQ ID NO: 18966 - DNA, 15 bp, Homo sapiens
ctggtaagagacaat

SEQ ID NO: 18967 - DNA, 15 bp, Homo sapiens
tctggtaagagacaa

SEQ ID NO: 18968 - DNA, 15 bp, Homo sapiens
ttctggtaagagaca

SEQ ID NO: 18969 - DNA, 15 bp, Homo sapiens
gttctggtaagagac

SEQ ID NO: 18970 - DNA, 15 bp, Homo sapiens
tgttctggtaagaga

SEQ ID NO: 18971 - DNA, 15 bp, Homo sapiens
gtgttctggtaagag

SEQ ID NO: 18972 - DNA, 15 bp, Homo sapiens
ggtgttctggtaaga

SEQ ID NO: 18973 - DNA, 15 bp, Homo sapiens
cggtgttctggtaag

SEQ ID NO: 18974 - DNA, 15 bp, Homo sapiens
acggtgttctggtaa

SEQ ID NO: 18975 - DNA, 15 bp, Homo sapiens
cacggtgttctggta

SEQ ID NO: 18976 - DNA, 15 bp, Homo sapiens
ccacggtgttctggt

SEQ ID NO: 18977 - DNA, 15 bp, Homo sapiens
tccacggtgttctgg

SEQ ID NO: 18978 - DNA, 15 bp, Homo sapiens
atccacggtgttctg

SEQ ID NO: 18979 - DNA, 15 bp, Homo sapiens
aatccacggtgttct

SEQ ID NO: 18980 - DNA, 15 bp, Homo sapiens
taatccacggtgttc

SEQ ID NO: 18981 - DNA, 15 bp, Homo sapiens
ctaatccacggtgtt

SEQ ID NO: 18982 - DNA, 15 bp, Homo sapiens
tctaatccacggtgt

SEQ ID NO: 18983 - DNA, 15 bp, Homo sapiens
ctctaatccacggtg

SEQ ID NO: 18984 - DNA, 15 bp, Homo sapiens
gctctaatccacggt

SEQ ID NO: 18985 - DNA, 15 bp, Homo sapiens
ggctctaatccacgg

SEQ ID NO: 18986 - DNA, 15 bp, Homo sapiens
gggctctaatccacg

SEQ ID NO: 18987 - DNA, 15 bp, Homo sapiens
tgggctctaatccac

SEQ ID NO: 18988 - DNA, 15 bp, Homo sapiens
gtgggctctaatcca

SEQ ID NO: 18989 - DNA, 15 bp, Homo sapiens
ggtgggctctaatcc

SEQ ID NO: 18990 - DNA, 15 bp, Homo sapiens
gggtgggctctaatc

SEQ ID NO: 18991 - DNA, 15 bp, Homo sapiens
ggggtgggctctaat

SEQ ID NO: 18992 - DNA, 15 bp, Homo sapiens
tggggtgggctctaa

SEQ ID NO: 18993 - DNA, 15 bp, Homo sapiens
gtggggtgggctcta

SEQ ID NO: 18994 - DNA, 15 bp, Homo sapiens
tgtggggtgggctct

SEQ ID NO: 18995 - DNA, 15 bp, Homo sapiens
ctgtggggtgggctc

SEQ ID NO: 18996 - DNA, 15 bp, Homo sapiens
actgtggggtgggct

SEQ ID NO: 18997 - DNA, 15 bp, Homo sapiens
cactgtggggtgggc

SEQ ID NO: 18998 - DNA, 15 bp, Homo sapiens
tcactgtggggtggg

SEQ ID NO: 18999 - DNA, 15 bp, Homo sapiens
gtcactgtggggtgg

SEQ ID NO: 19000 - DNA, 15 bp, Homo sapiens
ggtcactgtggggtg

SEQ ID NO: 19001 - DNA, 15 bp, Homo sapiens
aggtcactgtggggt

SEQ ID NO: 19002 - DNA, 15 bp, Homo sapiens
gaggtcactgtgggg

SEQ ID NO: 19003 - DNA, 15 bp, Homo sapiens
tgaggtcactgtggg

SEQ ID NO: 19004 - DNA, 15 bp, Homo sapiens
atgaggtcactgtgg

SEQ ID NO: 19005 - DNA, 15 bp, Homo sapiens
aatgaggtcactgtg

SEQ ID NO: 19006 - DNA, 15 bp, Homo sapiens
aaatgaggtcactgt

SEQ ID NO: 19007 - DNA, 15 bp, Homo sapiens
aaaatgaggtcactg

SEQ ID NO: 19008 - DNA, 15 bp, Homo sapiens
taaaatgaggtcact

SEQ ID NO: 19009 - DNA, 15 bp, Homo sapiens
ttaaaatgaggtcac

SEQ ID NO: 19010 - DNA, 15 bp, Homo sapiens
gttaaaatgaggtca

SEQ ID NO: 19011 - DNA, 15 bp, Homo sapiens
agttaaaatgaggtc

SEQ ID NO: 19012 - DNA, 15 bp, Homo sapiens
aagttaaaatgaggt

SEQ ID NO: 19013 - DNA, 15 bp, Homo sapiens
taagttaaaatgagg

SEQ ID NO: 19014 - DNA, 15 bp, Homo sapiens
ttaagttaaaatgag

SEQ ID NO: 19015 - DNA, 15 bp, Homo sapiens
attaagttaaaatga

SEQ ID NO: 19016 - DNA, 15 bp, Homo sapiens
gattaagttaaaatg

SEQ ID NO: 19017 - DNA, 15 bp, Homo sapiens
tgattaagttaaaat

SEQ ID NO: 19018 - DNA, 15 bp, Homo sapiens
gtgattaagttaaaa

SEQ ID NO: 19019 - DNA, 15 bp, Homo sapiens
ggtgattaagttaaa

SEQ ID NO: 19020 - DNA, 15 bp, Homo sapiens
aggtgattaagttaa

SEQ ID NO: 19021 - DNA, 15 bp, Homo sapiens
aaggtgattaagtta

SEQ ID NO: 19022 - DNA, 15 bp, Homo sapiens
taaggtgattaagtt

SEQ ID NO: 19023 - DNA, 15 bp, Homo sapiens
ataaggtgattaagt

SEQ ID NO: 19024 - DNA, 15 bp, Homo sapiens
aataaggtgattaag

SEQ ID NO: 19025 - DNA, 15 bp, Homo sapiens
caataaggtgattaa

SEQ ID NO: 19026 - DNA, 15 bp, Homo sapiens
tcaataaggtgatta

SEQ ID NO: 19027 - DNA, 15 bp, Homo sapiens
atcaataaggtgatt

SEQ ID NO: 19028 - DNA, 15 bp, Homo sapiens
catcaataaggtgat

SEQ ID NO: 19029 - DNA, 15 bp, Homo sapiens
tcatcaataaggtga

SEQ ID NO: 19030 - DNA, 15 bp, Homo sapiens
gtcatcaataaggtg

SEQ ID NO: 19031 - DNA, 15 bp, Homo sapiens
ggtcatcaataaggt

SEQ ID NO: 19032 - DNA, 15 bp, Homo sapiens
gggtcatcaataagg

SEQ ID NO: 19033 - DNA, 15 bp, Homo sapiens
agggtcatcaataag

SEQ ID NO: 19034 - DNA, 15 bp, Homo sapiens
cagggtcatcaataa

SEQ ID NO: 19035 - DNA, 15 bp, Homo sapiens
acagggtcatcaata

SEQ ID NO: 19036 - DNA, 15 bp, Homo sapiens
gacagggtcatcaat

SEQ ID NO: 19037 - DNA, 15 bp, Homo sapiens
agacagggtcatcaa

SEQ ID NO: 19038 - DNA, 15 bp, Homo sapiens
gagacagggtcatca

SEQ ID NO: 19039 - DNA, 15 bp, Homo sapiens
ggagacagggtcatc

SEQ ID NO: 19040 - DNA, 15 bp, Homo sapiens
tggagacagggtcat

SEQ ID NO: 19041 - DNA, 15 bp, Homo sapiens
gtggagacagggtca

SEQ ID NO: 19042 - DNA, 15 bp, Homo sapiens
agtggagacagggtc

SEQ ID NO: 19043 - DNA, 15 bp, Homo sapiens
aagtggagacagggt

SEQ ID NO: 19044 - DNA, 15 bp, Homo sapiens
taagtggagacaggg

SEQ ID NO: 19045 - DNA, 15 bp, Homo sapiens
gtaagtggagacagg

SEQ ID NO: 19046 - DNA, 15 bp, Homo sapiens
tgtaagtggagacag

SEQ ID NO: 19047 - DNA, 15 bp, Homo sapiens
ctgtaagtggagaca

SEQ ID NO: 19048 - DNA, 15 bp, Homo sapiens
actgtaagtggagac

SEQ ID NO: 19049 - DNA, 15 bp, Homo sapiens
gactgtaagtggaga

SEQ ID NO: 19050 - DNA, 15 bp, Homo sapiens
tgactgtaagtggag

SEQ ID NO: 19051 - DNA, 15 bp, Homo sapiens
gtgactgtaagtgga

SEQ ID NO: 19052 - DNA, 15 bp, Homo sapiens
tgtgactgtaagtgg

SEQ ID NO: 19053 - DNA, 15 bp, Homo sapiens
ctgtgactgtaagtg

SEQ ID NO: 19054 - DNA, 15 bp, Homo sapiens
gctgtgactgtaagt

SEQ ID NO: 19055 - DNA, 15 bp, Homo sapiens
ggctgtgactgtaag

SEQ ID NO: 19056 - DNA, 15 bp, Homo sapiens
aggctgtgactgtaa

SEQ ID NO: 19057 - DNA, 15 bp, Homo sapiens
caggctgtgactgta

SEQ ID NO: 19058 - DNA, 15 bp, Homo sapiens
tcaggctgtgactgt

SEQ ID NO: 19059 - DNA, 15 bp, Homo sapiens
ctcaggctgtgactg

SEQ ID NO: 19060 - DNA, 15 bp, Homo sapiens
cctcaggctgtgact

SEQ ID NO: 19061 - DNA, 15 bp, Homo sapiens
acctcaggctgtgac

SEQ ID NO: 19062 - DNA, 15 bp, Homo sapiens
gacctcaggctgtga

SEQ ID NO: 19063 - DNA, 15 bp, Homo sapiens
ggacctcaggctgtg

SEQ ID NO: 19064 - DNA, 15 bp, Homo sapiens
cggacctcaggctgt

SEQ ID NO: 19065 - DNA, 15 bp, Homo sapiens
ccggacctcaggctg

SEQ ID NO: 19066 - DNA, 15 bp, Homo sapiens
cccggacctcaggct

SEQ ID NO: 19067 - DNA, 15 bp, Homo sapiens
ccccggacctcaggc

SEQ ID NO: 19068 - DNA, 15 bp, Homo sapiens
cccccggacctcagg

SEQ ID NO: 19069 - DNA, 15 bp, Homo sapiens
ccccccggacctcag

SEQ ID NO: 19070 - DNA, 15 bp, Homo sapiens
accccccggacctca

SEQ ID NO: 19071 - DNA, 15 bp, Homo sapiens
aaccccccggacctc

SEQ ID NO: 19072 - DNA, 15 bp, Homo sapiens
taaccccccggacct

SEQ ID NO: 19073 - DNA, 15 bp, Homo sapiens
ctaaccccccggacc

SEQ ID NO: 19074 - DNA, 15 bp, Homo sapiens
cctaaccccccggac

SEQ ID NO: 19075 - DNA, 15 bp, Homo sapiens
tcctaaccccccgga

SEQ ID NO: 19076 - DNA, 15 bp, Homo sapiens
gtcctaaccccccgg

SEQ ID NO: 19077 - DNA, 15 bp, Homo sapiens
agtcctaaccccccg

SEQ ID NO: 19078 - DNA, 15 bp, Homo sapiens
cagtcctaacccccc

SEQ ID NO: 19079 - DNA, 15 bp, Homo sapiens
gcagtcctaaccccc

SEQ ID NO: 19080 - DNA, 15 bp, Homo sapiens
tgcagtcctaacccc

SEQ ID NO: 19081 - DNA, 15 bp, Homo sapiens
ttgcagtcctaaccc

SEQ ID NO: 19082 - DNA, 15 bp, Homo sapiens
gttgcagtcctaacc

SEQ ID NO: 19083 - DNA, 15 bp, Homo sapiens
tgttgcagtcctaac

SEQ ID NO: 19084 - DNA, 15 bp, Homo sapiens
ctgttgcagtcctaa

SEQ ID NO: 19085 - DNA, 15 bp, Homo sapiens
tctgttgcagtccta

SEQ ID NO: 19086 - DNA, 15 bp, Homo sapiens
atctgttgcagtcct

SEQ ID NO: 19087 - DNA, 15 bp, Homo sapiens
catctgttgcagtcc

SEQ ID NO: 19088 - DNA, 15 bp, Homo sapiens
tcatctgttgcagtc

SEQ ID NO: 19089 - DNA, 15 bp, Homo sapiens
ttcatctgttgcagt

SEQ ID NO: 19090 - DNA, 15 bp, Homo sapiens
attcatctgttgcag

SEQ ID NO: 19091 - DNA, 15 bp, Homo sapiens
aattcatctgttgca

SEQ ID NO: 19092 - DNA, 15 bp, Homo sapiens
caattcatctgttgc

SEQ ID NO: 19093 - DNA, 15 bp, Homo sapiens
tcaattcatctgttg

SEQ ID NO: 19094 - DNA, 15 bp, Homo sapiens
ctcaattcatctgtt

SEQ ID NO: 19095 - DNA, 15 bp, Homo sapiens
cctcaattcatctgt

SEQ ID NO: 19096 - DNA, 15 bp, Homo sapiens
ccctcaattcatctg

SEQ ID NO: 19097 - DNA, 15 bp, Homo sapiens
cccctcaattcatct

SEQ ID NO: 19098 - DNA, 15 bp, Homo sapiens
tcccctcaattcatc

SEQ ID NO: 19099 - DNA, 15 bp, Homo sapiens
gtcccctcaattcat

SEQ ID NO: 19100 - DNA, 15 bp, Homo sapiens
tgtcccctcaattca

SEQ ID NO: 19101 - DNA, 15 bp, Homo sapiens
gtgtcccctcaattc

SEQ ID NO: 19102 - DNA, 15 bp, Homo sapiens
tgtgtcccctcaatt

SEQ ID NO: 19103 - DNA, 15 bp, Homo sapiens
ctgtgtcccctcaat

SEQ ID NO: 19104 - DNA, 15 bp, Homo sapiens
actgtgtcccctcaa

SEQ ID NO: 19105 - DNA, 15 bp, Homo sapiens
cactgtgtcccctca

SEQ ID NO: 19106 - DNA, 15 bp, Homo sapiens
acactgtgtcccctc

SEQ ID NO: 19107 - DNA, 15 bp, Homo sapiens
tacactgtgtcccct

SEQ ID NO: 19108 - DNA, 15 bp, Homo sapiens
gtacactgtgtcccc

SEQ ID NO: 19109 - DNA, 15 bp, Homo sapiens
tgtacactgtgtccc

SEQ ID NO: 19110 - DNA, 15 bp, Homo sapiens
ctgtacactgtgtcc

SEQ ID NO: 19111 - DNA, 15 bp, Homo sapiens
actgtacactgtgtc

SEQ ID NO: 19112 - DNA, 15 bp, Homo sapiens
aactgtacactgtgt

SEQ ID NO: 19113 - DNA, 15 bp, Homo sapiens
gaactgtacactgtg

SEQ ID NO: 19114 - DNA, 15 bp, Homo sapiens
tgaactgtacactgt

SEQ ID NO: 19115 - DNA, 15 bp, Homo sapiens
ctgaactgtacactg

SEQ ID NO: 19116 - DNA, 15 bp, Homo sapiens
gctgaactgtacact

SEQ ID NO: 19117 - DNA, 15 bp, Homo sapiens
ggctgaactgtacac

SEQ ID NO: 19118 - DNA, 15 bp, Homo sapiens
gggctgaactgtaca

SEQ ID NO: 19119 - DNA, 15 bp, Homo sapiens
tgggctgaactgtac

SEQ ID NO: 19120 - DNA, 15 bp, Homo sapiens
atgggctgaactgta

SEQ ID NO: 19121 - DNA, 15 bp, Homo sapiens
tatgggctgaactgt

SEQ ID NO: 19122 - DNA, 15 bp, Homo sapiens
ttatgggctgaactg

SEQ ID NO: 19123 - DNA, 15 bp, Homo sapiens
tttatgggctgaact

SEQ ID NO: 19124 - DNA, 15 bp, Homo sapiens
ctttatgggctgaac

SEQ ID NO: 19125 - DNA, 15 bp, Homo sapiens
tctttatgggctgaa

SEQ ID NO: 19126 - DNA, 15 bp, Homo sapiens
ctctttatgggctga

SEQ ID NO: 19127 - DNA, 15 bp, Homo sapiens
cctctttatgggctg

SEQ ID NO: 19128 - DNA, 15 bp, Homo sapiens
tcctctttatgggct

SEQ ID NO: 19129 - DNA, 15 bp, Homo sapiens
ttcctctttatgggc

SEQ ID NO: 19130 - DNA, 15 bp, Homo sapiens
cttcctctttatggg

SEQ ID NO: 19131 - DNA, 15 bp, Homo sapiens
tcttcctctttatgg

SEQ ID NO: 19132 - DNA, 15 bp, Homo sapiens
atcttcctctttatg

SEQ ID NO: 19133 - DNA, 15 bp, Homo sapiens
tatcttcctctttat

SEQ ID NO: 19134 - DNA, 15 bp, Homo sapiens
gtatcttcctcttta

SEQ ID NO: 19135 - DNA, 15 bp, Homo sapiens
ggtatcttcctcttt

SEQ ID NO: 19136 - DNA, 15 bp, Homo sapiens
gggtatcttcctctt

SEQ ID NO: 19137 - DNA, 15 bp, Homo sapiens
tgggtatcttcctct

SEQ ID NO: 19138 - DNA, 15 bp, Homo sapiens
ctgggtatcttcctc

SEQ ID NO: 19139 - DNA, 15 bp, Homo sapiens
tctgggtatcttcct

SEQ ID NO: 19140 - DNA, 15 bp, Homo sapiens
ttctgggtatcttcc

SEQ ID NO: 19141 - DNA, 15 bp, Homo sapiens
cttctgggtatcttc

SEQ ID NO: 19142 - DNA, 15 bp, Homo sapiens
acttctgggtatctt

SEQ ID NO: 19143 - DNA, 15 bp, Homo sapiens
aacttctgggtatct

SEQ ID NO: 19144 - DNA, 15 bp, Homo sapiens
aaacttctgggtatc

SEQ ID NO: 19145 - DNA, 15 bp, Homo sapiens
gaaacttctgggtat

SEQ ID NO: 19146 - DNA, 15 bp, Homo sapiens
tgaaacttctgggta

SEQ ID NO: 19147 - DNA, 15 bp, Homo sapiens
ctgaaacttctgggt

SEQ ID NO: 19148 - DNA, 15 bp, Homo sapiens
cctgaaacttctggg

SEQ ID NO: 19149 - DNA, 15 bp, Homo sapiens
tcctgaaacttctgg

SEQ ID NO: 19150 - DNA, 15 bp, Homo sapiens
ctcctgaaacttctg

SEQ ID NO: 19151 - DNA, 15 bp, Homo sapiens
cctcctgaaacttct

SEQ ID NO: 19152 - DNA, 15 bp, Homo sapiens
ccctcctgaaacttc

SEQ ID NO: 19153 - DNA, 15 bp, Homo sapiens
tccctcctgaaactt

SEQ ID NO: 19154 - DNA, 15 bp, Homo sapiens
ctccctcctgaaact

SEQ ID NO: 19155 - DNA, 15 bp, Homo sapiens
actccctcctgaaac

SEQ ID NO: 19156 - DNA, 15 bp, Homo sapiens
cactccctcctgaaa

SEQ ID NO: 19157 - DNA, 15 bp, Homo sapiens
ccactccctcctgaa

SEQ ID NO: 19158 - DNA, 15 bp, Homo sapiens
tccactccctcctga

SEQ ID NO: 19159 - DNA, 15 bp, Homo sapiens
ctccactccctcctg

SEQ ID NO: 19160 - DNA, 15 bp, Homo sapiens
gctccactccctcct

SEQ ID NO: 19161 - DNA, 15 bp, Homo sapiens
tgctccactccctcc

SEQ ID NO: 19162 - DNA, 15 bp, Homo sapiens
atgctccactccctc

SEQ ID NO: 19163 - DNA, 15 bp, Homo sapiens
gatgctccactccct

SEQ ID NO: 19164 - DNA, 15 bp, Homo sapiens
agatgctccactccc

SEQ ID NO: 19165 - DNA, 15 bp, Homo sapiens
aagatgctccactcc

SEQ ID NO: 19166 - DNA, 15 bp, Homo sapiens
gaagatgctccactc

SEQ ID NO: 19167 - DNA, 15 bp, Homo sapiens
ggaagatgctccact

SEQ ID NO: 19168 - DNA, 15 bp, Homo sapiens
gggaagatgctccac

SEQ ID NO: 19169 - DNA, 15 bp, Homo sapiens
agggaagatgctcca

SEQ ID NO: 19170 - DNA, 15 bp, Homo sapiens
cagggaagatgctcc

SEQ ID NO: 19171 - DNA, 15 bp, Homo sapiens
tcagggaagatgctc

SEQ ID NO: 19172 - DNA, 15 bp, Homo sapiens
atcagggaagatgct

SEQ ID NO: 19173 - DNA, 15 bp, Homo sapiens
aatcagggaagatgc

SEQ ID NO: 19174 - DNA, 15 bp, Homo sapiens
caatcagggaagatg

SEQ ID NO: 19175 - DNA, 15 bp, Homo sapiens
acaatcagggaagat

SEQ ID NO: 19176 - DNA, 15 bp, Homo sapiens
tacaatcagggaaga

SEQ ID NO: 19177 - DNA, 15 bp, Homo sapiens
atacaatcagggaag

SEQ ID NO: 19178 - DNA, 15 bp, Homo sapiens
aatacaatcagggaa

SEQ ID NO: 19179 - DNA, 15 bp, Homo sapiens
aaatacaatcaggga

SEQ ID NO: 19180 - DNA, 15 bp, Homo sapiens
taaatacaatcaggg

SEQ ID NO: 19181 - DNA, 15 bp, Homo sapiens
ataaatacaatcagg

SEQ ID NO: 19182 - DNA, 15 bp, Homo sapiens
aataaatacaatcag

SEQ ID NO: 19183 - DNA, 15 bp, Homo sapiens
aaataaatacaatca

SEQ ID NO: 19184 - DNA, 15 bp, Homo sapiens
aaaataaatacaatc

SEQ ID NO: 19185 - DNA, 15 bp, Homo sapiens
taaaataaatacaat

SEQ ID NO: 19186 - DNA, 15 bp, Homo sapiens
ttaaaataaatacaa

SEQ ID NO: 19187 - DNA, 15 bp, Homo sapiens
attaaaataaataca

SEQ ID NO: 19188 - DNA, 15 bp, Homo sapiens
tattaaaataaatac

SEQ ID NO: 19189 - DNA, 15 bp, Homo sapiens
ctattaaaataaata

SEQ ID NO: 19190 - DNA, 15 bp, Homo sapiens
actattaaaataaat

SEQ ID NO: 19191 - DNA, 15 bp, Homo sapiens
aactattaaaataaa

SEQ ID NO: 19192 - DNA, 15 bp, Homo sapiens
aaactattaaaataa

SEQ ID NO: 19193 - DNA, 15 bp, Homo sapiens
aaaactattaaaata

SEQ ID NO: 19194 - DNA, 15 bp, Homo sapiens
aaaaactattaaaat

SEQ ID NO: 19195 - DNA, 15 bp, Homo sapiens
aaaaaactattaaaa

SEQ ID NO: 19196 - DNA, 15 bp, Homo sapiens
taaaaaactattaaa

SEQ ID NO: 19197 - DNA, 15 bp, Homo sapiens
ttaaaaaactattaa

SEQ ID NO: 19198 - DNA, 15 bp, Homo sapiens
tttaaaaaactatta

SEQ ID NO: 19199 - DNA, 15 bp, Homo sapiens
ttttaaaaaactatt

SEQ ID NO: 19200 - DNA, 15 bp, Homo sapiens
tttttaaaaaactat

SEQ ID NO: 19201 - DNA, 15 bp, Homo sapiens
ttttttaaaaaacta

SEQ ID NO: 19202 - DNA, 15 bp, Homo sapiens
gttttttaaaaaact

SEQ ID NO: 19203 - DNA, 15 bp, Homo sapiens
cgttttttaaaaaac

SEQ ID NO: 19204 - DNA, 15 bp, Homo sapiens
gcgttttttaaaaaa

SEQ ID NO: 19205 - DNA, 15 bp, Homo sapiens
agcgttttttaaaaa

SEQ ID NO: 19206 - DNA, 15 bp, Homo sapiens
aagcgttttttaaaa

SEQ ID NO: 19207 - DNA, 15 bp, Homo sapiens
caagcgttttttaaa

SEQ ID NO: 19208 - DNA, 15 bp, Homo sapiens
acaagcgttttttaa

SEQ ID NO: 19209 - DNA, 15 bp, Homo sapiens
tacaagcgtttttta

SEQ ID NO: 19210 - DNA, 15 bp, Homo sapiens
ttacaagcgtttttt

SEQ ID NO: 19211 - DNA, 15 bp, Homo sapiens
attacaagcgttttt

SEQ ID NO: 19212 - DNA, 15 bp, Homo sapiens
gattacaagcgtttt

SEQ ID NO: 19213 - DNA, 15 bp, Homo sapiens
tgattacaagcgttt

SEQ ID NO: 19214 - DNA, 15 bp, Homo sapiens
ctgattacaagcgtt

SEQ ID NO: 19215 - DNA, 15 bp, Homo sapiens
cctgattacaagcgt

SEQ ID NO: 19216 - DNA, 15 bp, Homo sapiens
tcctgattacaagcg

SEQ ID NO: 19217 - DNA, 15 bp, Homo sapiens
ttcctgattacaagc

SEQ ID NO: 19218 - DNA, 15 bp, Homo sapiens
tttcctgattacaag

SEQ ID NO: 19219 - DNA, 15 bp, Homo sapiens
ctttcctgattacaa

SEQ ID NO: 19220 - DNA, 15 bp, Homo sapiens
tctttcctgattaca

SEQ ID NO: 19221 - DNA, 15 bp, Homo sapiens
gtctttcctgattac

SEQ ID NO: 19222 - DNA, 15 bp, Homo sapiens
tgtctttcctgatta

SEQ ID NO: 19223 - DNA, 15 bp, Homo sapiens
ctgtctttcctgatt

SEQ ID NO: 19224 - DNA, 15 bp, Homo sapiens
actgtctttcctgat

SEQ ID NO: 19225 - DNA, 15 bp, Homo sapiens
gactgtctttcctga

SEQ ID NO: 19226 - DNA, 15 bp, Homo sapiens
agactgtctttcctg

SEQ ID NO: 19227 - DNA, 15 bp, Homo sapiens
cagactgtctttcct

SEQ ID NO: 19228 - DNA, 15 bp, Homo sapiens
acagactgtctttcc

SEQ ID NO: 19229 - DNA, 15 bp, Homo sapiens
gacagactgtctttc

SEQ ID NO: 19230 - DNA, 15 bp, Homo sapiens
agacagactgtcttt

SEQ ID NO: 19231 - DNA, 15 bp, Homo sapiens
aagacagactgtctt

SEQ ID NO: 19232 - DNA, 15 bp, Homo sapiens
aaagacagactgtct

SEQ ID NO: 19233 - DNA, 15 bp, Homo sapiens
aaaagacagactgtc

SEQ ID NO: 19234 - DNA, 15 bp, Homo sapiens
aaaaagacagactgt

SEQ ID NO: 19235 - DNA, 15 bp, Homo sapiens
aaaaaagacagactg

SEQ ID NO: 19236 - DNA, 15 bp, Homo sapiens
taaaaaagacagact

SEQ ID NO: 19237 - DNA, 15 bp, Homo sapiens
ataaaaaagacagac

SEQ ID NO: 19238 - DNA, 15 bp, Homo sapiens
tataaaaaagacaga

SEQ ID NO: 19239 - DNA, 15 bp, Homo sapiens
atataaaaaagacag

SEQ ID NO: 19240 - DNA, 15 bp, Homo sapiens
aatataaaaaagaca

SEQ ID NO: 19241 - DNA, 15 bp, Homo sapiens
taatataaaaaagac

SEQ ID NO: 19242 - DNA, 15 bp, Homo sapiens
gtaatataaaaaaga

SEQ ID NO: 19243 - DNA, 15 bp, Homo sapiens
ggtaatataaaaaag

SEQ ID NO: 19244 - DNA, 15 bp, Homo sapiens
gggtaatataaaaaa

SEQ ID NO: 19245 - DNA, 15 bp, Homo sapiens
tgggtaatataaaaa

SEQ ID NO: 19246 - DNA, 15 bp, Homo sapiens
ctgggtaatataaaa

SEQ ID NO: 19247 - DNA, 15 bp, Homo sapiens
actgggtaatataaa

SEQ ID NO: 19248 - DNA, 15 bp, Homo sapiens
aactgggtaatataa

SEQ ID NO: 19249 - DNA, 15 bp, Homo sapiens
aaactgggtaatata

SEQ ID NO: 19250 - DNA, 15 bp, Homo sapiens
caaactgggtaatat

SEQ ID NO: 19251 - DNA, 15 bp, Homo sapiens
ccaaactgggtaata

SEQ ID NO: 19252 - DNA, 15 bp, Homo sapiens
cccaaactgggtaat

SEQ ID NO: 19253 - DNA, 15 bp, Homo sapiens
tcccaaactgggtaa

SEQ ID NO: 19254 - DNA, 15 bp, Homo sapiens
ctcccaaactgggta

SEQ ID NO: 19255 - DNA, 15 bp, Homo sapiens
actcccaaactgggt

SEQ ID NO: 19256 - DNA, 15 bp, Homo sapiens
cactcccaaactggg

SEQ ID NO: 19257 - DNA, 15 bp, Homo sapiens
ccactcccaaactgg

SEQ ID NO: 19258 - DNA, 15 bp, Homo sapiens
gccactcccaaactg

SEQ ID NO: 19259 - DNA, 15 bp, Homo sapiens
tgccactcccaaact

SEQ ID NO: 19260 - DNA, 15 bp, Homo sapiens
ctgccactcccaaac

SEQ ID NO: 19261 - DNA, 15 bp, Homo sapiens
tctgccactcccaaa

SEQ ID NO: 19262 - DNA, 15 bp, Homo sapiens
ttctgccactcccaa

SEQ ID NO: 19263 - DNA, 15 bp, Homo sapiens
gttctgccactccca

SEQ ID NO: 19264 - DNA, 15 bp, Homo sapiens
agttctgccactccc

SEQ ID NO: 19265 - DNA, 15 bp, Homo sapiens
aagttctgccactcc

SEQ ID NO: 19266 - DNA, 15 bp, Homo sapiens
taagttctgccactc

SEQ ID NO: 19267 - DNA, 15 bp, Homo sapiens
ttaagttctgccact

SEQ ID NO: 19268 - DNA, 15 bp, Homo sapiens
tttaagttctgccac

SEQ ID NO: 19269 - DNA, 15 bp, Homo sapiens
atttaagttctgcca

SEQ ID NO: 19270 - DNA, 15 bp, Homo sapiens
catttaagttctgcc

SEQ ID NO: 19271 - DNA, 15 bp, Homo sapiens
gcatttaagttctgc

SEQ ID NO: 19272 - DNA, 15 bp, Homo sapiens
tgcatttaagttctg

SEQ ID NO: 19273 - DNA, 15 bp, Homo sapiens
gtgcatttaagttct

SEQ ID NO: 19274 - DNA, 15 bp, Homo sapiens
agtgcatttaagttc

SEQ ID NO: 19275 - DNA, 15 bp, Homo sapiens
aagtgcatttaagtt

SEQ ID NO: 19276 - DNA, 15 bp, Homo sapiens
aaagtgcatttaagt

SEQ ID NO: 19277 - DNA, 15 bp, Homo sapiens
aaaagtgcatttaag

SEQ ID NO: 19278 - DNA, 15 bp, Homo sapiens
caaaagtgcatttaa

SEQ ID NO: 19279 - DNA, 15 bp, Homo sapiens
tcaaaagtgcattta

SEQ ID NO: 19280 - DNA, 15 bp, Homo sapiens
atcaaaagtgcattt

SEQ ID NO: 19281 - DNA, 15 bp, Homo sapiens
aatcaaaagtgcatt

SEQ ID NO: 19282 - DNA, 15 bp, Homo sapiens
gaatcaaaagtgcat

SEQ ID NO: 19283 - DNA, 15 bp, Homo sapiens
tgaatcaaaagtgca

SEQ ID NO: 19284 - DNA, 15 bp, Homo sapiens
gtgaatcaaaagtgc

SEQ ID NO: 19285 - DNA, 15 bp, Homo sapiens
tgtgaatcaaaagtg

SEQ ID NO: 19286 - DNA, 15 bp, Homo sapiens
ctgtgaatcaaaagt

SEQ ID NO: 19287 - DNA, 15 bp, Homo sapiens
tctgtgaatcaaaag

SEQ ID NO: 19288 - DNA, 15 bp, Homo sapiens
atctgtgaatcaaaa

SEQ ID NO: 19289 - DNA, 15 bp, Homo sapiens
catctgtgaatcaaa

SEQ ID NO: 19290 - DNA, 15 bp, Homo sapiens
gcatctgtgaatcaa

SEQ ID NO: 19291 - DNA, 15 bp, Homo sapiens
ggcatctgtgaatca

SEQ ID NO: 19292 - DNA, 15 bp, Homo sapiens
aggcatctgtgaatc

SEQ ID NO: 19293 - DNA, 15 bp, Homo sapiens
gaggcatctgtgaat

SEQ ID NO: 19294 - DNA, 15 bp, Homo sapiens
agaggcatctgtgaa

SEQ ID NO: 19295 - DNA, 15 bp, Homo sapiens
aagaggcatctgtga

SEQ ID NO: 19296 - DNA, 15 bp, Homo sapiens
gaagaggcatctgtg

SEQ ID NO: 19297 - DNA, 15 bp, Homo sapiens
ggaagaggcatctgt

SEQ ID NO: 19298 - DNA, 15 bp, Homo sapiens
tggaagaggcatctg

SEQ ID NO: 19299 - DNA, 15 bp, Homo sapiens
gtggaagaggcatct

SEQ ID NO: 19300 - DNA, 15 bp, Homo sapiens
ggtggaagaggcatc

SEQ ID NO: 19301 - DNA, 15 bp, Homo sapiens
aggtggaagaggcat

SEQ ID NO: 19302 - DNA, 15 bp, Homo sapiens
caggtggaagaggca

SEQ ID NO: 19303 - DNA, 15 bp, Homo sapiens
tcaggtggaagaggc

SEQ ID NO: 19304 - DNA, 15 bp, Homo sapiens
atcaggtggaagagg

SEQ ID NO: 19305 - DNA, 15 bp, Homo sapiens
aatcaggtggaagag

SEQ ID NO: 19306 - DNA, 15 bp, Homo sapiens
taatcaggtggaaga

SEQ ID NO: 19307 - DNA, 15 bp, Homo sapiens
ttaatcaggtggaag

SEQ ID NO: 19308 - DNA, 15 bp, Homo sapiens
cttaatcaggtggaa

SEQ ID NO: 19309 - DNA, 15 bp, Homo sapiens
tcttaatcaggtgga

SEQ ID NO: 19310 - DNA, 15 bp, Homo sapiens
ttcttaatcaggtgg

SEQ ID NO: 19311 - DNA, 15 bp, Homo sapiens
gttcttaatcaggtg

SEQ ID NO: 19312 - DNA, 15 bp, Homo sapiens
ggttcttaatcaggt

SEQ ID NO: 19313 - DNA, 15 bp, Homo sapiens
tggttcttaatcagg

SEQ ID NO: 19314 - DNA, 15 bp, Homo sapiens
gtggttcttaatcag

SEQ ID NO: 19315 - DNA, 15 bp, Homo sapiens
agtggttcttaatca

SEQ ID NO: 19316 - DNA, 15 bp, Homo sapiens
cagtggttcttaatc

SEQ ID NO: 19317 - DNA, 15 bp, Homo sapiens
acagtggttcttaat

SEQ ID NO: 19318 - DNA, 15 bp, Homo sapiens
tacagtggttcttaa

SEQ ID NO: 19319 - DNA, 15 bp, Homo sapiens
ctacagtggttctta

SEQ ID NO: 19320 - DNA, 15 bp, Homo sapiens
gctacagtggttctt

SEQ ID NO: 19321 - DNA, 15 bp, Homo sapiens
tgctacagtggttct

SEQ ID NO: 19322 - DNA, 15 bp, Homo sapiens
ctgctacagtggttc

SEQ ID NO: 19323 - DNA, 15 bp, Homo sapiens
tctgctacagtggtt

SEQ ID NO: 19324 - DNA, 15 bp, Homo sapiens
gtctgctacagtggt

SEQ ID NO: 19325 - DNA, 15 bp, Homo sapiens
cgtctgctacagtgg

SEQ ID NO: 19326 - DNA, 15 bp, Homo sapiens
gcgtctgctacagtg

SEQ ID NO: 19327 - DNA, 15 bp, Homo sapiens
tgcgtctgctacagt

SEQ ID NO: 19328 - DNA, 15 bp, Homo sapiens
ctgcgtctgctacag

SEQ ID NO: 19329 - DNA, 15 bp, Homo sapiens
tctgcgtctgctaca

SEQ ID NO: 19330 - DNA, 15 bp, Homo sapiens
gtctgcgtctgctac

SEQ ID NO: 19331 - DNA, 15 bp, Homo sapiens
agtctgcgtctgcta

SEQ ID NO: 19332 - DNA, 15 bp, Homo sapiens
aagtctgcgtctgct

SEQ ID NO: 19333 - DNA, 15 bp, Homo sapiens
taagtctgcgtctgc

SEQ ID NO: 19334 - DNA, 15 bp, Homo sapiens
ataagtctgcgtctg

SEQ ID NO: 19335 - DNA, 15 bp, Homo sapiens
aataagtctgcgtct

SEQ ID NO: 19336 - DNA, 15 bp, Homo sapiens
caataagtctgcgtc

SEQ ID NO: 19337 - DNA, 15 bp, Homo sapiens
ccaataagtctgcgt

SEQ ID NO: 19338 - DNA, 15 bp, Homo sapiens
tccaataagtctgcg

SEQ ID NO: 19339 - DNA, 15 bp, Homo sapiens
gtccaataagtctgc

SEQ ID NO: 19340 - DNA, 15 bp, Homo sapiens
tgtccaataagtctg

SEQ ID NO: 19341 - DNA, 15 bp, Homo sapiens
gtgtccaataagtct

SEQ ID NO: 19342 - DNA, 15 bp, Homo sapiens
agtgtccaataagtc

SEQ ID NO: 19343 - DNA, 15 bp, Homo sapiens
tagtgtccaataagt

SEQ ID NO: 19344 - DNA, 15 bp, Homo sapiens
ctagtgtccaataag

SEQ ID NO: 19345 - DNA, 15 bp, Homo sapiens
cctagtgtccaataa

SEQ ID NO: 19346 - DNA, 15 bp, Homo sapiens
gcctagtgtccaata

SEQ ID NO: 19347 - DNA, 15 bp, Homo sapiens
cgcctagtgtccaat

SEQ ID NO: 19348 - DNA, 15 bp, Homo sapiens
ccgcctagtgtccaa

SEQ ID NO: 19349 - DNA, 15 bp, Homo sapiens
cccgcctagtgtcca

SEQ ID NO: 19350 - DNA, 15 bp, Homo sapiens
tcccgcctagtgtcc

SEQ ID NO: 19351 - DNA, 15 bp, Homo sapiens
ctcccgcctagtgtc

SEQ ID NO: 19352 - DNA, 15 bp, Homo sapiens
cctcccgcctagtgt

SEQ ID NO: 19353 - DNA, 15 bp, Homo sapiens
gcctcccgcctagtg

SEQ ID NO: 19354 - DNA, 15 bp, Homo sapiens
ggcctcccgcctagt

SEQ ID NO: 19355 - DNA, 15 bp, Homo sapiens
tggcctcccgcctag

SEQ ID NO: 19356 - DNA, 15 bp, Homo sapiens
ctggcctcccgccta

SEQ ID NO: 19357 - DNA, 15 bp, Homo sapiens
gctggcctcccgcct

SEQ ID NO: 19358 - DNA, 15 bp, Homo sapiens
agctggcctcccgcc

SEQ ID NO: 19359 - DNA, 15 bp, Homo sapiens
gagctggcctcccgc

SEQ ID NO: 19360 - DNA, 15 bp, Homo sapiens
agagctggcctcccg

SEQ ID NO: 19361 - DNA, 15 bp, Homo sapiens
cagagctggcctccc

SEQ ID NO: 19362 - DNA, 15 bp, Homo sapiens
gcagagctggcctcc

SEQ ID NO: 19363 - DNA, 15 bp, Homo sapiens
tgcagagctggcctc

SEQ ID NO: 19364 - DNA, 15 bp, Homo sapiens
ctgcagagctggcct

SEQ ID NO: 19365 - DNA, 15 bp, Homo sapiens
tctgcagagctggcc

SEQ ID NO: 19366 - DNA, 15 bp, Homo sapiens
gtctgcagagctggc

SEQ ID NO: 19367 - DNA, 15 bp, Homo sapiens
tgtctgcagagctgg

SEQ ID NO: 19368 - DNA, 15 bp, Homo sapiens
ctgtctgcagagctg

SEQ ID NO: 19369 - DNA, 15 bp, Homo sapiens
gctgtctgcagagct

SEQ ID NO: 19370 - DNA, 15 bp, Homo sapiens
tgctgtctgcagagc

SEQ ID NO: 19371 - DNA, 15 bp, Homo sapiens
ctgctgtctgcagag

SEQ ID NO: 19372 - DNA, 15 bp, Homo sapiens
cctgctgtctgcaga

SEQ ID NO: 19373 - DNA, 15 bp, Homo sapiens
acctgctgtctgcag

SEQ ID NO: 19374 - DNA, 15 bp, Homo sapiens
gacctgctgtctgca

SEQ ID NO: 19375 - DNA, 15 bp, Homo sapiens
agacctgctgtctgc

SEQ ID NO: 19376 - DNA, 15 bp, Homo sapiens
gagacctgctgtctg

SEQ ID NO: 19377 - DNA, 15 bp, Homo sapiens
tgagacctgctgtct

SEQ ID NO: 19378 - DNA, 15 bp, Homo sapiens
ctgagacctgctgtc

SEQ ID NO: 19379 - DNA, 15 bp, Homo sapiens
cctgagacctgctgt

SEQ ID NO: 19380 - DNA, 15 bp, Homo sapiens
tcctgagacctgctg

SEQ ID NO: 19381 - DNA, 15 bp, Homo sapiens
ttcctgagacctgct

SEQ ID NO: 19382 - DNA, 15 bp, Homo sapiens
cttcctgagacctgc

SEQ ID NO: 19383 - DNA, 15 bp, Homo sapiens
tcttcctgagacctg

SEQ ID NO: 19384 - DNA, 15 bp, Homo sapiens
gtcttcctgagacct

SEQ ID NO: 19385 - DNA, 15 bp, Homo sapiens
cgtcttcctgagacc

SEQ ID NO: 19386 - DNA, 15 bp, Homo sapiens
ccgtcttcctgagac

SEQ ID NO: 19387 - DNA, 15 bp, Homo sapiens
accgtcttcctgaga

SEQ ID NO: 19388 - DNA, 15 bp, Homo sapiens
gaccgtcttcctgag

SEQ ID NO: 19389 - DNA, 15 bp, Homo sapiens
tgaccgtcttcctga

SEQ ID NO: 19390 - DNA, 15 bp, Homo sapiens
ttgaccgtcttcctg

SEQ ID NO: 19391 - DNA, 15 bp, Homo sapiens
cttgaccgtcttcct

SEQ ID NO: 19392 - DNA, 15 bp, Homo sapiens
ccttgaccgtcttcc

SEQ ID NO: 19393 - DNA, 15 bp, Homo sapiens
gccttgaccgtcttc

SEQ ID NO: 19394 - DNA, 15 bp, Homo sapiens
tgccttgaccgtctt

SEQ ID NO: 19395 - DNA, 15 bp, Homo sapiens
atgccttgaccgtct

SEQ ID NO: 19396 - DNA, 15 bp, Homo sapiens
catgccttgaccgtc

SEQ ID NO: 19397 - DNA, 15 bp, Homo sapiens
ccatgccttgaccgt

SEQ ID NO: 19398 - DNA, 15 bp, Homo sapiens
gccatgccttgaccg

SEQ ID NO: 19399 - DNA, 15 bp, Homo sapiens
agccatgccttgacc

SEQ ID NO: 19400 - DNA, 15 bp, Homo sapiens
cagccatgccttgac

SEQ ID NO: 19401 - DNA, 15 bp, Homo sapiens
gcagccatgccttga

SEQ ID NO: 19402 - DNA, 15 bp, Homo sapiens
agcagccatgccttg

SEQ ID NO: 19403 - DNA, 15 bp, Homo sapiens
cagcagccatgcctt

SEQ ID NO: 19404 - DNA, 15 bp, Homo sapiens
tcagcagccatgcct

SEQ ID NO: 19405 - DNA, 15 bp, Homo sapiens
atcagcagccatgcc

SEQ ID NO: 19406 - DNA, 15 bp, Homo sapiens
catcagcagccatgc

SEQ ID NO: 19407 - DNA, 15 bp, Homo sapiens
tcatcagcagccatg

SEQ ID NO: 19408 - DNA, 15 bp, Homo sapiens
atcatcagcagccat

SEQ ID NO: 19409 - DNA, 15 bp, Homo sapiens
gatcatcagcagcca

SEQ ID NO: 19410 - DNA, 15 bp, Homo sapiens
ggatcatcagcagcc

SEQ ID NO: 19411 - DNA, 15 bp, Homo sapiens
cggatcatcagcagc

SEQ ID NO: 19412 - DNA, 15 bp, Homo sapiens
gcggatcatcagcag

SEQ ID NO: 19413 - DNA, 15 bp, Homo sapiens
agcggatcatcagca

SEQ ID NO: 19414 - DNA, 15 bp, Homo sapiens
aagcggatcatcagc

SEQ ID NO: 19415 - DNA, 15 bp, Homo sapiens
taagcggatcatcag

SEQ ID NO: 19416 - DNA, 15 bp, Homo sapiens
ataagcggatcatca

SEQ ID NO: 19417 - DNA, 15 bp, Homo sapiens
cataagcggatcatc

SEQ ID NO: 19418 - DNA, 15 bp, Homo sapiens
ccataagcggatcat

SEQ ID NO: 19419 - DNA, 15 bp, Homo sapiens
cccataagcggatca

SEQ ID NO: 19420 - DNA, 15 bp, Homo sapiens
acccataagcggatc

SEQ ID NO: 19421 - DNA, 15 bp, Homo sapiens
cacccataagcggat

SEQ ID NO: 19422 - DNA, 15 bp, Homo sapiens
acacccataagcgga

SEQ ID NO: 19423 - DNA, 15 bp, Homo sapiens
cacacccataagcgg

SEQ ID NO: 19424 - DNA, 15 bp, Homo sapiens
acacacccataagcg

SEQ ID NO: 19425 - DNA, 15 bp, Homo sapiens
aacacacccataagc

SEQ ID NO: 19426 - DNA, 15 bp, Homo sapiens
aaacacacccataag

SEQ ID NO: 19427 - DNA, 15 bp, Homo sapiens
taaacacacccataa

SEQ ID NO: 19428 - DNA, 15 bp, Homo sapiens
ataaacacacccata

SEQ ID NO: 19429 - DNA, 15 bp, Homo sapiens
aataaacacacccat

SEQ ID NO: 19430 - DNA, 15 bp, Homo sapiens
caataaacacaccca

SEQ ID NO: 19431 - DNA, 15 bp, Homo sapiens
acaataaacacaccc

SEQ ID NO: 19432 - DNA, 15 bp, Homo sapiens
gacaataaacacacc

SEQ ID NO: 19433 - DNA, 15 bp, Homo sapiens
agacaataaacacac

SEQ ID NO: 19434 - DNA, 15 bp, Homo sapiens
aagacaataaacaca

SEQ ID NO: 19435 - DNA, 15 bp, Homo sapiens
taagacaataaacac

SEQ ID NO: 19436 - DNA, 15 bp, Homo sapiens
ctaagacaataaaca

SEQ ID NO: 19437 - DNA, 15 bp, Homo sapiens
gctaagacaataaac

SEQ ID NO: 19438 - DNA, 15 bp, Homo sapiens
ggctaagacaataaa

SEQ ID NO: 19439 - DNA, 15 bp, Homo sapiens
gggctaagacaataa

SEQ ID NO: 19440 - DNA, 15 bp, Homo sapiens
tgggctaagacaata

SEQ ID NO: 19441 - DNA, 15 bp, Homo sapiens
atgggctaagacaat

SEQ ID NO: 19442 - DNA, 15 bp, Homo sapiens
catgggctaagacaa

SEQ ID NO: 19443 - DNA, 15 bp, Homo sapiens
acatgggctaagaca

SEQ ID NO: 19444 - DNA, 15 bp, Homo sapiens
aacatgggctaagac

SEQ ID NO: 19445 - DNA, 15 bp, Homo sapiens
taacatgggctaaga

SEQ ID NO: 19446 - DNA, 15 bp, Homo sapiens
ctaacatgggctaag

SEQ ID NO: 19447 - DNA, 15 bp, Homo sapiens
tctaacatgggctaa

SEQ ID NO: 19448 - DNA, 15 bp, Homo sapiens
atctaacatgggcta

SEQ ID NO: 19449 - DNA, 15 bp, Homo sapiens
catctaacatgggct

SEQ ID NO: 19450 - DNA, 15 bp, Homo sapiens
gcatctaacatgggc

SEQ ID NO: 19451 - DNA, 15 bp, Homo sapiens
cgcatctaacatggg

SEQ ID NO: 19452 - DNA, 15 bp, Homo sapiens
tcgcatctaacatgg

SEQ ID NO: 19453 - DNA, 15 bp, Homo sapiens
ctcgcatctaacatg

SEQ ID NO: 19454 - DNA, 15 bp, Homo sapiens
cctcgcatctaacat

SEQ ID NO: 19455 - DNA, 15 bp, Homo sapiens
tcctcgcatctaaca

SEQ ID NO: 19456 - DNA, 15 bp, Homo sapiens
ttcctcgcatctaac

SEQ ID NO: 19457 - DNA, 15 bp, Homo sapiens
gttcctcgcatctaa

SEQ ID NO: 19458 - DNA, 15 bp, Homo sapiens
ggttcctcgcatcta

SEQ ID NO: 19459 - DNA, 15 bp, Homo sapiens
tggttcctcgcatct

SEQ ID NO: 19460 - DNA, 15 bp, Homo sapiens
gtggttcctcgcatc

SEQ ID NO: 19461 - DNA, 15 bp, Homo sapiens
agtggttcctcgcat

SEQ ID NO: 19462 - DNA, 15 bp, Homo sapiens
gagtggttcctcgca

SEQ ID NO: 19463 - DNA, 15 bp, Homo sapiens
tgagtggttcctcgc

SEQ ID NO: 19464 - DNA, 15 bp, Homo sapiens
gtgagtggttcctcg

SEQ ID NO: 19465 - DNA, 15 bp, Homo sapiens
tgtgagtggttcctc

SEQ ID NO: 19466 - DNA, 15 bp, Homo sapiens
gtgtgagtggttcct

SEQ ID NO: 19467 - DNA, 15 bp, Homo sapiens
agtgtgagtggttcc

SEQ ID NO: 19468 - DNA, 15 bp, Homo sapiens
cagtgtgagtggttc

SEQ ID NO: 19469 - DNA, 15 bp, Homo sapiens
gcagtgtgagtggtt

SEQ ID NO: 19470 - DNA, 15 bp, Homo sapiens
tgcagtgtgagtggt

SEQ ID NO: 19471 - DNA, 15 bp, Homo sapiens
ttgcagtgtgagtgg

SEQ ID NO: 19472 - DNA, 15 bp, Homo sapiens
tttgcagtgtgagtg

SEQ ID NO: 19473 - DNA, 15 bp, Homo sapiens
atttgcagtgtgagt

SEQ ID NO: 19474 - DNA, 15 bp, Homo sapiens
catttgcagtgtgag

SEQ ID NO: 19475 - DNA, 15 bp, Homo sapiens
tcatttgcagtgtga

SEQ ID NO: 19476 - DNA, 15 bp, Homo sapiens
gtcatttgcagtgtg

SEQ ID NO: 19477 - DNA, 15 bp, Homo sapiens
tgtcatttgcagtgt

SEQ ID NO: 19478 - DNA, 15 bp, Homo sapiens
ctgtcatttgcagtg

SEQ ID NO: 19479 - DNA, 15 bp, Homo sapiens
gctgtcatttgcagt

SEQ ID NO: 19480 - DNA, 15 bp, Homo sapiens
agctgtcatttgcag

SEQ ID NO: 19481 - DNA, 15 bp, Homo sapiens
gagctgtcatttgca

SEQ ID NO: 19482 - DNA, 15 bp, Homo sapiens
ggagctgtcatttgc

SEQ ID NO: 19483 - DNA, 15 bp, Homo sapiens
aggagctgtcatttg

SEQ ID NO: 19484 - DNA, 15 bp, Homo sapiens
caggagctgtcattt

SEQ ID NO: 19485 - DNA, 15 bp, Homo sapiens
ccaggagctgtcatt

SEQ ID NO: 19486 - DNA, 15 bp, Homo sapiens
gccaggagctgtcat

SEQ ID NO: 19487 - DNA, 15 bp, Homo sapiens
agccaggagctgtca

SEQ ID NO: 19488 - DNA, 15 bp, Homo sapiens
gagccaggagctgtc

SEQ ID NO: 19489 - DNA, 15 bp, Homo sapiens
tgagccaggagctgt

SEQ ID NO: 19490 - DNA, 15 bp, Homo sapiens
ctgagccaggagctg

SEQ ID NO: 19491 - DNA, 15 bp, Homo sapiens
actgagccaggagct

SEQ ID NO: 19492 - DNA, 15 bp, Homo sapiens
gactgagccaggagc

SEQ ID NO: 19493 - DNA, 15 bp, Homo sapiens
agactgagccaggag

SEQ ID NO: 19494 - DNA, 15 bp, Homo sapiens
aagactgagccagga

SEQ ID NO: 19495 - DNA, 15 bp, Homo sapiens
taagactgagccagg

SEQ ID NO: 19496 - DNA, 15 bp, Homo sapiens
ctaagactgagccag

SEQ ID NO: 19497 - DNA, 15 bp, Homo sapiens
actaagactgagcca

SEQ ID NO: 19498 - DNA, 15 bp, Homo sapiens
cactaagactgagcc

SEQ ID NO: 19499 - DNA, 15 bp, Homo sapiens
acactaagactgagc

SEQ ID NO: 19500 - DNA, 15 bp, Homo sapiens
gacactaagactgag

SEQ ID NO: 19501 - DNA, 15 bp, Homo sapiens
tgacactaagactga

SEQ ID NO: 19502 - DNA, 15 bp, Homo sapiens
atgacactaagactg

SEQ ID NO: 19503 - DNA, 15 bp, Homo sapiens
tatgacactaagact

SEQ ID NO: 19504 - DNA, 15 bp, Homo sapiens
gtatgacactaagac

SEQ ID NO: 19505 - DNA, 15 bp, Homo sapiens
agtatgacactaaga

SEQ ID NO: 19506 - DNA, 15 bp, Homo sapiens
aagtatgacactaag

SEQ ID NO: 19507 - DNA, 15 bp, Homo sapiens
caagtatgacactaa

SEQ ID NO: 19508 - DNA, 15 bp, Homo sapiens
gcaagtatgacacta

SEQ ID NO: 19509 - DNA, 15 bp, Homo sapiens
ggcaagtatgacact

SEQ ID NO: 19510 - DNA, 15 bp, Homo sapiens
aggcaagtatgacac

SEQ ID NO: 19511 - DNA, 15 bp, Homo sapiens
aaggcaagtatgaca

SEQ ID NO: 19512 - DNA, 15 bp, Homo sapiens
aaaggcaagtatgac

SEQ ID NO: 19513 - DNA, 15 bp, Homo sapiens
taaaggcaagtatga

SEQ ID NO: 19514 - DNA, 15 bp, Homo sapiens
ttaaaggcaagtatg

SEQ ID NO: 19515 - DNA, 15 bp, Homo sapiens
gttaaaggcaagtat

SEQ ID NO: 19516 - DNA, 15 bp, Homo sapiens
agttaaaggcaagta

SEQ ID NO: 19517 - DNA, 15 bp, Homo sapiens
cagttaaaggcaagt

SEQ ID NO: 19518 - DNA, 15 bp, Homo sapiens
ccagttaaaggcaag

SEQ ID NO: 19519 - DNA, 15 bp, Homo sapiens
gccagttaaaggcaa

SEQ ID NO: 19520 - DNA, 15 bp, Homo sapiens
tgccagttaaaggca

SEQ ID NO: 19521 - DNA, 15 bp, Homo sapiens
ttgccagttaaaggc

SEQ ID NO: 19522 - DNA, 15 bp, Homo sapiens
gttgccagttaaagg

SEQ ID NO: 19523 - DNA, 15 bp, Homo sapiens
agttgccagttaaag

SEQ ID NO: 19524 - DNA, 15 bp, Homo sapiens
gagttgccagttaaa

SEQ ID NO: 19525 - DNA, 15 bp, Homo sapiens
ggagttgccagttaa

SEQ ID NO: 19526 - DNA, 15 bp, Homo sapiens
gggagttgccagtta

SEQ ID NO: 19527 - DNA, 15 bp, Homo sapiens
ggggagttgccagtt

SEQ ID NO: 19528 - DNA, 15 bp, Homo sapiens
aggggagttgccagt

SEQ ID NO: 19529 - DNA, 15 bp, Homo sapiens
caggggagttgccag

SEQ ID NO: 19530 - DNA, 15 bp, Homo sapiens
gcaggggagttgcca

SEQ ID NO: 19531 - DNA, 15 bp, Homo sapiens
tgcaggggagttgcc

SEQ ID NO: 19532 - DNA, 15 bp, Homo sapiens
ttgcaggggagttgc

SEQ ID NO: 19533 - DNA, 15 bp, Homo sapiens
attgcaggggagttg

SEQ ID NO: 19534 - DNA, 15 bp, Homo sapiens
tattgcaggggagtt

SEQ ID NO: 19535 - DNA, 15 bp, Homo sapiens
gtattgcaggggagt

SEQ ID NO: 19536 - DNA, 15 bp, Homo sapiens
tgtattgcaggggag

SEQ ID NO: 19537 - DNA, 15 bp, Homo sapiens
ctgtattgcagggga

SEQ ID NO: 19538 - DNA, 15 bp, Homo sapiens
cctgtattgcagggg

SEQ ID NO: 19539 - DNA, 15 bp, Homo sapiens
ccctgtattgcaggg

SEQ ID NO: 19540 - DNA, 15 bp, Homo sapiens
tccctgtattgcagg

SEQ ID NO: 19541 - DNA, 15 bp, Homo sapiens
atccctgtattgcag

SEQ ID NO: 19542 - DNA, 15 bp, Homo sapiens
aatccctgtattgca

SEQ ID NO: 19543 - DNA, 15 bp, Homo sapiens
caatccctgtattgc

SEQ ID NO: 19544 - DNA, 15 bp, Homo sapiens
acaatccctgtattg

SEQ ID NO: 19545 - DNA, 15 bp, Homo sapiens
gacaatccctgtatt

SEQ ID NO: 19546 - DNA, 15 bp, Homo sapiens
tgacaatccctgtat

SEQ ID NO: 19547 - DNA, 15 bp, Homo sapiens
atgacaatccctgta

SEQ ID NO: 19548 - DNA, 15 bp, Homo sapiens
gatgacaatccctgt

SEQ ID NO: 19549 - DNA, 15 bp, Homo sapiens
agatgacaatccctg

SEQ ID NO: 19550 - DNA, 15 bp, Homo sapiens
aagatgacaatccct

SEQ ID NO: 19551 - DNA, 15 bp, Homo sapiens
aaagatgacaatccc

SEQ ID NO: 19552 - DNA, 15 bp, Homo sapiens
taaagatgacaatcc

SEQ ID NO: 19553 - DNA, 15 bp, Homo sapiens
ctaaagatgacaatc

SEQ ID NO: 19554 - DNA, 15 bp, Homo sapiens
actaaagatgacaat

SEQ ID NO: 19555 - DNA, 15 bp, Homo sapiens
gactaaagatgacaa

SEQ ID NO: 19556 - DNA, 15 bp, Homo sapiens
ggactaaagatgaca

SEQ ID NO: 19557 - DNA, 15 bp, Homo sapiens
aggactaaagatgac

SEQ ID NO: 19558 - DNA, 15 bp, Homo sapiens
caggactaaagatga

SEQ ID NO: 19559 - DNA, 15 bp, Homo sapiens
tcaggactaaagatg

SEQ ID NO: 19560 - DNA, 15 bp, Homo sapiens
gtcaggactaaagat

SEQ ID NO: 19561 - DNA, 15 bp, Homo sapiens
agtcaggactaaaga

SEQ ID NO: 19562 - DNA, 15 bp, Homo sapiens
aagtcaggactaaag

SEQ ID NO: 19563 - DNA, 15 bp, Homo sapiens
aaagtcaggactaaa

SEQ ID NO: 19564 - DNA, 15 bp, Homo sapiens
gaaagtcaggactaa

SEQ ID NO: 19565 - DNA, 15 bp, Homo sapiens
ggaaagtcaggacta

SEQ ID NO: 19566 - DNA, 15 bp, Homo sapiens
tggaaagtcaggact

SEQ ID NO: 19567 - DNA, 15 bp, Homo sapiens
ttggaaagtcaggac

SEQ ID NO: 19568 - DNA, 15 bp, Homo sapiens
attggaaagtcagga

SEQ ID NO: 19569 - DNA, 15 bp, Homo sapiens
aattggaaagtcagg

SEQ ID NO: 19570 - DNA, 15 bp, Homo sapiens
gaattggaaagtcag

SEQ ID NO: 19571 - DNA, 15 bp, Homo sapiens
ggaattggaaagtca

SEQ ID NO: 19572 - DNA, 15 bp, Homo sapiens
tggaattggaaagtc

SEQ ID NO: 19573 - DNA, 15 bp, Homo sapiens
atggaattggaaagt

SEQ ID NO: 19574 - DNA, 15 bp, Homo sapiens
gatggaattggaaag

SEQ ID NO: 19575 - DNA, 15 bp, Homo sapiens
agatggaattggaaa

SEQ ID NO: 19576 - DNA, 15 bp, Homo sapiens
aagatggaattggaa

SEQ ID NO: 19577 - DNA, 15 bp, Homo sapiens
caagatggaattgga

SEQ ID NO: 19578 - DNA, 15 bp, Homo sapiens
ccaagatggaattgg

SEQ ID NO: 19579 - DNA, 15 bp, Homo sapiens
tccaagatggaattg

SEQ ID NO: 19580 - DNA, 15 bp, Homo sapiens
atccaagatggaatt

SEQ ID NO: 19581 - DNA, 15 bp, Homo sapiens
catccaagatggaat

SEQ ID NO: 19582 - DNA, 15 bp, Homo sapiens
acatccaagatggaa

SEQ ID NO: 19583 - DNA, 15 bp, Homo sapiens
cacatccaagatgga

SEQ ID NO: 19584 - DNA, 15 bp, Homo sapiens
gcacatccaagatgg

SEQ ID NO: 19585 - DNA, 15 bp, Homo sapiens
agcacatccaagatg

SEQ ID NO: 19586 - DNA, 15 bp, Homo sapiens
tagcacatccaagat

SEQ ID NO: 19587 - DNA, 15 bp, Homo sapiens
gtagcacatccaaga

SEQ ID NO: 19588 - DNA, 15 bp, Homo sapiens
ggtagcacatccaag

SEQ ID NO: 19589 - DNA, 15 bp, Homo sapiens
gggtagcacatccaa

SEQ ID NO: 19590 - DNA, 15 bp, Homo sapiens
agggtagcacatcca

SEQ ID NO: 19591 - DNA, 15 bp, Homo sapiens
cagggtagcacatcc

SEQ ID NO: 19592 - DNA, 15 bp, Homo sapiens
ccagggtagcacatc

SEQ ID NO: 19593 - DNA, 15 bp, Homo sapiens
gccagggtagcacat

SEQ ID NO: 19594 - DNA, 15 bp, Homo sapiens
ggccagggtagcaca

SEQ ID NO: 19595 - DNA, 15 bp, Homo sapiens
tggccagggtagcac

SEQ ID NO: 19596 - DNA, 15 bp, Homo sapiens
ctggccagggtagca

SEQ ID NO: 19597 - DNA, 15 bp, Homo sapiens
tctggccagggtagc

SEQ ID NO: 19598 - DNA, 15 bp, Homo sapiens
ttctggccagggtag

SEQ ID NO: 19599 - DNA, 15 bp, Homo sapiens
cttctggccagggta

SEQ ID NO: 19600 - DNA, 15 bp, Homo sapiens
gcttctggccagggt

SEQ ID NO: 19601 - DNA, 15 bp, Homo sapiens
ggcttctggccaggg

SEQ ID NO: 19602 - DNA, 15 bp, Homo sapiens
tggcttctggccagg

SEQ ID NO: 19603 - DNA, 15 bp, Homo sapiens
gtggcttctggccag

SEQ ID NO: 19604 - DNA, 15 bp, Homo sapiens
agtggcttctggcca

SEQ ID NO: 19605 - DNA, 15 bp, Homo sapiens
cagtggcttctggcc

SEQ ID NO: 19606 - DNA, 15 bp, Homo sapiens
ccagtggcttctggc

SEQ ID NO: 19607 - DNA, 15 bp, Homo sapiens
cccagtggcttctgg

SEQ ID NO: 19608 - DNA, 15 bp, Homo sapiens
acccagtggcttctg

SEQ ID NO: 19609 - DNA, 15 bp, Homo sapiens
cacccagtggcttct

SEQ ID NO: 19610 - DNA, 15 bp, Homo sapiens
acacccagtggcttc

SEQ ID NO: 19611 - DNA, 15 bp, Homo sapiens
cacacccagtggctt

SEQ ID NO: 19612 - DNA, 15 bp, Homo sapiens
gcacacccagtggct

SEQ ID NO: 19613 - DNA, 15 bp, Homo sapiens
ggcacacccagtggc

SEQ ID NO: 19614 - DNA, 15 bp, Homo sapiens
gggcacacccagtgg

SEQ ID NO: 19615 - DNA, 15 bp, Homo sapiens
agggcacacccagtg

SEQ ID NO: 19616 - DNA, 15 bp, Homo sapiens
aagggcacacccagt

SEQ ID NO: 19617 - DNA, 15 bp, Homo sapiens
taagggcacacccag

SEQ ID NO: 19618 - DNA, 15 bp, Homo sapiens
gtaagggcacaccca

SEQ ID NO: 19619 - DNA, 15 bp, Homo sapiens
agtaagggcacaccc

SEQ ID NO: 19620 - DNA, 15 bp, Homo sapiens
aagtaagggcacacc

SEQ ID NO: 19621 - DNA, 15 bp, Homo sapiens
aaagtaagggcacac

SEQ ID NO: 19622 - DNA, 15 bp, Homo sapiens
caaagtaagggcaca

SEQ ID NO: 19623 - DNA, 15 bp, Homo sapiens
tcaaagtaagggcac

SEQ ID NO: 19624 - DNA, 15 bp, Homo sapiens
gtcaaagtaagggca

SEQ ID NO: 19625 - DNA, 15 bp, Homo sapiens
ggtcaaagtaagggc

SEQ ID NO: 19626 - DNA, 15 bp, Homo sapiens
aggtcaaagtaaggg

SEQ ID NO: 19627 - DNA, 15 bp, Homo sapiens
aaggtcaaagtaagg

SEQ ID NO: 19628 - DNA, 15 bp, Homo sapiens
aaaggtcaaagtaag

SEQ ID NO: 19629 - DNA, 15 bp, Homo sapiens
gaaaggtcaaagtaa

SEQ ID NO: 19630 - DNA, 15 bp, Homo sapiens
tgaaaggtcaaagta

SEQ ID NO: 19631 - DNA, 15 bp, Homo sapiens
gtgaaaggtcaaagt

SEQ ID NO: 19632 - DNA, 15 bp, Homo sapiens
ggtgaaaggtcaaag

SEQ ID NO: 19633 - DNA, 15 bp, Homo sapiens
tggtgaaaggtcaaa

SEQ ID NO: 19634 - DNA, 15 bp, Homo sapiens
ctggtgaaaggtcaa

SEQ ID NO: 19635 - DNA, 15 bp, Homo sapiens
actggtgaaaggtca

SEQ ID NO: 19636 - DNA, 15 bp, Homo sapiens
tactggtgaaaggtc

SEQ ID NO: 19637 - DNA, 15 bp, Homo sapiens
ttactggtgaaaggt

SEQ ID NO: 19638 - DNA, 15 bp, Homo sapiens
tttactggtgaaagg

SEQ ID NO: 19639 - DNA, 15 bp, Homo sapiens
atttactggtgaaag

SEQ ID NO: 19640 - DNA, 15 bp, Homo sapiens
aatttactggtgaaa

SEQ ID NO: 19641 - DNA, 15 bp, Homo sapiens
gaatttactggtgaa

SEQ ID NO: 19642 - DNA, 15 bp, Homo sapiens
ggaatttactggtga

SEQ ID NO: 19643 - DNA, 15 bp, Homo sapiens
tggaatttactggtg

SEQ ID NO: 19644 - DNA, 15 bp, Homo sapiens
atggaatttactggt

SEQ ID NO: 19645 - DNA, 15 bp, Homo sapiens
gatggaatttactgg

SEQ ID NO: 19646 - DNA, 15 bp, Homo sapiens
agatggaatttactg

SEQ ID NO: 19647 - DNA, 15 bp, Homo sapiens
aagatggaatttact

SEQ ID NO: 19648 - DNA, 15 bp, Homo sapiens
taagatggaatttac

SEQ ID NO: 19649 - DNA, 15 bp, Homo sapiens
ctaagatggaattta

SEQ ID NO: 19650 - DNA, 15 bp, Homo sapiens
cctaagatggaattt

SEQ ID NO: 19651 - DNA, 15 bp, Homo sapiens
ccctaagatggaatt

SEQ ID NO: 19652 - DNA, 15 bp, Homo sapiens
cccctaagatggaat

SEQ ID NO: 19653 - DNA, 15 bp, Homo sapiens
ccccctaagatggaa

SEQ ID NO: 19654 - DNA, 15 bp, Homo sapiens
gccccctaagatgga

SEQ ID NO: 19655 - DNA, 15 bp, Homo sapiens
agccccctaagatgg

SEQ ID NO: 19656 - DNA, 15 bp, Homo sapiens
aagccccctaagatg

SEQ ID NO: 19657 - DNA, 15 bp, Homo sapiens
aaagccccctaagat

SEQ ID NO: 19658 - DNA, 15 bp, Homo sapiens
gaaagccccctaaga

SEQ ID NO: 19659 - DNA, 15 bp, Homo sapiens
agaaagccccctaag

SEQ ID NO: 19660 - DNA, 15 bp, Homo sapiens
gagaaagccccctaa

SEQ ID NO: 19661 - DNA, 15 bp, Homo sapiens
agagaaagcccccta

SEQ ID NO: 19662 - DNA, 15 bp, Homo sapiens
tagagaaagccccct

SEQ ID NO: 19663 - DNA, 15 bp, Homo sapiens
ttagagaaagccccc

SEQ ID NO: 19664 - DNA, 15 bp, Homo sapiens
attagagaaagcccc

SEQ ID NO: 19665 - DNA, 15 bp, Homo sapiens
aattagagaaagccc

SEQ ID NO: 19666 - DNA, 15 bp, Homo sapiens
caattagagaaagcc

SEQ ID NO: 19667 - DNA, 15 bp, Homo sapiens
gcaattagagaaagc

SEQ ID NO: 19668 - DNA, 15 bp, Homo sapiens
agcaattagagaaag

SEQ ID NO: 19669 - DNA, 15 bp, Homo sapiens
aagcaattagagaaa

SEQ ID NO: 19670 - DNA, 15 bp, Homo sapiens
gaagcaattagagaa

SEQ ID NO: 19671 - DNA, 15 bp, Homo sapiens
tgaagcaattagaga

SEQ ID NO: 19672 - DNA, 15 bp, Homo sapiens
ctgaagcaattagag

SEQ ID NO: 19673 - DNA, 15 bp, Homo sapiens
tctgaagcaattaga

SEQ ID NO: 19674 - DNA, 15 bp, Homo sapiens
gtctgaagcaattag

SEQ ID NO: 19675 - DNA, 15 bp, Homo sapiens
agtctgaagcaatta

SEQ ID NO: 19676 - DNA, 15 bp, Homo sapiens
gagtctgaagcaatt

SEQ ID NO: 19677 - DNA, 15 bp, Homo sapiens
ggagtctgaagcaat

SEQ ID NO: 19678 - DNA, 15 bp, Homo sapiens
gggagtctgaagcaa

SEQ ID NO: 19679 - DNA, 15 bp, Homo sapiens
agggagtctgaagca

SEQ ID NO: 19680 - DNA, 15 bp, Homo sapiens
gagggagtctgaagc

SEQ ID NO: 19681 - DNA, 15 bp, Homo sapiens
ggagggagtctgaag

SEQ ID NO: 19682 - DNA, 15 bp, Homo sapiens
aggagggagtctgaa

SEQ ID NO: 19683 - DNA, 15 bp, Homo sapiens
caggagggagtctga

SEQ ID NO: 19684 - DNA, 15 bp, Homo sapiens
tcaggagggagtctg

SEQ ID NO: 19685 - DNA, 15 bp, Homo sapiens
gtcaggagggagtct

SEQ ID NO: 19686 - DNA, 15 bp, Homo sapiens
ggtcaggagggagtc

SEQ ID NO: 19687 - DNA, 15 bp, Homo sapiens
gggtcaggagggagt

SEQ ID NO: 19688 - DNA, 15 bp, Homo sapiens
agggtcaggagggag

SEQ ID NO: 19689 - DNA, 15 bp, Homo sapiens
aagggtcaggaggga

SEQ ID NO: 19690 - DNA, 15 bp, Homo sapiens
aaagggtcaggaggg

SEQ ID NO: 19691 - DNA, 15 bp, Homo sapiens
taaagggtcaggagg

SEQ ID NO: 19692 - DNA, 15 bp, Homo sapiens
ataaagggtcaggag

SEQ ID NO: 19693 - DNA, 15 bp, Homo sapiens
tataaagggtcagga

SEQ ID NO: 19694 - DNA, 15 bp, Homo sapiens
gtataaagggtcagg

SEQ ID NO: 19695 - DNA, 15 bp, Homo sapiens
ggtataaagggtcag

SEQ ID NO: 19696 - DNA, 15 bp, Homo sapiens
tggtataaagggtca

SEQ ID NO: 19697 - DNA, 15 bp, Homo sapiens
gtggtataaagggtc

SEQ ID NO: 19698 - DNA, 15 bp, Homo sapiens
ggtggtataaagggt

SEQ ID NO: 19699 - DNA, 15 bp, Homo sapiens
gggtggtataaaggg

SEQ ID NO: 19700 - DNA, 15 bp, Homo sapiens
ggggtggtataaagg

SEQ ID NO: 19701 - DNA, 15 bp, Homo sapiens
tggggtggtataaag

SEQ ID NO: 19702 - DNA, 15 bp, Homo sapiens
ttggggtggtataaa

SEQ ID NO: 19703 - DNA, 15 bp, Homo sapiens
tttggggtggtataa

SEQ ID NO: 19704 - DNA, 15 bp, Homo sapiens
ttttggggtggtata

SEQ ID NO: 19705 - DNA, 15 bp, Homo sapiens
gttttggggtggtat

SEQ ID NO: 19706 - DNA, 15 bp, Homo sapiens
ggttttggggtggta

SEQ ID NO: 19707 - DNA, 15 bp, Homo sapiens
tggttttggggtggt

SEQ ID NO: 19708 - DNA, 15 bp, Homo sapiens
ttggttttggggtgg

SEQ ID NO: 19709 - DNA, 15 bp, Homo sapiens
tttggttttggggtg

SEQ ID NO: 19710 - DNA, 15 bp, Homo sapiens
ctttggttttggggt

SEQ ID NO: 19711 - DNA, 15 bp, Homo sapiens
cctttggttttgggg

SEQ ID NO: 19712 - DNA, 15 bp, Homo sapiens
gcctttggttttggg

SEQ ID NO: 19713 - DNA, 15 bp, Homo sapiens
ggcctttggttttgg

SEQ ID NO: 19714 - DNA, 15 bp, Homo sapiens
gggcctttggttttg

SEQ ID NO: 19715 - DNA, 15 bp, Homo sapiens
agggcctttggtttt

SEQ ID NO: 19716 - DNA, 15 bp, Homo sapiens
cagggcctttggttt

SEQ ID NO: 19717 - DNA, 15 bp, Homo sapiens
ccagggcctttggtt

SEQ ID NO: 19718 - DNA, 15 bp, Homo sapiens
accagggcctttggt

SEQ ID NO: 19719 - DNA, 15 bp, Homo sapiens
aaccagggcctttgg

SEQ ID NO: 19720 - DNA, 15 bp, Homo sapiens
aaaccagggcctttg

SEQ ID NO: 19721 - DNA, 15 bp, Homo sapiens
taaaccagggccttt

SEQ ID NO: 19722 - DNA, 15 bp, Homo sapiens
ctaaaccagggcctt

SEQ ID NO: 19723 - DNA, 15 bp, Homo sapiens
cctaaaccagggcct

SEQ ID NO: 19724 - DNA, 15 bp, Homo sapiens
tcctaaaccagggcc

SEQ ID NO: 19725 - DNA, 15 bp, Homo sapiens
ctcctaaaccagggc

SEQ ID NO: 19726 - DNA, 15 bp, Homo sapiens
gctcctaaaccaggg

SEQ ID NO: 19727 - DNA, 15 bp, Homo sapiens
agctcctaaaccagg

SEQ ID NO: 19728 - DNA, 15 bp, Homo sapiens
cagctcctaaaccag

SEQ ID NO: 19729 - DNA, 15 bp, Homo sapiens
tcagctcctaaacca

SEQ ID NO: 19730 - DNA, 15 bp, Homo sapiens
ttcagctcctaaacc

SEQ ID NO: 19731 - DNA, 15 bp, Homo sapiens
attcagctcctaaac

SEQ ID NO: 19732 - DNA, 15 bp, Homo sapiens
aattcagctcctaaa

SEQ ID NO: 19733 - DNA, 15 bp, Homo sapiens
caattcagctcctaa

SEQ ID NO: 19734 - DNA, 15 bp, Homo sapiens
acaattcagctccta

SEQ ID NO: 19735 - DNA, 15 bp, Homo sapiens
tacaattcagctcct

SEQ ID NO: 19736 - DNA, 15 bp, Homo sapiens
ctacaattcagctcc

SEQ ID NO: 19737 - DNA, 15 bp, Homo sapiens
gctacaattcagctc

SEQ ID NO: 19738 - DNA, 15 bp, Homo sapiens
tgctacaattcagct

SEQ ID NO: 19739 - DNA, 15 bp, Homo sapiens
ctgctacaattcagc

SEQ ID NO: 19740 - DNA, 15 bp, Homo sapiens
gctgctacaattcag

SEQ ID NO: 19741 - DNA, 15 bp, Homo sapiens
ggctgctacaattca

SEQ ID NO: 19742 - DNA, 15 bp, Homo sapiens
cggctgctacaattc

SEQ ID NO: 19743 - DNA, 15 bp, Homo sapiens
acggctgctacaatt

SEQ ID NO: 19744 - DNA, 15 bp, Homo sapiens
aacggctgctacaat

SEQ ID NO: 19745 - DNA, 15 bp, Homo sapiens
gaacggctgctacaa

SEQ ID NO: 19746 - DNA, 15 bp, Homo sapiens
ggaacggctgctaca

SEQ ID NO: 19747 - DNA, 15 bp, Homo sapiens
aggaacggctgctac

SEQ ID NO: 19748 - DNA, 15 bp, Homo sapiens
gaggaacggctgcta

SEQ ID NO: 19749 - DNA, 15 bp, Homo sapiens
tgaggaacggctgct

SEQ ID NO: 19750 - DNA, 15 bp, Homo sapiens
ctgaggaacggctgc

SEQ ID NO: 19751 - DNA, 15 bp, Homo sapiens
actgaggaacggctg

SEQ ID NO: 19752 - DNA, 15 bp, Homo sapiens
tactgaggaacggct

SEQ ID NO: 19753 - DNA, 15 bp, Homo sapiens
atactgaggaacggc

SEQ ID NO: 19754 - DNA, 15 bp, Homo sapiens
gatactgaggaacgg

SEQ ID NO: 19755 - DNA, 15 bp, Homo sapiens
agatactgaggaacg

SEQ ID NO: 19756 - DNA, 15 bp, Homo sapiens
tagatactgaggaac

SEQ ID NO: 19757 - DNA, 15 bp, Homo sapiens
ctagatactgaggaa

SEQ ID NO: 19758 - DNA, 15 bp, Homo sapiens
tctagatactgagga

SEQ ID NO: 19759 - DNA, 15 bp, Homo sapiens
atctagatactgagg

SEQ ID NO: 19760 - DNA, 15 bp, Homo sapiens
gatctagatactgag

SEQ ID NO: 19761 - DNA, 15 bp, Homo sapiens
cgatctagatactga

SEQ ID NO: 19762 - DNA, 15 bp, Homo sapiens
gcgatctagatactg

SEQ ID NO: 19763 - DNA, 15 bp, Homo sapiens
tgcgatctagatact

SEQ ID NO: 19764 - DNA, 15 bp, Homo sapiens
ctgcgatctagatac

SEQ ID NO: 19765 - DNA, 15 bp, Homo sapiens
cctgcgatctagata

SEQ ID NO: 19766 - DNA, 15 bp, Homo sapiens
ccctgcgatctagat

SEQ ID NO: 19767 - DNA, 15 bp, Homo sapiens
tccctgcgatctaga

SEQ ID NO: 19768 - DNA, 15 bp, Homo sapiens
ctccctgcgatctag

SEQ ID NO: 19769 - DNA, 15 bp, Homo sapiens
tctccctgcgatcta

SEQ ID NO: 19770 - DNA, 15 bp, Homo sapiens
atctccctgcgatct

SEQ ID NO: 19771 - DNA, 15 bp, Homo sapiens
aatctccctgcgatc

SEQ ID NO: 19772 - DNA, 15 bp, Homo sapiens
aaatctccctgcgat

SEQ ID NO: 19773 - DNA, 15 bp, Homo sapiens
gaaatctccctgcga

SEQ ID NO: 19774 - DNA, 15 bp, Homo sapiens
tgaaatctccctgcg

SEQ ID NO: 19775 - DNA, 15 bp, Homo sapiens
gtgaaatctccctgc

SEQ ID NO: 19776 - DNA, 15 bp, Homo sapiens
agtgaaatctccctg

SEQ ID NO: 19777 - DNA, 15 bp, Homo sapiens
cagtgaaatctccct

SEQ ID NO: 19778 - DNA, 15 bp, Homo sapiens
ccagtgaaatctccc

SEQ ID NO: 19779 - DNA, 15 bp, Homo sapiens
tccagtgaaatctcc

SEQ ID NO: 19780 - DNA, 15 bp, Homo sapiens
ctccagtgaaatctc

SEQ ID NO: 19781 - DNA, 15 bp, Homo sapiens
gctccagtgaaatct

SEQ ID NO: 19782 - DNA, 15 bp, Homo sapiens
agctccagtgaaatc

SEQ ID NO: 19783 - DNA, 15 bp, Homo sapiens
cagctccagtgaaat

SEQ ID NO: 19784 - DNA, 15 bp, Homo sapiens
ccagctccagtgaaa

SEQ ID NO: 19785 - DNA, 15 bp, Homo sapiens
gccagctccagtgaa

SEQ ID NO: 19786 - DNA, 15 bp, Homo sapiens
agccagctccagtga

SEQ ID NO: 19787 - DNA, 15 bp, Homo sapiens
cagccagctccagtg

SEQ ID NO: 19788 - DNA, 15 bp, Homo sapiens
tcagccagctccagt

SEQ ID NO: 19789 - DNA, 15 bp, Homo sapiens
ttcagccagctccag

SEQ ID NO: 19790 - DNA, 15 bp, Homo sapiens
cttcagccagctcca

SEQ ID NO: 19791 - DNA, 15 bp, Homo sapiens
gcttcagccagctcc

SEQ ID NO: 19792 - DNA, 15 bp, Homo sapiens
agcttcagccagctc

SEQ ID NO: 19793 - DNA, 15 bp, Homo sapiens
cagcttcagccagct

SEQ ID NO: 19794 - DNA, 15 bp, Homo sapiens
acagcttcagccagc

SEQ ID NO: 19795 - DNA, 15 bp, Homo sapiens
aacagcttcagccag

SEQ ID NO: 19796 - DNA, 15 bp, Homo sapiens
caacagcttcagcca

SEQ ID NO: 19797 - DNA, 15 bp, Homo sapiens
ccaacagcttcagcc

SEQ ID NO: 19798 - DNA, 15 bp, Homo sapiens
gccaacagcttcagc

SEQ ID NO: 19799 - DNA, 15 bp, Homo sapiens
cgccaacagcttcag

SEQ ID NO: 19800 - DNA, 15 bp, Homo sapiens
gcgccaacagcttca

SEQ ID NO: 19801 - DNA, 15 bp, Homo sapiens
agcgccaacagcttc

SEQ ID NO: 19802 - DNA, 15 bp, Homo sapiens
aagcgccaacagctt

SEQ ID NO: 19803 - DNA, 15 bp, Homo sapiens
aaagcgccaacagct

SEQ ID NO: 19804 - DNA, 15 bp, Homo sapiens
caaagcgccaacagc

SEQ ID NO: 19805 - DNA, 15 bp, Homo sapiens
tcaaagcgccaacag

SEQ ID NO: 19806 - DNA, 15 bp, Homo sapiens
ctcaaagcgccaaca

SEQ ID NO: 19807 - DNA, 15 bp, Homo sapiens
gctcaaagcgccaac

SEQ ID NO: 19808 - DNA, 15 bp, Homo sapiens
tgctcaaagcgccaa

SEQ ID NO: 19809 - DNA, 15 bp, Homo sapiens
ctgctcaaagcgcca

SEQ ID NO: 19810 - DNA, 15 bp, Homo sapiens
gctgctcaaagcgcc

SEQ ID NO: 19811 - DNA, 15 bp, Homo sapiens
cgctgctcaaagcgc

SEQ ID NO: 19812 - DNA, 15 bp, Homo sapiens
acgctgctcaaagcg

SEQ ID NO: 19813 - DNA, 15 bp, Homo sapiens
aacgctgctcaaagc

SEQ ID NO: 19814 - DNA, 15 bp, Homo sapiens
caacgctgctcaaag

SEQ ID NO: 19815 - DNA, 15 bp, Homo sapiens
tcaacgctgctcaaa

SEQ ID NO: 19816 - DNA, 15 bp, Homo sapiens
ctcaacgctgctcaa

SEQ ID NO: 19817 - DNA, 15 bp, Homo sapiens
gctcaacgctgctca

SEQ ID NO: 19818 - DNA, 15 bp, Homo sapiens
ggctcaacgctgctc

SEQ ID NO: 19819 - DNA, 15 bp, Homo sapiens
tggctcaacgctgct

SEQ ID NO: 19820 - DNA, 15 bp, Homo sapiens
atggctcaacgctgc

SEQ ID NO: 19821 - DNA, 15 bp, Homo sapiens
gatggctcaacgctg

SEQ ID NO: 19822 - DNA, 15 bp, Homo sapiens
tgatggctcaacgct

SEQ ID NO: 19823 - DNA, 15 bp, Homo sapiens
ctgatggctcaacgc

SEQ ID NO: 19824 - DNA, 15 bp, Homo sapiens
actgatggctcaacg

SEQ ID NO: 19825 - DNA, 15 bp, Homo sapiens
gactgatggctcaac

SEQ ID NO: 19826 - DNA, 15 bp, Homo sapiens
ggactgatggctcaa

SEQ ID NO: 19827 - DNA, 15 bp, Homo sapiens
aggactgatggctca

SEQ ID NO: 19828 - DNA, 15 bp, Homo sapiens
taggactgatggctc

SEQ ID NO: 19829 - DNA, 15 bp, Homo sapiens
ctaggactgatggct

SEQ ID NO: 19830 - DNA, 15 bp, Homo sapiens
actaggactgatggc

SEQ ID NO: 19831 - DNA, 15 bp, Homo sapiens
aactaggactgatgg

SEQ ID NO: 19832 - DNA, 15 bp, Homo sapiens
gaactaggactgatg

SEQ ID NO: 19833 - DNA, 15 bp, Homo sapiens
agaactaggactgat

SEQ ID NO: 19834 - DNA, 15 bp, Homo sapiens
cagaactaggactga

SEQ ID NO: 19835 - DNA, 15 bp, Homo sapiens
gcagaactaggactg

SEQ ID NO: 19836 - DNA, 15 bp, Homo sapiens
cgcagaactaggact

SEQ ID NO: 19837 - DNA, 15 bp, Homo sapiens
acgcagaactaggac

SEQ ID NO: 19838 - DNA, 15 bp, Homo sapiens
gacgcagaactagga

SEQ ID NO: 19839 - DNA, 15 bp, Homo sapiens
agacgcagaactagg

SEQ ID NO: 19840 - DNA, 15 bp, Homo sapiens
aagacgcagaactag

SEQ ID NO: 19841 - DNA, 15 bp, Homo sapiens
aaagacgcagaacta

SEQ ID NO: 19842 - DNA, 15 bp, Homo sapiens
caaagacgcagaact

SEQ ID NO: 19843 - DNA, 15 bp, Homo sapiens
gcaaagacgcagaac

SEQ ID NO: 19844 - DNA, 15 bp, Homo sapiens
ggcaaagacgcagaa

SEQ ID NO: 19845 - DNA, 15 bp, Homo sapiens
gggcaaagacgcaga

SEQ ID NO: 19846 - DNA, 15 bp, Homo sapiens
ggggcaaagacgcag

SEQ ID NO: 19847 - DNA, 15 bp, Homo sapiens
tggggcaaagacgca

SEQ ID NO: 19848 - DNA, 15 bp, Homo sapiens
gtggggcaaagacgc

SEQ ID NO: 19849 - DNA, 15 bp, Homo sapiens
agtggggcaaagacg

SEQ ID NO: 19850 - DNA, 15 bp, Homo sapiens
cagtggggcaaagac

SEQ ID NO: 19851 - DNA, 15 bp, Homo sapiens
gcagtggggcaaaga

SEQ ID NO: 19852 - DNA, 15 bp, Homo sapiens
tgcagtggggcaaag

SEQ ID NO: 19853 - DNA, 15 bp, Homo sapiens
ctgcagtggggcaaa

SEQ ID NO: 19854 - DNA, 15 bp, Homo sapiens
gctgcagtggggcaa

SEQ ID NO: 19855 - DNA, 15 bp, Homo sapiens
agctgcagtggggca

SEQ ID NO: 19856 - DNA, 15 bp, Homo sapiens
aagctgcagtggggc

SEQ ID NO: 19857 - DNA, 15 bp, Homo sapiens
aaagctgcagtgggg

SEQ ID NO: 19858 - DNA, 15 bp, Homo sapiens
aaaagctgcagtggg

SEQ ID NO: 19859 - DNA, 15 bp, Homo sapiens
caaaagctgcagtgg

SEQ ID NO: 19860 - DNA, 15 bp, Homo sapiens
ccaaaagctgcagtg

SEQ ID NO: 19861 - DNA, 15 bp, Homo sapiens
gccaaaagctgcagt

SEQ ID NO: 19862 - DNA, 15 bp, Homo sapiens
ggccaaaagctgcag

SEQ ID NO: 19863 - DNA, 15 bp, Homo sapiens
tggccaaaagctgca

SEQ ID NO: 19864 - DNA, 15 bp, Homo sapiens
gtggccaaaagctgc

SEQ ID NO: 19865 - DNA, 15 bp, Homo sapiens
agtggccaaaagctg

SEQ ID NO: 19866 - DNA, 15 bp, Homo sapiens
aagtggccaaaagct

SEQ ID NO: 19867 - DNA, 15 bp, Homo sapiens
caagtggccaaaagc

SEQ ID NO: 19868 - DNA, 15 bp, Homo sapiens
gcaagtggccaaaag

SEQ ID NO: 19869 - DNA, 15 bp, Homo sapiens
ggcaagtggccaaaa

SEQ ID NO: 19870 - DNA, 15 bp, Homo sapiens
gggcaagtggccaaa

SEQ ID NO: 19871 - DNA, 15 bp, Homo sapiens
ggggcaagtggccaa

SEQ ID NO: 19872 - DNA, 15 bp, Homo sapiens
tggggcaagtggcca

SEQ ID NO: 19873 - DNA, 15 bp, Homo sapiens
ctggggcaagtggcc

SEQ ID NO: 19874 - DNA, 15 bp, Homo sapiens
actggggcaagtggc

SEQ ID NO: 19875 - DNA, 15 bp, Homo sapiens
aactggggcaagtgg

SEQ ID NO: 19876 - DNA, 15 bp, Homo sapiens
aaactggggcaagtg

SEQ ID NO: 19877 - DNA, 15 bp, Homo sapiens
taaactggggcaagt

SEQ ID NO: 19878 - DNA, 15 bp, Homo sapiens
ctaaactggggcaag

SEQ ID NO: 19879 - DNA, 15 bp, Homo sapiens
actaaactggggcaa

SEQ ID NO: 19880 - DNA, 15 bp, Homo sapiens
cactaaactggggca

SEQ ID NO: 19881 - DNA, 15 bp, Homo sapiens
acactaaactggggc

SEQ ID NO: 19882 - DNA, 15 bp, Homo sapiens
gacactaaactgggg

SEQ ID NO: 19883 - DNA, 15 bp, Homo sapiens
tgacactaaactggg

SEQ ID NO: 19884 - DNA, 15 bp, Homo sapiens
gtgacactaaactgg

SEQ ID NO: 19885 - DNA, 15 bp, Homo sapiens
ggtgacactaaactg

SEQ ID NO: 19886 - DNA, 15 bp, Homo sapiens
tggtgacactaaact

SEQ ID NO: 19887 - DNA, 15 bp, Homo sapiens
ctggtgacactaaac

SEQ ID NO: 19888 - DNA, 15 bp, Homo sapiens
cctggtgacactaaa

SEQ ID NO: 19889 - DNA, 15 bp, Homo sapiens
gcctggtgacactaa

SEQ ID NO: 19890 - DNA, 15 bp, Homo sapiens
ggcctggtgacacta

SEQ ID NO: 19891 - DNA, 15 bp, Homo sapiens
gggcctggtgacact

SEQ ID NO: 19892 - DNA, 15 bp, Homo sapiens
ggggcctggtgacac

SEQ ID NO: 19893 - DNA, 15 bp, Homo sapiens
cggggcctggtgaca

SEQ ID NO: 19894 - DNA, 15 bp, Homo sapiens
tcggggcctggtgac

SEQ ID NO: 19895 - DNA, 15 bp, Homo sapiens
gtcggggcctggtga

SEQ ID NO: 19896 - DNA, 15 bp, Homo sapiens
agtcggggcctggtg

SEQ ID NO: 19897 - DNA, 15 bp, Homo sapiens
tagtcggggcctggt

SEQ ID NO: 19898 - DNA, 15 bp, Homo sapiens
atagtcggggcctgg

SEQ ID NO: 19899 - DNA, 15 bp, Homo sapiens
tatagtcggggcctg

SEQ ID NO: 19900 - DNA, 15 bp, Homo sapiens
ttatagtcggggcct

SEQ ID NO: 19901 - DNA, 15 bp, Homo sapiens
cttatagtcggggcc

SEQ ID NO: 19902 - DNA, 15 bp, Homo sapiens
gcttatagtcggggc

SEQ ID NO: 19903 - DNA, 15 bp, Homo sapiens
ggcttatagtcgggg

SEQ ID NO: 19904 - DNA, 15 bp, Homo sapiens
tggcttatagtcggg

SEQ ID NO: 19905 - DNA, 15 bp, Homo sapiens
gtggcttatagtcgg

SEQ ID NO: 19906 - DNA, 15 bp, Homo sapiens
tgtggcttatagtcg

SEQ ID NO: 19907 - DNA, 15 bp, Homo sapiens
ctgtggcttatagtc

SEQ ID NO: 19908 - DNA, 15 bp, Homo sapiens
actgtggcttatagt

SEQ ID NO: 19909 - DNA, 15 bp, Homo sapiens
tactgtggcttatag

SEQ ID NO: 19910 - DNA, 15 bp, Homo sapiens
ttactgtggcttata

SEQ ID NO: 19911 - DNA, 15 bp, Homo sapiens
attactgtggcttat

SEQ ID NO: 19912 - DNA, 15 bp, Homo sapiens
aattactgtggctta

SEQ ID NO: 19913 - DNA, 15 bp, Homo sapiens
aaattactgtggctt

SEQ ID NO: 19914 - DNA, 15 bp, Homo sapiens
aaaattactgtggct

SEQ ID NO: 19915 - DNA, 15 bp, Homo sapiens
aaaaattactgtggc

SEQ ID NO: 19916 - DNA, 15 bp, Homo sapiens
taaaaattactgtgg

SEQ ID NO: 19917 - DNA, 15 bp, Homo sapiens
ataaaaattactgtg

SEQ ID NO: 19918 - DNA, 15 bp, Homo sapiens
cataaaaattactgt

SEQ ID NO: 19919 - DNA, 15 bp, Homo sapiens
ccataaaaattactg

SEQ ID NO: 19920 - DNA, 15 bp, Homo sapiens
gccataaaaattact

SEQ ID NO: 19921 - DNA, 15 bp, Homo sapiens
agccataaaaattac

SEQ ID NO: 19922 - DNA, 15 bp, Homo sapiens
cagccataaaaatta

SEQ ID NO: 19923 - DNA, 15 bp, Homo sapiens
gcagccataaaaatt

SEQ ID NO: 19924 - DNA, 15 bp, Homo sapiens
tgcagccataaaaat

SEQ ID NO: 19925 - DNA, 15 bp, Homo sapiens
ctgcagccataaaaa

SEQ ID NO: 19926 - DNA, 15 bp, Homo sapiens
cctgcagccataaaa

SEQ ID NO: 19927 - DNA, 15 bp, Homo sapiens
acctgcagccataaa

SEQ ID NO: 19928 - DNA, 15 bp, Homo sapiens
tacctgcagccataa

SEQ ID NO: 19929 - DNA, 15 bp, Homo sapiens
atacctgcagccata

SEQ ID NO: 19930 - DNA, 15 bp, Homo sapiens
aatacctgcagccat

SEQ ID NO: 19931 - DNA, 15 bp, Homo sapiens
taatacctgcagcca

SEQ ID NO: 19932 - DNA, 15 bp, Homo sapiens
ctaatacctgcagcc

SEQ ID NO: 19933 - DNA, 15 bp, Homo sapiens
tctaatacctgcagc

SEQ ID NO: 19934 - DNA, 15 bp, Homo sapiens
ctctaatacctgcag

SEQ ID NO: 19935 - DNA, 15 bp, Homo sapiens
cctctaatacctgca

SEQ ID NO: 19936 - DNA, 15 bp, Homo sapiens
ccctctaatacctgc

SEQ ID NO: 19937 - DNA, 15 bp, Homo sapiens
gccctctaatacctg

SEQ ID NO: 19938 - DNA, 15 bp, Homo sapiens
tgccctctaatacct

SEQ ID NO: 19939 - DNA, 15 bp, Homo sapiens
ctgccctctaatacc

SEQ ID NO: 19940 - DNA, 15 bp, Homo sapiens
gctgccctctaatac

SEQ ID NO: 19941 - DNA, 15 bp, Homo sapiens
ggctgccctctaata

SEQ ID NO: 19942 - DNA, 15 bp, Homo sapiens
tggctgccctctaat

SEQ ID NO: 19943 - DNA, 15 bp, Homo sapiens
ctggctgccctctaa

SEQ ID NO: 19944 - DNA, 15 bp, Homo sapiens
actggctgccctcta

SEQ ID NO: 19945 - DNA, 15 bp, Homo sapiens
gactggctgccctct

SEQ ID NO: 19946 - DNA, 15 bp, Homo sapiens
agactggctgccctc

SEQ ID NO: 19947 - DNA, 15 bp, Homo sapiens
tagactggctgccct

SEQ ID NO: 19948 - DNA, 15 bp, Homo sapiens
gtagactggctgccc

SEQ ID NO: 19949 - DNA, 15 bp, Homo sapiens
tgtagactggctgcc

SEQ ID NO: 19950 - DNA, 15 bp, Homo sapiens
ctgtagactggctgc

SEQ ID NO: 19951 - DNA, 15 bp, Homo sapiens
tctgtagactggctg

SEQ ID NO: 19952 - DNA, 15 bp, Homo sapiens
ctctgtagactggct

SEQ ID NO: 19953 - DNA, 15 bp, Homo sapiens
cctctgtagactggc

SEQ ID NO: 19954 - DNA, 15 bp, Homo sapiens
acctctgtagactgg

SEQ ID NO: 19955 - DNA, 15 bp, Homo sapiens
tacctctgtagactg

SEQ ID NO: 19956 - DNA, 15 bp, Homo sapiens
ctacctctgtagact

SEQ ID NO: 19957 - DNA, 15 bp, Homo sapiens
cctacctctgtagac

SEQ ID NO: 19958 - DNA, 15 bp, Homo sapiens
ccctacctctgtaga

SEQ ID NO: 19959 - DNA, 15 bp, Homo sapiens
cccctacctctgtag

SEQ ID NO: 19960 - DNA, 15 bp, Homo sapiens
gcccctacctctgta

SEQ ID NO: 19961 - DNA, 15 bp, Homo sapiens
agcccctacctctgt

SEQ ID NO: 19962 - DNA, 15 bp, Homo sapiens
cagcccctacctctg

SEQ ID NO: 19963 - DNA, 15 bp, Homo sapiens
gcagcccctacctct

SEQ ID NO: 19964 - DNA, 15 bp, Homo sapiens
ggcagcccctacctc

SEQ ID NO: 19965 - DNA, 15 bp, Homo sapiens
gggcagcccctacct

SEQ ID NO: 19966 - DNA, 15 bp, Homo sapiens
tgggcagcccctacc

SEQ ID NO: 19967 - DNA, 15 bp, Homo sapiens
atgggcagcccctac

SEQ ID NO: 19968 - DNA, 15 bp, Homo sapiens
gatgggcagccccta

SEQ ID NO: 19969 - DNA, 15 bp, Homo sapiens
ggatgggcagcccct

SEQ ID NO: 19970 - DNA, 15 bp, Homo sapiens
aggatgggcagcccc

SEQ ID NO: 19971 - DNA, 15 bp, Homo sapiens
gaggatgggcagccc

SEQ ID NO: 19972 - DNA, 15 bp, Homo sapiens
ggaggatgggcagcc

SEQ ID NO: 19973 - DNA, 15 bp, Homo sapiens
tggaggatgggcagc

SEQ ID NO: 19974 - DNA, 15 bp, Homo sapiens
ctggaggatgggcag

SEQ ID NO: 19975 - DNA, 15 bp, Homo sapiens
gctggaggatgggca

SEQ ID NO: 19976 - DNA, 15 bp, Homo sapiens
agctggaggatgggc

SEQ ID NO: 19977 - DNA, 15 bp, Homo sapiens
cagctggaggatggg

SEQ ID NO: 19978 - DNA, 15 bp, Homo sapiens
acagctggaggatgg

SEQ ID NO: 19979 - DNA, 15 bp, Homo sapiens
gacagctggaggatg

SEQ ID NO: 19980 - DNA, 15 bp, Homo sapiens
agacagctggaggat

SEQ ID NO: 19981 - DNA, 15 bp, Homo sapiens
aagacagctggagga

SEQ ID NO: 19982 - DNA, 15 bp, Homo sapiens
aaagacagctggagg

SEQ ID NO: 19983 - DNA, 15 bp, Homo sapiens
aaaagacagctggag

SEQ ID NO: 19984 - DNA, 15 bp, Homo sapiens
caaaagacagctgga

SEQ ID NO: 19985 - DNA, 15 bp, Homo sapiens
gcaaaagacagctgg

SEQ ID NO: 19986 - DNA, 15 bp, Homo sapiens
tgcaaaagacagctg

SEQ ID NO: 19987 - DNA, 15 bp, Homo sapiens
ttgcaaaagacagct

SEQ ID NO: 19988 - DNA, 15 bp, Homo sapiens
attgcaaaagacagc

SEQ ID NO: 19989 - DNA, 15 bp, Homo sapiens
tattgcaaaagacag

SEQ ID NO: 19990 - DNA, 15 bp, Homo sapiens
gtattgcaaaagaca

SEQ ID NO: 19991 - DNA, 15 bp, Homo sapiens
cgtattgcaaaagac

SEQ ID NO: 19992 - DNA, 15 bp, Homo sapiens
ccgtattgcaaaaga

SEQ ID NO: 19993 - DNA, 15 bp, Homo sapiens
cccgtattgcaaaag

SEQ ID NO: 19994 - DNA, 15 bp, Homo sapiens
gcccgtattgcaaaa

SEQ ID NO: 19995 - DNA, 15 bp, Homo sapiens
tgcccgtattgcaaa

SEQ ID NO: 19996 - DNA, 15 bp, Homo sapiens
atgcccgtattgcaa

SEQ ID NO: 19997 - DNA, 15 bp, Homo sapiens
tatgcccgtattgca

SEQ ID NO: 19998 - DNA, 15 bp, Homo sapiens
gtatgcccgtattgc

SEQ ID NO: 19999 - DNA, 15 bp, Homo sapiens
tgtatgcccgtattg

SEQ ID NO: 20000 - DNA, 15 bp, Homo sapiens
gtgtatgcccgtatt

SEQ ID NO: 20001 - DNA, 15 bp, Homo sapiens
agtgtatgcccgtat

SEQ ID NO: 20002 - DNA, 15 bp, Homo sapiens
aagtgtatgcccgta

SEQ ID NO: 20003 - DNA, 15 bp, Homo sapiens
gaagtgtatgcccgt

SEQ ID NO: 20004 - DNA, 15 bp, Homo sapiens
cgaagtgtatgcccg

SEQ ID NO: 20005 - DNA, 15 bp, Homo sapiens
tcgaagtgtatgccc

SEQ ID NO: 20006 - DNA, 15 bp, Homo sapiens
ctcgaagtgtatgcc

SEQ ID NO: 20007 - DNA, 15 bp, Homo sapiens
gctcgaagtgtatgc

SEQ ID NO: 20008 - DNA, 15 bp, Homo sapiens
ggctcgaagtgtatg

SEQ ID NO: 20009 - DNA, 15 bp, Homo sapiens
tggctcgaagtgtat

SEQ ID NO: 20010 - DNA, 15 bp, Homo sapiens
ttggctcgaagtgta

SEQ ID NO: 20011 - DNA, 15 bp, Homo sapiens
gttggctcgaagtgt

SEQ ID NO: 20012 - DNA, 15 bp, Homo sapiens
tgttggctcgaagtg

SEQ ID NO: 20013 - DNA, 15 bp, Homo sapiens
ctgttggctcgaagt

SEQ ID NO: 20014 - DNA, 15 bp, Homo sapiens
gctgttggctcgaag

SEQ ID NO: 20015 - DNA, 15 bp, Homo sapiens
tgctgttggctcgaa

SEQ ID NO: 20016 - DNA, 15 bp, Homo sapiens
ctgctgttggctcga

SEQ ID NO: 20017 - DNA, 15 bp, Homo sapiens
gctgctgttggctcg

SEQ ID NO: 20018 - DNA, 15 bp, Homo sapiens
agctgctgttggctc

SEQ ID NO: 20019 - DNA, 15 bp, Homo sapiens
gagctgctgttggct

SEQ ID NO: 20020 - DNA, 15 bp, Homo sapiens
ggagctgctgttggc

SEQ ID NO: 20021 - DNA, 15 bp, Homo sapiens
tggagctgctgttgg

SEQ ID NO: 20022 - DNA, 15 bp, Homo sapiens
ctggagctgctgttg

SEQ ID NO: 20023 - DNA, 15 bp, Homo sapiens
gctggagctgctgtt

SEQ ID NO: 20024 - DNA, 15 bp, Homo sapiens
ggctggagctgctgt

SEQ ID NO: 20025 - DNA, 15 bp, Homo sapiens
cggctggagctgctg

SEQ ID NO: 20026 - DNA, 15 bp, Homo sapiens
ccggctggagctgct

SEQ ID NO: 20027 - DNA, 15 bp, Homo sapiens
gccggctggagctgc

SEQ ID NO: 20028 - DNA, 15 bp, Homo sapiens
ggccggctggagctg

SEQ ID NO: 20029 - DNA, 15 bp, Homo sapiens
cggccggctggagct

SEQ ID NO: 20030 - DNA, 15 bp, Homo sapiens
acggccggctggagc

SEQ ID NO: 20031 - DNA, 15 bp, Homo sapiens
cacggccggctggag

SEQ ID NO: 20032 - DNA, 15 bp, Homo sapiens
gcacggccggctgga

SEQ ID NO: 20033 - DNA, 15 bp, Homo sapiens
ggcacggccggctgg

SEQ ID NO: 20034 - DNA, 15 bp, Homo sapiens
tggcacggccggctg

SEQ ID NO: 20035 - DNA, 15 bp, Homo sapiens
ctggcacggccggct

SEQ ID NO: 20036 - DNA, 15 bp, Homo sapiens
gctggcacggccggc

SEQ ID NO: 20037 - DNA, 15 bp, Homo sapiens
agctggcacggccgg

SEQ ID NO: 20038 - DNA, 15 bp, Homo sapiens
cagctggcacggccg

SEQ ID NO: 20039 - DNA, 15 bp, Homo sapiens
acagctggcacggcc

SEQ ID NO: 20040 - DNA, 15 bp, Homo sapiens
gacagctggcacggc

SEQ ID NO: 20041 - DNA, 15 bp, Homo sapiens
tgacagctggcacgg

SEQ ID NO: 20042 - DNA, 15 bp, Homo sapiens
ttgacagctggcacg

SEQ ID NO: 20043 - DNA, 15 bp, Homo sapiens
tttgacagctggcac

SEQ ID NO: 20044 - DNA, 15 bp, Homo sapiens
atttgacagctggca

SEQ ID NO: 20045 - DNA, 15 bp, Homo sapiens
catttgacagctggc

SEQ ID NO: 20046 - DNA, 15 bp, Homo sapiens
gcatttgacagctgg

SEQ ID NO: 20047 - DNA, 15 bp, Homo sapiens
agcatttgacagctg

SEQ ID NO: 20048 - DNA, 15 bp, Homo sapiens
aagcatttgacagct

SEQ ID NO: 20049 - DNA, 15 bp, Homo sapiens
aaagcatttgacagc

SEQ ID NO: 20050 - DNA, 15 bp, Homo sapiens
gaaagcatttgacag

SEQ ID NO: 20051 - DNA, 15 bp, Homo sapiens
agaaagcatttgaca

SEQ ID NO: 20052 - DNA, 15 bp, Homo sapiens
cagaaagcatttgac

SEQ ID NO: 20053 - DNA, 15 bp, Homo sapiens
ccagaaagcatttga

SEQ ID NO: 20054 - DNA, 15 bp, Homo sapiens
cccagaaagcatttg

SEQ ID NO: 20055 - DNA, 15 bp, Homo sapiens
gcccagaaagcattt

SEQ ID NO: 20056 - DNA, 15 bp, Homo sapiens
agcccagaaagcatt

SEQ ID NO: 20057 - DNA, 15 bp, Homo sapiens
cagcccagaaagcat

SEQ ID NO: 20058 - DNA, 15 bp, Homo sapiens
ccagcccagaaagca

SEQ ID NO: 20059 - DNA, 15 bp, Homo sapiens
gccagcccagaaagc

SEQ ID NO: 20060 - DNA, 15 bp, Homo sapiens
tgccagcccagaaag

SEQ ID NO: 20061 - DNA, 15 bp, Homo sapiens
gtgccagcccagaaa

SEQ ID NO: 20062 - DNA, 15 bp, Homo sapiens
cgtgccagcccagaa

SEQ ID NO: 20063 - DNA, 15 bp, Homo sapiens
ccgtgccagcccaga

SEQ ID NO: 20064 - DNA, 15 bp, Homo sapiens
gccgtgccagcccag

SEQ ID NO: 20065 - DNA, 15 bp, Homo sapiens
agccgtgccagccca

SEQ ID NO: 20066 - DNA, 15 bp, Homo sapiens
gagccgtgccagccc

SEQ ID NO: 20067 - DNA, 15 bp, Homo sapiens
agagccgtgccagcc

SEQ ID NO: 20068 - DNA, 15 bp, Homo sapiens
aagagccgtgccagc

SEQ ID NO: 20069 - DNA, 15 bp, Homo sapiens
aaagagccgtgccag

SEQ ID NO: 20070 - DNA, 15 bp, Homo sapiens
caaagagccgtgcca

SEQ ID NO: 20071 - DNA, 15 bp, Homo sapiens
tcaaagagccgtgcc

SEQ ID NO: 20072 - DNA, 15 bp, Homo sapiens
ttcaaagagccgtgc

SEQ ID NO: 20073 - DNA, 15 bp, Homo sapiens
attcaaagagccgtg

SEQ ID NO: 20074 - DNA, 15 bp, Homo sapiens
gattcaaagagccgt

SEQ ID NO: 20075 - DNA, 15 bp, Homo sapiens
ggattcaaagagccg

SEQ ID NO: 20076 - DNA, 15 bp, Homo sapiens
cggattcaaagagcc

SEQ ID NO: 20077 - DNA, 15 bp, Homo sapiens
acggattcaaagagc

SEQ ID NO: 20078 - DNA, 15 bp, Homo sapiens
cacggattcaaagag

SEQ ID NO: 20079 - DNA, 15 bp, Homo sapiens
ccacggattcaaaga

SEQ ID NO: 20080 - DNA, 15 bp, Homo sapiens
accacggattcaaag

SEQ ID NO: 20081 - DNA, 15 bp, Homo sapiens
taccacggattcaaa

SEQ ID NO: 20082 - DNA, 15 bp, Homo sapiens
ttaccacggattcaa

SEQ ID NO: 20083 - DNA, 15 bp, Homo sapiens
attaccacggattca

SEQ ID NO: 20084 - DNA, 15 bp, Homo sapiens
cattaccacggattc

SEQ ID NO: 20085 - DNA, 15 bp, Homo sapiens
ccattaccacggatt

SEQ ID NO: 20086 - DNA, 15 bp, Homo sapiens
gccattaccacggat

SEQ ID NO: 20087 - DNA, 15 bp, Homo sapiens
agccattaccacgga

SEQ ID NO: 20088 - DNA, 15 bp, Homo sapiens
aagccattaccacgg

SEQ ID NO: 20089 - DNA, 15 bp, Homo sapiens
gaagccattaccacg

SEQ ID NO: 20090 - DNA, 15 bp, Homo sapiens
ggaagccattaccac

SEQ ID NO: 20091 - DNA, 15 bp, Homo sapiens
aggaagccattacca

SEQ ID NO: 20092 - DNA, 15 bp, Homo sapiens
gaggaagccattacc

SEQ ID NO: 20093 - DNA, 15 bp, Homo sapiens
agaggaagccattac

SEQ ID NO: 20094 - DNA, 15 bp, Homo sapiens
cagaggaagccatta

SEQ ID NO: 20095 - DNA, 15 bp, Homo sapiens
acagaggaagccatt

SEQ ID NO: 20096 - DNA, 15 bp, Homo sapiens
aacagaggaagccat

SEQ ID NO: 20097 - DNA, 15 bp, Homo sapiens
caacagaggaagcca

SEQ ID NO: 20098 - DNA, 15 bp, Homo sapiens
tcaacagaggaagcc

SEQ ID NO: 20099 - DNA, 15 bp, Homo sapiens
ttcaacagaggaagc

SEQ ID NO: 20100 - DNA, 15 bp, Homo sapiens
attcaacagaggaag

SEQ ID NO: 20101 - DNA, 15 bp, Homo sapiens
cattcaacagaggaa

SEQ ID NO: 20102 - DNA, 15 bp, Homo sapiens
acattcaacagagga

SEQ ID NO: 20103 - DNA, 15 bp, Homo sapiens
gacattcaacagagg

SEQ ID NO: 20104 - DNA, 15 bp, Homo sapiens
cgacattcaacagag

SEQ ID NO: 20105 - DNA, 15 bp, Homo sapiens
acgacattcaacaga

SEQ ID NO: 20106 - DNA, 15 bp, Homo sapiens
gacgacattcaacag

SEQ ID NO: 20107 - DNA, 15 bp, Homo sapiens
ggacgacattcaaca

SEQ ID NO: 20108 - DNA, 15 bp, Homo sapiens
tggacgacattcaac

SEQ ID NO: 20109 - DNA, 15 bp, Homo sapiens
ttggacgacattcaa

SEQ ID NO: 20110 - DNA, 15 bp, Homo sapiens
tttggacgacattca

SEQ ID NO: 20111 - DNA, 15 bp, Homo sapiens
ttttggacgacattc

SEQ ID NO: 20112 - DNA, 15 bp, Homo sapiens
cttttggacgacatt

SEQ ID NO: 20113 - DNA, 15 bp, Homo sapiens
gcttttggacgacat

SEQ ID NO: 20114 - DNA, 15 bp, Homo sapiens
tgcttttggacgaca

SEQ ID NO: 20115 - DNA, 15 bp, Homo sapiens
ttgcttttggacgac

SEQ ID NO: 20116 - DNA, 15 bp, Homo sapiens
attgcttttggacga

SEQ ID NO: 20117 - DNA, 15 bp, Homo sapiens
aattgcttttggacg

SEQ ID NO: 20118 - DNA, 15 bp, Homo sapiens
caattgcttttggac

SEQ ID NO: 20119 - DNA, 15 bp, Homo sapiens
gcaattgcttttgga

SEQ ID NO: 20120 - DNA, 15 bp, Homo sapiens
agcaattgcttttgg

SEQ ID NO: 20121 - DNA, 15 bp, Homo sapiens
aagcaattgcttttg

SEQ ID NO: 20122 - DNA, 15 bp, Homo sapiens
caagcaattgctttt

SEQ ID NO: 20123 - DNA, 15 bp, Homo sapiens
acaagcaattgcttt

SEQ ID NO: 20124 - DNA, 15 bp, Homo sapiens
gacaagcaattgctt

SEQ ID NO: 20125 - DNA, 15 bp, Homo sapiens
tgacaagcaattgct

SEQ ID NO: 20126 - DNA, 15 bp, Homo sapiens
ctgacaagcaattgc

SEQ ID NO: 20127 - DNA, 15 bp, Homo sapiens
gctgacaagcaattg

SEQ ID NO: 20128 - DNA, 15 bp, Homo sapiens
agctgacaagcaatt

SEQ ID NO: 20129 - DNA, 15 bp, Homo sapiens
aagctgacaagcaat

SEQ ID NO: 20130 - DNA, 15 bp, Homo sapiens
taagctgacaagcaa

SEQ ID NO: 20131 - DNA, 15 bp, Homo sapiens
ttaagctgacaagca

SEQ ID NO: 20132 - DNA, 15 bp, Homo sapiens
tttaagctgacaagc

SEQ ID NO: 20133 - DNA, 15 bp, Homo sapiens
ttttaagctgacaag

SEQ ID NO: 20134 - DNA, 15 bp, Homo sapiens
cttttaagctgacaa

SEQ ID NO: 20135 - DNA, 15 bp, Homo sapiens
gcttttaagctgaca

SEQ ID NO: 20136 - DNA, 15 bp, Homo sapiens
cgcttttaagctgac

SEQ ID NO: 20137 - DNA, 15 bp, Homo sapiens
acgcttttaagctga

SEQ ID NO: 20138 - DNA, 15 bp, Homo sapiens
cacgcttttaagctg

SEQ ID NO: 20139 - DNA, 15 bp, Homo sapiens
acacgcttttaagct

SEQ ID NO: 20140 - DNA, 15 bp, Homo sapiens
cacacgcttttaagc

SEQ ID NO: 20141 - DNA, 15 bp, Homo sapiens
gcacacgcttttaag

SEQ ID NO: 20142 - DNA, 15 bp, Homo sapiens
ggcacacgcttttaa

SEQ ID NO: 20143 - DNA, 15 bp, Homo sapiens
tggcacacgctttta

SEQ ID NO: 20144 - DNA, 15 bp, Homo sapiens
atggcacacgctttt

SEQ ID NO: 20145 - DNA, 15 bp, Homo sapiens
catggcacacgcttt

SEQ ID NO: 20146 - DNA, 15 bp, Homo sapiens
acatggcacacgctt

SEQ ID NO: 20147 - DNA, 15 bp, Homo sapiens
aacatggcacacgct

SEQ ID NO: 20148 - DNA, 15 bp, Homo sapiens
caacatggcacacgc

SEQ ID NO: 20149 - DNA, 15 bp, Homo sapiens
acaacatggcacacg

SEQ ID NO: 20150 - DNA, 15 bp, Homo sapiens
gacaacatggcacac

SEQ ID NO: 20151 - DNA, 15 bp, Homo sapiens
tgacaacatggcaca

SEQ ID NO: 20152 - DNA, 15 bp, Homo sapiens
atgacaacatggcac

SEQ ID NO: 20153 - DNA, 15 bp, Homo sapiens
catgacaacatggca

SEQ ID NO: 20154 - DNA, 15 bp, Homo sapiens
gcatgacaacatggc

SEQ ID NO: 20155 - DNA, 15 bp, Homo sapiens
ggcatgacaacatgg

SEQ ID NO: 20156 - DNA, 15 bp, Homo sapiens
gggcatgacaacatg

SEQ ID NO: 20157 - DNA, 15 bp, Homo sapiens
cgggcatgacaacat

SEQ ID NO: 20158 - DNA, 15 bp, Homo sapiens
gcgggcatgacaaca

SEQ ID NO: 20159 - DNA, 15 bp, Homo sapiens
ggcgggcatgacaac

SEQ ID NO: 20160 - DNA, 15 bp, Homo sapiens
cggcgggcatgacaa

SEQ ID NO: 20161 - DNA, 15 bp, Homo sapiens
acggcgggcatgaca

SEQ ID NO: 20162 - DNA, 15 bp, Homo sapiens
gacggcgggcatgac

SEQ ID NO: 20163 - DNA, 15 bp, Homo sapiens
agacggcgggcatga

SEQ ID NO: 20164 - DNA, 15 bp, Homo sapiens
cagacggcgggcatg

SEQ ID NO: 20165 - DNA, 15 bp, Homo sapiens
tcagacggcgggcat

SEQ ID NO: 20166 - DNA, 15 bp, Homo sapiens
ctcagacggcgggca

SEQ ID NO: 20167 - DNA, 15 bp, Homo sapiens
tctcagacggcgggc

SEQ ID NO: 20168 - DNA, 15 bp, Homo sapiens
ctctcagacggcggg

SEQ ID NO: 20169 - DNA, 15 bp, Homo sapiens
cctctcagacggcgg

SEQ ID NO: 20170 - DNA, 15 bp, Homo sapiens
ccctctcagacggcg

SEQ ID NO: 20171 - DNA, 15 bp, Homo sapiens
gccctctcagacggc

SEQ ID NO: 20172 - DNA, 15 bp, Homo sapiens
tgccctctcagacgg

SEQ ID NO: 20173 - DNA, 15 bp, Homo sapiens
ctgccctctcagacg

SEQ ID NO: 20174 - DNA, 15 bp, Homo sapiens
cctgccctctcagac

SEQ ID NO: 20175 - DNA, 15 bp, Homo sapiens
gcctgccctctcaga

SEQ ID NO: 20176 - DNA, 15 bp, Homo sapiens
tgcctgccctctcag

SEQ ID NO: 20177 - DNA, 15 bp, Homo sapiens
atgcctgccctctca

SEQ ID NO: 20178 - DNA, 15 bp, Homo sapiens
gatgcctgccctctc

SEQ ID NO: 20179 - DNA, 15 bp, Homo sapiens
ggatgcctgccctct

SEQ ID NO: 20180 - DNA, 15 bp, Homo sapiens
gggatgcctgccctc

SEQ ID NO: 20181 - DNA, 15 bp, Homo sapiens
ggggatgcctgccct

SEQ ID NO: 20182 - DNA, 15 bp, Homo sapiens
cggggatgcctgccc

SEQ ID NO: 20183 - DNA, 15 bp, Homo sapiens
gcggggatgcctgcc

SEQ ID NO: 20184 - DNA, 15 bp, Homo sapiens
tgcggggatgcctgc

SEQ ID NO: 20185 - DNA, 15 bp, Homo sapiens
gtgcggggatgcctg

SEQ ID NO: 20186 - DNA, 15 bp, Homo sapiens
tgtgcggggatgcct

SEQ ID NO: 20187 - DNA, 15 bp, Homo sapiens
gtgtgcggggatgcc

SEQ ID NO: 20188 - DNA, 15 bp, Homo sapiens
agtgtgcggggatgc

SEQ ID NO: 20189 - DNA, 15 bp, Homo sapiens
aagtgtgcggggatg

SEQ ID NO: 20190 - DNA, 15 bp, Homo sapiens
caagtgtgcggggat

SEQ ID NO: 20191 - DNA, 15 bp, Homo sapiens
gcaagtgtgcgggga

SEQ ID NO: 20192 - DNA, 15 bp, Homo sapiens
tgcaagtgtgcgggg

SEQ ID NO: 20193 - DNA, 15 bp, Homo sapiens
ctgcaagtgtgcggg

SEQ ID NO: 20194 - DNA, 15 bp, Homo sapiens
tctgcaagtgtgcgg

SEQ ID NO: 20195 - DNA, 15 bp, Homo sapiens
gtctgcaagtgtgcg

SEQ ID NO: 20196 - DNA, 15 bp, Homo sapiens
agtctgcaagtgtgc

SEQ ID NO: 20197 - DNA, 15 bp, Homo sapiens
cagtctgcaagtgtg

SEQ ID NO: 20198 - DNA, 15 bp, Homo sapiens
ccagtctgcaagtgt

SEQ ID NO: 20199 - DNA, 15 bp, Homo sapiens
cccagtctgcaagtg

SEQ ID NO: 20200 - DNA, 15 bp, Homo sapiens
tcccagtctgcaagt

SEQ ID NO: 20201 - DNA, 15 bp, Homo sapiens
atcccagtctgcaag

SEQ ID NO: 20202 - DNA, 15 bp, Homo sapiens
catcccagtctgcaa

SEQ ID NO: 20203 - DNA, 15 bp, Homo sapiens
gcatcccagtctgca

SEQ ID NO: 20204 - DNA, 15 bp, Homo sapiens
agcatcccagtctgc

SEQ ID NO: 20205 - DNA, 15 bp, Homo sapiens
cagcatcccagtctg

SEQ ID NO: 20206 - DNA, 15 bp, Homo sapiens
acagcatcccagtct

SEQ ID NO: 20207 - DNA, 15 bp, Homo sapiens
tacagcatcccagtc

SEQ ID NO: 20208 - DNA, 15 bp, Homo sapiens
ctacagcatcccagt

SEQ ID NO: 20209 - DNA, 15 bp, Homo sapiens
gctacagcatcccag

SEQ ID NO: 20210 - DNA, 15 bp, Homo sapiens
tgctacagcatccca

SEQ ID NO: 20211 - DNA, 15 bp, Homo sapiens
atgctacagcatccc

SEQ ID NO: 20212 - DNA, 15 bp, Homo sapiens
gatgctacagcatcc

SEQ ID NO: 20213 - DNA, 15 bp, Homo sapiens
agatgctacagcatc

SEQ ID NO: 20214 - DNA, 15 bp, Homo sapiens
aagatgctacagcat

SEQ ID NO: 20215 - DNA, 15 bp, Homo sapiens
gaagatgctacagca

SEQ ID NO: 20216 - DNA, 15 bp, Homo sapiens
agaagatgctacagc

SEQ ID NO: 20217 - DNA, 15 bp, Homo sapiens
gagaagatgctacag

SEQ ID NO: 20218 - DNA, 15 bp, Homo sapiens
tgagaagatgctaca

SEQ ID NO: 20219 - DNA, 15 bp, Homo sapiens
atgagaagatgctac

SEQ ID NO: 20220 - DNA, 15 bp, Homo sapiens
catgagaagatgcta

SEQ ID NO: 20221 - DNA, 15 bp, Homo sapiens
tcatgagaagatgct

SEQ ID NO: 20222 - DNA, 15 bp, Homo sapiens
ctcatgagaagatgc

SEQ ID NO: 20223 - DNA, 15 bp, Homo sapiens
actcatgagaagatg

SEQ ID NO: 20224 - DNA, 15 bp, Homo sapiens
gactcatgagaagat

SEQ ID NO: 20225 - DNA, 15 bp, Homo sapiens
tgactcatgagaaga

SEQ ID NO: 20226 - DNA, 15 bp, Homo sapiens
ctgactcatgagaag

SEQ ID NO: 20227 - DNA, 15 bp, Homo sapiens
cctgactcatgagaa

SEQ ID NO: 20228 - DNA, 15 bp, Homo sapiens
ccctgactcatgaga

SEQ ID NO: 20229 - DNA, 15 bp, Homo sapiens
tccctgactcatgag

SEQ ID NO: 20230 - DNA, 15 bp, Homo sapiens
atccctgactcatga

SEQ ID NO: 20231 - DNA, 15 bp, Homo sapiens
aatccctgactcatg

SEQ ID NO: 20232 - DNA, 15 bp, Homo sapiens
caatccctgactcat

SEQ ID NO: 20233 - DNA, 15 bp, Homo sapiens
ccaatccctgactca

SEQ ID NO: 20234 - DNA, 15 bp, Homo sapiens
cccaatccctgactc

SEQ ID NO: 20235 - DNA, 15 bp, Homo sapiens
acccaatccctgact

SEQ ID NO: 20236 - DNA, 15 bp, Homo sapiens
cacccaatccctgac

SEQ ID NO: 20237 - DNA, 15 bp, Homo sapiens
acacccaatccctga

SEQ ID NO: 20238 - DNA, 15 bp, Homo sapiens
tacacccaatccctg

SEQ ID NO: 20239 - DNA, 15 bp, Homo sapiens
ttacacccaatccct

SEQ ID NO: 20240 - DNA, 15 bp, Homo sapiens
gttacacccaatccc

SEQ ID NO: 20241 - DNA, 15 bp, Homo sapiens
agttacacccaatcc

SEQ ID NO: 20242 - DNA, 15 bp, Homo sapiens
aagttacacccaatc

SEQ ID NO: 20243 - DNA, 15 bp, Homo sapiens
aaagttacacccaat

SEQ ID NO: 20244 - DNA, 15 bp, Homo sapiens
aaaagttacacccaa

SEQ ID NO: 20245 - DNA, 15 bp, Homo sapiens
caaaagttacaccca

SEQ ID NO: 20246 - DNA, 15 bp, Homo sapiens
gcaaaagttacaccc

SEQ ID NO: 20247 - DNA, 15 bp, Homo sapiens
ggcaaaagttacacc

SEQ ID NO: 20248 - DNA, 15 bp, Homo sapiens
tggcaaaagttacac

SEQ ID NO: 20249 - DNA, 15 bp, Homo sapiens
ttggcaaaagttaca

SEQ ID NO: 20250 - DNA, 15 bp, Homo sapiens
tttggcaaaagttac

SEQ ID NO: 20251 - DNA, 15 bp, Homo sapiens
ttttggcaaaagtta

SEQ ID NO: 20252 - DNA, 15 bp, Homo sapiens
attttggcaaaagtt

SEQ ID NO: 20253 - DNA, 15 bp, Homo sapiens
aattttggcaaaagt

SEQ ID NO: 20254 - DNA, 15 bp, Homo sapiens
aaattttggcaaaag

SEQ ID NO: 20255 - DNA, 15 bp, Homo sapiens
gaaattttggcaaaa

SEQ ID NO: 20256 - DNA, 15 bp, Homo sapiens
ggaaattttggcaaa

SEQ ID NO: 20257 - DNA, 15 bp, Homo sapiens
aggaaattttggcaa

SEQ ID NO: 20258 - DNA, 15 bp, Homo sapiens
caggaaattttggca

SEQ ID NO: 20259 - DNA, 15 bp, Homo sapiens
gcaggaaattttggc

SEQ ID NO: 20260 - DNA, 15 bp, Homo sapiens
tgcaggaaattttgg

SEQ ID NO: 20261 - DNA, 15 bp, Homo sapiens
atgcaggaaattttg

SEQ ID NO: 20262 - DNA, 15 bp, Homo sapiens
aatgcaggaaatttt

SEQ ID NO: 20263 - DNA, 15 bp, Homo sapiens
aaatgcaggaaattt

SEQ ID NO: 20264 - DNA, 15 bp, Homo sapiens
aaaatgcaggaaatt

SEQ ID NO: 20265 - DNA, 15 bp, Homo sapiens
gaaaatgcaggaaat

SEQ ID NO: 20266 - DNA, 15 bp, Homo sapiens
ggaaaatgcaggaaa

SEQ ID NO: 20267 - DNA, 15 bp, Homo sapiens
gggaaaatgcaggaa

SEQ ID NO: 20268 - DNA, 15 bp, Homo sapiens
ggggaaaatgcagga

SEQ ID NO: 20269 - DNA, 15 bp, Homo sapiens
tggggaaaatgcagg

SEQ ID NO: 20270 - DNA, 15 bp, Homo sapiens
gtggggaaaatgcag

SEQ ID NO: 20271 - DNA, 15 bp, Homo sapiens
ggtggggaaaatgca

SEQ ID NO: 20272 - DNA, 15 bp, Homo sapiens
gggtggggaaaatgc

SEQ ID NO: 20273 - DNA, 15 bp, Homo sapiens
agggtggggaaaatg

SEQ ID NO: 20274 - DNA, 15 bp, Homo sapiens
gagggtggggaaaat

SEQ ID NO: 20275 - DNA, 15 bp, Homo sapiens
agagggtggggaaaa

SEQ ID NO: 20276 - DNA, 15 bp, Homo sapiens
gagagggtggggaaa

SEQ ID NO: 20277 - DNA, 15 bp, Homo sapiens
ggagagggtggggaa

SEQ ID NO: 20278 - DNA, 15 bp, Homo sapiens
tggagagggtgggga

SEQ ID NO: 20279 - DNA, 15 bp, Homo sapiens
ttggagagggtgggg

SEQ ID NO: 20280 - DNA, 15 bp, Homo sapiens
gttggagagggtggg

SEQ ID NO: 20281 - DNA, 15 bp, Homo sapiens
tgttggagagggtgg

SEQ ID NO: 20282 - DNA, 15 bp, Homo sapiens
atgttggagagggtg

SEQ ID NO: 20283 - DNA, 15 bp, Homo sapiens
catgttggagagggt

SEQ ID NO: 20284 - DNA, 15 bp, Homo sapiens
acatgttggagaggg

SEQ ID NO: 20285 - DNA, 15 bp, Homo sapiens
gacatgttggagagg

SEQ ID NO: 20286 - DNA, 15 bp, Homo sapiens
agacatgttggagag

SEQ ID NO: 20287 - DNA, 15 bp, Homo sapiens
aagacatgttggaga

SEQ ID NO: 20288 - DNA, 15 bp, Homo sapiens
aaagacatgttggag

SEQ ID NO: 20289 - DNA, 15 bp, Homo sapiens
caaagacatgttgga

SEQ ID NO: 20290 - DNA, 15 bp, Homo sapiens
tcaaagacatgttgg

SEQ ID NO: 20291 - DNA, 15 bp, Homo sapiens
ttcaaagacatgttg

SEQ ID NO: 20292 - DNA, 15 bp, Homo sapiens
attcaaagacatgtt

SEQ ID NO: 20293 - DNA, 15 bp, Homo sapiens
tattcaaagacatgt

SEQ ID NO: 20294 - DNA, 15 bp, Homo sapiens
gtattcaaagacatg

SEQ ID NO: 20295 - DNA, 15 bp, Homo sapiens
ggtattcaaagacat

SEQ ID NO: 20296 - DNA, 15 bp, Homo sapiens
gggtattcaaagaca

SEQ ID NO: 20297 - DNA, 15 bp, Homo sapiens
ggggtattcaaagac

SEQ ID NO: 20298 - DNA, 15 bp, Homo sapiens
tggggtattcaaaga

SEQ ID NO: 20299 - DNA, 15 bp, Homo sapiens
atggggtattcaaag

SEQ ID NO: 20300 - DNA, 15 bp, Homo sapiens
tatggggtattcaaa

SEQ ID NO: 20301 - DNA, 15 bp, Homo sapiens
atatggggtattcaa

SEQ ID NO: 20302 - DNA, 15 bp, Homo sapiens
gatatggggtattca

SEQ ID NO: 20303 - DNA, 15 bp, Homo sapiens
ggatatggggtattc

SEQ ID NO: 20304 - DNA, 15 bp, Homo sapiens
aggatatggggtatt

SEQ ID NO: 20305 - DNA, 15 bp, Homo sapiens
aaggatatggggtat

SEQ ID NO: 20306 - DNA, 15 bp, Homo sapiens
aaaggatatggggta

SEQ ID NO: 20307 - DNA, 15 bp, Homo sapiens
taaaggatatggggt

SEQ ID NO: 20308 - DNA, 15 bp, Homo sapiens
gtaaaggatatgggg

SEQ ID NO: 20309 - DNA, 15 bp, Homo sapiens
tgtaaaggatatggg

SEQ ID NO: 20310 - DNA, 15 bp, Homo sapiens
atgtaaaggatatgg

SEQ ID NO: 20311 - DNA, 15 bp, Homo sapiens
aatgtaaaggatatg

SEQ ID NO: 20312 - DNA, 15 bp, Homo sapiens
aaatgtaaaggatat

SEQ ID NO: 20313 - DNA, 15 bp, Homo sapiens
caaatgtaaaggata

SEQ ID NO: 20314 - DNA, 15 bp, Homo sapiens
tcaaatgtaaaggat

SEQ ID NO: 20315 - DNA, 15 bp, Homo sapiens
ctcaaatgtaaagga

SEQ ID NO: 20316 - DNA, 15 bp, Homo sapiens
tctcaaatgtaaagg

SEQ ID NO: 20317 - DNA, 15 bp, Homo sapiens
atctcaaatgtaaag

SEQ ID NO: 20318 - DNA, 15 bp, Homo sapiens
catctcaaatgtaaa

SEQ ID NO: 20319 - DNA, 15 bp, Homo sapiens
tcatctcaaatgtaa

SEQ ID NO: 20320 - DNA, 15 bp, Homo sapiens
ttcatctcaaatgta

SEQ ID NO: 20321 - DNA, 15 bp, Homo sapiens
tttcatctcaaatgt

SEQ ID NO: 20322 - DNA, 15 bp, Homo sapiens
ctttcatctcaaatg

SEQ ID NO: 20323 - DNA, 15 bp, Homo sapiens
actttcatctcaaat

SEQ ID NO: 20324 - DNA, 15 bp, Homo sapiens
cactttcatctcaaa

SEQ ID NO: 20325 - DNA, 15 bp, Homo sapiens
ccactttcatctcaa

SEQ ID NO: 20326 - DNA, 15 bp, Homo sapiens
tccactttcatctca

SEQ ID NO: 20327 - DNA, 15 bp, Homo sapiens
ttccactttcatctc

SEQ ID NO: 20328 - DNA, 15 bp, Homo sapiens
gttccactttcatct

SEQ ID NO: 20329 - DNA, 15 bp, Homo sapiens
agttccactttcatc

SEQ ID NO: 20330 - DNA, 15 bp, Homo sapiens
gagttccactttcat

SEQ ID NO: 20331 - DNA, 15 bp, Homo sapiens
agagttccactttca

SEQ ID NO: 20332 - DNA, 15 bp, Homo sapiens
tagagttccactttc

SEQ ID NO: 20333 - DNA, 15 bp, Homo sapiens
ttagagttccacttt

SEQ ID NO: 20334 - DNA, 15 bp, Homo sapiens
tttagagttccactt

SEQ ID NO: 20335 - DNA, 15 bp, Homo sapiens
ttttagagttccact

SEQ ID NO: 20336 - DNA, 15 bp, Homo sapiens
tttttagagttccac

SEQ ID NO: 20337 - DNA, 15 bp, Homo sapiens
gtttttagagttcca

SEQ ID NO: 20338 - DNA, 15 bp, Homo sapiens
ggtttttagagttcc

SEQ ID NO: 20339 - DNA, 15 bp, Homo sapiens
aggtttttagagttc

SEQ ID NO: 20340 - DNA, 15 bp, Homo sapiens
aaggtttttagagtt

SEQ ID NO: 20341 - DNA, 15 bp, Homo sapiens
caaggtttttagagt

SEQ ID NO: 20342 - DNA, 15 bp, Homo sapiens
ccaaggtttttagag

SEQ ID NO: 20343 - DNA, 15 bp, Homo sapiens
tccaaggtttttaga

SEQ ID NO: 20344 - DNA, 15 bp, Homo sapiens
ttccaaggtttttag

SEQ ID NO: 20345 - DNA, 15 bp, Homo sapiens
tttccaaggttttta

SEQ ID NO: 20346 - DNA, 15 bp, Homo sapiens
ctttccaaggttttt

SEQ ID NO: 20347 - DNA, 15 bp, Homo sapiens
tctttccaaggtttt

SEQ ID NO: 20348 - DNA, 15 bp, Homo sapiens
atctttccaaggttt

SEQ ID NO: 20349 - DNA, 15 bp, Homo sapiens
aatctttccaaggtt

SEQ ID NO: 20350 - DNA, 15 bp, Homo sapiens
gaatctttccaaggt

SEQ ID NO: 20351 - DNA, 15 bp, Homo sapiens
agaatctttccaagg

SEQ ID NO: 20352 - DNA, 15 bp, Homo sapiens
gagaatctttccaag

SEQ ID NO: 20353 - DNA, 15 bp, Homo sapiens
agagaatctttccaa

SEQ ID NO: 20354 - DNA, 15 bp, Homo sapiens
aagagaatctttcca

SEQ ID NO: 20355 - DNA, 15 bp, Homo sapiens
caagagaatctttcc

SEQ ID NO: 20356 - DNA, 15 bp, Homo sapiens
acaagagaatctttc

SEQ ID NO: 20357 - DNA, 15 bp, Homo sapiens
cacaagagaatcttt

SEQ ID NO: 20358 - DNA, 15 bp, Homo sapiens
tcacaagagaatctt

SEQ ID NO: 20359 - DNA, 15 bp, Homo sapiens
ctcacaagagaatct

SEQ ID NO: 20360 - DNA, 15 bp, Homo sapiens
cctcacaagagaatc

SEQ ID NO: 20361 - DNA, 15 bp, Homo sapiens
acctcacaagagaat

SEQ ID NO: 20362 - DNA, 15 bp, Homo sapiens
cacctcacaagagaa

SEQ ID NO: 20363 - DNA, 15 bp, Homo sapiens
tcacctcacaagaga

SEQ ID NO: 20364 - DNA, 15 bp, Homo sapiens
gtcacctcacaagag

SEQ ID NO: 20365 - DNA, 15 bp, Homo sapiens
agtcacctcacaaga

SEQ ID NO: 20366 - DNA, 15 bp, Homo sapiens
aagtcacctcacaag

SEQ ID NO: 20367 - DNA, 15 bp, Homo sapiens
gaagtcacctcacaa

SEQ ID NO: 20368 - DNA, 15 bp, Homo sapiens
agaagtcacctcaca

SEQ ID NO: 20369 - DNA, 15 bp, Homo sapiens
tagaagtcacctcac

SEQ ID NO: 20370 - DNA, 15 bp, Homo sapiens
gtagaagtcacctca

SEQ ID NO: 20371 - DNA, 15 bp, Homo sapiens
agtagaagtcacctc

SEQ ID NO: 20372 - DNA, 15 bp, Homo sapiens
aagtagaagtcacct

SEQ ID NO: 20373 - DNA, 15 bp, Homo sapiens
taagtagaagtcacc

SEQ ID NO: 20374 - DNA, 15 bp, Homo sapiens
ttaagtagaagtcac

SEQ ID NO: 20375 - DNA, 15 bp, Homo sapiens
cttaagtagaagtca

SEQ ID NO: 20376 - DNA, 15 bp, Homo sapiens
gcttaagtagaagtc

SEQ ID NO: 20377 - DNA, 15 bp, Homo sapiens
agcttaagtagaagt

SEQ ID NO: 20378 - DNA, 15 bp, Homo sapiens
aagcttaagtagaag

SEQ ID NO: 20379 - DNA, 15 bp, Homo sapiens
caagcttaagtagaa

SEQ ID NO: 20380 - DNA, 15 bp, Homo sapiens
ccaagcttaagtaga

SEQ ID NO: 20381 - DNA, 15 bp, Homo sapiens
accaagcttaagtag

SEQ ID NO: 20382 - DNA, 15 bp, Homo sapiens
gaccaagcttaagta

SEQ ID NO: 20383 - DNA, 15 bp, Homo sapiens
tgaccaagcttaagt

SEQ ID NO: 20384 - DNA, 15 bp, Homo sapiens
gtgaccaagcttaag

SEQ ID NO: 20385 - DNA, 15 bp, Homo sapiens
tgtgaccaagcttaa

SEQ ID NO: 20386 - DNA, 15 bp, Homo sapiens
ctgtgaccaagctta

SEQ ID NO: 20387 - DNA, 15 bp, Homo sapiens
gctgtgaccaagctt

SEQ ID NO: 20388 - DNA, 15 bp, Homo sapiens
ggctgtgaccaagct

SEQ ID NO: 20389 - DNA, 15 bp, Homo sapiens
aggctgtgaccaagc

SEQ ID NO: 20390 - DNA, 15 bp, Homo sapiens
gaggctgtgaccaag

SEQ ID NO: 20391 - DNA, 15 bp, Homo sapiens
ggaggctgtgaccaa

SEQ ID NO: 20392 - DNA, 15 bp, Homo sapiens
aggaggctgtgacca

SEQ ID NO: 20393 - DNA, 15 bp, Homo sapiens
caggaggctgtgacc

SEQ ID NO: 20394 - DNA, 15 bp, Homo sapiens
gcaggaggctgtgac

SEQ ID NO: 20395 - DNA, 15 bp, Homo sapiens
agcaggaggctgtga

SEQ ID NO: 20396 - DNA, 15 bp, Homo sapiens
cagcaggaggctgtg

SEQ ID NO: 20397 - DNA, 15 bp, Homo sapiens
acagcaggaggctgt

SEQ ID NO: 20398 - DNA, 15 bp, Homo sapiens
gacagcaggaggctg

SEQ ID NO: 20399 - DNA, 15 bp, Homo sapiens
ggacagcaggaggct

SEQ ID NO: 20400 - DNA, 15 bp, Homo sapiens
aggacagcaggaggc

SEQ ID NO: 20401 - DNA, 15 bp, Homo sapiens
gaggacagcaggagg

SEQ ID NO: 20402 - DNA, 15 bp, Homo sapiens
tgaggacagcaggag

SEQ ID NO: 20403 - DNA, 15 bp, Homo sapiens
ttgaggacagcagga

SEQ ID NO: 20404 - DNA, 15 bp, Homo sapiens
tttgaggacagcagg

SEQ ID NO: 20405 - DNA, 15 bp, Homo sapiens
ctttgaggacagcag

SEQ ID NO: 20406 - DNA, 15 bp, Homo sapiens
tctttgaggacagca

SEQ ID NO: 20407 - DNA, 15 bp, Homo sapiens
ctctttgaggacagc

SEQ ID NO: 20408 - DNA, 15 bp, Homo sapiens
actctttgaggacag

SEQ ID NO: 20409 - DNA, 15 bp, Homo sapiens
cactctttgaggaca

SEQ ID NO: 20410 - DNA, 15 bp, Homo sapiens
ccactctttgaggac

SEQ ID NO: 20411 - DNA, 15 bp, Homo sapiens
cccactctttgagga

SEQ ID NO: 20412 - DNA, 15 bp, Homo sapiens
gcccactctttgagg

SEQ ID NO: 20413 - DNA, 15 bp, Homo sapiens
tgcccactctttgag

SEQ ID NO: 20414 - DNA, 15 bp, Homo sapiens
ctgcccactctttga

SEQ ID NO: 20415 - DNA, 15 bp, Homo sapiens
cctgcccactctttg

SEQ ID NO: 20416 - DNA, 15 bp, Homo sapiens
tcctgcccactcttt

SEQ ID NO: 20417 - DNA, 15 bp, Homo sapiens
ctcctgcccactctt

SEQ ID NO: 20418 - DNA, 15 bp, Homo sapiens
tctcctgcccactct

SEQ ID NO: 20419 - DNA, 15 bp, Homo sapiens
atctcctgcccactc

SEQ ID NO: 20420 - DNA, 15 bp, Homo sapiens
aatctcctgcccact

SEQ ID NO: 20421 - DNA, 15 bp, Homo sapiens
aaatctcctgcccac

SEQ ID NO: 20422 - DNA, 15 bp, Homo sapiens
gaaatctcctgccca

SEQ ID NO: 20423 - DNA, 15 bp, Homo sapiens
agaaatctcctgccc

SEQ ID NO: 20424 - DNA, 15 bp, Homo sapiens
aagaaatctcctgcc

SEQ ID NO: 20425 - DNA, 15 bp, Homo sapiens
gaagaaatctcctgc

SEQ ID NO: 20426 - DNA, 15 bp, Homo sapiens
ggaagaaatctcctg

SEQ ID NO: 20427 - DNA, 15 bp, Homo sapiens
gggaagaaatctcct

SEQ ID NO: 20428 - DNA, 15 bp, Homo sapiens
agggaagaaatctcc

SEQ ID NO: 20429 - DNA, 15 bp, Homo sapiens
aagggaagaaatctc

SEQ ID NO: 20430 - DNA, 15 bp, Homo sapiens
caagggaagaaatct

SEQ ID NO: 20431 - DNA, 15 bp, Homo sapiens
ccaagggaagaaatc

SEQ ID NO: 20432 - DNA, 15 bp, Homo sapiens
tccaagggaagaaat

SEQ ID NO: 20433 - DNA, 15 bp, Homo sapiens
gtccaagggaagaaa

SEQ ID NO: 20434 - DNA, 15 bp, Homo sapiens
cgtccaagggaagaa

SEQ ID NO: 20435 - DNA, 15 bp, Homo sapiens
gcgtccaagggaaga

SEQ ID NO: 20436 - DNA, 15 bp, Homo sapiens
agcgtccaagggaag

SEQ ID NO: 20437 - DNA, 15 bp, Homo sapiens
cagcgtccaagggaa

SEQ ID NO: 20438 - DNA, 15 bp, Homo sapiens
gcagcgtccaaggga

SEQ ID NO: 20439 - DNA, 15 bp, Homo sapiens
ggcagcgtccaaggg

SEQ ID NO: 20440 - DNA, 15 bp, Homo sapiens
tggcagcgtccaagg

SEQ ID NO: 20441 - DNA, 15 bp, Homo sapiens
ctggcagcgtccaag

SEQ ID NO: 20442 - DNA, 15 bp, Homo sapiens
actggcagcgtccaa

SEQ ID NO: 20443 - DNA, 15 bp, Homo sapiens
cactggcagcgtcca

SEQ ID NO: 20444 - DNA, 15 bp, Homo sapiens
gcactggcagcgtcc

SEQ ID NO: 20445 - DNA, 15 bp, Homo sapiens
agcactggcagcgtc

SEQ ID NO: 20446 - DNA, 15 bp, Homo sapiens
cagcactggcagcgt

SEQ ID NO: 20447 - DNA, 15 bp, Homo sapiens
ccagcactggcagcg

SEQ ID NO: 20448 - DNA, 15 bp, Homo sapiens
tccagcactggcagc

SEQ ID NO: 20449 - DNA, 15 bp, Homo sapiens
ttccagcactggcag

SEQ ID NO: 20450 - DNA, 15 bp, Homo sapiens
attccagcactggca

SEQ ID NO: 20451 - DNA, 15 bp, Homo sapiens
tattccagcactggc

SEQ ID NO: 20452 - DNA, 15 bp, Homo sapiens
atattccagcactgg

SEQ ID NO: 20453 - DNA, 15 bp, Homo sapiens
catattccagcactg

SEQ ID NO: 20454 - DNA, 15 bp, Homo sapiens
tcatattccagcact

SEQ ID NO: 20455 - DNA, 15 bp, Homo sapiens
ttcatattccagcac

SEQ ID NO: 20456 - DNA, 15 bp, Homo sapiens
tttcatattccagca

SEQ ID NO: 20457 - DNA, 15 bp, Homo sapiens
gtttcatattccagc

SEQ ID NO: 20458 - DNA, 15 bp, Homo sapiens
agtttcatattccag

SEQ ID NO: 20459 - DNA, 15 bp, Homo sapiens
aagtttcatattcca

SEQ ID NO: 20460 - DNA, 15 bp, Homo sapiens
taagtttcatattcc

SEQ ID NO: 20461 - DNA, 15 bp, Homo sapiens
gtaagtttcatattc

SEQ ID NO: 20462 - DNA, 15 bp, Homo sapiens
ggtaagtttcatatt

SEQ ID NO: 20463 - DNA, 15 bp, Homo sapiens
tggtaagtttcatat

SEQ ID NO: 20464 - DNA, 15 bp, Homo sapiens
ttggtaagtttcata

SEQ ID NO: 20465 - DNA, 15 bp, Homo sapiens
cttggtaagtttcat

SEQ ID NO: 20466 - DNA, 15 bp, Homo sapiens
acttggtaagtttca

SEQ ID NO: 20467 - DNA, 15 bp, Homo sapiens
cacttggtaagtttc

SEQ ID NO: 20468 - DNA, 15 bp, Homo sapiens
acacttggtaagttt

SEQ ID NO: 20469 - DNA, 15 bp, Homo sapiens
gacacttggtaagtt

SEQ ID NO: 20470 - DNA, 15 bp, Homo sapiens
tgacacttggtaagt

SEQ ID NO: 20471 - DNA, 15 bp, Homo sapiens
ctgacacttggtaag

SEQ ID NO: 20472 - DNA, 15 bp, Homo sapiens
gctgacacttggtaa

SEQ ID NO: 20473 - DNA, 15 bp, Homo sapiens
tgctgacacttggta

SEQ ID NO: 20474 - DNA, 15 bp, Homo sapiens
ctgctgacacttggt

SEQ ID NO: 20475 - DNA, 15 bp, Homo sapiens
actgctgacacttgg

SEQ ID NO: 20476 - DNA, 15 bp, Homo sapiens
aactgctgacacttg

SEQ ID NO: 20477 - DNA, 15 bp, Homo sapiens
caactgctgacactt

SEQ ID NO: 20478 - DNA, 15 bp, Homo sapiens
ccaactgctgacact

SEQ ID NO: 20479 - DNA, 15 bp, Homo sapiens
cccaactgctgacac

SEQ ID NO: 20480 - DNA, 15 bp, Homo sapiens
ccccaactgctgaca

SEQ ID NO: 20481 - DNA, 15 bp, Homo sapiens
accccaactgctgac

SEQ ID NO: 20482 - DNA, 15 bp, Homo sapiens
gaccccaactgctga

SEQ ID NO: 20483 - DNA, 15 bp, Homo sapiens
agaccccaactgctg

SEQ ID NO: 20484 - DNA, 15 bp, Homo sapiens
cagaccccaactgct

SEQ ID NO: 20485 - DNA, 15 bp, Homo sapiens
acagaccccaactgc

SEQ ID NO: 20486 - DNA, 15 bp, Homo sapiens
gacagaccccaactg

SEQ ID NO: 20487 - DNA, 15 bp, Homo sapiens
ggacagaccccaact

SEQ ID NO: 20488 - DNA, 15 bp, Homo sapiens
aggacagaccccaac

SEQ ID NO: 20489 - DNA, 15 bp, Homo sapiens
aaggacagaccccaa

SEQ ID NO: 20490 - DNA, 15 bp, Homo sapiens
gaaggacagacccca

SEQ ID NO: 20491 - DNA, 15 bp, Homo sapiens
tgaaggacagacccc

SEQ ID NO: 20492 - DNA, 15 bp, Homo sapiens
gtgaaggacagaccc

SEQ ID NO: 20493 - DNA, 15 bp, Homo sapiens
cgtgaaggacagacc

SEQ ID NO: 20494 - DNA, 15 bp, Homo sapiens
acgtgaaggacagac

SEQ ID NO: 20495 - DNA, 15 bp, Homo sapiens
aacgtgaaggacaga

SEQ ID NO: 20496 - DNA, 15 bp, Homo sapiens
caacgtgaaggacag

SEQ ID NO: 20497 - DNA, 15 bp, Homo sapiens
tcaacgtgaaggaca

SEQ ID NO: 20498 - DNA, 15 bp, Homo sapiens
gtcaacgtgaaggac

SEQ ID NO: 20499 - DNA, 15 bp, Homo sapiens
ggtcaacgtgaagga

SEQ ID NO: 20500 - DNA, 15 bp, Homo sapiens
gggtcaacgtgaagg

SEQ ID NO: 20501 - DNA, 15 bp, Homo sapiens
tgggtcaacgtgaag

SEQ ID NO: 20502 - DNA, 15 bp, Homo sapiens
ctgggtcaacgtgaa

SEQ ID NO: 20503 - DNA, 15 bp, Homo sapiens
gctgggtcaacgtga

SEQ ID NO: 20504 - DNA, 15 bp, Homo sapiens
ggctgggtcaacgtg

SEQ ID NO: 20505 - DNA, 15 bp, Homo sapiens
gggctgggtcaacgt

SEQ ID NO: 20506 - DNA, 15 bp, Homo sapiens
ggggctgggtcaacg

SEQ ID NO: 20507 - DNA, 15 bp, Homo sapiens
gggggctgggtcaac

SEQ ID NO: 20508 - DNA, 15 bp, Homo sapiens
agggggctgggtcaa

SEQ ID NO: 20509 - DNA, 15 bp, Homo sapiens
gagggggctgggtca

SEQ ID NO: 20510 - DNA, 15 bp, Homo sapiens
tgagggggctgggtc

SEQ ID NO: 20511 - DNA, 15 bp, Homo sapiens
atgagggggctgggt

SEQ ID NO: 20512 - DNA, 15 bp, Homo sapiens
aatgagggggctggg

SEQ ID NO: 20513 - DNA, 15 bp, Homo sapiens
caatgagggggctgg

SEQ ID NO: 20514 - DNA, 15 bp, Homo sapiens
ccaatgagggggctg

SEQ ID NO: 20515 - DNA, 15 bp, Homo sapiens
accaatgagggggct

SEQ ID NO: 20516 - DNA, 15 bp, Homo sapiens
caccaatgagggggc

SEQ ID NO: 20517 - DNA, 15 bp, Homo sapiens
acaccaatgaggggg

SEQ ID NO: 20518 - DNA, 15 bp, Homo sapiens
gacaccaatgagggg

SEQ ID NO: 20519 - DNA, 15 bp, Homo sapiens
ggacaccaatgaggg

SEQ ID NO: 20520 - DNA, 15 bp, Homo sapiens
aggacaccaatgagg

SEQ ID NO: 20521 - DNA, 15 bp, Homo sapiens
caggacaccaatgag

SEQ ID NO: 20522 - DNA, 15 bp, Homo sapiens
tcaggacaccaatga

SEQ ID NO: 20523 - DNA, 15 bp, Homo sapiens
atcaggacaccaatg

SEQ ID NO: 20524 - DNA, 15 bp, Homo sapiens
catcaggacaccaat

SEQ ID NO: 20525 - DNA, 15 bp, Homo sapiens
tcatcaggacaccaa

SEQ ID NO: 20526 - DNA, 15 bp, Homo sapiens
atcatcaggacacca

SEQ ID NO: 20527 - DNA, 15 bp, Homo sapiens
aatcatcaggacacc

SEQ ID NO: 20528 - DNA, 15 bp, Homo sapiens
caatcatcaggacac

SEQ ID NO: 20529 - DNA, 15 bp, Homo sapiens
acaatcatcaggaca

SEQ ID NO: 20530 - DNA, 15 bp, Homo sapiens
cacaatcatcaggac

SEQ ID NO: 20531 - DNA, 15 bp, Homo sapiens
ccacaatcatcagga

SEQ ID NO: 20532 - DNA, 15 bp, Homo sapiens
tccacaatcatcagg

SEQ ID NO: 20533 - DNA, 15 bp, Homo sapiens
gtccacaatcatcag

SEQ ID NO: 20534 - DNA, 15 bp, Homo sapiens
tgtccacaatcatca

SEQ ID NO: 20535 - DNA, 15 bp, Homo sapiens
gtgtccacaatcatc

SEQ ID NO: 20536 - DNA, 15 bp, Homo sapiens
ggtgtccacaatcat

SEQ ID NO: 20537 - DNA, 15 bp, Homo sapiens
gggtgtccacaatca

SEQ ID NO: 20538 - DNA, 15 bp, Homo sapiens
tgggtgtccacaatc

SEQ ID NO: 20539 - DNA, 15 bp, Homo sapiens
ctgggtgtccacaat

SEQ ID NO: 20540 - DNA, 15 bp, Homo sapiens
actgggtgtccacaa

SEQ ID NO: 20541 - DNA, 15 bp, Homo sapiens
gactgggtgtccaca

SEQ ID NO: 20542 - DNA, 15 bp, Homo sapiens
tgactgggtgtccac

SEQ ID NO: 20543 - DNA, 15 bp, Homo sapiens
ctgactgggtgtcca

SEQ ID NO: 20544 - DNA, 15 bp, Homo sapiens
gctgactgggtgtcc

SEQ ID NO: 20545 - DNA, 15 bp, Homo sapiens
ggctgactgggtgtc

SEQ ID NO: 20546 - DNA, 15 bp, Homo sapiens
gggctgactgggtgt

SEQ ID NO: 20547 - DNA, 15 bp, Homo sapiens
ggggctgactgggtg

SEQ ID NO: 20548 - DNA, 15 bp, Homo sapiens
tggggctgactgggt

SEQ ID NO: 20549 - DNA, 15 bp, Homo sapiens
atggggctgactggg

SEQ ID NO: 20550 - DNA, 15 bp, Homo sapiens
aatggggctgactgg

SEQ ID NO: 20551 - DNA, 15 bp, Homo sapiens
aaatggggctgactg

SEQ ID NO: 20552 - DNA, 15 bp, Homo sapiens
aaaatggggctgact

SEQ ID NO: 20553 - DNA, 15 bp, Homo sapiens
gaaaatggggctgac

SEQ ID NO: 20554 - DNA, 15 bp, Homo sapiens
agaaaatggggctga

SEQ ID NO: 20555 - DNA, 15 bp, Homo sapiens
cagaaaatggggctg

SEQ ID NO: 20556 - DNA, 15 bp, Homo sapiens
ccagaaaatggggct

SEQ ID NO: 20557 - DNA, 15 bp, Homo sapiens
gccagaaaatggggc

SEQ ID NO: 20558 - DNA, 15 bp, Homo sapiens
ggccagaaaatgggg

SEQ ID NO: 20559 - DNA, 15 bp, Homo sapiens
tggccagaaaatggg

SEQ ID NO: 20560 - DNA, 15 bp, Homo sapiens
gtggccagaaaatgg

SEQ ID NO: 20561 - DNA, 15 bp, Homo sapiens
tgtggccagaaaatg

SEQ ID NO: 20562 - DNA, 15 bp, Homo sapiens
gtgtggccagaaaat

SEQ ID NO: 20563 - DNA, 15 bp, Homo sapiens
ggtgtggccagaaaa

SEQ ID NO: 20564 - DNA, 15 bp, Homo sapiens
tggtgtggccagaaa

SEQ ID NO: 20565 - DNA, 15 bp, Homo sapiens
ttggtgtggccagaa

SEQ ID NO: 20566 - DNA, 15 bp, Homo sapiens
cttggtgtggccaga

SEQ ID NO: 20567 - DNA, 15 bp, Homo sapiens
gcttggtgtggccag

SEQ ID NO: 20568 - DNA, 15 bp, Homo sapiens
tgcttggtgtggcca

SEQ ID NO: 20569 - DNA, 15 bp, Homo sapiens
atgcttggtgtggcc

SEQ ID NO: 20570 - DNA, 15 bp, Homo sapiens
catgcttggtgtggc

SEQ ID NO: 20571 - DNA, 15 bp, Homo sapiens
ccatgcttggtgtgg

SEQ ID NO: 20572 - DNA, 15 bp, Homo sapiens
gccatgcttggtgtg

SEQ ID NO: 20573 - DNA, 15 bp, Homo sapiens
tgccatgcttggtgt

SEQ ID NO: 20574 - DNA, 15 bp, Homo sapiens
ttgccatgcttggtg

SEQ ID NO: 20575 - DNA, 15 bp, Homo sapiens
attgccatgcttggt

SEQ ID NO: 20576 - DNA, 15 bp, Homo sapiens
cattgccatgcttgg

SEQ ID NO: 20577 - DNA, 15 bp, Homo sapiens
tcattgccatgcttg

SEQ ID NO: 20578 - DNA, 15 bp, Homo sapiens
gtcattgccatgctt

SEQ ID NO: 20579 - DNA, 15 bp, Homo sapiens
tgtcattgccatgct

SEQ ID NO: 20580 - DNA, 15 bp, Homo sapiens
gtgtcattgccatgc

SEQ ID NO: 20581 - DNA, 15 bp, Homo sapiens
ggtgtcattgccatg

SEQ ID NO: 20582 - DNA, 15 bp, Homo sapiens
tggtgtcattgccat

SEQ ID NO: 20583 - DNA, 15 bp, Homo sapiens
ctggtgtcattgcca

SEQ ID NO: 20584 - DNA, 15 bp, Homo sapiens
cctggtgtcattgcc

SEQ ID NO: 20585 - DNA, 15 bp, Homo sapiens
acctggtgtcattgc

SEQ ID NO: 20586 - DNA, 15 bp, Homo sapiens
aacctggtgtcattg

SEQ ID NO: 20587 - DNA, 15 bp, Homo sapiens
caacctggtgtcatt

SEQ ID NO: 20588 - DNA, 15 bp, Homo sapiens
ccaacctggtgtcat

SEQ ID NO: 20589 - DNA, 15 bp, Homo sapiens
gccaacctggtgtca

SEQ ID NO: 20590 - DNA, 15 bp, Homo sapiens
tgccaacctggtgtc

SEQ ID NO: 20591 - DNA, 15 bp, Homo sapiens
gtgccaacctggtgt

SEQ ID NO: 20592 - DNA, 15 bp, Homo sapiens
tgtgccaacctggtg

SEQ ID NO: 20593 - DNA, 15 bp, Homo sapiens
ttgtgccaacctggt

SEQ ID NO: 20594 - DNA, 15 bp, Homo sapiens
tttgtgccaacctgg

SEQ ID NO: 20595 - DNA, 15 bp, Homo sapiens
ttttgtgccaacctg

SEQ ID NO: 20596 - DNA, 15 bp, Homo sapiens
gttttgtgccaacct

SEQ ID NO: 20597 - DNA, 15 bp, Homo sapiens
tgttttgtgccaacc

SEQ ID NO: 20598 - DNA, 15 bp, Homo sapiens
ttgttttgtgccaac

SEQ ID NO: 20599 - DNA, 15 bp, Homo sapiens
gttgttttgtgccaa

SEQ ID NO: 20600 - DNA, 15 bp, Homo sapiens
agttgttttgtgcca

SEQ ID NO: 20601 - DNA, 15 bp, Homo sapiens
gagttgttttgtgcc

SEQ ID NO: 20602 - DNA, 15 bp, Homo sapiens
agagttgttttgtgc

SEQ ID NO: 20603 - DNA, 15 bp, Homo sapiens
cagagttgttttgtg

SEQ ID NO: 20604 - DNA, 15 bp, Homo sapiens
gcagagttgttttgt

SEQ ID NO: 20605 - DNA, 15 bp, Homo sapiens
ggcagagttgttttg

SEQ ID NO: 20606 - DNA, 15 bp, Homo sapiens
aggcagagttgtttt

SEQ ID NO: 20607 - DNA, 15 bp, Homo sapiens
caggcagagttgttt

SEQ ID NO: 20608 - DNA, 15 bp, Homo sapiens
ccaggcagagttgtt

SEQ ID NO: 20609 - DNA, 15 bp, Homo sapiens
tccaggcagagttgt

SEQ ID NO: 20610 - DNA, 15 bp, Homo sapiens
atccaggcagagttg

SEQ ID NO: 20611 - DNA, 15 bp, Homo sapiens
aatccaggcagagtt

SEQ ID NO: 20612 - DNA, 15 bp, Homo sapiens
caatccaggcagagt

SEQ ID NO: 20613 - DNA, 15 bp, Homo sapiens
tcaatccaggcagag

SEQ ID NO: 20614 - DNA, 15 bp, Homo sapiens
atcaatccaggcaga

SEQ ID NO: 20615 - DNA, 15 bp, Homo sapiens
aatcaatccaggcag

SEQ ID NO: 20616 - DNA, 15 bp, Homo sapiens
taatcaatccaggca

SEQ ID NO: 20617 - DNA, 15 bp, Homo sapiens
gtaatcaatccaggc

SEQ ID NO: 20618 - DNA, 15 bp, Homo sapiens
agtaatcaatccagg

SEQ ID NO: 20619 - DNA, 15 bp, Homo sapiens
aagtaatcaatccag

SEQ ID NO: 20620 - DNA, 15 bp, Homo sapiens
taagtaatcaatcca

SEQ ID NO: 20621 - DNA, 15 bp, Homo sapiens
ctaagtaatcaatcc

SEQ ID NO: 20622 - DNA, 15 bp, Homo sapiens
gctaagtaatcaatc

SEQ ID NO: 20623 - DNA, 15 bp, Homo sapiens
ggctaagtaatcaat

SEQ ID NO: 20624 - DNA, 15 bp, Homo sapiens
gggctaagtaatcaa

SEQ ID NO: 20625 - DNA, 15 bp, Homo sapiens
tgggctaagtaatca

SEQ ID NO: 20626 - DNA, 15 bp, Homo sapiens
atgggctaagtaatc

SEQ ID NO: 20627 - DNA, 15 bp, Homo sapiens
gatgggctaagtaat

SEQ ID NO: 20628 - DNA, 15 bp, Homo sapiens
tgatgggctaagtaa

SEQ ID NO: 20629 - DNA, 15 bp, Homo sapiens
atgatgggctaagta

SEQ ID NO: 20630 - DNA, 15 bp, Homo sapiens
tatgatgggctaagt

SEQ ID NO: 20631 - DNA, 15 bp, Homo sapiens
ctatgatgggctaag

SEQ ID NO: 20632 - DNA, 15 bp, Homo sapiens
gctatgatgggctaa

SEQ ID NO: 20633 - DNA, 15 bp, Homo sapiens
cgctatgatgggcta

SEQ ID NO: 20634 - DNA, 15 bp, Homo sapiens
acgctatgatgggct

SEQ ID NO: 20635 - DNA, 15 bp, Homo sapiens
tacgctatgatgggc

SEQ ID NO: 20636 - DNA, 15 bp, Homo sapiens
gtacgctatgatggg

SEQ ID NO: 20637 - DNA, 15 bp, Homo sapiens
tgtacgctatgatgg

SEQ ID NO: 20638 - DNA, 15 bp, Homo sapiens
gtgtacgctatgatg

SEQ ID NO: 20639 - DNA, 15 bp, Homo sapiens
agtgtacgctatgat

SEQ ID NO: 20640 - DNA, 15 bp, Homo sapiens
aagtgtacgctatga

SEQ ID NO: 20641 - DNA, 15 bp, Homo sapiens
aaagtgtacgctatg

SEQ ID NO: 20642 - DNA, 15 bp, Homo sapiens
gaaagtgtacgctat

SEQ ID NO: 20643 - DNA, 15 bp, Homo sapiens
agaaagtgtacgcta

SEQ ID NO: 20644 - DNA, 15 bp, Homo sapiens
aagaaagtgtacgct

SEQ ID NO: 20645 - DNA, 15 bp, Homo sapiens
gaagaaagtgtacgc

SEQ ID NO: 20646 - DNA, 15 bp, Homo sapiens
tgaagaaagtgtacg

SEQ ID NO: 20647 - DNA, 15 bp, Homo sapiens
atgaagaaagtgtac

SEQ ID NO: 20648 - DNA, 15 bp, Homo sapiens
aatgaagaaagtgta

SEQ ID NO: 20649 - DNA, 15 bp, Homo sapiens
aaatgaagaaagtgt

SEQ ID NO: 20650 - DNA, 15 bp, Homo sapiens
aaaatgaagaaagtg

SEQ ID NO: 20651 - DNA, 15 bp, Homo sapiens
taaaatgaagaaagt

SEQ ID NO: 20652 - DNA, 15 bp, Homo sapiens
ctaaaatgaagaaag

SEQ ID NO: 20653 - DNA, 15 bp, Homo sapiens
actaaaatgaagaaa

SEQ ID NO: 20654 - DNA, 15 bp, Homo sapiens
tactaaaatgaagaa

SEQ ID NO: 20655 - DNA, 15 bp, Homo sapiens
ttactaaaatgaaga

SEQ ID NO: 20656 - DNA, 15 bp, Homo sapiens
cttactaaaatgaag

SEQ ID NO: 20657 - DNA, 15 bp, Homo sapiens
acttactaaaatgaa

SEQ ID NO: 20658 - DNA, 15 bp, Homo sapiens
aacttactaaaatga

SEQ ID NO: 20659 - DNA, 15 bp, Homo sapiens
caacttactaaaatg

SEQ ID NO: 20660 - DNA, 15 bp, Homo sapiens
acaacttactaaaat

SEQ ID NO: 20661 - DNA, 15 bp, Homo sapiens
cacaacttactaaaa

SEQ ID NO: 20662 - DNA, 15 bp, Homo sapiens
ccacaacttactaaa

SEQ ID NO: 20663 - DNA, 15 bp, Homo sapiens
accacaacttactaa

SEQ ID NO: 20664 - DNA, 15 bp, Homo sapiens
aaccacaacttacta

SEQ ID NO: 20665 - DNA, 15 bp, Homo sapiens
aaaccacaacttact

SEQ ID NO: 20666 - DNA, 15 bp, Homo sapiens
aaaaccacaacttac

SEQ ID NO: 20667 - DNA, 15 bp, Homo sapiens
taaaaccacaactta

SEQ ID NO: 20668 - DNA, 15 bp, Homo sapiens
ataaaaccacaactt

SEQ ID NO: 20669 - DNA, 15 bp, Homo sapiens
aataaaaccacaact

SEQ ID NO: 20670 - DNA, 15 bp, Homo sapiens
aaataaaaccacaac

SEQ ID NO: 20671 - DNA, 15 bp, Homo sapiens
aaaataaaaccacaa

SEQ ID NO: 20672 - DNA, 15 bp, Homo sapiens
caaaataaaaccaca

SEQ ID NO: 20673 - DNA, 15 bp, Homo sapiens
tcaaaataaaaccac

SEQ ID NO: 20674 - DNA, 15 bp, Homo sapiens
ttcaaaataaaacca

SEQ ID NO: 20675 - DNA, 15 bp, Homo sapiens
attcaaaataaaacc

SEQ ID NO: 20676 - DNA, 15 bp, Homo sapiens
tattcaaaataaaac

SEQ ID NO: 20677 - DNA, 15 bp, Homo sapiens
ttattcaaaataaaa

SEQ ID NO: 20678 - DNA, 15 bp, Homo sapiens
cttattcaaaataaa

SEQ ID NO: 20679 - DNA, 15 bp, Homo sapiens
acttattcaaaataa

SEQ ID NO: 20680 - DNA, 15 bp, Homo sapiens
gacttattcaaaata

SEQ ID NO: 20681 - DNA, 15 bp, Homo sapiens
agacttattcaaaat

SEQ ID NO: 20682 - DNA, 15 bp, Homo sapiens
gagacttattcaaaa

SEQ ID NO: 20683 - DNA, 15 bp, Homo sapiens
agagacttattcaaa

SEQ ID NO: 20684 - DNA, 15 bp, Homo sapiens
aagagacttattcaa

SEQ ID NO: 20685 - DNA, 15 bp, Homo sapiens
aaagagacttattca

SEQ ID NO: 20686 - DNA, 15 bp, Homo sapiens
gaaagagacttattc

SEQ ID NO: 20687 - DNA, 15 bp, Homo sapiens
tgaaagagacttatt

SEQ ID NO: 20688 - DNA, 15 bp, Homo sapiens
ttgaaagagacttat

SEQ ID NO: 20689 - DNA, 15 bp, Homo sapiens
gttgaaagagactta

SEQ ID NO: 20690 - DNA, 15 bp, Homo sapiens
ggttgaaagagactt

SEQ ID NO: 20691 - DNA, 15 bp, Homo sapiens
aggttgaaagagact

SEQ ID NO: 20692 - DNA, 15 bp, Homo sapiens
taggttgaaagagac

SEQ ID NO: 20693 - DNA, 15 bp, Homo sapiens
ataggttgaaagaga

SEQ ID NO: 20694 - DNA, 15 bp, Homo sapiens
aataggttgaaagag

SEQ ID NO: 20695 - DNA, 15 bp, Homo sapiens
taataggttgaaaga

SEQ ID NO: 20696 - DNA, 15 bp, Homo sapiens
ttaataggttgaaag

SEQ ID NO: 20697 - DNA, 15 bp, Homo sapiens
attaataggttgaaa

SEQ ID NO: 20698 - DNA, 15 bp, Homo sapiens
tattaataggttgaa

SEQ ID NO: 20699 - DNA, 15 bp, Homo sapiens
atattaataggttga

SEQ ID NO: 20700 - DNA, 15 bp, Homo sapiens
aatattaataggttg

SEQ ID NO: 20701 - DNA, 15 bp, Homo sapiens
taatattaataggtt

SEQ ID NO: 20702 - DNA, 15 bp, Homo sapiens
ctaatattaataggt

SEQ ID NO: 20703 - DNA, 15 bp, Homo sapiens
actaatattaatagg

SEQ ID NO: 20704 - DNA, 15 bp, Homo sapiens
gactaatattaatag

SEQ ID NO: 20705 - DNA, 15 bp, Homo sapiens
agactaatattaata

SEQ ID NO: 20706 - DNA, 15 bp, Homo sapiens
tagactaatattaat

SEQ ID NO: 20707 - DNA, 15 bp, Homo sapiens
gtagactaatattaa

SEQ ID NO: 20708 - DNA, 15 bp, Homo sapiens
tgtagactaatatta

SEQ ID NO: 20709 - DNA, 15 bp, Homo sapiens
gtgtagactaatatt

SEQ ID NO: 20710 - DNA, 15 bp, Homo sapiens
agtgtagactaatat

SEQ ID NO: 20711 - DNA, 15 bp, Homo sapiens
tagtgtagactaata

SEQ ID NO: 20712 - DNA, 15 bp, Homo sapiens
ttagtgtagactaat

SEQ ID NO: 20713 - DNA, 15 bp, Homo sapiens
tttagtgtagactaa

SEQ ID NO: 20714 - DNA, 15 bp, Homo sapiens
ttttagtgtagacta

SEQ ID NO: 20715 - DNA, 15 bp, Homo sapiens
attttagtgtagact

SEQ ID NO: 20716 - DNA, 15 bp, Homo sapiens
aattttagtgtagac

SEQ ID NO: 20717 - DNA, 15 bp, Homo sapiens
taattttagtgtaga

SEQ ID NO: 20718 - DNA, 15 bp, Homo sapiens
ttaattttagtgtag

SEQ ID NO: 20719 - DNA, 15 bp, Homo sapiens
gttaattttagtgta

SEQ ID NO: 20720 - DNA, 15 bp, Homo sapiens
ggttaattttagtgt

SEQ ID NO: 20721 - DNA, 15 bp, Homo sapiens
aggttaattttagtg

SEQ ID NO: 20722 - DNA, 15 bp, Homo sapiens
aaggttaattttagt

SEQ ID NO: 20723 - DNA, 15 bp, Homo sapiens
gaaggttaattttag

SEQ ID NO: 20724 - DNA, 15 bp, Homo sapiens
ggaaggttaatttta

SEQ ID NO: 20725 - DNA, 15 bp, Homo sapiens
gggaaggttaatttt

SEQ ID NO: 20726 - DNA, 15 bp, Homo sapiens
ggggaaggttaattt

SEQ ID NO: 20727 - DNA, 15 bp, Homo sapiens
aggggaaggttaatt

SEQ ID NO: 20728 - DNA, 15 bp, Homo sapiens
taggggaaggttaat

SEQ ID NO: 20729 - DNA, 15 bp, Homo sapiens
ttaggggaaggttaa

SEQ ID NO: 20730 - DNA, 15 bp, Homo sapiens
tttaggggaaggtta

SEQ ID NO: 20731 - DNA, 15 bp, Homo sapiens
atttaggggaaggtt

SEQ ID NO: 20732 - DNA, 15 bp, Homo sapiens
aatttaggggaaggt

SEQ ID NO: 20733 - DNA, 15 bp, Homo sapiens
taatttaggggaagg

SEQ ID NO: 20734 - DNA, 15 bp, Homo sapiens
ataatttaggggaag

SEQ ID NO: 20735 - DNA, 15 bp, Homo sapiens
aataatttaggggaa

SEQ ID NO: 20736 - DNA, 15 bp, Homo sapiens
gaataatttagggga

SEQ ID NO: 20737 - DNA, 15 bp, Homo sapiens
agaataatttagggg

SEQ ID NO: 20738 - DNA, 15 bp, Homo sapiens
gagaataatttaggg

SEQ ID NO: 20739 - DNA, 15 bp, Homo sapiens
tgagaataatttagg

SEQ ID NO: 20740 - DNA, 15 bp, Homo sapiens
gtgagaataatttag

SEQ ID NO: 20741 - DNA, 15 bp, Homo sapiens
tgtgagaataattta

SEQ ID NO: 20742 - DNA, 15 bp, Homo sapiens
gtgtgagaataattt

SEQ ID NO: 20743 - DNA, 15 bp, Homo sapiens
tgtgtgagaataatt

SEQ ID NO: 20744 - DNA, 15 bp, Homo sapiens
ctgtgtgagaataat

SEQ ID NO: 20745 - DNA, 15 bp, Homo sapiens
tctgtgtgagaataa

SEQ ID NO: 20746 - DNA, 15 bp, Homo sapiens
ctctgtgtgagaata

SEQ ID NO: 20747 - DNA, 15 bp, Homo sapiens
cctctgtgtgagaat

SEQ ID NO: 20748 - DNA, 15 bp, Homo sapiens
gcctctgtgtgagaa

SEQ ID NO: 20749 - DNA, 15 bp, Homo sapiens
tgcctctgtgtgaga

SEQ ID NO: 20750 - DNA, 15 bp, Homo sapiens
ctgcctctgtgtgag

SEQ ID NO: 20751 - DNA, 15 bp, Homo sapiens
gctgcctctgtgtga

SEQ ID NO: 20752 - DNA, 15 bp, Homo sapiens
tgctgcctctgtgtg

SEQ ID NO: 20753 - DNA, 15 bp, Homo sapiens
ttgctgcctctgtgt

SEQ ID NO: 20754 - DNA, 15 bp, Homo sapiens
tttgctgcctctgtg

SEQ ID NO: 20755 - DNA, 15 bp, Homo sapiens
ctttgctgcctctgt

SEQ ID NO: 20756 - DNA, 15 bp, Homo sapiens
actttgctgcctctg

SEQ ID NO: 20757 - DNA, 15 bp, Homo sapiens
tactttgctgcctct

SEQ ID NO: 20758 - DNA, 15 bp, Homo sapiens
ttactttgctgcctc

SEQ ID NO: 20759 - DNA, 15 bp, Homo sapiens
attactttgctgcct

SEQ ID NO: 20760 - DNA, 15 bp, Homo sapiens
aattactttgctgcc

SEQ ID NO: 20761 - DNA, 15 bp, Homo sapiens
aaattactttgctgc

SEQ ID NO: 20762 - DNA, 15 bp, Homo sapiens
aaaattactttgctg

SEQ ID NO: 20763 - DNA, 15 bp, Homo sapiens
caaaattactttgct

SEQ ID NO: 20764 - DNA, 15 bp, Homo sapiens
tcaaaattactttgc

SEQ ID NO: 20765 - DNA, 15 bp, Homo sapiens
ttcaaaattactttg

SEQ ID NO: 20766 - DNA, 15 bp, Homo sapiens
tttcaaaattacttt

SEQ ID NO: 20767 - DNA, 15 bp, Homo sapiens
ctttcaaaattactt

SEQ ID NO: 20768 - DNA, 15 bp, Homo sapiens
actttcaaaattact

SEQ ID NO: 20769 - DNA, 15 bp, Homo sapiens
aactttcaaaattac

SEQ ID NO: 20770 - DNA, 15 bp, Homo sapiens
taactttcaaaatta

SEQ ID NO: 20771 - DNA, 15 bp, Homo sapiens
ttaactttcaaaatt

SEQ ID NO: 20772 - DNA, 15 bp, Homo sapiens
tttaactttcaaaat

SEQ ID NO: 20773 - DNA, 15 bp, Homo sapiens
atttaactttcaaaa

SEQ ID NO: 20774 - DNA, 15 bp, Homo sapiens
gatttaactttcaaa

SEQ ID NO: 20775 - DNA, 15 bp, Homo sapiens
tgatttaactttcaa

SEQ ID NO: 20776 - DNA, 15 bp, Homo sapiens
ttgatttaactttca

SEQ ID NO: 20777 - DNA, 15 bp, Homo sapiens
tttgatttaactttc

SEQ ID NO: 20778 - DNA, 15 bp, Homo sapiens
ttttgatttaacttt

SEQ ID NO: 20779 - DNA, 15 bp, Homo sapiens
gttttgatttaactt

SEQ ID NO: 20780 - DNA, 15 bp, Homo sapiens
tgttttgatttaact

SEQ ID NO: 20781 - DNA, 15 bp, Homo sapiens
ttgttttgatttaac

SEQ ID NO: 20782 - DNA, 15 bp, Homo sapiens
tttgttttgatttaa

SEQ ID NO: 20783 - DNA, 15 bp, Homo sapiens
ctttgttttgattta

SEQ ID NO: 20784 - DNA, 15 bp, Homo sapiens
gctttgttttgattt

SEQ ID NO: 20785 - DNA, 15 bp, Homo sapiens
tgctttgttttgatt

SEQ ID NO: 20786 - DNA, 15 bp, Homo sapiens
ttgctttgttttgat

SEQ ID NO: 20787 - DNA, 15 bp, Homo sapiens
attgctttgttttga

SEQ ID NO: 20788 - DNA, 15 bp, Homo sapiens
gattgctttgttttg

SEQ ID NO: 20789 - DNA, 15 bp, Homo sapiens
agattgctttgtttt

SEQ ID NO: 20790 - DNA, 15 bp, Homo sapiens
aagattgctttgttt

SEQ ID NO: 20791 - DNA, 15 bp, Homo sapiens
caagattgctttgtt

SEQ ID NO: 20792 - DNA, 15 bp, Homo sapiens
acaagattgctttgt

SEQ ID NO: 20793 - DNA, 15 bp, Homo sapiens
cacaagattgctttg

SEQ ID NO: 20794 - DNA, 15 bp, Homo sapiens
acacaagattgcttt

SEQ ID NO: 20795 - DNA, 15 bp, Homo sapiens
cacacaagattgctt

SEQ ID NO: 20796 - DNA, 15 bp, Homo sapiens
acacacaagattgct

SEQ ID NO: 20797 - DNA, 15 bp, Homo sapiens
tacacacaagattgc

SEQ ID NO: 20798 - DNA, 15 bp, Homo sapiens
ttacacacaagattg

SEQ ID NO: 20799 - DNA, 15 bp, Homo sapiens
tttacacacaagatt

SEQ ID NO: 20800 - DNA, 15 bp, Homo sapiens
ttttacacacaagat

SEQ ID NO: 20801 - DNA, 15 bp, Homo sapiens
gttttacacacaaga

SEQ ID NO: 20802 - DNA, 15 bp, Homo sapiens
tgttttacacacaag

SEQ ID NO: 20803 - DNA, 15 bp, Homo sapiens
ctgttttacacacaa

SEQ ID NO: 20804 - DNA, 15 bp, Homo sapiens
tctgttttacacaca

SEQ ID NO: 20805 - DNA, 15 bp, Homo sapiens
atctgttttacacac

SEQ ID NO: 20806 - DNA, 15 bp, Homo sapiens
tatctgttttacaca

SEQ ID NO: 20807 - DNA, 15 bp, Homo sapiens
ttatctgttttacac

SEQ ID NO: 20808 - DNA, 15 bp, Homo sapiens
tttatctgttttaca

SEQ ID NO: 20809 - DNA, 15 bp, Homo sapiens
ttttatctgttttac

SEQ ID NO: 20810 - DNA, 15 bp, Homo sapiens
tttttatctgtttta

SEQ ID NO: 20811 - DNA, 15 bp, Homo sapiens
atttttatctgtttt

SEQ ID NO: 20812 - DNA, 15 bp, Homo sapiens
gatttttatctgttt

SEQ ID NO: 20813 - DNA, 15 bp, Homo sapiens
tgatttttatctgtt

SEQ ID NO: 20814 - DNA, 15 bp, Homo sapiens
gtgatttttatctgt

SEQ ID NO: 20815 - DNA, 15 bp, Homo sapiens
tgtgatttttatctg

SEQ ID NO: 20816 - DNA, 15 bp, Homo sapiens
ctgtgatttttatct

SEQ ID NO: 20817 - DNA, 15 bp, Homo sapiens
tctgtgatttttatc

SEQ ID NO: 20818 - DNA, 15 bp, Homo sapiens
gtctgtgatttttat

SEQ ID NO: 20819 - DNA, 15 bp, Homo sapiens
agtctgtgattttta

SEQ ID NO: 20820 - DNA, 15 bp, Homo sapiens
cagtctgtgattttt

SEQ ID NO: 20821 - DNA, 15 bp, Homo sapiens
acagtctgtgatttt

SEQ ID NO: 20822 - DNA, 15 bp, Homo sapiens
cacagtctgtgattt

SEQ ID NO: 20823 - DNA, 15 bp, Homo sapiens
ccacagtctgtgatt

SEQ ID NO: 20824 - DNA, 15 bp, Homo sapiens
accacagtctgtgat

SEQ ID NO: 20825 - DNA, 15 bp, Homo sapiens
aaccacagtctgtga

SEQ ID NO: 20826 - DNA, 15 bp, Homo sapiens
taaccacagtctgtg

SEQ ID NO: 20827 - DNA, 15 bp, Homo sapiens
gtaaccacagtctgt

SEQ ID NO: 20828 - DNA, 15 bp, Homo sapiens
tgtaaccacagtctg

SEQ ID NO: 20829 - DNA, 15 bp, Homo sapiens
ctgtaaccacagtct

SEQ ID NO: 20830 - DNA, 15 bp, Homo sapiens
tctgtaaccacagtc

SEQ ID NO: 20831 - DNA, 15 bp, Homo sapiens
ctctgtaaccacagt

SEQ ID NO: 20832 - DNA, 15 bp, Homo sapiens
actctgtaaccacag

SEQ ID NO: 20833 - DNA, 15 bp, Homo sapiens
cactctgtaaccaca

SEQ ID NO: 20834 - DNA, 15 bp, Homo sapiens
gcactctgtaaccac

SEQ ID NO: 20835 - DNA, 15 bp, Homo sapiens
ggcactctgtaacca

SEQ ID NO: 20836 - DNA, 15 bp, Homo sapiens
aggcactctgtaacc

SEQ ID NO: 20837 - DNA, 15 bp, Homo sapiens
gaggcactctgtaac

SEQ ID NO: 20838 - DNA, 15 bp, Homo sapiens
agaggcactctgtaa

SEQ ID NO: 20839 - DNA, 15 bp, Homo sapiens
tagaggcactctgta

SEQ ID NO: 20840 - DNA, 15 bp, Homo sapiens
gtagaggcactctgt

SEQ ID NO: 20841 - DNA, 15 bp, Homo sapiens
tgtagaggcactctg

SEQ ID NO: 20842 - DNA, 15 bp, Homo sapiens
ctgtagaggcactct

SEQ ID NO: 20843 - DNA, 15 bp, Homo sapiens
cctgtagaggcactc

SEQ ID NO: 20844 - DNA, 15 bp, Homo sapiens
tcctgtagaggcact

SEQ ID NO: 20845 - DNA, 15 bp, Homo sapiens
ttcctgtagaggcac

SEQ ID NO: 20846 - DNA, 15 bp, Homo sapiens
attcctgtagaggca

SEQ ID NO: 20847 - DNA, 15 bp, Homo sapiens
gattcctgtagaggc

SEQ ID NO: 20848 - DNA, 15 bp, Homo sapiens
cgattcctgtagagg

SEQ ID NO: 20849 - DNA, 15 bp, Homo sapiens
gcgattcctgtagag

SEQ ID NO: 20850 - DNA, 15 bp, Homo sapiens
agcgattcctgtaga

SEQ ID NO: 20851 - DNA, 15 bp, Homo sapiens
aagcgattcctgtag

SEQ ID NO: 20852 - DNA, 15 bp, Homo sapiens
taagcgattcctgta

SEQ ID NO: 20853 - DNA, 15 bp, Homo sapiens
gtaagcgattcctgt

SEQ ID NO: 20854 - DNA, 15 bp, Homo sapiens
tgtaagcgattcctg

SEQ ID NO: 20855 - DNA, 15 bp, Homo sapiens
atgtaagcgattcct

SEQ ID NO: 20856 - DNA, 15 bp, Homo sapiens
tatgtaagcgattcc

SEQ ID NO: 20857 - DNA, 15 bp, Homo sapiens
ttatgtaagcgattc

SEQ ID NO: 20858 - DNA, 15 bp, Homo sapiens
tttatgtaagcgatt

SEQ ID NO: 20859 - DNA, 15 bp, Homo sapiens
ctttatgtaagcgat

SEQ ID NO: 20860 - DNA, 15 bp, Homo sapiens
gctttatgtaagcga

SEQ ID NO: 20861 - DNA, 15 bp, Homo sapiens
agctttatgtaagcg

SEQ ID NO: 20862 - DNA, 15 bp, Homo sapiens
cagctttatgtaagc

SEQ ID NO: 20863 - DNA, 15 bp, Homo sapiens
tcagctttatgtaag

SEQ ID NO: 20864 - DNA, 15 bp, Homo sapiens
atcagctttatgtaa

SEQ ID NO: 20865 - DNA, 15 bp, Homo sapiens
aatcagctttatgta

SEQ ID NO: 20866 - DNA, 15 bp, Homo sapiens
aaatcagctttatgt

SEQ ID NO: 20867 - DNA, 15 bp, Homo sapiens
gaaatcagctttatg

SEQ ID NO: 20868 - DNA, 15 bp, Homo sapiens
ggaaatcagctttat

SEQ ID NO: 20869 - DNA, 15 bp, Homo sapiens
aggaaatcagcttta

SEQ ID NO: 20870 - DNA, 15 bp, Homo sapiens
gaggaaatcagcttt

SEQ ID NO: 20871 - DNA, 15 bp, Homo sapiens
ggaggaaatcagctt

SEQ ID NO: 20872 - DNA, 15 bp, Homo sapiens
tggaggaaatcagct

SEQ ID NO: 20873 - DNA, 15 bp, Homo sapiens
ttggaggaaatcagc

SEQ ID NO: 20874 - DNA, 15 bp, Homo sapiens
attggaggaaatcag

SEQ ID NO: 20875 - DNA, 15 bp, Homo sapiens
gattggaggaaatca

SEQ ID NO: 20876 - DNA, 15 bp, Homo sapiens
agattggaggaaatc

SEQ ID NO: 20877 - DNA, 15 bp, Homo sapiens
aagattggaggaaat

SEQ ID NO: 20878 - DNA, 15 bp, Homo sapiens
caagattggaggaaa

SEQ ID NO: 20879 - DNA, 15 bp, Homo sapiens
acaagattggaggaa

SEQ ID NO: 20880 - DNA, 15 bp, Homo sapiens
aacaagattggagga

SEQ ID NO: 20881 - DNA, 15 bp, Homo sapiens
taacaagattggagg

SEQ ID NO: 20882 - DNA, 15 bp, Homo sapiens
ataacaagattggag

SEQ ID NO: 20883 - DNA, 15 bp, Homo sapiens
cataacaagattgga

SEQ ID NO: 20884 - DNA, 15 bp, Homo sapiens
ccataacaagattgg

SEQ ID NO: 20885 - DNA, 15 bp, Homo sapiens
tccataacaagattg

SEQ ID NO: 20886 - DNA, 15 bp, Homo sapiens
ttccataacaagatt

SEQ ID NO: 20887 - DNA, 15 bp, Homo sapiens
cttccataacaagat

SEQ ID NO: 20888 - DNA, 15 bp, Homo sapiens
ccttccataacaaga

SEQ ID NO: 20889 - DNA, 15 bp, Homo sapiens
tccttccataacaag

SEQ ID NO: 20890 - DNA, 15 bp, Homo sapiens
ttccttccataacaa

SEQ ID NO: 20891 - DNA, 15 bp, Homo sapiens
tttccttccataaca

SEQ ID NO: 20892 - DNA, 15 bp, Homo sapiens
ttttccttccataac

SEQ ID NO: 20893 - DNA, 15 bp, Homo sapiens
cttttccttccataa

SEQ ID NO: 20894 - DNA, 15 bp, Homo sapiens
ccttttccttccata

SEQ ID NO: 20895 - DNA, 15 bp, Homo sapiens
cccttttccttccat

SEQ ID NO: 20896 - DNA, 15 bp, Homo sapiens
ccccttttccttcca

SEQ ID NO: 20897 - DNA, 15 bp, Homo sapiens
tccccttttccttcc

SEQ ID NO: 20898 - DNA, 15 bp, Homo sapiens
ttccccttttccttc

SEQ ID NO: 20899 - DNA, 15 bp, Homo sapiens
tttccccttttcctt

SEQ ID NO: 20900 - DNA, 15 bp, Homo sapiens
atttccccttttcct

SEQ ID NO: 20901 - DNA, 15 bp, Homo sapiens
catttccccttttcc

SEQ ID NO: 20902 - DNA, 15 bp, Homo sapiens
gcatttccccttttc

SEQ ID NO: 20903 - DNA, 15 bp, Homo sapiens
ggcatttcccctttt

SEQ ID NO: 20904 - DNA, 15 bp, Homo sapiens
gggcatttccccttt

SEQ ID NO: 20905 - DNA, 15 bp, Homo sapiens
agggcatttcccctt

SEQ ID NO: 20906 - DNA, 15 bp, Homo sapiens
cagggcatttcccct

SEQ ID NO: 20907 - DNA, 15 bp, Homo sapiens
ccagggcatttcccc

SEQ ID NO: 20908 - DNA, 15 bp, Homo sapiens
gccagggcatttccc

SEQ ID NO: 20909 - DNA, 15 bp, Homo sapiens
ggccagggcatttcc

SEQ ID NO: 20910 - DNA, 15 bp, Homo sapiens
aggccagggcatttc

SEQ ID NO: 20911 - DNA, 15 bp, Homo sapiens
aaggccagggcattt

SEQ ID NO: 20912 - DNA, 15 bp, Homo sapiens
taaggccagggcatt

SEQ ID NO: 20913 - DNA, 15 bp, Homo sapiens
ataaggccagggcat

SEQ ID NO: 20914 - DNA, 15 bp, Homo sapiens
gataaggccagggca

SEQ ID NO: 20915 - DNA, 15 bp, Homo sapiens
tgataaggccagggc

SEQ ID NO: 20916 - DNA, 15 bp, Homo sapiens
gtgataaggccaggg

SEQ ID NO: 20917 - DNA, 15 bp, Homo sapiens
tgtgataaggccagg

SEQ ID NO: 20918 - DNA, 15 bp, Homo sapiens
ttgtgataaggccag

SEQ ID NO: 20919 - DNA, 15 bp, Homo sapiens
attgtgataaggcca

SEQ ID NO: 20920 - DNA, 15 bp, Homo sapiens
gattgtgataaggcc

SEQ ID NO: 20921 - DNA, 15 bp, Homo sapiens
ggattgtgataaggc

SEQ ID NO: 20922 - DNA, 15 bp, Homo sapiens
gggattgtgataagg

SEQ ID NO: 20923 - DNA, 15 bp, Homo sapiens
tgggattgtgataag

SEQ ID NO: 20924 - DNA, 15 bp, Homo sapiens
atgggattgtgataa

SEQ ID NO: 20925 - DNA, 15 bp, Homo sapiens
aatgggattgtgata

SEQ ID NO: 20926 - DNA, 15 bp, Homo sapiens
gaatgggattgtgat

SEQ ID NO: 20927 - DNA, 15 bp, Homo sapiens
agaatgggattgtga

SEQ ID NO: 20928 - DNA, 15 bp, Homo sapiens
cagaatgggattgtg

SEQ ID NO: 20929 - DNA, 15 bp, Homo sapiens
acagaatgggattgt

SEQ ID NO: 20930 - DNA, 15 bp, Homo sapiens
gacagaatgggattg

SEQ ID NO: 20931 - DNA, 15 bp, Homo sapiens
tgacagaatgggatt

SEQ ID NO: 20932 - DNA, 15 bp, Homo sapiens
ttgacagaatgggat

SEQ ID NO: 20933 - DNA, 15 bp, Homo sapiens
tttgacagaatggga

SEQ ID NO: 20934 - DNA, 15 bp, Homo sapiens
gtttgacagaatggg

SEQ ID NO: 20935 - DNA, 15 bp, Homo sapiens
tgtttgacagaatgg

SEQ ID NO: 20936 - DNA, 15 bp, Homo sapiens
ttgtttgacagaatg

SEQ ID NO: 20937 - DNA, 15 bp, Homo sapiens
cttgtttgacagaat

SEQ ID NO: 20938 - DNA, 15 bp, Homo sapiens
gcttgtttgacagaa

SEQ ID NO: 20939 - DNA, 15 bp, Homo sapiens
cgcttgtttgacaga

SEQ ID NO: 20940 - DNA, 15 bp, Homo sapiens
gcgcttgtttgacag

SEQ ID NO: 20941 - DNA, 15 bp, Homo sapiens
cgcgcttgtttgaca

SEQ ID NO: 20942 - DNA, 15 bp, Homo sapiens
ccgcgcttgtttgac

SEQ ID NO: 20943 - DNA, 15 bp, Homo sapiens
gccgcgcttgtttga

SEQ ID NO: 20944 - DNA, 15 bp, Homo sapiens
tgccgcgcttgtttg

SEQ ID NO: 20945 - DNA, 15 bp, Homo sapiens
ctgccgcgcttgttt

SEQ ID NO: 20946 - DNA, 15 bp, Homo sapiens
tctgccgcgcttgtt

SEQ ID NO: 20947 - DNA, 15 bp, Homo sapiens
ctctgccgcgcttgt

SEQ ID NO: 20948 - DNA, 15 bp, Homo sapiens
gctctgccgcgcttg

SEQ ID NO: 20949 - DNA, 15 bp, Homo sapiens
agctctgccgcgctt

SEQ ID NO: 20950 - DNA, 15 bp, Homo sapiens
aagctctgccgcgct

SEQ ID NO: 20951 - DNA, 15 bp, Homo sapiens
caagctctgccgcgc

SEQ ID NO: 20952 - DNA, 15 bp, Homo sapiens
acaagctctgccgcg

SEQ ID NO: 20953 - DNA, 15 bp, Homo sapiens
cacaagctctgccgc

SEQ ID NO: 20954 - DNA, 15 bp, Homo sapiens
acacaagctctgccg

SEQ ID NO: 20955 - DNA, 15 bp, Homo sapiens
tacacaagctctgcc

SEQ ID NO: 20956 - DNA, 15 bp, Homo sapiens
ttacacaagctctgc

SEQ ID NO: 20957 - DNA, 15 bp, Homo sapiens
tttacacaagctctg

SEQ ID NO: 20958 - DNA, 15 bp, Homo sapiens
gtttacacaagctct

SEQ ID NO: 20959 - DNA, 15 bp, Homo sapiens
tgtttacacaagctc

SEQ ID NO: 20960 - DNA, 15 bp, Homo sapiens
ctgtttacacaagct

SEQ ID NO: 20961 - DNA, 15 bp, Homo sapiens
actgtttacacaagc

SEQ ID NO: 20962 - DNA, 15 bp, Homo sapiens
cactgtttacacaag

SEQ ID NO: 20963 - DNA, 15 bp, Homo sapiens
ccactgtttacacaa

SEQ ID NO: 20964 - DNA, 15 bp, Homo sapiens
tccactgtttacaca

SEQ ID NO: 20965 - DNA, 15 bp, Homo sapiens
ctccactgtttacac

SEQ ID NO: 20966 - DNA, 15 bp, Homo sapiens
gctccactgtttaca

SEQ ID NO: 20967 - DNA, 15 bp, Homo sapiens
agctccactgtttac

SEQ ID NO: 20968 - DNA, 15 bp, Homo sapiens
cagctccactgttta

SEQ ID NO: 20969 - DNA, 15 bp, Homo sapiens
gcagctccactgttt

SEQ ID NO: 20970 - DNA, 15 bp, Homo sapiens
tgcagctccactgtt

SEQ ID NO: 20971 - DNA, 15 bp, Homo sapiens
ctgcagctccactgt

SEQ ID NO: 20972 - DNA, 15 bp, Homo sapiens
gctgcagctccactg

SEQ ID NO: 20973 - DNA, 15 bp, Homo sapiens
agctgcagctccact

SEQ ID NO: 20974 - DNA, 15 bp, Homo sapiens
cagctgcagctccac

SEQ ID NO: 20975 - DNA, 15 bp, Homo sapiens
gcagctgcagctcca

SEQ ID NO: 20976 - DNA, 15 bp, Homo sapiens
cgcagctgcagctcc

SEQ ID NO: 20977 - DNA, 15 bp, Homo sapiens
ccgcagctgcagctc

SEQ ID NO: 20978 - DNA, 15 bp, Homo sapiens
gccgcagctgcagct

SEQ ID NO: 20979 - DNA, 15 bp, Homo sapiens
agccgcagctgcagc

SEQ ID NO: 20980 - DNA, 15 bp, Homo sapiens
cagccgcagctgcag

SEQ ID NO: 20981 - DNA, 15 bp, Homo sapiens
ccagccgcagctgca

SEQ ID NO: 20982 - DNA, 15 bp, Homo sapiens
accagccgcagctgc

SEQ ID NO: 20983 - DNA, 15 bp, Homo sapiens
caccagccgcagctg

SEQ ID NO: 20984 - DNA, 15 bp, Homo sapiens
acaccagccgcagct

SEQ ID NO: 20985 - DNA, 15 bp, Homo sapiens
gacaccagccgcagc

SEQ ID NO: 20986 - DNA, 15 bp, Homo sapiens
agacaccagccgcag

SEQ ID NO: 20987 - DNA, 15 bp, Homo sapiens
cagacaccagccgca

SEQ ID NO: 20988 - DNA, 15 bp, Homo sapiens
acagacaccagccgc

SEQ ID NO: 20989 - DNA, 15 bp, Homo sapiens
cacagacaccagccg

SEQ ID NO: 20990 - DNA, 15 bp, Homo sapiens
ccacagacaccagcc

SEQ ID NO: 20991 - DNA, 15 bp, Homo sapiens
cccacagacaccagc

SEQ ID NO: 20992 - DNA, 15 bp, Homo sapiens
ccccacagacaccag

SEQ ID NO: 20993 - DNA, 15 bp, Homo sapiens
cccccacagacacca

SEQ ID NO: 20994 - DNA, 15 bp, Homo sapiens
gcccccacagacacc

SEQ ID NO: 20995 - DNA, 15 bp, Homo sapiens
ggcccccacagacac

SEQ ID NO: 20996 - DNA, 15 bp, Homo sapiens
tggcccccacagaca

SEQ ID NO: 20997 - DNA, 15 bp, Homo sapiens
atggcccccacagac

SEQ ID NO: 20998 - DNA, 15 bp, Homo sapiens
aatggcccccacaga

SEQ ID NO: 20999 - DNA, 15 bp, Homo sapiens
gaatggcccccacag

SEQ ID NO: 21000 - DNA, 15 bp, Homo sapiens
cgaatggcccccaca

SEQ ID NO: 21001 - DNA, 15 bp, Homo sapiens
ccgaatggcccccac

SEQ ID NO: 21002 - DNA, 15 bp, Homo sapiens
cccgaatggccccca

SEQ ID NO: 21003 - DNA, 15 bp, Homo sapiens
ccccgaatggccccc

SEQ ID NO: 21004 - DNA, 15 bp, Homo sapiens
accccgaatggcccc

SEQ ID NO: 21005 - DNA, 15 bp, Homo sapiens
gaccccgaatggccc

SEQ ID NO: 21006 - DNA, 15 bp, Homo sapiens
agaccccgaatggcc

SEQ ID NO: 21007 - DNA, 15 bp, Homo sapiens
cagaccccgaatggc

SEQ ID NO: 21008 - DNA, 15 bp, Homo sapiens
tcagaccccgaatgg

SEQ ID NO: 21009 - DNA, 15 bp, Homo sapiens
ctcagaccccgaatg

SEQ ID NO: 21010 - DNA, 15 bp, Homo sapiens
cctcagaccccgaat

SEQ ID NO: 21011 - DNA, 15 bp, Homo sapiens
ccctcagaccccgaa

SEQ ID NO: 21012 - DNA, 15 bp, Homo sapiens
cccctcagaccccga

SEQ ID NO: 21013 - DNA, 15 bp, Homo sapiens
tcccctcagaccccg

SEQ ID NO: 21014 - DNA, 15 bp, Homo sapiens
gtcccctcagacccc

SEQ ID NO: 21015 - DNA, 15 bp, Homo sapiens
tgtcccctcagaccc

SEQ ID NO: 21016 - DNA, 15 bp, Homo sapiens
ctgtcccctcagacc

SEQ ID NO: 21017 - DNA, 15 bp, Homo sapiens
actgtcccctcagac

SEQ ID NO: 21018 - DNA, 15 bp, Homo sapiens
aactgtcccctcaga

SEQ ID NO: 21019 - DNA, 15 bp, Homo sapiens
caactgtcccctcag

SEQ ID NO: 21020 - DNA, 15 bp, Homo sapiens
acaactgtcccctca

SEQ ID NO: 21021 - DNA, 15 bp, Homo sapiens
gacaactgtcccctc

SEQ ID NO: 21022 - DNA, 15 bp, Homo sapiens
agacaactgtcccct

SEQ ID NO: 21023 - DNA, 15 bp, Homo sapiens
gagacaactgtcccc

SEQ ID NO: 21024 - DNA, 15 bp, Homo sapiens
tgagacaactgtccc

SEQ ID NO: 21025 - DNA, 15 bp, Homo sapiens
ctgagacaactgtcc

SEQ ID NO: 21026 - DNA, 15 bp, Homo sapiens
gctgagacaactgtc

SEQ ID NO: 21027 - DNA, 15 bp, Homo sapiens
ggctgagacaactgt

SEQ ID NO: 21028 - DNA, 15 bp, Homo sapiens
aggctgagacaactg

SEQ ID NO: 21029 - DNA, 15 bp, Homo sapiens
caggctgagacaact

SEQ ID NO: 21030 - DNA, 15 bp, Homo sapiens
tcaggctgagacaac

SEQ ID NO: 21031 - DNA, 15 bp, Homo sapiens
atcaggctgagacaa

SEQ ID NO: 21032 - DNA, 15 bp, Homo sapiens
catcaggctgagaca

SEQ ID NO: 21033 - DNA, 15 bp, Homo sapiens
gcatcaggctgagac

SEQ ID NO: 21034 - DNA, 15 bp, Homo sapiens
tgcatcaggctgaga

SEQ ID NO: 21035 - DNA, 15 bp, Homo sapiens
atgcatcaggctgag

SEQ ID NO: 21036 - DNA, 15 bp, Homo sapiens
catgcatcaggctga

SEQ ID NO: 21037 - DNA, 15 bp, Homo sapiens
ccatgcatcaggctg

SEQ ID NO: 21038 - DNA, 15 bp, Homo sapiens
gccatgcatcaggct

SEQ ID NO: 21039 - DNA, 15 bp, Homo sapiens
tgccatgcatcaggc

SEQ ID NO: 21040 - DNA, 15 bp, Homo sapiens
ctgccatgcatcagg

SEQ ID NO: 21041 - DNA, 15 bp, Homo sapiens
cctgccatgcatcag

SEQ ID NO: 21042 - DNA, 15 bp, Homo sapiens
acctgccatgcatca

SEQ ID NO: 21043 - DNA, 15 bp, Homo sapiens
cacctgccatgcatc

SEQ ID NO: 21044 - DNA, 15 bp, Homo sapiens
ccacctgccatgcat

SEQ ID NO: 21045 - DNA, 15 bp, Homo sapiens
accacctgccatgca

SEQ ID NO: 21046 - DNA, 15 bp, Homo sapiens
aaccacctgccatgc

SEQ ID NO: 21047 - DNA, 15 bp, Homo sapiens
gaaccacctgccatg

SEQ ID NO: 21048 - DNA, 15 bp, Homo sapiens
ggaaccacctgccat

SEQ ID NO: 21049 - DNA, 15 bp, Homo sapiens
gggaaccacctgcca

SEQ ID NO: 21050 - DNA, 15 bp, Homo sapiens
cgggaaccacctgcc

SEQ ID NO: 21051 - DNA, 15 bp, Homo sapiens
gcgggaaccacctgc

SEQ ID NO: 21052 - DNA, 15 bp, Homo sapiens
cgcgggaaccacctg

SEQ ID NO: 21053 - DNA, 15 bp, Homo sapiens
tcgcgggaaccacct

SEQ ID NO: 21054 - DNA, 15 bp, Homo sapiens
gtcgcgggaaccacc

SEQ ID NO: 21055 - DNA, 15 bp, Homo sapiens
cgtcgcgggaaccac

SEQ ID NO: 21056 - DNA, 15 bp, Homo sapiens
ccgtcgcgggaacca

SEQ ID NO: 21057 - DNA, 15 bp, Homo sapiens
accgtcgcgggaacc

SEQ ID NO: 21058 - DNA, 15 bp, Homo sapiens
caccgtcgcgggaac

SEQ ID NO: 21059 - DNA, 15 bp, Homo sapiens
acaccgtcgcgggaa

SEQ ID NO: 21060 - DNA, 15 bp, Homo sapiens
cacaccgtcgcggga

SEQ ID NO: 21061 - DNA, 15 bp, Homo sapiens
acacaccgtcgcggg

SEQ ID NO: 21062 - DNA, 15 bp, Homo sapiens
aacacaccgtcgcgg

SEQ ID NO: 21063 - DNA, 15 bp, Homo sapiens
caacacaccgtcgcg

SEQ ID NO: 21064 - DNA, 15 bp, Homo sapiens
ccaacacaccgtcgc

SEQ ID NO: 21065 - DNA, 15 bp, Homo sapiens
tccaacacaccgtcg

SEQ ID NO: 21066 - DNA, 15 bp, Homo sapiens
ctccaacacaccgtc

SEQ ID NO: 21067 - DNA, 15 bp, Homo sapiens
cctccaacacaccgt

SEQ ID NO: 21068 - DNA, 15 bp, Homo sapiens
acctccaacacaccg

SEQ ID NO: 21069 - DNA, 15 bp, Homo sapiens
tacctccaacacacc

SEQ ID NO: 21070 - DNA, 15 bp, Homo sapiens
atacctccaacacac

SEQ ID NO: 21071 - DNA, 15 bp, Homo sapiens
gatacctccaacaca

SEQ ID NO: 21072 - DNA, 15 bp, Homo sapiens
ggatacctccaacac

SEQ ID NO: 21073 - DNA, 15 bp, Homo sapiens
gggatacctccaaca

SEQ ID NO: 21074 - DNA, 15 bp, Homo sapiens
ggggatacctccaac

SEQ ID NO: 21075 - DNA, 15 bp, Homo sapiens
gggggatacctccaa

SEQ ID NO: 21076 - DNA, 15 bp, Homo sapiens
tgggggatacctcca

SEQ ID NO: 21077 - DNA, 15 bp, Homo sapiens
gtgggggatacctcc

SEQ ID NO: 21078 - DNA, 15 bp, Homo sapiens
ggtgggggatacctc

SEQ ID NO: 21079 - DNA, 15 bp, Homo sapiens
gggtgggggatacct

SEQ ID NO: 21080 - DNA, 15 bp, Homo sapiens
tgggtgggggatacc

SEQ ID NO: 21081 - DNA, 15 bp, Homo sapiens
ttgggtgggggatac

SEQ ID NO: 21082 - DNA, 15 bp, Homo sapiens
attgggtgggggata

SEQ ID NO: 21083 - DNA, 15 bp, Homo sapiens
cattgggtgggggat

SEQ ID NO: 21084 - DNA, 15 bp, Homo sapiens
tcattgggtggggga

SEQ ID NO: 21085 - DNA, 15 bp, Homo sapiens
ctcattgggtggggg

SEQ ID NO: 21086 - DNA, 15 bp, Homo sapiens
tctcattgggtgggg

SEQ ID NO: 21087 - DNA, 15 bp, Homo sapiens
ttctcattgggtggg

SEQ ID NO: 21088 - DNA, 15 bp, Homo sapiens
cttctcattgggtgg

SEQ ID NO: 21089 - DNA, 15 bp, Homo sapiens
ccttctcattgggtg

SEQ ID NO: 21090 - DNA, 15 bp, Homo sapiens
cccttctcattgggt

SEQ ID NO: 21091 - DNA, 15 bp, Homo sapiens
ccccttctcattggg

SEQ ID NO: 21092 - DNA, 15 bp, Homo sapiens
cccccttctcattgg

SEQ ID NO: 21093 - DNA, 15 bp, Homo sapiens
acccccttctcattg

SEQ ID NO: 21094 - DNA, 15 bp, Homo sapiens
aacccccttctcatt

SEQ ID NO: 21095 - DNA, 15 bp, Homo sapiens
aaacccccttctcat

SEQ ID NO: 21096 - DNA, 15 bp, Homo sapiens
caaacccccttctca

SEQ ID NO: 21097 - DNA, 15 bp, Homo sapiens
acaaacccccttctc

SEQ ID NO: 21098 - DNA, 15 bp, Homo sapiens
cacaaacccccttct

SEQ ID NO: 21099 - DNA, 15 bp, Homo sapiens
ccacaaacccccttc

SEQ ID NO: 21100 - DNA, 15 bp, Homo sapiens
tccacaaaccccctt

SEQ ID NO: 21101 - DNA, 15 bp, Homo sapiens
ctccacaaaccccct

SEQ ID NO: 21102 - DNA, 15 bp, Homo sapiens
tctccacaaaccccc

SEQ ID NO: 21103 - DNA, 15 bp, Homo sapiens
ctctccacaaacccc

SEQ ID NO: 21104 - DNA, 15 bp, Homo sapiens
tctctccacaaaccc

SEQ ID NO: 21105 - DNA, 15 bp, Homo sapiens
gtctctccacaaacc

SEQ ID NO: 21106 - DNA, 15 bp, Homo sapiens
tgtctctccacaaac

SEQ ID NO: 21107 - DNA, 15 bp, Homo sapiens
ctgtctctccacaaa

SEQ ID NO: 21108 - DNA, 15 bp, Homo sapiens
actgtctctccacaa

SEQ ID NO: 21109 - DNA, 15 bp, Homo sapiens
gactgtctctccaca

SEQ ID NO: 21110 - DNA, 15 bp, Homo sapiens
tgactgtctctccac

SEQ ID NO: 21111 - DNA, 15 bp, Homo sapiens
atgactgtctctcca

SEQ ID NO: 21112 - DNA, 15 bp, Homo sapiens
catgactgtctctcc

SEQ ID NO: 21113 - DNA, 15 bp, Homo sapiens
acatgactgtctctc

SEQ ID NO: 21114 - DNA, 15 bp, Homo sapiens
tacatgactgtctct

SEQ ID NO: 21115 - DNA, 15 bp, Homo sapiens
ctacatgactgtctc

SEQ ID NO: 21116 - DNA, 15 bp, Homo sapiens
gctacatgactgtct

SEQ ID NO: 21117 - DNA, 15 bp, Homo sapiens
ggctacatgactgtc

SEQ ID NO: 21118 - DNA, 15 bp, Homo sapiens
gggctacatgactgt

SEQ ID NO: 21119 - DNA, 15 bp, Homo sapiens
cgggctacatgactg

SEQ ID NO: 21120 - DNA, 15 bp, Homo sapiens
ccgggctacatgact

SEQ ID NO: 21121 - DNA, 15 bp, Homo sapiens
accgggctacatgac

SEQ ID NO: 21122 - DNA, 15 bp, Homo sapiens
gaccgggctacatga

SEQ ID NO: 21123 - DNA, 15 bp, Homo sapiens
agaccgggctacatg

SEQ ID NO: 21124 - DNA, 15 bp, Homo sapiens
gagaccgggctacat

SEQ ID NO: 21125 - DNA, 15 bp, Homo sapiens
cgagaccgggctaca

SEQ ID NO: 21126 - DNA, 15 bp, Homo sapiens
acgagaccgggctac

SEQ ID NO: 21127 - DNA, 15 bp, Homo sapiens
cacgagaccgggcta

SEQ ID NO: 21128 - DNA, 15 bp, Homo sapiens
acacgagaccgggct

SEQ ID NO: 21129 - DNA, 15 bp, Homo sapiens
cacacgagaccgggc

SEQ ID NO: 21130 - DNA, 15 bp, Homo sapiens
ccacacgagaccggg

SEQ ID NO: 21131 - DNA, 15 bp, Homo sapiens
tccacacgagaccgg

SEQ ID NO: 21132 - DNA, 15 bp, Homo sapiens
atccacacgagaccg

SEQ ID NO: 21133 - DNA, 15 bp, Homo sapiens
aatccacacgagacc

SEQ ID NO: 21134 - DNA, 15 bp, Homo sapiens
taatccacacgagac

SEQ ID NO: 21135 - DNA, 15 bp, Homo sapiens
ctaatccacacgaga

SEQ ID NO: 21136 - DNA, 15 bp, Homo sapiens
actaatccacacgag

SEQ ID NO: 21137 - DNA, 15 bp, Homo sapiens
gactaatccacacga

SEQ ID NO: 21138 - DNA, 15 bp, Homo sapiens
tgactaatccacacg

SEQ ID NO: 21139 - DNA, 15 bp, Homo sapiens
atgactaatccacac

SEQ ID NO: 21140 - DNA, 15 bp, Homo sapiens
aatgactaatccaca

SEQ ID NO: 21141 - DNA, 15 bp, Homo sapiens
taatgactaatccac

SEQ ID NO: 21142 - DNA, 15 bp, Homo sapiens
ttaatgactaatcca

SEQ ID NO: 21143 - DNA, 15 bp, Homo sapiens
cttaatgactaatcc

SEQ ID NO: 21144 - DNA, 15 bp, Homo sapiens
tcttaatgactaatc

SEQ ID NO: 21145 - DNA, 15 bp, Homo sapiens
ttcttaatgactaat

SEQ ID NO: 21146 - DNA, 15 bp, Homo sapiens
tttcttaatgactaa

SEQ ID NO: 21147 - DNA, 15 bp, Homo sapiens
atttcttaatgacta

SEQ ID NO: 21148 - DNA, 15 bp, Homo sapiens
catttcttaatgact

SEQ ID NO: 21149 - DNA, 15 bp, Homo sapiens
acatttcttaatgac

SEQ ID NO: 21150 - DNA, 15 bp, Homo sapiens
gacatttcttaatga

SEQ ID NO: 21151 - DNA, 15 bp, Homo sapiens
ggacatttcttaatg

SEQ ID NO: 21152 - DNA, 15 bp, Homo sapiens
tggacatttcttaat

SEQ ID NO: 21153 - DNA, 15 bp, Homo sapiens
ctggacatttcttaa

SEQ ID NO: 21154 - DNA, 15 bp, Homo sapiens
cctggacatttctta

SEQ ID NO: 21155 - DNA, 15 bp, Homo sapiens
ccctggacatttctt

SEQ ID NO: 21156 - DNA, 15 bp, Homo sapiens
gccctggacatttct

SEQ ID NO: 21157 - DNA, 15 bp, Homo sapiens
tgccctggacatttc

SEQ ID NO: 21158 - DNA, 15 bp, Homo sapiens
ctgccctggacattt

SEQ ID NO: 21159 - DNA, 15 bp, Homo sapiens
tctgccctggacatt

SEQ ID NO: 21160 - DNA, 15 bp, Homo sapiens
atctgccctggacat

SEQ ID NO: 21161 - DNA, 15 bp, Homo sapiens
aatctgccctggaca

SEQ ID NO: 21162 - DNA, 15 bp, Homo sapiens
aaatctgccctggac

SEQ ID NO: 21163 - DNA, 15 bp, Homo sapiens
gaaatctgccctgga

SEQ ID NO: 21164 - DNA, 15 bp, Homo sapiens
tgaaatctgccctgg

SEQ ID NO: 21165 - DNA, 15 bp, Homo sapiens
ctgaaatctgccctg

SEQ ID NO: 21166 - DNA, 15 bp, Homo sapiens
tctgaaatctgccct

SEQ ID NO: 21167 - DNA, 15 bp, Homo sapiens
gtctgaaatctgccc

SEQ ID NO: 21168 - DNA, 15 bp, Homo sapiens
agtctgaaatctgcc

SEQ ID NO: 21169 - DNA, 15 bp, Homo sapiens
aagtctgaaatctgc

SEQ ID NO: 21170 - DNA, 15 bp, Homo sapiens
caagtctgaaatctg

SEQ ID NO: 21171 - DNA, 15 bp, Homo sapiens
tcaagtctgaaatct

SEQ ID NO: 21172 - DNA, 15 bp, Homo sapiens
ttcaagtctgaaatc

SEQ ID NO: 21173 - DNA, 15 bp, Homo sapiens
gttcaagtctgaaat

SEQ ID NO: 21174 - DNA, 15 bp, Homo sapiens
tgttcaagtctgaaa

SEQ ID NO: 21175 - DNA, 15 bp, Homo sapiens
ctgttcaagtctgaa

SEQ ID NO: 21176 - DNA, 15 bp, Homo sapiens
actgttcaagtctga

SEQ ID NO: 21177 - DNA, 15 bp, Homo sapiens
cactgttcaagtctg

SEQ ID NO: 21178 - DNA, 15 bp, Homo sapiens
tcactgttcaagtct

SEQ ID NO: 21179 - DNA, 15 bp, Homo sapiens
ttcactgttcaagtc

SEQ ID NO: 21180 - DNA, 15 bp, Homo sapiens
gttcactgttcaagt

SEQ ID NO: 21181 - DNA, 15 bp, Homo sapiens
ggttcactgttcaag

SEQ ID NO: 21182 - DNA, 15 bp, Homo sapiens
tggttcactgttcaa

SEQ ID NO: 21183 - DNA, 15 bp, Homo sapiens
ctggttcactgttca

SEQ ID NO: 21184 - DNA, 15 bp, Homo sapiens
cctggttcactgttc

SEQ ID NO: 21185 - DNA, 15 bp, Homo sapiens
acctggttcactgtt

SEQ ID NO: 21186 - DNA, 15 bp, Homo sapiens
aacctggttcactgt

SEQ ID NO: 21187 - DNA, 15 bp, Homo sapiens
caacctggttcactg

SEQ ID NO: 21188 - DNA, 15 bp, Homo sapiens
acaacctggttcact

SEQ ID NO: 21189 - DNA, 15 bp, Homo sapiens
tacaacctggttcac

SEQ ID NO: 21190 - DNA, 15 bp, Homo sapiens
ctacaacctggttca

SEQ ID NO: 21191 - DNA, 15 bp, Homo sapiens
gctacaacctggttc

SEQ ID NO: 21192 - DNA, 15 bp, Homo sapiens
agctacaacctggtt

SEQ ID NO: 21193 - DNA, 15 bp, Homo sapiens
gagctacaacctggt

SEQ ID NO: 21194 - DNA, 15 bp, Homo sapiens
tgagctacaacctgg

SEQ ID NO: 21195 - DNA, 15 bp, Homo sapiens
atgagctacaacctg

SEQ ID NO: 21196 - DNA, 15 bp, Homo sapiens
catgagctacaacct

SEQ ID NO: 21197 - DNA, 15 bp, Homo sapiens
ccatgagctacaacc

SEQ ID NO: 21198 - DNA, 15 bp, Homo sapiens
gccatgagctacaac

SEQ ID NO: 21199 - DNA, 15 bp, Homo sapiens
cgccatgagctacaa

SEQ ID NO: 21200 - DNA, 15 bp, Homo sapiens
acgccatgagctaca

SEQ ID NO: 21201 - DNA, 15 bp, Homo sapiens
gacgccatgagctac

SEQ ID NO: 21202 - DNA, 15 bp, Homo sapiens
cgacgccatgagcta

SEQ ID NO: 21203 - DNA, 15 bp, Homo sapiens
tcgacgccatgagct

SEQ ID NO: 21204 - DNA, 15 bp, Homo sapiens
ctcgacgccatgagc

SEQ ID NO: 21205 - DNA, 15 bp, Homo sapiens
cctcgacgccatgag

SEQ ID NO: 21206 - DNA, 15 bp, Homo sapiens
acctcgacgccatga

SEQ ID NO: 21207 - DNA, 15 bp, Homo sapiens
aacctcgacgccatg

SEQ ID NO: 21208 - DNA, 15 bp, Homo sapiens
caacctcgacgccat

SEQ ID NO: 21209 - DNA, 15 bp, Homo sapiens
tcaacctcgacgcca

SEQ ID NO: 21210 - DNA, 15 bp, Homo sapiens
ctcaacctcgacgcc

SEQ ID NO: 21211 - DNA, 15 bp, Homo sapiens
cctcaacctcgacgc

SEQ ID NO: 21212 - DNA, 15 bp, Homo sapiens
acctcaacctcgacg

SEQ ID NO: 21213 - DNA, 15 bp, Homo sapiens
cacctcaacctcgac

SEQ ID NO: 21214 - DNA, 15 bp, Homo sapiens
acacctcaacctcga

SEQ ID NO: 21215 - DNA, 15 bp, Homo sapiens
aacacctcaacctcg

SEQ ID NO: 21216 - DNA, 15 bp, Homo sapiens
caacacctcaacctc

SEQ ID NO: 21217 - DNA, 15 bp, Homo sapiens
acaacacctcaacct

SEQ ID NO: 21218 - DNA, 15 bp, Homo sapiens
cacaacacctcaacc

SEQ ID NO: 21219 - DNA, 15 bp, Homo sapiens
acacaacacctcaac

SEQ ID NO: 21220 - DNA, 15 bp, Homo sapiens
aacacaacacctcaa

SEQ ID NO: 21221 - DNA, 15 bp, Homo sapiens
caacacaacacctca

SEQ ID NO: 21222 - DNA, 15 bp, Homo sapiens
gcaacacaacacctc

SEQ ID NO: 21223 - DNA, 15 bp, Homo sapiens
ggcaacacaacacct

SEQ ID NO: 21224 - DNA, 15 bp, Homo sapiens
cggcaacacaacacc

SEQ ID NO: 21225 - DNA, 15 bp, Homo sapiens
gcggcaacacaacac

SEQ ID NO: 21226 - DNA, 15 bp, Homo sapiens
agcggcaacacaaca

SEQ ID NO: 21227 - DNA, 15 bp, Homo sapiens
cagcggcaacacaac

SEQ ID NO: 21228 - DNA, 15 bp, Homo sapiens
gcagcggcaacacaa

SEQ ID NO: 21229 - DNA, 15 bp, Homo sapiens
ggcagcggcaacaca

SEQ ID NO: 21230 - DNA, 15 bp, Homo sapiens
aggcagcggcaacac

SEQ ID NO: 21231 - DNA, 15 bp, Homo sapiens
aaggcagcggcaaca

SEQ ID NO: 21232 - DNA, 15 bp, Homo sapiens
aaaggcagcggcaac

SEQ ID NO: 21233 - DNA, 15 bp, Homo sapiens
caaaggcagcggcaa

SEQ ID NO: 21234 - DNA, 15 bp, Homo sapiens
ccaaaggcagcggca

SEQ ID NO: 21235 - DNA, 15 bp, Homo sapiens
accaaaggcagcggc

SEQ ID NO: 21236 - DNA, 15 bp, Homo sapiens
caccaaaggcagcgg

SEQ ID NO: 21237 - DNA, 15 bp, Homo sapiens
tcaccaaaggcagcg

SEQ ID NO: 21238 - DNA, 15 bp, Homo sapiens
gtcaccaaaggcagc

SEQ ID NO: 21239 - DNA, 15 bp, Homo sapiens
agtcaccaaaggcag

SEQ ID NO: 21240 - DNA, 15 bp, Homo sapiens
cagtcaccaaaggca

SEQ ID NO: 21241 - DNA, 15 bp, Homo sapiens
acagtcaccaaaggc

SEQ ID NO: 21242 - DNA, 15 bp, Homo sapiens
cacagtcaccaaagg

SEQ ID NO: 21243 - DNA, 15 bp, Homo sapiens
tcacagtcaccaaag

SEQ ID NO: 21244 - DNA, 15 bp, Homo sapiens
ttcacagtcaccaaa

SEQ ID NO: 21245 - DNA, 15 bp, Homo sapiens
attcacagtcaccaa

SEQ ID NO: 21246 - DNA, 15 bp, Homo sapiens
aattcacagtcacca

SEQ ID NO: 21247 - DNA, 15 bp, Homo sapiens
aaattcacagtcacc

SEQ ID NO: 21248 - DNA, 15 bp, Homo sapiens
taaattcacagtcac

SEQ ID NO: 21249 - DNA, 15 bp, Homo sapiens
ataaattcacagtca

SEQ ID NO: 21250 - DNA, 15 bp, Homo sapiens
tataaattcacagtc

SEQ ID NO: 21251 - DNA, 15 bp, Homo sapiens
gtataaattcacagt

SEQ ID NO: 21252 - DNA, 15 bp, Homo sapiens
ggtataaattcacag

SEQ ID NO: 21253 - DNA, 15 bp, Homo sapiens
aggtataaattcaca

SEQ ID NO: 21254 - DNA, 15 bp, Homo sapiens
aaggtataaattcac

SEQ ID NO: 21255 - DNA, 15 bp, Homo sapiens
caaggtataaattca

SEQ ID NO: 21256 - DNA, 15 bp, Homo sapiens
gcaaggtataaattc

SEQ ID NO: 21257 - DNA, 15 bp, Homo sapiens
tgcaaggtataaatt

SEQ ID NO: 21258 - DNA, 15 bp, Homo sapiens
gtgcaaggtataaat

SEQ ID NO: 21259 - DNA, 15 bp, Homo sapiens
tgtgcaaggtataaa

SEQ ID NO: 21260 - DNA, 15 bp, Homo sapiens
atgtgcaaggtataa

SEQ ID NO: 21261 - DNA, 15 bp, Homo sapiens
tatgtgcaaggtata

SEQ ID NO: 21262 - DNA, 15 bp, Homo sapiens
gtatgtgcaaggtat

SEQ ID NO: 21263 - DNA, 15 bp, Homo sapiens
agtatgtgcaaggta

SEQ ID NO: 21264 - DNA, 15 bp, Homo sapiens
gagtatgtgcaaggt

SEQ ID NO: 21265 - DNA, 15 bp, Homo sapiens
tgagtatgtgcaagg

SEQ ID NO: 21266 - DNA, 15 bp, Homo sapiens
gtgagtatgtgcaag

SEQ ID NO: 21267 - DNA, 15 bp, Homo sapiens
tgtgagtatgtgcaa

SEQ ID NO: 21268 - DNA, 15 bp, Homo sapiens
ttgtgagtatgtgca

SEQ ID NO: 21269 - DNA, 15 bp, Homo sapiens
tttgtgagtatgtgc

SEQ ID NO: 21270 - DNA, 15 bp, Homo sapiens
ttttgtgagtatgtg

SEQ ID NO: 21271 - DNA, 15 bp, Homo sapiens
attttgtgagtatgt

SEQ ID NO: 21272 - DNA, 15 bp, Homo sapiens
cattttgtgagtatg

SEQ ID NO: 21273 - DNA, 15 bp, Homo sapiens
ccattttgtgagtat

SEQ ID NO: 21274 - DNA, 15 bp, Homo sapiens
tccattttgtgagta

SEQ ID NO: 21275 - DNA, 15 bp, Homo sapiens
atccattttgtgagt

SEQ ID NO: 21276 - DNA, 15 bp, Homo sapiens
aatccattttgtgag

SEQ ID NO: 21277 - DNA, 15 bp, Homo sapiens
taatccattttgtga

SEQ ID NO: 21278 - DNA, 15 bp, Homo sapiens
ctaatccattttgtg

SEQ ID NO: 21279 - DNA, 15 bp, Homo sapiens
tctaatccattttgt

SEQ ID NO: 21280 - DNA, 15 bp, Homo sapiens
ttctaatccattttg

SEQ ID NO: 21281 - DNA, 15 bp, Homo sapiens
gttctaatccatttt

SEQ ID NO: 21282 - DNA, 15 bp, Homo sapiens
ggttctaatccattt

SEQ ID NO: 21283 - DNA, 15 bp, Homo sapiens
aggttctaatccatt

SEQ ID NO: 21284 - DNA, 15 bp, Homo sapiens
caggttctaatccat

SEQ ID NO: 21285 - DNA, 15 bp, Homo sapiens
tcaggttctaatcca

SEQ ID NO: 21286 - DNA, 15 bp, Homo sapiens
ttcaggttctaatcc

SEQ ID NO: 21287 - DNA, 15 bp, Homo sapiens
tttcaggttctaatc

SEQ ID NO: 21288 - DNA, 15 bp, Homo sapiens
ctttcaggttctaat

SEQ ID NO: 21289 - DNA, 15 bp, Homo sapiens
actttcaggttctaa

SEQ ID NO: 21290 - DNA, 15 bp, Homo sapiens
cactttcaggttcta

SEQ ID NO: 21291 - DNA, 15 bp, Homo sapiens
ccactttcaggttct

SEQ ID NO: 21292 - DNA, 15 bp, Homo sapiens
cccactttcaggttc

SEQ ID NO: 21293 - DNA, 15 bp, Homo sapiens
gcccactttcaggtt

SEQ ID NO: 21294 - DNA, 15 bp, Homo sapiens
cgcccactttcaggt

SEQ ID NO: 21295 - DNA, 15 bp, Homo sapiens
gcgcccactttcagg

SEQ ID NO: 21296 - DNA, 15 bp, Homo sapiens
agcgcccactttcag

SEQ ID NO: 21297 - DNA, 15 bp, Homo sapiens
cagcgcccactttca

SEQ ID NO: 21298 - DNA, 15 bp, Homo sapiens
acagcgcccactttc

SEQ ID NO: 21299 - DNA, 15 bp, Homo sapiens
cacagcgcccacttt

SEQ ID NO: 21300 - DNA, 15 bp, Homo sapiens
ccacagcgcccactt

SEQ ID NO: 21301 - DNA, 15 bp, Homo sapiens
tccacagcgcccact

SEQ ID NO: 21302 - DNA, 15 bp, Homo sapiens
ttccacagcgcccac

SEQ ID NO: 21303 - DNA, 15 bp, Homo sapiens
cttccacagcgccca

SEQ ID NO: 21304 - DNA, 15 bp, Homo sapiens
tcttccacagcgccc

SEQ ID NO: 21305 - DNA, 15 bp, Homo sapiens
gtcttccacagcgcc

SEQ ID NO: 21306 - DNA, 15 bp, Homo sapiens
ggtcttccacagcgc

SEQ ID NO: 21307 - DNA, 15 bp, Homo sapiens
aggtcttccacagcg

SEQ ID NO: 21308 - DNA, 15 bp, Homo sapiens
caggtcttccacagc

SEQ ID NO: 21309 - DNA, 15 bp, Homo sapiens
tcaggtcttccacag

SEQ ID NO: 21310 - DNA, 15 bp, Homo sapiens
ctcaggtcttccaca

SEQ ID NO: 21311 - DNA, 15 bp, Homo sapiens
cctcaggtcttccac

SEQ ID NO: 21312 - DNA, 15 bp, Homo sapiens
tcctcaggtcttcca

SEQ ID NO: 21313 - DNA, 15 bp, Homo sapiens
gtcctcaggtcttcc

SEQ ID NO: 21314 - DNA, 15 bp, Homo sapiens
ggtcctcaggtcttc

SEQ ID NO: 21315 - DNA, 15 bp, Homo sapiens
gggtcctcaggtctt

SEQ ID NO: 21316 - DNA, 15 bp, Homo sapiens
agggtcctcaggtct

SEQ ID NO: 21317 - DNA, 15 bp, Homo sapiens
cagggtcctcaggtc

SEQ ID NO: 21318 - DNA, 15 bp, Homo sapiens
tcagggtcctcaggt

SEQ ID NO: 21319 - DNA, 15 bp, Homo sapiens
ttcagggtcctcagg

SEQ ID NO: 21320 - DNA, 15 bp, Homo sapiens
tttcagggtcctcag

SEQ ID NO: 21321 - DNA, 15 bp, Homo sapiens
ctttcagggtcctca

SEQ ID NO: 21322 - DNA, 15 bp, Homo sapiens
gctttcagggtcctc

SEQ ID NO: 21323 - DNA, 15 bp, Homo sapiens
tgctttcagggtcct

SEQ ID NO: 21324 - DNA, 15 bp, Homo sapiens
atgctttcagggtcc

SEQ ID NO: 21325 - DNA, 15 bp, Homo sapiens
aatgctttcagggtc

SEQ ID NO: 21326 - DNA, 15 bp, Homo sapiens
caatgctttcagggt

SEQ ID NO: 21327 - DNA, 15 bp, Homo sapiens
ccaatgctttcaggg

SEQ ID NO: 21328 - DNA, 15 bp, Homo sapiens
tccaatgctttcagg

SEQ ID NO: 21329 - DNA, 15 bp, Homo sapiens
atccaatgctttcag

SEQ ID NO: 21330 - DNA, 15 bp, Homo sapiens
tatccaatgctttca

SEQ ID NO: 21331 - DNA, 15 bp, Homo sapiens
ttatccaatgctttc

SEQ ID NO: 21332 - DNA, 15 bp, Homo sapiens
cttatccaatgcttt

SEQ ID NO: 21333 - DNA, 15 bp, Homo sapiens
gcttatccaatgctt

SEQ ID NO: 21334 - DNA, 15 bp, Homo sapiens
agcttatccaatgct

SEQ ID NO: 21335 - DNA, 15 bp, Homo sapiens
cagcttatccaatgc

SEQ ID NO: 21336 - DNA, 15 bp, Homo sapiens
ccagcttatccaatg

SEQ ID NO: 21337 - DNA, 15 bp, Homo sapiens
accagcttatccaat

SEQ ID NO: 21338 - DNA, 15 bp, Homo sapiens
caccagcttatccaa

SEQ ID NO: 21339 - DNA, 15 bp, Homo sapiens
tcaccagcttatcca

SEQ ID NO: 21340 - DNA, 15 bp, Homo sapiens
atcaccagcttatcc

SEQ ID NO: 21341 - DNA, 15 bp, Homo sapiens
aatcaccagcttatc

SEQ ID NO: 21342 - DNA, 15 bp, Homo sapiens
aaatcaccagcttat

SEQ ID NO: 21343 - DNA, 15 bp, Homo sapiens
gaaatcaccagctta

SEQ ID NO: 21344 - DNA, 15 bp, Homo sapiens
ggaaatcaccagctt

SEQ ID NO: 21345 - DNA, 15 bp, Homo sapiens
aggaaatcaccagct

SEQ ID NO: 21346 - DNA, 15 bp, Homo sapiens
aaggaaatcaccagc

SEQ ID NO: 21347 - DNA, 15 bp, Homo sapiens
aaaggaaatcaccag

SEQ ID NO: 21348 - DNA, 15 bp, Homo sapiens
aaaaggaaatcacca

SEQ ID NO: 21349 - DNA, 15 bp, Homo sapiens
caaaaggaaatcacc

SEQ ID NO: 21350 - DNA, 15 bp, Homo sapiens
tcaaaaggaaatcac

SEQ ID NO: 21351 - DNA, 15 bp, Homo sapiens
ttcaaaaggaaatca

SEQ ID NO: 21352 - DNA, 15 bp, Homo sapiens
gttcaaaaggaaatc

SEQ ID NO: 21353 - DNA, 15 bp, Homo sapiens
tgttcaaaaggaaat

SEQ ID NO: 21354 - DNA, 15 bp, Homo sapiens
ctgttcaaaaggaaa

SEQ ID NO: 21355 - DNA, 15 bp, Homo sapiens
actgttcaaaaggaa

SEQ ID NO: 21356 - DNA, 15 bp, Homo sapiens
aactgttcaaaagga

SEQ ID NO: 21357 - DNA, 15 bp, Homo sapiens
aaactgttcaaaagg

SEQ ID NO: 21358 - DNA, 15 bp, Homo sapiens
gaaactgttcaaaag

SEQ ID NO: 21359 - DNA, 15 bp, Homo sapiens
agaaactgttcaaaa

SEQ ID NO: 21360 - DNA, 15 bp, Homo sapiens
gagaaactgttcaaa

SEQ ID NO: 21361 - DNA, 15 bp, Homo sapiens
tgagaaactgttcaa

SEQ ID NO: 21362 - DNA, 15 bp, Homo sapiens
ctgagaaactgttca

SEQ ID NO: 21363 - DNA, 15 bp, Homo sapiens
actgagaaactgttc

SEQ ID NO: 21364 - DNA, 15 bp, Homo sapiens
aactgagaaactgtt

SEQ ID NO: 21365 - DNA, 15 bp, Homo sapiens
aaactgagaaactgt

SEQ ID NO: 21366 - DNA, 15 bp, Homo sapiens
caaactgagaaactg

SEQ ID NO: 21367 - DNA, 15 bp, Homo sapiens
acaaactgagaaact

SEQ ID NO: 21368 - DNA, 15 bp, Homo sapiens
tacaaactgagaaac

SEQ ID NO: 21369 - DNA, 15 bp, Homo sapiens
ttacaaactgagaaa

SEQ ID NO: 21370 - DNA, 15 bp, Homo sapiens
gttacaaactgagaa

SEQ ID NO: 21371 - DNA, 15 bp, Homo sapiens
tgttacaaactgaga

SEQ ID NO: 21372 - DNA, 15 bp, Homo sapiens
ttgttacaaactgag

SEQ ID NO: 21373 - DNA, 15 bp, Homo sapiens
tttgttacaaactga

SEQ ID NO: 21374 - DNA, 15 bp, Homo sapiens
gtttgttacaaactg

SEQ ID NO: 21375 - DNA, 15 bp, Homo sapiens
tgtttgttacaaact

SEQ ID NO: 21376 - DNA, 15 bp, Homo sapiens
atgtttgttacaaac

SEQ ID NO: 21377 - DNA, 15 bp, Homo sapiens
tatgtttgttacaaa

SEQ ID NO: 21378 - DNA, 15 bp, Homo sapiens
atatgtttgttacaa

SEQ ID NO: 21379 - DNA, 15 bp, Homo sapiens
catatgtttgttaca

SEQ ID NO: 21380 - DNA, 15 bp, Homo sapiens
gcatatgtttgttac

SEQ ID NO: 21381 - DNA, 15 bp, Homo sapiens
agcatatgtttgtta

SEQ ID NO: 21382 - DNA, 15 bp, Homo sapiens
cagcatatgtttgtt

SEQ ID NO: 21383 - DNA, 15 bp, Homo sapiens
ccagcatatgtttgt

SEQ ID NO: 21384 - DNA, 15 bp, Homo sapiens
accagcatatgtttg

SEQ ID NO: 21385 - DNA, 15 bp, Homo sapiens
gaccagcatatgttt

SEQ ID NO: 21386 - DNA, 15 bp, Homo sapiens
tgaccagcatatgtt

SEQ ID NO: 21387 - DNA, 15 bp, Homo sapiens
gtgaccagcatatgt

SEQ ID NO: 21388 - DNA, 15 bp, Homo sapiens
agtgaccagcatatg

SEQ ID NO: 21389 - DNA, 15 bp, Homo sapiens
cagtgaccagcatat

SEQ ID NO: 21390 - DNA, 15 bp, Homo sapiens
tcagtgaccagcata

SEQ ID NO: 21391 - DNA, 15 bp, Homo sapiens
gtcagtgaccagcat

SEQ ID NO: 21392 - DNA, 15 bp, Homo sapiens
tgtcagtgaccagca

SEQ ID NO: 21393 - DNA, 15 bp, Homo sapiens
gtgtcagtgaccagc

SEQ ID NO: 21394 - DNA, 15 bp, Homo sapiens
tgtgtcagtgaccag

SEQ ID NO: 21395 - DNA, 15 bp, Homo sapiens
ctgtgtcagtgacca

SEQ ID NO: 21396 - DNA, 15 bp, Homo sapiens
tctgtgtcagtgacc

SEQ ID NO: 21397 - DNA, 15 bp, Homo sapiens
ctctgtgtcagtgac

SEQ ID NO: 21398 - DNA, 15 bp, Homo sapiens
tctctgtgtcagtga

SEQ ID NO: 21399 - DNA, 15 bp, Homo sapiens
gtctctgtgtcagtg

SEQ ID NO: 21400 - DNA, 15 bp, Homo sapiens
agtctctgtgtcagt

SEQ ID NO: 21401 - DNA, 15 bp, Homo sapiens
aagtctctgtgtcag

SEQ ID NO: 21402 - DNA, 15 bp, Homo sapiens
aaagtctctgtgtca

SEQ ID NO: 21403 - DNA, 15 bp, Homo sapiens
aaaagtctctgtgtc

SEQ ID NO: 21404 - DNA, 15 bp, Homo sapiens
aaaaagtctctgtgt

SEQ ID NO: 21405 - DNA, 15 bp, Homo sapiens
aaaaaagtctctgtg

SEQ ID NO: 21406 - DNA, 15 bp, Homo sapiens
taaaaaagtctctgt

SEQ ID NO: 21407 - DNA, 15 bp, Homo sapiens
ataaaaaagtctctg

SEQ ID NO: 21408 - DNA, 15 bp, Homo sapiens
cataaaaaagtctct

SEQ ID NO: 21409 - DNA, 15 bp, Homo sapiens
acataaaaaagtctc

SEQ ID NO: 21410 - DNA, 15 bp, Homo sapiens
aacataaaaaagtct

SEQ ID NO: 21411 - DNA, 15 bp, Homo sapiens
gaacataaaaaagtc

SEQ ID NO: 21412 - DNA, 15 bp, Homo sapiens
agaacataaaaaagt

SEQ ID NO: 21413 - DNA, 15 bp, Homo sapiens
cagaacataaaaaag

SEQ ID NO: 21414 - DNA, 15 bp, Homo sapiens
ccagaacataaaaaa

SEQ ID NO: 21415 - DNA, 15 bp, Homo sapiens
tccagaacataaaaa

SEQ ID NO: 21416 - DNA, 15 bp, Homo sapiens
atccagaacataaaa

SEQ ID NO: 21417 - DNA, 15 bp, Homo sapiens
aatccagaacataaa

SEQ ID NO: 21418 - DNA, 15 bp, Homo sapiens
caatccagaacataa

SEQ ID NO: 21419 - DNA, 15 bp, Homo sapiens
gcaatccagaacata

SEQ ID NO: 21420 - DNA, 15 bp, Homo sapiens
agcaatccagaacat

SEQ ID NO: 21421 - DNA, 15 bp, Homo sapiens
gagcaatccagaaca

SEQ ID NO: 21422 - DNA, 15 bp, Homo sapiens
agagcaatccagaac

SEQ ID NO: 21423 - DNA, 15 bp, Homo sapiens
aagagcaatccagaa

SEQ ID NO: 21424 - DNA, 15 bp, Homo sapiens
aaagagcaatccaga

SEQ ID NO: 21425 - DNA, 15 bp, Homo sapiens
gaaagagcaatccag

SEQ ID NO: 21426 - DNA, 15 bp, Homo sapiens
ggaaagagcaatcca

SEQ ID NO: 21427 - DNA, 15 bp, Homo sapiens
aggaaagagcaatcc

SEQ ID NO: 21428 - DNA, 15 bp, Homo sapiens
aaggaaagagcaatc

SEQ ID NO: 21429 - DNA, 15 bp, Homo sapiens
gaaggaaagagcaat

SEQ ID NO: 21430 - DNA, 15 bp, Homo sapiens
ggaaggaaagagcaa

SEQ ID NO: 21431 - DNA, 15 bp, Homo sapiens
gggaaggaaagagca

SEQ ID NO: 21432 - DNA, 15 bp, Homo sapiens
tgggaaggaaagagc

SEQ ID NO: 21433 - DNA, 15 bp, Homo sapiens
atgggaaggaaagag

SEQ ID NO: 21434 - DNA, 15 bp, Homo sapiens
tatgggaaggaaaga

SEQ ID NO: 21435 - DNA, 15 bp, Homo sapiens
gtatgggaaggaaag

SEQ ID NO: 21436 - DNA, 15 bp, Homo sapiens
ggtatgggaaggaaa

SEQ ID NO: 21437 - DNA, 15 bp, Homo sapiens
cggtatgggaaggaa

SEQ ID NO: 21438 - DNA, 15 bp, Homo sapiens
tcggtatgggaagga

SEQ ID NO: 21439 - DNA, 15 bp, Homo sapiens
ctcggtatgggaagg

SEQ ID NO: 21440 - DNA, 15 bp, Homo sapiens
tctcggtatgggaag

SEQ ID NO: 21441 - DNA, 15 bp, Homo sapiens
ttctcggtatgggaa

SEQ ID NO: 21442 - DNA, 15 bp, Homo sapiens
cttctcggtatggga

SEQ ID NO: 21443 - DNA, 15 bp, Homo sapiens
ccttctcggtatggg

SEQ ID NO: 21444 - DNA, 15 bp, Homo sapiens
accttctcggtatgg

SEQ ID NO: 21445 - DNA, 15 bp, Homo sapiens
caccttctcggtatg

SEQ ID NO: 21446 - DNA, 15 bp, Homo sapiens
ccaccttctcggtat

SEQ ID NO: 21447 - DNA, 15 bp, Homo sapiens
cccaccttctcggta

SEQ ID NO: 21448 - DNA, 15 bp, Homo sapiens
tcccaccttctcggt

SEQ ID NO: 21449 - DNA, 15 bp, Homo sapiens
ctcccaccttctcgg

SEQ ID NO: 21450 - DNA, 15 bp, Homo sapiens
cctcccaccttctcg

SEQ ID NO: 21451 - DNA, 15 bp, Homo sapiens
tcctcccaccttctc

SEQ ID NO: 21452 - DNA, 15 bp, Homo sapiens
atcctcccaccttct

SEQ ID NO: 21453 - DNA, 15 bp, Homo sapiens
catcctcccaccttc

SEQ ID NO: 21454 - DNA, 15 bp, Homo sapiens
ccatcctcccacctt

SEQ ID NO: 21455 - DNA, 15 bp, Homo sapiens
cccatcctcccacct

SEQ ID NO: 21456 - DNA, 15 bp, Homo sapiens
ccccatcctcccacc

SEQ ID NO: 21457 - DNA, 15 bp, Homo sapiens
cccccatcctcccac

SEQ ID NO: 21458 - DNA, 15 bp, Homo sapiens
acccccatcctccca

SEQ ID NO: 21459 - DNA, 15 bp, Homo sapiens
aacccccatcctccc

SEQ ID NO: 21460 - DNA, 15 bp, Homo sapiens
caacccccatcctcc

SEQ ID NO: 21461 - DNA, 15 bp, Homo sapiens
tcaacccccatcctc

SEQ ID NO: 21462 - DNA, 15 bp, Homo sapiens
gtcaacccccatcct

SEQ ID NO: 21463 - DNA, 15 bp, Homo sapiens
tgtcaacccccatcc

SEQ ID NO: 21464 - DNA, 15 bp, Homo sapiens
atgtcaacccccatc

SEQ ID NO: 21465 - DNA, 15 bp, Homo sapiens
aatgtcaacccccat

SEQ ID NO: 21466 - DNA, 15 bp, Homo sapiens
caatgtcaaccccca

SEQ ID NO: 21467 - DNA, 15 bp, Homo sapiens
gcaatgtcaaccccc

SEQ ID NO: 21468 - DNA, 15 bp, Homo sapiens
ggcaatgtcaacccc

SEQ ID NO: 21469 - DNA, 15 bp, Homo sapiens
aggcaatgtcaaccc

SEQ ID NO: 21470 - DNA, 15 bp, Homo sapiens
caggcaatgtcaacc

SEQ ID NO: 21471 - DNA, 15 bp, Homo sapiens
acaggcaatgtcaac

SEQ ID NO: 21472 - DNA, 15 bp, Homo sapiens
cacaggcaatgtcaa

SEQ ID NO: 21473 - DNA, 15 bp, Homo sapiens
acacaggcaatgtca

SEQ ID NO: 21474 - DNA, 15 bp, Homo sapiens
gacacaggcaatgtc

SEQ ID NO: 21475 - DNA, 15 bp, Homo sapiens
agacacaggcaatgt

SEQ ID NO: 21476 - DNA, 15 bp, Homo sapiens
cagacacaggcaatg

SEQ ID NO: 21477 - DNA, 15 bp, Homo sapiens
acagacacaggcaat

SEQ ID NO: 21478 - DNA, 15 bp, Homo sapiens
cacagacacaggcaa

SEQ ID NO: 21479 - DNA, 15 bp, Homo sapiens
tcacagacacaggca

SEQ ID NO: 21480 - DNA, 15 bp, Homo sapiens
gtcacagacacaggc

SEQ ID NO: 21481 - DNA, 15 bp, Homo sapiens
ggtcacagacacagg

SEQ ID NO: 21482 - DNA, 15 bp, Homo sapiens
tggtcacagacacag

SEQ ID NO: 21483 - DNA, 15 bp, Homo sapiens
atggtcacagacaca

SEQ ID NO: 21484 - DNA, 15 bp, Homo sapiens
catggtcacagacac

SEQ ID NO: 21485 - DNA, 15 bp, Homo sapiens
ccatggtcacagaca

SEQ ID NO: 21486 - DNA, 15 bp, Homo sapiens
cccatggtcacagac

SEQ ID NO: 21487 - DNA, 15 bp, Homo sapiens
gcccatggtcacaga

SEQ ID NO: 21488 - DNA, 15 bp, Homo sapiens
tgcccatggtcacag

SEQ ID NO: 21489 - DNA, 15 bp, Homo sapiens
gtgcccatggtcaca

SEQ ID NO: 21490 - DNA, 15 bp, Homo sapiens
ggtgcccatggtcac

SEQ ID NO: 21491 - DNA, 15 bp, Homo sapiens
gggtgcccatggtca

SEQ ID NO: 21492 - DNA, 15 bp, Homo sapiens
ggggtgcccatggtc

SEQ ID NO: 21493 - DNA, 15 bp, Homo sapiens
aggggtgcccatggt

SEQ ID NO: 21494 - DNA, 15 bp, Homo sapiens
gaggggtgcccatgg

SEQ ID NO: 21495 - DNA, 15 bp, Homo sapiens
agaggggtgcccatg

SEQ ID NO: 21496 - DNA, 15 bp, Homo sapiens
cagaggggtgcccat

SEQ ID NO: 21497 - DNA, 15 bp, Homo sapiens
ccagaggggtgccca

SEQ ID NO: 21498 - DNA, 15 bp, Homo sapiens
cccagaggggtgccc

SEQ ID NO: 21499 - DNA, 15 bp, Homo sapiens
acccagaggggtgcc

SEQ ID NO: 21500 - DNA, 15 bp, Homo sapiens
gacccagaggggtgc

SEQ ID NO: 21501 - DNA, 15 bp, Homo sapiens
tgacccagaggggtg

SEQ ID NO: 21502 - DNA, 15 bp, Homo sapiens
gtgacccagaggggt

SEQ ID NO: 21503 - DNA, 15 bp, Homo sapiens
cgtgacccagagggg

SEQ ID NO: 21504 - DNA, 15 bp, Homo sapiens
ccgtgacccagaggg

SEQ ID NO: 21505 - DNA, 15 bp, Homo sapiens
accgtgacccagagg

SEQ ID NO: 21506 - DNA, 15 bp, Homo sapiens
caccgtgacccagag

SEQ ID NO: 21507 - DNA, 15 bp, Homo sapiens
acaccgtgacccaga

SEQ ID NO: 21508 - DNA, 15 bp, Homo sapiens
aacaccgtgacccag

SEQ ID NO: 21509 - DNA, 15 bp, Homo sapiens
aaacaccgtgaccca

SEQ ID NO: 21510 - DNA, 15 bp, Homo sapiens
taaacaccgtgaccc

SEQ ID NO: 21511 - DNA, 15 bp, Homo sapiens
ataaacaccgtgacc

SEQ ID NO: 21512 - DNA, 15 bp, Homo sapiens
gataaacaccgtgac

SEQ ID NO: 21513 - DNA, 15 bp, Homo sapiens
tgataaacaccgtga

SEQ ID NO: 21514 - DNA, 15 bp, Homo sapiens
atgataaacaccgtg

SEQ ID NO: 21515 - DNA, 15 bp, Homo sapiens
tatgataaacaccgt

SEQ ID NO: 21516 - DNA, 15 bp, Homo sapiens
ctatgataaacaccg

SEQ ID NO: 21517 - DNA, 15 bp, Homo sapiens
gctatgataaacacc

SEQ ID NO: 21518 - DNA, 15 bp, Homo sapiens
ggctatgataaacac

SEQ ID NO: 21519 - DNA, 15 bp, Homo sapiens
tggctatgataaaca

SEQ ID NO: 21520 - DNA, 15 bp, Homo sapiens
ttggctatgataaac

SEQ ID NO: 21521 - DNA, 15 bp, Homo sapiens
cttggctatgataaa

SEQ ID NO: 21522 - DNA, 15 bp, Homo sapiens
gcttggctatgataa

SEQ ID NO: 21523 - DNA, 15 bp, Homo sapiens
tgcttggctatgata

SEQ ID NO: 21524 - DNA, 15 bp, Homo sapiens
ctgcttggctatgat

SEQ ID NO: 21525 - DNA, 15 bp, Homo sapiens
gctgcttggctatga

SEQ ID NO: 21526 - DNA, 15 bp, Homo sapiens
ggctgcttggctatg

SEQ ID NO: 21527 - DNA, 15 bp, Homo sapiens
tggctgcttggctat

SEQ ID NO: 21528 - DNA, 15 bp, Homo sapiens
ctggctgcttggcta

SEQ ID NO: 21529 - DNA, 15 bp, Homo sapiens
tctggctgcttggct

SEQ ID NO: 21530 - DNA, 15 bp, Homo sapiens
ctctggctgcttggc

SEQ ID NO: 21531 - DNA, 15 bp, Homo sapiens
cctctggctgcttgg

SEQ ID NO: 21532 - DNA, 15 bp, Homo sapiens
gcctctggctgcttg

SEQ ID NO: 21533 - DNA, 15 bp, Homo sapiens
tgcctctggctgctt

SEQ ID NO: 21534 - DNA, 15 bp, Homo sapiens
gtgcctctggctgct

SEQ ID NO: 21535 - DNA, 15 bp, Homo sapiens
tgtgcctctggctgc

SEQ ID NO: 21536 - DNA, 15 bp, Homo sapiens
ttgtgcctctggctg

SEQ ID NO: 21537 - DNA, 15 bp, Homo sapiens
attgtgcctctggct

SEQ ID NO: 21538 - DNA, 15 bp, Homo sapiens
cattgtgcctctggc

SEQ ID NO: 21539 - DNA, 15 bp, Homo sapiens
ccattgtgcctctgg

SEQ ID NO: 21540 - DNA, 15 bp, Homo sapiens
gccattgtgcctctg

SEQ ID NO: 21541 - DNA, 15 bp, Homo sapiens
cgccattgtgcctct

SEQ ID NO: 21542 - DNA, 15 bp, Homo sapiens
gcgccattgtgcctc

SEQ ID NO: 21543 - DNA, 15 bp, Homo sapiens
tgcgccattgtgcct

SEQ ID NO: 21544 - DNA, 15 bp, Homo sapiens
atgcgccattgtgcc

SEQ ID NO: 21545 - DNA, 15 bp, Homo sapiens
gatgcgccattgtgc

SEQ ID NO: 21546 - DNA, 15 bp, Homo sapiens
tgatgcgccattgtg

SEQ ID NO: 21547 - DNA, 15 bp, Homo sapiens
gtgatgcgccattgt

SEQ ID NO: 21548 - DNA, 15 bp, Homo sapiens
agtgatgcgccattg

SEQ ID NO: 21549 - DNA, 15 bp, Homo sapiens
cagtgatgcgccatt

SEQ ID NO: 21550 - DNA, 15 bp, Homo sapiens
gcagtgatgcgccat

SEQ ID NO: 21551 - DNA, 15 bp, Homo sapiens
cgcagtgatgcgcca

SEQ ID NO: 21552 - DNA, 15 bp, Homo sapiens
tcgcagtgatgcgcc

SEQ ID NO: 21553 - DNA, 15 bp, Homo sapiens
ctcgcagtgatgcgc

SEQ ID NO: 21554 - DNA, 15 bp, Homo sapiens
tctcgcagtgatgcg

SEQ ID NO: 21555 - DNA, 15 bp, Homo sapiens
gtctcgcagtgatgc

SEQ ID NO: 21556 - DNA, 15 bp, Homo sapiens
agtctcgcagtgatg

SEQ ID NO: 21557 - DNA, 15 bp, Homo sapiens
aagtctcgcagtgat

SEQ ID NO: 21558 - DNA, 15 bp, Homo sapiens
aaagtctcgcagtga

SEQ ID NO: 21559 - DNA, 15 bp, Homo sapiens
taaagtctcgcagtg

SEQ ID NO: 21560 - DNA, 15 bp, Homo sapiens
ataaagtctcgcagt

SEQ ID NO: 21561 - DNA, 15 bp, Homo sapiens
aataaagtctcgcag

SEQ ID NO: 21562 - DNA, 15 bp, Homo sapiens
aaataaagtctcgca

SEQ ID NO: 21563 - DNA, 15 bp, Homo sapiens
taaataaagtctcgc

SEQ ID NO: 21564 - DNA, 15 bp, Homo sapiens
ctaaataaagtctcg

SEQ ID NO: 21565 - DNA, 15 bp, Homo sapiens
gctaaataaagtctc

SEQ ID NO: 21566 - DNA, 15 bp, Homo sapiens
agctaaataaagtct

SEQ ID NO: 21567 - DNA, 15 bp, Homo sapiens
aagctaaataaagtc

SEQ ID NO: 21568 - DNA, 15 bp, Homo sapiens
gaagctaaataaagt

SEQ ID NO: 21569 - DNA, 15 bp, Homo sapiens
agaagctaaataaag

SEQ ID NO: 21570 - DNA, 15 bp, Homo sapiens
aagaagctaaataaa

SEQ ID NO: 21571 - DNA, 15 bp, Homo sapiens
taagaagctaaataa

SEQ ID NO: 21572 - DNA, 15 bp, Homo sapiens
ctaagaagctaaata

SEQ ID NO: 21573 - DNA, 15 bp, Homo sapiens
cctaagaagctaaat

SEQ ID NO: 21574 - DNA, 15 bp, Homo sapiens
ccctaagaagctaaa

SEQ ID NO: 21575 - DNA, 15 bp, Homo sapiens
gccctaagaagctaa

SEQ ID NO: 21576 - DNA, 15 bp, Homo sapiens
tgccctaagaagcta

SEQ ID NO: 21577 - DNA, 15 bp, Homo sapiens
ctgccctaagaagct

SEQ ID NO: 21578 - DNA, 15 bp, Homo sapiens
tctgccctaagaagc

SEQ ID NO: 21579 - DNA, 15 bp, Homo sapiens
atctgccctaagaag

SEQ ID NO: 21580 - DNA, 15 bp, Homo sapiens
aatctgccctaagaa

SEQ ID NO: 21581 - DNA, 15 bp, Homo sapiens
taatctgccctaaga

SEQ ID NO: 21582 - DNA, 15 bp, Homo sapiens
gtaatctgccctaag

SEQ ID NO: 21583 - DNA, 15 bp, Homo sapiens
agtaatctgccctaa

SEQ ID NO: 21584 - DNA, 15 bp, Homo sapiens
gagtaatctgcccta

SEQ ID NO: 21585 - DNA, 15 bp, Homo sapiens
ggagtaatctgccct

SEQ ID NO: 21586 - DNA, 15 bp, Homo sapiens
tggagtaatctgccc

SEQ ID NO: 21587 - DNA, 15 bp, Homo sapiens
ttggagtaatctgcc

SEQ ID NO: 21588 - DNA, 15 bp, Homo sapiens
tttggagtaatctgc

SEQ ID NO: 21589 - DNA, 15 bp, Homo sapiens
atttggagtaatctg

SEQ ID NO: 21590 - DNA, 15 bp, Homo sapiens
gatttggagtaatct

SEQ ID NO: 21591 - DNA, 15 bp, Homo sapiens
tgatttggagtaatc

SEQ ID NO: 21592 - DNA, 15 bp, Homo sapiens
gtgatttggagtaat

SEQ ID NO: 21593 - DNA, 15 bp, Homo sapiens
agtgatttggagtaa

SEQ ID NO: 21594 - DNA, 15 bp, Homo sapiens
cagtgatttggagta

SEQ ID NO: 21595 - DNA, 15 bp, Homo sapiens
ccagtgatttggagt

SEQ ID NO: 21596 - DNA, 15 bp, Homo sapiens
accagtgatttggag

SEQ ID NO: 21597 - DNA, 15 bp, Homo sapiens
aaccagtgatttgga

SEQ ID NO: 21598 - DNA, 15 bp, Homo sapiens
aaaccagtgatttgg

SEQ ID NO: 21599 - DNA, 15 bp, Homo sapiens
aaaaccagtgatttg

SEQ ID NO: 21600 - DNA, 15 bp, Homo sapiens
aaaaaccagtgattt

SEQ ID NO: 21601 - DNA, 15 bp, Homo sapiens
gaaaaaccagtgatt

SEQ ID NO: 21602 - DNA, 15 bp, Homo sapiens
tgaaaaaccagtgat

SEQ ID NO: 21603 - DNA, 15 bp, Homo sapiens
ttgaaaaaccagtga

SEQ ID NO: 21604 - DNA, 15 bp, Homo sapiens
tttgaaaaaccagtg

SEQ ID NO: 21605 - DNA, 15 bp, Homo sapiens
atttgaaaaaccagt

SEQ ID NO: 21606 - DNA, 15 bp, Homo sapiens
tatttgaaaaaccag

SEQ ID NO: 21607 - DNA, 15 bp, Homo sapiens
ttatttgaaaaacca

SEQ ID NO: 21608 - DNA, 15 bp, Homo sapiens
tttatttgaaaaacc

SEQ ID NO: 21609 - DNA, 15 bp, Homo sapiens
atttatttgaaaaac

SEQ ID NO: 21610 - DNA, 15 bp, Homo sapiens
aatttatttgaaaaa

SEQ ID NO: 21611 - DNA, 15 bp, Homo sapiens
taatttatttgaaaa

SEQ ID NO: 21612 - DNA, 15 bp, Homo sapiens
gtaatttatttgaaa

SEQ ID NO: 21613 - DNA, 15 bp, Homo sapiens
tgtaatttatttgaa

SEQ ID NO: 21614 - DNA, 15 bp, Homo sapiens
ctgtaatttatttga

SEQ ID NO: 21615 - DNA, 15 bp, Homo sapiens
gctgtaatttatttg

SEQ ID NO: 21616 - DNA, 15 bp, Homo sapiens
agctgtaatttattt

SEQ ID NO: 21617 - DNA, 15 bp, Homo sapiens
tagctgtaatttatt

SEQ ID NO: 21618 - DNA, 15 bp, Homo sapiens
gtagctgtaatttat

SEQ ID NO: 21619 - DNA, 15 bp, Homo sapiens
ggtagctgtaattta

SEQ ID NO: 21620 - DNA, 15 bp, Homo sapiens
tggtagctgtaattt

SEQ ID NO: 21621 - DNA, 15 bp, Homo sapiens
ctggtagctgtaatt

SEQ ID NO: 21622 - DNA, 15 bp, Homo sapiens
tctggtagctgtaat

SEQ ID NO: 21623 - DNA, 15 bp, Homo sapiens
ttctggtagctgtaa

SEQ ID NO: 21624 - DNA, 15 bp, Homo sapiens
tttctggtagctgta

SEQ ID NO: 21625 - DNA, 15 bp, Homo sapiens
atttctggtagctgt

SEQ ID NO: 21626 - DNA, 15 bp, Homo sapiens
aatttctggtagctg

SEQ ID NO: 21627 - DNA, 15 bp, Homo sapiens
gaatttctggtagct

SEQ ID NO: 21628 - DNA, 15 bp, Homo sapiens
tgaatttctggtagc

SEQ ID NO: 21629 - DNA, 15 bp, Homo sapiens
gtgaatttctggtag

SEQ ID NO: 21630 - DNA, 15 bp, Homo sapiens
ggtgaatttctggta

SEQ ID NO: 21631 - DNA, 15 bp, Homo sapiens
gggtgaatttctggt

SEQ ID NO: 21632 - DNA, 15 bp, Homo sapiens
ggggtgaatttctgg

SEQ ID NO: 21633 - DNA, 15 bp, Homo sapiens
aggggtgaatttctg

SEQ ID NO: 21634 - DNA, 15 bp, Homo sapiens
caggggtgaatttct

SEQ ID NO: 21635 - DNA, 15 bp, Homo sapiens
ccaggggtgaatttc

SEQ ID NO: 21636 - DNA, 15 bp, Homo sapiens
cccaggggtgaattt

SEQ ID NO: 21637 - DNA, 15 bp, Homo sapiens
ccccaggggtgaatt

SEQ ID NO: 21638 - DNA, 15 bp, Homo sapiens
cccccaggggtgaat

SEQ ID NO: 21639 - DNA, 15 bp, Homo sapiens
tcccccaggggtgaa

SEQ ID NO: 21640 - DNA, 15 bp, Homo sapiens
ttcccccaggggtga

SEQ ID NO: 21641 - DNA, 15 bp, Homo sapiens
attcccccaggggtg

SEQ ID NO: 21642 - DNA, 15 bp, Homo sapiens
gattcccccaggggt

SEQ ID NO: 21643 - DNA, 15 bp, Homo sapiens
agattcccccagggg

SEQ ID NO: 21644 - DNA, 15 bp, Homo sapiens
cagattcccccaggg

SEQ ID NO: 21645 - DNA, 15 bp, Homo sapiens
gcagattcccccagg

SEQ ID NO: 21646 - DNA, 15 bp, Homo sapiens
tgcagattcccccag

SEQ ID NO: 21647 - DNA, 15 bp, Homo sapiens
ctgcagattccccca

SEQ ID NO: 21648 - DNA, 15 bp, Homo sapiens
gctgcagattccccc

SEQ ID NO: 21649 - DNA, 15 bp, Homo sapiens
tgctgcagattcccc

SEQ ID NO: 21650 - DNA, 15 bp, Homo sapiens
atgctgcagattccc

SEQ ID NO: 21651 - DNA, 15 bp, Homo sapiens
tatgctgcagattcc

SEQ ID NO: 21652 - DNA, 15 bp, Homo sapiens
atatgctgcagattc

SEQ ID NO: 21653 - DNA, 15 bp, Homo sapiens
aatatgctgcagatt

SEQ ID NO: 21654 - DNA, 15 bp, Homo sapiens
aaatatgctgcagat

SEQ ID NO: 21655 - DNA, 15 bp, Homo sapiens
caaatatgctgcaga

SEQ ID NO: 21656 - DNA, 15 bp, Homo sapiens
tcaaatatgctgcag

SEQ ID NO: 21657 - DNA, 15 bp, Homo sapiens
ttcaaatatgctgca

SEQ ID NO: 21658 - DNA, 15 bp, Homo sapiens
attcaaatatgctgc

SEQ ID NO: 21659 - DNA, 15 bp, Homo sapiens
cattcaaatatgctg

SEQ ID NO: 21660 - DNA, 15 bp, Homo sapiens
acattcaaatatgct

SEQ ID NO: 21661 - DNA, 15 bp, Homo sapiens
gacattcaaatatgc

SEQ ID NO: 21662 - DNA, 15 bp, Homo sapiens
tgacattcaaatatg

SEQ ID NO: 21663 - DNA, 15 bp, Homo sapiens
ctgacattcaaatat

SEQ ID NO: 21664 - DNA, 15 bp, Homo sapiens
actgacattcaaata

SEQ ID NO: 21665 - DNA, 15 bp, Homo sapiens
aactgacattcaaat

SEQ ID NO: 21666 - DNA, 15 bp, Homo sapiens
taactgacattcaaa

SEQ ID NO: 21667 - DNA, 15 bp, Homo sapiens
ttaactgacattcaa

SEQ ID NO: 21668 - DNA, 15 bp, Homo sapiens
gttaactgacattca

SEQ ID NO: 21669 - DNA, 15 bp, Homo sapiens
agttaactgacattc

SEQ ID NO: 21670 - DNA, 15 bp, Homo sapiens
aagttaactgacatt

SEQ ID NO: 21671 - DNA, 15 bp, Homo sapiens
caagttaactgacat

SEQ ID NO: 21672 - DNA, 15 bp, Homo sapiens
ccaagttaactgaca

SEQ ID NO: 21673 - DNA, 15 bp, Homo sapiens
cccaagttaactgac

SEQ ID NO: 21674 - DNA, 15 bp, Homo sapiens
acccaagttaactga

SEQ ID NO: 21675 - DNA, 15 bp, Homo sapiens
cacccaagttaactg

SEQ ID NO: 21676 - DNA, 15 bp, Homo sapiens
ccacccaagttaact

SEQ ID NO: 21677 - DNA, 15 bp, Homo sapiens
accacccaagttaac

SEQ ID NO: 21678 - DNA, 15 bp, Homo sapiens
taccacccaagttaa

SEQ ID NO: 21679 - DNA, 15 bp, Homo sapiens
ttaccacccaagtta

SEQ ID NO: 21680 - DNA, 15 bp, Homo sapiens
cttaccacccaagtt

SEQ ID NO: 21681 - DNA, 15 bp, Homo sapiens
tcttaccacccaagt

SEQ ID NO: 21682 - DNA, 15 bp, Homo sapiens
atcttaccacccaag

SEQ ID NO: 21683 - DNA, 15 bp, Homo sapiens
tatcttaccacccaa

SEQ ID NO: 21684 - DNA, 15 bp, Homo sapiens
ctatcttaccaccca

SEQ ID NO: 21685 - DNA, 15 bp, Homo sapiens
actatcttaccaccc

SEQ ID NO: 21686 - DNA, 15 bp, Homo sapiens
aactatcttaccacc

SEQ ID NO: 21687 - DNA, 15 bp, Homo sapiens
caactatcttaccac

SEQ ID NO: 21688 - DNA, 15 bp, Homo sapiens
gcaactatcttacca

SEQ ID NO: 21689 - DNA, 15 bp, Homo sapiens
agcaactatcttacc

SEQ ID NO: 21690 - DNA, 15 bp, Homo sapiens
aagcaactatcttac

SEQ ID NO: 21691 - DNA, 15 bp, Homo sapiens
aaagcaactatctta

SEQ ID NO: 21692 - DNA, 15 bp, Homo sapiens
taaagcaactatctt

SEQ ID NO: 21693 - DNA, 15 bp, Homo sapiens
gtaaagcaactatct

SEQ ID NO: 21694 - DNA, 15 bp, Homo sapiens
tgtaaagcaactatc

SEQ ID NO: 21695 - DNA, 15 bp, Homo sapiens
atgtaaagcaactat

SEQ ID NO: 21696 - DNA, 15 bp, Homo sapiens
gatgtaaagcaacta

SEQ ID NO: 21697 - DNA, 15 bp, Homo sapiens
ggatgtaaagcaact

SEQ ID NO: 21698 - DNA, 15 bp, Homo sapiens
aggatgtaaagcaac

SEQ ID NO: 21699 - DNA, 15 bp, Homo sapiens
gaggatgtaaagcaa

SEQ ID NO: 21700 - DNA, 15 bp, Homo sapiens
agaggatgtaaagca

SEQ ID NO: 21701 - DNA, 15 bp, Homo sapiens
aagaggatgtaaagc

SEQ ID NO: 21702 - DNA, 15 bp, Homo sapiens
aaagaggatgtaaag

SEQ ID NO: 21703 - DNA, 15 bp, Homo sapiens
caaagaggatgtaaa

SEQ ID NO: 21704 - DNA, 15 bp, Homo sapiens
tcaaagaggatgtaa

SEQ ID NO: 21705 - DNA, 15 bp, Homo sapiens
ctcaaagaggatgta

SEQ ID NO: 21706 - DNA, 15 bp, Homo sapiens
actcaaagaggatgt

SEQ ID NO: 21707 - DNA, 15 bp, Homo sapiens
aactcaaagaggatg

SEQ ID NO: 21708 - DNA, 15 bp, Homo sapiens
aaactcaaagaggat

SEQ ID NO: 21709 - DNA, 15 bp, Homo sapiens
aaaactcaaagagga

SEQ ID NO: 21710 - DNA, 15 bp, Homo sapiens
aaaaactcaaagagg

SEQ ID NO: 21711 - DNA, 15 bp, Homo sapiens
gaaaaactcaaagag

SEQ ID NO: 21712 - DNA, 15 bp, Homo sapiens
tgaaaaactcaaaga

SEQ ID NO: 21713 - DNA, 15 bp, Homo sapiens
ttgaaaaactcaaag

SEQ ID NO: 21714 - DNA, 15 bp, Homo sapiens
tttgaaaaactcaaa

SEQ ID NO: 21715 - DNA, 15 bp, Homo sapiens
gtttgaaaaactcaa

SEQ ID NO: 21716 - DNA, 15 bp, Homo sapiens
tgtttgaaaaactca

SEQ ID NO: 21717 - DNA, 15 bp, Homo sapiens
atgtttgaaaaactc

SEQ ID NO: 21718 - DNA, 15 bp, Homo sapiens
aatgtttgaaaaact

SEQ ID NO: 21719 - DNA, 15 bp, Homo sapiens
aaatgtttgaaaaac

SEQ ID NO: 21720 - DNA, 15 bp, Homo sapiens
aaaatgtttgaaaaa

SEQ ID NO: 21721 - DNA, 15 bp, Homo sapiens
aaaaatgtttgaaaa

SEQ ID NO: 21722 - DNA, 15 bp, Homo sapiens
aaaaaatgtttgaaa

SEQ ID NO: 21723 - DNA, 15 bp, Homo sapiens
aaaaaaatgtttgaa

SEQ ID NO: 21724 - DNA, 15 bp, Homo sapiens
caaaaaaatgtttga

SEQ ID NO: 21725 - DNA, 15 bp, Homo sapiens
tcaaaaaaatgtttg

SEQ ID NO: 21726 - DNA, 15 bp, Homo sapiens
ctcaaaaaaatgttt

SEQ ID NO: 21727 - DNA, 15 bp, Homo sapiens
actcaaaaaaatgtt

SEQ ID NO: 21728 - DNA, 15 bp, Homo sapiens
cactcaaaaaaatgt

SEQ ID NO: 21729 - DNA, 15 bp, Homo sapiens
gcactcaaaaaaatg

SEQ ID NO: 21730 - DNA, 15 bp, Homo sapiens
agcactcaaaaaaat

SEQ ID NO: 21731 - DNA, 15 bp, Homo sapiens
aagcactcaaaaaaa

SEQ ID NO: 21732 - DNA, 15 bp, Homo sapiens
aaagcactcaaaaaa

SEQ ID NO: 21733 - DNA, 15 bp, Homo sapiens
aaaagcactcaaaaa

SEQ ID NO: 21734 - DNA, 15 bp, Homo sapiens
aaaaagcactcaaaa

SEQ ID NO: 21735 - DNA, 15 bp, Homo sapiens
aaaaaagcactcaaa

SEQ ID NO: 21736 - DNA, 15 bp, Homo sapiens
aaaaaaagcactcaa

SEQ ID NO: 21737 - DNA, 15 bp, Homo sapiens
aaaaaaaagcactca

SEQ ID NO: 21738 - DNA, 15 bp, Homo sapiens
aaaaaaaaagcactc

SEQ ID NO: 21739 - DNA, 15 bp, Homo sapiens
aaaaaaaaaagcact

SEQ ID NO: 21740 - DNA, 15 bp, Homo sapiens
aaaaaaaaaaagcac

SEQ ID NO: 21741 - DNA, 15 bp, Homo sapiens
aaaaaaaaaaaagca

SEQ ID NO: 21742 - DNA, 15 bp, Homo sapiens
aaaaaaaaaaaaagc

SEQ ID NO: 21743 - DNA, 15 bp, Homo sapiens
ataggaaaaaaaaaa

SEQ ID NO: 21744 - DNA, 15 bp, Homo sapiens
aataggaaaaaaaaa

SEQ ID NO: 21745 - DNA, 15 bp, Homo sapiens
aaataggaaaaaaaa

SEQ ID NO: 21746 - DNA, 15 bp, Homo sapiens
aaaataggaaaaaaa

SEQ ID NO: 21747 - DNA, 15 bp, Homo sapiens
taaaataggaaaaaa

SEQ ID NO: 21748 - DNA, 15 bp, Homo sapiens
ttaaaataggaaaaa

SEQ ID NO: 21749 - DNA, 15 bp, Homo sapiens
cttaaaataggaaaa

SEQ ID NO: 21750 - DNA, 15 bp, Homo sapiens
ccttaaaataggaaa

SEQ ID NO: 21751 - DNA, 15 bp, Homo sapiens
tccttaaaataggaa

SEQ ID NO: 21752 - DNA, 15 bp, Homo sapiens
ctccttaaaatagga

SEQ ID NO: 21753 - DNA, 15 bp, Homo sapiens
actccttaaaatagg

SEQ ID NO: 21754 - DNA, 15 bp, Homo sapiens
tactccttaaaatag

SEQ ID NO: 21755 - DNA, 15 bp, Homo sapiens
ttactccttaaaata

SEQ ID NO: 21756 - DNA, 15 bp, Homo sapiens
tttactccttaaaat

SEQ ID NO: 21757 - DNA, 15 bp, Homo sapiens
atttactccttaaaa

SEQ ID NO: 21758 - DNA, 15 bp, Homo sapiens
gatttactccttaaa

SEQ ID NO: 21759 - DNA, 15 bp, Homo sapiens
tgatttactccttaa

SEQ ID NO: 21760 - DNA, 15 bp, Homo sapiens
atgatttactcctta

SEQ ID NO: 21761 - DNA, 15 bp, Homo sapiens
aatgatttactcctt

SEQ ID NO: 21762 - DNA, 15 bp, Homo sapiens
caatgatttactcct

SEQ ID NO: 21763 - DNA, 15 bp, Homo sapiens
ccaatgatttactcc

SEQ ID NO: 21764 - DNA, 15 bp, Homo sapiens
accaatgatttactc

SEQ ID NO: 21765 - DNA, 15 bp, Homo sapiens
taccaatgatttact

SEQ ID NO: 21766 - DNA, 15 bp, Homo sapiens
ataccaatgatttac

SEQ ID NO: 21767 - DNA, 15 bp, Homo sapiens
cataccaatgattta

SEQ ID NO: 21768 - DNA, 15 bp, Homo sapiens
gcataccaatgattt

SEQ ID NO: 21769 - DNA, 15 bp, Homo sapiens
ggcataccaatgatt

SEQ ID NO: 21770 - DNA, 15 bp, Homo sapiens
aggcataccaatgat

SEQ ID NO: 21771 - DNA, 15 bp, Homo sapiens
caggcataccaatga

SEQ ID NO: 21772 - DNA, 15 bp, Homo sapiens
gcaggcataccaatg

SEQ ID NO: 21773 - DNA, 15 bp, Homo sapiens
ggcaggcataccaat

SEQ ID NO: 21774 - DNA, 15 bp, Homo sapiens
gggcaggcataccaa

SEQ ID NO: 21775 - DNA, 15 bp, Homo sapiens
agggcaggcatacca

SEQ ID NO: 21776 - DNA, 15 bp, Homo sapiens
aagggcaggcatacc

SEQ ID NO: 21777 - DNA, 15 bp, Homo sapiens
aaagggcaggcatac

SEQ ID NO: 21778 - DNA, 15 bp, Homo sapiens
aaaagggcaggcata

SEQ ID NO: 21779 - DNA, 15 bp, Homo sapiens
aaaaagggcaggcat

SEQ ID NO: 21780 - DNA, 15 bp, Homo sapiens
caaaaagggcaggca

SEQ ID NO: 21781 - DNA, 15 bp, Homo sapiens
acaaaaagggcaggc

SEQ ID NO: 21782 - DNA, 15 bp, Homo sapiens
tacaaaaagggcagg

SEQ ID NO: 21783 - DNA, 15 bp, Homo sapiens
ctacaaaaagggcag

SEQ ID NO: 21784 - DNA, 15 bp, Homo sapiens
cctacaaaaagggca

SEQ ID NO: 21785 - DNA, 15 bp, Homo sapiens
ccctacaaaaagggc

SEQ ID NO: 21786 - DNA, 15 bp, Homo sapiens
tccctacaaaaaggg

SEQ ID NO: 21787 - DNA, 15 bp, Homo sapiens
atccctacaaaaagg

SEQ ID NO: 21788 - DNA, 15 bp, Homo sapiens
catccctacaaaaag

SEQ ID NO: 21789 - DNA, 15 bp, Homo sapiens
acatccctacaaaaa

SEQ ID NO: 21790 - DNA, 15 bp, Homo sapiens
gacatccctacaaaa

SEQ ID NO: 21791 - DNA, 15 bp, Homo sapiens
agacatccctacaaa

SEQ ID NO: 21792 - DNA, 15 bp, Homo sapiens
aagacatccctacaa

SEQ ID NO: 21793 - DNA, 15 bp, Homo sapiens
gaagacatccctaca

SEQ ID NO: 21794 - DNA, 15 bp, Homo sapiens
ggaagacatccctac

SEQ ID NO: 21795 - DNA, 15 bp, Homo sapiens
gggaagacatcccta

SEQ ID NO: 21796 - DNA, 15 bp, Homo sapiens
ggggaagacatccct

SEQ ID NO: 21797 - DNA, 15 bp, Homo sapiens
aggggaagacatccc

SEQ ID NO: 21798 - DNA, 15 bp, Homo sapiens
aaggggaagacatcc

SEQ ID NO: 21799 - DNA, 15 bp, Homo sapiens
aaaggggaagacatc

SEQ ID NO: 21800 - DNA, 15 bp, Homo sapiens
caaaggggaagacat

SEQ ID NO: 21801 - DNA, 15 bp, Homo sapiens
gcaaaggggaagaca

SEQ ID NO: 21802 - DNA, 15 bp, Homo sapiens
tgcaaaggggaagac

SEQ ID NO: 21803 - DNA, 15 bp, Homo sapiens
ctgcaaaggggaaga

SEQ ID NO: 21804 - DNA, 15 bp, Homo sapiens
cctgcaaaggggaag

SEQ ID NO: 21805 - DNA, 15 bp, Homo sapiens
ccctgcaaaggggaa

SEQ ID NO: 21806 - DNA, 15 bp, Homo sapiens
tccctgcaaagggga

SEQ ID NO: 21807 - DNA, 15 bp, Homo sapiens
ttccctgcaaagggg

SEQ ID NO: 21808 - DNA, 15 bp, Homo sapiens
tttccctgcaaaggg

SEQ ID NO: 21809 - DNA, 15 bp, Homo sapiens
atttccctgcaaagg

SEQ ID NO: 21810 - DNA, 15 bp, Homo sapiens
catttccctgcaaag

SEQ ID NO: 21811 - DNA, 15 bp, Homo sapiens
tcatttccctgcaaa

SEQ ID NO: 21812 - DNA, 15 bp, Homo sapiens
ttcatttccctgcaa

SEQ ID NO: 21813 - DNA, 15 bp, Homo sapiens
tttcatttccctgca

SEQ ID NO: 21814 - DNA, 15 bp, Homo sapiens
ttttcatttccctgc

SEQ ID NO: 21815 - DNA, 15 bp, Homo sapiens
gttttcatttccctg

SEQ ID NO: 21816 - DNA, 15 bp, Homo sapiens
tgttttcatttccct

SEQ ID NO: 21817 - DNA, 15 bp, Homo sapiens
ttgttttcatttccc

SEQ ID NO: 21818 - DNA, 15 bp, Homo sapiens
cttgttttcatttcc

SEQ ID NO: 21819 - DNA, 15 bp, Homo sapiens
acttgttttcatttc

SEQ ID NO: 21820 - DNA, 15 bp, Homo sapiens
aacttgttttcattt

SEQ ID NO: 21821 - DNA, 15 bp, Homo sapiens
aaacttgttttcatt

SEQ ID NO: 21822 - DNA, 15 bp, Homo sapiens
aaaacttgttttcat

SEQ ID NO: 21823 - DNA, 15 bp, Homo sapiens
gaaaacttgttttca

SEQ ID NO: 21824 - DNA, 15 bp, Homo sapiens
agaaaacttgttttc

SEQ ID NO: 21825 - DNA, 15 bp, Homo sapiens
aagaaaacttgtttt

SEQ ID NO: 21826 - DNA, 15 bp, Homo sapiens
gaagaaaacttgttt

SEQ ID NO: 21827 - DNA, 15 bp, Homo sapiens
tgaagaaaacttgtt

SEQ ID NO: 21828 - DNA, 15 bp, Homo sapiens
gtgaagaaaacttgt

SEQ ID NO: 21829 - DNA, 15 bp, Homo sapiens
tgtgaagaaaacttg

SEQ ID NO: 21830 - DNA, 15 bp, Homo sapiens
ttgtgaagaaaactt

SEQ ID NO: 21831 - DNA, 15 bp, Homo sapiens
attgtgaagaaaact

SEQ ID NO: 21832 - DNA, 15 bp, Homo sapiens
gattgtgaagaaaac

SEQ ID NO: 21833 - DNA, 15 bp, Homo sapiens
agattgtgaagaaaa

SEQ ID NO: 21834 - DNA, 15 bp, Homo sapiens
gagattgtgaagaaa

SEQ ID NO: 21835 - DNA, 15 bp, Homo sapiens
agagattgtgaagaa

SEQ ID NO: 21836 - DNA, 15 bp, Homo sapiens
cagagattgtgaaga

SEQ ID NO: 21837 - DNA, 15 bp, Homo sapiens
ccagagattgtgaag

SEQ ID NO: 21838 - DNA, 15 bp, Homo sapiens
cccagagattgtgaa

SEQ ID NO: 21839 - DNA, 15 bp, Homo sapiens
tcccagagattgtga

SEQ ID NO: 21840 - DNA, 15 bp, Homo sapiens
ctcccagagattgtg

SEQ ID NO: 21841 - DNA, 15 bp, Homo sapiens
cctcccagagattgt

SEQ ID NO: 21842 - DNA, 15 bp, Homo sapiens
gcctcccagagattg

SEQ ID NO: 21843 - DNA, 15 bp, Homo sapiens
tgcctcccagagatt

SEQ ID NO: 21844 - DNA, 15 bp, Homo sapiens
atgcctcccagagat

SEQ ID NO: 21845 - DNA, 15 bp, Homo sapiens
gatgcctcccagaga

SEQ ID NO: 21846 - DNA, 15 bp, Homo sapiens
cgatgcctcccagag

SEQ ID NO: 21847 - DNA, 15 bp, Homo sapiens
acgatgcctcccaga

SEQ ID NO: 21848 - DNA, 15 bp, Homo sapiens
cacgatgcctcccag

SEQ ID NO: 21849 - DNA, 15 bp, Homo sapiens
gcacgatgcctccca

SEQ ID NO: 21850 - DNA, 15 bp, Homo sapiens
agcacgatgcctccc

SEQ ID NO: 21851 - DNA, 15 bp, Homo sapiens
aagcacgatgcctcc

SEQ ID NO: 21852 - DNA, 15 bp, Homo sapiens
aaagcacgatgcctc

SEQ ID NO: 21853 - DNA, 15 bp, Homo sapiens
caaagcacgatgcct

SEQ ID NO: 21854 - DNA, 15 bp, Homo sapiens
acaaagcacgatgcc

SEQ ID NO: 21855 - DNA, 15 bp, Homo sapiens
cacaaagcacgatgc

SEQ ID NO: 21856 - DNA, 15 bp, Homo sapiens
tcacaaagcacgatg

SEQ ID NO: 21857 - DNA, 15 bp, Homo sapiens
gtcacaaagcacgat

SEQ ID NO: 21858 - DNA, 15 bp, Homo sapiens
tgtcacaaagcacga

SEQ ID NO: 21859 - DNA, 15 bp, Homo sapiens
gtgtcacaaagcacg

SEQ ID NO: 21860 - DNA, 15 bp, Homo sapiens
tgtgtcacaaagcac

SEQ ID NO: 21861 - DNA, 15 bp, Homo sapiens
ctgtgtcacaaagca

SEQ ID NO: 21862 - DNA, 15 bp, Homo sapiens
actgtgtcacaaagc

SEQ ID NO: 21863 - DNA, 15 bp, Homo sapiens
cactgtgtcacaaag

SEQ ID NO: 21864 - DNA, 15 bp, Homo sapiens
gcactgtgtcacaaa

SEQ ID NO: 21865 - DNA, 15 bp, Homo sapiens
agcactgtgtcacaa

SEQ ID NO: 21866 - DNA, 15 bp, Homo sapiens
gagcactgtgtcaca

SEQ ID NO: 21867 - DNA, 15 bp, Homo sapiens
agagcactgtgtcac

SEQ ID NO: 21868 - DNA, 15 bp, Homo sapiens
aagagcactgtgtca

SEQ ID NO: 21869 - DNA, 15 bp, Homo sapiens
caagagcactgtgtc

SEQ ID NO: 21870 - DNA, 15 bp, Homo sapiens
tcaagagcactgtgt

SEQ ID NO: 21871 - DNA, 15 bp, Homo sapiens
ttcaagagcactgtg

SEQ ID NO: 21872 - DNA, 15 bp, Homo sapiens
cttcaagagcactgt

SEQ ID NO: 21873 - DNA, 15 bp, Homo sapiens
tcttcaagagcactg

SEQ ID NO: 21874 - DNA, 15 bp, Homo sapiens
ctcttcaagagcact

SEQ ID NO: 21875 - DNA, 15 bp, Homo sapiens
cctcttcaagagcac

SEQ ID NO: 21876 - DNA, 15 bp, Homo sapiens
acctcttcaagagca

SEQ ID NO: 21877 - DNA, 15 bp, Homo sapiens
cacctcttcaagagc

SEQ ID NO: 21878 - DNA, 15 bp, Homo sapiens
gcacctcttcaagag

SEQ ID NO: 21879 - DNA, 15 bp, Homo sapiens
ggcacctcttcaaga

SEQ ID NO: 21880 - DNA, 15 bp, Homo sapiens
aggcacctcttcaag

SEQ ID NO: 21881 - DNA, 15 bp, Homo sapiens
aaggcacctcttcaa

SEQ ID NO: 21882 - DNA, 15 bp, Homo sapiens
aaaggcacctcttca

SEQ ID NO: 21883 - DNA, 15 bp, Homo sapiens
gaaaggcacctcttc

SEQ ID NO: 21884 - DNA, 15 bp, Homo sapiens
tgaaaggcacctctt

SEQ ID NO: 21885 - DNA, 15 bp, Homo sapiens
atgaaaggcacctct

SEQ ID NO: 21886 - DNA, 15 bp, Homo sapiens
catgaaaggcacctc

SEQ ID NO: 21887 - DNA, 15 bp, Homo sapiens
ccatgaaaggcacct

SEQ ID NO: 21888 - DNA, 15 bp, Homo sapiens
accatgaaaggcacc

SEQ ID NO: 21889 - DNA, 15 bp, Homo sapiens
caccatgaaaggcac

SEQ ID NO: 21890 - DNA, 15 bp, Homo sapiens
tcaccatgaaaggca

SEQ ID NO: 21891 - DNA, 15 bp, Homo sapiens
atcaccatgaaaggc

SEQ ID NO: 21892 - DNA, 15 bp, Homo sapiens
aatcaccatgaaagg

SEQ ID NO: 21893 - DNA, 15 bp, Homo sapiens
taatcaccatgaaag

SEQ ID NO: 21894 - DNA, 15 bp, Homo sapiens
ttaatcaccatgaaa

SEQ ID NO: 21895 - DNA, 15 bp, Homo sapiens
cttaatcaccatgaa

SEQ ID NO: 21896 - DNA, 15 bp, Homo sapiens
tcttaatcaccatga

SEQ ID NO: 21897 - DNA, 15 bp, Homo sapiens
atcttaatcaccatg

SEQ ID NO: 21898 - DNA, 15 bp, Homo sapiens
catcttaatcaccat

SEQ ID NO: 21899 - DNA, 15 bp, Homo sapiens
ccatcttaatcacca

SEQ ID NO: 21900 - DNA, 15 bp, Homo sapiens
cccatcttaatcacc

SEQ ID NO: 21901 - DNA, 15 bp, Homo sapiens
tcccatcttaatcac

SEQ ID NO: 21902 - DNA, 15 bp, Homo sapiens
atcccatcttaatca

SEQ ID NO: 21903 - DNA, 15 bp, Homo sapiens
aatcccatcttaatc

SEQ ID NO: 21904 - DNA, 15 bp, Homo sapiens
caatcccatcttaat

SEQ ID NO: 21905 - DNA, 15 bp, Homo sapiens
ccaatcccatcttaa

SEQ ID NO: 21906 - DNA, 15 bp, Homo sapiens
accaatcccatctta

SEQ ID NO: 21907 - DNA, 15 bp, Homo sapiens
aaccaatcccatctt

SEQ ID NO: 21908 - DNA, 15 bp, Homo sapiens
caaccaatcccatct

SEQ ID NO: 21909 - DNA, 15 bp, Homo sapiens
acaaccaatcccatc

SEQ ID NO: 21910 - DNA, 15 bp, Homo sapiens
aacaaccaatcccat

SEQ ID NO: 21911 - DNA, 15 bp, Homo sapiens
gaacaaccaatccca

SEQ ID NO: 21912 - DNA, 15 bp, Homo sapiens
tgaacaaccaatccc

SEQ ID NO: 21913 - DNA, 15 bp, Homo sapiens
gtgaacaaccaatcc

SEQ ID NO: 21914 - DNA, 15 bp, Homo sapiens
agtgaacaaccaatc

SEQ ID NO: 21915 - DNA, 15 bp, Homo sapiens
aagtgaacaaccaat

SEQ ID NO: 21916 - DNA, 15 bp, Homo sapiens
taagtgaacaaccaa

SEQ ID NO: 21917 - DNA, 15 bp, Homo sapiens
ttaagtgaacaacca

SEQ ID NO: 21918 - DNA, 15 bp, Homo sapiens
tttaagtgaacaacc

SEQ ID NO: 21919 - DNA, 15 bp, Homo sapiens
atttaagtgaacaac

SEQ ID NO: 21920 - DNA, 15 bp, Homo sapiens
tatttaagtgaacaa

SEQ ID NO: 21921 - DNA, 15 bp, Homo sapiens
atatttaagtgaaca

SEQ ID NO: 21922 - DNA, 15 bp, Homo sapiens
catatttaagtgaac

SEQ ID NO: 21923 - DNA, 15 bp, Homo sapiens
ccatatttaagtgaa

SEQ ID NO: 21924 - DNA, 15 bp, Homo sapiens
cccatatttaagtga

SEQ ID NO: 21925 - DNA, 15 bp, Homo sapiens
gcccatatttaagtg

SEQ ID NO: 21926 - DNA, 15 bp, Homo sapiens
agcccatatttaagt

SEQ ID NO: 21927 - DNA, 15 bp, Homo sapiens
gagcccatatttaag

SEQ ID NO: 21928 - DNA, 15 bp, Homo sapiens
ggagcccatatttaa

SEQ ID NO: 21929 - DNA, 15 bp, Homo sapiens
gggagcccatattta

SEQ ID NO: 21930 - DNA, 15 bp, Homo sapiens
tgggagcccatattt

SEQ ID NO: 21931 - DNA, 15 bp, Homo sapiens
gtgggagcccatatt

SEQ ID NO: 21932 - DNA, 15 bp, Homo sapiens
ggtgggagcccatat

SEQ ID NO: 21933 - DNA, 15 bp, Homo sapiens
gggtgggagcccata

SEQ ID NO: 21934 - DNA, 15 bp, Homo sapiens
ggggtgggagcccat

SEQ ID NO: 21935 - DNA, 15 bp, Homo sapiens
aggggtgggagccca

SEQ ID NO: 21936 - DNA, 15 bp, Homo sapiens
gaggggtgggagccc

SEQ ID NO: 21937 - DNA, 15 bp, Homo sapiens
ggaggggtgggagcc

SEQ ID NO: 21938 - DNA, 15 bp, Homo sapiens
gggaggggtgggagc

SEQ ID NO: 21939 - DNA, 15 bp, Homo sapiens
ggggaggggtgggag

SEQ ID NO: 21940 - DNA, 15 bp, Homo sapiens
tggggaggggtggga

SEQ ID NO: 21941 - DNA, 15 bp, Homo sapiens
gtggggaggggtggg

SEQ ID NO: 21942 - DNA, 15 bp, Homo sapiens
ggtggggaggggtgg

SEQ ID NO: 21943 - DNA, 15 bp, Homo sapiens
gggtggggaggggtg

SEQ ID NO: 21944 - DNA, 15 bp, Homo sapiens
ggggtggggaggggt

SEQ ID NO: 21945 - DNA, 15 bp, Homo sapiens
gggggtggggagggg

SEQ ID NO: 21946 - DNA, 15 bp, Homo sapiens
tgggggtggggaggg

SEQ ID NO: 21947 - DNA, 15 bp, Homo sapiens
ttgggggtggggagg

SEQ ID NO: 21948 - DNA, 15 bp, Homo sapiens
tttgggggtggggag

SEQ ID NO: 21949 - DNA, 15 bp, Homo sapiens
atttgggggtgggga

SEQ ID NO: 21950 - DNA, 15 bp, Homo sapiens
aatttgggggtgggg

SEQ ID NO: 21951 - DNA, 15 bp, Homo sapiens
taatttgggggtggg

SEQ ID NO: 21952 - DNA, 15 bp, Homo sapiens
ctaatttgggggtgg

SEQ ID NO: 21953 - DNA, 15 bp, Homo sapiens
cctaatttgggggtg

SEQ ID NO: 21954 - DNA, 15 bp, Homo sapiens
ccctaatttgggggt

SEQ ID NO: 21955 - DNA, 15 bp, Homo sapiens
tccctaatttggggg

SEQ ID NO: 21956 - DNA, 15 bp, Homo sapiens
ctccctaatttgggg

SEQ ID NO: 21957 - DNA, 15 bp, Homo sapiens
tctccctaatttggg

SEQ ID NO: 21958 - DNA, 15 bp, Homo sapiens
ttctccctaatttgg

SEQ ID NO: 21959 - DNA, 15 bp, Homo sapiens
tttctccctaatttg

SEQ ID NO: 21960 - DNA, 15 bp, Homo sapiens
gtttctccctaattt

SEQ ID NO: 21961 - DNA, 15 bp, Homo sapiens
agtttctccctaatt

SEQ ID NO: 21962 - DNA, 15 bp, Homo sapiens
tagtttctccctaat

SEQ ID NO: 21963 - DNA, 15 bp, Homo sapiens
ttagtttctccctaa

SEQ ID NO: 21964 - DNA, 15 bp, Homo sapiens
cttagtttctcccta

SEQ ID NO: 21965 - DNA, 15 bp, Homo sapiens
tcttagtttctccct

SEQ ID NO: 21966 - DNA, 15 bp, Homo sapiens
ttcttagtttctccc

SEQ ID NO: 21967 - DNA, 15 bp, Homo sapiens
cttcttagtttctcc

SEQ ID NO: 21968 - DNA, 15 bp, Homo sapiens
gcttcttagtttctc

SEQ ID NO: 21969 - DNA, 15 bp, Homo sapiens
agcttcttagtttct

SEQ ID NO: 21970 - DNA, 15 bp, Homo sapiens
aagcttcttagtttc

SEQ ID NO: 21971 - DNA, 15 bp, Homo sapiens
aaagcttcttagttt

SEQ ID NO: 21972 - DNA, 15 bp, Homo sapiens
gaaagcttcttagtt

SEQ ID NO: 21973 - DNA, 15 bp, Homo sapiens
ggaaagcttcttagt

SEQ ID NO: 21974 - DNA, 15 bp, Homo sapiens
aggaaagcttcttag

SEQ ID NO: 21975 - DNA, 15 bp, Homo sapiens
aaggaaagcttctta

SEQ ID NO: 21976 - DNA, 15 bp, Homo sapiens
aaaggaaagcttctt

SEQ ID NO: 21977 - DNA, 15 bp, Homo sapiens
aaaaggaaagcttct

SEQ ID NO: 21978 - DNA, 15 bp, Homo sapiens
caaaaggaaagcttc

SEQ ID NO: 21979 - DNA, 15 bp, Homo sapiens
acaaaaggaaagctt

SEQ ID NO: 21980 - DNA, 15 bp, Homo sapiens
aacaaaaggaaagct

SEQ ID NO: 21981 - DNA, 15 bp, Homo sapiens
caacaaaaggaaagc

SEQ ID NO: 21982 - DNA, 15 bp, Homo sapiens
acaacaaaaggaaag

SEQ ID NO: 21983 - DNA, 15 bp, Homo sapiens
aacaacaaaaggaaa

SEQ ID NO: 21984 - DNA, 15 bp, Homo sapiens
aaacaacaaaaggaa

SEQ ID NO: 21985 - DNA, 15 bp, Homo sapiens
gaaacaacaaaagga

SEQ ID NO: 21986 - DNA, 15 bp, Homo sapiens
tgaaacaacaaaagg

SEQ ID NO: 21987 - DNA, 15 bp, Homo sapiens
ctgaaacaacaaaag

SEQ ID NO: 21988 - DNA, 15 bp, Homo sapiens
cctgaaacaacaaaa

SEQ ID NO: 21989 - DNA, 15 bp, Homo sapiens
acctgaaacaacaaa

SEQ ID NO: 21990 - DNA, 15 bp, Homo sapiens
tacctgaaacaacaa

SEQ ID NO: 21991 - DNA, 15 bp, Homo sapiens
atacctgaaacaaca

SEQ ID NO: 21992 - DNA, 15 bp, Homo sapiens
aatacctgaaacaac

SEQ ID NO: 21993 - DNA, 15 bp, Homo sapiens
aaatacctgaaacaa

SEQ ID NO: 21994 - DNA, 15 bp, Homo sapiens
aaaatacctgaaaca

SEQ ID NO: 21995 - DNA, 15 bp, Homo sapiens
aaaaatacctgaaac

SEQ ID NO: 21996 - DNA, 15 bp, Homo sapiens
caaaaatacctgaaa

SEQ ID NO: 21997 - DNA, 15 bp, Homo sapiens
tcaaaaatacctgaa

SEQ ID NO: 21998 - DNA, 15 bp, Homo sapiens
ttcaaaaatacctga

SEQ ID NO: 21999 - DNA, 15 bp, Homo sapiens
attcaaaaatacctg

SEQ ID NO: 22000 - DNA, 15 bp, Homo sapiens
tattcaaaaatacct

SEQ ID NO: 22001 - DNA, 15 bp, Homo sapiens
ttattcaaaaatacc

SEQ ID NO: 22002 - DNA, 15 bp, Homo sapiens
attattcaaaaatac

SEQ ID NO: 22003 - DNA, 15 bp, Homo sapiens
aattattcaaaaata

SEQ ID NO: 22004 - DNA, 15 bp, Homo sapiens
taattattcaaaaat

SEQ ID NO: 22005 - DNA, 15 bp, Homo sapiens
gtaattattcaaaaa

SEQ ID NO: 22006 - DNA, 15 bp, Homo sapiens
ggtaattattcaaaa

SEQ ID NO: 22007 - DNA, 15 bp, Homo sapiens
tggtaattattcaaa

SEQ ID NO: 22008 - DNA, 15 bp, Homo sapiens
ttggtaattattcaa

SEQ ID NO: 22009 - DNA, 15 bp, Homo sapiens
cttggtaattattca

SEQ ID NO: 22010 - DNA, 15 bp, Homo sapiens
gcttggtaattattc

SEQ ID NO: 22011 - DNA, 15 bp, Homo sapiens
tgcttggtaattatt

SEQ ID NO: 22012 - DNA, 15 bp, Homo sapiens
ctgcttggtaattat

SEQ ID NO: 22013 - DNA, 15 bp, Homo sapiens
gctgcttggtaatta

SEQ ID NO: 22014 - DNA, 15 bp, Homo sapiens
ggctgcttggtaatt

SEQ ID NO: 22015 - DNA, 15 bp, Homo sapiens
cggctgcttggtaat

SEQ ID NO: 22016 - DNA, 15 bp, Homo sapiens
tcggctgcttggtaa

SEQ ID NO: 22017 - DNA, 15 bp, Homo sapiens
ttcggctgcttggta

SEQ ID NO: 22018 - DNA, 15 bp, Homo sapiens
cttcggctgcttggt

SEQ ID NO: 22019 - DNA, 15 bp, Homo sapiens
tcttcggctgcttgg

SEQ ID NO: 22020 - DNA, 15 bp, Homo sapiens
gtcttcggctgcttg

SEQ ID NO: 22021 - DNA, 15 bp, Homo sapiens
ggtcttcggctgctt

SEQ ID NO: 22022 - DNA, 15 bp, Homo sapiens
tggtcttcggctgct

SEQ ID NO: 22023 - DNA, 15 bp, Homo sapiens
gtggtcttcggctgc

SEQ ID NO: 22024 - DNA, 15 bp, Homo sapiens
ggtggtcttcggctg

SEQ ID NO: 22025 - DNA, 15 bp, Homo sapiens
gggtggtcttcggct

SEQ ID NO: 22026 - DNA, 15 bp, Homo sapiens
tgggtggtcttcggc

SEQ ID NO: 22027 - DNA, 15 bp, Homo sapiens
gtgggtggtcttcgg

SEQ ID NO: 22028 - DNA, 15 bp, Homo sapiens
cgtgggtggtcttcg

SEQ ID NO: 22029 - DNA, 15 bp, Homo sapiens
tcgtgggtggtcttc

SEQ ID NO: 22030 - DNA, 15 bp, Homo sapiens
ttcgtgggtggtctt

SEQ ID NO: 22031 - DNA, 15 bp, Homo sapiens
attcgtgggtggtct

SEQ ID NO: 22032 - DNA, 15 bp, Homo sapiens
cattcgtgggtggtc

SEQ ID NO: 22033 - DNA, 15 bp, Homo sapiens
ccattcgtgggtggt

SEQ ID NO: 22034 - DNA, 15 bp, Homo sapiens
accattcgtgggtgg

SEQ ID NO: 22035 - DNA, 15 bp, Homo sapiens
aaccattcgtgggtg

SEQ ID NO: 22036 - DNA, 15 bp, Homo sapiens
taaccattcgtgggt

SEQ ID NO: 22037 - DNA, 15 bp, Homo sapiens
ataaccattcgtggg

SEQ ID NO: 22038 - DNA, 15 bp, Homo sapiens
gataaccattcgtgg

SEQ ID NO: 22039 - DNA, 15 bp, Homo sapiens
agataaccattcgtg

SEQ ID NO: 22040 - DNA, 15 bp, Homo sapiens
aagataaccattcgt

SEQ ID NO: 22041 - DNA, 15 bp, Homo sapiens
taagataaccattcg

SEQ ID NO: 22042 - DNA, 15 bp, Homo sapiens
gtaagataaccattc

SEQ ID NO: 22043 - DNA, 15 bp, Homo sapiens
cgtaagataaccatt

SEQ ID NO: 22044 - DNA, 15 bp, Homo sapiens
tcgtaagataaccat

SEQ ID NO: 22045 - DNA, 15 bp, Homo sapiens
gtcgtaagataacca

SEQ ID NO: 22046 - DNA, 15 bp, Homo sapiens
agtcgtaagataacc

SEQ ID NO: 22047 - DNA, 15 bp, Homo sapiens
cagtcgtaagataac

SEQ ID NO: 22048 - DNA, 15 bp, Homo sapiens
acagtcgtaagataa

SEQ ID NO: 22049 - DNA, 15 bp, Homo sapiens
aacagtcgtaagata

SEQ ID NO: 22050 - DNA, 15 bp, Homo sapiens
taacagtcgtaagat

SEQ ID NO: 22051 - DNA, 15 bp, Homo sapiens
gtaacagtcgtaaga

SEQ ID NO: 22052 - DNA, 15 bp, Homo sapiens
cgtaacagtcgtaag

SEQ ID NO: 22053 - DNA, 15 bp, Homo sapiens
acgtaacagtcgtaa

SEQ ID NO: 22054 - DNA, 15 bp, Homo sapiens
aacgtaacagtcgta

SEQ ID NO: 22055 - DNA, 15 bp, Homo sapiens
taacgtaacagtcgt

SEQ ID NO: 22056 - DNA, 15 bp, Homo sapiens
gtaacgtaacagtcg

SEQ ID NO: 22057 - DNA, 15 bp, Homo sapiens
tgtaacgtaacagtc

SEQ ID NO: 22058 - DNA, 15 bp, Homo sapiens
atgtaacgtaacagt

SEQ ID NO: 22059 - DNA, 15 bp, Homo sapiens
aatgtaacgtaacag

SEQ ID NO: 22060 - DNA, 15 bp, Homo sapiens
caatgtaacgtaaca

SEQ ID NO: 22061 - DNA, 15 bp, Homo sapiens
acaatgtaacgtaac

SEQ ID NO: 22062 - DNA, 15 bp, Homo sapiens
gacaatgtaacgtaa

SEQ ID NO: 22063 - DNA, 15 bp, Homo sapiens
ggacaatgtaacgta

SEQ ID NO: 22064 - DNA, 15 bp, Homo sapiens
cggacaatgtaacgt

SEQ ID NO: 22065 - DNA, 15 bp, Homo sapiens
gcggacaatgtaacg

SEQ ID NO: 22066 - DNA, 15 bp, Homo sapiens
ggcggacaatgtaac

SEQ ID NO: 22067 - DNA, 15 bp, Homo sapiens
aggcggacaatgtaa

SEQ ID NO: 22068 - DNA, 15 bp, Homo sapiens
caggcggacaatgta

SEQ ID NO: 22069 - DNA, 15 bp, Homo sapiens
ccaggcggacaatgt

SEQ ID NO: 22070 - DNA, 15 bp, Homo sapiens
accaggcggacaatg

SEQ ID NO: 22071 - DNA, 15 bp, Homo sapiens
caccaggcggacaat

SEQ ID NO: 22072 - DNA, 15 bp, Homo sapiens
acaccaggcggacaa

SEQ ID NO: 22073 - DNA, 15 bp, Homo sapiens
cacaccaggcggaca

SEQ ID NO: 22074 - DNA, 15 bp, Homo sapiens
ccacaccaggcggac

SEQ ID NO: 22075 - DNA, 15 bp, Homo sapiens
tccacaccaggcgga

SEQ ID NO: 22076 - DNA, 15 bp, Homo sapiens
ctccacaccaggcgg

SEQ ID NO: 22077 - DNA, 15 bp, Homo sapiens
tctccacaccaggcg

SEQ ID NO: 22078 - DNA, 15 bp, Homo sapiens
ttctccacaccaggc

SEQ ID NO: 22079 - DNA, 15 bp, Homo sapiens
attctccacaccagg

SEQ ID NO: 22080 - DNA, 15 bp, Homo sapiens
cattctccacaccag

SEQ ID NO: 22081 - DNA, 15 bp, Homo sapiens
gcattctccacacca

SEQ ID NO: 22082 - DNA, 15 bp, Homo sapiens
tgcattctccacacc

SEQ ID NO: 22083 - DNA, 15 bp, Homo sapiens
atgcattctccacac

SEQ ID NO: 22084 - DNA, 15 bp, Homo sapiens
aatgcattctccaca

SEQ ID NO: 22085 - DNA, 15 bp, Homo sapiens
caatgcattctccac

SEQ ID NO: 22086 - DNA, 15 bp, Homo sapiens
tcaatgcattctcca

SEQ ID NO: 22087 - DNA, 15 bp, Homo sapiens
gtcaatgcattctcc

SEQ ID NO: 22088 - DNA, 15 bp, Homo sapiens
tgtcaatgcattctc

SEQ ID NO: 22089 - DNA, 15 bp, Homo sapiens
ctgtcaatgcattct

SEQ ID NO: 22090 - DNA, 15 bp, Homo sapiens
cctgtcaatgcattc

SEQ ID NO: 22091 - DNA, 15 bp, Homo sapiens
acctgtcaatgcatt

SEQ ID NO: 22092 - DNA, 15 bp, Homo sapiens
aacctgtcaatgcat

SEQ ID NO: 22093 - DNA, 15 bp, Homo sapiens
gaacctgtcaatgca

SEQ ID NO: 22094 - DNA, 15 bp, Homo sapiens
agaacctgtcaatgc

SEQ ID NO: 22095 - DNA, 15 bp, Homo sapiens
aagaacctgtcaatg

SEQ ID NO: 22096 - DNA, 15 bp, Homo sapiens
aaagaacctgtcaat

SEQ ID NO: 22097 - DNA, 15 bp, Homo sapiens
caaagaacctgtcaa

SEQ ID NO: 22098 - DNA, 15 bp, Homo sapiens
gcaaagaacctgtca

SEQ ID NO: 22099 - DNA, 15 bp, Homo sapiens
cgcaaagaacctgtc

SEQ ID NO: 22100 - DNA, 15 bp, Homo sapiens
ccgcaaagaacctgt

SEQ ID NO: 22101 - DNA, 15 bp, Homo sapiens
tccgcaaagaacctg

SEQ ID NO: 22102 - DNA, 15 bp, Homo sapiens
ctccgcaaagaacct

SEQ ID NO: 22103 - DNA, 15 bp, Homo sapiens
gctccgcaaagaacc

SEQ ID NO: 22104 - DNA, 15 bp, Homo sapiens
ggctccgcaaagaac

SEQ ID NO: 22105 - DNA, 15 bp, Homo sapiens
cggctccgcaaagaa

SEQ ID NO: 22106 - DNA, 15 bp, Homo sapiens
tcggctccgcaaaga

SEQ ID NO: 22107 - DNA, 15 bp, Homo sapiens
ctcggctccgcaaag

SEQ ID NO: 22108 - DNA, 15 bp, Homo sapiens
tctcggctccgcaaa

SEQ ID NO: 22109 - DNA, 15 bp, Homo sapiens
atctcggctccgcaa

SEQ ID NO: 22110 - DNA, 15 bp, Homo sapiens
tatctcggctccgca

SEQ ID NO: 22111 - DNA, 15 bp, Homo sapiens
gtatctcggctccgc

SEQ ID NO: 22112 - DNA, 15 bp, Homo sapiens
ggtatctcggctccg

SEQ ID NO: 22113 - DNA, 15 bp, Homo sapiens
tggtatctcggctcc

SEQ ID NO: 22114 - DNA, 15 bp, Homo sapiens
atggtatctcggctc

SEQ ID NO: 22115 - DNA, 15 bp, Homo sapiens
catggtatctcggct

SEQ ID NO: 22116 - DNA, 15 bp, Homo sapiens
gcatggtatctcggc

SEQ ID NO: 22117 - DNA, 15 bp, Homo sapiens
tgcatggtatctcgg

SEQ ID NO: 22118 - DNA, 15 bp, Homo sapiens
ctgcatggtatctcg

SEQ ID NO: 22119 - DNA, 15 bp, Homo sapiens
tctgcatggtatctc

SEQ ID NO: 22120 - DNA, 15 bp, Homo sapiens
gtctgcatggtatct

SEQ ID NO: 22121 - DNA, 15 bp, Homo sapiens
tgtctgcatggtatc

SEQ ID NO: 22122 - DNA, 15 bp, Homo sapiens
atgtctgcatggtat

SEQ ID NO: 22123 - DNA, 15 bp, Homo sapiens
aatgtctgcatggta

SEQ ID NO: 22124 - DNA, 15 bp, Homo sapiens
aaatgtctgcatggt

SEQ ID NO: 22125 - DNA, 15 bp, Homo sapiens
aaaatgtctgcatgg

SEQ ID NO: 22126 - DNA, 15 bp, Homo sapiens
caaaatgtctgcatg

SEQ ID NO: 22127 - DNA, 15 bp, Homo sapiens
gcaaaatgtctgcat

SEQ ID NO: 22128 - DNA, 15 bp, Homo sapiens
agcaaaatgtctgca

SEQ ID NO: 22129 - DNA, 15 bp, Homo sapiens
aagcaaaatgtctgc

SEQ ID NO: 22130 - DNA, 15 bp, Homo sapiens
caagcaaaatgtctg

SEQ ID NO: 22131 - DNA, 15 bp, Homo sapiens
acaagcaaaatgtct

SEQ ID NO: 22132 - DNA, 15 bp, Homo sapiens
aacaagcaaaatgtc

SEQ ID NO: 22133 - DNA, 15 bp, Homo sapiens
gaacaagcaaaatgt

SEQ ID NO: 22134 - DNA, 15 bp, Homo sapiens
tgaacaagcaaaatg

SEQ ID NO: 22135 - DNA, 15 bp, Homo sapiens
ttgaacaagcaaaat

SEQ ID NO: 22136 - DNA, 15 bp, Homo sapiens
tttgaacaagcaaaa

SEQ ID NO: 22137 - DNA, 15 bp, Homo sapiens
gtttgaacaagcaaa

SEQ ID NO: 22138 - DNA, 15 bp, Homo sapiens
ggtttgaacaagcaa

SEQ ID NO: 22139 - DNA, 15 bp, Homo sapiens
tggtttgaacaagca

SEQ ID NO: 22140 - DNA, 15 bp, Homo sapiens
ttggtttgaacaagc

SEQ ID NO: 22141 - DNA, 15 bp, Homo sapiens
gttggtttgaacaag

SEQ ID NO: 22142 - DNA, 15 bp, Homo sapiens
tgttggtttgaacaa

SEQ ID NO: 22143 - DNA, 15 bp, Homo sapiens
ttgttggtttgaaca

SEQ ID NO: 22144 - DNA, 15 bp, Homo sapiens
cttgttggtttgaac

SEQ ID NO: 22145 - DNA, 15 bp, Homo sapiens
tcttgttggtttgaa

SEQ ID NO: 22146 - DNA, 15 bp, Homo sapiens
gtcttgttggtttga

SEQ ID NO: 22147 - DNA, 15 bp, Homo sapiens
ggtcttgttggtttg

SEQ ID NO: 22148 - DNA, 15 bp, Homo sapiens
gggtcttgttggttt

SEQ ID NO: 22149 - DNA, 15 bp, Homo sapiens
tgggtcttgttggtt

SEQ ID NO: 22150 - DNA, 15 bp, Homo sapiens
ctgggtcttgttggt

SEQ ID NO: 22151 - DNA, 15 bp, Homo sapiens
gctgggtcttgttgg

SEQ ID NO: 22152 - DNA, 15 bp, Homo sapiens
tgctgggtcttgttg

SEQ ID NO: 22153 - DNA, 15 bp, Homo sapiens
gtgctgggtcttgtt

SEQ ID NO: 22154 - DNA, 15 bp, Homo sapiens
ggtgctgggtcttgt

SEQ ID NO: 22155 - DNA, 15 bp, Homo sapiens
cggtgctgggtcttg

SEQ ID NO: 22156 - DNA, 15 bp, Homo sapiens
gcggtgctgggtctt

SEQ ID NO: 22157 - DNA, 15 bp, Homo sapiens
cgcggtgctgggtct

SEQ ID NO: 22158 - DNA, 15 bp, Homo sapiens
ccgcggtgctgggtc

SEQ ID NO: 22159 - DNA, 15 bp, Homo sapiens
accgcggtgctgggt

SEQ ID NO: 22160 - DNA, 15 bp, Homo sapiens
gaccgcggtgctggg

SEQ ID NO: 22161 - DNA, 15 bp, Homo sapiens
agaccgcggtgctgg

SEQ ID NO: 22162 - DNA, 15 bp, Homo sapiens
gagaccgcggtgctg

SEQ ID NO: 22163 - DNA, 15 bp, Homo sapiens
ggagaccgcggtgct

SEQ ID NO: 22164 - DNA, 15 bp, Homo sapiens
aggagaccgcggtgc

SEQ ID NO: 22165 - DNA, 15 bp, Homo sapiens
caggagaccgcggtg

SEQ ID NO: 22166 - DNA, 15 bp, Homo sapiens
ccaggagaccgcggt

SEQ ID NO: 22167 - DNA, 15 bp, Homo sapiens
accaggagaccgcgg

SEQ ID NO: 22168 - DNA, 15 bp, Homo sapiens
caccaggagaccgcg

SEQ ID NO: 22169 - DNA, 15 bp, Homo sapiens
gcaccaggagaccgc

SEQ ID NO: 22170 - DNA, 15 bp, Homo sapiens
ggcaccaggagaccg

SEQ ID NO: 22171 - DNA, 15 bp, Homo sapiens
tggcaccaggagacc

SEQ ID NO: 22172 - DNA, 15 bp, Homo sapiens
atggcaccaggagac

SEQ ID NO: 22173 - DNA, 15 bp, Homo sapiens
aatggcaccaggaga

SEQ ID NO: 22174 - DNA, 15 bp, Homo sapiens
taatggcaccaggag

SEQ ID NO: 22175 - DNA, 15 bp, Homo sapiens
ataatggcaccagga

SEQ ID NO: 22176 - DNA, 15 bp, Homo sapiens
aataatggcaccagg

SEQ ID NO: 22177 - DNA, 15 bp, Homo sapiens
taataatggcaccag

SEQ ID NO: 22178 - DNA, 15 bp, Homo sapiens
ataataatggcacca

SEQ ID NO: 22179 - DNA, 15 bp, Homo sapiens
cataataatggcacc

SEQ ID NO: 22180 - DNA, 15 bp, Homo sapiens
gcataataatggcac

SEQ ID NO: 22181 - DNA, 15 bp, Homo sapiens
tgcataataatggca

SEQ ID NO: 22182 - DNA, 15 bp, Homo sapiens
ctgcataataatggc

SEQ ID NO: 22183 - DNA, 15 bp, Homo sapiens
gctgcataataatgg

SEQ ID NO: 22184 - DNA, 15 bp, Homo sapiens
ggctgcataataatg

SEQ ID NO: 22185 - DNA, 15 bp, Homo sapiens
tggctgcataataat

SEQ ID NO: 22186 - DNA, 15 bp, Homo sapiens
ctggctgcataataa

SEQ ID NO: 22187 - DNA, 15 bp, Homo sapiens
gctggctgcataata

SEQ ID NO: 22188 - DNA, 15 bp, Homo sapiens
cgctggctgcataat

SEQ ID NO: 22189 - DNA, 15 bp, Homo sapiens
ccgctggctgcataa

SEQ ID NO: 22190 - DNA, 15 bp, Homo sapiens
accgctggctgcata

SEQ ID NO: 22191 - DNA, 15 bp, Homo sapiens
aaccgctggctgcat

SEQ ID NO: 22192 - DNA, 15 bp, Homo sapiens
gaaccgctggctgca

SEQ ID NO: 22193 - DNA, 15 bp, Homo sapiens
agaaccgctggctgc

SEQ ID NO: 22194 - DNA, 15 bp, Homo sapiens
gagaaccgctggctg

SEQ ID NO: 22195 - DNA, 15 bp, Homo sapiens
agagaaccgctggct

SEQ ID NO: 22196 - DNA, 15 bp, Homo sapiens
aagagaaccgctggc

SEQ ID NO: 22197 - DNA, 15 bp, Homo sapiens
caagagaaccgctgg

SEQ ID NO: 22198 - DNA, 15 bp, Homo sapiens
acaagagaaccgctg

SEQ ID NO: 22199 - DNA, 15 bp, Homo sapiens
cacaagagaaccgct

SEQ ID NO: 22200 - DNA, 15 bp, Homo sapiens
ccacaagagaaccgc

SEQ ID NO: 22201 - DNA, 15 bp, Homo sapiens
tccacaagagaaccg

SEQ ID NO: 22202 - DNA, 15 bp, Homo sapiens
ctccacaagagaacc

SEQ ID NO: 22203 - DNA, 15 bp, Homo sapiens
cctccacaagagaac

SEQ ID NO: 22204 - DNA, 15 bp, Homo sapiens
ccctccacaagagaa

SEQ ID NO: 22205 - DNA, 15 bp, Homo sapiens
cccctccacaagaga

SEQ ID NO: 22206 - DNA, 15 bp, Homo sapiens
ccccctccacaagag

SEQ ID NO: 22207 - DNA, 15 bp, Homo sapiens
gccccctccacaaga

SEQ ID NO: 22208 - DNA, 15 bp, Homo sapiens
tgccccctccacaag

SEQ ID NO: 22209 - DNA, 15 bp, Homo sapiens
ctgccccctccacaa

SEQ ID NO: 22210 - DNA, 15 bp, Homo sapiens
cctgccccctccaca

SEQ ID NO: 22211 - DNA, 15 bp, Homo sapiens
acctgccccctccac

SEQ ID NO: 22212 - DNA, 15 bp, Homo sapiens
cacctgccccctcca

SEQ ID NO: 22213 - DNA, 15 bp, Homo sapiens
tcacctgccccctcc

SEQ ID NO: 22214 - DNA, 15 bp, Homo sapiens
gtcacctgccccctc

SEQ ID NO: 22215 - DNA, 15 bp, Homo sapiens
cgtcacctgccccct

SEQ ID NO: 22216 - DNA, 15 bp, Homo sapiens
acgtcacctgccccc

SEQ ID NO: 22217 - DNA, 15 bp, Homo sapiens
aacgtcacctgcccc

SEQ ID NO: 22218 - DNA, 15 bp, Homo sapiens
aaacgtcacctgccc

SEQ ID NO: 22219 - DNA, 15 bp, Homo sapiens
gaaacgtcacctgcc

SEQ ID NO: 22220 - DNA, 15 bp, Homo sapiens
tgaaacgtcacctgc

SEQ ID NO: 22221 - DNA, 15 bp, Homo sapiens
ctgaaacgtcacctg

SEQ ID NO: 22222 - DNA, 15 bp, Homo sapiens
tctgaaacgtcacct

SEQ ID NO: 22223 - DNA, 15 bp, Homo sapiens
ttctgaaacgtcacc

SEQ ID NO: 22224 - DNA, 15 bp, Homo sapiens
cttctgaaacgtcac

SEQ ID NO: 22225 - DNA, 15 bp, Homo sapiens
tcttctgaaacgtca

SEQ ID NO: 22226 - DNA, 15 bp, Homo sapiens
gtcttctgaaacgtc

SEQ ID NO: 22227 - DNA, 15 bp, Homo sapiens
tgtcttctgaaacgt

SEQ ID NO: 22228 - DNA, 15 bp, Homo sapiens
gtgtcttctgaaacg

SEQ ID NO: 22229 - DNA, 15 bp, Homo sapiens
ggtgtcttctgaaac

SEQ ID NO: 22230 - DNA, 15 bp, Homo sapiens
cggtgtcttctgaaa

SEQ ID NO: 22231 - DNA, 15 bp, Homo sapiens
tcggtgtcttctgaa

SEQ ID NO: 22232 - DNA, 15 bp, Homo sapiens
ctcggtgtcttctga

SEQ ID NO: 22233 - DNA, 15 bp, Homo sapiens
gctcggtgtcttctg

SEQ ID NO: 22234 - DNA, 15 bp, Homo sapiens
agctcggtgtcttct

SEQ ID NO: 22235 - DNA, 15 bp, Homo sapiens
cagctcggtgtcttc

SEQ ID NO: 22236 - DNA, 15 bp, Homo sapiens
ccagctcggtgtctt

SEQ ID NO: 22237 - DNA, 15 bp, Homo sapiens
tccagctcggtgtct

SEQ ID NO: 22238 - DNA, 15 bp, Homo sapiens
atccagctcggtgtc

SEQ ID NO: 22239 - DNA, 15 bp, Homo sapiens
catccagctcggtgt

SEQ ID NO: 22240 - DNA, 15 bp, Homo sapiens
ccatccagctcggtg

SEQ ID NO: 22241 - DNA, 15 bp, Homo sapiens
cccatccagctcggt

SEQ ID NO: 22242 - DNA, 15 bp, Homo sapiens
tcccatccagctcgg

SEQ ID NO: 22243 - DNA, 15 bp, Homo sapiens
gtcccatccagctcg

SEQ ID NO: 22244 - DNA, 15 bp, Homo sapiens
agtcccatccagctc

SEQ ID NO: 22245 - DNA, 15 bp, Homo sapiens
tagtcccatccagct

SEQ ID NO: 22246 - DNA, 15 bp, Homo sapiens
gtagtcccatccagc

SEQ ID NO: 22247 - DNA, 15 bp, Homo sapiens
ggtagtcccatccag

SEQ ID NO: 22248 - DNA, 15 bp, Homo sapiens
aggtagtcccatcca

SEQ ID NO: 22249 - DNA, 15 bp, Homo sapiens
aaggtagtcccatcc

SEQ ID NO: 22250 - DNA, 15 bp, Homo sapiens
aaaggtagtcccatc

SEQ ID NO: 22251 - DNA, 15 bp, Homo sapiens
gaaaggtagtcccat

SEQ ID NO: 22252 - DNA, 15 bp, Homo sapiens
agaaaggtagtccca

SEQ ID NO: 22253 - DNA, 15 bp, Homo sapiens
cagaaaggtagtccc

SEQ ID NO: 22254 - DNA, 15 bp, Homo sapiens
acagaaaggtagtcc

SEQ ID NO: 22255 - DNA, 15 bp, Homo sapiens
aacagaaaggtagtc

SEQ ID NO: 22256 - DNA, 15 bp, Homo sapiens
gaacagaaaggtagt

SEQ ID NO: 22257 - DNA, 15 bp, Homo sapiens
tgaacagaaaggtag

SEQ ID NO: 22258 - DNA, 15 bp, Homo sapiens
atgaacagaaaggta

SEQ ID NO: 22259 - DNA, 15 bp, Homo sapiens
gatgaacagaaaggt

SEQ ID NO: 22260 - DNA, 15 bp, Homo sapiens
tgatgaacagaaagg

SEQ ID NO: 22261 - DNA, 15 bp, Homo sapiens
gtgatgaacagaaag

SEQ ID NO: 22262 - DNA, 15 bp, Homo sapiens
ggtgatgaacagaaa

SEQ ID NO: 22263 - DNA, 15 bp, Homo sapiens
tggtgatgaacagaa

SEQ ID NO: 22264 - DNA, 15 bp, Homo sapiens
gtggtgatgaacaga

SEQ ID NO: 22265 - DNA, 15 bp, Homo sapiens
tgtggtgatgaacag

SEQ ID NO: 22266 - DNA, 15 bp, Homo sapiens
gtgtggtgatgaaca

SEQ ID NO: 22267 - DNA, 15 bp, Homo sapiens
tgtgtggtgatgaac

SEQ ID NO: 22268 - DNA, 15 bp, Homo sapiens
ctgtgtggtgatgaa

SEQ ID NO: 22269 - DNA, 15 bp, Homo sapiens
gctgtgtggtgatga

SEQ ID NO: 22270 - DNA, 15 bp, Homo sapiens
tgctgtgtggtgatg

SEQ ID NO: 22271 - DNA, 15 bp, Homo sapiens
ctgctgtgtggtgat

SEQ ID NO: 22272 - DNA, 15 bp, Homo sapiens
tctgctgtgtggtga

SEQ ID NO: 22273 - DNA, 15 bp, Homo sapiens
ttctgctgtgtggtg

SEQ ID NO: 22274 - DNA, 15 bp, Homo sapiens
attctgctgtgtggt

SEQ ID NO: 22275 - DNA, 15 bp, Homo sapiens
aattctgctgtgtgg

SEQ ID NO: 22276 - DNA, 15 bp, Homo sapiens
aaattctgctgtgtg

SEQ ID NO: 22277 - DNA, 15 bp, Homo sapiens
gaaattctgctgtgt

SEQ ID NO: 22278 - DNA, 15 bp, Homo sapiens
agaaattctgctgtg

SEQ ID NO: 22279 - DNA, 15 bp, Homo sapiens
tagaaattctgctgt

SEQ ID NO: 22280 - DNA, 15 bp, Homo sapiens
ttagaaattctgctg

SEQ ID NO: 22281 - DNA, 15 bp, Homo sapiens
attagaaattctgct

SEQ ID NO: 22282 - DNA, 15 bp, Homo sapiens
cattagaaattctgc

SEQ ID NO: 22283 - DNA, 15 bp, Homo sapiens
ccattagaaattctg

SEQ ID NO: 22284 - DNA, 15 bp, Homo sapiens
tccattagaaattct

SEQ ID NO: 22285 - DNA, 15 bp, Homo sapiens
ttccattagaaattc

SEQ ID NO: 22286 - DNA, 15 bp, Homo sapiens
cttccattagaaatt

SEQ ID NO: 22287 - DNA, 15 bp, Homo sapiens
acttccattagaaat

SEQ ID NO: 22288 - DNA, 15 bp, Homo sapiens
aacttccattagaaa

SEQ ID NO: 22289 - DNA, 15 bp, Homo sapiens
aaacttccattagaa

SEQ ID NO: 22290 - DNA, 15 bp, Homo sapiens
caaacttccattaga

SEQ ID NO: 22291 - DNA, 15 bp, Homo sapiens
acaaacttccattag

SEQ ID NO: 22292 - DNA, 15 bp, Homo sapiens
aacaaacttccatta

SEQ ID NO: 22293 - DNA, 15 bp, Homo sapiens
caacaaacttccatt

SEQ ID NO: 22294 - DNA, 15 bp, Homo sapiens
acaacaaacttccat

SEQ ID NO: 22295 - DNA, 15 bp, Homo sapiens
cacaacaaacttcca

SEQ ID NO: 22296 - DNA, 15 bp, Homo sapiens
tcacaacaaacttcc

SEQ ID NO: 22297 - DNA, 15 bp, Homo sapiens
ttcacaacaaacttc

SEQ ID NO: 22298 - DNA, 15 bp, Homo sapiens
attcacaacaaactt

SEQ ID NO: 22299 - DNA, 15 bp, Homo sapiens
cattcacaacaaact

SEQ ID NO: 22300 - DNA, 15 bp, Homo sapiens
acattcacaacaaac

SEQ ID NO: 22301 - DNA, 15 bp, Homo sapiens
tacattcacaacaaa

SEQ ID NO: 22302 - DNA, 15 bp, Homo sapiens
ttacattcacaacaa

SEQ ID NO: 22303 - DNA, 15 bp, Homo sapiens
tttacattcacaaca

SEQ ID NO: 22304 - DNA, 15 bp, Homo sapiens
ctttacattcacaac

SEQ ID NO: 22305 - DNA, 15 bp, Homo sapiens
cctttacattcacaa

SEQ ID NO: 22306 - DNA, 15 bp, Homo sapiens
tcctttacattcaca

SEQ ID NO: 22307 - DNA, 15 bp, Homo sapiens
ctcctttacattcac

SEQ ID NO: 22308 - DNA, 15 bp, Homo sapiens
cctcctttacattca

SEQ ID NO: 22309 - DNA, 15 bp, Homo sapiens
ccctcctttacattc

SEQ ID NO: 22310 - DNA, 15 bp, Homo sapiens
tccctcctttacatt

SEQ ID NO: 22311 - DNA, 15 bp, Homo sapiens
ctccctcctttacat

SEQ ID NO: 22312 - DNA, 15 bp, Homo sapiens
gctccctcctttaca

SEQ ID NO: 22313 - DNA, 15 bp, Homo sapiens
tgctccctcctttac

SEQ ID NO: 22314 - DNA, 15 bp, Homo sapiens
atgctccctccttta

SEQ ID NO: 22315 - DNA, 15 bp, Homo sapiens
aatgctccctccttt

SEQ ID NO: 22316 - DNA, 15 bp, Homo sapiens
gaatgctccctcctt

SEQ ID NO: 22317 - DNA, 15 bp, Homo sapiens
agaatgctccctcct

SEQ ID NO: 22318 - DNA, 15 bp, Homo sapiens
aagaatgctccctcc

SEQ ID NO: 22319 - DNA, 15 bp, Homo sapiens
aaagaatgctccctc

SEQ ID NO: 22320 - DNA, 15 bp, Homo sapiens
caaagaatgctccct

SEQ ID NO: 22321 - DNA, 15 bp, Homo sapiens
gcaaagaatgctccc

SEQ ID NO: 22322 - DNA, 15 bp, Homo sapiens
agcaaagaatgctcc

SEQ ID NO: 22323 - DNA, 15 bp, Homo sapiens
aagcaaagaatgctc

SEQ ID NO: 22324 - DNA, 15 bp, Homo sapiens
aaagcaaagaatgct

SEQ ID NO: 22325 - DNA, 15 bp, Homo sapiens
aaaagcaaagaatgc

SEQ ID NO: 22326 - DNA, 15 bp, Homo sapiens
aaaaagcaaagaatg

SEQ ID NO: 22327 - DNA, 15 bp, Homo sapiens
taaaaagcaaagaat

SEQ ID NO: 22328 - DNA, 15 bp, Homo sapiens
ttaaaaagcaaagaa

SEQ ID NO: 22329 - DNA, 15 bp, Homo sapiens
attaaaaagcaaaga

SEQ ID NO: 22330 - DNA, 15 bp, Homo sapiens
tattaaaaagcaaag

SEQ ID NO: 22331 - DNA, 15 bp, Homo sapiens
atattaaaaagcaaa

SEQ ID NO: 22332 - DNA, 15 bp, Homo sapiens
tatattaaaaagcaa

SEQ ID NO: 22333 - DNA, 15 bp, Homo sapiens
gtatattaaaaagca

SEQ ID NO: 22334 - DNA, 15 bp, Homo sapiens
tgtatattaaaaagc

SEQ ID NO: 22335 - DNA, 15 bp, Homo sapiens
ttgtatattaaaaag

SEQ ID NO: 22336 - DNA, 15 bp, Homo sapiens
tttgtatattaaaaa

SEQ ID NO: 22337 - DNA, 15 bp, Homo sapiens
gtttgtatattaaaa

SEQ ID NO: 22338 - DNA, 15 bp, Homo sapiens
ggtttgtatattaaa

SEQ ID NO: 22339 - DNA, 15 bp, Homo sapiens
tggtttgtatattaa

SEQ ID NO: 22340 - DNA, 15 bp, Homo sapiens
atggtttgtatatta

SEQ ID NO: 22341 - DNA, 15 bp, Homo sapiens
catggtttgtatatt

SEQ ID NO: 22342 - DNA, 15 bp, Homo sapiens
ccatggtttgtatat

SEQ ID NO: 22343 - DNA, 15 bp, Homo sapiens
accatggtttgtata

SEQ ID NO: 22344 - DNA, 15 bp, Homo sapiens
aaccatggtttgtat

SEQ ID NO: 22345 - DNA, 15 bp, Homo sapiens
aaaccatggtttgta

SEQ ID NO: 22346 - DNA, 15 bp, Homo sapiens
aaaaccatggtttgt

SEQ ID NO: 22347 - DNA, 15 bp, Homo sapiens
aaaaaccatggtttg

SEQ ID NO: 22348 - DNA, 15 bp, Homo sapiens
aaaaaaccatggttt

SEQ ID NO: 22349 - DNA, 15 bp, Homo sapiens
caaaaaaccatggtt

SEQ ID NO: 22350 - DNA, 15 bp, Homo sapiens
ccaaaaaaccatggt

SEQ ID NO: 22351 - DNA, 15 bp, Homo sapiens
tccaaaaaaccatgg

SEQ ID NO: 22352 - DNA, 15 bp, Homo sapiens
ctccaaaaaaccatg

SEQ ID NO: 22353 - DNA, 15 bp, Homo sapiens
gctccaaaaaaccat

SEQ ID NO: 22354 - DNA, 15 bp, Homo sapiens
tgctccaaaaaacca

SEQ ID NO: 22355 - DNA, 15 bp, Homo sapiens
ctgctccaaaaaacc

SEQ ID NO: 22356 - DNA, 15 bp, Homo sapiens
cctgctccaaaaaac

SEQ ID NO: 22357 - DNA, 15 bp, Homo sapiens
tcctgctccaaaaaa

SEQ ID NO: 22358 - DNA, 15 bp, Homo sapiens
atcctgctccaaaaa

SEQ ID NO: 22359 - DNA, 15 bp, Homo sapiens
aatcctgctccaaaa

SEQ ID NO: 22360 - DNA, 15 bp, Homo sapiens
aaatcctgctccaaa

SEQ ID NO: 22361 - DNA, 15 bp, Homo sapiens
aaaatcctgctccaa

SEQ ID NO: 22362 - DNA, 15 bp, Homo sapiens
caaaatcctgctcca

SEQ ID NO: 22363 - DNA, 15 bp, Homo sapiens
acaaaatcctgctcc

SEQ ID NO: 22364 - DNA, 15 bp, Homo sapiens
cacaaaatcctgctc

SEQ ID NO: 22365 - DNA, 15 bp, Homo sapiens
acacaaaatcctgct

SEQ ID NO: 22366 - DNA, 15 bp, Homo sapiens
tacacaaaatcctgc

SEQ ID NO: 22367 - DNA, 15 bp, Homo sapiens
ttacacaaaatcctg

SEQ ID NO: 22368 - DNA, 15 bp, Homo sapiens
cttacacaaaatcct

SEQ ID NO: 22369 - DNA, 15 bp, Homo sapiens
tcttacacaaaatcc

SEQ ID NO: 22370 - DNA, 15 bp, Homo sapiens
ttcttacacaaaatc

SEQ ID NO: 22371 - DNA, 15 bp, Homo sapiens
attcttacacaaaat

SEQ ID NO: 22372 - DNA, 15 bp, Homo sapiens
cattcttacacaaaa

SEQ ID NO: 22373 - DNA, 15 bp, Homo sapiens
ccattcttacacaaa

SEQ ID NO: 22374 - DNA, 15 bp, Homo sapiens
accattcttacacaa

SEQ ID NO: 22375 - DNA, 15 bp, Homo sapiens
caccattcttacaca

SEQ ID NO: 22376 - DNA, 15 bp, Homo sapiens
acaccattcttacac

SEQ ID NO: 22377 - DNA, 15 bp, Homo sapiens
aacaccattcttaca

SEQ ID NO: 22378 - DNA, 15 bp, Homo sapiens
aaacaccattcttac

SEQ ID NO: 22379 - DNA, 15 bp, Homo sapiens
taaacaccattctta

SEQ ID NO: 22380 - DNA, 15 bp, Homo sapiens
gtaaacaccattctt

SEQ ID NO: 22381 - DNA, 15 bp, Homo sapiens
tgtaaacaccattct

SEQ ID NO: 22382 - DNA, 15 bp, Homo sapiens
atgtaaacaccattc

SEQ ID NO: 22383 - DNA, 15 bp, Homo sapiens
catgtaaacaccatt

SEQ ID NO: 22384 - DNA, 15 bp, Homo sapiens
gcatgtaaacaccat

SEQ ID NO: 22385 - DNA, 15 bp, Homo sapiens
tgcatgtaaacacca

SEQ ID NO: 22386 - DNA, 15 bp, Homo sapiens
ctgcatgtaaacacc

SEQ ID NO: 22387 - DNA, 15 bp, Homo sapiens
actgcatgtaaacac

SEQ ID NO: 22388 - DNA, 15 bp, Homo sapiens
cactgcatgtaaaca

SEQ ID NO: 22389 - DNA, 15 bp, Homo sapiens
acactgcatgtaaac

SEQ ID NO: 22390 - DNA, 15 bp, Homo sapiens
cacactgcatgtaaa

SEQ ID NO: 22391 - DNA, 15 bp, Homo sapiens
acacactgcatgtaa

SEQ ID NO: 22392 - DNA, 15 bp, Homo sapiens
aacacactgcatgta

SEQ ID NO: 22393 - DNA, 15 bp, Homo sapiens
aaacacactgcatgt

SEQ ID NO: 22394 - DNA, 15 bp, Homo sapiens
aaaacacactgcatg

SEQ ID NO: 22395 - DNA, 15 bp, Homo sapiens
gaaaacacactgcat

SEQ ID NO: 22396 - DNA, 15 bp, Homo sapiens
ggaaaacacactgca

SEQ ID NO: 22397 - DNA, 15 bp, Homo sapiens
gggaaaacacactgc

SEQ ID NO: 22398 - DNA, 15 bp, Homo sapiens
ggggaaaacacactg

SEQ ID NO: 22399 - DNA, 15 bp, Homo sapiens
gggggaaaacacact

SEQ ID NO: 22400 - DNA, 15 bp, Homo sapiens
agggggaaaacacac

SEQ ID NO: 22401 - DNA, 15 bp, Homo sapiens
gagggggaaaacaca

SEQ ID NO: 22402 - DNA, 15 bp, Homo sapiens
tgagggggaaaacac

SEQ ID NO: 22403 - DNA, 15 bp, Homo sapiens
gtgagggggaaaaca

SEQ ID NO: 22404 - DNA, 15 bp, Homo sapiens
ggtgagggggaaaac

SEQ ID NO: 22405 - DNA, 15 bp, Homo sapiens
aggtgagggggaaaa

SEQ ID NO: 22406 - DNA, 15 bp, Homo sapiens
aaggtgagggggaaa

SEQ ID NO: 22407 - DNA, 15 bp, Homo sapiens
gaaggtgagggggaa

SEQ ID NO: 22408 - DNA, 15 bp, Homo sapiens
tgaaggtgaggggga

SEQ ID NO: 22409 - DNA, 15 bp, Homo sapiens
ttgaaggtgaggggg

SEQ ID NO: 22410 - DNA, 15 bp, Homo sapiens
attgaaggtgagggg

SEQ ID NO: 22411 - DNA, 15 bp, Homo sapiens
tattgaaggtgaggg

SEQ ID NO: 22412 - DNA, 15 bp, Homo sapiens
ttattgaaggtgagg

SEQ ID NO: 22413 - DNA, 15 bp, Homo sapiens
cttattgaaggtgag

SEQ ID NO: 22414 - DNA, 15 bp, Homo sapiens
ccttattgaaggtga

SEQ ID NO: 22415 - DNA, 15 bp, Homo sapiens
accttattgaaggtg

SEQ ID NO: 22416 - DNA, 15 bp, Homo sapiens
aaccttattgaaggt

SEQ ID NO: 22417 - DNA, 15 bp, Homo sapiens
aaaccttattgaagg

SEQ ID NO: 22418 - DNA, 15 bp, Homo sapiens
aaaaccttattgaag

SEQ ID NO: 22419 - DNA, 15 bp, Homo sapiens
aaaaaccttattgaa

SEQ ID NO: 22420 - DNA, 15 bp, Homo sapiens
gaaaaaccttattga

SEQ ID NO: 22421 - DNA, 15 bp, Homo sapiens
tgaaaaaccttattg

SEQ ID NO: 22422 - DNA, 15 bp, Homo sapiens
ttgaaaaaccttatt

SEQ ID NO: 22423 - DNA, 15 bp, Homo sapiens
tttgaaaaaccttat

SEQ ID NO: 22424 - DNA, 15 bp, Homo sapiens
ttttgaaaaacctta

SEQ ID NO: 22425 - DNA, 15 bp, Homo sapiens
tttttgaaaaacctt

SEQ ID NO: 22426 - DNA, 15 bp, Homo sapiens
ctttttgaaaaacct

SEQ ID NO: 22427 - DNA, 15 bp, Homo sapiens
cctttttgaaaaacc

SEQ ID NO: 22428 - DNA, 15 bp, Homo sapiens
tcctttttgaaaaac

SEQ ID NO: 22429 - DNA, 15 bp, Homo sapiens
ttcctttttgaaaaa

SEQ ID NO: 22430 - DNA, 15 bp, Homo sapiens
tttcctttttgaaaa

SEQ ID NO: 22431 - DNA, 15 bp, Homo sapiens
atttcctttttgaaa

SEQ ID NO: 22432 - DNA, 15 bp, Homo sapiens
catttcctttttgaa

SEQ ID NO: 22433 - DNA, 15 bp, Homo sapiens
ccatttcctttttga

SEQ ID NO: 22434 - DNA, 15 bp, Homo sapiens
tccatttcctttttg

SEQ ID NO: 22435 - DNA, 15 bp, Homo sapiens
ttccatttccttttt

SEQ ID NO: 22436 - DNA, 15 bp, Homo sapiens
tttccatttcctttt

SEQ ID NO: 22437 - DNA, 15 bp, Homo sapiens
gtttccatttccttt

SEQ ID NO: 22438 - DNA, 15 bp, Homo sapiens
agtttccatttcctt

SEQ ID NO: 22439 - DNA, 15 bp, Homo sapiens
aagtttccatttcct

SEQ ID NO: 22440 - DNA, 15 bp, Homo sapiens
aaagtttccatttcc

SEQ ID NO: 22441 - DNA, 15 bp, Homo sapiens
aaaagtttccatttc

SEQ ID NO: 22442 - DNA, 15 bp, Homo sapiens
aaaaagtttccattt

SEQ ID NO: 22443 - DNA, 15 bp, Homo sapiens
taaaaagtttccatt

SEQ ID NO: 22444 - DNA, 15 bp, Homo sapiens
ttaaaaagtttccat

SEQ ID NO: 22445 - DNA, 15 bp, Homo sapiens
gttaaaaagtttcca

SEQ ID NO: 22446 - DNA, 15 bp, Homo sapiens
ggttaaaaagtttcc

SEQ ID NO: 22447 - DNA, 15 bp, Homo sapiens
tggttaaaaagtttc

SEQ ID NO: 22448 - DNA, 15 bp, Homo sapiens
ttggttaaaaagttt

SEQ ID NO: 22449 - DNA, 15 bp, Homo sapiens
attggttaaaaagtt

SEQ ID NO: 22450 - DNA, 15 bp, Homo sapiens
aattggttaaaaagt

SEQ ID NO: 22451 - DNA, 15 bp, Homo sapiens
aaattggttaaaaag

SEQ ID NO: 22452 - DNA, 15 bp, Homo sapiens
caaattggttaaaaa

SEQ ID NO: 22453 - DNA, 15 bp, Homo sapiens
acaaattggttaaaa

SEQ ID NO: 22454 - DNA, 15 bp, Homo sapiens
cacaaattggttaaa

SEQ ID NO: 22455 - DNA, 15 bp, Homo sapiens
tcacaaattggttaa

SEQ ID NO: 22456 - DNA, 15 bp, Homo sapiens
ttcacaaattggtta

SEQ ID NO: 22457 - DNA, 15 bp, Homo sapiens
attcacaaattggtt

SEQ ID NO: 22458 - DNA, 15 bp, Homo sapiens
tattcacaaattggt

SEQ ID NO: 22459 - DNA, 15 bp, Homo sapiens
ttattcacaaattgg

SEQ ID NO: 22460 - DNA, 15 bp, Homo sapiens
gttattcacaaattg

SEQ ID NO: 22461 - DNA, 15 bp, Homo sapiens
agttattcacaaatt

SEQ ID NO: 22462 - DNA, 15 bp, Homo sapiens
aagttattcacaaat

SEQ ID NO: 22463 - DNA, 15 bp, Homo sapiens
aaagttattcacaaa

SEQ ID NO: 22464 - DNA, 15 bp, Homo sapiens
aaaagttattcacaa

SEQ ID NO: 22465 - DNA, 15 bp, Homo sapiens
caaaagttattcaca

SEQ ID NO: 22466 - DNA, 15 bp, Homo sapiens
acaaaagttattcac

SEQ ID NO: 22467 - DNA, 15 bp, Homo sapiens
tacaaaagttattca

SEQ ID NO: 22468 - DNA, 15 bp, Homo sapiens
atacaaaagttattc

SEQ ID NO: 22469 - DNA, 15 bp, Homo sapiens
aatacaaaagttatt

SEQ ID NO: 22470 - DNA, 15 bp, Homo sapiens
taatacaaaagttat

SEQ ID NO: 22471 - DNA, 15 bp, Homo sapiens
ttaatacaaaagtta

SEQ ID NO: 22472 - DNA, 15 bp, Homo sapiens
tttaatacaaaagtt

SEQ ID NO: 22473 - DNA, 15 bp, Homo sapiens
ttttaatacaaaagt

SEQ ID NO: 22474 - DNA, 15 bp, Homo sapiens
attttaatacaaaag

SEQ ID NO: 22475 - DNA, 15 bp, Homo sapiens
aattttaatacaaaa

SEQ ID NO: 22476 - DNA, 15 bp, Homo sapiens
aaattttaatacaaa

SEQ ID NO: 22477 - DNA, 15 bp, Homo sapiens
aaaattttaatacaa

SEQ ID NO: 22478 - DNA, 15 bp, Homo sapiens
taaaattttaataca

SEQ ID NO: 22479 - DNA, 15 bp, Homo sapiens
ttaaaattttaatac

SEQ ID NO: 22480 - DNA, 15 bp, Homo sapiens
cttaaaattttaata

SEQ ID NO: 22481 - DNA, 15 bp, Homo sapiens
tcttaaaattttaat

SEQ ID NO: 22482 - DNA, 15 bp, Homo sapiens
ttcttaaaattttaa

SEQ ID NO: 22483 - DNA, 15 bp, Homo sapiens
gttcttaaaatttta

SEQ ID NO: 22484 - DNA, 15 bp, Homo sapiens
ggttcttaaaatttt

SEQ ID NO: 22485 - DNA, 15 bp, Homo sapiens
aggttcttaaaattt

SEQ ID NO: 22486 - DNA, 15 bp, Homo sapiens
taggttcttaaaatt

SEQ ID NO: 22487 - DNA, 15 bp, Homo sapiens
gtaggttcttaaaat

SEQ ID NO: 22488 - DNA, 15 bp, Homo sapiens
cgtaggttcttaaaa

SEQ ID NO: 22489 - DNA, 15 bp, Homo sapiens
ccgtaggttcttaaa

SEQ ID NO: 22490 - DNA, 15 bp, Homo sapiens
gccgtaggttcttaa

SEQ ID NO: 22491 - DNA, 15 bp, Homo sapiens
ggccgtaggttctta

SEQ ID NO: 22492 - DNA, 15 bp, Homo sapiens
aggccgtaggttctt

SEQ ID NO: 22493 - DNA, 15 bp, Homo sapiens
taggccgtaggttct

SEQ ID NO: 22494 - DNA, 15 bp, Homo sapiens
ataggccgtaggttc

SEQ ID NO: 22495 - DNA, 15 bp, Homo sapiens
aataggccgtaggtt

SEQ ID NO: 22496 - DNA, 15 bp, Homo sapiens
gaataggccgtaggt

SEQ ID NO: 22497 - DNA, 15 bp, Homo sapiens
agaataggccgtagg

SEQ ID NO: 22498 - DNA, 15 bp, Homo sapiens
gagaataggccgtag

SEQ ID NO: 22499 - DNA, 15 bp, Homo sapiens
tgagaataggccgta

SEQ ID NO: 22500 - DNA, 15 bp, Homo sapiens
ctgagaataggccgt

SEQ ID NO: 22501 - DNA, 15 bp, Homo sapiens
tctgagaataggccg

SEQ ID NO: 22502 - DNA, 15 bp, Homo sapiens
ctctgagaataggcc

SEQ ID NO: 22503 - DNA, 15 bp, Homo sapiens
cctctgagaataggc

SEQ ID NO: 22504 - DNA, 15 bp, Homo sapiens
tcctctgagaatagg

SEQ ID NO: 22505 - DNA, 15 bp, Homo sapiens
atcctctgagaatag

SEQ ID NO: 22506 - DNA, 15 bp, Homo sapiens
aatcctctgagaata

SEQ ID NO: 22507 - DNA, 15 bp, Homo sapiens
taatcctctgagaat

SEQ ID NO: 22508 - DNA, 15 bp, Homo sapiens
ataatcctctgagaa

SEQ ID NO: 22509 - DNA, 15 bp, Homo sapiens
cataatcctctgaga

SEQ ID NO: 22510 - DNA, 15 bp, Homo sapiens
acataatcctctgag

SEQ ID NO: 22511 - DNA, 15 bp, Homo sapiens
tacataatcctctga

SEQ ID NO: 22512 - DNA, 15 bp, Homo sapiens
ttacataatcctctg

SEQ ID NO: 22513 - DNA, 15 bp, Homo sapiens
gttacataatcctct

SEQ ID NO: 22514 - DNA, 15 bp, Homo sapiens
ggttacataatcctc

SEQ ID NO: 22515 - DNA, 15 bp, Homo sapiens
gggttacataatcct

SEQ ID NO: 22516 - DNA, 15 bp, Homo sapiens
ggggttacataatcc

SEQ ID NO: 22517 - DNA, 15 bp, Homo sapiens
aggggttacataatc

SEQ ID NO: 22518 - DNA, 15 bp, Homo sapiens
caggggttacataat

SEQ ID NO: 22519 - DNA, 15 bp, Homo sapiens
gcaggggttacataa

SEQ ID NO: 22520 - DNA, 15 bp, Homo sapiens
tgcaggggttacata

SEQ ID NO: 22521 - DNA, 15 bp, Homo sapiens
ctgcaggggttacat

SEQ ID NO: 22522 - DNA, 15 bp, Homo sapiens
actgcaggggttaca

SEQ ID NO: 22523 - DNA, 15 bp, Homo sapiens
cactgcaggggttac

SEQ ID NO: 22524 - DNA, 15 bp, Homo sapiens
ccactgcaggggtta

SEQ ID NO: 22525 - DNA, 15 bp, Homo sapiens
tccactgcaggggtt

SEQ ID NO: 22526 - DNA, 15 bp, Homo sapiens
ttccactgcaggggt

SEQ ID NO: 22527 - DNA, 15 bp, Homo sapiens
tttccactgcagggg

SEQ ID NO: 22528 - DNA, 15 bp, Homo sapiens
gtttccactgcaggg

SEQ ID NO: 22529 - DNA, 15 bp, Homo sapiens
agtttccactgcagg

SEQ ID NO: 22530 - DNA, 15 bp, Homo sapiens
cagtttccactgcag

SEQ ID NO: 22531 - DNA, 15 bp, Homo sapiens
tcagtttccactgca

SEQ ID NO: 22532 - DNA, 15 bp, Homo sapiens
ctcagtttccactgc

SEQ ID NO: 22533 - DNA, 15 bp, Homo sapiens
gctcagtttccactg

SEQ ID NO: 22534 - DNA, 15 bp, Homo sapiens
ggctcagtttccact

SEQ ID NO: 22535 - DNA, 15 bp, Homo sapiens
tggctcagtttccac

SEQ ID NO: 22536 - DNA, 15 bp, Homo sapiens
ctggctcagtttcca

SEQ ID NO: 22537 - DNA, 15 bp, Homo sapiens
gctggctcagtttcc

SEQ ID NO: 22538 - DNA, 15 bp, Homo sapiens
agctggctcagtttc

SEQ ID NO: 22539 - DNA, 15 bp, Homo sapiens
tagctggctcagttt

SEQ ID NO: 22540 - DNA, 15 bp, Homo sapiens
ttagctggctcagtt

SEQ ID NO: 22541 - DNA, 15 bp, Homo sapiens
gttagctggctcagt

SEQ ID NO: 22542 - DNA, 15 bp, Homo sapiens
agttagctggctcag

SEQ ID NO: 22543 - DNA, 15 bp, Homo sapiens
aagttagctggctca

SEQ ID NO: 22544 - DNA, 15 bp, Homo sapiens
taagttagctggctc

SEQ ID NO: 22545 - DNA, 15 bp, Homo sapiens
ttaagttagctggct

SEQ ID NO: 22546 - DNA, 15 bp, Homo sapiens
tttaagttagctggc

SEQ ID NO: 22547 - DNA, 15 bp, Homo sapiens
ttttaagttagctgg

SEQ ID NO: 22548 - DNA, 15 bp, Homo sapiens
tttttaagttagctg

SEQ ID NO: 22549 - DNA, 15 bp, Homo sapiens
ctttttaagttagct

SEQ ID NO: 22550 - DNA, 15 bp, Homo sapiens
gctttttaagttagc

SEQ ID NO: 22551 - DNA, 15 bp, Homo sapiens
agctttttaagttag

SEQ ID NO: 22552 - DNA, 15 bp, Homo sapiens
cagctttttaagtta

SEQ ID NO: 22553 - DNA, 15 bp, Homo sapiens
gcagctttttaagtt

SEQ ID NO: 22554 - DNA, 15 bp, Homo sapiens
ggcagctttttaagt

SEQ ID NO: 22555 - DNA, 15 bp, Homo sapiens
aggcagctttttaag

SEQ ID NO: 22556 - DNA, 15 bp, Homo sapiens
aaggcagctttttaa

SEQ ID NO: 22557 - DNA, 15 bp, Homo sapiens
taaggcagcttttta

SEQ ID NO: 22558 - DNA, 15 bp, Homo sapiens
ctaaggcagcttttt

SEQ ID NO: 22559 - DNA, 15 bp, Homo sapiens
actaaggcagctttt

SEQ ID NO: 22560 - DNA, 15 bp, Homo sapiens
aactaaggcagcttt

SEQ ID NO: 22561 - DNA, 15 bp, Homo sapiens
aaactaaggcagctt

SEQ ID NO: 22562 - DNA, 15 bp, Homo sapiens
taaactaaggcagct

SEQ ID NO: 22563 - DNA, 15 bp, Homo sapiens
ataaactaaggcagc

SEQ ID NO: 22564 - DNA, 15 bp, Homo sapiens
aataaactaaggcag

SEQ ID NO: 22565 - DNA, 15 bp, Homo sapiens
aaataaactaaggca

SEQ ID NO: 22566 - DNA, 15 bp, Homo sapiens
aaaataaactaaggc

SEQ ID NO: 22567 - DNA, 15 bp, Homo sapiens
aaaaataaactaagg

SEQ ID NO: 22568 - DNA, 15 bp, Homo sapiens
taaaaataaactaag

SEQ ID NO: 22569 - DNA, 15 bp, Homo sapiens
ctaaaaataaactaa

SEQ ID NO: 22570 - DNA, 15 bp, Homo sapiens
tctaaaaataaacta

SEQ ID NO: 22571 - DNA, 15 bp, Homo sapiens
ctctaaaaataaact

SEQ ID NO: 22572 - DNA, 15 bp, Homo sapiens
tctctaaaaataaac

SEQ ID NO: 22573 - DNA, 15 bp, Homo sapiens
atctctaaaaataaa

SEQ ID NO: 22574 - DNA, 15 bp, Homo sapiens
aatctctaaaaataa

SEQ ID NO: 22575 - DNA, 15 bp, Homo sapiens
taatctctaaaaata

SEQ ID NO: 22576 - DNA, 15 bp, Homo sapiens
gtaatctctaaaaat

SEQ ID NO: 22577 - DNA, 15 bp, Homo sapiens
tgtaatctctaaaaa

SEQ ID NO: 22578 - DNA, 15 bp, Homo sapiens
ctgtaatctctaaaa

SEQ ID NO: 22579 - DNA, 15 bp, Homo sapiens
tctgtaatctctaaa

SEQ ID NO: 22580 - DNA, 15 bp, Homo sapiens
ttctgtaatctctaa

SEQ ID NO: 22581 - DNA, 15 bp, Homo sapiens
attctgtaatctcta

SEQ ID NO: 22582 - DNA, 15 bp, Homo sapiens
aattctgtaatctct

SEQ ID NO: 22583 - DNA, 15 bp, Homo sapiens
aaattctgtaatctc

SEQ ID NO: 22584 - DNA, 15 bp, Homo sapiens
aaaattctgtaatct

SEQ ID NO: 22585 - DNA, 15 bp, Homo sapiens
aaaaattctgtaatc

SEQ ID NO: 22586 - DNA, 15 bp, Homo sapiens
taaaaattctgtaat

SEQ ID NO: 22587 - DNA, 15 bp, Homo sapiens
ttaaaaattctgtaa

SEQ ID NO: 22588 - DNA, 15 bp, Homo sapiens
tttaaaaattctgta

SEQ ID NO: 22589 - DNA, 15 bp, Homo sapiens
gtttaaaaattctgt

SEQ ID NO: 22590 - DNA, 15 bp, Homo sapiens
tgtttaaaaattctg

SEQ ID NO: 22591 - DNA, 15 bp, Homo sapiens
ctgtttaaaaattct

SEQ ID NO: 22592 - DNA, 15 bp, Homo sapiens
cctgtttaaaaattc

SEQ ID NO: 22593 - DNA, 15 bp, Homo sapiens
ccctgtttaaaaatt

SEQ ID NO: 22594 - DNA, 15 bp, Homo sapiens
tccctgtttaaaaat

SEQ ID NO: 22595 - DNA, 15 bp, Homo sapiens
ctccctgtttaaaaa

SEQ ID NO: 22596 - DNA, 15 bp, Homo sapiens
tctccctgtttaaaa

SEQ ID NO: 22597 - DNA, 15 bp, Homo sapiens
gtctccctgtttaaa

SEQ ID NO: 22598 - DNA, 15 bp, Homo sapiens
cgtctccctgtttaa

SEQ ID NO: 22599 - DNA, 15 bp, Homo sapiens
acgtctccctgttta

SEQ ID NO: 22600 - DNA, 15 bp, Homo sapiens
cacgtctccctgttt

SEQ ID NO: 22601 - DNA, 15 bp, Homo sapiens
acacgtctccctgtt

SEQ ID NO: 22602 - DNA, 15 bp, Homo sapiens
cacacgtctccctgt

SEQ ID NO: 22603 - DNA, 15 bp, Homo sapiens
tcacacgtctccctg

SEQ ID NO: 22604 - DNA, 15 bp, Homo sapiens
atcacacgtctccct

SEQ ID NO: 22605 - DNA, 15 bp, Homo sapiens
tatcacacgtctccc

SEQ ID NO: 22606 - DNA, 15 bp, Homo sapiens
atatcacacgtctcc

SEQ ID NO: 22607 - DNA, 15 bp, Homo sapiens
tatatcacacgtctc

SEQ ID NO: 22608 - DNA, 15 bp, Homo sapiens
gtatatcacacgtct

SEQ ID NO: 22609 - DNA, 15 bp, Homo sapiens
agtatatcacacgtc

SEQ ID NO: 22610 - DNA, 15 bp, Homo sapiens
gagtatatcacacgt

SEQ ID NO: 22611 - DNA, 15 bp, Homo sapiens
ggagtatatcacacg

SEQ ID NO: 22612 - DNA, 15 bp, Homo sapiens
gggagtatatcacac

SEQ ID NO: 22613 - DNA, 15 bp, Homo sapiens
agggagtatatcaca

SEQ ID NO: 22614 - DNA, 15 bp, Homo sapiens
gagggagtatatcac

SEQ ID NO: 22615 - DNA, 15 bp, Homo sapiens
ggagggagtatatca

SEQ ID NO: 22616 - DNA, 15 bp, Homo sapiens
gggagggagtatatc

SEQ ID NO: 22617 - DNA, 15 bp, Homo sapiens
agggagggagtatat

SEQ ID NO: 22618 - DNA, 15 bp, Homo sapiens
aagggagggagtata

SEQ ID NO: 22619 - DNA, 15 bp, Homo sapiens
gaagggagggagtat

SEQ ID NO: 22620 - DNA, 15 bp, Homo sapiens
ggaagggagggagta

SEQ ID NO: 22621 - DNA, 15 bp, Homo sapiens
gggaagggagggagt

SEQ ID NO: 22622 - DNA, 15 bp, Homo sapiens
agggaagggagggag

SEQ ID NO: 22623 - DNA, 15 bp, Homo sapiens
tagggaagggaggga

SEQ ID NO: 22624 - DNA, 15 bp, Homo sapiens
gtagggaagggaggg

SEQ ID NO: 22625 - DNA, 15 bp, Homo sapiens
agtagggaagggagg

SEQ ID NO: 22626 - DNA, 15 bp, Homo sapiens
tagtagggaagggag

SEQ ID NO: 22627 - DNA, 15 bp, Homo sapiens
atagtagggaaggga

SEQ ID NO: 22628 - DNA, 15 bp, Homo sapiens
aatagtagggaaggg

SEQ ID NO: 22629 - DNA, 15 bp, Homo sapiens
caatagtagggaagg

SEQ ID NO: 22630 - DNA, 15 bp, Homo sapiens
gcaatagtagggaag

SEQ ID NO: 22631 - DNA, 15 bp, Homo sapiens
ggcaatagtagggaa

SEQ ID NO: 22632 - DNA, 15 bp, Homo sapiens
aggcaatagtaggga

SEQ ID NO: 22633 - DNA, 15 bp, Homo sapiens
gaggcaatagtaggg

SEQ ID NO: 22634 - DNA, 15 bp, Homo sapiens
agaggcaatagtagg

SEQ ID NO: 22635 - DNA, 15 bp, Homo sapiens
gagaggcaatagtag

SEQ ID NO: 22636 - DNA, 15 bp, Homo sapiens
agagaggcaatagta

SEQ ID NO: 22637 - DNA, 15 bp, Homo sapiens
cagagaggcaatagt

SEQ ID NO: 22638 - DNA, 15 bp, Homo sapiens
tcagagaggcaatag

SEQ ID NO: 22639 - DNA, 15 bp, Homo sapiens
gtcagagaggcaata

SEQ ID NO: 22640 - DNA, 15 bp, Homo sapiens
ggtcagagaggcaat

SEQ ID NO: 22641 - DNA, 15 bp, Homo sapiens
aggtcagagaggcaa

SEQ ID NO: 22642 - DNA, 15 bp, Homo sapiens
aaggtcagagaggca

SEQ ID NO: 22643 - DNA, 15 bp, Homo sapiens
aaaggtcagagaggc

SEQ ID NO: 22644 - DNA, 15 bp, Homo sapiens
aaaaggtcagagagg

SEQ ID NO: 22645 - DNA, 15 bp, Homo sapiens
aaaaaggtcagagag

SEQ ID NO: 22646 - DNA, 15 bp, Homo sapiens
taaaaaggtcagaga

SEQ ID NO: 22647 - DNA, 15 bp, Homo sapiens
ttaaaaaggtcagag

SEQ ID NO: 22648 - DNA, 15 bp, Homo sapiens
tttaaaaaggtcaga

SEQ ID NO: 22649 - DNA, 15 bp, Homo sapiens
atttaaaaaggtcag

SEQ ID NO: 22650 - DNA, 15 bp, Homo sapiens
aatttaaaaaggtca

SEQ ID NO: 22651 - DNA, 15 bp, Homo sapiens
taatttaaaaaggtc

SEQ ID NO: 22652 - DNA, 15 bp, Homo sapiens
ataatttaaaaaggt

SEQ ID NO: 22653 - DNA, 15 bp, Homo sapiens
aataatttaaaaagg

SEQ ID NO: 22654 - DNA, 15 bp, Homo sapiens
aaataatttaaaaag

SEQ ID NO: 22655 - DNA, 15 bp, Homo sapiens
aaaataatttaaaaa

SEQ ID NO: 22656 - DNA, 15 bp, Homo sapiens
aaaaataatttaaaa

SEQ ID NO: 22657 - DNA, 15 bp, Homo sapiens
taaaaataatttaaa

SEQ ID NO: 22658 - DNA, 15 bp, Homo sapiens
ttaaaaataatttaa

SEQ ID NO: 22659 - DNA, 15 bp, Homo sapiens
attaaaaataattta

SEQ ID NO: 22660 - DNA, 15 bp, Homo sapiens
tattaaaaataattt

SEQ ID NO: 22661 - DNA, 15 bp, Homo sapiens
gtattaaaaataatt

SEQ ID NO: 22662 - DNA, 15 bp, Homo sapiens
ggtattaaaaataat

SEQ ID NO: 22663 - DNA, 15 bp, Homo sapiens
tggtattaaaaataa

SEQ ID NO: 22664 - DNA, 15 bp, Homo sapiens
ttggtattaaaaata

SEQ ID NO: 22665 - DNA, 15 bp, Homo sapiens
tttggtattaaaaat

SEQ ID NO: 22666 - DNA, 15 bp, Homo sapiens
ttttggtattaaaaa

SEQ ID NO: 22667 - DNA, 15 bp, Homo sapiens
cttttggtattaaaa

SEQ ID NO: 22668 - DNA, 15 bp, Homo sapiens
tcttttggtattaaa

SEQ ID NO: 22669 - DNA, 15 bp, Homo sapiens
ctcttttggtattaa

SEQ ID NO: 22670 - DNA, 15 bp, Homo sapiens
actcttttggtatta

SEQ ID NO: 22671 - DNA, 15 bp, Homo sapiens
aactcttttggtatt

SEQ ID NO: 22672 - DNA, 15 bp, Homo sapiens
gaactcttttggtat

SEQ ID NO: 22673 - DNA, 15 bp, Homo sapiens
agaactcttttggta

SEQ ID NO: 22674 - DNA, 15 bp, Homo sapiens
aagaactcttttggt

SEQ ID NO: 22675 - DNA, 15 bp, Homo sapiens
aaagaactcttttgg

SEQ ID NO: 22676 - DNA, 15 bp, Homo sapiens
aaaagaactcttttg

SEQ ID NO: 22677 - DNA, 15 bp, Homo sapiens
caaaagaactctttt

SEQ ID NO: 22678 - DNA, 15 bp, Homo sapiens
tcaaaagaactcttt

SEQ ID NO: 22679 - DNA, 15 bp, Homo sapiens
ttcaaaagaactctt

SEQ ID NO: 22680 - DNA, 15 bp, Homo sapiens
tttcaaaagaactct

SEQ ID NO: 22681 - DNA, 15 bp, Homo sapiens
atttcaaaagaactc

SEQ ID NO: 22682 - DNA, 15 bp, Homo sapiens
catttcaaaagaact

SEQ ID NO: 22683 - DNA, 15 bp, Homo sapiens
ccatttcaaaagaac

SEQ ID NO: 22684 - DNA, 15 bp, Homo sapiens
tccatttcaaaagaa

SEQ ID NO: 22685 - DNA, 15 bp, Homo sapiens
ttccatttcaaaaga

SEQ ID NO: 22686 - DNA, 15 bp, Homo sapiens
gttccatttcaaaag

SEQ ID NO: 22687 - DNA, 15 bp, Homo sapiens
agttccatttcaaaa

SEQ ID NO: 22688 - DNA, 15 bp, Homo sapiens
cagttccatttcaaa

SEQ ID NO: 22689 - DNA, 15 bp, Homo sapiens
tcagttccatttcaa

SEQ ID NO: 22690 - DNA, 15 bp, Homo sapiens
atcagttccatttca

SEQ ID NO: 22691 - DNA, 15 bp, Homo sapiens
aatcagttccatttc

SEQ ID NO: 22692 - DNA, 15 bp, Homo sapiens
taatcagttccattt

SEQ ID NO: 22693 - DNA, 15 bp, Homo sapiens
ttaatcagttccatt

SEQ ID NO: 22694 - DNA, 15 bp, Homo sapiens
tttaatcagttccat

SEQ ID NO: 22695 - DNA, 15 bp, Homo sapiens
ttttaatcagttcca

SEQ ID NO: 22696 - DNA, 15 bp, Homo sapiens
cttttaatcagttcc

SEQ ID NO: 22697 - DNA, 15 bp, Homo sapiens
ccttttaatcagttc

SEQ ID NO: 22698 - DNA, 15 bp, Homo sapiens
cccttttaatcagtt

SEQ ID NO: 22699 - DNA, 15 bp, Homo sapiens
gcccttttaatcagt

SEQ ID NO: 22700 - DNA, 15 bp, Homo sapiens
tgcccttttaatcag

SEQ ID NO: 22701 - DNA, 15 bp, Homo sapiens
ctgcccttttaatca

SEQ ID NO: 22702 - DNA, 15 bp, Homo sapiens
tctgcccttttaatc

SEQ ID NO: 22703 - DNA, 15 bp, Homo sapiens
ctctgcccttttaat

SEQ ID NO: 22704 - DNA, 15 bp, Homo sapiens
cctctgcccttttaa

SEQ ID NO: 22705 - DNA, 15 bp, Homo sapiens
ccctctgccctttta

SEQ ID NO: 22706 - DNA, 15 bp, Homo sapiens
accctctgccctttt

SEQ ID NO: 22707 - DNA, 15 bp, Homo sapiens
gaccctctgcccttt

SEQ ID NO: 22708 - DNA, 15 bp, Homo sapiens
agaccctctgccctt

SEQ ID NO: 22709 - DNA, 15 bp, Homo sapiens
cagaccctctgccct

SEQ ID NO: 22710 - DNA, 15 bp, Homo sapiens
acagaccctctgccc

SEQ ID NO: 22711 - DNA, 15 bp, Homo sapiens
aacagaccctctgcc

SEQ ID NO: 22712 - DNA, 15 bp, Homo sapiens
caacagaccctctgc

SEQ ID NO: 22713 - DNA, 15 bp, Homo sapiens
gcaacagaccctctg

SEQ ID NO: 22714 - DNA, 15 bp, Homo sapiens
ggcaacagaccctct

SEQ ID NO: 22715 - DNA, 15 bp, Homo sapiens
tggcaacagaccctc

SEQ ID NO: 22716 - DNA, 15 bp, Homo sapiens
ctggcaacagaccct

SEQ ID NO: 22717 - DNA, 15 bp, Homo sapiens
gctggcaacagaccc

SEQ ID NO: 22718 - DNA, 15 bp, Homo sapiens
ggctggcaacagacc

SEQ ID NO: 22719 - DNA, 15 bp, Homo sapiens
aggctggcaacagac

SEQ ID NO: 22720 - DNA, 15 bp, Homo sapiens
caggctggcaacaga

SEQ ID NO: 22721 - DNA, 15 bp, Homo sapiens
gcaggctggcaacag

SEQ ID NO: 22722 - DNA, 15 bp, Homo sapiens
tgcaggctggcaaca

SEQ ID NO: 22723 - DNA, 15 bp, Homo sapiens
atgcaggctggcaac

SEQ ID NO: 22724 - DNA, 15 bp, Homo sapiens
aatgcaggctggcaa

SEQ ID NO: 22725 - DNA, 15 bp, Homo sapiens
caatgcaggctggca

SEQ ID NO: 22726 - DNA, 15 bp, Homo sapiens
tcaatgcaggctggc

SEQ ID NO: 22727 - DNA, 15 bp, Homo sapiens
atcaatgcaggctgg

SEQ ID NO: 22728 - DNA, 15 bp, Homo sapiens
tatcaatgcaggctg

SEQ ID NO: 22729 - DNA, 15 bp, Homo sapiens
atatcaatgcaggct

SEQ ID NO: 22730 - DNA, 15 bp, Homo sapiens
tatatcaatgcaggc

SEQ ID NO: 22731 - DNA, 15 bp, Homo sapiens
gtatatcaatgcagg

SEQ ID NO: 22732 - DNA, 15 bp, Homo sapiens
ggtatatcaatgcag

SEQ ID NO: 22733 - DNA, 15 bp, Homo sapiens
tggtatatcaatgca

SEQ ID NO: 22734 - DNA, 15 bp, Homo sapiens
ctggtatatcaatgc

SEQ ID NO: 22735 - DNA, 15 bp, Homo sapiens
actggtatatcaatg

SEQ ID NO: 22736 - DNA, 15 bp, Homo sapiens
gactggtatatcaat

SEQ ID NO: 22737 - DNA, 15 bp, Homo sapiens
ggactggtatatcaa

SEQ ID NO: 22738 - DNA, 15 bp, Homo sapiens
gggactggtatatca

SEQ ID NO: 22739 - DNA, 15 bp, Homo sapiens
tgggactggtatatc

SEQ ID NO: 22740 - DNA, 15 bp, Homo sapiens
atgggactggtatat

SEQ ID NO: 22741 - DNA, 15 bp, Homo sapiens
aatgggactggtata

SEQ ID NO: 22742 - DNA, 15 bp, Homo sapiens
aaatgggactggtat

SEQ ID NO: 22743 - DNA, 15 bp, Homo sapiens
caaatgggactggta

SEQ ID NO: 22744 - DNA, 15 bp, Homo sapiens
acaaatgggactggt

SEQ ID NO: 22745 - DNA, 15 bp, Homo sapiens
tacaaatgggactgg

SEQ ID NO: 22746 - DNA, 15 bp, Homo sapiens
ttacaaatgggactg

SEQ ID NO: 22747 - DNA, 15 bp, Homo sapiens
tttacaaatgggact

SEQ ID NO: 22748 - DNA, 15 bp, Homo sapiens
atttacaaatgggac

SEQ ID NO: 22749 - DNA, 15 bp, Homo sapiens
tatttacaaatggga

SEQ ID NO: 22750 - DNA, 15 bp, Homo sapiens
atatttacaaatggg

SEQ ID NO: 22751 - DNA, 15 bp, Homo sapiens
aatatttacaaatgg

SEQ ID NO: 22752 - DNA, 15 bp, Homo sapiens
aaatatttacaaatg

SEQ ID NO: 22753 - DNA, 15 bp, Homo sapiens
taaatatttacaaat

SEQ ID NO: 22754 - DNA, 15 bp, Homo sapiens
gtaaatatttacaaa

SEQ ID NO: 22755 - DNA, 15 bp, Homo sapiens
cgtaaatatttacaa

SEQ ID NO: 22756 - DNA, 15 bp, Homo sapiens
acgtaaatatttaca

SEQ ID NO: 22757 - DNA, 15 bp, Homo sapiens
tacgtaaatatttac

SEQ ID NO: 22758 - DNA, 15 bp, Homo sapiens
gtacgtaaatattta

SEQ ID NO: 22759 - DNA, 15 bp, Homo sapiens
ggtacgtaaatattt

SEQ ID NO: 22760 - DNA, 15 bp, Homo sapiens
aggtacgtaaatatt

SEQ ID NO: 22761 - DNA, 15 bp, Homo sapiens
aaggtacgtaaatat

SEQ ID NO: 22762 - DNA, 15 bp, Homo sapiens
aaaggtacgtaaata

SEQ ID NO: 22763 - DNA, 15 bp, Homo sapiens
taaaggtacgtaaat

SEQ ID NO: 22764 - DNA, 15 bp, Homo sapiens
ataaaggtacgtaaa

SEQ ID NO: 22765 - DNA, 15 bp, Homo sapiens
tataaaggtacgtaa

SEQ ID NO: 22766 - DNA, 15 bp, Homo sapiens
ttataaaggtacgta

SEQ ID NO: 22767 - DNA, 15 bp, Homo sapiens
tttataaaggtacgt

SEQ ID NO: 22768 - DNA, 15 bp, Homo sapiens
atttataaaggtacg

SEQ ID NO: 22769 - DNA, 15 bp, Homo sapiens
aatttataaaggtac

SEQ ID NO: 22770 - DNA, 15 bp, Homo sapiens
gaatttataaaggta

SEQ ID NO: 22771 - DNA, 15 bp, Homo sapiens
tgaatttataaaggt

SEQ ID NO: 22772 - DNA, 15 bp, Homo sapiens
ctgaatttataaagg

SEQ ID NO: 22773 - DNA, 15 bp, Homo sapiens
actgaatttataaag

SEQ ID NO: 22774 - DNA, 15 bp, Homo sapiens
aactgaatttataaa

SEQ ID NO: 22775 - DNA, 15 bp, Homo sapiens
caactgaatttataa

SEQ ID NO: 22776 - DNA, 15 bp, Homo sapiens
gcaactgaatttata

SEQ ID NO: 22777 - DNA, 15 bp, Homo sapiens
tgcaactgaatttat

SEQ ID NO: 22778 - DNA, 15 bp, Homo sapiens
atgcaactgaattta

SEQ ID NO: 22779 - DNA, 15 bp, Homo sapiens
gatgcaactgaattt

SEQ ID NO: 22780 - DNA, 15 bp, Homo sapiens
agatgcaactgaatt

SEQ ID NO: 22781 - DNA, 15 bp, Homo sapiens
cagatgcaactgaat

SEQ ID NO: 22782 - DNA, 15 bp, Homo sapiens
acagatgcaactgaa

SEQ ID NO: 22783 - DNA, 15 bp, Homo sapiens
cacagatgcaactga

SEQ ID NO: 22784 - DNA, 15 bp, Homo sapiens
ccacagatgcaactg

SEQ ID NO: 22785 - DNA, 15 bp, Homo sapiens
gccacagatgcaact

SEQ ID NO: 22786 - DNA, 15 bp, Homo sapiens
tgccacagatgcaac

SEQ ID NO: 22787 - DNA, 15 bp, Homo sapiens
ttgccacagatgcaa

SEQ ID NO: 22788 - DNA, 15 bp, Homo sapiens
tttgccacagatgca

SEQ ID NO: 22789 - DNA, 15 bp, Homo sapiens
ttttgccacagatgc

SEQ ID NO: 22790 - DNA, 15 bp, Homo sapiens
attttgccacagatg

SEQ ID NO: 22791 - DNA, 15 bp, Homo sapiens
aattttgccacagat

SEQ ID NO: 22792 - DNA, 15 bp, Homo sapiens
aaattttgccacaga

SEQ ID NO: 22793 - DNA, 15 bp, Homo sapiens
gaaattttgccacag

SEQ ID NO: 22794 - DNA, 15 bp, Homo sapiens
tgaaattttgccaca

SEQ ID NO: 22795 - DNA, 15 bp, Homo sapiens
ctgaaattttgccac

SEQ ID NO: 22796 - DNA, 15 bp, Homo sapiens
tctgaaattttgcca

SEQ ID NO: 22797 - DNA, 15 bp, Homo sapiens
gtctgaaattttgcc

SEQ ID NO: 22798 - DNA, 15 bp, Homo sapiens
agtctgaaattttgc

SEQ ID NO: 22799 - DNA, 15 bp, Homo sapiens
tagtctgaaattttg

SEQ ID NO: 22800 - DNA, 15 bp, Homo sapiens
atagtctgaaatttt

SEQ ID NO: 22801 - DNA, 15 bp, Homo sapiens
aatagtctgaaattt

SEQ ID NO: 22802 - DNA, 15 bp, Homo sapiens
aaatagtctgaaatt

SEQ ID NO: 22803 - DNA, 15 bp, Homo sapiens
aaaatagtctgaaat

SEQ ID NO: 22804 - DNA, 15 bp, Homo sapiens
aaaaatagtctgaaa

SEQ ID NO: 22805 - DNA, 15 bp, Homo sapiens
caaaaatagtctgaa

SEQ ID NO: 22806 - DNA, 15 bp, Homo sapiens
gcaaaaatagtctga

SEQ ID NO: 22807 - DNA, 15 bp, Homo sapiens
cgcaaaaatagtctg

SEQ ID NO: 22808 - DNA, 15 bp, Homo sapiens
acgcaaaaatagtct

SEQ ID NO: 22809 - DNA, 15 bp, Homo sapiens
gacgcaaaaatagtc

SEQ ID NO: 22810 - DNA, 15 bp, Homo sapiens
agacgcaaaaatagt

SEQ ID NO: 22811 - DNA, 15 bp, Homo sapiens
aagacgcaaaaatag

SEQ ID NO: 22812 - DNA, 15 bp, Homo sapiens
aaagacgcaaaaata

SEQ ID NO: 22813 - DNA, 15 bp, Homo sapiens
gaaagacgcaaaaat

SEQ ID NO: 22814 - DNA, 15 bp, Homo sapiens
ggaaagacgcaaaaa

SEQ ID NO: 22815 - DNA, 15 bp, Homo sapiens
aggaaagacgcaaaa

SEQ ID NO: 22816 - DNA, 15 bp, Homo sapiens
gaggaaagacgcaaa

SEQ ID NO: 22817 - DNA, 15 bp, Homo sapiens
tgaggaaagacgcaa

SEQ ID NO: 22818 - DNA, 15 bp, Homo sapiens
atgaggaaagacgca

SEQ ID NO: 22819 - DNA, 15 bp, Homo sapiens
gatgaggaaagacgc

SEQ ID NO: 22820 - DNA, 15 bp, Homo sapiens
tgatgaggaaagacg

SEQ ID NO: 22821 - DNA, 15 bp, Homo sapiens
gtgatgaggaaagac

SEQ ID NO: 22822 - DNA, 15 bp, Homo sapiens
agtgatgaggaaaga

SEQ ID NO: 22823 - DNA, 15 bp, Homo sapiens
aagtgatgaggaaag

SEQ ID NO: 22824 - DNA, 15 bp, Homo sapiens
aaagtgatgaggaaa

SEQ ID NO: 22825 - DNA, 15 bp, Homo sapiens
aaaagtgatgaggaa

SEQ ID NO: 22826 - DNA, 15 bp, Homo sapiens
aaaaagtgatgagga

SEQ ID NO: 22827 - DNA, 15 bp, Homo sapiens
caaaaagtgatgagg

SEQ ID NO: 22828 - DNA, 15 bp, Homo sapiens
acaaaaagtgatgag

SEQ ID NO: 22829 - DNA, 15 bp, Homo sapiens
cacaaaaagtgatga

SEQ ID NO: 22830 - DNA, 15 bp, Homo sapiens
tcacaaaaagtgatg

SEQ ID NO: 22831 - DNA, 15 bp, Homo sapiens
atcacaaaaagtgat

SEQ ID NO: 22832 - DNA, 15 bp, Homo sapiens
catcacaaaaagtga

SEQ ID NO: 22833 - DNA, 15 bp, Homo sapiens
gcatcacaaaaagtg

SEQ ID NO: 22834 - DNA, 15 bp, Homo sapiens
tgcatcacaaaaagt

SEQ ID NO: 22835 - DNA, 15 bp, Homo sapiens
ttgcatcacaaaaag

SEQ ID NO: 22836 - DNA, 15 bp, Homo sapiens
gttgcatcacaaaaa

SEQ ID NO: 22837 - DNA, 15 bp, Homo sapiens
agttgcatcacaaaa

SEQ ID NO: 22838 - DNA, 15 bp, Homo sapiens
gagttgcatcacaaa

SEQ ID NO: 22839 - DNA, 15 bp, Homo sapiens
ggagttgcatcacaa

SEQ ID NO: 22840 - DNA, 15 bp, Homo sapiens
tggagttgcatcaca

SEQ ID NO: 22841 - DNA, 15 bp, Homo sapiens
ctggagttgcatcac

SEQ ID NO: 22842 - DNA, 15 bp, Homo sapiens
actggagttgcatca

SEQ ID NO: 22843 - DNA, 15 bp, Homo sapiens
gactggagttgcatc

SEQ ID NO: 22844 - DNA, 15 bp, Homo sapiens
agactggagttgcat

SEQ ID NO: 22845 - DNA, 15 bp, Homo sapiens
cagactggagttgca

SEQ ID NO: 22846 - DNA, 15 bp, Homo sapiens
ccagactggagttgc

SEQ ID NO: 22847 - DNA, 15 bp, Homo sapiens
tccagactggagttg

SEQ ID NO: 22848 - DNA, 15 bp, Homo sapiens
gtccagactggagtt

SEQ ID NO: 22849 - DNA, 15 bp, Homo sapiens
agtccagactggagt

SEQ ID NO: 22850 - DNA, 15 bp, Homo sapiens
gagtccagactggag

SEQ ID NO: 22851 - DNA, 15 bp, Homo sapiens
tgagtccagactgga

SEQ ID NO: 22852 - DNA, 15 bp, Homo sapiens
ctgagtccagactgg

SEQ ID NO: 22853 - DNA, 15 bp, Homo sapiens
tctgagtccagactg

SEQ ID NO: 22854 - DNA, 15 bp, Homo sapiens
atctgagtccagact

SEQ ID NO: 22855 - DNA, 15 bp, Homo sapiens
catctgagtccagac

SEQ ID NO: 22856 - DNA, 15 bp, Homo sapiens
gcatctgagtccaga

SEQ ID NO: 22857 - DNA, 15 bp, Homo sapiens
tgcatctgagtccag

SEQ ID NO: 22858 - DNA, 15 bp, Homo sapiens
atgcatctgagtcca

SEQ ID NO: 22859 - DNA, 15 bp, Homo sapiens
tatgcatctgagtcc

SEQ ID NO: 22860 - DNA, 15 bp, Homo sapiens
ctatgcatctgagtc

SEQ ID NO: 22861 - DNA, 15 bp, Homo sapiens
tctatgcatctgagt

SEQ ID NO: 22862 - DNA, 15 bp, Homo sapiens
atctatgcatctgag

SEQ ID NO: 22863 - DNA, 15 bp, Homo sapiens
aatctatgcatctga

SEQ ID NO: 22864 - DNA, 15 bp, Homo sapiens
aaatctatgcatctg

SEQ ID NO: 22865 - DNA, 15 bp, Homo sapiens
caaatctatgcatct

SEQ ID NO: 22866 - DNA, 15 bp, Homo sapiens
ccaaatctatgcatc

SEQ ID NO: 22867 - DNA, 15 bp, Homo sapiens
accaaatctatgcat

SEQ ID NO: 22868 - DNA, 15 bp, Homo sapiens
gaccaaatctatgca

SEQ ID NO: 22869 - DNA, 15 bp, Homo sapiens
ggaccaaatctatgc

SEQ ID NO: 22870 - DNA, 15 bp, Homo sapiens
tggaccaaatctatg

SEQ ID NO: 22871 - DNA, 15 bp, Homo sapiens
ctggaccaaatctat

SEQ ID NO: 22872 - DNA, 15 bp, Homo sapiens
actggaccaaatcta

SEQ ID NO: 22873 - DNA, 15 bp, Homo sapiens
cactggaccaaatct

SEQ ID NO: 22874 - DNA, 15 bp, Homo sapiens
acactggaccaaatc

SEQ ID NO: 22875 - DNA, 15 bp, Homo sapiens
tacactggaccaaat

SEQ ID NO: 22876 - DNA, 15 bp, Homo sapiens
atacactggaccaaa

SEQ ID NO: 22877 - DNA, 15 bp, Homo sapiens
aatacactggaccaa

SEQ ID NO: 22878 - DNA, 15 bp, Homo sapiens
aaatacactggacca

SEQ ID NO: 22879 - DNA, 15 bp, Homo sapiens
aaaatacactggacc

SEQ ID NO: 22880 - DNA, 15 bp, Homo sapiens
gaaaatacactggac

SEQ ID NO: 22881 - DNA, 15 bp, Homo sapiens
tgaaaatacactgga

SEQ ID NO: 22882 - DNA, 15 bp, Homo sapiens
atgaaaatacactgg

SEQ ID NO: 22883 - DNA, 15 bp, Homo sapiens
catgaaaatacactg

SEQ ID NO: 22884 - DNA, 15 bp, Homo sapiens
tcatgaaaatacact

SEQ ID NO: 22885 - DNA, 15 bp, Homo sapiens
atcatgaaaatacac

SEQ ID NO: 22886 - DNA, 15 bp, Homo sapiens
tatcatgaaaataca

SEQ ID NO: 22887 - DNA, 15 bp, Homo sapiens
ttatcatgaaaatac

SEQ ID NO: 22888 - DNA, 15 bp, Homo sapiens
tttatcatgaaaata

SEQ ID NO: 22889 - DNA, 15 bp, Homo sapiens
ctttatcatgaaaat

SEQ ID NO: 22890 - DNA, 15 bp, Homo sapiens
actttatcatgaaaa

SEQ ID NO: 22891 - DNA, 15 bp, Homo sapiens
cactttatcatgaaa

SEQ ID NO: 22892 - DNA, 15 bp, Homo sapiens
tcactttatcatgaa

SEQ ID NO: 22893 - DNA, 15 bp, Homo sapiens
ttcactttatcatga

SEQ ID NO: 22894 - DNA, 15 bp, Homo sapiens
tttcactttatcatg

SEQ ID NO: 22895 - DNA, 15 bp, Homo sapiens
atttcactttatcat

SEQ ID NO: 22896 - DNA, 15 bp, Homo sapiens
aatttcactttatca

SEQ ID NO: 22897 - DNA, 15 bp, Homo sapiens
caatttcactttatc

SEQ ID NO: 22898 - DNA, 15 bp, Homo sapiens
tcaatttcactttat

SEQ ID NO: 22899 - DNA, 15 bp, Homo sapiens
ctcaatttcacttta

SEQ ID NO: 22900 - DNA, 15 bp, Homo sapiens
actcaatttcacttt

SEQ ID NO: 22901 - DNA, 15 bp, Homo sapiens
gactcaatttcactt

SEQ ID NO: 22902 - DNA, 15 bp, Homo sapiens
tgactcaatttcact

SEQ ID NO: 22903 - DNA, 15 bp, Homo sapiens
ctgactcaatttcac

SEQ ID NO: 22904 - DNA, 15 bp, Homo sapiens
tctgactcaatttca

SEQ ID NO: 22905 - DNA, 15 bp, Homo sapiens
ttctgactcaatttc

SEQ ID NO: 22906 - DNA, 15 bp, Homo sapiens
gttctgactcaattt

SEQ ID NO: 22907 - DNA, 15 bp, Homo sapiens
tgttctgactcaatt

SEQ ID NO: 22908 - DNA, 15 bp, Homo sapiens
ttgttctgactcaat

SEQ ID NO: 22909 - DNA, 15 bp, Homo sapiens
cttgttctgactcaa

SEQ ID NO: 22910 - DNA, 15 bp, Homo sapiens
tcttgttctgactca

SEQ ID NO: 22911 - DNA, 15 bp, Homo sapiens
ctcttgttctgactc

SEQ ID NO: 22912 - DNA, 15 bp, Homo sapiens
actcttgttctgact

SEQ ID NO: 22913 - DNA, 15 bp, Homo sapiens
aactcttgttctgac

SEQ ID NO: 22914 - DNA, 15 bp, Homo sapiens
taactcttgttctga

SEQ ID NO: 22915 - DNA, 15 bp, Homo sapiens
ttaactcttgttctg

SEQ ID NO: 22916 - DNA, 15 bp, Homo sapiens
attaactcttgttct

SEQ ID NO: 22917 - DNA, 15 bp, Homo sapiens
tattaactcttgttc

SEQ ID NO: 22918 - DNA, 15 bp, Homo sapiens
atattaactcttgtt

SEQ ID NO: 22919 - DNA, 15 bp, Homo sapiens
gatattaactcttgt

SEQ ID NO: 22920 - DNA, 15 bp, Homo sapiens
agatattaactcttg

SEQ ID NO: 22921 - DNA, 15 bp, Homo sapiens
cagatattaactctt

SEQ ID NO: 22922 - DNA, 15 bp, Homo sapiens
gcagatattaactct

SEQ ID NO: 22923 - DNA, 15 bp, Homo sapiens
ggcagatattaactc

SEQ ID NO: 22924 - DNA, 15 bp, Homo sapiens
aggcagatattaact

SEQ ID NO: 22925 - DNA, 15 bp, Homo sapiens
caggcagatattaac

SEQ ID NO: 22926 - DNA, 15 bp, Homo sapiens
acaggcagatattaa

SEQ ID NO: 22927 - DNA, 15 bp, Homo sapiens
tacaggcagatatta

SEQ ID NO: 22928 - DNA, 15 bp, Homo sapiens
atacaggcagatatt

SEQ ID NO: 22929 - DNA, 15 bp, Homo sapiens
gatacaggcagatat

SEQ ID NO: 22930 - DNA, 15 bp, Homo sapiens
agatacaggcagata

SEQ ID NO: 22931 - DNA, 15 bp, Homo sapiens
aagatacaggcagat

SEQ ID NO: 22932 - DNA, 15 bp, Homo sapiens
caagatacaggcaga

SEQ ID NO: 22933 - DNA, 15 bp, Homo sapiens
gcaagatacaggcag

SEQ ID NO: 22934 - DNA, 15 bp, Homo sapiens
tgcaagatacaggca

SEQ ID NO: 22935 - DNA, 15 bp, Homo sapiens
gtgcaagatacaggc

SEQ ID NO: 22936 - DNA, 15 bp, Homo sapiens
tgtgcaagatacagg

SEQ ID NO: 22937 - DNA, 15 bp, Homo sapiens
ctgtgcaagatacag

SEQ ID NO: 22938 - DNA, 15 bp, Homo sapiens
actgtgcaagataca

SEQ ID NO: 22939 - DNA, 15 bp, Homo sapiens
aactgtgcaagatac

SEQ ID NO: 22940 - DNA, 15 bp, Homo sapiens
gaactgtgcaagata

SEQ ID NO: 22941 - DNA, 15 bp, Homo sapiens
cgaactgtgcaagat

SEQ ID NO: 22942 - DNA, 15 bp, Homo sapiens
tcgaactgtgcaaga

SEQ ID NO: 22943 - DNA, 15 bp, Homo sapiens
ctcgaactgtgcaag

SEQ ID NO: 22944 - DNA, 15 bp, Homo sapiens
gctcgaactgtgcaa

SEQ ID NO: 22945 - DNA, 15 bp, Homo sapiens
cgctcgaactgtgca

SEQ ID NO: 22946 - DNA, 15 bp, Homo sapiens
tcgctcgaactgtgc

SEQ ID NO: 22947 - DNA, 15 bp, Homo sapiens
atcgctcgaactgtg

SEQ ID NO: 22948 - DNA, 15 bp, Homo sapiens
gatcgctcgaactgt

SEQ ID NO: 22949 - DNA, 15 bp, Homo sapiens
agatcgctcgaactg

SEQ ID NO: 22950 - DNA, 15 bp, Homo sapiens
cagatcgctcgaact

SEQ ID NO: 22951 - DNA, 15 bp, Homo sapiens
acagatcgctcgaac

SEQ ID NO: 22952 - DNA, 15 bp, Homo sapiens
aacagatcgctcgaa

SEQ ID NO: 22953 - DNA, 15 bp, Homo sapiens
taacagatcgctcga

SEQ ID NO: 22954 - DNA, 15 bp, Homo sapiens
ataacagatcgctcg

SEQ ID NO: 22955 - DNA, 15 bp, Homo sapiens
aataacagatcgctc

SEQ ID NO: 22956 - DNA, 15 bp, Homo sapiens
taataacagatcgct

SEQ ID NO: 22957 - DNA, 15 bp, Homo sapiens
ttaataacagatcgc

SEQ ID NO: 22958 - DNA, 15 bp, Homo sapiens
gttaataacagatcg

SEQ ID NO: 22959 - DNA, 15 bp, Homo sapiens
agttaataacagatc

SEQ ID NO: 22960 - DNA, 15 bp, Homo sapiens
cagttaataacagat

SEQ ID NO: 22961 - DNA, 15 bp, Homo sapiens
ccagttaataacaga

SEQ ID NO: 22962 - DNA, 15 bp, Homo sapiens
cccagttaataacag

SEQ ID NO: 22963 - DNA, 15 bp, Homo sapiens
tcccagttaataaca

SEQ ID NO: 22964 - DNA, 15 bp, Homo sapiens
ttcccagttaataac

SEQ ID NO: 22965 - DNA, 15 bp, Homo sapiens
cttcccagttaataa

SEQ ID NO: 22966 - DNA, 15 bp, Homo sapiens
gcttcccagttaata

SEQ ID NO: 22967 - DNA, 15 bp, Homo sapiens
tgcttcccagttaat

SEQ ID NO: 22968 - DNA, 15 bp, Homo sapiens
atgcttcccagttaa

SEQ ID NO: 22969 - DNA, 15 bp, Homo sapiens
aatgcttcccagtta

SEQ ID NO: 22970 - DNA, 15 bp, Homo sapiens
aaatgcttcccagtt

SEQ ID NO: 22971 - DNA, 15 bp, Homo sapiens
caaatgcttcccagt

SEQ ID NO: 22972 - DNA, 15 bp, Homo sapiens
ccaaatgcttcccag

SEQ ID NO: 22973 - DNA, 15 bp, Homo sapiens
accaaatgcttccca

SEQ ID NO: 22974 - DNA, 15 bp, Homo sapiens
caccaaatgcttccc

SEQ ID NO: 22975 - DNA, 15 bp, Homo sapiens
acaccaaatgcttcc

SEQ ID NO: 22976 - DNA, 15 bp, Homo sapiens
aacaccaaatgcttc

SEQ ID NO: 22977 - DNA, 15 bp, Homo sapiens
caacaccaaatgctt

SEQ ID NO: 22978 - DNA, 15 bp, Homo sapiens
ccaacaccaaatgct

SEQ ID NO: 22979 - DNA, 15 bp, Homo sapiens
accaacaccaaatgc

SEQ ID NO: 22980 - DNA, 15 bp, Homo sapiens
aaccaacaccaaatg

SEQ ID NO: 22981 - DNA, 15 bp, Homo sapiens
aaaccaacaccaaat

SEQ ID NO: 22982 - DNA, 15 bp, Homo sapiens
aaaaccaacaccaaa

SEQ ID NO: 22983 - DNA, 15 bp, Homo sapiens
gaaaaccaacaccaa

SEQ ID NO: 22984 - DNA, 15 bp, Homo sapiens
tgaaaaccaacacca

SEQ ID NO: 22985 - DNA, 15 bp, Homo sapiens
atgaaaaccaacacc

SEQ ID NO: 22986 - DNA, 15 bp, Homo sapiens
aatgaaaaccaacac

SEQ ID NO: 22987 - DNA, 15 bp, Homo sapiens
gaatgaaaaccaaca

SEQ ID NO: 22988 - DNA, 15 bp, Homo sapiens
ggaatgaaaaccaac

SEQ ID NO: 22989 - DNA, 15 bp, Homo sapiens
tggaatgaaaaccaa

SEQ ID NO: 22990 - DNA, 15 bp, Homo sapiens
atggaatgaaaacca

SEQ ID NO: 22991 - DNA, 15 bp, Homo sapiens
aatggaatgaaaacc

SEQ ID NO: 22992 - DNA, 15 bp, Homo sapiens
aaatggaatgaaaac

SEQ ID NO: 22993 - DNA, 15 bp, Homo sapiens
gaaatggaatgaaaa

SEQ ID NO: 22994 - DNA, 15 bp, Homo sapiens
cgaaatggaatgaaa

SEQ ID NO: 22995 - DNA, 15 bp, Homo sapiens
tcgaaatggaatgaa

SEQ ID NO: 22996 - DNA, 15 bp, Homo sapiens
gtcgaaatggaatga

SEQ ID NO: 22997 - DNA, 15 bp, Homo sapiens
cgtcgaaatggaatg

SEQ ID NO: 22998 - DNA, 15 bp, Homo sapiens
tcgtcgaaatggaat

SEQ ID NO: 22999 - DNA, 15 bp, Homo sapiens
ctcgtcgaaatggaa

SEQ ID NO: 23000 - DNA, 15 bp, Homo sapiens
gctcgtcgaaatgga

SEQ ID NO: 23001 - DNA, 15 bp, Homo sapiens
tgctcgtcgaaatgg

SEQ ID NO: 23002 - DNA, 15 bp, Homo sapiens
atgctcgtcgaaatg

SEQ ID NO: 23003 - DNA, 15 bp, Homo sapiens
catgctcgtcgaaat

SEQ ID NO: 23004 - DNA, 15 bp, Homo sapiens
acatgctcgtcgaaa

SEQ ID NO: 23005 - DNA, 15 bp, Homo sapiens
aacatgctcgtcgaa

SEQ ID NO: 23006 - DNA, 15 bp, Homo sapiens
taacatgctcgtcga

SEQ ID NO: 23007 - DNA, 15 bp, Homo sapiens
ataacatgctcgtcg

SEQ ID NO: 23008 - DNA, 15 bp, Homo sapiens
aataacatgctcgtc

SEQ ID NO: 23009 - DNA, 15 bp, Homo sapiens
caataacatgctcgt

SEQ ID NO: 23010 - DNA, 15 bp, Homo sapiens
ccaataacatgctcg

SEQ ID NO: 23011 - DNA, 15 bp, Homo sapiens
cccaataacatgctc

SEQ ID NO: 23012 - DNA, 15 bp, Homo sapiens
tcccaataacatgct

SEQ ID NO: 23013 - DNA, 15 bp, Homo sapiens
ttcccaataacatgc

SEQ ID NO: 23014 - DNA, 15 bp, Homo sapiens
cttcccaataacatg

SEQ ID NO: 23015 - DNA, 15 bp, Homo sapiens
acttcccaataacat

SEQ ID NO: 23016 - DNA, 15 bp, Homo sapiens
tacttcccaataaca

SEQ ID NO: 23017 - DNA, 15 bp, Homo sapiens
atacttcccaataac

SEQ ID NO: 23018 - DNA, 15 bp, Homo sapiens
aatacttcccaataa

SEQ ID NO: 23019 - DNA, 15 bp, Homo sapiens
gaatacttcccaata

SEQ ID NO: 23020 - DNA, 15 bp, Homo sapiens
agaatacttcccaat

SEQ ID NO: 23021 - DNA, 15 bp, Homo sapiens
cagaatacttcccaa

SEQ ID NO: 23022 - DNA, 15 bp, Homo sapiens
tcagaatacttccca

SEQ ID NO: 23023 - DNA, 15 bp, Homo sapiens
ttcagaatacttccc

SEQ ID NO: 23024 - DNA, 15 bp, Homo sapiens
cttcagaatacttcc

SEQ ID NO: 23025 - DNA, 15 bp, Homo sapiens
tcttcagaatacttc

SEQ ID NO: 23026 - DNA, 15 bp, Homo sapiens
ctcttcagaatactt

SEQ ID NO: 23027 - DNA, 15 bp, Homo sapiens
cctcttcagaatact

SEQ ID NO: 23028 - DNA, 15 bp, Homo sapiens
gcctcttcagaatac

SEQ ID NO: 23029 - DNA, 15 bp, Homo sapiens
tgcctcttcagaata

SEQ ID NO: 23030 - DNA, 15 bp, Homo sapiens
ttgcctcttcagaat

SEQ ID NO: 23031 - DNA, 15 bp, Homo sapiens
attgcctcttcagaa

SEQ ID NO: 23032 - DNA, 15 bp, Homo sapiens
tattgcctcttcaga

SEQ ID NO: 23033 - DNA, 15 bp, Homo sapiens
ctattgcctcttcag

SEQ ID NO: 23034 - DNA, 15 bp, Homo sapiens
gctattgcctcttca

SEQ ID NO: 23035 - DNA, 15 bp, Homo sapiens
tgctattgcctcttc

SEQ ID NO: 23036 - DNA, 15 bp, Homo sapiens
ctgctattgcctctt

SEQ ID NO: 23037 - DNA, 15 bp, Homo sapiens
actgctattgcctct

SEQ ID NO: 23038 - DNA, 15 bp, Homo sapiens
tactgctattgcctc

SEQ ID NO: 23039 - DNA, 15 bp, Homo sapiens
ttactgctattgcct

SEQ ID NO: 23040 - DNA, 15 bp, Homo sapiens
attactgctattgcc

SEQ ID NO: 23041 - DNA, 15 bp, Homo sapiens
tattactgctattgc

SEQ ID NO: 23042 - DNA, 15 bp, Homo sapiens
ttattactgctattg

SEQ ID NO: 23043 - DNA, 15 bp, Homo sapiens
gttattactgctatt

SEQ ID NO: 23044 - DNA, 15 bp, Homo sapiens
tgttattactgctat

SEQ ID NO: 23045 - DNA, 15 bp, Homo sapiens
ttgttattactgcta

SEQ ID NO: 23046 - DNA, 15 bp, Homo sapiens
gttgttattactgct

SEQ ID NO: 23047 - DNA, 15 bp, Homo sapiens
tgttgttattactgc

SEQ ID NO: 23048 - DNA, 15 bp, Homo sapiens
ctgttgttattactg

SEQ ID NO: 23049 - DNA, 15 bp, Homo sapiens
tctgttgttattact

SEQ ID NO: 23050 - DNA, 15 bp, Homo sapiens
gtctgttgttattac

SEQ ID NO: 23051 - DNA, 15 bp, Homo sapiens
agtctgttgttatta

SEQ ID NO: 23052 - DNA, 15 bp, Homo sapiens
aagtctgttgttatt

SEQ ID NO: 23053 - DNA, 15 bp, Homo sapiens
taagtctgttgttat

SEQ ID NO: 23054 - DNA, 15 bp, Homo sapiens
ttaagtctgttgtta

SEQ ID NO: 23055 - DNA, 15 bp, Homo sapiens
cttaagtctgttgtt

SEQ ID NO: 23056 - DNA, 15 bp, Homo sapiens
acttaagtctgttgt

SEQ ID NO: 23057 - DNA, 15 bp, Homo sapiens
cacttaagtctgttg

SEQ ID NO: 23058 - DNA, 15 bp, Homo sapiens
gcacttaagtctgtt

SEQ ID NO: 23059 - DNA, 15 bp, Homo sapiens
agcacttaagtctgt

SEQ ID NO: 23060 - DNA, 15 bp, Homo sapiens
tagcacttaagtctg

SEQ ID NO: 23061 - DNA, 15 bp, Homo sapiens
gtagcacttaagtct

SEQ ID NO: 23062 - DNA, 15 bp, Homo sapiens
cgtagcacttaagtc

SEQ ID NO: 23063 - DNA, 15 bp, Homo sapiens
gcgtagcacttaagt

SEQ ID NO: 23064 - DNA, 15 bp, Homo sapiens
ggcgtagcacttaag

SEQ ID NO: 23065 - DNA, 15 bp, Homo sapiens
gggcgtagcacttaa

SEQ ID NO: 23066 - DNA, 15 bp, Homo sapiens
ggggcgtagcactta

SEQ ID NO: 23067 - DNA, 15 bp, Homo sapiens
aggggcgtagcactt

SEQ ID NO: 23068 - DNA, 15 bp, Homo sapiens
aaggggcgtagcact

SEQ ID NO: 23069 - DNA, 15 bp, Homo sapiens
aaaggggcgtagcac

SEQ ID NO: 23070 - DNA, 15 bp, Homo sapiens
caaaggggcgtagca

SEQ ID NO: 23071 - DNA, 15 bp, Homo sapiens
acaaaggggcgtagc

SEQ ID NO: 23072 - DNA, 15 bp, Homo sapiens
cacaaaggggcgtag

SEQ ID NO: 23073 - DNA, 15 bp, Homo sapiens
gcacaaaggggcgta

SEQ ID NO: 23074 - DNA, 15 bp, Homo sapiens
agcacaaaggggcgt

SEQ ID NO: 23075 - DNA, 15 bp, Homo sapiens
cagcacaaaggggcg

SEQ ID NO: 23076 - DNA, 15 bp, Homo sapiens
gcagcacaaaggggc

SEQ ID NO: 23077 - DNA, 15 bp, Homo sapiens
agcagcacaaagggg

SEQ ID NO: 23078 - DNA, 15 bp, Homo sapiens
cagcagcacaaaggg

SEQ ID NO: 23079 - DNA, 15 bp, Homo sapiens
ccagcagcacaaagg

SEQ ID NO: 23080 - DNA, 15 bp, Homo sapiens
gccagcagcacaaag

SEQ ID NO: 23081 - DNA, 15 bp, Homo sapiens
agccagcagcacaaa

SEQ ID NO: 23082 - DNA, 15 bp, Homo sapiens
aagccagcagcacaa

SEQ ID NO: 23083 - DNA, 15 bp, Homo sapiens
aaagccagcagcaca

SEQ ID NO: 23084 - DNA, 15 bp, Homo sapiens
aaaagccagcagcac

SEQ ID NO: 23085 - DNA, 15 bp, Homo sapiens
gaaaagccagcagca

SEQ ID NO: 23086 - DNA, 15 bp, Homo sapiens
agaaaagccagcagc

SEQ ID NO: 23087 - DNA, 15 bp, Homo sapiens
cagaaaagccagcag

SEQ ID NO: 23088 - DNA, 15 bp, Homo sapiens
ccagaaaagccagca

SEQ ID NO: 23089 - DNA, 15 bp, Homo sapiens
accagaaaagccagc

SEQ ID NO: 23090 - DNA, 15 bp, Homo sapiens
aaccagaaaagccag

SEQ ID NO: 23091 - DNA, 15 bp, Homo sapiens
caaccagaaaagcca

SEQ ID NO: 23092 - DNA, 15 bp, Homo sapiens
gcaaccagaaaagcc

SEQ ID NO: 23093 - DNA, 15 bp, Homo sapiens
tgcaaccagaaaagc

SEQ ID NO: 23094 - DNA, 15 bp, Homo sapiens
ctgcaaccagaaaag

SEQ ID NO: 23095 - DNA, 15 bp, Homo sapiens
cctgcaaccagaaaa

SEQ ID NO: 23096 - DNA, 15 bp, Homo sapiens
gcctgcaaccagaaa

SEQ ID NO: 23097 - DNA, 15 bp, Homo sapiens
agcctgcaaccagaa

SEQ ID NO: 23098 - DNA, 15 bp, Homo sapiens
aagcctgcaaccaga

SEQ ID NO: 23099 - DNA, 15 bp, Homo sapiens
aaagcctgcaaccag

SEQ ID NO: 23100 - DNA, 15 bp, Homo sapiens
gaaagcctgcaacca

SEQ ID NO: 23101 - DNA, 15 bp, Homo sapiens
ggaaagcctgcaacc

SEQ ID NO: 23102 - DNA, 15 bp, Homo sapiens
gggaaagcctgcaac

SEQ ID NO: 23103 - DNA, 15 bp, Homo sapiens
tgggaaagcctgcaa

SEQ ID NO: 23104 - DNA, 15 bp, Homo sapiens
atgggaaagcctgca

SEQ ID NO: 23105 - DNA, 15 bp, Homo sapiens
catgggaaagcctgc

SEQ ID NO: 23106 - DNA, 15 bp, Homo sapiens
ccatgggaaagcctg

SEQ ID NO: 23107 - DNA, 15 bp, Homo sapiens
accatgggaaagcct

SEQ ID NO: 23108 - DNA, 15 bp, Homo sapiens
gaccatgggaaagcc

SEQ ID NO: 23109 - DNA, 15 bp, Homo sapiens
tgaccatgggaaagc

SEQ ID NO: 23110 - DNA, 15 bp, Homo sapiens
gtgaccatgggaaag

SEQ ID NO: 23111 - DNA, 15 bp, Homo sapiens
tgtgaccatgggaaa

SEQ ID NO: 23112 - DNA, 15 bp, Homo sapiens
ctgtgaccatgggaa

SEQ ID NO: 23113 - DNA, 15 bp, Homo sapiens
cctgtgaccatggga

SEQ ID NO: 23114 - DNA, 15 bp, Homo sapiens
tcctgtgaccatggg

SEQ ID NO: 23115 - DNA, 15 bp, Homo sapiens
atcctgtgaccatgg

SEQ ID NO: 23116 - DNA, 15 bp, Homo sapiens
catcctgtgaccatg

SEQ ID NO: 23117 - DNA, 15 bp, Homo sapiens
gcatcctgtgaccat

SEQ ID NO: 23118 - DNA, 15 bp, Homo sapiens
tgcatcctgtgacca

SEQ ID NO: 23119 - DNA, 15 bp, Homo sapiens
gtgcatcctgtgacc

SEQ ID NO: 23120 - DNA, 15 bp, Homo sapiens
agtgcatcctgtgac

SEQ ID NO: 23121 - DNA, 15 bp, Homo sapiens
cagtgcatcctgtga

SEQ ID NO: 23122 - DNA, 15 bp, Homo sapiens
acagtgcatcctgtg

SEQ ID NO: 23123 - DNA, 15 bp, Homo sapiens
gacagtgcatcctgt

SEQ ID NO: 23124 - DNA, 15 bp, Homo sapiens
tgacagtgcatcctg

SEQ ID NO: 23125 - DNA, 15 bp, Homo sapiens
ctgacagtgcatcct

SEQ ID NO: 23126 - DNA, 15 bp, Homo sapiens
gctgacagtgcatcc

SEQ ID NO: 23127 - DNA, 15 bp, Homo sapiens
tgctgacagtgcatc

SEQ ID NO: 23128 - DNA, 15 bp, Homo sapiens
atgctgacagtgcat

SEQ ID NO: 23129 - DNA, 15 bp, Homo sapiens
gatgctgacagtgca

SEQ ID NO: 23130 - DNA, 15 bp, Homo sapiens
tgatgctgacagtgc

SEQ ID NO: 23131 - DNA, 15 bp, Homo sapiens
ctgatgctgacagtg

SEQ ID NO: 23132 - DNA, 15 bp, Homo sapiens
cctgatgctgacagt

SEQ ID NO: 23133 - DNA, 15 bp, Homo sapiens
acctgatgctgacag

SEQ ID NO: 23134 - DNA, 15 bp, Homo sapiens
gacctgatgctgaca

SEQ ID NO: 23135 - DNA, 15 bp, Homo sapiens
ggacctgatgctgac

SEQ ID NO: 23136 - DNA, 15 bp, Homo sapiens
gggacctgatgctga

SEQ ID NO: 23137 - DNA, 15 bp, Homo sapiens
tgggacctgatgctg

SEQ ID NO: 23138 - DNA, 15 bp, Homo sapiens
ctgggacctgatgct

SEQ ID NO: 23139 - DNA, 15 bp, Homo sapiens
tctgggacctgatgc

SEQ ID NO: 23140 - DNA, 15 bp, Homo sapiens
ctctgggacctgatg

SEQ ID NO: 23141 - DNA, 15 bp, Homo sapiens
cctctgggacctgat

SEQ ID NO: 23142 - DNA, 15 bp, Homo sapiens
ccctctgggacctga

SEQ ID NO: 23143 - DNA, 15 bp, Homo sapiens
gccctctgggacctg

SEQ ID NO: 23144 - DNA, 15 bp, Homo sapiens
ggccctctgggacct

SEQ ID NO: 23145 - DNA, 15 bp, Homo sapiens
tggccctctgggacc

SEQ ID NO: 23146 - DNA, 15 bp, Homo sapiens
gtggccctctgggac

SEQ ID NO: 23147 - DNA, 15 bp, Homo sapiens
ggtggccctctggga

SEQ ID NO: 23148 - DNA, 15 bp, Homo sapiens
cggtggccctctggg

SEQ ID NO: 23149 - DNA, 15 bp, Homo sapiens
acggtggccctctgg

SEQ ID NO: 23150 - DNA, 15 bp, Homo sapiens
cacggtggccctctg

SEQ ID NO: 23151 - DNA, 15 bp, Homo sapiens
acacggtggccctct

SEQ ID NO: 23152 - DNA, 15 bp, Homo sapiens
gacacggtggccctc

SEQ ID NO: 23153 - DNA, 15 bp, Homo sapiens
ggacacggtggccct

SEQ ID NO: 23154 - DNA, 15 bp, Homo sapiens
tggacacggtggccc

SEQ ID NO: 23155 - DNA, 15 bp, Homo sapiens
atggacacggtggcc

SEQ ID NO: 23156 - DNA, 15 bp, Homo sapiens
aatggacacggtggc

SEQ ID NO: 23157 - DNA, 15 bp, Homo sapiens
taatggacacggtgg

SEQ ID NO: 23158 - DNA, 15 bp, Homo sapiens
gtaatggacacggtg

SEQ ID NO: 23159 - DNA, 15 bp, Homo sapiens
tgtaatggacacggt

SEQ ID NO: 23160 - DNA, 15 bp, Homo sapiens
ctgtaatggacacgg

SEQ ID NO: 23161 - DNA, 15 bp, Homo sapiens
gctgtaatggacacg

SEQ ID NO: 23162 - DNA, 15 bp, Homo sapiens
tgctgtaatggacac

SEQ ID NO: 23163 - DNA, 15 bp, Homo sapiens
ctgctgtaatggaca

SEQ ID NO: 23164 - DNA, 15 bp, Homo sapiens
tctgctgtaatggac

SEQ ID NO: 23165 - DNA, 15 bp, Homo sapiens
ctctgctgtaatgga

SEQ ID NO: 23166 - DNA, 15 bp, Homo sapiens
actctgctgtaatgg

SEQ ID NO: 23167 - DNA, 15 bp, Homo sapiens
gactctgctgtaatg

SEQ ID NO: 23168 - DNA, 15 bp, Homo sapiens
ggactctgctgtaat

SEQ ID NO: 23169 - DNA, 15 bp, Homo sapiens
tggactctgctgtaa

SEQ ID NO: 23170 - DNA, 15 bp, Homo sapiens
ctggactctgctgta

SEQ ID NO: 23171 - DNA, 15 bp, Homo sapiens
gctggactctgctgt

SEQ ID NO: 23172 - DNA, 15 bp, Homo sapiens
agctggactctgctg

SEQ ID NO: 23173 - DNA, 15 bp, Homo sapiens
cagctggactctgct

SEQ ID NO: 23174 - DNA, 15 bp, Homo sapiens
gcagctggactctgc

SEQ ID NO: 23175 - DNA, 15 bp, Homo sapiens
tgcagctggactctg

SEQ ID NO: 23176 - DNA, 15 bp, Homo sapiens
ctgcagctggactct

SEQ ID NO: 23177 - DNA, 15 bp, Homo sapiens
gctgcagctggactc

SEQ ID NO: 23178 - DNA, 15 bp, Homo sapiens
tgctgcagctggact

SEQ ID NO: 23179 - DNA, 15 bp, Homo sapiens
atgctgcagctggac

SEQ ID NO: 23180 - DNA, 15 bp, Homo sapiens
gatgctgcagctgga

SEQ ID NO: 23181 - DNA, 15 bp, Homo sapiens
ggatgctgcagctgg

SEQ ID NO: 23182 - DNA, 15 bp, Homo sapiens
tggatgctgcagctg

SEQ ID NO: 23183 - DNA, 15 bp, Homo sapiens
ctggatgctgcagct

SEQ ID NO: 23184 - DNA, 15 bp, Homo sapiens
gctggatgctgcagc

SEQ ID NO: 23185 - DNA, 15 bp, Homo sapiens
agctggatgctgcag

SEQ ID NO: 23186 - DNA, 15 bp, Homo sapiens
gagctggatgctgca

SEQ ID NO: 23187 - DNA, 15 bp, Homo sapiens
tgagctggatgctgc

SEQ ID NO: 23188 - DNA, 15 bp, Homo sapiens
gtgagctggatgctg

SEQ ID NO: 23189 - DNA, 15 bp, Homo sapiens
cgtgagctggatgct

SEQ ID NO: 23190 - DNA, 15 bp, Homo sapiens
gcgtgagctggatgc

SEQ ID NO: 23191 - DNA, 15 bp, Homo sapiens
ggcgtgagctggatg

SEQ ID NO: 23192 - DNA, 15 bp, Homo sapiens
gggcgtgagctggat

SEQ ID NO: 23193 - DNA, 15 bp, Homo sapiens
agggcgtgagctgga

SEQ ID NO: 23194 - DNA, 15 bp, Homo sapiens
gagggcgtgagctgg

SEQ ID NO: 23195 - DNA, 15 bp, Homo sapiens
tgagggcgtgagctg

SEQ ID NO: 23196 - DNA, 15 bp, Homo sapiens
atgagggcgtgagct

SEQ ID NO: 23197 - DNA, 15 bp, Homo sapiens
catgagggcgtgagc

SEQ ID NO: 23198 - DNA, 15 bp, Homo sapiens
ccatgagggcgtgag

SEQ ID NO: 23199 - DNA, 15 bp, Homo sapiens
cccatgagggcgtga

SEQ ID NO: 23200 - DNA, 15 bp, Homo sapiens
tcccatgagggcgtg

SEQ ID NO: 23201 - DNA, 15 bp, Homo sapiens
ttcccatgagggcgt

SEQ ID NO: 23202 - DNA, 15 bp, Homo sapiens
attcccatgagggcg

SEQ ID NO: 23203 - DNA, 15 bp, Homo sapiens
aattcccatgagggc

SEQ ID NO: 23204 - DNA, 15 bp, Homo sapiens
caattcccatgaggg

SEQ ID NO: 23205 - DNA, 15 bp, Homo sapiens
ccaattcccatgagg

SEQ ID NO: 23206 - DNA, 15 bp, Homo sapiens
gccaattcccatgag

SEQ ID NO: 23207 - DNA, 15 bp, Homo sapiens
tgccaattcccatga

SEQ ID NO: 23208 - DNA, 15 bp, Homo sapiens
gtgccaattcccatg

SEQ ID NO: 23209 - DNA, 15 bp, Homo sapiens
tgtgccaattcccat

SEQ ID NO: 23210 - DNA, 15 bp, Homo sapiens
ctgtgccaattccca

SEQ ID NO: 23211 - DNA, 15 bp, Homo sapiens
cctgtgccaattccc

SEQ ID NO: 23212 - DNA, 15 bp, Homo sapiens
gcctgtgccaattcc

SEQ ID NO: 23213 - DNA, 15 bp, Homo sapiens
ggcctgtgccaattc

SEQ ID NO: 23214 - DNA, 15 bp, Homo sapiens
aggcctgtgccaatt

SEQ ID NO: 23215 - DNA, 15 bp, Homo sapiens
caggcctgtgccaat

SEQ ID NO: 23216 - DNA, 15 bp, Homo sapiens
ccaggcctgtgccaa

SEQ ID NO: 23217 - DNA, 15 bp, Homo sapiens
cccaggcctgtgcca

SEQ ID NO: 23218 - DNA, 15 bp, Homo sapiens
ccccaggcctgtgcc

SEQ ID NO: 23219 - DNA, 15 bp, Homo sapiens
gccccaggcctgtgc

SEQ ID NO: 23220 - DNA, 15 bp, Homo sapiens
tgccccaggcctgtg

SEQ ID NO: 23221 - DNA, 15 bp, Homo sapiens
ctgccccaggcctgt

SEQ ID NO: 23222 - DNA, 15 bp, Homo sapiens
cctgccccaggcctg

SEQ ID NO: 23223 - DNA, 15 bp, Homo sapiens
ccctgccccaggcct

SEQ ID NO: 23224 - DNA, 15 bp, Homo sapiens
gccctgccccaggcc

SEQ ID NO: 23225 - DNA, 15 bp, Homo sapiens
agccctgccccaggc

SEQ ID NO: 23226 - DNA, 15 bp, Homo sapiens
aagccctgccccagg

SEQ ID NO: 23227 - DNA, 15 bp, Homo sapiens
gaagccctgccccag

SEQ ID NO: 23228 - DNA, 15 bp, Homo sapiens
agaagccctgcccca

SEQ ID NO: 23229 - DNA, 15 bp, Homo sapiens
cagaagccctgcccc

SEQ ID NO: 23230 - DNA, 15 bp, Homo sapiens
tcagaagccctgccc

SEQ ID NO: 23231 - DNA, 15 bp, Homo sapiens
atcagaagccctgcc

SEQ ID NO: 23232 - DNA, 15 bp, Homo sapiens
catcagaagccctgc

SEQ ID NO: 23233 - DNA, 15 bp, Homo sapiens
ccatcagaagccctg

SEQ ID NO: 23234 - DNA, 15 bp, Homo sapiens
gccatcagaagccct

SEQ ID NO: 23235 - DNA, 15 bp, Homo sapiens
ggccatcagaagccc

SEQ ID NO: 23236 - DNA, 15 bp, Homo sapiens
tggccatcagaagcc

SEQ ID NO: 23237 - DNA, 15 bp, Homo sapiens
atggccatcagaagc

SEQ ID NO: 23238 - DNA, 15 bp, Homo sapiens
aatggccatcagaag

SEQ ID NO: 23239 - DNA, 15 bp, Homo sapiens
aaatggccatcagaa

SEQ ID NO: 23240 - DNA, 15 bp, Homo sapiens
caaatggccatcaga

SEQ ID NO: 23241 - DNA, 15 bp, Homo sapiens
gcaaatggccatcag

SEQ ID NO: 23242 - DNA, 15 bp, Homo sapiens
agcaaatggccatca

SEQ ID NO: 23243 - DNA, 15 bp, Homo sapiens
aagcaaatggccatc

SEQ ID NO: 23244 - DNA, 15 bp, Homo sapiens
caagcaaatggccat

SEQ ID NO: 23245 - DNA, 15 bp, Homo sapiens
ccaagcaaatggcca

SEQ ID NO: 23246 - DNA, 15 bp, Homo sapiens
gccaagcaaatggcc

SEQ ID NO: 23247 - DNA, 15 bp, Homo sapiens
ggccaagcaaatggc

SEQ ID NO: 23248 - DNA, 15 bp, Homo sapiens
aggccaagcaaatgg

SEQ ID NO: 23249 - DNA, 15 bp, Homo sapiens
gaggccaagcaaatg

SEQ ID NO: 23250 - DNA, 15 bp, Homo sapiens
ggaggccaagcaaat

SEQ ID NO: 23251 - DNA, 15 bp, Homo sapiens
aggaggccaagcaaa

SEQ ID NO: 23252 - DNA, 15 bp, Homo sapiens
caggaggccaagcaa

SEQ ID NO: 23253 - DNA, 15 bp, Homo sapiens
gcaggaggccaagca

SEQ ID NO: 23254 - DNA, 15 bp, Homo sapiens
tgcaggaggccaagc

SEQ ID NO: 23255 - DNA, 15 bp, Homo sapiens
atgcaggaggccaag

SEQ ID NO: 23256 - DNA, 15 bp, Homo sapiens
aatgcaggaggccaa

SEQ ID NO: 23257 - DNA, 15 bp, Homo sapiens
aaatgcaggaggcca

SEQ ID NO: 23258 - DNA, 15 bp, Homo sapiens
aaaatgcaggaggcc

SEQ ID NO: 23259 - DNA, 15 bp, Homo sapiens
taaaatgcaggaggc

SEQ ID NO: 23260 - DNA, 15 bp, Homo sapiens
ctaaaatgcaggagg

SEQ ID NO: 23261 - DNA, 15 bp, Homo sapiens
actaaaatgcaggag

SEQ ID NO: 23262 - DNA, 15 bp, Homo sapiens
gactaaaatgcagga

SEQ ID NO: 23263 - DNA, 15 bp, Homo sapiens
ggactaaaatgcagg

SEQ ID NO: 23264 - DNA, 15 bp, Homo sapiens
tggactaaaatgcag

SEQ ID NO: 23265 - DNA, 15 bp, Homo sapiens
ttggactaaaatgca

SEQ ID NO: 23266 - DNA, 15 bp, Homo sapiens
gttggactaaaatgc

SEQ ID NO: 23267 - DNA, 15 bp, Homo sapiens
agttggactaaaatg

SEQ ID NO: 23268 - DNA, 15 bp, Homo sapiens
gagttggactaaaat

SEQ ID NO: 23269 - DNA, 15 bp, Homo sapiens
tgagttggactaaaa

SEQ ID NO: 23270 - DNA, 15 bp, Homo sapiens
gtgagttggactaaa

SEQ ID NO: 23271 - DNA, 15 bp, Homo sapiens
tgtgagttggactaa

SEQ ID NO: 23272 - DNA, 15 bp, Homo sapiens
ctgtgagttggacta

SEQ ID NO: 23273 - DNA, 15 bp, Homo sapiens
actgtgagttggact

SEQ ID NO: 23274 - DNA, 15 bp, Homo sapiens
gactgtgagttggac

SEQ ID NO: 23275 - DNA, 15 bp, Homo sapiens
ggactgtgagttgga

SEQ ID NO: 23276 - DNA, 15 bp, Homo sapiens
tggactgtgagttgg

SEQ ID NO: 23277 - DNA, 15 bp, Homo sapiens
gtggactgtgagttg

SEQ ID NO: 23278 - DNA, 15 bp, Homo sapiens
agtggactgtgagtt

SEQ ID NO: 23279 - DNA, 15 bp, Homo sapiens
tagtggactgtgagt

SEQ ID NO: 23280 - DNA, 15 bp, Homo sapiens
ctagtggactgtgag

SEQ ID NO: 23281 - DNA, 15 bp, Homo sapiens
gctagtggactgtga

SEQ ID NO: 23282 - DNA, 15 bp, Homo sapiens
agctagtggactgtg

SEQ ID NO: 23283 - DNA, 15 bp, Homo sapiens
aagctagtggactgt

SEQ ID NO: 23284 - DNA, 15 bp, Homo sapiens
gaagctagtggactg

SEQ ID NO: 23285 - DNA, 15 bp, Homo sapiens
tgaagctagtggact

SEQ ID NO: 23286 - DNA, 15 bp, Homo sapiens
gtgaagctagtggac

SEQ ID NO: 23287 - DNA, 15 bp, Homo sapiens
agtgaagctagtgga

SEQ ID NO: 23288 - DNA, 15 bp, Homo sapiens
gagtgaagctagtgg

SEQ ID NO: 23289 - DNA, 15 bp, Homo sapiens
ggagtgaagctagtg

SEQ ID NO: 23290 - DNA, 15 bp, Homo sapiens
aggagtgaagctagt

SEQ ID NO: 23291 - DNA, 15 bp, Homo sapiens
aaggagtgaagctag

SEQ ID NO: 23292 - DNA, 15 bp, Homo sapiens
aaaggagtgaagcta

SEQ ID NO: 23293 - DNA, 15 bp, Homo sapiens
taaaggagtgaagct

SEQ ID NO: 23294 - DNA, 15 bp, Homo sapiens
ttaaaggagtgaagc

SEQ ID NO: 23295 - DNA, 15 bp, Homo sapiens
tttaaaggagtgaag

SEQ ID NO: 23296 - DNA, 15 bp, Homo sapiens
atttaaaggagtgaa

SEQ ID NO: 23297 - DNA, 15 bp, Homo sapiens
aatttaaaggagtga

SEQ ID NO: 23298 - DNA, 15 bp, Homo sapiens
gaatttaaaggagtg

SEQ ID NO: 23299 - DNA, 15 bp, Homo sapiens
tgaatttaaaggagt

SEQ ID NO: 23300 - DNA, 15 bp, Homo sapiens
gtgaatttaaaggag

SEQ ID NO: 23301 - DNA, 15 bp, Homo sapiens
agtgaatttaaagga

SEQ ID NO: 23302 - DNA, 15 bp, Homo sapiens
aagtgaatttaaagg

SEQ ID NO: 23303 - DNA, 15 bp, Homo sapiens
aaagtgaatttaaag

SEQ ID NO: 23304 - DNA, 15 bp, Homo sapiens
caaagtgaatttaaa

SEQ ID NO: 23305 - DNA, 15 bp, Homo sapiens
tcaaagtgaatttaa

SEQ ID NO: 23306 - DNA, 15 bp, Homo sapiens
ttcaaagtgaattta

SEQ ID NO: 23307 - DNA, 15 bp, Homo sapiens
tttcaaagtgaattt

SEQ ID NO: 23308 - DNA, 15 bp, Homo sapiens
gtttcaaagtgaatt

SEQ ID NO: 23309 - DNA, 15 bp, Homo sapiens
tgtttcaaagtgaat

SEQ ID NO: 23310 - DNA, 15 bp, Homo sapiens
ctgtttcaaagtgaa

SEQ ID NO: 23311 - DNA, 15 bp, Homo sapiens
cctgtttcaaagtga

SEQ ID NO: 23312 - DNA, 15 bp, Homo sapiens
gcctgtttcaaagtg

SEQ ID NO: 23313 - DNA, 15 bp, Homo sapiens
ggcctgtttcaaagt

SEQ ID NO: 23314 - DNA, 15 bp, Homo sapiens
aggcctgtttcaaag

SEQ ID NO: 23315 - DNA, 15 bp, Homo sapiens
gaggcctgtttcaaa

SEQ ID NO: 23316 - DNA, 15 bp, Homo sapiens
tgaggcctgtttcaa

SEQ ID NO: 23317 - DNA, 15 bp, Homo sapiens
atgaggcctgtttca

SEQ ID NO: 23318 - DNA, 15 bp, Homo sapiens
gatgaggcctgtttc

SEQ ID NO: 23319 - DNA, 15 bp, Homo sapiens
ggatgaggcctgttt

SEQ ID NO: 23320 - DNA, 15 bp, Homo sapiens
gggatgaggcctgtt

SEQ ID NO: 23321 - DNA, 15 bp, Homo sapiens
tgggatgaggcctgt

SEQ ID NO: 23322 - DNA, 15 bp, Homo sapiens
gtgggatgaggcctg

SEQ ID NO: 23323 - DNA, 15 bp, Homo sapiens
agtgggatgaggcct

SEQ ID NO: 23324 - DNA, 15 bp, Homo sapiens
aagtgggatgaggcc

SEQ ID NO: 23325 - DNA, 15 bp, Homo sapiens
gaagtgggatgaggc

SEQ ID NO: 23326 - DNA, 15 bp, Homo sapiens
ggaagtgggatgagg

SEQ ID NO: 23327 - DNA, 15 bp, Homo sapiens
tggaagtgggatgag

SEQ ID NO: 23328 - DNA, 15 bp, Homo sapiens
gtggaagtgggatga

SEQ ID NO: 23329 - DNA, 15 bp, Homo sapiens
ggtggaagtgggatg

SEQ ID NO: 23330 - DNA, 15 bp, Homo sapiens
tggtggaagtgggat

SEQ ID NO: 23331 - DNA, 15 bp, Homo sapiens
ctggtggaagtggga

SEQ ID NO: 23332 - DNA, 15 bp, Homo sapiens
gctggtggaagtggg

SEQ ID NO: 23333 - DNA, 15 bp, Homo sapiens
tgctggtggaagtgg

SEQ ID NO: 23334 - DNA, 15 bp, Homo sapiens
gtgctggtggaagtg

SEQ ID NO: 23335 - DNA, 15 bp, Homo sapiens
ggtgctggtggaagt

SEQ ID NO: 23336 - DNA, 15 bp, Homo sapiens
tggtgctggtggaag

SEQ ID NO: 23337 - DNA, 15 bp, Homo sapiens
atggtgctggtggaa

SEQ ID NO: 23338 - DNA, 15 bp, Homo sapiens
tatggtgctggtgga

SEQ ID NO: 23339 - DNA, 15 bp, Homo sapiens
ctatggtgctggtgg

SEQ ID NO: 23340 - DNA, 15 bp, Homo sapiens
tctatggtgctggtg

SEQ ID NO: 23341 - DNA, 15 bp, Homo sapiens
ttctatggtgctggt

SEQ ID NO: 23342 - DNA, 15 bp, Homo sapiens
cttctatggtgctgg

SEQ ID NO: 23343 - DNA, 15 bp, Homo sapiens
tcttctatggtgctg

SEQ ID NO: 23344 - DNA, 15 bp, Homo sapiens
ttcttctatggtgct

SEQ ID NO: 23345 - DNA, 15 bp, Homo sapiens
attcttctatggtgc

SEQ ID NO: 23346 - DNA, 15 bp, Homo sapiens
tattcttctatggtg

SEQ ID NO: 23347 - DNA, 15 bp, Homo sapiens
ttattcttctatggt

SEQ ID NO: 23348 - DNA, 15 bp, Homo sapiens
attattcttctatgg

SEQ ID NO: 23349 - DNA, 15 bp, Homo sapiens
aattattcttctatg

SEQ ID NO: 23350 - DNA, 15 bp, Homo sapiens
gaattattcttctat

SEQ ID NO: 23351 - DNA, 15 bp, Homo sapiens
agaattattcttcta

SEQ ID NO: 23352 - DNA, 15 bp, Homo sapiens
cagaattattcttct

SEQ ID NO: 23353 - DNA, 15 bp, Homo sapiens
ccagaattattcttc

SEQ ID NO: 23354 - DNA, 15 bp, Homo sapiens
cccagaattattctt

SEQ ID NO: 23355 - DNA, 15 bp, Homo sapiens
gcccagaattattct

SEQ ID NO: 23356 - DNA, 15 bp, Homo sapiens
tgcccagaattattc

SEQ ID NO: 23357 - DNA, 15 bp, Homo sapiens
ctgcccagaattatt

SEQ ID NO: 23358 - DNA, 15 bp, Homo sapiens
tctgcccagaattat

SEQ ID NO: 23359 - DNA, 15 bp, Homo sapiens
ttctgcccagaatta

SEQ ID NO: 23360 - DNA, 15 bp, Homo sapiens
cttctgcccagaatt

SEQ ID NO: 23361 - DNA, 15 bp, Homo sapiens
acttctgcccagaat

SEQ ID NO: 23362 - DNA, 15 bp, Homo sapiens
gacttctgcccagaa

SEQ ID NO: 23363 - DNA, 15 bp, Homo sapiens
agacttctgcccaga

SEQ ID NO: 23364 - DNA, 15 bp, Homo sapiens
cagacttctgcccag

SEQ ID NO: 23365 - DNA, 15 bp, Homo sapiens
acagacttctgccca

SEQ ID NO: 23366 - DNA, 15 bp, Homo sapiens
aacagacttctgccc

SEQ ID NO: 23367 - DNA, 15 bp, Homo sapiens
aaacagacttctgcc

SEQ ID NO: 23368 - DNA, 15 bp, Homo sapiens
aaaacagacttctgc

SEQ ID NO: 23369 - DNA, 15 bp, Homo sapiens
aaaaacagacttctg

SEQ ID NO: 23370 - DNA, 15 bp, Homo sapiens
aaaaaacagacttct

SEQ ID NO: 23371 - DNA, 15 bp, Homo sapiens
aaaaaaacagacttc

SEQ ID NO: 23372 - DNA, 15 bp, Homo sapiens
aaaaaaaacagactt

SEQ ID NO: 23373 - DNA, 15 bp, Homo sapiens
gaaaaaaaacagact

SEQ ID NO: 23374 - DNA, 15 bp, Homo sapiens
tgaaaaaaaacagac

SEQ ID NO: 23375 - DNA, 15 bp, Homo sapiens
atgaaaaaaaacaga

SEQ ID NO: 23376 - DNA, 15 bp, Homo sapiens
aatgaaaaaaaacag

SEQ ID NO: 23377 - DNA, 15 bp, Homo sapiens
aaatgaaaaaaaaca

SEQ ID NO: 23378 - DNA, 15 bp, Homo sapiens
aaaatgaaaaaaaac

SEQ ID NO: 23379 - DNA, 15 bp, Homo sapiens
aaaaatgaaaaaaaa

SEQ ID NO: 23380 - DNA, 15 bp, Homo sapiens
gaaaaatgaaaaaaa

SEQ ID NO: 23381 - DNA, 15 bp, Homo sapiens
ggaaaaatgaaaaaa

SEQ ID NO: 23382 - DNA, 15 bp, Homo sapiens
tggaaaaatgaaaaa

SEQ ID NO: 23383 - DNA, 15 bp, Homo sapiens
ctggaaaaatgaaaa

SEQ ID NO: 23384 - DNA, 15 bp, Homo sapiens
cctggaaaaatgaaa

SEQ ID NO: 23385 - DNA, 15 bp, Homo sapiens
tcctggaaaaatgaa

SEQ ID NO: 23386 - DNA, 15 bp, Homo sapiens
gtcctggaaaaatga

SEQ ID NO: 23387 - DNA, 15 bp, Homo sapiens
tgtcctggaaaaatg

SEQ ID NO: 23388 - DNA, 15 bp, Homo sapiens
ctgtcctggaaaaat

SEQ ID NO: 23389 - DNA, 15 bp, Homo sapiens
actgtcctggaaaaa

SEQ ID NO: 23390 - DNA, 15 bp, Homo sapiens
aactgtcctggaaaa

SEQ ID NO: 23391 - DNA, 15 bp, Homo sapiens
caactgtcctggaaa

SEQ ID NO: 23392 - DNA, 15 bp, Homo sapiens
ccaactgtcctggaa

SEQ ID NO: 23393 - DNA, 15 bp, Homo sapiens
tccaactgtcctgga

SEQ ID NO: 23394 - DNA, 15 bp, Homo sapiens
atccaactgtcctgg

SEQ ID NO: 23395 - DNA, 15 bp, Homo sapiens
tatccaactgtcctg

SEQ ID NO: 23396 - DNA, 15 bp, Homo sapiens
atatccaactgtcct

SEQ ID NO: 23397 - DNA, 15 bp, Homo sapiens
aatatccaactgtcc

SEQ ID NO: 23398 - DNA, 15 bp, Homo sapiens
caatatccaactgtc

SEQ ID NO: 23399 - DNA, 15 bp, Homo sapiens
acaatatccaactgt

SEQ ID NO: 23400 - DNA, 15 bp, Homo sapiens
gacaatatccaactg

SEQ ID NO: 23401 - DNA, 15 bp, Homo sapiens
tgacaatatccaact

SEQ ID NO: 23402 - DNA, 15 bp, Homo sapiens
ctgacaatatccaac

SEQ ID NO: 23403 - DNA, 15 bp, Homo sapiens
cctgacaatatccaa

SEQ ID NO: 23404 - DNA, 15 bp, Homo sapiens
gcctgacaatatcca

SEQ ID NO: 23405 - DNA, 15 bp, Homo sapiens
ggcctgacaatatcc

SEQ ID NO: 23406 - DNA, 15 bp, Homo sapiens
tggcctgacaatatc

SEQ ID NO: 23407 - DNA, 15 bp, Homo sapiens
gtggcctgacaatat

SEQ ID NO: 23408 - DNA, 15 bp, Homo sapiens
agtggcctgacaata

SEQ ID NO: 23409 - DNA, 15 bp, Homo sapiens
aagtggcctgacaat

SEQ ID NO: 23410 - DNA, 15 bp, Homo sapiens
caagtggcctgacaa

SEQ ID NO: 23411 - DNA, 15 bp, Homo sapiens
acaagtggcctgaca

SEQ ID NO: 23412 - DNA, 15 bp, Homo sapiens
cacaagtggcctgac

SEQ ID NO: 23413 - DNA, 15 bp, Homo sapiens
tcacaagtggcctga

SEQ ID NO: 23414 - DNA, 15 bp, Homo sapiens
gtcacaagtggcctg

SEQ ID NO: 23415 - DNA, 15 bp, Homo sapiens
ggtcacaagtggcct

SEQ ID NO: 23416 - DNA, 15 bp, Homo sapiens
gggtcacaagtggcc

SEQ ID NO: 23417 - DNA, 15 bp, Homo sapiens
ggggtcacaagtggc

SEQ ID NO: 23418 - DNA, 15 bp, Homo sapiens
tggggtcacaagtgg

SEQ ID NO: 23419 - DNA, 15 bp, Homo sapiens
ctggggtcacaagtg

SEQ ID NO: 23420 - DNA, 15 bp, Homo sapiens
gctggggtcacaagt

SEQ ID NO: 23421 - DNA, 15 bp, Homo sapiens
ggctggggtcacaag

SEQ ID NO: 23422 - DNA, 15 bp, Homo sapiens
tggctggggtcacaa

SEQ ID NO: 23423 - DNA, 15 bp, Homo sapiens
atggctggggtcaca

SEQ ID NO: 23424 - DNA, 15 bp, Homo sapiens
catggctggggtcac

SEQ ID NO: 23425 - DNA, 15 bp, Homo sapiens
acatggctggggtca

SEQ ID NO: 23426 - DNA, 15 bp, Homo sapiens
tacatggctggggtc

SEQ ID NO: 23427 - DNA, 15 bp, Homo sapiens
ctacatggctggggt

SEQ ID NO: 23428 - DNA, 15 bp, Homo sapiens
actacatggctgggg

SEQ ID NO: 23429 - DNA, 15 bp, Homo sapiens
cactacatggctggg

SEQ ID NO: 23430 - DNA, 15 bp, Homo sapiens
tcactacatggctgg

SEQ ID NO: 23431 - DNA, 15 bp, Homo sapiens
ctcactacatggctg

SEQ ID NO: 23432 - DNA, 15 bp, Homo sapiens
cctcactacatggct

SEQ ID NO: 23433 - DNA, 15 bp, Homo sapiens
ccctcactacatggc

SEQ ID NO: 23434 - DNA, 15 bp, Homo sapiens
accctcactacatgg

SEQ ID NO: 23435 - DNA, 15 bp, Homo sapiens
caccctcactacatg

SEQ ID NO: 23436 - DNA, 15 bp, Homo sapiens
gcaccctcactacat

SEQ ID NO: 23437 - DNA, 15 bp, Homo sapiens
agcaccctcactaca

SEQ ID NO: 23438 - DNA, 15 bp, Homo sapiens
gagcaccctcactac

SEQ ID NO: 23439 - DNA, 15 bp, Homo sapiens
agagcaccctcacta

SEQ ID NO: 23440 - DNA, 15 bp, Homo sapiens
aagagcaccctcact

SEQ ID NO: 23441 - DNA, 15 bp, Homo sapiens
aaagagcaccctcac

SEQ ID NO: 23442 - DNA, 15 bp, Homo sapiens
gaaagagcaccctca

SEQ ID NO: 23443 - DNA, 15 bp, Homo sapiens
agaaagagcaccctc

SEQ ID NO: 23444 - DNA, 15 bp, Homo sapiens
gagaaagagcaccct

SEQ ID NO: 23445 - DNA, 15 bp, Homo sapiens
agagaaagagcaccc

SEQ ID NO: 23446 - DNA, 15 bp, Homo sapiens
cagagaaagagcacc

SEQ ID NO: 23447 - DNA, 15 bp, Homo sapiens
acagagaaagagcac

SEQ ID NO: 23448 - DNA, 15 bp, Homo sapiens
cacagagaaagagca

SEQ ID NO: 23449 - DNA, 15 bp, Homo sapiens
gcacagagaaagagc

SEQ ID NO: 23450 - DNA, 15 bp, Homo sapiens
ggcacagagaaagag

SEQ ID NO: 23451 - DNA, 15 bp, Homo sapiens
aggcacagagaaaga

SEQ ID NO: 23452 - DNA, 15 bp, Homo sapiens
caggcacagagaaag

SEQ ID NO: 23453 - DNA, 15 bp, Homo sapiens
gcaggcacagagaaa

SEQ ID NO: 23454 - DNA, 15 bp, Homo sapiens
agcaggcacagagaa

SEQ ID NO: 23455 - DNA, 15 bp, Homo sapiens
gagcaggcacagaga

SEQ ID NO: 23456 - DNA, 15 bp, Homo sapiens
ggagcaggcacagag

SEQ ID NO: 23457 - DNA, 15 bp, Homo sapiens
aggagcaggcacaga

SEQ ID NO: 23458 - DNA, 15 bp, Homo sapiens
aaggagcaggcacag

SEQ ID NO: 23459 - DNA, 15 bp, Homo sapiens
taaggagcaggcaca

SEQ ID NO: 23460 - DNA, 15 bp, Homo sapiens
ataaggagcaggcac

SEQ ID NO: 23461 - DNA, 15 bp, Homo sapiens
cataaggagcaggca

SEQ ID NO: 23462 - DNA, 15 bp, Homo sapiens
tcataaggagcaggc

SEQ ID NO: 23463 - DNA, 15 bp, Homo sapiens
ctcataaggagcagg

SEQ ID NO: 23464 - DNA, 15 bp, Homo sapiens
actcataaggagcag

SEQ ID NO: 23465 - DNA, 15 bp, Homo sapiens
cactcataaggagca

SEQ ID NO: 23466 - DNA, 15 bp, Homo sapiens
gcactcataaggagc

SEQ ID NO: 23467 - DNA, 15 bp, Homo sapiens
tgcactcataaggag

SEQ ID NO: 23468 - DNA, 15 bp, Homo sapiens
ctgcactcataagga

SEQ ID NO: 23469 - DNA, 15 bp, Homo sapiens
actgcactcataagg

SEQ ID NO: 23470 - DNA, 15 bp, Homo sapiens
cactgcactcataag

SEQ ID NO: 23471 - DNA, 15 bp, Homo sapiens
ccactgcactcataa

SEQ ID NO: 23472 - DNA, 15 bp, Homo sapiens
tccactgcactcata

SEQ ID NO: 23473 - DNA, 15 bp, Homo sapiens
ttccactgcactcat

SEQ ID NO: 23474 - DNA, 15 bp, Homo sapiens
cttccactgcactca

SEQ ID NO: 23475 - DNA, 15 bp, Homo sapiens
ccttccactgcactc

SEQ ID NO: 23476 - DNA, 15 bp, Homo sapiens
tccttccactgcact

SEQ ID NO: 23477 - DNA, 15 bp, Homo sapiens
ttccttccactgcac

SEQ ID NO: 23478 - DNA, 15 bp, Homo sapiens
cttccttccactgca

SEQ ID NO: 23479 - DNA, 15 bp, Homo sapiens
gcttccttccactgc

SEQ ID NO: 23480 - DNA, 15 bp, Homo sapiens
ggcttccttccactg

SEQ ID NO: 23481 - DNA, 15 bp, Homo sapiens
tggcttccttccact

SEQ ID NO: 23482 - DNA, 15 bp, Homo sapiens
gtggcttccttccac

SEQ ID NO: 23483 - DNA, 15 bp, Homo sapiens
tgtggcttccttcca

SEQ ID NO: 23484 - DNA, 15 bp, Homo sapiens
gtgtggcttccttcc

SEQ ID NO: 23485 - DNA, 15 bp, Homo sapiens
tgtgtggcttccttc

SEQ ID NO: 23486 - DNA, 15 bp, Homo sapiens
gtgtgtggcttcctt

SEQ ID NO: 23487 - DNA, 15 bp, Homo sapiens
agtgtgtggcttcct

SEQ ID NO: 23488 - DNA, 15 bp, Homo sapiens
cagtgtgtggcttcc

SEQ ID NO: 23489 - DNA, 15 bp, Homo sapiens
ccagtgtgtggcttc

SEQ ID NO: 23490 - DNA, 15 bp, Homo sapiens
accagtgtgtggctt

SEQ ID NO: 23491 - DNA, 15 bp, Homo sapiens
gaccagtgtgtggct

SEQ ID NO: 23492 - DNA, 15 bp, Homo sapiens
tgaccagtgtgtggc

SEQ ID NO: 23493 - DNA, 15 bp, Homo sapiens
ctgaccagtgtgtgg

SEQ ID NO: 23494 - DNA, 15 bp, Homo sapiens
actgaccagtgtgtg

SEQ ID NO: 23495 - DNA, 15 bp, Homo sapiens
gactgaccagtgtgt

SEQ ID NO: 23496 - DNA, 15 bp, Homo sapiens
tgactgaccagtgtg

SEQ ID NO: 23497 - DNA, 15 bp, Homo sapiens
atgactgaccagtgt

SEQ ID NO: 23498 - DNA, 15 bp, Homo sapiens
aatgactgaccagtg

SEQ ID NO: 23499 - DNA, 15 bp, Homo sapiens
aaatgactgaccagt

SEQ ID NO: 23500 - DNA, 15 bp, Homo sapiens
gaaatgactgaccag

SEQ ID NO: 23501 - DNA, 15 bp, Homo sapiens
tgaaatgactgacca

SEQ ID NO: 23502 - DNA, 15 bp, Homo sapiens
ctgaaatgactgacc

SEQ ID NO: 23503 - DNA, 15 bp, Homo sapiens
tctgaaatgactgac

SEQ ID NO: 23504 - DNA, 15 bp, Homo sapiens
ctctgaaatgactga

SEQ ID NO: 23505 - DNA, 15 bp, Homo sapiens
cctctgaaatgactg

SEQ ID NO: 23506 - DNA, 15 bp, Homo sapiens
gcctctgaaatgact

SEQ ID NO: 23507 - DNA, 15 bp, Homo sapiens
tgcctctgaaatgac

SEQ ID NO: 23508 - DNA, 15 bp, Homo sapiens
ctgcctctgaaatga

SEQ ID NO: 23509 - DNA, 15 bp, Homo sapiens
gctgcctctgaaatg

SEQ ID NO: 23510 - DNA, 15 bp, Homo sapiens
tgctgcctctgaaat

SEQ ID NO: 23511 - DNA, 15 bp, Homo sapiens
ctgctgcctctgaaa

SEQ ID NO: 23512 - DNA, 15 bp, Homo sapiens
tctgctgcctctgaa

SEQ ID NO: 23513 - DNA, 15 bp, Homo sapiens
atctgctgcctctga

SEQ ID NO: 23514 - DNA, 15 bp, Homo sapiens
catctgctgcctctg

SEQ ID NO: 23515 - DNA, 15 bp, Homo sapiens
gcatctgctgcctct

SEQ ID NO: 23516 - DNA, 15 bp, Homo sapiens
ggcatctgctgcctc

SEQ ID NO: 23517 - DNA, 15 bp, Homo sapiens
gggcatctgctgcct

SEQ ID NO: 23518 - DNA, 15 bp, Homo sapiens
tgggcatctgctgcc

SEQ ID NO: 23519 - DNA, 15 bp, Homo sapiens
ctgggcatctgctgc

SEQ ID NO: 23520 - DNA, 15 bp, Homo sapiens
cctgggcatctgctg

SEQ ID NO: 23521 - DNA, 15 bp, Homo sapiens
ccctgggcatctgct

SEQ ID NO: 23522 - DNA, 15 bp, Homo sapiens
tccctgggcatctgc

SEQ ID NO: 23523 - DNA, 15 bp, Homo sapiens
ctccctgggcatctg

SEQ ID NO: 23524 - DNA, 15 bp, Homo sapiens
tctccctgggcatct

SEQ ID NO: 23525 - DNA, 15 bp, Homo sapiens
gtctccctgggcatc

SEQ ID NO: 23526 - DNA, 15 bp, Homo sapiens
ggtctccctgggcat

SEQ ID NO: 23527 - DNA, 15 bp, Homo sapiens
gggtctccctgggca

SEQ ID NO: 23528 - DNA, 15 bp, Homo sapiens
tgggtctccctgggc

SEQ ID NO: 23529 - DNA, 15 bp, Homo sapiens
ttgggtctccctggg

SEQ ID NO: 23530 - DNA, 15 bp, Homo sapiens
cttgggtctccctgg

SEQ ID NO: 23531 - DNA, 15 bp, Homo sapiens
tcttgggtctccctg

SEQ ID NO: 23532 - DNA, 15 bp, Homo sapiens
ttcttgggtctccct

SEQ ID NO: 23533 - DNA, 15 bp, Homo sapiens
tttcttgggtctccc

SEQ ID NO: 23534 - DNA, 15 bp, Homo sapiens
ctttcttgggtctcc

SEQ ID NO: 23535 - DNA, 15 bp, Homo sapiens
tctttcttgggtctc

SEQ ID NO: 23536 - DNA, 15 bp, Homo sapiens
ctctttcttgggtct

SEQ ID NO: 23537 - DNA, 15 bp, Homo sapiens
actctttcttgggtc

SEQ ID NO: 23538 - DNA, 15 bp, Homo sapiens
gactctttcttgggt

SEQ ID NO: 23539 - DNA, 15 bp, Homo sapiens
tgactctttcttggg

SEQ ID NO: 23540 - DNA, 15 bp, Homo sapiens
ctgactctttcttgg

SEQ ID NO: 23541 - DNA, 15 bp, Homo sapiens
cctgactctttcttg

SEQ ID NO: 23542 - DNA, 15 bp, Homo sapiens
acctgactctttctt

SEQ ID NO: 23543 - DNA, 15 bp, Homo sapiens
aacctgactctttct

SEQ ID NO: 23544 - DNA, 15 bp, Homo sapiens
taacctgactctttc

SEQ ID NO: 23545 - DNA, 15 bp, Homo sapiens
ctaacctgactcttt

SEQ ID NO: 23546 - DNA, 15 bp, Homo sapiens
cctaacctgactctt

SEQ ID NO: 23547 - DNA, 15 bp, Homo sapiens
ccctaacctgactct

SEQ ID NO: 23548 - DNA, 15 bp, Homo sapiens
tccctaacctgactc

SEQ ID NO: 23549 - DNA, 15 bp, Homo sapiens
ctccctaacctgact

SEQ ID NO: 23550 - DNA, 15 bp, Homo sapiens
gctccctaacctgac

SEQ ID NO: 23551 - DNA, 15 bp, Homo sapiens
tgctccctaacctga

SEQ ID NO: 23552 - DNA, 15 bp, Homo sapiens
ctgctccctaacctg

SEQ ID NO: 23553 - DNA, 15 bp, Homo sapiens
actgctccctaacct

SEQ ID NO: 23554 - DNA, 15 bp, Homo sapiens
cactgctccctaacc

SEQ ID NO: 23555 - DNA, 15 bp, Homo sapiens
tcactgctccctaac

SEQ ID NO: 23556 - DNA, 15 bp, Homo sapiens
ttcactgctccctaa

SEQ ID NO: 23557 - DNA, 15 bp, Homo sapiens
tttcactgctcccta

SEQ ID NO: 23558 - DNA, 15 bp, Homo sapiens
ctttcactgctccct

SEQ ID NO: 23559 - DNA, 15 bp, Homo sapiens
actttcactgctccc

SEQ ID NO: 23560 - DNA, 15 bp, Homo sapiens
cactttcactgctcc

SEQ ID NO: 23561 - DNA, 15 bp, Homo sapiens
tcactttcactgctc

SEQ ID NO: 23562 - DNA, 15 bp, Homo sapiens
ctcactttcactgct

SEQ ID NO: 23563 - DNA, 15 bp, Homo sapiens
cctcactttcactgc

SEQ ID NO: 23564 - DNA, 15 bp, Homo sapiens
tcctcactttcactg

SEQ ID NO: 23565 - DNA, 15 bp, Homo sapiens
ctcctcactttcact

SEQ ID NO: 23566 - DNA, 15 bp, Homo sapiens
cctcctcactttcac

SEQ ID NO: 23567 - DNA, 15 bp, Homo sapiens
ccctcctcactttca

SEQ ID NO: 23568 - DNA, 15 bp, Homo sapiens
tccctcctcactttc

SEQ ID NO: 23569 - DNA, 15 bp, Homo sapiens
ttccctcctcacttt

SEQ ID NO: 23570 - DNA, 15 bp, Homo sapiens
cttccctcctcactt

SEQ ID NO: 23571 - DNA, 15 bp, Homo sapiens
tcttccctcctcact

SEQ ID NO: 23572 - DNA, 15 bp, Homo sapiens
gtcttccctcctcac

SEQ ID NO: 23573 - DNA, 15 bp, Homo sapiens
tgtcttccctcctca

SEQ ID NO: 23574 - DNA, 15 bp, Homo sapiens
ttgtcttccctcctc

SEQ ID NO: 23575 - DNA, 15 bp, Homo sapiens
attgtcttccctcct

SEQ ID NO: 23576 - DNA, 15 bp, Homo sapiens
aattgtcttccctcc

SEQ ID NO: 23577 - DNA, 15 bp, Homo sapiens
gaattgtcttccctc

SEQ ID NO: 23578 - DNA, 15 bp, Homo sapiens
agaattgtcttccct

SEQ ID NO: 23579 - DNA, 15 bp, Homo sapiens
cagaattgtcttccc

SEQ ID NO: 23580 - DNA, 15 bp, Homo sapiens
acagaattgtcttcc

SEQ ID NO: 23581 - DNA, 15 bp, Homo sapiens
cacagaattgtcttc

SEQ ID NO: 23582 - DNA, 15 bp, Homo sapiens
tcacagaattgtctt

SEQ ID NO: 23583 - DNA, 15 bp, Homo sapiens
ttcacagaattgtct

SEQ ID NO: 23584 - DNA, 15 bp, Homo sapiens
gttcacagaattgtc

SEQ ID NO: 23585 - DNA, 15 bp, Homo sapiens
agttcacagaattgt

SEQ ID NO: 23586 - DNA, 15 bp, Homo sapiens
gagttcacagaattg

SEQ ID NO: 23587 - DNA, 15 bp, Homo sapiens
agagttcacagaatt

SEQ ID NO: 23588 - DNA, 15 bp, Homo sapiens
cagagttcacagaat

SEQ ID NO: 23589 - DNA, 15 bp, Homo sapiens
acagagttcacagaa

SEQ ID NO: 23590 - DNA, 15 bp, Homo sapiens
tacagagttcacaga

SEQ ID NO: 23591 - DNA, 15 bp, Homo sapiens
ttacagagttcacag

SEQ ID NO: 23592 - DNA, 15 bp, Homo sapiens
gttacagagttcaca

SEQ ID NO: 23593 - DNA, 15 bp, Homo sapiens
agttacagagttcac

SEQ ID NO: 23594 - DNA, 15 bp, Homo sapiens
gagttacagagttca

SEQ ID NO: 23595 - DNA, 15 bp, Homo sapiens
agagttacagagttc

SEQ ID NO: 23596 - DNA, 15 bp, Homo sapiens
aagagttacagagtt

SEQ ID NO: 23597 - DNA, 15 bp, Homo sapiens
taagagttacagagt

SEQ ID NO: 23598 - DNA, 15 bp, Homo sapiens
ttaagagttacagag

SEQ ID NO: 23599 - DNA, 15 bp, Homo sapiens
tttaagagttacaga

SEQ ID NO: 23600 - DNA, 15 bp, Homo sapiens
ttttaagagttacag

SEQ ID NO: 23601 - DNA, 15 bp, Homo sapiens
attttaagagttaca

SEQ ID NO: 23602 - DNA, 15 bp, Homo sapiens
aattttaagagttac

SEQ ID NO: 23603 - DNA, 15 bp, Homo sapiens
aaattttaagagtta

SEQ ID NO: 23604 - DNA, 15 bp, Homo sapiens
aaaattttaagagtt

SEQ ID NO: 23605 - DNA, 15 bp, Homo sapiens
aaaaattttaagagt

SEQ ID NO: 23606 - DNA, 15 bp, Homo sapiens
caaaaattttaagag

SEQ ID NO: 23607 - DNA, 15 bp, Homo sapiens
tcaaaaattttaaga

SEQ ID NO: 23608 - DNA, 15 bp, Homo sapiens
ttcaaaaattttaag

SEQ ID NO: 23609 - DNA, 15 bp, Homo sapiens
tttcaaaaattttaa

SEQ ID NO: 23610 - DNA, 15 bp, Homo sapiens
ttttcaaaaatttta

SEQ ID NO: 23611 - DNA, 15 bp, Homo sapiens
gttttcaaaaatttt

SEQ ID NO: 23612 - DNA, 15 bp, Homo sapiens
agttttcaaaaattt

SEQ ID NO: 23613 - DNA, 15 bp, Homo sapiens
gagttttcaaaaatt

SEQ ID NO: 23614 - DNA, 15 bp, Homo sapiens
ggagttttcaaaaat

SEQ ID NO: 23615 - DNA, 15 bp, Homo sapiens
tggagttttcaaaaa

SEQ ID NO: 23616 - DNA, 15 bp, Homo sapiens
atggagttttcaaaa

SEQ ID NO: 23617 - DNA, 15 bp, Homo sapiens
gatggagttttcaaa

SEQ ID NO: 23618 - DNA, 15 bp, Homo sapiens
cgatggagttttcaa

SEQ ID NO: 23619 - DNA, 15 bp, Homo sapiens
acgatggagttttca

SEQ ID NO: 23620 - DNA, 15 bp, Homo sapiens
aacgatggagttttc

SEQ ID NO: 23621 - DNA, 15 bp, Homo sapiens
taacgatggagtttt

SEQ ID NO: 23622 - DNA, 15 bp, Homo sapiens
ttaacgatggagttt

SEQ ID NO: 23623 - DNA, 15 bp, Homo sapiens
tttaacgatggagtt

SEQ ID NO: 23624 - DNA, 15 bp, Homo sapiens
gtttaacgatggagt

SEQ ID NO: 23625 - DNA, 15 bp, Homo sapiens
tgtttaacgatggag

SEQ ID NO: 23626 - DNA, 15 bp, Homo sapiens
ttgtttaacgatgga

SEQ ID NO: 23627 - DNA, 15 bp, Homo sapiens
gttgtttaacgatgg

SEQ ID NO: 23628 - DNA, 15 bp, Homo sapiens
agttgtttaacgatg

SEQ ID NO: 23629 - DNA, 15 bp, Homo sapiens
aagttgtttaacgat

SEQ ID NO: 23630 - DNA, 15 bp, Homo sapiens
aaagttgtttaacga

SEQ ID NO: 23631 - DNA, 15 bp, Homo sapiens
aaaagttgtttaacg

SEQ ID NO: 23632 - DNA, 15 bp, Homo sapiens
taaaagttgtttaac

SEQ ID NO: 23633 - DNA, 15 bp, Homo sapiens
ttaaaagttgtttaa

SEQ ID NO: 23634 - DNA, 15 bp, Homo sapiens
tttaaaagttgttta

SEQ ID NO: 23635 - DNA, 15 bp, Homo sapiens
ttttaaaagttgttt

SEQ ID NO: 23636 - DNA, 15 bp, Homo sapiens
cttttaaaagttgtt

SEQ ID NO: 23637 - DNA, 15 bp, Homo sapiens
tcttttaaaagttgt

SEQ ID NO: 23638 - DNA, 15 bp, Homo sapiens
ttcttttaaaagttg

SEQ ID NO: 23639 - DNA, 15 bp, Homo sapiens
tttcttttaaaagtt

SEQ ID NO: 23640 - DNA, 15 bp, Homo sapiens
atttcttttaaaagt

SEQ ID NO: 23641 - DNA, 15 bp, Homo sapiens
tatttcttttaaaag

SEQ ID NO: 23642 - DNA, 15 bp, Homo sapiens
ttatttcttttaaaa

SEQ ID NO: 23643 - DNA, 15 bp, Homo sapiens
gttatttcttttaaa

SEQ ID NO: 23644 - DNA, 15 bp, Homo sapiens
agttatttcttttaa

SEQ ID NO: 23645 - DNA, 15 bp, Homo sapiens
tagttatttctttta

SEQ ID NO: 23646 - DNA, 15 bp, Homo sapiens
ttagttatttctttt

SEQ ID NO: 23647 - DNA, 15 bp, Homo sapiens
tttagttatttcttt

SEQ ID NO: 23648 - DNA, 15 bp, Homo sapiens
atttagttatttctt

SEQ ID NO: 23649 - DNA, 15 bp, Homo sapiens
aatttagttatttct

SEQ ID NO: 23650 - DNA, 15 bp, Homo sapiens
aaatttagttatttc

SEQ ID NO: 23651 - DNA, 15 bp, Homo sapiens
aaaatttagttattt

SEQ ID NO: 23652 - DNA, 15 bp, Homo sapiens
gaaaatttagttatt

SEQ ID NO: 23653 - DNA, 15 bp, Homo sapiens
tgaaaatttagttat

SEQ ID NO: 23654 - DNA, 15 bp, Homo sapiens
ttgaaaatttagtta

SEQ ID NO: 23655 - DNA, 15 bp, Homo sapiens
tttgaaaatttagtt

SEQ ID NO: 23656 - DNA, 15 bp, Homo sapiens
atttgaaaatttagt

SEQ ID NO: 23657 - DNA, 15 bp, Homo sapiens
catttgaaaatttag

SEQ ID NO: 23658 - DNA, 15 bp, Homo sapiens
tcatttgaaaattta

SEQ ID NO: 23659 - DNA, 15 bp, Homo sapiens
ctcatttgaaaattt

SEQ ID NO: 23660 - DNA, 15 bp, Homo sapiens
actcatttgaaaatt

SEQ ID NO: 23661 - DNA, 15 bp, Homo sapiens
tactcatttgaaaat

SEQ ID NO: 23662 - DNA, 15 bp, Homo sapiens
ttactcatttgaaaa

SEQ ID NO: 23663 - DNA, 15 bp, Homo sapiens
cttactcatttgaaa

SEQ ID NO: 23664 - DNA, 15 bp, Homo sapiens
gcttactcatttgaa

SEQ ID NO: 23665 - DNA, 15 bp, Homo sapiens
tgcttactcatttga

SEQ ID NO: 23666 - DNA, 15 bp, Homo sapiens
ctgcttactcatttg

SEQ ID NO: 23667 - DNA, 15 bp, Homo sapiens
actgcttactcattt

SEQ ID NO: 23668 - DNA, 15 bp, Homo sapiens
cactgcttactcatt

SEQ ID NO: 23669 - DNA, 15 bp, Homo sapiens
gcactgcttactcat

SEQ ID NO: 23670 - DNA, 15 bp, Homo sapiens
ggcactgcttactca

SEQ ID NO: 23671 - DNA, 15 bp, Homo sapiens
tggcactgcttactc

SEQ ID NO: 23672 - DNA, 15 bp, Homo sapiens
gtggcactgcttact

SEQ ID NO: 23673 - DNA, 15 bp, Homo sapiens
ggtggcactgcttac

SEQ ID NO: 23674 - DNA, 15 bp, Homo sapiens
tggtggcactgctta

SEQ ID NO: 23675 - DNA, 15 bp, Homo sapiens
ttggtggcactgctt

SEQ ID NO: 23676 - DNA, 15 bp, Homo sapiens
gttggtggcactgct

SEQ ID NO: 23677 - DNA, 15 bp, Homo sapiens
agttggtggcactgc

SEQ ID NO: 23678 - DNA, 15 bp, Homo sapiens
tagttggtggcactg

SEQ ID NO: 23679 - DNA, 15 bp, Homo sapiens
ctagttggtggcact

SEQ ID NO: 23680 - DNA, 15 bp, Homo sapiens
actagttggtggcac

SEQ ID NO: 23681 - DNA, 15 bp, Homo sapiens
cactagttggtggca

SEQ ID NO: 23682 - DNA, 15 bp, Homo sapiens
acactagttggtggc

SEQ ID NO: 23683 - DNA, 15 bp, Homo sapiens
aacactagttggtgg

SEQ ID NO: 23684 - DNA, 15 bp, Homo sapiens
aaacactagttggtg

SEQ ID NO: 23685 - DNA, 15 bp, Homo sapiens
aaaacactagttggt

SEQ ID NO: 23686 - DNA, 15 bp, Homo sapiens
caaaacactagttgg

SEQ ID NO: 23687 - DNA, 15 bp, Homo sapiens
gcaaaacactagttg

SEQ ID NO: 23688 - DNA, 15 bp, Homo sapiens
ggcaaaacactagtt

SEQ ID NO: 23689 - DNA, 15 bp, Homo sapiens
gggcaaaacactagt

SEQ ID NO: 23690 - DNA, 15 bp, Homo sapiens
cgggcaaaacactag

SEQ ID NO: 23691 - DNA, 15 bp, Homo sapiens
tcgggcaaaacacta

SEQ ID NO: 23692 - DNA, 15 bp, Homo sapiens
atcgggcaaaacact

SEQ ID NO: 23693 - DNA, 15 bp, Homo sapiens
tatcgggcaaaacac

SEQ ID NO: 23694 - DNA, 15 bp, Homo sapiens
ctatcgggcaaaaca

SEQ ID NO: 23695 - DNA, 15 bp, Homo sapiens
tctatcgggcaaaac

SEQ ID NO: 23696 - DNA, 15 bp, Homo sapiens
ttctatcgggcaaaa

SEQ ID NO: 23697 - DNA, 15 bp, Homo sapiens
cttctatcgggcaaa

SEQ ID NO: 23698 - DNA, 15 bp, Homo sapiens
tcttctatcgggcaa

SEQ ID NO: 23699 - DNA, 15 bp, Homo sapiens
ctcttctatcgggca

SEQ ID NO: 23700 - DNA, 15 bp, Homo sapiens
gctcttctatcgggc

SEQ ID NO: 23701 - DNA, 15 bp, Homo sapiens
ggctcttctatcggg

SEQ ID NO: 23702 - DNA, 15 bp, Homo sapiens
tggctcttctatcgg

SEQ ID NO: 23703 - DNA, 15 bp, Homo sapiens
ctggctcttctatcg

SEQ ID NO: 23704 - DNA, 15 bp, Homo sapiens
gctggctcttctatc

SEQ ID NO: 23705 - DNA, 15 bp, Homo sapiens
tgctggctcttctat

SEQ ID NO: 23706 - DNA, 15 bp, Homo sapiens
atgctggctcttcta

SEQ ID NO: 23707 - DNA, 15 bp, Homo sapiens
catgctggctcttct

SEQ ID NO: 23708 - DNA, 15 bp, Homo sapiens
acatgctggctcttc

SEQ ID NO: 23709 - DNA, 15 bp, Homo sapiens
aacatgctggctctt

SEQ ID NO: 23710 - DNA, 15 bp, Homo sapiens
gaacatgctggctct

SEQ ID NO: 23711 - DNA, 15 bp, Homo sapiens
tgaacatgctggctc

SEQ ID NO: 23712 - DNA, 15 bp, Homo sapiens
gtgaacatgctggct

SEQ ID NO: 23713 - DNA, 15 bp, Homo sapiens
cgtgaacatgctggc

SEQ ID NO: 23714 - DNA, 15 bp, Homo sapiens
acgtgaacatgctgg

SEQ ID NO: 23715 - DNA, 15 bp, Homo sapiens
aacgtgaacatgctg

SEQ ID NO: 23716 - DNA, 15 bp, Homo sapiens
taacgtgaacatgct

SEQ ID NO: 23717 - DNA, 15 bp, Homo sapiens
ataacgtgaacatgc

SEQ ID NO: 23718 - DNA, 15 bp, Homo sapiens
aataacgtgaacatg

SEQ ID NO: 23719 - DNA, 15 bp, Homo sapiens
aaataacgtgaacat

SEQ ID NO: 23720 - DNA, 15 bp, Homo sapiens
taaataacgtgaaca

SEQ ID NO: 23721 - DNA, 15 bp, Homo sapiens
ttaaataacgtgaac

SEQ ID NO: 23722 - DNA, 15 bp, Homo sapiens
tttaaataacgtgaa

SEQ ID NO: 23723 - DNA, 15 bp, Homo sapiens
atttaaataacgtga

SEQ ID NO: 23724 - DNA, 15 bp, Homo sapiens
aatttaaataacgtg

SEQ ID NO: 23725 - DNA, 15 bp, Homo sapiens
taatttaaataacgt

SEQ ID NO: 23726 - DNA, 15 bp, Homo sapiens
ctaatttaaataacg

SEQ ID NO: 23727 - DNA, 15 bp, Homo sapiens
cctaatttaaataac

SEQ ID NO: 23728 - DNA, 15 bp, Homo sapiens
acctaatttaaataa

SEQ ID NO: 23729 - DNA, 15 bp, Homo sapiens
cacctaatttaaata

SEQ ID NO: 23730 - DNA, 15 bp, Homo sapiens
ccacctaatttaaat

SEQ ID NO: 23731 - DNA, 15 bp, Homo sapiens
tccacctaatttaaa

SEQ ID NO: 23732 - DNA, 15 bp, Homo sapiens
ttccacctaatttaa

SEQ ID NO: 23733 - DNA, 15 bp, Homo sapiens
tttccacctaattta

SEQ ID NO: 23734 - DNA, 15 bp, Homo sapiens
ttttccacctaattt

SEQ ID NO: 23735 - DNA, 15 bp, Homo sapiens
tttttccacctaatt

SEQ ID NO: 23736 - DNA, 15 bp, Homo sapiens
atttttccacctaat

SEQ ID NO: 23737 - DNA, 15 bp, Homo sapiens
gatttttccacctaa

SEQ ID NO: 23738 - DNA, 15 bp, Homo sapiens
agatttttccaccta

SEQ ID NO: 23739 - DNA, 15 bp, Homo sapiens
tagatttttccacct

SEQ ID NO: 23740 - DNA, 15 bp, Homo sapiens
ttagatttttccacc

SEQ ID NO: 23741 - DNA, 15 bp, Homo sapiens
tttagatttttccac

SEQ ID NO: 23742 - DNA, 15 bp, Homo sapiens
gtttagatttttcca

SEQ ID NO: 23743 - DNA, 15 bp, Homo sapiens
tgtttagatttttcc

SEQ ID NO: 23744 - DNA, 15 bp, Homo sapiens
atgtttagatttttc

SEQ ID NO: 23745 - DNA, 15 bp, Homo sapiens
aatgtttagattttt

SEQ ID NO: 23746 - DNA, 15 bp, Homo sapiens
aaatgtttagatttt

SEQ ID NO: 23747 - DNA, 15 bp, Homo sapiens
aaaatgtttagattt

SEQ ID NO: 23748 - DNA, 15 bp, Homo sapiens
aaaaatgtttagatt

SEQ ID NO: 23749 - DNA, 15 bp, Homo sapiens
taaaaatgtttagat

SEQ ID NO: 23750 - DNA, 15 bp, Homo sapiens
ataaaaatgtttaga

SEQ ID NO: 23751 - DNA, 15 bp, Homo sapiens
gataaaaatgtttag

SEQ ID NO: 23752 - DNA, 15 bp, Homo sapiens
agataaaaatgttta

SEQ ID NO: 23753 - DNA, 15 bp, Homo sapiens
aagataaaaatgttt

SEQ ID NO: 23754 - DNA, 15 bp, Homo sapiens
gaagataaaaatgtt

SEQ ID NO: 23755 - DNA, 15 bp, Homo sapiens
tgaagataaaaatgt

SEQ ID NO: 23756 - DNA, 15 bp, Homo sapiens
atgaagataaaaatg

SEQ ID NO: 23757 - DNA, 15 bp, Homo sapiens
tatgaagataaaaat

SEQ ID NO: 23758 - DNA, 15 bp, Homo sapiens
ttatgaagataaaaa

SEQ ID NO: 23759 - DNA, 15 bp, Homo sapiens
attatgaagataaaa

SEQ ID NO: 23760 - DNA, 15 bp, Homo sapiens
aattatgaagataaa

SEQ ID NO: 23761 - DNA, 15 bp, Homo sapiens
aaattatgaagataa

SEQ ID NO: 23762 - DNA, 15 bp, Homo sapiens
taaattatgaagata

SEQ ID NO: 23763 - DNA, 15 bp, Homo sapiens
ttaaattatgaagat

SEQ ID NO: 23764 - DNA, 15 bp, Homo sapiens
tttaaattatgaaga

SEQ ID NO: 23765 - DNA, 15 bp, Homo sapiens
ttttaaattatgaag

SEQ ID NO: 23766 - DNA, 15 bp, Homo sapiens
tttttaaattatgaa

SEQ ID NO: 23767 - DNA, 15 bp, Homo sapiens
ttttttaaattatga

SEQ ID NO: 23768 - DNA, 15 bp, Homo sapiens
attttttaaattatg

SEQ ID NO: 23769 - DNA, 15 bp, Homo sapiens
tattttttaaattat

SEQ ID NO: 23770 - DNA, 15 bp, Homo sapiens
atattttttaaatta

SEQ ID NO: 23771 - DNA, 15 bp, Homo sapiens
tatattttttaaatt

SEQ ID NO: 23772 - DNA, 15 bp, Homo sapiens
atatattttttaaat

SEQ ID NO: 23773 - DNA, 15 bp, Homo sapiens
tatatattttttaaa

SEQ ID NO: 23774 - DNA, 15 bp, Homo sapiens
atatatattttttaa

SEQ ID NO: 23775 - DNA, 15 bp, Homo sapiens
catatatatttttta

SEQ ID NO: 23776 - DNA, 15 bp, Homo sapiens
acatatatatttttt

SEQ ID NO: 23777 - DNA, 15 bp, Homo sapiens
tacatatatattttt

SEQ ID NO: 23778 - DNA, 15 bp, Homo sapiens
atacatatatatttt

SEQ ID NO: 23779 - DNA, 15 bp, Homo sapiens
tatacatatatattt

SEQ ID NO: 23780 - DNA, 15 bp, Homo sapiens
atatacatatatatt

SEQ ID NO: 23781 - DNA, 15 bp, Homo sapiens
tatatacatatatat

SEQ ID NO: 23782 - DNA, 15 bp, Homo sapiens
atatatacatatata

SEQ ID NO: 23783 - DNA, 15 bp, Homo sapiens
aatatatacatatat

SEQ ID NO: 23784 - DNA, 15 bp, Homo sapiens
caatatatacatata

SEQ ID NO: 23785 - DNA, 15 bp, Homo sapiens
gcaatatatacatat

SEQ ID NO: 23786 - DNA, 15 bp, Homo sapiens
tgcaatatatacata

SEQ ID NO: 23787 - DNA, 15 bp, Homo sapiens
atgcaatatatacat

SEQ ID NO: 23788 - DNA, 15 bp, Homo sapiens
tatgcaatatataca

SEQ ID NO: 23789 - DNA, 15 bp, Homo sapiens
atatgcaatatatac

SEQ ID NO: 23790 - DNA, 15 bp, Homo sapiens
aatatgcaatatata

SEQ ID NO: 23791 - DNA, 15 bp, Homo sapiens
gaatatgcaatatat

SEQ ID NO: 23792 - DNA, 15 bp, Homo sapiens
tgaatatgcaatata

SEQ ID NO: 23793 - DNA, 15 bp, Homo sapiens
gtgaatatgcaatat

SEQ ID NO: 23794 - DNA, 15 bp, Homo sapiens
agtgaatatgcaata

SEQ ID NO: 23795 - DNA, 15 bp, Homo sapiens
aagtgaatatgcaat

SEQ ID NO: 23796 - DNA, 15 bp, Homo sapiens
aaagtgaatatgcaa

SEQ ID NO: 23797 - DNA, 15 bp, Homo sapiens
aaaagtgaatatgca

SEQ ID NO: 23798 - DNA, 15 bp, Homo sapiens
aaaaagtgaatatgc

SEQ ID NO: 23799 - DNA, 15 bp, Homo sapiens
gaaaaagtgaatatg

SEQ ID NO: 23800 - DNA, 15 bp, Homo sapiens
ggaaaaagtgaatat

SEQ ID NO: 23801 - DNA, 15 bp, Homo sapiens
aggaaaaagtgaata

SEQ ID NO: 23802 - DNA, 15 bp, Homo sapiens
aaggaaaaagtgaat

SEQ ID NO: 23803 - DNA, 15 bp, Homo sapiens
aaaggaaaaagtgaa

SEQ ID NO: 23804 - DNA, 15 bp, Homo sapiens
taaaggaaaaagtga

SEQ ID NO: 23805 - DNA, 15 bp, Homo sapiens
ctaaaggaaaaagtg

SEQ ID NO: 23806 - DNA, 15 bp, Homo sapiens
cctaaaggaaaaagt

SEQ ID NO: 23807 - DNA, 15 bp, Homo sapiens
acctaaaggaaaaag

SEQ ID NO: 23808 - DNA, 15 bp, Homo sapiens
tacctaaaggaaaaa

SEQ ID NO: 23809 - DNA, 15 bp, Homo sapiens
ctacctaaaggaaaa

SEQ ID NO: 23810 - DNA, 15 bp, Homo sapiens
tctacctaaaggaaa

SEQ ID NO: 23811 - DNA, 15 bp, Homo sapiens
ctctacctaaaggaa

SEQ ID NO: 23812 - DNA, 15 bp, Homo sapiens
tctctacctaaagga

SEQ ID NO: 23813 - DNA, 15 bp, Homo sapiens
atctctacctaaagg

SEQ ID NO: 23814 - DNA, 15 bp, Homo sapiens
catctctacctaaag

SEQ ID NO: 23815 - DNA, 15 bp, Homo sapiens
tcatctctacctaaa

SEQ ID NO: 23816 - DNA, 15 bp, Homo sapiens
atcatctctacctaa

SEQ ID NO: 23817 - DNA, 15 bp, Homo sapiens
aatcatctctaccta

SEQ ID NO: 23818 - DNA, 15 bp, Homo sapiens
aaatcatctctacct

SEQ ID NO: 23819 - DNA, 15 bp, Homo sapiens
gaaatcatctctacc

SEQ ID NO: 23820 - DNA, 15 bp, Homo sapiens
tgaaatcatctctac

SEQ ID NO: 23821 - DNA, 15 bp, Homo sapiens
ttgaaatcatctcta

SEQ ID NO: 23822 - DNA, 15 bp, Homo sapiens
attgaaatcatctct

SEQ ID NO: 23823 - DNA, 15 bp, Homo sapiens
gattgaaatcatctc

SEQ ID NO: 23824 - DNA, 15 bp, Homo sapiens
ggattgaaatcatct

SEQ ID NO: 23825 - DNA, 15 bp, Homo sapiens
tggattgaaatcatc

SEQ ID NO: 23826 - DNA, 15 bp, Homo sapiens
ttggattgaaatcat

SEQ ID NO: 23827 - DNA, 15 bp, Homo sapiens
tttggattgaaatca

SEQ ID NO: 23828 - DNA, 15 bp, Homo sapiens
atttggattgaaatc

SEQ ID NO: 23829 - DNA, 15 bp, Homo sapiens
tatttggattgaaat

SEQ ID NO: 23830 - DNA, 15 bp, Homo sapiens
gtatttggattgaaa

SEQ ID NO: 23831 - DNA, 15 bp, Homo sapiens
agtatttggattgaa

SEQ ID NO: 23832 - DNA, 15 bp, Homo sapiens
gagtatttggattga

SEQ ID NO: 23833 - DNA, 15 bp, Homo sapiens
agagtatttggattg

SEQ ID NO: 23834 - DNA, 15 bp, Homo sapiens
aagagtatttggatt

SEQ ID NO: 23835 - DNA, 15 bp, Homo sapiens
taagagtatttggat

SEQ ID NO: 23836 - DNA, 15 bp, Homo sapiens
gtaagagtatttgga

SEQ ID NO: 23837 - DNA, 15 bp, Homo sapiens
agtaagagtatttgg

SEQ ID NO: 23838 - DNA, 15 bp, Homo sapiens
aagtaagagtatttg

SEQ ID NO: 23839 - DNA, 15 bp, Homo sapiens
aaagtaagagtattt

SEQ ID NO: 23840 - DNA, 15 bp, Homo sapiens
taaagtaagagtatt

SEQ ID NO: 23841 - DNA, 15 bp, Homo sapiens
ttaaagtaagagtat

SEQ ID NO: 23842 - DNA, 15 bp, Homo sapiens
tttaaagtaagagta

SEQ ID NO: 23843 - DNA, 15 bp, Homo sapiens
ttttaaagtaagagt

SEQ ID NO: 23844 - DNA, 15 bp, Homo sapiens
tttttaaagtaagag

SEQ ID NO: 23845 - DNA, 15 bp, Homo sapiens
ttttttaaagtaaga

SEQ ID NO: 23846 - DNA, 15 bp, Homo sapiens
attttttaaagtaag

SEQ ID NO: 23847 - DNA, 15 bp, Homo sapiens
aattttttaaagtaa

SEQ ID NO: 23848 - DNA, 15 bp, Homo sapiens
aaattttttaaagta

SEQ ID NO: 23849 - DNA, 15 bp, Homo sapiens
gaaattttttaaagt

SEQ ID NO: 23850 - DNA, 15 bp, Homo sapiens
ggaaattttttaaag

SEQ ID NO: 23851 - DNA, 15 bp, Homo sapiens
aggaaattttttaaa

SEQ ID NO: 23852 - DNA, 15 bp, Homo sapiens
aaggaaattttttaa

SEQ ID NO: 23853 - DNA, 15 bp, Homo sapiens
aaaggaaatttttta

SEQ ID NO: 23854 - DNA, 15 bp, Homo sapiens
gaaaggaaatttttt

SEQ ID NO: 23855 - DNA, 15 bp, Homo sapiens
ggaaaggaaattttt

SEQ ID NO: 23856 - DNA, 15 bp, Homo sapiens
gggaaaggaaatttt

SEQ ID NO: 23857 - DNA, 15 bp, Homo sapiens
ggggaaaggaaattt

SEQ ID NO: 23858 - DNA, 15 bp, Homo sapiens
tggggaaaggaaatt

SEQ ID NO: 23859 - DNA, 15 bp, Homo sapiens
ttggggaaaggaaat

SEQ ID NO: 23860 - DNA, 15 bp, Homo sapiens
cttggggaaaggaaa

SEQ ID NO: 23861 - DNA, 15 bp, Homo sapiens
tcttggggaaaggaa

SEQ ID NO: 23862 - DNA, 15 bp, Homo sapiens
ttcttggggaaagga

SEQ ID NO: 23863 - DNA, 15 bp, Homo sapiens
attcttggggaaagg

SEQ ID NO: 23864 - DNA, 15 bp, Homo sapiens
gattcttggggaaag

SEQ ID NO: 23865 - DNA, 15 bp, Homo sapiens
agattcttggggaaa

SEQ ID NO: 23866 - DNA, 15 bp, Homo sapiens
gagattcttggggaa

SEQ ID NO: 23867 - DNA, 15 bp, Homo sapiens
ggagattcttgggga

SEQ ID NO: 23868 - DNA, 15 bp, Homo sapiens
aggagattcttgggg

SEQ ID NO: 23869 - DNA, 15 bp, Homo sapiens
aaggagattcttggg

SEQ ID NO: 23870 - DNA, 15 bp, Homo sapiens
caaggagattcttgg

SEQ ID NO: 23871 - DNA, 15 bp, Homo sapiens
ccaaggagattcttg

SEQ ID NO: 23872 - DNA, 15 bp, Homo sapiens
cccaaggagattctt

SEQ ID NO: 23873 - DNA, 15 bp, Homo sapiens
tcccaaggagattct

SEQ ID NO: 23874 - DNA, 15 bp, Homo sapiens
gtcccaaggagattc

SEQ ID NO: 23875 - DNA, 15 bp, Homo sapiens
agtcccaaggagatt

SEQ ID NO: 23876 - DNA, 15 bp, Homo sapiens
aagtcccaaggagat

SEQ ID NO: 23877 - DNA, 15 bp, Homo sapiens
aaagtcccaaggaga

SEQ ID NO: 23878 - DNA, 15 bp, Homo sapiens
caaagtcccaaggag

SEQ ID NO: 23879 - DNA, 15 bp, Homo sapiens
tcaaagtcccaagga

SEQ ID NO: 23880 - DNA, 15 bp, Homo sapiens
gtcaaagtcccaagg

SEQ ID NO: 23881 - DNA, 15 bp, Homo sapiens
agtcaaagtcccaag

SEQ ID NO: 23882 - DNA, 15 bp, Homo sapiens
aagtcaaagtcccaa

SEQ ID NO: 23883 - DNA, 15 bp, Homo sapiens
taagtcaaagtccca

SEQ ID NO: 23884 - DNA, 15 bp, Homo sapiens
ataagtcaaagtccc

SEQ ID NO: 23885 - DNA, 15 bp, Homo sapiens
aataagtcaaagtcc

SEQ ID NO: 23886 - DNA, 15 bp, Homo sapiens
aaataagtcaaagtc

SEQ ID NO: 23887 - DNA, 15 bp, Homo sapiens
aaaataagtcaaagt

SEQ ID NO: 23888 - DNA, 15 bp, Homo sapiens
aaaaataagtcaaag

SEQ ID NO: 23889 - DNA, 15 bp, Homo sapiens
taaaaataagtcaaa

SEQ ID NO: 23890 - DNA, 15 bp, Homo sapiens
ttaaaaataagtcaa

SEQ ID NO: 23891 - DNA, 15 bp, Homo sapiens
tttaaaaataagtca

SEQ ID NO: 23892 - DNA, 15 bp, Homo sapiens
ctttaaaaataagtc

SEQ ID NO: 23893 - DNA, 15 bp, Homo sapiens
gctttaaaaataagt

SEQ ID NO: 23894 - DNA, 15 bp, Homo sapiens
agctttaaaaataag

SEQ ID NO: 23895 - DNA, 15 bp, Homo sapiens
cagctttaaaaataa

SEQ ID NO: 23896 - DNA, 15 bp, Homo sapiens
acagctttaaaaata

SEQ ID NO: 23897 - DNA, 15 bp, Homo sapiens
cacagctttaaaaat

SEQ ID NO: 23898 - DNA, 15 bp, Homo sapiens
acacagctttaaaaa

SEQ ID NO: 23899 - DNA, 15 bp, Homo sapiens
aacacagctttaaaa

SEQ ID NO: 23900 - DNA, 15 bp, Homo sapiens
caacacagctttaaa

SEQ ID NO: 23901 - DNA, 15 bp, Homo sapiens
ccaacacagctttaa

SEQ ID NO: 23902 - DNA, 15 bp, Homo sapiens
tccaacacagcttta

SEQ ID NO: 23903 - DNA, 15 bp, Homo sapiens
ctccaacacagcttt

SEQ ID NO: 23904 - DNA, 15 bp, Homo sapiens
gctccaacacagctt

SEQ ID NO: 23905 - DNA, 15 bp, Homo sapiens
agctccaacacagct

SEQ ID NO: 23906 - DNA, 15 bp, Homo sapiens
gagctccaacacagc

SEQ ID NO: 23907 - DNA, 15 bp, Homo sapiens
tgagctccaacacag

SEQ ID NO: 23908 - DNA, 15 bp, Homo sapiens
atgagctccaacaca

SEQ ID NO: 23909 - DNA, 15 bp, Homo sapiens
gatgagctccaacac

SEQ ID NO: 23910 - DNA, 15 bp, Homo sapiens
agatgagctccaaca

SEQ ID NO: 23911 - DNA, 15 bp, Homo sapiens
aagatgagctccaac

SEQ ID NO: 23912 - DNA, 15 bp, Homo sapiens
caagatgagctccaa

SEQ ID NO: 23913 - DNA, 15 bp, Homo sapiens
acaagatgagctcca

SEQ ID NO: 23914 - DNA, 15 bp, Homo sapiens
aacaagatgagctcc

SEQ ID NO: 23915 - DNA, 15 bp, Homo sapiens
gaacaagatgagctc

SEQ ID NO: 23916 - DNA, 15 bp, Homo sapiens
ggaacaagatgagct

SEQ ID NO: 23917 - DNA, 15 bp, Homo sapiens
gggaacaagatgagc

SEQ ID NO: 23918 - DNA, 15 bp, Homo sapiens
agggaacaagatgag

SEQ ID NO: 23919 - DNA, 15 bp, Homo sapiens
cagggaacaagatga

SEQ ID NO: 23920 - DNA, 15 bp, Homo sapiens
tcagggaacaagatg

SEQ ID NO: 23921 - DNA, 15 bp, Homo sapiens
atcagggaacaagat

SEQ ID NO: 23922 - DNA, 15 bp, Homo sapiens
catcagggaacaaga

SEQ ID NO: 23923 - DNA, 15 bp, Homo sapiens
acatcagggaacaag

SEQ ID NO: 23924 - DNA, 15 bp, Homo sapiens
cacatcagggaacaa

SEQ ID NO: 23925 - DNA, 15 bp, Homo sapiens
acacatcagggaaca

SEQ ID NO: 23926 - DNA, 15 bp, Homo sapiens
gacacatcagggaac

SEQ ID NO: 23927 - DNA, 15 bp, Homo sapiens
agacacatcagggaa

SEQ ID NO: 23928 - DNA, 15 bp, Homo sapiens
gagacacatcaggga

SEQ ID NO: 23929 - DNA, 15 bp, Homo sapiens
cgagacacatcaggg

SEQ ID NO: 23930 - DNA, 15 bp, Homo sapiens
tcgagacacatcagg

SEQ ID NO: 23931 - DNA, 15 bp, Homo sapiens
ctcgagacacatcag

SEQ ID NO: 23932 - DNA, 15 bp, Homo sapiens
gctcgagacacatca

SEQ ID NO: 23933 - DNA, 15 bp, Homo sapiens
ggctcgagacacatc

SEQ ID NO: 23934 - DNA, 15 bp, Homo sapiens
gggctcgagacacat

SEQ ID NO: 23935 - DNA, 15 bp, Homo sapiens
tgggctcgagacaca

SEQ ID NO: 23936 - DNA, 15 bp, Homo sapiens
atgggctcgagacac

SEQ ID NO: 23937 - DNA, 15 bp, Homo sapiens
aatgggctcgagaca

SEQ ID NO: 23938 - DNA, 15 bp, Homo sapiens
caatgggctcgagac

SEQ ID NO: 23939 - DNA, 15 bp, Homo sapiens
ccaatgggctcgaga

SEQ ID NO: 23940 - DNA, 15 bp, Homo sapiens
accaatgggctcgag

SEQ ID NO: 23941 - DNA, 15 bp, Homo sapiens
taccaatgggctcga

SEQ ID NO: 23942 - DNA, 15 bp, Homo sapiens
ctaccaatgggctcg

SEQ ID NO: 23943 - DNA, 15 bp, Homo sapiens
cctaccaatgggctc

SEQ ID NO: 23944 - DNA, 15 bp, Homo sapiens
ccctaccaatgggct

SEQ ID NO: 23945 - DNA, 15 bp, Homo sapiens
accctaccaatgggc

SEQ ID NO: 23946 - DNA, 15 bp, Homo sapiens
gaccctaccaatggg

SEQ ID NO: 23947 - DNA, 15 bp, Homo sapiens
tgaccctaccaatgg

SEQ ID NO: 23948 - DNA, 15 bp, Homo sapiens
atgaccctaccaatg

SEQ ID NO: 23949 - DNA, 15 bp, Homo sapiens
tatgaccctaccaat

SEQ ID NO: 23950 - DNA, 15 bp, Homo sapiens
gtatgaccctaccaa

SEQ ID NO: 23951 - DNA, 15 bp, Homo sapiens
tgtatgaccctacca

SEQ ID NO: 23952 - DNA, 15 bp, Homo sapiens
ttgtatgaccctacc

SEQ ID NO: 23953 - DNA, 15 bp, Homo sapiens
tttgtatgaccctac

SEQ ID NO: 23954 - DNA, 15 bp, Homo sapiens
ctttgtatgacccta

SEQ ID NO: 23955 - DNA, 15 bp, Homo sapiens
gctttgtatgaccct

SEQ ID NO: 23956 - DNA, 15 bp, Homo sapiens
ggctttgtatgaccc

SEQ ID NO: 23957 - DNA, 15 bp, Homo sapiens
gggctttgtatgacc

SEQ ID NO: 23958 - DNA, 15 bp, Homo sapiens
tgggctttgtatgac

SEQ ID NO: 23959 - DNA, 15 bp, Homo sapiens
gtgggctttgtatga

SEQ ID NO: 23960 - DNA, 15 bp, Homo sapiens
cgtgggctttgtatg

SEQ ID NO: 23961 - DNA, 15 bp, Homo sapiens
ccgtgggctttgtat

SEQ ID NO: 23962 - DNA, 15 bp, Homo sapiens
accgtgggctttgta

SEQ ID NO: 23963 - DNA, 15 bp, Homo sapiens
aaccgtgggctttgt

SEQ ID NO: 23964 - DNA, 15 bp, Homo sapiens
taaccgtgggctttg

SEQ ID NO: 23965 - DNA, 15 bp, Homo sapiens
gtaaccgtgggcttt

SEQ ID NO: 23966 - DNA, 15 bp, Homo sapiens
tgtaaccgtgggctt

SEQ ID NO: 23967 - DNA, 15 bp, Homo sapiens
ttgtaaccgtgggct

SEQ ID NO: 23968 - DNA, 15 bp, Homo sapiens
cttgtaaccgtgggc

SEQ ID NO: 23969 - DNA, 15 bp, Homo sapiens
gcttgtaaccgtggg

SEQ ID NO: 23970 - DNA, 15 bp, Homo sapiens
tgcttgtaaccgtgg

SEQ ID NO: 23971 - DNA, 15 bp, Homo sapiens
ctgcttgtaaccgtg

SEQ ID NO: 23972 - DNA, 15 bp, Homo sapiens
actgcttgtaaccgt

SEQ ID NO: 23973 - DNA, 15 bp, Homo sapiens
cactgcttgtaaccg

SEQ ID NO: 23974 - DNA, 15 bp, Homo sapiens
ccactgcttgtaacc

SEQ ID NO: 23975 - DNA, 15 bp, Homo sapiens
accactgcttgtaac

SEQ ID NO: 23976 - DNA, 15 bp, Homo sapiens
taccactgcttgtaa

SEQ ID NO: 23977 - DNA, 15 bp, Homo sapiens
ctaccactgcttgta

SEQ ID NO: 23978 - DNA, 15 bp, Homo sapiens
cctaccactgcttgt

SEQ ID NO: 23979 - DNA, 15 bp, Homo sapiens
tcctaccactgcttg

SEQ ID NO: 23980 - DNA, 15 bp, Homo sapiens
atcctaccactgctt

SEQ ID NO: 23981 - DNA, 15 bp, Homo sapiens
aatcctaccactgct

SEQ ID NO: 23982 - DNA, 15 bp, Homo sapiens
caatcctaccactgc

SEQ ID NO: 23983 - DNA, 15 bp, Homo sapiens
gcaatcctaccactg

SEQ ID NO: 23984 - DNA, 15 bp, Homo sapiens
tgcaatcctaccact

SEQ ID NO: 23985 - DNA, 15 bp, Homo sapiens
ctgcaatcctaccac

SEQ ID NO: 23986 - DNA, 15 bp, Homo sapiens
gctgcaatcctacca

SEQ ID NO: 23987 - DNA, 15 bp, Homo sapiens
ggctgcaatcctacc

SEQ ID NO: 23988 - DNA, 15 bp, Homo sapiens
cggctgcaatcctac

SEQ ID NO: 23989 - DNA, 15 bp, Homo sapiens
acggctgcaatccta

SEQ ID NO: 23990 - DNA, 15 bp, Homo sapiens
cacggctgcaatcct

SEQ ID NO: 23991 - DNA, 15 bp, Homo sapiens
ccacggctgcaatcc

SEQ ID NO: 23992 - DNA, 15 bp, Homo sapiens
cccacggctgcaatc

SEQ ID NO: 23993 - DNA, 15 bp, Homo sapiens
gcccacggctgcaat

SEQ ID NO: 23994 - DNA, 15 bp, Homo sapiens
ggcccacggctgcaa

SEQ ID NO: 23995 - DNA, 15 bp, Homo sapiens
aggcccacggctgca

SEQ ID NO: 23996 - DNA, 15 bp, Homo sapiens
caggcccacggctgc

SEQ ID NO: 23997 - DNA, 15 bp, Homo sapiens
gcaggcccacggctg

SEQ ID NO: 23998 - DNA, 15 bp, Homo sapiens
agcaggcccacggct

SEQ ID NO: 23999 - DNA, 15 bp, Homo sapiens
cagcaggcccacggc

SEQ ID NO: 24000 - DNA, 15 bp, Homo sapiens
ccagcaggcccacgg

SEQ ID NO: 24001 - DNA, 15 bp, Homo sapiens
tccagcaggcccacg

SEQ ID NO: 24002 - DNA, 15 bp, Homo sapiens
gtccagcaggcccac

SEQ ID NO: 24003 - DNA, 15 bp, Homo sapiens
tgtccagcaggccca

SEQ ID NO: 24004 - DNA, 15 bp, Homo sapiens
gtgtccagcaggccc

SEQ ID NO: 24005 - DNA, 15 bp, Homo sapiens
tgtgtccagcaggcc

SEQ ID NO: 24006 - DNA, 15 bp, Homo sapiens
gtgtgtccagcaggc

SEQ ID NO: 24007 - DNA, 15 bp, Homo sapiens
tgtgtgtccagcagg

SEQ ID NO: 24008 - DNA, 15 bp, Homo sapiens
gtgtgtgtccagcag

SEQ ID NO: 24009 - DNA, 15 bp, Homo sapiens
tgtgtgtgtccagca

SEQ ID NO: 24010 - DNA, 15 bp, Homo sapiens
atgtgtgtgtccagc

SEQ ID NO: 24011 - DNA, 15 bp, Homo sapiens
tatgtgtgtgtccag

SEQ ID NO: 24012 - DNA, 15 bp, Homo sapiens
gtatgtgtgtgtcca

SEQ ID NO: 24013 - DNA, 15 bp, Homo sapiens
tgtatgtgtgtgtcc

SEQ ID NO: 24014 - DNA, 15 bp, Homo sapiens
gtgtatgtgtgtgtc

SEQ ID NO: 24015 - DNA, 15 bp, Homo sapiens
ggtgtatgtgtgtgt

SEQ ID NO: 24016 - DNA, 15 bp, Homo sapiens
tggtgtatgtgtgtg

SEQ ID NO: 24017 - DNA, 15 bp, Homo sapiens
ttggtgtatgtgtgt

SEQ ID NO: 24018 - DNA, 15 bp, Homo sapiens
tttggtgtatgtgtg

SEQ ID NO: 24019 - DNA, 15 bp, Homo sapiens
ctttggtgtatgtgt

SEQ ID NO: 24020 - DNA, 15 bp, Homo sapiens
tctttggtgtatgtg

SEQ ID NO: 24021 - DNA, 15 bp, Homo sapiens
atctttggtgtatgt

SEQ ID NO: 24022 - DNA, 15 bp, Homo sapiens
catctttggtgtatg

SEQ ID NO: 24023 - DNA, 15 bp, Homo sapiens
acatctttggtgtat

SEQ ID NO: 24024 - DNA, 15 bp, Homo sapiens
tacatctttggtgta

SEQ ID NO: 24025 - DNA, 15 bp, Homo sapiens
atacatctttggtgt

SEQ ID NO: 24026 - DNA, 15 bp, Homo sapiens
aatacatctttggtg

SEQ ID NO: 24027 - DNA, 15 bp, Homo sapiens
aaatacatctttggt

SEQ ID NO: 24028 - DNA, 15 bp, Homo sapiens
caaatacatctttgg

SEQ ID NO: 24029 - DNA, 15 bp, Homo sapiens
ccaaatacatctttg

SEQ ID NO: 24030 - DNA, 15 bp, Homo sapiens
tccaaatacatcttt

SEQ ID NO: 24031 - DNA, 15 bp, Homo sapiens
atccaaatacatctt

SEQ ID NO: 24032 - DNA, 15 bp, Homo sapiens
gatccaaatacatct

SEQ ID NO: 24033 - DNA, 15 bp, Homo sapiens
agatccaaatacatc

SEQ ID NO: 24034 - DNA, 15 bp, Homo sapiens
cagatccaaatacat

SEQ ID NO: 24035 - DNA, 15 bp, Homo sapiens
ccagatccaaataca

SEQ ID NO: 24036 - DNA, 15 bp, Homo sapiens
cccagatccaaatac

SEQ ID NO: 24037 - DNA, 15 bp, Homo sapiens
gcccagatccaaata

SEQ ID NO: 24038 - DNA, 15 bp, Homo sapiens
tgcccagatccaaat

SEQ ID NO: 24039 - DNA, 15 bp, Homo sapiens
gtgcccagatccaaa

SEQ ID NO: 24040 - DNA, 15 bp, Homo sapiens
ggtgcccagatccaa

SEQ ID NO: 24041 - DNA, 15 bp, Homo sapiens
gggtgcccagatcca

SEQ ID NO: 24042 - DNA, 15 bp, Homo sapiens
ggggtgcccagatcc

SEQ ID NO: 24043 - DNA, 15 bp, Homo sapiens
gggggtgcccagatc

SEQ ID NO: 24044 - DNA, 15 bp, Homo sapiens
agggggtgcccagat

SEQ ID NO: 24045 - DNA, 15 bp, Homo sapiens
gagggggtgcccaga

SEQ ID NO: 24046 - DNA, 15 bp, Homo sapiens
ggagggggtgcccag

SEQ ID NO: 24047 - DNA, 15 bp, Homo sapiens
gggagggggtgccca

SEQ ID NO: 24048 - DNA, 15 bp, Homo sapiens
tgggagggggtgccc

SEQ ID NO: 24049 - DNA, 15 bp, Homo sapiens
ctgggagggggtgcc

SEQ ID NO: 24050 - DNA, 15 bp, Homo sapiens
cctgggagggggtgc

SEQ ID NO: 24051 - DNA, 15 bp, Homo sapiens
tcctgggagggggtg

SEQ ID NO: 24052 - DNA, 15 bp, Homo sapiens
atcctgggagggggt

SEQ ID NO: 24053 - DNA, 15 bp, Homo sapiens
gatcctgggaggggg

SEQ ID NO: 24054 - DNA, 15 bp, Homo sapiens
ggatcctgggagggg

SEQ ID NO: 24055 - DNA, 15 bp, Homo sapiens
gggatcctgggaggg

SEQ ID NO: 24056 - DNA, 15 bp, Homo sapiens
agggatcctgggagg

SEQ ID NO: 24057 - DNA, 15 bp, Homo sapiens
cagggatcctgggag

SEQ ID NO: 24058 - DNA, 15 bp, Homo sapiens
acagggatcctggga

SEQ ID NO: 24059 - DNA, 15 bp, Homo sapiens
tacagggatcctggg

SEQ ID NO: 24060 - DNA, 15 bp, Homo sapiens
gtacagggatcctgg

SEQ ID NO: 24061 - DNA, 15 bp, Homo sapiens
agtacagggatcctg

SEQ ID NO: 24062 - DNA, 15 bp, Homo sapiens
gagtacagggatcct

SEQ ID NO: 24063 - DNA, 15 bp, Homo sapiens
tgagtacagggatcc

SEQ ID NO: 24064 - DNA, 15 bp, Homo sapiens
gtgagtacagggatc

SEQ ID NO: 24065 - DNA, 15 bp, Homo sapiens
cgtgagtacagggat

SEQ ID NO: 24066 - DNA, 15 bp, Homo sapiens
acgtgagtacaggga

SEQ ID NO: 24067 - DNA, 15 bp, Homo sapiens
cacgtgagtacaggg

SEQ ID NO: 24068 - DNA, 15 bp, Homo sapiens
gcacgtgagtacagg

SEQ ID NO: 24069 - DNA, 15 bp, Homo sapiens
ggcacgtgagtacag

SEQ ID NO: 24070 - DNA, 15 bp, Homo sapiens
tggcacgtgagtaca

SEQ ID NO: 24071 - DNA, 15 bp, Homo sapiens
ctggcacgtgagtac

SEQ ID NO: 24072 - DNA, 15 bp, Homo sapiens
actggcacgtgagta

SEQ ID NO: 24073 - DNA, 15 bp, Homo sapiens
gactggcacgtgagt

SEQ ID NO: 24074 - DNA, 15 bp, Homo sapiens
agactggcacgtgag

SEQ ID NO: 24075 - DNA, 15 bp, Homo sapiens
gagactggcacgtga

SEQ ID NO: 24076 - DNA, 15 bp, Homo sapiens
ggagactggcacgtg

SEQ ID NO: 24077 - DNA, 15 bp, Homo sapiens
aggagactggcacgt

SEQ ID NO: 24078 - DNA, 15 bp, Homo sapiens
caggagactggcacg

SEQ ID NO: 24079 - DNA, 15 bp, Homo sapiens
tcaggagactggcac

SEQ ID NO: 24080 - DNA, 15 bp, Homo sapiens
gtcaggagactggca

SEQ ID NO: 24081 - DNA, 15 bp, Homo sapiens
agtcaggagactggc

SEQ ID NO: 24082 - DNA, 15 bp, Homo sapiens
tagtcaggagactgg

SEQ ID NO: 24083 - DNA, 15 bp, Homo sapiens
ctagtcaggagactg

SEQ ID NO: 24084 - DNA, 15 bp, Homo sapiens
tctagtcaggagact

SEQ ID NO: 24085 - DNA, 15 bp, Homo sapiens
ctctagtcaggagac

SEQ ID NO: 24086 - DNA, 15 bp, Homo sapiens
gctctagtcaggaga

SEQ ID NO: 24087 - DNA, 15 bp, Homo sapiens
tgctctagtcaggag

SEQ ID NO: 24088 - DNA, 15 bp, Homo sapiens
gtgctctagtcagga

SEQ ID NO: 24089 - DNA, 15 bp, Homo sapiens
agtgctctagtcagg

SEQ ID NO: 24090 - DNA, 15 bp, Homo sapiens
aagtgctctagtcag

SEQ ID NO: 24091 - DNA, 15 bp, Homo sapiens
aaagtgctctagtca

SEQ ID NO: 24092 - DNA, 15 bp, Homo sapiens
taaagtgctctagtc

SEQ ID NO: 24093 - DNA, 15 bp, Homo sapiens
gtaaagtgctctagt

SEQ ID NO: 24094 - DNA, 15 bp, Homo sapiens
agtaaagtgctctag

SEQ ID NO: 24095 - DNA, 15 bp, Homo sapiens
gagtaaagtgctcta

SEQ ID NO: 24096 - DNA, 15 bp, Homo sapiens
agagtaaagtgctct

SEQ ID NO: 24097 - DNA, 15 bp, Homo sapiens
cagagtaaagtgctc

SEQ ID NO: 24098 - DNA, 15 bp, Homo sapiens
acagagtaaagtgct

SEQ ID NO: 24099 - DNA, 15 bp, Homo sapiens
aacagagtaaagtgc

SEQ ID NO: 24100 - DNA, 15 bp, Homo sapiens
aaacagagtaaagtg

SEQ ID NO: 24101 - DNA, 15 bp, Homo sapiens
gaaacagagtaaagt

SEQ ID NO: 24102 - DNA, 15 bp, Homo sapiens
ggaaacagagtaaag

SEQ ID NO: 24103 - DNA, 15 bp, Homo sapiens
aggaaacagagtaaa

SEQ ID NO: 24104 - DNA, 15 bp, Homo sapiens
gaggaaacagagtaa

SEQ ID NO: 24105 - DNA, 15 bp, Homo sapiens
tgaggaaacagagta

SEQ ID NO: 24106 - DNA, 15 bp, Homo sapiens
ctgaggaaacagagt

SEQ ID NO: 24107 - DNA, 15 bp, Homo sapiens
gctgaggaaacagag

SEQ ID NO: 24108 - DNA, 15 bp, Homo sapiens
ggctgaggaaacaga

SEQ ID NO: 24109 - DNA, 15 bp, Homo sapiens
gggctgaggaaacag

SEQ ID NO: 24110 - DNA, 15 bp, Homo sapiens
agggctgaggaaaca

SEQ ID NO: 24111 - DNA, 15 bp, Homo sapiens
cagggctgaggaaac

SEQ ID NO: 24112 - DNA, 15 bp, Homo sapiens
gcagggctgaggaaa

SEQ ID NO: 24113 - DNA, 15 bp, Homo sapiens
tgcagggctgaggaa

SEQ ID NO: 24114 - DNA, 15 bp, Homo sapiens
ctgcagggctgagga

SEQ ID NO: 24115 - DNA, 15 bp, Homo sapiens
gctgcagggctgagg

SEQ ID NO: 24116 - DNA, 15 bp, Homo sapiens
ggctgcagggctgag

SEQ ID NO: 24117 - DNA, 15 bp, Homo sapiens
gggctgcagggctga

SEQ ID NO: 24118 - DNA, 15 bp, Homo sapiens
ggggctgcagggctg

SEQ ID NO: 24119 - DNA, 15 bp, Homo sapiens
aggggctgcagggct

SEQ ID NO: 24120 - DNA, 15 bp, Homo sapiens
caggggctgcagggc

SEQ ID NO: 24121 - DNA, 15 bp, Homo sapiens
ccaggggctgcaggg

SEQ ID NO: 24122 - DNA, 15 bp, Homo sapiens
cccaggggctgcagg

SEQ ID NO: 24123 - DNA, 15 bp, Homo sapiens
tcccaggggctgcag

SEQ ID NO: 24124 - DNA, 15 bp, Homo sapiens
ctcccaggggctgca

SEQ ID NO: 24125 - DNA, 15 bp, Homo sapiens
gctcccaggggctgc

SEQ ID NO: 24126 - DNA, 15 bp, Homo sapiens
tgctcccaggggctg

SEQ ID NO: 24127 - DNA, 15 bp, Homo sapiens
gtgctcccaggggct

SEQ ID NO: 24128 - DNA, 15 bp, Homo sapiens
tgtgctcccaggggc

SEQ ID NO: 24129 - DNA, 15 bp, Homo sapiens
gtgtgctcccagggg

SEQ ID NO: 24130 - DNA, 15 bp, Homo sapiens
tgtgtgctcccaggg

SEQ ID NO: 24131 - DNA, 15 bp, Homo sapiens
gtgtgtgctcccagg

SEQ ID NO: 24132 - DNA, 15 bp, Homo sapiens
agtgtgtgctcccag

SEQ ID NO: 24133 - DNA, 15 bp, Homo sapiens
cagtgtgtgctccca

SEQ ID NO: 24134 - DNA, 15 bp, Homo sapiens
ccagtgtgtgctccc

SEQ ID NO: 24135 - DNA, 15 bp, Homo sapiens
cccagtgtgtgctcc

SEQ ID NO: 24136 - DNA, 15 bp, Homo sapiens
acccagtgtgtgctc

SEQ ID NO: 24137 - DNA, 15 bp, Homo sapiens
cacccagtgtgtgct

SEQ ID NO: 24138 - DNA, 15 bp, Homo sapiens
gcacccagtgtgtgc

SEQ ID NO: 24139 - DNA, 15 bp, Homo sapiens
tgcacccagtgtgtg

SEQ ID NO: 24140 - DNA, 15 bp, Homo sapiens
ctgcacccagtgtgt

SEQ ID NO: 24141 - DNA, 15 bp, Homo sapiens
gctgcacccagtgtg

SEQ ID NO: 24142 - DNA, 15 bp, Homo sapiens
ggctgcacccagtgt

SEQ ID NO: 24143 - DNA, 15 bp, Homo sapiens
gggctgcacccagtg

SEQ ID NO: 24144 - DNA, 15 bp, Homo sapiens
agggctgcacccagt

SEQ ID NO: 24145 - DNA, 15 bp, Homo sapiens
cagggctgcacccag

SEQ ID NO: 24146 - DNA, 15 bp, Homo sapiens
ccagggctgcaccca

SEQ ID NO: 24147 - DNA, 15 bp, Homo sapiens
cccagggctgcaccc

SEQ ID NO: 24148 - DNA, 15 bp, Homo sapiens
gcccagggctgcacc

SEQ ID NO: 24149 - DNA, 15 bp, Homo sapiens
ggcccagggctgcac

SEQ ID NO: 24150 - DNA, 15 bp, Homo sapiens
tggcccagggctgca

SEQ ID NO: 24151 - DNA, 15 bp, Homo sapiens
ctggcccagggctgc

SEQ ID NO: 24152 - DNA, 15 bp, Homo sapiens
cctggcccagggctg

SEQ ID NO: 24153 - DNA, 15 bp, Homo sapiens
gcctggcccagggct

SEQ ID NO: 24154 - DNA, 15 bp, Homo sapiens
tgcctggcccagggc

SEQ ID NO: 24155 - DNA, 15 bp, Homo sapiens
gtgcctggcccaggg

SEQ ID NO: 24156 - DNA, 15 bp, Homo sapiens
cgtgcctggcccagg

SEQ ID NO: 24157 - DNA, 15 bp, Homo sapiens
ccgtgcctggcccag

SEQ ID NO: 24158 - DNA, 15 bp, Homo sapiens
cccgtgcctggccca

SEQ ID NO: 24159 - DNA, 15 bp, Homo sapiens
tcccgtgcctggccc

SEQ ID NO: 24160 - DNA, 15 bp, Homo sapiens
ctcccgtgcctggcc

SEQ ID NO: 24161 - DNA, 15 bp, Homo sapiens
cctcccgtgcctggc

SEQ ID NO: 24162 - DNA, 15 bp, Homo sapiens
gcctcccgtgcctgg

SEQ ID NO: 24163 - DNA, 15 bp, Homo sapiens
ggcctcccgtgcctg

SEQ ID NO: 24164 - DNA, 15 bp, Homo sapiens
gggcctcccgtgcct

SEQ ID NO: 24165 - DNA, 15 bp, Homo sapiens
agggcctcccgtgcc

SEQ ID NO: 24166 - DNA, 15 bp, Homo sapiens
cagggcctcccgtgc

SEQ ID NO: 24167 - DNA, 15 bp, Homo sapiens
gcagggcctcccgtg

SEQ ID NO: 24168 - DNA, 15 bp, Homo sapiens
ggcagggcctcccgt

SEQ ID NO: 24169 - DNA, 15 bp, Homo sapiens
gggcagggcctcccg

SEQ ID NO: 24170 - DNA, 15 bp, Homo sapiens
agggcagggcctccc

SEQ ID NO: 24171 - DNA, 15 bp, Homo sapiens
cagggcagggcctcc

SEQ ID NO: 24172 - DNA, 15 bp, Homo sapiens
acagggcagggcctc

SEQ ID NO: 24173 - DNA, 15 bp, Homo sapiens
cacagggcagggcct

SEQ ID NO: 24174 - DNA, 15 bp, Homo sapiens
gcacagggcagggcc

SEQ ID NO: 24175 - DNA, 15 bp, Homo sapiens
agcacagggcagggc

SEQ ID NO: 24176 - DNA, 15 bp, Homo sapiens
cagcacagggcaggg

SEQ ID NO: 24177 - DNA, 15 bp, Homo sapiens
gcagcacagggcagg

SEQ ID NO: 24178 - DNA, 15 bp, Homo sapiens
ggcagcacagggcag

SEQ ID NO: 24179 - DNA, 15 bp, Homo sapiens
gggcagcacagggca

SEQ ID NO: 24180 - DNA, 15 bp, Homo sapiens
tgggcagcacagggc

SEQ ID NO: 24181 - DNA, 15 bp, Homo sapiens
ctgggcagcacaggg

SEQ ID NO: 24182 - DNA, 15 bp, Homo sapiens
cctgggcagcacagg

SEQ ID NO: 24183 - DNA, 15 bp, Homo sapiens
ccctgggcagcacag

SEQ ID NO: 24184 - DNA, 15 bp, Homo sapiens
cccctgggcagcaca

SEQ ID NO: 24185 - DNA, 15 bp, Homo sapiens
gcccctgggcagcac

SEQ ID NO: 24186 - DNA, 15 bp, Homo sapiens
agcccctgggcagca

SEQ ID NO: 24187 - DNA, 15 bp, Homo sapiens
cagcccctgggcagc

SEQ ID NO: 24188 - DNA, 15 bp, Homo sapiens
acagcccctgggcag

SEQ ID NO: 24189 - DNA, 15 bp, Homo sapiens
cacagcccctgggca

SEQ ID NO: 24190 - DNA, 15 bp, Homo sapiens
acacagcccctgggc

SEQ ID NO: 24191 - DNA, 15 bp, Homo sapiens
cacacagcccctggg

SEQ ID NO: 24192 - DNA, 15 bp, Homo sapiens
gcacacagcccctgg

SEQ ID NO: 24193 - DNA, 15 bp, Homo sapiens
tgcacacagcccctg

SEQ ID NO: 24194 - DNA, 15 bp, Homo sapiens
gtgcacacagcccct

SEQ ID NO: 24195 - DNA, 15 bp, Homo sapiens
ggtgcacacagcccc

SEQ ID NO: 24196 - DNA, 15 bp, Homo sapiens
tggtgcacacagccc

SEQ ID NO: 24197 - DNA, 15 bp, Homo sapiens
gtggtgcacacagcc

SEQ ID NO: 24198 - DNA, 15 bp, Homo sapiens
tgtggtgcacacagc

SEQ ID NO: 24199 - DNA, 15 bp, Homo sapiens
atgtggtgcacacag

SEQ ID NO: 24200 - DNA, 15 bp, Homo sapiens
catgtggtgcacaca

SEQ ID NO: 24201 - DNA, 15 bp, Homo sapiens
tcatgtggtgcacac

SEQ ID NO: 24202 - DNA, 15 bp, Homo sapiens
ctcatgtggtgcaca

SEQ ID NO: 24203 - DNA, 15 bp, Homo sapiens
gctcatgtggtgcac

SEQ ID NO: 24204 - DNA, 15 bp, Homo sapiens
tgctcatgtggtgca

SEQ ID NO: 24205 - DNA, 15 bp, Homo sapiens
gtgctcatgtggtgc

SEQ ID NO: 24206 - DNA, 15 bp, Homo sapiens
tgtgctcatgtggtg

SEQ ID NO: 24207 - DNA, 15 bp, Homo sapiens
atgtgctcatgtggt

SEQ ID NO: 24208 - DNA, 15 bp, Homo sapiens
aatgtgctcatgtgg

SEQ ID NO: 24209 - DNA, 15 bp, Homo sapiens
aaatgtgctcatgtg

SEQ ID NO: 24210 - DNA, 15 bp, Homo sapiens
gaaatgtgctcatgt

SEQ ID NO: 24211 - DNA, 15 bp, Homo sapiens
ggaaatgtgctcatg

SEQ ID NO: 24212 - DNA, 15 bp, Homo sapiens
gggaaatgtgctcat

SEQ ID NO: 24213 - DNA, 15 bp, Homo sapiens
agggaaatgtgctca

SEQ ID NO: 24214 - DNA, 15 bp, Homo sapiens
gagggaaatgtgctc

SEQ ID NO: 24215 - DNA, 15 bp, Homo sapiens
agagggaaatgtgct

SEQ ID NO: 24216 - DNA, 15 bp, Homo sapiens
cagagggaaatgtgc

SEQ ID NO: 24217 - DNA, 15 bp, Homo sapiens
ccagagggaaatgtg

SEQ ID NO: 24218 - DNA, 15 bp, Homo sapiens
gccagagggaaatgt

SEQ ID NO: 24219 - DNA, 15 bp, Homo sapiens
ggccagagggaaatg

SEQ ID NO: 24220 - DNA, 15 bp, Homo sapiens
aggccagagggaaat

SEQ ID NO: 24221 - DNA, 15 bp, Homo sapiens
caggccagagggaaa

SEQ ID NO: 24222 - DNA, 15 bp, Homo sapiens
ccaggccagagggaa

SEQ ID NO: 24223 - DNA, 15 bp, Homo sapiens
gccaggccagaggga

SEQ ID NO: 24224 - DNA, 15 bp, Homo sapiens
cgccaggccagaggg

SEQ ID NO: 24225 - DNA, 15 bp, Homo sapiens
ccgccaggccagagg

SEQ ID NO: 24226 - DNA, 15 bp, Homo sapiens
gccgccaggccagag

SEQ ID NO: 24227 - DNA, 15 bp, Homo sapiens
ggccgccaggccaga

SEQ ID NO: 24228 - DNA, 15 bp, Homo sapiens
aggccgccaggccag

SEQ ID NO: 24229 - DNA, 15 bp, Homo sapiens
gaggccgccaggcca

SEQ ID NO: 24230 - DNA, 15 bp, Homo sapiens
ggaggccgccaggcc

SEQ ID NO: 24231 - DNA, 15 bp, Homo sapiens
tggaggccgccaggc

SEQ ID NO: 24232 - DNA, 15 bp, Homo sapiens
ctggaggccgccagg

SEQ ID NO: 24233 - DNA, 15 bp, Homo sapiens
cctggaggccgccag

SEQ ID NO: 24234 - DNA, 15 bp, Homo sapiens
gcctggaggccgcca

SEQ ID NO: 24235 - DNA, 15 bp, Homo sapiens
agcctggaggccgcc

SEQ ID NO: 24236 - DNA, 15 bp, Homo sapiens
cagcctggaggccgc

SEQ ID NO: 24237 - DNA, 15 bp, Homo sapiens
ccagcctggaggccg

SEQ ID NO: 24238 - DNA, 15 bp, Homo sapiens
gccagcctggaggcc

SEQ ID NO: 24239 - DNA, 15 bp, Homo sapiens
agccagcctggaggc

SEQ ID NO: 24240 - DNA, 15 bp, Homo sapiens
cagccagcctggagg

SEQ ID NO: 24241 - DNA, 15 bp, Homo sapiens
acagccagcctggag

SEQ ID NO: 24242 - DNA, 15 bp, Homo sapiens
cacagccagcctgga

SEQ ID NO: 24243 - DNA, 15 bp, Homo sapiens
ccacagccagcctgg

SEQ ID NO: 24244 - DNA, 15 bp, Homo sapiens
tccacagccagcctg

SEQ ID NO: 24245 - DNA, 15 bp, Homo sapiens
ttccacagccagcct

SEQ ID NO: 24246 - DNA, 15 bp, Homo sapiens
tttccacagccagcc

SEQ ID NO: 24247 - DNA, 15 bp, Homo sapiens
gtttccacagccagc

SEQ ID NO: 24248 - DNA, 15 bp, Homo sapiens
tgtttccacagccag

SEQ ID NO: 24249 - DNA, 15 bp, Homo sapiens
ctgtttccacagcca

SEQ ID NO: 24250 - DNA, 15 bp, Homo sapiens
actgtttccacagcc

SEQ ID NO: 24251 - DNA, 15 bp, Homo sapiens
aactgtttccacagc

SEQ ID NO: 24252 - DNA, 15 bp, Homo sapiens
gaactgtttccacag

SEQ ID NO: 24253 - DNA, 15 bp, Homo sapiens
ggaactgtttccaca

SEQ ID NO: 24254 - DNA, 15 bp, Homo sapiens
aggaactgtttccac

SEQ ID NO: 24255 - DNA, 15 bp, Homo sapiens
caggaactgtttcca

SEQ ID NO: 24256 - DNA, 15 bp, Homo sapiens
tcaggaactgtttcc

SEQ ID NO: 24257 - DNA, 15 bp, Homo sapiens
ctcaggaactgtttc

SEQ ID NO: 24258 - DNA, 15 bp, Homo sapiens
cctcaggaactgttt

SEQ ID NO: 24259 - DNA, 15 bp, Homo sapiens
tcctcaggaactgtt

SEQ ID NO: 24260 - DNA, 15 bp, Homo sapiens
ttcctcaggaactgt

SEQ ID NO: 24261 - DNA, 15 bp, Homo sapiens
tttcctcaggaactg

SEQ ID NO: 24262 - DNA, 15 bp, Homo sapiens
atttcctcaggaact

SEQ ID NO: 24263 - DNA, 15 bp, Homo sapiens
aatttcctcaggaac

SEQ ID NO: 24264 - DNA, 15 bp, Homo sapiens
taatttcctcaggaa

SEQ ID NO: 24265 - DNA, 15 bp, Homo sapiens
ctaatttcctcagga

SEQ ID NO: 24266 - DNA, 15 bp, Homo sapiens
tctaatttcctcagg

SEQ ID NO: 24267 - DNA, 15 bp, Homo sapiens
ctctaatttcctcag

SEQ ID NO: 24268 - DNA, 15 bp, Homo sapiens
tctctaatttcctca

SEQ ID NO: 24269 - DNA, 15 bp, Homo sapiens
atctctaatttcctc

SEQ ID NO: 24270 - DNA, 15 bp, Homo sapiens
aatctctaatttcct

SEQ ID NO: 24271 - DNA, 15 bp, Homo sapiens
gaatctctaatttcc

SEQ ID NO: 24272 - DNA, 15 bp, Homo sapiens
agaatctctaatttc

SEQ ID NO: 24273 - DNA, 15 bp, Homo sapiens
tagaatctctaattt

SEQ ID NO: 24274 - DNA, 15 bp, Homo sapiens
atagaatctctaatt

SEQ ID NO: 24275 - DNA, 15 bp, Homo sapiens
catagaatctctaat

SEQ ID NO: 24276 - DNA, 15 bp, Homo sapiens
tcatagaatctctaa

SEQ ID NO: 24277 - DNA, 15 bp, Homo sapiens
ttcatagaatctcta

SEQ ID NO: 24278 - DNA, 15 bp, Homo sapiens
attcatagaatctct

SEQ ID NO: 24279 - DNA, 15 bp, Homo sapiens
aattcatagaatctc

SEQ ID NO: 24280 - DNA, 15 bp, Homo sapiens
caattcatagaatct

SEQ ID NO: 24281 - DNA, 15 bp, Homo sapiens
acaattcatagaatc

SEQ ID NO: 24282 - DNA, 15 bp, Homo sapiens
tacaattcatagaat

SEQ ID NO: 24283 - DNA, 15 bp, Homo sapiens
ctacaattcatagaa

SEQ ID NO: 24284 - DNA, 15 bp, Homo sapiens
cctacaattcataga

SEQ ID NO: 24285 - DNA, 15 bp, Homo sapiens
tcctacaattcatag

SEQ ID NO: 24286 - DNA, 15 bp, Homo sapiens
ctcctacaattcata

SEQ ID NO: 24287 - DNA, 15 bp, Homo sapiens
actcctacaattcat

SEQ ID NO: 24288 - DNA, 15 bp, Homo sapiens
tactcctacaattca

SEQ ID NO: 24289 - DNA, 15 bp, Homo sapiens
atactcctacaattc

SEQ ID NO: 24290 - DNA, 15 bp, Homo sapiens
aatactcctacaatt

SEQ ID NO: 24291 - DNA, 15 bp, Homo sapiens
taatactcctacaat

SEQ ID NO: 24292 - DNA, 15 bp, Homo sapiens
ttaatactcctacaa

SEQ ID NO: 24293 - DNA, 15 bp, Homo sapiens
tttaatactcctaca

SEQ ID NO: 24294 - DNA, 15 bp, Homo sapiens
ctttaatactcctac

SEQ ID NO: 24295 - DNA, 15 bp, Homo sapiens
tctttaatactccta

SEQ ID NO: 24296 - DNA, 15 bp, Homo sapiens
gtctttaatactcct

SEQ ID NO: 24297 - DNA, 15 bp, Homo sapiens
ggtctttaatactcc

SEQ ID NO: 24298 - DNA, 15 bp, Homo sapiens
tggtctttaatactc

SEQ ID NO: 24299 - DNA, 15 bp, Homo sapiens
ctggtctttaatact

SEQ ID NO: 24300 - DNA, 15 bp, Homo sapiens
cctggtctttaatac

SEQ ID NO: 24301 - DNA, 15 bp, Homo sapiens
gcctggtctttaata

SEQ ID NO: 24302 - DNA, 15 bp, Homo sapiens
agcctggtctttaat

SEQ ID NO: 24303 - DNA, 15 bp, Homo sapiens
cagcctggtctttaa

SEQ ID NO: 24304 - DNA, 15 bp, Homo sapiens
acagcctggtcttta

SEQ ID NO: 24305 - DNA, 15 bp, Homo sapiens
aacagcctggtcttt

SEQ ID NO: 24306 - DNA, 15 bp, Homo sapiens
caacagcctggtctt

SEQ ID NO: 24307 - DNA, 15 bp, Homo sapiens
ccaacagcctggtct

SEQ ID NO: 24308 - DNA, 15 bp, Homo sapiens
gccaacagcctggtc

SEQ ID NO: 24309 - DNA, 15 bp, Homo sapiens
tgccaacagcctggt

SEQ ID NO: 24310 - DNA, 15 bp, Homo sapiens
gtgccaacagcctgg

SEQ ID NO: 24311 - DNA, 15 bp, Homo sapiens
ggtgccaacagcctg

SEQ ID NO: 24312 - DNA, 15 bp, Homo sapiens
tggtgccaacagcct

SEQ ID NO: 24313 - DNA, 15 bp, Homo sapiens
ctggtgccaacagcc

SEQ ID NO: 24314 - DNA, 15 bp, Homo sapiens
tctggtgccaacagc

SEQ ID NO: 24315 - DNA, 15 bp, Homo sapiens
ttctggtgccaacag

SEQ ID NO: 24316 - DNA, 15 bp, Homo sapiens
gttctggtgccaaca

SEQ ID NO: 24317 - DNA, 15 bp, Homo sapiens
agttctggtgccaac

SEQ ID NO: 24318 - DNA, 15 bp, Homo sapiens
aagttctggtgccaa

SEQ ID NO: 24319 - DNA, 15 bp, Homo sapiens
taagttctggtgcca

SEQ ID NO: 24320 - DNA, 15 bp, Homo sapiens
ttaagttctggtgcc

SEQ ID NO: 24321 - DNA, 15 bp, Homo sapiens
tttaagttctggtgc

SEQ ID NO: 24322 - DNA, 15 bp, Homo sapiens
ctttaagttctggtg

SEQ ID NO: 24323 - DNA, 15 bp, Homo sapiens
gctttaagttctggt

SEQ ID NO: 24324 - DNA, 15 bp, Homo sapiens
cgctttaagttctgg

SEQ ID NO: 24325 - DNA, 15 bp, Homo sapiens
tcgctttaagttctg

SEQ ID NO: 24326 - DNA, 15 bp, Homo sapiens
atcgctttaagttct

SEQ ID NO: 24327 - DNA, 15 bp, Homo sapiens
catcgctttaagttc

SEQ ID NO: 24328 - DNA, 15 bp, Homo sapiens
tcatcgctttaagtt

SEQ ID NO: 24329 - DNA, 15 bp, Homo sapiens
gtcatcgctttaagt

SEQ ID NO: 24330 - DNA, 15 bp, Homo sapiens
agtcatcgctttaag

SEQ ID NO: 24331 - DNA, 15 bp, Homo sapiens
cagtcatcgctttaa

SEQ ID NO: 24332 - DNA, 15 bp, Homo sapiens
ccagtcatcgcttta

SEQ ID NO: 24333 - DNA, 15 bp, Homo sapiens
tccagtcatcgcttt

SEQ ID NO: 24334 - DNA, 15 bp, Homo sapiens
atccagtcatcgctt

SEQ ID NO: 24335 - DNA, 15 bp, Homo sapiens
catccagtcatcgct

SEQ ID NO: 24336 - DNA, 15 bp, Homo sapiens
acatccagtcatcgc

SEQ ID NO: 24337 - DNA, 15 bp, Homo sapiens
gacatccagtcatcg

SEQ ID NO: 24338 - DNA, 15 bp, Homo sapiens
agacatccagtcatc

SEQ ID NO: 24339 - DNA, 15 bp, Homo sapiens
gagacatccagtcat

SEQ ID NO: 24340 - DNA, 15 bp, Homo sapiens
agagacatccagtca

SEQ ID NO: 24341 - DNA, 15 bp, Homo sapiens
cagagacatccagtc

SEQ ID NO: 24342 - DNA, 15 bp, Homo sapiens
acagagacatccagt

SEQ ID NO: 24343 - DNA, 15 bp, Homo sapiens
tacagagacatccag

SEQ ID NO: 24344 - DNA, 15 bp, Homo sapiens
gtacagagacatcca

SEQ ID NO: 24345 - DNA, 15 bp, Homo sapiens
agtacagagacatcc

SEQ ID NO: 24346 - DNA, 15 bp, Homo sapiens
cagtacagagacatc

SEQ ID NO: 24347 - DNA, 15 bp, Homo sapiens
acagtacagagacat

SEQ ID NO: 24348 - DNA, 15 bp, Homo sapiens
tacagtacagagaca

SEQ ID NO: 24349 - DNA, 15 bp, Homo sapiens
atacagtacagagac

SEQ ID NO: 24350 - DNA, 15 bp, Homo sapiens
catacagtacagaga

SEQ ID NO: 24351 - DNA, 15 bp, Homo sapiens
acatacagtacagag

SEQ ID NO: 24352 - DNA, 15 bp, Homo sapiens
tacatacagtacaga

SEQ ID NO: 24353 - DNA, 15 bp, Homo sapiens
atacatacagtacag

SEQ ID NO: 24354 - DNA, 15 bp, Homo sapiens
gatacatacagtaca

SEQ ID NO: 24355 - DNA, 15 bp, Homo sapiens
agatacatacagtac

SEQ ID NO: 24356 - DNA, 15 bp, Homo sapiens
cagatacatacagta

SEQ ID NO: 24357 - DNA, 15 bp, Homo sapiens
ccagatacatacagt

SEQ ID NO: 24358 - DNA, 15 bp, Homo sapiens
accagatacatacag

SEQ ID NO: 24359 - DNA, 15 bp, Homo sapiens
aaccagatacataca

SEQ ID NO: 24360 - DNA, 15 bp, Homo sapiens
taaccagatacatac

SEQ ID NO: 24361 - DNA, 15 bp, Homo sapiens
ataaccagatacata

SEQ ID NO: 24362 - DNA, 15 bp, Homo sapiens
gataaccagatacat

SEQ ID NO: 24363 - DNA, 15 bp, Homo sapiens
tgataaccagataca

SEQ ID NO: 24364 - DNA, 15 bp, Homo sapiens
ttgataaccagatac

SEQ ID NO: 24365 - DNA, 15 bp, Homo sapiens
cttgataaccagata

SEQ ID NO: 24366 - DNA, 15 bp, Homo sapiens
tcttgataaccagat

SEQ ID NO: 24367 - DNA, 15 bp, Homo sapiens
atcttgataaccaga

SEQ ID NO: 24368 - DNA, 15 bp, Homo sapiens
catcttgataaccag

SEQ ID NO: 24369 - DNA, 15 bp, Homo sapiens
gcatcttgataacca

SEQ ID NO: 24370 - DNA, 15 bp, Homo sapiens
ggcatcttgataacc

SEQ ID NO: 24371 - DNA, 15 bp, Homo sapiens
aggcatcttgataac

SEQ ID NO: 24372 - DNA, 15 bp, Homo sapiens
gaggcatcttgataa

SEQ ID NO: 24373 - DNA, 15 bp, Homo sapiens
agaggcatcttgata

SEQ ID NO: 24374 - DNA, 15 bp, Homo sapiens
cagaggcatcttgat

SEQ ID NO: 24375 - DNA, 15 bp, Homo sapiens
acagaggcatcttga

SEQ ID NO: 24376 - DNA, 15 bp, Homo sapiens
cacagaggcatcttg

SEQ ID NO: 24377 - DNA, 15 bp, Homo sapiens
gcacagaggcatctt

SEQ ID NO: 24378 - DNA, 15 bp, Homo sapiens
tgcacagaggcatct

SEQ ID NO: 24379 - DNA, 15 bp, Homo sapiens
ctgcacagaggcatc

SEQ ID NO: 24380 - DNA, 15 bp, Homo sapiens
tctgcacagaggcat

SEQ ID NO: 24381 - DNA, 15 bp, Homo sapiens
ttctgcacagaggca

SEQ ID NO: 24382 - DNA, 15 bp, Homo sapiens
tttctgcacagaggc

SEQ ID NO: 24383 - DNA, 15 bp, Homo sapiens
ctttctgcacagagg

SEQ ID NO: 24384 - DNA, 15 bp, Homo sapiens
actttctgcacagag

SEQ ID NO: 24385 - DNA, 15 bp, Homo sapiens
tactttctgcacaga

SEQ ID NO: 24386 - DNA, 15 bp, Homo sapiens
atactttctgcacag

SEQ ID NO: 24387 - DNA, 15 bp, Homo sapiens
catactttctgcaca

SEQ ID NO: 24388 - DNA, 15 bp, Homo sapiens
gcatactttctgcac

SEQ ID NO: 24389 - DNA, 15 bp, Homo sapiens
ggcatactttctgca

SEQ ID NO: 24390 - DNA, 15 bp, Homo sapiens
aggcatactttctgc

SEQ ID NO: 24391 - DNA, 15 bp, Homo sapiens
gaggcatactttctg

SEQ ID NO: 24392 - DNA, 15 bp, Homo sapiens
ggaggcatactttct

SEQ ID NO: 24393 - DNA, 15 bp, Homo sapiens
gggaggcatactttc

SEQ ID NO: 24394 - DNA, 15 bp, Homo sapiens
cgggaggcatacttt

SEQ ID NO: 24395 - DNA, 15 bp, Homo sapiens
acgggaggcatactt

SEQ ID NO: 24396 - DNA, 15 bp, Homo sapiens
cacgggaggcatact

SEQ ID NO: 24397 - DNA, 15 bp, Homo sapiens
ccacgggaggcatac

SEQ ID NO: 24398 - DNA, 15 bp, Homo sapiens
cccacgggaggcata

SEQ ID NO: 24399 - DNA, 15 bp, Homo sapiens
acccacgggaggcat

SEQ ID NO: 24400 - DNA, 15 bp, Homo sapiens
tacccacgggaggca

SEQ ID NO: 24401 - DNA, 15 bp, Homo sapiens
atacccacgggaggc

SEQ ID NO: 24402 - DNA, 15 bp, Homo sapiens
tatacccacgggagg

SEQ ID NO: 24403 - DNA, 15 bp, Homo sapiens
gtatacccacgggag

SEQ ID NO: 24404 - DNA, 15 bp, Homo sapiens
cgtatacccacggga

SEQ ID NO: 24405 - DNA, 15 bp, Homo sapiens
acgtatacccacggg

SEQ ID NO: 24406 - DNA, 15 bp, Homo sapiens
aacgtatacccacgg

SEQ ID NO: 24407 - DNA, 15 bp, Homo sapiens
aaacgtatacccacg

SEQ ID NO: 24408 - DNA, 15 bp, Homo sapiens
aaaacgtatacccac

SEQ ID NO: 24409 - DNA, 15 bp, Homo sapiens
aaaaacgtataccca

SEQ ID NO: 24410 - DNA, 15 bp, Homo sapiens
taaaaacgtataccc

SEQ ID NO: 24411 - DNA, 15 bp, Homo sapiens
gtaaaaacgtatacc

SEQ ID NO: 24412 - DNA, 15 bp, Homo sapiens
ggtaaaaacgtatac

SEQ ID NO: 24413 - DNA, 15 bp, Homo sapiens
aggtaaaaacgtata

SEQ ID NO: 24414 - DNA, 15 bp, Homo sapiens
aaggtaaaaacgtat

SEQ ID NO: 24415 - DNA, 15 bp, Homo sapiens
aaaggtaaaaacgta

SEQ ID NO: 24416 - DNA, 15 bp, Homo sapiens
aaaaggtaaaaacgt

SEQ ID NO: 24417 - DNA, 15 bp, Homo sapiens
aaaaaggtaaaaacg

SEQ ID NO: 24418 - DNA, 15 bp, Homo sapiens
aaaaaaggtaaaaac

SEQ ID NO: 24419 - DNA, 15 bp, Homo sapiens
taaaaaaggtaaaaa

SEQ ID NO: 24420 - DNA, 15 bp, Homo sapiens
ttaaaaaaggtaaaa

SEQ ID NO: 24421 - DNA, 15 bp, Homo sapiens
tttaaaaaaggtaaa

SEQ ID NO: 24422 - DNA, 15 bp, Homo sapiens
ttttaaaaaaggtaa

SEQ ID NO: 24423 - DNA, 15 bp, Homo sapiens
tttttaaaaaaggta

SEQ ID NO: 24424 - DNA, 15 bp, Homo sapiens
ttttttaaaaaaggt

SEQ ID NO: 24425 - DNA, 15 bp, Homo sapiens
gttttttaaaaaagg

SEQ ID NO: 24426 - DNA, 15 bp, Homo sapiens
tgttttttaaaaaag

SEQ ID NO: 24427 - DNA, 15 bp, Homo sapiens
atgttttttaaaaaa

SEQ ID NO: 24428 - DNA, 15 bp, Homo sapiens
aatgttttttaaaaa

SEQ ID NO: 24429 - DNA, 15 bp, Homo sapiens
aaatgttttttaaaa

SEQ ID NO: 24430 - DNA, 15 bp, Homo sapiens
aaaatgttttttaaa

SEQ ID NO: 24431 - DNA, 15 bp, Homo sapiens
aaaaatgttttttaa

SEQ ID NO: 24432 - DNA, 15 bp, Homo sapiens
caaaaatgtttttta

SEQ ID NO: 24433 - DNA, 15 bp, Homo sapiens
acaaaaatgtttttt

SEQ ID NO: 24434 - DNA, 15 bp, Homo sapiens
tacaaaaatgttttt

SEQ ID NO: 24435 - DNA, 15 bp, Homo sapiens
ctacaaaaatgtttt

SEQ ID NO: 24436 - DNA, 15 bp, Homo sapiens
tctacaaaaatgttt

SEQ ID NO: 24437 - DNA, 15 bp, Homo sapiens
ttctacaaaaatgtt

SEQ ID NO: 24438 - DNA, 15 bp, Homo sapiens
tttctacaaaaatgt

SEQ ID NO: 24439 - DNA, 15 bp, Homo sapiens
ttttctacaaaaatg

SEQ ID NO: 24440 - DNA, 15 bp, Homo sapiens
tttttctacaaaaat

SEQ ID NO: 24441 - DNA, 15 bp, Homo sapiens
ttttttctacaaaaa

SEQ ID NO: 24442 - DNA, 15 bp, Homo sapiens
attttttctacaaaa

SEQ ID NO: 24443 - DNA, 15 bp, Homo sapiens
tattttttctacaaa

SEQ ID NO: 24444 - DNA, 15 bp, Homo sapiens
ttattttttctacaa

SEQ ID NO: 24445 - DNA, 15 bp, Homo sapiens
attattttttctaca

SEQ ID NO: 24446 - DNA, 15 bp, Homo sapiens
aattattttttctac

SEQ ID NO: 24447 - DNA, 15 bp, Homo sapiens
taattattttttcta

SEQ ID NO: 24448 - DNA, 15 bp, Homo sapiens
ttaattattttttct

SEQ ID NO: 24449 - DNA, 15 bp, Homo sapiens
tttaattattttttc

SEQ ID NO: 24450 - DNA, 15 bp, Homo sapiens
atttaattatttttt

SEQ ID NO: 24451 - DNA, 15 bp, Homo sapiens
gatttaattattttt

SEQ ID NO: 24452 - DNA, 15 bp, Homo sapiens
ggatttaattatttt

SEQ ID NO: 24453 - DNA, 15 bp, Homo sapiens
gggatttaattattt

SEQ ID NO: 24454 - DNA, 15 bp, Homo sapiens
ggggatttaattatt

SEQ ID NO: 24455 - DNA, 15 bp, Homo sapiens
aggggatttaattat

SEQ ID NO: 24456 - DNA, 15 bp, Homo sapiens
aaggggatttaatta

SEQ ID NO: 24457 - DNA, 15 bp, Homo sapiens
aaaggggatttaatt

SEQ ID NO: 24458 - DNA, 15 bp, Homo sapiens
aaaaggggatttaat

SEQ ID NO: 24459 - DNA, 15 bp, Homo sapiens
aaaaaggggatttaa

SEQ ID NO: 24460 - DNA, 15 bp, Homo sapiens
caaaaaggggattta

SEQ ID NO: 24461 - DNA, 15 bp, Homo sapiens
ccaaaaaggggattt

SEQ ID NO: 24462 - DNA, 15 bp, Homo sapiens
tccaaaaaggggatt

SEQ ID NO: 24463 - DNA, 15 bp, Homo sapiens
ttccaaaaaggggat

SEQ ID NO: 24464 - DNA, 15 bp, Homo sapiens
tttccaaaaagggga

SEQ ID NO: 24465 - DNA, 15 bp, Homo sapiens
gtttccaaaaagggg

SEQ ID NO: 24466 - DNA, 15 bp, Homo sapiens
agtttccaaaaaggg

SEQ ID NO: 24467 - DNA, 15 bp, Homo sapiens
aagtttccaaaaagg

SEQ ID NO: 24468 - DNA, 15 bp, Homo sapiens
taagtttccaaaaag

SEQ ID NO: 24469 - DNA, 15 bp, Homo sapiens
gtaagtttccaaaaa

SEQ ID NO: 24470 - DNA, 15 bp, Homo sapiens
agtaagtttccaaaa

SEQ ID NO: 24471 - DNA, 15 bp, Homo sapiens
cagtaagtttccaaa

SEQ ID NO: 24472 - DNA, 15 bp, Homo sapiens
gcagtaagtttccaa

SEQ ID NO: 24473 - DNA, 15 bp, Homo sapiens
tgcagtaagtttcca

SEQ ID NO: 24474 - DNA, 15 bp, Homo sapiens
ctgcagtaagtttcc

SEQ ID NO: 24475 - DNA, 15 bp, Homo sapiens
cctgcagtaagtttc

SEQ ID NO: 24476 - DNA, 15 bp, Homo sapiens
acctgcagtaagttt

SEQ ID NO: 24477 - DNA, 15 bp, Homo sapiens
aacctgcagtaagtt

SEQ ID NO: 24478 - DNA, 15 bp, Homo sapiens
aaacctgcagtaagt

SEQ ID NO: 24479 - DNA, 15 bp, Homo sapiens
aaaacctgcagtaag

SEQ ID NO: 24480 - DNA, 15 bp, Homo sapiens
caaaacctgcagtaa

SEQ ID NO: 24481 - DNA, 15 bp, Homo sapiens
acaaaacctgcagta

SEQ ID NO: 24482 - DNA, 15 bp, Homo sapiens
cacaaaacctgcagt

SEQ ID NO: 24483 - DNA, 15 bp, Homo sapiens
gcacaaaacctgcag

SEQ ID NO: 24484 - DNA, 15 bp, Homo sapiens
ggcacaaaacctgca

SEQ ID NO: 24485 - DNA, 15 bp, Homo sapiens
aggcacaaaacctgc

SEQ ID NO: 24486 - DNA, 15 bp, Homo sapiens
aaggcacaaaacctg

SEQ ID NO: 24487 - DNA, 15 bp, Homo sapiens
caaggcacaaaacct

SEQ ID NO: 24488 - DNA, 15 bp, Homo sapiens
tcaaggcacaaaacc

SEQ ID NO: 24489 - DNA, 15 bp, Homo sapiens
gtcaaggcacaaaac

SEQ ID NO: 24490 - DNA, 15 bp, Homo sapiens
tgtcaaggcacaaaa

SEQ ID NO: 24491 - DNA, 15 bp, Homo sapiens
ttgtcaaggcacaaa

SEQ ID NO: 24492 - DNA, 15 bp, Homo sapiens
gttgtcaaggcacaa

SEQ ID NO: 24493 - DNA, 15 bp, Homo sapiens
ggttgtcaaggcaca

SEQ ID NO: 24494 - DNA, 15 bp, Homo sapiens
aggttgtcaaggcac

SEQ ID NO: 24495 - DNA, 15 bp, Homo sapiens
gaggttgtcaaggca

SEQ ID NO: 24496 - DNA, 15 bp, Homo sapiens
agaggttgtcaaggc

SEQ ID NO: 24497 - DNA, 15 bp, Homo sapiens
gagaggttgtcaagg

SEQ ID NO: 24498 - DNA, 15 bp, Homo sapiens
ggagaggttgtcaag

SEQ ID NO: 24499 - DNA, 15 bp, Homo sapiens
gggagaggttgtcaa

SEQ ID NO: 24500 - DNA, 15 bp, Homo sapiens
agggagaggttgtca

SEQ ID NO: 24501 - DNA, 15 bp, Homo sapiens
tagggagaggttgtc

SEQ ID NO: 24502 - DNA, 15 bp, Homo sapiens
atagggagaggttgt

SEQ ID NO: 24503 - DNA, 15 bp, Homo sapiens
catagggagaggttg

SEQ ID NO: 24504 - DNA, 15 bp, Homo sapiens
acatagggagaggtt

SEQ ID NO: 24505 - DNA, 15 bp, Homo sapiens
cacatagggagaggt

SEQ ID NO: 24506 - DNA, 15 bp, Homo sapiens
tcacatagggagagg

SEQ ID NO: 24507 - DNA, 15 bp, Homo sapiens
ctcacatagggagag

SEQ ID NO: 24508 - DNA, 15 bp, Homo sapiens
cctcacatagggaga

SEQ ID NO: 24509 - DNA, 15 bp, Homo sapiens
acctcacatagggag

SEQ ID NO: 24510 - DNA, 15 bp, Homo sapiens
aacctcacataggga

SEQ ID NO: 24511 - DNA, 15 bp, Homo sapiens
aaacctcacataggg

SEQ ID NO: 24512 - DNA, 15 bp, Homo sapiens
caaacctcacatagg

SEQ ID NO: 24513 - DNA, 15 bp, Homo sapiens
acaaacctcacatag

SEQ ID NO: 24514 - DNA, 15 bp, Homo sapiens
tacaaacctcacata

SEQ ID NO: 24515 - DNA, 15 bp, Homo sapiens
ttacaaacctcacat

SEQ ID NO: 24516 - DNA, 15 bp, Homo sapiens
tttacaaacctcaca

SEQ ID NO: 24517 - DNA, 15 bp, Homo sapiens
ttttacaaacctcac

SEQ ID NO: 24518 - DNA, 15 bp, Homo sapiens
tttttacaaacctca

SEQ ID NO: 24519 - DNA, 15 bp, Homo sapiens
ctttttacaaacctc

SEQ ID NO: 24520 - DNA, 15 bp, Homo sapiens
actttttacaaacct

SEQ ID NO: 24521 - DNA, 15 bp, Homo sapiens
cactttttacaaacc

SEQ ID NO: 24522 - DNA, 15 bp, Homo sapiens
acactttttacaaac

SEQ ID NO: 24523 - DNA, 15 bp, Homo sapiens
gacactttttacaaa

SEQ ID NO: 24524 - DNA, 15 bp, Homo sapiens
ggacactttttacaa

SEQ ID NO: 24525 - DNA, 15 bp, Homo sapiens
aggacactttttaca

SEQ ID NO: 24526 - DNA, 15 bp, Homo sapiens
caggacactttttac

SEQ ID NO: 24527 - DNA, 15 bp, Homo sapiens
acaggacacttttta

SEQ ID NO: 24528 - DNA, 15 bp, Homo sapiens
cacaggacacttttt

SEQ ID NO: 24529 - DNA, 15 bp, Homo sapiens
tcacaggacactttt

SEQ ID NO: 24530 - DNA, 15 bp, Homo sapiens
gtcacaggacacttt

SEQ ID NO: 24531 - DNA, 15 bp, Homo sapiens
agtcacaggacactt

SEQ ID NO: 24532 - DNA, 15 bp, Homo sapiens
aagtcacaggacact

SEQ ID NO: 24533 - DNA, 15 bp, Homo sapiens
taagtcacaggacac

SEQ ID NO: 24534 - DNA, 15 bp, Homo sapiens
ttaagtcacaggaca

SEQ ID NO: 24535 - DNA, 15 bp, Homo sapiens
gttaagtcacaggac

SEQ ID NO: 24536 - DNA, 15 bp, Homo sapiens
tgttaagtcacagga

SEQ ID NO: 24537 - DNA, 15 bp, Homo sapiens
gtgttaagtcacagg

SEQ ID NO: 24538 - DNA, 15 bp, Homo sapiens
tgtgttaagtcacag

SEQ ID NO: 24539 - DNA, 15 bp, Homo sapiens
ctgtgttaagtcaca

SEQ ID NO: 24540 - DNA, 15 bp, Homo sapiens
tctgtgttaagtcac

SEQ ID NO: 24541 - DNA, 15 bp, Homo sapiens
ttctgtgttaagtca

SEQ ID NO: 24542 - DNA, 15 bp, Homo sapiens
tttctgtgttaagtc

SEQ ID NO: 24543 - DNA, 15 bp, Homo sapiens
gtttctgtgttaagt

SEQ ID NO: 24544 - DNA, 15 bp, Homo sapiens
cgtttctgtgttaag

SEQ ID NO: 24545 - DNA, 15 bp, Homo sapiens
gcgtttctgtgttaa

SEQ ID NO: 24546 - DNA, 15 bp, Homo sapiens
tgcgtttctgtgtta

SEQ ID NO: 24547 - DNA, 15 bp, Homo sapiens
ttgcgtttctgtgtt

SEQ ID NO: 24548 - DNA, 15 bp, Homo sapiens
attgcgtttctgtgt

SEQ ID NO: 24549 - DNA, 15 bp, Homo sapiens
tattgcgtttctgtg

SEQ ID NO: 24550 - DNA, 15 bp, Homo sapiens
ttattgcgtttctgt

SEQ ID NO: 24551 - DNA, 15 bp, Homo sapiens
tttattgcgtttctg

SEQ ID NO: 24552 - DNA, 15 bp, Homo sapiens
gtttattgcgtttct

SEQ ID NO: 24553 - DNA, 15 bp, Homo sapiens
tgtttattgcgtttc

SEQ ID NO: 24554 - DNA, 15 bp, Homo sapiens
gtgtttattgcgttt

SEQ ID NO: 24555 - DNA, 15 bp, Homo sapiens
tgtgtttattgcgtt

SEQ ID NO: 24556 - DNA, 15 bp, Homo sapiens
gtgtgtttattgcgt

SEQ ID NO: 24557 - DNA, 15 bp, Homo sapiens
tgtgtgtttattgcg

SEQ ID NO: 24558 - DNA, 15 bp, Homo sapiens
gtgtgtgtttattgc

SEQ ID NO: 24559 - DNA, 15 bp, Homo sapiens
tgtgtgtgtttattg

SEQ ID NO: 24560 - DNA, 15 bp, Homo sapiens
ttgtgtgtgtttatt

SEQ ID NO: 24561 - DNA, 15 bp, Homo sapiens
tttgtgtgtgtttat

SEQ ID NO: 24562 - DNA, 15 bp, Homo sapiens
ttttgtgtgtgttta

SEQ ID NO: 24563 - DNA, 15 bp, Homo sapiens
attttgtgtgtgttt

SEQ ID NO: 24564 - DNA, 15 bp, Homo sapiens
tattttgtgtgtgtt

SEQ ID NO: 24565 - DNA, 15 bp, Homo sapiens
ctattttgtgtgtgt

SEQ ID NO: 24566 - DNA, 15 bp, Homo sapiens
actattttgtgtgtg

SEQ ID NO: 24567 - DNA, 15 bp, Homo sapiens
aactattttgtgtgt

SEQ ID NO: 24568 - DNA, 15 bp, Homo sapiens
aaactattttgtgtg

SEQ ID NO: 24569 - DNA, 15 bp, Homo sapiens
gaaactattttgtgt

SEQ ID NO: 24570 - DNA, 15 bp, Homo sapiens
tgaaactattttgtg

SEQ ID NO: 24571 - DNA, 15 bp, Homo sapiens
atgaaactattttgt

SEQ ID NO: 24572 - DNA, 15 bp, Homo sapiens
catgaaactattttg

SEQ ID NO: 24573 - DNA, 15 bp, Homo sapiens
tcatgaaactatttt

SEQ ID NO: 24574 - DNA, 15 bp, Homo sapiens
ctcatgaaactattt

SEQ ID NO: 24575 - DNA, 15 bp, Homo sapiens
actcatgaaactatt

SEQ ID NO: 24576 - DNA, 15 bp, Homo sapiens
cactcatgaaactat

SEQ ID NO: 24577 - DNA, 15 bp, Homo sapiens
tcactcatgaaacta

SEQ ID NO: 24578 - DNA, 15 bp, Homo sapiens
atcactcatgaaact

SEQ ID NO: 24579 - DNA, 15 bp, Homo sapiens
aatcactcatgaaac

SEQ ID NO: 24580 - DNA, 15 bp, Homo sapiens
gaatcactcatgaaa

SEQ ID NO: 24581 - DNA, 15 bp, Homo sapiens
agaatcactcatgaa

SEQ ID NO: 24582 - DNA, 15 bp, Homo sapiens
aagaatcactcatga

SEQ ID NO: 24583 - DNA, 15 bp, Homo sapiens
gaagaatcactcatg

SEQ ID NO: 24584 - DNA, 15 bp, Homo sapiens
tgaagaatcactcat

SEQ ID NO: 24585 - DNA, 15 bp, Homo sapiens
ctgaagaatcactca

SEQ ID NO: 24586 - DNA, 15 bp, Homo sapiens
tctgaagaatcactc

SEQ ID NO: 24587 - DNA, 15 bp, Homo sapiens
atctgaagaatcact

SEQ ID NO: 24588 - DNA, 15 bp, Homo sapiens
catctgaagaatcac

SEQ ID NO: 24589 - DNA, 15 bp, Homo sapiens
gcatctgaagaatca

SEQ ID NO: 24590 - DNA, 15 bp, Homo sapiens
ggcatctgaagaatc

SEQ ID NO: 24591 - DNA, 15 bp, Homo sapiens
gggcatctgaagaat

SEQ ID NO: 24592 - DNA, 15 bp, Homo sapiens
agggcatctgaagaa

SEQ ID NO: 24593 - DNA, 15 bp, Homo sapiens
aagggcatctgaaga

SEQ ID NO: 24594 - DNA, 15 bp, Homo sapiens
gaagggcatctgaag

SEQ ID NO: 24595 - DNA, 15 bp, Homo sapiens
ggaagggcatctgaa

SEQ ID NO: 24596 - DNA, 15 bp, Homo sapiens
gggaagggcatctga

SEQ ID NO: 24597 - DNA, 15 bp, Homo sapiens
tgggaagggcatctg

SEQ ID NO: 24598 - DNA, 15 bp, Homo sapiens
ttgggaagggcatct

SEQ ID NO: 24599 - DNA, 15 bp, Homo sapiens
gttgggaagggcatc

SEQ ID NO: 24600 - DNA, 15 bp, Homo sapiens
agttgggaagggcat

SEQ ID NO: 24601 - DNA, 15 bp, Homo sapiens
cagttgggaagggca

SEQ ID NO: 24602 - DNA, 15 bp, Homo sapiens
ccagttgggaagggc

SEQ ID NO: 24603 - DNA, 15 bp, Homo sapiens
accagttgggaaggg

SEQ ID NO: 24604 - DNA, 15 bp, Homo sapiens
aaccagttgggaagg

SEQ ID NO: 24605 - DNA, 15 bp, Homo sapiens
taaccagttgggaag

SEQ ID NO: 24606 - DNA, 15 bp, Homo sapiens
ctaaccagttgggaa

SEQ ID NO: 24607 - DNA, 15 bp, Homo sapiens
actaaccagttggga

SEQ ID NO: 24608 - DNA, 15 bp, Homo sapiens
aactaaccagttggg

SEQ ID NO: 24609 - DNA, 15 bp, Homo sapiens
caactaaccagttgg

SEQ ID NO: 24610 - DNA, 15 bp, Homo sapiens
tcaactaaccagttg

SEQ ID NO: 24611 - DNA, 15 bp, Homo sapiens
atcaactaaccagtt

SEQ ID NO: 24612 - DNA, 15 bp, Homo sapiens
gatcaactaaccagt

SEQ ID NO: 24613 - DNA, 15 bp, Homo sapiens
tgatcaactaaccag

SEQ ID NO: 24614 - DNA, 15 bp, Homo sapiens
ttgatcaactaacca

SEQ ID NO: 24615 - DNA, 15 bp, Homo sapiens
cttgatcaactaacc

SEQ ID NO: 24616 - DNA, 15 bp, Homo sapiens
tcttgatcaactaac

SEQ ID NO: 24617 - DNA, 15 bp, Homo sapiens
ttcttgatcaactaa

SEQ ID NO: 24618 - DNA, 15 bp, Homo sapiens
attcttgatcaacta

SEQ ID NO: 24619 - DNA, 15 bp, Homo sapiens
aattcttgatcaact

SEQ ID NO: 24620 - DNA, 15 bp, Homo sapiens
aaattcttgatcaac

SEQ ID NO: 24621 - DNA, 15 bp, Homo sapiens
aaaattcttgatcaa

SEQ ID NO: 24622 - DNA, 15 bp, Homo sapiens
caaaattcttgatca

SEQ ID NO: 24623 - DNA, 15 bp, Homo sapiens
ccaaaattcttgatc

SEQ ID NO: 24624 - DNA, 15 bp, Homo sapiens
cccaaaattcttgat

SEQ ID NO: 24625 - DNA, 15 bp, Homo sapiens
ccccaaaattcttga

SEQ ID NO: 24626 - DNA, 15 bp, Homo sapiens
cccccaaaattcttg

SEQ ID NO: 24627 - DNA, 15 bp, Homo sapiens
acccccaaaattctt

SEQ ID NO: 24628 - DNA, 15 bp, Homo sapiens
cacccccaaaattct

SEQ ID NO: 24629 - DNA, 15 bp, Homo sapiens
ccacccccaaaattc

SEQ ID NO: 24630 - DNA, 15 bp, Homo sapiens
cccacccccaaaatt

SEQ ID NO: 24631 - DNA, 15 bp, Homo sapiens
ccccacccccaaaat

SEQ ID NO: 24632 - DNA, 15 bp, Homo sapiens
cccccacccccaaaa

SEQ ID NO: 24633 - DNA, 15 bp, Homo sapiens
acccccacccccaaa

SEQ ID NO: 24634 - DNA, 15 bp, Homo sapiens
aacccccacccccaa

SEQ ID NO: 24635 - DNA, 15 bp, Homo sapiens
caacccccaccccca

SEQ ID NO: 24636 - DNA, 15 bp, Homo sapiens
gcaacccccaccccc

SEQ ID NO: 24637 - DNA, 15 bp, Homo sapiens
cgcaacccccacccc

SEQ ID NO: 24638 - DNA, 15 bp, Homo sapiens
ccgcaacccccaccc

SEQ ID NO: 24639 - DNA, 15 bp, Homo sapiens
tccgcaacccccacc

SEQ ID NO: 24640 - DNA, 15 bp, Homo sapiens
ctccgcaacccccac

SEQ ID NO: 24641 - DNA, 15 bp, Homo sapiens
tctccgcaaccccca

SEQ ID NO: 24642 - DNA, 15 bp, Homo sapiens
ttctccgcaaccccc

SEQ ID NO: 24643 - DNA, 15 bp, Homo sapiens
tttctccgcaacccc

SEQ ID NO: 24644 - DNA, 15 bp, Homo sapiens
atttctccgcaaccc

SEQ ID NO: 24645 - DNA, 15 bp, Homo sapiens
gatttctccgcaacc

SEQ ID NO: 24646 - DNA, 15 bp, Homo sapiens
tgatttctccgcaac

SEQ ID NO: 24647 - DNA, 15 bp, Homo sapiens
ttgatttctccgcaa

SEQ ID NO: 24648 - DNA, 15 bp, Homo sapiens
cttgatttctccgca

SEQ ID NO: 24649 - DNA, 15 bp, Homo sapiens
acttgatttctccgc

SEQ ID NO: 24650 - DNA, 15 bp, Homo sapiens
aacttgatttctccg

SEQ ID NO: 24651 - DNA, 15 bp, Homo sapiens
aaacttgatttctcc

SEQ ID NO: 24652 - DNA, 15 bp, Homo sapiens
taaacttgatttctc

SEQ ID NO: 24653 - DNA, 15 bp, Homo sapiens
ttaaacttgatttct

SEQ ID NO: 24654 - DNA, 15 bp, Homo sapiens
tttaaacttgatttc

SEQ ID NO: 24655 - DNA, 15 bp, Homo sapiens
ttttaaacttgattt

SEQ ID NO: 24656 - DNA, 15 bp, Homo sapiens
attttaaacttgatt

SEQ ID NO: 24657 - DNA, 15 bp, Homo sapiens
aattttaaacttgat

SEQ ID NO: 24658 - DNA, 15 bp, Homo sapiens
gaattttaaacttga

SEQ ID NO: 24659 - DNA, 15 bp, Homo sapiens
ggaattttaaacttg

SEQ ID NO: 24660 - DNA, 15 bp, Homo sapiens
aggaattttaaactt

SEQ ID NO: 24661 - DNA, 15 bp, Homo sapiens
aaggaattttaaact

SEQ ID NO: 24662 - DNA, 15 bp, Homo sapiens
gaaggaattttaaac

SEQ ID NO: 24663 - DNA, 15 bp, Homo sapiens
agaaggaattttaaa

SEQ ID NO: 24664 - DNA, 15 bp, Homo sapiens
cagaaggaattttaa

SEQ ID NO: 24665 - DNA, 15 bp, Homo sapiens
tcagaaggaatttta

SEQ ID NO: 24666 - DNA, 15 bp, Homo sapiens
atcagaaggaatttt

SEQ ID NO: 24667 - DNA, 15 bp, Homo sapiens
aatcagaaggaattt

SEQ ID NO: 24668 - DNA, 15 bp, Homo sapiens
taatcagaaggaatt

SEQ ID NO: 24669 - DNA, 15 bp, Homo sapiens
ttaatcagaaggaat

SEQ ID NO: 24670 - DNA, 15 bp, Homo sapiens
tttaatcagaaggaa

SEQ ID NO: 24671 - DNA, 15 bp, Homo sapiens
ttttaatcagaagga

SEQ ID NO: 24672 - DNA, 15 bp, Homo sapiens
tttttaatcagaagg

SEQ ID NO: 24673 - DNA, 15 bp, Homo sapiens
ttttttaatcagaag

SEQ ID NO: 24674 - DNA, 15 bp, Homo sapiens
tttttttaatcagaa

SEQ ID NO: 24675 - DNA, 15 bp, Homo sapiens
atttttttaatcaga

SEQ ID NO: 24676 - DNA, 15 bp, Homo sapiens
tatttttttaatcag

SEQ ID NO: 24677 - DNA, 15 bp, Homo sapiens
atatttttttaatca

SEQ ID NO: 24678 - DNA, 15 bp, Homo sapiens
tatatttttttaatc

SEQ ID NO: 24679 - DNA, 15 bp, Homo sapiens
ctatatttttttaat

SEQ ID NO: 24680 - DNA, 15 bp, Homo sapiens
actatatttttttaa

SEQ ID NO: 24681 - DNA, 15 bp, Homo sapiens
cactatattttttta

SEQ ID NO: 24682 - DNA, 15 bp, Homo sapiens
ccactatattttttt

SEQ ID NO: 24683 - DNA, 15 bp, Homo sapiens
tccactatatttttt

SEQ ID NO: 24684 - DNA, 15 bp, Homo sapiens
ttccactatattttt

SEQ ID NO: 24685 - DNA, 15 bp, Homo sapiens
attccactatatttt

SEQ ID NO: 24686 - DNA, 15 bp, Homo sapiens
tattccactatattt

SEQ ID NO: 24687 - DNA, 15 bp, Homo sapiens
gtattccactatatt

SEQ ID NO: 24688 - DNA, 15 bp, Homo sapiens
tgtattccactatat

SEQ ID NO: 24689 - DNA, 15 bp, Homo sapiens
ttgtattccactata

SEQ ID NO: 24690 - DNA, 15 bp, Homo sapiens
attgtattccactat

SEQ ID NO: 24691 - DNA, 15 bp, Homo sapiens
aattgtattccacta

SEQ ID NO: 24692 - DNA, 15 bp, Homo sapiens
caattgtattccact

SEQ ID NO: 24693 - DNA, 15 bp, Homo sapiens
acaattgtattccac

SEQ ID NO: 24694 - DNA, 15 bp, Homo sapiens
gacaattgtattcca

SEQ ID NO: 24695 - DNA, 15 bp, Homo sapiens
agacaattgtattcc

SEQ ID NO: 24696 - DNA, 15 bp, Homo sapiens
cagacaattgtattc

SEQ ID NO: 24697 - DNA, 15 bp, Homo sapiens
gcagacaattgtatt

SEQ ID NO: 24698 - DNA, 15 bp, Homo sapiens
ggcagacaattgtat

SEQ ID NO: 24699 - DNA, 15 bp, Homo sapiens
cggcagacaattgta

SEQ ID NO: 24700 - DNA, 15 bp, Homo sapiens
acggcagacaattgt

SEQ ID NO: 24701 - DNA, 15 bp, Homo sapiens
aacggcagacaattg

SEQ ID NO: 24702 - DNA, 15 bp, Homo sapiens
aaacggcagacaatt

SEQ ID NO: 24703 - DNA, 15 bp, Homo sapiens
gaaacggcagacaat

SEQ ID NO: 24704 - DNA, 15 bp, Homo sapiens
ggaaacggcagacaa

SEQ ID NO: 24705 - DNA, 15 bp, Homo sapiens
gggaaacggcagaca

SEQ ID NO: 24706 - DNA, 15 bp, Homo sapiens
ggggaaacggcagac

SEQ ID NO: 24707 - DNA, 15 bp, Homo sapiens
aggggaaacggcaga

SEQ ID NO: 24708 - DNA, 15 bp, Homo sapiens
aaggggaaacggcag

SEQ ID NO: 24709 - DNA, 15 bp, Homo sapiens
gaaggggaaacggca

SEQ ID NO: 24710 - DNA, 15 bp, Homo sapiens
agaaggggaaacggc

SEQ ID NO: 24711 - DNA, 15 bp, Homo sapiens
aagaaggggaaacgg

SEQ ID NO: 24712 - DNA, 15 bp, Homo sapiens
taagaaggggaaacg

SEQ ID NO: 24713 - DNA, 15 bp, Homo sapiens
ttaagaaggggaaac

SEQ ID NO: 24714 - DNA, 15 bp, Homo sapiens
attaagaaggggaaa

SEQ ID NO: 24715 - DNA, 15 bp, Homo sapiens
cattaagaaggggaa

SEQ ID NO: 24716 - DNA, 15 bp, Homo sapiens
acattaagaagggga

SEQ ID NO: 24717 - DNA, 15 bp, Homo sapiens
tacattaagaagggg

SEQ ID NO: 24718 - DNA, 15 bp, Homo sapiens
atacattaagaaggg

SEQ ID NO: 24719 - DNA, 15 bp, Homo sapiens
tatacattaagaagg

SEQ ID NO: 24720 - DNA, 15 bp, Homo sapiens
atatacattaagaag

SEQ ID NO: 24721 - DNA, 15 bp, Homo sapiens
tatatacattaagaa

SEQ ID NO: 24722 - DNA, 15 bp, Homo sapiens
atatatacattaaga

SEQ ID NO: 24723 - DNA, 15 bp, Homo sapiens
aatatatacattaag

SEQ ID NO: 24724 - DNA, 15 bp, Homo sapiens
caatatatacattaa

SEQ ID NO: 24725 - DNA, 15 bp, Homo sapiens
acaatatatacatta

SEQ ID NO: 24726 - DNA, 15 bp, Homo sapiens
cacaatatatacatt

SEQ ID NO: 24727 - DNA, 15 bp, Homo sapiens
tcacaatatatacat

SEQ ID NO: 24728 - DNA, 15 bp, Homo sapiens
ctcacaatatataca

SEQ ID NO: 24729 - DNA, 15 bp, Homo sapiens
actcacaatatatac

SEQ ID NO: 24730 - DNA, 15 bp, Homo sapiens
tactcacaatatata

SEQ ID NO: 24731 - DNA, 15 bp, Homo sapiens
atactcacaatatat

SEQ ID NO: 24732 - DNA, 15 bp, Homo sapiens
aatactcacaatata

SEQ ID NO: 24733 - DNA, 15 bp, Homo sapiens
aaatactcacaatat

SEQ ID NO: 24734 - DNA, 15 bp, Homo sapiens
taaatactcacaata

SEQ ID NO: 24735 - DNA, 15 bp, Homo sapiens
ataaatactcacaat

SEQ ID NO: 24736 - DNA, 15 bp, Homo sapiens
aataaatactcacaa

SEQ ID NO: 24737 - DNA, 15 bp, Homo sapiens
taataaatactcaca

SEQ ID NO: 24738 - DNA, 15 bp, Homo sapiens
ctaataaatactcac

SEQ ID NO: 24739 - DNA, 15 bp, Homo sapiens
tctaataaatactca

SEQ ID NO: 24740 - DNA, 15 bp, Homo sapiens
atctaataaatactc

SEQ ID NO: 24741 - DNA, 15 bp, Homo sapiens
aatctaataaatact

SEQ ID NO: 24742 - DNA, 15 bp, Homo sapiens
gaatctaataaatac

SEQ ID NO: 24743 - DNA, 15 bp, Homo sapiens
cgaatctaataaata

SEQ ID NO: 24744 - DNA, 15 bp, Homo sapiens
acgaatctaataaat

SEQ ID NO: 24745 - DNA, 15 bp, Homo sapiens
tacgaatctaataaa

SEQ ID NO: 24746 - DNA, 15 bp, Homo sapiens
ctacgaatctaataa

SEQ ID NO: 24747 - DNA, 15 bp, Homo sapiens
cctacgaatctaata

SEQ ID NO: 24748 - DNA, 15 bp, Homo sapiens
acctacgaatctaat

SEQ ID NO: 24749 - DNA, 15 bp, Homo sapiens
gacctacgaatctaa

SEQ ID NO: 24750 - DNA, 15 bp, Homo sapiens
tgacctacgaatcta

SEQ ID NO: 24751 - DNA, 15 bp, Homo sapiens
atgacctacgaatct

SEQ ID NO: 24752 - DNA, 15 bp, Homo sapiens
tatgacctacgaatc

SEQ ID NO: 24753 - DNA, 15 bp, Homo sapiens
atatgacctacgaat

SEQ ID NO: 24754 - DNA, 15 bp, Homo sapiens
aatatgacctacgaa

SEQ ID NO: 24755 - DNA, 15 bp, Homo sapiens
taatatgacctacga

SEQ ID NO: 24756 - DNA, 15 bp, Homo sapiens
gtaatatgacctacg

SEQ ID NO: 24757 - DNA, 15 bp, Homo sapiens
agtaatatgacctac

SEQ ID NO: 24758 - DNA, 15 bp, Homo sapiens
aagtaatatgaccta

SEQ ID NO: 24759 - DNA, 15 bp, Homo sapiens
taagtaatatgacct

SEQ ID NO: 24760 - DNA, 15 bp, Homo sapiens
ataagtaatatgacc

SEQ ID NO: 24761 - DNA, 15 bp, Homo sapiens
gataagtaatatgac

SEQ ID NO: 24762 - DNA, 15 bp, Homo sapiens
tgataagtaatatga

SEQ ID NO: 24763 - DNA, 15 bp, Homo sapiens
ttgataagtaatatg

SEQ ID NO: 24764 - DNA, 15 bp, Homo sapiens
gttgataagtaatat

SEQ ID NO: 24765 - DNA, 15 bp, Homo sapiens
agttgataagtaata

SEQ ID NO: 24766 - DNA, 15 bp, Homo sapiens
cagttgataagtaat

SEQ ID NO: 24767 - DNA, 15 bp, Homo sapiens
tcagttgataagtaa

SEQ ID NO: 24768 - DNA, 15 bp, Homo sapiens
ctcagttgataagta

SEQ ID NO: 24769 - DNA, 15 bp, Homo sapiens
gctcagttgataagt

SEQ ID NO: 24770 - DNA, 15 bp, Homo sapiens
ggctcagttgataag

SEQ ID NO: 24771 - DNA, 15 bp, Homo sapiens
tggctcagttgataa

SEQ ID NO: 24772 - DNA, 15 bp, Homo sapiens
ttggctcagttgata

SEQ ID NO: 24773 - DNA, 15 bp, Homo sapiens
tttggctcagttgat

SEQ ID NO: 24774 - DNA, 15 bp, Homo sapiens
atttggctcagttga

SEQ ID NO: 24775 - DNA, 15 bp, Homo sapiens
catttggctcagttg

SEQ ID NO: 24776 - DNA, 15 bp, Homo sapiens
acatttggctcagtt

SEQ ID NO: 24777 - DNA, 15 bp, Homo sapiens
gacatttggctcagt

SEQ ID NO: 24778 - DNA, 15 bp, Homo sapiens
agacatttggctcag

SEQ ID NO: 24779 - DNA, 15 bp, Homo sapiens
cagacatttggctca

SEQ ID NO: 24780 - DNA, 15 bp, Homo sapiens
acagacatttggctc

SEQ ID NO: 24781 - DNA, 15 bp, Homo sapiens
cacagacatttggct

SEQ ID NO: 24782 - DNA, 15 bp, Homo sapiens
acacagacatttggc

SEQ ID NO: 24783 - DNA, 15 bp, Homo sapiens
cacacagacatttgg

SEQ ID NO: 24784 - DNA, 15 bp, Homo sapiens
gcacacagacatttg

SEQ ID NO: 24785 - DNA, 15 bp, Homo sapiens
tgcacacagacattt

SEQ ID NO: 24786 - DNA, 15 bp, Homo sapiens
ttgcacacagacatt

SEQ ID NO: 24787 - DNA, 15 bp, Homo sapiens
attgcacacagacat

SEQ ID NO: 24788 - DNA, 15 bp, Homo sapiens
aattgcacacagaca

SEQ ID NO: 24789 - DNA, 15 bp, Homo sapiens
caattgcacacagac

SEQ ID NO: 24790 - DNA, 15 bp, Homo sapiens
acaattgcacacaga

SEQ ID NO: 24791 - DNA, 15 bp, Homo sapiens
cacaattgcacacag

SEQ ID NO: 24792 - DNA, 15 bp, Homo sapiens
acacaattgcacaca

SEQ ID NO: 24793 - DNA, 15 bp, Homo sapiens
aacacaattgcacac

SEQ ID NO: 24794 - DNA, 15 bp, Homo sapiens
aaacacaattgcaca

SEQ ID NO: 24795 - DNA, 15 bp, Homo sapiens
gaaacacaattgcac

SEQ ID NO: 24796 - DNA, 15 bp, Homo sapiens
ggaaacacaattgca

SEQ ID NO: 24797 - DNA, 15 bp, Homo sapiens
aggaaacacaattgc

SEQ ID NO: 24798 - DNA, 15 bp, Homo sapiens
aaggaaacacaattg

SEQ ID NO: 24799 - DNA, 15 bp, Homo sapiens
aaaggaaacacaatt

SEQ ID NO: 24800 - DNA, 15 bp, Homo sapiens
taaaggaaacacaat

SEQ ID NO: 24801 - DNA, 15 bp, Homo sapiens
gtaaaggaaacacaa

SEQ ID NO: 24802 - DNA, 15 bp, Homo sapiens
ggtaaaggaaacaca

SEQ ID NO: 24803 - DNA, 15 bp, Homo sapiens
aggtaaaggaaacac

SEQ ID NO: 24804 - DNA, 15 bp, Homo sapiens
aaggtaaaggaaaca

SEQ ID NO: 24805 - DNA, 15 bp, Homo sapiens
caaggtaaaggaaac

SEQ ID NO: 24806 - DNA, 15 bp, Homo sapiens
acaaggtaaaggaaa

SEQ ID NO: 24807 - DNA, 15 bp, Homo sapiens
tacaaggtaaaggaa

SEQ ID NO: 24808 - DNA, 15 bp, Homo sapiens
ttacaaggtaaagga

SEQ ID NO: 24809 - DNA, 15 bp, Homo sapiens
tttacaaggtaaagg

SEQ ID NO: 24810 - DNA, 15 bp, Homo sapiens
ttttacaaggtaaag

SEQ ID NO: 24811 - DNA, 15 bp, Homo sapiens
attttacaaggtaaa

SEQ ID NO: 24812 - DNA, 15 bp, Homo sapiens
aattttacaaggtaa

SEQ ID NO: 24813 - DNA, 15 bp, Homo sapiens
aaattttacaaggta

SEQ ID NO: 24814 - DNA, 15 bp, Homo sapiens
aaaattttacaaggt

SEQ ID NO: 24815 - DNA, 15 bp, Homo sapiens
caaaattttacaagg

SEQ ID NO: 24816 - DNA, 15 bp, Homo sapiens
acaaaattttacaag

SEQ ID NO: 24817 - DNA, 15 bp, Homo sapiens
tacaaaattttacaa

SEQ ID NO: 24818 - DNA, 15 bp, Homo sapiens
gtacaaaattttaca

SEQ ID NO: 24819 - DNA, 15 bp, Homo sapiens
tgtacaaaattttac

SEQ ID NO: 24820 - DNA, 15 bp, Homo sapiens
ctgtacaaaatttta

SEQ ID NO: 24821 - DNA, 15 bp, Homo sapiens
gctgtacaaaatttt

SEQ ID NO: 24822 - DNA, 15 bp, Homo sapiens
tgctgtacaaaattt

SEQ ID NO: 24823 - DNA, 15 bp, Homo sapiens
atgctgtacaaaatt

SEQ ID NO: 24824 - DNA, 15 bp, Homo sapiens
tatgctgtacaaaat

SEQ ID NO: 24825 - DNA, 15 bp, Homo sapiens
ttatgctgtacaaaa

SEQ ID NO: 24826 - DNA, 15 bp, Homo sapiens
tttatgctgtacaaa

SEQ ID NO: 24827 - DNA, 15 bp, Homo sapiens
atttatgctgtacaa

SEQ ID NO: 24828 - DNA, 15 bp, Homo sapiens
tatttatgctgtaca

SEQ ID NO: 24829 - DNA, 15 bp, Homo sapiens
ttatttatgctgtac

SEQ ID NO: 24830 - DNA, 15 bp, Homo sapiens
cttatttatgctgta

SEQ ID NO: 24831 - DNA, 15 bp, Homo sapiens
acttatttatgctgt

SEQ ID NO: 24832 - DNA, 15 bp, Homo sapiens
tacttatttatgctg

SEQ ID NO: 24833 - DNA, 15 bp, Homo sapiens
ttacttatttatgct

SEQ ID NO: 24834 - DNA, 15 bp, Homo sapiens
tttacttatttatgc

SEQ ID NO: 24835 - DNA, 15 bp, Homo sapiens
ttttacttatttatg

SEQ ID NO: 24836 - DNA, 15 bp, Homo sapiens
tttttacttatttat

SEQ ID NO: 24837 - DNA, 15 bp, Homo sapiens
ttttttacttattta

SEQ ID NO: 24838 - DNA, 15 bp, Homo sapiens
tttttttacttattt

SEQ ID NO: 24839 - DNA, 15 bp, Homo sapiens
atttttttacttatt

SEQ ID NO: 24840 - DNA, 15 bp, Homo sapiens
gatttttttacttat

SEQ ID NO: 24841 - DNA, 15 bp, Homo sapiens
tgatttttttactta

SEQ ID NO: 24842 - DNA, 15 bp, Homo sapiens
gtgatttttttactt

SEQ ID NO: 24843 - DNA, 15 bp, Homo sapiens
agtgatttttttact

SEQ ID NO: 24844 - DNA, 15 bp, Homo sapiens
cagtgatttttttac

SEQ ID NO: 24845 - DNA, 15 bp, Homo sapiens
acagtgattttttta

SEQ ID NO: 24846 - DNA, 15 bp, Homo sapiens
aacagtgattttttt

SEQ ID NO: 24847 - DNA, 15 bp, Homo sapiens
aaacagtgatttttt

SEQ ID NO: 24848 - DNA, 15 bp, Homo sapiens
aaaacagtgattttt

SEQ ID NO: 24849 - DNA, 15 bp, Homo sapiens
aaaaacagtgatttt

SEQ ID NO: 24850 - DNA, 15 bp, Homo sapiens
gaaaaacagtgattt

SEQ ID NO: 24851 - DNA, 15 bp, Homo sapiens
agaaaaacagtgatt

SEQ ID NO: 24852 - DNA, 15 bp, Homo sapiens
gagaaaaacagtgat

SEQ ID NO: 24853 - DNA, 15 bp, Homo sapiens
tgagaaaaacagtga

SEQ ID NO: 24854 - DNA, 15 bp, Homo sapiens
ttgagaaaaacagtg

SEQ ID NO: 24855 - DNA, 15 bp, Homo sapiens
gttgagaaaaacagt

SEQ ID NO: 24856 - DNA, 15 bp, Homo sapiens
agttgagaaaaacag

SEQ ID NO: 24857 - DNA, 15 bp, Homo sapiens
aagttgagaaaaaca

SEQ ID NO: 24858 - DNA, 15 bp, Homo sapiens
aaagttgagaaaaac

SEQ ID NO: 24859 - DNA, 15 bp, Homo sapiens
aaaagttgagaaaaa

SEQ ID NO: 24860 - DNA, 15 bp, Homo sapiens
aaaaagttgagaaaa

SEQ ID NO: 24861 - DNA, 15 bp, Homo sapiens
gaaaaagttgagaaa

SEQ ID NO: 24862 - DNA, 15 bp, Homo sapiens
tgaaaaagttgagaa

SEQ ID NO: 24863 - DNA, 15 bp, Homo sapiens
ttgaaaaagttgaga

SEQ ID NO: 24864 - DNA, 15 bp, Homo sapiens
tttgaaaaagttgag

SEQ ID NO: 24865 - DNA, 15 bp, Homo sapiens
ttttgaaaaagttga

SEQ ID NO: 24866 - DNA, 15 bp, Homo sapiens
attttgaaaaagttg

SEQ ID NO: 24867 - DNA, 15 bp, Homo sapiens
gattttgaaaaagtt

SEQ ID NO: 24868 - DNA, 15 bp, Homo sapiens
tgattttgaaaaagt

SEQ ID NO: 24869 - DNA, 15 bp, Homo sapiens
ttgattttgaaaaag

SEQ ID NO: 24870 - DNA, 15 bp, Homo sapiens
cttgattttgaaaaa

SEQ ID NO: 24871 - DNA, 15 bp, Homo sapiens
ccttgattttgaaaa

SEQ ID NO: 24872 - DNA, 15 bp, Homo sapiens
tccttgattttgaaa

SEQ ID NO: 24873 - DNA, 15 bp, Homo sapiens
atccttgattttgaa

SEQ ID NO: 24874 - DNA, 15 bp, Homo sapiens
aatccttgattttga

SEQ ID NO: 24875 - DNA, 15 bp, Homo sapiens
caatccttgattttg

SEQ ID NO: 24876 - DNA, 15 bp, Homo sapiens
acaatccttgatttt

SEQ ID NO: 24877 - DNA, 15 bp, Homo sapiens
tacaatccttgattt

SEQ ID NO: 24878 - DNA, 15 bp, Homo sapiens
ttacaatccttgatt

SEQ ID NO: 24879 - DNA, 15 bp, Homo sapiens
tttacaatccttgat

SEQ ID NO: 24880 - DNA, 15 bp, Homo sapiens
atttacaatccttga

SEQ ID NO: 24881 - DNA, 15 bp, Homo sapiens
tatttacaatccttg

SEQ ID NO: 24882 - DNA, 15 bp, Homo sapiens
atatttacaatcctt

SEQ ID NO: 24883 - DNA, 15 bp, Homo sapiens
aatatttacaatcct

SEQ ID NO: 24884 - DNA, 15 bp, Homo sapiens
caatatttacaatcc

SEQ ID NO: 24885 - DNA, 15 bp, Homo sapiens
acaatatttacaatc

SEQ ID NO: 24886 - DNA, 15 bp, Homo sapiens
tacaatatttacaat

SEQ ID NO: 24887 - DNA, 15 bp, Homo sapiens
ctacaatatttacaa

SEQ ID NO: 24888 - DNA, 15 bp, Homo sapiens
tctacaatatttaca

SEQ ID NO: 24889 - DNA, 15 bp, Homo sapiens
atctacaatatttac

SEQ ID NO: 24890 - DNA, 15 bp, Homo sapiens
aatctacaatattta

SEQ ID NO: 24891 - DNA, 15 bp, Homo sapiens
gaatctacaatattt

SEQ ID NO: 24892 - DNA, 15 bp, Homo sapiens
agaatctacaatatt

SEQ ID NO: 24893 - DNA, 15 bp, Homo sapiens
aagaatctacaatat

SEQ ID NO: 24894 - DNA, 15 bp, Homo sapiens
aaagaatctacaata

SEQ ID NO: 24895 - DNA, 15 bp, Homo sapiens
aaaagaatctacaat

SEQ ID NO: 24896 - DNA, 15 bp, Homo sapiens
aaaaagaatctacaa

SEQ ID NO: 24897 - DNA, 15 bp, Homo sapiens
gaaaaagaatctaca

SEQ ID NO: 24898 - DNA, 15 bp, Homo sapiens
agaaaaagaatctac

SEQ ID NO: 24899 - DNA, 15 bp, Homo sapiens
cagaaaaagaatcta

SEQ ID NO: 24900 - DNA, 15 bp, Homo sapiens
acagaaaaagaatct

SEQ ID NO: 24901 - DNA, 15 bp, Homo sapiens
cacagaaaaagaatc

SEQ ID NO: 24902 - DNA, 15 bp, Homo sapiens
acacagaaaaagaat

SEQ ID NO: 24903 - DNA, 15 bp, Homo sapiens
cacacagaaaaagaa

SEQ ID NO: 24904 - DNA, 15 bp, Homo sapiens
tcacacagaaaaaga

SEQ ID NO: 24905 - DNA, 15 bp, Homo sapiens
atcacacagaaaaag

SEQ ID NO: 24906 - DNA, 15 bp, Homo sapiens
catcacacagaaaaa

SEQ ID NO: 24907 - DNA, 15 bp, Homo sapiens
acatcacacagaaaa

SEQ ID NO: 24908 - DNA, 15 bp, Homo sapiens
cacatcacacagaaa

SEQ ID NO: 24909 - DNA, 15 bp, Homo sapiens
acacatcacacagaa

SEQ ID NO: 24910 - DNA, 15 bp, Homo sapiens
gacacatcacacaga

SEQ ID NO: 24911 - DNA, 15 bp, Homo sapiens
ggacacatcacacag

SEQ ID NO: 24912 - DNA, 15 bp, Homo sapiens
aggacacatcacaca

SEQ ID NO: 24913 - DNA, 15 bp, Homo sapiens
taggacacatcacac

SEQ ID NO: 24914 - DNA, 15 bp, Homo sapiens
gtaggacacatcaca

SEQ ID NO: 24915 - DNA, 15 bp, Homo sapiens
agtaggacacatcac

SEQ ID NO: 24916 - DNA, 15 bp, Homo sapiens
cagtaggacacatca

SEQ ID NO: 24917 - DNA, 15 bp, Homo sapiens
acagtaggacacatc

SEQ ID NO: 24918 - DNA, 15 bp, Homo sapiens
aacagtaggacacat

SEQ ID NO: 24919 - DNA, 15 bp, Homo sapiens
aaacagtaggacaca

SEQ ID NO: 24920 - DNA, 15 bp, Homo sapiens
gaaacagtaggacac

SEQ ID NO: 24921 - DNA, 15 bp, Homo sapiens
tgaaacagtaggaca

SEQ ID NO: 24922 - DNA, 15 bp, Homo sapiens
atgaaacagtaggac

SEQ ID NO: 24923 - DNA, 15 bp, Homo sapiens
tatgaaacagtagga

SEQ ID NO: 24924 - DNA, 15 bp, Homo sapiens
ttatgaaacagtagg

SEQ ID NO: 24925 - DNA, 15 bp, Homo sapiens
attatgaaacagtag

SEQ ID NO: 24926 - DNA, 15 bp, Homo sapiens
cattatgaaacagta

SEQ ID NO: 24927 - DNA, 15 bp, Homo sapiens
gcattatgaaacagt

SEQ ID NO: 24928 - DNA, 15 bp, Homo sapiens
agcattatgaaacag

SEQ ID NO: 24929 - DNA, 15 bp, Homo sapiens
cagcattatgaaaca

SEQ ID NO: 24930 - DNA, 15 bp, Homo sapiens
acagcattatgaaac

SEQ ID NO: 24931 - DNA, 15 bp, Homo sapiens
tacagcattatgaaa

SEQ ID NO: 24932 - DNA, 15 bp, Homo sapiens
ttacagcattatgaa

SEQ ID NO: 24933 - DNA, 15 bp, Homo sapiens
gttacagcattatga

SEQ ID NO: 24934 - DNA, 15 bp, Homo sapiens
agttacagcattatg

SEQ ID NO: 24935 - DNA, 15 bp, Homo sapiens
aagttacagcattat

SEQ ID NO: 24936 - DNA, 15 bp, Homo sapiens
caagttacagcatta

SEQ ID NO: 24937 - DNA, 15 bp, Homo sapiens
acaagttacagcatt

SEQ ID NO: 24938 - DNA, 15 bp, Homo sapiens
tacaagttacagcat

SEQ ID NO: 24939 - DNA, 15 bp, Homo sapiens
ctacaagttacagca

SEQ ID NO: 24940 - DNA, 15 bp, Homo sapiens
tctacaagttacagc

SEQ ID NO: 24941 - DNA, 15 bp, Homo sapiens
ttctacaagttacag

SEQ ID NO: 24942 - DNA, 15 bp, Homo sapiens
tttctacaagttaca

SEQ ID NO: 24943 - DNA, 15 bp, Homo sapiens
atttctacaagttac

SEQ ID NO: 24944 - DNA, 15 bp, Homo sapiens
tatttctacaagtta

SEQ ID NO: 24945 - DNA, 15 bp, Homo sapiens
atatttctacaagtt

SEQ ID NO: 24946 - DNA, 15 bp, Homo sapiens
aatatttctacaagt

SEQ ID NO: 24947 - DNA, 15 bp, Homo sapiens
caatatttctacaag

SEQ ID NO: 24948 - DNA, 15 bp, Homo sapiens
acaatatttctacaa

SEQ ID NO: 24949 - DNA, 15 bp, Homo sapiens
tacaatatttctaca

SEQ ID NO: 24950 - DNA, 15 bp, Homo sapiens
atacaatatttctac

SEQ ID NO: 24951 - DNA, 15 bp, Homo sapiens
tatacaatatttcta

SEQ ID NO: 24952 - DNA, 15 bp, Homo sapiens
atatacaatatttct

SEQ ID NO: 24953 - DNA, 15 bp, Homo sapiens
aatatacaatatttc

SEQ ID NO: 24954 - DNA, 15 bp, Homo sapiens
aaatatacaatattt

SEQ ID NO: 24955 - DNA, 15 bp, Homo sapiens
taaatatacaatatt

SEQ ID NO: 24956 - DNA, 15 bp, Homo sapiens
ataaatatacaatat

SEQ ID NO: 24957 - DNA, 15 bp, Homo sapiens
aataaatatacaata

SEQ ID NO: 24958 - DNA, 15 bp, Homo sapiens
aaataaatatacaat

SEQ ID NO: 24959 - DNA, 15 bp, Homo sapiens
aaaataaatatacaa

SEQ ID NO: 24960 - DNA, 15 bp, Homo sapiens
gaaaataaatataca

SEQ ID NO: 24961 - DNA, 15 bp, Homo sapiens
agaaaataaatatac

SEQ ID NO: 24962 - DNA, 15 bp, Homo sapiens
cagaaaataaatata

SEQ ID NO: 24963 - DNA, 15 bp, Homo sapiens
gcagaaaataaatat

SEQ ID NO: 24964 - DNA, 15 bp, Homo sapiens
agcagaaaataaata

SEQ ID NO: 24965 - DNA, 15 bp, Homo sapiens
aagcagaaaataaat

SEQ ID NO: 24966 - DNA, 15 bp, Homo sapiens
taagcagaaaataaa

SEQ ID NO: 24967 - DNA, 15 bp, Homo sapiens
ataagcagaaaataa

SEQ ID NO: 24968 - DNA, 15 bp, Homo sapiens
aataagcagaaaata

SEQ ID NO: 24969 - DNA, 15 bp, Homo sapiens
aaataagcagaaaat

SEQ ID NO: 24970 - DNA, 15 bp, Homo sapiens
taaataagcagaaaa

SEQ ID NO: 24971 - DNA, 15 bp, Homo sapiens
ttaaataagcagaaa

SEQ ID NO: 24972 - DNA, 15 bp, Homo sapiens
attaaataagcagaa

SEQ ID NO: 24973 - DNA, 15 bp, Homo sapiens
cattaaataagcaga

SEQ ID NO: 24974 - DNA, 15 bp, Homo sapiens
acattaaataagcag

SEQ ID NO: 24975 - DNA, 15 bp, Homo sapiens
gacattaaataagca

SEQ ID NO: 24976 - DNA, 15 bp, Homo sapiens
agacattaaataagc

SEQ ID NO: 24977 - DNA, 15 bp, Homo sapiens
aagacattaaataag

SEQ ID NO: 24978 - DNA, 15 bp, Homo sapiens
taagacattaaataa

SEQ ID NO: 24979 - DNA, 15 bp, Homo sapiens
ttaagacattaaata

SEQ ID NO: 24980 - DNA, 15 bp, Homo sapiens
attaagacattaaat

SEQ ID NO: 24981 - DNA, 15 bp, Homo sapiens
aattaagacattaaa

SEQ ID NO: 24982 - DNA, 15 bp, Homo sapiens
aaattaagacattaa

SEQ ID NO: 24983 - DNA, 15 bp, Homo sapiens
gaaattaagacatta

SEQ ID NO: 24984 - DNA, 15 bp, Homo sapiens
agaaattaagacatt

SEQ ID NO: 24985 - DNA, 15 bp, Homo sapiens
cagaaattaagacat

SEQ ID NO: 24986 - DNA, 15 bp, Homo sapiens
tcagaaattaagaca

SEQ ID NO: 24987 - DNA, 15 bp, Homo sapiens
ttcagaaattaagac

SEQ ID NO: 24988 - DNA, 15 bp, Homo sapiens
tttcagaaattaaga

SEQ ID NO: 24989 - DNA, 15 bp, Homo sapiens
ttttcagaaattaag

SEQ ID NO: 24990 - DNA, 15 bp, Homo sapiens
cttttcagaaattaa

SEQ ID NO: 24991 - DNA, 15 bp, Homo sapiens
acttttcagaaatta

SEQ ID NO: 24992 - DNA, 15 bp, Homo sapiens
tacttttcagaaatt

SEQ ID NO: 24993 - DNA, 15 bp, Homo sapiens
atacttttcagaaat

SEQ ID NO: 24994 - DNA, 15 bp, Homo sapiens
aatacttttcagaaa

SEQ ID NO: 24995 - DNA, 15 bp, Homo sapiens
taatacttttcagaa

SEQ ID NO: 24996 - DNA, 15 bp, Homo sapiens
ttaatacttttcaga

SEQ ID NO: 24997 - DNA, 15 bp, Homo sapiens
gttaatacttttcag

SEQ ID NO: 24998 - DNA, 15 bp, Homo sapiens
tgttaatacttttca

SEQ ID NO: 24999 - DNA, 15 bp, Homo sapiens
atgttaatacttttc

SEQ ID NO: 25000 - DNA, 15 bp, Homo sapiens
gatgttaatactttt

SEQ ID NO: 25001 - DNA, 15 bp, Homo sapiens
ggatgttaatacttt

SEQ ID NO: 25002 - DNA, 15 bp, Homo sapiens
gggatgttaatactt

SEQ ID NO: 25003 - DNA, 15 bp, Homo sapiens
agggatgttaatact

SEQ ID NO: 25004 - DNA, 15 bp, Homo sapiens
cagggatgttaatac

SEQ ID NO: 25005 - DNA, 15 bp, Homo sapiens
acagggatgttaata

SEQ ID NO: 25006 - DNA, 15 bp, Homo sapiens
gacagggatgttaat

SEQ ID NO: 25007 - DNA, 15 bp, Homo sapiens
agacagggatgttaa

SEQ ID NO: 25008 - DNA, 15 bp, Homo sapiens
gagacagggatgtta

SEQ ID NO: 25009 - DNA, 15 bp, Homo sapiens
ggagacagggatgtt

SEQ ID NO: 25010 - DNA, 15 bp, Homo sapiens
gggagacagggatgt

SEQ ID NO: 25011 - DNA, 15 bp, Homo sapiens
tgggagacagggatg

SEQ ID NO: 25012 - DNA, 15 bp, Homo sapiens
gtgggagacagggat

SEQ ID NO: 25013 - DNA, 15 bp, Homo sapiens
agtgggagacaggga

SEQ ID NO: 25014 - DNA, 15 bp, Homo sapiens
gagtgggagacaggg

SEQ ID NO: 25015 - DNA, 15 bp, Homo sapiens
ggagtgggagacagg

SEQ ID NO: 25016 - DNA, 15 bp, Homo sapiens
gggagtgggagacag

SEQ ID NO: 25017 - DNA, 15 bp, Homo sapiens
ggggagtgggagaca

SEQ ID NO: 25018 - DNA, 15 bp, Homo sapiens
aggggagtgggagac

SEQ ID NO: 25019 - DNA, 15 bp, Homo sapiens
caggggagtgggaga

SEQ ID NO: 25020 - DNA, 15 bp, Homo sapiens
gcaggggagtgggag

SEQ ID NO: 25021 - DNA, 15 bp, Homo sapiens
ggcaggggagtggga

SEQ ID NO: 25022 - DNA, 15 bp, Homo sapiens
cggcaggggagtggg

SEQ ID NO: 25023 - DNA, 15 bp, Homo sapiens
acggcaggggagtgg

SEQ ID NO: 25024 - DNA, 15 bp, Homo sapiens
gacggcaggggagtg

SEQ ID NO: 25025 - DNA, 15 bp, Homo sapiens
ggacggcaggggagt

SEQ ID NO: 25026 - DNA, 15 bp, Homo sapiens
gggacggcaggggag

SEQ ID NO: 25027 - DNA, 15 bp, Homo sapiens
tgggacggcagggga

SEQ ID NO: 25028 - DNA, 15 bp, Homo sapiens
atgggacggcagggg

SEQ ID NO: 25029 - DNA, 15 bp, Homo sapiens
catgggacggcaggg

SEQ ID NO: 25030 - DNA, 15 bp, Homo sapiens
aacaagttgactaaa

SEQ ID NO: 25031 - DNA, 15 bp, Homo sapiens
caacaagttgactaa

SEQ ID NO: 25032 - DNA, 15 bp, Homo sapiens
tcaacaagttgacta

SEQ ID NO: 25033 - DNA, 15 bp, Homo sapiens
ttcaacaagttgact

SEQ ID NO: 25034 - DNA, 15 bp, Homo sapiens
cttcaacaagttgac

SEQ ID NO: 25035 - DNA, 15 bp, Homo sapiens
tcttcaacaagttga

SEQ ID NO: 25036 - DNA, 15 bp, Homo sapiens
ctcttcaacaagttg

SEQ ID NO: 25037 - DNA, 15 bp, Homo sapiens
gctcttcaacaagtt

SEQ ID NO: 25038 - DNA, 15 bp, Homo sapiens
agctcttcaacaagt

SEQ ID NO: 25039 - DNA, 15 bp, Homo sapiens
tagctcttcaacaag

SEQ ID NO: 25040 - DNA, 15 bp, Homo sapiens
atagctcttcaacaa

SEQ ID NO: 25041 - DNA, 15 bp, Homo sapiens
aatagctcttcaaca

SEQ ID NO: 25042 - DNA, 15 bp, Homo sapiens
caatagctcttcaac

SEQ ID NO: 25043 - DNA, 15 bp, Homo sapiens
tcaatagctcttcaa

SEQ ID NO: 25044 - DNA, 15 bp, Homo sapiens
ttcaatagctcttca

SEQ ID NO: 25045 - DNA, 15 bp, Homo sapiens
tttcaatagctcttc

SEQ ID NO: 25046 - DNA, 15 bp, Homo sapiens
ttttcaatagctctt

SEQ ID NO: 25047 - DNA, 15 bp, Homo sapiens
attttcaatagctct

SEQ ID NO: 25048 - DNA, 15 bp, Homo sapiens
gattttcaatagctc

SEQ ID NO: 25049 - DNA, 15 bp, Homo sapiens
tgattttcaatagct

SEQ ID NO: 25050 - DNA, 15 bp, Homo sapiens
atgattttcaatagc

SEQ ID NO: 25051 - DNA, 15 bp, Homo sapiens
aatgattttcaatag

SEQ ID NO: 25052 - DNA, 15 bp, Homo sapiens
aaatgattttcaata

SEQ ID NO: 25053 - DNA, 15 bp, Homo sapiens
caaatgattttcaat

SEQ ID NO: 25054 - DNA, 15 bp, Homo sapiens
acaaatgattttcaa

SEQ ID NO: 25055 - DNA, 15 bp, Homo sapiens
cacaaatgattttca

SEQ ID NO: 25056 - DNA, 15 bp, Homo sapiens
gcacaaatgattttc

SEQ ID NO: 25057 - DNA, 15 bp, Homo sapiens
agcacaaatgatttt

SEQ ID NO: 25058 - DNA, 15 bp, Homo sapiens
aagcacaaatgattt

SEQ ID NO: 25059 - DNA, 15 bp, Homo sapiens
aaagcacaaatgatt

SEQ ID NO: 25060 - DNA, 15 bp, Homo sapiens
aaaagcacaaatgat

SEQ ID NO: 25061 - DNA, 15 bp, Homo sapiens
gaaaagcacaaatga

SEQ ID NO: 25062 - DNA, 15 bp, Homo sapiens
tgaaaagcacaaatg

SEQ ID NO: 25063 - DNA, 15 bp, Homo sapiens
ctgaaaagcacaaat

SEQ ID NO: 25064 - DNA, 15 bp, Homo sapiens
gctgaaaagcacaaa

SEQ ID NO: 25065 - DNA, 15 bp, Homo sapiens
agctgaaaagcacaa

SEQ ID NO: 25066 - DNA, 15 bp, Homo sapiens
aagctgaaaagcaca

SEQ ID NO: 25067 - DNA, 15 bp, Homo sapiens
caagctgaaaagcac

SEQ ID NO: 25068 - DNA, 15 bp, Homo sapiens
tcaagctgaaaagca

SEQ ID NO: 25069 - DNA, 15 bp, Homo sapiens
gtcaagctgaaaagc

SEQ ID NO: 25070 - DNA, 15 bp, Homo sapiens
tgtcaagctgaaaag

SEQ ID NO: 25071 - DNA, 15 bp, Homo sapiens
gtgtcaagctgaaaa

SEQ ID NO: 25072 - DNA, 15 bp, Homo sapiens
tgtgtcaagctgaaa

SEQ ID NO: 25073 - DNA, 15 bp, Homo sapiens
ctgtgtcaagctgaa

SEQ ID NO: 25074 - DNA, 15 bp, Homo sapiens
cctgtgtcaagctga

SEQ ID NO: 25075 - DNA, 15 bp, Homo sapiens
acctgtgtcaagctg

SEQ ID NO: 25076 - DNA, 15 bp, Homo sapiens
aacctgtgtcaagct

SEQ ID NO: 25077 - DNA, 15 bp, Homo sapiens
aaacctgtgtcaagc

SEQ ID NO: 25078 - DNA, 15 bp, Homo sapiens
caaacctgtgtcaag

SEQ ID NO: 25079 - DNA, 15 bp, Homo sapiens
ccaaacctgtgtcaa

SEQ ID NO: 25080 - DNA, 15 bp, Homo sapiens
tccaaacctgtgtca

SEQ ID NO: 25081 - DNA, 15 bp, Homo sapiens
ctccaaacctgtgtc

SEQ ID NO: 25082 - DNA, 15 bp, Homo sapiens
actccaaacctgtgt

SEQ ID NO: 25083 - DNA, 15 bp, Homo sapiens
cactccaaacctgtg

SEQ ID NO: 25084 - DNA, 15 bp, Homo sapiens
acactccaaacctgt

SEQ ID NO: 25085 - DNA, 15 bp, Homo sapiens
tacactccaaacctg

SEQ ID NO: 25086 - DNA, 15 bp, Homo sapiens
ttacactccaaacct

SEQ ID NO: 25087 - DNA, 15 bp, Homo sapiens
cttacactccaaacc

SEQ ID NO: 25088 - DNA, 15 bp, Homo sapiens
acttacactccaaac

SEQ ID NO: 25089 - DNA, 15 bp, Homo sapiens
cacttacactccaaa

SEQ ID NO: 25090 - DNA, 15 bp, Homo sapiens
acacttacactccaa

SEQ ID NO: 25091 - DNA, 15 bp, Homo sapiens
aacacttacactcca

SEQ ID NO: 25092 - DNA, 15 bp, Homo sapiens
caacacttacactcc

SEQ ID NO: 25093 - DNA, 15 bp, Homo sapiens
tcaacacttacactc

SEQ ID NO: 25094 - DNA, 15 bp, Homo sapiens
ttcaacacttacact

SEQ ID NO: 25095 - DNA, 15 bp, Homo sapiens
attcaacacttacac

SEQ ID NO: 25096 - DNA, 15 bp, Homo sapiens
tattcaacacttaca

SEQ ID NO: 25097 - DNA, 15 bp, Homo sapiens
atattcaacacttac

SEQ ID NO: 25098 - DNA, 15 bp, Homo sapiens
gatattcaacactta

SEQ ID NO: 25099 - DNA, 15 bp, Homo sapiens
ggatattcaacactt

SEQ ID NO: 25100 - DNA, 15 bp, Homo sapiens
gggatattcaacact

SEQ ID NO: 25101 - DNA, 15 bp, Homo sapiens
tgggatattcaacac

SEQ ID NO: 25102 - DNA, 15 bp, Homo sapiens
ttgggatattcaaca

SEQ ID NO: 25103 - DNA, 15 bp, Homo sapiens
cttgggatattcaac

SEQ ID NO: 25104 - DNA, 15 bp, Homo sapiens
tcttgggatattcaa

SEQ ID NO: 25105 - DNA, 15 bp, Homo sapiens
ttcttgggatattca

SEQ ID NO: 25106 - DNA, 15 bp, Homo sapiens
attcttgggatattc

SEQ ID NO: 25107 - DNA, 15 bp, Homo sapiens
cattcttgggatatt

SEQ ID NO: 25108 - DNA, 15 bp, Homo sapiens
tcattcttgggatat

SEQ ID NO: 25109 - DNA, 15 bp, Homo sapiens
gtcattcttgggata

SEQ ID NO: 25110 - DNA, 15 bp, Homo sapiens
tgtcattcttgggat

SEQ ID NO: 25111 - DNA, 15 bp, Homo sapiens
gtgtcattcttggga

SEQ ID NO: 25112 - DNA, 15 bp, Homo sapiens
agtgtcattcttggg

SEQ ID NO: 25113 - DNA, 15 bp, Homo sapiens
gagtgtcattcttgg

SEQ ID NO: 25114 - DNA, 15 bp, Homo sapiens
tgagtgtcattcttg

SEQ ID NO: 25115 - DNA, 15 bp, Homo sapiens
ttgagtgtcattctt

SEQ ID NO: 25116 - DNA, 15 bp, Homo sapiens
cttgagtgtcattct

SEQ ID NO: 25117 - DNA, 15 bp, Homo sapiens
acttgagtgtcattc

SEQ ID NO: 25118 - DNA, 15 bp, Homo sapiens
cacttgagtgtcatt

SEQ ID NO: 25119 - DNA, 15 bp, Homo sapiens
gcacttgagtgtcat

SEQ ID NO: 25120 - DNA, 15 bp, Homo sapiens
agcacttgagtgtca

SEQ ID NO: 25121 - DNA, 15 bp, Homo sapiens
cagcacttgagtgtc

SEQ ID NO: 25122 - DNA, 15 bp, Homo sapiens
acagcacttgagtgt

SEQ ID NO: 25123 - DNA, 15 bp, Homo sapiens
gacagcacttgagtg

SEQ ID NO: 25124 - DNA, 15 bp, Homo sapiens
ggacagcacttgagt

SEQ ID NO: 25125 - DNA, 15 bp, Homo sapiens
tggacagcacttgag

SEQ ID NO: 25126 - DNA, 15 bp, Homo sapiens
atggacagcacttga

SEQ ID NO: 25127 - DNA, 15 bp, Homo sapiens
catggacagcacttg

SEQ ID NO: 25128 - DNA, 15 bp, Homo sapiens
tcatggacagcactt

SEQ ID NO: 25129 - DNA, 15 bp, Homo sapiens
ttcatggacagcact

SEQ ID NO: 25130 - DNA, 15 bp, Homo sapiens
tttcatggacagcac

SEQ ID NO: 25131 - DNA, 15 bp, Homo sapiens
ttttcatggacagca

SEQ ID NO: 25132 - DNA, 15 bp, Homo sapiens
gttttcatggacagc

SEQ ID NO: 25133 - DNA, 15 bp, Homo sapiens
agttttcatggacag

SEQ ID NO: 25134 - DNA, 15 bp, Homo sapiens
gagttttcatggaca

SEQ ID NO: 25135 - DNA, 15 bp, Homo sapiens
tgagttttcatggac

SEQ ID NO: 25136 - DNA, 15 bp, Homo sapiens
ctgagttttcatgga

SEQ ID NO: 25137 - DNA, 15 bp, Homo sapiens
cctgagttttcatgg

SEQ ID NO: 25138 - DNA, 15 bp, Homo sapiens
tcctgagttttcatg

SEQ ID NO: 25139 - DNA, 15 bp, Homo sapiens
ttcctgagttttcat

SEQ ID NO: 25140 - DNA, 15 bp, Homo sapiens
cttcctgagttttca

SEQ ID NO: 25141 - DNA, 15 bp, Homo sapiens
acttcctgagttttc

SEQ ID NO: 25142 - DNA, 15 bp, Homo sapiens
aacttcctgagtttt

SEQ ID NO: 25143 - DNA, 15 bp, Homo sapiens
aaacttcctgagttt

SEQ ID NO: 25144 - DNA, 15 bp, Homo sapiens
caaacttcctgagtt

SEQ ID NO: 25145 - DNA, 15 bp, Homo sapiens
gcaaacttcctgagt

SEQ ID NO: 25146 - DNA, 15 bp, Homo sapiens
tgcaaacttcctgag

SEQ ID NO: 25147 - DNA, 15 bp, Homo sapiens
gtgcaaacttcctga

SEQ ID NO: 25148 - DNA, 15 bp, Homo sapiens
tgtgcaaacttcctg

SEQ ID NO: 25149 - DNA, 15 bp, Homo sapiens
ttgtgcaaacttcct

SEQ ID NO: 25150 - DNA, 15 bp, Homo sapiens
attgtgcaaacttcc

SEQ ID NO: 25151 - DNA, 15 bp, Homo sapiens
aattgtgcaaacttc

SEQ ID NO: 25152 - DNA, 15 bp, Homo sapiens
taattgtgcaaactt

SEQ ID NO: 25153 - DNA, 15 bp, Homo sapiens
gtaattgtgcaaact

SEQ ID NO: 25154 - DNA, 15 bp, Homo sapiens
agtaattgtgcaaac

SEQ ID NO: 25155 - DNA, 15 bp, Homo sapiens
aagtaattgtgcaaa

SEQ ID NO: 25156 - DNA, 15 bp, Homo sapiens
aaagtaattgtgcaa

SEQ ID NO: 25157 - DNA, 15 bp, Homo sapiens
gaaagtaattgtgca

SEQ ID NO: 25158 - DNA, 15 bp, Homo sapiens
agaaagtaattgtgc

SEQ ID NO: 25159 - DNA, 15 bp, Homo sapiens
tagaaagtaattgtg

SEQ ID NO: 25160 - DNA, 15 bp, Homo sapiens
atagaaagtaattgt

SEQ ID NO: 25161 - DNA, 15 bp, Homo sapiens
catagaaagtaattg

SEQ ID NO: 25162 - DNA, 15 bp, Homo sapiens
tcatagaaagtaatt

SEQ ID NO: 25163 - DNA, 15 bp, Homo sapiens
gtcatagaaagtaat

SEQ ID NO: 25164 - DNA, 15 bp, Homo sapiens
cgtcatagaaagtaa

SEQ ID NO: 25165 - DNA, 15 bp, Homo sapiens
acgtcatagaaagta

SEQ ID NO: 25166 - DNA, 15 bp, Homo sapiens
cacgtcatagaaagt

SEQ ID NO: 25167 - DNA, 15 bp, Homo sapiens
ccacgtcatagaaag

SEQ ID NO: 25168 - DNA, 15 bp, Homo sapiens
accacgtcatagaaa

SEQ ID NO: 25169 - DNA, 15 bp, Homo sapiens
caccacgtcatagaa

SEQ ID NO: 25170 - DNA, 15 bp, Homo sapiens
tcaccacgtcataga

SEQ ID NO: 25171 - DNA, 15 bp, Homo sapiens
atcaccacgtcatag

SEQ ID NO: 25172 - DNA, 15 bp, Homo sapiens
tatcaccacgtcata

SEQ ID NO: 25173 - DNA, 15 bp, Homo sapiens
ttatcaccacgtcat

SEQ ID NO: 25174 - DNA, 15 bp, Homo sapiens
cttatcaccacgtca

SEQ ID NO: 25175 - DNA, 15 bp, Homo sapiens
tcttatcaccacgtc

SEQ ID NO: 25176 - DNA, 15 bp, Homo sapiens
gtcttatcaccacgt

SEQ ID NO: 25177 - DNA, 15 bp, Homo sapiens
ggtcttatcaccacg

SEQ ID NO: 25178 - DNA, 15 bp, Homo sapiens
aggtcttatcaccac

SEQ ID NO: 25179 - DNA, 15 bp, Homo sapiens
aaggtcttatcacca

SEQ ID NO: 25180 - DNA, 15 bp, Homo sapiens
aaaggtcttatcacc

SEQ ID NO: 25181 - DNA, 15 bp, Homo sapiens
aaaaggtcttatcac

SEQ ID NO: 25182 - DNA, 15 bp, Homo sapiens
taaaaggtcttatca

SEQ ID NO: 25183 - DNA, 15 bp, Homo sapiens
ctaaaaggtcttatc

SEQ ID NO: 25184 - DNA, 15 bp, Homo sapiens
actaaaaggtcttat

SEQ ID NO: 25185 - DNA, 15 bp, Homo sapiens
gactaaaaggtctta

SEQ ID NO: 25186 - DNA, 15 bp, Homo sapiens
agactaaaaggtctt

SEQ ID NO: 25187 - DNA, 15 bp, Homo sapiens
tagactaaaaggtct

SEQ ID NO: 25188 - DNA, 15 bp, Homo sapiens
ctagactaaaaggtc

SEQ ID NO: 25189 - DNA, 15 bp, Homo sapiens
cctagactaaaaggt

SEQ ID NO: 25190 - DNA, 15 bp, Homo sapiens
acctagactaaaagg

SEQ ID NO: 25191 - DNA, 15 bp, Homo sapiens
aacctagactaaaag

SEQ ID NO: 25192 - DNA, 15 bp, Homo sapiens
taacctagactaaaa

SEQ ID NO: 25193 - DNA, 15 bp, Homo sapiens
ttaacctagactaaa

SEQ ID NO: 25194 - DNA, 15 bp, Homo sapiens
attaacctagactaa

SEQ ID NO: 25195 - DNA, 15 bp, Homo sapiens
aattaacctagacta

SEQ ID NO: 25196 - DNA, 15 bp, Homo sapiens
aaattaacctagact

SEQ ID NO: 25197 - DNA, 15 bp, Homo sapiens
aaaattaacctagac

SEQ ID NO: 25198 - DNA, 15 bp, Homo sapiens
taaaattaacctaga

SEQ ID NO: 25199 - DNA, 15 bp, Homo sapiens
ctaaaattaacctag

SEQ ID NO: 25200 - DNA, 15 bp, Homo sapiens
actaaaattaaccta

SEQ ID NO: 25201 - DNA, 15 bp, Homo sapiens
aactaaaattaacct

SEQ ID NO: 25202 - DNA, 15 bp, Homo sapiens
gaactaaaattaacc

SEQ ID NO: 25203 - DNA, 15 bp, Homo sapiens
agaactaaaattaac

SEQ ID NO: 25204 - DNA, 15 bp, Homo sapiens
cagaactaaaattaa

SEQ ID NO: 25205 - DNA, 15 bp, Homo sapiens
acagaactaaaatta

SEQ ID NO: 25206 - DNA, 15 bp, Homo sapiens
tacagaactaaaatt

SEQ ID NO: 25207 - DNA, 15 bp, Homo sapiens
atacagaactaaaat

SEQ ID NO: 25208 - DNA, 15 bp, Homo sapiens
gatacagaactaaaa

SEQ ID NO: 25209 - DNA, 15 bp, Homo sapiens
agatacagaactaaa

SEQ ID NO: 25210 - DNA, 15 bp, Homo sapiens
cagatacagaactaa

SEQ ID NO: 25211 - DNA, 15 bp, Homo sapiens
acagatacagaacta

SEQ ID NO: 25212 - DNA, 15 bp, Homo sapiens
tacagatacagaact

SEQ ID NO: 25213 - DNA, 15 bp, Homo sapiens
ttacagatacagaac

SEQ ID NO: 25214 - DNA, 15 bp, Homo sapiens
attacagatacagaa

SEQ ID NO: 25215 - DNA, 15 bp, Homo sapiens
gattacagatacaga

SEQ ID NO: 25216 - DNA, 15 bp, Homo sapiens
agattacagatacag

SEQ ID NO: 25217 - DNA, 15 bp, Homo sapiens
tagattacagataca

SEQ ID NO: 25218 - DNA, 15 bp, Homo sapiens
atagattacagatac

SEQ ID NO: 25219 - DNA, 15 bp, Homo sapiens
aatagattacagata

SEQ ID NO: 25220 - DNA, 15 bp, Homo sapiens
aaatagattacagat

SEQ ID NO: 25221 - DNA, 15 bp, Homo sapiens
aaaatagattacaga

SEQ ID NO: 25222 - DNA, 15 bp, Homo sapiens
aaaaatagattacag

SEQ ID NO: 25223 - DNA, 15 bp, Homo sapiens
taaaaatagattaca

SEQ ID NO: 25224 - DNA, 15 bp, Homo sapiens
ttaaaaatagattac

SEQ ID NO: 25225 - DNA, 15 bp, Homo sapiens
tttaaaaatagatta

SEQ ID NO: 25226 - DNA, 15 bp, Homo sapiens
ttttaaaaatagatt

SEQ ID NO: 25227 - DNA, 15 bp, Homo sapiens
tttttaaaaatagat

SEQ ID NO: 25228 - DNA, 15 bp, Homo sapiens
ttttttaaaaataga

SEQ ID NO: 25229 - DNA, 15 bp, Homo sapiens
attttttaaaaatag

SEQ ID NO: 25230 - DNA, 15 bp, Homo sapiens
aattttttaaaaata

SEQ ID NO: 25231 - DNA, 15 bp, Homo sapiens
taattttttaaaaat

SEQ ID NO: 25232 - DNA, 15 bp, Homo sapiens
gtaattttttaaaaa

SEQ ID NO: 25233 - DNA, 15 bp, Homo sapiens
agtaattttttaaaa

SEQ ID NO: 25234 - DNA, 15 bp, Homo sapiens
gagtaattttttaaa

SEQ ID NO: 25235 - DNA, 15 bp, Homo sapiens
ggagtaattttttaa

SEQ ID NO: 25236 - DNA, 15 bp, Homo sapiens
gggagtaatttttta

SEQ ID NO: 25237 - DNA, 15 bp, Homo sapiens
tgggagtaatttttt

SEQ ID NO: 25238 - DNA, 15 bp, Homo sapiens
gtgggagtaattttt

SEQ ID NO: 25239 - DNA, 15 bp, Homo sapiens
agtgggagtaatttt

SEQ ID NO: 25240 - DNA, 15 bp, Homo sapiens
cagtgggagtaattt

SEQ ID NO: 25241 - DNA, 15 bp, Homo sapiens
ccagtgggagtaatt

SEQ ID NO: 25242 - DNA, 15 bp, Homo sapiens
accagtgggagtaat

SEQ ID NO: 25243 - DNA, 15 bp, Homo sapiens
gaccagtgggagtaa

SEQ ID NO: 25244 - DNA, 15 bp, Homo sapiens
agaccagtgggagta

SEQ ID NO: 25245 - DNA, 15 bp, Homo sapiens
gagaccagtgggagt

SEQ ID NO: 25246 - DNA, 15 bp, Homo sapiens
tgagaccagtgggag

SEQ ID NO: 25247 - DNA, 15 bp, Homo sapiens
gtgagaccagtggga

SEQ ID NO: 25248 - DNA, 15 bp, Homo sapiens
tgtgagaccagtggg

SEQ ID NO: 25249 - DNA, 15 bp, Homo sapiens
gtgtgagaccagtgg

SEQ ID NO: 25250 - DNA, 15 bp, Homo sapiens
ggtgtgagaccagtg

SEQ ID NO: 25251 - DNA, 15 bp, Homo sapiens
aggtgtgagaccagt

SEQ ID NO: 25252 - DNA, 15 bp, Homo sapiens
aaggtgtgagaccag

SEQ ID NO: 25253 - DNA, 15 bp, Homo sapiens
taaggtgtgagacca

SEQ ID NO: 25254 - DNA, 15 bp, Homo sapiens
ataaggtgtgagacc

SEQ ID NO: 25255 - DNA, 15 bp, Homo sapiens
aataaggtgtgagac

SEQ ID NO: 25256 - DNA, 15 bp, Homo sapiens
aaataaggtgtgaga

SEQ ID NO: 25257 - DNA, 15 bp, Homo sapiens
aaaataaggtgtgag

SEQ ID NO: 25258 - DNA, 15 bp, Homo sapiens
taaaataaggtgtga

SEQ ID NO: 25259 - DNA, 15 bp, Homo sapiens
ataaaataaggtgtg

SEQ ID NO: 25260 - DNA, 15 bp, Homo sapiens
gataaaataaggtgt

SEQ ID NO: 25261 - DNA, 15 bp, Homo sapiens
tgataaaataaggtg

SEQ ID NO: 25262 - DNA, 15 bp, Homo sapiens
ttgataaaataaggt

SEQ ID NO: 25263 - DNA, 15 bp, Homo sapiens
attgataaaataagg

SEQ ID NO: 25264 - DNA, 15 bp, Homo sapiens
gattgataaaataag

SEQ ID NO: 25265 - DNA, 15 bp, Homo sapiens
cgattgataaaataa

SEQ ID NO: 25266 - DNA, 15 bp, Homo sapiens
acgattgataaaata

SEQ ID NO: 25267 - DNA, 15 bp, Homo sapiens
tacgattgataaaat

SEQ ID NO: 25268 - DNA, 15 bp, Homo sapiens
ttacgattgataaaa

SEQ ID NO: 25269 - DNA, 15 bp, Homo sapiens
cttacgattgataaa

SEQ ID NO: 25270 - DNA, 15 bp, Homo sapiens
ccttacgattgataa

SEQ ID NO: 25271 - DNA, 15 bp, Homo sapiens
accttacgattgata

SEQ ID NO: 25272 - DNA, 15 bp, Homo sapiens
caccttacgattgat

SEQ ID NO: 25273 - DNA, 15 bp, Homo sapiens
gcaccttacgattga

SEQ ID NO: 25274 - DNA, 15 bp, Homo sapiens
tgcaccttacgattg

SEQ ID NO: 25275 - DNA, 15 bp, Homo sapiens
gtgcaccttacgatt

SEQ ID NO: 25276 - DNA, 15 bp, Homo sapiens
tgtgcaccttacgat

SEQ ID NO: 25277 - DNA, 15 bp, Homo sapiens
atgtgcaccttacga

SEQ ID NO: 25278 - DNA, 15 bp, Homo sapiens
aatgtgcaccttacg

SEQ ID NO: 25279 - DNA, 15 bp, Homo sapiens
aaatgtgcaccttac

SEQ ID NO: 25280 - DNA, 15 bp, Homo sapiens
aaaatgtgcacctta

SEQ ID NO: 25281 - DNA, 15 bp, Homo sapiens
aaaaatgtgcacctt

SEQ ID NO: 25282 - DNA, 15 bp, Homo sapiens
gaaaaatgtgcacct

SEQ ID NO: 25283 - DNA, 15 bp, Homo sapiens
tgaaaaatgtgcacc

SEQ ID NO: 25284 - DNA, 15 bp, Homo sapiens
gtgaaaaatgtgcac

SEQ ID NO: 25285 - DNA, 15 bp, Homo sapiens
tgtgaaaaatgtgca

SEQ ID NO: 25286 - DNA, 15 bp, Homo sapiens
atgtgaaaaatgtgc

SEQ ID NO: 25287 - DNA, 15 bp, Homo sapiens
gatgtgaaaaatgtg

SEQ ID NO: 25288 - DNA, 15 bp, Homo sapiens
agatgtgaaaaatgt

SEQ ID NO: 25289 - DNA, 15 bp, Homo sapiens
aagatgtgaaaaatg

SEQ ID NO: 25290 - DNA, 15 bp, Homo sapiens
taagatgtgaaaaat

SEQ ID NO: 25291 - DNA, 15 bp, Homo sapiens
ttaagatgtgaaaaa

SEQ ID NO: 25292 - DNA, 15 bp, Homo sapiens
gttaagatgtgaaaa

SEQ ID NO: 25293 - DNA, 15 bp, Homo sapiens
tgttaagatgtgaaa

SEQ ID NO: 25294 - DNA, 15 bp, Homo sapiens
atgttaagatgtgaa

SEQ ID NO: 25295 - DNA, 15 bp, Homo sapiens
gatgttaagatgtga

SEQ ID NO: 25296 - DNA, 15 bp, Homo sapiens
agatgttaagatgtg

SEQ ID NO: 25297 - DNA, 15 bp, Homo sapiens
gagatgttaagatgt

SEQ ID NO: 25298 - DNA, 15 bp, Homo sapiens
agagatgttaagatg

SEQ ID NO: 25299 - DNA, 15 bp, Homo sapiens
cagagatgttaagat

SEQ ID NO: 25300 - DNA, 15 bp, Homo sapiens
tcagagatgttaaga

SEQ ID NO: 25301 - DNA, 15 bp, Homo sapiens
ttcagagatgttaag

SEQ ID NO: 25302 - DNA, 15 bp, Homo sapiens
tttcagagatgttaa

SEQ ID NO: 25303 - DNA, 15 bp, Homo sapiens
atttcagagatgtta

SEQ ID NO: 25304 - DNA, 15 bp, Homo sapiens
aatttcagagatgtt

SEQ ID NO: 25305 - DNA, 15 bp, Homo sapiens
caatttcagagatgt

SEQ ID NO: 25306 - DNA, 15 bp, Homo sapiens
ccaatttcagagatg

SEQ ID NO: 25307 - DNA, 15 bp, Homo sapiens
cccaatttcagagat

SEQ ID NO: 25308 - DNA, 15 bp, Homo sapiens
tcccaatttcagaga

SEQ ID NO: 25309 - DNA, 15 bp, Homo sapiens
ttcccaatttcagag

SEQ ID NO: 25310 - DNA, 15 bp, Homo sapiens
gttcccaatttcaga

SEQ ID NO: 25311 - DNA, 15 bp, Homo sapiens
tgttcccaatttcag

SEQ ID NO: 25312 - DNA, 15 bp, Homo sapiens
atgttcccaatttca

SEQ ID NO: 25313 - DNA, 15 bp, Homo sapiens
aatgttcccaatttc

SEQ ID NO: 25314 - DNA, 15 bp, Homo sapiens
aaatgttcccaattt

SEQ ID NO: 25315 - DNA, 15 bp, Homo sapiens
aaaatgttcccaatt

SEQ ID NO: 25316 - DNA, 15 bp, Homo sapiens
taaaatgttcccaat

SEQ ID NO: 25317 - DNA, 15 bp, Homo sapiens
gtaaaatgttcccaa

SEQ ID NO: 25318 - DNA, 15 bp, Homo sapiens
agtaaaatgttccca

SEQ ID NO: 25319 - DNA, 15 bp, Homo sapiens
tagtaaaatgttccc

SEQ ID NO: 25320 - DNA, 15 bp, Homo sapiens
atagtaaaatgttcc

SEQ ID NO: 25321 - DNA, 15 bp, Homo sapiens
aatagtaaaatgttc

SEQ ID NO: 25322 - DNA, 15 bp, Homo sapiens
caatagtaaaatgtt

SEQ ID NO: 25323 - DNA, 15 bp, Homo sapiens
tcaatagtaaaatgt

SEQ ID NO: 25324 - DNA, 15 bp, Homo sapiens
ctcaatagtaaaatg

SEQ ID NO: 25325 - DNA, 15 bp, Homo sapiens
cctcaatagtaaaat

SEQ ID NO: 25326 - DNA, 15 bp, Homo sapiens
ccctcaatagtaaaa

SEQ ID NO: 25327 - DNA, 15 bp, Homo sapiens
accctcaatagtaaa

SEQ ID NO: 25328 - DNA, 15 bp, Homo sapiens
caccctcaatagtaa

SEQ ID NO: 25329 - DNA, 15 bp, Homo sapiens
acaccctcaatagta

SEQ ID NO: 25330 - DNA, 15 bp, Homo sapiens
cacaccctcaatagt

SEQ ID NO: 25331 - DNA, 15 bp, Homo sapiens
acacaccctcaatag

SEQ ID NO: 25332 - DNA, 15 bp, Homo sapiens
gacacaccctcaata

SEQ ID NO: 25333 - DNA, 15 bp, Homo sapiens
tgacacaccctcaat

SEQ ID NO: 25334 - DNA, 15 bp, Homo sapiens
atgacacaccctcaa

SEQ ID NO: 25335 - DNA, 15 bp, Homo sapiens
aatgacacaccctca

SEQ ID NO: 25336 - DNA, 15 bp, Homo sapiens
aaatgacacaccctc

SEQ ID NO: 25337 - DNA, 15 bp, Homo sapiens
caaatgacacaccct

SEQ ID NO: 25338 - DNA, 15 bp, Homo sapiens
acaaatgacacaccc

SEQ ID NO: 25339 - DNA, 15 bp, Homo sapiens
aacaaatgacacacc

SEQ ID NO: 25340 - DNA, 15 bp, Homo sapiens
aaacaaatgacacac

SEQ ID NO: 25341 - DNA, 15 bp, Homo sapiens
taaacaaatgacaca

SEQ ID NO: 25342 - DNA, 15 bp, Homo sapiens
ttaaacaaatgacac

SEQ ID NO: 25343 - DNA, 15 bp, Homo sapiens
attaaacaaatgaca

SEQ ID NO: 25344 - DNA, 15 bp, Homo sapiens
aattaaacaaatgac

SEQ ID NO: 25345 - DNA, 15 bp, Homo sapiens
aaattaaacaaatga

SEQ ID NO: 25346 - DNA, 15 bp, Homo sapiens
caaattaaacaaatg

SEQ ID NO: 25347 - DNA, 15 bp, Homo sapiens
acaaattaaacaaat

SEQ ID NO: 25348 - DNA, 15 bp, Homo sapiens
cacaaattaaacaaa

SEQ ID NO: 25349 - DNA, 15 bp, Homo sapiens
acacaaattaaacaa

SEQ ID NO: 25350 - DNA, 15 bp, Homo sapiens
cacacaaattaaaca

SEQ ID NO: 25351 - DNA, 15 bp, Homo sapiens
gcacacaaattaaac

SEQ ID NO: 25352 - DNA, 15 bp, Homo sapiens
agcacacaaattaaa

SEQ ID NO: 25353 - DNA, 15 bp, Homo sapiens
aagcacacaaattaa

SEQ ID NO: 25354 - DNA, 15 bp, Homo sapiens
aaagcacacaaatta

SEQ ID NO: 25355 - DNA, 15 bp, Homo sapiens
gaaagcacacaaatt

SEQ ID NO: 25356 - DNA, 15 bp, Homo sapiens
agaaagcacacaaat

SEQ ID NO: 25357 - DNA, 15 bp, Homo sapiens
aagaaagcacacaaa

SEQ ID NO: 25358 - DNA, 15 bp, Homo sapiens
aaagaaagcacacaa

SEQ ID NO: 25359 - DNA, 15 bp, Homo sapiens
gaaagaaagcacaca

SEQ ID NO: 25360 - DNA, 15 bp, Homo sapiens
agaaagaaagcacac

SEQ ID NO: 25361 - DNA, 15 bp, Homo sapiens
aagaaagaaagcaca

SEQ ID NO: 25362 - DNA, 15 bp, Homo sapiens
taagaaagaaagcac

SEQ ID NO: 25363 - DNA, 15 bp, Homo sapiens
ctaagaaagaaagca

SEQ ID NO: 25364 - DNA, 15 bp, Homo sapiens
actaagaaagaaagc

SEQ ID NO: 25365 - DNA, 15 bp, Homo sapiens
cactaagaaagaaag

SEQ ID NO: 25366 - DNA, 15 bp, Homo sapiens
tcactaagaaagaaa

SEQ ID NO: 25367 - DNA, 15 bp, Homo sapiens
atcactaagaaagaa

SEQ ID NO: 25368 - DNA, 15 bp, Homo sapiens
tatcactaagaaaga

SEQ ID NO: 25369 - DNA, 15 bp, Homo sapiens
gtatcactaagaaag

SEQ ID NO: 25370 - DNA, 15 bp, Homo sapiens
tgtatcactaagaaa

SEQ ID NO: 25371 - DNA, 15 bp, Homo sapiens
ctgtatcactaagaa

SEQ ID NO: 25372 - DNA, 15 bp, Homo sapiens
tctgtatcactaaga

SEQ ID NO: 25373 - DNA, 15 bp, Homo sapiens
ttctgtatcactaag

SEQ ID NO: 25374 - DNA, 15 bp, Homo sapiens
tttctgtatcactaa

SEQ ID NO: 25375 - DNA, 15 bp, Homo sapiens
ttttctgtatcacta

SEQ ID NO: 25376 - DNA, 15 bp, Homo sapiens
attttctgtatcact

SEQ ID NO: 25377 - DNA, 15 bp, Homo sapiens
tattttctgtatcac

SEQ ID NO: 25378 - DNA, 15 bp, Homo sapiens
ttattttctgtatca

SEQ ID NO: 25379 - DNA, 15 bp, Homo sapiens
attattttctgtatc

SEQ ID NO: 25380 - DNA, 15 bp, Homo sapiens
tattattttctgtat

SEQ ID NO: 25381 - DNA, 15 bp, Homo sapiens
ctattattttctgta

SEQ ID NO: 25382 - DNA, 15 bp, Homo sapiens
actattattttctgt

SEQ ID NO: 25383 - DNA, 15 bp, Homo sapiens
cactattattttctg

SEQ ID NO: 25384 - DNA, 15 bp, Homo sapiens
gcactattattttct

SEQ ID NO: 25385 - DNA, 15 bp, Homo sapiens
tgcactattattttc

SEQ ID NO: 25386 - DNA, 15 bp, Homo sapiens
ttgcactattatttt

SEQ ID NO: 25387 - DNA, 15 bp, Homo sapiens
gttgcactattattt

SEQ ID NO: 25388 - DNA, 15 bp, Homo sapiens
agttgcactattatt

SEQ ID NO: 25389 - DNA, 15 bp, Homo sapiens
aagttgcactattat

SEQ ID NO: 25390 - DNA, 15 bp, Homo sapiens
taagttgcactatta

SEQ ID NO: 25391 - DNA, 15 bp, Homo sapiens
gtaagttgcactatt

SEQ ID NO: 25392 - DNA, 15 bp, Homo sapiens
tgtaagttgcactat

SEQ ID NO: 25393 - DNA, 15 bp, Homo sapiens
atgtaagttgcacta

SEQ ID NO: 25394 - DNA, 15 bp, Homo sapiens
aatgtaagttgcact

SEQ ID NO: 25395 - DNA, 15 bp, Homo sapiens
caatgtaagttgcac

SEQ ID NO: 25396 - DNA, 15 bp, Homo sapiens
acaatgtaagttgca

SEQ ID NO: 25397 - DNA, 15 bp, Homo sapiens
aacaatgtaagttgc

SEQ ID NO: 25398 - DNA, 15 bp, Homo sapiens
caacaatgtaagttg

SEQ ID NO: 25399 - DNA, 15 bp, Homo sapiens
ccaacaatgtaagtt

SEQ ID NO: 25400 - DNA, 15 bp, Homo sapiens
accaacaatgtaagt

SEQ ID NO: 25401 - DNA, 15 bp, Homo sapiens
caccaacaatgtaag

SEQ ID NO: 25402 - DNA, 15 bp, Homo sapiens
acaccaacaatgtaa

SEQ ID NO: 25403 - DNA, 15 bp, Homo sapiens
gacaccaacaatgta

SEQ ID NO: 25404 - DNA, 15 bp, Homo sapiens
agacaccaacaatgt

SEQ ID NO: 25405 - DNA, 15 bp, Homo sapiens
aagacaccaacaatg

SEQ ID NO: 25406 - DNA, 15 bp, Homo sapiens
taagacaccaacaat

SEQ ID NO: 25407 - DNA, 15 bp, Homo sapiens
ctaagacaccaacaa

SEQ ID NO: 25408 - DNA, 15 bp, Homo sapiens
gctaagacaccaaca

SEQ ID NO: 25409 - DNA, 15 bp, Homo sapiens
agctaagacaccaac

SEQ ID NO: 25410 - DNA, 15 bp, Homo sapiens
aagctaagacaccaa

SEQ ID NO: 25411 - DNA, 15 bp, Homo sapiens
aaagctaagacacca

SEQ ID NO: 25412 - DNA, 15 bp, Homo sapiens
taaagctaagacacc

SEQ ID NO: 25413 - DNA, 15 bp, Homo sapiens
ctaaagctaagacac

SEQ ID NO: 25414 - DNA, 15 bp, Homo sapiens
actaaagctaagaca

SEQ ID NO: 25415 - DNA, 15 bp, Homo sapiens
cactaaagctaagac

SEQ ID NO: 25416 - DNA, 15 bp, Homo sapiens
tcactaaagctaaga

SEQ ID NO: 25417 - DNA, 15 bp, Homo sapiens
ttcactaaagctaag

SEQ ID NO: 25418 - DNA, 15 bp, Homo sapiens
tttcactaaagctaa

SEQ ID NO: 25419 - DNA, 15 bp, Homo sapiens
atttcactaaagcta

SEQ ID NO: 25420 - DNA, 15 bp, Homo sapiens
tatttcactaaagct

SEQ ID NO: 25421 - DNA, 15 bp, Homo sapiens
gtatttcactaaagc

SEQ ID NO: 25422 - DNA, 15 bp, Homo sapiens
tgtatttcactaaag

SEQ ID NO: 25423 - DNA, 15 bp, Homo sapiens
ctgtatttcactaaa

SEQ ID NO: 25424 - DNA, 15 bp, Homo sapiens
actgtatttcactaa

SEQ ID NO: 25425 - DNA, 15 bp, Homo sapiens
tactgtatttcacta

SEQ ID NO: 25426 - DNA, 15 bp, Homo sapiens
atactgtatttcact

SEQ ID NO: 25427 - DNA, 15 bp, Homo sapiens
aatactgtatttcac

SEQ ID NO: 25428 - DNA, 15 bp, Homo sapiens
caatactgtatttca

SEQ ID NO: 25429 - DNA, 15 bp, Homo sapiens
tcaatactgtatttc

SEQ ID NO: 25430 - DNA, 15 bp, Homo sapiens
atcaatactgtattt

SEQ ID NO: 25431 - DNA, 15 bp, Homo sapiens
tatcaatactgtatt

SEQ ID NO: 25432 - DNA, 15 bp, Homo sapiens
ctatcaatactgtat

SEQ ID NO: 25433 - DNA, 15 bp, Homo sapiens
cctatcaatactgta

SEQ ID NO: 25434 - DNA, 15 bp, Homo sapiens
gcctatcaatactgt

SEQ ID NO: 25435 - DNA, 15 bp, Homo sapiens
tgcctatcaatactg

SEQ ID NO: 25436 - DNA, 15 bp, Homo sapiens
ttgcctatcaatact

SEQ ID NO: 25437 - DNA, 15 bp, Homo sapiens
tttgcctatcaatac

SEQ ID NO: 25438 - DNA, 15 bp, Homo sapiens
atttgcctatcaata

SEQ ID NO: 25439 - DNA, 15 bp, Homo sapiens
aatttgcctatcaat

SEQ ID NO: 25440 - DNA, 15 bp, Homo sapiens
aaatttgcctatcaa

SEQ ID NO: 25441 - DNA, 15 bp, Homo sapiens
gaaatttgcctatca

SEQ ID NO: 25442 - DNA, 15 bp, Homo sapiens
agaaatttgcctatc

SEQ ID NO: 25443 - DNA, 15 bp, Homo sapiens
aagaaatttgcctat

SEQ ID NO: 25444 - DNA, 15 bp, Homo sapiens
taagaaatttgccta

SEQ ID NO: 25445 - DNA, 15 bp, Homo sapiens
ctaagaaatttgcct

SEQ ID NO: 25446 - DNA, 15 bp, Homo sapiens
actaagaaatttgcc

SEQ ID NO: 25447 - DNA, 15 bp, Homo sapiens
cactaagaaatttgc

SEQ ID NO: 25448 - DNA, 15 bp, Homo sapiens
acactaagaaatttg

SEQ ID NO: 25449 - DNA, 15 bp, Homo sapiens
aacactaagaaattt

SEQ ID NO: 25450 - DNA, 15 bp, Homo sapiens
taacactaagaaatt

SEQ ID NO: 25451 - DNA, 15 bp, Homo sapiens
ttaacactaagaaat

SEQ ID NO: 25452 - DNA, 15 bp, Homo sapiens
cttaacactaagaaa

SEQ ID NO: 25453 - DNA, 15 bp, Homo sapiens
ccttaacactaagaa

SEQ ID NO: 25454 - DNA, 15 bp, Homo sapiens
accttaacactaaga

SEQ ID NO: 25455 - DNA, 15 bp, Homo sapiens
taccttaacactaag

SEQ ID NO: 25456 - DNA, 15 bp, Homo sapiens
ctaccttaacactaa

SEQ ID NO: 25457 - DNA, 15 bp, Homo sapiens
tctaccttaacacta

SEQ ID NO: 25458 - DNA, 15 bp, Homo sapiens
ttctaccttaacact

SEQ ID NO: 25459 - DNA, 15 bp, Homo sapiens
tttctaccttaacac

SEQ ID NO: 25460 - DNA, 15 bp, Homo sapiens
ttttctaccttaaca

SEQ ID NO: 25461 - DNA, 15 bp, Homo sapiens
gttttctaccttaac

SEQ ID NO: 25462 - DNA, 15 bp, Homo sapiens
tgttttctaccttaa

SEQ ID NO: 25463 - DNA, 15 bp, Homo sapiens
ttgttttctacctta

SEQ ID NO: 25464 - DNA, 15 bp, Homo sapiens
cttgttttctacctt

SEQ ID NO: 25465 - DNA, 15 bp, Homo sapiens
ccttgttttctacct

SEQ ID NO: 25466 - DNA, 15 bp, Homo sapiens
tccttgttttctacc

SEQ ID NO: 25467 - DNA, 15 bp, Homo sapiens
gtccttgttttctac

SEQ ID NO: 25468 - DNA, 15 bp, Homo sapiens
agtccttgttttcta

SEQ ID NO: 25469 - DNA, 15 bp, Homo sapiens
gagtccttgttttct

SEQ ID NO: 25470 - DNA, 15 bp, Homo sapiens
agagtccttgttttc

SEQ ID NO: 25471 - DNA, 15 bp, Homo sapiens
tagagtccttgtttt

SEQ ID NO: 25472 - DNA, 15 bp, Homo sapiens
ttagagtccttgttt

SEQ ID NO: 25473 - DNA, 15 bp, Homo sapiens
tttagagtccttgtt

SEQ ID NO: 25474 - DNA, 15 bp, Homo sapiens
atttagagtccttgt

SEQ ID NO: 25475 - DNA, 15 bp, Homo sapiens
tatttagagtccttg

SEQ ID NO: 25476 - DNA, 15 bp, Homo sapiens
ttatttagagtcctt

SEQ ID NO: 25477 - DNA, 15 bp, Homo sapiens
gttatttagagtcct

SEQ ID NO: 25478 - DNA, 15 bp, Homo sapiens
agttatttagagtcc

SEQ ID NO: 25479 - DNA, 15 bp, Homo sapiens
aagttatttagagtc

SEQ ID NO: 25480 - DNA, 15 bp, Homo sapiens
aaagttatttagagt

SEQ ID NO: 25481 - DNA, 15 bp, Homo sapiens
caaagttatttagag

SEQ ID NO: 25482 - DNA, 15 bp, Homo sapiens
tcaaagttatttaga

SEQ ID NO: 25483 - DNA, 15 bp, Homo sapiens
atcaaagttatttag

SEQ ID NO: 25484 - DNA, 15 bp, Homo sapiens
catcaaagttattta

SEQ ID NO: 25485 - DNA, 15 bp, Homo sapiens
ccatcaaagttattt

SEQ ID NO: 25486 - DNA, 15 bp, Homo sapiens
accatcaaagttatt

SEQ ID NO: 25487 - DNA, 15 bp, Homo sapiens
gaccatcaaagttat

SEQ ID NO: 25488 - DNA, 15 bp, Homo sapiens
agaccatcaaagtta

SEQ ID NO: 25489 - DNA, 15 bp, Homo sapiens
cagaccatcaaagtt

SEQ ID NO: 25490 - DNA, 15 bp, Homo sapiens
acagaccatcaaagt

SEQ ID NO: 25491 - DNA, 15 bp, Homo sapiens
cacagaccatcaaag

SEQ ID NO: 25492 - DNA, 15 bp, Homo sapiens
acacagaccatcaaa

SEQ ID NO: 25493 - DNA, 15 bp, Homo sapiens
tacacagaccatcaa

SEQ ID NO: 25494 - DNA, 15 bp, Homo sapiens
atacacagaccatca

SEQ ID NO: 25495 - DNA, 15 bp, Homo sapiens
aatacacagaccatc

SEQ ID NO: 25496 - DNA, 15 bp, Homo sapiens
aaatacacagaccat

SEQ ID NO: 25497 - DNA, 15 bp, Homo sapiens
caaatacacagacca

SEQ ID NO: 25498 - DNA, 15 bp, Homo sapiens
acaaatacacagacc

SEQ ID NO: 25499 - DNA, 15 bp, Homo sapiens
aacaaatacacagac

SEQ ID NO: 25500 - DNA, 15 bp, Homo sapiens
aaacaaatacacaga

SEQ ID NO: 25501 - DNA, 15 bp, Homo sapiens
aaaacaaatacacag

SEQ ID NO: 25502 - DNA, 15 bp, Homo sapiens
aaaaacaaatacaca

SEQ ID NO: 25503 - DNA, 15 bp, Homo sapiens
caaaaacaaatacac

SEQ ID NO: 25504 - DNA, 15 bp, Homo sapiens
acaaaaacaaataca

SEQ ID NO: 25505 - DNA, 15 bp, Homo sapiens
aacaaaaacaaatac

SEQ ID NO: 25506 - DNA, 15 bp, Homo sapiens
aaacaaaaacaaata

SEQ ID NO: 25507 - DNA, 15 bp, Homo sapiens
gaaacaaaaacaaat

SEQ ID NO: 25508 - DNA, 15 bp, Homo sapiens
ggaaacaaaaacaaa

SEQ ID NO: 25509 - DNA, 15 bp, Homo sapiens
aggaaacaaaaacaa

SEQ ID NO: 25510 - DNA, 15 bp, Homo sapiens
taggaaacaaaaaca

SEQ ID NO: 25511 - DNA, 15 bp, Homo sapiens
ctaggaaacaaaaac

SEQ ID NO: 25512 - DNA, 15 bp, Homo sapiens
cctaggaaacaaaaa

SEQ ID NO: 25513 - DNA, 15 bp, Homo sapiens
tcctaggaaacaaaa

SEQ ID NO: 25514 - DNA, 15 bp, Homo sapiens
ctcctaggaaacaaa

SEQ ID NO: 25515 - DNA, 15 bp, Homo sapiens
actcctaggaaacaa

SEQ ID NO: 25516 - DNA, 15 bp, Homo sapiens
tactcctaggaaaca

SEQ ID NO: 25517 - DNA, 15 bp, Homo sapiens
ttactcctaggaaac

SEQ ID NO: 25518 - DNA, 15 bp, Homo sapiens
tttactcctaggaaa

SEQ ID NO: 25519 - DNA, 15 bp, Homo sapiens
ttttactcctaggaa

SEQ ID NO: 25520 - DNA, 15 bp, Homo sapiens
attttactcctagga

SEQ ID NO: 25521 - DNA, 15 bp, Homo sapiens
aattttactcctagg

SEQ ID NO: 25522 - DNA, 15 bp, Homo sapiens
aaattttactcctag

SEQ ID NO: 25523 - DNA, 15 bp, Homo sapiens
gaaattttactccta

SEQ ID NO: 25524 - DNA, 15 bp, Homo sapiens
ggaaattttactcct

SEQ ID NO: 25525 - DNA, 15 bp, Homo sapiens
tggaaattttactcc

SEQ ID NO: 25526 - DNA, 15 bp, Homo sapiens
ctggaaattttactc

SEQ ID NO: 25527 - DNA, 15 bp, Homo sapiens
actggaaattttact

SEQ ID NO: 25528 - DNA, 15 bp, Homo sapiens
aactggaaattttac

SEQ ID NO: 25529 - DNA, 15 bp, Homo sapiens
caactggaaatttta

SEQ ID NO: 25530 - DNA, 15 bp, Homo sapiens
tcaactggaaatttt

SEQ ID NO: 25531 - DNA, 15 bp, Homo sapiens
atcaactggaaattt

SEQ ID NO: 25532 - DNA, 15 bp, Homo sapiens
aatcaactggaaatt

SEQ ID NO: 25533 - DNA, 15 bp, Homo sapiens
aaatcaactggaaat

SEQ ID NO: 25534 - DNA, 15 bp, Homo sapiens
aaaatcaactggaaa

SEQ ID NO: 25535 - DNA, 15 bp, Homo sapiens
aaaaatcaactggaa

SEQ ID NO: 25536 - DNA, 15 bp, Homo sapiens
aaaaaatcaactgga

SEQ ID NO: 25537 - DNA, 15 bp, Homo sapiens
taaaaaatcaactgg

SEQ ID NO: 25538 - DNA, 15 bp, Homo sapiens
ttaaaaaatcaactg

SEQ ID NO: 25539 - DNA, 15 bp, Homo sapiens
tttaaaaaatcaact

SEQ ID NO: 25540 - DNA, 15 bp, Homo sapiens
ttttaaaaaatcaac

SEQ ID NO: 25541 - DNA, 15 bp, Homo sapiens
attttaaaaaatcaa

SEQ ID NO: 25542 - DNA, 15 bp, Homo sapiens
aattttaaaaaatca

SEQ ID NO: 25543 - DNA, 15 bp, Homo sapiens
aaattttaaaaaatc

SEQ ID NO: 25544 - DNA, 15 bp, Homo sapiens
caaattttaaaaaat

SEQ ID NO: 25545 - DNA, 15 bp, Homo sapiens
tcaaattttaaaaaa

SEQ ID NO: 25546 - DNA, 15 bp, Homo sapiens
atcaaattttaaaaa

SEQ ID NO: 25547 - DNA, 15 bp, Homo sapiens
aatcaaattttaaaa

SEQ ID NO: 25548 - DNA, 15 bp, Homo sapiens
aaatcaaattttaaa

SEQ ID NO: 25549 - DNA, 15 bp, Homo sapiens
aaaatcaaattttaa

SEQ ID NO: 25550 - DNA, 15 bp, Homo sapiens
aaaaatcaaatttta

SEQ ID NO: 25551 - DNA, 15 bp, Homo sapiens
taaaaatcaaatttt

SEQ ID NO: 25552 - DNA, 15 bp, Homo sapiens
ttaaaaatcaaattt

SEQ ID NO: 25553 - DNA, 15 bp, Homo sapiens
tttaaaaatcaaatt

SEQ ID NO: 25554 - DNA, 15 bp, Homo sapiens
ttttaaaaatcaaat

SEQ ID NO: 25555 - DNA, 15 bp, Homo sapiens
tttttaaaaatcaaa

SEQ ID NO: 25556 - DNA, 15 bp, Homo sapiens
ttttttaaaaatcaa

SEQ ID NO: 25557 - DNA, 15 bp, Homo sapiens
tttttttaaaaatca

SEQ ID NO: 25558 - DNA, 15 bp, Homo sapiens
ttttttttaaaaatc

SEQ ID NO: 25559 - DNA, 15 bp, Homo sapiens
attttttttaaaaat

SEQ ID NO: 25560 - DNA, 15 bp, Homo sapiens
gattttttttaaaaa

SEQ ID NO: 25561 - DNA, 15 bp, Homo sapiens
tgattttttttaaaa

SEQ ID NO: 25562 - DNA, 15 bp, Homo sapiens
gtgattttttttaaa

SEQ ID NO: 25563 - DNA, 15 bp, Homo sapiens
tgtgattttttttaa

SEQ ID NO: 25564 - DNA, 15 bp, Homo sapiens
ctgtgatttttttta

SEQ ID NO: 25565 - DNA, 15 bp, Homo sapiens
cctgtgatttttttt

SEQ ID NO: 25566 - DNA, 15 bp, Homo sapiens
acctgtgattttttt

SEQ ID NO: 25567 - DNA, 15 bp, Homo sapiens
tacctgtgatttttt

SEQ ID NO: 25568 - DNA, 15 bp, Homo sapiens
ttacctgtgattttt

SEQ ID NO: 25569 - DNA, 15 bp, Homo sapiens
gttacctgtgatttt

SEQ ID NO: 25570 - DNA, 15 bp, Homo sapiens
ggttacctgtgattt

SEQ ID NO: 25571 - DNA, 15 bp, Homo sapiens
aggttacctgtgatt

SEQ ID NO: 25572 - DNA, 15 bp, Homo sapiens
aaggttacctgtgat

SEQ ID NO: 25573 - DNA, 15 bp, Homo sapiens
taaggttacctgtga

SEQ ID NO: 25574 - DNA, 15 bp, Homo sapiens
ttaaggttacctgtg

SEQ ID NO: 25575 - DNA, 15 bp, Homo sapiens
attaaggttacctgt

SEQ ID NO: 25576 - DNA, 15 bp, Homo sapiens
cattaaggttacctg

SEQ ID NO: 25577 - DNA, 15 bp, Homo sapiens
gcattaaggttacct

SEQ ID NO: 25578 - DNA, 15 bp, Homo sapiens
tgcattaaggttacc

SEQ ID NO: 25579 - DNA, 15 bp, Homo sapiens
atgcattaaggttac

SEQ ID NO: 25580 - DNA, 15 bp, Homo sapiens
aatgcattaaggtta

SEQ ID NO: 25581 - DNA, 15 bp, Homo sapiens
caatgcattaaggtt

SEQ ID NO: 25582 - DNA, 15 bp, Homo sapiens
acaatgcattaaggt

SEQ ID NO: 25583 - DNA, 15 bp, Homo sapiens
gacaatgcattaagg

SEQ ID NO: 25584 - DNA, 15 bp, Homo sapiens
agacaatgcattaag

SEQ ID NO: 25585 - DNA, 15 bp, Homo sapiens
aagacaatgcattaa

SEQ ID NO: 25586 - DNA, 15 bp, Homo sapiens
taagacaatgcatta

SEQ ID NO: 25587 - DNA, 15 bp, Homo sapiens
ttaagacaatgcatt

SEQ ID NO: 25588 - DNA, 15 bp, Homo sapiens
gttaagacaatgcat

SEQ ID NO: 25589 - DNA, 15 bp, Homo sapiens
tgttaagacaatgca

SEQ ID NO: 25590 - DNA, 15 bp, Homo sapiens
gtgttaagacaatgc

SEQ ID NO: 25591 - DNA, 15 bp, Homo sapiens
tgtgttaagacaatg

SEQ ID NO: 25592 - DNA, 15 bp, Homo sapiens
ttgtgttaagacaat

SEQ ID NO: 25593 - DNA, 15 bp, Homo sapiens
gttgtgttaagacaa

SEQ ID NO: 25594 - DNA, 15 bp, Homo sapiens
tgttgtgttaagaca

SEQ ID NO: 25595 - DNA, 15 bp, Homo sapiens
ttgttgtgttaagac

SEQ ID NO: 25596 - DNA, 15 bp, Homo sapiens
tttgttgtgttaaga

SEQ ID NO: 25597 - DNA, 15 bp, Homo sapiens
ctttgttgtgttaag

SEQ ID NO: 25598 - DNA, 15 bp, Homo sapiens
tctttgttgtgttaa

SEQ ID NO: 25599 - DNA, 15 bp, Homo sapiens
ctctttgttgtgtta

SEQ ID NO: 25600 - DNA, 15 bp, Homo sapiens
gctctttgttgtgtt

SEQ ID NO: 25601 - DNA, 15 bp, Homo sapiens
tgctctttgttgtgt

SEQ ID NO: 25602 - DNA, 15 bp, Homo sapiens
atgctctttgttgtg

SEQ ID NO: 25603 - DNA, 15 bp, Homo sapiens
tatgctctttgttgt

SEQ ID NO: 25604 - DNA, 15 bp, Homo sapiens
gtatgctctttgttg

SEQ ID NO: 25605 - DNA, 15 bp, Homo sapiens
tgtatgctctttgtt

SEQ ID NO: 25606 - DNA, 15 bp, Homo sapiens
atgtatgctctttgt

SEQ ID NO: 25607 - DNA, 15 bp, Homo sapiens
tatgtatgctctttg

SEQ ID NO: 25608 - DNA, 15 bp, Homo sapiens
ctatgtatgctcttt

SEQ ID NO: 25609 - DNA, 15 bp, Homo sapiens
cctatgtatgctctt

SEQ ID NO: 25610 - DNA, 15 bp, Homo sapiens
ccctatgtatgctct

SEQ ID NO: 25611 - DNA, 15 bp, Homo sapiens
accctatgtatgctc

SEQ ID NO: 25612 - DNA, 15 bp, Homo sapiens
aaccctatgtatgct

SEQ ID NO: 25613 - DNA, 15 bp, Homo sapiens
aaaccctatgtatgc

SEQ ID NO: 25614 - DNA, 15 bp, Homo sapiens
gaaaccctatgtatg

SEQ ID NO: 25615 - DNA, 15 bp, Homo sapiens
agaaaccctatgtat

SEQ ID NO: 25616 - DNA, 15 bp, Homo sapiens
gagaaaccctatgta

SEQ ID NO: 25617 - DNA, 15 bp, Homo sapiens
agagaaaccctatgt

SEQ ID NO: 25618 - DNA, 15 bp, Homo sapiens
aagagaaaccctatg

SEQ ID NO: 25619 - DNA, 15 bp, Homo sapiens
caagagaaaccctat

SEQ ID NO: 25620 - DNA, 15 bp, Homo sapiens
ccaagagaaacccta

SEQ ID NO: 25621 - DNA, 15 bp, Homo sapiens
accaagagaaaccct

SEQ ID NO: 25622 - DNA, 15 bp, Homo sapiens
aaccaagagaaaccc

SEQ ID NO: 25623 - DNA, 15 bp, Homo sapiens
aaaccaagagaaacc

SEQ ID NO: 25624 - DNA, 15 bp, Homo sapiens
gaaaccaagagaaac

SEQ ID NO: 25625 - DNA, 15 bp, Homo sapiens
agaaaccaagagaaa

SEQ ID NO: 25626 - DNA, 15 bp, Homo sapiens
aagaaaccaagagaa

SEQ ID NO: 25627 - DNA, 15 bp, Homo sapiens
aaagaaaccaagaga

SEQ ID NO: 25628 - DNA, 15 bp, Homo sapiens
caaagaaaccaagag

SEQ ID NO: 25629 - DNA, 15 bp, Homo sapiens
tcaaagaaaccaaga

SEQ ID NO: 25630 - DNA, 15 bp, Homo sapiens
atcaaagaaaccaag

SEQ ID NO: 25631 - DNA, 15 bp, Homo sapiens
aatcaaagaaaccaa

SEQ ID NO: 25632 - DNA, 15 bp, Homo sapiens
taatcaaagaaacca

SEQ ID NO: 25633 - DNA, 15 bp, Homo sapiens
ataatcaaagaaacc

SEQ ID NO: 25634 - DNA, 15 bp, Homo sapiens
tataatcaaagaaac

SEQ ID NO: 25635 - DNA, 15 bp, Homo sapiens
ttataatcaaagaaa

SEQ ID NO: 25636 - DNA, 15 bp, Homo sapiens
attataatcaaagaa

SEQ ID NO: 25637 - DNA, 15 bp, Homo sapiens
aattataatcaaaga

SEQ ID NO: 25638 - DNA, 15 bp, Homo sapiens
gaattataatcaaag

SEQ ID NO: 25639 - DNA, 15 bp, Homo sapiens
tgaattataatcaaa

SEQ ID NO: 25640 - DNA, 15 bp, Homo sapiens
atgaattataatcaa

SEQ ID NO: 25641 - DNA, 15 bp, Homo sapiens
tatgaattataatca

SEQ ID NO: 25642 - DNA, 15 bp, Homo sapiens
gtatgaattataatc

SEQ ID NO: 25643 - DNA, 15 bp, Homo sapiens
tgtatgaattataat

SEQ ID NO: 25644 - DNA, 15 bp, Homo sapiens
atgtatgaattataa

SEQ ID NO: 25645 - DNA, 15 bp, Homo sapiens
aatgtatgaattata

SEQ ID NO: 25646 - DNA, 15 bp, Homo sapiens
aaatgtatgaattat

SEQ ID NO: 25647 - DNA, 15 bp, Homo sapiens
aaaatgtatgaatta

SEQ ID NO: 25648 - DNA, 15 bp, Homo sapiens
aaaaatgtatgaatt

SEQ ID NO: 25649 - DNA, 15 bp, Homo sapiens
gaaaaatgtatgaat

SEQ ID NO: 25650 - DNA, 15 bp, Homo sapiens
agaaaaatgtatgaa

SEQ ID NO: 25651 - DNA, 15 bp, Homo sapiens
gagaaaaatgtatga

SEQ ID NO: 25652 - DNA, 15 bp, Homo sapiens
agagaaaaatgtatg

SEQ ID NO: 25653 - DNA, 15 bp, Homo sapiens
tagagaaaaatgtat

SEQ ID NO: 25654 - DNA, 15 bp, Homo sapiens
ttagagaaaaatgta

SEQ ID NO: 25655 - DNA, 15 bp, Homo sapiens
gttagagaaaaatgt

SEQ ID NO: 25656 - DNA, 15 bp, Homo sapiens
agttagagaaaaatg

SEQ ID NO: 25657 - DNA, 15 bp, Homo sapiens
cagttagagaaaaat

SEQ ID NO: 25658 - DNA, 15 bp, Homo sapiens
gcagttagagaaaaa

SEQ ID NO: 25659 - DNA, 15 bp, Homo sapiens
tgcagttagagaaaa

SEQ ID NO: 25660 - DNA, 15 bp, Homo sapiens
ttgcagttagagaaa

SEQ ID NO: 25661 - DNA, 15 bp, Homo sapiens
tttgcagttagagaa

SEQ ID NO: 25662 - DNA, 15 bp, Homo sapiens
gtttgcagttagaga

SEQ ID NO: 25663 - DNA, 15 bp, Homo sapiens
tgtttgcagttagag

SEQ ID NO: 25664 - DNA, 15 bp, Homo sapiens
atgtttgcagttaga

SEQ ID NO: 25665 - DNA, 15 bp, Homo sapiens
tatgtttgcagttag

SEQ ID NO: 25666 - DNA, 15 bp, Homo sapiens
ttatgtttgcagtta

SEQ ID NO: 25667 - DNA, 15 bp, Homo sapiens
attatgtttgcagtt

SEQ ID NO: 25668 - DNA, 15 bp, Homo sapiens
cattatgtttgcagt

SEQ ID NO: 25669 - DNA, 15 bp, Homo sapiens
acattatgtttgcag

SEQ ID NO: 25670 - DNA, 15 bp, Homo sapiens
aacattatgtttgca

SEQ ID NO: 25671 - DNA, 15 bp, Homo sapiens
aaacattatgtttgc

SEQ ID NO: 25672 - DNA, 15 bp, Homo sapiens
aaaacattatgtttg

SEQ ID NO: 25673 - DNA, 15 bp, Homo sapiens
gaaaacattatgttt

SEQ ID NO: 25674 - DNA, 15 bp, Homo sapiens
ggaaaacattatgtt

SEQ ID NO: 25675 - DNA, 15 bp, Homo sapiens
gggaaaacattatgt

SEQ ID NO: 25676 - DNA, 15 bp, Homo sapiens
agggaaaacattatg

SEQ ID NO: 25677 - DNA, 15 bp, Homo sapiens
aagggaaaacattat

SEQ ID NO: 25678 - DNA, 15 bp, Homo sapiens
caagggaaaacatta

SEQ ID NO: 25679 - DNA, 15 bp, Homo sapiens
acaagggaaaacatt

SEQ ID NO: 25680 - DNA, 15 bp, Homo sapiens
tacaagggaaaacat

SEQ ID NO: 25681 - DNA, 15 bp, Homo sapiens
atacaagggaaaaca

SEQ ID NO: 25682 - DNA, 15 bp, Homo sapiens
aatacaagggaaaac

SEQ ID NO: 25683 - DNA, 15 bp, Homo sapiens
aaatacaagggaaaa

SEQ ID NO: 25684 - DNA, 15 bp, Homo sapiens
aaaatacaagggaaa

SEQ ID NO: 25685 - DNA, 15 bp, Homo sapiens
taaaatacaagggaa

SEQ ID NO: 25686 - DNA, 15 bp, Homo sapiens
gtaaaatacaaggga

SEQ ID NO: 25687 - DNA, 15 bp, Homo sapiens
tgtaaaatacaaggg

SEQ ID NO: 25688 - DNA, 15 bp, Homo sapiens
ctgtaaaatacaagg

SEQ ID NO: 25689 - DNA, 15 bp, Homo sapiens
tctgtaaaatacaag

SEQ ID NO: 25690 - DNA, 15 bp, Homo sapiens
atctgtaaaatacaa

SEQ ID NO: 25691 - DNA, 15 bp, Homo sapiens
catctgtaaaataca

SEQ ID NO: 25692 - DNA, 15 bp, Homo sapiens
gcatctgtaaaatac

SEQ ID NO: 25693 - DNA, 15 bp, Homo sapiens
tgcatctgtaaaata

SEQ ID NO: 25694 - DNA, 15 bp, Homo sapiens
ttgcatctgtaaaat

SEQ ID NO: 25695 - DNA, 15 bp, Homo sapiens
tttgcatctgtaaaa

SEQ ID NO: 25696 - DNA, 15 bp, Homo sapiens
gtttgcatctgtaaa

SEQ ID NO: 25697 - DNA, 15 bp, Homo sapiens
tgtttgcatctgtaa

SEQ ID NO: 25698 - DNA, 15 bp, Homo sapiens
ctgtttgcatctgta

SEQ ID NO: 25699 - DNA, 15 bp, Homo sapiens
gctgtttgcatctgt

SEQ ID NO: 25700 - DNA, 15 bp, Homo sapiens
agctgtttgcatctg

SEQ ID NO: 25701 - DNA, 15 bp, Homo sapiens
tagctgtttgcatct

SEQ ID NO: 25702 - DNA, 15 bp, Homo sapiens
atagctgtttgcatc

SEQ ID NO: 25703 - DNA, 15 bp, Homo sapiens
tatagctgtttgcat

SEQ ID NO: 25704 - DNA, 15 bp, Homo sapiens
ttatagctgtttgca

SEQ ID NO: 25705 - DNA, 15 bp, Homo sapiens
attatagctgtttgc

SEQ ID NO: 25706 - DNA, 15 bp, Homo sapiens
aattatagctgtttg

SEQ ID NO: 25707 - DNA, 15 bp, Homo sapiens
aaattatagctgttt

SEQ ID NO: 25708 - DNA, 15 bp, Homo sapiens
aaaattatagctgtt

SEQ ID NO: 25709 - DNA, 15 bp, Homo sapiens
caaaattatagctgt

SEQ ID NO: 25710 - DNA, 15 bp, Homo sapiens
gcaaaattatagctg

SEQ ID NO: 25711 - DNA, 15 bp, Homo sapiens
tgcaaaattatagct

SEQ ID NO: 25712 - DNA, 15 bp, Homo sapiens
ttgcaaaattatagc

SEQ ID NO: 25713 - DNA, 15 bp, Homo sapiens
tttgcaaaattatag

SEQ ID NO: 25714 - DNA, 15 bp, Homo sapiens
ttttgcaaaattata

SEQ ID NO: 25715 - DNA, 15 bp, Homo sapiens
tttttgcaaaattat

SEQ ID NO: 25716 - DNA, 15 bp, Homo sapiens
ttttttgcaaaatta

SEQ ID NO: 25717 - DNA, 15 bp, Homo sapiens
cttttttgcaaaatt

SEQ ID NO: 25718 - DNA, 15 bp, Homo sapiens
ccttttttgcaaaat

SEQ ID NO: 25719 - DNA, 15 bp, Homo sapiens
tccttttttgcaaaa

SEQ ID NO: 25720 - DNA, 15 bp, Homo sapiens
ttccttttttgcaaa

SEQ ID NO: 25721 - DNA, 15 bp, Homo sapiens
tttccttttttgcaa

SEQ ID NO: 25722 - DNA, 15 bp, Homo sapiens
ttttccttttttgca

SEQ ID NO: 25723 - DNA, 15 bp, Homo sapiens
attttccttttttgc

SEQ ID NO: 25724 - DNA, 15 bp, Homo sapiens
tattttccttttttg

SEQ ID NO: 25725 - DNA, 15 bp, Homo sapiens
ttattttcctttttt

SEQ ID NO: 25726 - DNA, 15 bp, Homo sapiens
gttattttccttttt

SEQ ID NO: 25727 - DNA, 15 bp, Homo sapiens
agttattttcctttt

SEQ ID NO: 25728 - DNA, 15 bp, Homo sapiens
gagttattttccttt

SEQ ID NO: 25729 - DNA, 15 bp, Homo sapiens
agagttattttcctt

SEQ ID NO: 25730 - DNA, 15 bp, Homo sapiens
gagagttattttcct

SEQ ID NO: 25731 - DNA, 15 bp, Homo sapiens
ggagagttattttcc

SEQ ID NO: 25732 - DNA, 15 bp, Homo sapiens
aggagagttattttc

SEQ ID NO: 25733 - DNA, 15 bp, Homo sapiens
caggagagttatttt

SEQ ID NO: 25734 - DNA, 15 bp, Homo sapiens
tcaggagagttattt

SEQ ID NO: 25735 - DNA, 15 bp, Homo sapiens
ttcaggagagttatt

SEQ ID NO: 25736 - DNA, 15 bp, Homo sapiens
gttcaggagagttat

SEQ ID NO: 25737 - DNA, 15 bp, Homo sapiens
tgttcaggagagtta

SEQ ID NO: 25738 - DNA, 15 bp, Homo sapiens
atgttcaggagagtt

SEQ ID NO: 25739 - DNA, 15 bp, Homo sapiens
gatgttcaggagagt

SEQ ID NO: 25740 - DNA, 15 bp, Homo sapiens
agatgttcaggagag

SEQ ID NO: 25741 - DNA, 15 bp, Homo sapiens
tagatgttcaggaga

SEQ ID NO: 25742 - DNA, 15 bp, Homo sapiens
ttagatgttcaggag

SEQ ID NO: 25743 - DNA, 15 bp, Homo sapiens
tttagatgttcagga

SEQ ID NO: 25744 - DNA, 15 bp, Homo sapiens
ttttagatgttcagg

SEQ ID NO: 25745 - DNA, 15 bp, Homo sapiens
cttttagatgttcag

SEQ ID NO: 25746 - DNA, 15 bp, Homo sapiens
tcttttagatgttca

SEQ ID NO: 25747 - DNA, 15 bp, Homo sapiens
atcttttagatgttc

SEQ ID NO: 25748 - DNA, 15 bp, Homo sapiens
catcttttagatgtt

SEQ ID NO: 25749 - DNA, 15 bp, Homo sapiens
tcatcttttagatgt

SEQ ID NO: 25750 - DNA, 15 bp, Homo sapiens
ttcatcttttagatg

SEQ ID NO: 25751 - DNA, 15 bp, Homo sapiens
cttcatcttttagat

SEQ ID NO: 25752 - DNA, 15 bp, Homo sapiens
acttcatcttttaga

SEQ ID NO: 25753 - DNA, 15 bp, Homo sapiens
aacttcatcttttag

SEQ ID NO: 25754 - DNA, 15 bp, Homo sapiens
aaacttcatctttta

SEQ ID NO: 25755 - DNA, 15 bp, Homo sapiens
gaaacttcatctttt

SEQ ID NO: 25756 - DNA, 15 bp, Homo sapiens
agaaacttcatcttt

SEQ ID NO: 25757 - DNA, 15 bp, Homo sapiens
tagaaacttcatctt

SEQ ID NO: 25758 - DNA, 15 bp, Homo sapiens
atagaaacttcatct

SEQ ID NO: 25759 - DNA, 15 bp, Homo sapiens
gatagaaacttcatc

SEQ ID NO: 25760 - DNA, 15 bp, Homo sapiens
tgatagaaacttcat

SEQ ID NO: 25761 - DNA, 15 bp, Homo sapiens
atgatagaaacttca

SEQ ID NO: 25762 - DNA, 15 bp, Homo sapiens
gatgatagaaacttc

SEQ ID NO: 25763 - DNA, 15 bp, Homo sapiens
ggatgatagaaactt

SEQ ID NO: 25764 - DNA, 15 bp, Homo sapiens
tggatgatagaaact

SEQ ID NO: 25765 - DNA, 15 bp, Homo sapiens
ttggatgatagaaac

SEQ ID NO: 25766 - DNA, 15 bp, Homo sapiens
tttggatgatagaaa

SEQ ID NO: 25767 - DNA, 15 bp, Homo sapiens
ctttggatgatagaa

SEQ ID NO: 25768 - DNA, 15 bp, Homo sapiens
actttggatgataga

SEQ ID NO: 25769 - DNA, 15 bp, Homo sapiens
tactttggatgatag

SEQ ID NO: 25770 - DNA, 15 bp, Homo sapiens
atactttggatgata

SEQ ID NO: 25771 - DNA, 15 bp, Homo sapiens
catactttggatgat

SEQ ID NO: 25772 - DNA, 15 bp, Homo sapiens
ccatactttggatga

SEQ ID NO: 25773 - DNA, 15 bp, Homo sapiens
cccatactttggatg

SEQ ID NO: 25774 - DNA, 15 bp, Homo sapiens
gcccatactttggat

SEQ ID NO: 25775 - DNA, 15 bp, Homo sapiens
agcccatactttgga

SEQ ID NO: 25776 - DNA, 15 bp, Homo sapiens
tagcccatactttgg

SEQ ID NO: 25777 - DNA, 15 bp, Homo sapiens
gtagcccatactttg

SEQ ID NO: 25778 - DNA, 15 bp, Homo sapiens
tgtagcccatacttt

SEQ ID NO: 25779 - DNA, 15 bp, Homo sapiens
ctgtagcccatactt

SEQ ID NO: 25780 - DNA, 15 bp, Homo sapiens
tctgtagcccatact

SEQ ID NO: 25781 - DNA, 15 bp, Homo sapiens
ttctgtagcccatac

SEQ ID NO: 25782 - DNA, 15 bp, Homo sapiens
tttctgtagcccata

SEQ ID NO: 25783 - DNA, 15 bp, Homo sapiens
gtttctgtagcccat

SEQ ID NO: 25784 - DNA, 15 bp, Homo sapiens
ggtttctgtagccca

SEQ ID NO: 25785 - DNA, 15 bp, Homo sapiens
cggtttctgtagccc

SEQ ID NO: 25786 - DNA, 15 bp, Homo sapiens
acggtttctgtagcc

SEQ ID NO: 25787 - DNA, 15 bp, Homo sapiens
cacggtttctgtagc

SEQ ID NO: 25788 - DNA, 15 bp, Homo sapiens
gcacggtttctgtag

SEQ ID NO: 25789 - DNA, 15 bp, Homo sapiens
ggcacggtttctgta

SEQ ID NO: 25790 - DNA, 15 bp, Homo sapiens
tggcacggtttctgt

SEQ ID NO: 25791 - DNA, 15 bp, Homo sapiens
ttggcacggtttctg

SEQ ID NO: 25792 - DNA, 15 bp, Homo sapiens
tttggcacggtttct

SEQ ID NO: 25793 - DNA, 15 bp, Homo sapiens
ttttggcacggtttc

SEQ ID NO: 25794 - DNA, 15 bp, Homo sapiens
cttttggcacggttt

SEQ ID NO: 25795 - DNA, 15 bp, Homo sapiens
tcttttggcacggtt

SEQ ID NO: 25796 - DNA, 15 bp, Homo sapiens
gtcttttggcacggt

SEQ ID NO: 25797 - DNA, 15 bp, Homo sapiens
agtcttttggcacgg

SEQ ID NO: 25798 - DNA, 15 bp, Homo sapiens
aagtcttttggcacg

SEQ ID NO: 25799 - DNA, 15 bp, Homo sapiens
gaagtcttttggcac

SEQ ID NO: 25800 - DNA, 15 bp, Homo sapiens
agaagtcttttggca

SEQ ID NO: 25801 - DNA, 15 bp, Homo sapiens
tagaagtcttttggc

SEQ ID NO: 25802 - DNA, 15 bp, Homo sapiens
gtagaagtcttttgg

SEQ ID NO: 25803 - DNA, 15 bp, Homo sapiens
tgtagaagtcttttg

SEQ ID NO: 25804 - DNA, 15 bp, Homo sapiens
ctgtagaagtctttt

SEQ ID NO: 25805 - DNA, 15 bp, Homo sapiens
tctgtagaagtcttt

SEQ ID NO: 25806 - DNA, 15 bp, Homo sapiens
ctctgtagaagtctt

SEQ ID NO: 25807 - DNA, 15 bp, Homo sapiens
actctgtagaagtct

SEQ ID NO: 25808 - DNA, 15 bp, Homo sapiens
cactctgtagaagtc

SEQ ID NO: 25809 - DNA, 15 bp, Homo sapiens
tcactctgtagaagt

SEQ ID NO: 25810 - DNA, 15 bp, Homo sapiens
ttcactctgtagaag

SEQ ID NO: 25811 - DNA, 15 bp, Homo sapiens
gttcactctgtagaa

SEQ ID NO: 25812 - DNA, 15 bp, Homo sapiens
ggttcactctgtaga

SEQ ID NO: 25813 - DNA, 15 bp, Homo sapiens
gggttcactctgtag

SEQ ID NO: 25814 - DNA, 15 bp, Homo sapiens
cgggttcactctgta

SEQ ID NO: 25815 - DNA, 15 bp, Homo sapiens
tcgggttcactctgt

SEQ ID NO: 25816 - DNA, 15 bp, Homo sapiens
ttcgggttcactctg

SEQ ID NO: 25817 - DNA, 15 bp, Homo sapiens
tttcgggttcactct

SEQ ID NO: 25818 - DNA, 15 bp, Homo sapiens
ttttcgggttcactc

SEQ ID NO: 25819 - DNA, 15 bp, Homo sapiens
attttcgggttcact

SEQ ID NO: 25820 - DNA, 15 bp, Homo sapiens
gattttcgggttcac

SEQ ID NO: 25821 - DNA, 15 bp, Homo sapiens
ggattttcgggttca

SEQ ID NO: 25822 - DNA, 15 bp, Homo sapiens
aggattttcgggttc

SEQ ID NO: 25823 - DNA, 15 bp, Homo sapiens
aaggattttcgggtt

SEQ ID NO: 25824 - DNA, 15 bp, Homo sapiens
gaaggattttcgggt

SEQ ID NO: 25825 - DNA, 15 bp, Homo sapiens
ggaaggattttcggg

SEQ ID NO: 25826 - DNA, 15 bp, Homo sapiens
aggaaggattttcgg

SEQ ID NO: 25827 - DNA, 15 bp, Homo sapiens
aaggaaggattttcg

SEQ ID NO: 25828 - DNA, 15 bp, Homo sapiens
caaggaaggattttc

SEQ ID NO: 25829 - DNA, 15 bp, Homo sapiens
ccaaggaaggatttt

SEQ ID NO: 25830 - DNA, 15 bp, Homo sapiens
accaaggaaggattt

SEQ ID NO: 25831 - DNA, 15 bp, Homo sapiens
taccaaggaaggatt

SEQ ID NO: 25832 - DNA, 15 bp, Homo sapiens
ttaccaaggaaggat

SEQ ID NO: 25833 - DNA, 15 bp, Homo sapiens
tttaccaaggaagga

SEQ ID NO: 25834 - DNA, 15 bp, Homo sapiens
ttttaccaaggaagg

SEQ ID NO: 25835 - DNA, 15 bp, Homo sapiens
gttttaccaaggaag

SEQ ID NO: 25836 - DNA, 15 bp, Homo sapiens
ggttttaccaaggaa

SEQ ID NO: 25837 - DNA, 15 bp, Homo sapiens
tggttttaccaagga

SEQ ID NO: 25838 - DNA, 15 bp, Homo sapiens
atggttttaccaagg

SEQ ID NO: 25839 - DNA, 15 bp, Homo sapiens
aatggttttaccaag

SEQ ID NO: 25840 - DNA, 15 bp, Homo sapiens
aaatggttttaccaa

SEQ ID NO: 25841 - DNA, 15 bp, Homo sapiens
caaatggttttacca

SEQ ID NO: 25842 - DNA, 15 bp, Homo sapiens
acaaatggttttacc

SEQ ID NO: 25843 - DNA, 15 bp, Homo sapiens
aacaaatggttttac

SEQ ID NO: 25844 - DNA, 15 bp, Homo sapiens
aaacaaatggtttta

SEQ ID NO: 25845 - DNA, 15 bp, Homo sapiens
aaaacaaatggtttt

SEQ ID NO: 25846 - DNA, 15 bp, Homo sapiens
gaaaacaaatggttt

SEQ ID NO: 25847 - DNA, 15 bp, Homo sapiens
agaaaacaaatggtt

SEQ ID NO: 25848 - DNA, 15 bp, Homo sapiens
aagaaaacaaatggt

SEQ ID NO: 25849 - DNA, 15 bp, Homo sapiens
gaagaaaacaaatgg

SEQ ID NO: 25850 - DNA, 15 bp, Homo sapiens
agaagaaaacaaatg

SEQ ID NO: 25851 - DNA, 15 bp, Homo sapiens
aagaagaaaacaaat

SEQ ID NO: 25852 - DNA, 15 bp, Homo sapiens
gaagaagaaaacaaa

SEQ ID NO: 25853 - DNA, 15 bp, Homo sapiens
agaagaagaaaacaa

SEQ ID NO: 25854 - DNA, 15 bp, Homo sapiens
aagaagaagaaaaca

SEQ ID NO: 25855 - DNA, 15 bp, Homo sapiens
gaagaagaagaaaac

SEQ ID NO: 25856 - DNA, 15 bp, Homo sapiens
agaagaagaagaaaa

SEQ ID NO: 25857 - DNA, 15 bp, Homo sapiens
aagaagaagaagaaa

SEQ ID NO: 25858 - DNA, 15 bp, Homo sapiens
gaagaagaagaagaa

SEQ ID NO: 25859 - DNA, 15 bp, Homo sapiens
agaagaagaagaaga

SEQ ID NO: 25860 - DNA, 15 bp, Homo sapiens
aagaagaagaagaag

SEQ ID NO: 25861 - DNA, 15 bp, Homo sapiens
aaagaagaagaagaa

SEQ ID NO: 25862 - DNA, 15 bp, Homo sapiens
aaaagaagaagaaga

SEQ ID NO: 25863 - DNA, 15 bp, Homo sapiens
gaaaagaagaagaag

SEQ ID NO: 25864 - DNA, 15 bp, Homo sapiens
agaaaagaagaagaa

SEQ ID NO: 25865 - DNA, 15 bp, Homo sapiens
aagaaaagaagaaga

SEQ ID NO: 25866 - DNA, 15 bp, Homo sapiens
aaagaaaagaagaag

SEQ ID NO: 25867 - DNA, 15 bp, Homo sapiens
aaaagaaaagaagaa

SEQ ID NO: 25868 - DNA, 15 bp, Homo sapiens
aaaaagaaaagaaga

SEQ ID NO: 25869 - DNA, 15 bp, Homo sapiens
aaaaaagaaaagaag

SEQ ID NO: 25870 - DNA, 15 bp, Homo sapiens
aaaaaaagaaaagaa

SEQ ID NO: 25871 - DNA, 15 bp, Homo sapiens
aaaaaaaagaaaaga

SEQ ID NO: 25872 - DNA, 15 bp, Homo sapiens
gaaaaaaaaaagaaa

SEQ ID NO: 25873 - DNA, 15 bp, Homo sapiens
agaaaaaaaaaagaa

SEQ ID NO: 25874 - DNA, 15 bp, Homo sapiens
aagaaaaaaaaaaga

SEQ ID NO: 25875 - DNA, 15 bp, Homo sapiens
aaagaaaaaaaaaag

SEQ ID NO: 25876 - DNA, 15 bp, Homo sapiens
aaaaaaaagaaaaaa

SEQ ID NO: 25877 - DNA, 15 bp, Homo sapiens
aaaaaaaaagaaaaa

SEQ ID NO: 25878 - DNA, 15 bp, Homo sapiens
caaaaaaaaaaaaga

SEQ ID NO: 25879 - DNA, 15 bp, Homo sapiens
tcaaaaaaaaaaaag

SEQ ID NO: 25880 - DNA, 15 bp, Homo sapiens
cacagagcaagactc

SEQ ID NO: 25881 - DNA, 15 bp, Homo sapiens
ccacagagcaagact

SEQ ID NO: 25882 - DNA, 15 bp, Homo sapiens
gccacagagcaagac

SEQ ID NO: 25883 - DNA, 15 bp, Homo sapiens
ggccacagagcaaga

SEQ ID NO: 25884 - DNA, 15 bp, Homo sapiens
gggccacagagcaag

SEQ ID NO: 25885 - DNA, 15 bp, Homo sapiens
tgggccacagagcaa

SEQ ID NO: 25886 - DNA, 15 bp, Homo sapiens
ctgggccacagagca

SEQ ID NO: 25887 - DNA, 15 bp, Homo sapiens
cctgggccacagagc

SEQ ID NO: 25888 - DNA, 15 bp, Homo sapiens
gcctgggccacagag

SEQ ID NO: 25889 - DNA, 15 bp, Homo sapiens
agcctgggccacaga

SEQ ID NO: 25890 - DNA, 15 bp, Homo sapiens
tagcctgggccacag

SEQ ID NO: 25891 - DNA, 15 bp, Homo sapiens
ctagcctgggccaca

SEQ ID NO: 25892 - DNA, 15 bp, Homo sapiens
tctagcctgggccac

SEQ ID NO: 25893 - DNA, 15 bp, Homo sapiens
ttctagcctgggcca

SEQ ID NO: 25894 - DNA, 15 bp, Homo sapiens
cttctagcctgggcc

SEQ ID NO: 25895 - DNA, 15 bp, Homo sapiens
gcttctagcctgggc

SEQ ID NO: 25896 - DNA, 15 bp, Homo sapiens
tgcttctagcctggg

SEQ ID NO: 25897 - DNA, 15 bp, Homo sapiens
ctgcttctagcctgg

SEQ ID NO: 25898 - DNA, 15 bp, Homo sapiens
actgcttctagcctg

SEQ ID NO: 25899 - DNA, 15 bp, Homo sapiens
gactgcttctagcct

SEQ ID NO: 25900 - DNA, 15 bp, Homo sapiens
ggactgcttctagcc

SEQ ID NO: 25901 - DNA, 15 bp, Homo sapiens
aggactgcttctagc

SEQ ID NO: 25902 - DNA, 15 bp, Homo sapiens
gaggactgcttctag

SEQ ID NO: 25903 - DNA, 15 bp, Homo sapiens
ggaggactgcttcta

SEQ ID NO: 25904 - DNA, 15 bp, Homo sapiens
aggaggactgcttct

SEQ ID NO: 25905 - DNA, 15 bp, Homo sapiens
caggaggactgcttc

SEQ ID NO: 25906 - DNA, 15 bp, Homo sapiens
gcaggaggactgctt

SEQ ID NO: 25907 - DNA, 15 bp, Homo sapiens
ggcaggaggactgct

SEQ ID NO: 25908 - DNA, 15 bp, Homo sapiens
aggcaggaggactgc

SEQ ID NO: 25909 - DNA, 15 bp, Homo sapiens
aaggcaggaggactg

SEQ ID NO: 25910 - DNA, 15 bp, Homo sapiens
taaggcaggaggact

SEQ ID NO: 25911 - DNA, 15 bp, Homo sapiens
ctaaggcaggaggac

SEQ ID NO: 25912 - DNA, 15 bp, Homo sapiens
gctaaggcaggagga

SEQ ID NO: 25913 - DNA, 15 bp, Homo sapiens
ggctaaggcaggagg

SEQ ID NO: 25914 - DNA, 15 bp, Homo sapiens
gggctaaggcaggag

SEQ ID NO: 25915 - DNA, 15 bp, Homo sapiens
ggggctaaggcagga

SEQ ID NO: 25916 - DNA, 15 bp, Homo sapiens
gggggctaaggcagg

SEQ ID NO: 25917 - DNA, 15 bp, Homo sapiens
agggggctaaggcag

SEQ ID NO: 25918 - DNA, 15 bp, Homo sapiens
aagggggctaaggca

SEQ ID NO: 25919 - DNA, 15 bp, Homo sapiens
taagggggctaaggc

SEQ ID NO: 25920 - DNA, 15 bp, Homo sapiens
ctaagggggctaagg

SEQ ID NO: 25921 - DNA, 15 bp, Homo sapiens
actaagggggctaag

SEQ ID NO: 25922 - DNA, 15 bp, Homo sapiens
tactaagggggctaa

SEQ ID NO: 25923 - DNA, 15 bp, Homo sapiens
ctactaagggggcta

SEQ ID NO: 25924 - DNA, 15 bp, Homo sapiens
gctactaagggggct

SEQ ID NO: 25925 - DNA, 15 bp, Homo sapiens
agctactaagggggc

SEQ ID NO: 25926 - DNA, 15 bp, Homo sapiens
cagctactaaggggg

SEQ ID NO: 25927 - DNA, 15 bp, Homo sapiens
ccagctactaagggg

SEQ ID NO: 25928 - DNA, 15 bp, Homo sapiens
cccagctactaaggg

SEQ ID NO: 25929 - DNA, 15 bp, Homo sapiens
tcccagctactaagg

SEQ ID NO: 25930 - DNA, 15 bp, Homo sapiens
atcccagctactaag

SEQ ID NO: 25931 - DNA, 15 bp, Homo sapiens
aatcccagctactaa

SEQ ID NO: 25932 - DNA, 15 bp, Homo sapiens
taatcccagctacta

SEQ ID NO: 25933 - DNA, 15 bp, Homo sapiens
gtgcctgtaatccca

SEQ ID NO: 25934 - DNA, 15 bp, Homo sapiens
cgtgcctgtaatccc

SEQ ID NO: 25935 - DNA, 15 bp, Homo sapiens
gcgtgcctgtaatcc

SEQ ID NO: 25936 - DNA, 15 bp, Homo sapiens
cgcgtgcctgtaatc

SEQ ID NO: 25937 - DNA, 15 bp, Homo sapiens
gcgcgtgcctgtaat

SEQ ID NO: 25938 - DNA, 15 bp, Homo sapiens
ggcgcgtgcctgtaa

SEQ ID NO: 25939 - DNA, 15 bp, Homo sapiens
tggcgcgtgcctgta

SEQ ID NO: 25940 - DNA, 15 bp, Homo sapiens
gtggcgcgtgcctgt

SEQ ID NO: 25941 - DNA, 15 bp, Homo sapiens
ggtggcgcgtgcctg

SEQ ID NO: 25942 - DNA, 15 bp, Homo sapiens
tggtggcgcgtgcct

SEQ ID NO: 25943 - DNA, 15 bp, Homo sapiens
atggtggcgcgtgcc

SEQ ID NO: 25944 - DNA, 15 bp, Homo sapiens
catggtggcgcgtgc

SEQ ID NO: 25945 - DNA, 15 bp, Homo sapiens
gcatggtggcgcgtg

SEQ ID NO: 25946 - DNA, 15 bp, Homo sapiens
ggcatggtggcgcgt

SEQ ID NO: 25947 - DNA, 15 bp, Homo sapiens
tggcatggtggcgcg

SEQ ID NO: 25948 - DNA, 15 bp, Homo sapiens
ctggcatggtggcgc

SEQ ID NO: 25949 - DNA, 15 bp, Homo sapiens
cctggcatggtggcg

SEQ ID NO: 25950 - DNA, 15 bp, Homo sapiens
gcctggcatggtggc

SEQ ID NO: 25951 - DNA, 15 bp, Homo sapiens
agcctggcatggtgg

SEQ ID NO: 25952 - DNA, 15 bp, Homo sapiens
tagcctggcatggtg

SEQ ID NO: 25953 - DNA, 15 bp, Homo sapiens
ttagcctggcatggt

SEQ ID NO: 25954 - DNA, 15 bp, Homo sapiens
attagcctggcatgg

SEQ ID NO: 25955 - DNA, 15 bp, Homo sapiens
aattagcctggcatg

SEQ ID NO: 25956 - DNA, 15 bp, Homo sapiens
aaattagcctggcat

SEQ ID NO: 25957 - DNA, 15 bp, Homo sapiens
aaaattagcctggca

SEQ ID NO: 25958 - DNA, 15 bp, Homo sapiens
aaaaattagcctggc

SEQ ID NO: 25959 - DNA, 15 bp, Homo sapiens
caaaaattagcctgg

SEQ ID NO: 25960 - DNA, 15 bp, Homo sapiens
acaaaaattagcctg

SEQ ID NO: 25961 - DNA, 15 bp, Homo sapiens
tacaaaaattagcct

SEQ ID NO: 25962 - DNA, 15 bp, Homo sapiens
atgaaaccccgtctc

SEQ ID NO: 25963 - DNA, 15 bp, Homo sapiens
gatgaaaccccgtct

SEQ ID NO: 25964 - DNA, 15 bp, Homo sapiens
tgatgaaaccccgtc

SEQ ID NO: 25965 - DNA, 15 bp, Homo sapiens
atgatgaaaccccgt

SEQ ID NO: 25966 - DNA, 15 bp, Homo sapiens
catgatgaaaccccg

SEQ ID NO: 25967 - DNA, 15 bp, Homo sapiens
acatgatgaaacccc

SEQ ID NO: 25968 - DNA, 15 bp, Homo sapiens
aacatgatgaaaccc

SEQ ID NO: 25969 - DNA, 15 bp, Homo sapiens
caacatgatgaaacc

SEQ ID NO: 25970 - DNA, 15 bp, Homo sapiens
ccaacatgatgaaac

SEQ ID NO: 25971 - DNA, 15 bp, Homo sapiens
gccaacatgatgaaa

SEQ ID NO: 25972 - DNA, 15 bp, Homo sapiens
ggccaacatgatgaa

SEQ ID NO: 25973 - DNA, 15 bp, Homo sapiens
tggccaacatgatga

SEQ ID NO: 25974 - DNA, 15 bp, Homo sapiens
ctggccaacatgatg

SEQ ID NO: 25975 - DNA, 15 bp, Homo sapiens
cctggccaacatgat

SEQ ID NO: 25976 - DNA, 15 bp, Homo sapiens
gcctggccaacatga

SEQ ID NO: 25977 - DNA, 15 bp, Homo sapiens
taggagttcgagacc

SEQ ID NO: 25978 - DNA, 15 bp, Homo sapiens
ttaggagttcgagac

SEQ ID NO: 25979 - DNA, 15 bp, Homo sapiens
gttaggagttcgaga

SEQ ID NO: 25980 - DNA, 15 bp, Homo sapiens
ggttaggagttcgag

SEQ ID NO: 25981 - DNA, 15 bp, Homo sapiens
aggttaggagttcga

SEQ ID NO: 25982 - DNA, 15 bp, Homo sapiens
gaggttaggagttcg

SEQ ID NO: 25983 - DNA, 15 bp, Homo sapiens
tgaggttaggagttc

SEQ ID NO: 25984 - DNA, 15 bp, Homo sapiens
ctgaggttaggagtt

SEQ ID NO: 25985 - DNA, 15 bp, Homo sapiens
cctgaggttaggagt

SEQ ID NO: 25986 - DNA, 15 bp, Homo sapiens
acctgaggttaggag

SEQ ID NO: 25987 - DNA, 15 bp, Homo sapiens
cacctgaggttagga

SEQ ID NO: 25988 - DNA, 15 bp, Homo sapiens
tcacctgaggttagg

SEQ ID NO: 25989 - DNA, 15 bp, Homo sapiens
atcacctgaggttag

SEQ ID NO: 25990 - DNA, 15 bp, Homo sapiens
gatcacctgaggtta

SEQ ID NO: 25991 - DNA, 15 bp, Homo sapiens
ggatcacctgaggtt

SEQ ID NO: 25992 - DNA, 15 bp, Homo sapiens
tggatcacctgaggt

SEQ ID NO: 25993 - DNA, 15 bp, Homo sapiens
gtggatcacctgagg

SEQ ID NO: 25994 - DNA, 15 bp, Homo sapiens
cgaggtgggtggatc

SEQ ID NO: 25995 - DNA, 15 bp, Homo sapiens
ccgaggtgggtggat

SEQ ID NO: 25996 - DNA, 15 bp, Homo sapiens
gccgaggtgggtgga

SEQ ID NO: 25997 - DNA, 15 bp, Homo sapiens
agccgaggtgggtgg

SEQ ID NO: 25998 - DNA, 15 bp, Homo sapiens
gagccgaggtgggtg

SEQ ID NO: 25999 - DNA, 15 bp, Homo sapiens
ggagccgaggtgggt

SEQ ID NO: 26000 - DNA, 15 bp, Homo sapiens
gggagccgaggtggg

SEQ ID NO: 26001 - DNA, 15 bp, Homo sapiens
ggggagccgaggtgg

SEQ ID NO: 26002 - DNA, 15 bp, Homo sapiens
tggggagccgaggtg

SEQ ID NO: 26003 - DNA, 15 bp, Homo sapiens
ttggggagccgaggt

SEQ ID NO: 26004 - DNA, 15 bp, Homo sapiens
tttggggagccgagg

SEQ ID NO: 26005 - DNA, 15 bp, Homo sapiens
atttggggagccgag

SEQ ID NO: 26006 - DNA, 15 bp, Homo sapiens
aatttggggagccga

SEQ ID NO: 26007 - DNA, 15 bp, Homo sapiens
caatttggggagccg

SEQ ID NO: 26008 - DNA, 15 bp, Homo sapiens
gcaatttggggagcc

SEQ ID NO: 26009 - DNA, 15 bp, Homo sapiens
agcaatttggggagc

SEQ ID NO: 26010 - DNA, 15 bp, Homo sapiens
cagcaatttggggag

SEQ ID NO: 26011 - DNA, 15 bp, Homo sapiens
ccagcaatttgggga

SEQ ID NO: 26012 - DNA, 15 bp, Homo sapiens
cccagcaatttgggg

SEQ ID NO: 26013 - DNA, 15 bp, Homo sapiens
acagtggctcacacc

SEQ ID NO: 26014 - DNA, 15 bp, Homo sapiens
cacagtggctcacac

SEQ ID NO: 26015 - DNA, 15 bp, Homo sapiens
gcacagtggctcaca

SEQ ID NO: 26016 - DNA, 15 bp, Homo sapiens
ggcacagtggctcac

SEQ ID NO: 26017 - DNA, 15 bp, Homo sapiens
gggcacagtggctca

SEQ ID NO: 26018 - DNA, 15 bp, Homo sapiens
cgggcacagtggctc

SEQ ID NO: 26019 - DNA, 15 bp, Homo sapiens
ccgggcacagtggct

SEQ ID NO: 26020 - DNA, 15 bp, Homo sapiens
gccgggcacagtggc

SEQ ID NO: 26021 - DNA, 15 bp, Homo sapiens
ggccgggcacagtgg

SEQ ID NO: 26022 - DNA, 15 bp, Homo sapiens
cggccgggcacagtg

SEQ ID NO: 26023 - DNA, 15 bp, Homo sapiens
ccggccgggcacagt

SEQ ID NO: 26024 - DNA, 15 bp, Homo sapiens
accggccgggcacag

SEQ ID NO: 26025 - DNA, 15 bp, Homo sapiens
taccggccgggcaca

SEQ ID NO: 26026 - DNA, 15 bp, Homo sapiens
ttaccggccgggcac

SEQ ID NO: 26027 - DNA, 15 bp, Homo sapiens
tttaccggccgggca

SEQ ID NO: 26028 - DNA, 15 bp, Homo sapiens
ttttaccggccgggc

SEQ ID NO: 26029 - DNA, 15 bp, Homo sapiens
gttttaccggccggg

SEQ ID NO: 26030 - DNA, 15 bp, Homo sapiens
ggttttaccggccgg

SEQ ID NO: 26031 - DNA, 15 bp, Homo sapiens
tggttttaccggccg

SEQ ID NO: 26032 - DNA, 15 bp, Homo sapiens
atggttttaccggcc

SEQ ID NO: 26033 - DNA, 15 bp, Homo sapiens
aatggttttaccggc

SEQ ID NO: 26034 - DNA, 15 bp, Homo sapiens
aaatggttttaccgg

SEQ ID NO: 26035 - DNA, 15 bp, Homo sapiens
aaaatggttttaccg

SEQ ID NO: 26036 - DNA, 15 bp, Homo sapiens
gaaaatggttttacc

SEQ ID NO: 26037 - DNA, 15 bp, Homo sapiens
tgaaaatggttttac

SEQ ID NO: 26038 - DNA, 15 bp, Homo sapiens
atgaaaatggtttta

SEQ ID NO: 26039 - DNA, 15 bp, Homo sapiens
aatgaaaatggtttt

SEQ ID NO: 26040 - DNA, 15 bp, Homo sapiens
aaatgaaaatggttt

SEQ ID NO: 26041 - DNA, 15 bp, Homo sapiens
taaatgaaaatggtt

SEQ ID NO: 26042 - DNA, 15 bp, Homo sapiens
ataaatgaaaatggt

SEQ ID NO: 26043 - DNA, 15 bp, Homo sapiens
aataaatgaaaatgg

SEQ ID NO: 26044 - DNA, 15 bp, Homo sapiens
gaataaatgaaaatg

SEQ ID NO: 26045 - DNA, 15 bp, Homo sapiens
agaataaatgaaaat

SEQ ID NO: 26046 - DNA, 15 bp, Homo sapiens
cagaataaatgaaaa

SEQ ID NO: 26047 - DNA, 15 bp, Homo sapiens
ccagaataaatgaaa

SEQ ID NO: 26048 - DNA, 15 bp, Homo sapiens
gccagaataaatgaa

SEQ ID NO: 26049 - DNA, 15 bp, Homo sapiens
tgccagaataaatga

SEQ ID NO: 26050 - DNA, 15 bp, Homo sapiens
ttgccagaataaatg

SEQ ID NO: 26051 - DNA, 15 bp, Homo sapiens
gttgccagaataaat

SEQ ID NO: 26052 - DNA, 15 bp, Homo sapiens
tgttgccagaataaa

SEQ ID NO: 26053 - DNA, 15 bp, Homo sapiens
atgttgccagaataa

SEQ ID NO: 26054 - DNA, 15 bp, Homo sapiens
gatgttgccagaata

SEQ ID NO: 26055 - DNA, 15 bp, Homo sapiens
agatgttgccagaat

SEQ ID NO: 26056 - DNA, 15 bp, Homo sapiens
gagatgttgccagaa

SEQ ID NO: 26057 - DNA, 15 bp, Homo sapiens
agagatgttgccaga

SEQ ID NO: 26058 - DNA, 15 bp, Homo sapiens
aagagatgttgccag

SEQ ID NO: 26059 - DNA, 15 bp, Homo sapiens
aaagagatgttgcca

SEQ ID NO: 26060 - DNA, 15 bp, Homo sapiens
taaagagatgttgcc

SEQ ID NO: 26061 - DNA, 15 bp, Homo sapiens
ataaagagatgttgc

SEQ ID NO: 26062 - DNA, 15 bp, Homo sapiens
aataaagagatgttg

SEQ ID NO: 26063 - DNA, 15 bp, Homo sapiens
caataaagagatgtt

SEQ ID NO: 26064 - DNA, 15 bp, Homo sapiens
tcaataaagagatgt

SEQ ID NO: 26065 - DNA, 15 bp, Homo sapiens
ctcaataaagagatg

SEQ ID NO: 26066 - DNA, 15 bp, Homo sapiens
gctcaataaagagat

SEQ ID NO: 26067 - DNA, 15 bp, Homo sapiens
tgctcaataaagaga

SEQ ID NO: 26068 - DNA, 15 bp, Homo sapiens
atgctcaataaagag

SEQ ID NO: 26069 - DNA, 15 bp, Homo sapiens
aatgctcaataaaga

SEQ ID NO: 26070 - DNA, 15 bp, Homo sapiens
caatgctcaataaag

SEQ ID NO: 26071 - DNA, 15 bp, Homo sapiens
acaatgctcaataaa

SEQ ID NO: 26072 - DNA, 15 bp, Homo sapiens
cacaatgctcaataa

SEQ ID NO: 26073 - DNA, 15 bp, Homo sapiens
tcacaatgctcaata

SEQ ID NO: 26074 - DNA, 15 bp, Homo sapiens
ttcacaatgctcaat

SEQ ID NO: 26075 - DNA, 15 bp, Homo sapiens
attcacaatgctcaa

SEQ ID NO: 26076 - DNA, 15 bp, Homo sapiens
tattcacaatgctca

SEQ ID NO: 26077 - DNA, 15 bp, Homo sapiens
atattcacaatgctc

SEQ ID NO: 26078 - DNA, 15 bp, Homo sapiens
catattcacaatgct

SEQ ID NO: 26079 - DNA, 15 bp, Homo sapiens
acatattcacaatgc

SEQ ID NO: 26080 - DNA, 15 bp, Homo sapiens
aacatattcacaatg

SEQ ID NO: 26081 - DNA, 15 bp, Homo sapiens
taacatattcacaat

SEQ ID NO: 26082 - DNA, 15 bp, Homo sapiens
ctaacatattcacaa

SEQ ID NO: 26083 - DNA, 15 bp, Homo sapiens
actaacatattcaca

SEQ ID NO: 26084 - DNA, 15 bp, Homo sapiens
cactaacatattcac

SEQ ID NO: 26085 - DNA, 15 bp, Homo sapiens
tcactaacatattca

SEQ ID NO: 26086 - DNA, 15 bp, Homo sapiens
ttcactaacatattc

SEQ ID NO: 26087 - DNA, 15 bp, Homo sapiens
attcactaacatatt

SEQ ID NO: 26088 - DNA, 15 bp, Homo sapiens
cattcactaacatat

SEQ ID NO: 26089 - DNA, 15 bp, Homo sapiens
acattcactaacata

SEQ ID NO: 26090 - DNA, 15 bp, Homo sapiens
cacattcactaacat

SEQ ID NO: 26091 - DNA, 15 bp, Homo sapiens
gcacattcactaaca

SEQ ID NO: 26092 - DNA, 15 bp, Homo sapiens
agcacattcactaac

SEQ ID NO: 26093 - DNA, 15 bp, Homo sapiens
tagcacattcactaa

SEQ ID NO: 26094 - DNA, 15 bp, Homo sapiens
ctagcacattcacta

SEQ ID NO: 26095 - DNA, 15 bp, Homo sapiens
tctagcacattcact

SEQ ID NO: 26096 - DNA, 15 bp, Homo sapiens
atctagcacattcac

SEQ ID NO: 26097 - DNA, 15 bp, Homo sapiens
catctagcacattca

SEQ ID NO: 26098 - DNA, 15 bp, Homo sapiens
gcatctagcacattc

SEQ ID NO: 26099 - DNA, 15 bp, Homo sapiens
agcatctagcacatt

SEQ ID NO: 26100 - DNA, 15 bp, Homo sapiens
gagcatctagcacat

SEQ ID NO: 26101 - DNA, 15 bp, Homo sapiens
tgagcatctagcaca

SEQ ID NO: 26102 - DNA, 15 bp, Homo sapiens
atgagcatctagcac

SEQ ID NO: 26103 - DNA, 15 bp, Homo sapiens
tatgagcatctagca

SEQ ID NO: 26104 - DNA, 15 bp, Homo sapiens
ctatgagcatctagc

SEQ ID NO: 26105 - DNA, 15 bp, Homo sapiens
tctatgagcatctag

SEQ ID NO: 26106 - DNA, 15 bp, Homo sapiens
atctatgagcatcta

SEQ ID NO: 26107 - DNA, 15 bp, Homo sapiens
aatctatgagcatct

SEQ ID NO: 26108 - DNA, 15 bp, Homo sapiens
aaatctatgagcatc

SEQ ID NO: 26109 - DNA, 15 bp, Homo sapiens
taaatctatgagcat

SEQ ID NO: 26110 - DNA, 15 bp, Homo sapiens
ataaatctatgagca

SEQ ID NO: 26111 - DNA, 15 bp, Homo sapiens
tataaatctatgagc

SEQ ID NO: 26112 - DNA, 15 bp, Homo sapiens
atataaatctatgag

SEQ ID NO: 26113 - DNA, 15 bp, Homo sapiens
tatataaatctatga

SEQ ID NO: 26114 - DNA, 15 bp, Homo sapiens
ttatataaatctatg

SEQ ID NO: 26115 - DNA, 15 bp, Homo sapiens
tttatataaatctat

SEQ ID NO: 26116 - DNA, 15 bp, Homo sapiens
ttttatataaatcta

SEQ ID NO: 26117 - DNA, 15 bp, Homo sapiens
tttttatataaatct

SEQ ID NO: 26118 - DNA, 15 bp, Homo sapiens
ctttttatataaatc

SEQ ID NO: 26119 - DNA, 15 bp, Homo sapiens
actttttatataaat

SEQ ID NO: 26120 - DNA, 15 bp, Homo sapiens
aactttttatataaa

SEQ ID NO: 26121 - DNA, 15 bp, Homo sapiens
taactttttatataa

SEQ ID NO: 26122 - DNA, 15 bp, Homo sapiens
ctaactttttatata

SEQ ID NO: 26123 - DNA, 15 bp, Homo sapiens
actaactttttatat

SEQ ID NO: 26124 - DNA, 15 bp, Homo sapiens
cactaactttttata

SEQ ID NO: 26125 - DNA, 15 bp, Homo sapiens
tcactaactttttat

SEQ ID NO: 26126 - DNA, 15 bp, Homo sapiens
ttcactaacttttta

SEQ ID NO: 26127 - DNA, 15 bp, Homo sapiens
cttcactaacttttt

SEQ ID NO: 26128 - DNA, 15 bp, Homo sapiens
tcttcactaactttt

SEQ ID NO: 26129 - DNA, 15 bp, Homo sapiens
ttcttcactaacttt

SEQ ID NO: 26130 - DNA, 15 bp, Homo sapiens
cttcttcactaactt

SEQ ID NO: 26131 - DNA, 15 bp, Homo sapiens
ccttcttcactaact

SEQ ID NO: 26132 - DNA, 15 bp, Homo sapiens
tccttcttcactaac

SEQ ID NO: 26133 - DNA, 15 bp, Homo sapiens
ttccttcttcactaa

SEQ ID NO: 26134 - DNA, 15 bp, Homo sapiens
tttccttcttcacta

SEQ ID NO: 26135 - DNA, 15 bp, Homo sapiens
ctttccttcttcact

SEQ ID NO: 26136 - DNA, 15 bp, Homo sapiens
tctttccttcttcac

SEQ ID NO: 26137 - DNA, 15 bp, Homo sapiens
atctttccttcttca

SEQ ID NO: 26138 - DNA, 15 bp, Homo sapiens
catctttccttcttc

SEQ ID NO: 26139 - DNA, 15 bp, Homo sapiens
ccatctttccttctt

SEQ ID NO: 26140 - DNA, 15 bp, Homo sapiens
accatctttccttct

SEQ ID NO: 26141 - DNA, 15 bp, Homo sapiens
taccatctttccttc

SEQ ID NO: 26142 - DNA, 15 bp, Homo sapiens
ataccatctttcctt

SEQ ID NO: 26143 - DNA, 15 bp, Homo sapiens
tataccatctttcct

SEQ ID NO: 26144 - DNA, 15 bp, Homo sapiens
atataccatctttcc

SEQ ID NO: 26145 - DNA, 15 bp, Homo sapiens
aatataccatctttc

SEQ ID NO: 26146 - DNA, 15 bp, Homo sapiens
taatataccatcttt

SEQ ID NO: 26147 - DNA, 15 bp, Homo sapiens
ttaatataccatctt

SEQ ID NO: 26148 - DNA, 15 bp, Homo sapiens
cttaatataccatct

SEQ ID NO: 26149 - DNA, 15 bp, Homo sapiens
acttaatataccatc

SEQ ID NO: 26150 - DNA, 15 bp, Homo sapiens
cacttaatataccat

SEQ ID NO: 26151 - DNA, 15 bp, Homo sapiens
ccacttaatatacca

SEQ ID NO: 26152 - DNA, 15 bp, Homo sapiens
accacttaatatacc

SEQ ID NO: 26153 - DNA, 15 bp, Homo sapiens
aaccacttaatatac

SEQ ID NO: 26154 - DNA, 15 bp, Homo sapiens
taaccacttaatata

SEQ ID NO: 26155 - DNA, 15 bp, Homo sapiens
ctaaccacttaatat

SEQ ID NO: 26156 - DNA, 15 bp, Homo sapiens
tctaaccacttaata

SEQ ID NO: 26157 - DNA, 15 bp, Homo sapiens
gtctaaccacttaat

SEQ ID NO: 26158 - DNA, 15 bp, Homo sapiens
tgtctaaccacttaa

SEQ ID NO: 26159 - DNA, 15 bp, Homo sapiens
ttgtctaaccactta

SEQ ID NO: 26160 - DNA, 15 bp, Homo sapiens
cttgtctaaccactt

SEQ ID NO: 26161 - DNA, 15 bp, Homo sapiens
acttgtctaaccact

SEQ ID NO: 26162 - DNA, 15 bp, Homo sapiens
cacttgtctaaccac

SEQ ID NO: 26163 - DNA, 15 bp, Homo sapiens
acacttgtctaacca

SEQ ID NO: 26164 - DNA, 15 bp, Homo sapiens
aacacttgtctaacc

SEQ ID NO: 26165 - DNA, 15 bp, Homo sapiens
gaacacttgtctaac

SEQ ID NO: 26166 - DNA, 15 bp, Homo sapiens
agaacacttgtctaa

SEQ ID NO: 26167 - DNA, 15 bp, Homo sapiens
tagaacacttgtcta

SEQ ID NO: 26168 - DNA, 15 bp, Homo sapiens
ttagaacacttgtct

SEQ ID NO: 26169 - DNA, 15 bp, Homo sapiens
attagaacacttgtc

SEQ ID NO: 26170 - DNA, 15 bp, Homo sapiens
gattagaacacttgt

SEQ ID NO: 26171 - DNA, 15 bp, Homo sapiens
tgattagaacacttg

SEQ ID NO: 26172 - DNA, 15 bp, Homo sapiens
ctgattagaacactt

SEQ ID NO: 26173 - DNA, 15 bp, Homo sapiens
actgattagaacact

SEQ ID NO: 26174 - DNA, 15 bp, Homo sapiens
aactgattagaacac

SEQ ID NO: 26175 - DNA, 15 bp, Homo sapiens
taactgattagaaca

SEQ ID NO: 26176 - DNA, 15 bp, Homo sapiens
ctaactgattagaac

SEQ ID NO: 26177 - DNA, 15 bp, Homo sapiens
tctaactgattagaa

SEQ ID NO: 26178 - DNA, 15 bp, Homo sapiens
ctctaactgattaga

SEQ ID NO: 26179 - DNA, 15 bp, Homo sapiens
actctaactgattag

SEQ ID NO: 26180 - DNA, 15 bp, Homo sapiens
aactctaactgatta

SEQ ID NO: 26181 - DNA, 15 bp, Homo sapiens
gaactctaactgatt

SEQ ID NO: 26182 - DNA, 15 bp, Homo sapiens
tgaactctaactgat

SEQ ID NO: 26183 - DNA, 15 bp, Homo sapiens
ctgaactctaactga

SEQ ID NO: 26184 - DNA, 15 bp, Homo sapiens
tctgaactctaactg

SEQ ID NO: 26185 - DNA, 15 bp, Homo sapiens
ctctgaactctaact

SEQ ID NO: 26186 - DNA, 15 bp, Homo sapiens
tctctgaactctaac

SEQ ID NO: 26187 - DNA, 15 bp, Homo sapiens
ttctctgaactctaa

SEQ ID NO: 26188 - DNA, 15 bp, Homo sapiens
cttctctgaactcta

SEQ ID NO: 26189 - DNA, 15 bp, Homo sapiens
ccttctctgaactct

SEQ ID NO: 26190 - DNA, 15 bp, Homo sapiens
accttctctgaactc

SEQ ID NO: 26191 - DNA, 15 bp, Homo sapiens
gaccttctctgaact

SEQ ID NO: 26192 - DNA, 15 bp, Homo sapiens
tgaccttctctgaac

SEQ ID NO: 26193 - DNA, 15 bp, Homo sapiens
ctgaccttctctgaa

SEQ ID NO: 26194 - DNA, 15 bp, Homo sapiens
cctgaccttctctga

SEQ ID NO: 26195 - DNA, 15 bp, Homo sapiens
ccctgaccttctctg

SEQ ID NO: 26196 - DNA, 15 bp, Homo sapiens
accctgaccttctct

SEQ ID NO: 26197 - DNA, 15 bp, Homo sapiens
taccctgaccttctc

SEQ ID NO: 26198 - DNA, 15 bp, Homo sapiens
gtaccctgaccttct

SEQ ID NO: 26199 - DNA, 15 bp, Homo sapiens
ggtaccctgaccttc

SEQ ID NO: 26200 - DNA, 15 bp, Homo sapiens
aggtaccctgacctt

SEQ ID NO: 26201 - DNA, 15 bp, Homo sapiens
caggtaccctgacct

SEQ ID NO: 26202 - DNA, 15 bp, Homo sapiens
tcaggtaccctgacc

SEQ ID NO: 26203 - DNA, 15 bp, Homo sapiens
atcaggtaccctgac

SEQ ID NO: 26204 - DNA, 15 bp, Homo sapiens
tatcaggtaccctga

SEQ ID NO: 26205 - DNA, 15 bp, Homo sapiens
atatcaggtaccctg

SEQ ID NO: 26206 - DNA, 15 bp, Homo sapiens
tatatcaggtaccct

SEQ ID NO: 26207 - DNA, 15 bp, Homo sapiens
ttatatcaggtaccc

SEQ ID NO: 26208 - DNA, 15 bp, Homo sapiens
attatatcaggtacc

SEQ ID NO: 26209 - DNA, 15 bp, Homo sapiens
gattatatcaggtac

SEQ ID NO: 26210 - DNA, 15 bp, Homo sapiens
tgattatatcaggta

SEQ ID NO: 26211 - DNA, 15 bp, Homo sapiens
ttgattatatcaggt

SEQ ID NO: 26212 - DNA, 15 bp, Homo sapiens
cttgattatatcagg

SEQ ID NO: 26213 - DNA, 15 bp, Homo sapiens
tcttgattatatcag

SEQ ID NO: 26214 - DNA, 15 bp, Homo sapiens
ctcttgattatatca

SEQ ID NO: 26215 - DNA, 15 bp, Homo sapiens
tctcttgattatatc

SEQ ID NO: 26216 - DNA, 15 bp, Homo sapiens
ctctcttgattatat

SEQ ID NO: 26217 - DNA, 15 bp, Homo sapiens
tctctcttgattata

SEQ ID NO: 26218 - DNA, 15 bp, Homo sapiens
ctctctcttgattat

SEQ ID NO: 26219 - DNA, 15 bp, Homo sapiens
tctctctcttgatta

SEQ ID NO: 26220 - DNA, 15 bp, Homo sapiens
gtctctctcttgatt

SEQ ID NO: 26221 - DNA, 15 bp, Homo sapiens
ggtctctctcttgat

SEQ ID NO: 26222 - DNA, 15 bp, Homo sapiens
aggtctctctcttga

SEQ ID NO: 26223 - DNA, 15 bp, Homo sapiens
aaggtctctctcttg

SEQ ID NO: 26224 - DNA, 15 bp, Homo sapiens
taaggtctctctctt

SEQ ID NO: 26225 - DNA, 15 bp, Homo sapiens
gtaaggtctctctct

SEQ ID NO: 26226 - DNA, 15 bp, Homo sapiens
tgtaaggtctctctc

SEQ ID NO: 26227 - DNA, 15 bp, Homo sapiens
ctgtaaggtctctct

SEQ ID NO: 26228 - DNA, 15 bp, Homo sapiens
gctgtaaggtctctc

SEQ ID NO: 26229 - DNA, 15 bp, Homo sapiens
ggctgtaaggtctct

SEQ ID NO: 26230 - DNA, 15 bp, Homo sapiens
tggctgtaaggtctc

SEQ ID NO: 26231 - DNA, 15 bp, Homo sapiens
ctggctgtaaggtct

SEQ ID NO: 26232 - DNA, 15 bp, Homo sapiens
cctggctgtaaggtc

SEQ ID NO: 26233 - DNA, 15 bp, Homo sapiens
acctggctgtaaggt

SEQ ID NO: 26234 - DNA, 15 bp, Homo sapiens
cacctggctgtaagg

SEQ ID NO: 26235 - DNA, 15 bp, Homo sapiens
tcacctggctgtaag

SEQ ID NO: 26236 - DNA, 15 bp, Homo sapiens
ctcacctggctgtaa

SEQ ID NO: 26237 - DNA, 15 bp, Homo sapiens
cctcacctggctgta

SEQ ID NO: 26238 - DNA, 15 bp, Homo sapiens
acctcacctggctgt

SEQ ID NO: 26239 - DNA, 15 bp, Homo sapiens
cacctcacctggctg

SEQ ID NO: 26240 - DNA, 15 bp, Homo sapiens
tcacctcacctggct

SEQ ID NO: 26241 - DNA, 15 bp, Homo sapiens
ttcacctcacctggc

SEQ ID NO: 26242 - DNA, 15 bp, Homo sapiens
attcacctcacctgg

SEQ ID NO: 26243 - DNA, 15 bp, Homo sapiens
cattcacctcacctg

SEQ ID NO: 26244 - DNA, 15 bp, Homo sapiens
acattcacctcacct

SEQ ID NO: 26245 - DNA, 15 bp, Homo sapiens
tacattcacctcacc

SEQ ID NO: 26246 - DNA, 15 bp, Homo sapiens
gtacattcacctcac

SEQ ID NO: 26247 - DNA, 15 bp, Homo sapiens
ggtacattcacctca

SEQ ID NO: 26248 - DNA, 15 bp, Homo sapiens
aggtacattcacctc

SEQ ID NO: 26249 - DNA, 15 bp, Homo sapiens
taggtacattcacct

SEQ ID NO: 26250 - DNA, 15 bp, Homo sapiens
ataggtacattcacc

SEQ ID NO: 26251 - DNA, 15 bp, Homo sapiens
tataggtacattcac

SEQ ID NO: 26252 - DNA, 15 bp, Homo sapiens
ttataggtacattca

SEQ ID NO: 26253 - DNA, 15 bp, Homo sapiens
attataggtacattc

SEQ ID NO: 26254 - DNA, 15 bp, Homo sapiens
gattataggtacatt

SEQ ID NO: 26255 - DNA, 15 bp, Homo sapiens
ggattataggtacat

SEQ ID NO: 26256 - DNA, 15 bp, Homo sapiens
gggattataggtaca

SEQ ID NO: 26257 - DNA, 15 bp, Homo sapiens
tgggattataggtac

SEQ ID NO: 26258 - DNA, 15 bp, Homo sapiens
ctgggattataggta

SEQ ID NO: 26259 - DNA, 15 bp, Homo sapiens
gctgggattataggt

SEQ ID NO: 26260 - DNA, 15 bp, Homo sapiens
agctgggattatagg

SEQ ID NO: 26261 - DNA, 15 bp, Homo sapiens
tagctgggattatag

SEQ ID NO: 26262 - DNA, 15 bp, Homo sapiens
gtagctgggattata

SEQ ID NO: 26263 - DNA, 15 bp, Homo sapiens
agtagctgggattat

SEQ ID NO: 26264 - DNA, 15 bp, Homo sapiens
aagtagctgggatta

SEQ ID NO: 26265 - DNA, 15 bp, Homo sapiens
taagtagctgggatt

SEQ ID NO: 26266 - DNA, 15 bp, Homo sapiens
ctaagtagctgggat

SEQ ID NO: 26267 - DNA, 15 bp, Homo sapiens
cctaagtagctggga

SEQ ID NO: 26268 - DNA, 15 bp, Homo sapiens
tcctaagtagctggg

SEQ ID NO: 26269 - DNA, 15 bp, Homo sapiens
ctcctaagtagctgg

SEQ ID NO: 26270 - DNA, 15 bp, Homo sapiens
cctcctaagtagctg

SEQ ID NO: 26271 - DNA, 15 bp, Homo sapiens
gcctcctaagtagct

SEQ ID NO: 26272 - DNA, 15 bp, Homo sapiens
agcctcctaagtagc

SEQ ID NO: 26273 - DNA, 15 bp, Homo sapiens
cagcctcctaagtag

SEQ ID NO: 26274 - DNA, 15 bp, Homo sapiens
tcagcctcctaagta

SEQ ID NO: 26275 - DNA, 15 bp, Homo sapiens
ttcagcctcctaagt

SEQ ID NO: 26276 - DNA, 15 bp, Homo sapiens
tttcagcctcctaag

SEQ ID NO: 26277 - DNA, 15 bp, Homo sapiens
atttcagcctcctaa

SEQ ID NO: 26278 - DNA, 15 bp, Homo sapiens
catttcagcctccta

SEQ ID NO: 26279 - DNA, 15 bp, Homo sapiens
ccatttcagcctcct

SEQ ID NO: 26280 - DNA, 15 bp, Homo sapiens
cccatttcagcctcc

SEQ ID NO: 26281 - DNA, 15 bp, Homo sapiens
tcccatttcagcctc

SEQ ID NO: 26282 - DNA, 15 bp, Homo sapiens
ctcccatttcagcct

SEQ ID NO: 26283 - DNA, 15 bp, Homo sapiens
cctcccatttcagcc

SEQ ID NO: 26284 - DNA, 15 bp, Homo sapiens
tcctcccatttcagc

SEQ ID NO: 26285 - DNA, 15 bp, Homo sapiens
atcctcccatttcag

SEQ ID NO: 26286 - DNA, 15 bp, Homo sapiens
gatcctcccatttca

SEQ ID NO: 26287 - DNA, 15 bp, Homo sapiens
tgatcctcccatttc

SEQ ID NO: 26288 - DNA, 15 bp, Homo sapiens
gtgatcctcccattt

SEQ ID NO: 26289 - DNA, 15 bp, Homo sapiens
agtgatcctcccatt

SEQ ID NO: 26290 - DNA, 15 bp, Homo sapiens
aagtgatcctcccat

SEQ ID NO: 26291 - DNA, 15 bp, Homo sapiens
caagtgatcctccca

SEQ ID NO: 26292 - DNA, 15 bp, Homo sapiens
tcaagtgatcctccc

SEQ ID NO: 26293 - DNA, 15 bp, Homo sapiens
actcaagtgatcctc

SEQ ID NO: 26294 - DNA, 15 bp, Homo sapiens
gactcaagtgatcct

SEQ ID NO: 26295 - DNA, 15 bp, Homo sapiens
ggactcaagtgatcc

SEQ ID NO: 26296 - DNA, 15 bp, Homo sapiens
tggactcaagtgatc

SEQ ID NO: 26297 - DNA, 15 bp, Homo sapiens
ctggactcaagtgat

SEQ ID NO: 26298 - DNA, 15 bp, Homo sapiens
cctggactcaagtga

SEQ ID NO: 26299 - DNA, 15 bp, Homo sapiens
acctggactcaagtg

SEQ ID NO: 26300 - DNA, 15 bp, Homo sapiens
aacctggactcaagt

SEQ ID NO: 26301 - DNA, 15 bp, Homo sapiens
aaacctggactcaag

SEQ ID NO: 26302 - DNA, 15 bp, Homo sapiens
caaacctggactcaa

SEQ ID NO: 26303 - DNA, 15 bp, Homo sapiens
tcaaacctggactca

SEQ ID NO: 26304 - DNA, 15 bp, Homo sapiens
ctcaaacctggactc

SEQ ID NO: 26305 - DNA, 15 bp, Homo sapiens
tctcaaacctggact

SEQ ID NO: 26306 - DNA, 15 bp, Homo sapiens
gtctcaaacctggac

SEQ ID NO: 26307 - DNA, 15 bp, Homo sapiens
ggtctcaaacctgga

SEQ ID NO: 26308 - DNA, 15 bp, Homo sapiens
tggtctcaaacctgg

SEQ ID NO: 26309 - DNA, 15 bp, Homo sapiens
ctggtctcaaacctg

SEQ ID NO: 26310 - DNA, 15 bp, Homo sapiens
gctggtctcaaacct

SEQ ID NO: 26311 - DNA, 15 bp, Homo sapiens
ggctggtctcaaacc

SEQ ID NO: 26312 - DNA, 15 bp, Homo sapiens
gggctggtctcaaac

SEQ ID NO: 26313 - DNA, 15 bp, Homo sapiens
tgggctggtctcaaa

SEQ ID NO: 26314 - DNA, 15 bp, Homo sapiens
ctgggctggtctcaa

SEQ ID NO: 26315 - DNA, 15 bp, Homo sapiens
cctgggctggtctca

SEQ ID NO: 26316 - DNA, 15 bp, Homo sapiens
gcctgggctggtctc

SEQ ID NO: 26317 - DNA, 15 bp, Homo sapiens
tgcctgggctggtct

SEQ ID NO: 26318 - DNA, 15 bp, Homo sapiens
ttgcctgggctggtc

SEQ ID NO: 26319 - DNA, 15 bp, Homo sapiens
gttgcctgggctggt

SEQ ID NO: 26320 - DNA, 15 bp, Homo sapiens
tgttgcctgggctgg

SEQ ID NO: 26321 - DNA, 15 bp, Homo sapiens
atgttgcctgggctg

SEQ ID NO: 26322 - DNA, 15 bp, Homo sapiens
tatgttgcctgggct

SEQ ID NO: 26323 - DNA, 15 bp, Homo sapiens
ctatgttgcctgggc

SEQ ID NO: 26324 - DNA, 15 bp, Homo sapiens
gctatgttgcctggg

SEQ ID NO: 26325 - DNA, 15 bp, Homo sapiens
tgctatgttgcctgg

SEQ ID NO: 26326 - DNA, 15 bp, Homo sapiens
ttgctatgttgcctg

SEQ ID NO: 26327 - DNA, 15 bp, Homo sapiens
cttgctatgttgcct

SEQ ID NO: 26328 - DNA, 15 bp, Homo sapiens
tcttgctatgttgcc

SEQ ID NO: 26329 - DNA, 15 bp, Homo sapiens
atcttgctatgttgc

SEQ ID NO: 26330 - DNA, 15 bp, Homo sapiens
gatcttgctatgttg

SEQ ID NO: 26331 - DNA, 15 bp, Homo sapiens
ggatcttgctatgtt

SEQ ID NO: 26332 - DNA, 15 bp, Homo sapiens
gggatcttgctatgt

SEQ ID NO: 26333 - DNA, 15 bp, Homo sapiens
ggggatcttgctatg

SEQ ID NO: 26334 - DNA, 15 bp, Homo sapiens
tggggatcttgctat

SEQ ID NO: 26335 - DNA, 15 bp, Homo sapiens
atggggatcttgcta

SEQ ID NO: 26336 - DNA, 15 bp, Homo sapiens
gatggggatcttgct

SEQ ID NO: 26337 - DNA, 15 bp, Homo sapiens
tgatggggatcttgc

SEQ ID NO: 26338 - DNA, 15 bp, Homo sapiens
ctgatggggatcttg

SEQ ID NO: 26339 - DNA, 15 bp, Homo sapiens
tctgatggggatctt

SEQ ID NO: 26340 - DNA, 15 bp, Homo sapiens
atctgatggggatct

SEQ ID NO: 26341 - DNA, 15 bp, Homo sapiens
tatctgatggggatc

SEQ ID NO: 26342 - DNA, 15 bp, Homo sapiens
gtatctgatggggat

SEQ ID NO: 26343 - DNA, 15 bp, Homo sapiens
tgtatctgatgggga

SEQ ID NO: 26344 - DNA, 15 bp, Homo sapiens
gtgtatctgatgggg

SEQ ID NO: 26345 - DNA, 15 bp, Homo sapiens
ggtgtatctgatggg

SEQ ID NO: 26346 - DNA, 15 bp, Homo sapiens
tggtgtatctgatgg

SEQ ID NO: 26347 - DNA, 15 bp, Homo sapiens
ttggtgtatctgatg

SEQ ID NO: 26348 - DNA, 15 bp, Homo sapiens
tttggtgtatctgat

SEQ ID NO: 26349 - DNA, 15 bp, Homo sapiens
ttttggtgtatctga

SEQ ID NO: 26350 - DNA, 15 bp, Homo sapiens
tttttggtgtatctg

SEQ ID NO: 26351 - DNA, 15 bp, Homo sapiens
ctttttggtgtatct

SEQ ID NO: 26352 - DNA, 15 bp, Homo sapiens
tctttttggtgtatc

SEQ ID NO: 26353 - DNA, 15 bp, Homo sapiens
gtctttttggtgtat

SEQ ID NO: 26354 - DNA, 15 bp, Homo sapiens
tgtctttttggtgta

SEQ ID NO: 26355 - DNA, 15 bp, Homo sapiens
ctgtctttttggtgt

SEQ ID NO: 26356 - DNA, 15 bp, Homo sapiens
tctgtctttttggtg

SEQ ID NO: 26357 - DNA, 15 bp, Homo sapiens
atctgtctttttggt

SEQ ID NO: 26358 - DNA, 15 bp, Homo sapiens
aatctgtctttttgg

SEQ ID NO: 26359 - DNA, 15 bp, Homo sapiens
aaatctgtctttttg

SEQ ID NO: 26360 - DNA, 15 bp, Homo sapiens
gaaatctgtcttttt

SEQ ID NO: 26361 - DNA, 15 bp, Homo sapiens
agaaatctgtctttt

SEQ ID NO: 26362 - DNA, 15 bp, Homo sapiens
aagaaatctgtcttt

SEQ ID NO: 26363 - DNA, 15 bp, Homo sapiens
aaagaaatctgtctt

SEQ ID NO: 26364 - DNA, 15 bp, Homo sapiens
aaaagaaatctgtct

SEQ ID NO: 26365 - DNA, 15 bp, Homo sapiens
aaaaagaaatctgtc

SEQ ID NO: 26366 - DNA, 15 bp, Homo sapiens
aaaaaagaaatctgt

SEQ ID NO: 26367 - DNA, 15 bp, Homo sapiens
aaaaaaagaaatctg

SEQ ID NO: 26368 - DNA, 15 bp, Homo sapiens
aaaaaaaagaaatct

SEQ ID NO: 26369 - DNA, 15 bp, Homo sapiens
aaaaaaaaagaaatc

SEQ ID NO: 26370 - DNA, 15 bp, Homo sapiens
gagactctgtctcaa

SEQ ID NO: 26371 - DNA, 15 bp, Homo sapiens
cgagactctgtctca

SEQ ID NO: 26372 - DNA, 15 bp, Homo sapiens
gcgagactctgtctc

SEQ ID NO: 26373 - DNA, 15 bp, Homo sapiens
agcgagactctgtct

SEQ ID NO: 26374 - DNA, 15 bp, Homo sapiens
gagcgagactctgtc

SEQ ID NO: 26375 - DNA, 15 bp, Homo sapiens
agagcgagactctgt

SEQ ID NO: 26376 - DNA, 15 bp, Homo sapiens
cagagcgagactctg

SEQ ID NO: 26377 - DNA, 15 bp, Homo sapiens
acagagcgagactct

SEQ ID NO: 26378 - DNA, 15 bp, Homo sapiens
gctccagcctgggcg

SEQ ID NO: 26379 - DNA, 15 bp, Homo sapiens
cgctccagcctgggc

SEQ ID NO: 26380 - DNA, 15 bp, Homo sapiens
gcgctccagcctggg

SEQ ID NO: 26381 - DNA, 15 bp, Homo sapiens
tgcgctccagcctgg

SEQ ID NO: 26382 - DNA, 15 bp, Homo sapiens
ctgcgctccagcctg

SEQ ID NO: 26383 - DNA, 15 bp, Homo sapiens
actgcgctccagcct

SEQ ID NO: 26384 - DNA, 15 bp, Homo sapiens
cactgcgctccagcc

SEQ ID NO: 26385 - DNA, 15 bp, Homo sapiens
tcactgcgctccagc

SEQ ID NO: 26386 - DNA, 15 bp, Homo sapiens
gtcactgcgctccag

SEQ ID NO: 26387 - DNA, 15 bp, Homo sapiens
tgtcactgcgctcca

SEQ ID NO: 26388 - DNA, 15 bp, Homo sapiens
gtgtcactgcgctcc

SEQ ID NO: 26389 - DNA, 15 bp, Homo sapiens
cgtgtcactgcgctc

SEQ ID NO: 26390 - DNA, 15 bp, Homo sapiens
tcgtgtcactgcgct

SEQ ID NO: 26391 - DNA, 15 bp, Homo sapiens
atcgtgtcactgcgc

SEQ ID NO: 26392 - DNA, 15 bp, Homo sapiens
catcgtgtcactgcg

SEQ ID NO: 26393 - DNA, 15 bp, Homo sapiens
acatcgtgtcactgc

SEQ ID NO: 26394 - DNA, 15 bp, Homo sapiens
gacatcgtgtcactg

SEQ ID NO: 26395 - DNA, 15 bp, Homo sapiens
tgacatcgtgtcact

SEQ ID NO: 26396 - DNA, 15 bp, Homo sapiens
ctgacatcgtgtcac

SEQ ID NO: 26397 - DNA, 15 bp, Homo sapiens
gctgacatcgtgtca

SEQ ID NO: 26398 - DNA, 15 bp, Homo sapiens
agctgacatcgtgtc

SEQ ID NO: 26399 - DNA, 15 bp, Homo sapiens
gagctgacatcgtgt

SEQ ID NO: 26400 - DNA, 15 bp, Homo sapiens
tgagctgacatcgtg

SEQ ID NO: 26401 - DNA, 15 bp, Homo sapiens
gtgagctgacatcgt

SEQ ID NO: 26402 - DNA, 15 bp, Homo sapiens
agtgagctgacatcg

SEQ ID NO: 26403 - DNA, 15 bp, Homo sapiens
cagtgagctgacatc

SEQ ID NO: 26404 - DNA, 15 bp, Homo sapiens
gcagtgagctgacat

SEQ ID NO: 26405 - DNA, 15 bp, Homo sapiens
tgcagtgagctgaca

SEQ ID NO: 26406 - DNA, 15 bp, Homo sapiens
ttgcagtgagctgac

SEQ ID NO: 26407 - DNA, 15 bp, Homo sapiens
gttgcagtgagctga

SEQ ID NO: 26408 - DNA, 15 bp, Homo sapiens
ggttgcagtgagctg

SEQ ID NO: 26409 - DNA, 15 bp, Homo sapiens
aggttgcagtgagct

SEQ ID NO: 26410 - DNA, 15 bp, Homo sapiens
tgggaggcggaggtt

SEQ ID NO: 26411 - DNA, 15 bp, Homo sapiens
ctgggaggcggaggt

SEQ ID NO: 26412 - DNA, 15 bp, Homo sapiens
cctgggaggcggagg

SEQ ID NO: 26413 - DNA, 15 bp, Homo sapiens
acctgggaggcggag

SEQ ID NO: 26414 - DNA, 15 bp, Homo sapiens
aacctgggaggcgga

SEQ ID NO: 26415 - DNA, 15 bp, Homo sapiens
gaacctgggaggcgg

SEQ ID NO: 26416 - DNA, 15 bp, Homo sapiens
tgaacctgggaggcg

SEQ ID NO: 26417 - DNA, 15 bp, Homo sapiens
ttgaacctgggaggc

SEQ ID NO: 26418 - DNA, 15 bp, Homo sapiens
cttgaacctgggagg

SEQ ID NO: 26419 - DNA, 15 bp, Homo sapiens
acttgaacctgggag

SEQ ID NO: 26420 - DNA, 15 bp, Homo sapiens
cacttgaacctggga

SEQ ID NO: 26421 - DNA, 15 bp, Homo sapiens
tcacttgaacctggg

SEQ ID NO: 26422 - DNA, 15 bp, Homo sapiens
atcacttgaacctgg

SEQ ID NO: 26423 - DNA, 15 bp, Homo sapiens
aatcacttgaacctg

SEQ ID NO: 26424 - DNA, 15 bp, Homo sapiens
gaatcacttgaacct

SEQ ID NO: 26425 - DNA, 15 bp, Homo sapiens
actactcaggaggct

SEQ ID NO: 26426 - DNA, 15 bp, Homo sapiens
aactactcaggaggc

SEQ ID NO: 26427 - DNA, 15 bp, Homo sapiens
caactactcaggagg

SEQ ID NO: 26428 - DNA, 15 bp, Homo sapiens
ccaactactcaggag

SEQ ID NO: 26429 - DNA, 15 bp, Homo sapiens
cccaactactcagga

SEQ ID NO: 26430 - DNA, 15 bp, Homo sapiens
tcccaactactcagg

SEQ ID NO: 26431 - DNA, 15 bp, Homo sapiens
gtcccaactactcag

SEQ ID NO: 26432 - DNA, 15 bp, Homo sapiens
agtcccaactactca

SEQ ID NO: 26433 - DNA, 15 bp, Homo sapiens
tagtcccaactactc

SEQ ID NO: 26434 - DNA, 15 bp, Homo sapiens
gtagtcccaactact

SEQ ID NO: 26435 - DNA, 15 bp, Homo sapiens
tgtagtcccaactac

SEQ ID NO: 26436 - DNA, 15 bp, Homo sapiens
ctgtagtcccaacta

SEQ ID NO: 26437 - DNA, 15 bp, Homo sapiens
cctgtagtcccaact

SEQ ID NO: 26438 - DNA, 15 bp, Homo sapiens
ccctgtagtcccaac

SEQ ID NO: 26439 - DNA, 15 bp, Homo sapiens
cccctgtagtcccaa

SEQ ID NO: 26440 - DNA, 15 bp, Homo sapiens
acccctgtagtccca

SEQ ID NO: 26441 - DNA, 15 bp, Homo sapiens
tacccctgtagtccc

SEQ ID NO: 26442 - DNA, 15 bp, Homo sapiens
gtacccctgtagtcc

SEQ ID NO: 26443 - DNA, 15 bp, Homo sapiens
cgtacccctgtagtc

SEQ ID NO: 26444 - DNA, 15 bp, Homo sapiens
tcgtacccctgtagt

SEQ ID NO: 26445 - DNA, 15 bp, Homo sapiens
gtcgtacccctgtag

SEQ ID NO: 26446 - DNA, 15 bp, Homo sapiens
tgtcgtacccctgta

SEQ ID NO: 26447 - DNA, 15 bp, Homo sapiens
gtgtcgtacccctgt

SEQ ID NO: 26448 - DNA, 15 bp, Homo sapiens
ggtgtcgtacccctg

SEQ ID NO: 26449 - DNA, 15 bp, Homo sapiens
tggtgtcgtacccct

SEQ ID NO: 26450 - DNA, 15 bp, Homo sapiens
ctggtgtcgtacccc

SEQ ID NO: 26451 - DNA, 15 bp, Homo sapiens
tctggtgtcgtaccc

SEQ ID NO: 26452 - DNA, 15 bp, Homo sapiens
gtctggtgtcgtacc

SEQ ID NO: 26453 - DNA, 15 bp, Homo sapiens
ggtctggtgtcgtac

SEQ ID NO: 26454 - DNA, 15 bp, Homo sapiens
aggtctggtgtcgta

SEQ ID NO: 26455 - DNA, 15 bp, Homo sapiens
caggtctggtgtcgt

SEQ ID NO: 26456 - DNA, 15 bp, Homo sapiens
ccaggtctggtgtcg

SEQ ID NO: 26457 - DNA, 15 bp, Homo sapiens
gccaggtctggtgtc

SEQ ID NO: 26458 - DNA, 15 bp, Homo sapiens
agccaggtctggtgt

SEQ ID NO: 26459 - DNA, 15 bp, Homo sapiens
tagccaggtctggtg

SEQ ID NO: 26460 - DNA, 15 bp, Homo sapiens
ttagccaggtctggt

SEQ ID NO: 26461 - DNA, 15 bp, Homo sapiens
attagccaggtctgg

SEQ ID NO: 26462 - DNA, 15 bp, Homo sapiens
aattagccaggtctg

SEQ ID NO: 26463 - DNA, 15 bp, Homo sapiens
aaattagccaggtct

SEQ ID NO: 26464 - DNA, 15 bp, Homo sapiens
aaaattagccaggtc

SEQ ID NO: 26465 - DNA, 15 bp, Homo sapiens
ttacaaaaattagcc

SEQ ID NO: 26466 - DNA, 15 bp, Homo sapiens
attacaaaaattagc

SEQ ID NO: 26467 - DNA, 15 bp, Homo sapiens
aattacaaaaattag

SEQ ID NO: 26468 - DNA, 15 bp, Homo sapiens
aaattacaaaaatta

SEQ ID NO: 26469 - DNA, 15 bp, Homo sapiens
aaaattacaaaaatt

SEQ ID NO: 26470 - DNA, 15 bp, Homo sapiens
taaaattacaaaaat

SEQ ID NO: 26471 - DNA, 15 bp, Homo sapiens
ctaaaattacaaaaa

SEQ ID NO: 26472 - DNA, 15 bp, Homo sapiens
actaaaattacaaaa

SEQ ID NO: 26473 - DNA, 15 bp, Homo sapiens
tactaaaattacaaa

SEQ ID NO: 26474 - DNA, 15 bp, Homo sapiens
ctactaaaattacaa

SEQ ID NO: 26475 - DNA, 15 bp, Homo sapiens
tctactaaaattaca

SEQ ID NO: 26476 - DNA, 15 bp, Homo sapiens
ctctactaaaattac

SEQ ID NO: 26477 - DNA, 15 bp, Homo sapiens
actctactaaaatta

SEQ ID NO: 26478 - DNA, 15 bp, Homo sapiens
gactctactaaaatt

SEQ ID NO: 26479 - DNA, 15 bp, Homo sapiens
cgactctactaaaat

SEQ ID NO: 26480 - DNA, 15 bp, Homo sapiens
ggtgaaaccccgact

SEQ ID NO: 26481 - DNA, 15 bp, Homo sapiens
tggtgaaaccccgac

SEQ ID NO: 26482 - DNA, 15 bp, Homo sapiens
atggtgaaaccccga

SEQ ID NO: 26483 - DNA, 15 bp, Homo sapiens
tatggtgaaaccccg

SEQ ID NO: 26484 - DNA, 15 bp, Homo sapiens
atatggtgaaacccc

SEQ ID NO: 26485 - DNA, 15 bp, Homo sapiens
accaatatggtgaaa

SEQ ID NO: 26486 - DNA, 15 bp, Homo sapiens
gaccaatatggtgaa

SEQ ID NO: 26487 - DNA, 15 bp, Homo sapiens
tgaccaatatggtga

SEQ ID NO: 26488 - DNA, 15 bp, Homo sapiens
ctgaccaatatggtg

SEQ ID NO: 26489 - DNA, 15 bp, Homo sapiens
cctgaccaatatggt

SEQ ID NO: 26490 - DNA, 15 bp, Homo sapiens
gcctgaccaatatgg

SEQ ID NO: 26491 - DNA, 15 bp, Homo sapiens
agcctgaccaatatg

SEQ ID NO: 26492 - DNA, 15 bp, Homo sapiens
cagcctgaccaatat

SEQ ID NO: 26493 - DNA, 15 bp, Homo sapiens
ccagcctgaccaata

SEQ ID NO: 26494 - DNA, 15 bp, Homo sapiens
accagcctgaccaat

SEQ ID NO: 26495 - DNA, 15 bp, Homo sapiens
gagaccagcctgacc

SEQ ID NO: 26496 - DNA, 15 bp, Homo sapiens
cgagaccagcctgac

SEQ ID NO: 26497 - DNA, 15 bp, Homo sapiens
tcgagaccagcctga

SEQ ID NO: 26498 - DNA, 15 bp, Homo sapiens
agggtggatcacctg

SEQ ID NO: 26499 - DNA, 15 bp, Homo sapiens
gagggtggatcacct

SEQ ID NO: 26500 - DNA, 15 bp, Homo sapiens
ggagggtggatcacc

SEQ ID NO: 26501 - DNA, 15 bp, Homo sapiens
aggagggtggatcac

SEQ ID NO: 26502 - DNA, 15 bp, Homo sapiens
aaggagggtggatca

SEQ ID NO: 26503 - DNA, 15 bp, Homo sapiens
caaggagggtggatc

SEQ ID NO: 26504 - DNA, 15 bp, Homo sapiens
ccaaggagggtggat

SEQ ID NO: 26505 - DNA, 15 bp, Homo sapiens
gccaaggagggtgga

SEQ ID NO: 26506 - DNA, 15 bp, Homo sapiens
ggccaaggagggtgg

SEQ ID NO: 26507 - DNA, 15 bp, Homo sapiens
aggccaaggagggtg

SEQ ID NO: 26508 - DNA, 15 bp, Homo sapiens
gaggccaaggagggt

SEQ ID NO: 26509 - DNA, 15 bp, Homo sapiens
ggaggccaaggaggg

SEQ ID NO: 26510 - DNA, 15 bp, Homo sapiens
gggaggccaaggagg

SEQ ID NO: 26511 - DNA, 15 bp, Homo sapiens
tgggaggccaaggag

SEQ ID NO: 26512 - DNA, 15 bp, Homo sapiens
ctgggaggccaagga

SEQ ID NO: 26513 - DNA, 15 bp, Homo sapiens
tctgggaggccaagg

SEQ ID NO: 26514 - DNA, 15 bp, Homo sapiens
ctctgggaggccaag

SEQ ID NO: 26515 - DNA, 15 bp, Homo sapiens
actctgggaggccaa

SEQ ID NO: 26516 - DNA, 15 bp, Homo sapiens
cactctgggaggcca

SEQ ID NO: 26517 - DNA, 15 bp, Homo sapiens
gcactctgggaggcc

SEQ ID NO: 26518 - DNA, 15 bp, Homo sapiens
agcactctgggaggc

SEQ ID NO: 26519 - DNA, 15 bp, Homo sapiens
cagcactctgggagg

SEQ ID NO: 26520 - DNA, 15 bp, Homo sapiens
ccagcactctgggag

SEQ ID NO: 26521 - DNA, 15 bp, Homo sapiens
cccagcactctggga

SEQ ID NO: 26522 - DNA, 15 bp, Homo sapiens
tcccagcactctggg

SEQ ID NO: 26523 - DNA, 15 bp, Homo sapiens
atcccagcactctgg

SEQ ID NO: 26524 - DNA, 15 bp, Homo sapiens
aatcccagcactctg

SEQ ID NO: 26525 - DNA, 15 bp, Homo sapiens
taatcccagcactct

SEQ ID NO: 26526 - DNA, 15 bp, Homo sapiens
gtaatcccagcactc

SEQ ID NO: 26527 - DNA, 15 bp, Homo sapiens
ttggtggctcacgcc

SEQ ID NO: 26528 - DNA, 15 bp, Homo sapiens
cttggtggctcacgc

SEQ ID NO: 26529 - DNA, 15 bp, Homo sapiens
gcttggtggctcacg

SEQ ID NO: 26530 - DNA, 15 bp, Homo sapiens
ggcttggtggctcac

SEQ ID NO: 26531 - DNA, 15 bp, Homo sapiens
gggcttggtggctca

SEQ ID NO: 26532 - DNA, 15 bp, Homo sapiens
cgggcttggtggctc

SEQ ID NO: 26533 - DNA, 15 bp, Homo sapiens
ccgggcttggtggct

SEQ ID NO: 26534 - DNA, 15 bp, Homo sapiens
gccgggcttggtggc

SEQ ID NO: 26535 - DNA, 15 bp, Homo sapiens
ggccgggcttggtgg

SEQ ID NO: 26536 - DNA, 15 bp, Homo sapiens
tggccgggcttggtg

SEQ ID NO: 26537 - DNA, 15 bp, Homo sapiens
ttggccgggcttggt

SEQ ID NO: 26538 - DNA, 15 bp, Homo sapiens
tttggccgggcttgg

SEQ ID NO: 26539 - DNA, 15 bp, Homo sapiens
ttttggccgggcttg

SEQ ID NO: 26540 - DNA, 15 bp, Homo sapiens
tttttggccgggctt

SEQ ID NO: 26541 - DNA, 15 bp, Homo sapiens
ttttttggccgggct

SEQ ID NO: 26542 - DNA, 15 bp, Homo sapiens
cttttttggccgggc

SEQ ID NO: 26543 - DNA, 15 bp, Homo sapiens
tcttttttggccggg

SEQ ID NO: 26544 - DNA, 15 bp, Homo sapiens
ctcttttttggccgg

SEQ ID NO: 26545 - DNA, 15 bp, Homo sapiens
tctcttttttggccg

SEQ ID NO: 26546 - DNA, 15 bp, Homo sapiens
ctctcttttttggcc

SEQ ID NO: 26547 - DNA, 15 bp, Homo sapiens
gctctcttttttggc

SEQ ID NO: 26548 - DNA, 15 bp, Homo sapiens
agctctcttttttgg

SEQ ID NO: 26549 - DNA, 15 bp, Homo sapiens
gagctctcttttttg

SEQ ID NO: 26550 - DNA, 15 bp, Homo sapiens
agagctctctttttt

SEQ ID NO: 26551 - DNA, 15 bp, Homo sapiens
aagagctctcttttt

SEQ ID NO: 26552 - DNA, 15 bp, Homo sapiens
taagagctctctttt

SEQ ID NO: 26553 - DNA, 15 bp, Homo sapiens
ataagagctctcttt

SEQ ID NO: 26554 - DNA, 15 bp, Homo sapiens
tataagagctctctt

SEQ ID NO: 26555 - DNA, 15 bp, Homo sapiens
ctataagagctctct

SEQ ID NO: 26556 - DNA, 15 bp, Homo sapiens
cctataagagctctc

SEQ ID NO: 26557 - DNA, 15 bp, Homo sapiens
gcctataagagctct

SEQ ID NO: 26558 - DNA, 15 bp, Homo sapiens
ggcctataagagctc

SEQ ID NO: 26559 - DNA, 15 bp, Homo sapiens
gggcctataagagct

SEQ ID NO: 26560 - DNA, 15 bp, Homo sapiens
agggcctataagagc

SEQ ID NO: 26561 - DNA, 15 bp, Homo sapiens
aagggcctataagag

SEQ ID NO: 26562 - DNA, 15 bp, Homo sapiens
gaagggcctataaga

SEQ ID NO: 26563 - DNA, 15 bp, Homo sapiens
ggaagggcctataag

SEQ ID NO: 26564 - DNA, 15 bp, Homo sapiens
aggaagggcctataa

SEQ ID NO: 26565 - DNA, 15 bp, Homo sapiens
aaggaagggcctata

SEQ ID NO: 26566 - DNA, 15 bp, Homo sapiens
caaggaagggcctat

SEQ ID NO: 26567 - DNA, 15 bp, Homo sapiens
gcaaggaagggccta

SEQ ID NO: 26568 - DNA, 15 bp, Homo sapiens
agcaaggaagggcct

SEQ ID NO: 26569 - DNA, 15 bp, Homo sapiens
aagcaaggaagggcc

SEQ ID NO: 26570 - DNA, 15 bp, Homo sapiens
aaagcaaggaagggc

SEQ ID NO: 26571 - DNA, 15 bp, Homo sapiens
caaagcaaggaaggg

SEQ ID NO: 26572 - DNA, 15 bp, Homo sapiens
ccaaagcaaggaagg

SEQ ID NO: 26573 - DNA, 15 bp, Homo sapiens
tccaaagcaaggaag

SEQ ID NO: 26574 - DNA, 15 bp, Homo sapiens
ctccaaagcaaggaa

SEQ ID NO: 26575 - DNA, 15 bp, Homo sapiens
gctccaaagcaagga

SEQ ID NO: 26576 - DNA, 15 bp, Homo sapiens
agctccaaagcaagg

SEQ ID NO: 26577 - DNA, 15 bp, Homo sapiens
aagctccaaagcaag

SEQ ID NO: 26578 - DNA, 15 bp, Homo sapiens
aaagctccaaagcaa

SEQ ID NO: 26579 - DNA, 15 bp, Homo sapiens
taaagctccaaagca

SEQ ID NO: 26580 - DNA, 15 bp, Homo sapiens
ataaagctccaaagc

SEQ ID NO: 26581 - DNA, 15 bp, Homo sapiens
gataaagctccaaag

SEQ ID NO: 26582 - DNA, 15 bp, Homo sapiens
agataaagctccaaa

SEQ ID NO: 26583 - DNA, 15 bp, Homo sapiens
cagataaagctccaa

SEQ ID NO: 26584 - DNA, 15 bp, Homo sapiens
gcagataaagctcca

SEQ ID NO: 26585 - DNA, 15 bp, Homo sapiens
agcagataaagctcc

SEQ ID NO: 26586 - DNA, 15 bp, Homo sapiens
gagcagataaagctc

SEQ ID NO: 26587 - DNA, 15 bp, Homo sapiens
agagcagataaagct

SEQ ID NO: 26588 - DNA, 15 bp, Homo sapiens
cagagcagataaagc

SEQ ID NO: 26589 - DNA, 15 bp, Homo sapiens
acagagcagataaag

SEQ ID NO: 26590 - DNA, 15 bp, Homo sapiens
cacagagcagataaa

SEQ ID NO: 26591 - DNA, 15 bp, Homo sapiens
tcacagagcagataa

SEQ ID NO: 26592 - DNA, 15 bp, Homo sapiens
atcacagagcagata

SEQ ID NO: 26593 - DNA, 15 bp, Homo sapiens
catcacagagcagat

SEQ ID NO: 26594 - DNA, 15 bp, Homo sapiens
gcatcacagagcaga

SEQ ID NO: 26595 - DNA, 15 bp, Homo sapiens
agcatcacagagcag

SEQ ID NO: 26596 - DNA, 15 bp, Homo sapiens
aagcatcacagagca

SEQ ID NO: 26597 - DNA, 15 bp, Homo sapiens
taagcatcacagagc

SEQ ID NO: 26598 - DNA, 15 bp, Homo sapiens
ataagcatcacagag

SEQ ID NO: 26599 - DNA, 15 bp, Homo sapiens
gataagcatcacaga

SEQ ID NO: 26600 - DNA, 15 bp, Homo sapiens
agataagcatcacag

SEQ ID NO: 26601 - DNA, 15 bp, Homo sapiens
tagataagcatcaca

SEQ ID NO: 26602 - DNA, 15 bp, Homo sapiens
ttagataagcatcac

SEQ ID NO: 26603 - DNA, 15 bp, Homo sapiens
tttagataagcatca

SEQ ID NO: 26604 - DNA, 15 bp, Homo sapiens
ttttagataagcatc

SEQ ID NO: 26605 - DNA, 15 bp, Homo sapiens
attttagataagcat

SEQ ID NO: 26606 - DNA, 15 bp, Homo sapiens
tattttagataagca

SEQ ID NO: 26607 - DNA, 15 bp, Homo sapiens
ctattttagataagc

SEQ ID NO: 26608 - DNA, 15 bp, Homo sapiens
gctattttagataag

SEQ ID NO: 26609 - DNA, 15 bp, Homo sapiens
ggctattttagataa

SEQ ID NO: 26610 - DNA, 15 bp, Homo sapiens
tggctattttagata

SEQ ID NO: 26611 - DNA, 15 bp, Homo sapiens
atggctattttagat

SEQ ID NO: 26612 - DNA, 15 bp, Homo sapiens
tatggctattttaga

SEQ ID NO: 26613 - DNA, 15 bp, Homo sapiens
ttatggctattttag

SEQ ID NO: 26614 - DNA, 15 bp, Homo sapiens
cttatggctatttta

SEQ ID NO: 26615 - DNA, 15 bp, Homo sapiens
ccttatggctatttt

SEQ ID NO: 26616 - DNA, 15 bp, Homo sapiens
accttatggctattt

SEQ ID NO: 26617 - DNA, 15 bp, Homo sapiens
gaccttatggctatt

SEQ ID NO: 26618 - DNA, 15 bp, Homo sapiens
tgaccttatggctat

SEQ ID NO: 26619 - DNA, 15 bp, Homo sapiens
gtgaccttatggcta

SEQ ID NO: 26620 - DNA, 15 bp, Homo sapiens
agtgaccttatggct

SEQ ID NO: 26621 - DNA, 15 bp, Homo sapiens
cagtgaccttatggc

SEQ ID NO: 26622 - DNA, 15 bp, Homo sapiens
tcagtgaccttatgg

SEQ ID NO: 26623 - DNA, 15 bp, Homo sapiens
atcagtgaccttatg

SEQ ID NO: 26624 - DNA, 15 bp, Homo sapiens
tatcagtgaccttat

SEQ ID NO: 26625 - DNA, 15 bp, Homo sapiens
atatcagtgacctta

SEQ ID NO: 26626 - DNA, 15 bp, Homo sapiens
aatatcagtgacctt

SEQ ID NO: 26627 - DNA, 15 bp, Homo sapiens
aaatatcagtgacct

SEQ ID NO: 26628 - DNA, 15 bp, Homo sapiens
aaaatatcagtgacc

SEQ ID NO: 26629 - DNA, 15 bp, Homo sapiens
aaaaatatcagtgac

SEQ ID NO: 26630 - DNA, 15 bp, Homo sapiens
taaaaatatcagtga

SEQ ID NO: 26631 - DNA, 15 bp, Homo sapiens
ttaaaaatatcagtg

SEQ ID NO: 26632 - DNA, 15 bp, Homo sapiens
cttaaaaatatcagt

SEQ ID NO: 26633 - DNA, 15 bp, Homo sapiens
gcttaaaaatatcag

SEQ ID NO: 26634 - DNA, 15 bp, Homo sapiens
tgcttaaaaatatca

SEQ ID NO: 26635 - DNA, 15 bp, Homo sapiens
atgcttaaaaatatc

SEQ ID NO: 26636 - DNA, 15 bp, Homo sapiens
aatgcttaaaaatat

SEQ ID NO: 26637 - DNA, 15 bp, Homo sapiens
aaatgcttaaaaata

SEQ ID NO: 26638 - DNA, 15 bp, Homo sapiens
caaatgcttaaaaat

SEQ ID NO: 26639 - DNA, 15 bp, Homo sapiens
ccaaatgcttaaaaa

SEQ ID NO: 26640 - DNA, 15 bp, Homo sapiens
tccaaatgcttaaaa

SEQ ID NO: 26641 - DNA, 15 bp, Homo sapiens
ttccaaatgcttaaa

SEQ ID NO: 26642 - DNA, 15 bp, Homo sapiens
tttccaaatgcttaa

SEQ ID NO: 26643 - DNA, 15 bp, Homo sapiens
atttccaaatgctta

SEQ ID NO: 26644 - DNA, 15 bp, Homo sapiens
aatttccaaatgctt

SEQ ID NO: 26645 - DNA, 15 bp, Homo sapiens
taatttccaaatgct

SEQ ID NO: 26646 - DNA, 15 bp, Homo sapiens
gtaatttccaaatgc

SEQ ID NO: 26647 - DNA, 15 bp, Homo sapiens
agtaatttccaaatg

SEQ ID NO: 26648 - DNA, 15 bp, Homo sapiens
aagtaatttccaaat

SEQ ID NO: 26649 - DNA, 15 bp, Homo sapiens
gaagtaatttccaaa

SEQ ID NO: 26650 - DNA, 15 bp, Homo sapiens
tgaagtaatttccaa

SEQ ID NO: 26651 - DNA, 15 bp, Homo sapiens
ctgaagtaatttcca

SEQ ID NO: 26652 - DNA, 15 bp, Homo sapiens
gctgaagtaatttcc

SEQ ID NO: 26653 - DNA, 15 bp, Homo sapiens
agctgaagtaatttc

SEQ ID NO: 26654 - DNA, 15 bp, Homo sapiens
cagctgaagtaattt

SEQ ID NO: 26655 - DNA, 15 bp, Homo sapiens
ccagctgaagtaatt

SEQ ID NO: 26656 - DNA, 15 bp, Homo sapiens
cccagctgaagtaat

SEQ ID NO: 26657 - DNA, 15 bp, Homo sapiens
acccagctgaagtaa

SEQ ID NO: 26658 - DNA, 15 bp, Homo sapiens
cacccagctgaagta

SEQ ID NO: 26659 - DNA, 15 bp, Homo sapiens
gcacccagctgaagt

SEQ ID NO: 26660 - DNA, 15 bp, Homo sapiens
ggcacccagctgaag

SEQ ID NO: 26661 - DNA, 15 bp, Homo sapiens
tggcacccagctgaa

SEQ ID NO: 26662 - DNA, 15 bp, Homo sapiens
atggcacccagctga

SEQ ID NO: 26663 - DNA, 15 bp, Homo sapiens
catggcacccagctg

SEQ ID NO: 26664 - DNA, 15 bp, Homo sapiens
ccatggcacccagct

SEQ ID NO: 26665 - DNA, 15 bp, Homo sapiens
gccatggcacccagc

SEQ ID NO: 26666 - DNA, 15 bp, Homo sapiens
agccatggcacccag

SEQ ID NO: 26667 - DNA, 15 bp, Homo sapiens
gagccatggcaccca

SEQ ID NO: 26668 - DNA, 15 bp, Homo sapiens
tgagccatggcaccc

SEQ ID NO: 26669 - DNA, 15 bp, Homo sapiens
atgagccatggcacc

SEQ ID NO: 26670 - DNA, 15 bp, Homo sapiens
catgagccatggcac

SEQ ID NO: 26671 - DNA, 15 bp, Homo sapiens
gcatgagccatggca

SEQ ID NO: 26672 - DNA, 15 bp, Homo sapiens
ggcatgagccatggc

SEQ ID NO: 26673 - DNA, 15 bp, Homo sapiens
aggcatgagccatgg

SEQ ID NO: 26674 - DNA, 15 bp, Homo sapiens
taggcatgagccatg

SEQ ID NO: 26675 - DNA, 15 bp, Homo sapiens
ataggcatgagccat

SEQ ID NO: 26676 - DNA, 15 bp, Homo sapiens
tataggcatgagcca

SEQ ID NO: 26677 - DNA, 15 bp, Homo sapiens
ttataggcatgagcc

SEQ ID NO: 26678 - DNA, 15 bp, Homo sapiens
attataggcatgagc

SEQ ID NO: 26679 - DNA, 15 bp, Homo sapiens
gattataggcatgag

SEQ ID NO: 26680 - DNA, 15 bp, Homo sapiens
ggattataggcatga

SEQ ID NO: 26681 - DNA, 15 bp, Homo sapiens
gggattataggcatg

SEQ ID NO: 26682 - DNA, 15 bp, Homo sapiens
tgggattataggcat

SEQ ID NO: 26683 - DNA, 15 bp, Homo sapiens
ttgggattataggca

SEQ ID NO: 26684 - DNA, 15 bp, Homo sapiens
gttgggattataggc

SEQ ID NO: 26685 - DNA, 15 bp, Homo sapiens
ggttgggattatagg

SEQ ID NO: 26686 - DNA, 15 bp, Homo sapiens
gggttgggattatag

SEQ ID NO: 26687 - DNA, 15 bp, Homo sapiens
agggttgggattata

SEQ ID NO: 26688 - DNA, 15 bp, Homo sapiens
aagggttgggattat

SEQ ID NO: 26689 - DNA, 15 bp, Homo sapiens
aaagggttgggatta

SEQ ID NO: 26690 - DNA, 15 bp, Homo sapiens
caaagggttgggatt

SEQ ID NO: 26691 - DNA, 15 bp, Homo sapiens
ccaaagggttgggat

SEQ ID NO: 26692 - DNA, 15 bp, Homo sapiens
cccaaagggttggga

SEQ ID NO: 26693 - DNA, 15 bp, Homo sapiens
tcccaaagggttggg

SEQ ID NO: 26694 - DNA, 15 bp, Homo sapiens
ctcccaaagggttgg

SEQ ID NO: 26695 - DNA, 15 bp, Homo sapiens
cctcccaaagggttg

SEQ ID NO: 26696 - DNA, 15 bp, Homo sapiens
gcctcccaaagggtt

SEQ ID NO: 26697 - DNA, 15 bp, Homo sapiens
agcctcccaaagggt

SEQ ID NO: 26698 - DNA, 15 bp, Homo sapiens
cagcctcccaaaggg

SEQ ID NO: 26699 - DNA, 15 bp, Homo sapiens
tcagcctcccaaagg

SEQ ID NO: 26700 - DNA, 15 bp, Homo sapiens
tacctcagcctccca

SEQ ID NO: 26701 - DNA, 15 bp, Homo sapiens
ctacctcagcctccc

SEQ ID NO: 26702 - DNA, 15 bp, Homo sapiens
cctacctcagcctcc

SEQ ID NO: 26703 - DNA, 15 bp, Homo sapiens
tcctacctcagcctc

SEQ ID NO: 26704 - DNA, 15 bp, Homo sapiens
ctcctacctcagcct

SEQ ID NO: 26705 - DNA, 15 bp, Homo sapiens
cctcctacctcagcc

SEQ ID NO: 26706 - DNA, 15 bp, Homo sapiens
acctcctacctcagc

SEQ ID NO: 26707 - DNA, 15 bp, Homo sapiens
gacctcctacctcag

SEQ ID NO: 26708 - DNA, 15 bp, Homo sapiens
ggacctcctacctca

SEQ ID NO: 26709 - DNA, 15 bp, Homo sapiens
aggacctcctacctc

SEQ ID NO: 26710 - DNA, 15 bp, Homo sapiens
aaggacctcctacct

SEQ ID NO: 26711 - DNA, 15 bp, Homo sapiens
aaaggacctcctacc

SEQ ID NO: 26712 - DNA, 15 bp, Homo sapiens
caaaggacctcctac

SEQ ID NO: 26713 - DNA, 15 bp, Homo sapiens
tcaaaggacctccta

SEQ ID NO: 26714 - DNA, 15 bp, Homo sapiens
ctcaaaggacctcct

SEQ ID NO: 26715 - DNA, 15 bp, Homo sapiens
gctcaaaggacctcc

SEQ ID NO: 26716 - DNA, 15 bp, Homo sapiens
ggctcaaaggacctc

SEQ ID NO: 26717 - DNA, 15 bp, Homo sapiens
gggctcaaaggacct

SEQ ID NO: 26718 - DNA, 15 bp, Homo sapiens
tgggctcaaaggacc

SEQ ID NO: 26719 - DNA, 15 bp, Homo sapiens
ctgggctcaaaggac

SEQ ID NO: 26720 - DNA, 15 bp, Homo sapiens
gctgggctcaaagga

SEQ ID NO: 26721 - DNA, 15 bp, Homo sapiens
agctgggctcaaagg

SEQ ID NO: 26722 - DNA, 15 bp, Homo sapiens
aagctgggctcaaag

SEQ ID NO: 26723 - DNA, 15 bp, Homo sapiens
caagctgggctcaaa

SEQ ID NO: 26724 - DNA, 15 bp, Homo sapiens
ccaagctgggctcaa

SEQ ID NO: 26725 - DNA, 15 bp, Homo sapiens
cccaagctgggctca

SEQ ID NO: 26726 - DNA, 15 bp, Homo sapiens
gcccaagctgggctc

SEQ ID NO: 26727 - DNA, 15 bp, Homo sapiens
tgcccaagctgggct

SEQ ID NO: 26728 - DNA, 15 bp, Homo sapiens
ttgcccaagctgggc

SEQ ID NO: 26729 - DNA, 15 bp, Homo sapiens
gttgcccaagctggg

SEQ ID NO: 26730 - DNA, 15 bp, Homo sapiens
tgttgcccaagctgg

SEQ ID NO: 26731 - DNA, 15 bp, Homo sapiens
gtgttgcccaagctg

SEQ ID NO: 26732 - DNA, 15 bp, Homo sapiens
tgtgttgcccaagct

SEQ ID NO: 26733 - DNA, 15 bp, Homo sapiens
ctgtgttgcccaagc

SEQ ID NO: 26734 - DNA, 15 bp, Homo sapiens
actgtgttgcccaag

SEQ ID NO: 26735 - DNA, 15 bp, Homo sapiens
cactgtgttgcccaa

SEQ ID NO: 26736 - DNA, 15 bp, Homo sapiens
tcactgtgttgccca

SEQ ID NO: 26737 - DNA, 15 bp, Homo sapiens
ctcactgtgttgccc

SEQ ID NO: 26738 - DNA, 15 bp, Homo sapiens
tctcactgtgttgcc

SEQ ID NO: 26739 - DNA, 15 bp, Homo sapiens
gtctcactgtgttgc

SEQ ID NO: 26740 - DNA, 15 bp, Homo sapiens
tgtctcactgtgttg

SEQ ID NO: 26741 - DNA, 15 bp, Homo sapiens
gtgtctcactgtgtt

SEQ ID NO: 26742 - DNA, 15 bp, Homo sapiens
agtgtctcactgtgt

SEQ ID NO: 26743 - DNA, 15 bp, Homo sapiens
cagtgtctcactgtg

SEQ ID NO: 26744 - DNA, 15 bp, Homo sapiens
acagtgtctcactgt

SEQ ID NO: 26745 - DNA, 15 bp, Homo sapiens
gacagtgtctcactg

SEQ ID NO: 26746 - DNA, 15 bp, Homo sapiens
agacagtgtctcact

SEQ ID NO: 26747 - DNA, 15 bp, Homo sapiens
gagacagtgtctcac

SEQ ID NO: 26748 - DNA, 15 bp, Homo sapiens
agagacagtgtctca

SEQ ID NO: 26749 - DNA, 15 bp, Homo sapiens
cagagacagtgtctc

SEQ ID NO: 26750 - DNA, 15 bp, Homo sapiens
gcagagacagtgtct

SEQ ID NO: 26751 - DNA, 15 bp, Homo sapiens
tgcagagacagtgtc

SEQ ID NO: 26752 - DNA, 15 bp, Homo sapiens
ttgcagagacagtgt

SEQ ID NO: 26753 - DNA, 15 bp, Homo sapiens
attgcagagacagtg

SEQ ID NO: 26754 - DNA, 15 bp, Homo sapiens
aattgcagagacagt

SEQ ID NO: 26755 - DNA, 15 bp, Homo sapiens
taattgcagagacag

SEQ ID NO: 26756 - DNA, 15 bp, Homo sapiens
ttaattgcagagaca

SEQ ID NO: 26757 - DNA, 15 bp, Homo sapiens
tttaattgcagagac

SEQ ID NO: 26758 - DNA, 15 bp, Homo sapiens
ttttaattgcagaga

SEQ ID NO: 26759 - DNA, 15 bp, Homo sapiens
tttttaattgcagag

SEQ ID NO: 26760 - DNA, 15 bp, Homo sapiens
ttttttaattgcaga

SEQ ID NO: 26761 - DNA, 15 bp, Homo sapiens
tttttttaattgcag

SEQ ID NO: 26762 - DNA, 15 bp, Homo sapiens
ttttttttaattgca

SEQ ID NO: 26763 - DNA, 15 bp, Homo sapiens
tttttttttaattgc

SEQ ID NO: 26764 - DNA, 15 bp, Homo sapiens
ttttttttttaattg

SEQ ID NO: 26765 - DNA, 15 bp, Homo sapiens
tttttttttttaatt

SEQ ID NO: 26766 - DNA, 15 bp, Homo sapiens
ttttttttttttaat

SEQ ID NO: 26767 - DNA, 15 bp, Homo sapiens
tttttttttttttaa

SEQ ID NO: 26768 - DNA, 15 bp, Homo sapiens
tactttttttttttt

SEQ ID NO: 26769 - DNA, 15 bp, Homo sapiens
ctacttttttttttt

SEQ ID NO: 26770 - DNA, 15 bp, Homo sapiens
gctactttttttttt

SEQ ID NO: 26771 - DNA, 15 bp, Homo sapiens
agctacttttttttt

SEQ ID NO: 26772 - DNA, 15 bp, Homo sapiens
cagctactttttttt

SEQ ID NO: 26773 - DNA, 15 bp, Homo sapiens
ccagctacttttttt

SEQ ID NO: 26774 - DNA, 15 bp, Homo sapiens
cccagctactttttt

SEQ ID NO: 26775 - DNA, 15 bp, Homo sapiens
acccagctacttttt

SEQ ID NO: 26776 - DNA, 15 bp, Homo sapiens
cacccagctactttt

SEQ ID NO: 26777 - DNA, 15 bp, Homo sapiens
gcacccagctacttt

SEQ ID NO: 26778 - DNA, 15 bp, Homo sapiens
ggcacccagctactt

SEQ ID NO: 26779 - DNA, 15 bp, Homo sapiens
cggcacccagctact

SEQ ID NO: 26780 - DNA, 15 bp, Homo sapiens
acggcacccagctac

SEQ ID NO: 26781 - DNA, 15 bp, Homo sapiens
cacggcacccagcta

SEQ ID NO: 26782 - DNA, 15 bp, Homo sapiens
ccacggcacccagct

SEQ ID NO: 26783 - DNA, 15 bp, Homo sapiens
gccacggcacccagc

SEQ ID NO: 26784 - DNA, 15 bp, Homo sapiens
agccacggcacccag

SEQ ID NO: 26785 - DNA, 15 bp, Homo sapiens
gagccacggcaccca

SEQ ID NO: 26786 - DNA, 15 bp, Homo sapiens
tgagccacggcaccc

SEQ ID NO: 26787 - DNA, 15 bp, Homo sapiens
gtgagccacggcacc

SEQ ID NO: 26788 - DNA, 15 bp, Homo sapiens
cgtgagccacggcac

SEQ ID NO: 26789 - DNA, 15 bp, Homo sapiens
gcgtgagccacggca

SEQ ID NO: 26790 - DNA, 15 bp, Homo sapiens
ggcgtgagccacggc

SEQ ID NO: 26791 - DNA, 15 bp, Homo sapiens
aggcgtgagccacgg

SEQ ID NO: 26792 - DNA, 15 bp, Homo sapiens
caggcgtgagccacg

SEQ ID NO: 26793 - DNA, 15 bp, Homo sapiens
aattacaggcgtgag

SEQ ID NO: 26794 - DNA, 15 bp, Homo sapiens
gaattacaggcgtga

SEQ ID NO: 26795 - DNA, 15 bp, Homo sapiens
ggaattacaggcgtg

SEQ ID NO: 26796 - DNA, 15 bp, Homo sapiens
tggaattacaggcgt

SEQ ID NO: 26797 - DNA, 15 bp, Homo sapiens
ctggaattacaggcg

SEQ ID NO: 26798 - DNA, 15 bp, Homo sapiens
gctggaattacaggc

SEQ ID NO: 26799 - DNA, 15 bp, Homo sapiens
tgctggaattacagg

SEQ ID NO: 26800 - DNA, 15 bp, Homo sapiens
gtgctggaattacag

SEQ ID NO: 26801 - DNA, 15 bp, Homo sapiens
agtgctggaattaca

SEQ ID NO: 26802 - DNA, 15 bp, Homo sapiens
tagtgctggaattac

SEQ ID NO: 26803 - DNA, 15 bp, Homo sapiens
ctagtgctggaatta

SEQ ID NO: 26804 - DNA, 15 bp, Homo sapiens
cctagtgctggaatt

SEQ ID NO: 26805 - DNA, 15 bp, Homo sapiens
tcctagtgctggaat

SEQ ID NO: 26806 - DNA, 15 bp, Homo sapiens
ctcctagtgctggaa

SEQ ID NO: 26807 - DNA, 15 bp, Homo sapiens
cctcctagtgctgga

SEQ ID NO: 26808 - DNA, 15 bp, Homo sapiens
gcctcctagtgctgg

SEQ ID NO: 26809 - DNA, 15 bp, Homo sapiens
agcctcctagtgctg

SEQ ID NO: 26810 - DNA, 15 bp, Homo sapiens
aagcctcctagtgct

SEQ ID NO: 26811 - DNA, 15 bp, Homo sapiens
caagcctcctagtgc

SEQ ID NO: 26812 - DNA, 15 bp, Homo sapiens
tcaagcctcctagtg

SEQ ID NO: 26813 - DNA, 15 bp, Homo sapiens
ctcaagcctcctagt

SEQ ID NO: 26814 - DNA, 15 bp, Homo sapiens
cctcaagcctcctag

SEQ ID NO: 26815 - DNA, 15 bp, Homo sapiens
tcctcaagcctccta

SEQ ID NO: 26816 - DNA, 15 bp, Homo sapiens
atcctcaagcctcct

SEQ ID NO: 26817 - DNA, 15 bp, Homo sapiens
aatcctcaagcctcc

SEQ ID NO: 26818 - DNA, 15 bp, Homo sapiens
caatcctcaagcctc

SEQ ID NO: 26819 - DNA, 15 bp, Homo sapiens
gcaatcctcaagcct

SEQ ID NO: 26820 - DNA, 15 bp, Homo sapiens
ggcaatcctcaagcc

SEQ ID NO: 26821 - DNA, 15 bp, Homo sapiens
aggcaatcctcaagc

SEQ ID NO: 26822 - DNA, 15 bp, Homo sapiens
caggcaatcctcaag

SEQ ID NO: 26823 - DNA, 15 bp, Homo sapiens
tcaggcaatcctcaa

SEQ ID NO: 26824 - DNA, 15 bp, Homo sapiens
ctcaggcaatcctca

SEQ ID NO: 26825 - DNA, 15 bp, Homo sapiens
gctcaggcaatcctc

SEQ ID NO: 26826 - DNA, 15 bp, Homo sapiens
agctcaggcaatcct

SEQ ID NO: 26827 - DNA, 15 bp, Homo sapiens
gagctcaggcaatcc

SEQ ID NO: 26828 - DNA, 15 bp, Homo sapiens
tgagctcaggcaatc

SEQ ID NO: 26829 - DNA, 15 bp, Homo sapiens
ctgagctcaggcaat

SEQ ID NO: 26830 - DNA, 15 bp, Homo sapiens
cctgagctcaggcaa

SEQ ID NO: 26831 - DNA, 15 bp, Homo sapiens
tcctgagctcaggca

SEQ ID NO: 26832 - DNA, 15 bp, Homo sapiens
ctcctgagctcaggc

SEQ ID NO: 26833 - DNA, 15 bp, Homo sapiens
actcctgagctcagg

SEQ ID NO: 26834 - DNA, 15 bp, Homo sapiens
aactcctgagctcag

SEQ ID NO: 26835 - DNA, 15 bp, Homo sapiens
actggtcttgaactc

SEQ ID NO: 26836 - DNA, 15 bp, Homo sapiens
aactggtcttgaact

SEQ ID NO: 26837 - DNA, 15 bp, Homo sapiens
aaactggtcttgaac

SEQ ID NO: 26838 - DNA, 15 bp, Homo sapiens
caaactggtcttgaa

SEQ ID NO: 26839 - DNA, 15 bp, Homo sapiens
ccaaactggtcttga

SEQ ID NO: 26840 - DNA, 15 bp, Homo sapiens
cccaaactggtcttg

SEQ ID NO: 26841 - DNA, 15 bp, Homo sapiens
gcccaaactggtctt

SEQ ID NO: 26842 - DNA, 15 bp, Homo sapiens
tgcccaaactggtct

SEQ ID NO: 26843 - DNA, 15 bp, Homo sapiens
ttgcccaaactggtc

SEQ ID NO: 26844 - DNA, 15 bp, Homo sapiens
gttgcccaaactggt

SEQ ID NO: 26845 - DNA, 15 bp, Homo sapiens
tgttgcccaaactgg

SEQ ID NO: 26846 - DNA, 15 bp, Homo sapiens
atgttgcccaaactg

SEQ ID NO: 26847 - DNA, 15 bp, Homo sapiens
tatgttgcccaaact

SEQ ID NO: 26848 - DNA, 15 bp, Homo sapiens
ctatgttgcccaaac

SEQ ID NO: 26849 - DNA, 15 bp, Homo sapiens
gctatgttgcccaaa

SEQ ID NO: 26850 - DNA, 15 bp, Homo sapiens
tgctatgttgcccaa

SEQ ID NO: 26851 - DNA, 15 bp, Homo sapiens
ttgctatgttgccca

SEQ ID NO: 26852 - DNA, 15 bp, Homo sapiens
cttgctatgttgccc

SEQ ID NO: 26853 - DNA, 15 bp, Homo sapiens
acttgctatgttgcc

SEQ ID NO: 26854 - DNA, 15 bp, Homo sapiens
gacttgctatgttgc

SEQ ID NO: 26855 - DNA, 15 bp, Homo sapiens
ggacttgctatgttg

SEQ ID NO: 26856 - DNA, 15 bp, Homo sapiens
aggacttgctatgtt

SEQ ID NO: 26857 - DNA, 15 bp, Homo sapiens
aaggacttgctatgt

SEQ ID NO: 26858 - DNA, 15 bp, Homo sapiens
caaggacttgctatg

SEQ ID NO: 26859 - DNA, 15 bp, Homo sapiens
acaaggacttgctat

SEQ ID NO: 26860 - DNA, 15 bp, Homo sapiens
gacaaggacttgcta

SEQ ID NO: 26861 - DNA, 15 bp, Homo sapiens
agacaaggacttgct

SEQ ID NO: 26862 - DNA, 15 bp, Homo sapiens
tagacaaggacttgc

SEQ ID NO: 26863 - DNA, 15 bp, Homo sapiens
atagacaaggacttg

SEQ ID NO: 26864 - DNA, 15 bp, Homo sapiens
tatagacaaggactt

SEQ ID NO: 26865 - DNA, 15 bp, Homo sapiens
atatagacaaggact

SEQ ID NO: 26866 - DNA, 15 bp, Homo sapiens
aatatagacaaggac

SEQ ID NO: 26867 - DNA, 15 bp, Homo sapiens
taatatagacaagga

SEQ ID NO: 26868 - DNA, 15 bp, Homo sapiens
ttaatatagacaagg

SEQ ID NO: 26869 - DNA, 15 bp, Homo sapiens
tttaatatagacaag

SEQ ID NO: 26870 - DNA, 15 bp, Homo sapiens
ttttaatatagacaa

SEQ ID NO: 26871 - DNA, 15 bp, Homo sapiens
cttttaatatagaca

SEQ ID NO: 26872 - DNA, 15 bp, Homo sapiens
acttttaatatagac

SEQ ID NO: 26873 - DNA, 15 bp, Homo sapiens
aacttttaatataga

SEQ ID NO: 26874 - DNA, 15 bp, Homo sapiens
aaacttttaatatag

SEQ ID NO: 26875 - DNA, 15 bp, Homo sapiens
aaaacttttaatata

SEQ ID NO: 26876 - DNA, 15 bp, Homo sapiens
aaaaacttttaatat

SEQ ID NO: 26877 - DNA, 15 bp, Homo sapiens
aaaaaacttttaata

SEQ ID NO: 26878 - DNA, 15 bp, Homo sapiens
aaaaaaacttttaat

SEQ ID NO: 26879 - DNA, 15 bp, Homo sapiens
taaaaaaacttttaa

SEQ ID NO: 26880 - DNA, 15 bp, Homo sapiens
ttaaaaaaactttta

SEQ ID NO: 26881 - DNA, 15 bp, Homo sapiens
tttaaaaaaactttt

SEQ ID NO: 26882 - DNA, 15 bp, Homo sapiens
atttaaaaaaacttt

SEQ ID NO: 26883 - DNA, 15 bp, Homo sapiens
aatttaaaaaaactt

SEQ ID NO: 26884 - DNA, 15 bp, Homo sapiens
taatttaaaaaaact

SEQ ID NO: 26885 - DNA, 15 bp, Homo sapiens
ataatttaaaaaaac

SEQ ID NO: 26886 - DNA, 15 bp, Homo sapiens
gataatttaaaaaaa

SEQ ID NO: 26887 - DNA, 15 bp, Homo sapiens
agataatttaaaaaa

SEQ ID NO: 26888 - DNA, 15 bp, Homo sapiens
cagataatttaaaaa

SEQ ID NO: 26889 - DNA, 15 bp, Homo sapiens
ccagataatttaaaa

SEQ ID NO: 26890 - DNA, 15 bp, Homo sapiens
cccagataatttaaa

SEQ ID NO: 26891 - DNA, 15 bp, Homo sapiens
gcccagataatttaa

SEQ ID NO: 26892 - DNA, 15 bp, Homo sapiens
tgcccagataattta

SEQ ID NO: 26893 - DNA, 15 bp, Homo sapiens
atgcccagataattt

SEQ ID NO: 26894 - DNA, 15 bp, Homo sapiens
catgcccagataatt

SEQ ID NO: 26895 - DNA, 15 bp, Homo sapiens
ccatgcccagataat

SEQ ID NO: 26896 - DNA, 15 bp, Homo sapiens
accatgcccagataa

SEQ ID NO: 26897 - DNA, 15 bp, Homo sapiens
caccatgcccagata

SEQ ID NO: 26898 - DNA, 15 bp, Homo sapiens
ccaccatgcccagat

SEQ ID NO: 26899 - DNA, 15 bp, Homo sapiens
accaccatgcccaga

SEQ ID NO: 26900 - DNA, 15 bp, Homo sapiens
caccaccatgcccag

SEQ ID NO: 26901 - DNA, 15 bp, Homo sapiens
acaccaccatgccca

SEQ ID NO: 26902 - DNA, 15 bp, Homo sapiens
cacaccaccatgccc

SEQ ID NO: 26903 - DNA, 15 bp, Homo sapiens
acacaccaccatgcc

SEQ ID NO: 26904 - DNA, 15 bp, Homo sapiens
cacacaccaccatgc

SEQ ID NO: 26905 - DNA, 15 bp, Homo sapiens
gcacacaccaccatg

SEQ ID NO: 26906 - DNA, 15 bp, Homo sapiens
ggcacacaccaccat

SEQ ID NO: 26907 - DNA, 15 bp, Homo sapiens
aggcacacaccacca

SEQ ID NO: 26908 - DNA, 15 bp, Homo sapiens
caggcacacaccacc

SEQ ID NO: 26909 - DNA, 15 bp, Homo sapiens
acaggcacacaccac

SEQ ID NO: 26910 - DNA, 15 bp, Homo sapiens
tacaggcacacacca

SEQ ID NO: 26911 - DNA, 15 bp, Homo sapiens
ctacaggcacacacc

SEQ ID NO: 26912 - DNA, 15 bp, Homo sapiens
actacaggcacacac

SEQ ID NO: 26913 - DNA, 15 bp, Homo sapiens
gactacaggcacaca

SEQ ID NO: 26914 - DNA, 15 bp, Homo sapiens
ggactacaggcacac

SEQ ID NO: 26915 - DNA, 15 bp, Homo sapiens
gggactacaggcaca

SEQ ID NO: 26916 - DNA, 15 bp, Homo sapiens
ttcccaagtagctgg

SEQ ID NO: 26917 - DNA, 15 bp, Homo sapiens
cttcccaagtagctg

SEQ ID NO: 26918 - DNA, 15 bp, Homo sapiens
gcttcccaagtagct

SEQ ID NO: 26919 - DNA, 15 bp, Homo sapiens
agcttcccaagtagc

SEQ ID NO: 26920 - DNA, 15 bp, Homo sapiens
cagcttcccaagtag

SEQ ID NO: 26921 - DNA, 15 bp, Homo sapiens
tcagcttcccaagta

SEQ ID NO: 26922 - DNA, 15 bp, Homo sapiens
ctcagcttcccaagt

SEQ ID NO: 26923 - DNA, 15 bp, Homo sapiens
tctcagcttcccaag

SEQ ID NO: 26924 - DNA, 15 bp, Homo sapiens
gtctcagcttcccaa

SEQ ID NO: 26925 - DNA, 15 bp, Homo sapiens
tgtctcagcttccca

SEQ ID NO: 26926 - DNA, 15 bp, Homo sapiens
ctgtctcagcttccc

SEQ ID NO: 26927 - DNA, 15 bp, Homo sapiens
tctgtctcagcttcc

SEQ ID NO: 26928 - DNA, 15 bp, Homo sapiens
ttctgtctcagcttc

SEQ ID NO: 26929 - DNA, 15 bp, Homo sapiens
cttctgtctcagctt

SEQ ID NO: 26930 - DNA, 15 bp, Homo sapiens
ccttctgtctcagct

SEQ ID NO: 26931 - DNA, 15 bp, Homo sapiens
tccttctgtctcagc

SEQ ID NO: 26932 - DNA, 15 bp, Homo sapiens
atccttctgtctcag

SEQ ID NO: 26933 - DNA, 15 bp, Homo sapiens
gatccttctgtctca

SEQ ID NO: 26934 - DNA, 15 bp, Homo sapiens
tgatccttctgtctc

SEQ ID NO: 26935 - DNA, 15 bp, Homo sapiens
gtgatccttctgtct

SEQ ID NO: 26936 - DNA, 15 bp, Homo sapiens
agtgatccttctgtc

SEQ ID NO: 26937 - DNA, 15 bp, Homo sapiens
aagtgatccttctgt

SEQ ID NO: 26938 - DNA, 15 bp, Homo sapiens
caagtgatccttctg

SEQ ID NO: 26939 - DNA, 15 bp, Homo sapiens
tcaagtgatccttct

SEQ ID NO: 26940 - DNA, 15 bp, Homo sapiens
ctcaagtgatccttc

SEQ ID NO: 26941 - DNA, 15 bp, Homo sapiens
actcaagtgatcctt

SEQ ID NO: 26942 - DNA, 15 bp, Homo sapiens
tcctggactcaagtg

SEQ ID NO: 26943 - DNA, 15 bp, Homo sapiens
ctcctggactcaagt

SEQ ID NO: 26944 - DNA, 15 bp, Homo sapiens
tctcctggactcaag

SEQ ID NO: 26945 - DNA, 15 bp, Homo sapiens
atctcctggactcaa

SEQ ID NO: 26946 - DNA, 15 bp, Homo sapiens
catctcctggactca

SEQ ID NO: 26947 - DNA, 15 bp, Homo sapiens
acatctcctggactc

SEQ ID NO: 26948 - DNA, 15 bp, Homo sapiens
tacatctcctggact

SEQ ID NO: 26949 - DNA, 15 bp, Homo sapiens
ctacatctcctggac

SEQ ID NO: 26950 - DNA, 15 bp, Homo sapiens
tctacatctcctgga

SEQ ID NO: 26951 - DNA, 15 bp, Homo sapiens
gtctacatctcctgg

SEQ ID NO: 26952 - DNA, 15 bp, Homo sapiens
agtctacatctcctg

SEQ ID NO: 26953 - DNA, 15 bp, Homo sapiens
tagtctacatctcct

SEQ ID NO: 26954 - DNA, 15 bp, Homo sapiens
gtagtctacatctcc

SEQ ID NO: 26955 - DNA, 15 bp, Homo sapiens
tgtagtctacatctc

SEQ ID NO: 26956 - DNA, 15 bp, Homo sapiens
ctgtagtctacatct

SEQ ID NO: 26957 - DNA, 15 bp, Homo sapiens
actgtagtctacatc

SEQ ID NO: 26958 - DNA, 15 bp, Homo sapiens
cactgtagtctacat

SEQ ID NO: 26959 - DNA, 15 bp, Homo sapiens
tcactgtagtctaca

SEQ ID NO: 26960 - DNA, 15 bp, Homo sapiens
ctcactgtagtctac

SEQ ID NO: 26961 - DNA, 15 bp, Homo sapiens
gctcactgtagtcta

SEQ ID NO: 26962 - DNA, 15 bp, Homo sapiens
agctcactgtagtct

SEQ ID NO: 26963 - DNA, 15 bp, Homo sapiens
tagctcactgtagtc

SEQ ID NO: 26964 - DNA, 15 bp, Homo sapiens
atagctcactgtagt

SEQ ID NO: 26965 - DNA, 15 bp, Homo sapiens
catagctcactgtag

SEQ ID NO: 26966 - DNA, 15 bp, Homo sapiens
tcatagctcactgta

SEQ ID NO: 26967 - DNA, 15 bp, Homo sapiens
atcatagctcactgt

SEQ ID NO: 26968 - DNA, 15 bp, Homo sapiens
gatcatagctcactg

SEQ ID NO: 26969 - DNA, 15 bp, Homo sapiens
agtgatcatagctca

SEQ ID NO: 26970 - DNA, 15 bp, Homo sapiens
gagtgatcatagctc

SEQ ID NO: 26971 - DNA, 15 bp, Homo sapiens
ggagtgatcatagct

SEQ ID NO: 26972 - DNA, 15 bp, Homo sapiens
tggagtgatcatagc

SEQ ID NO: 26973 - DNA, 15 bp, Homo sapiens
gtggagtgatcatag

SEQ ID NO: 26974 - DNA, 15 bp, Homo sapiens
agtggagtgatcata

SEQ ID NO: 26975 - DNA, 15 bp, Homo sapiens
cagtggagtgatcat

SEQ ID NO: 26976 - DNA, 15 bp, Homo sapiens
gcagtggagtgatca

SEQ ID NO: 26977 - DNA, 15 bp, Homo sapiens
tgcagtggagtgatc

SEQ ID NO: 26978 - DNA, 15 bp, Homo sapiens
gtgcagtggagtgat

SEQ ID NO: 26979 - DNA, 15 bp, Homo sapiens
agtgcagtggagtga

SEQ ID NO: 26980 - DNA, 15 bp, Homo sapiens
aagtgcagtggagtg

SEQ ID NO: 26981 - DNA, 15 bp, Homo sapiens
gaagtgcagtggagt

SEQ ID NO: 26982 - DNA, 15 bp, Homo sapiens
tgaagtgcagtggag

SEQ ID NO: 26983 - DNA, 15 bp, Homo sapiens
ctgaagtgcagtgga

SEQ ID NO: 26984 - DNA, 15 bp, Homo sapiens
gctgaagtgcagtgg

SEQ ID NO: 26985 - DNA, 15 bp, Homo sapiens
cgctgaagtgcagtg

SEQ ID NO: 26986 - DNA, 15 bp, Homo sapiens
acgctgaagtgcagt

SEQ ID NO: 26987 - DNA, 15 bp, Homo sapiens
cacgctgaagtgcag

SEQ ID NO: 26988 - DNA, 15 bp, Homo sapiens
ccacgctgaagtgca

SEQ ID NO: 26989 - DNA, 15 bp, Homo sapiens
cccacgctgaagtgc

SEQ ID NO: 26990 - DNA, 15 bp, Homo sapiens
gcccacgctgaagtg

SEQ ID NO: 26991 - DNA, 15 bp, Homo sapiens
cgcccacgctgaagt

SEQ ID NO: 26992 - DNA, 15 bp, Homo sapiens
ccgcccacgctgaag

SEQ ID NO: 26993 - DNA, 15 bp, Homo sapiens
gccgcccacgctgaa

SEQ ID NO: 26994 - DNA, 15 bp, Homo sapiens
tgccgcccacgctga

SEQ ID NO: 26995 - DNA, 15 bp, Homo sapiens
ttgccgcccacgctg

SEQ ID NO: 26996 - DNA, 15 bp, Homo sapiens
tttgccgcccacgct

SEQ ID NO: 26997 - DNA, 15 bp, Homo sapiens
ctttgccgcccacgc

SEQ ID NO: 26998 - DNA, 15 bp, Homo sapiens
gctttgccgcccacg

SEQ ID NO: 26999 - DNA, 15 bp, Homo sapiens
tgctttgccgcccac

SEQ ID NO: 27000 - DNA, 15 bp, Homo sapiens
ttgctttgccgccca

SEQ ID NO: 27001 - DNA, 15 bp, Homo sapiens
cttgctttgccgccc

SEQ ID NO: 27002 - DNA, 15 bp, Homo sapiens
tcttgctttgccgcc

SEQ ID NO: 27003 - DNA, 15 bp, Homo sapiens
atcttgctttgccgc

SEQ ID NO: 27004 - DNA, 15 bp, Homo sapiens
gatcttgctttgccg

SEQ ID NO: 27005 - DNA, 15 bp, Homo sapiens
agatcttgctttgcc

SEQ ID NO: 27006 - DNA, 15 bp, Homo sapiens
tagatcttgctttgc

SEQ ID NO: 27007 - DNA, 15 bp, Homo sapiens
ctagatcttgctttg

SEQ ID NO: 27008 - DNA, 15 bp, Homo sapiens
actagatcttgcttt

SEQ ID NO: 27009 - DNA, 15 bp, Homo sapiens
aactagatcttgctt

SEQ ID NO: 27010 - DNA, 15 bp, Homo sapiens
caactagatcttgct

SEQ ID NO: 27011 - DNA, 15 bp, Homo sapiens
gcaactagatcttgc

SEQ ID NO: 27012 - DNA, 15 bp, Homo sapiens
tgcaactagatcttg

SEQ ID NO: 27013 - DNA, 15 bp, Homo sapiens
ttgcaactagatctt

SEQ ID NO: 27014 - DNA, 15 bp, Homo sapiens
tttgcaactagatct

SEQ ID NO: 27015 - DNA, 15 bp, Homo sapiens
ttttgcaactagatc

SEQ ID NO: 27016 - DNA, 15 bp, Homo sapiens
tttttgcaactagat

SEQ ID NO: 27017 - DNA, 15 bp, Homo sapiens
ttttttgcaactaga

SEQ ID NO: 27018 - DNA, 15 bp, Homo sapiens
tttttttgcaactag

SEQ ID NO: 27019 - DNA, 15 bp, Homo sapiens
ttttttttgcaacta

SEQ ID NO: 27020 - DNA, 15 bp, Homo sapiens
tttttttttgcaact

SEQ ID NO: 27021 - DNA, 15 bp, Homo sapiens
ttttttttttgcaac

SEQ ID NO: 27022 - DNA, 15 bp, Homo sapiens
tttttttttttgcaa

SEQ ID NO: 27023 - DNA, 15 bp, Homo sapiens
ctttttttttttgca

SEQ ID NO: 27024 - DNA, 15 bp, Homo sapiens
tctttttttttttgc

SEQ ID NO: 27025 - DNA, 15 bp, Homo sapiens
ttctttttttttttg

SEQ ID NO: 27026 - DNA, 15 bp, Homo sapiens
gttcttttttttttt

SEQ ID NO: 27027 - DNA, 15 bp, Homo sapiens
agttctttttttttt

SEQ ID NO: 27028 - DNA, 15 bp, Homo sapiens
cagttcttttttttt

SEQ ID NO: 27029 - DNA, 15 bp, Homo sapiens
ccagttctttttttt

SEQ ID NO: 27030 - DNA, 15 bp, Homo sapiens
gccagttcttttttt

SEQ ID NO: 27031 - DNA, 15 bp, Homo sapiens
agccagttctttttt

SEQ ID NO: 27032 - DNA, 15 bp, Homo sapiens
cagccagttcttttt

SEQ ID NO: 27033 - DNA, 15 bp, Homo sapiens
ccagccagttctttt

SEQ ID NO: 27034 - DNA, 15 bp, Homo sapiens
cccagccagttcttt

SEQ ID NO: 27035 - DNA, 15 bp, Homo sapiens
acccagccagttctt

SEQ ID NO: 27036 - DNA, 15 bp, Homo sapiens
cacccagccagttct

SEQ ID NO: 27037 - DNA, 15 bp, Homo sapiens
gcacccagccagttc

SEQ ID NO: 27038 - DNA, 15 bp, Homo sapiens
cgcacccagccagtt

SEQ ID NO: 27039 - DNA, 15 bp, Homo sapiens
ccgcacccagccagt

SEQ ID NO: 27040 - DNA, 15 bp, Homo sapiens
gccgcacccagccag

SEQ ID NO: 27041 - DNA, 15 bp, Homo sapiens
cgccgcacccagcca

SEQ ID NO: 27042 - DNA, 15 bp, Homo sapiens
ccgccgcacccagcc

SEQ ID NO: 27043 - DNA, 15 bp, Homo sapiens
gccgccgcacccagc

SEQ ID NO: 27044 - DNA, 15 bp, Homo sapiens
agccgccgcacccag

SEQ ID NO: 27045 - DNA, 15 bp, Homo sapiens
tagccgccgcaccca

SEQ ID NO: 27046 - DNA, 15 bp, Homo sapiens
ttagccgccgcaccc

SEQ ID NO: 27047 - DNA, 15 bp, Homo sapiens
gttagccgccgcacc

SEQ ID NO: 27048 - DNA, 15 bp, Homo sapiens
tgttagccgccgcac

SEQ ID NO: 27049 - DNA, 15 bp, Homo sapiens
gtgttagccgccgca

SEQ ID NO: 27050 - DNA, 15 bp, Homo sapiens
ggtgttagccgccgc

SEQ ID NO: 27051 - DNA, 15 bp, Homo sapiens
aggtgttagccgccg

SEQ ID NO: 27052 - DNA, 15 bp, Homo sapiens
caggtgttagccgcc

SEQ ID NO: 27053 - DNA, 15 bp, Homo sapiens
gcaggtgttagccgc

SEQ ID NO: 27054 - DNA, 15 bp, Homo sapiens
tgcaggtgttagccg

SEQ ID NO: 27055 - DNA, 15 bp, Homo sapiens
ttgcaggtgttagcc

SEQ ID NO: 27056 - DNA, 15 bp, Homo sapiens
attgcaggtgttagc

SEQ ID NO: 27057 - DNA, 15 bp, Homo sapiens
gattgcaggtgttag

SEQ ID NO: 27058 - DNA, 15 bp, Homo sapiens
ggattgcaggtgtta

SEQ ID NO: 27059 - DNA, 15 bp, Homo sapiens
gggattgcaggtgtt

SEQ ID NO: 27060 - DNA, 15 bp, Homo sapiens
tgggattgcaggtgt

SEQ ID NO: 27061 - DNA, 15 bp, Homo sapiens
ctgggattgcaggtg

SEQ ID NO: 27062 - DNA, 15 bp, Homo sapiens
gctgggattgcaggt

SEQ ID NO: 27063 - DNA, 15 bp, Homo sapiens
tgctgggattgcagg

SEQ ID NO: 27064 - DNA, 15 bp, Homo sapiens
gtgctgggattgcag

SEQ ID NO: 27065 - DNA, 15 bp, Homo sapiens
ggtgctgggattgca

SEQ ID NO: 27066 - DNA, 15 bp, Homo sapiens
aggtgctgggattgc

SEQ ID NO: 27067 - DNA, 15 bp, Homo sapiens
aaggtgctgggattg

SEQ ID NO: 27068 - DNA, 15 bp, Homo sapiens
caaggtgctgggatt

SEQ ID NO: 27069 - DNA, 15 bp, Homo sapiens
ccaaggtgctgggat

SEQ ID NO: 27070 - DNA, 15 bp, Homo sapiens
cccaaggtgctggga

SEQ ID NO: 27071 - DNA, 15 bp, Homo sapiens
tcccaaggtgctggg

SEQ ID NO: 27072 - DNA, 15 bp, Homo sapiens
ctcccaaggtgctgg

SEQ ID NO: 27073 - DNA, 15 bp, Homo sapiens
cctcccaaggtgctg

SEQ ID NO: 27074 - DNA, 15 bp, Homo sapiens
gcctcccaaggtgct

SEQ ID NO: 27075 - DNA, 15 bp, Homo sapiens
agcctcccaaggtgc

SEQ ID NO: 27076 - DNA, 15 bp, Homo sapiens
cagcctcccaaggtg

SEQ ID NO: 27077 - DNA, 15 bp, Homo sapiens
tcagcctcccaaggt

SEQ ID NO: 27078 - DNA, 15 bp, Homo sapiens
ctcagcctcccaagg

SEQ ID NO: 27079 - DNA, 15 bp, Homo sapiens
tggcctcagcctccc

SEQ ID NO: 27080 - DNA, 15 bp, Homo sapiens
ctggcctcagcctcc

SEQ ID NO: 27081 - DNA, 15 bp, Homo sapiens
actggcctcagcctc

SEQ ID NO: 27082 - DNA, 15 bp, Homo sapiens
cactggcctcagcct

SEQ ID NO: 27083 - DNA, 15 bp, Homo sapiens
ccactggcctcagcc

SEQ ID NO: 27084 - DNA, 15 bp, Homo sapiens
tccactggcctcagc

SEQ ID NO: 27085 - DNA, 15 bp, Homo sapiens
atccactggcctcag

SEQ ID NO: 27086 - DNA, 15 bp, Homo sapiens
gatccactggcctca

SEQ ID NO: 27087 - DNA, 15 bp, Homo sapiens
tgatccactggcctc

SEQ ID NO: 27088 - DNA, 15 bp, Homo sapiens
atgatccactggcct

SEQ ID NO: 27089 - DNA, 15 bp, Homo sapiens
catgatccactggcc

SEQ ID NO: 27090 - DNA, 15 bp, Homo sapiens
tcatgatccactggc

SEQ ID NO: 27091 - DNA, 15 bp, Homo sapiens
ctcatgatccactgg

SEQ ID NO: 27092 - DNA, 15 bp, Homo sapiens
cctcatgatccactg

SEQ ID NO: 27093 - DNA, 15 bp, Homo sapiens
acctcatgatccact

SEQ ID NO: 27094 - DNA, 15 bp, Homo sapiens
gacctcatgatccac

SEQ ID NO: 27095 - DNA, 15 bp, Homo sapiens
tgacctcatgatcca

SEQ ID NO: 27096 - DNA, 15 bp, Homo sapiens
ctgacctcatgatcc

SEQ ID NO: 27097 - DNA, 15 bp, Homo sapiens
cctgacctcatgatc

SEQ ID NO: 27098 - DNA, 15 bp, Homo sapiens
tcctgacctcatgat

SEQ ID NO: 27099 - DNA, 15 bp, Homo sapiens
tctcctgacctcatg

SEQ ID NO: 27100 - DNA, 15 bp, Homo sapiens
atctcctgacctcat

SEQ ID NO: 27101 - DNA, 15 bp, Homo sapiens
aatctcctgacctca

SEQ ID NO: 27102 - DNA, 15 bp, Homo sapiens
caatctcctgacctc

SEQ ID NO: 27103 - DNA, 15 bp, Homo sapiens
tcaatctcctgacct

SEQ ID NO: 27104 - DNA, 15 bp, Homo sapiens
ctcaatctcctgacc

SEQ ID NO: 27105 - DNA, 15 bp, Homo sapiens
tctcaatctcctgac

SEQ ID NO: 27106 - DNA, 15 bp, Homo sapiens
gtctcaatctcctga

SEQ ID NO: 27107 - DNA, 15 bp, Homo sapiens
ggtctcaatctcctg

SEQ ID NO: 27108 - DNA, 15 bp, Homo sapiens
tggtctcaatctcct

SEQ ID NO: 27109 - DNA, 15 bp, Homo sapiens
gtggtctcaatctcc

SEQ ID NO: 27110 - DNA, 15 bp, Homo sapiens
ggtggtctcaatctc

SEQ ID NO: 27111 - DNA, 15 bp, Homo sapiens
gggtggtctcaatct

SEQ ID NO: 27112 - DNA, 15 bp, Homo sapiens
agggtggtctcaatc

SEQ ID NO: 27113 - DNA, 15 bp, Homo sapiens
cagggtggtctcaat

SEQ ID NO: 27114 - DNA, 15 bp, Homo sapiens
ccagggtggtctcaa

SEQ ID NO: 27115 - DNA, 15 bp, Homo sapiens
gccagggtggtctca

SEQ ID NO: 27116 - DNA, 15 bp, Homo sapiens
ggccagggtggtctc

SEQ ID NO: 27117 - DNA, 15 bp, Homo sapiens
tggccagggtggtct

SEQ ID NO: 27118 - DNA, 15 bp, Homo sapiens
ttggccagggtggtc

SEQ ID NO: 27119 - DNA, 15 bp, Homo sapiens
gttggccagggtggt

SEQ ID NO: 27120 - DNA, 15 bp, Homo sapiens
tgttggccagggtgg

SEQ ID NO: 27121 - DNA, 15 bp, Homo sapiens
atgttggccagggtg

SEQ ID NO: 27122 - DNA, 15 bp, Homo sapiens
catgttggccagggt

SEQ ID NO: 27123 - DNA, 15 bp, Homo sapiens
ccatgttggccaggg

SEQ ID NO: 27124 - DNA, 15 bp, Homo sapiens
cgggtttcaccatgt

SEQ ID NO: 27125 - DNA, 15 bp, Homo sapiens
ccgggtttcaccatg

SEQ ID NO: 27126 - DNA, 15 bp, Homo sapiens
accgggtttcaccat

SEQ ID NO: 27127 - DNA, 15 bp, Homo sapiens
gaccgggtttcacca

SEQ ID NO: 27128 - DNA, 15 bp, Homo sapiens
agaccgggtttcacc

SEQ ID NO: 27129 - DNA, 15 bp, Homo sapiens
gagaccgggtttcac

SEQ ID NO: 27130 - DNA, 15 bp, Homo sapiens
agagaccgggtttca

SEQ ID NO: 27131 - DNA, 15 bp, Homo sapiens
tagagaccgggtttc

SEQ ID NO: 27132 - DNA, 15 bp, Homo sapiens
gtagagaccgggttt

SEQ ID NO: 27133 - DNA, 15 bp, Homo sapiens
agtagagaccgggtt

SEQ ID NO: 27134 - DNA, 15 bp, Homo sapiens
tagtagagaccgggt

SEQ ID NO: 27135 - DNA, 15 bp, Homo sapiens
ttagtagagaccggg

SEQ ID NO: 27136 - DNA, 15 bp, Homo sapiens
tttagtagagaccgg

SEQ ID NO: 27137 - DNA, 15 bp, Homo sapiens
ttttagtagagaccg

SEQ ID NO: 27138 - DNA, 15 bp, Homo sapiens
tttttagtagagacc

SEQ ID NO: 27139 - DNA, 15 bp, Homo sapiens
gccaccacacccagc

SEQ ID NO: 27140 - DNA, 15 bp, Homo sapiens
tgccaccacacccag

SEQ ID NO: 27141 - DNA, 15 bp, Homo sapiens
gtgccaccacaccca

SEQ ID NO: 27142 - DNA, 15 bp, Homo sapiens
cgtgccaccacaccc

SEQ ID NO: 27143 - DNA, 15 bp, Homo sapiens
acgtgccaccacacc

SEQ ID NO: 27144 - DNA, 15 bp, Homo sapiens
cacgtgccaccacac

SEQ ID NO: 27145 - DNA, 15 bp, Homo sapiens
gcacgtgccaccaca

SEQ ID NO: 27146 - DNA, 15 bp, Homo sapiens
ggcacgtgccaccac

SEQ ID NO: 27147 - DNA, 15 bp, Homo sapiens
aggcacgtgccacca

SEQ ID NO: 27148 - DNA, 15 bp, Homo sapiens
caggcacgtgccacc

SEQ ID NO: 27149 - DNA, 15 bp, Homo sapiens
acaggcacgtgccac

SEQ ID NO: 27150 - DNA, 15 bp, Homo sapiens
tacaggcacgtgcca

SEQ ID NO: 27151 - DNA, 15 bp, Homo sapiens
ttacaggcacgtgcc

SEQ ID NO: 27152 - DNA, 15 bp, Homo sapiens
attacaggcacgtgc

SEQ ID NO: 27153 - DNA, 15 bp, Homo sapiens
gattacaggcacgtg

SEQ ID NO: 27154 - DNA, 15 bp, Homo sapiens
ggattacaggcacgt

SEQ ID NO: 27155 - DNA, 15 bp, Homo sapiens
gggattacaggcacg

SEQ ID NO: 27156 - DNA, 15 bp, Homo sapiens
ggagtagctgggatt

SEQ ID NO: 27157 - DNA, 15 bp, Homo sapiens
tggagtagctgggat

SEQ ID NO: 27158 - DNA, 15 bp, Homo sapiens
ctggagtagctggga

SEQ ID NO: 27159 - DNA, 15 bp, Homo sapiens
tctggagtagctggg

SEQ ID NO: 27160 - DNA, 15 bp, Homo sapiens
ctctggagtagctgg

SEQ ID NO: 27161 - DNA, 15 bp, Homo sapiens
cctctggagtagctg

SEQ ID NO: 27162 - DNA, 15 bp, Homo sapiens
gcctctggagtagct

SEQ ID NO: 27163 - DNA, 15 bp, Homo sapiens
agcctctggagtagc

SEQ ID NO: 27164 - DNA, 15 bp, Homo sapiens
cagcctctggagtag

SEQ ID NO: 27165 - DNA, 15 bp, Homo sapiens
tcagcctctggagta

SEQ ID NO: 27166 - DNA, 15 bp, Homo sapiens
ctcagcctctggagt

SEQ ID NO: 27167 - DNA, 15 bp, Homo sapiens
cctcagcctctggag

SEQ ID NO: 27168 - DNA, 15 bp, Homo sapiens
tcctcagcctctgga

SEQ ID NO: 27169 - DNA, 15 bp, Homo sapiens
atcctcagcctctgg

SEQ ID NO: 27170 - DNA, 15 bp, Homo sapiens
catcctcagcctctg

SEQ ID NO: 27171 - DNA, 15 bp, Homo sapiens
ccatcctcagcctct

SEQ ID NO: 27172 - DNA, 15 bp, Homo sapiens
tccatcctcagcctc

SEQ ID NO: 27173 - DNA, 15 bp, Homo sapiens
ctccatcctcagcct

SEQ ID NO: 27174 - DNA, 15 bp, Homo sapiens
tctccatcctcagcc

SEQ ID NO: 27175 - DNA, 15 bp, Homo sapiens
ttctccatcctcagc

SEQ ID NO: 27176 - DNA, 15 bp, Homo sapiens
attctccatcctcag

SEQ ID NO: 27177 - DNA, 15 bp, Homo sapiens
gattctccatcctca

SEQ ID NO: 27178 - DNA, 15 bp, Homo sapiens
tgattctccatcctc

SEQ ID NO: 27179 - DNA, 15 bp, Homo sapiens
gtgattctccatcct

SEQ ID NO: 27180 - DNA, 15 bp, Homo sapiens
agtgattctccatcc

SEQ ID NO: 27181 - DNA, 15 bp, Homo sapiens
aagtgattctccatc

SEQ ID NO: 27182 - DNA, 15 bp, Homo sapiens
caagtgattctccat

SEQ ID NO: 27183 - DNA, 15 bp, Homo sapiens
tcaagtgattctcca

SEQ ID NO: 27184 - DNA, 15 bp, Homo sapiens
tcaggttcaagtgat

SEQ ID NO: 27185 - DNA, 15 bp, Homo sapiens
ctcaggttcaagtga

SEQ ID NO: 27186 - DNA, 15 bp, Homo sapiens
tctcaggttcaagtg

SEQ ID NO: 27187 - DNA, 15 bp, Homo sapiens
ctctcaggttcaagt

SEQ ID NO: 27188 - DNA, 15 bp, Homo sapiens
actctcaggttcaag

SEQ ID NO: 27189 - DNA, 15 bp, Homo sapiens
gactctcaggttcaa

SEQ ID NO: 27190 - DNA, 15 bp, Homo sapiens
cgactctcaggttca

SEQ ID NO: 27191 - DNA, 15 bp, Homo sapiens
ccgactctcaggttc

SEQ ID NO: 27192 - DNA, 15 bp, Homo sapiens
tccgactctcaggtt

SEQ ID NO: 27193 - DNA, 15 bp, Homo sapiens
ctccgactctcaggt

SEQ ID NO: 27194 - DNA, 15 bp, Homo sapiens
cctccgactctcagg

SEQ ID NO: 27195 - DNA, 15 bp, Homo sapiens
acctccgactctcag

SEQ ID NO: 27196 - DNA, 15 bp, Homo sapiens
aacctccgactctca

SEQ ID NO: 27197 - DNA, 15 bp, Homo sapiens
caacctccgactctc

SEQ ID NO: 27198 - DNA, 15 bp, Homo sapiens
gcaacctccgactct

SEQ ID NO: 27199 - DNA, 15 bp, Homo sapiens
tgcaacctccgactc

SEQ ID NO: 27200 - DNA, 15 bp, Homo sapiens
ctgcaacctccgact

SEQ ID NO: 27201 - DNA, 15 bp, Homo sapiens
actgcaacctccgac

SEQ ID NO: 27202 - DNA, 15 bp, Homo sapiens
cactgcaacctccga

SEQ ID NO: 27203 - DNA, 15 bp, Homo sapiens
gtggcgcaatctcgg

SEQ ID NO: 27204 - DNA, 15 bp, Homo sapiens
agtggcgcaatctcg

SEQ ID NO: 27205 - DNA, 15 bp, Homo sapiens
gagtgcagtggcgca

SEQ ID NO: 27206 - DNA, 15 bp, Homo sapiens
ggagtgcagtggcgc

SEQ ID NO: 27207 - DNA, 15 bp, Homo sapiens
gccaggctggagtgc

SEQ ID NO: 27208 - DNA, 15 bp, Homo sapiens
cgccaggctggagtg

SEQ ID NO: 27209 - DNA, 15 bp, Homo sapiens
tcgccaggctggagt

SEQ ID NO: 27210 - DNA, 15 bp, Homo sapiens
gtcgccaggctggag

SEQ ID NO: 27211 - DNA, 15 bp, Homo sapiens
tgtcgccaggctgga

SEQ ID NO: 27212 - DNA, 15 bp, Homo sapiens
ctgtcgccaggctgg

SEQ ID NO: 27213 - DNA, 15 bp, Homo sapiens
tctgtcgccaggctg

SEQ ID NO: 27214 - DNA, 15 bp, Homo sapiens
ctctgtcgccaggct

SEQ ID NO: 27215 - DNA, 15 bp, Homo sapiens
gctctgtcgccaggc

SEQ ID NO: 27216 - DNA, 15 bp, Homo sapiens
cgctctgtcgccagg

SEQ ID NO: 27217 - DNA, 15 bp, Homo sapiens
tcgctctgtcgccag

SEQ ID NO: 27218 - DNA, 15 bp, Homo sapiens
ctcgctctgtcgcca

SEQ ID NO: 27219 - DNA, 15 bp, Homo sapiens
gcttttttttttttt

SEQ ID NO: 27220 - DNA, 15 bp, Homo sapiens
agctttttttttttt

SEQ ID NO: 27221 - DNA, 15 bp, Homo sapiens
aagcttttttttttt

SEQ ID NO: 27222 - DNA, 15 bp, Homo sapiens
gaagctttttttttt

SEQ ID NO: 27223 - DNA, 15 bp, Homo sapiens
tgaagcttttttttt

SEQ ID NO: 27224 - DNA, 15 bp, Homo sapiens
gtgaagctttttttt

SEQ ID NO: 27225 - DNA, 15 bp, Homo sapiens
cgtgaagcttttttt

SEQ ID NO: 27226 - DNA, 15 bp, Homo sapiens
gcgtgaagctttttt

SEQ ID NO: 27227 - DNA, 15 bp, Homo sapiens
ggcgtgaagcttttt

SEQ ID NO: 27228 - DNA, 15 bp, Homo sapiens
aggcgtgaagctttt

SEQ ID NO: 27229 - DNA, 15 bp, Homo sapiens
caggcgtgaagcttt

SEQ ID NO: 27230 - DNA, 15 bp, Homo sapiens
acaggcgtgaagctt

SEQ ID NO: 27231 - DNA, 15 bp, Homo sapiens
tacaggcgtgaagct

SEQ ID NO: 27232 - DNA, 15 bp, Homo sapiens
ttacaggcgtgaagc

SEQ ID NO: 27233 - DNA, 15 bp, Homo sapiens
attacaggcgtgaag

SEQ ID NO: 27234 - DNA, 15 bp, Homo sapiens
gattacaggcgtgaa

SEQ ID NO: 27235 - DNA, 15 bp, Homo sapiens
actcggcctcccaaa

SEQ ID NO: 27236 - DNA, 15 bp, Homo sapiens
gactcggcctcccaa

SEQ ID NO: 27237 - DNA, 15 bp, Homo sapiens
tgactcggcctccca

SEQ ID NO: 27238 - DNA, 15 bp, Homo sapiens
ttgactcggcctccc

SEQ ID NO: 27239 - DNA, 15 bp, Homo sapiens
cttgactcggcctcc

SEQ ID NO: 27240 - DNA, 15 bp, Homo sapiens
acttgactcggcctc

SEQ ID NO: 27241 - DNA, 15 bp, Homo sapiens
cacttgactcggcct

SEQ ID NO: 27242 - DNA, 15 bp, Homo sapiens
ccacttgactcggcc

SEQ ID NO: 27243 - DNA, 15 bp, Homo sapiens
tccacttgactcggc

SEQ ID NO: 27244 - DNA, 15 bp, Homo sapiens
atccacttgactcgg

SEQ ID NO: 27245 - DNA, 15 bp, Homo sapiens
gatccacttgactcg

SEQ ID NO: 27246 - DNA, 15 bp, Homo sapiens
tgatccacttgactc

SEQ ID NO: 27247 - DNA, 15 bp, Homo sapiens
gtgatccacttgact

SEQ ID NO: 27248 - DNA, 15 bp, Homo sapiens
cgtgatccacttgac

SEQ ID NO: 27249 - DNA, 15 bp, Homo sapiens
tcgtgatccacttga

SEQ ID NO: 27250 - DNA, 15 bp, Homo sapiens
ctcgtgatccacttg

SEQ ID NO: 27251 - DNA, 15 bp, Homo sapiens
cctcgtgatccactt

SEQ ID NO: 27252 - DNA, 15 bp, Homo sapiens
acctcgtgatccact

SEQ ID NO: 27253 - DNA, 15 bp, Homo sapiens
cacctcgtgatccac

SEQ ID NO: 27254 - DNA, 15 bp, Homo sapiens
acacctcgtgatcca

SEQ ID NO: 27255 - DNA, 15 bp, Homo sapiens
cacacctcgtgatcc

SEQ ID NO: 27256 - DNA, 15 bp, Homo sapiens
ccacacctcgtgatc

SEQ ID NO: 27257 - DNA, 15 bp, Homo sapiens
tccacacctcgtgat

SEQ ID NO: 27258 - DNA, 15 bp, Homo sapiens
ctccacacctcgtga

SEQ ID NO: 27259 - DNA, 15 bp, Homo sapiens
tctccacacctcgtg

SEQ ID NO: 27260 - DNA, 15 bp, Homo sapiens
atctccacacctcgt

SEQ ID NO: 27261 - DNA, 15 bp, Homo sapiens
gatctccacacctcg

SEQ ID NO: 27262 - DNA, 15 bp, Homo sapiens
tgatctccacacctc

SEQ ID NO: 27263 - DNA, 15 bp, Homo sapiens
ttgatctccacacct

SEQ ID NO: 27264 - DNA, 15 bp, Homo sapiens
cttgatctccacacc

SEQ ID NO: 27265 - DNA, 15 bp, Homo sapiens
tcttgatctccacac

SEQ ID NO: 27266 - DNA, 15 bp, Homo sapiens
gtcttgatctccaca

SEQ ID NO: 27267 - DNA, 15 bp, Homo sapiens
agtcttgatctccac

SEQ ID NO: 27268 - DNA, 15 bp, Homo sapiens
tagtcttgatctcca

SEQ ID NO: 27269 - DNA, 15 bp, Homo sapiens
atagtcttgatctcc

SEQ ID NO: 27270 - DNA, 15 bp, Homo sapiens
gatagtcttgatctc

SEQ ID NO: 27271 - DNA, 15 bp, Homo sapiens
ggatagtcttgatct

SEQ ID NO: 27272 - DNA, 15 bp, Homo sapiens
aggatagtcttgatc

SEQ ID NO: 27273 - DNA, 15 bp, Homo sapiens
caggatagtcttgat

SEQ ID NO: 27274 - DNA, 15 bp, Homo sapiens
ccaggatagtcttga

SEQ ID NO: 27275 - DNA, 15 bp, Homo sapiens
gccaggatagtcttg

SEQ ID NO: 27276 - DNA, 15 bp, Homo sapiens
agccaggatagtctt

SEQ ID NO: 27277 - DNA, 15 bp, Homo sapiens
gagccaggatagtct

SEQ ID NO: 27278 - DNA, 15 bp, Homo sapiens
tgagccaggatagtc

SEQ ID NO: 27279 - DNA, 15 bp, Homo sapiens
gtgagccaggatagt

SEQ ID NO: 27280 - DNA, 15 bp, Homo sapiens
tgtgagccaggatag

SEQ ID NO: 27281 - DNA, 15 bp, Homo sapiens
atgtgagccaggata

SEQ ID NO: 27282 - DNA, 15 bp, Homo sapiens
catgtgagccaggat

SEQ ID NO: 27283 - DNA, 15 bp, Homo sapiens
ccatgtgagccagga

SEQ ID NO: 27284 - DNA, 15 bp, Homo sapiens
accatgtgagccagg

SEQ ID NO: 27285 - DNA, 15 bp, Homo sapiens
caccatgtgagccag

SEQ ID NO: 27286 - DNA, 15 bp, Homo sapiens
tcaccatgtgagcca

SEQ ID NO: 27287 - DNA, 15 bp, Homo sapiens
ttcaccatgtgagcc

SEQ ID NO: 27288 - DNA, 15 bp, Homo sapiens
tttcaccatgtgagc

SEQ ID NO: 27289 - DNA, 15 bp, Homo sapiens
ctttcaccatgtgag

SEQ ID NO: 27290 - DNA, 15 bp, Homo sapiens
gctttcaccatgtga

SEQ ID NO: 27291 - DNA, 15 bp, Homo sapiens
ggctttcaccatgtg

SEQ ID NO: 27292 - DNA, 15 bp, Homo sapiens
gggctttcaccatgt

SEQ ID NO: 27293 - DNA, 15 bp, Homo sapiens
cgggctttcaccatg

SEQ ID NO: 27294 - DNA, 15 bp, Homo sapiens
acgggctttcaccat

SEQ ID NO: 27295 - DNA, 15 bp, Homo sapiens
gacgggctttcacca

SEQ ID NO: 27296 - DNA, 15 bp, Homo sapiens
agacgggctttcacc

SEQ ID NO: 27297 - DNA, 15 bp, Homo sapiens
gagacgggctttcac

SEQ ID NO: 27298 - DNA, 15 bp, Homo sapiens
agagacgggctttca

SEQ ID NO: 27299 - DNA, 15 bp, Homo sapiens
tagagacgggctttc

SEQ ID NO: 27300 - DNA, 15 bp, Homo sapiens
gtagagacgggcttt

SEQ ID NO: 27301 - DNA, 15 bp, Homo sapiens
agtagagacgggctt

SEQ ID NO: 27302 - DNA, 15 bp, Homo sapiens
tagtagagacgggct

SEQ ID NO: 27303 - DNA, 15 bp, Homo sapiens
ttagtagagacgggc

SEQ ID NO: 27304 - DNA, 15 bp, Homo sapiens
gtttttagtagagac

SEQ ID NO: 27305 - DNA, 15 bp, Homo sapiens
ctgtgtttttagtag

SEQ ID NO: 27306 - DNA, 15 bp, Homo sapiens
tctgtgtttttagta

SEQ ID NO: 27307 - DNA, 15 bp, Homo sapiens
ttctgtgtttttagt

SEQ ID NO: 27308 - DNA, 15 bp, Homo sapiens
tttctgtgtttttag

SEQ ID NO: 27309 - DNA, 15 bp, Homo sapiens
ttttctgtgttttta

SEQ ID NO: 27310 - DNA, 15 bp, Homo sapiens
tttttctgtgttttt

SEQ ID NO: 27311 - DNA, 15 bp, Homo sapiens
atttttctgtgtttt

SEQ ID NO: 27312 - DNA, 15 bp, Homo sapiens
aatttttctgtgttt

SEQ ID NO: 27313 - DNA, 15 bp, Homo sapiens
taatttttctgtgtt

SEQ ID NO: 27314 - DNA, 15 bp, Homo sapiens
ctaatttttctgtgt

SEQ ID NO: 27315 - DNA, 15 bp, Homo sapiens
gctaatttttctgtg

SEQ ID NO: 27316 - DNA, 15 bp, Homo sapiens
agctaatttttctgt

SEQ ID NO: 27317 - DNA, 15 bp, Homo sapiens
cagctaatttttctg

SEQ ID NO: 27318 - DNA, 15 bp, Homo sapiens
tcagctaatttttct

SEQ ID NO: 27319 - DNA, 15 bp, Homo sapiens
ctcagctaatttttc

SEQ ID NO: 27320 - DNA, 15 bp, Homo sapiens
gctcagctaattttt

SEQ ID NO: 27321 - DNA, 15 bp, Homo sapiens
cgctcagctaatttt

SEQ ID NO: 27322 - DNA, 15 bp, Homo sapiens
acgctcagctaattt

SEQ ID NO: 27323 - DNA, 15 bp, Homo sapiens
cacgctcagctaatt

SEQ ID NO: 27324 - DNA, 15 bp, Homo sapiens
tcacgctcagctaat

SEQ ID NO: 27325 - DNA, 15 bp, Homo sapiens
atcacgctcagctaa

SEQ ID NO: 27326 - DNA, 15 bp, Homo sapiens
catcacgctcagcta

SEQ ID NO: 27327 - DNA, 15 bp, Homo sapiens
ccatcacgctcagct

SEQ ID NO: 27328 - DNA, 15 bp, Homo sapiens
gccatcacgctcagc

SEQ ID NO: 27329 - DNA, 15 bp, Homo sapiens
cgccatcacgctcag

SEQ ID NO: 27330 - DNA, 15 bp, Homo sapiens
ccgccatcacgctca

SEQ ID NO: 27331 - DNA, 15 bp, Homo sapiens
tccgccatcacgctc

SEQ ID NO: 27332 - DNA, 15 bp, Homo sapiens
gtccgccatcacgct

SEQ ID NO: 27333 - DNA, 15 bp, Homo sapiens
agtccgccatcacgc

SEQ ID NO: 27334 - DNA, 15 bp, Homo sapiens
gagtccgccatcacg

SEQ ID NO: 27335 - DNA, 15 bp, Homo sapiens
ggagtccgccatcac

SEQ ID NO: 27336 - DNA, 15 bp, Homo sapiens
aggagtccgccatca

SEQ ID NO: 27337 - DNA, 15 bp, Homo sapiens
caggagtccgccatc

SEQ ID NO: 27338 - DNA, 15 bp, Homo sapiens
acaggagtccgccat

SEQ ID NO: 27339 - DNA, 15 bp, Homo sapiens
tacaggagtccgcca

SEQ ID NO: 27340 - DNA, 15 bp, Homo sapiens
ctacaggagtccgcc

SEQ ID NO: 27341 - DNA, 15 bp, Homo sapiens
actacaggagtccgc

SEQ ID NO: 27342 - DNA, 15 bp, Homo sapiens
gactacaggagtccg

SEQ ID NO: 27343 - DNA, 15 bp, Homo sapiens
ggactacaggagtcc

SEQ ID NO: 27344 - DNA, 15 bp, Homo sapiens
gggactacaggagtc

SEQ ID NO: 27345 - DNA, 15 bp, Homo sapiens
tgggactacaggagt

SEQ ID NO: 27346 - DNA, 15 bp, Homo sapiens
ctgggactacaggag

SEQ ID NO: 27347 - DNA, 15 bp, Homo sapiens
gctgggactacagga

SEQ ID NO: 27348 - DNA, 15 bp, Homo sapiens
tctttaacaattaca

SEQ ID NO: 27349 - DNA, 15 bp, Homo sapiens
ttctttaacaattac

SEQ ID NO: 27350 - DNA, 15 bp, Homo sapiens
tttctttaacaatta

SEQ ID NO: 27351 - DNA, 15 bp, Homo sapiens
ttttctttaacaatt

SEQ ID NO: 27352 - DNA, 15 bp, Homo sapiens
attttctttaacaat

SEQ ID NO: 27353 - DNA, 15 bp, Homo sapiens
cattttctttaacaa

SEQ ID NO: 27354 - DNA, 15 bp, Homo sapiens
acattttctttaaca

SEQ ID NO: 27355 - DNA, 15 bp, Homo sapiens
tacattttctttaac

SEQ ID NO: 27356 - DNA, 15 bp, Homo sapiens
ctacattttctttaa

SEQ ID NO: 27357 - DNA, 15 bp, Homo sapiens
actacattttcttta

SEQ ID NO: 27358 - DNA, 15 bp, Homo sapiens
cactacattttcttt

SEQ ID NO: 27359 - DNA, 15 bp, Homo sapiens
tcactacattttctt

SEQ ID NO: 27360 - DNA, 15 bp, Homo sapiens
atcactacattttct

SEQ ID NO: 27361 - DNA, 15 bp, Homo sapiens
aatcactacattttc

SEQ ID NO: 27362 - DNA, 15 bp, Homo sapiens
aaatcactacatttt

SEQ ID NO: 27363 - DNA, 15 bp, Homo sapiens
caaatcactacattt

SEQ ID NO: 27364 - DNA, 15 bp, Homo sapiens
gcaaatcactacatt

SEQ ID NO: 27365 - DNA, 15 bp, Homo sapiens
agcaaatcactacat

SEQ ID NO: 27366 - DNA, 15 bp, Homo sapiens
gagcaaatcactaca

SEQ ID NO: 27367 - DNA, 15 bp, Homo sapiens
agagcaaatcactac

SEQ ID NO: 27368 - DNA, 15 bp, Homo sapiens
cagagcaaatcacta

SEQ ID NO: 27369 - DNA, 15 bp, Homo sapiens
acagagcaaatcact

SEQ ID NO: 27370 - DNA, 15 bp, Homo sapiens
aacagagcaaatcac

SEQ ID NO: 27371 - DNA, 15 bp, Homo sapiens
caacagagcaaatca

SEQ ID NO: 27372 - DNA, 15 bp, Homo sapiens
acaacagagcaaatc

SEQ ID NO: 27373 - DNA, 15 bp, Homo sapiens
aacaacagagcaaat

SEQ ID NO: 27374 - DNA, 15 bp, Homo sapiens
taacaacagagcaaa

SEQ ID NO: 27375 - DNA, 15 bp, Homo sapiens
gtaacaacagagcaa

SEQ ID NO: 27376 - DNA, 15 bp, Homo sapiens
agtaacaacagagca

SEQ ID NO: 27377 - DNA, 15 bp, Homo sapiens
aagtaacaacagagc

SEQ ID NO: 27378 - DNA, 15 bp, Homo sapiens
taagtaacaacagag

SEQ ID NO: 27379 - DNA, 15 bp, Homo sapiens
ataagtaacaacaga

SEQ ID NO: 27380 - DNA, 15 bp, Homo sapiens
tataagtaacaacag

SEQ ID NO: 27381 - DNA, 15 bp, Homo sapiens
atataagtaacaaca

SEQ ID NO: 27382 - DNA, 15 bp, Homo sapiens
catataagtaacaac

SEQ ID NO: 27383 - DNA, 15 bp, Homo sapiens
acatataagtaacaa

SEQ ID NO: 27384 - DNA, 15 bp, Homo sapiens
cacatataagtaaca

SEQ ID NO: 27385 - DNA, 15 bp, Homo sapiens
gcacatataagtaac

SEQ ID NO: 27386 - DNA, 15 bp, Homo sapiens
tgcacatataagtaa

SEQ ID NO: 27387 - DNA, 15 bp, Homo sapiens
atgcacatataagta

SEQ ID NO: 27388 - DNA, 15 bp, Homo sapiens
catgcacatataagt

SEQ ID NO: 27389 - DNA, 15 bp, Homo sapiens
tcatgcacatataag

SEQ ID NO: 27390 - DNA, 15 bp, Homo sapiens
ttcatgcacatataa

SEQ ID NO: 27391 - DNA, 15 bp, Homo sapiens
attcatgcacatata

SEQ ID NO: 27392 - DNA, 15 bp, Homo sapiens
cattcatgcacatat

SEQ ID NO: 27393 - DNA, 15 bp, Homo sapiens
tcattcatgcacata

SEQ ID NO: 27394 - DNA, 15 bp, Homo sapiens
atcattcatgcacat

SEQ ID NO: 27395 - DNA, 15 bp, Homo sapiens
catcattcatgcaca

SEQ ID NO: 27396 - DNA, 15 bp, Homo sapiens
ccatcattcatgcac

SEQ ID NO: 27397 - DNA, 15 bp, Homo sapiens
tccatcattcatgca

SEQ ID NO: 27398 - DNA, 15 bp, Homo sapiens
ctccatcattcatgc

SEQ ID NO: 27399 - DNA, 15 bp, Homo sapiens
tctccatcattcatg

SEQ ID NO: 27400 - DNA, 15 bp, Homo sapiens
atctccatcattcat

SEQ ID NO: 27401 - DNA, 15 bp, Homo sapiens
gatctccatcattca

SEQ ID NO: 27402 - DNA, 15 bp, Homo sapiens
agatctccatcattc

SEQ ID NO: 27403 - DNA, 15 bp, Homo sapiens
aagatctccatcatt

SEQ ID NO: 27404 - DNA, 15 bp, Homo sapiens
taagatctccatcat

SEQ ID NO: 27405 - DNA, 15 bp, Homo sapiens
ttaagatctccatca

SEQ ID NO: 27406 - DNA, 15 bp, Homo sapiens
tttaagatctccatc

SEQ ID NO: 27407 - DNA, 15 bp, Homo sapiens
ttttaagatctccat

SEQ ID NO: 27408 - DNA, 15 bp, Homo sapiens
tttttaagatctcca

SEQ ID NO: 27409 - DNA, 15 bp, Homo sapiens
ctttttaagatctcc

SEQ ID NO: 27410 - DNA, 15 bp, Homo sapiens
actttttaagatctc

SEQ ID NO: 27411 - DNA, 15 bp, Homo sapiens
tactttttaagatct

SEQ ID NO: 27412 - DNA, 15 bp, Homo sapiens
ttactttttaagatc

SEQ ID NO: 27413 - DNA, 15 bp, Homo sapiens
attactttttaagat

SEQ ID NO: 27414 - DNA, 15 bp, Homo sapiens
gattactttttaaga

SEQ ID NO: 27415 - DNA, 15 bp, Homo sapiens
tgattactttttaag

SEQ ID NO: 27416 - DNA, 15 bp, Homo sapiens
atgattactttttaa

SEQ ID NO: 27417 - DNA, 15 bp, Homo sapiens
aatgattacttttta

SEQ ID NO: 27418 - DNA, 15 bp, Homo sapiens
gaatgattacttttt

SEQ ID NO: 27419 - DNA, 15 bp, Homo sapiens
agaatgattactttt

SEQ ID NO: 27420 - DNA, 15 bp, Homo sapiens
cagaatgattacttt

SEQ ID NO: 27421 - DNA, 15 bp, Homo sapiens
ccagaatgattactt

SEQ ID NO: 27422 - DNA, 15 bp, Homo sapiens
cccagaatgattact

SEQ ID NO: 27423 - DNA, 15 bp, Homo sapiens
ccccagaatgattac

SEQ ID NO: 27424 - DNA, 15 bp, Homo sapiens
gccccagaatgatta

SEQ ID NO: 27425 - DNA, 15 bp, Homo sapiens
agccccagaatgatt

SEQ ID NO: 27426 - DNA, 15 bp, Homo sapiens
cagccccagaatgat

SEQ ID NO: 27427 - DNA, 15 bp, Homo sapiens
ccagccccagaatga

SEQ ID NO: 27428 - DNA, 15 bp, Homo sapiens
cccagccccagaatg

SEQ ID NO: 27429 - DNA, 15 bp, Homo sapiens
gcccagccccagaat

SEQ ID NO: 27430 - DNA, 15 bp, Homo sapiens
cgcccagccccagaa

SEQ ID NO: 27431 - DNA, 15 bp, Homo sapiens
acgcccagccccaga

SEQ ID NO: 27432 - DNA, 15 bp, Homo sapiens
tacgcccagccccag

SEQ ID NO: 27433 - DNA, 15 bp, Homo sapiens
ctacgcccagcccca

SEQ ID NO: 27434 - DNA, 15 bp, Homo sapiens
actacgcccagcccc

SEQ ID NO: 27435 - DNA, 15 bp, Homo sapiens
tactacgcccagccc

SEQ ID NO: 27436 - DNA, 15 bp, Homo sapiens
ctactacgcccagcc

SEQ ID NO: 27437 - DNA, 15 bp, Homo sapiens
gctactacgcccagc

SEQ ID NO: 27438 - DNA, 15 bp, Homo sapiens
agctactacgcccag

SEQ ID NO: 27439 - DNA, 15 bp, Homo sapiens
aagctactacgccca

SEQ ID NO: 27440 - DNA, 15 bp, Homo sapiens
caagctactacgccc

SEQ ID NO: 27441 - DNA, 15 bp, Homo sapiens
gcaagctactacgcc

SEQ ID NO: 27442 - DNA, 15 bp, Homo sapiens
tgcaagctactacgc

SEQ ID NO: 27443 - DNA, 15 bp, Homo sapiens
gtgcaagctactacg

SEQ ID NO: 27444 - DNA, 15 bp, Homo sapiens
ggtgcaagctactac

SEQ ID NO: 27445 - DNA, 15 bp, Homo sapiens
aggtgcaagctacta

SEQ ID NO: 27446 - DNA, 15 bp, Homo sapiens
caggtgcaagctact

SEQ ID NO: 27447 - DNA, 15 bp, Homo sapiens
acaggtgcaagctac

SEQ ID NO: 27448 - DNA, 15 bp, Homo sapiens
tacaggtgcaagcta

SEQ ID NO: 27449 - DNA, 15 bp, Homo sapiens
ttacaggtgcaagct

SEQ ID NO: 27450 - DNA, 15 bp, Homo sapiens
attacaggtgcaagc

SEQ ID NO: 27451 - DNA, 15 bp, Homo sapiens
gattacaggtgcaag

SEQ ID NO: 27452 - DNA, 15 bp, Homo sapiens
ggattacaggtgcaa

SEQ ID NO: 27453 - DNA, 15 bp, Homo sapiens
gggattacaggtgca

SEQ ID NO: 27454 - DNA, 15 bp, Homo sapiens
tgggattacaggtgc

SEQ ID NO: 27455 - DNA, 15 bp, Homo sapiens
gaagtgctgggatta

SEQ ID NO: 27456 - DNA, 15 bp, Homo sapiens
cgaagtgctgggatt

SEQ ID NO: 27457 - DNA, 15 bp, Homo sapiens
ccgaagtgctgggat

SEQ ID NO: 27458 - DNA, 15 bp, Homo sapiens
cccgaagtgctggga

SEQ ID NO: 27459 - DNA, 15 bp, Homo sapiens
tcccgaagtgctggg

SEQ ID NO: 27460 - DNA, 15 bp, Homo sapiens
ctcccgaagtgctgg

SEQ ID NO: 27461 - DNA, 15 bp, Homo sapiens
cctcccgaagtgctg

SEQ ID NO: 27462 - DNA, 15 bp, Homo sapiens
gcctcccgaagtgct

SEQ ID NO: 27463 - DNA, 15 bp, Homo sapiens
agcctcccgaagtgc

SEQ ID NO: 27464 - DNA, 15 bp, Homo sapiens
cagcctcccgaagtg

SEQ ID NO: 27465 - DNA, 15 bp, Homo sapiens
tcagcctcccgaagt

SEQ ID NO: 27466 - DNA, 15 bp, Homo sapiens
ctcagcctcccgaag

SEQ ID NO: 27467 - DNA, 15 bp, Homo sapiens
cctcagcctcccgaa

SEQ ID NO: 27468 - DNA, 15 bp, Homo sapiens
gcctgcctcagcctc

SEQ ID NO: 27469 - DNA, 15 bp, Homo sapiens
tgcctgcctcagcct

SEQ ID NO: 27470 - DNA, 15 bp, Homo sapiens
ctgcctgcctcagcc

SEQ ID NO: 27471 - DNA, 15 bp, Homo sapiens
tctgcctgcctcagc

SEQ ID NO: 27472 - DNA, 15 bp, Homo sapiens
atctgcctgcctcag

SEQ ID NO: 27473 - DNA, 15 bp, Homo sapiens
tatctgcctgcctca

SEQ ID NO: 27474 - DNA, 15 bp, Homo sapiens
ttatctgcctgcctc

SEQ ID NO: 27475 - DNA, 15 bp, Homo sapiens
attatctgcctgcct

SEQ ID NO: 27476 - DNA, 15 bp, Homo sapiens
aattatctgcctgcc

SEQ ID NO: 27477 - DNA, 15 bp, Homo sapiens
aaattatctgcctgc

SEQ ID NO: 27478 - DNA, 15 bp, Homo sapiens
caaattatctgcctg

SEQ ID NO: 27479 - DNA, 15 bp, Homo sapiens
tcaaattatctgcct

SEQ ID NO: 27480 - DNA, 15 bp, Homo sapiens
ctcaaattatctgcc

SEQ ID NO: 27481 - DNA, 15 bp, Homo sapiens
cctcaaattatctgc

SEQ ID NO: 27482 - DNA, 15 bp, Homo sapiens
acctcaaattatctg

SEQ ID NO: 27483 - DNA, 15 bp, Homo sapiens
gacctcaaattatct

SEQ ID NO: 27484 - DNA, 15 bp, Homo sapiens
tgacctcaaattatc

SEQ ID NO: 27485 - DNA, 15 bp, Homo sapiens
ctgacctcaaattat

SEQ ID NO: 27486 - DNA, 15 bp, Homo sapiens
cctgacctcaaatta

SEQ ID NO: 27487 - DNA, 15 bp, Homo sapiens
tcctgacctcaaatt

SEQ ID NO: 27488 - DNA, 15 bp, Homo sapiens
ctcctgacctcaaat

SEQ ID NO: 27489 - DNA, 15 bp, Homo sapiens
actcctgacctcaaa

SEQ ID NO: 27490 - DNA, 15 bp, Homo sapiens
tgggtttcaccatgt

SEQ ID NO: 27491 - DNA, 15 bp, Homo sapiens
atgggtttcaccatg

SEQ ID NO: 27492 - DNA, 15 bp, Homo sapiens
gatgggtttcaccat

SEQ ID NO: 27493 - DNA, 15 bp, Homo sapiens
agatgggtttcacca

SEQ ID NO: 27494 - DNA, 15 bp, Homo sapiens
gagatgggtttcacc

SEQ ID NO: 27495 - DNA, 15 bp, Homo sapiens
agagatgggtttcac

SEQ ID NO: 27496 - DNA, 15 bp, Homo sapiens
tagagatgggtttca

SEQ ID NO: 27497 - DNA, 15 bp, Homo sapiens
gtagagatgggtttc

SEQ ID NO: 27498 - DNA, 15 bp, Homo sapiens
agtagagatgggttt

SEQ ID NO: 27499 - DNA, 15 bp, Homo sapiens
tagtagagatgggtt

SEQ ID NO: 27500 - DNA, 15 bp, Homo sapiens
ttagtagagatgggt

SEQ ID NO: 27501 - DNA, 15 bp, Homo sapiens
tacgtgccaccacac

SEQ ID NO: 27502 - DNA, 15 bp, Homo sapiens
gtacgtgccaccaca

SEQ ID NO: 27503 - DNA, 15 bp, Homo sapiens
ggtacgtgccaccac

SEQ ID NO: 27504 - DNA, 15 bp, Homo sapiens
ttacaggtacgtgcc

SEQ ID NO: 27505 - DNA, 15 bp, Homo sapiens
attacaggtacgtgc

SEQ ID NO: 27506 - DNA, 15 bp, Homo sapiens
gattacaggtacgtg

SEQ ID NO: 27507 - DNA, 15 bp, Homo sapiens
ggattacaggtacgt

SEQ ID NO: 27508 - DNA, 15 bp, Homo sapiens
gggattacaggtacg

SEQ ID NO: 27509 - DNA, 15 bp, Homo sapiens
tgggattacaggtac

SEQ ID NO: 27510 - DNA, 15 bp, Homo sapiens
ctgggattacaggta

SEQ ID NO: 27511 - DNA, 15 bp, Homo sapiens
cgcctcccgagtagc

SEQ ID NO: 27512 - DNA, 15 bp, Homo sapiens
ccgcctcccgagtag

SEQ ID NO: 27513 - DNA, 15 bp, Homo sapiens
tccgcctcccgagta

SEQ ID NO: 27514 - DNA, 15 bp, Homo sapiens
ctccgcctcccgagt

SEQ ID NO: 27515 - DNA, 15 bp, Homo sapiens
cctccgcctcccgag

SEQ ID NO: 27516 - DNA, 15 bp, Homo sapiens
gcctccgcctcccga

SEQ ID NO: 27517 - DNA, 15 bp, Homo sapiens
tgcctccgcctcccg

SEQ ID NO: 27518 - DNA, 15 bp, Homo sapiens
gtgcctccgcctccc

SEQ ID NO: 27519 - DNA, 15 bp, Homo sapiens
tgtgcctccgcctcc

SEQ ID NO: 27520 - DNA, 15 bp, Homo sapiens
ttgtgcctccgcctc

SEQ ID NO: 27521 - DNA, 15 bp, Homo sapiens
cttgtgcctccgcct

SEQ ID NO: 27522 - DNA, 15 bp, Homo sapiens
tcttgtgcctccgcc

SEQ ID NO: 27523 - DNA, 15 bp, Homo sapiens
ttcttgtgcctccgc

SEQ ID NO: 27524 - DNA, 15 bp, Homo sapiens
attcttgtgcctccg

SEQ ID NO: 27525 - DNA, 15 bp, Homo sapiens
aattcttgtgcctcc

SEQ ID NO: 27526 - DNA, 15 bp, Homo sapiens
caattcttgtgcctc

SEQ ID NO: 27527 - DNA, 15 bp, Homo sapiens
gcaattcttgtgcct

SEQ ID NO: 27528 - DNA, 15 bp, Homo sapiens
agcaattcttgtgcc

SEQ ID NO: 27529 - DNA, 15 bp, Homo sapiens
aagcaattcttgtgc

SEQ ID NO: 27530 - DNA, 15 bp, Homo sapiens
caagcaattcttgtg

SEQ ID NO: 27531 - DNA, 15 bp, Homo sapiens
tcaagcaattcttgt

SEQ ID NO: 27532 - DNA, 15 bp, Homo sapiens
ttcaagcaattcttg

SEQ ID NO: 27533 - DNA, 15 bp, Homo sapiens
gttcaagcaattctt

SEQ ID NO: 27534 - DNA, 15 bp, Homo sapiens
aggttcaagcaattc

SEQ ID NO: 27535 - DNA, 15 bp, Homo sapiens
taggttcaagcaatt

SEQ ID NO: 27536 - DNA, 15 bp, Homo sapiens
ctaggttcaagcaat

SEQ ID NO: 27537 - DNA, 15 bp, Homo sapiens
cctaggttcaagcaa

SEQ ID NO: 27538 - DNA, 15 bp, Homo sapiens
tcctaggttcaagca

SEQ ID NO: 27539 - DNA, 15 bp, Homo sapiens
gtcctaggttcaagc

SEQ ID NO: 27540 - DNA, 15 bp, Homo sapiens
cgtcctaggttcaag

SEQ ID NO: 27541 - DNA, 15 bp, Homo sapiens
gcgtcctaggttcaa

SEQ ID NO: 27542 - DNA, 15 bp, Homo sapiens
cgcgtcctaggttca

SEQ ID NO: 27543 - DNA, 15 bp, Homo sapiens
ccgcgtcctaggttc

SEQ ID NO: 27544 - DNA, 15 bp, Homo sapiens
tccgcgtcctaggtt

SEQ ID NO: 27545 - DNA, 15 bp, Homo sapiens
ctccgcgtcctaggt

SEQ ID NO: 27546 - DNA, 15 bp, Homo sapiens
cctccgcgtcctagg

SEQ ID NO: 27547 - DNA, 15 bp, Homo sapiens
acctccgcgtcctag

SEQ ID NO: 27548 - DNA, 15 bp, Homo sapiens
aacctccgcgtccta

SEQ ID NO: 27549 - DNA, 15 bp, Homo sapiens
caacctccgcgtcct

SEQ ID NO: 27550 - DNA, 15 bp, Homo sapiens
gcaacctccgcgtcc

SEQ ID NO: 27551 - DNA, 15 bp, Homo sapiens
tgcaacctccgcgtc

SEQ ID NO: 27552 - DNA, 15 bp, Homo sapiens
ctgcaacctccgcgt

SEQ ID NO: 27553 - DNA, 15 bp, Homo sapiens
gctgcaacctccgcg

SEQ ID NO: 27554 - DNA, 15 bp, Homo sapiens
cgctgcaacctccgc

SEQ ID NO: 27555 - DNA, 15 bp, Homo sapiens
tcgctgcaacctccg

SEQ ID NO: 27556 - DNA, 15 bp, Homo sapiens
ctcgctgcaacctcc

SEQ ID NO: 27557 - DNA, 15 bp, Homo sapiens
gctcgctgcaacctc

SEQ ID NO: 27558 - DNA, 15 bp, Homo sapiens
ggctcgctgcaacct

SEQ ID NO: 27559 - DNA, 15 bp, Homo sapiens
tggctcgctgcaacc

SEQ ID NO: 27560 - DNA, 15 bp, Homo sapiens
ttggctcgctgcaac

SEQ ID NO: 27561 - DNA, 15 bp, Homo sapiens
cttggctcgctgcaa

SEQ ID NO: 27562 - DNA, 15 bp, Homo sapiens
tcttggctcgctgca

SEQ ID NO: 27563 - DNA, 15 bp, Homo sapiens
atcttggctcgctgc

SEQ ID NO: 27564 - DNA, 15 bp, Homo sapiens
gatcttggctcgctg

SEQ ID NO: 27565 - DNA, 15 bp, Homo sapiens
cgatcttggctcgct

SEQ ID NO: 27566 - DNA, 15 bp, Homo sapiens
gcgatcttggctcgc

SEQ ID NO: 27567 - DNA, 15 bp, Homo sapiens
cgcgatcttggctcg

SEQ ID NO: 27568 - DNA, 15 bp, Homo sapiens
cagtggcgcgatctt

SEQ ID NO: 27569 - DNA, 15 bp, Homo sapiens
gcagtggcgcgatct

SEQ ID NO: 27570 - DNA, 15 bp, Homo sapiens
tgcagtggcgcgatc

SEQ ID NO: 27571 - DNA, 15 bp, Homo sapiens
gtgcagtggcgcgat

SEQ ID NO: 27572 - DNA, 15 bp, Homo sapiens
agtgcagtggcgcga

SEQ ID NO: 27573 - DNA, 15 bp, Homo sapiens
gagtgcagtggcgcg

SEQ ID NO: 27574 - DNA, 15 bp, Homo sapiens
ggcccaggctggagt

SEQ ID NO: 27575 - DNA, 15 bp, Homo sapiens
cggcccaggctggag

SEQ ID NO: 27576 - DNA, 15 bp, Homo sapiens
acggcccaggctgga

SEQ ID NO: 27577 - DNA, 15 bp, Homo sapiens
tacggcccaggctgg

SEQ ID NO: 27578 - DNA, 15 bp, Homo sapiens
ctacggcccaggctg

SEQ ID NO: 27579 - DNA, 15 bp, Homo sapiens
tctacggcccaggct

SEQ ID NO: 27580 - DNA, 15 bp, Homo sapiens
ctctacggcccaggc

SEQ ID NO: 27581 - DNA, 15 bp, Homo sapiens
actctacggcccagg

SEQ ID NO: 27582 - DNA, 15 bp, Homo sapiens
cactctacggcccag

SEQ ID NO: 27583 - DNA, 15 bp, Homo sapiens
tcactctacggccca

SEQ ID NO: 27584 - DNA, 15 bp, Homo sapiens
ctcactctacggccc

SEQ ID NO: 27585 - DNA, 15 bp, Homo sapiens
tctcactctacggcc

SEQ ID NO: 27586 - DNA, 15 bp, Homo sapiens
gtctcactctacggc

SEQ ID NO: 27587 - DNA, 15 bp, Homo sapiens
agtctcactctacgg

SEQ ID NO: 27588 - DNA, 15 bp, Homo sapiens
gagtctcactctacg

SEQ ID NO: 27589 - DNA, 15 bp, Homo sapiens
agagtctcactctac

SEQ ID NO: 27590 - DNA, 15 bp, Homo sapiens
cagagtctcactcta

SEQ ID NO: 27591 - DNA, 15 bp, Homo sapiens
cttttttgagacaga

SEQ ID NO: 27592 - DNA, 15 bp, Homo sapiens
tcttttttgagacag

SEQ ID NO: 27593 - DNA, 15 bp, Homo sapiens
ttcttttttgagaca

SEQ ID NO: 27594 - DNA, 15 bp, Homo sapiens
tttcttttttgagac

SEQ ID NO: 27595 - DNA, 15 bp, Homo sapiens
ttttcttttttgaga

SEQ ID NO: 27596 - DNA, 15 bp, Homo sapiens
tttttcttttttgag

SEQ ID NO: 27597 - DNA, 15 bp, Homo sapiens
tttttttcttttttg

SEQ ID NO: 27598 - DNA, 15 bp, Homo sapiens
acttttttttctttt

SEQ ID NO: 27599 - DNA, 15 bp, Homo sapiens
tacttttttttcttt

SEQ ID NO: 27600 - DNA, 15 bp, Homo sapiens
ttacttttttttctt

SEQ ID NO: 27601 - DNA, 15 bp, Homo sapiens
attacttttttttct

SEQ ID NO: 27602 - DNA, 15 bp, Homo sapiens
aattacttttttttc

SEQ ID NO: 27603 - DNA, 15 bp, Homo sapiens
caattactttttttt

SEQ ID NO: 27604 - DNA, 15 bp, Homo sapiens
acaattacttttttt

SEQ ID NO: 27605 - DNA, 15 bp, Homo sapiens
aacaattactttttt

SEQ ID NO: 27606 - DNA, 15 bp, Homo sapiens
gaacaattacttttt

SEQ ID NO: 27607 - DNA, 15 bp, Homo sapiens
agaacaattactttt

SEQ ID NO: 27608 - DNA, 15 bp, Homo sapiens
tagaacaattacttt

SEQ ID NO: 27609 - DNA, 15 bp, Homo sapiens
ctagaacaattactt

SEQ ID NO: 27610 - DNA, 15 bp, Homo sapiens
gctagaacaattact

SEQ ID NO: 27611 - DNA, 15 bp, Homo sapiens
agctagaacaattac

SEQ ID NO: 27612 - DNA, 15 bp, Homo sapiens
cagctagaacaatta

SEQ ID NO: 27613 - DNA, 15 bp, Homo sapiens
ccagctagaacaatt

SEQ ID NO: 27614 - DNA, 15 bp, Homo sapiens
cccagctagaacaat

SEQ ID NO: 27615 - DNA, 15 bp, Homo sapiens
gcccagctagaacaa

SEQ ID NO: 27616 - DNA, 15 bp, Homo sapiens
cgcccagctagaaca

SEQ ID NO: 27617 - DNA, 15 bp, Homo sapiens
gcgcccagctagaac

SEQ ID NO: 27618 - DNA, 15 bp, Homo sapiens
tgcgcccagctagaa

SEQ ID NO: 27619 - DNA, 15 bp, Homo sapiens
ctgcgcccagctaga

SEQ ID NO: 27620 - DNA, 15 bp, Homo sapiens
actgcgcccagctag

SEQ ID NO: 27621 - DNA, 15 bp, Homo sapiens
cactgcgcccagcta

SEQ ID NO: 27622 - DNA, 15 bp, Homo sapiens
ccactgcgcccagct

SEQ ID NO: 27623 - DNA, 15 bp, Homo sapiens
gccactgcgcccagc

SEQ ID NO: 27624 - DNA, 15 bp, Homo sapiens
agccactgcgcccag

SEQ ID NO: 27625 - DNA, 15 bp, Homo sapiens
gagccactgcgccca

SEQ ID NO: 27626 - DNA, 15 bp, Homo sapiens
agagccactgcgccc

SEQ ID NO: 27627 - DNA, 15 bp, Homo sapiens
aagagccactgcgcc

SEQ ID NO: 27628 - DNA, 15 bp, Homo sapiens
caagagccactgcgc

SEQ ID NO: 27629 - DNA, 15 bp, Homo sapiens
gcaagagccactgcg

SEQ ID NO: 27630 - DNA, 15 bp, Homo sapiens
ggcaagagccactgc

SEQ ID NO: 27631 - DNA, 15 bp, Homo sapiens
aggcaagagccactg

SEQ ID NO: 27632 - DNA, 15 bp, Homo sapiens
caggcaagagccact

SEQ ID NO: 27633 - DNA, 15 bp, Homo sapiens
acaggcaagagccac

SEQ ID NO: 27634 - DNA, 15 bp, Homo sapiens
tacaggcaagagcca

SEQ ID NO: 27635 - DNA, 15 bp, Homo sapiens
ttacaggcaagagcc

SEQ ID NO: 27636 - DNA, 15 bp, Homo sapiens
attacaggcaagagc

SEQ ID NO: 27637 - DNA, 15 bp, Homo sapiens
gattacaggcaagag

SEQ ID NO: 27638 - DNA, 15 bp, Homo sapiens
ggattacaggcaaga

SEQ ID NO: 27639 - DNA, 15 bp, Homo sapiens
gggattacaggcaag

SEQ ID NO: 27640 - DNA, 15 bp, Homo sapiens
tgggattacaggcaa

SEQ ID NO: 27641 - DNA, 15 bp, Homo sapiens
cgccttggcctccca

SEQ ID NO: 27642 - DNA, 15 bp, Homo sapiens
ccgccttggcctccc

SEQ ID NO: 27643 - DNA, 15 bp, Homo sapiens
cccgccttggcctcc

SEQ ID NO: 27644 - DNA, 15 bp, Homo sapiens
acccgccttggcctc

SEQ ID NO: 27645 - DNA, 15 bp, Homo sapiens
cacccgccttggcct

SEQ ID NO: 27646 - DNA, 15 bp, Homo sapiens
ccacccgccttggcc

SEQ ID NO: 27647 - DNA, 15 bp, Homo sapiens
tccacccgccttggc

SEQ ID NO: 27648 - DNA, 15 bp, Homo sapiens
atccacccgccttgg

SEQ ID NO: 27649 - DNA, 15 bp, Homo sapiens
gatccacccgccttg

SEQ ID NO: 27650 - DNA, 15 bp, Homo sapiens
agatccacccgcctt

SEQ ID NO: 27651 - DNA, 15 bp, Homo sapiens
gagatccacccgcct

SEQ ID NO: 27652 - DNA, 15 bp, Homo sapiens
cgagatccacccgcc

SEQ ID NO: 27653 - DNA, 15 bp, Homo sapiens
tcgagatccacccgc

SEQ ID NO: 27654 - DNA, 15 bp, Homo sapiens
ctcgagatccacccg

SEQ ID NO: 27655 - DNA, 15 bp, Homo sapiens
actcgagatccaccc

SEQ ID NO: 27656 - DNA, 15 bp, Homo sapiens
gactcgagatccacc

SEQ ID NO: 27657 - DNA, 15 bp, Homo sapiens
ggactcgagatccac

SEQ ID NO: 27658 - DNA, 15 bp, Homo sapiens
aggactcgagatcca

SEQ ID NO: 27659 - DNA, 15 bp, Homo sapiens
taggactcgagatcc

SEQ ID NO: 27660 - DNA, 15 bp, Homo sapiens
ctaggactcgagatc

SEQ ID NO: 27661 - DNA, 15 bp, Homo sapiens
tctaggactcgagat

SEQ ID NO: 27662 - DNA, 15 bp, Homo sapiens
ctctaggactcgaga

SEQ ID NO: 27663 - DNA, 15 bp, Homo sapiens
actctaggactcgag

SEQ ID NO: 27664 - DNA, 15 bp, Homo sapiens
aactctaggactcga

SEQ ID NO: 27665 - DNA, 15 bp, Homo sapiens
gaactctaggactcg

SEQ ID NO: 27666 - DNA, 15 bp, Homo sapiens
tgaactctaggactc

SEQ ID NO: 27667 - DNA, 15 bp, Homo sapiens
ttgaactctaggact

SEQ ID NO: 27668 - DNA, 15 bp, Homo sapiens
cttgaactctaggac

SEQ ID NO: 27669 - DNA, 15 bp, Homo sapiens
tcttgaactctagga

SEQ ID NO: 27670 - DNA, 15 bp, Homo sapiens
gtcttgaactctagg

SEQ ID NO: 27671 - DNA, 15 bp, Homo sapiens
ggtcttgaactctag

SEQ ID NO: 27672 - DNA, 15 bp, Homo sapiens
tggtcttgaactcta

SEQ ID NO: 27673 - DNA, 15 bp, Homo sapiens
ctggtcttgaactct

SEQ ID NO: 27674 - DNA, 15 bp, Homo sapiens
taggctggtcttgaa

SEQ ID NO: 27675 - DNA, 15 bp, Homo sapiens
ctaggctggtcttga

SEQ ID NO: 27676 - DNA, 15 bp, Homo sapiens
cctaggctggtcttg

SEQ ID NO: 27677 - DNA, 15 bp, Homo sapiens
gcctaggctggtctt

SEQ ID NO: 27678 - DNA, 15 bp, Homo sapiens
tgcctaggctggtct

SEQ ID NO: 27679 - DNA, 15 bp, Homo sapiens
ttgcctaggctggtc

SEQ ID NO: 27680 - DNA, 15 bp, Homo sapiens
attgcctaggctggt

SEQ ID NO: 27681 - DNA, 15 bp, Homo sapiens
cattgcctaggctgg

SEQ ID NO: 27682 - DNA, 15 bp, Homo sapiens
acattgcctaggctg

SEQ ID NO: 27683 - DNA, 15 bp, Homo sapiens
cacattgcctaggct

SEQ ID NO: 27684 - DNA, 15 bp, Homo sapiens
ccacattgcctaggc

SEQ ID NO: 27685 - DNA, 15 bp, Homo sapiens
accacattgcctagg

SEQ ID NO: 27686 - DNA, 15 bp, Homo sapiens
caccacattgcctag

SEQ ID NO: 27687 - DNA, 15 bp, Homo sapiens
tcaccacattgccta

SEQ ID NO: 27688 - DNA, 15 bp, Homo sapiens
ttcaccacattgcct

SEQ ID NO: 27689 - DNA, 15 bp, Homo sapiens
tttcaccacattgcc

SEQ ID NO: 27690 - DNA, 15 bp, Homo sapiens
gtttcaccacattgc

SEQ ID NO: 27691 - DNA, 15 bp, Homo sapiens
ggtttcaccacattg

SEQ ID NO: 27692 - DNA, 15 bp, Homo sapiens
gggtttcaccacatt

SEQ ID NO: 27693 - DNA, 15 bp, Homo sapiens
ggggtttcaccacat

SEQ ID NO: 27694 - DNA, 15 bp, Homo sapiens
tggggtttcaccaca

SEQ ID NO: 27695 - DNA, 15 bp, Homo sapiens
atggggtttcaccac

SEQ ID NO: 27696 - DNA, 15 bp, Homo sapiens
cgatggggtttcacc

SEQ ID NO: 27697 - DNA, 15 bp, Homo sapiens
gcgatggggtttcac

SEQ ID NO: 27698 - DNA, 15 bp, Homo sapiens
agcgatggggtttca

SEQ ID NO: 27699 - DNA, 15 bp, Homo sapiens
tagcgatggggtttc

SEQ ID NO: 27700 - DNA, 15 bp, Homo sapiens
gtagcgatggggttt

SEQ ID NO: 27701 - DNA, 15 bp, Homo sapiens
tgtagcgatggggtt

SEQ ID NO: 27702 - DNA, 15 bp, Homo sapiens
ttgtagcgatggggt

SEQ ID NO: 27703 - DNA, 15 bp, Homo sapiens
tttgtagcgatgggg

SEQ ID NO: 27704 - DNA, 15 bp, Homo sapiens
ttttgtagcgatggg

SEQ ID NO: 27705 - DNA, 15 bp, Homo sapiens
tttttgtagcgatgg

SEQ ID NO: 27706 - DNA, 15 bp, Homo sapiens
ttttttgtagcgatg

SEQ ID NO: 27707 - DNA, 15 bp, Homo sapiens
attttttgtagcgat

SEQ ID NO: 27708 - DNA, 15 bp, Homo sapiens
tattttttgtagcga

SEQ ID NO: 27709 - DNA, 15 bp, Homo sapiens
gtattttttgtagcg

SEQ ID NO: 27710 - DNA, 15 bp, Homo sapiens
tgtattttttgtagc

SEQ ID NO: 27711 - DNA, 15 bp, Homo sapiens
ttgtattttttgtag

SEQ ID NO: 27712 - DNA, 15 bp, Homo sapiens
tttgtattttttgta

SEQ ID NO: 27713 - DNA, 15 bp, Homo sapiens
ttttgtattttttgt

SEQ ID NO: 27714 - DNA, 15 bp, Homo sapiens
tttttgtattttttg

SEQ ID NO: 27715 - DNA, 15 bp, Homo sapiens
atttttgtatttttt

SEQ ID NO: 27716 - DNA, 15 bp, Homo sapiens
cgccaccatgcctgg

SEQ ID NO: 27717 - DNA, 15 bp, Homo sapiens
acgccaccatgcctg

SEQ ID NO: 27718 - DNA, 15 bp, Homo sapiens
cacgccaccatgcct

SEQ ID NO: 27719 - DNA, 15 bp, Homo sapiens
gcacgccaccatgcc

SEQ ID NO: 27720 - DNA, 15 bp, Homo sapiens
cgcacgccaccatgc

SEQ ID NO: 27721 - DNA, 15 bp, Homo sapiens
gcgcacgccaccatg

SEQ ID NO: 27722 - DNA, 15 bp, Homo sapiens
tgcgcacgccaccat

SEQ ID NO: 27723 - DNA, 15 bp, Homo sapiens
atgcgcacgccacca

SEQ ID NO: 27724 - DNA, 15 bp, Homo sapiens
catgcgcacgccacc

SEQ ID NO: 27725 - DNA, 15 bp, Homo sapiens
acatgcgcacgccac

SEQ ID NO: 27726 - DNA, 15 bp, Homo sapiens
tacatgcgcacgcca

SEQ ID NO: 27727 - DNA, 15 bp, Homo sapiens
ctacatgcgcacgcc

SEQ ID NO: 27728 - DNA, 15 bp, Homo sapiens
actacatgcgcacgc

SEQ ID NO: 27729 - DNA, 15 bp, Homo sapiens
gactacatgcgcacg

SEQ ID NO: 27730 - DNA, 15 bp, Homo sapiens
ggactacatgcgcac

SEQ ID NO: 27731 - DNA, 15 bp, Homo sapiens
gggactacatgcgca

SEQ ID NO: 27732 - DNA, 15 bp, Homo sapiens
tgggactacatgcgc

SEQ ID NO: 27733 - DNA, 15 bp, Homo sapiens
ctgggactacatgcg

SEQ ID NO: 27734 - DNA, 15 bp, Homo sapiens
gctgggactacatgc

SEQ ID NO: 27735 - DNA, 15 bp, Homo sapiens
agctgggactacatg

SEQ ID NO: 27736 - DNA, 15 bp, Homo sapiens
gagctgggactacat

SEQ ID NO: 27737 - DNA, 15 bp, Homo sapiens
ggagctgggactaca

SEQ ID NO: 27738 - DNA, 15 bp, Homo sapiens
aggagctgggactac

SEQ ID NO: 27739 - DNA, 15 bp, Homo sapiens
aaggagctgggacta

SEQ ID NO: 27740 - DNA, 15 bp, Homo sapiens
caaggagctgggact

SEQ ID NO: 27741 - DNA, 15 bp, Homo sapiens
ccaaggagctgggac

SEQ ID NO: 27742 - DNA, 15 bp, Homo sapiens
cccaaggagctggga

SEQ ID NO: 27743 - DNA, 15 bp, Homo sapiens
tcccaaggagctggg

SEQ ID NO: 27744 - DNA, 15 bp, Homo sapiens
ctcccaaggagctgg

SEQ ID NO: 27745 - DNA, 15 bp, Homo sapiens
cctcccaaggagctg

SEQ ID NO: 27746 - DNA, 15 bp, Homo sapiens
gcctcccaaggagct

SEQ ID NO: 27747 - DNA, 15 bp, Homo sapiens
agcctcccaaggagc

SEQ ID NO: 27748 - DNA, 15 bp, Homo sapiens
cagcctcccaaggag

SEQ ID NO: 27749 - DNA, 15 bp, Homo sapiens
tcagcctcccaagga

SEQ ID NO: 27750 - DNA, 15 bp, Homo sapiens
ctcccacctcagcct

SEQ ID NO: 27751 - DNA, 15 bp, Homo sapiens
cctcccacctcagcc

SEQ ID NO: 27752 - DNA, 15 bp, Homo sapiens
tcctcccacctcagc

SEQ ID NO: 27753 - DNA, 15 bp, Homo sapiens
atcctcccacctcag

SEQ ID NO: 27754 - DNA, 15 bp, Homo sapiens
gatcctcccacctca

SEQ ID NO: 27755 - DNA, 15 bp, Homo sapiens
tgatcctcccacctc

SEQ ID NO: 27756 - DNA, 15 bp, Homo sapiens
gtgatcctcccacct

SEQ ID NO: 27757 - DNA, 15 bp, Homo sapiens
agtgatcctcccacc

SEQ ID NO: 27758 - DNA, 15 bp, Homo sapiens
aagtgatcctcccac

SEQ ID NO: 27759 - DNA, 15 bp, Homo sapiens
ttcaagtgatcctcc

SEQ ID NO: 27760 - DNA, 15 bp, Homo sapiens
gttcaagtgatcctc

SEQ ID NO: 27761 - DNA, 15 bp, Homo sapiens
ggttcaagtgatcct

SEQ ID NO: 27762 - DNA, 15 bp, Homo sapiens
gggttcaagtgatcc

SEQ ID NO: 27763 - DNA, 15 bp, Homo sapiens
tgggttcaagtgatc

SEQ ID NO: 27764 - DNA, 15 bp, Homo sapiens
ctgggttcaagtgat

SEQ ID NO: 27765 - DNA, 15 bp, Homo sapiens
cctgggttcaagtga

SEQ ID NO: 27766 - DNA, 15 bp, Homo sapiens
tcctgggttcaagtg

SEQ ID NO: 27767 - DNA, 15 bp, Homo sapiens
ctcctgggttcaagt

SEQ ID NO: 27768 - DNA, 15 bp, Homo sapiens
tctcctgggttcaag

SEQ ID NO: 27769 - DNA, 15 bp, Homo sapiens
gtctcctgggttcaa

SEQ ID NO: 27770 - DNA, 15 bp, Homo sapiens
tgtctcctgggttca

SEQ ID NO: 27771 - DNA, 15 bp, Homo sapiens
ctgtctcctgggttc

SEQ ID NO: 27772 - DNA, 15 bp, Homo sapiens
tctgtctcctgggtt

SEQ ID NO: 27773 - DNA, 15 bp, Homo sapiens
ctctgtctcctgggt

SEQ ID NO: 27774 - DNA, 15 bp, Homo sapiens
cctctgtctcctggg

SEQ ID NO: 27775 - DNA, 15 bp, Homo sapiens
acctctgtctcctgg

SEQ ID NO: 27776 - DNA, 15 bp, Homo sapiens
aacctctgtctcctg

SEQ ID NO: 27777 - DNA, 15 bp, Homo sapiens
caacctctgtctcct

SEQ ID NO: 27778 - DNA, 15 bp, Homo sapiens
gcaacctctgtctcc

SEQ ID NO: 27779 - DNA, 15 bp, Homo sapiens
tgcaacctctgtctc

SEQ ID NO: 27780 - DNA, 15 bp, Homo sapiens
ctgcaacctctgtct

SEQ ID NO: 27781 - DNA, 15 bp, Homo sapiens
actgcaacctctgtc

SEQ ID NO: 27782 - DNA, 15 bp, Homo sapiens
cactgcaacctctgt

SEQ ID NO: 27783 - DNA, 15 bp, Homo sapiens
ttcactgcaacctct

SEQ ID NO: 27784 - DNA, 15 bp, Homo sapiens
gttcactgcaacctc

SEQ ID NO: 27785 - DNA, 15 bp, Homo sapiens
ggttcactgcaacct

SEQ ID NO: 27786 - DNA, 15 bp, Homo sapiens
cggttcactgcaacc

SEQ ID NO: 27787 - DNA, 15 bp, Homo sapiens
tcggttcactgcaac

SEQ ID NO: 27788 - DNA, 15 bp, Homo sapiens
ctcggttcactgcaa

SEQ ID NO: 27789 - DNA, 15 bp, Homo sapiens
tctcggttcactgca

SEQ ID NO: 27790 - DNA, 15 bp, Homo sapiens
atctcggttcactgc

SEQ ID NO: 27791 - DNA, 15 bp, Homo sapiens
gatctcggttcactg

SEQ ID NO: 27792 - DNA, 15 bp, Homo sapiens
tgatctcggttcact

SEQ ID NO: 27793 - DNA, 15 bp, Homo sapiens
gtgatctcggttcac

SEQ ID NO: 27794 - DNA, 15 bp, Homo sapiens
cgtgatctcggttca

SEQ ID NO: 27795 - DNA, 15 bp, Homo sapiens
gcgtgatctcggttc

SEQ ID NO: 27796 - DNA, 15 bp, Homo sapiens
ggcgtgatctcggtt

SEQ ID NO: 27797 - DNA, 15 bp, Homo sapiens
tggcgtgatctcggt

SEQ ID NO: 27798 - DNA, 15 bp, Homo sapiens
gtggcgtgatctcgg

SEQ ID NO: 27799 - DNA, 15 bp, Homo sapiens
ggtggcgtgatctcg

SEQ ID NO: 27800 - DNA, 15 bp, Homo sapiens
tggtggcgtgatctc

SEQ ID NO: 27801 - DNA, 15 bp, Homo sapiens
gtggtggcgtgatct

SEQ ID NO: 27802 - DNA, 15 bp, Homo sapiens
cgtggtggcgtgatc

SEQ ID NO: 27803 - DNA, 15 bp, Homo sapiens
gcgtggtggcgtgat

SEQ ID NO: 27804 - DNA, 15 bp, Homo sapiens
agcgtggtggcgtga

SEQ ID NO: 27805 - DNA, 15 bp, Homo sapiens
gagcgtggtggcgtg

SEQ ID NO: 27806 - DNA, 15 bp, Homo sapiens
ggagcgtggtggcgt

SEQ ID NO: 27807 - DNA, 15 bp, Homo sapiens
tggagcgtggtggcg

SEQ ID NO: 27808 - DNA, 15 bp, Homo sapiens
ctggagcgtggtggc

SEQ ID NO: 27809 - DNA, 15 bp, Homo sapiens
gctggagcgtggtgg

SEQ ID NO: 27810 - DNA, 15 bp, Homo sapiens
ggctggagcgtggtg

SEQ ID NO: 27811 - DNA, 15 bp, Homo sapiens
aggctggagcgtggt

SEQ ID NO: 27812 - DNA, 15 bp, Homo sapiens
caggctggagcgtgg

SEQ ID NO: 27813 - DNA, 15 bp, Homo sapiens
ccaggctggagcgtg

SEQ ID NO: 27814 - DNA, 15 bp, Homo sapiens
cccaggctggagcgt

SEQ ID NO: 27815 - DNA, 15 bp, Homo sapiens
gcccaggctggagcg

SEQ ID NO: 27816 - DNA, 15 bp, Homo sapiens
tgcccaggctggagc

SEQ ID NO: 27817 - DNA, 15 bp, Homo sapiens
ttgcccaggctggag

SEQ ID NO: 27818 - DNA, 15 bp, Homo sapiens
gttgcccaggctgga

SEQ ID NO: 27819 - DNA, 15 bp, Homo sapiens
ctgttgcccaggctg

SEQ ID NO: 27820 - DNA, 15 bp, Homo sapiens
tctgttgcccaggct

SEQ ID NO: 27821 - DNA, 15 bp, Homo sapiens
ttctgttgcccaggc

SEQ ID NO: 27822 - DNA, 15 bp, Homo sapiens
gttctgttgcccagg

SEQ ID NO: 27823 - DNA, 15 bp, Homo sapiens
tgttctgttgcccag

SEQ ID NO: 27824 - DNA, 15 bp, Homo sapiens
ttgttctgttgccca

SEQ ID NO: 27825 - DNA, 15 bp, Homo sapiens
cttgttctgttgccc

SEQ ID NO: 27826 - DNA, 15 bp, Homo sapiens
tcttgttctgttgcc

SEQ ID NO: 27827 - DNA, 15 bp, Homo sapiens
gtcttgttctgttgc

SEQ ID NO: 27828 - DNA, 15 bp, Homo sapiens
agtcttgttctgttg

SEQ ID NO: 27829 - DNA, 15 bp, Homo sapiens
gagtcttgttctgtt

SEQ ID NO: 27830 - DNA, 15 bp, Homo sapiens
agagtcttgttctgt

SEQ ID NO: 27831 - DNA, 15 bp, Homo sapiens
cagagtcttgttctg

SEQ ID NO: 27832 - DNA, 15 bp, Homo sapiens
acagagtcttgttct

SEQ ID NO: 27833 - DNA, 15 bp, Homo sapiens
gacagagtcttgttc

SEQ ID NO: 27834 - DNA, 15 bp, Homo sapiens
agacagagtcttgtt

SEQ ID NO: 27835 - DNA, 15 bp, Homo sapiens
tagacagagtcttgt

SEQ ID NO: 27836 - DNA, 15 bp, Homo sapiens
ttagacagagtcttg

SEQ ID NO: 27837 - DNA, 15 bp, Homo sapiens
tttagacagagtctt

SEQ ID NO: 27838 - DNA, 15 bp, Homo sapiens
ttttagacagagtct

SEQ ID NO: 27839 - DNA, 15 bp, Homo sapiens
tttttagacagagtc

SEQ ID NO: 27840 - DNA, 15 bp, Homo sapiens
ttttttagacagagt

SEQ ID NO: 27841 - DNA, 15 bp, Homo sapiens
tttttttagacagag

SEQ ID NO: 27842 - DNA, 15 bp, Homo sapiens
atttttttagacaga

SEQ ID NO: 27843 - DNA, 15 bp, Homo sapiens
tatttttttagacag

SEQ ID NO: 27844 - DNA, 15 bp, Homo sapiens
gtatttttttagaca

SEQ ID NO: 27845 - DNA, 15 bp, Homo sapiens
tgtatttttttagac

SEQ ID NO: 27846 - DNA, 15 bp, Homo sapiens
ttgtatttttttaga

SEQ ID NO: 27847 - DNA, 15 bp, Homo sapiens
tttgtatttttttag

SEQ ID NO: 27848 - DNA, 15 bp, Homo sapiens
atttgtattttttta

SEQ ID NO: 27849 - DNA, 15 bp, Homo sapiens
tatttgtattttttt

SEQ ID NO: 27850 - DNA, 15 bp, Homo sapiens
ttatttgtatttttt

SEQ ID NO: 27851 - DNA, 15 bp, Homo sapiens
tttatttgtattttt

SEQ ID NO: 27852 - DNA, 15 bp, Homo sapiens
ttttatttgtatttt

SEQ ID NO: 27853 - DNA, 15 bp, Homo sapiens
attttatttgtattt

SEQ ID NO: 27854 - DNA, 15 bp, Homo sapiens
tattttatttgtatt

SEQ ID NO: 27855 - DNA, 15 bp, Homo sapiens
ttattttatttgtat

SEQ ID NO: 27856 - DNA, 15 bp, Homo sapiens
tttattttatttgta

SEQ ID NO: 27857 - DNA, 15 bp, Homo sapiens
ttttattttatttgt

SEQ ID NO: 27858 - DNA, 15 bp, Homo sapiens
cttttattttatttg

SEQ ID NO: 27859 - DNA, 15 bp, Homo sapiens
acttttattttattt

SEQ ID NO: 27860 - DNA, 15 bp, Homo sapiens
tacttttattttatt

SEQ ID NO: 27861 - DNA, 15 bp, Homo sapiens
ctacttttattttat

SEQ ID NO: 27862 - DNA, 15 bp, Homo sapiens
actacttttatttta

SEQ ID NO: 27863 - DNA, 15 bp, Homo sapiens
aactacttttatttt

SEQ ID NO: 27864 - DNA, 15 bp, Homo sapiens
gaactacttttattt

SEQ ID NO: 27865 - DNA, 15 bp, Homo sapiens
agaactacttttatt

SEQ ID NO: 27866 - DNA, 15 bp, Homo sapiens
gagaactacttttat

SEQ ID NO: 27867 - DNA, 15 bp, Homo sapiens
tgagaactactttta

SEQ ID NO: 27868 - DNA, 15 bp, Homo sapiens
gtgagaactactttt

SEQ ID NO: 27869 - DNA, 15 bp, Homo sapiens
tgtgagaactacttt

SEQ ID NO: 27870 - DNA, 15 bp, Homo sapiens
ctgtgagaactactt

SEQ ID NO: 27871 - DNA, 15 bp, Homo sapiens
actgtgagaactact

SEQ ID NO: 27872 - DNA, 15 bp, Homo sapiens
tactgtgagaactac

SEQ ID NO: 27873 - DNA, 15 bp, Homo sapiens
gtactgtgagaacta

SEQ ID NO: 27874 - DNA, 15 bp, Homo sapiens
ggtactgtgagaact

SEQ ID NO: 27875 - DNA, 15 bp, Homo sapiens
tggtactgtgagaac

SEQ ID NO: 27876 - DNA, 15 bp, Homo sapiens
ctggtactgtgagaa

SEQ ID NO: 27877 - DNA, 15 bp, Homo sapiens
gctggtactgtgaga

SEQ ID NO: 27878 - DNA, 15 bp, Homo sapiens
tgctggtactgtgag

SEQ ID NO: 27879 - DNA, 15 bp, Homo sapiens
atgctggtactgtga

SEQ ID NO: 27880 - DNA, 15 bp, Homo sapiens
aatgctggtactgtg

SEQ ID NO: 27881 - DNA, 15 bp, Homo sapiens
gaatgctggtactgt

SEQ ID NO: 27882 - DNA, 15 bp, Homo sapiens
tgaatgctggtactg

SEQ ID NO: 27883 - DNA, 15 bp, Homo sapiens
atgaatgctggtact

SEQ ID NO: 27884 - DNA, 15 bp, Homo sapiens
aatgaatgctggtac

SEQ ID NO: 27885 - DNA, 15 bp, Homo sapiens
aaatgaatgctggta

SEQ ID NO: 27886 - DNA, 15 bp, Homo sapiens
aaaatgaatgctggt

SEQ ID NO: 27887 - DNA, 15 bp, Homo sapiens
aaaaatgaatgctgg

SEQ ID NO: 27888 - DNA, 15 bp, Homo sapiens
gaaaaatgaatgctg

SEQ ID NO: 27889 - DNA, 15 bp, Homo sapiens
tgaaaaatgaatgct

SEQ ID NO: 27890 - DNA, 15 bp, Homo sapiens
ttgaaaaatgaatgc

SEQ ID NO: 27891 - DNA, 15 bp, Homo sapiens
tttgaaaaatgaatg

SEQ ID NO: 27892 - DNA, 15 bp, Homo sapiens
ttttgaaaaatgaat

SEQ ID NO: 27893 - DNA, 15 bp, Homo sapiens
cttttgaaaaatgaa

SEQ ID NO: 27894 - DNA, 15 bp, Homo sapiens
tcttttgaaaaatga

SEQ ID NO: 27895 - DNA, 15 bp, Homo sapiens
atcttttgaaaaatg

SEQ ID NO: 27896 - DNA, 15 bp, Homo sapiens
tatcttttgaaaaat

SEQ ID NO: 27897 - DNA, 15 bp, Homo sapiens
atatcttttgaaaaa

SEQ ID NO: 27898 - DNA, 15 bp, Homo sapiens
tatatcttttgaaaa

SEQ ID NO: 27899 - DNA, 15 bp, Homo sapiens
ctatatcttttgaaa

SEQ ID NO: 27900 - DNA, 15 bp, Homo sapiens
tctatatcttttgaa

SEQ ID NO: 27901 - DNA, 15 bp, Homo sapiens
ctctatatcttttga

SEQ ID NO: 27902 - DNA, 15 bp, Homo sapiens
gctctatatcttttg

SEQ ID NO: 27903 - DNA, 15 bp, Homo sapiens
agctctatatctttt

SEQ ID NO: 27904 - DNA, 15 bp, Homo sapiens
tagctctatatcttt

SEQ ID NO: 27905 - DNA, 15 bp, Homo sapiens
ttagctctatatctt

SEQ ID NO: 27906 - DNA, 15 bp, Homo sapiens
tttagctctatatct

SEQ ID NO: 27907 - DNA, 15 bp, Homo sapiens
ttttagctctatatc

SEQ ID NO: 27908 - DNA, 15 bp, Homo sapiens
tttttagctctatat

SEQ ID NO: 27909 - DNA, 15 bp, Homo sapiens
ctttttagctctata

SEQ ID NO: 27910 - DNA, 15 bp, Homo sapiens
cctttttagctctat

SEQ ID NO: 27911 - DNA, 15 bp, Homo sapiens
tcctttttagctcta

SEQ ID NO: 27912 - DNA, 15 bp, Homo sapiens
ttcctttttagctct

SEQ ID NO: 27913 - DNA, 15 bp, Homo sapiens
cttcctttttagctc

SEQ ID NO: 27914 - DNA, 15 bp, Homo sapiens
ccttcctttttagct

SEQ ID NO: 27915 - DNA, 15 bp, Homo sapiens
tccttcctttttagc

SEQ ID NO: 27916 - DNA, 15 bp, Homo sapiens
ttccttcctttttag

SEQ ID NO: 27917 - DNA, 15 bp, Homo sapiens
tttccttccttttta

SEQ ID NO: 27918 - DNA, 15 bp, Homo sapiens
ttttccttccttttt

SEQ ID NO: 27919 - DNA, 15 bp, Homo sapiens
tttttccttcctttt

SEQ ID NO: 27920 - DNA, 15 bp, Homo sapiens
ttttttccttccttt

SEQ ID NO: 27921 - DNA, 15 bp, Homo sapiens
tttttttccttcctt

SEQ ID NO: 27922 - DNA, 15 bp, Homo sapiens
ttttttttccttcct

SEQ ID NO: 27923 - DNA, 15 bp, Homo sapiens
tttttttttccttcc

SEQ ID NO: 27924 - DNA, 15 bp, Homo sapiens
ctttttttttccttc

SEQ ID NO: 27925 - DNA, 15 bp, Homo sapiens
actttttttttcctt

SEQ ID NO: 27926 - DNA, 15 bp, Homo sapiens
tactttttttttcct

SEQ ID NO: 27927 - DNA, 15 bp, Homo sapiens
ttactttttttttcc

SEQ ID NO: 27928 - DNA, 15 bp, Homo sapiens
attactttttttttc

SEQ ID NO: 27929 - DNA, 15 bp, Homo sapiens
cattacttttttttt

SEQ ID NO: 27930 - DNA, 15 bp, Homo sapiens
acattactttttttt

SEQ ID NO: 27931 - DNA, 15 bp, Homo sapiens
aacattacttttttt

SEQ ID NO: 27932 - DNA, 15 bp, Homo sapiens
caacattactttttt

SEQ ID NO: 27933 - DNA, 15 bp, Homo sapiens
ccaacattacttttt

SEQ ID NO: 27934 - DNA, 15 bp, Homo sapiens
cccaacattactttt

SEQ ID NO: 27935 - DNA, 15 bp, Homo sapiens
gcccaacattacttt

SEQ ID NO: 27936 - DNA, 15 bp, Homo sapiens
agcccaacattactt

SEQ ID NO: 27937 - DNA, 15 bp, Homo sapiens
aagcccaacattact

SEQ ID NO: 27938 - DNA, 15 bp, Homo sapiens
aaagcccaacattac

SEQ ID NO: 27939 - DNA, 15 bp, Homo sapiens
aaaagcccaacatta

SEQ ID NO: 27940 - DNA, 15 bp, Homo sapiens
taaaagcccaacatt

SEQ ID NO: 27941 - DNA, 15 bp, Homo sapiens
ttaaaagcccaacat

SEQ ID NO: 27942 - DNA, 15 bp, Homo sapiens
tttaaaagcccaaca

SEQ ID NO: 27943 - DNA, 15 bp, Homo sapiens
atttaaaagcccaac

SEQ ID NO: 27944 - DNA, 15 bp, Homo sapiens
tatttaaaagcccaa

SEQ ID NO: 27945 - DNA, 15 bp, Homo sapiens
gtatttaaaagccca

SEQ ID NO: 27946 - DNA, 15 bp, Homo sapiens
agtatttaaaagccc

SEQ ID NO: 27947 - DNA, 15 bp, Homo sapiens
gagtatttaaaagcc

SEQ ID NO: 27948 - DNA, 15 bp, Homo sapiens
cgagtatttaaaagc

SEQ ID NO: 27949 - DNA, 15 bp, Homo sapiens
acgagtatttaaaag

SEQ ID NO: 27950 - DNA, 15 bp, Homo sapiens
aacgagtatttaaaa

SEQ ID NO: 27951 - DNA, 15 bp, Homo sapiens
gaacgagtatttaaa

SEQ ID NO: 27952 - DNA, 15 bp, Homo sapiens
ggaacgagtatttaa

SEQ ID NO: 27953 - DNA, 15 bp, Homo sapiens
aggaacgagtattta

SEQ ID NO: 27954 - DNA, 15 bp, Homo sapiens
taggaacgagtattt

SEQ ID NO: 27955 - DNA, 15 bp, Homo sapiens
ataggaacgagtatt

SEQ ID NO: 27956 - DNA, 15 bp, Homo sapiens
tataggaacgagtat

SEQ ID NO: 27957 - DNA, 15 bp, Homo sapiens
gtataggaacgagta

SEQ ID NO: 27958 - DNA, 15 bp, Homo sapiens
agtataggaacgagt

SEQ ID NO: 27959 - DNA, 15 bp, Homo sapiens
tagtataggaacgag

SEQ ID NO: 27960 - DNA, 15 bp, Homo sapiens
ttagtataggaacga

SEQ ID NO: 27961 - DNA, 15 bp, Homo sapiens
tttagtataggaacg

SEQ ID NO: 27962 - DNA, 15 bp, Homo sapiens
atttagtataggaac

SEQ ID NO: 27963 - DNA, 15 bp, Homo sapiens
catttagtataggaa

SEQ ID NO: 27964 - DNA, 15 bp, Homo sapiens
acatttagtatagga

SEQ ID NO: 27965 - DNA, 15 bp, Homo sapiens
aacatttagtatagg

SEQ ID NO: 27966 - DNA, 15 bp, Homo sapiens
gaacatttagtatag

SEQ ID NO: 27967 - DNA, 15 bp, Homo sapiens
agaacatttagtata

SEQ ID NO: 27968 - DNA, 15 bp, Homo sapiens
aagaacatttagtat

SEQ ID NO: 27969 - DNA, 15 bp, Homo sapiens
taagaacatttagta

SEQ ID NO: 27970 - DNA, 15 bp, Homo sapiens
ctaagaacatttagt

SEQ ID NO: 27971 - DNA, 15 bp, Homo sapiens
cctaagaacatttag

SEQ ID NO: 27972 - DNA, 15 bp, Homo sapiens
tcctaagaacattta

SEQ ID NO: 27973 - DNA, 15 bp, Homo sapiens
ctcctaagaacattt

SEQ ID NO: 27974 - DNA, 15 bp, Homo sapiens
actcctaagaacatt

SEQ ID NO: 27975 - DNA, 15 bp, Homo sapiens
cactcctaagaacat

SEQ ID NO: 27976 - DNA, 15 bp, Homo sapiens
gcactcctaagaaca

SEQ ID NO: 27977 - DNA, 15 bp, Homo sapiens
agcactcctaagaac

SEQ ID NO: 27978 - DNA, 15 bp, Homo sapiens
cagcactcctaagaa

SEQ ID NO: 27979 - DNA, 15 bp, Homo sapiens
ccagcactcctaaga

SEQ ID NO: 27980 - DNA, 15 bp, Homo sapiens
cccagcactcctaag

SEQ ID NO: 27981 - DNA, 15 bp, Homo sapiens
ccccagcactcctaa

SEQ ID NO: 27982 - DNA, 15 bp, Homo sapiens
accccagcactccta

SEQ ID NO: 27983 - DNA, 15 bp, Homo sapiens
aaccccagcactcct

SEQ ID NO: 27984 - DNA, 15 bp, Homo sapiens
aaaccccagcactcc

SEQ ID NO: 27985 - DNA, 15 bp, Homo sapiens
aaaaccccagcactc

SEQ ID NO: 27986 - DNA, 15 bp, Homo sapiens
taaaaccccagcact

SEQ ID NO: 27987 - DNA, 15 bp, Homo sapiens
ataaaaccccagcac

SEQ ID NO: 27988 - DNA, 15 bp, Homo sapiens
aataaaaccccagca

SEQ ID NO: 27989 - DNA, 15 bp, Homo sapiens
caataaaaccccagc

SEQ ID NO: 27990 - DNA, 15 bp, Homo sapiens
acaataaaaccccag

SEQ ID NO: 27991 - DNA, 15 bp, Homo sapiens
gacaataaaacccca

SEQ ID NO: 27992 - DNA, 15 bp, Homo sapiens
tgacaataaaacccc

SEQ ID NO: 27993 - DNA, 15 bp, Homo sapiens
atgacaataaaaccc

SEQ ID NO: 27994 - DNA, 15 bp, Homo sapiens
gatgacaataaaacc

SEQ ID NO: 27995 - DNA, 15 bp, Homo sapiens
tgatgacaataaaac

SEQ ID NO: 27996 - DNA, 15 bp, Homo sapiens
atgatgacaataaaa

SEQ ID NO: 27997 - DNA, 15 bp, Homo sapiens
aatgatgacaataaa

SEQ ID NO: 27998 - DNA, 15 bp, Homo sapiens
aaatgatgacaataa

SEQ ID NO: 27999 - DNA, 15 bp, Homo sapiens
taaatgatgacaata

SEQ ID NO: 28000 - DNA, 15 bp, Homo sapiens
ataaatgatgacaat

SEQ ID NO: 28001 - DNA, 15 bp, Homo sapiens
gataaatgatgacaa

SEQ ID NO: 28002 - DNA, 15 bp, Homo sapiens
ggataaatgatgaca

SEQ ID NO: 28003 - DNA, 15 bp, Homo sapiens
aggataaatgatgac

SEQ ID NO: 28004 - DNA, 15 bp, Homo sapiens
aaggataaatgatga

SEQ ID NO: 28005 - DNA, 15 bp, Homo sapiens
aaaggataaatgatg

SEQ ID NO: 28006 - DNA, 15 bp, Homo sapiens
aaaaggataaatgat

SEQ ID NO: 28007 - DNA, 15 bp, Homo sapiens
aaaaaggataaatga

SEQ ID NO: 28008 - DNA, 15 bp, Homo sapiens
taaaaaggataaatg

SEQ ID NO: 28009 - DNA, 15 bp, Homo sapiens
ttaaaaaggataaat

SEQ ID NO: 28010 - DNA, 15 bp, Homo sapiens
tttaaaaaggataaa

SEQ ID NO: 28011 - DNA, 15 bp, Homo sapiens
ttttaaaaaggataa

SEQ ID NO: 28012 - DNA, 15 bp, Homo sapiens
tttttaaaaaggata

SEQ ID NO: 28013 - DNA, 15 bp, Homo sapiens
atttttaaaaaggat

SEQ ID NO: 28014 - DNA, 15 bp, Homo sapiens
catttttaaaaagga

SEQ ID NO: 28015 - DNA, 15 bp, Homo sapiens
acatttttaaaaagg

SEQ ID NO: 28016 - DNA, 15 bp, Homo sapiens
aacatttttaaaaag

SEQ ID NO: 28017 - DNA, 15 bp, Homo sapiens
taacatttttaaaaa

SEQ ID NO: 28018 - DNA, 15 bp, Homo sapiens
ataacatttttaaaa

SEQ ID NO: 28019 - DNA, 15 bp, Homo sapiens
aataacatttttaaa

SEQ ID NO: 28020 - DNA, 15 bp, Homo sapiens
caataacatttttaa

SEQ ID NO: 28021 - DNA, 15 bp, Homo sapiens
ccaataacattttta

SEQ ID NO: 28022 - DNA, 15 bp, Homo sapiens
gccaataacattttt

SEQ ID NO: 28023 - DNA, 15 bp, Homo sapiens
ggccaataacatttt

SEQ ID NO: 28024 - DNA, 15 bp, Homo sapiens
tggccaataacattt

SEQ ID NO: 28025 - DNA, 15 bp, Homo sapiens
ctggccaataacatt

SEQ ID NO: 28026 - DNA, 15 bp, Homo sapiens
cctggccaataacat

SEQ ID NO: 28027 - DNA, 15 bp, Homo sapiens
gcctggccaataaca

SEQ ID NO: 28028 - DNA, 15 bp, Homo sapiens
tgcctggccaataac

SEQ ID NO: 28029 - DNA, 15 bp, Homo sapiens
gtgcctggccaataa

SEQ ID NO: 28030 - DNA, 15 bp, Homo sapiens
cgtgcctggccaata

SEQ ID NO: 28031 - DNA, 15 bp, Homo sapiens
ccgtgcctggccaat

SEQ ID NO: 28032 - DNA, 15 bp, Homo sapiens
accgtgcctggccaa

SEQ ID NO: 28033 - DNA, 15 bp, Homo sapiens
caccgtgcctggcca

SEQ ID NO: 28034 - DNA, 15 bp, Homo sapiens
ccaccgtgcctggcc

SEQ ID NO: 28035 - DNA, 15 bp, Homo sapiens
gccaccgtgcctggc

SEQ ID NO: 28036 - DNA, 15 bp, Homo sapiens
agccaccgtgcctgg

SEQ ID NO: 28037 - DNA, 15 bp, Homo sapiens
gagccaccgtgcctg

SEQ ID NO: 28038 - DNA, 15 bp, Homo sapiens
tgagccaccgtgcct

SEQ ID NO: 28039 - DNA, 15 bp, Homo sapiens
ccatgagccaccgtg

SEQ ID NO: 28040 - DNA, 15 bp, Homo sapiens
gccatgagccaccgt

SEQ ID NO: 28041 - DNA, 15 bp, Homo sapiens
agccatgagccaccg

SEQ ID NO: 28042 - DNA, 15 bp, Homo sapiens
cagccatgagccacc

SEQ ID NO: 28043 - DNA, 15 bp, Homo sapiens
acagccatgagccac

SEQ ID NO: 28044 - DNA, 15 bp, Homo sapiens
tacagccatgagcca

SEQ ID NO: 28045 - DNA, 15 bp, Homo sapiens
ttacagccatgagcc

SEQ ID NO: 28046 - DNA, 15 bp, Homo sapiens
attacagccatgagc

SEQ ID NO: 28047 - DNA, 15 bp, Homo sapiens
gattacagccatgag

SEQ ID NO: 28048 - DNA, 15 bp, Homo sapiens
ggattacagccatga

SEQ ID NO: 28049 - DNA, 15 bp, Homo sapiens
gggattacagccatg

SEQ ID NO: 28050 - DNA, 15 bp, Homo sapiens
tgggattacagccat

SEQ ID NO: 28051 - DNA, 15 bp, Homo sapiens
ctgggattacagcca

SEQ ID NO: 28052 - DNA, 15 bp, Homo sapiens
gctgggattacagcc

SEQ ID NO: 28053 - DNA, 15 bp, Homo sapiens
tgctgggattacagc

SEQ ID NO: 28054 - DNA, 15 bp, Homo sapiens
gcctcggcctcccaa

SEQ ID NO: 28055 - DNA, 15 bp, Homo sapiens
tgcctcggcctccca

SEQ ID NO: 28056 - DNA, 15 bp, Homo sapiens
ctgcctcggcctccc

SEQ ID NO: 28057 - DNA, 15 bp, Homo sapiens
cctgcctcggcctcc

SEQ ID NO: 28058 - DNA, 15 bp, Homo sapiens
gcctgcctcggcctc

SEQ ID NO: 28059 - DNA, 15 bp, Homo sapiens
tgcctgcctcggcct

SEQ ID NO: 28060 - DNA, 15 bp, Homo sapiens
ctgcctgcctcggcc

SEQ ID NO: 28061 - DNA, 15 bp, Homo sapiens
tctgcctgcctcggc

SEQ ID NO: 28062 - DNA, 15 bp, Homo sapiens
atctgcctgcctcgg

SEQ ID NO: 28063 - DNA, 15 bp, Homo sapiens
gatctgcctgcctcg

SEQ ID NO: 28064 - DNA, 15 bp, Homo sapiens
tgatctgcctgcctc

SEQ ID NO: 28065 - DNA, 15 bp, Homo sapiens
gtgatctgcctgcct

SEQ ID NO: 28066 - DNA, 15 bp, Homo sapiens
ggtgatctgcctgcc

SEQ ID NO: 28067 - DNA, 15 bp, Homo sapiens
aggtgatctgcctgc

SEQ ID NO: 28068 - DNA, 15 bp, Homo sapiens
caggtgatctgcctg

SEQ ID NO: 28069 - DNA, 15 bp, Homo sapiens
tcaggtgatctgcct

SEQ ID NO: 28070 - DNA, 15 bp, Homo sapiens
ctcaggtgatctgcc

SEQ ID NO: 28071 - DNA, 15 bp, Homo sapiens
cctcaggtgatctgc

SEQ ID NO: 28072 - DNA, 15 bp, Homo sapiens
acctcaggtgatctg

SEQ ID NO: 28073 - DNA, 15 bp, Homo sapiens
gacctcaggtgatct

SEQ ID NO: 28074 - DNA, 15 bp, Homo sapiens
cactcctgacctcag

SEQ ID NO: 28075 - DNA, 15 bp, Homo sapiens
acactcctgacctca

SEQ ID NO: 28076 - DNA, 15 bp, Homo sapiens
cacactcctgacctc

SEQ ID NO: 28077 - DNA, 15 bp, Homo sapiens
tcacactcctgacct

SEQ ID NO: 28078 - DNA, 15 bp, Homo sapiens
ctcacactcctgacc

SEQ ID NO: 28079 - DNA, 15 bp, Homo sapiens
tctcacactcctgac

SEQ ID NO: 28080 - DNA, 15 bp, Homo sapiens
gtctcacactcctga

SEQ ID NO: 28081 - DNA, 15 bp, Homo sapiens
ggtctcacactcctg

SEQ ID NO: 28082 - DNA, 15 bp, Homo sapiens
tggtctcacactcct

SEQ ID NO: 28083 - DNA, 15 bp, Homo sapiens
ctggtctcacactcc

SEQ ID NO: 28084 - DNA, 15 bp, Homo sapiens
gctggtctcacactc

SEQ ID NO: 28085 - DNA, 15 bp, Homo sapiens
ggctggtctcacact

SEQ ID NO: 28086 - DNA, 15 bp, Homo sapiens
aggctggtctcacac

SEQ ID NO: 28087 - DNA, 15 bp, Homo sapiens
caggctggtctcaca

SEQ ID NO: 28088 - DNA, 15 bp, Homo sapiens
ccaggctggtctcac

SEQ ID NO: 28089 - DNA, 15 bp, Homo sapiens
gccatgttggccagg

SEQ ID NO: 28090 - DNA, 15 bp, Homo sapiens
cgccatgttggccag

SEQ ID NO: 28091 - DNA, 15 bp, Homo sapiens
tcgccatgttggcca

SEQ ID NO: 28092 - DNA, 15 bp, Homo sapiens
ttcgccatgttggcc

SEQ ID NO: 28093 - DNA, 15 bp, Homo sapiens
tttcgccatgttggc

SEQ ID NO: 28094 - DNA, 15 bp, Homo sapiens
gtttcgccatgttgg

SEQ ID NO: 28095 - DNA, 15 bp, Homo sapiens
ggtttcgccatgttg

SEQ ID NO: 28096 - DNA, 15 bp, Homo sapiens
aggtttcgccatgtt

SEQ ID NO: 28097 - DNA, 15 bp, Homo sapiens
caggtttcgccatgt

SEQ ID NO: 28098 - DNA, 15 bp, Homo sapiens
acaggtttcgccatg

SEQ ID NO: 28099 - DNA, 15 bp, Homo sapiens
gacaggtttcgccat

SEQ ID NO: 28100 - DNA, 15 bp, Homo sapiens
agacaggtttcgcca

SEQ ID NO: 28101 - DNA, 15 bp, Homo sapiens
gagacaggtttcgcc

SEQ ID NO: 28102 - DNA, 15 bp, Homo sapiens
agagacaggtttcgc

SEQ ID NO: 28103 - DNA, 15 bp, Homo sapiens
tagagacaggtttcg

SEQ ID NO: 28104 - DNA, 15 bp, Homo sapiens
gtagagacaggtttc

SEQ ID NO: 28105 - DNA, 15 bp, Homo sapiens
agtagagacaggttt

SEQ ID NO: 28106 - DNA, 15 bp, Homo sapiens
tagtagagacaggtt

SEQ ID NO: 28107 - DNA, 15 bp, Homo sapiens
ttagtagagacaggt

SEQ ID NO: 28108 - DNA, 15 bp, Homo sapiens
tttagtagagacagg

SEQ ID NO: 28109 - DNA, 15 bp, Homo sapiens
tttttagtagagaca

SEQ ID NO: 28110 - DNA, 15 bp, Homo sapiens
ttaatttttgtattt

SEQ ID NO: 28111 - DNA, 15 bp, Homo sapiens
gttaatttttgtatt

SEQ ID NO: 28112 - DNA, 15 bp, Homo sapiens
agttaatttttgtat

SEQ ID NO: 28113 - DNA, 15 bp, Homo sapiens
tagttaatttttgta

SEQ ID NO: 28114 - DNA, 15 bp, Homo sapiens
ctagttaatttttgt

SEQ ID NO: 28115 - DNA, 15 bp, Homo sapiens
cctagttaatttttg

SEQ ID NO: 28116 - DNA, 15 bp, Homo sapiens
gcctagttaattttt

SEQ ID NO: 28117 - DNA, 15 bp, Homo sapiens
cgcctagttaatttt

SEQ ID NO: 28118 - DNA, 15 bp, Homo sapiens
acgcctagttaattt

SEQ ID NO: 28119 - DNA, 15 bp, Homo sapiens
cacgcctagttaatt

SEQ ID NO: 28120 - DNA, 15 bp, Homo sapiens
ccacgcctagttaat

SEQ ID NO: 28121 - DNA, 15 bp, Homo sapiens
accacgcctagttaa

SEQ ID NO: 28122 - DNA, 15 bp, Homo sapiens
caccacgcctagtta

SEQ ID NO: 28123 - DNA, 15 bp, Homo sapiens
ccaccacgcctagtt

SEQ ID NO: 28124 - DNA, 15 bp, Homo sapiens
accaccacgcctagt

SEQ ID NO: 28125 - DNA, 15 bp, Homo sapiens
caccaccacgcctag

SEQ ID NO: 28126 - DNA, 15 bp, Homo sapiens
acaccaccacgccta

SEQ ID NO: 28127 - DNA, 15 bp, Homo sapiens
tacaccaccacgcct

SEQ ID NO: 28128 - DNA, 15 bp, Homo sapiens
gtacaccaccacgcc

SEQ ID NO: 28129 - DNA, 15 bp, Homo sapiens
cgtacaccaccacgc

SEQ ID NO: 28130 - DNA, 15 bp, Homo sapiens
gcgtacaccaccacg

SEQ ID NO: 28131 - DNA, 15 bp, Homo sapiens
ggcgtacaccaccac

SEQ ID NO: 28132 - DNA, 15 bp, Homo sapiens
aggcgtacaccacca

SEQ ID NO: 28133 - DNA, 15 bp, Homo sapiens
caggcgtacaccacc

SEQ ID NO: 28134 - DNA, 15 bp, Homo sapiens
acaggcgtacaccac

SEQ ID NO: 28135 - DNA, 15 bp, Homo sapiens
tacaggcgtacacca

SEQ ID NO: 28136 - DNA, 15 bp, Homo sapiens
ctacaggcgtacacc

SEQ ID NO: 28137 - DNA, 15 bp, Homo sapiens
actacaggcgtacac

SEQ ID NO: 28138 - DNA, 15 bp, Homo sapiens
gactacaggcgtaca

SEQ ID NO: 28139 - DNA, 15 bp, Homo sapiens
ggactacaggcgtac

SEQ ID NO: 28140 - DNA, 15 bp, Homo sapiens
gggactacaggcgta

SEQ ID NO: 28141 - DNA, 15 bp, Homo sapiens
tgggactacaggcgt

SEQ ID NO: 28142 - DNA, 15 bp, Homo sapiens
ttgattctcctgcct

SEQ ID NO: 28143 - DNA, 15 bp, Homo sapiens
gttgattctcctgcc

SEQ ID NO: 28144 - DNA, 15 bp, Homo sapiens
agttgattctcctgc

SEQ ID NO: 28145 - DNA, 15 bp, Homo sapiens
cagttgattctcctg

SEQ ID NO: 28146 - DNA, 15 bp, Homo sapiens
tcagttgattctcct

SEQ ID NO: 28147 - DNA, 15 bp, Homo sapiens
ttcagttgattctcc

SEQ ID NO: 28148 - DNA, 15 bp, Homo sapiens
gttcagttgattctc

SEQ ID NO: 28149 - DNA, 15 bp, Homo sapiens
ggttcagttgattct

SEQ ID NO: 28150 - DNA, 15 bp, Homo sapiens
tggttcagttgattc

SEQ ID NO: 28151 - DNA, 15 bp, Homo sapiens
ctggttcagttgatt

SEQ ID NO: 28152 - DNA, 15 bp, Homo sapiens
cctggttcagttgat

SEQ ID NO: 28153 - DNA, 15 bp, Homo sapiens
ccctggttcagttga

SEQ ID NO: 28154 - DNA, 15 bp, Homo sapiens
tccctggttcagttg

SEQ ID NO: 28155 - DNA, 15 bp, Homo sapiens
ctccctggttcagtt

SEQ ID NO: 28156 - DNA, 15 bp, Homo sapiens
cctccctggttcagt

SEQ ID NO: 28157 - DNA, 15 bp, Homo sapiens
acctccctggttcag

SEQ ID NO: 28158 - DNA, 15 bp, Homo sapiens
cacctccctggttca

SEQ ID NO: 28159 - DNA, 15 bp, Homo sapiens
ccacctccctggttc

SEQ ID NO: 28160 - DNA, 15 bp, Homo sapiens
tccacctccctggtt

SEQ ID NO: 28161 - DNA, 15 bp, Homo sapiens
ctccacctccctggt

SEQ ID NO: 28162 - DNA, 15 bp, Homo sapiens
cctccacctccctgg

SEQ ID NO: 28163 - DNA, 15 bp, Homo sapiens
acctccacctccctg

SEQ ID NO: 28164 - DNA, 15 bp, Homo sapiens
aacctccacctccct

SEQ ID NO: 28165 - DNA, 15 bp, Homo sapiens
caacctccacctccc

SEQ ID NO: 28166 - DNA, 15 bp, Homo sapiens
gcaacctccacctcc

SEQ ID NO: 28167 - DNA, 15 bp, Homo sapiens
tgcaacctccacctc

SEQ ID NO: 28168 - DNA, 15 bp, Homo sapiens
ctgcaacctccacct

SEQ ID NO: 28169 - DNA, 15 bp, Homo sapiens
actgcaacctccacc

SEQ ID NO: 28170 - DNA, 15 bp, Homo sapiens
cactgcaacctccac

SEQ ID NO: 28171 - DNA, 15 bp, Homo sapiens
acactgcaacctcca

SEQ ID NO: 28172 - DNA, 15 bp, Homo sapiens
cacactgcaacctcc

SEQ ID NO: 28173 - DNA, 15 bp, Homo sapiens
gcacactgcaacctc

SEQ ID NO: 28174 - DNA, 15 bp, Homo sapiens
ggcacactgcaacct

SEQ ID NO: 28175 - DNA, 15 bp, Homo sapiens
cggcacactgcaacc

SEQ ID NO: 28176 - DNA, 15 bp, Homo sapiens
tcggcacactgcaac

SEQ ID NO: 28177 - DNA, 15 bp, Homo sapiens
ctcggcacactgcaa

SEQ ID NO: 28178 - DNA, 15 bp, Homo sapiens
tctcggcacactgca

SEQ ID NO: 28179 - DNA, 15 bp, Homo sapiens
atctcggcacactgc

SEQ ID NO: 28180 - DNA, 15 bp, Homo sapiens
gatctcggcacactg

SEQ ID NO: 28181 - DNA, 15 bp, Homo sapiens
tgatctcggcacact

SEQ ID NO: 28182 - DNA, 15 bp, Homo sapiens
gtgatctcggcacac

SEQ ID NO: 28183 - DNA, 15 bp, Homo sapiens
cgtgatctcggcaca

SEQ ID NO: 28184 - DNA, 15 bp, Homo sapiens
gcgtgatctcggcac

SEQ ID NO: 28185 - DNA, 15 bp, Homo sapiens
ggcgtgatctcggca

SEQ ID NO: 28186 - DNA, 15 bp, Homo sapiens
tggcgtgatctcggc

SEQ ID NO: 28187 - DNA, 15 bp, Homo sapiens
agtggcgtgatctcg

SEQ ID NO: 28188 - DNA, 15 bp, Homo sapiens
cagtggcgtgatctc

SEQ ID NO: 28189 - DNA, 15 bp, Homo sapiens
agagtgcagtggcgt

SEQ ID NO: 28190 - DNA, 15 bp, Homo sapiens
tagagtgcagtggcg

SEQ ID NO: 28191 - DNA, 15 bp, Homo sapiens
ctagagtgcagtggc

SEQ ID NO: 28192 - DNA, 15 bp, Homo sapiens
gctagagtgcagtgg

SEQ ID NO: 28193 - DNA, 15 bp, Homo sapiens
ggctagagtgcagtg

SEQ ID NO: 28194 - DNA, 15 bp, Homo sapiens
aggctagagtgcagt

SEQ ID NO: 28195 - DNA, 15 bp, Homo sapiens
caggctagagtgcag

SEQ ID NO: 28196 - DNA, 15 bp, Homo sapiens
ccaggctagagtgca

SEQ ID NO: 28197 - DNA, 15 bp, Homo sapiens
gccaggctagagtgc

SEQ ID NO: 28198 - DNA, 15 bp, Homo sapiens
tgccaggctagagtg

SEQ ID NO: 28199 - DNA, 15 bp, Homo sapiens
ttgccaggctagagt

SEQ ID NO: 28200 - DNA, 15 bp, Homo sapiens
gttgccaggctagag

SEQ ID NO: 28201 - DNA, 15 bp, Homo sapiens
tgttgccaggctaga

SEQ ID NO: 28202 - DNA, 15 bp, Homo sapiens
ctgttgccaggctag

SEQ ID NO: 28203 - DNA, 15 bp, Homo sapiens
tctgttgccaggcta

SEQ ID NO: 28204 - DNA, 15 bp, Homo sapiens
ctctgttgccaggct

SEQ ID NO: 28205 - DNA, 15 bp, Homo sapiens
gctctgttgccaggc

SEQ ID NO: 28206 - DNA, 15 bp, Homo sapiens
tgctctgttgccagg

SEQ ID NO: 28207 - DNA, 15 bp, Homo sapiens
ttgctctgttgccag

SEQ ID NO: 28208 - DNA, 15 bp, Homo sapiens
cttgctctgttgcca

SEQ ID NO: 28209 - DNA, 15 bp, Homo sapiens
tcttgctctgttgcc

SEQ ID NO: 28210 - DNA, 15 bp, Homo sapiens
atcttgctctgttgc

SEQ ID NO: 28211 - DNA, 15 bp, Homo sapiens
aatcttgctctgttg

SEQ ID NO: 28212 - DNA, 15 bp, Homo sapiens
gaatcttgctctgtt

SEQ ID NO: 28213 - DNA, 15 bp, Homo sapiens
agaatcttgctctgt

SEQ ID NO: 28214 - DNA, 15 bp, Homo sapiens
cagaatcttgctctg

SEQ ID NO: 28215 - DNA, 15 bp, Homo sapiens
acagaatcttgctct

SEQ ID NO: 28216 - DNA, 15 bp, Homo sapiens
gacagaatcttgctc

SEQ ID NO: 28217 - DNA, 15 bp, Homo sapiens
agacagaatcttgct

SEQ ID NO: 28218 - DNA, 15 bp, Homo sapiens
gagacagaatcttgc

SEQ ID NO: 28219 - DNA, 15 bp, Homo sapiens
tgagacagaatcttg

SEQ ID NO: 28220 - DNA, 15 bp, Homo sapiens
ttgagacagaatctt

SEQ ID NO: 28221 - DNA, 15 bp, Homo sapiens
tttgagacagaatct

SEQ ID NO: 28222 - DNA, 15 bp, Homo sapiens
ttttgagacagaatc

SEQ ID NO: 28223 - DNA, 15 bp, Homo sapiens
tttttgagacagaat

SEQ ID NO: 28224 - DNA, 15 bp, Homo sapiens
ttttttgagacagaa

SEQ ID NO: 28225 - DNA, 15 bp, Homo sapiens
tatgttttttttttt

SEQ ID NO: 28226 - DNA, 15 bp, Homo sapiens
atatgtttttttttt

SEQ ID NO: 28227 - DNA, 15 bp, Homo sapiens
tatatgttttttttt

SEQ ID NO: 28228 - DNA, 15 bp, Homo sapiens
atatatgtttttttt

SEQ ID NO: 28229 - DNA, 15 bp, Homo sapiens
tatatatgttttttt

SEQ ID NO: 28230 - DNA, 15 bp, Homo sapiens
gtatatatgtttttt

SEQ ID NO: 28231 - DNA, 15 bp, Homo sapiens
tgtatatatgttttt

SEQ ID NO: 28232 - DNA, 15 bp, Homo sapiens
gtgtatatatgtttt

SEQ ID NO: 28233 - DNA, 15 bp, Homo sapiens
tgtgtatatatgttt

SEQ ID NO: 28234 - DNA, 15 bp, Homo sapiens
atgtgtatatatgtt

SEQ ID NO: 28235 - DNA, 15 bp, Homo sapiens
tatgtgtatatatgt

SEQ ID NO: 28236 - DNA, 15 bp, Homo sapiens
atatgtgtatatatg

SEQ ID NO: 28237 - DNA, 15 bp, Homo sapiens
tatatgtgtatatat

SEQ ID NO: 28238 - DNA, 15 bp, Homo sapiens
atatatgtgtatata

SEQ ID NO: 28239 - DNA, 15 bp, Homo sapiens
gatatatgtgtatat

SEQ ID NO: 28240 - DNA, 15 bp, Homo sapiens
ggatatatgtgtata

SEQ ID NO: 28241 - DNA, 15 bp, Homo sapiens
gggatatatgtgtat

SEQ ID NO: 28242 - DNA, 15 bp, Homo sapiens
tgggatatatgtgta

SEQ ID NO: 28243 - DNA, 15 bp, Homo sapiens
ttgggatatatgtgt

SEQ ID NO: 28244 - DNA, 15 bp, Homo sapiens
tttgggatatatgtg

SEQ ID NO: 28245 - DNA, 15 bp, Homo sapiens
ctttgggatatatgt

SEQ ID NO: 28246 - DNA, 15 bp, Homo sapiens
actttgggatatatg

SEQ ID NO: 28247 - DNA, 15 bp, Homo sapiens
cactttgggatatat

SEQ ID NO: 28248 - DNA, 15 bp, Homo sapiens
gcactttgggatata

SEQ ID NO: 28249 - DNA, 15 bp, Homo sapiens
agcactttgggatat

SEQ ID NO: 28250 - DNA, 15 bp, Homo sapiens
cagcactttgggata

SEQ ID NO: 28251 - DNA, 15 bp, Homo sapiens
ccagcactttgggat

SEQ ID NO: 28252 - DNA, 15 bp, Homo sapiens
atgtaatcccagcac

SEQ ID NO: 28253 - DNA, 15 bp, Homo sapiens
tatgtaatcccagca

SEQ ID NO: 28254 - DNA, 15 bp, Homo sapiens
atatgtaatcccagc

SEQ ID NO: 28255 - DNA, 15 bp, Homo sapiens
tatatgtaatcccag

SEQ ID NO: 28256 - DNA, 15 bp, Homo sapiens
atatatgtaatccca

SEQ ID NO: 28257 - DNA, 15 bp, Homo sapiens
tatatatgtaatccc

SEQ ID NO: 28258 - DNA, 15 bp, Homo sapiens
atatatatgtaatcc

SEQ ID NO: 28259 - DNA, 15 bp, Homo sapiens
tatatatatgtaatc

SEQ ID NO: 28260 - DNA, 15 bp, Homo sapiens
atatatatatgtaat

SEQ ID NO: 28261 - DNA, 15 bp, Homo sapiens
tatatatatatgtaa

SEQ ID NO: 28262 - DNA, 15 bp, Homo sapiens
atatatatatatgta

SEQ ID NO: 28263 - DNA, 15 bp, Homo sapiens
tatatatatatatgt

SEQ ID NO: 28264 - DNA, 15 bp, Homo sapiens
atatatatatatatg

SEQ ID NO: 28265 - DNA, 15 bp, Homo sapiens
tatatatatatatat

SEQ ID NO: 28266 - DNA, 15 bp, Homo sapiens
atatatatatatata

SEQ ID NO: 28267 - DNA, 15 bp, Homo sapiens
aatatatatatatat

SEQ ID NO: 28268 - DNA, 15 bp, Homo sapiens
taatatatatatata

SEQ ID NO: 28269 - DNA, 15 bp, Homo sapiens
ataatatatatatat

SEQ ID NO: 28270 - DNA, 15 bp, Homo sapiens
tataatatatatata

SEQ ID NO: 28271 - DNA, 15 bp, Homo sapiens
atataatatatatat

SEQ ID NO: 28272 - DNA, 15 bp, Homo sapiens
tatataatatatata

SEQ ID NO: 28273 - DNA, 15 bp, Homo sapiens
atatataatatatat

SEQ ID NO: 28274 - DNA, 15 bp, Homo sapiens
tatatataatatata

SEQ ID NO: 28275 - DNA, 15 bp, Homo sapiens
atatatataatatat

SEQ ID NO: 28276 - DNA, 15 bp, Homo sapiens
tatatatataatata

SEQ ID NO: 28277 - DNA, 15 bp, Homo sapiens
atatatatataatat

SEQ ID NO: 28278 - DNA, 15 bp, Homo sapiens
tatatatatataata

SEQ ID NO: 28279 - DNA, 15 bp, Homo sapiens
atatatatatataat

SEQ ID NO: 28280 - DNA, 15 bp, Homo sapiens
tatatatatatataa

SEQ ID NO: 28281 - DNA, 15 bp, Homo sapiens
catatatatatatat

SEQ ID NO: 28282 - DNA, 15 bp, Homo sapiens
acatatatatatata

SEQ ID NO: 28283 - DNA, 15 bp, Homo sapiens
taacatatatatata

SEQ ID NO: 28284 - DNA, 15 bp, Homo sapiens
ataacatatatatat

SEQ ID NO: 28285 - DNA, 15 bp, Homo sapiens
tataacatatatata

SEQ ID NO: 28286 - DNA, 15 bp, Homo sapiens
atataacatatatat

SEQ ID NO: 28287 - DNA, 15 bp, Homo sapiens
tatataacatatata

SEQ ID NO: 28288 - DNA, 15 bp, Homo sapiens
atatataacatatat

SEQ ID NO: 28289 - DNA, 15 bp, Homo sapiens
tatatataacatata

SEQ ID NO: 28290 - DNA, 15 bp, Homo sapiens
aacatatatataaca

SEQ ID NO: 28291 - DNA, 15 bp, Homo sapiens
taacatatatataac

SEQ ID NO: 28292 - DNA, 15 bp, Homo sapiens
ataacatatatataa

SEQ ID NO: 28293 - DNA, 15 bp, Homo sapiens
tatatatataacata

SEQ ID NO: 28294 - DNA, 15 bp, Homo sapiens
atatatatataacat

SEQ ID NO: 28295 - DNA, 15 bp, Homo sapiens
tatatatatataaca

SEQ ID NO: 28296 - DNA, 15 bp, Homo sapiens
ttatatatatataac

SEQ ID NO: 28297 - DNA, 15 bp, Homo sapiens
gttatatatatataa

SEQ ID NO: 28298 - DNA, 15 bp, Homo sapiens
tgttatatatatata

SEQ ID NO: 28299 - DNA, 15 bp, Homo sapiens
atgttatatatatat

SEQ ID NO: 28300 - DNA, 15 bp, Homo sapiens
tatgttatatatata

SEQ ID NO: 28301 - DNA, 15 bp, Homo sapiens
atatgttatatatat

SEQ ID NO: 28302 - DNA, 15 bp, Homo sapiens
tatatgttatatata

SEQ ID NO: 28303 - DNA, 15 bp, Homo sapiens
atatatgttatatat

SEQ ID NO: 28304 - DNA, 15 bp, Homo sapiens
tatatatgttatata

SEQ ID NO: 28305 - DNA, 15 bp, Homo sapiens
atatatatgttatat

SEQ ID NO: 28306 - DNA, 15 bp, Homo sapiens
tatatatatgttata

SEQ ID NO: 28307 - DNA, 15 bp, Homo sapiens
atatatatatgttat

SEQ ID NO: 28308 - DNA, 15 bp, Homo sapiens
catatatatatgtta

SEQ ID NO: 28309 - DNA, 15 bp, Homo sapiens
acatatatatatgtt

SEQ ID NO: 28310 - DNA, 15 bp, Homo sapiens
aacatatatatatgt

SEQ ID NO: 28311 - DNA, 15 bp, Homo sapiens
taacatatatatatg

SEQ ID NO: 28312 - DNA, 15 bp, Homo sapiens
attatatatatataa

SEQ ID NO: 28313 - DNA, 15 bp, Homo sapiens
tattatatatatata

SEQ ID NO: 28314 - DNA, 15 bp, Homo sapiens
atattatatatatat

SEQ ID NO: 28315 - DNA, 15 bp, Homo sapiens
tatattatatatata

SEQ ID NO: 28316 - DNA, 15 bp, Homo sapiens
atatattatatatat

SEQ ID NO: 28317 - DNA, 15 bp, Homo sapiens
tatatattatatata

SEQ ID NO: 28318 - DNA, 15 bp, Homo sapiens
atatatattatatat

SEQ ID NO: 28319 - DNA, 15 bp, Homo sapiens
tatatatattatata

SEQ ID NO: 28320 - DNA, 15 bp, Homo sapiens
atatatatattatat

SEQ ID NO: 28321 - DNA, 15 bp, Homo sapiens
catatatatattata

SEQ ID NO: 28322 - DNA, 15 bp, Homo sapiens
acatatatatattat

SEQ ID NO: 28323 - DNA, 15 bp, Homo sapiens
aacatatatatatta

SEQ ID NO: 28324 - DNA, 15 bp, Homo sapiens
taacatatatatatt

SEQ ID NO: 28325 - DNA, 15 bp, Homo sapiens
atatatatatataac

SEQ ID NO: 28326 - DNA, 15 bp, Homo sapiens
gtatatatatatata

SEQ ID NO: 28327 - DNA, 15 bp, Homo sapiens
tgtatatatatatat

SEQ ID NO: 28328 - DNA, 15 bp, Homo sapiens
gtgtatatatatata

SEQ ID NO: 28329 - DNA, 15 bp, Homo sapiens
tgtgtatatatatat

SEQ ID NO: 28330 - DNA, 15 bp, Homo sapiens
gtgtgtatatatata

SEQ ID NO: 28331 - DNA, 15 bp, Homo sapiens
tgtgtgtatatatat

SEQ ID NO: 28332 - DNA, 15 bp, Homo sapiens
gtgtgtgtatatata

SEQ ID NO: 28333 - DNA, 15 bp, Homo sapiens
tgtgtgtgtatatat

SEQ ID NO: 28334 - DNA, 15 bp, Homo sapiens
gtgtgtgtgtatata

SEQ ID NO: 28335 - DNA, 15 bp, Homo sapiens
tgtgtgtgtgtatat

SEQ ID NO: 28336 - DNA, 15 bp, Homo sapiens
gtgtgtgtgtgtata

SEQ ID NO: 28337 - DNA, 15 bp, Homo sapiens
tgtgtgtgtgtgtat

SEQ ID NO: 28338 - DNA, 15 bp, Homo sapiens
gtgtgtgtgtgtgta

SEQ ID NO: 28339 - DNA, 15 bp, Homo sapiens
tgtgtgtgtgtgtgt

SEQ ID NO: 28340 - DNA, 15 bp, Homo sapiens
atgtgtgtgtgtgtg

SEQ ID NO: 28341 - DNA, 15 bp, Homo sapiens
tatgtgtgtgtgtgt

SEQ ID NO: 28342 - DNA, 15 bp, Homo sapiens
atatgtgtgtgtgtg

SEQ ID NO: 28343 - DNA, 15 bp, Homo sapiens
tatatgtgtgtgtgt

SEQ ID NO: 28344 - DNA, 15 bp, Homo sapiens
atatatgtgtgtgtg

SEQ ID NO: 28345 - DNA, 15 bp, Homo sapiens
tatatatgtgtgtgt

SEQ ID NO: 28346 - DNA, 15 bp, Homo sapiens
atatatatgtgtgtg

SEQ ID NO: 28347 - DNA, 15 bp, Homo sapiens
catatatatgtgtgt

SEQ ID NO: 28348 - DNA, 15 bp, Homo sapiens
acatatatatgtgtg

SEQ ID NO: 28349 - DNA, 15 bp, Homo sapiens
tacatatatatgtgt

SEQ ID NO: 28350 - DNA, 15 bp, Homo sapiens
atacatatatatgtg

SEQ ID NO: 28351 - DNA, 15 bp, Homo sapiens
tatacatatatatgt

SEQ ID NO: 28352 - DNA, 15 bp, Homo sapiens
atatacatatatatg

SEQ ID NO: 28353 - DNA, 15 bp, Homo sapiens
tatatacatatatat

SEQ ID NO: 28354 - DNA, 15 bp, Homo sapiens
atatatacatatata

SEQ ID NO: 28355 - DNA, 15 bp, Homo sapiens
tatatatacatatat

SEQ ID NO: 28356 - DNA, 15 bp, Homo sapiens
atatatatacatata

SEQ ID NO: 28357 - DNA, 15 bp, Homo sapiens
tatatatatacatat

SEQ ID NO: 28358 - DNA, 15 bp, Homo sapiens
atatatatatacata

SEQ ID NO: 28359 - DNA, 15 bp, Homo sapiens
tatatatatatacat

SEQ ID NO: 28360 - DNA, 15 bp, Homo sapiens
gtatatatatataca

SEQ ID NO: 28361 - DNA, 15 bp, Homo sapiens
tgtatatatatatac

SEQ ID NO: 28362 - DNA, 15 bp, Homo sapiens
ttgtgtgtgtgtgtg

SEQ ID NO: 28363 - DNA, 15 bp, Homo sapiens
tttgtgtgtgtgtgt

SEQ ID NO: 28364 - DNA, 15 bp, Homo sapiens
atttgtgtgtgtgtg

SEQ ID NO: 28365 - DNA, 15 bp, Homo sapiens
aatttgtgtgtgtgt

SEQ ID NO: 28366 - DNA, 15 bp, Homo sapiens
taatttgtgtgtgtg

SEQ ID NO: 28367 - DNA, 15 bp, Homo sapiens
ctaatttgtgtgtgt

SEQ ID NO: 28368 - DNA, 15 bp, Homo sapiens
gctaatttgtgtgtg

SEQ ID NO: 28369 - DNA, 15 bp, Homo sapiens
ggctaatttgtgtgt

SEQ ID NO: 28370 - DNA, 15 bp, Homo sapiens
tggctaatttgtgtg

SEQ ID NO: 28371 - DNA, 15 bp, Homo sapiens
ctggctaatttgtgt

SEQ ID NO: 28372 - DNA, 15 bp, Homo sapiens
cctggctaatttgtg

SEQ ID NO: 28373 - DNA, 15 bp, Homo sapiens
gcctggctaatttgt

SEQ ID NO: 28374 - DNA, 15 bp, Homo sapiens
tgcctggctaatttg

SEQ ID NO: 28375 - DNA, 15 bp, Homo sapiens
tatgcctggctaatt

SEQ ID NO: 28376 - DNA, 15 bp, Homo sapiens
ctatgcctggctaat

SEQ ID NO: 28377 - DNA, 15 bp, Homo sapiens
actatgcctggctaa

SEQ ID NO: 28378 - DNA, 15 bp, Homo sapiens
aactatgcctggcta

SEQ ID NO: 28379 - DNA, 15 bp, Homo sapiens
caactatgcctggct

SEQ ID NO: 28380 - DNA, 15 bp, Homo sapiens
gcaactatgcctggc

SEQ ID NO: 28381 - DNA, 15 bp, Homo sapiens
tgcaactatgcctgg

SEQ ID NO: 28382 - DNA, 15 bp, Homo sapiens
gtgcaactatgcctg

SEQ ID NO: 28383 - DNA, 15 bp, Homo sapiens
tgtgcaactatgcct

SEQ ID NO: 28384 - DNA, 15 bp, Homo sapiens
gtgtgcaactatgcc

SEQ ID NO: 28385 - DNA, 15 bp, Homo sapiens
cgtgtgcaactatgc

SEQ ID NO: 28386 - DNA, 15 bp, Homo sapiens
gcgtgtgcaactatg

SEQ ID NO: 28387 - DNA, 15 bp, Homo sapiens
agcgtgtgcaactat

SEQ ID NO: 28388 - DNA, 15 bp, Homo sapiens
aagcgtgtgcaacta

SEQ ID NO: 28389 - DNA, 15 bp, Homo sapiens
caagcgtgtgcaact

SEQ ID NO: 28390 - DNA, 15 bp, Homo sapiens
acaagcgtgtgcaac

SEQ ID NO: 28391 - DNA, 15 bp, Homo sapiens
tacaagcgtgtgcaa

SEQ ID NO: 28392 - DNA, 15 bp, Homo sapiens
ctacaagcgtgtgca

SEQ ID NO: 28393 - DNA, 15 bp, Homo sapiens
tctacaagcgtgtgc

SEQ ID NO: 28394 - DNA, 15 bp, Homo sapiens
gtctacaagcgtgtg

SEQ ID NO: 28395 - DNA, 15 bp, Homo sapiens
ggtctacaagcgtgt

SEQ ID NO: 28396 - DNA, 15 bp, Homo sapiens
gggtctacaagcgtg

SEQ ID NO: 28397 - DNA, 15 bp, Homo sapiens
tgggtctacaagcgt

SEQ ID NO: 28398 - DNA, 15 bp, Homo sapiens
ctgggtctacaagcg

SEQ ID NO: 28399 - DNA, 15 bp, Homo sapiens
gctgggtctacaagc

SEQ ID NO: 28400 - DNA, 15 bp, Homo sapiens
agctgggtctacaag

SEQ ID NO: 28401 - DNA, 15 bp, Homo sapiens
tagctgggtctacaa

SEQ ID NO: 28402 - DNA, 15 bp, Homo sapiens
gtagctgggtctaca

SEQ ID NO: 28403 - DNA, 15 bp, Homo sapiens
agtagctgggtctac

SEQ ID NO: 28404 - DNA, 15 bp, Homo sapiens
gagtagctgggtcta

SEQ ID NO: 28405 - DNA, 15 bp, Homo sapiens
tgagtagctgggtct

SEQ ID NO: 28406 - DNA, 15 bp, Homo sapiens
ctgagtagctgggtc

SEQ ID NO: 28407 - DNA, 15 bp, Homo sapiens
cctgagtagctgggt

SEQ ID NO: 28408 - DNA, 15 bp, Homo sapiens
agattctcctgcctc

SEQ ID NO: 28409 - DNA, 15 bp, Homo sapiens
gagattctcctgcct

SEQ ID NO: 28410 - DNA, 15 bp, Homo sapiens
agagattctcctgcc

SEQ ID NO: 28411 - DNA, 15 bp, Homo sapiens
aagagattctcctgc

SEQ ID NO: 28412 - DNA, 15 bp, Homo sapiens
caagagattctcctg

SEQ ID NO: 28413 - DNA, 15 bp, Homo sapiens
tcaagagattctcct

SEQ ID NO: 28414 - DNA, 15 bp, Homo sapiens
ttcaagagattctcc

SEQ ID NO: 28415 - DNA, 15 bp, Homo sapiens
gttcaagagattctc

SEQ ID NO: 28416 - DNA, 15 bp, Homo sapiens
agttcaagagattct

SEQ ID NO: 28417 - DNA, 15 bp, Homo sapiens
aagttcaagagattc

SEQ ID NO: 28418 - DNA, 15 bp, Homo sapiens
taagttcaagagatt

SEQ ID NO: 28419 - DNA, 15 bp, Homo sapiens
ctaagttcaagagat

SEQ ID NO: 28420 - DNA, 15 bp, Homo sapiens
cctaagttcaagaga

SEQ ID NO: 28421 - DNA, 15 bp, Homo sapiens
tcctaagttcaagag

SEQ ID NO: 28422 - DNA, 15 bp, Homo sapiens
ctcctaagttcaaga

SEQ ID NO: 28423 - DNA, 15 bp, Homo sapiens
cctcctaagttcaag

SEQ ID NO: 28424 - DNA, 15 bp, Homo sapiens
gcctcctaagttcaa

SEQ ID NO: 28425 - DNA, 15 bp, Homo sapiens
cgcctcctaagttca

SEQ ID NO: 28426 - DNA, 15 bp, Homo sapiens
ccgcctcctaagttc

SEQ ID NO: 28427 - DNA, 15 bp, Homo sapiens
tccgcctcctaagtt

SEQ ID NO: 28428 - DNA, 15 bp, Homo sapiens
ctccgcctcctaagt

SEQ ID NO: 28429 - DNA, 15 bp, Homo sapiens
cctccgcctcctaag

SEQ ID NO: 28430 - DNA, 15 bp, Homo sapiens
acctccgcctcctaa

SEQ ID NO: 28431 - DNA, 15 bp, Homo sapiens
aacctccgcctccta

SEQ ID NO: 28432 - DNA, 15 bp, Homo sapiens
caacctccgcctcct

SEQ ID NO: 28433 - DNA, 15 bp, Homo sapiens
cacccaggctggagt

SEQ ID NO: 28434 - DNA, 15 bp, Homo sapiens
gtcacccaggctgga

SEQ ID NO: 28435 - DNA, 15 bp, Homo sapiens
tgtcacccaggctgg

SEQ ID NO: 28436 - DNA, 15 bp, Homo sapiens
ctgtcacccaggctg

SEQ ID NO: 28437 - DNA, 15 bp, Homo sapiens
tctgtcacccaggct

SEQ ID NO: 28438 - DNA, 15 bp, Homo sapiens
ctctgtcacccaggc

SEQ ID NO: 28439 - DNA, 15 bp, Homo sapiens
gctctgtcacccagg

SEQ ID NO: 28440 - DNA, 15 bp, Homo sapiens
tgctctgtcacccag

SEQ ID NO: 28441 - DNA, 15 bp, Homo sapiens
ctgctctgtcaccca

SEQ ID NO: 28442 - DNA, 15 bp, Homo sapiens
cctgctctgtcaccc

SEQ ID NO: 28443 - DNA, 15 bp, Homo sapiens
tcctgctctgtcacc

SEQ ID NO: 28444 - DNA, 15 bp, Homo sapiens
gtcctgctctgtcac

SEQ ID NO: 28445 - DNA, 15 bp, Homo sapiens
agtcctgctctgtca

SEQ ID NO: 28446 - DNA, 15 bp, Homo sapiens
gagtcctgctctgtc

SEQ ID NO: 28447 - DNA, 15 bp, Homo sapiens
agagtcctgctctgt

SEQ ID NO: 28448 - DNA, 15 bp, Homo sapiens
cagagtcctgctctg

SEQ ID NO: 28449 - DNA, 15 bp, Homo sapiens
acagagtcctgctct

SEQ ID NO: 28450 - DNA, 15 bp, Homo sapiens
tacagagtcctgctc

SEQ ID NO: 28451 - DNA, 15 bp, Homo sapiens
gtacagagtcctgct

SEQ ID NO: 28452 - DNA, 15 bp, Homo sapiens
tgtacagagtcctgc

SEQ ID NO: 28453 - DNA, 15 bp, Homo sapiens
gtgtacagagtcctg

SEQ ID NO: 28454 - DNA, 15 bp, Homo sapiens
ggtgtacagagtcct

SEQ ID NO: 28455 - DNA, 15 bp, Homo sapiens
gggtgtacagagtcc

SEQ ID NO: 28456 - DNA, 15 bp, Homo sapiens
ggggtgtacagagtc

SEQ ID NO: 28457 - DNA, 15 bp, Homo sapiens
gggggtgtacagagt

SEQ ID NO: 28458 - DNA, 15 bp, Homo sapiens
ggggggtgtacagag

SEQ ID NO: 28459 - DNA, 15 bp, Homo sapiens
tggggggtgtacaga

SEQ ID NO: 28460 - DNA, 15 bp, Homo sapiens
ttggggggtgtacag

SEQ ID NO: 28461 - DNA, 15 bp, Homo sapiens
tttggggggtgtaca

SEQ ID NO: 28462 - DNA, 15 bp, Homo sapiens
ttttggggggtgtac

SEQ ID NO: 28463 - DNA, 15 bp, Homo sapiens
gttttggggggtgta

SEQ ID NO: 28464 - DNA, 15 bp, Homo sapiens
tgttttggggggtgt

SEQ ID NO: 28465 - DNA, 15 bp, Homo sapiens
ttgttttggggggtg

SEQ ID NO: 28466 - DNA, 15 bp, Homo sapiens
tttgttttggggggt

SEQ ID NO: 28467 - DNA, 15 bp, Homo sapiens
ttttgttttgggggg

SEQ ID NO: 28468 - DNA, 15 bp, Homo sapiens
tttttgttttggggg

SEQ ID NO: 28469 - DNA, 15 bp, Homo sapiens
ttttttgttttgggg

SEQ ID NO: 28470 - DNA, 15 bp, Homo sapiens
tttttttgttttggg

SEQ ID NO: 28471 - DNA, 15 bp, Homo sapiens
ttttttttgttttgg

SEQ ID NO: 28472 - DNA, 15 bp, Homo sapiens
tttttttttgttttg

SEQ ID NO: 28473 - DNA, 15 bp, Homo sapiens
ttttttttttgtttt

SEQ ID NO: 28474 - DNA, 15 bp, Homo sapiens
aacttttttttttgt

SEQ ID NO: 28475 - DNA, 15 bp, Homo sapiens
taacttttttttttg

SEQ ID NO: 28476 - DNA, 15 bp, Homo sapiens
ataactttttttttt

SEQ ID NO: 28477 - DNA, 15 bp, Homo sapiens
gataacttttttttt

SEQ ID NO: 28478 - DNA, 15 bp, Homo sapiens
tgataactttttttt

SEQ ID NO: 28479 - DNA, 15 bp, Homo sapiens
ctgataacttttttt

SEQ ID NO: 28480 - DNA, 15 bp, Homo sapiens
tctgataactttttt

SEQ ID NO: 28481 - DNA, 15 bp, Homo sapiens
atctgataacttttt

SEQ ID NO: 28482 - DNA, 15 bp, Homo sapiens
catctgataactttt

SEQ ID NO: 28483 - DNA, 15 bp, Homo sapiens
acatctgataacttt

SEQ ID NO: 28484 - DNA, 15 bp, Homo sapiens
cacatctgataactt

SEQ ID NO: 28485 - DNA, 15 bp, Homo sapiens
tcacatctgataact

SEQ ID NO: 28486 - DNA, 15 bp, Homo sapiens
atcacatctgataac

SEQ ID NO: 28487 - DNA, 15 bp, Homo sapiens
aatcacatctgataa

SEQ ID NO: 28488 - DNA, 15 bp, Homo sapiens
caatcacatctgata

SEQ ID NO: 28489 - DNA, 15 bp, Homo sapiens
ccaatcacatctgat

SEQ ID NO: 28490 - DNA, 15 bp, Homo sapiens
tccaatcacatctga

SEQ ID NO: 28491 - DNA, 15 bp, Homo sapiens
ttccaatcacatctg

SEQ ID NO: 28492 - DNA, 15 bp, Homo sapiens
attccaatcacatct

SEQ ID NO: 28493 - DNA, 15 bp, Homo sapiens
cattccaatcacatc

SEQ ID NO: 28494 - DNA, 15 bp, Homo sapiens
acattccaatcacat

SEQ ID NO: 28495 - DNA, 15 bp, Homo sapiens
tacattccaatcaca

SEQ ID NO: 28496 - DNA, 15 bp, Homo sapiens
atacattccaatcac

SEQ ID NO: 28497 - DNA, 15 bp, Homo sapiens
tatacattccaatca

SEQ ID NO: 28498 - DNA, 15 bp, Homo sapiens
atatacattccaatc

SEQ ID NO: 28499 - DNA, 15 bp, Homo sapiens
gatatacattccaat

SEQ ID NO: 28500 - DNA, 15 bp, Homo sapiens
tgatatacattccaa

SEQ ID NO: 28501 - DNA, 15 bp, Homo sapiens
ttgatatacattcca

SEQ ID NO: 28502 - DNA, 15 bp, Homo sapiens
cttgatatacattcc

SEQ ID NO: 28503 - DNA, 15 bp, Homo sapiens
acttgatatacattc

SEQ ID NO: 28504 - DNA, 15 bp, Homo sapiens
tacttgatatacatt

SEQ ID NO: 28505 - DNA, 15 bp, Homo sapiens
atacttgatatacat

SEQ ID NO: 28506 - DNA, 15 bp, Homo sapiens
gatacttgatataca

SEQ ID NO: 28507 - DNA, 15 bp, Homo sapiens
tgatacttgatatac

SEQ ID NO: 28508 - DNA, 15 bp, Homo sapiens
ctgatacttgatata

SEQ ID NO: 28509 - DNA, 15 bp, Homo sapiens
gctgatacttgatat

SEQ ID NO: 28510 - DNA, 15 bp, Homo sapiens
agctgatacttgata

SEQ ID NO: 28511 - DNA, 15 bp, Homo sapiens
aagctgatacttgat

SEQ ID NO: 28512 - DNA, 15 bp, Homo sapiens
gaagctgatacttga

SEQ ID NO: 28513 - DNA, 15 bp, Homo sapiens
tgaagctgatacttg

SEQ ID NO: 28514 - DNA, 15 bp, Homo sapiens
ttgaagctgatactt

SEQ ID NO: 28515 - DNA, 15 bp, Homo sapiens
tttgaagctgatact

SEQ ID NO: 28516 - DNA, 15 bp, Homo sapiens
ttttgaagctgatac

SEQ ID NO: 28517 - DNA, 15 bp, Homo sapiens
attttgaagctgata

SEQ ID NO: 28518 - DNA, 15 bp, Homo sapiens
tattttgaagctgat

SEQ ID NO: 28519 - DNA, 15 bp, Homo sapiens
atattttgaagctga

SEQ ID NO: 28520 - DNA, 15 bp, Homo sapiens
catattttgaagctg

SEQ ID NO: 28521 - DNA, 15 bp, Homo sapiens
gcatattttgaagct

SEQ ID NO: 28522 - DNA, 15 bp, Homo sapiens
agcatattttgaagc

SEQ ID NO: 28523 - DNA, 15 bp, Homo sapiens
tagcatattttgaag

SEQ ID NO: 28524 - DNA, 15 bp, Homo sapiens
atagcatattttgaa

SEQ ID NO: 28525 - DNA, 15 bp, Homo sapiens
tatagcatattttga

SEQ ID NO: 28526 - DNA, 15 bp, Homo sapiens
atatagcatattttg

SEQ ID NO: 28527 - DNA, 15 bp, Homo sapiens
aatatagcatatttt

SEQ ID NO: 28528 - DNA, 15 bp, Homo sapiens
taatatagcatattt

SEQ ID NO: 28529 - DNA, 15 bp, Homo sapiens
ttaatatagcatatt

SEQ ID NO: 28530 - DNA, 15 bp, Homo sapiens
attaatatagcatat

SEQ ID NO: 28531 - DNA, 15 bp, Homo sapiens
tattaatatagcata

SEQ ID NO: 28532 - DNA, 15 bp, Homo sapiens
gtattaatatagcat

SEQ ID NO: 28533 - DNA, 15 bp, Homo sapiens
agtattaatatagca

SEQ ID NO: 28534 - DNA, 15 bp, Homo sapiens
aagtattaatatagc

SEQ ID NO: 28535 - DNA, 15 bp, Homo sapiens
gaagtattaatatag

SEQ ID NO: 28536 - DNA, 15 bp, Homo sapiens
tgaagtattaatata

SEQ ID NO: 28537 - DNA, 15 bp, Homo sapiens
ttgaagtattaatat

SEQ ID NO: 28538 - DNA, 15 bp, Homo sapiens
tttgaagtattaata

SEQ ID NO: 28539 - DNA, 15 bp, Homo sapiens
ttttgaagtattaat

SEQ ID NO: 28540 - DNA, 15 bp, Homo sapiens
tttttgaagtattaa

SEQ ID NO: 28541 - DNA, 15 bp, Homo sapiens
atttttgaagtatta

SEQ ID NO: 28542 - DNA, 15 bp, Homo sapiens
aatttttgaagtatt

SEQ ID NO: 28543 - DNA, 15 bp, Homo sapiens
taatttttgaagtat

SEQ ID NO: 28544 - DNA, 15 bp, Homo sapiens
gtaatttttgaagta

SEQ ID NO: 28545 - DNA, 15 bp, Homo sapiens
tgtaatttttgaagt

SEQ ID NO: 28546 - DNA, 15 bp, Homo sapiens
gtgtaatttttgaag

SEQ ID NO: 28547 - DNA, 15 bp, Homo sapiens
tgtgtaatttttgaa

SEQ ID NO: 28548 - DNA, 15 bp, Homo sapiens
ttgtgtaatttttga

SEQ ID NO: 28549 - DNA, 15 bp, Homo sapiens
tttgtgtaatttttg

SEQ ID NO: 28550 - DNA, 15 bp, Homo sapiens
atttgtgtaattttt

SEQ ID NO: 28551 - DNA, 15 bp, Homo sapiens
tatttgtgtaatttt

SEQ ID NO: 28552 - DNA, 15 bp, Homo sapiens
ttatttgtgtaattt

SEQ ID NO: 28553 - DNA, 15 bp, Homo sapiens
attatttgtgtaatt

SEQ ID NO: 28554 - DNA, 15 bp, Homo sapiens
tattatttgtgtaat

SEQ ID NO: 28555 - DNA, 15 bp, Homo sapiens
gtattatttgtgtaa

SEQ ID NO: 28556 - DNA, 15 bp, Homo sapiens
tgtattatttgtgta

SEQ ID NO: 28557 - DNA, 15 bp, Homo sapiens
atgtattatttgtgt

SEQ ID NO: 28558 - DNA, 15 bp, Homo sapiens
tatgtattatttgtg

SEQ ID NO: 28559 - DNA, 15 bp, Homo sapiens
ttatgtattatttgt

SEQ ID NO: 28560 - DNA, 15 bp, Homo sapiens
attatgtattatttg

SEQ ID NO: 28561 - DNA, 15 bp, Homo sapiens
gattatgtattattt

SEQ ID NO: 28562 - DNA, 15 bp, Homo sapiens
tgattatgtattatt

SEQ ID NO: 28563 - DNA, 15 bp, Homo sapiens
ctgattatgtattat

SEQ ID NO: 28564 - DNA, 15 bp, Homo sapiens
cctgattatgtatta

SEQ ID NO: 28565 - DNA, 15 bp, Homo sapiens
acctgattatgtatt

SEQ ID NO: 28566 - DNA, 15 bp, Homo sapiens
aacctgattatgtat

SEQ ID NO: 28567 - DNA, 15 bp, Homo sapiens
aaacctgattatgta

SEQ ID NO: 28568 - DNA, 15 bp, Homo sapiens
caaacctgattatgt

SEQ ID NO: 28569 - DNA, 15 bp, Homo sapiens
tcaaacctgattatg

SEQ ID NO: 28570 - DNA, 15 bp, Homo sapiens
ttcaaacctgattat

SEQ ID NO: 28571 - DNA, 15 bp, Homo sapiens
tttcaaacctgatta

SEQ ID NO: 28572 - DNA, 15 bp, Homo sapiens
ttttcaaacctgatt

SEQ ID NO: 28573 - DNA, 15 bp, Homo sapiens
tttttcaaacctgat

SEQ ID NO: 28574 - DNA, 15 bp, Homo sapiens
atttttcaaacctga

SEQ ID NO: 28575 - DNA, 15 bp, Homo sapiens
aatttttcaaacctg

SEQ ID NO: 28576 - DNA, 15 bp, Homo sapiens
aaatttttcaaacct

SEQ ID NO: 28577 - DNA, 15 bp, Homo sapiens
taaatttttcaaacc

SEQ ID NO: 28578 - DNA, 15 bp, Homo sapiens
ttaaatttttcaaac

SEQ ID NO: 28579 - DNA, 15 bp, Homo sapiens
cttaaatttttcaaa

SEQ ID NO: 28580 - DNA, 15 bp, Homo sapiens
tcttaaatttttcaa

SEQ ID NO: 28581 - DNA, 15 bp, Homo sapiens
gtcttaaatttttca

SEQ ID NO: 28582 - DNA, 15 bp, Homo sapiens
tgtcttaaatttttc

SEQ ID NO: 28583 - DNA, 15 bp, Homo sapiens
ttgtcttaaattttt

SEQ ID NO: 28584 - DNA, 15 bp, Homo sapiens
gttgtcttaaatttt

SEQ ID NO: 28585 - DNA, 15 bp, Homo sapiens
tgttgtcttaaattt

SEQ ID NO: 28586 - DNA, 15 bp, Homo sapiens
ctgttgtcttaaatt

SEQ ID NO: 28587 - DNA, 15 bp, Homo sapiens
tctgttgtcttaaat

SEQ ID NO: 28588 - DNA, 15 bp, Homo sapiens
ttctgttgtcttaaa

SEQ ID NO: 28589 - DNA, 15 bp, Homo sapiens
tttctgttgtcttaa

SEQ ID NO: 28590 - DNA, 15 bp, Homo sapiens
ttttctgttgtctta

SEQ ID NO: 28591 - DNA, 15 bp, Homo sapiens
tttttctgttgtctt

SEQ ID NO: 28592 - DNA, 15 bp, Homo sapiens
ttttttctgttgtct

SEQ ID NO: 28593 - DNA, 15 bp, Homo sapiens
tttttttctgttgtc

SEQ ID NO: 28594 - DNA, 15 bp, Homo sapiens
ttttttttctgttgt

SEQ ID NO: 28595 - DNA, 15 bp, Homo sapiens
tttttttttctgttg

SEQ ID NO: 28596 - DNA, 15 bp, Homo sapiens
atttttttttctgtt

SEQ ID NO: 28597 - DNA, 15 bp, Homo sapiens
aatttttttttctgt

SEQ ID NO: 28598 - DNA, 15 bp, Homo sapiens
gaatttttttttctg

SEQ ID NO: 28599 - DNA, 15 bp, Homo sapiens
tgaatttttttttct

SEQ ID NO: 28600 - DNA, 15 bp, Homo sapiens
ttgaatttttttttc

SEQ ID NO: 28601 - DNA, 15 bp, Homo sapiens
tttgaattttttttt

SEQ ID NO: 28602 - DNA, 15 bp, Homo sapiens
atttgaatttttttt

SEQ ID NO: 28603 - DNA, 15 bp, Homo sapiens
gatttgaattttttt

SEQ ID NO: 28604 - DNA, 15 bp, Homo sapiens
tgatttgaatttttt

SEQ ID NO: 28605 - DNA, 15 bp, Homo sapiens
gtgatttgaattttt

SEQ ID NO: 28606 - DNA, 15 bp, Homo sapiens
tgtgatttgaatttt

SEQ ID NO: 28607 - DNA, 15 bp, Homo sapiens
gtgtgatttgaattt

SEQ ID NO: 28608 - DNA, 15 bp, Homo sapiens
tgtgtgatttgaatt

SEQ ID NO: 28609 - DNA, 15 bp, Homo sapiens
atgtgtgatttgaat

SEQ ID NO: 28610 - DNA, 15 bp, Homo sapiens
tatgtgtgatttgaa

SEQ ID NO: 28611 - DNA, 15 bp, Homo sapiens
atatgtgtgatttga

SEQ ID NO: 28612 - DNA, 15 bp, Homo sapiens
gatatgtgtgatttg

SEQ ID NO: 28613 - DNA, 15 bp, Homo sapiens
ggatatgtgtgattt

SEQ ID NO: 28614 - DNA, 15 bp, Homo sapiens
gggatatgtgtgatt

SEQ ID NO: 28615 - DNA, 15 bp, Homo sapiens
tgggatatgtgtgat

SEQ ID NO: 28616 - DNA, 15 bp, Homo sapiens
gtgggatatgtgtga

SEQ ID NO: 28617 - DNA, 15 bp, Homo sapiens
tgtgggatatgtgtg

SEQ ID NO: 28618 - DNA, 15 bp, Homo sapiens
gtgtgggatatgtgt

SEQ ID NO: 28619 - DNA, 15 bp, Homo sapiens
tgtgtgggatatgtg

SEQ ID NO: 28620 - DNA, 15 bp, Homo sapiens
atgtgtgggatatgt

SEQ ID NO: 28621 - DNA, 15 bp, Homo sapiens
aatgtgtgggatatg

SEQ ID NO: 28622 - DNA, 15 bp, Homo sapiens
aaatgtgtgggatat

SEQ ID NO: 28623 - DNA, 15 bp, Homo sapiens
aaaatgtgtgggata

SEQ ID NO: 28624 - DNA, 15 bp, Homo sapiens
taaaatgtgtgggat

SEQ ID NO: 28625 - DNA, 15 bp, Homo sapiens
ataaaatgtgtggga

SEQ ID NO: 28626 - DNA, 15 bp, Homo sapiens
aataaaatgtgtggg

SEQ ID NO: 28627 - DNA, 15 bp, Homo sapiens
taataaaatgtgtgg

SEQ ID NO: 28628 - DNA, 15 bp, Homo sapiens
ataataaaatgtgtg

SEQ ID NO: 28629 - DNA, 15 bp, Homo sapiens
aataataaaatgtgt

SEQ ID NO: 28630 - DNA, 15 bp, Homo sapiens
taataataaaatgtg

SEQ ID NO: 28631 - DNA, 15 bp, Homo sapiens
gtaataataaaatgt

SEQ ID NO: 28632 - DNA, 15 bp, Homo sapiens
agtaataataaaatg

SEQ ID NO: 28633 - DNA, 15 bp, Homo sapiens
tagtaataataaaat

SEQ ID NO: 28634 - DNA, 15 bp, Homo sapiens
gtagtaataataaaa

SEQ ID NO: 28635 - DNA, 15 bp, Homo sapiens
agtagtaataataaa

SEQ ID NO: 28636 - DNA, 15 bp, Homo sapiens
tagtagtaataataa

SEQ ID NO: 28637 - DNA, 15 bp, Homo sapiens
gtagtagtaataata

SEQ ID NO: 28638 - DNA, 15 bp, Homo sapiens
agtagtagtaataat

SEQ ID NO: 28639 - DNA, 15 bp, Homo sapiens
tagtagtagtaataa

SEQ ID NO: 28640 - DNA, 15 bp, Homo sapiens
atagtagtagtaata

SEQ ID NO: 28641 - DNA, 15 bp, Homo sapiens
aatagtagtagtaat

SEQ ID NO: 28642 - DNA, 15 bp, Homo sapiens
taatagtagtagtaa

SEQ ID NO: 28643 - DNA, 15 bp, Homo sapiens
ataatagtagtagta

SEQ ID NO: 28644 - DNA, 15 bp, Homo sapiens
aataatagtagtagt

SEQ ID NO: 28645 - DNA, 15 bp, Homo sapiens
aaataatagtagtag

SEQ ID NO: 28646 - DNA, 15 bp, Homo sapiens
aaaataatagtagta

SEQ ID NO: 28647 - DNA, 15 bp, Homo sapiens
caaaataatagtagt

SEQ ID NO: 28648 - DNA, 15 bp, Homo sapiens
acaaaataatagtag

SEQ ID NO: 28649 - DNA, 15 bp, Homo sapiens
tacaaaataatagta

SEQ ID NO: 28650 - DNA, 15 bp, Homo sapiens
ctacaaaataatagt

SEQ ID NO: 28651 - DNA, 15 bp, Homo sapiens
tctacaaaataatag

SEQ ID NO: 28652 - DNA, 15 bp, Homo sapiens
ctctacaaaataata

SEQ ID NO: 28653 - DNA, 15 bp, Homo sapiens
tctctacaaaataat

SEQ ID NO: 28654 - DNA, 15 bp, Homo sapiens
gtctctacaaaataa

SEQ ID NO: 28655 - DNA, 15 bp, Homo sapiens
agtctctacaaaata

SEQ ID NO: 28656 - DNA, 15 bp, Homo sapiens
cagtctctacaaaat

SEQ ID NO: 28657 - DNA, 15 bp, Homo sapiens
ccagtctctacaaaa

SEQ ID NO: 28658 - DNA, 15 bp, Homo sapiens
cccagtctctacaaa

SEQ ID NO: 28659 - DNA, 15 bp, Homo sapiens
acccagtctctacaa

SEQ ID NO: 28660 - DNA, 15 bp, Homo sapiens
gacccagtctctaca

SEQ ID NO: 28661 - DNA, 15 bp, Homo sapiens
agacccagtctctac

SEQ ID NO: 28662 - DNA, 15 bp, Homo sapiens
gagacccagtctcta

SEQ ID NO: 28663 - DNA, 15 bp, Homo sapiens
tgagacccagtctct

SEQ ID NO: 28664 - DNA, 15 bp, Homo sapiens
gtgagacccagtctc

SEQ ID NO: 28665 - DNA, 15 bp, Homo sapiens
agtgagacccagtct

SEQ ID NO: 28666 - DNA, 15 bp, Homo sapiens
gagtgagacccagtc

SEQ ID NO: 28667 - DNA, 15 bp, Homo sapiens
agagtgagacccagt

SEQ ID NO: 28668 - DNA, 15 bp, Homo sapiens
cagagtgagacccag

SEQ ID NO: 28669 - DNA, 15 bp, Homo sapiens
acagagtgagaccca

SEQ ID NO: 28670 - DNA, 15 bp, Homo sapiens
aacagagtgagaccc

SEQ ID NO: 28671 - DNA, 15 bp, Homo sapiens
caacagagtgagacc

SEQ ID NO: 28672 - DNA, 15 bp, Homo sapiens
gcaacagagtgagac

SEQ ID NO: 28673 - DNA, 15 bp, Homo sapiens
agcaacagagtgaga

SEQ ID NO: 28674 - DNA, 15 bp, Homo sapiens
aagcaacagagtgag

SEQ ID NO: 28675 - DNA, 15 bp, Homo sapiens
taagcaacagagtga

SEQ ID NO: 28676 - DNA, 15 bp, Homo sapiens
ataagcaacagagtg

SEQ ID NO: 28677 - DNA, 15 bp, Homo sapiens
cataagcaacagagt

SEQ ID NO: 28678 - DNA, 15 bp, Homo sapiens
gcataagcaacagag

SEQ ID NO: 28679 - DNA, 15 bp, Homo sapiens
agcataagcaacaga

SEQ ID NO: 28680 - DNA, 15 bp, Homo sapiens
cagcataagcaacag

SEQ ID NO: 28681 - DNA, 15 bp, Homo sapiens
ccagcataagcaaca

SEQ ID NO: 28682 - DNA, 15 bp, Homo sapiens
accagcataagcaac

SEQ ID NO: 28683 - DNA, 15 bp, Homo sapiens
gaccagcataagcaa

SEQ ID NO: 28684 - DNA, 15 bp, Homo sapiens
agaccagcataagca

SEQ ID NO: 28685 - DNA, 15 bp, Homo sapiens
aagaccagcataagc

SEQ ID NO: 28686 - DNA, 15 bp, Homo sapiens
caagaccagcataag

SEQ ID NO: 28687 - DNA, 15 bp, Homo sapiens
tcaagaccagcataa

SEQ ID NO: 28688 - DNA, 15 bp, Homo sapiens
ttcaagaccagcata

SEQ ID NO: 28689 - DNA, 15 bp, Homo sapiens
gttcaagaccagcat

SEQ ID NO: 28690 - DNA, 15 bp, Homo sapiens
agttcaagaccagca

SEQ ID NO: 28691 - DNA, 15 bp, Homo sapiens
gcttgaggccaggag

SEQ ID NO: 28692 - DNA, 15 bp, Homo sapiens
tgcttgaggccagga

SEQ ID NO: 28693 - DNA, 15 bp, Homo sapiens
ctgcttgaggccagg

SEQ ID NO: 28694 - DNA, 15 bp, Homo sapiens
actgcttgaggccag

SEQ ID NO: 28695 - DNA, 15 bp, Homo sapiens
gactgcttgaggcca

SEQ ID NO: 28696 - DNA, 15 bp, Homo sapiens
ggactgcttgaggcc

SEQ ID NO: 28697 - DNA, 15 bp, Homo sapiens
aggactgcttgaggc

SEQ ID NO: 28698 - DNA, 15 bp, Homo sapiens
caggactgcttgagg

SEQ ID NO: 28699 - DNA, 15 bp, Homo sapiens
gcaggactgcttgag

SEQ ID NO: 28700 - DNA, 15 bp, Homo sapiens
agcaggactgcttga

SEQ ID NO: 28701 - DNA, 15 bp, Homo sapiens
gagcaggactgcttg

SEQ ID NO: 28702 - DNA, 15 bp, Homo sapiens
ggagcaggactgctt

SEQ ID NO: 28703 - DNA, 15 bp, Homo sapiens
tggagcaggactgct

SEQ ID NO: 28704 - DNA, 15 bp, Homo sapiens
ctggagcaggactgc

SEQ ID NO: 28705 - DNA, 15 bp, Homo sapiens
gctggagcaggactg

SEQ ID NO: 28706 - DNA, 15 bp, Homo sapiens
ggctggagcaggact

SEQ ID NO: 28707 - DNA, 15 bp, Homo sapiens
aggctggagcaggac

SEQ ID NO: 28708 - DNA, 15 bp, Homo sapiens
gaggctggagcagga

SEQ ID NO: 28709 - DNA, 15 bp, Homo sapiens
ggaggctggagcagg

SEQ ID NO: 28710 - DNA, 15 bp, Homo sapiens
gggaggctggagcag

SEQ ID NO: 28711 - DNA, 15 bp, Homo sapiens
tgggaggctggagca

SEQ ID NO: 28712 - DNA, 15 bp, Homo sapiens
ttgggaggctggagc

SEQ ID NO: 28713 - DNA, 15 bp, Homo sapiens
tttgggaggctggag

SEQ ID NO: 28714 - DNA, 15 bp, Homo sapiens
ctttgggaggctgga

SEQ ID NO: 28715 - DNA, 15 bp, Homo sapiens
actttgggaggctgg

SEQ ID NO: 28716 - DNA, 15 bp, Homo sapiens
ataatcccagcactt

SEQ ID NO: 28717 - DNA, 15 bp, Homo sapiens
tataatcccagcact

SEQ ID NO: 28718 - DNA, 15 bp, Homo sapiens
ctataatcccagcac

SEQ ID NO: 28719 - DNA, 15 bp, Homo sapiens
cctataatcccagca

SEQ ID NO: 28720 - DNA, 15 bp, Homo sapiens
tgcctataatcccag

SEQ ID NO: 28721 - DNA, 15 bp, Homo sapiens
agctcatgcctataa

SEQ ID NO: 28722 - DNA, 15 bp, Homo sapiens
tagctcatgcctata

SEQ ID NO: 28723 - DNA, 15 bp, Homo sapiens
gtagctcatgcctat

SEQ ID NO: 28724 - DNA, 15 bp, Homo sapiens
ggtagctcatgccta

SEQ ID NO: 28725 - DNA, 15 bp, Homo sapiens
cggtagctcatgcct

SEQ ID NO: 28726 - DNA, 15 bp, Homo sapiens
gcggtagctcatgcc

SEQ ID NO: 28727 - DNA, 15 bp, Homo sapiens
agcggtagctcatgc

SEQ ID NO: 28728 - DNA, 15 bp, Homo sapiens
gagcggtagctcatg

SEQ ID NO: 28729 - DNA, 15 bp, Homo sapiens
ggagcggtagctcat

SEQ ID NO: 28730 - DNA, 15 bp, Homo sapiens
gggagcggtagctca

SEQ ID NO: 28731 - DNA, 15 bp, Homo sapiens
tgggagcggtagctc

SEQ ID NO: 28732 - DNA, 15 bp, Homo sapiens
ctgggagcggtagct

SEQ ID NO: 28733 - DNA, 15 bp, Homo sapiens
gctgggagcggtagc

SEQ ID NO: 28734 - DNA, 15 bp, Homo sapiens
ggctgggagcggtag

SEQ ID NO: 28735 - DNA, 15 bp, Homo sapiens
gggctgggagcggta

SEQ ID NO: 28736 - DNA, 15 bp, Homo sapiens
ggggctgggagcggt

SEQ ID NO: 28737 - DNA, 15 bp, Homo sapiens
tggggctgggagcgg

SEQ ID NO: 28738 - DNA, 15 bp, Homo sapiens
ctggggctgggagcg

SEQ ID NO: 28739 - DNA, 15 bp, Homo sapiens
tctggggctgggagc

SEQ ID NO: 28740 - DNA, 15 bp, Homo sapiens
gtctggggctgggag

SEQ ID NO: 28741 - DNA, 15 bp, Homo sapiens
tgtctggggctggga

SEQ ID NO: 28742 - DNA, 15 bp, Homo sapiens
atgtctggggctggg

SEQ ID NO: 28743 - DNA, 15 bp, Homo sapiens
aatgtctggggctgg

SEQ ID NO: 28744 - DNA, 15 bp, Homo sapiens
aaatgtctggggctg

SEQ ID NO: 28745 - DNA, 15 bp, Homo sapiens
aaaatgtctggggct

SEQ ID NO: 28746 - DNA, 15 bp, Homo sapiens
taaaatgtctggggc

SEQ ID NO: 28747 - DNA, 15 bp, Homo sapiens
ctaaaatgtctgggg

SEQ ID NO: 28748 - DNA, 15 bp, Homo sapiens
actaaaatgtctggg

SEQ ID NO: 28749 - DNA, 15 bp, Homo sapiens
cactaaaatgtctgg

SEQ ID NO: 28750 - DNA, 15 bp, Homo sapiens
acactaaaatgtctg

SEQ ID NO: 28751 - DNA, 15 bp, Homo sapiens
cacactaaaatgtct

SEQ ID NO: 28752 - DNA, 15 bp, Homo sapiens
acacactaaaatgtc

SEQ ID NO: 28753 - DNA, 15 bp, Homo sapiens
tacacactaaaatgt

SEQ ID NO: 28754 - DNA, 15 bp, Homo sapiens
ttacacactaaaatg

SEQ ID NO: 28755 - DNA, 15 bp, Homo sapiens
tttacacactaaaat

SEQ ID NO: 28756 - DNA, 15 bp, Homo sapiens
atttacacactaaaa

SEQ ID NO: 28757 - DNA, 15 bp, Homo sapiens
aatttacacactaaa

SEQ ID NO: 28758 - DNA, 15 bp, Homo sapiens
gaatttacacactaa

SEQ ID NO: 28759 - DNA, 15 bp, Homo sapiens
ggaatttacacacta

SEQ ID NO: 28760 - DNA, 15 bp, Homo sapiens
aggaatttacacact

SEQ ID NO: 28761 - DNA, 15 bp, Homo sapiens
caggaatttacacac

SEQ ID NO: 28762 - DNA, 15 bp, Homo sapiens
ccaggaatttacaca

SEQ ID NO: 28763 - DNA, 15 bp, Homo sapiens
cccaggaatttacac

SEQ ID NO: 28764 - DNA, 15 bp, Homo sapiens
gcccaggaatttaca

SEQ ID NO: 28765 - DNA, 15 bp, Homo sapiens
tgcccaggaatttac

SEQ ID NO: 28766 - DNA, 15 bp, Homo sapiens
atgcccaggaattta

SEQ ID NO: 28767 - DNA, 15 bp, Homo sapiens
aatgcccaggaattt

SEQ ID NO: 28768 - DNA, 15 bp, Homo sapiens
aaatgcccaggaatt

SEQ ID NO: 28769 - DNA, 15 bp, Homo sapiens
aaaatgcccaggaat

SEQ ID NO: 28770 - DNA, 15 bp, Homo sapiens
aaaaatgcccaggaa

SEQ ID NO: 28771 - DNA, 15 bp, Homo sapiens
aaaaaatgcccagga

SEQ ID NO: 28772 - DNA, 15 bp, Homo sapiens
gaaaaaatgcccagg

SEQ ID NO: 28773 - DNA, 15 bp, Homo sapiens
ggaaaaaatgcccag

SEQ ID NO: 28774 - DNA, 15 bp, Homo sapiens
tggaaaaaatgccca

SEQ ID NO: 28775 - DNA, 15 bp, Homo sapiens
ctggaaaaaatgccc

SEQ ID NO: 28776 - DNA, 15 bp, Homo sapiens
cctggaaaaaatgcc

SEQ ID NO: 28777 - DNA, 15 bp, Homo sapiens
gcctggaaaaaatgc

SEQ ID NO: 28778 - DNA, 15 bp, Homo sapiens
tgcctggaaaaaatg

SEQ ID NO: 28779 - DNA, 15 bp, Homo sapiens
atgcctggaaaaaat

SEQ ID NO: 28780 - DNA, 15 bp, Homo sapiens
gatgcctggaaaaaa

SEQ ID NO: 28781 - DNA, 15 bp, Homo sapiens
tgatgcctggaaaaa

SEQ ID NO: 28782 - DNA, 15 bp, Homo sapiens
atgatgcctggaaaa

SEQ ID NO: 28783 - DNA, 15 bp, Homo sapiens
tatgatgcctggaaa

SEQ ID NO: 28784 - DNA, 15 bp, Homo sapiens
gtatgatgcctggaa

SEQ ID NO: 28785 - DNA, 15 bp, Homo sapiens
tgtatgatgcctgga

SEQ ID NO: 28786 - DNA, 15 bp, Homo sapiens
atgtatgatgcctgg

SEQ ID NO: 28787 - DNA, 15 bp, Homo sapiens
catgtatgatgcctg

SEQ ID NO: 28788 - DNA, 15 bp, Homo sapiens
acatgtatgatgcct

SEQ ID NO: 28789 - DNA, 15 bp, Homo sapiens
aacatgtatgatgcc

SEQ ID NO: 28790 - DNA, 15 bp, Homo sapiens
taacatgtatgatgc

SEQ ID NO: 28791 - DNA, 15 bp, Homo sapiens
ctaacatgtatgatg

SEQ ID NO: 28792 - DNA, 15 bp, Homo sapiens
gctaacatgtatgat

SEQ ID NO: 28793 - DNA, 15 bp, Homo sapiens
agctaacatgtatga

SEQ ID NO: 28794 - DNA, 15 bp, Homo sapiens
cagctaacatgtatg

SEQ ID NO: 28795 - DNA, 15 bp, Homo sapiens
tcagctaacatgtat

SEQ ID NO: 28796 - DNA, 15 bp, Homo sapiens
gtcagctaacatgta

SEQ ID NO: 28797 - DNA, 15 bp, Homo sapiens
agtcagctaacatgt

SEQ ID NO: 28798 - DNA, 15 bp, Homo sapiens
cagtcagctaacatg

SEQ ID NO: 28799 - DNA, 15 bp, Homo sapiens
tcagtcagctaacat

SEQ ID NO: 28800 - DNA, 15 bp, Homo sapiens
atcagtcagctaaca

SEQ ID NO: 28801 - DNA, 15 bp, Homo sapiens
catcagtcagctaac

SEQ ID NO: 28802 - DNA, 15 bp, Homo sapiens
tcatcagtcagctaa

SEQ ID NO: 28803 - DNA, 15 bp, Homo sapiens
atcatcagtcagcta

SEQ ID NO: 28804 - DNA, 15 bp, Homo sapiens
catcatcagtcagct

SEQ ID NO: 28805 - DNA, 15 bp, Homo sapiens
ccatcatcagtcagc

SEQ ID NO: 28806 - DNA, 15 bp, Homo sapiens
accatcatcagtcag

SEQ ID NO: 28807 - DNA, 15 bp, Homo sapiens
gaccatcatcagtca

SEQ ID NO: 28808 - DNA, 15 bp, Homo sapiens
tgaccatcatcagtc

SEQ ID NO: 28809 - DNA, 15 bp, Homo sapiens
ttgaccatcatcagt

SEQ ID NO: 28810 - DNA, 15 bp, Homo sapiens
attgaccatcatcag

SEQ ID NO: 28811 - DNA, 15 bp, Homo sapiens
aattgaccatcatca

SEQ ID NO: 28812 - DNA, 15 bp, Homo sapiens
aaattgaccatcatc

SEQ ID NO: 28813 - DNA, 15 bp, Homo sapiens
taaattgaccatcat

SEQ ID NO: 28814 - DNA, 15 bp, Homo sapiens
ataaattgaccatca

SEQ ID NO: 28815 - DNA, 15 bp, Homo sapiens
aataaattgaccatc

SEQ ID NO: 28816 - DNA, 15 bp, Homo sapiens
aaataaattgaccat

SEQ ID NO: 28817 - DNA, 15 bp, Homo sapiens
aaaataaattgacca

SEQ ID NO: 28818 - DNA, 15 bp, Homo sapiens
caaaataaattgacc

SEQ ID NO: 28819 - DNA, 15 bp, Homo sapiens
acaaaataaattgac

SEQ ID NO: 28820 - DNA, 15 bp, Homo sapiens
gacaaaataaattga

SEQ ID NO: 28821 - DNA, 15 bp, Homo sapiens
ggacaaaataaattg

SEQ ID NO: 28822 - DNA, 15 bp, Homo sapiens
tggacaaaataaatt

SEQ ID NO: 28823 - DNA, 15 bp, Homo sapiens
atggacaaaataaat

SEQ ID NO: 28824 - DNA, 15 bp, Homo sapiens
catggacaaaataaa

SEQ ID NO: 28825 - DNA, 15 bp, Homo sapiens
ccatggacaaaataa

SEQ ID NO: 28826 - DNA, 15 bp, Homo sapiens
accatggacaaaata

SEQ ID NO: 28827 - DNA, 15 bp, Homo sapiens
caccatggacaaaat

SEQ ID NO: 28828 - DNA, 15 bp, Homo sapiens
acaccatggacaaaa

SEQ ID NO: 28829 - DNA, 15 bp, Homo sapiens
gacaccatggacaaa

SEQ ID NO: 28830 - DNA, 15 bp, Homo sapiens
tgacaccatggacaa

SEQ ID NO: 28831 - DNA, 15 bp, Homo sapiens
ttgacaccatggaca

SEQ ID NO: 28832 - DNA, 15 bp, Homo sapiens
cttgacaccatggac

SEQ ID NO: 28833 - DNA, 15 bp, Homo sapiens
acttgacaccatgga

SEQ ID NO: 28834 - DNA, 15 bp, Homo sapiens
aacttgacaccatgg

SEQ ID NO: 28835 - DNA, 15 bp, Homo sapiens
aaacttgacaccatg

SEQ ID NO: 28836 - DNA, 15 bp, Homo sapiens
gaaacttgacaccat

SEQ ID NO: 28837 - DNA, 15 bp, Homo sapiens
agaaacttgacacca

SEQ ID NO: 28838 - DNA, 15 bp, Homo sapiens
gagaaacttgacacc

SEQ ID NO: 28839 - DNA, 15 bp, Homo sapiens
agagaaacttgacac

SEQ ID NO: 28840 - DNA, 15 bp, Homo sapiens
aagagaaacttgaca

SEQ ID NO: 28841 - DNA, 15 bp, Homo sapiens
gaagagaaacttgac

SEQ ID NO: 28842 - DNA, 15 bp, Homo sapiens
tgaagagaaacttga

SEQ ID NO: 28843 - DNA, 15 bp, Homo sapiens
ctgaagagaaacttg

SEQ ID NO: 28844 - DNA, 15 bp, Homo sapiens
cctgaagagaaactt

SEQ ID NO: 28845 - DNA, 15 bp, Homo sapiens
tcctgaagagaaact

SEQ ID NO: 28846 - DNA, 15 bp, Homo sapiens
ctcctgaagagaaac

SEQ ID NO: 28847 - DNA, 15 bp, Homo sapiens
cctcctgaagagaaa

SEQ ID NO: 28848 - DNA, 15 bp, Homo sapiens
tcctcctgaagagaa

SEQ ID NO: 28849 - DNA, 15 bp, Homo sapiens
ttcctcctgaagaga

SEQ ID NO: 28850 - DNA, 15 bp, Homo sapiens
tttcctcctgaagag

SEQ ID NO: 28851 - DNA, 15 bp, Homo sapiens
ttttcctcctgaaga

SEQ ID NO: 28852 - DNA, 15 bp, Homo sapiens
cttttcctcctgaag

SEQ ID NO: 28853 - DNA, 15 bp, Homo sapiens
gcttttcctcctgaa

SEQ ID NO: 28854 - DNA, 15 bp, Homo sapiens
tgcttttcctcctga

SEQ ID NO: 28855 - DNA, 15 bp, Homo sapiens
gtgcttttcctcctg

SEQ ID NO: 28856 - DNA, 15 bp, Homo sapiens
tgtgcttttcctcct

SEQ ID NO: 28857 - DNA, 15 bp, Homo sapiens
ctgtgcttttcctcc

SEQ ID NO: 28858 - DNA, 15 bp, Homo sapiens
tctgtgcttttcctc

SEQ ID NO: 28859 - DNA, 15 bp, Homo sapiens
ttctgtgcttttcct

SEQ ID NO: 28860 - DNA, 15 bp, Homo sapiens
gttctgtgcttttcc

SEQ ID NO: 28861 - DNA, 15 bp, Homo sapiens
agttctgtgcttttc

SEQ ID NO: 28862 - DNA, 15 bp, Homo sapiens
cagttctgtgctttt

SEQ ID NO: 28863 - DNA, 15 bp, Homo sapiens
ccagttctgtgcttt

SEQ ID NO: 28864 - DNA, 15 bp, Homo sapiens
gccagttctgtgctt

SEQ ID NO: 28865 - DNA, 15 bp, Homo sapiens
ggccagttctgtgct

SEQ ID NO: 28866 - DNA, 15 bp, Homo sapiens
tggccagttctgtgc

SEQ ID NO: 28867 - DNA, 15 bp, Homo sapiens
ttggccagttctgtg

SEQ ID NO: 28868 - DNA, 15 bp, Homo sapiens
gttggccagttctgt

SEQ ID NO: 28869 - DNA, 15 bp, Homo sapiens
tgttggccagttctg

SEQ ID NO: 28870 - DNA, 15 bp, Homo sapiens
ttgttggccagttct

SEQ ID NO: 28871 - DNA, 15 bp, Homo sapiens
attgttggccagttc

SEQ ID NO: 28872 - DNA, 15 bp, Homo sapiens
aattgttggccagtt

SEQ ID NO: 28873 - DNA, 15 bp, Homo sapiens
caattgttggccagt

SEQ ID NO: 28874 - DNA, 15 bp, Homo sapiens
gcaattgttggccag

SEQ ID NO: 28875 - DNA, 15 bp, Homo sapiens
agcaattgttggcca

SEQ ID NO: 28876 - DNA, 15 bp, Homo sapiens
aagcaattgttggcc

SEQ ID NO: 28877 - DNA, 15 bp, Homo sapiens
caagcaattgttggc

SEQ ID NO: 28878 - DNA, 15 bp, Homo sapiens
tcaagcaattgttgg

SEQ ID NO: 28879 - DNA, 15 bp, Homo sapiens
gtcaagcaattgttg

SEQ ID NO: 28880 - DNA, 15 bp, Homo sapiens
agtcaagcaattgtt

SEQ ID NO: 28881 - DNA, 15 bp, Homo sapiens
cagtcaagcaattgt

SEQ ID NO: 28882 - DNA, 15 bp, Homo sapiens
acagtcaagcaattg

SEQ ID NO: 28883 - DNA, 15 bp, Homo sapiens
aacagtcaagcaatt

SEQ ID NO: 28884 - DNA, 15 bp, Homo sapiens
gaacagtcaagcaat

SEQ ID NO: 28885 - DNA, 15 bp, Homo sapiens
agaacagtcaagcaa

SEQ ID NO: 28886 - DNA, 15 bp, Homo sapiens
aagaacagtcaagca

SEQ ID NO: 28887 - DNA, 15 bp, Homo sapiens
aaagaacagtcaagc

SEQ ID NO: 28888 - DNA, 15 bp, Homo sapiens
taaagaacagtcaag

SEQ ID NO: 28889 - DNA, 15 bp, Homo sapiens
gtaaagaacagtcaa

SEQ ID NO: 28890 - DNA, 15 bp, Homo sapiens
ggtaaagaacagtca

SEQ ID NO: 28891 - DNA, 15 bp, Homo sapiens
tggtaaagaacagtc

SEQ ID NO: 28892 - DNA, 15 bp, Homo sapiens
atggtaaagaacagt

SEQ ID NO: 28893 - DNA, 15 bp, Homo sapiens
tatggtaaagaacag

SEQ ID NO: 28894 - DNA, 15 bp, Homo sapiens
gtatggtaaagaaca

SEQ ID NO: 28895 - DNA, 15 bp, Homo sapiens
agtatggtaaagaac

SEQ ID NO: 28896 - DNA, 15 bp, Homo sapiens
cagtatggtaaagaa

SEQ ID NO: 28897 - DNA, 15 bp, Homo sapiens
acagtatggtaaaga

SEQ ID NO: 28898 - DNA, 15 bp, Homo sapiens
aacagtatggtaaag

SEQ ID NO: 28899 - DNA, 15 bp, Homo sapiens
aaacagtatggtaaa

SEQ ID NO: 28900 - DNA, 15 bp, Homo sapiens
taaacagtatggtaa

SEQ ID NO: 28901 - DNA, 15 bp, Homo sapiens
ctaaacagtatggta

SEQ ID NO: 28902 - DNA, 15 bp, Homo sapiens
gctaaacagtatggt

SEQ ID NO: 28903 - DNA, 15 bp, Homo sapiens
tgctaaacagtatgg

SEQ ID NO: 28904 - DNA, 15 bp, Homo sapiens
ctgctaaacagtatg

SEQ ID NO: 28905 - DNA, 15 bp, Homo sapiens
cctgctaaacagtat

SEQ ID NO: 28906 - DNA, 15 bp, Homo sapiens
tcctgctaaacagta

SEQ ID NO: 28907 - DNA, 15 bp, Homo sapiens
ttcctgctaaacagt

SEQ ID NO: 28908 - DNA, 15 bp, Homo sapiens
tttcctgctaaacag

SEQ ID NO: 28909 - DNA, 15 bp, Homo sapiens
gtttcctgctaaaca

SEQ ID NO: 28910 - DNA, 15 bp, Homo sapiens
ggtttcctgctaaac

SEQ ID NO: 28911 - DNA, 15 bp, Homo sapiens
tggtttcctgctaaa

SEQ ID NO: 28912 - DNA, 15 bp, Homo sapiens
ctggtttcctgctaa

SEQ ID NO: 28913 - DNA, 15 bp, Homo sapiens
actggtttcctgcta

SEQ ID NO: 28914 - DNA, 15 bp, Homo sapiens
gactggtttcctgct

SEQ ID NO: 28915 - DNA, 15 bp, Homo sapiens
agactggtttcctgc

SEQ ID NO: 28916 - DNA, 15 bp, Homo sapiens
gagactggtttcctg

SEQ ID NO: 28917 - DNA, 15 bp, Homo sapiens
tgagactggtttcct

SEQ ID NO: 28918 - DNA, 15 bp, Homo sapiens
ctgagactggtttcc

SEQ ID NO: 28919 - DNA, 15 bp, Homo sapiens
actgagactggtttc

SEQ ID NO: 28920 - DNA, 15 bp, Homo sapiens
cactgagactggttt

SEQ ID NO: 28921 - DNA, 15 bp, Homo sapiens
acactgagactggtt

SEQ ID NO: 28922 - DNA, 15 bp, Homo sapiens
gacactgagactggt

SEQ ID NO: 28923 - DNA, 15 bp, Homo sapiens
ggacactgagactgg

SEQ ID NO: 28924 - DNA, 15 bp, Homo sapiens
tggacactgagactg

SEQ ID NO: 28925 - DNA, 15 bp, Homo sapiens
ttggacactgagact

SEQ ID NO: 28926 - DNA, 15 bp, Homo sapiens
gttggacactgagac

SEQ ID NO: 28927 - DNA, 15 bp, Homo sapiens
agttggacactgaga

SEQ ID NO: 28928 - DNA, 15 bp, Homo sapiens
gagttggacactgag

SEQ ID NO: 28929 - DNA, 15 bp, Homo sapiens
agagttggacactga

SEQ ID NO: 28930 - DNA, 15 bp, Homo sapiens
gagagttggacactg

SEQ ID NO: 28931 - DNA, 15 bp, Homo sapiens
agagagttggacact

SEQ ID NO: 28932 - DNA, 15 bp, Homo sapiens
tagagagttggacac

SEQ ID NO: 28933 - DNA, 15 bp, Homo sapiens
ttagagagttggaca

SEQ ID NO: 28934 - DNA, 15 bp, Homo sapiens
gttagagagttggac

SEQ ID NO: 28935 - DNA, 15 bp, Homo sapiens
ggttagagagttgga

SEQ ID NO: 28936 - DNA, 15 bp, Homo sapiens
aggttagagagttgg

SEQ ID NO: 28937 - DNA, 15 bp, Homo sapiens
aaggttagagagttg

SEQ ID NO: 28938 - DNA, 15 bp, Homo sapiens
caaggttagagagtt

SEQ ID NO: 28939 - DNA, 15 bp, Homo sapiens
ccaaggttagagagt

SEQ ID NO: 28940 - DNA, 15 bp, Homo sapiens
tccaaggttagagag

SEQ ID NO: 28941 - DNA, 15 bp, Homo sapiens
ttccaaggttagaga

SEQ ID NO: 28942 - DNA, 15 bp, Homo sapiens
gttccaaggttagag

SEQ ID NO: 28943 - DNA, 15 bp, Homo sapiens
agttccaaggttaga

SEQ ID NO: 28944 - DNA, 15 bp, Homo sapiens
cagttccaaggttag

SEQ ID NO: 28945 - DNA, 15 bp, Homo sapiens
acagttccaaggtta

SEQ ID NO: 28946 - DNA, 15 bp, Homo sapiens
cacagttccaaggtt

SEQ ID NO: 28947 - DNA, 15 bp, Homo sapiens
tcacagttccaaggt

SEQ ID NO: 28948 - DNA, 15 bp, Homo sapiens
ctcacagttccaagg

SEQ ID NO: 28949 - DNA, 15 bp, Homo sapiens
tctcacagttccaag

SEQ ID NO: 28950 - DNA, 15 bp, Homo sapiens
ttctcacagttccaa

SEQ ID NO: 28951 - DNA, 15 bp, Homo sapiens
gttctcacagttcca

SEQ ID NO: 28952 - DNA, 15 bp, Homo sapiens
agttctcacagttcc

SEQ ID NO: 28953 - DNA, 15 bp, Homo sapiens
gagttctcacagttc

SEQ ID NO: 28954 - DNA, 15 bp, Homo sapiens
agagttctcacagtt

SEQ ID NO: 28955 - DNA, 15 bp, Homo sapiens
cagagttctcacagt

SEQ ID NO: 28956 - DNA, 15 bp, Homo sapiens
tcagagttctcacag

SEQ ID NO: 28957 - DNA, 15 bp, Homo sapiens
ctcagagttctcaca

SEQ ID NO: 28958 - DNA, 15 bp, Homo sapiens
cctcagagttctcac

SEQ ID NO: 28959 - DNA, 15 bp, Homo sapiens
tcctcagagttctca

SEQ ID NO: 28960 - DNA, 15 bp, Homo sapiens
gtcctcagagttctc

SEQ ID NO: 28961 - DNA, 15 bp, Homo sapiens
tgtcctcagagttct

SEQ ID NO: 28962 - DNA, 15 bp, Homo sapiens
ttgtcctcagagttc

SEQ ID NO: 28963 - DNA, 15 bp, Homo sapiens
tttgtcctcagagtt

SEQ ID NO: 28964 - DNA, 15 bp, Homo sapiens
ctttgtcctcagagt

SEQ ID NO: 28965 - DNA, 15 bp, Homo sapiens
gctttgtcctcagag

SEQ ID NO: 28966 - DNA, 15 bp, Homo sapiens
tgctttgtcctcaga

SEQ ID NO: 28967 - DNA, 15 bp, Homo sapiens
ctgctttgtcctcag

SEQ ID NO: 28968 - DNA, 15 bp, Homo sapiens
gctgctttgtcctca

SEQ ID NO: 28969 - DNA, 15 bp, Homo sapiens
cgctgctttgtcctc

SEQ ID NO: 28970 - DNA, 15 bp, Homo sapiens
ccgctgctttgtcct

SEQ ID NO: 28971 - DNA, 15 bp, Homo sapiens
tccgctgctttgtcc

SEQ ID NO: 28972 - DNA, 15 bp, Homo sapiens
atccgctgctttgtc

SEQ ID NO: 28973 - DNA, 15 bp, Homo sapiens
tatccgctgctttgt

SEQ ID NO: 28974 - DNA, 15 bp, Homo sapiens
gtatccgctgctttg

SEQ ID NO: 28975 - DNA, 15 bp, Homo sapiens
tgtatccgctgcttt

SEQ ID NO: 28976 - DNA, 15 bp, Homo sapiens
ttgtatccgctgctt

SEQ ID NO: 28977 - DNA, 15 bp, Homo sapiens
gttgtatccgctgct

SEQ ID NO: 28978 - DNA, 15 bp, Homo sapiens
ggttgtatccgctgc

SEQ ID NO: 28979 - DNA, 15 bp, Homo sapiens
aggttgtatccgctg

SEQ ID NO: 28980 - DNA, 15 bp, Homo sapiens
gaggttgtatccgct

SEQ ID NO: 28981 - DNA, 15 bp, Homo sapiens
tgaggttgtatccgc

SEQ ID NO: 28982 - DNA, 15 bp, Homo sapiens
ttgaggttgtatccg

SEQ ID NO: 28983 - DNA, 15 bp, Homo sapiens
tttgaggttgtatcc

SEQ ID NO: 28984 - DNA, 15 bp, Homo sapiens
ttttgaggttgtatc

SEQ ID NO: 28985 - DNA, 15 bp, Homo sapiens
cttttgaggttgtat

SEQ ID NO: 28986 - DNA, 15 bp, Homo sapiens
tcttttgaggttgta

SEQ ID NO: 28987 - DNA, 15 bp, Homo sapiens
gtcttttgaggttgt

SEQ ID NO: 28988 - DNA, 15 bp, Homo sapiens
cgtcttttgaggttg

SEQ ID NO: 28989 - DNA, 15 bp, Homo sapiens
acgtcttttgaggtt

SEQ ID NO: 28990 - DNA, 15 bp, Homo sapiens
gacgtcttttgaggt

SEQ ID NO: 28991 - DNA, 15 bp, Homo sapiens
agacgtcttttgagg

SEQ ID NO: 28992 - DNA, 15 bp, Homo sapiens
cagacgtcttttgag

SEQ ID NO: 28993 - DNA, 15 bp, Homo sapiens
acagacgtcttttga

SEQ ID NO: 28994 - DNA, 15 bp, Homo sapiens
gacagacgtcttttg

SEQ ID NO: 28995 - DNA, 15 bp, Homo sapiens
agacagacgtctttt

SEQ ID NO: 28996 - DNA, 15 bp, Homo sapiens
tagacagacgtcttt

SEQ ID NO: 28997 - DNA, 15 bp, Homo sapiens
gtagacagacgtctt

SEQ ID NO: 28998 - DNA, 15 bp, Homo sapiens
tgtagacagacgtct

SEQ ID NO: 28999 - DNA, 15 bp, Homo sapiens
atgtagacagacgtc

SEQ ID NO: 29000 - DNA, 15 bp, Homo sapiens
aatgtagacagacgt

SEQ ID NO: 29001 - DNA, 15 bp, Homo sapiens
caatgtagacagacg

SEQ ID NO: 29002 - DNA, 15 bp, Homo sapiens
tcaatgtagacagac

SEQ ID NO: 29003 - DNA, 15 bp, Homo sapiens
ttcaatgtagacaga

SEQ ID NO: 29004 - DNA, 15 bp, Homo sapiens
attcaatgtagacag

SEQ ID NO: 29005 - DNA, 15 bp, Homo sapiens
aattcaatgtagaca

SEQ ID NO: 29006 - DNA, 15 bp, Homo sapiens
caattcaatgtagac

SEQ ID NO: 29007 - DNA, 15 bp, Homo sapiens
ccaattcaatgtaga

SEQ ID NO: 29008 - DNA, 15 bp, Homo sapiens
cccaattcaatgtag

SEQ ID NO: 29009 - DNA, 15 bp, Homo sapiens
acccaattcaatgta

SEQ ID NO: 29010 - DNA, 15 bp, Homo sapiens
tacccaattcaatgt

SEQ ID NO: 29011 - DNA, 15 bp, Homo sapiens
ttacccaattcaatg

SEQ ID NO: 29012 - DNA, 15 bp, Homo sapiens
cttacccaattcaat

SEQ ID NO: 29013 - DNA, 15 bp, Homo sapiens
ccttacccaattcaa

SEQ ID NO: 29014 - DNA, 15 bp, Homo sapiens
cccttacccaattca

SEQ ID NO: 29015 - DNA, 15 bp, Homo sapiens
acccttacccaattc

SEQ ID NO: 29016 - DNA, 15 bp, Homo sapiens
gacccttacccaatt

SEQ ID NO: 29017 - DNA, 15 bp, Homo sapiens
agacccttacccaat

SEQ ID NO: 29018 - DNA, 15 bp, Homo sapiens
gagacccttacccaa

SEQ ID NO: 29019 - DNA, 15 bp, Homo sapiens
tgagacccttaccca

SEQ ID NO: 29020 - DNA, 15 bp, Homo sapiens
ctgagacccttaccc

SEQ ID NO: 29021 - DNA, 15 bp, Homo sapiens
cctgagacccttacc

SEQ ID NO: 29022 - DNA, 15 bp, Homo sapiens
acctgagacccttac

SEQ ID NO: 29023 - DNA, 15 bp, Homo sapiens
aacctgagaccctta

SEQ ID NO: 29024 - DNA, 15 bp, Homo sapiens
aaacctgagaccctt

SEQ ID NO: 29025 - DNA, 15 bp, Homo sapiens
aaaacctgagaccct

SEQ ID NO: 29026 - DNA, 15 bp, Homo sapiens
aaaaacctgagaccc

SEQ ID NO: 29027 - DNA, 15 bp, Homo sapiens
aaaaaacctgagacc

SEQ ID NO: 29028 - DNA, 15 bp, Homo sapiens
taaaaaacctgagac

SEQ ID NO: 29029 - DNA, 15 bp, Homo sapiens
ttaaaaaacctgaga

SEQ ID NO: 29030 - DNA, 15 bp, Homo sapiens
cttaaaaaacctgag

SEQ ID NO: 29031 - DNA, 15 bp, Homo sapiens
acttaaaaaacctga

SEQ ID NO: 29032 - DNA, 15 bp, Homo sapiens
tacttaaaaaacctg

SEQ ID NO: 29033 - DNA, 15 bp, Homo sapiens
atacttaaaaaacct

SEQ ID NO: 29034 - DNA, 15 bp, Homo sapiens
aatacttaaaaaacc

SEQ ID NO: 29035 - DNA, 15 bp, Homo sapiens
aaatacttaaaaaac

SEQ ID NO: 29036 - DNA, 15 bp, Homo sapiens
taaatacttaaaaaa

SEQ ID NO: 29037 - DNA, 15 bp, Homo sapiens
ttaaatacttaaaaa

SEQ ID NO: 29038 - DNA, 15 bp, Homo sapiens
attaaatacttaaaa

SEQ ID NO: 29039 - DNA, 15 bp, Homo sapiens
tattaaatacttaaa

SEQ ID NO: 29040 - DNA, 15 bp, Homo sapiens
ttattaaatacttaa

SEQ ID NO: 29041 - DNA, 15 bp, Homo sapiens
attattaaatactta

SEQ ID NO: 29042 - DNA, 15 bp, Homo sapiens
tattattaaatactt

SEQ ID NO: 29043 - DNA, 15 bp, Homo sapiens
ttattattaaatact

SEQ ID NO: 29044 - DNA, 15 bp, Homo sapiens
attattattaaatac

SEQ ID NO: 29045 - DNA, 15 bp, Homo sapiens
aattattattaaata

SEQ ID NO: 29046 - DNA, 15 bp, Homo sapiens
caattattattaaat

SEQ ID NO: 29047 - DNA, 15 bp, Homo sapiens
gcaattattattaaa

SEQ ID NO: 29048 - DNA, 15 bp, Homo sapiens
agcaattattattaa

SEQ ID NO: 29049 - DNA, 15 bp, Homo sapiens
cagcaattattatta

SEQ ID NO: 29050 - DNA, 15 bp, Homo sapiens
ccagcaattattatt

SEQ ID NO: 29051 - DNA, 15 bp, Homo sapiens
tccagcaattattat

SEQ ID NO: 29052 - DNA, 15 bp, Homo sapiens
atccagcaattatta

SEQ ID NO: 29053 - DNA, 15 bp, Homo sapiens
aatccagcaattatt

SEQ ID NO: 29054 - DNA, 15 bp, Homo sapiens
gaatccagcaattat

SEQ ID NO: 29055 - DNA, 15 bp, Homo sapiens
ggaatccagcaatta

SEQ ID NO: 29056 - DNA, 15 bp, Homo sapiens
aggaatccagcaatt

SEQ ID NO: 29057 - DNA, 15 bp, Homo sapiens
aaggaatccagcaat

SEQ ID NO: 29058 - DNA, 15 bp, Homo sapiens
taaggaatccagcaa

SEQ ID NO: 29059 - DNA, 15 bp, Homo sapiens
ataaggaatccagca

SEQ ID NO: 29060 - DNA, 15 bp, Homo sapiens
gataaggaatccagc

SEQ ID NO: 29061 - DNA, 15 bp, Homo sapiens
agataaggaatccag

SEQ ID NO: 29062 - DNA, 15 bp, Homo sapiens
aagataaggaatcca

SEQ ID NO: 29063 - DNA, 15 bp, Homo sapiens
taagataaggaatcc

SEQ ID NO: 29064 - DNA, 15 bp, Homo sapiens
ataagataaggaatc

SEQ ID NO: 29065 - DNA, 15 bp, Homo sapiens
tataagataaggaat

SEQ ID NO: 29066 - DNA, 15 bp, Homo sapiens
ctataagataaggaa

SEQ ID NO: 29067 - DNA, 15 bp, Homo sapiens
actataagataagga

SEQ ID NO: 29068 - DNA, 15 bp, Homo sapiens
aactataagataagg

SEQ ID NO: 29069 - DNA, 15 bp, Homo sapiens
aaactataagataag

SEQ ID NO: 29070 - DNA, 15 bp, Homo sapiens
aaaactataagataa

SEQ ID NO: 29071 - DNA, 15 bp, Homo sapiens
caaaactataagata

SEQ ID NO: 29072 - DNA, 15 bp, Homo sapiens
gcaaaactataagat

SEQ ID NO: 29073 - DNA, 15 bp, Homo sapiens
ggcaaaactataaga

SEQ ID NO: 29074 - DNA, 15 bp, Homo sapiens
tggcaaaactataag

SEQ ID NO: 29075 - DNA, 15 bp, Homo sapiens
ttggcaaaactataa

SEQ ID NO: 29076 - DNA, 15 bp, Homo sapiens
tttggcaaaactata

SEQ ID NO: 29077 - DNA, 15 bp, Homo sapiens
ttttggcaaaactat

SEQ ID NO: 29078 - DNA, 15 bp, Homo sapiens
tttttggcaaaacta

SEQ ID NO: 29079 - DNA, 15 bp, Homo sapiens
atttttggcaaaact

SEQ ID NO: 29080 - DNA, 15 bp, Homo sapiens
gatttttggcaaaac

SEQ ID NO: 29081 - DNA, 15 bp, Homo sapiens
agatttttggcaaaa

SEQ ID NO: 29082 - DNA, 15 bp, Homo sapiens
aagatttttggcaaa

SEQ ID NO: 29083 - DNA, 15 bp, Homo sapiens
caagatttttggcaa

SEQ ID NO: 29084 - DNA, 15 bp, Homo sapiens
ccaagatttttggca

SEQ ID NO: 29085 - DNA, 15 bp, Homo sapiens
accaagatttttggc

SEQ ID NO: 29086 - DNA, 15 bp, Homo sapiens
gaccaagatttttgg

SEQ ID NO: 29087 - DNA, 15 bp, Homo sapiens
tgaccaagatttttg

SEQ ID NO: 29088 - DNA, 15 bp, Homo sapiens
atgaccaagattttt

SEQ ID NO: 29089 - DNA, 15 bp, Homo sapiens
tatgaccaagatttt

SEQ ID NO: 29090 - DNA, 15 bp, Homo sapiens
ttatgaccaagattt

SEQ ID NO: 29091 - DNA, 15 bp, Homo sapiens
attatgaccaagatt

SEQ ID NO: 29092 - DNA, 15 bp, Homo sapiens
aattatgaccaagat

SEQ ID NO: 29093 - DNA, 15 bp, Homo sapiens
aaattatgaccaaga

SEQ ID NO: 29094 - DNA, 15 bp, Homo sapiens
caaattatgaccaag

SEQ ID NO: 29095 - DNA, 15 bp, Homo sapiens
acaaattatgaccaa

SEQ ID NO: 29096 - DNA, 15 bp, Homo sapiens
tacaaattatgacca

SEQ ID NO: 29097 - DNA, 15 bp, Homo sapiens
atacaaattatgacc

SEQ ID NO: 29098 - DNA, 15 bp, Homo sapiens
aatacaaattatgac

SEQ ID NO: 29099 - DNA, 15 bp, Homo sapiens
aaatacaaattatga

SEQ ID NO: 29100 - DNA, 15 bp, Homo sapiens
caaatacaaattatg

SEQ ID NO: 29101 - DNA, 15 bp, Homo sapiens
acaaatacaaattat

SEQ ID NO: 29102 - DNA, 15 bp, Homo sapiens
cacaaatacaaatta

SEQ ID NO: 29103 - DNA, 15 bp, Homo sapiens
ccacaaatacaaatt

SEQ ID NO: 29104 - DNA, 15 bp, Homo sapiens
accacaaatacaaat

SEQ ID NO: 29105 - DNA, 15 bp, Homo sapiens
taccacaaatacaaa

SEQ ID NO: 29106 - DNA, 15 bp, Homo sapiens
ctaccacaaatacaa

SEQ ID NO: 29107 - DNA, 15 bp, Homo sapiens
cctaccacaaataca

SEQ ID NO: 29108 - DNA, 15 bp, Homo sapiens
gcctaccacaaatac

SEQ ID NO: 29109 - DNA, 15 bp, Homo sapiens
tgcctaccacaaata

SEQ ID NO: 29110 - DNA, 15 bp, Homo sapiens
ctgcctaccacaaat

SEQ ID NO: 29111 - DNA, 15 bp, Homo sapiens
gctgcctaccacaaa

SEQ ID NO: 29112 - DNA, 15 bp, Homo sapiens
agctgcctaccacaa

SEQ ID NO: 29113 - DNA, 15 bp, Homo sapiens
aagctgcctaccaca

SEQ ID NO: 29114 - DNA, 15 bp, Homo sapiens
aaagctgcctaccac

SEQ ID NO: 29115 - DNA, 15 bp, Homo sapiens
caaagctgcctacca

SEQ ID NO: 29116 - DNA, 15 bp, Homo sapiens
ccaaagctgcctacc

SEQ ID NO: 29117 - DNA, 15 bp, Homo sapiens
cccaaagctgcctac

SEQ ID NO: 29118 - DNA, 15 bp, Homo sapiens
tcccaaagctgccta

SEQ ID NO: 29119 - DNA, 15 bp, Homo sapiens
ttcccaaagctgcct

SEQ ID NO: 29120 - DNA, 15 bp, Homo sapiens
cttcccaaagctgcc

SEQ ID NO: 29121 - DNA, 15 bp, Homo sapiens
acttcccaaagctgc

SEQ ID NO: 29122 - DNA, 15 bp, Homo sapiens
cacttcccaaagctg

SEQ ID NO: 29123 - DNA, 15 bp, Homo sapiens
tcacttcccaaagct

SEQ ID NO: 29124 - DNA, 15 bp, Homo sapiens
ttcacttcccaaagc

SEQ ID NO: 29125 - DNA, 15 bp, Homo sapiens
attcacttcccaaag

SEQ ID NO: 29126 - DNA, 15 bp, Homo sapiens
aattcacttcccaaa

SEQ ID NO: 29127 - DNA, 15 bp, Homo sapiens
aaattcacttcccaa

SEQ ID NO: 29128 - DNA, 15 bp, Homo sapiens
aaaattcacttccca

SEQ ID NO: 29129 - DNA, 15 bp, Homo sapiens
taaaattcacttccc

SEQ ID NO: 29130 - DNA, 15 bp, Homo sapiens
ataaaattcacttcc

SEQ ID NO: 29131 - DNA, 15 bp, Homo sapiens
cataaaattcacttc

SEQ ID NO: 29132 - DNA, 15 bp, Homo sapiens
tcataaaattcactt

SEQ ID NO: 29133 - DNA, 15 bp, Homo sapiens
ctcataaaattcact

SEQ ID NO: 29134 - DNA, 15 bp, Homo sapiens
gctcataaaattcac

SEQ ID NO: 29135 - DNA, 15 bp, Homo sapiens
ggctcataaaattca

SEQ ID NO: 29136 - DNA, 15 bp, Homo sapiens
gggctcataaaattc

SEQ ID NO: 29137 - DNA, 15 bp, Homo sapiens
agggctcataaaatt

SEQ ID NO: 29138 - DNA, 15 bp, Homo sapiens
tagggctcataaaat

SEQ ID NO: 29139 - DNA, 15 bp, Homo sapiens
atagggctcataaaa

SEQ ID NO: 29140 - DNA, 15 bp, Homo sapiens
catagggctcataaa

SEQ ID NO: 29141 - DNA, 15 bp, Homo sapiens
ccatagggctcataa

SEQ ID NO: 29142 - DNA, 15 bp, Homo sapiens
accatagggctcata

SEQ ID NO: 29143 - DNA, 15 bp, Homo sapiens
caccatagggctcat

SEQ ID NO: 29144 - DNA, 15 bp, Homo sapiens
tcaccatagggctca

SEQ ID NO: 29145 - DNA, 15 bp, Homo sapiens
ctcaccatagggctc

SEQ ID NO: 29146 - DNA, 15 bp, Homo sapiens
actcaccatagggct

SEQ ID NO: 29147 - DNA, 15 bp, Homo sapiens
aactcaccatagggc

SEQ ID NO: 29148 - DNA, 15 bp, Homo sapiens
taactcaccataggg

SEQ ID NO: 29149 - DNA, 15 bp, Homo sapiens
ataactcaccatagg

SEQ ID NO: 29150 - DNA, 15 bp, Homo sapiens
tataactcaccatag

SEQ ID NO: 29151 - DNA, 15 bp, Homo sapiens
ttataactcaccata

SEQ ID NO: 29152 - DNA, 15 bp, Homo sapiens
tttataactcaccat

SEQ ID NO: 29153 - DNA, 15 bp, Homo sapiens
ttttataactcacca

SEQ ID NO: 29154 - DNA, 15 bp, Homo sapiens
tttttataactcacc

SEQ ID NO: 29155 - DNA, 15 bp, Homo sapiens
ttttttataactcac

SEQ ID NO: 29156 - DNA, 15 bp, Homo sapiens
attttttataactca

SEQ ID NO: 29157 - DNA, 15 bp, Homo sapiens
cattttttataactc

SEQ ID NO: 29158 - DNA, 15 bp, Homo sapiens
acattttttataact

SEQ ID NO: 29159 - DNA, 15 bp, Homo sapiens
tacattttttataac

SEQ ID NO: 29160 - DNA, 15 bp, Homo sapiens
ttacattttttataa

SEQ ID NO: 29161 - DNA, 15 bp, Homo sapiens
tttacattttttata

SEQ ID NO: 29162 - DNA, 15 bp, Homo sapiens
ttttacattttttat

SEQ ID NO: 29163 - DNA, 15 bp, Homo sapiens
cttttacatttttta

SEQ ID NO: 29164 - DNA, 15 bp, Homo sapiens
tcttttacatttttt

SEQ ID NO: 29165 - DNA, 15 bp, Homo sapiens
gtcttttacattttt

SEQ ID NO: 29166 - DNA, 15 bp, Homo sapiens
cgtcttttacatttt

SEQ ID NO: 29167 - DNA, 15 bp, Homo sapiens
gcgtcttttacattt

SEQ ID NO: 29168 - DNA, 15 bp, Homo sapiens
tgcgtcttttacatt

SEQ ID NO: 29169 - DNA, 15 bp, Homo sapiens
ctgcgtcttttacat

SEQ ID NO: 29170 - DNA, 15 bp, Homo sapiens
actgcgtcttttaca

SEQ ID NO: 29171 - DNA, 15 bp, Homo sapiens
aactgcgtcttttac

SEQ ID NO: 29172 - DNA, 15 bp, Homo sapiens
gaactgcgtctttta

SEQ ID NO: 29173 - DNA, 15 bp, Homo sapiens
ggaactgcgtctttt

SEQ ID NO: 29174 - DNA, 15 bp, Homo sapiens
gggaactgcgtcttt

SEQ ID NO: 29175 - DNA, 15 bp, Homo sapiens
tgggaactgcgtctt

SEQ ID NO: 29176 - DNA, 15 bp, Homo sapiens
gtgggaactgcgtct

SEQ ID NO: 29177 - DNA, 15 bp, Homo sapiens
ggtgggaactgcgtc

SEQ ID NO: 29178 - DNA, 15 bp, Homo sapiens
aggtgggaactgcgt

SEQ ID NO: 29179 - DNA, 15 bp, Homo sapiens
aaggtgggaactgcg

SEQ ID NO: 29180 - DNA, 15 bp, Homo sapiens
caaggtgggaactgc

SEQ ID NO: 29181 - DNA, 15 bp, Homo sapiens
tcaaggtgggaactg

SEQ ID NO: 29182 - DNA, 15 bp, Homo sapiens
ttcaaggtgggaact

SEQ ID NO: 29183 - DNA, 15 bp, Homo sapiens
cttcaaggtgggaac

SEQ ID NO: 29184 - DNA, 15 bp, Homo sapiens
tcttcaaggtgggaa

SEQ ID NO: 29185 - DNA, 15 bp, Homo sapiens
ttcttcaaggtggga

SEQ ID NO: 29186 - DNA, 15 bp, Homo sapiens
attcttcaaggtggg

SEQ ID NO: 29187 - DNA, 15 bp, Homo sapiens
gattcttcaaggtgg

SEQ ID NO: 29188 - DNA, 15 bp, Homo sapiens
agattcttcaaggtg

SEQ ID NO: 29189 - DNA, 15 bp, Homo sapiens
aagattcttcaaggt

SEQ ID NO: 29190 - DNA, 15 bp, Homo sapiens
taagattcttcaagg

SEQ ID NO: 29191 - DNA, 15 bp, Homo sapiens
gtaagattcttcaag

SEQ ID NO: 29192 - DNA, 15 bp, Homo sapiens
agtaagattcttcaa

SEQ ID NO: 29193 - DNA, 15 bp, Homo sapiens
aagtaagattcttca

SEQ ID NO: 29194 - DNA, 15 bp, Homo sapiens
aaagtaagattcttc

SEQ ID NO: 29195 - DNA, 15 bp, Homo sapiens
taaagtaagattctt

SEQ ID NO: 29196 - DNA, 15 bp, Homo sapiens
ttaaagtaagattct

SEQ ID NO: 29197 - DNA, 15 bp, Homo sapiens
tttaaagtaagattc

SEQ ID NO: 29198 - DNA, 15 bp, Homo sapiens
ttttaaagtaagatt

SEQ ID NO: 29199 - DNA, 15 bp, Homo sapiens
tttttaaagtaagat

SEQ ID NO: 29200 - DNA, 15 bp, Homo sapiens
ctttttaaagtaaga

SEQ ID NO: 29201 - DNA, 15 bp, Homo sapiens
cctttttaaagtaag

SEQ ID NO: 29202 - DNA, 15 bp, Homo sapiens
ccctttttaaagtaa

SEQ ID NO: 29203 - DNA, 15 bp, Homo sapiens
tccctttttaaagta

SEQ ID NO: 29204 - DNA, 15 bp, Homo sapiens
ctccctttttaaagt

SEQ ID NO: 29205 - DNA, 15 bp, Homo sapiens
gctccctttttaaag

SEQ ID NO: 29206 - DNA, 15 bp, Homo sapiens
tgctccctttttaaa

SEQ ID NO: 29207 - DNA, 15 bp, Homo sapiens
ttgctccctttttaa

SEQ ID NO: 29208 - DNA, 15 bp, Homo sapiens
tttgctcccttttta

SEQ ID NO: 29209 - DNA, 15 bp, Homo sapiens
ttttgctcccttttt

SEQ ID NO: 29210 - DNA, 15 bp, Homo sapiens
cttttgctccctttt

SEQ ID NO: 29211 - DNA, 15 bp, Homo sapiens
tcttttgctcccttt

SEQ ID NO: 29212 - DNA, 15 bp, Homo sapiens
ctcttttgctccctt

SEQ ID NO: 29213 - DNA, 15 bp, Homo sapiens
cctcttttgctccct

SEQ ID NO: 29214 - DNA, 15 bp, Homo sapiens
gcctcttttgctccc

SEQ ID NO: 29215 - DNA, 15 bp, Homo sapiens
ggcctcttttgctcc

SEQ ID NO: 29216 - DNA, 15 bp, Homo sapiens
tggcctcttttgctc

SEQ ID NO: 29217 - DNA, 15 bp, Homo sapiens
ctggcctcttttgct

SEQ ID NO: 29218 - DNA, 15 bp, Homo sapiens
cctggcctcttttgc

SEQ ID NO: 29219 - DNA, 15 bp, Homo sapiens
gcctggcctcttttg

SEQ ID NO: 29220 - DNA, 15 bp, Homo sapiens
tgcctggcctctttt

SEQ ID NO: 29221 - DNA, 15 bp, Homo sapiens
atgcctggcctcttt

SEQ ID NO: 29222 - DNA, 15 bp, Homo sapiens
catgcctggcctctt

SEQ ID NO: 29223 - DNA, 15 bp, Homo sapiens
ccatgcctggcctct

SEQ ID NO: 29224 - DNA, 15 bp, Homo sapiens
accatgcctggcctc

SEQ ID NO: 29225 - DNA, 15 bp, Homo sapiens
caccatgcctggcct

SEQ ID NO: 29226 - DNA, 15 bp, Homo sapiens
tttggcctcccaaag

SEQ ID NO: 29227 - DNA, 15 bp, Homo sapiens
ctttggcctcccaaa

SEQ ID NO: 29228 - DNA, 15 bp, Homo sapiens
actttggcctcccaa

SEQ ID NO: 29229 - DNA, 15 bp, Homo sapiens
cactttggcctccca

SEQ ID NO: 29230 - DNA, 15 bp, Homo sapiens
ccactttggcctccc

SEQ ID NO: 29231 - DNA, 15 bp, Homo sapiens
cccactttggcctcc

SEQ ID NO: 29232 - DNA, 15 bp, Homo sapiens
acccactttggcctc

SEQ ID NO: 29233 - DNA, 15 bp, Homo sapiens
cacccactttggcct

SEQ ID NO: 29234 - DNA, 15 bp, Homo sapiens
ccacccactttggcc

SEQ ID NO: 29235 - DNA, 15 bp, Homo sapiens
tccacccactttggc

SEQ ID NO: 29236 - DNA, 15 bp, Homo sapiens
atccacccactttgg

SEQ ID NO: 29237 - DNA, 15 bp, Homo sapiens
gatccacccactttg

SEQ ID NO: 29238 - DNA, 15 bp, Homo sapiens
tgatccacccacttt

SEQ ID NO: 29239 - DNA, 15 bp, Homo sapiens
gtgatccacccactt

SEQ ID NO: 29240 - DNA, 15 bp, Homo sapiens
ggtgatccacccact

SEQ ID NO: 29241 - DNA, 15 bp, Homo sapiens
aggtgatccacccac

SEQ ID NO: 29242 - DNA, 15 bp, Homo sapiens
caggtgatccaccca

SEQ ID NO: 29243 - DNA, 15 bp, Homo sapiens
tcaggtgatccaccc

SEQ ID NO: 29244 - DNA, 15 bp, Homo sapiens
cgacctcaggtgatc

SEQ ID NO: 29245 - DNA, 15 bp, Homo sapiens
ccgacctcaggtgat

SEQ ID NO: 29246 - DNA, 15 bp, Homo sapiens
cccgacctcaggtga

SEQ ID NO: 29247 - DNA, 15 bp, Homo sapiens
tcccgacctcaggtg

SEQ ID NO: 29248 - DNA, 15 bp, Homo sapiens
ctcccgacctcaggt

SEQ ID NO: 29249 - DNA, 15 bp, Homo sapiens
actcccgacctcagg

SEQ ID NO: 29250 - DNA, 15 bp, Homo sapiens
aactcccgacctcag

SEQ ID NO: 29251 - DNA, 15 bp, Homo sapiens
tggctcaagcctgta

SEQ ID NO: 29252 - DNA, 15 bp, Homo sapiens
gtggctcaagcctgt

SEQ ID NO: 29253 - DNA, 15 bp, Homo sapiens
ggtggctcaagcctg

SEQ ID NO: 29254 - DNA, 15 bp, Homo sapiens
cggtggctcaagcct

SEQ ID NO: 29255 - DNA, 15 bp, Homo sapiens
acggtggctcaagcc

SEQ ID NO: 29256 - DNA, 15 bp, Homo sapiens
cacggtggctcaagc

SEQ ID NO: 29257 - DNA, 15 bp, Homo sapiens
gcacggtggctcaag

SEQ ID NO: 29258 - DNA, 15 bp, Homo sapiens
ggcacggtggctcaa

SEQ ID NO: 29259 - DNA, 15 bp, Homo sapiens
gggcacggtggctca

SEQ ID NO: 29260 - DNA, 15 bp, Homo sapiens
tgggcacggtggctc

SEQ ID NO: 29261 - DNA, 15 bp, Homo sapiens
ctgggcacggtggct

SEQ ID NO: 29262 - DNA, 15 bp, Homo sapiens
gctgggcacggtggc

SEQ ID NO: 29263 - DNA, 15 bp, Homo sapiens
tgctgggcacggtgg

SEQ ID NO: 29264 - DNA, 15 bp, Homo sapiens
ttgctgggcacggtg

SEQ ID NO: 29265 - DNA, 15 bp, Homo sapiens
gttgctgggcacggt

SEQ ID NO: 29266 - DNA, 15 bp, Homo sapiens
ggttgctgggcacgg

SEQ ID NO: 29267 - DNA, 15 bp, Homo sapiens
tggttgctgggcacg

SEQ ID NO: 29268 - DNA, 15 bp, Homo sapiens
atggttgctgggcac

SEQ ID NO: 29269 - DNA, 15 bp, Homo sapiens
aatggttgctgggca

SEQ ID NO: 29270 - DNA, 15 bp, Homo sapiens
aaatggttgctgggc

SEQ ID NO: 29271 - DNA, 15 bp, Homo sapiens
gaaatggttgctggg

SEQ ID NO: 29272 - DNA, 15 bp, Homo sapiens
tgaaatggttgctgg

SEQ ID NO: 29273 - DNA, 15 bp, Homo sapiens
atgaaatggttgctg

SEQ ID NO: 29274 - DNA, 15 bp, Homo sapiens
aatgaaatggttgct

SEQ ID NO: 29275 - DNA, 15 bp, Homo sapiens
aaatgaaatggttgc

SEQ ID NO: 29276 - DNA, 15 bp, Homo sapiens
gaaatgaaatggttg

SEQ ID NO: 29277 - DNA, 15 bp, Homo sapiens
tgaaatgaaatggtt

SEQ ID NO: 29278 - DNA, 15 bp, Homo sapiens
ttgaaatgaaatggt

SEQ ID NO: 29279 - DNA, 15 bp, Homo sapiens
gttgaaatgaaatgg

SEQ ID NO: 29280 - DNA, 15 bp, Homo sapiens
agttgaaatgaaatg

SEQ ID NO: 29281 - DNA, 15 bp, Homo sapiens
tagttgaaatgaaat

SEQ ID NO: 29282 - DNA, 15 bp, Homo sapiens
ctagttgaaatgaaa

SEQ ID NO: 29283 - DNA, 15 bp, Homo sapiens
tctagttgaaatgaa

SEQ ID NO: 29284 - DNA, 15 bp, Homo sapiens
ttctagttgaaatga

SEQ ID NO: 29285 - DNA, 15 bp, Homo sapiens
cttctagttgaaatg

SEQ ID NO: 29286 - DNA, 15 bp, Homo sapiens
acttctagttgaaat

SEQ ID NO: 29287 - DNA, 15 bp, Homo sapiens
aacttctagttgaaa

SEQ ID NO: 29288 - DNA, 15 bp, Homo sapiens
aaacttctagttgaa

SEQ ID NO: 29289 - DNA, 15 bp, Homo sapiens
gaaacttctagttga

SEQ ID NO: 29290 - DNA, 15 bp, Homo sapiens
agaaacttctagttg

SEQ ID NO: 29291 - DNA, 15 bp, Homo sapiens
tagaaacttctagtt

SEQ ID NO: 29292 - DNA, 15 bp, Homo sapiens
ttagaaacttctagt

SEQ ID NO: 29293 - DNA, 15 bp, Homo sapiens
tttagaaacttctag

SEQ ID NO: 29294 - DNA, 15 bp, Homo sapiens
ctttagaaacttcta

SEQ ID NO: 29295 - DNA, 15 bp, Homo sapiens
cctttagaaacttct

SEQ ID NO: 29296 - DNA, 15 bp, Homo sapiens
tcctttagaaacttc

SEQ ID NO: 29297 - DNA, 15 bp, Homo sapiens
ctcctttagaaactt

SEQ ID NO: 29298 - DNA, 15 bp, Homo sapiens
tctcctttagaaact

SEQ ID NO: 29299 - DNA, 15 bp, Homo sapiens
ctctcctttagaaac

SEQ ID NO: 29300 - DNA, 15 bp, Homo sapiens
tctctcctttagaaa

SEQ ID NO: 29301 - DNA, 15 bp, Homo sapiens
ctctctcctttagaa

SEQ ID NO: 29302 - DNA, 15 bp, Homo sapiens
gctctctcctttaga

SEQ ID NO: 29303 - DNA, 15 bp, Homo sapiens
tgctctctcctttag

SEQ ID NO: 29304 - DNA, 15 bp, Homo sapiens
ctgctctctccttta

SEQ ID NO: 29305 - DNA, 15 bp, Homo sapiens
gctgctctctccttt

SEQ ID NO: 29306 - DNA, 15 bp, Homo sapiens
agctgctctctcctt

SEQ ID NO: 29307 - DNA, 15 bp, Homo sapiens
aagctgctctctcct

SEQ ID NO: 29308 - DNA, 15 bp, Homo sapiens
aaagctgctctctcc

SEQ ID NO: 29309 - DNA, 15 bp, Homo sapiens
gaaagctgctctctc

SEQ ID NO: 29310 - DNA, 15 bp, Homo sapiens
tgaaagctgctctct

SEQ ID NO: 29311 - DNA, 15 bp, Homo sapiens
gtgaaagctgctctc

SEQ ID NO: 29312 - DNA, 15 bp, Homo sapiens
agtgaaagctgctct

SEQ ID NO: 29313 - DNA, 15 bp, Homo sapiens
tagtgaaagctgctc

SEQ ID NO: 29314 - DNA, 15 bp, Homo sapiens
ttagtgaaagctgct

SEQ ID NO: 29315 - DNA, 15 bp, Homo sapiens
gttagtgaaagctgc

SEQ ID NO: 29316 - DNA, 15 bp, Homo sapiens
agttagtgaaagctg

SEQ ID NO: 29317 - DNA, 15 bp, Homo sapiens
tagttagtgaaagct

SEQ ID NO: 29318 - DNA, 15 bp, Homo sapiens
ttagttagtgaaagc

SEQ ID NO: 29319 - DNA, 15 bp, Homo sapiens
tttagttagtgaaag

SEQ ID NO: 29320 - DNA, 15 bp, Homo sapiens
atttagttagtgaaa

SEQ ID NO: 29321 - DNA, 15 bp, Homo sapiens
tatttagttagtgaa

SEQ ID NO: 29322 - DNA, 15 bp, Homo sapiens
ttatttagttagtga

SEQ ID NO: 29323 - DNA, 15 bp, Homo sapiens
cttatttagttagtg

SEQ ID NO: 29324 - DNA, 15 bp, Homo sapiens
tcttatttagttagt

SEQ ID NO: 29325 - DNA, 15 bp, Homo sapiens
atcttatttagttag

SEQ ID NO: 29326 - DNA, 15 bp, Homo sapiens
aatcttatttagtta

SEQ ID NO: 29327 - DNA, 15 bp, Homo sapiens
caatcttatttagtt

SEQ ID NO: 29328 - DNA, 15 bp, Homo sapiens
ccaatcttatttagt

SEQ ID NO: 29329 - DNA, 15 bp, Homo sapiens
accaatcttatttag

SEQ ID NO: 29330 - DNA, 15 bp, Homo sapiens
gaccaatcttattta

SEQ ID NO: 29331 - DNA, 15 bp, Homo sapiens
tgaccaatcttattt

SEQ ID NO: 29332 - DNA, 15 bp, Homo sapiens
ctgaccaatcttatt

SEQ ID NO: 29333 - DNA, 15 bp, Homo sapiens
gctgaccaatcttat

SEQ ID NO: 29334 - DNA, 15 bp, Homo sapiens
agctgaccaatctta

SEQ ID NO: 29335 - DNA, 15 bp, Homo sapiens
aagctgaccaatctt

SEQ ID NO: 29336 - DNA, 15 bp, Homo sapiens
aaagctgaccaatct

SEQ ID NO: 29337 - DNA, 15 bp, Homo sapiens
gaaagctgaccaatc

SEQ ID NO: 29338 - DNA, 15 bp, Homo sapiens
agaaagctgaccaat

SEQ ID NO: 29339 - DNA, 15 bp, Homo sapiens
cagaaagctgaccaa

SEQ ID NO: 29340 - DNA, 15 bp, Homo sapiens
acagaaagctgacca

SEQ ID NO: 29341 - DNA, 15 bp, Homo sapiens
tacagaaagctgacc

SEQ ID NO: 29342 - DNA, 15 bp, Homo sapiens
ttacagaaagctgac

SEQ ID NO: 29343 - DNA, 15 bp, Homo sapiens
attacagaaagctga

SEQ ID NO: 29344 - DNA, 15 bp, Homo sapiens
gattacagaaagctg

SEQ ID NO: 29345 - DNA, 15 bp, Homo sapiens
cgattacagaaagct

SEQ ID NO: 29346 - DNA, 15 bp, Homo sapiens
tcgattacagaaagc

SEQ ID NO: 29347 - DNA, 15 bp, Homo sapiens
ttcgattacagaaag

SEQ ID NO: 29348 - DNA, 15 bp, Homo sapiens
tttcgattacagaaa

SEQ ID NO: 29349 - DNA, 15 bp, Homo sapiens
ctttcgattacagaa

SEQ ID NO: 29350 - DNA, 15 bp, Homo sapiens
tctttcgattacaga

SEQ ID NO: 29351 - DNA, 15 bp, Homo sapiens
ctctttcgattacag

SEQ ID NO: 29352 - DNA, 15 bp, Homo sapiens
gctctttcgattaca

SEQ ID NO: 29353 - DNA, 15 bp, Homo sapiens
agctctttcgattac

SEQ ID NO: 29354 - DNA, 15 bp, Homo sapiens
tagctctttcgatta

SEQ ID NO: 29355 - DNA, 15 bp, Homo sapiens
ttagctctttcgatt

SEQ ID NO: 29356 - DNA, 15 bp, Homo sapiens
tttagctctttcgat

SEQ ID NO: 29357 - DNA, 15 bp, Homo sapiens
ttttagctctttcga

SEQ ID NO: 29358 - DNA, 15 bp, Homo sapiens
attttagctctttcg

SEQ ID NO: 29359 - DNA, 15 bp, Homo sapiens
cattttagctctttc

SEQ ID NO: 29360 - DNA, 15 bp, Homo sapiens
acattttagctcttt

SEQ ID NO: 29361 - DNA, 15 bp, Homo sapiens
aacattttagctctt

SEQ ID NO: 29362 - DNA, 15 bp, Homo sapiens
aaacattttagctct

SEQ ID NO: 29363 - DNA, 15 bp, Homo sapiens
caaacattttagctc

SEQ ID NO: 29364 - DNA, 15 bp, Homo sapiens
tcaaacattttagct

SEQ ID NO: 29365 - DNA, 15 bp, Homo sapiens
atcaaacattttagc

SEQ ID NO: 29366 - DNA, 15 bp, Homo sapiens
gatcaaacattttag

SEQ ID NO: 29367 - DNA, 15 bp, Homo sapiens
agatcaaacatttta

SEQ ID NO: 29368 - DNA, 15 bp, Homo sapiens
aagatcaaacatttt

SEQ ID NO: 29369 - DNA, 15 bp, Homo sapiens
caagatcaaacattt

SEQ ID NO: 29370 - DNA, 15 bp, Homo sapiens
ccaagatcaaacatt

SEQ ID NO: 29371 - DNA, 15 bp, Homo sapiens
accaagatcaaacat

SEQ ID NO: 29372 - DNA, 15 bp, Homo sapiens
gaccaagatcaaaca

SEQ ID NO: 29373 - DNA, 15 bp, Homo sapiens
tgaccaagatcaaac

SEQ ID NO: 29374 - DNA, 15 bp, Homo sapiens
atgaccaagatcaaa

SEQ ID NO: 29375 - DNA, 15 bp, Homo sapiens
aatgaccaagatcaa

SEQ ID NO: 29376 - DNA, 15 bp, Homo sapiens
aaatgaccaagatca

SEQ ID NO: 29377 - DNA, 15 bp, Homo sapiens
caaatgaccaagatc

SEQ ID NO: 29378 - DNA, 15 bp, Homo sapiens
tcaaatgaccaagat

SEQ ID NO: 29379 - DNA, 15 bp, Homo sapiens
gtcaaatgaccaaga

SEQ ID NO: 29380 - DNA, 15 bp, Homo sapiens
tgtcaaatgaccaag

SEQ ID NO: 29381 - DNA, 15 bp, Homo sapiens
ctgtcaaatgaccaa

SEQ ID NO: 29382 - DNA, 15 bp, Homo sapiens
actgtcaaatgacca

SEQ ID NO: 29383 - DNA, 15 bp, Homo sapiens
aactgtcaaatgacc

SEQ ID NO: 29384 - DNA, 15 bp, Homo sapiens
gaactgtcaaatgac

SEQ ID NO: 29385 - DNA, 15 bp, Homo sapiens
agaactgtcaaatga

SEQ ID NO: 29386 - DNA, 15 bp, Homo sapiens
cagaactgtcaaatg

SEQ ID NO: 29387 - DNA, 15 bp, Homo sapiens
gcagaactgtcaaat

SEQ ID NO: 29388 - DNA, 15 bp, Homo sapiens
tgcagaactgtcaaa

SEQ ID NO: 29389 - DNA, 15 bp, Homo sapiens
atgcagaactgtcaa

SEQ ID NO: 29390 - DNA, 15 bp, Homo sapiens
tatgcagaactgtca

SEQ ID NO: 29391 - DNA, 15 bp, Homo sapiens
gtatgcagaactgtc

SEQ ID NO: 29392 - DNA, 15 bp, Homo sapiens
tgtatgcagaactgt

SEQ ID NO: 29393 - DNA, 15 bp, Homo sapiens
atgtatgcagaactg

SEQ ID NO: 29394 - DNA, 15 bp, Homo sapiens
catgtatgcagaact

SEQ ID NO: 29395 - DNA, 15 bp, Homo sapiens
acatgtatgcagaac

SEQ ID NO: 29396 - DNA, 15 bp, Homo sapiens
tacatgtatgcagaa

SEQ ID NO: 29397 - DNA, 15 bp, Homo sapiens
ttacatgtatgcaga

SEQ ID NO: 29398 - DNA, 15 bp, Homo sapiens
gttacatgtatgcag

SEQ ID NO: 29399 - DNA, 15 bp, Homo sapiens
agttacatgtatgca

SEQ ID NO: 29400 - DNA, 15 bp, Homo sapiens
tagttacatgtatgc

SEQ ID NO: 29401 - DNA, 15 bp, Homo sapiens
ctagttacatgtatg

SEQ ID NO: 29402 - DNA, 15 bp, Homo sapiens
actagttacatgtat

SEQ ID NO: 29403 - DNA, 15 bp, Homo sapiens
cactagttacatgta

SEQ ID NO: 29404 - DNA, 15 bp, Homo sapiens
acactagttacatgt

SEQ ID NO: 29405 - DNA, 15 bp, Homo sapiens
aacactagttacatg

SEQ ID NO: 29406 - DNA, 15 bp, Homo sapiens
aaacactagttacat

SEQ ID NO: 29407 - DNA, 15 bp, Homo sapiens
gaaacactagttaca

SEQ ID NO: 29408 - DNA, 15 bp, Homo sapiens
agaaacactagttac

SEQ ID NO: 29409 - DNA, 15 bp, Homo sapiens
aagaaacactagtta

SEQ ID NO: 29410 - DNA, 15 bp, Homo sapiens
taagaaacactagtt

SEQ ID NO: 29411 - DNA, 15 bp, Homo sapiens
ataagaaacactagt

SEQ ID NO: 29412 - DNA, 15 bp, Homo sapiens
aataagaaacactag

SEQ ID NO: 29413 - DNA, 15 bp, Homo sapiens
taataagaaacacta

SEQ ID NO: 29414 - DNA, 15 bp, Homo sapiens
ctaataagaaacact

SEQ ID NO: 29415 - DNA, 15 bp, Homo sapiens
cctaataagaaacac

SEQ ID NO: 29416 - DNA, 15 bp, Homo sapiens
tcctaataagaaaca

SEQ ID NO: 29417 - DNA, 15 bp, Homo sapiens
gtcctaataagaaac

SEQ ID NO: 29418 - DNA, 15 bp, Homo sapiens
agtcctaataagaaa

SEQ ID NO: 29419 - DNA, 15 bp, Homo sapiens
gagtcctaataagaa

SEQ ID NO: 29420 - DNA, 15 bp, Homo sapiens
agagtcctaataaga

SEQ ID NO: 29421 - DNA, 15 bp, Homo sapiens
cagagtcctaataag

SEQ ID NO: 29422 - DNA, 15 bp, Homo sapiens
acagagtcctaataa

SEQ ID NO: 29423 - DNA, 15 bp, Homo sapiens
gacagagtcctaata

SEQ ID NO: 29424 - DNA, 15 bp, Homo sapiens
agacagagtcctaat

SEQ ID NO: 29425 - DNA, 15 bp, Homo sapiens
aagacagagtcctaa

SEQ ID NO: 29426 - DNA, 15 bp, Homo sapiens
aaagacagagtccta

SEQ ID NO: 29427 - DNA, 15 bp, Homo sapiens
aaaagacagagtcct

SEQ ID NO: 29428 - DNA, 15 bp, Homo sapiens
gaaaagacagagtcc

SEQ ID NO: 29429 - DNA, 15 bp, Homo sapiens
ggaaaagacagagtc

SEQ ID NO: 29430 - DNA, 15 bp, Homo sapiens
gggaaaagacagagt

SEQ ID NO: 29431 - DNA, 15 bp, Homo sapiens
agggaaaagacagag

SEQ ID NO: 29432 - DNA, 15 bp, Homo sapiens
tagggaaaagacaga

SEQ ID NO: 29433 - DNA, 15 bp, Homo sapiens
atagggaaaagacag

SEQ ID NO: 29434 - DNA, 15 bp, Homo sapiens
tatagggaaaagaca

SEQ ID NO: 29435 - DNA, 15 bp, Homo sapiens
ctatagggaaaagac

SEQ ID NO: 29436 - DNA, 15 bp, Homo sapiens
actatagggaaaaga

SEQ ID NO: 29437 - DNA, 15 bp, Homo sapiens
cactatagggaaaag

SEQ ID NO: 29438 - DNA, 15 bp, Homo sapiens
acactatagggaaaa

SEQ ID NO: 29439 - DNA, 15 bp, Homo sapiens
cacactatagggaaa

SEQ ID NO: 29440 - DNA, 15 bp, Homo sapiens
ccacactatagggaa

SEQ ID NO: 29441 - DNA, 15 bp, Homo sapiens
cccacactataggga

SEQ ID NO: 29442 - DNA, 15 bp, Homo sapiens
tcccacactataggg

SEQ ID NO: 29443 - DNA, 15 bp, Homo sapiens
ctcccacactatagg

SEQ ID NO: 29444 - DNA, 15 bp, Homo sapiens
tctcccacactatag

SEQ ID NO: 29445 - DNA, 15 bp, Homo sapiens
atctcccacactata

SEQ ID NO: 29446 - DNA, 15 bp, Homo sapiens
gatctcccacactat

SEQ ID NO: 29447 - DNA, 15 bp, Homo sapiens
tgatctcccacacta

SEQ ID NO: 29448 - DNA, 15 bp, Homo sapiens
ttgatctcccacact

SEQ ID NO: 29449 - DNA, 15 bp, Homo sapiens
cttgatctcccacac

SEQ ID NO: 29450 - DNA, 15 bp, Homo sapiens
tcttgatctcccaca

SEQ ID NO: 29451 - DNA, 15 bp, Homo sapiens
ttcttgatctcccac

SEQ ID NO: 29452 - DNA, 15 bp, Homo sapiens
attcttgatctccca

SEQ ID NO: 29453 - DNA, 15 bp, Homo sapiens
aattcttgatctccc

SEQ ID NO: 29454 - DNA, 15 bp, Homo sapiens
caattcttgatctcc

SEQ ID NO: 29455 - DNA, 15 bp, Homo sapiens
acaattcttgatctc

SEQ ID NO: 29456 - DNA, 15 bp, Homo sapiens
aacaattcttgatct

SEQ ID NO: 29457 - DNA, 15 bp, Homo sapiens
taacaattcttgatc

SEQ ID NO: 29458 - DNA, 15 bp, Homo sapiens
gtaacaattcttgat

SEQ ID NO: 29459 - DNA, 15 bp, Homo sapiens
tgtaacaattcttga

SEQ ID NO: 29460 - DNA, 15 bp, Homo sapiens
ttgtaacaattcttg

SEQ ID NO: 29461 - DNA, 15 bp, Homo sapiens
tttgtaacaattctt

SEQ ID NO: 29462 - DNA, 15 bp, Homo sapiens
atttgtaacaattct

SEQ ID NO: 29463 - DNA, 15 bp, Homo sapiens
gatttgtaacaattc

SEQ ID NO: 29464 - DNA, 15 bp, Homo sapiens
tgatttgtaacaatt

SEQ ID NO: 29465 - DNA, 15 bp, Homo sapiens
gtgatttgtaacaat

SEQ ID NO: 29466 - DNA, 15 bp, Homo sapiens
ggtgatttgtaacaa

SEQ ID NO: 29467 - DNA, 15 bp, Homo sapiens
gggtgatttgtaaca

SEQ ID NO: 29468 - DNA, 15 bp, Homo sapiens
ggggtgatttgtaac

SEQ ID NO: 29469 - DNA, 15 bp, Homo sapiens
aggggtgatttgtaa

SEQ ID NO: 29470 - DNA, 15 bp, Homo sapiens
gaggggtgatttgta

SEQ ID NO: 29471 - DNA, 15 bp, Homo sapiens
tgaggggtgatttgt

SEQ ID NO: 29472 - DNA, 15 bp, Homo sapiens
ttgaggggtgatttg

SEQ ID NO: 29473 - DNA, 15 bp, Homo sapiens
cttgaggggtgattt

SEQ ID NO: 29474 - DNA, 15 bp, Homo sapiens
ccttgaggggtgatt

SEQ ID NO: 29475 - DNA, 15 bp, Homo sapiens
tccttgaggggtgat

SEQ ID NO: 29476 - DNA, 15 bp, Homo sapiens
ttccttgaggggtga

SEQ ID NO: 29477 - DNA, 15 bp, Homo sapiens
gttccttgaggggtg

SEQ ID NO: 29478 - DNA, 15 bp, Homo sapiens
ggttccttgaggggt

SEQ ID NO: 29479 - DNA, 15 bp, Homo sapiens
tggttccttgagggg

SEQ ID NO: 29480 - DNA, 15 bp, Homo sapiens
ctggttccttgaggg

SEQ ID NO: 29481 - DNA, 15 bp, Homo sapiens
cctggttccttgagg

SEQ ID NO: 29482 - DNA, 15 bp, Homo sapiens
ccctggttccttgag

SEQ ID NO: 29483 - DNA, 15 bp, Homo sapiens
tccctggttccttga

SEQ ID NO: 29484 - DNA, 15 bp, Homo sapiens
atccctggttccttg

SEQ ID NO: 29485 - DNA, 15 bp, Homo sapiens
catccctggttcctt

SEQ ID NO: 29486 - DNA, 15 bp, Homo sapiens
tcatccctggttcct

SEQ ID NO: 29487 - DNA, 15 bp, Homo sapiens
ttcatccctggttcc

SEQ ID NO: 29488 - DNA, 15 bp, Homo sapiens
tttcatccctggttc

SEQ ID NO: 29489 - DNA, 15 bp, Homo sapiens
atttcatccctggtt

SEQ ID NO: 29490 - DNA, 15 bp, Homo sapiens
gatttcatccctggt

SEQ ID NO: 29491 - DNA, 15 bp, Homo sapiens
tgatttcatccctgg

SEQ ID NO: 29492 - DNA, 15 bp, Homo sapiens
ctgatttcatccctg

SEQ ID NO: 29493 - DNA, 15 bp, Homo sapiens
actgatttcatccct

SEQ ID NO: 29494 - DNA, 15 bp, Homo sapiens
aactgatttcatccc

SEQ ID NO: 29495 - DNA, 15 bp, Homo sapiens
aaactgatttcatcc

SEQ ID NO: 29496 - DNA, 15 bp, Homo sapiens
caaactgatttcatc

SEQ ID NO: 29497 - DNA, 15 bp, Homo sapiens
ccaaactgatttcat

SEQ ID NO: 29498 - DNA, 15 bp, Homo sapiens
tccaaactgatttca

SEQ ID NO: 29499 - DNA, 15 bp, Homo sapiens
atccaaactgatttc

SEQ ID NO: 29500 - DNA, 15 bp, Homo sapiens
aatccaaactgattt

SEQ ID NO: 29501 - DNA, 15 bp, Homo sapiens
gaatccaaactgatt

SEQ ID NO: 29502 - DNA, 15 bp, Homo sapiens
agaatccaaactgat

SEQ ID NO: 29503 - DNA, 15 bp, Homo sapiens
cagaatccaaactga

SEQ ID NO: 29504 - DNA, 15 bp, Homo sapiens
gcagaatccaaactg

SEQ ID NO: 29505 - DNA, 15 bp, Homo sapiens
tgcagaatccaaact

SEQ ID NO: 29506 - DNA, 15 bp, Homo sapiens
ttgcagaatccaaac

SEQ ID NO: 29507 - DNA, 15 bp, Homo sapiens
tttgcagaatccaaa

SEQ ID NO: 29508 - DNA, 15 bp, Homo sapiens
ttttgcagaatccaa

SEQ ID NO: 29509 - DNA, 15 bp, Homo sapiens
tttttgcagaatcca

SEQ ID NO: 29510 - DNA, 15 bp, Homo sapiens
ttttttgcagaatcc

SEQ ID NO: 29511 - DNA, 15 bp, Homo sapiens
cttttttgcagaatc

SEQ ID NO: 29512 - DNA, 15 bp, Homo sapiens
ccttttttgcagaat

SEQ ID NO: 29513 - DNA, 15 bp, Homo sapiens
cccttttttgcagaa

SEQ ID NO: 29514 - DNA, 15 bp, Homo sapiens
acccttttttgcaga

SEQ ID NO: 29515 - DNA, 15 bp, Homo sapiens
tacccttttttgcag

SEQ ID NO: 29516 - DNA, 15 bp, Homo sapiens
ttacccttttttgca

SEQ ID NO: 29517 - DNA, 15 bp, Homo sapiens
attacccttttttgc

SEQ ID NO: 29518 - DNA, 15 bp, Homo sapiens
cattacccttttttg

SEQ ID NO: 29519 - DNA, 15 bp, Homo sapiens
ccattaccctttttt

SEQ ID NO: 29520 - DNA, 15 bp, Homo sapiens
gccattacccttttt

SEQ ID NO: 29521 - DNA, 15 bp, Homo sapiens
tgccattaccctttt

SEQ ID NO: 29522 - DNA, 15 bp, Homo sapiens
ttgccattacccttt

SEQ ID NO: 29523 - DNA, 15 bp, Homo sapiens
tttgccattaccctt

SEQ ID NO: 29524 - DNA, 15 bp, Homo sapiens
ctttgccattaccct

SEQ ID NO: 29525 - DNA, 15 bp, Homo sapiens
actttgccattaccc

SEQ ID NO: 29526 - DNA, 15 bp, Homo sapiens
aactttgccattacc

SEQ ID NO: 29527 - DNA, 15 bp, Homo sapiens
aaactttgccattac

SEQ ID NO: 29528 - DNA, 15 bp, Homo sapiens
caaactttgccatta

SEQ ID NO: 29529 - DNA, 15 bp, Homo sapiens
gcaaactttgccatt

SEQ ID NO: 29530 - DNA, 15 bp, Homo sapiens
ggcaaactttgccat

SEQ ID NO: 29531 - DNA, 15 bp, Homo sapiens
tggcaaactttgcca

SEQ ID NO: 29532 - DNA, 15 bp, Homo sapiens
ttggcaaactttgcc

SEQ ID NO: 29533 - DNA, 15 bp, Homo sapiens
gttggcaaactttgc

SEQ ID NO: 29534 - DNA, 15 bp, Homo sapiens
agttggcaaactttg

SEQ ID NO: 29535 - DNA, 15 bp, Homo sapiens
aagttggcaaacttt

SEQ ID NO: 29536 - DNA, 15 bp, Homo sapiens
taagttggcaaactt

SEQ ID NO: 29537 - DNA, 15 bp, Homo sapiens
ttaagttggcaaact

SEQ ID NO: 29538 - DNA, 15 bp, Homo sapiens
gttaagttggcaaac

SEQ ID NO: 29539 - DNA, 15 bp, Homo sapiens
tgttaagttggcaaa

SEQ ID NO: 29540 - DNA, 15 bp, Homo sapiens
ctgttaagttggcaa

SEQ ID NO: 29541 - DNA, 15 bp, Homo sapiens
cctgttaagttggca

SEQ ID NO: 29542 - DNA, 15 bp, Homo sapiens
gcctgttaagttggc

SEQ ID NO: 29543 - DNA, 15 bp, Homo sapiens
tgcctgttaagttgg

SEQ ID NO: 29544 - DNA, 15 bp, Homo sapiens
gtgcctgttaagttg

SEQ ID NO: 29545 - DNA, 15 bp, Homo sapiens
agtgcctgttaagtt

SEQ ID NO: 29546 - DNA, 15 bp, Homo sapiens
cagtgcctgttaagt

SEQ ID NO: 29547 - DNA, 15 bp, Homo sapiens
tcagtgcctgttaag

SEQ ID NO: 29548 - DNA, 15 bp, Homo sapiens
ttcagtgcctgttaa

SEQ ID NO: 29549 - DNA, 15 bp, Homo sapiens
tttcagtgcctgtta

SEQ ID NO: 29550 - DNA, 15 bp, Homo sapiens
ttttcagtgcctgtt

SEQ ID NO: 29551 - DNA, 15 bp, Homo sapiens
cttttcagtgcctgt

SEQ ID NO: 29552 - DNA, 15 bp, Homo sapiens
tcttttcagtgcctg

SEQ ID NO: 29553 - DNA, 15 bp, Homo sapiens
ctcttttcagtgcct

SEQ ID NO: 29554 - DNA, 15 bp, Homo sapiens
tctcttttcagtgcc

SEQ ID NO: 29555 - DNA, 15 bp, Homo sapiens
ctctcttttcagtgc

SEQ ID NO: 29556 - DNA, 15 bp, Homo sapiens
actctcttttcagtg

SEQ ID NO: 29557 - DNA, 15 bp, Homo sapiens
cactctcttttcagt

SEQ ID NO: 29558 - DNA, 15 bp, Homo sapiens
ccactctcttttcag

SEQ ID NO: 29559 - DNA, 15 bp, Homo sapiens
cccactctcttttca

SEQ ID NO: 29560 - DNA, 15 bp, Homo sapiens
acccactctcttttc

SEQ ID NO: 29561 - DNA, 15 bp, Homo sapiens
tacccactctctttt

SEQ ID NO: 29562 - DNA, 15 bp, Homo sapiens
ctacccactctcttt

SEQ ID NO: 29563 - DNA, 15 bp, Homo sapiens
tctacccactctctt

SEQ ID NO: 29564 - DNA, 15 bp, Homo sapiens
atctacccactctct

SEQ ID NO: 29565 - DNA, 15 bp, Homo sapiens
tatctacccactctc

SEQ ID NO: 29566 - DNA, 15 bp, Homo sapiens
gtatctacccactct

SEQ ID NO: 29567 - DNA, 15 bp, Homo sapiens
tgtatctacccactc

SEQ ID NO: 29568 - DNA, 15 bp, Homo sapiens
ctgtatctacccact

SEQ ID NO: 29569 - DNA, 15 bp, Homo sapiens
actgtatctacccac

SEQ ID NO: 29570 - DNA, 15 bp, Homo sapiens
tactgtatctaccca

SEQ ID NO: 29571 - DNA, 15 bp, Homo sapiens
gtactgtatctaccc

SEQ ID NO: 29572 - DNA, 15 bp, Homo sapiens
agtactgtatctacc

SEQ ID NO: 29573 - DNA, 15 bp, Homo sapiens
cagtactgtatctac

SEQ ID NO: 29574 - DNA, 15 bp, Homo sapiens
acagtactgtatcta

SEQ ID NO: 29575 - DNA, 15 bp, Homo sapiens
tacagtactgtatct

SEQ ID NO: 29576 - DNA, 15 bp, Homo sapiens
ttacagtactgtatc

SEQ ID NO: 29577 - DNA, 15 bp, Homo sapiens
attacagtactgtat

SEQ ID NO: 29578 - DNA, 15 bp, Homo sapiens
aattacagtactgta

SEQ ID NO: 29579 - DNA, 15 bp, Homo sapiens
taattacagtactgt

SEQ ID NO: 29580 - DNA, 15 bp, Homo sapiens
ctaattacagtactg

SEQ ID NO: 29581 - DNA, 15 bp, Homo sapiens
tctaattacagtact

SEQ ID NO: 29582 - DNA, 15 bp, Homo sapiens
atctaattacagtac

SEQ ID NO: 29583 - DNA, 15 bp, Homo sapiens
aatctaattacagta

SEQ ID NO: 29584 - DNA, 15 bp, Homo sapiens
taatctaattacagt

SEQ ID NO: 29585 - DNA, 15 bp, Homo sapiens
ataatctaattacag

SEQ ID NO: 29586 - DNA, 15 bp, Homo sapiens
aataatctaattaca

SEQ ID NO: 29587 - DNA, 15 bp, Homo sapiens
gaataatctaattac

SEQ ID NO: 29588 - DNA, 15 bp, Homo sapiens
agaataatctaatta

SEQ ID NO: 29589 - DNA, 15 bp, Homo sapiens
cagaataatctaatt

SEQ ID NO: 29590 - DNA, 15 bp, Homo sapiens
tcagaataatctaat

SEQ ID NO: 29591 - DNA, 15 bp, Homo sapiens
ttcagaataatctaa

SEQ ID NO: 29592 - DNA, 15 bp, Homo sapiens
cttcagaataatcta

SEQ ID NO: 29593 - DNA, 15 bp, Homo sapiens
tcttcagaataatct

SEQ ID NO: 29594 - DNA, 15 bp, Homo sapiens
gtcttcagaataatc

SEQ ID NO: 29595 - DNA, 15 bp, Homo sapiens
ggtcttcagaataat

SEQ ID NO: 29596 - DNA, 15 bp, Homo sapiens
tggtcttcagaataa

SEQ ID NO: 29597 - DNA, 15 bp, Homo sapiens
atggtcttcagaata

SEQ ID NO: 29598 - DNA, 15 bp, Homo sapiens
aatggtcttcagaat

SEQ ID NO: 29599 - DNA, 15 bp, Homo sapiens
aaatggtcttcagaa

SEQ ID NO: 29600 - DNA, 15 bp, Homo sapiens
caaatggtcttcaga

SEQ ID NO: 29601 - DNA, 15 bp, Homo sapiens
ccaaatggtcttcag

SEQ ID NO: 29602 - DNA, 15 bp, Homo sapiens
cccaaatggtcttca

SEQ ID NO: 29603 - DNA, 15 bp, Homo sapiens
tcccaaatggtcttc

SEQ ID NO: 29604 - DNA, 15 bp, Homo sapiens
gtcccaaatggtctt

SEQ ID NO: 29605 - DNA, 15 bp, Homo sapiens
ggtcccaaatggtct

SEQ ID NO: 29606 - DNA, 15 bp, Homo sapiens
aggtcccaaatggtc

SEQ ID NO: 29607 - DNA, 15 bp, Homo sapiens
aaggtcccaaatggt

SEQ ID NO: 29608 - DNA, 15 bp, Homo sapiens
aaaggtcccaaatgg

SEQ ID NO: 29609 - DNA, 15 bp, Homo sapiens
taaaggtcccaaatg

SEQ ID NO: 29610 - DNA, 15 bp, Homo sapiens
gtaaaggtcccaaat

SEQ ID NO: 29611 - DNA, 15 bp, Homo sapiens
tgtaaaggtcccaaa

SEQ ID NO: 29612 - DNA, 15 bp, Homo sapiens
ttgtaaaggtcccaa

SEQ ID NO: 29613 - DNA, 15 bp, Homo sapiens
gttgtaaaggtccca

SEQ ID NO: 29614 - DNA, 15 bp, Homo sapiens
ggttgtaaaggtccc

SEQ ID NO: 29615 - DNA, 15 bp, Homo sapiens
gggttgtaaaggtcc

SEQ ID NO: 29616 - DNA, 15 bp, Homo sapiens
tgggttgtaaaggtc

SEQ ID NO: 29617 - DNA, 15 bp, Homo sapiens
gtgggttgtaaaggt

SEQ ID NO: 29618 - DNA, 15 bp, Homo sapiens
tgtgggttgtaaagg

SEQ ID NO: 29619 - DNA, 15 bp, Homo sapiens
ttgtgggttgtaaag

SEQ ID NO: 29620 - DNA, 15 bp, Homo sapiens
tttgtgggttgtaaa

SEQ ID NO: 29621 - DNA, 15 bp, Homo sapiens
ttttgtgggttgtaa

SEQ ID NO: 29622 - DNA, 15 bp, Homo sapiens
attttgtgggttgta

SEQ ID NO: 29623 - DNA, 15 bp, Homo sapiens
gattttgtgggttgt

SEQ ID NO: 29624 - DNA, 15 bp, Homo sapiens
agattttgtgggttg

SEQ ID NO: 29625 - DNA, 15 bp, Homo sapiens
gagattttgtgggtt

SEQ ID NO: 29626 - DNA, 15 bp, Homo sapiens
agagattttgtgggt

SEQ ID NO: 29627 - DNA, 15 bp, Homo sapiens
aagagattttgtggg

SEQ ID NO: 29628 - DNA, 15 bp, Homo sapiens
caagagattttgtgg

SEQ ID NO: 29629 - DNA, 15 bp, Homo sapiens
ccaagagattttgtg

SEQ ID NO: 29630 - DNA, 15 bp, Homo sapiens
gccaagagattttgt

SEQ ID NO: 29631 - DNA, 15 bp, Homo sapiens
tgccaagagattttg

SEQ ID NO: 29632 - DNA, 15 bp, Homo sapiens
ctgccaagagatttt

SEQ ID NO: 29633 - DNA, 15 bp, Homo sapiens
tctgccaagagattt

SEQ ID NO: 29634 - DNA, 15 bp, Homo sapiens
ctctgccaagagatt

SEQ ID NO: 29635 - DNA, 15 bp, Homo sapiens
actctgccaagagat

SEQ ID NO: 29636 - DNA, 15 bp, Homo sapiens
aactctgccaagaga

SEQ ID NO: 29637 - DNA, 15 bp, Homo sapiens
taactctgccaagag

SEQ ID NO: 29638 - DNA, 15 bp, Homo sapiens
ctaactctgccaaga

SEQ ID NO: 29639 - DNA, 15 bp, Homo sapiens
tctaactctgccaag

SEQ ID NO: 29640 - DNA, 15 bp, Homo sapiens
ctctaactctgccaa

SEQ ID NO: 29641 - DNA, 15 bp, Homo sapiens
actctaactctgcca

SEQ ID NO: 29642 - DNA, 15 bp, Homo sapiens
tactctaactctgcc

SEQ ID NO: 29643 - DNA, 15 bp, Homo sapiens
atactctaactctgc

SEQ ID NO: 29644 - DNA, 15 bp, Homo sapiens
gatactctaactctg

SEQ ID NO: 29645 - DNA, 15 bp, Homo sapiens
tgatactctaactct

SEQ ID NO: 29646 - DNA, 15 bp, Homo sapiens
atgatactctaactc

SEQ ID NO: 29647 - DNA, 15 bp, Homo sapiens
aatgatactctaact

SEQ ID NO: 29648 - DNA, 15 bp, Homo sapiens
gaatgatactctaac

SEQ ID NO: 29649 - DNA, 15 bp, Homo sapiens
agaatgatactctaa

SEQ ID NO: 29650 - DNA, 15 bp, Homo sapiens
gagaatgatactcta

SEQ ID NO: 29651 - DNA, 15 bp, Homo sapiens
agagaatgatactct

SEQ ID NO: 29652 - DNA, 15 bp, Homo sapiens
cagagaatgatactc

SEQ ID NO: 29653 - DNA, 15 bp, Homo sapiens
acagagaatgatact

SEQ ID NO: 29654 - DNA, 15 bp, Homo sapiens
gacagagaatgatac

SEQ ID NO: 29655 - DNA, 15 bp, Homo sapiens
tgacagagaatgata

SEQ ID NO: 29656 - DNA, 15 bp, Homo sapiens
ttgacagagaatgat

SEQ ID NO: 29657 - DNA, 15 bp, Homo sapiens
tttgacagagaatga

SEQ ID NO: 29658 - DNA, 15 bp, Homo sapiens
atttgacagagaatg

SEQ ID NO: 29659 - DNA, 15 bp, Homo sapiens
catttgacagagaat

SEQ ID NO: 29660 - DNA, 15 bp, Homo sapiens
acatttgacagagaa

SEQ ID NO: 29661 - DNA, 15 bp, Homo sapiens
gacatttgacagaga

SEQ ID NO: 29662 - DNA, 15 bp, Homo sapiens
cgacatttgacagag

SEQ ID NO: 29663 - DNA, 15 bp, Homo sapiens
acgacatttgacaga

SEQ ID NO: 29664 - DNA, 15 bp, Homo sapiens
cacgacatttgacag

SEQ ID NO: 29665 - DNA, 15 bp, Homo sapiens
ccacgacatttgaca

SEQ ID NO: 29666 - DNA, 15 bp, Homo sapiens
accacgacatttgac

SEQ ID NO: 29667 - DNA, 15 bp, Homo sapiens
taccacgacatttga

SEQ ID NO: 29668 - DNA, 15 bp, Homo sapiens
ataccacgacatttg

SEQ ID NO: 29669 - DNA, 15 bp, Homo sapiens
cataccacgacattt

SEQ ID NO: 29670 - DNA, 15 bp, Homo sapiens
ccataccacgacatt

SEQ ID NO: 29671 - DNA, 15 bp, Homo sapiens
accataccacgacat

SEQ ID NO: 29672 - DNA, 15 bp, Homo sapiens
gaccataccacgaca

SEQ ID NO: 29673 - DNA, 15 bp, Homo sapiens
agaccataccacgac

SEQ ID NO: 29674 - DNA, 15 bp, Homo sapiens
cagaccataccacga

SEQ ID NO: 29675 - DNA, 15 bp, Homo sapiens
tcagaccataccacg

SEQ ID NO: 29676 - DNA, 15 bp, Homo sapiens
atcagaccataccac

SEQ ID NO: 29677 - DNA, 15 bp, Homo sapiens
tatcagaccatacca

SEQ ID NO: 29678 - DNA, 15 bp, Homo sapiens
ctatcagaccatacc

SEQ ID NO: 29679 - DNA, 15 bp, Homo sapiens
tctatcagaccatac

SEQ ID NO: 29680 - DNA, 15 bp, Homo sapiens
atctatcagaccata

SEQ ID NO: 29681 - DNA, 15 bp, Homo sapiens
aatctatcagaccat

SEQ ID NO: 29682 - DNA, 15 bp, Homo sapiens
aaatctatcagacca

SEQ ID NO: 29683 - DNA, 15 bp, Homo sapiens
taaatctatcagacc

SEQ ID NO: 29684 - DNA, 15 bp, Homo sapiens
ttaaatctatcagac

SEQ ID NO: 29685 - DNA, 15 bp, Homo sapiens
tttaaatctatcaga

SEQ ID NO: 29686 - DNA, 15 bp, Homo sapiens
atttaaatctatcag

SEQ ID NO: 29687 - DNA, 15 bp, Homo sapiens
catttaaatctatca

SEQ ID NO: 29688 - DNA, 15 bp, Homo sapiens
ccatttaaatctatc

SEQ ID NO: 29689 - DNA, 15 bp, Homo sapiens
accatttaaatctat

SEQ ID NO: 29690 - DNA, 15 bp, Homo sapiens
taccatttaaatcta

SEQ ID NO: 29691 - DNA, 15 bp, Homo sapiens
gtaccatttaaatct

SEQ ID NO: 29692 - DNA, 15 bp, Homo sapiens
agtaccatttaaatc

SEQ ID NO: 29693 - DNA, 15 bp, Homo sapiens
tagtaccatttaaat

SEQ ID NO: 29694 - DNA, 15 bp, Homo sapiens
ctagtaccatttaaa

SEQ ID NO: 29695 - DNA, 15 bp, Homo sapiens
tctagtaccatttaa

SEQ ID NO: 29696 - DNA, 15 bp, Homo sapiens
gtctagtaccattta

SEQ ID NO: 29697 - DNA, 15 bp, Homo sapiens
agtctagtaccattt

SEQ ID NO: 29698 - DNA, 15 bp, Homo sapiens
tagtctagtaccatt

SEQ ID NO: 29699 - DNA, 15 bp, Homo sapiens
ttagtctagtaccat

SEQ ID NO: 29700 - DNA, 15 bp, Homo sapiens
attagtctagtacca

SEQ ID NO: 29701 - DNA, 15 bp, Homo sapiens
cattagtctagtacc

SEQ ID NO: 29702 - DNA, 15 bp, Homo sapiens
acattagtctagtac

SEQ ID NO: 29703 - DNA, 15 bp, Homo sapiens
tacattagtctagta

SEQ ID NO: 29704 - DNA, 15 bp, Homo sapiens
gtacattagtctagt

SEQ ID NO: 29705 - DNA, 15 bp, Homo sapiens
ggtacattagtctag

SEQ ID NO: 29706 - DNA, 15 bp, Homo sapiens
aggtacattagtcta

SEQ ID NO: 29707 - DNA, 15 bp, Homo sapiens
taggtacattagtct

SEQ ID NO: 29708 - DNA, 15 bp, Homo sapiens
ataggtacattagtc

SEQ ID NO: 29709 - DNA, 15 bp, Homo sapiens
tataggtacattagt

SEQ ID NO: 29710 - DNA, 15 bp, Homo sapiens
ttataggtacattag

SEQ ID NO: 29711 - DNA, 15 bp, Homo sapiens
attataggtacatta

SEQ ID NO: 29712 - DNA, 15 bp, Homo sapiens
tattataggtacatt

SEQ ID NO: 29713 - DNA, 15 bp, Homo sapiens
ttattataggtacat

SEQ ID NO: 29714 - DNA, 15 bp, Homo sapiens
cttattataggtaca

SEQ ID NO: 29715 - DNA, 15 bp, Homo sapiens
tcttattataggtac

SEQ ID NO: 29716 - DNA, 15 bp, Homo sapiens
gtcttattataggta

SEQ ID NO: 29717 - DNA, 15 bp, Homo sapiens
ggtcttattataggt

SEQ ID NO: 29718 - DNA, 15 bp, Homo sapiens
aggtcttattatagg

SEQ ID NO: 29719 - DNA, 15 bp, Homo sapiens
aaggtcttattatag

SEQ ID NO: 29720 - DNA, 15 bp, Homo sapiens
gaaggtcttattata

SEQ ID NO: 29721 - DNA, 15 bp, Homo sapiens
agaaggtcttattat

SEQ ID NO: 29722 - DNA, 15 bp, Homo sapiens
cagaaggtcttatta

SEQ ID NO: 29723 - DNA, 15 bp, Homo sapiens
acagaaggtcttatt

SEQ ID NO: 29724 - DNA, 15 bp, Homo sapiens
tacagaaggtcttat

SEQ ID NO: 29725 - DNA, 15 bp, Homo sapiens
ttacagaaggtctta

SEQ ID NO: 29726 - DNA, 15 bp, Homo sapiens
gttacagaaggtctt

SEQ ID NO: 29727 - DNA, 15 bp, Homo sapiens
agttacagaaggtct

SEQ ID NO: 29728 - DNA, 15 bp, Homo sapiens
cagttacagaaggtc

SEQ ID NO: 29729 - DNA, 15 bp, Homo sapiens
tcagttacagaaggt

SEQ ID NO: 29730 - DNA, 15 bp, Homo sapiens
atcagttacagaagg

SEQ ID NO: 29731 - DNA, 15 bp, Homo sapiens
aatcagttacagaag

SEQ ID NO: 29732 - DNA, 15 bp, Homo sapiens
caatcagttacagaa

SEQ ID NO: 29733 - DNA, 15 bp, Homo sapiens
acaatcagttacaga

SEQ ID NO: 29734 - DNA, 15 bp, Homo sapiens
aacaatcagttacag

SEQ ID NO: 29735 - DNA, 15 bp, Homo sapiens
caacaatcagttaca

SEQ ID NO: 29736 - DNA, 15 bp, Homo sapiens
gcaacaatcagttac

SEQ ID NO: 29737 - DNA, 15 bp, Homo sapiens
ggcaacaatcagtta

SEQ ID NO: 29738 - DNA, 15 bp, Homo sapiens
gggcaacaatcagtt

SEQ ID NO: 29739 - DNA, 15 bp, Homo sapiens
agggcaacaatcagt

SEQ ID NO: 29740 - DNA, 15 bp, Homo sapiens
aagggcaacaatcag

SEQ ID NO: 29741 - DNA, 15 bp, Homo sapiens
aaagggcaacaatca

SEQ ID NO: 29742 - DNA, 15 bp, Homo sapiens
gaaagggcaacaatc

SEQ ID NO: 29743 - DNA, 15 bp, Homo sapiens
cgaaagggcaacaat

SEQ ID NO: 29744 - DNA, 15 bp, Homo sapiens
acgaaagggcaacaa

SEQ ID NO: 29745 - DNA, 15 bp, Homo sapiens
aacgaaagggcaaca

SEQ ID NO: 29746 - DNA, 15 bp, Homo sapiens
aaacgaaagggcaac

SEQ ID NO: 29747 - DNA, 15 bp, Homo sapiens
aaaacgaaagggcaa

SEQ ID NO: 29748 - DNA, 15 bp, Homo sapiens
aaaaacgaaagggca

SEQ ID NO: 29749 - DNA, 15 bp, Homo sapiens
aaaaaacgaaagggc

SEQ ID NO: 29750 - DNA, 15 bp, Homo sapiens
aaaaaaacgaaaggg

SEQ ID NO: 29751 - DNA, 15 bp, Homo sapiens
aaaaaaaacgaaagg

SEQ ID NO: 29752 - DNA, 15 bp, Homo sapiens
aaaaaaaaacgaaag

SEQ ID NO: 29753 - DNA, 15 bp, Homo sapiens
aaaaaaaaaacgaaa

SEQ ID NO: 29754 - DNA, 15 bp, Homo sapiens
aaaaaaaaaaacgaa

SEQ ID NO: 29755 - DNA, 15 bp, Homo sapiens
caaaaaaaaaaacga

SEQ ID NO: 29756 - DNA, 15 bp, Homo sapiens
acaaaaaaaaaaacg

SEQ ID NO: 29757 - DNA, 15 bp, Homo sapiens
aacaaaaaaaaaaac

SEQ ID NO: 29758 - DNA, 15 bp, Homo sapiens
aaacaaaaaaaaaaa

SEQ ID NO: 29759 - DNA, 15 bp, Homo sapiens
caaacaaaaaaaaaa

SEQ ID NO: 29760 - DNA, 15 bp, Homo sapiens
acaaacaaaaaaaaa

SEQ ID NO: 29761 - DNA, 15 bp, Homo sapiens
aacaaacaaaaaaaa

SEQ ID NO: 29762 - DNA, 15 bp, Homo sapiens
aaacaaacaaaaaaa

SEQ ID NO: 29763 - DNA, 15 bp, Homo sapiens
caaacaaacaaaaaa

SEQ ID NO: 29764 - DNA, 15 bp, Homo sapiens
aaaaaacaaacaaac

SEQ ID NO: 29765 - DNA, 15 bp, Homo sapiens
aaaaaaacaaacaaa

SEQ ID NO: 29766 - DNA, 15 bp, Homo sapiens
aaaaaaaacaaacaa

SEQ ID NO: 29767 - DNA, 15 bp, Homo sapiens
aaaaaaaaacaaaca

SEQ ID NO: 29768 - DNA, 15 bp, Homo sapiens
caaaaaaaaacaaac

SEQ ID NO: 29769 - DNA, 15 bp, Homo sapiens
tcaaaaaaaaacaaa

SEQ ID NO: 29770 - DNA, 15 bp, Homo sapiens
ctcaaaaaaaaacaa

SEQ ID NO: 29771 - DNA, 15 bp, Homo sapiens
tctcaaaaaaaaaca

SEQ ID NO: 29772 - DNA, 15 bp, Homo sapiens
atctcaaaaaaaaac

SEQ ID NO: 29773 - DNA, 15 bp, Homo sapiens
cccatctcaaaaaaa

SEQ ID NO: 29774 - DNA, 15 bp, Homo sapiens
ccccatctcaaaaaa

SEQ ID NO: 29775 - DNA, 15 bp, Homo sapiens
accccatctcaaaaa

SEQ ID NO: 29776 - DNA, 15 bp, Homo sapiens
gaccccatctcaaaa

SEQ ID NO: 29777 - DNA, 15 bp, Homo sapiens
agaccccatctcaaa

SEQ ID NO: 29778 - DNA, 15 bp, Homo sapiens
gagaccccatctcaa

SEQ ID NO: 29779 - DNA, 15 bp, Homo sapiens
tgagaccccatctca

SEQ ID NO: 29780 - DNA, 15 bp, Homo sapiens
gtgagaccccatctc

SEQ ID NO: 29781 - DNA, 15 bp, Homo sapiens
agtgagaccccatct

SEQ ID NO: 29782 - DNA, 15 bp, Homo sapiens
gagtgagaccccatc

SEQ ID NO: 29783 - DNA, 15 bp, Homo sapiens
agagtgagaccccat

SEQ ID NO: 29784 - DNA, 15 bp, Homo sapiens
cagagtgagacccca

SEQ ID NO: 29785 - DNA, 15 bp, Homo sapiens
acagagtgagacccc

SEQ ID NO: 29786 - DNA, 15 bp, Homo sapiens
tcactgcactccagc

SEQ ID NO: 29787 - DNA, 15 bp, Homo sapiens
atcactgcactccag

SEQ ID NO: 29788 - DNA, 15 bp, Homo sapiens
catcactgcactcca

SEQ ID NO: 29789 - DNA, 15 bp, Homo sapiens
gcatcactgcactcc

SEQ ID NO: 29790 - DNA, 15 bp, Homo sapiens
tgcatcactgcactc

SEQ ID NO: 29791 - DNA, 15 bp, Homo sapiens
ttgcatcactgcact

SEQ ID NO: 29792 - DNA, 15 bp, Homo sapiens
attgcatcactgcac

SEQ ID NO: 29793 - DNA, 15 bp, Homo sapiens
gattgcatcactgca

SEQ ID NO: 29794 - DNA, 15 bp, Homo sapiens
agattgcatcactgc

SEQ ID NO: 29795 - DNA, 15 bp, Homo sapiens
aagattgcatcactg

SEQ ID NO: 29796 - DNA, 15 bp, Homo sapiens
caagattgcatcact

SEQ ID NO: 29797 - DNA, 15 bp, Homo sapiens
ccaagattgcatcac

SEQ ID NO: 29798 - DNA, 15 bp, Homo sapiens
gccaagattgcatca

SEQ ID NO: 29799 - DNA, 15 bp, Homo sapiens
agccaagattgcatc

SEQ ID NO: 29800 - DNA, 15 bp, Homo sapiens
gagccaagattgcat

SEQ ID NO: 29801 - DNA, 15 bp, Homo sapiens
tgagccaagattgca

SEQ ID NO: 29802 - DNA, 15 bp, Homo sapiens
gtgagccaagattgc

SEQ ID NO: 29803 - DNA, 15 bp, Homo sapiens
agtgagccaagattg

SEQ ID NO: 29804 - DNA, 15 bp, Homo sapiens
cagtgagccaagatt

SEQ ID NO: 29805 - DNA, 15 bp, Homo sapiens
ttggaggtggaggtt

SEQ ID NO: 29806 - DNA, 15 bp, Homo sapiens
cttggaggtggaggt

SEQ ID NO: 29807 - DNA, 15 bp, Homo sapiens
ccttggaggtggagg

SEQ ID NO: 29808 - DNA, 15 bp, Homo sapiens
gccttggaggtggag

SEQ ID NO: 29809 - DNA, 15 bp, Homo sapiens
agccttggaggtgga

SEQ ID NO: 29810 - DNA, 15 bp, Homo sapiens
gagccttggaggtgg

SEQ ID NO: 29811 - DNA, 15 bp, Homo sapiens
tgagccttggaggtg

SEQ ID NO: 29812 - DNA, 15 bp, Homo sapiens
ttgagccttggaggt

SEQ ID NO: 29813 - DNA, 15 bp, Homo sapiens
cttgagccttggagg

SEQ ID NO: 29814 - DNA, 15 bp, Homo sapiens
gcttgagccttggag

SEQ ID NO: 29815 - DNA, 15 bp, Homo sapiens
agcttgagccttgga

SEQ ID NO: 29816 - DNA, 15 bp, Homo sapiens
tagcttgagccttgg

SEQ ID NO: 29817 - DNA, 15 bp, Homo sapiens
atagcttgagccttg

SEQ ID NO: 29818 - DNA, 15 bp, Homo sapiens
gatagcttgagcctt

SEQ ID NO: 29819 - DNA, 15 bp, Homo sapiens
ggatagcttgagcct

SEQ ID NO: 29820 - DNA, 15 bp, Homo sapiens
aggatagcttgagcc

SEQ ID NO: 29821 - DNA, 15 bp, Homo sapiens
gaggatagcttgagc

SEQ ID NO: 29822 - DNA, 15 bp, Homo sapiens
ggaggatagcttgag

SEQ ID NO: 29823 - DNA, 15 bp, Homo sapiens
gggaggatagcttga

SEQ ID NO: 29824 - DNA, 15 bp, Homo sapiens
tgggaggatagcttg

SEQ ID NO: 29825 - DNA, 15 bp, Homo sapiens
gtgggaggatagctt

SEQ ID NO: 29826 - DNA, 15 bp, Homo sapiens
agtgggaggatagct

SEQ ID NO: 29827 - DNA, 15 bp, Homo sapiens
aagtgggaggatagc

SEQ ID NO: 29828 - DNA, 15 bp, Homo sapiens
gaagtgggaggatag

SEQ ID NO: 29829 - DNA, 15 bp, Homo sapiens
tgaagtgggaggata

SEQ ID NO: 29830 - DNA, 15 bp, Homo sapiens
ctgaagtgggaggat

SEQ ID NO: 29831 - DNA, 15 bp, Homo sapiens
gctgaagtgggagga

SEQ ID NO: 29832 - DNA, 15 bp, Homo sapiens
ggctgaagtgggagg

SEQ ID NO: 29833 - DNA, 15 bp, Homo sapiens
aggctgaagtgggag

SEQ ID NO: 29834 - DNA, 15 bp, Homo sapiens
gaggctgaagtggga

SEQ ID NO: 29835 - DNA, 15 bp, Homo sapiens
ggaggctgaagtggg

SEQ ID NO: 29836 - DNA, 15 bp, Homo sapiens
aggaggctgaagtgg

SEQ ID NO: 29837 - DNA, 15 bp, Homo sapiens
caggaggctgaagtg

SEQ ID NO: 29838 - DNA, 15 bp, Homo sapiens
tcaggaggctgaagt

SEQ ID NO: 29839 - DNA, 15 bp, Homo sapiens
ctcaggaggctgaag

SEQ ID NO: 29840 - DNA, 15 bp, Homo sapiens
actcaggaggctgaa

SEQ ID NO: 29841 - DNA, 15 bp, Homo sapiens
gtcccagctactcag

SEQ ID NO: 29842 - DNA, 15 bp, Homo sapiens
agtcccagctactca

SEQ ID NO: 29843 - DNA, 15 bp, Homo sapiens
tgcgcctgtagtccc

SEQ ID NO: 29844 - DNA, 15 bp, Homo sapiens
atgcgcctgtagtcc

SEQ ID NO: 29845 - DNA, 15 bp, Homo sapiens
catgcgcctgtagtc

SEQ ID NO: 29846 - DNA, 15 bp, Homo sapiens
gcatgcgcctgtagt

SEQ ID NO: 29847 - DNA, 15 bp, Homo sapiens
ggcatgcgcctgtag

SEQ ID NO: 29848 - DNA, 15 bp, Homo sapiens
gtggtggcatgcgcc

SEQ ID NO: 29849 - DNA, 15 bp, Homo sapiens
tgtggtggcatgcgc

SEQ ID NO: 29850 - DNA, 15 bp, Homo sapiens
gtgtggtggcatgcg

SEQ ID NO: 29851 - DNA, 15 bp, Homo sapiens
ggtgtggtggcatgc

SEQ ID NO: 29852 - DNA, 15 bp, Homo sapiens
gggtgtggtggcatg

SEQ ID NO: 29853 - DNA, 15 bp, Homo sapiens
cgggtgtggtggcat

SEQ ID NO: 29854 - DNA, 15 bp, Homo sapiens
ccgggtgtggtggca

SEQ ID NO: 29855 - DNA, 15 bp, Homo sapiens
accgggtgtggtggc

SEQ ID NO: 29856 - DNA, 15 bp, Homo sapiens
aaccgggtgtggtgg

SEQ ID NO: 29857 - DNA, 15 bp, Homo sapiens
taaccgggtgtggtg

SEQ ID NO: 29858 - DNA, 15 bp, Homo sapiens
ttaaccgggtgtggt

SEQ ID NO: 29859 - DNA, 15 bp, Homo sapiens
attaaccgggtgtgg

SEQ ID NO: 29860 - DNA, 15 bp, Homo sapiens
aattaaccgggtgtg

SEQ ID NO: 29861 - DNA, 15 bp, Homo sapiens
aaattaaccgggtgt

SEQ ID NO: 29862 - DNA, 15 bp, Homo sapiens
aaaattaaccgggtg

SEQ ID NO: 29863 - DNA, 15 bp, Homo sapiens
aaaaattaaccgggt

SEQ ID NO: 29864 - DNA, 15 bp, Homo sapiens
aaaaaattaaccggg

SEQ ID NO: 29865 - DNA, 15 bp, Homo sapiens
caaaaaattaaccgg

SEQ ID NO: 29866 - DNA, 15 bp, Homo sapiens
acaaaaaattaaccg

SEQ ID NO: 29867 - DNA, 15 bp, Homo sapiens
cacaaaaaattaacc

SEQ ID NO: 29868 - DNA, 15 bp, Homo sapiens
ccacaaaaaattaac

SEQ ID NO: 29869 - DNA, 15 bp, Homo sapiens
accacaaaaaattaa

SEQ ID NO: 29870 - DNA, 15 bp, Homo sapiens
aaccacaaaaaatta

SEQ ID NO: 29871 - DNA, 15 bp, Homo sapiens
aaaccacaaaaaatt

SEQ ID NO: 29872 - DNA, 15 bp, Homo sapiens
aaaaccacaaaaaat

SEQ ID NO: 29873 - DNA, 15 bp, Homo sapiens
taaaaccacaaaaaa

SEQ ID NO: 29874 - DNA, 15 bp, Homo sapiens
ataaaaccacaaaaa

SEQ ID NO: 29875 - DNA, 15 bp, Homo sapiens
tataaaaccacaaaa

SEQ ID NO: 29876 - DNA, 15 bp, Homo sapiens
ctataaaaccacaaa

SEQ ID NO: 29877 - DNA, 15 bp, Homo sapiens
tctataaaaccacaa

SEQ ID NO: 29878 - DNA, 15 bp, Homo sapiens
ctctataaaaccaca

SEQ ID NO: 29879 - DNA, 15 bp, Homo sapiens
tctctataaaaccac

SEQ ID NO: 29880 - DNA, 15 bp, Homo sapiens
atctctataaaacca

SEQ ID NO: 29881 - DNA, 15 bp, Homo sapiens
catctctataaaacc

SEQ ID NO: 29882 - DNA, 15 bp, Homo sapiens
ccatctctataaaac

SEQ ID NO: 29883 - DNA, 15 bp, Homo sapiens
cccatctctataaaa

SEQ ID NO: 29884 - DNA, 15 bp, Homo sapiens
ccccatctctataaa

SEQ ID NO: 29885 - DNA, 15 bp, Homo sapiens
accccatctctataa

SEQ ID NO: 29886 - DNA, 15 bp, Homo sapiens
aaccccatctctata

SEQ ID NO: 29887 - DNA, 15 bp, Homo sapiens
aaaccccatctctat

SEQ ID NO: 29888 - DNA, 15 bp, Homo sapiens
gtaacatggtgaaac

SEQ ID NO: 29889 - DNA, 15 bp, Homo sapiens
ggtaacatggtgaaa

SEQ ID NO: 29890 - DNA, 15 bp, Homo sapiens
cggtaacatggtgaa

SEQ ID NO: 29891 - DNA, 15 bp, Homo sapiens
tcggtaacatggtga

SEQ ID NO: 29892 - DNA, 15 bp, Homo sapiens
ctcggtaacatggtg

SEQ ID NO: 29893 - DNA, 15 bp, Homo sapiens
cctcggtaacatggt

SEQ ID NO: 29894 - DNA, 15 bp, Homo sapiens
gcctcggtaacatgg

SEQ ID NO: 29895 - DNA, 15 bp, Homo sapiens
agcctcggtaacatg

SEQ ID NO: 29896 - DNA, 15 bp, Homo sapiens
cagcctcggtaacat

SEQ ID NO: 29897 - DNA, 15 bp, Homo sapiens
ccagcctcggtaaca

SEQ ID NO: 29898 - DNA, 15 bp, Homo sapiens
accagcctcggtaac

SEQ ID NO: 29899 - DNA, 15 bp, Homo sapiens
gaccagcctcggtaa

SEQ ID NO: 29900 - DNA, 15 bp, Homo sapiens
agaccagcctcggta

SEQ ID NO: 29901 - DNA, 15 bp, Homo sapiens
gagaccagcctcggt

SEQ ID NO: 29902 - DNA, 15 bp, Homo sapiens
tgagaccagcctcgg

SEQ ID NO: 29903 - DNA, 15 bp, Homo sapiens
ttgagaccagcctcg

SEQ ID NO: 29904 - DNA, 15 bp, Homo sapiens
tttgagaccagcctc

SEQ ID NO: 29905 - DNA, 15 bp, Homo sapiens
ccaggagtttgagac

SEQ ID NO: 29906 - DNA, 15 bp, Homo sapiens
tccaggagtttgaga

SEQ ID NO: 29907 - DNA, 15 bp, Homo sapiens
gtccaggagtttgag

SEQ ID NO: 29908 - DNA, 15 bp, Homo sapiens
agtccaggagtttga

SEQ ID NO: 29909 - DNA, 15 bp, Homo sapiens
gagtccaggagtttg

SEQ ID NO: 29910 - DNA, 15 bp, Homo sapiens
tgagtccaggagttt

SEQ ID NO: 29911 - DNA, 15 bp, Homo sapiens
ttgagtccaggagtt

SEQ ID NO: 29912 - DNA, 15 bp, Homo sapiens
cttgagtccaggagt

SEQ ID NO: 29913 - DNA, 15 bp, Homo sapiens
gcttgagtccaggag

SEQ ID NO: 29914 - DNA, 15 bp, Homo sapiens
tgcttgagtccagga

SEQ ID NO: 29915 - DNA, 15 bp, Homo sapiens
ctgcttgagtccagg

SEQ ID NO: 29916 - DNA, 15 bp, Homo sapiens
actgcttgagtccag

SEQ ID NO: 29917 - DNA, 15 bp, Homo sapiens
gactgcttgagtcca

SEQ ID NO: 29918 - DNA, 15 bp, Homo sapiens
agactgcttgagtcc

SEQ ID NO: 29919 - DNA, 15 bp, Homo sapiens
cagactgcttgagtc

SEQ ID NO: 29920 - DNA, 15 bp, Homo sapiens
gcagactgcttgagt

SEQ ID NO: 29921 - DNA, 15 bp, Homo sapiens
ggcagactgcttgag

SEQ ID NO: 29922 - DNA, 15 bp, Homo sapiens
gggcagactgcttga

SEQ ID NO: 29923 - DNA, 15 bp, Homo sapiens
tgggcagactgcttg

SEQ ID NO: 29924 - DNA, 15 bp, Homo sapiens
gtgggcagactgctt

SEQ ID NO: 29925 - DNA, 15 bp, Homo sapiens
agtgggcagactgct

SEQ ID NO: 29926 - DNA, 15 bp, Homo sapiens
aagtgggcagactgc

SEQ ID NO: 29927 - DNA, 15 bp, Homo sapiens
gaagtgggcagactg

SEQ ID NO: 29928 - DNA, 15 bp, Homo sapiens
tgaagtgggcagact

SEQ ID NO: 29929 - DNA, 15 bp, Homo sapiens
ctgaagtgggcagac

SEQ ID NO: 29930 - DNA, 15 bp, Homo sapiens
gctgaagtgggcaga

SEQ ID NO: 29931 - DNA, 15 bp, Homo sapiens
ggctgaagtgggcag

SEQ ID NO: 29932 - DNA, 15 bp, Homo sapiens
aggctgaagtgggca

SEQ ID NO: 29933 - DNA, 15 bp, Homo sapiens
gaggctgaagtgggc

SEQ ID NO: 29934 - DNA, 15 bp, Homo sapiens
gggaggctgaagtgg

SEQ ID NO: 29935 - DNA, 15 bp, Homo sapiens
tgggaggctgaagtg

SEQ ID NO: 29936 - DNA, 15 bp, Homo sapiens
ttgggaggctgaagt

SEQ ID NO: 29937 - DNA, 15 bp, Homo sapiens
tttgggaggctgaag

SEQ ID NO: 29938 - DNA, 15 bp, Homo sapiens
ctttgggaggctgaa

SEQ ID NO: 29939 - DNA, 15 bp, Homo sapiens
gcagcactttgggag

SEQ ID NO: 29940 - DNA, 15 bp, Homo sapiens
tgcagcactttggga

SEQ ID NO: 29941 - DNA, 15 bp, Homo sapiens
ctgcagcactttggg

SEQ ID NO: 29942 - DNA, 15 bp, Homo sapiens
actgcagcactttgg

SEQ ID NO: 29943 - DNA, 15 bp, Homo sapiens
aactgcagcactttg

SEQ ID NO: 29944 - DNA, 15 bp, Homo sapiens
taactgcagcacttt

SEQ ID NO: 29945 - DNA, 15 bp, Homo sapiens
gtaactgcagcactt

SEQ ID NO: 29946 - DNA, 15 bp, Homo sapiens
tgtaactgcagcact

SEQ ID NO: 29947 - DNA, 15 bp, Homo sapiens
ctgtaactgcagcac

SEQ ID NO: 29948 - DNA, 15 bp, Homo sapiens
cctgtaactgcagca

SEQ ID NO: 29949 - DNA, 15 bp, Homo sapiens
gcctgtaactgcagc

SEQ ID NO: 29950 - DNA, 15 bp, Homo sapiens
agcctgtaactgcag

SEQ ID NO: 29951 - DNA, 15 bp, Homo sapiens
aagcctgtaactgca

SEQ ID NO: 29952 - DNA, 15 bp, Homo sapiens
caagcctgtaactgc

SEQ ID NO: 29953 - DNA, 15 bp, Homo sapiens
tcaagcctgtaactg

SEQ ID NO: 29954 - DNA, 15 bp, Homo sapiens
ctcaagcctgtaact

SEQ ID NO: 29955 - DNA, 15 bp, Homo sapiens
gctcaagcctgtaac

SEQ ID NO: 29956 - DNA, 15 bp, Homo sapiens
agtggctcaagcctg

SEQ ID NO: 29957 - DNA, 15 bp, Homo sapiens
cagtggctcaagcct

SEQ ID NO: 29958 - DNA, 15 bp, Homo sapiens
acagtggctcaagcc

SEQ ID NO: 29959 - DNA, 15 bp, Homo sapiens
cacagtggctcaagc

SEQ ID NO: 29960 - DNA, 15 bp, Homo sapiens
gcacagtggctcaag

SEQ ID NO: 29961 - DNA, 15 bp, Homo sapiens
ggcacagtggctcaa

SEQ ID NO: 29962 - DNA, 15 bp, Homo sapiens
aggcacagtggctca

SEQ ID NO: 29963 - DNA, 15 bp, Homo sapiens
ggccaggcacagtgg

SEQ ID NO: 29964 - DNA, 15 bp, Homo sapiens
aggccaggcacagtg

SEQ ID NO: 29965 - DNA, 15 bp, Homo sapiens
caggccaggcacagt

SEQ ID NO: 29966 - DNA, 15 bp, Homo sapiens
gcaggccaggcacag

SEQ ID NO: 29967 - DNA, 15 bp, Homo sapiens
ggcaggccaggcaca

SEQ ID NO: 29968 - DNA, 15 bp, Homo sapiens
gggcaggccaggcac

SEQ ID NO: 29969 - DNA, 15 bp, Homo sapiens
agggcaggccaggca

SEQ ID NO: 29970 - DNA, 15 bp, Homo sapiens
aagggcaggccaggc

SEQ ID NO: 29971 - DNA, 15 bp, Homo sapiens
aaagggcaggccagg

SEQ ID NO: 29972 - DNA, 15 bp, Homo sapiens
taaagggcaggccag

SEQ ID NO: 29973 - DNA, 15 bp, Homo sapiens
gtaaagggcaggcca

SEQ ID NO: 29974 - DNA, 15 bp, Homo sapiens
agtaaagggcaggcc

SEQ ID NO: 29975 - DNA, 15 bp, Homo sapiens
aagtaaagggcaggc

SEQ ID NO: 29976 - DNA, 15 bp, Homo sapiens
aaagtaaagggcagg

SEQ ID NO: 29977 - DNA, 15 bp, Homo sapiens
aaaagtaaagggcag

SEQ ID NO: 29978 - DNA, 15 bp, Homo sapiens
taaaagtaaagggca

SEQ ID NO: 29979 - DNA, 15 bp, Homo sapiens
ttaaaagtaaagggc

SEQ ID NO: 29980 - DNA, 15 bp, Homo sapiens
attaaaagtaaaggg

SEQ ID NO: 29981 - DNA, 15 bp, Homo sapiens
aattaaaagtaaagg

SEQ ID NO: 29982 - DNA, 15 bp, Homo sapiens
caattaaaagtaaag

SEQ ID NO: 29983 - DNA, 15 bp, Homo sapiens
ccaattaaaagtaaa

SEQ ID NO: 29984 - DNA, 15 bp, Homo sapiens
accaattaaaagtaa

SEQ ID NO: 29985 - DNA, 15 bp, Homo sapiens
caccaattaaaagta

SEQ ID NO: 29986 - DNA, 15 bp, Homo sapiens
acaccaattaaaagt

SEQ ID NO: 29987 - DNA, 15 bp, Homo sapiens
tacaccaattaaaag

SEQ ID NO: 29988 - DNA, 15 bp, Homo sapiens
atacaccaattaaaa

SEQ ID NO: 29989 - DNA, 15 bp, Homo sapiens
aatacaccaattaaa

SEQ ID NO: 29990 - DNA, 15 bp, Homo sapiens
aaatacaccaattaa

SEQ ID NO: 29991 - DNA, 15 bp, Homo sapiens
caaatacaccaatta

SEQ ID NO: 29992 - DNA, 15 bp, Homo sapiens
acaaatacaccaatt

SEQ ID NO: 29993 - DNA, 15 bp, Homo sapiens
cacaaatacaccaat

SEQ ID NO: 29994 - DNA, 15 bp, Homo sapiens
acacaaatacaccaa

SEQ ID NO: 29995 - DNA, 15 bp, Homo sapiens
aacacaaatacacca

SEQ ID NO: 29996 - DNA, 15 bp, Homo sapiens
aaacacaaatacacc

SEQ ID NO: 29997 - DNA, 15 bp, Homo sapiens
gaaacacaaatacac

SEQ ID NO: 29998 - DNA, 15 bp, Homo sapiens
tgaaacacaaataca

SEQ ID NO: 29999 - DNA, 15 bp, Homo sapiens
atgaaacacaaatac

SEQ ID NO: 30000 - DNA, 15 bp, Homo sapiens
gatgaaacacaaata

SEQ ID NO: 30001 - DNA, 15 bp, Homo sapiens
agatgaaacacaaat

SEQ ID NO: 30002 - DNA, 15 bp, Homo sapiens
aagatgaaacacaaa

SEQ ID NO: 30003 - DNA, 15 bp, Homo sapiens
aaagatgaaacacaa

SEQ ID NO: 30004 - DNA, 15 bp, Homo sapiens
aaaagatgaaacaca

SEQ ID NO: 30005 - DNA, 15 bp, Homo sapiens
taaaagatgaaacac

SEQ ID NO: 30006 - DNA, 15 bp, Homo sapiens
gtaaaagatgaaaca

SEQ ID NO: 30007 - DNA, 15 bp, Homo sapiens
ggtaaaagatgaaac

SEQ ID NO: 30008 - DNA, 15 bp, Homo sapiens
aggtaaaagatgaaa

SEQ ID NO: 30009 - DNA, 15 bp, Homo sapiens
taggtaaaagatgaa

SEQ ID NO: 30010 - DNA, 15 bp, Homo sapiens
gtaggtaaaagatga

SEQ ID NO: 30011 - DNA, 15 bp, Homo sapiens
agtaggtaaaagatg

SEQ ID NO: 30012 - DNA, 15 bp, Homo sapiens
cagtaggtaaaagat

SEQ ID NO: 30013 - DNA, 15 bp, Homo sapiens
ccagtaggtaaaaga

SEQ ID NO: 30014 - DNA, 15 bp, Homo sapiens
accagtaggtaaaag

SEQ ID NO: 30015 - DNA, 15 bp, Homo sapiens
aaccagtaggtaaaa

SEQ ID NO: 30016 - DNA, 15 bp, Homo sapiens
aaaccagtaggtaaa

SEQ ID NO: 30017 - DNA, 15 bp, Homo sapiens
aaaaccagtaggtaa

SEQ ID NO: 30018 - DNA, 15 bp, Homo sapiens
aaaaaccagtaggta

SEQ ID NO: 30019 - DNA, 15 bp, Homo sapiens
taaaaaccagtaggt

SEQ ID NO: 30020 - DNA, 15 bp, Homo sapiens
ttaaaaaccagtagg

SEQ ID NO: 30021 - DNA, 15 bp, Homo sapiens
tttaaaaaccagtag

SEQ ID NO: 30022 - DNA, 15 bp, Homo sapiens
atttaaaaaccagta

SEQ ID NO: 30023 - DNA, 15 bp, Homo sapiens
tatttaaaaaccagt

SEQ ID NO: 30024 - DNA, 15 bp, Homo sapiens
atatttaaaaaccag

SEQ ID NO: 30025 - DNA, 15 bp, Homo sapiens
tatatttaaaaacca

SEQ ID NO: 30026 - DNA, 15 bp, Homo sapiens
ctatatttaaaaacc

SEQ ID NO: 30027 - DNA, 15 bp, Homo sapiens
cctatatttaaaaac

SEQ ID NO: 30028 - DNA, 15 bp, Homo sapiens
ccctatatttaaaaa

SEQ ID NO: 30029 - DNA, 15 bp, Homo sapiens
tccctatatttaaaa

SEQ ID NO: 30030 - DNA, 15 bp, Homo sapiens
ctccctatatttaaa

SEQ ID NO: 30031 - DNA, 15 bp, Homo sapiens
actccctatatttaa

SEQ ID NO: 30032 - DNA, 15 bp, Homo sapiens
cactccctatattta

SEQ ID NO: 30033 - DNA, 15 bp, Homo sapiens
ccactccctatattt

SEQ ID NO: 30034 - DNA, 15 bp, Homo sapiens
accactccctatatt

SEQ ID NO: 30035 - DNA, 15 bp, Homo sapiens
taccactccctatat

SEQ ID NO: 30036 - DNA, 15 bp, Homo sapiens
ttaccactccctata

SEQ ID NO: 30037 - DNA, 15 bp, Homo sapiens
cttaccactccctat

SEQ ID NO: 30038 - DNA, 15 bp, Homo sapiens
acttaccactcccta

SEQ ID NO: 30039 - DNA, 15 bp, Homo sapiens
gacttaccactccct

SEQ ID NO: 30040 - DNA, 15 bp, Homo sapiens
agacttaccactccc

SEQ ID NO: 30041 - DNA, 15 bp, Homo sapiens
cagacttaccactcc

SEQ ID NO: 30042 - DNA, 15 bp, Homo sapiens
acagacttaccactc

SEQ ID NO: 30043 - DNA, 15 bp, Homo sapiens
tacagacttaccact

SEQ ID NO: 30044 - DNA, 15 bp, Homo sapiens
ctacagacttaccac

SEQ ID NO: 30045 - DNA, 15 bp, Homo sapiens
tctacagacttacca

SEQ ID NO: 30046 - DNA, 15 bp, Homo sapiens
atctacagacttacc

SEQ ID NO: 30047 - DNA, 15 bp, Homo sapiens
tatctacagacttac

SEQ ID NO: 30048 - DNA, 15 bp, Homo sapiens
ctatctacagactta

SEQ ID NO: 30049 - DNA, 15 bp, Homo sapiens
tctatctacagactt

SEQ ID NO: 30050 - DNA, 15 bp, Homo sapiens
ttctatctacagact

SEQ ID NO: 30051 - DNA, 15 bp, Homo sapiens
gttctatctacagac

SEQ ID NO: 30052 - DNA, 15 bp, Homo sapiens
tgttctatctacaga

SEQ ID NO: 30053 - DNA, 15 bp, Homo sapiens
ctgttctatctacag

SEQ ID NO: 30054 - DNA, 15 bp, Homo sapiens
tctgttctatctaca

SEQ ID NO: 30055 - DNA, 15 bp, Homo sapiens
ctctgttctatctac

SEQ ID NO: 30056 - DNA, 15 bp, Homo sapiens
actctgttctatcta

SEQ ID NO: 30057 - DNA, 15 bp, Homo sapiens
tactctgttctatct

SEQ ID NO: 30058 - DNA, 15 bp, Homo sapiens
atactctgttctatc

SEQ ID NO: 30059 - DNA, 15 bp, Homo sapiens
aatactctgttctat

SEQ ID NO: 30060 - DNA, 15 bp, Homo sapiens
taatactctgttcta

SEQ ID NO: 30061 - DNA, 15 bp, Homo sapiens
ttaatactctgttct

SEQ ID NO: 30062 - DNA, 15 bp, Homo sapiens
cttaatactctgttc

SEQ ID NO: 30063 - DNA, 15 bp, Homo sapiens
acttaatactctgtt

SEQ ID NO: 30064 - DNA, 15 bp, Homo sapiens
tacttaatactctgt

SEQ ID NO: 30065 - DNA, 15 bp, Homo sapiens
ctacttaatactctg

SEQ ID NO: 30066 - DNA, 15 bp, Homo sapiens
tctacttaatactct

SEQ ID NO: 30067 - DNA, 15 bp, Homo sapiens
gtctacttaatactc

SEQ ID NO: 30068 - DNA, 15 bp, Homo sapiens
agtctacttaatact

SEQ ID NO: 30069 - DNA, 15 bp, Homo sapiens
aagtctacttaatac

SEQ ID NO: 30070 - DNA, 15 bp, Homo sapiens
taagtctacttaata

SEQ ID NO: 30071 - DNA, 15 bp, Homo sapiens
ttaagtctacttaat

SEQ ID NO: 30072 - DNA, 15 bp, Homo sapiens
attaagtctacttaa

SEQ ID NO: 30073 - DNA, 15 bp, Homo sapiens
cattaagtctactta

SEQ ID NO: 30074 - DNA, 15 bp, Homo sapiens
ccattaagtctactt

SEQ ID NO: 30075 - DNA, 15 bp, Homo sapiens
gccattaagtctact

SEQ ID NO: 30076 - DNA, 15 bp, Homo sapiens
ggccattaagtctac

SEQ ID NO: 30077 - DNA, 15 bp, Homo sapiens
tggccattaagtcta

SEQ ID NO: 30078 - DNA, 15 bp, Homo sapiens
ctggccattaagtct

SEQ ID NO: 30079 - DNA, 15 bp, Homo sapiens
actggccattaagtc

SEQ ID NO: 30080 - DNA, 15 bp, Homo sapiens
tactggccattaagt

SEQ ID NO: 30081 - DNA, 15 bp, Homo sapiens
ttactggccattaag

SEQ ID NO: 30082 - DNA, 15 bp, Homo sapiens
attactggccattaa

SEQ ID NO: 30083 - DNA, 15 bp, Homo sapiens
gattactggccatta

SEQ ID NO: 30084 - DNA, 15 bp, Homo sapiens
agattactggccatt

SEQ ID NO: 30085 - DNA, 15 bp, Homo sapiens
aagattactggccat

SEQ ID NO: 30086 - DNA, 15 bp, Homo sapiens
aaagattactggcca

SEQ ID NO: 30087 - DNA, 15 bp, Homo sapiens
taaagattactggcc

SEQ ID NO: 30088 - DNA, 15 bp, Homo sapiens
ctaaagattactggc

SEQ ID NO: 30089 - DNA, 15 bp, Homo sapiens
tctaaagattactgg

SEQ ID NO: 30090 - DNA, 15 bp, Homo sapiens
ctctaaagattactg

SEQ ID NO: 30091 - DNA, 15 bp, Homo sapiens
actctaaagattact

SEQ ID NO: 30092 - DNA, 15 bp, Homo sapiens
tactctaaagattac

SEQ ID NO: 30093 - DNA, 15 bp, Homo sapiens
gtactctaaagatta

SEQ ID NO: 30094 - DNA, 15 bp, Homo sapiens
tgtactctaaagatt

SEQ ID NO: 30095 - DNA, 15 bp, Homo sapiens
atgtactctaaagat

SEQ ID NO: 30096 - DNA, 15 bp, Homo sapiens
gatgtactctaaaga

SEQ ID NO: 30097 - DNA, 15 bp, Homo sapiens
tgatgtactctaaag

SEQ ID NO: 30098 - DNA, 15 bp, Homo sapiens
ctgatgtactctaaa

SEQ ID NO: 30099 - DNA, 15 bp, Homo sapiens
tctgatgtactctaa

SEQ ID NO: 30100 - DNA, 15 bp, Homo sapiens
ttctgatgtactcta

SEQ ID NO: 30101 - DNA, 15 bp, Homo sapiens
gttctgatgtactct

SEQ ID NO: 30102 - DNA, 15 bp, Homo sapiens
ggttctgatgtactc

SEQ ID NO: 30103 - DNA, 15 bp, Homo sapiens
tggttctgatgtact

SEQ ID NO: 30104 - DNA, 15 bp, Homo sapiens
ctggttctgatgtac

SEQ ID NO: 30105 - DNA, 15 bp, Homo sapiens
actggttctgatgta

SEQ ID NO: 30106 - DNA, 15 bp, Homo sapiens
aactggttctgatgt

SEQ ID NO: 30107 - DNA, 15 bp, Homo sapiens
aaactggttctgatg

SEQ ID NO: 30108 - DNA, 15 bp, Homo sapiens
aaaactggttctgat

SEQ ID NO: 30109 - DNA, 15 bp, Homo sapiens
gaaaactggttctga

SEQ ID NO: 30110 - DNA, 15 bp, Homo sapiens
agaaaactggttctg

SEQ ID NO: 30111 - DNA, 15 bp, Homo sapiens
cagaaaactggttct

SEQ ID NO: 30112 - DNA, 15 bp, Homo sapiens
tcagaaaactggttc

SEQ ID NO: 30113 - DNA, 15 bp, Homo sapiens
atcagaaaactggtt

SEQ ID NO: 30114 - DNA, 15 bp, Homo sapiens
catcagaaaactggt

SEQ ID NO: 30115 - DNA, 15 bp, Homo sapiens
ccatcagaaaactgg

SEQ ID NO: 30116 - DNA, 15 bp, Homo sapiens
gccatcagaaaactg

SEQ ID NO: 30117 - DNA, 15 bp, Homo sapiens
ggccatcagaaaact

SEQ ID NO: 30118 - DNA, 15 bp, Homo sapiens
tggccatcagaaaac

SEQ ID NO: 30119 - DNA, 15 bp, Homo sapiens
ttggccatcagaaaa

SEQ ID NO: 30120 - DNA, 15 bp, Homo sapiens
attggccatcagaaa

SEQ ID NO: 30121 - DNA, 15 bp, Homo sapiens
gattggccatcagaa

SEQ ID NO: 30122 - DNA, 15 bp, Homo sapiens
agattggccatcaga

SEQ ID NO: 30123 - DNA, 15 bp, Homo sapiens
cagattggccatcag

SEQ ID NO: 30124 - DNA, 15 bp, Homo sapiens
gcagattggccatca

SEQ ID NO: 30125 - DNA, 15 bp, Homo sapiens
agcagattggccatc

SEQ ID NO: 30126 - DNA, 15 bp, Homo sapiens
aagcagattggccat

SEQ ID NO: 30127 - DNA, 15 bp, Homo sapiens
aaagcagattggcca

SEQ ID NO: 30128 - DNA, 15 bp, Homo sapiens
aaaagcagattggcc

SEQ ID NO: 30129 - DNA, 15 bp, Homo sapiens
taaaagcagattggc

SEQ ID NO: 30130 - DNA, 15 bp, Homo sapiens
ttaaaagcagattgg

SEQ ID NO: 30131 - DNA, 15 bp, Homo sapiens
attaaaagcagattg

SEQ ID NO: 30132 - DNA, 15 bp, Homo sapiens
aattaaaagcagatt

SEQ ID NO: 30133 - DNA, 15 bp, Homo sapiens
gaattaaaagcagat

SEQ ID NO: 30134 - DNA, 15 bp, Homo sapiens
tgaattaaaagcaga

SEQ ID NO: 30135 - DNA, 15 bp, Homo sapiens
gtgaattaaaagcag

SEQ ID NO: 30136 - DNA, 15 bp, Homo sapiens
agtgaattaaaagca

SEQ ID NO: 30137 - DNA, 15 bp, Homo sapiens
gagtgaattaaaagc

SEQ ID NO: 30138 - DNA, 15 bp, Homo sapiens
agagtgaattaaaag

SEQ ID NO: 30139 - DNA, 15 bp, Homo sapiens
aagagtgaattaaaa

SEQ ID NO: 30140 - DNA, 15 bp, Homo sapiens
taagagtgaattaaa

SEQ ID NO: 30141 - DNA, 15 bp, Homo sapiens
ctaagagtgaattaa

SEQ ID NO: 30142 - DNA, 15 bp, Homo sapiens
tctaagagtgaatta

SEQ ID NO: 30143 - DNA, 15 bp, Homo sapiens
gtctaagagtgaatt

SEQ ID NO: 30144 - DNA, 15 bp, Homo sapiens
cgtctaagagtgaat

SEQ ID NO: 30145 - DNA, 15 bp, Homo sapiens
acgtctaagagtgaa

SEQ ID NO: 30146 - DNA, 15 bp, Homo sapiens
aacgtctaagagtga

SEQ ID NO: 30147 - DNA, 15 bp, Homo sapiens
taacgtctaagagtg

SEQ ID NO: 30148 - DNA, 15 bp, Homo sapiens
ctaacgtctaagagt

SEQ ID NO: 30149 - DNA, 15 bp, Homo sapiens
tctaacgtctaagag

SEQ ID NO: 30150 - DNA, 15 bp, Homo sapiens
ctctaacgtctaaga

SEQ ID NO: 30151 - DNA, 15 bp, Homo sapiens
tctctaacgtctaag

SEQ ID NO: 30152 - DNA, 15 bp, Homo sapiens
ttctctaacgtctaa

SEQ ID NO: 30153 - DNA, 15 bp, Homo sapiens
tttctctaacgtcta

SEQ ID NO: 30154 - DNA, 15 bp, Homo sapiens
atttctctaacgtct

SEQ ID NO: 30155 - DNA, 15 bp, Homo sapiens
tatttctctaacgtc

SEQ ID NO: 30156 - DNA, 15 bp, Homo sapiens
ctatttctctaacgt

SEQ ID NO: 30157 - DNA, 15 bp, Homo sapiens
cctatttctctaacg

SEQ ID NO: 30158 - DNA, 15 bp, Homo sapiens
acctatttctctaac

SEQ ID NO: 30159 - DNA, 15 bp, Homo sapiens
cacctatttctctaa

SEQ ID NO: 30160 - DNA, 15 bp, Homo sapiens
acacctatttctcta

SEQ ID NO: 30161 - DNA, 15 bp, Homo sapiens
cacacctatttctct

SEQ ID NO: 30162 - DNA, 15 bp, Homo sapiens
ccacacctatttctc

SEQ ID NO: 30163 - DNA, 15 bp, Homo sapiens
accacacctatttct

SEQ ID NO: 30164 - DNA, 15 bp, Homo sapiens
aaccacacctatttc

SEQ ID NO: 30165 - DNA, 15 bp, Homo sapiens
aaaccacacctattt

SEQ ID NO: 30166 - DNA, 15 bp, Homo sapiens
gaaaccacacctatt

SEQ ID NO: 30167 - DNA, 15 bp, Homo sapiens
agaaaccacacctat

SEQ ID NO: 30168 - DNA, 15 bp, Homo sapiens
cagaaaccacaccta

SEQ ID NO: 30169 - DNA, 15 bp, Homo sapiens
gcagaaaccacacct

SEQ ID NO: 30170 - DNA, 15 bp, Homo sapiens
tgcagaaaccacacc

SEQ ID NO: 30171 - DNA, 15 bp, Homo sapiens
atgcagaaaccacac

SEQ ID NO: 30172 - DNA, 15 bp, Homo sapiens
tatgcagaaaccaca

SEQ ID NO: 30173 - DNA, 15 bp, Homo sapiens
ctatgcagaaaccac

SEQ ID NO: 30174 - DNA, 15 bp, Homo sapiens
cctatgcagaaacca

SEQ ID NO: 30175 - DNA, 15 bp, Homo sapiens
ccctatgcagaaacc

SEQ ID NO: 30176 - DNA, 15 bp, Homo sapiens
tccctatgcagaaac

SEQ ID NO: 30177 - DNA, 15 bp, Homo sapiens
ttccctatgcagaaa

SEQ ID NO: 30178 - DNA, 15 bp, Homo sapiens
tttccctatgcagaa

SEQ ID NO: 30179 - DNA, 15 bp, Homo sapiens
ttttccctatgcaga

SEQ ID NO: 30180 - DNA, 15 bp, Homo sapiens
attttccctatgcag

SEQ ID NO: 30181 - DNA, 15 bp, Homo sapiens
aattttccctatgca

SEQ ID NO: 30182 - DNA, 15 bp, Homo sapiens
gaattttccctatgc

SEQ ID NO: 30183 - DNA, 15 bp, Homo sapiens
agaattttccctatg

SEQ ID NO: 30184 - DNA, 15 bp, Homo sapiens
cagaattttccctat

SEQ ID NO: 30185 - DNA, 15 bp, Homo sapiens
tcagaattttcccta

SEQ ID NO: 30186 - DNA, 15 bp, Homo sapiens
ttcagaattttccct

SEQ ID NO: 30187 - DNA, 15 bp, Homo sapiens
tttcagaattttccc

SEQ ID NO: 30188 - DNA, 15 bp, Homo sapiens
atttcagaattttcc

SEQ ID NO: 30189 - DNA, 15 bp, Homo sapiens
aatttcagaattttc

SEQ ID NO: 30190 - DNA, 15 bp, Homo sapiens
taatttcagaatttt

SEQ ID NO: 30191 - DNA, 15 bp, Homo sapiens
ttaatttcagaattt

SEQ ID NO: 30192 - DNA, 15 bp, Homo sapiens
tttaatttcagaatt

SEQ ID NO: 30193 - DNA, 15 bp, Homo sapiens
ttttaatttcagaat

SEQ ID NO: 30194 - DNA, 15 bp, Homo sapiens
tttttaatttcagaa

SEQ ID NO: 30195 - DNA, 15 bp, Homo sapiens
atttttaatttcaga

SEQ ID NO: 30196 - DNA, 15 bp, Homo sapiens
aatttttaatttcag

SEQ ID NO: 30197 - DNA, 15 bp, Homo sapiens
aaatttttaatttca

SEQ ID NO: 30198 - DNA, 15 bp, Homo sapiens
taaatttttaatttc

SEQ ID NO: 30199 - DNA, 15 bp, Homo sapiens
ttaaatttttaattt

SEQ ID NO: 30200 - DNA, 15 bp, Homo sapiens
attaaatttttaatt

SEQ ID NO: 30201 - DNA, 15 bp, Homo sapiens
cattaaatttttaat

SEQ ID NO: 30202 - DNA, 15 bp, Homo sapiens
ccattaaatttttaa

SEQ ID NO: 30203 - DNA, 15 bp, Homo sapiens
tccattaaattttta

SEQ ID NO: 30204 - DNA, 15 bp, Homo sapiens
atccattaaattttt

SEQ ID NO: 30205 - DNA, 15 bp, Homo sapiens
gatccattaaatttt

SEQ ID NO: 30206 - DNA, 15 bp, Homo sapiens
ggatccattaaattt

SEQ ID NO: 30207 - DNA, 15 bp, Homo sapiens
aggatccattaaatt

SEQ ID NO: 30208 - DNA, 15 bp, Homo sapiens
taggatccattaaat

SEQ ID NO: 30209 - DNA, 15 bp, Homo sapiens
ttaggatccattaaa

SEQ ID NO: 30210 - DNA, 15 bp, Homo sapiens
cttaggatccattaa

SEQ ID NO: 30211 - DNA, 15 bp, Homo sapiens
acttaggatccatta

SEQ ID NO: 30212 - DNA, 15 bp, Homo sapiens
cacttaggatccatt

SEQ ID NO: 30213 - DNA, 15 bp, Homo sapiens
ccacttaggatccat

SEQ ID NO: 30214 - DNA, 15 bp, Homo sapiens
tccacttaggatcca

SEQ ID NO: 30215 - DNA, 15 bp, Homo sapiens
ttccacttaggatcc

SEQ ID NO: 30216 - DNA, 15 bp, Homo sapiens
tttccacttaggatc

SEQ ID NO: 30217 - DNA, 15 bp, Homo sapiens
atttccacttaggat

SEQ ID NO: 30218 - DNA, 15 bp, Homo sapiens
tatttccacttagga

SEQ ID NO: 30219 - DNA, 15 bp, Homo sapiens
ttatttccacttagg

SEQ ID NO: 30220 - DNA, 15 bp, Homo sapiens
attatttccacttag

SEQ ID NO: 30221 - DNA, 15 bp, Homo sapiens
gattatttccactta

SEQ ID NO: 30222 - DNA, 15 bp, Homo sapiens
agattatttccactt

SEQ ID NO: 30223 - DNA, 15 bp, Homo sapiens
tagattatttccact

SEQ ID NO: 30224 - DNA, 15 bp, Homo sapiens
ctagattatttccac

SEQ ID NO: 30225 - DNA, 15 bp, Homo sapiens
cctagattatttcca

SEQ ID NO: 30226 - DNA, 15 bp, Homo sapiens
acctagattatttcc

SEQ ID NO: 30227 - DNA, 15 bp, Homo sapiens
tacctagattatttc

SEQ ID NO: 30228 - DNA, 15 bp, Homo sapiens
ttacctagattattt

SEQ ID NO: 30229 - DNA, 15 bp, Homo sapiens
tttacctagattatt

SEQ ID NO: 30230 - DNA, 15 bp, Homo sapiens
atttacctagattat

SEQ ID NO: 30231 - DNA, 15 bp, Homo sapiens
tatttacctagatta

SEQ ID NO: 30232 - DNA, 15 bp, Homo sapiens
ctatttacctagatt

SEQ ID NO: 30233 - DNA, 15 bp, Homo sapiens
cctatttacctagat

SEQ ID NO: 30234 - DNA, 15 bp, Homo sapiens
tcctatttacctaga

SEQ ID NO: 30235 - DNA, 15 bp, Homo sapiens
ttcctatttacctag

SEQ ID NO: 30236 - DNA, 15 bp, Homo sapiens
attcctatttaccta

SEQ ID NO: 30237 - DNA, 15 bp, Homo sapiens
aattcctatttacct

SEQ ID NO: 30238 - DNA, 15 bp, Homo sapiens
taattcctatttacc

SEQ ID NO: 30239 - DNA, 15 bp, Homo sapiens
ttaattcctatttac

SEQ ID NO: 30240 - DNA, 15 bp, Homo sapiens
tttaattcctattta

SEQ ID NO: 30241 - DNA, 15 bp, Homo sapiens
atttaattcctattt

SEQ ID NO: 30242 - DNA, 15 bp, Homo sapiens
catttaattcctatt

SEQ ID NO: 30243 - DNA, 15 bp, Homo sapiens
tcatttaattcctat

SEQ ID NO: 30244 - DNA, 15 bp, Homo sapiens
ttcatttaattccta

SEQ ID NO: 30245 - DNA, 15 bp, Homo sapiens
tttcatttaattcct

SEQ ID NO: 30246 - DNA, 15 bp, Homo sapiens
ctttcatttaattcc

SEQ ID NO: 30247 - DNA, 15 bp, Homo sapiens
tctttcatttaattc

SEQ ID NO: 30248 - DNA, 15 bp, Homo sapiens
ctctttcatttaatt

SEQ ID NO: 30249 - DNA, 15 bp, Homo sapiens
actctttcatttaat

SEQ ID NO: 30250 - DNA, 15 bp, Homo sapiens
tactctttcatttaa

SEQ ID NO: 30251 - DNA, 15 bp, Homo sapiens
atactctttcattta

SEQ ID NO: 30252 - DNA, 15 bp, Homo sapiens
catactctttcattt

SEQ ID NO: 30253 - DNA, 15 bp, Homo sapiens
tcatactctttcatt

SEQ ID NO: 30254 - DNA, 15 bp, Homo sapiens
ctcatactctttcat

SEQ ID NO: 30255 - DNA, 15 bp, Homo sapiens
gctcatactctttca

SEQ ID NO: 30256 - DNA, 15 bp, Homo sapiens
agctcatactctttc

SEQ ID NO: 30257 - DNA, 15 bp, Homo sapiens
tagctcatactcttt

SEQ ID NO: 30258 - DNA, 15 bp, Homo sapiens
gtagctcatactctt

SEQ ID NO: 30259 - DNA, 15 bp, Homo sapiens
tgtagctcatactct

SEQ ID NO: 30260 - DNA, 15 bp, Homo sapiens
atgtagctcatactc

SEQ ID NO: 30261 - DNA, 15 bp, Homo sapiens
gatgtagctcatact

SEQ ID NO: 30262 - DNA, 15 bp, Homo sapiens
agatgtagctcatac

SEQ ID NO: 30263 - DNA, 15 bp, Homo sapiens
aagatgtagctcata

SEQ ID NO: 30264 - DNA, 15 bp, Homo sapiens
gaagatgtagctcat

SEQ ID NO: 30265 - DNA, 15 bp, Homo sapiens
tgaagatgtagctca

SEQ ID NO: 30266 - DNA, 15 bp, Homo sapiens
ctgaagatgtagctc

SEQ ID NO: 30267 - DNA, 15 bp, Homo sapiens
actgaagatgtagct

SEQ ID NO: 30268 - DNA, 15 bp, Homo sapiens
tactgaagatgtagc

SEQ ID NO: 30269 - DNA, 15 bp, Homo sapiens
atactgaagatgtag

SEQ ID NO: 30270 - DNA, 15 bp, Homo sapiens
tatactgaagatgta

SEQ ID NO: 30271 - DNA, 15 bp, Homo sapiens
gtatactgaagatgt

SEQ ID NO: 30272 - DNA, 15 bp, Homo sapiens
agtatactgaagatg

SEQ ID NO: 30273 - DNA, 15 bp, Homo sapiens
aagtatactgaagat

SEQ ID NO: 30274 - DNA, 15 bp, Homo sapiens
caagtatactgaaga

SEQ ID NO: 30275 - DNA, 15 bp, Homo sapiens
ccaagtatactgaag

SEQ ID NO: 30276 - DNA, 15 bp, Homo sapiens
accaagtatactgaa

SEQ ID NO: 30277 - DNA, 15 bp, Homo sapiens
taccaagtatactga

SEQ ID NO: 30278 - DNA, 15 bp, Homo sapiens
ctaccaagtatactg

SEQ ID NO: 30279 - DNA, 15 bp, Homo sapiens
actaccaagtatact

SEQ ID NO: 30280 - DNA, 15 bp, Homo sapiens
aactaccaagtatac

SEQ ID NO: 30281 - DNA, 15 bp, Homo sapiens
aaactaccaagtata

SEQ ID NO: 30282 - DNA, 15 bp, Homo sapiens
taaactaccaagtat

SEQ ID NO: 30283 - DNA, 15 bp, Homo sapiens
ataaactaccaagta

SEQ ID NO: 30284 - DNA, 15 bp, Homo sapiens
cataaactaccaagt

SEQ ID NO: 30285 - DNA, 15 bp, Homo sapiens
tcataaactaccaag

SEQ ID NO: 30286 - DNA, 15 bp, Homo sapiens
ctcataaactaccaa

SEQ ID NO: 30287 - DNA, 15 bp, Homo sapiens
cctcataaactacca

SEQ ID NO: 30288 - DNA, 15 bp, Homo sapiens
acctcataaactacc

SEQ ID NO: 30289 - DNA, 15 bp, Homo sapiens
aacctcataaactac

SEQ ID NO: 30290 - DNA, 15 bp, Homo sapiens
taacctcataaacta

SEQ ID NO: 30291 - DNA, 15 bp, Homo sapiens
ctaacctcataaact

SEQ ID NO: 30292 - DNA, 15 bp, Homo sapiens
actaacctcataaac

SEQ ID NO: 30293 - DNA, 15 bp, Homo sapiens
aactaacctcataaa

SEQ ID NO: 30294 - DNA, 15 bp, Homo sapiens
aaactaacctcataa

SEQ ID NO: 30295 - DNA, 15 bp, Homo sapiens
gaaactaacctcata

SEQ ID NO: 30296 - DNA, 15 bp, Homo sapiens
agaaactaacctcat

SEQ ID NO: 30297 - DNA, 15 bp, Homo sapiens
gagaaactaacctca

SEQ ID NO: 30298 - DNA, 15 bp, Homo sapiens
agagaaactaacctc

SEQ ID NO: 30299 - DNA, 15 bp, Homo sapiens
tagagaaactaacct

SEQ ID NO: 30300 - DNA, 15 bp, Homo sapiens
ttagagaaactaacc

SEQ ID NO: 30301 - DNA, 15 bp, Homo sapiens
attagagaaactaac

SEQ ID NO: 30302 - DNA, 15 bp, Homo sapiens
tattagagaaactaa

SEQ ID NO: 30303 - DNA, 15 bp, Homo sapiens
atattagagaaacta

SEQ ID NO: 30304 - DNA, 15 bp, Homo sapiens
tatattagagaaact

SEQ ID NO: 30305 - DNA, 15 bp, Homo sapiens
ctatattagagaaac

SEQ ID NO: 30306 - DNA, 15 bp, Homo sapiens
gctatattagagaaa

SEQ ID NO: 30307 - DNA, 15 bp, Homo sapiens
ggctatattagagaa

SEQ ID NO: 30308 - DNA, 15 bp, Homo sapiens
tggctatattagaga

SEQ ID NO: 30309 - DNA, 15 bp, Homo sapiens
ctggctatattagag

SEQ ID NO: 30310 - DNA, 15 bp, Homo sapiens
actggctatattaga

SEQ ID NO: 30311 - DNA, 15 bp, Homo sapiens
aactggctatattag

SEQ ID NO: 30312 - DNA, 15 bp, Homo sapiens
caactggctatatta

SEQ ID NO: 30313 - DNA, 15 bp, Homo sapiens
ccaactggctatatt

SEQ ID NO: 30314 - DNA, 15 bp, Homo sapiens
accaactggctatat

SEQ ID NO: 30315 - DNA, 15 bp, Homo sapiens
aaccaactggctata

SEQ ID NO: 30316 - DNA, 15 bp, Homo sapiens
caaccaactggctat

SEQ ID NO: 30317 - DNA, 15 bp, Homo sapiens
tcaaccaactggcta

SEQ ID NO: 30318 - DNA, 15 bp, Homo sapiens
atcaaccaactggct

SEQ ID NO: 30319 - DNA, 15 bp, Homo sapiens
aatcaaccaactggc

SEQ ID NO: 30320 - DNA, 15 bp, Homo sapiens
aaatcaaccaactgg

SEQ ID NO: 30321 - DNA, 15 bp, Homo sapiens
gaaatcaaccaactg

SEQ ID NO: 30322 - DNA, 15 bp, Homo sapiens
ggaaatcaaccaact

SEQ ID NO: 30323 - DNA, 15 bp, Homo sapiens
tggaaatcaaccaac

SEQ ID NO: 30324 - DNA, 15 bp, Homo sapiens
gtggaaatcaaccaa

SEQ ID NO: 30325 - DNA, 15 bp, Homo sapiens
ggtggaaatcaacca

SEQ ID NO: 30326 - DNA, 15 bp, Homo sapiens
aggtggaaatcaacc

SEQ ID NO: 30327 - DNA, 15 bp, Homo sapiens
gaggtggaaatcaac

SEQ ID NO: 30328 - DNA, 15 bp, Homo sapiens
ggaggtggaaatcaa

SEQ ID NO: 30329 - DNA, 15 bp, Homo sapiens
tggaggtggaaatca

SEQ ID NO: 30330 - DNA, 15 bp, Homo sapiens
ttggaggtggaaatc

SEQ ID NO: 30331 - DNA, 15 bp, Homo sapiens
cttggaggtggaaat

SEQ ID NO: 30332 - DNA, 15 bp, Homo sapiens
ccttggaggtggaaa

SEQ ID NO: 30333 - DNA, 15 bp, Homo sapiens
accttggaggtggaa

SEQ ID NO: 30334 - DNA, 15 bp, Homo sapiens
caccttggaggtgga

SEQ ID NO: 30335 - DNA, 15 bp, Homo sapiens
acaccttggaggtgg

SEQ ID NO: 30336 - DNA, 15 bp, Homo sapiens
tacaccttggaggtg

SEQ ID NO: 30337 - DNA, 15 bp, Homo sapiens
atacaccttggaggt

SEQ ID NO: 30338 - DNA, 15 bp, Homo sapiens
catacaccttggagg

SEQ ID NO: 30339 - DNA, 15 bp, Homo sapiens
tcatacaccttggag

SEQ ID NO: 30340 - DNA, 15 bp, Homo sapiens
ttcatacaccttgga

SEQ ID NO: 30341 - DNA, 15 bp, Homo sapiens
cttcatacaccttgg

SEQ ID NO: 30342 - DNA, 15 bp, Homo sapiens
acttcatacaccttg

SEQ ID NO: 30343 - DNA, 15 bp, Homo sapiens
tacttcatacacctt

SEQ ID NO: 30344 - DNA, 15 bp, Homo sapiens
atacttcatacacct

SEQ ID NO: 30345 - DNA, 15 bp, Homo sapiens
catacttcatacacc

SEQ ID NO: 30346 - DNA, 15 bp, Homo sapiens
acatacttcatacac

SEQ ID NO: 30347 - DNA, 15 bp, Homo sapiens
tacatacttcataca

SEQ ID NO: 30348 - DNA, 15 bp, Homo sapiens
atacatacttcatac

SEQ ID NO: 30349 - DNA, 15 bp, Homo sapiens
aatacatacttcata

SEQ ID NO: 30350 - DNA, 15 bp, Homo sapiens
aaatacatacttcat

SEQ ID NO: 30351 - DNA, 15 bp, Homo sapiens
aaaatacatacttca

SEQ ID NO: 30352 - DNA, 15 bp, Homo sapiens
aaaaatacatacttc

SEQ ID NO: 30353 - DNA, 15 bp, Homo sapiens
aaaaaatacatactt

SEQ ID NO: 30354 - DNA, 15 bp, Homo sapiens
aaaaaaatacatact

SEQ ID NO: 30355 - DNA, 15 bp, Homo sapiens
taaaaaaatacatac

SEQ ID NO: 30356 - DNA, 15 bp, Homo sapiens
ttaaaaaaatacata

SEQ ID NO: 30357 - DNA, 15 bp, Homo sapiens
attaaaaaaatacat

SEQ ID NO: 30358 - DNA, 15 bp, Homo sapiens
cattaaaaaaataca

SEQ ID NO: 30359 - DNA, 15 bp, Homo sapiens
tcattaaaaaaatac

SEQ ID NO: 30360 - DNA, 15 bp, Homo sapiens
gtcattaaaaaaata

SEQ ID NO: 30361 - DNA, 15 bp, Homo sapiens
tgtcattaaaaaaat

SEQ ID NO: 30362 - DNA, 15 bp, Homo sapiens
ttgtcattaaaaaaa

SEQ ID NO: 30363 - DNA, 15 bp, Homo sapiens
attgtcattaaaaaa

SEQ ID NO: 30364 - DNA, 15 bp, Homo sapiens
aattgtcattaaaaa

SEQ ID NO: 30365 - DNA, 15 bp, Homo sapiens
gaattgtcattaaaa

SEQ ID NO: 30366 - DNA, 15 bp, Homo sapiens
tgaattgtcattaaa

SEQ ID NO: 30367 - DNA, 15 bp, Homo sapiens
ctgaattgtcattaa

SEQ ID NO: 30368 - DNA, 15 bp, Homo sapiens
actgaattgtcatta

SEQ ID NO: 30369 - DNA, 15 bp, Homo sapiens
aactgaattgtcatt

SEQ ID NO: 30370 - DNA, 15 bp, Homo sapiens
aaactgaattgtcat

SEQ ID NO: 30371 - DNA, 15 bp, Homo sapiens
aaaactgaattgtca

SEQ ID NO: 30372 - DNA, 15 bp, Homo sapiens
aaaaactgaattgtc

SEQ ID NO: 30373 - DNA, 15 bp, Homo sapiens
caaaaactgaattgt

SEQ ID NO: 30374 - DNA, 15 bp, Homo sapiens
tcaaaaactgaattg

SEQ ID NO: 30375 - DNA, 15 bp, Homo sapiens
ctcaaaaactgaatt

SEQ ID NO: 30376 - DNA, 15 bp, Homo sapiens
actcaaaaactgaat

SEQ ID NO: 30377 - DNA, 15 bp, Homo sapiens
tactcaaaaactgaa

SEQ ID NO: 30378 - DNA, 15 bp, Homo sapiens
gtactcaaaaactga

SEQ ID NO: 30379 - DNA, 15 bp, Homo sapiens
ggtactcaaaaactg

SEQ ID NO: 30380 - DNA, 15 bp, Homo sapiens
aggtactcaaaaact

SEQ ID NO: 30381 - DNA, 15 bp, Homo sapiens
aaggtactcaaaaac

SEQ ID NO: 30382 - DNA, 15 bp, Homo sapiens
caaggtactcaaaaa

SEQ ID NO: 30383 - DNA, 15 bp, Homo sapiens
acaaggtactcaaaa

SEQ ID NO: 30384 - DNA, 15 bp, Homo sapiens
aacaaggtactcaaa

SEQ ID NO: 30385 - DNA, 15 bp, Homo sapiens
taacaaggtactcaa

SEQ ID NO: 30386 - DNA, 15 bp, Homo sapiens
ataacaaggtactca

SEQ ID NO: 30387 - DNA, 15 bp, Homo sapiens
aataacaaggtactc

SEQ ID NO: 30388 - DNA, 15 bp, Homo sapiens
aaataacaaggtact

SEQ ID NO: 30389 - DNA, 15 bp, Homo sapiens
aaaataacaaggtac

SEQ ID NO: 30390 - DNA, 15 bp, Homo sapiens
aaaaataacaaggta

SEQ ID NO: 30391 - DNA, 15 bp, Homo sapiens
caaaaataacaaggt

SEQ ID NO: 30392 - DNA, 15 bp, Homo sapiens
acaaaaataacaagg

SEQ ID NO: 30393 - DNA, 15 bp, Homo sapiens
tacaaaaataacaag

SEQ ID NO: 30394 - DNA, 15 bp, Homo sapiens
atacaaaaataacaa

SEQ ID NO: 30395 - DNA, 15 bp, Homo sapiens
tatacaaaaataaca

SEQ ID NO: 30396 - DNA, 15 bp, Homo sapiens
atatacaaaaataac

SEQ ID NO: 30397 - DNA, 15 bp, Homo sapiens
aatatacaaaaataa

SEQ ID NO: 30398 - DNA, 15 bp, Homo sapiens
aaatatacaaaaata

SEQ ID NO: 30399 - DNA, 15 bp, Homo sapiens
aaaatatacaaaaat

SEQ ID NO: 30400 - DNA, 15 bp, Homo sapiens
gaaaatatacaaaaa

SEQ ID NO: 30401 - DNA, 15 bp, Homo sapiens
tgaaaatatacaaaa

SEQ ID NO: 30402 - DNA, 15 bp, Homo sapiens
ctgaaaatatacaaa

SEQ ID NO: 30403 - DNA, 15 bp, Homo sapiens
gctgaaaatatacaa

SEQ ID NO: 30404 - DNA, 15 bp, Homo sapiens
agctgaaaatataca

SEQ ID NO: 30405 - DNA, 15 bp, Homo sapiens
cagctgaaaatatac

SEQ ID NO: 30406 - DNA, 15 bp, Homo sapiens
gcagctgaaaatata

SEQ ID NO: 30407 - DNA, 15 bp, Homo sapiens
agcagctgaaaatat

SEQ ID NO: 30408 - DNA, 15 bp, Homo sapiens
aagcagctgaaaata

SEQ ID NO: 30409 - DNA, 15 bp, Homo sapiens
caagcagctgaaaat

SEQ ID NO: 30410 - DNA, 15 bp, Homo sapiens
acaagcagctgaaaa

SEQ ID NO: 30411 - DNA, 15 bp, Homo sapiens
cacaagcagctgaaa

SEQ ID NO: 30412 - DNA, 15 bp, Homo sapiens
tcacaagcagctgaa

SEQ ID NO: 30413 - DNA, 15 bp, Homo sapiens
ttcacaagcagctga

SEQ ID NO: 30414 - DNA, 15 bp, Homo sapiens
attcacaagcagctg

SEQ ID NO: 30415 - DNA, 15 bp, Homo sapiens
aattcacaagcagct

SEQ ID NO: 30416 - DNA, 15 bp, Homo sapiens
aaattcacaagcagc

SEQ ID NO: 30417 - DNA, 15 bp, Homo sapiens
aaaattcacaagcag

SEQ ID NO: 30418 - DNA, 15 bp, Homo sapiens
gaaaattcacaagca

SEQ ID NO: 30419 - DNA, 15 bp, Homo sapiens
agaaaattcacaagc

SEQ ID NO: 30420 - DNA, 15 bp, Homo sapiens
cagaaaattcacaag

SEQ ID NO: 30421 - DNA, 15 bp, Homo sapiens
tcagaaaattcacaa

SEQ ID NO: 30422 - DNA, 15 bp, Homo sapiens
ctcagaaaattcaca

SEQ ID NO: 30423 - DNA, 15 bp, Homo sapiens
tctcagaaaattcac

SEQ ID NO: 30424 - DNA, 15 bp, Homo sapiens
gtctcagaaaattca

SEQ ID NO: 30425 - DNA, 15 bp, Homo sapiens
cgtctcagaaaattc

SEQ ID NO: 30426 - DNA, 15 bp, Homo sapiens
ccgtctcagaaaatt

SEQ ID NO: 30427 - DNA, 15 bp, Homo sapiens
tccgtctcagaaaat

SEQ ID NO: 30428 - DNA, 15 bp, Homo sapiens
atccgtctcagaaaa

SEQ ID NO: 30429 - DNA, 15 bp, Homo sapiens
catccgtctcagaaa

SEQ ID NO: 30430 - DNA, 15 bp, Homo sapiens
acatccgtctcagaa

SEQ ID NO: 30431 - DNA, 15 bp, Homo sapiens
tacatccgtctcaga

SEQ ID NO: 30432 - DNA, 15 bp, Homo sapiens
ttacatccgtctcag

SEQ ID NO: 30433 - DNA, 15 bp, Homo sapiens
gttacatccgtctca

SEQ ID NO: 30434 - DNA, 15 bp, Homo sapiens
tgttacatccgtctc

SEQ ID NO: 30435 - DNA, 15 bp, Homo sapiens
ttgttacatccgtct

SEQ ID NO: 30436 - DNA, 15 bp, Homo sapiens
tttgttacatccgtc

SEQ ID NO: 30437 - DNA, 15 bp, Homo sapiens
atttgttacatccgt

SEQ ID NO: 30438 - DNA, 15 bp, Homo sapiens
tatttgttacatccg

SEQ ID NO: 30439 - DNA, 15 bp, Homo sapiens
gtatttgttacatcc

SEQ ID NO: 30440 - DNA, 15 bp, Homo sapiens
agtatttgttacatc

SEQ ID NO: 30441 - DNA, 15 bp, Homo sapiens
cagtatttgttacat

SEQ ID NO: 30442 - DNA, 15 bp, Homo sapiens
tcagtatttgttaca

SEQ ID NO: 30443 - DNA, 15 bp, Homo sapiens
ttcagtatttgttac

SEQ ID NO: 30444 - DNA, 15 bp, Homo sapiens
gttcagtatttgtta

SEQ ID NO: 30445 - DNA, 15 bp, Homo sapiens
tgttcagtatttgtt

SEQ ID NO: 30446 - DNA, 15 bp, Homo sapiens
atgttcagtatttgt

SEQ ID NO: 30447 - DNA, 15 bp, Homo sapiens
gatgttcagtatttg

SEQ ID NO: 30448 - DNA, 15 bp, Homo sapiens
tgatgttcagtattt

SEQ ID NO: 30449 - DNA, 15 bp, Homo sapiens
atgatgttcagtatt

SEQ ID NO: 30450 - DNA, 15 bp, Homo sapiens
gatgatgttcagtat

SEQ ID NO: 30451 - DNA, 15 bp, Homo sapiens
tgatgatgttcagta

SEQ ID NO: 30452 - DNA, 15 bp, Homo sapiens
ttgatgatgttcagt

SEQ ID NO: 30453 - DNA, 15 bp, Homo sapiens
gttgatgatgttcag

SEQ ID NO: 30454 - DNA, 15 bp, Homo sapiens
ggttgatgatgttca

SEQ ID NO: 30455 - DNA, 15 bp, Homo sapiens
gggttgatgatgttc

SEQ ID NO: 30456 - DNA, 15 bp, Homo sapiens
tgggttgatgatgtt

SEQ ID NO: 30457 - DNA, 15 bp, Homo sapiens
ctgggttgatgatgt

SEQ ID NO: 30458 - DNA, 15 bp, Homo sapiens
actgggttgatgatg

SEQ ID NO: 30459 - DNA, 15 bp, Homo sapiens
tactgggttgatgat

SEQ ID NO: 30460 - DNA, 15 bp, Homo sapiens
ttactgggttgatga

SEQ ID NO: 30461 - DNA, 15 bp, Homo sapiens
attactgggttgatg

SEQ ID NO: 30462 - DNA, 15 bp, Homo sapiens
tattactgggttgat

SEQ ID NO: 30463 - DNA, 15 bp, Homo sapiens
ttattactgggttga

SEQ ID NO: 30464 - DNA, 15 bp, Homo sapiens
attattactgggttg

SEQ ID NO: 30465 - DNA, 15 bp, Homo sapiens
cattattactgggtt

SEQ ID NO: 30466 - DNA, 15 bp, Homo sapiens
tcattattactgggt

SEQ ID NO: 30467 - DNA, 15 bp, Homo sapiens
atcattattactggg

SEQ ID NO: 30468 - DNA, 15 bp, Homo sapiens
aatcattattactgg

SEQ ID NO: 30469 - DNA, 15 bp, Homo sapiens
aaatcattattactg

SEQ ID NO: 30470 - DNA, 15 bp, Homo sapiens
caaatcattattact

SEQ ID NO: 30471 - DNA, 15 bp, Homo sapiens
tcaaatcattattac

SEQ ID NO: 30472 - DNA, 15 bp, Homo sapiens
ttcaaatcattatta

SEQ ID NO: 30473 - DNA, 15 bp, Homo sapiens
gttcaaatcattatt

SEQ ID NO: 30474 - DNA, 15 bp, Homo sapiens
tgttcaaatcattat

SEQ ID NO: 30475 - DNA, 15 bp, Homo sapiens
gtgttcaaatcatta

SEQ ID NO: 30476 - DNA, 15 bp, Homo sapiens
ggtgttcaaatcatt

SEQ ID NO: 30477 - DNA, 15 bp, Homo sapiens
tggtgttcaaatcat

SEQ ID NO: 30478 - DNA, 15 bp, Homo sapiens
gtggtgttcaaatca

SEQ ID NO: 30479 - DNA, 15 bp, Homo sapiens
agtggtgttcaaatc

SEQ ID NO: 30480 - DNA, 15 bp, Homo sapiens
cagtggtgttcaaat

SEQ ID NO: 30481 - DNA, 15 bp, Homo sapiens
tcagtggtgttcaaa

SEQ ID NO: 30482 - DNA, 15 bp, Homo sapiens
ctcagtggtgttcaa

SEQ ID NO: 30483 - DNA, 15 bp, Homo sapiens
tctcagtggtgttca

SEQ ID NO: 30484 - DNA, 15 bp, Homo sapiens
ttctcagtggtgttc

SEQ ID NO: 30485 - DNA, 15 bp, Homo sapiens
cttctcagtggtgtt

SEQ ID NO: 30486 - DNA, 15 bp, Homo sapiens
gcttctcagtggtgt

SEQ ID NO: 30487 - DNA, 15 bp, Homo sapiens
cgcttctcagtggtg

SEQ ID NO: 30488 - DNA, 15 bp, Homo sapiens
acgcttctcagtggt

SEQ ID NO: 30489 - DNA, 15 bp, Homo sapiens
cacgcttctcagtgg

SEQ ID NO: 30490 - DNA, 15 bp, Homo sapiens
gcacgcttctcagtg

SEQ ID NO: 30491 - DNA, 15 bp, Homo sapiens
tgcacgcttctcagt

SEQ ID NO: 30492 - DNA, 15 bp, Homo sapiens
ctgcacgcttctcag

SEQ ID NO: 30493 - DNA, 15 bp, Homo sapiens
gctgcacgcttctca

SEQ ID NO: 30494 - DNA, 15 bp, Homo sapiens
agctgcacgcttctc

SEQ ID NO: 30495 - DNA, 15 bp, Homo sapiens
cagctgcacgcttct

SEQ ID NO: 30496 - DNA, 15 bp, Homo sapiens
tcagctgcacgcttc

SEQ ID NO: 30497 - DNA, 15 bp, Homo sapiens
ctcagctgcacgctt

SEQ ID NO: 30498 - DNA, 15 bp, Homo sapiens
tctcagctgcacgct

SEQ ID NO: 30499 - DNA, 15 bp, Homo sapiens
ctctcagctgcacgc

SEQ ID NO: 30500 - DNA, 15 bp, Homo sapiens
cctctcagctgcacg

SEQ ID NO: 30501 - DNA, 15 bp, Homo sapiens
gcctctcagctgcac

SEQ ID NO: 30502 - DNA, 15 bp, Homo sapiens
tgcctctcagctgca

SEQ ID NO: 30503 - DNA, 15 bp, Homo sapiens
atgcctctcagctgc

SEQ ID NO: 30504 - DNA, 15 bp, Homo sapiens
gatgcctctcagctg

SEQ ID NO: 30505 - DNA, 15 bp, Homo sapiens
ggatgcctctcagct

SEQ ID NO: 30506 - DNA, 15 bp, Homo sapiens
tggatgcctctcagc

SEQ ID NO: 30507 - DNA, 15 bp, Homo sapiens
ctggatgcctctcag

SEQ ID NO: 30508 - DNA, 15 bp, Homo sapiens
tctggatgcctctca

SEQ ID NO: 30509 - DNA, 15 bp, Homo sapiens
ttctggatgcctctc

SEQ ID NO: 30510 - DNA, 15 bp, Homo sapiens
tttctggatgcctct

SEQ ID NO: 30511 - DNA, 15 bp, Homo sapiens
ttttctggatgcctc

SEQ ID NO: 30512 - DNA, 15 bp, Homo sapiens
cttttctggatgcct

SEQ ID NO: 30513 - DNA, 15 bp, Homo sapiens
acttttctggatgcc

SEQ ID NO: 30514 - DNA, 15 bp, Homo sapiens
tacttttctggatgc

SEQ ID NO: 30515 - DNA, 15 bp, Homo sapiens
atacttttctggatg

SEQ ID NO: 30516 - DNA, 15 bp, Homo sapiens
gatacttttctggat

SEQ ID NO: 30517 - DNA, 15 bp, Homo sapiens
tgatacttttctgga

SEQ ID NO: 30518 - DNA, 15 bp, Homo sapiens
ctgatacttttctgg

SEQ ID NO: 30519 - DNA, 15 bp, Homo sapiens
cctgatacttttctg

SEQ ID NO: 30520 - DNA, 15 bp, Homo sapiens
ccctgatacttttct

SEQ ID NO: 30521 - DNA, 15 bp, Homo sapiens
accctgatacttttc

SEQ ID NO: 30522 - DNA, 15 bp, Homo sapiens
taccctgatactttt

SEQ ID NO: 30523 - DNA, 15 bp, Homo sapiens
ctaccctgatacttt

SEQ ID NO: 30524 - DNA, 15 bp, Homo sapiens
actaccctgatactt

SEQ ID NO: 30525 - DNA, 15 bp, Homo sapiens
aactaccctgatact

SEQ ID NO: 30526 - DNA, 15 bp, Homo sapiens
gaactaccctgatac

SEQ ID NO: 30527 - DNA, 15 bp, Homo sapiens
agaactaccctgata

SEQ ID NO: 30528 - DNA, 15 bp, Homo sapiens
cagaactaccctgat

SEQ ID NO: 30529 - DNA, 15 bp, Homo sapiens
acagaactaccctga

SEQ ID NO: 30530 - DNA, 15 bp, Homo sapiens
aacagaactaccctg

SEQ ID NO: 30531 - DNA, 15 bp, Homo sapiens
aaacagaactaccct

SEQ ID NO: 30532 - DNA, 15 bp, Homo sapiens
gaaacagaactaccc

SEQ ID NO: 30533 - DNA, 15 bp, Homo sapiens
tgaaacagaactacc

SEQ ID NO: 30534 - DNA, 15 bp, Homo sapiens
ttgaaacagaactac

SEQ ID NO: 30535 - DNA, 15 bp, Homo sapiens
tttgaaacagaacta

SEQ ID NO: 30536 - DNA, 15 bp, Homo sapiens
gtttgaaacagaact

SEQ ID NO: 30537 - DNA, 15 bp, Homo sapiens
agtttgaaacagaac

SEQ ID NO: 30538 - DNA, 15 bp, Homo sapiens
aagtttgaaacagaa

SEQ ID NO: 30539 - DNA, 15 bp, Homo sapiens
caagtttgaaacaga

SEQ ID NO: 30540 - DNA, 15 bp, Homo sapiens
gcaagtttgaaacag

SEQ ID NO: 30541 - DNA, 15 bp, Homo sapiens
tgcaagtttgaaaca

SEQ ID NO: 30542 - DNA, 15 bp, Homo sapiens
atgcaagtttgaaac

SEQ ID NO: 30543 - DNA, 15 bp, Homo sapiens
catgcaagtttgaaa

SEQ ID NO: 30544 - DNA, 15 bp, Homo sapiens
acatgcaagtttgaa

SEQ ID NO: 30545 - DNA, 15 bp, Homo sapiens
cacatgcaagtttga

SEQ ID NO: 30546 - DNA, 15 bp, Homo sapiens
ccacatgcaagtttg

SEQ ID NO: 30547 - DNA, 15 bp, Homo sapiens
tccacatgcaagttt

SEQ ID NO: 30548 - DNA, 15 bp, Homo sapiens
ctccacatgcaagtt

SEQ ID NO: 30549 - DNA, 15 bp, Homo sapiens
gctccacatgcaagt

SEQ ID NO: 30550 - DNA, 15 bp, Homo sapiens
ggctccacatgcaag

SEQ ID NO: 30551 - DNA, 15 bp, Homo sapiens
tggctccacatgcaa

SEQ ID NO: 30552 - DNA, 15 bp, Homo sapiens
atggctccacatgca

SEQ ID NO: 30553 - DNA, 15 bp, Homo sapiens
catggctccacatgc

SEQ ID NO: 30554 - DNA, 15 bp, Homo sapiens
acatggctccacatg

SEQ ID NO: 30555 - DNA, 15 bp, Homo sapiens
cacatggctccacat

SEQ ID NO: 30556 - DNA, 15 bp, Homo sapiens
ccacatggctccaca

SEQ ID NO: 30557 - DNA, 15 bp, Homo sapiens
gccacatggctccac

SEQ ID NO: 30558 - DNA, 15 bp, Homo sapiens
tgccacatggctcca

SEQ ID NO: 30559 - DNA, 15 bp, Homo sapiens
gtgccacatggctcc

SEQ ID NO: 30560 - DNA, 15 bp, Homo sapiens
tgtgccacatggctc

SEQ ID NO: 30561 - DNA, 15 bp, Homo sapiens
ttgtgccacatggct

SEQ ID NO: 30562 - DNA, 15 bp, Homo sapiens
tttgtgccacatggc

SEQ ID NO: 30563 - DNA, 15 bp, Homo sapiens
atttgtgccacatgg

SEQ ID NO: 30564 - DNA, 15 bp, Homo sapiens
tatttgtgccacatg

SEQ ID NO: 30565 - DNA, 15 bp, Homo sapiens
gtatttgtgccacat

SEQ ID NO: 30566 - DNA, 15 bp, Homo sapiens
agtatttgtgccaca

SEQ ID NO: 30567 - DNA, 15 bp, Homo sapiens
gagtatttgtgccac

SEQ ID NO: 30568 - DNA, 15 bp, Homo sapiens
tgagtatttgtgcca

SEQ ID NO: 30569 - DNA, 15 bp, Homo sapiens
atgagtatttgtgcc

SEQ ID NO: 30570 - DNA, 15 bp, Homo sapiens
catgagtatttgtgc

SEQ ID NO: 30571 - DNA, 15 bp, Homo sapiens
gcatgagtatttgtg

SEQ ID NO: 30572 - DNA, 15 bp, Homo sapiens
ggcatgagtatttgt

SEQ ID NO: 30573 - DNA, 15 bp, Homo sapiens
tggcatgagtatttg

SEQ ID NO: 30574 - DNA, 15 bp, Homo sapiens
ctggcatgagtattt

SEQ ID NO: 30575 - DNA, 15 bp, Homo sapiens
gctggcatgagtatt

SEQ ID NO: 30576 - DNA, 15 bp, Homo sapiens
agctggcatgagtat

SEQ ID NO: 30577 - DNA, 15 bp, Homo sapiens
gagctggcatgagta

SEQ ID NO: 30578 - DNA, 15 bp, Homo sapiens
tgagctggcatgagt

SEQ ID NO: 30579 - DNA, 15 bp, Homo sapiens
atgagctggcatgag

SEQ ID NO: 30580 - DNA, 15 bp, Homo sapiens
aatgagctggcatga

SEQ ID NO: 30581 - DNA, 15 bp, Homo sapiens
taatgagctggcatg

SEQ ID NO: 30582 - DNA, 15 bp, Homo sapiens
gtaatgagctggcat

SEQ ID NO: 30583 - DNA, 15 bp, Homo sapiens
tgtaatgagctggca

SEQ ID NO: 30584 - DNA, 15 bp, Homo sapiens
ctgtaatgagctggc

SEQ ID NO: 30585 - DNA, 15 bp, Homo sapiens
gctgtaatgagctgg

SEQ ID NO: 30586 - DNA, 15 bp, Homo sapiens
tgctgtaatgagctg

SEQ ID NO: 30587 - DNA, 15 bp, Homo sapiens
atgctgtaatgagct

SEQ ID NO: 30588 - DNA, 15 bp, Homo sapiens
catgctgtaatgagc

SEQ ID NO: 30589 - DNA, 15 bp, Homo sapiens
tcatgctgtaatgag

SEQ ID NO: 30590 - DNA, 15 bp, Homo sapiens
ctcatgctgtaatga

SEQ ID NO: 30591 - DNA, 15 bp, Homo sapiens
tctcatgctgtaatg

SEQ ID NO: 30592 - DNA, 15 bp, Homo sapiens
ttctcatgctgtaat

SEQ ID NO: 30593 - DNA, 15 bp, Homo sapiens
gttctcatgctgtaa

SEQ ID NO: 30594 - DNA, 15 bp, Homo sapiens
tgttctcatgctgta

SEQ ID NO: 30595 - DNA, 15 bp, Homo sapiens
ctgttctcatgctgt

SEQ ID NO: 30596 - DNA, 15 bp, Homo sapiens
gctgttctcatgctg

SEQ ID NO: 30597 - DNA, 15 bp, Homo sapiens
tgctgttctcatgct

SEQ ID NO: 30598 - DNA, 15 bp, Homo sapiens
ctgctgttctcatgc

SEQ ID NO: 30599 - DNA, 15 bp, Homo sapiens
actgctgttctcatg

SEQ ID NO: 30600 - DNA, 15 bp, Homo sapiens
aactgctgttctcat

SEQ ID NO: 30601 - DNA, 15 bp, Homo sapiens
aaactgctgttctca

SEQ ID NO: 30602 - DNA, 15 bp, Homo sapiens
taaactgctgttctc

SEQ ID NO: 30603 - DNA, 15 bp, Homo sapiens
ataaactgctgttct

SEQ ID NO: 30604 - DNA, 15 bp, Homo sapiens
aataaactgctgttc

SEQ ID NO: 30605 - DNA, 15 bp, Homo sapiens
taataaactgctgtt

SEQ ID NO: 30606 - DNA, 15 bp, Homo sapiens
gtaataaactgctgt

SEQ ID NO: 30607 - DNA, 15 bp, Homo sapiens
agtaataaactgctg

SEQ ID NO: 30608 - DNA, 15 bp, Homo sapiens
gagtaataaactgct

SEQ ID NO: 30609 - DNA, 15 bp, Homo sapiens
tgagtaataaactgc

SEQ ID NO: 30610 - DNA, 15 bp, Homo sapiens
gtgagtaataaactg

SEQ ID NO: 30611 - DNA, 15 bp, Homo sapiens
agtgagtaataaact

SEQ ID NO: 30612 - DNA, 15 bp, Homo sapiens
tagtgagtaataaac

SEQ ID NO: 30613 - DNA, 15 bp, Homo sapiens
ttagtgagtaataaa

SEQ ID NO: 30614 - DNA, 15 bp, Homo sapiens
tttagtgagtaataa

SEQ ID NO: 30615 - DNA, 15 bp, Homo sapiens
ctttagtgagtaata

SEQ ID NO: 30616 - DNA, 15 bp, Homo sapiens
tctttagtgagtaat

SEQ ID NO: 30617 - DNA, 15 bp, Homo sapiens
gtctttagtgagtaa

SEQ ID NO: 30618 - DNA, 15 bp, Homo sapiens
tgtctttagtgagta

SEQ ID NO: 30619 - DNA, 15 bp, Homo sapiens
ctgtctttagtgagt

SEQ ID NO: 30620 - DNA, 15 bp, Homo sapiens
tctgtctttagtgag

SEQ ID NO: 30621 - DNA, 15 bp, Homo sapiens
ttctgtctttagtga

SEQ ID NO: 30622 - DNA, 15 bp, Homo sapiens
attctgtctttagtg

SEQ ID NO: 30623 - DNA, 15 bp, Homo sapiens
cattctgtctttagt

SEQ ID NO: 30624 - DNA, 15 bp, Homo sapiens
tcattctgtctttag

SEQ ID NO: 30625 - DNA, 15 bp, Homo sapiens
ttcattctgtcttta

SEQ ID NO: 30626 - DNA, 15 bp, Homo sapiens
attcattctgtcttt

SEQ ID NO: 30627 - DNA, 15 bp, Homo sapiens
cattcattctgtctt

SEQ ID NO: 30628 - DNA, 15 bp, Homo sapiens
acattcattctgtct

SEQ ID NO: 30629 - DNA, 15 bp, Homo sapiens
tacattcattctgtc

SEQ ID NO: 30630 - DNA, 15 bp, Homo sapiens
ctacattcattctgt

SEQ ID NO: 30631 - DNA, 15 bp, Homo sapiens
tctacattcattctg

SEQ ID NO: 30632 - DNA, 15 bp, Homo sapiens
ttctacattcattct

SEQ ID NO: 30633 - DNA, 15 bp, Homo sapiens
tttctacattcattc

SEQ ID NO: 30634 - DNA, 15 bp, Homo sapiens
ttttctacattcatt

SEQ ID NO: 30635 - DNA, 15 bp, Homo sapiens
cttttctacattcat

SEQ ID NO: 30636 - DNA, 15 bp, Homo sapiens
ccttttctacattca

SEQ ID NO: 30637 - DNA, 15 bp, Homo sapiens
gccttttctacattc

SEQ ID NO: 30638 - DNA, 15 bp, Homo sapiens
agccttttctacatt

SEQ ID NO: 30639 - DNA, 15 bp, Homo sapiens
cagccttttctacat

SEQ ID NO: 30640 - DNA, 15 bp, Homo sapiens
tcagccttttctaca

SEQ ID NO: 30641 - DNA, 15 bp, Homo sapiens
ttcagccttttctac

SEQ ID NO: 30642 - DNA, 15 bp, Homo sapiens
attcagccttttcta

SEQ ID NO: 30643 - DNA, 15 bp, Homo sapiens
aattcagccttttct

SEQ ID NO: 30644 - DNA, 15 bp, Homo sapiens
gaattcagccttttc

SEQ ID NO: 30645 - DNA, 15 bp, Homo sapiens
agaattcagcctttt

SEQ ID NO: 30646 - DNA, 15 bp, Homo sapiens
cagaattcagccttt

SEQ ID NO: 30647 - DNA, 15 bp, Homo sapiens
acagaattcagcctt

SEQ ID NO: 30648 - DNA, 15 bp, Homo sapiens
tacagaattcagcct

SEQ ID NO: 30649 - DNA, 15 bp, Homo sapiens
ttacagaattcagcc

SEQ ID NO: 30650 - DNA, 15 bp, Homo sapiens
attacagaattcagc

SEQ ID NO: 30651 - DNA, 15 bp, Homo sapiens
tattacagaattcag

SEQ ID NO: 30652 - DNA, 15 bp, Homo sapiens
ttattacagaattca

SEQ ID NO: 30653 - DNA, 15 bp, Homo sapiens
tttattacagaattc

SEQ ID NO: 30654 - DNA, 15 bp, Homo sapiens
ttttattacagaatt

SEQ ID NO: 30655 - DNA, 15 bp, Homo sapiens
cttttattacagaat

SEQ ID NO: 30656 - DNA, 15 bp, Homo sapiens
gcttttattacagaa

SEQ ID NO: 30657 - DNA, 15 bp, Homo sapiens
tgcttttattacaga

SEQ ID NO: 30658 - DNA, 15 bp, Homo sapiens
ttgcttttattacag

SEQ ID NO: 30659 - DNA, 15 bp, Homo sapiens
tttgcttttattaca

SEQ ID NO: 30660 - DNA, 15 bp, Homo sapiens
gtttgcttttattac

SEQ ID NO: 30661 - DNA, 15 bp, Homo sapiens
tgtttgcttttatta

SEQ ID NO: 30662 - DNA, 15 bp, Homo sapiens
ctgtttgcttttatt

SEQ ID NO: 30663 - DNA, 15 bp, Homo sapiens
gctgtttgcttttat

SEQ ID NO: 30664 - DNA, 15 bp, Homo sapiens
ggctgtttgctttta

SEQ ID NO: 30665 - DNA, 15 bp, Homo sapiens
aggctgtttgctttt

SEQ ID NO: 30666 - DNA, 15 bp, Homo sapiens
caggctgtttgcttt

SEQ ID NO: 30667 - DNA, 15 bp, Homo sapiens
ccaggctgtttgctt

SEQ ID NO: 30668 - DNA, 15 bp, Homo sapiens
gccaggctgtttgct

SEQ ID NO: 30669 - DNA, 15 bp, Homo sapiens
agccaggctgtttgc

SEQ ID NO: 30670 - DNA, 15 bp, Homo sapiens
aagccaggctgtttg

SEQ ID NO: 30671 - DNA, 15 bp, Homo sapiens
taagccaggctgttt

SEQ ID NO: 30672 - DNA, 15 bp, Homo sapiens
ctaagccaggctgtt

SEQ ID NO: 30673 - DNA, 15 bp, Homo sapiens
gctaagccaggctgt

SEQ ID NO: 30674 - DNA, 15 bp, Homo sapiens
tgctaagccaggctg

SEQ ID NO: 30675 - DNA, 15 bp, Homo sapiens
ttgctaagccaggct

SEQ ID NO: 30676 - DNA, 15 bp, Homo sapiens
cttgctaagccaggc

SEQ ID NO: 30677 - DNA, 15 bp, Homo sapiens
ccttgctaagccagg

SEQ ID NO: 30678 - DNA, 15 bp, Homo sapiens
tccttgctaagccag

SEQ ID NO: 30679 - DNA, 15 bp, Homo sapiens
ctccttgctaagcca

SEQ ID NO: 30680 - DNA, 15 bp, Homo sapiens
gctccttgctaagcc

SEQ ID NO: 30681 - DNA, 15 bp, Homo sapiens
ggctccttgctaagc

SEQ ID NO: 30682 - DNA, 15 bp, Homo sapiens
tggctccttgctaag

SEQ ID NO: 30683 - DNA, 15 bp, Homo sapiens
ttggctccttgctaa

SEQ ID NO: 30684 - DNA, 15 bp, Homo sapiens
gttggctccttgcta

SEQ ID NO: 30685 - DNA, 15 bp, Homo sapiens
tgttggctccttgct

SEQ ID NO: 30686 - DNA, 15 bp, Homo sapiens
atgttggctccttgc

SEQ ID NO: 30687 - DNA, 15 bp, Homo sapiens
tatgttggctccttg

SEQ ID NO: 30688 - DNA, 15 bp, Homo sapiens
ttatgttggctcctt

SEQ ID NO: 30689 - DNA, 15 bp, Homo sapiens
gttatgttggctcct

SEQ ID NO: 30690 - DNA, 15 bp, Homo sapiens
tgttatgttggctcc

SEQ ID NO: 30691 - DNA, 15 bp, Homo sapiens
ctgttatgttggctc

SEQ ID NO: 30692 - DNA, 15 bp, Homo sapiens
tctgttatgttggct

SEQ ID NO: 30693 - DNA, 15 bp, Homo sapiens
atctgttatgttggc

SEQ ID NO: 30694 - DNA, 15 bp, Homo sapiens
catctgttatgttgg

SEQ ID NO: 30695 - DNA, 15 bp, Homo sapiens
ccatctgttatgttg

SEQ ID NO: 30696 - DNA, 15 bp, Homo sapiens
cccatctgttatgtt

SEQ ID NO: 30697 - DNA, 15 bp, Homo sapiens
gcccatctgttatgt

SEQ ID NO: 30698 - DNA, 15 bp, Homo sapiens
agcccatctgttatg

SEQ ID NO: 30699 - DNA, 15 bp, Homo sapiens
cagcccatctgttat

SEQ ID NO: 30700 - DNA, 15 bp, Homo sapiens
ccagcccatctgtta

SEQ ID NO: 30701 - DNA, 15 bp, Homo sapiens
tccagcccatctgtt

SEQ ID NO: 30702 - DNA, 15 bp, Homo sapiens
ttccagcccatctgt

SEQ ID NO: 30703 - DNA, 15 bp, Homo sapiens
cttccagcccatctg

SEQ ID NO: 30704 - DNA, 15 bp, Homo sapiens
acttccagcccatct

SEQ ID NO: 30705 - DNA, 15 bp, Homo sapiens
tacttccagcccatc

SEQ ID NO: 30706 - DNA, 15 bp, Homo sapiens
ttacttccagcccat

SEQ ID NO: 30707 - DNA, 15 bp, Homo sapiens
cttacttccagccca

SEQ ID NO: 30708 - DNA, 15 bp, Homo sapiens
ccttacttccagccc

SEQ ID NO: 30709 - DNA, 15 bp, Homo sapiens
tccttacttccagcc

SEQ ID NO: 30710 - DNA, 15 bp, Homo sapiens
ttccttacttccagc

SEQ ID NO: 30711 - DNA, 15 bp, Homo sapiens
tttccttacttccag

SEQ ID NO: 30712 - DNA, 15 bp, Homo sapiens
gtttccttacttcca

SEQ ID NO: 30713 - DNA, 15 bp, Homo sapiens
tgtttccttacttcc

SEQ ID NO: 30714 - DNA, 15 bp, Homo sapiens
atgtttccttacttc

SEQ ID NO: 30715 - DNA, 15 bp, Homo sapiens
catgtttccttactt

SEQ ID NO: 30716 - DNA, 15 bp, Homo sapiens
acatgtttccttact

SEQ ID NO: 30717 - DNA, 15 bp, Homo sapiens
tacatgtttccttac

SEQ ID NO: 30718 - DNA, 15 bp, Homo sapiens
ttacatgtttcctta

SEQ ID NO: 30719 - DNA, 15 bp, Homo sapiens
attacatgtttcctt

SEQ ID NO: 30720 - DNA, 15 bp, Homo sapiens
cattacatgtttcct

SEQ ID NO: 30721 - DNA, 15 bp, Homo sapiens
tcattacatgtttcc

SEQ ID NO: 30722 - DNA, 15 bp, Homo sapiens
atcattacatgtttc

SEQ ID NO: 30723 - DNA, 15 bp, Homo sapiens
tatcattacatgttt

SEQ ID NO: 30724 - DNA, 15 bp, Homo sapiens
ctatcattacatgtt

SEQ ID NO: 30725 - DNA, 15 bp, Homo sapiens
cctatcattacatgt

SEQ ID NO: 30726 - DNA, 15 bp, Homo sapiens
gcctatcattacatg

SEQ ID NO: 30727 - DNA, 15 bp, Homo sapiens
cgcctatcattacat

SEQ ID NO: 30728 - DNA, 15 bp, Homo sapiens
ccgcctatcattaca

SEQ ID NO: 30729 - DNA, 15 bp, Homo sapiens
tccgcctatcattac

SEQ ID NO: 30730 - DNA, 15 bp, Homo sapiens
gtccgcctatcatta

SEQ ID NO: 30731 - DNA, 15 bp, Homo sapiens
agtccgcctatcatt

SEQ ID NO: 30732 - DNA, 15 bp, Homo sapiens
gagtccgcctatcat

SEQ ID NO: 30733 - DNA, 15 bp, Homo sapiens
ggagtccgcctatca

SEQ ID NO: 30734 - DNA, 15 bp, Homo sapiens
gggagtccgcctatc

SEQ ID NO: 30735 - DNA, 15 bp, Homo sapiens
tgggagtccgcctat

SEQ ID NO: 30736 - DNA, 15 bp, Homo sapiens
ctgggagtccgccta

SEQ ID NO: 30737 - DNA, 15 bp, Homo sapiens
gctgggagtccgcct

SEQ ID NO: 30738 - DNA, 15 bp, Homo sapiens
tgctgggagtccgcc

SEQ ID NO: 30739 - DNA, 15 bp, Homo sapiens
gtgctgggagtccgc

SEQ ID NO: 30740 - DNA, 15 bp, Homo sapiens
tgtgctgggagtccg

SEQ ID NO: 30741 - DNA, 15 bp, Homo sapiens
ctgtgctgggagtcc

SEQ ID NO: 30742 - DNA, 15 bp, Homo sapiens
tctgtgctgggagtc

SEQ ID NO: 30743 - DNA, 15 bp, Homo sapiens
ttctgtgctgggagt

SEQ ID NO: 30744 - DNA, 15 bp, Homo sapiens
tttctgtgctgggag

SEQ ID NO: 30745 - DNA, 15 bp, Homo sapiens
ttttctgtgctggga

SEQ ID NO: 30746 - DNA, 15 bp, Homo sapiens
tttttctgtgctggg

SEQ ID NO: 30747 - DNA, 15 bp, Homo sapiens
ttttttctgtgctgg

SEQ ID NO: 30748 - DNA, 15 bp, Homo sapiens
tttttttctgtgctg

SEQ ID NO: 30749 - DNA, 15 bp, Homo sapiens
ctttttttctgtgct

SEQ ID NO: 30750 - DNA, 15 bp, Homo sapiens
cctttttttctgtgc

SEQ ID NO: 30751 - DNA, 15 bp, Homo sapiens
acctttttttctgtg

SEQ ID NO: 30752 - DNA, 15 bp, Homo sapiens
tacctttttttctgt

SEQ ID NO: 30753 - DNA, 15 bp, Homo sapiens
ctacctttttttctg

SEQ ID NO: 30754 - DNA, 15 bp, Homo sapiens
tctacctttttttct

SEQ ID NO: 30755 - DNA, 15 bp, Homo sapiens
atctacctttttttc

SEQ ID NO: 30756 - DNA, 15 bp, Homo sapiens
gatctaccttttttt

SEQ ID NO: 30757 - DNA, 15 bp, Homo sapiens
agatctacctttttt

SEQ ID NO: 30758 - DNA, 15 bp, Homo sapiens
cagatctaccttttt

SEQ ID NO: 30759 - DNA, 15 bp, Homo sapiens
tcagatctacctttt

SEQ ID NO: 30760 - DNA, 15 bp, Homo sapiens
ttcagatctaccttt

SEQ ID NO: 30761 - DNA, 15 bp, Homo sapiens
attcagatctacctt

SEQ ID NO: 30762 - DNA, 15 bp, Homo sapiens
cattcagatctacct

SEQ ID NO: 30763 - DNA, 15 bp, Homo sapiens
gcattcagatctacc

SEQ ID NO: 30764 - DNA, 15 bp, Homo sapiens
agcattcagatctac

SEQ ID NO: 30765 - DNA, 15 bp, Homo sapiens
cagcattcagatcta

SEQ ID NO: 30766 - DNA, 15 bp, Homo sapiens
tcagcattcagatct

SEQ ID NO: 30767 - DNA, 15 bp, Homo sapiens
atcagcattcagatc

SEQ ID NO: 30768 - DNA, 15 bp, Homo sapiens
gatcagcattcagat

SEQ ID NO: 30769 - DNA, 15 bp, Homo sapiens
ggatcagcattcaga

SEQ ID NO: 30770 - DNA, 15 bp, Homo sapiens
gggatcagcattcag

SEQ ID NO: 30771 - DNA, 15 bp, Homo sapiens
ggggatcagcattca

SEQ ID NO: 30772 - DNA, 15 bp, Homo sapiens
aggggatcagcattc

SEQ ID NO: 30773 - DNA, 15 bp, Homo sapiens
caggggatcagcatt

SEQ ID NO: 30774 - DNA, 15 bp, Homo sapiens
acaggggatcagcat

SEQ ID NO: 30775 - DNA, 15 bp, Homo sapiens
cacaggggatcagca

SEQ ID NO: 30776 - DNA, 15 bp, Homo sapiens
acacaggggatcagc

SEQ ID NO: 30777 - DNA, 15 bp, Homo sapiens
cacacaggggatcag

SEQ ID NO: 30778 - DNA, 15 bp, Homo sapiens
tcacacaggggatca

SEQ ID NO: 30779 - DNA, 15 bp, Homo sapiens
ctcacacaggggatc

SEQ ID NO: 30780 - DNA, 15 bp, Homo sapiens
tctcacacaggggat

SEQ ID NO: 30781 - DNA, 15 bp, Homo sapiens
ctctcacacagggga

SEQ ID NO: 30782 - DNA, 15 bp, Homo sapiens
tctctcacacagggg

SEQ ID NO: 30783 - DNA, 15 bp, Homo sapiens
ttctctcacacaggg

SEQ ID NO: 30784 - DNA, 15 bp, Homo sapiens
tttctctcacacagg

SEQ ID NO: 30785 - DNA, 15 bp, Homo sapiens
ttttctctcacacag

SEQ ID NO: 30786 - DNA, 15 bp, Homo sapiens
cttttctctcacaca

SEQ ID NO: 30787 - DNA, 15 bp, Homo sapiens
tcttttctctcacac

SEQ ID NO: 30788 - DNA, 15 bp, Homo sapiens
ttcttttctctcaca

SEQ ID NO: 30789 - DNA, 15 bp, Homo sapiens
attcttttctctcac

SEQ ID NO: 30790 - DNA, 15 bp, Homo sapiens
cattcttttctctca

SEQ ID NO: 30791 - DNA, 15 bp, Homo sapiens
ccattcttttctctc

SEQ ID NO: 30792 - DNA, 15 bp, Homo sapiens
tccattcttttctct

SEQ ID NO: 30793 - DNA, 15 bp, Homo sapiens
ttccattcttttctc

SEQ ID NO: 30794 - DNA, 15 bp, Homo sapiens
attccattcttttct

SEQ ID NO: 30795 - DNA, 15 bp, Homo sapiens
tattccattcttttc

SEQ ID NO: 30796 - DNA, 15 bp, Homo sapiens
ttattccattctttt

SEQ ID NO: 30797 - DNA, 15 bp, Homo sapiens
cttattccattcttt

SEQ ID NO: 30798 - DNA, 15 bp, Homo sapiens
gcttattccattctt

SEQ ID NO: 30799 - DNA, 15 bp, Homo sapiens
tgcttattccattct

SEQ ID NO: 30800 - DNA, 15 bp, Homo sapiens
ctgcttattccattc

SEQ ID NO: 30801 - DNA, 15 bp, Homo sapiens
tctgcttattccatt

SEQ ID NO: 30802 - DNA, 15 bp, Homo sapiens
ttctgcttattccat

SEQ ID NO: 30803 - DNA, 15 bp, Homo sapiens
tttctgcttattcca

SEQ ID NO: 30804 - DNA, 15 bp, Homo sapiens
gtttctgcttattcc

SEQ ID NO: 30805 - DNA, 15 bp, Homo sapiens
agtttctgcttattc

SEQ ID NO: 30806 - DNA, 15 bp, Homo sapiens
cagtttctgcttatt

SEQ ID NO: 30807 - DNA, 15 bp, Homo sapiens
gcagtttctgcttat

SEQ ID NO: 30808 - DNA, 15 bp, Homo sapiens
ggcagtttctgctta

SEQ ID NO: 30809 - DNA, 15 bp, Homo sapiens
tggcagtttctgctt

SEQ ID NO: 30810 - DNA, 15 bp, Homo sapiens
atggcagtttctgct

SEQ ID NO: 30811 - DNA, 15 bp, Homo sapiens
catggcagtttctgc

SEQ ID NO: 30812 - DNA, 15 bp, Homo sapiens
gcatggcagtttctg

SEQ ID NO: 30813 - DNA, 15 bp, Homo sapiens
agcatggcagtttct

SEQ ID NO: 30814 - DNA, 15 bp, Homo sapiens
gagcatggcagtttc

SEQ ID NO: 30815 - DNA, 15 bp, Homo sapiens
tgagcatggcagttt

SEQ ID NO: 30816 - DNA, 15 bp, Homo sapiens
ctgagcatggcagtt

SEQ ID NO: 30817 - DNA, 15 bp, Homo sapiens
tctgagcatggcagt

SEQ ID NO: 30818 - DNA, 15 bp, Homo sapiens
ctctgagcatggcag

SEQ ID NO: 30819 - DNA, 15 bp, Homo sapiens
tctctgagcatggca

SEQ ID NO: 30820 - DNA, 15 bp, Homo sapiens
ttctctgagcatggc

SEQ ID NO: 30821 - DNA, 15 bp, Homo sapiens
attctctgagcatgg

SEQ ID NO: 30822 - DNA, 15 bp, Homo sapiens
gattctctgagcatg

SEQ ID NO: 30823 - DNA, 15 bp, Homo sapiens
ggattctctgagcat

SEQ ID NO: 30824 - DNA, 15 bp, Homo sapiens
aggattctctgagca

SEQ ID NO: 30825 - DNA, 15 bp, Homo sapiens
taggattctctgagc

SEQ ID NO: 30826 - DNA, 15 bp, Homo sapiens
ctaggattctctgag

SEQ ID NO: 30827 - DNA, 15 bp, Homo sapiens
tctaggattctctga

SEQ ID NO: 30828 - DNA, 15 bp, Homo sapiens
ctctaggattctctg

SEQ ID NO: 30829 - DNA, 15 bp, Homo sapiens
tctctaggattctct

SEQ ID NO: 30830 - DNA, 15 bp, Homo sapiens
atctctaggattctc

SEQ ID NO: 30831 - DNA, 15 bp, Homo sapiens
tatctctaggattct

SEQ ID NO: 30832 - DNA, 15 bp, Homo sapiens
gtatctctaggattc

SEQ ID NO: 30833 - DNA, 15 bp, Homo sapiens
agtatctctaggatt

SEQ ID NO: 30834 - DNA, 15 bp, Homo sapiens
cagtatctctaggat

SEQ ID NO: 30835 - DNA, 15 bp, Homo sapiens
tcagtatctctagga

SEQ ID NO: 30836 - DNA, 15 bp, Homo sapiens
ttcagtatctctagg

SEQ ID NO: 30837 - DNA, 15 bp, Homo sapiens
cttcagtatctctag

SEQ ID NO: 30838 - DNA, 15 bp, Homo sapiens
tcttcagtatctcta

SEQ ID NO: 30839 - DNA, 15 bp, Homo sapiens
atcttcagtatctct

SEQ ID NO: 30840 - DNA, 15 bp, Homo sapiens
catcttcagtatctc

SEQ ID NO: 30841 - DNA, 15 bp, Homo sapiens
acatcttcagtatct

SEQ ID NO: 30842 - DNA, 15 bp, Homo sapiens
aacatcttcagtatc

SEQ ID NO: 30843 - DNA, 15 bp, Homo sapiens
gaacatcttcagtat

SEQ ID NO: 30844 - DNA, 15 bp, Homo sapiens
ggaacatcttcagta

SEQ ID NO: 30845 - DNA, 15 bp, Homo sapiens
aggaacatcttcagt

SEQ ID NO: 30846 - DNA, 15 bp, Homo sapiens
aaggaacatcttcag

SEQ ID NO: 30847 - DNA, 15 bp, Homo sapiens
caaggaacatcttca

SEQ ID NO: 30848 - DNA, 15 bp, Homo sapiens
ccaaggaacatcttc

SEQ ID NO: 30849 - DNA, 15 bp, Homo sapiens
tccaaggaacatctt

SEQ ID NO: 30850 - DNA, 15 bp, Homo sapiens
atccaaggaacatct

SEQ ID NO: 30851 - DNA, 15 bp, Homo sapiens
tatccaaggaacatc

SEQ ID NO: 30852 - DNA, 15 bp, Homo sapiens
ttatccaaggaacat

SEQ ID NO: 30853 - DNA, 15 bp, Homo sapiens
gttatccaaggaaca

SEQ ID NO: 30854 - DNA, 15 bp, Homo sapiens
tgttatccaaggaac

SEQ ID NO: 30855 - DNA, 15 bp, Homo sapiens
gtgttatccaaggaa

SEQ ID NO: 30856 - DNA, 15 bp, Homo sapiens
agtgttatccaagga

SEQ ID NO: 30857 - DNA, 15 bp, Homo sapiens
tagtgttatccaagg

SEQ ID NO: 30858 - DNA, 15 bp, Homo sapiens
ttagtgttatccaag

SEQ ID NO: 30859 - DNA, 15 bp, Homo sapiens
tttagtgttatccaa

SEQ ID NO: 30860 - DNA, 15 bp, Homo sapiens
atttagtgttatcca

SEQ ID NO: 30861 - DNA, 15 bp, Homo sapiens
tatttagtgttatcc

SEQ ID NO: 30862 - DNA, 15 bp, Homo sapiens
ctatttagtgttatc

SEQ ID NO: 30863 - DNA, 15 bp, Homo sapiens
gctatttagtgttat

SEQ ID NO: 30864 - DNA, 15 bp, Homo sapiens
tgctatttagtgtta

SEQ ID NO: 30865 - DNA, 15 bp, Homo sapiens
ctgctatttagtgtt

SEQ ID NO: 30866 - DNA, 15 bp, Homo sapiens
gctgctatttagtgt

SEQ ID NO: 30867 - DNA, 15 bp, Homo sapiens
tgctgctatttagtg

SEQ ID NO: 30868 - DNA, 15 bp, Homo sapiens
atgctgctatttagt

SEQ ID NO: 30869 - DNA, 15 bp, Homo sapiens
aatgctgctatttag

SEQ ID NO: 30870 - DNA, 15 bp, Homo sapiens
gaatgctgctattta

SEQ ID NO: 30871 - DNA, 15 bp, Homo sapiens
tgaatgctgctattt

SEQ ID NO: 30872 - DNA, 15 bp, Homo sapiens
ctgaatgctgctatt

SEQ ID NO: 30873 - DNA, 15 bp, Homo sapiens
tctgaatgctgctat

SEQ ID NO: 30874 - DNA, 15 bp, Homo sapiens
ttctgaatgctgcta

SEQ ID NO: 30875 - DNA, 15 bp, Homo sapiens
tttctgaatgctgct

SEQ ID NO: 30876 - DNA, 15 bp, Homo sapiens
ctttctgaatgctgc

SEQ ID NO: 30877 - DNA, 15 bp, Homo sapiens
actttctgaatgctg

SEQ ID NO: 30878 - DNA, 15 bp, Homo sapiens
aactttctgaatgct

SEQ ID NO: 30879 - DNA, 15 bp, Homo sapiens
taactttctgaatgc

SEQ ID NO: 30880 - DNA, 15 bp, Homo sapiens
ttaactttctgaatg

SEQ ID NO: 30881 - DNA, 15 bp, Homo sapiens
attaactttctgaat

SEQ ID NO: 30882 - DNA, 15 bp, Homo sapiens
cattaactttctgaa

SEQ ID NO: 30883 - DNA, 15 bp, Homo sapiens
tcattaactttctga

SEQ ID NO: 30884 - DNA, 15 bp, Homo sapiens
ctcattaactttctg

SEQ ID NO: 30885 - DNA, 15 bp, Homo sapiens
actcattaactttct

SEQ ID NO: 30886 - DNA, 15 bp, Homo sapiens
cactcattaactttc

SEQ ID NO: 30887 - DNA, 15 bp, Homo sapiens
ccactcattaacttt

SEQ ID NO: 30888 - DNA, 15 bp, Homo sapiens
accactcattaactt

SEQ ID NO: 30889 - DNA, 15 bp, Homo sapiens
aaccactcattaact

SEQ ID NO: 30890 - DNA, 15 bp, Homo sapiens
aaaccactcattaac

SEQ ID NO: 30891 - DNA, 15 bp, Homo sapiens
aaaaccactcattaa

SEQ ID NO: 30892 - DNA, 15 bp, Homo sapiens
gaaaaccactcatta

SEQ ID NO: 30893 - DNA, 15 bp, Homo sapiens
ggaaaaccactcatt

SEQ ID NO: 30894 - DNA, 15 bp, Homo sapiens
tggaaaaccactcat

SEQ ID NO: 30895 - DNA, 15 bp, Homo sapiens
ctggaaaaccactca

SEQ ID NO: 30896 - DNA, 15 bp, Homo sapiens
tctggaaaaccactc

SEQ ID NO: 30897 - DNA, 15 bp, Homo sapiens
ttctggaaaaccact

SEQ ID NO: 30898 - DNA, 15 bp, Homo sapiens
cttctggaaaaccac

SEQ ID NO: 30899 - DNA, 15 bp, Homo sapiens
acttctggaaaacca

SEQ ID NO: 30900 - DNA, 15 bp, Homo sapiens
cacttctggaaaacc

SEQ ID NO: 30901 - DNA, 15 bp, Homo sapiens
tcacttctggaaaac

SEQ ID NO: 30902 - DNA, 15 bp, Homo sapiens
atcacttctggaaaa

SEQ ID NO: 30903 - DNA, 15 bp, Homo sapiens
catcacttctggaaa

SEQ ID NO: 30904 - DNA, 15 bp, Homo sapiens
tcatcacttctggaa

SEQ ID NO: 30905 - DNA, 15 bp, Homo sapiens
ttcatcacttctgga

SEQ ID NO: 30906 - DNA, 15 bp, Homo sapiens
gttcatcacttctgg

SEQ ID NO: 30907 - DNA, 15 bp, Homo sapiens
agttcatcacttctg

SEQ ID NO: 30908 - DNA, 15 bp, Homo sapiens
cagttcatcacttct

SEQ ID NO: 30909 - DNA, 15 bp, Homo sapiens
acagttcatcacttc

SEQ ID NO: 30910 - DNA, 15 bp, Homo sapiens
aacagttcatcactt

SEQ ID NO: 30911 - DNA, 15 bp, Homo sapiens
taacagttcatcact

SEQ ID NO: 30912 - DNA, 15 bp, Homo sapiens
ctaacagttcatcac

SEQ ID NO: 30913 - DNA, 15 bp, Homo sapiens
cctaacagttcatca

SEQ ID NO: 30914 - DNA, 15 bp, Homo sapiens
acctaacagttcatc

SEQ ID NO: 30915 - DNA, 15 bp, Homo sapiens
aacctaacagttcat

SEQ ID NO: 30916 - DNA, 15 bp, Homo sapiens
gaacctaacagttca

SEQ ID NO: 30917 - DNA, 15 bp, Homo sapiens
agaacctaacagttc

SEQ ID NO: 30918 - DNA, 15 bp, Homo sapiens
cagaacctaacagtt

SEQ ID NO: 30919 - DNA, 15 bp, Homo sapiens
tcagaacctaacagt

SEQ ID NO: 30920 - DNA, 15 bp, Homo sapiens
atcagaacctaacag

SEQ ID NO: 30921 - DNA, 15 bp, Homo sapiens
catcagaacctaaca

SEQ ID NO: 30922 - DNA, 15 bp, Homo sapiens
tcatcagaacctaac

SEQ ID NO: 30923 - DNA, 15 bp, Homo sapiens
gtcatcagaacctaa

SEQ ID NO: 30924 - DNA, 15 bp, Homo sapiens
agtcatcagaaccta

SEQ ID NO: 30925 - DNA, 15 bp, Homo sapiens
gagtcatcagaacct

SEQ ID NO: 30926 - DNA, 15 bp, Homo sapiens
tgagtcatcagaacc

SEQ ID NO: 30927 - DNA, 15 bp, Homo sapiens
gtgagtcatcagaac

SEQ ID NO: 30928 - DNA, 15 bp, Homo sapiens
tgtgagtcatcagaa

SEQ ID NO: 30929 - DNA, 15 bp, Homo sapiens
atgtgagtcatcaga

SEQ ID NO: 30930 - DNA, 15 bp, Homo sapiens
catgtgagtcatcag

SEQ ID NO: 30931 - DNA, 15 bp, Homo sapiens
tcatgtgagtcatca

SEQ ID NO: 30932 - DNA, 15 bp, Homo sapiens
atcatgtgagtcatc

SEQ ID NO: 30933 - DNA, 15 bp, Homo sapiens
catcatgtgagtcat

SEQ ID NO: 30934 - DNA, 15 bp, Homo sapiens
ccatcatgtgagtca

SEQ ID NO: 30935 - DNA, 15 bp, Homo sapiens
cccatcatgtgagtc

SEQ ID NO: 30936 - DNA, 15 bp, Homo sapiens
ccccatcatgtgagt

SEQ ID NO: 30937 - DNA, 15 bp, Homo sapiens
tccccatcatgtgag

SEQ ID NO: 30938 - DNA, 15 bp, Homo sapiens
ctccccatcatgtga

SEQ ID NO: 30939 - DNA, 15 bp, Homo sapiens
actccccatcatgtg

SEQ ID NO: 30940 - DNA, 15 bp, Homo sapiens
gactccccatcatgt

SEQ ID NO: 30941 - DNA, 15 bp, Homo sapiens
agactccccatcatg

SEQ ID NO: 30942 - DNA, 15 bp, Homo sapiens
cagactccccatcat

SEQ ID NO: 30943 - DNA, 15 bp, Homo sapiens
tcagactccccatca

SEQ ID NO: 30944 - DNA, 15 bp, Homo sapiens
ttcagactccccatc

SEQ ID NO: 30945 - DNA, 15 bp, Homo sapiens
attcagactccccat

SEQ ID NO: 30946 - DNA, 15 bp, Homo sapiens
gattcagactcccca

SEQ ID NO: 30947 - DNA, 15 bp, Homo sapiens
tgattcagactcccc

SEQ ID NO: 30948 - DNA, 15 bp, Homo sapiens
ttgattcagactccc

SEQ ID NO: 30949 - DNA, 15 bp, Homo sapiens
tttgattcagactcc

SEQ ID NO: 30950 - DNA, 15 bp, Homo sapiens
atttgattcagactc

SEQ ID NO: 30951 - DNA, 15 bp, Homo sapiens
catttgattcagact

SEQ ID NO: 30952 - DNA, 15 bp, Homo sapiens
gcatttgattcagac

SEQ ID NO: 30953 - DNA, 15 bp, Homo sapiens
ggcatttgattcaga

SEQ ID NO: 30954 - DNA, 15 bp, Homo sapiens
tggcatttgattcag

SEQ ID NO: 30955 - DNA, 15 bp, Homo sapiens
ttggcatttgattca

SEQ ID NO: 30956 - DNA, 15 bp, Homo sapiens
tttggcatttgattc

SEQ ID NO: 30957 - DNA, 15 bp, Homo sapiens
ctttggcatttgatt

SEQ ID NO: 30958 - DNA, 15 bp, Homo sapiens
actttggcatttgat

SEQ ID NO: 30959 - DNA, 15 bp, Homo sapiens
tactttggcatttga

SEQ ID NO: 30960 - DNA, 15 bp, Homo sapiens
ctactttggcatttg

SEQ ID NO: 30961 - DNA, 15 bp, Homo sapiens
gctactttggcattt

SEQ ID NO: 30962 - DNA, 15 bp, Homo sapiens
agctactttggcatt

SEQ ID NO: 30963 - DNA, 15 bp, Homo sapiens
cagctactttggcat

SEQ ID NO: 30964 - DNA, 15 bp, Homo sapiens
tcagctactttggca

SEQ ID NO: 30965 - DNA, 15 bp, Homo sapiens
atcagctactttggc

SEQ ID NO: 30966 - DNA, 15 bp, Homo sapiens
catcagctactttgg

SEQ ID NO: 30967 - DNA, 15 bp, Homo sapiens
acatcagctactttg

SEQ ID NO: 30968 - DNA, 15 bp, Homo sapiens
tacatcagctacttt

SEQ ID NO: 30969 - DNA, 15 bp, Homo sapiens
atacatcagctactt

SEQ ID NO: 30970 - DNA, 15 bp, Homo sapiens
aatacatcagctact

SEQ ID NO: 30971 - DNA, 15 bp, Homo sapiens
caatacatcagctac

SEQ ID NO: 30972 - DNA, 15 bp, Homo sapiens
ccaatacatcagcta

SEQ ID NO: 30973 - DNA, 15 bp, Homo sapiens
tccaatacatcagct

SEQ ID NO: 30974 - DNA, 15 bp, Homo sapiens
gtccaatacatcagc

SEQ ID NO: 30975 - DNA, 15 bp, Homo sapiens
cgtccaatacatcag

SEQ ID NO: 30976 - DNA, 15 bp, Homo sapiens
acgtccaatacatca

SEQ ID NO: 30977 - DNA, 15 bp, Homo sapiens
aacgtccaatacatc

SEQ ID NO: 30978 - DNA, 15 bp, Homo sapiens
gaacgtccaatacat

SEQ ID NO: 30979 - DNA, 15 bp, Homo sapiens
agaacgtccaataca

SEQ ID NO: 30980 - DNA, 15 bp, Homo sapiens
tagaacgtccaatac

SEQ ID NO: 30981 - DNA, 15 bp, Homo sapiens
ttagaacgtccaata

SEQ ID NO: 30982 - DNA, 15 bp, Homo sapiens
tttagaacgtccaat

SEQ ID NO: 30983 - DNA, 15 bp, Homo sapiens
atttagaacgtccaa

SEQ ID NO: 30984 - DNA, 15 bp, Homo sapiens
catttagaacgtcca

SEQ ID NO: 30985 - DNA, 15 bp, Homo sapiens
tcatttagaacgtcc

SEQ ID NO: 30986 - DNA, 15 bp, Homo sapiens
ctcatttagaacgtc

SEQ ID NO: 30987 - DNA, 15 bp, Homo sapiens
cctcatttagaacgt

SEQ ID NO: 30988 - DNA, 15 bp, Homo sapiens
acctcatttagaacg

SEQ ID NO: 30989 - DNA, 15 bp, Homo sapiens
tacctcatttagaac

SEQ ID NO: 30990 - DNA, 15 bp, Homo sapiens
ctacctcatttagaa

SEQ ID NO: 30991 - DNA, 15 bp, Homo sapiens
tctacctcatttaga

SEQ ID NO: 30992 - DNA, 15 bp, Homo sapiens
atctacctcatttag

SEQ ID NO: 30993 - DNA, 15 bp, Homo sapiens
catctacctcattta

SEQ ID NO: 30994 - DNA, 15 bp, Homo sapiens
tcatctacctcattt

SEQ ID NO: 30995 - DNA, 15 bp, Homo sapiens
ttcatctacctcatt

SEQ ID NO: 30996 - DNA, 15 bp, Homo sapiens
attcatctacctcat

SEQ ID NO: 30997 - DNA, 15 bp, Homo sapiens
tattcatctacctca

SEQ ID NO: 30998 - DNA, 15 bp, Homo sapiens
atattcatctacctc

SEQ ID NO: 30999 - DNA, 15 bp, Homo sapiens
aatattcatctacct

SEQ ID NO: 31000 - DNA, 15 bp, Homo sapiens
gaatattcatctacc

SEQ ID NO: 31001 - DNA, 15 bp, Homo sapiens
agaatattcatctac

SEQ ID NO: 31002 - DNA, 15 bp, Homo sapiens
cagaatattcatcta

SEQ ID NO: 31003 - DNA, 15 bp, Homo sapiens
ccagaatattcatct

SEQ ID NO: 31004 - DNA, 15 bp, Homo sapiens
accagaatattcatc

SEQ ID NO: 31005 - DNA, 15 bp, Homo sapiens
aaccagaatattcat

SEQ ID NO: 31006 - DNA, 15 bp, Homo sapiens
gaaccagaatattca

SEQ ID NO: 31007 - DNA, 15 bp, Homo sapiens
agaaccagaatattc

SEQ ID NO: 31008 - DNA, 15 bp, Homo sapiens
aagaaccagaatatt

SEQ ID NO: 31009 - DNA, 15 bp, Homo sapiens
gaagaaccagaatat

SEQ ID NO: 31010 - DNA, 15 bp, Homo sapiens
tgaagaaccagaata

SEQ ID NO: 31011 - DNA, 15 bp, Homo sapiens
ctgaagaaccagaat

SEQ ID NO: 31012 - DNA, 15 bp, Homo sapiens
tctgaagaaccagaa

SEQ ID NO: 31013 - DNA, 15 bp, Homo sapiens
ctctgaagaaccaga

SEQ ID NO: 31014 - DNA, 15 bp, Homo sapiens
tctctgaagaaccag

SEQ ID NO: 31015 - DNA, 15 bp, Homo sapiens
ttctctgaagaacca

SEQ ID NO: 31016 - DNA, 15 bp, Homo sapiens
tttctctgaagaacc

SEQ ID NO: 31017 - DNA, 15 bp, Homo sapiens
ttttctctgaagaac

SEQ ID NO: 31018 - DNA, 15 bp, Homo sapiens
attttctctgaagaa

SEQ ID NO: 31019 - DNA, 15 bp, Homo sapiens
tattttctctgaaga

SEQ ID NO: 31020 - DNA, 15 bp, Homo sapiens
ctattttctctgaag

SEQ ID NO: 31021 - DNA, 15 bp, Homo sapiens
tctattttctctgaa

SEQ ID NO: 31022 - DNA, 15 bp, Homo sapiens
gtctattttctctga

SEQ ID NO: 31023 - DNA, 15 bp, Homo sapiens
agtctattttctctg

SEQ ID NO: 31024 - DNA, 15 bp, Homo sapiens
aagtctattttctct

SEQ ID NO: 31025 - DNA, 15 bp, Homo sapiens
taagtctattttctc

SEQ ID NO: 31026 - DNA, 15 bp, Homo sapiens
gtaagtctattttct

SEQ ID NO: 31027 - DNA, 15 bp, Homo sapiens
agtaagtctattttc

SEQ ID NO: 31028 - DNA, 15 bp, Homo sapiens
cagtaagtctatttt

SEQ ID NO: 31029 - DNA, 15 bp, Homo sapiens
ccagtaagtctattt

SEQ ID NO: 31030 - DNA, 15 bp, Homo sapiens
gccagtaagtctatt

SEQ ID NO: 31031 - DNA, 15 bp, Homo sapiens
ggccagtaagtctat

SEQ ID NO: 31032 - DNA, 15 bp, Homo sapiens
tggccagtaagtcta

SEQ ID NO: 31033 - DNA, 15 bp, Homo sapiens
ctggccagtaagtct

SEQ ID NO: 31034 - DNA, 15 bp, Homo sapiens
actggccagtaagtc

SEQ ID NO: 31035 - DNA, 15 bp, Homo sapiens
cactggccagtaagt

SEQ ID NO: 31036 - DNA, 15 bp, Homo sapiens
tcactggccagtaag

SEQ ID NO: 31037 - DNA, 15 bp, Homo sapiens
atcactggccagtaa

SEQ ID NO: 31038 - DNA, 15 bp, Homo sapiens
gatcactggccagta

SEQ ID NO: 31039 - DNA, 15 bp, Homo sapiens
ggatcactggccagt

SEQ ID NO: 31040 - DNA, 15 bp, Homo sapiens
aggatcactggccag

SEQ ID NO: 31041 - DNA, 15 bp, Homo sapiens
gaggatcactggcca

SEQ ID NO: 31042 - DNA, 15 bp, Homo sapiens
tgaggatcactggcc

SEQ ID NO: 31043 - DNA, 15 bp, Homo sapiens
atgaggatcactggc

SEQ ID NO: 31044 - DNA, 15 bp, Homo sapiens
catgaggatcactgg

SEQ ID NO: 31045 - DNA, 15 bp, Homo sapiens
tcatgaggatcactg

SEQ ID NO: 31046 - DNA, 15 bp, Homo sapiens
ctcatgaggatcact

SEQ ID NO: 31047 - DNA, 15 bp, Homo sapiens
cctcatgaggatcac

SEQ ID NO: 31048 - DNA, 15 bp, Homo sapiens
gcctcatgaggatca

SEQ ID NO: 31049 - DNA, 15 bp, Homo sapiens
agcctcatgaggatc

SEQ ID NO: 31050 - DNA, 15 bp, Homo sapiens
aagcctcatgaggat

SEQ ID NO: 31051 - DNA, 15 bp, Homo sapiens
aaagcctcatgagga

SEQ ID NO: 31052 - DNA, 15 bp, Homo sapiens
taaagcctcatgagg

SEQ ID NO: 31053 - DNA, 15 bp, Homo sapiens
ttaaagcctcatgag

SEQ ID NO: 31054 - DNA, 15 bp, Homo sapiens
attaaagcctcatga

SEQ ID NO: 31055 - DNA, 15 bp, Homo sapiens
tattaaagcctcatg

SEQ ID NO: 31056 - DNA, 15 bp, Homo sapiens
atattaaagcctcat

SEQ ID NO: 31057 - DNA, 15 bp, Homo sapiens
catattaaagcctca

SEQ ID NO: 31058 - DNA, 15 bp, Homo sapiens
acatattaaagcctc

SEQ ID NO: 31059 - DNA, 15 bp, Homo sapiens
tacatattaaagcct

SEQ ID NO: 31060 - DNA, 15 bp, Homo sapiens
ttacatattaaagcc

SEQ ID NO: 31061 - DNA, 15 bp, Homo sapiens
tttacatattaaagc

SEQ ID NO: 31062 - DNA, 15 bp, Homo sapiens
ttttacatattaaag

SEQ ID NO: 31063 - DNA, 15 bp, Homo sapiens
cttttacatattaaa

SEQ ID NO: 31064 - DNA, 15 bp, Homo sapiens
acttttacatattaa

SEQ ID NO: 31065 - DNA, 15 bp, Homo sapiens
cacttttacatatta

SEQ ID NO: 31066 - DNA, 15 bp, Homo sapiens
tcacttttacatatt

SEQ ID NO: 31067 - DNA, 15 bp, Homo sapiens
ttcacttttacatat

SEQ ID NO: 31068 - DNA, 15 bp, Homo sapiens
tttcacttttacata

SEQ ID NO: 31069 - DNA, 15 bp, Homo sapiens
ctttcacttttacat

SEQ ID NO: 31070 - DNA, 15 bp, Homo sapiens
tctttcacttttaca

SEQ ID NO: 31071 - DNA, 15 bp, Homo sapiens
ctctttcacttttac

SEQ ID NO: 31072 - DNA, 15 bp, Homo sapiens
actctttcactttta

SEQ ID NO: 31073 - DNA, 15 bp, Homo sapiens
aactctttcactttt

SEQ ID NO: 31074 - DNA, 15 bp, Homo sapiens
gaactctttcacttt

SEQ ID NO: 31075 - DNA, 15 bp, Homo sapiens
tgaactctttcactt

SEQ ID NO: 31076 - DNA, 15 bp, Homo sapiens
gtgaactctttcact

SEQ ID NO: 31077 - DNA, 15 bp, Homo sapiens
agtgaactctttcac

SEQ ID NO: 31078 - DNA, 15 bp, Homo sapiens
gagtgaactctttca

SEQ ID NO: 31079 - DNA, 15 bp, Homo sapiens
ggagtgaactctttc

SEQ ID NO: 31080 - DNA, 15 bp, Homo sapiens
tggagtgaactcttt

SEQ ID NO: 31081 - DNA, 15 bp, Homo sapiens
ttggagtgaactctt

SEQ ID NO: 31082 - DNA, 15 bp, Homo sapiens
tttggagtgaactct

SEQ ID NO: 31083 - DNA, 15 bp, Homo sapiens
atttggagtgaactc

SEQ ID NO: 31084 - DNA, 15 bp, Homo sapiens
gatttggagtgaact

SEQ ID NO: 31085 - DNA, 15 bp, Homo sapiens
tgatttggagtgaac

SEQ ID NO: 31086 - DNA, 15 bp, Homo sapiens
ctgatttggagtgaa

SEQ ID NO: 31087 - DNA, 15 bp, Homo sapiens
actgatttggagtga

SEQ ID NO: 31088 - DNA, 15 bp, Homo sapiens
tactgatttggagtg

SEQ ID NO: 31089 - DNA, 15 bp, Homo sapiens
ctactgatttggagt

SEQ ID NO: 31090 - DNA, 15 bp, Homo sapiens
tctactgatttggag

SEQ ID NO: 31091 - DNA, 15 bp, Homo sapiens
ctctactgatttgga

SEQ ID NO: 31092 - DNA, 15 bp, Homo sapiens
tctctactgatttgg

SEQ ID NO: 31093 - DNA, 15 bp, Homo sapiens
ctctctactgatttg

SEQ ID NO: 31094 - DNA, 15 bp, Homo sapiens
actctctactgattt

SEQ ID NO: 31095 - DNA, 15 bp, Homo sapiens
tactctctactgatt

SEQ ID NO: 31096 - DNA, 15 bp, Homo sapiens
ttactctctactgat

SEQ ID NO: 31097 - DNA, 15 bp, Homo sapiens
attactctctactga

SEQ ID NO: 31098 - DNA, 15 bp, Homo sapiens
tattactctctactg

SEQ ID NO: 31099 - DNA, 15 bp, Homo sapiens
atattactctctact

SEQ ID NO: 31100 - DNA, 15 bp, Homo sapiens
aatattactctctac

SEQ ID NO: 31101 - DNA, 15 bp, Homo sapiens
caatattactctcta

SEQ ID NO: 31102 - DNA, 15 bp, Homo sapiens
tcaatattactctct

SEQ ID NO: 31103 - DNA, 15 bp, Homo sapiens
ttcaatattactctc

SEQ ID NO: 31104 - DNA, 15 bp, Homo sapiens
cttcaatattactct

SEQ ID NO: 31105 - DNA, 15 bp, Homo sapiens
tcttcaatattactc

SEQ ID NO: 31106 - DNA, 15 bp, Homo sapiens
gtcttcaatattact

SEQ ID NO: 31107 - DNA, 15 bp, Homo sapiens
tgtcttcaatattac

SEQ ID NO: 31108 - DNA, 15 bp, Homo sapiens
ttgtcttcaatatta

SEQ ID NO: 31109 - DNA, 15 bp, Homo sapiens
tttgtcttcaatatt

SEQ ID NO: 31110 - DNA, 15 bp, Homo sapiens
ttttgtcttcaatat

SEQ ID NO: 31111 - DNA, 15 bp, Homo sapiens
attttgtcttcaata

SEQ ID NO: 31112 - DNA, 15 bp, Homo sapiens
tattttgtcttcaat

SEQ ID NO: 31113 - DNA, 15 bp, Homo sapiens
atattttgtcttcaa

SEQ ID NO: 31114 - DNA, 15 bp, Homo sapiens
aatattttgtcttca

SEQ ID NO: 31115 - DNA, 15 bp, Homo sapiens
aaatattttgtcttc

SEQ ID NO: 31116 - DNA, 15 bp, Homo sapiens
caaatattttgtctt

SEQ ID NO: 31117 - DNA, 15 bp, Homo sapiens
ccaaatattttgtct

SEQ ID NO: 31118 - DNA, 15 bp, Homo sapiens
cccaaatattttgtc

SEQ ID NO: 31119 - DNA, 15 bp, Homo sapiens
tcccaaatattttgt

SEQ ID NO: 31120 - DNA, 15 bp, Homo sapiens
ttcccaaatattttg

SEQ ID NO: 31121 - DNA, 15 bp, Homo sapiens
tttcccaaatatttt

SEQ ID NO: 31122 - DNA, 15 bp, Homo sapiens
ttttcccaaatattt

SEQ ID NO: 31123 - DNA, 15 bp, Homo sapiens
gttttcccaaatatt

SEQ ID NO: 31124 - DNA, 15 bp, Homo sapiens
ggttttcccaaatat

SEQ ID NO: 31125 - DNA, 15 bp, Homo sapiens
aggttttcccaaata

SEQ ID NO: 31126 - DNA, 15 bp, Homo sapiens
taggttttcccaaat

SEQ ID NO: 31127 - DNA, 15 bp, Homo sapiens
ataggttttcccaaa

SEQ ID NO: 31128 - DNA, 15 bp, Homo sapiens
gataggttttcccaa

SEQ ID NO: 31129 - DNA, 15 bp, Homo sapiens
cgataggttttccca

SEQ ID NO: 31130 - DNA, 15 bp, Homo sapiens
ccgataggttttccc

SEQ ID NO: 31131 - DNA, 15 bp, Homo sapiens
tccgataggttttcc

SEQ ID NO: 31132 - DNA, 15 bp, Homo sapiens
ttccgataggttttc

SEQ ID NO: 31133 - DNA, 15 bp, Homo sapiens
cttccgataggtttt

SEQ ID NO: 31134 - DNA, 15 bp, Homo sapiens
tcttccgataggttt

SEQ ID NO: 31135 - DNA, 15 bp, Homo sapiens
ttcttccgataggtt

SEQ ID NO: 31136 - DNA, 15 bp, Homo sapiens
cttcttccgataggt

SEQ ID NO: 31137 - DNA, 15 bp, Homo sapiens
ccttcttccgatagg

SEQ ID NO: 31138 - DNA, 15 bp, Homo sapiens
gccttcttccgatag

SEQ ID NO: 31139 - DNA, 15 bp, Homo sapiens
tgccttcttccgata

SEQ ID NO: 31140 - DNA, 15 bp, Homo sapiens
ttgccttcttccgat

SEQ ID NO: 31141 - DNA, 15 bp, Homo sapiens
cttgccttcttccga

SEQ ID NO: 31142 - DNA, 15 bp, Homo sapiens
gcttgccttcttccg

SEQ ID NO: 31143 - DNA, 15 bp, Homo sapiens
ggcttgccttcttcc

SEQ ID NO: 31144 - DNA, 15 bp, Homo sapiens
aggcttgccttcttc

SEQ ID NO: 31145 - DNA, 15 bp, Homo sapiens
gaggcttgccttctt

SEQ ID NO: 31146 - DNA, 15 bp, Homo sapiens
ggaggcttgccttct

SEQ ID NO: 31147 - DNA, 15 bp, Homo sapiens
gggaggcttgccttc

SEQ ID NO: 31148 - DNA, 15 bp, Homo sapiens
ggggaggcttgcctt

SEQ ID NO: 31149 - DNA, 15 bp, Homo sapiens
tggggaggcttgcct

SEQ ID NO: 31150 - DNA, 15 bp, Homo sapiens
ttggggaggcttgcc

SEQ ID NO: 31151 - DNA, 15 bp, Homo sapiens
gttggggaggcttgc

SEQ ID NO: 31152 - DNA, 15 bp, Homo sapiens
agttggggaggcttg

SEQ ID NO: 31153 - DNA, 15 bp, Homo sapiens
aagttggggaggctt

SEQ ID NO: 31154 - DNA, 15 bp, Homo sapiens
taagttggggaggct

SEQ ID NO: 31155 - DNA, 15 bp, Homo sapiens
ttaagttggggaggc

SEQ ID NO: 31156 - DNA, 15 bp, Homo sapiens
cttaagttggggagg

SEQ ID NO: 31157 - DNA, 15 bp, Homo sapiens
gcttaagttggggag

SEQ ID NO: 31158 - DNA, 15 bp, Homo sapiens
ggcttaagttgggga

SEQ ID NO: 31159 - DNA, 15 bp, Homo sapiens
tggcttaagttgggg

SEQ ID NO: 31160 - DNA, 15 bp, Homo sapiens
atggcttaagttggg

SEQ ID NO: 31161 - DNA, 15 bp, Homo sapiens
catggcttaagttgg

SEQ ID NO: 31162 - DNA, 15 bp, Homo sapiens
acatggcttaagttg

SEQ ID NO: 31163 - DNA, 15 bp, Homo sapiens
tacatggcttaagtt

SEQ ID NO: 31164 - DNA, 15 bp, Homo sapiens
ttacatggcttaagt

SEQ ID NO: 31165 - DNA, 15 bp, Homo sapiens
gttacatggcttaag

SEQ ID NO: 31166 - DNA, 15 bp, Homo sapiens
agttacatggcttaa

SEQ ID NO: 31167 - DNA, 15 bp, Homo sapiens
cagttacatggctta

SEQ ID NO: 31168 - DNA, 15 bp, Homo sapiens
tcagttacatggctt

SEQ ID NO: 31169 - DNA, 15 bp, Homo sapiens
ttcagttacatggct

SEQ ID NO: 31170 - DNA, 15 bp, Homo sapiens
tttcagttacatggc

SEQ ID NO: 31171 - DNA, 15 bp, Homo sapiens
ttttcagttacatgg

SEQ ID NO: 31172 - DNA, 15 bp, Homo sapiens
attttcagttacatg

SEQ ID NO: 31173 - DNA, 15 bp, Homo sapiens
gattttcagttacat

SEQ ID NO: 31174 - DNA, 15 bp, Homo sapiens
agattttcagttaca

SEQ ID NO: 31175 - DNA, 15 bp, Homo sapiens
tagattttcagttac

SEQ ID NO: 31176 - DNA, 15 bp, Homo sapiens
ttagattttcagtta

SEQ ID NO: 31177 - DNA, 15 bp, Homo sapiens
attagattttcagtt

SEQ ID NO: 31178 - DNA, 15 bp, Homo sapiens
aattagattttcagt

SEQ ID NO: 31179 - DNA, 15 bp, Homo sapiens
taattagattttcag

SEQ ID NO: 31180 - DNA, 15 bp, Homo sapiens
ataattagattttca

SEQ ID NO: 31181 - DNA, 15 bp, Homo sapiens
tataattagattttc

SEQ ID NO: 31182 - DNA, 15 bp, Homo sapiens
ctataattagatttt

SEQ ID NO: 31183 - DNA, 15 bp, Homo sapiens
cctataattagattt

SEQ ID NO: 31184 - DNA, 15 bp, Homo sapiens
tcctataattagatt

SEQ ID NO: 31185 - DNA, 15 bp, Homo sapiens
ctcctataattagat

SEQ ID NO: 31186 - DNA, 15 bp, Homo sapiens
gctcctataattaga

SEQ ID NO: 31187 - DNA, 15 bp, Homo sapiens
tgctcctataattag

SEQ ID NO: 31188 - DNA, 15 bp, Homo sapiens
atgctcctataatta

SEQ ID NO: 31189 - DNA, 15 bp, Homo sapiens
aatgctcctataatt

SEQ ID NO: 31190 - DNA, 15 bp, Homo sapiens
aaatgctcctataat

SEQ ID NO: 31191 - DNA, 15 bp, Homo sapiens
caaatgctcctataa

SEQ ID NO: 31192 - DNA, 15 bp, Homo sapiens
acaaatgctcctata

SEQ ID NO: 31193 - DNA, 15 bp, Homo sapiens
aacaaatgctcctat

SEQ ID NO: 31194 - DNA, 15 bp, Homo sapiens
taacaaatgctccta

SEQ ID NO: 31195 - DNA, 15 bp, Homo sapiens
gtaacaaatgctcct

SEQ ID NO: 31196 - DNA, 15 bp, Homo sapiens
agtaacaaatgctcc

SEQ ID NO: 31197 - DNA, 15 bp, Homo sapiens
cagtaacaaatgctc

SEQ ID NO: 31198 - DNA, 15 bp, Homo sapiens
tcagtaacaaatgct

SEQ ID NO: 31199 - DNA, 15 bp, Homo sapiens
ctcagtaacaaatgc

SEQ ID NO: 31200 - DNA, 15 bp, Homo sapiens
gctcagtaacaaatg

SEQ ID NO: 31201 - DNA, 15 bp, Homo sapiens
ggctcagtaacaaat

SEQ ID NO: 31202 - DNA, 15 bp, Homo sapiens
tggctcagtaacaaa

SEQ ID NO: 31203 - DNA, 15 bp, Homo sapiens
gtggctcagtaacaa

SEQ ID NO: 31204 - DNA, 15 bp, Homo sapiens
tgtggctcagtaaca

SEQ ID NO: 31205 - DNA, 15 bp, Homo sapiens
ctgtggctcagtaac

SEQ ID NO: 31206 - DNA, 15 bp, Homo sapiens
tctgtggctcagtaa

SEQ ID NO: 31207 - DNA, 15 bp, Homo sapiens
atctgtggctcagta

SEQ ID NO: 31208 - DNA, 15 bp, Homo sapiens
tatctgtggctcagt

SEQ ID NO: 31209 - DNA, 15 bp, Homo sapiens
ttatctgtggctcag

SEQ ID NO: 31210 - DNA, 15 bp, Homo sapiens
attatctgtggctca

SEQ ID NO: 31211 - DNA, 15 bp, Homo sapiens
tattatctgtggctc

SEQ ID NO: 31212 - DNA, 15 bp, Homo sapiens
gtattatctgtggct

SEQ ID NO: 31213 - DNA, 15 bp, Homo sapiens
tgtattatctgtggc

SEQ ID NO: 31214 - DNA, 15 bp, Homo sapiens
ttgtattatctgtgg

SEQ ID NO: 31215 - DNA, 15 bp, Homo sapiens
cttgtattatctgtg

SEQ ID NO: 31216 - DNA, 15 bp, Homo sapiens
tcttgtattatctgt

SEQ ID NO: 31217 - DNA, 15 bp, Homo sapiens
ctcttgtattatctg

SEQ ID NO: 31218 - DNA, 15 bp, Homo sapiens
gctcttgtattatct

SEQ ID NO: 31219 - DNA, 15 bp, Homo sapiens
cgctcttgtattatc

SEQ ID NO: 31220 - DNA, 15 bp, Homo sapiens
acgctcttgtattat

SEQ ID NO: 31221 - DNA, 15 bp, Homo sapiens
gacgctcttgtatta

SEQ ID NO: 31222 - DNA, 15 bp, Homo sapiens
ggacgctcttgtatt

SEQ ID NO: 31223 - DNA, 15 bp, Homo sapiens
gggacgctcttgtat

SEQ ID NO: 31224 - DNA, 15 bp, Homo sapiens
ggggacgctcttgta

SEQ ID NO: 31225 - DNA, 15 bp, Homo sapiens
aggggacgctcttgt

SEQ ID NO: 31226 - DNA, 15 bp, Homo sapiens
gaggggacgctcttg

SEQ ID NO: 31227 - DNA, 15 bp, Homo sapiens
tgaggggacgctctt

SEQ ID NO: 31228 - DNA, 15 bp, Homo sapiens
gtgaggggacgctct

SEQ ID NO: 31229 - DNA, 15 bp, Homo sapiens
tgtgaggggacgctc

SEQ ID NO: 31230 - DNA, 15 bp, Homo sapiens
ttgtgaggggacgct

SEQ ID NO: 31231 - DNA, 15 bp, Homo sapiens
tttgtgaggggacgc

SEQ ID NO: 31232 - DNA, 15 bp, Homo sapiens
atttgtgaggggacg

SEQ ID NO: 31233 - DNA, 15 bp, Homo sapiens
tatttgtgaggggac

SEQ ID NO: 31234 - DNA, 15 bp, Homo sapiens
ttatttgtgagggga

SEQ ID NO: 31235 - DNA, 15 bp, Homo sapiens
tttatttgtgagggg

SEQ ID NO: 31236 - DNA, 15 bp, Homo sapiens
atttatttgtgaggg

SEQ ID NO: 31237 - DNA, 15 bp, Homo sapiens
aatttatttgtgagg

SEQ ID NO: 31238 - DNA, 15 bp, Homo sapiens
taatttatttgtgag

SEQ ID NO: 31239 - DNA, 15 bp, Homo sapiens
ttaatttatttgtga

SEQ ID NO: 31240 - DNA, 15 bp, Homo sapiens
tttaatttatttgtg

SEQ ID NO: 31241 - DNA, 15 bp, Homo sapiens
ctttaatttatttgt

SEQ ID NO: 31242 - DNA, 15 bp, Homo sapiens
gctttaatttatttg

SEQ ID NO: 31243 - DNA, 15 bp, Homo sapiens
cgctttaatttattt

SEQ ID NO: 31244 - DNA, 15 bp, Homo sapiens
acgctttaatttatt

SEQ ID NO: 31245 - DNA, 15 bp, Homo sapiens
tacgctttaatttat

SEQ ID NO: 31246 - DNA, 15 bp, Homo sapiens
ttacgctttaattta

SEQ ID NO: 31247 - DNA, 15 bp, Homo sapiens
tttacgctttaattt

SEQ ID NO: 31248 - DNA, 15 bp, Homo sapiens
ttttacgctttaatt

SEQ ID NO: 31249 - DNA, 15 bp, Homo sapiens
cttttacgctttaat

SEQ ID NO: 31250 - DNA, 15 bp, Homo sapiens
ccttttacgctttaa

SEQ ID NO: 31251 - DNA, 15 bp, Homo sapiens
tccttttacgcttta

SEQ ID NO: 31252 - DNA, 15 bp, Homo sapiens
ctccttttacgcttt

SEQ ID NO: 31253 - DNA, 15 bp, Homo sapiens
tctccttttacgctt

SEQ ID NO: 31254 - DNA, 15 bp, Homo sapiens
gtctccttttacgct

SEQ ID NO: 31255 - DNA, 15 bp, Homo sapiens
ggtctccttttacgc

SEQ ID NO: 31256 - DNA, 15 bp, Homo sapiens
aggtctccttttacg

SEQ ID NO: 31257 - DNA, 15 bp, Homo sapiens
taggtctccttttac

SEQ ID NO: 31258 - DNA, 15 bp, Homo sapiens
gtaggtctcctttta

SEQ ID NO: 31259 - DNA, 15 bp, Homo sapiens
tgtaggtctcctttt

SEQ ID NO: 31260 - DNA, 15 bp, Homo sapiens
atgtaggtctccttt

SEQ ID NO: 31261 - DNA, 15 bp, Homo sapiens
gatgtaggtctcctt

SEQ ID NO: 31262 - DNA, 15 bp, Homo sapiens
tgatgtaggtctcct

SEQ ID NO: 31263 - DNA, 15 bp, Homo sapiens
ctgatgtaggtctcc

SEQ ID NO: 31264 - DNA, 15 bp, Homo sapiens
cctgatgtaggtctc

SEQ ID NO: 31265 - DNA, 15 bp, Homo sapiens
gcctgatgtaggtct

SEQ ID NO: 31266 - DNA, 15 bp, Homo sapiens
ggcctgatgtaggtc

SEQ ID NO: 31267 - DNA, 15 bp, Homo sapiens
aggcctgatgtaggt

SEQ ID NO: 31268 - DNA, 15 bp, Homo sapiens
tcatcacttgaccat

SEQ ID NO: 31269 - DNA, 15 bp, Homo sapiens
ttcatcacttgacca

SEQ ID NO: 31270 - DNA, 15 bp, Homo sapiens
attcatcacttgacc

SEQ ID NO: 31271 - DNA, 15 bp, Homo sapiens
tattcatcacttgac

SEQ ID NO: 31272 - DNA, 15 bp, Homo sapiens
atattcatcacttga

SEQ ID NO: 31273 - DNA, 15 bp, Homo sapiens
aatattcatcacttg

SEQ ID NO: 31274 - DNA, 15 bp, Homo sapiens
taatattcatcactt

SEQ ID NO: 31275 - DNA, 15 bp, Homo sapiens
gtaatattcatcact

SEQ ID NO: 31276 - DNA, 15 bp, Homo sapiens
agtaatattcatcac

SEQ ID NO: 31277 - DNA, 15 bp, Homo sapiens
tagtaatattcatca

SEQ ID NO: 31278 - DNA, 15 bp, Homo sapiens
ttagtaatattcatc

SEQ ID NO: 31279 - DNA, 15 bp, Homo sapiens
attagtaatattcat

SEQ ID NO: 31280 - DNA, 15 bp, Homo sapiens
tattagtaatattca

SEQ ID NO: 31281 - DNA, 15 bp, Homo sapiens
ctattagtaatattc

SEQ ID NO: 31282 - DNA, 15 bp, Homo sapiens
actattagtaatatt

SEQ ID NO: 31283 - DNA, 15 bp, Homo sapiens
cactattagtaatat

SEQ ID NO: 31284 - DNA, 15 bp, Homo sapiens
ccactattagtaata

SEQ ID NO: 31285 - DNA, 15 bp, Homo sapiens
accactattagtaat

SEQ ID NO: 31286 - DNA, 15 bp, Homo sapiens
gaccactattagtaa

SEQ ID NO: 31287 - DNA, 15 bp, Homo sapiens
tgaccactattagta

SEQ ID NO: 31288 - DNA, 15 bp, Homo sapiens
atgaccactattagt

SEQ ID NO: 31289 - DNA, 15 bp, Homo sapiens
catgaccactattag

SEQ ID NO: 31290 - DNA, 15 bp, Homo sapiens
tcatgaccactatta

SEQ ID NO: 31291 - DNA, 15 bp, Homo sapiens
ctcatgaccactatt

SEQ ID NO: 31292 - DNA, 15 bp, Homo sapiens
tctcatgaccactat

SEQ ID NO: 31293 - DNA, 15 bp, Homo sapiens
ttctcatgaccacta

SEQ ID NO: 31294 - DNA, 15 bp, Homo sapiens
attctcatgaccact

SEQ ID NO: 31295 - DNA, 15 bp, Homo sapiens
tattctcatgaccac

SEQ ID NO: 31296 - DNA, 15 bp, Homo sapiens
ttattctcatgacca

SEQ ID NO: 31297 - DNA, 15 bp, Homo sapiens
tttattctcatgacc

SEQ ID NO: 31298 - DNA, 15 bp, Homo sapiens
ttttattctcatgac

SEQ ID NO: 31299 - DNA, 15 bp, Homo sapiens
gttttattctcatga

SEQ ID NO: 31300 - DNA, 15 bp, Homo sapiens
tgttttattctcatg

SEQ ID NO: 31301 - DNA, 15 bp, Homo sapiens
ttgttttattctcat

SEQ ID NO: 31302 - DNA, 15 bp, Homo sapiens
tttgttttattctca

SEQ ID NO: 31303 - DNA, 15 bp, Homo sapiens
ttttgttttattctc

SEQ ID NO: 31304 - DNA, 15 bp, Homo sapiens
cttttgttttattct

SEQ ID NO: 31305 - DNA, 15 bp, Homo sapiens
ccttttgttttattc

SEQ ID NO: 31306 - DNA, 15 bp, Homo sapiens
accttttgttttatt

SEQ ID NO: 31307 - DNA, 15 bp, Homo sapiens
caccttttgttttat

SEQ ID NO: 31308 - DNA, 15 bp, Homo sapiens
tcaccttttgtttta

SEQ ID NO: 31309 - DNA, 15 bp, Homo sapiens
atcaccttttgtttt

SEQ ID NO: 31310 - DNA, 15 bp, Homo sapiens
aatcaccttttgttt

SEQ ID NO: 31311 - DNA, 15 bp, Homo sapiens
gaatcaccttttgtt

SEQ ID NO: 31312 - DNA, 15 bp, Homo sapiens
agaatcaccttttgt

SEQ ID NO: 31313 - DNA, 15 bp, Homo sapiens
tagaatcaccttttg

SEQ ID NO: 31314 - DNA, 15 bp, Homo sapiens
atagaatcacctttt

SEQ ID NO: 31315 - DNA, 15 bp, Homo sapiens
aatagaatcaccttt

SEQ ID NO: 31316 - DNA, 15 bp, Homo sapiens
gaatagaatcacctt

SEQ ID NO: 31317 - DNA, 15 bp, Homo sapiens
tgaatagaatcacct

SEQ ID NO: 31318 - DNA, 15 bp, Homo sapiens
ctgaatagaatcacc

SEQ ID NO: 31319 - DNA, 15 bp, Homo sapiens
tctgaatagaatcac

SEQ ID NO: 31320 - DNA, 15 bp, Homo sapiens
ttctgaatagaatca

SEQ ID NO: 31321 - DNA, 15 bp, Homo sapiens
attctgaatagaatc

SEQ ID NO: 31322 - DNA, 15 bp, Homo sapiens
cattctgaatagaat

SEQ ID NO: 31323 - DNA, 15 bp, Homo sapiens
tcattctgaatagaa

SEQ ID NO: 31324 - DNA, 15 bp, Homo sapiens
ctcattctgaataga

SEQ ID NO: 31325 - DNA, 15 bp, Homo sapiens
gcttatactgctgct

SEQ ID NO: 31326 - DNA, 15 bp, Homo sapiens
tgcttatactgctgc

SEQ ID NO: 31327 - DNA, 15 bp, Homo sapiens
ttgcttatactgctg

SEQ ID NO: 31328 - DNA, 15 bp, Homo sapiens
attgcttatactgct

SEQ ID NO: 31329 - DNA, 15 bp, Homo sapiens
tattgcttatactgc

SEQ ID NO: 31330 - DNA, 15 bp, Homo sapiens
atattgcttatactg

SEQ ID NO: 31331 - DNA, 15 bp, Homo sapiens
catattgcttatact

SEQ ID NO: 31332 - DNA, 15 bp, Homo sapiens
ccatattgcttatac

SEQ ID NO: 31333 - DNA, 15 bp, Homo sapiens
tccatattgcttata

SEQ ID NO: 31334 - DNA, 15 bp, Homo sapiens
ttccatattgcttat

SEQ ID NO: 31335 - DNA, 15 bp, Homo sapiens
gttccatattgctta

SEQ ID NO: 31336 - DNA, 15 bp, Homo sapiens
agttccatattgctt

SEQ ID NO: 31337 - DNA, 15 bp, Homo sapiens
gagttccatattgct

SEQ ID NO: 31338 - DNA, 15 bp, Homo sapiens
cgagttccatattgc

SEQ ID NO: 31339 - DNA, 15 bp, Homo sapiens
tcgagttccatattg

SEQ ID NO: 31340 - DNA, 15 bp, Homo sapiens
ttcgagttccatatt

SEQ ID NO: 31341 - DNA, 15 bp, Homo sapiens
attcgagttccatat

SEQ ID NO: 31342 - DNA, 15 bp, Homo sapiens
aattcgagttccata

SEQ ID NO: 31343 - DNA, 15 bp, Homo sapiens
taattcgagttccat

SEQ ID NO: 31344 - DNA, 15 bp, Homo sapiens
ttaattcgagttcca

SEQ ID NO: 31345 - DNA, 15 bp, Homo sapiens
tttaattcgagttcc

SEQ ID NO: 31346 - DNA, 15 bp, Homo sapiens
atttaattcgagttc

SEQ ID NO: 31347 - DNA, 15 bp, Homo sapiens
tatttaattcgagtt

SEQ ID NO: 31348 - DNA, 15 bp, Homo sapiens
atatttaattcgagt

SEQ ID NO: 31349 - DNA, 15 bp, Homo sapiens
gatatttaattcgag

SEQ ID NO: 31350 - DNA, 15 bp, Homo sapiens
ggatatttaattcga

SEQ ID NO: 31351 - DNA, 15 bp, Homo sapiens
tggatatttaattcg

SEQ ID NO: 31352 - DNA, 15 bp, Homo sapiens
gtggatatttaattc

SEQ ID NO: 31353 - DNA, 15 bp, Homo sapiens
tgtggatatttaatt

SEQ ID NO: 31354 - DNA, 15 bp, Homo sapiens
ttgtggatatttaat

SEQ ID NO: 31355 - DNA, 15 bp, Homo sapiens
attgtggatatttaa

SEQ ID NO: 31356 - DNA, 15 bp, Homo sapiens
aattgtggatattta

SEQ ID NO: 31357 - DNA, 15 bp, Homo sapiens
gaattgtggatattt

SEQ ID NO: 31358 - DNA, 15 bp, Homo sapiens
tgaattgtggatatt

SEQ ID NO: 31359 - DNA, 15 bp, Homo sapiens
ttgaattgtggatat

SEQ ID NO: 31360 - DNA, 15 bp, Homo sapiens
tttgaattgtggata

SEQ ID NO: 31361 - DNA, 15 bp, Homo sapiens
ttttgaattgtggat

SEQ ID NO: 31362 - DNA, 15 bp, Homo sapiens
cttttgaattgtgga

SEQ ID NO: 31363 - DNA, 15 bp, Homo sapiens
gcttttgaattgtgg

SEQ ID NO: 31364 - DNA, 15 bp, Homo sapiens
tgcttttgaattgtg

SEQ ID NO: 31365 - DNA, 15 bp, Homo sapiens
gtgcttttgaattgt

SEQ ID NO: 31366 - DNA, 15 bp, Homo sapiens
ggtgcttttgaattg

SEQ ID NO: 31367 - DNA, 15 bp, Homo sapiens
aggtgcttttgaatt

SEQ ID NO: 31368 - DNA, 15 bp, Homo sapiens
taggtgcttttgaat

SEQ ID NO: 31369 - DNA, 15 bp, Homo sapiens
ttaggtgcttttgaa

SEQ ID NO: 31370 - DNA, 15 bp, Homo sapiens
tttaggtgcttttga

SEQ ID NO: 31371 - DNA, 15 bp, Homo sapiens
ttttaggtgcttttg

SEQ ID NO: 31372 - DNA, 15 bp, Homo sapiens
tttttaggtgctttt

SEQ ID NO: 31373 - DNA, 15 bp, Homo sapiens
ctttttaggtgcttt

SEQ ID NO: 31374 - DNA, 15 bp, Homo sapiens
tctttttaggtgctt

SEQ ID NO: 31375 - DNA, 15 bp, Homo sapiens
ttctttttaggtgct

SEQ ID NO: 31376 - DNA, 15 bp, Homo sapiens
attctttttaggtgc

SEQ ID NO: 31377 - DNA, 15 bp, Homo sapiens
tattctttttaggtg

SEQ ID NO: 31378 - DNA, 15 bp, Homo sapiens
ctattctttttaggt

SEQ ID NO: 31379 - DNA, 15 bp, Homo sapiens
cctattctttttagg

SEQ ID NO: 31380 - DNA, 15 bp, Homo sapiens
gcctattctttttag

SEQ ID NO: 31381 - DNA, 15 bp, Homo sapiens
agcctattcttttta

SEQ ID NO: 31382 - DNA, 15 bp, Homo sapiens
cagcctattcttttt

SEQ ID NO: 31383 - DNA, 15 bp, Homo sapiens
tcagcctattctttt

SEQ ID NO: 31384 - DNA, 15 bp, Homo sapiens
ctcagcctattcttt

SEQ ID NO: 31385 - DNA, 15 bp, Homo sapiens
cctcagcctattctt

SEQ ID NO: 31386 - DNA, 15 bp, Homo sapiens
tcctcagcctattct

SEQ ID NO: 31387 - DNA, 15 bp, Homo sapiens
ctcctcagcctattc

SEQ ID NO: 31388 - DNA, 15 bp, Homo sapiens
cctcctcagcctatt

SEQ ID NO: 31389 - DNA, 15 bp, Homo sapiens
tcctcctcagcctat

SEQ ID NO: 31390 - DNA, 15 bp, Homo sapiens
ttcctcctcagccta

SEQ ID NO: 31391 - DNA, 15 bp, Homo sapiens
cttcctcctcagcct

SEQ ID NO: 31392 - DNA, 15 bp, Homo sapiens
acttcctcctcagcc

SEQ ID NO: 31393 - DNA, 15 bp, Homo sapiens
gacttcctcctcagc

SEQ ID NO: 31394 - DNA, 15 bp, Homo sapiens
agacttcctcctcag

SEQ ID NO: 31395 - DNA, 15 bp, Homo sapiens
aagacttcctcctca

SEQ ID NO: 31396 - DNA, 15 bp, Homo sapiens
gaagacttcctcctc

SEQ ID NO: 31397 - DNA, 15 bp, Homo sapiens
agaagacttcctcct

SEQ ID NO: 31398 - DNA, 15 bp, Homo sapiens
tagaagacttcctcc

SEQ ID NO: 31399 - DNA, 15 bp, Homo sapiens
gtagaagacttcctc

SEQ ID NO: 31400 - DNA, 15 bp, Homo sapiens
ggtagaagacttcct

SEQ ID NO: 31401 - DNA, 15 bp, Homo sapiens
tggtagaagacttcc

SEQ ID NO: 31402 - DNA, 15 bp, Homo sapiens
ctggtagaagacttc

SEQ ID NO: 31403 - DNA, 15 bp, Homo sapiens
cctggtagaagactt

SEQ ID NO: 31404 - DNA, 15 bp, Homo sapiens
gcctggtagaagact

SEQ ID NO: 31405 - DNA, 15 bp, Homo sapiens
tgcctggtagaagac

SEQ ID NO: 31406 - DNA, 15 bp, Homo sapiens
atgcctggtagaaga

SEQ ID NO: 31407 - DNA, 15 bp, Homo sapiens
tatgcctggtagaag

SEQ ID NO: 31408 - DNA, 15 bp, Homo sapiens
atatgcctggtagaa

SEQ ID NO: 31409 - DNA, 15 bp, Homo sapiens
aatatgcctggtaga

SEQ ID NO: 31410 - DNA, 15 bp, Homo sapiens
gaatatgcctggtag

SEQ ID NO: 31411 - DNA, 15 bp, Homo sapiens
tgaatatgcctggta

SEQ ID NO: 31412 - DNA, 15 bp, Homo sapiens
atgaatatgcctggt

SEQ ID NO: 31413 - DNA, 15 bp, Homo sapiens
catgaatatgcctgg

SEQ ID NO: 31414 - DNA, 15 bp, Homo sapiens
gcatgaatatgcctg

SEQ ID NO: 31415 - DNA, 15 bp, Homo sapiens
cgcatgaatatgcct

SEQ ID NO: 31416 - DNA, 15 bp, Homo sapiens
gcgcatgaatatgcc

SEQ ID NO: 31417 - DNA, 15 bp, Homo sapiens
agcgcatgaatatgc

SEQ ID NO: 31418 - DNA, 15 bp, Homo sapiens
aagcgcatgaatatg

SEQ ID NO: 31419 - DNA, 15 bp, Homo sapiens
caagcgcatgaatat

SEQ ID NO: 31420 - DNA, 15 bp, Homo sapiens
tcaagcgcatgaata

SEQ ID NO: 31421 - DNA, 15 bp, Homo sapiens
ttcaagcgcatgaat

SEQ ID NO: 31422 - DNA, 15 bp, Homo sapiens
gttcaagcgcatgaa

SEQ ID NO: 31423 - DNA, 15 bp, Homo sapiens
agttcaagcgcatga

SEQ ID NO: 31424 - DNA, 15 bp, Homo sapiens
tagttcaagcgcatg

SEQ ID NO: 31425 - DNA, 15 bp, Homo sapiens
ctagttcaagcgcat

SEQ ID NO: 31426 - DNA, 15 bp, Homo sapiens
actagttcaagcgca

SEQ ID NO: 31427 - DNA, 15 bp, Homo sapiens
tactagttcaagcgc

SEQ ID NO: 31428 - DNA, 15 bp, Homo sapiens
ctactagttcaagcg

SEQ ID NO: 31429 - DNA, 15 bp, Homo sapiens
actactagttcaagc

SEQ ID NO: 31430 - DNA, 15 bp, Homo sapiens
gactactagttcaag

SEQ ID NO: 31431 - DNA, 15 bp, Homo sapiens
tgactactagttcaa

SEQ ID NO: 31432 - DNA, 15 bp, Homo sapiens
ctgactactagttca

SEQ ID NO: 31433 - DNA, 15 bp, Homo sapiens
actgactactagttc

SEQ ID NO: 31434 - DNA, 15 bp, Homo sapiens
tactgactactagtt

SEQ ID NO: 31435 - DNA, 15 bp, Homo sapiens
ctactgactactagt

SEQ ID NO: 31436 - DNA, 15 bp, Homo sapiens
tctactgactactag

SEQ ID NO: 31437 - DNA, 15 bp, Homo sapiens
ttctactgactacta

SEQ ID NO: 31438 - DNA, 15 bp, Homo sapiens
tttctactgactact

SEQ ID NO: 31439 - DNA, 15 bp, Homo sapiens
atttctactgactac

SEQ ID NO: 31440 - DNA, 15 bp, Homo sapiens
gatttctactgacta

SEQ ID NO: 31441 - DNA, 15 bp, Homo sapiens
agatttctactgact

SEQ ID NO: 31442 - DNA, 15 bp, Homo sapiens
tagatttctactgac

SEQ ID NO: 31443 - DNA, 15 bp, Homo sapiens
ttagatttctactga

SEQ ID NO: 31444 - DNA, 15 bp, Homo sapiens
cttagatttctactg

SEQ ID NO: 31445 - DNA, 15 bp, Homo sapiens
gcttagatttctact

SEQ ID NO: 31446 - DNA, 15 bp, Homo sapiens
ggcttagatttctac

SEQ ID NO: 31447 - DNA, 15 bp, Homo sapiens
gggcttagatttcta

SEQ ID NO: 31448 - DNA, 15 bp, Homo sapiens
tgggcttagatttct

SEQ ID NO: 31449 - DNA, 15 bp, Homo sapiens
gtgggcttagatttc

SEQ ID NO: 31450 - DNA, 15 bp, Homo sapiens
ggtgggcttagattt

SEQ ID NO: 31451 - DNA, 15 bp, Homo sapiens
aggtgggcttagatt

SEQ ID NO: 31452 - DNA, 15 bp, Homo sapiens
taggtgggcttagat

SEQ ID NO: 31453 - DNA, 15 bp, Homo sapiens
ttaggtgggcttaga

SEQ ID NO: 31454 - DNA, 15 bp, Homo sapiens
attaggtgggcttag

SEQ ID NO: 31455 - DNA, 15 bp, Homo sapiens
aattaggtgggctta

SEQ ID NO: 31456 - DNA, 15 bp, Homo sapiens
caattaggtgggctt

SEQ ID NO: 31457 - DNA, 15 bp, Homo sapiens
acaattaggtgggct

SEQ ID NO: 31458 - DNA, 15 bp, Homo sapiens
tacaattaggtgggc

SEQ ID NO: 31459 - DNA, 15 bp, Homo sapiens
gtacaattaggtggg

SEQ ID NO: 31460 - DNA, 15 bp, Homo sapiens
agtacaattaggtgg

SEQ ID NO: 31461 - DNA, 15 bp, Homo sapiens
cagtacaattaggtg

SEQ ID NO: 31462 - DNA, 15 bp, Homo sapiens
tcagtacaattaggt

SEQ ID NO: 31463 - DNA, 15 bp, Homo sapiens
ttcagtacaattagg

SEQ ID NO: 31464 - DNA, 15 bp, Homo sapiens
catttgttaacttca

SEQ ID NO: 31465 - DNA, 15 bp, Homo sapiens
gcatttgttaacttc

SEQ ID NO: 31466 - DNA, 15 bp, Homo sapiens
tgcatttgttaactt

SEQ ID NO: 31467 - DNA, 15 bp, Homo sapiens
gtgcatttgttaact

SEQ ID NO: 31468 - DNA, 15 bp, Homo sapiens
ggtgcatttgttaac

SEQ ID NO: 31469 - DNA, 15 bp, Homo sapiens
aggtgcatttgttaa

SEQ ID NO: 31470 - DNA, 15 bp, Homo sapiens
caggtgcatttgtta

SEQ ID NO: 31471 - DNA, 15 bp, Homo sapiens
ccaggtgcatttgtt

SEQ ID NO: 31472 - DNA, 15 bp, Homo sapiens
accaggtgcatttgt

SEQ ID NO: 31473 - DNA, 15 bp, Homo sapiens
aaccaggtgcatttg

SEQ ID NO: 31474 - DNA, 15 bp, Homo sapiens
gaaccaggtgcattt

SEQ ID NO: 31475 - DNA, 15 bp, Homo sapiens
agaaccaggtgcatt

SEQ ID NO: 31476 - DNA, 15 bp, Homo sapiens
aagaaccaggtgcat

SEQ ID NO: 31477 - DNA, 15 bp, Homo sapiens
aaagaaccaggtgca

SEQ ID NO: 31478 - DNA, 15 bp, Homo sapiens
aaaagaaccaggtgc

SEQ ID NO: 31479 - DNA, 15 bp, Homo sapiens
taaaagaaccaggtg

SEQ ID NO: 31480 - DNA, 15 bp, Homo sapiens
gtaaaagaaccaggt

SEQ ID NO: 31481 - DNA, 15 bp, Homo sapiens
agtaaaagaaccagg

SEQ ID NO: 31482 - DNA, 15 bp, Homo sapiens
tagtaaaagaaccag

SEQ ID NO: 31483 - DNA, 15 bp, Homo sapiens
ttagtaaaagaacca

SEQ ID NO: 31484 - DNA, 15 bp, Homo sapiens
cttagtaaaagaacc

SEQ ID NO: 31485 - DNA, 15 bp, Homo sapiens
acttagtaaaagaac

SEQ ID NO: 31486 - DNA, 15 bp, Homo sapiens
cacttagtaaaagaa

SEQ ID NO: 31487 - DNA, 15 bp, Homo sapiens
acacttagtaaaaga

SEQ ID NO: 31488 - DNA, 15 bp, Homo sapiens
aacacttagtaaaag

SEQ ID NO: 31489 - DNA, 15 bp, Homo sapiens
gaacacttagtaaaa

SEQ ID NO: 31490 - DNA, 15 bp, Homo sapiens
tgaacacttagtaaa

SEQ ID NO: 31491 - DNA, 15 bp, Homo sapiens
ttgaacacttagtaa

SEQ ID NO: 31492 - DNA, 15 bp, Homo sapiens
tttgaacacttagta

SEQ ID NO: 31493 - DNA, 15 bp, Homo sapiens
atttgaacacttagt

SEQ ID NO: 31494 - DNA, 15 bp, Homo sapiens
tatttgaacacttag

SEQ ID NO: 31495 - DNA, 15 bp, Homo sapiens
gtatttgaacactta

SEQ ID NO: 31496 - DNA, 15 bp, Homo sapiens
ggtatttgaacactt

SEQ ID NO: 31497 - DNA, 15 bp, Homo sapiens
tggtatttgaacact

SEQ ID NO: 31498 - DNA, 15 bp, Homo sapiens
ctggtatttgaacac

SEQ ID NO: 31499 - DNA, 15 bp, Homo sapiens
actggtatttgaaca

SEQ ID NO: 31500 - DNA, 15 bp, Homo sapiens
cactggtatttgaac

SEQ ID NO: 31501 - DNA, 15 bp, Homo sapiens
tcactggtatttgaa

SEQ ID NO: 31502 - DNA, 15 bp, Homo sapiens
ttcactggtatttga

SEQ ID NO: 31503 - DNA, 15 bp, Homo sapiens
gttcactggtatttg

SEQ ID NO: 31504 - DNA, 15 bp, Homo sapiens
agttcactggtattt

SEQ ID NO: 31505 - DNA, 15 bp, Homo sapiens
aagttcactggtatt

SEQ ID NO: 31506 - DNA, 15 bp, Homo sapiens
taagttcactggtat

SEQ ID NO: 31507 - DNA, 15 bp, Homo sapiens
ttaagttcactggta

SEQ ID NO: 31508 - DNA, 15 bp, Homo sapiens
tttaagttcactggt

SEQ ID NO: 31509 - DNA, 15 bp, Homo sapiens
ctttaagttcactgg

SEQ ID NO: 31510 - DNA, 15 bp, Homo sapiens
tctttaagttcactg

SEQ ID NO: 31511 - DNA, 15 bp, Homo sapiens
ttctttaagttcact

SEQ ID NO: 31512 - DNA, 15 bp, Homo sapiens
attctttaagttcac

SEQ ID NO: 31513 - DNA, 15 bp, Homo sapiens
aattctttaagttca

SEQ ID NO: 31514 - DNA, 15 bp, Homo sapiens
aaattctttaagttc

SEQ ID NO: 31515 - DNA, 15 bp, Homo sapiens
caaattctttaagtt

SEQ ID NO: 31516 - DNA, 15 bp, Homo sapiens
acaaattctttaagt

SEQ ID NO: 31517 - DNA, 15 bp, Homo sapiens
gacaaattctttaag

SEQ ID NO: 31518 - DNA, 15 bp, Homo sapiens
tgacaaattctttaa

SEQ ID NO: 31519 - DNA, 15 bp, Homo sapiens
ttgacaaattcttta

SEQ ID NO: 31520 - DNA, 15 bp, Homo sapiens
attgacaaattcttt

SEQ ID NO: 31521 - DNA, 15 bp, Homo sapiens
gattgacaaattctt

SEQ ID NO: 31522 - DNA, 15 bp, Homo sapiens
ggattgacaaattct

SEQ ID NO: 31523 - DNA, 15 bp, Homo sapiens
aggattgacaaattc

SEQ ID NO: 31524 - DNA, 15 bp, Homo sapiens
taggattgacaaatt

SEQ ID NO: 31525 - DNA, 15 bp, Homo sapiens
ctaggattgacaaat

SEQ ID NO: 31526 - DNA, 15 bp, Homo sapiens
gctaggattgacaaa

SEQ ID NO: 31527 - DNA, 15 bp, Homo sapiens
ggctaggattgacaa

SEQ ID NO: 31528 - DNA, 15 bp, Homo sapiens
aggctaggattgaca

SEQ ID NO: 31529 - DNA, 15 bp, Homo sapiens
aaggctaggattgac

SEQ ID NO: 31530 - DNA, 15 bp, Homo sapiens
gaaggctaggattga

SEQ ID NO: 31531 - DNA, 15 bp, Homo sapiens
ggaaggctaggattg

SEQ ID NO: 31532 - DNA, 15 bp, Homo sapiens
tggaaggctaggatt

SEQ ID NO: 31533 - DNA, 15 bp, Homo sapiens
ttggaaggctaggat

SEQ ID NO: 31534 - DNA, 15 bp, Homo sapiens
cttggaaggctagga

SEQ ID NO: 31535 - DNA, 15 bp, Homo sapiens
tcttggaaggctagg

SEQ ID NO: 31536 - DNA, 15 bp, Homo sapiens
ctcttggaaggctag

SEQ ID NO: 31537 - DNA, 15 bp, Homo sapiens
tctcttggaaggcta

SEQ ID NO: 31538 - DNA, 15 bp, Homo sapiens
ttctcttggaaggct

SEQ ID NO: 31539 - DNA, 15 bp, Homo sapiens
cttctcttggaaggc

SEQ ID NO: 31540 - DNA, 15 bp, Homo sapiens
tcttctcttggaagg

SEQ ID NO: 31541 - DNA, 15 bp, Homo sapiens
ttcttctcttggaag

SEQ ID NO: 31542 - DNA, 15 bp, Homo sapiens
tttcttctcttggaa

SEQ ID NO: 31543 - DNA, 15 bp, Homo sapiens
ttttcttctcttgga

SEQ ID NO: 31544 - DNA, 15 bp, Homo sapiens
tttttcttctcttgg

SEQ ID NO: 31545 - DNA, 15 bp, Homo sapiens
ctttttcttctcttg

SEQ ID NO: 31546 - DNA, 15 bp, Homo sapiens
tctttttcttctctt

SEQ ID NO: 31547 - DNA, 15 bp, Homo sapiens
ttctttttcttctct

SEQ ID NO: 31548 - DNA, 15 bp, Homo sapiens
cttctttttcttctc

SEQ ID NO: 31549 - DNA, 15 bp, Homo sapiens
tcttctttttcttct

SEQ ID NO: 31550 - DNA, 15 bp, Homo sapiens
ctcttctttttcttc

SEQ ID NO: 31551 - DNA, 15 bp, Homo sapiens
tctcttctttttctt

SEQ ID NO: 31552 - DNA, 15 bp, Homo sapiens
ttctcttctttttct

SEQ ID NO: 31553 - DNA, 15 bp, Homo sapiens
tttctcttctttttc

SEQ ID NO: 31554 - DNA, 15 bp, Homo sapiens
gtttctcttcttttt

SEQ ID NO: 31555 - DNA, 15 bp, Homo sapiens
agtttctcttctttt

SEQ ID NO: 31556 - DNA, 15 bp, Homo sapiens
tagtttctcttcttt

SEQ ID NO: 31557 - DNA, 15 bp, Homo sapiens
ctagtttctcttctt

SEQ ID NO: 31558 - DNA, 15 bp, Homo sapiens
tctagtttctcttct

SEQ ID NO: 31559 - DNA, 15 bp, Homo sapiens
ttctagtttctcttc

SEQ ID NO: 31560 - DNA, 15 bp, Homo sapiens
tttctagtttctctt

SEQ ID NO: 31561 - DNA, 15 bp, Homo sapiens
gtttctagtttctct

SEQ ID NO: 31562 - DNA, 15 bp, Homo sapiens
tgtttctagtttctc

SEQ ID NO: 31563 - DNA, 15 bp, Homo sapiens
ctgtttctagtttct

SEQ ID NO: 31564 - DNA, 15 bp, Homo sapiens
actgtttctagtttc

SEQ ID NO: 31565 - DNA, 15 bp, Homo sapiens
aactgtttctagttt

SEQ ID NO: 31566 - DNA, 15 bp, Homo sapiens
taactgtttctagtt

SEQ ID NO: 31567 - DNA, 15 bp, Homo sapiens
ttaactgtttctagt

SEQ ID NO: 31568 - DNA, 15 bp, Homo sapiens
tttaactgtttctag

SEQ ID NO: 31569 - DNA, 15 bp, Homo sapiens
ctttaactgtttcta

SEQ ID NO: 31570 - DNA, 15 bp, Homo sapiens
actttaactgtttct

SEQ ID NO: 31571 - DNA, 15 bp, Homo sapiens
cactttaactgtttc

SEQ ID NO: 31572 - DNA, 15 bp, Homo sapiens
acactttaactgttt

SEQ ID NO: 31573 - DNA, 15 bp, Homo sapiens
gacactttaactgtt

SEQ ID NO: 31574 - DNA, 15 bp, Homo sapiens
agacactttaactgt

SEQ ID NO: 31575 - DNA, 15 bp, Homo sapiens
tagacactttaactg

SEQ ID NO: 31576 - DNA, 15 bp, Homo sapiens
ttagacactttaact

SEQ ID NO: 31577 - DNA, 15 bp, Homo sapiens
attagacactttaac

SEQ ID NO: 31578 - DNA, 15 bp, Homo sapiens
tattagacactttaa

SEQ ID NO: 31579 - DNA, 15 bp, Homo sapiens
ttattagacacttta

SEQ ID NO: 31580 - DNA, 15 bp, Homo sapiens
attattagacacttt

SEQ ID NO: 31581 - DNA, 15 bp, Homo sapiens
cattattagacactt

SEQ ID NO: 31582 - DNA, 15 bp, Homo sapiens
gcattattagacact

SEQ ID NO: 31583 - DNA, 15 bp, Homo sapiens
agcattattagacac

SEQ ID NO: 31584 - DNA, 15 bp, Homo sapiens
cagcattattagaca

SEQ ID NO: 31585 - DNA, 15 bp, Homo sapiens
tcagcattattagac

SEQ ID NO: 31586 - DNA, 15 bp, Homo sapiens
ttcagcattattaga

SEQ ID NO: 31587 - DNA, 15 bp, Homo sapiens
cttcagcattattag

SEQ ID NO: 31588 - DNA, 15 bp, Homo sapiens
tcttcagcattatta

SEQ ID NO: 31589 - DNA, 15 bp, Homo sapiens
gtcttcagcattatt

SEQ ID NO: 31590 - DNA, 15 bp, Homo sapiens
ggtcttcagcattat

SEQ ID NO: 31591 - DNA, 15 bp, Homo sapiens
gggtcttcagcatta

SEQ ID NO: 31592 - DNA, 15 bp, Homo sapiens
ggggtcttcagcatt

SEQ ID NO: 31593 - DNA, 15 bp, Homo sapiens
tggggtcttcagcat

SEQ ID NO: 31594 - DNA, 15 bp, Homo sapiens
ttggggtcttcagca

SEQ ID NO: 31595 - DNA, 15 bp, Homo sapiens
tttggggtcttcagc

SEQ ID NO: 31596 - DNA, 15 bp, Homo sapiens
ctttggggtcttcag

SEQ ID NO: 31597 - DNA, 15 bp, Homo sapiens
tctttggggtcttca

SEQ ID NO: 31598 - DNA, 15 bp, Homo sapiens
atctttggggtcttc

SEQ ID NO: 31599 - DNA, 15 bp, Homo sapiens
gatctttggggtctt

SEQ ID NO: 31600 - DNA, 15 bp, Homo sapiens
agatctttggggtct

SEQ ID NO: 31601 - DNA, 15 bp, Homo sapiens
gagatctttggggtc

SEQ ID NO: 31602 - DNA, 15 bp, Homo sapiens
tgagatctttggggt

SEQ ID NO: 31603 - DNA, 15 bp, Homo sapiens
atgagatctttgggg

SEQ ID NO: 31604 - DNA, 15 bp, Homo sapiens
catgagatctttggg

SEQ ID NO: 31605 - DNA, 15 bp, Homo sapiens
acatgagatctttgg

SEQ ID NO: 31606 - DNA, 15 bp, Homo sapiens
aacatgagatctttg

SEQ ID NO: 31607 - DNA, 15 bp, Homo sapiens
taacatgagatcttt

SEQ ID NO: 31608 - DNA, 15 bp, Homo sapiens
ttaacatgagatctt

SEQ ID NO: 31609 - DNA, 15 bp, Homo sapiens
cttaacatgagatct

SEQ ID NO: 31610 - DNA, 15 bp, Homo sapiens
acttaacatgagatc

SEQ ID NO: 31611 - DNA, 15 bp, Homo sapiens
cacttaacatgagat

SEQ ID NO: 31612 - DNA, 15 bp, Homo sapiens
ccacttaacatgaga

SEQ ID NO: 31613 - DNA, 15 bp, Homo sapiens
tccacttaacatgag

SEQ ID NO: 31614 - DNA, 15 bp, Homo sapiens
ctccacttaacatga

SEQ ID NO: 31615 - DNA, 15 bp, Homo sapiens
tctccacttaacatg

SEQ ID NO: 31616 - DNA, 15 bp, Homo sapiens
ttctccacttaacat

SEQ ID NO: 31617 - DNA, 15 bp, Homo sapiens
tttctccacttaaca

SEQ ID NO: 31618 - DNA, 15 bp, Homo sapiens
ctttctccacttaac

SEQ ID NO: 31619 - DNA, 15 bp, Homo sapiens
cctttctccacttaa

SEQ ID NO: 31620 - DNA, 15 bp, Homo sapiens
ccctttctccactta

SEQ ID NO: 31621 - DNA, 15 bp, Homo sapiens
accctttctccactt

SEQ ID NO: 31622 - DNA, 15 bp, Homo sapiens
aaccctttctccact

SEQ ID NO: 31623 - DNA, 15 bp, Homo sapiens
aaaccctttctccac

SEQ ID NO: 31624 - DNA, 15 bp, Homo sapiens
aaaaccctttctcca

SEQ ID NO: 31625 - DNA, 15 bp, Homo sapiens
caaaaccctttctcc

SEQ ID NO: 31626 - DNA, 15 bp, Homo sapiens
gcaaaaccctttctc

SEQ ID NO: 31627 - DNA, 15 bp, Homo sapiens
tgcaaaaccctttct

SEQ ID NO: 31628 - DNA, 15 bp, Homo sapiens
ttgcaaaaccctttc

SEQ ID NO: 31629 - DNA, 15 bp, Homo sapiens
tttgcaaaacccttt

SEQ ID NO: 31630 - DNA, 15 bp, Homo sapiens
gtttgcaaaaccctt

SEQ ID NO: 31631 - DNA, 15 bp, Homo sapiens
agtttgcaaaaccct

SEQ ID NO: 31632 - DNA, 15 bp, Homo sapiens
cagtttgcaaaaccc

SEQ ID NO: 31633 - DNA, 15 bp, Homo sapiens
tcagtttgcaaaacc

SEQ ID NO: 31634 - DNA, 15 bp, Homo sapiens
ttcagtttgcaaaac

SEQ ID NO: 31635 - DNA, 15 bp, Homo sapiens
tttcagtttgcaaaa

SEQ ID NO: 31636 - DNA, 15 bp, Homo sapiens
ctttcagtttgcaaa

SEQ ID NO: 31637 - DNA, 15 bp, Homo sapiens
tctttcagtttgcaa

SEQ ID NO: 31638 - DNA, 15 bp, Homo sapiens
atctttcagtttgca

SEQ ID NO: 31639 - DNA, 15 bp, Homo sapiens
gatctttcagtttgc

SEQ ID NO: 31640 - DNA, 15 bp, Homo sapiens
agatctttcagtttg

SEQ ID NO: 31641 - DNA, 15 bp, Homo sapiens
cagatctttcagttt

SEQ ID NO: 31642 - DNA, 15 bp, Homo sapiens
acagatctttcagtt

SEQ ID NO: 31643 - DNA, 15 bp, Homo sapiens
tacagatctttcagt

SEQ ID NO: 31644 - DNA, 15 bp, Homo sapiens
ctacagatctttcag

SEQ ID NO: 31645 - DNA, 15 bp, Homo sapiens
tctacagatctttca

SEQ ID NO: 31646 - DNA, 15 bp, Homo sapiens
ctctacagatctttc

SEQ ID NO: 31647 - DNA, 15 bp, Homo sapiens
tctctacagatcttt

SEQ ID NO: 31648 - DNA, 15 bp, Homo sapiens
ctctctacagatctt

SEQ ID NO: 31649 - DNA, 15 bp, Homo sapiens
actctctacagatct

SEQ ID NO: 31650 - DNA, 15 bp, Homo sapiens
tactctctacagatc

SEQ ID NO: 31651 - DNA, 15 bp, Homo sapiens
ctactctctacagat

SEQ ID NO: 31652 - DNA, 15 bp, Homo sapiens
gctactctctacaga

SEQ ID NO: 31653 - DNA, 15 bp, Homo sapiens
tgctactctctacag

SEQ ID NO: 31654 - DNA, 15 bp, Homo sapiens
ctgctactctctaca

SEQ ID NO: 31655 - DNA, 15 bp, Homo sapiens
actgctactctctac

SEQ ID NO: 31656 - DNA, 15 bp, Homo sapiens
tactgctactctcta

SEQ ID NO: 31657 - DNA, 15 bp, Homo sapiens
atactgctactctct

SEQ ID NO: 31658 - DNA, 15 bp, Homo sapiens
aatactgctactctc

SEQ ID NO: 31659 - DNA, 15 bp, Homo sapiens
aaatactgctactct

SEQ ID NO: 31660 - DNA, 15 bp, Homo sapiens
gaaatactgctactc

SEQ ID NO: 31661 - DNA, 15 bp, Homo sapiens
tgaaatactgctact

SEQ ID NO: 31662 - DNA, 15 bp, Homo sapiens
atgaaatactgctac

SEQ ID NO: 31663 - DNA, 15 bp, Homo sapiens
aatgaaatactgcta

SEQ ID NO: 31664 - DNA, 15 bp, Homo sapiens
caatgaaatactgct

SEQ ID NO: 31665 - DNA, 15 bp, Homo sapiens
ccaatgaaatactgc

SEQ ID NO: 31666 - DNA, 15 bp, Homo sapiens
accaatgaaatactg

SEQ ID NO: 31667 - DNA, 15 bp, Homo sapiens
taccaatgaaatact

SEQ ID NO: 31668 - DNA, 15 bp, Homo sapiens
gtaccaatgaaatac

SEQ ID NO: 31669 - DNA, 15 bp, Homo sapiens
ggtaccaatgaaata

SEQ ID NO: 31670 - DNA, 15 bp, Homo sapiens
aggtaccaatgaaat

SEQ ID NO: 31671 - DNA, 15 bp, Homo sapiens
caggtaccaatgaaa

SEQ ID NO: 31672 - DNA, 15 bp, Homo sapiens
ccaggtaccaatgaa

SEQ ID NO: 31673 - DNA, 15 bp, Homo sapiens
accaggtaccaatga

SEQ ID NO: 31674 - DNA, 15 bp, Homo sapiens
taccaggtaccaatg

SEQ ID NO: 31675 - DNA, 15 bp, Homo sapiens
gtaccaggtaccaat

SEQ ID NO: 31676 - DNA, 15 bp, Homo sapiens
agtaccaggtaccaa

SEQ ID NO: 31677 - DNA, 15 bp, Homo sapiens
cagtaccaggtacca

SEQ ID NO: 31678 - DNA, 15 bp, Homo sapiens
tcagtaccaggtacc

SEQ ID NO: 31679 - DNA, 15 bp, Homo sapiens
atcagtaccaggtac

SEQ ID NO: 31680 - DNA, 15 bp, Homo sapiens
aatcagtaccaggta

SEQ ID NO: 31681 - DNA, 15 bp, Homo sapiens
taatcagtaccaggt

SEQ ID NO: 31682 - DNA, 15 bp, Homo sapiens
ataatcagtaccagg

SEQ ID NO: 31683 - DNA, 15 bp, Homo sapiens
cataatcagtaccag

SEQ ID NO: 31684 - DNA, 15 bp, Homo sapiens
ccataatcagtacca

SEQ ID NO: 31685 - DNA, 15 bp, Homo sapiens
gccataatcagtacc

SEQ ID NO: 31686 - DNA, 15 bp, Homo sapiens
tgccataatcagtac

SEQ ID NO: 31687 - DNA, 15 bp, Homo sapiens
gtgccataatcagta

SEQ ID NO: 31688 - DNA, 15 bp, Homo sapiens
agtgccataatcagt

SEQ ID NO: 31689 - DNA, 15 bp, Homo sapiens
gagtgccataatcag

SEQ ID NO: 31690 - DNA, 15 bp, Homo sapiens
tgagtgccataatca

SEQ ID NO: 31691 - DNA, 15 bp, Homo sapiens
ctgagtgccataatc

SEQ ID NO: 31692 - DNA, 15 bp, Homo sapiens
cctgagtgccataat

SEQ ID NO: 31693 - DNA, 15 bp, Homo sapiens
tcctgagtgccataa

SEQ ID NO: 31694 - DNA, 15 bp, Homo sapiens
ttcctgagtgccata

SEQ ID NO: 31695 - DNA, 15 bp, Homo sapiens
tttcctgagtgccat

SEQ ID NO: 31696 - DNA, 15 bp, Homo sapiens
ctttcctgagtgcca

SEQ ID NO: 31697 - DNA, 15 bp, Homo sapiens
actttcctgagtgcc

SEQ ID NO: 31698 - DNA, 15 bp, Homo sapiens
tactttcctgagtgc

SEQ ID NO: 31699 - DNA, 15 bp, Homo sapiens
atactttcctgagtg

SEQ ID NO: 31700 - DNA, 15 bp, Homo sapiens
gatactttcctgagt

SEQ ID NO: 31701 - DNA, 15 bp, Homo sapiens
agatactttcctgag

SEQ ID NO: 31702 - DNA, 15 bp, Homo sapiens
gagatactttcctga

SEQ ID NO: 31703 - DNA, 15 bp, Homo sapiens
cgagatactttcctg

SEQ ID NO: 31704 - DNA, 15 bp, Homo sapiens
acgagatactttcct

SEQ ID NO: 31705 - DNA, 15 bp, Homo sapiens
aacgagatactttcc

SEQ ID NO: 31706 - DNA, 15 bp, Homo sapiens
taacgagatactttc

SEQ ID NO: 31707 - DNA, 15 bp, Homo sapiens
gtaacgagatacttt

SEQ ID NO: 31708 - DNA, 15 bp, Homo sapiens
agtaacgagatactt

SEQ ID NO: 31709 - DNA, 15 bp, Homo sapiens
cagtaacgagatact

SEQ ID NO: 31710 - DNA, 15 bp, Homo sapiens
ccagtaacgagatac

SEQ ID NO: 31711 - DNA, 15 bp, Homo sapiens
tccagtaacgagata

SEQ ID NO: 31712 - DNA, 15 bp, Homo sapiens
ttccagtaacgagat

SEQ ID NO: 31713 - DNA, 15 bp, Homo sapiens
cttccagtaacgaga

SEQ ID NO: 31714 - DNA, 15 bp, Homo sapiens
acttccagtaacgag

SEQ ID NO: 31715 - DNA, 15 bp, Homo sapiens
aacttccagtaacga

SEQ ID NO: 31716 - DNA, 15 bp, Homo sapiens
taacttccagtaacg

SEQ ID NO: 31717 - DNA, 15 bp, Homo sapiens
ctaacttccagtaac

SEQ ID NO: 31718 - DNA, 15 bp, Homo sapiens
gctaacttccagtaa

SEQ ID NO: 31719 - DNA, 15 bp, Homo sapiens
tgctaacttccagta

SEQ ID NO: 31720 - DNA, 15 bp, Homo sapiens
gtgctaacttccagt

SEQ ID NO: 31721 - DNA, 15 bp, Homo sapiens
agtgctaacttccag

SEQ ID NO: 31722 - DNA, 15 bp, Homo sapiens
gagtgctaacttcca

SEQ ID NO: 31723 - DNA, 15 bp, Homo sapiens
agagtgctaacttcc

SEQ ID NO: 31724 - DNA, 15 bp, Homo sapiens
tagagtgctaacttc

SEQ ID NO: 31725 - DNA, 15 bp, Homo sapiens
ctagagtgctaactt

SEQ ID NO: 31726 - DNA, 15 bp, Homo sapiens
cctagagtgctaact

SEQ ID NO: 31727 - DNA, 15 bp, Homo sapiens
ccctagagtgctaac

SEQ ID NO: 31728 - DNA, 15 bp, Homo sapiens
tccctagagtgctaa

SEQ ID NO: 31729 - DNA, 15 bp, Homo sapiens
ttccctagagtgcta

SEQ ID NO: 31730 - DNA, 15 bp, Homo sapiens
cttccctagagtgct

SEQ ID NO: 31731 - DNA, 15 bp, Homo sapiens
ccttccctagagtgc

SEQ ID NO: 31732 - DNA, 15 bp, Homo sapiens
gccttccctagagtg

SEQ ID NO: 31733 - DNA, 15 bp, Homo sapiens
tgccttccctagagt

SEQ ID NO: 31734 - DNA, 15 bp, Homo sapiens
ttgccttccctagag

SEQ ID NO: 31735 - DNA, 15 bp, Homo sapiens
tttgccttccctaga

SEQ ID NO: 31736 - DNA, 15 bp, Homo sapiens
ttttgccttccctag

SEQ ID NO: 31737 - DNA, 15 bp, Homo sapiens
tttttgccttcccta

SEQ ID NO: 31738 - DNA, 15 bp, Homo sapiens
gtttttgccttccct

SEQ ID NO: 31739 - DNA, 15 bp, Homo sapiens
tgtttttgccttccc

SEQ ID NO: 31740 - DNA, 15 bp, Homo sapiens
ctgtttttgccttcc

SEQ ID NO: 31741 - DNA, 15 bp, Homo sapiens
tctgtttttgccttc

SEQ ID NO: 31742 - DNA, 15 bp, Homo sapiens
ttctgtttttgcctt

SEQ ID NO: 31743 - DNA, 15 bp, Homo sapiens
gttctgtttttgcct

SEQ ID NO: 31744 - DNA, 15 bp, Homo sapiens
ggttctgtttttgcc

SEQ ID NO: 31745 - DNA, 15 bp, Homo sapiens
tggttctgtttttgc

SEQ ID NO: 31746 - DNA, 15 bp, Homo sapiens
ttggttctgtttttg

SEQ ID NO: 31747 - DNA, 15 bp, Homo sapiens
tttggttctgttttt

SEQ ID NO: 31748 - DNA, 15 bp, Homo sapiens
atttggttctgtttt

SEQ ID NO: 31749 - DNA, 15 bp, Homo sapiens
tatttggttctgttt

SEQ ID NO: 31750 - DNA, 15 bp, Homo sapiens
ttatttggttctgtt

SEQ ID NO: 31751 - DNA, 15 bp, Homo sapiens
tttatttggttctgt

SEQ ID NO: 31752 - DNA, 15 bp, Homo sapiens
atttatttggttctg

SEQ ID NO: 31753 - DNA, 15 bp, Homo sapiens
catttatttggttct

SEQ ID NO: 31754 - DNA, 15 bp, Homo sapiens
acatttatttggttc

SEQ ID NO: 31755 - DNA, 15 bp, Homo sapiens
cacatttatttggtt

SEQ ID NO: 31756 - DNA, 15 bp, Homo sapiens
acacatttatttggt

SEQ ID NO: 31757 - DNA, 15 bp, Homo sapiens
cacacatttatttgg

SEQ ID NO: 31758 - DNA, 15 bp, Homo sapiens
tcacacatttatttg

SEQ ID NO: 31759 - DNA, 15 bp, Homo sapiens
ctcacacatttattt

SEQ ID NO: 31760 - DNA, 15 bp, Homo sapiens
actcacacatttatt

SEQ ID NO: 31761 - DNA, 15 bp, Homo sapiens
gactcacacatttat

SEQ ID NO: 31762 - DNA, 15 bp, Homo sapiens
tgactcacacattta

SEQ ID NO: 31763 - DNA, 15 bp, Homo sapiens
ctgactcacacattt

SEQ ID NO: 31764 - DNA, 15 bp, Homo sapiens
actgactcacacatt

SEQ ID NO: 31765 - DNA, 15 bp, Homo sapiens
cactgactcacacat

SEQ ID NO: 31766 - DNA, 15 bp, Homo sapiens
acactgactcacaca

SEQ ID NO: 31767 - DNA, 15 bp, Homo sapiens
cacactgactcacac

SEQ ID NO: 31768 - DNA, 15 bp, Homo sapiens
gcacactgactcaca

SEQ ID NO: 31769 - DNA, 15 bp, Homo sapiens
tgcacactgactcac

SEQ ID NO: 31770 - DNA, 15 bp, Homo sapiens
ctgcacactgactca

SEQ ID NO: 31771 - DNA, 15 bp, Homo sapiens
gctgcacactgactc

SEQ ID NO: 31772 - DNA, 15 bp, Homo sapiens
tgctgcacactgact

SEQ ID NO: 31773 - DNA, 15 bp, Homo sapiens
atgctgcacactgac

SEQ ID NO: 31774 - DNA, 15 bp, Homo sapiens
aatgctgcacactga

SEQ ID NO: 31775 - DNA, 15 bp, Homo sapiens
aaatgctgcacactg

SEQ ID NO: 31776 - DNA, 15 bp, Homo sapiens
caaatgctgcacact

SEQ ID NO: 31777 - DNA, 15 bp, Homo sapiens
tcaaatgctgcacac

SEQ ID NO: 31778 - DNA, 15 bp, Homo sapiens
ttcaaatgctgcaca

SEQ ID NO: 31779 - DNA, 15 bp, Homo sapiens
tttcaaatgctgcac

SEQ ID NO: 31780 - DNA, 15 bp, Homo sapiens
ttttcaaatgctgca

SEQ ID NO: 31781 - DNA, 15 bp, Homo sapiens
gttttcaaatgctgc

SEQ ID NO: 31782 - DNA, 15 bp, Homo sapiens
ggttttcaaatgctg

SEQ ID NO: 31783 - DNA, 15 bp, Homo sapiens
gggttttcaaatgct

SEQ ID NO: 31784 - DNA, 15 bp, Homo sapiens
ggggttttcaaatgc

SEQ ID NO: 31785 - DNA, 15 bp, Homo sapiens
tggggttttcaaatg

SEQ ID NO: 31786 - DNA, 15 bp, Homo sapiens
ttggggttttcaaat

SEQ ID NO: 31787 - DNA, 15 bp, Homo sapiens
cttggggttttcaaa

SEQ ID NO: 31788 - DNA, 15 bp, Homo sapiens
ccttggggttttcaa

SEQ ID NO: 31789 - DNA, 15 bp, Homo sapiens
cccttggggttttca

SEQ ID NO: 31790 - DNA, 15 bp, Homo sapiens
tcccttggggttttc

SEQ ID NO: 31791 - DNA, 15 bp, Homo sapiens
gtcccttggggtttt

SEQ ID NO: 31792 - DNA, 15 bp, Homo sapiens
agtcccttggggttt

SEQ ID NO: 31793 - DNA, 15 bp, Homo sapiens
tagtcccttggggtt

SEQ ID NO: 31794 - DNA, 15 bp, Homo sapiens
ttagtcccttggggt

SEQ ID NO: 31795 - DNA, 15 bp, Homo sapiens
attagtcccttgggg

SEQ ID NO: 31796 - DNA, 15 bp, Homo sapiens
aattagtcccttggg

SEQ ID NO: 31797 - DNA, 15 bp, Homo sapiens
gaattagtcccttgg

SEQ ID NO: 31798 - DNA, 15 bp, Homo sapiens
tgaattagtcccttg

SEQ ID NO: 31799 - DNA, 15 bp, Homo sapiens
atgaattagtccctt

SEQ ID NO: 31800 - DNA, 15 bp, Homo sapiens
catgaattagtccct

SEQ ID NO: 31801 - DNA, 15 bp, Homo sapiens
ccatgaattagtccc

SEQ ID NO: 31802 - DNA, 15 bp, Homo sapiens
accatgaattagtcc

SEQ ID NO: 31803 - DNA, 15 bp, Homo sapiens
aaccatgaattagtc

SEQ ID NO: 31804 - DNA, 15 bp, Homo sapiens
caaccatgaattagt

SEQ ID NO: 31805 - DNA, 15 bp, Homo sapiens
acaaccatgaattag

SEQ ID NO: 31806 - DNA, 15 bp, Homo sapiens
aacaaccatgaatta

SEQ ID NO: 31807 - DNA, 15 bp, Homo sapiens
gaacaaccatgaatt

SEQ ID NO: 31808 - DNA, 15 bp, Homo sapiens
ggaacaaccatgaat

SEQ ID NO: 31809 - DNA, 15 bp, Homo sapiens
tggaacaaccatgaa

SEQ ID NO: 31810 - DNA, 15 bp, Homo sapiens
ttggaacaaccatga

SEQ ID NO: 31811 - DNA, 15 bp, Homo sapiens
tttggaacaaccatg

SEQ ID NO: 31812 - DNA, 15 bp, Homo sapiens
ctttggaacaaccat

SEQ ID NO: 31813 - DNA, 15 bp, Homo sapiens
tctttggaacaacca

SEQ ID NO: 31814 - DNA, 15 bp, Homo sapiens
atctttggaacaacc

SEQ ID NO: 31815 - DNA, 15 bp, Homo sapiens
tatctttggaacaac

SEQ ID NO: 31816 - DNA, 15 bp, Homo sapiens
ttatctttggaacaa

SEQ ID NO: 31817 - DNA, 15 bp, Homo sapiens
attatctttggaaca

SEQ ID NO: 31818 - DNA, 15 bp, Homo sapiens
tattatctttggaac

SEQ ID NO: 31819 - DNA, 15 bp, Homo sapiens
ctattatctttggaa

SEQ ID NO: 31820 - DNA, 15 bp, Homo sapiens
tctattatctttgga

SEQ ID NO: 31821 - DNA, 15 bp, Homo sapiens
ttctattatctttgg

SEQ ID NO: 31822 - DNA, 15 bp, Homo sapiens
tttctattatctttg

SEQ ID NO: 31823 - DNA, 15 bp, Homo sapiens
atttctattatcttt

SEQ ID NO: 31824 - DNA, 15 bp, Homo sapiens
catttctattatctt

SEQ ID NO: 31825 - DNA, 15 bp, Homo sapiens
tcatttctattatct

SEQ ID NO: 31826 - DNA, 15 bp, Homo sapiens
gtcatttctattatc

SEQ ID NO: 31827 - DNA, 15 bp, Homo sapiens
tgtcatttctattat

SEQ ID NO: 31828 - DNA, 15 bp, Homo sapiens
gtgtcatttctatta

SEQ ID NO: 31829 - DNA, 15 bp, Homo sapiens
tgtgtcatttctatt

SEQ ID NO: 31830 - DNA, 15 bp, Homo sapiens
ctgtgtcatttctat

SEQ ID NO: 31831 - DNA, 15 bp, Homo sapiens
tctgtgtcatttcta

SEQ ID NO: 31832 - DNA, 15 bp, Homo sapiens
ttctgtgtcatttct

SEQ ID NO: 31833 - DNA, 15 bp, Homo sapiens
cttctgtgtcatttc

SEQ ID NO: 31834 - DNA, 15 bp, Homo sapiens
ccttctgtgtcattt

SEQ ID NO: 31835 - DNA, 15 bp, Homo sapiens
gccttctgtgtcatt

SEQ ID NO: 31836 - DNA, 15 bp, Homo sapiens
agccttctgtgtcat

SEQ ID NO: 31837 - DNA, 15 bp, Homo sapiens
aagccttctgtgtca

SEQ ID NO: 31838 - DNA, 15 bp, Homo sapiens
aaagccttctgtgtc

SEQ ID NO: 31839 - DNA, 15 bp, Homo sapiens
taaagccttctgtgt

SEQ ID NO: 31840 - DNA, 15 bp, Homo sapiens
ttaaagccttctgtg

SEQ ID NO: 31841 - DNA, 15 bp, Homo sapiens
cttaaagccttctgt

SEQ ID NO: 31842 - DNA, 15 bp, Homo sapiens
acttaaagccttctg

SEQ ID NO: 31843 - DNA, 15 bp, Homo sapiens
tacttaaagccttct

SEQ ID NO: 31844 - DNA, 15 bp, Homo sapiens
atacttaaagccttc

SEQ ID NO: 31845 - DNA, 15 bp, Homo sapiens
gatacttaaagcctt

SEQ ID NO: 31846 - DNA, 15 bp, Homo sapiens
ggatacttaaagcct

SEQ ID NO: 31847 - DNA, 15 bp, Homo sapiens
tggatacttaaagcc

SEQ ID NO: 31848 - DNA, 15 bp, Homo sapiens
atggatacttaaagc

SEQ ID NO: 31849 - DNA, 15 bp, Homo sapiens
aatggatacttaaag

SEQ ID NO: 31850 - DNA, 15 bp, Homo sapiens
caatggatacttaaa

SEQ ID NO: 31851 - DNA, 15 bp, Homo sapiens
ccaatggatacttaa

SEQ ID NO: 31852 - DNA, 15 bp, Homo sapiens
cccaatggatactta

SEQ ID NO: 31853 - DNA, 15 bp, Homo sapiens
tcccaatggatactt

SEQ ID NO: 31854 - DNA, 15 bp, Homo sapiens
gtcccaatggatact

SEQ ID NO: 31855 - DNA, 15 bp, Homo sapiens
tgtcccaatggatac

SEQ ID NO: 31856 - DNA, 15 bp, Homo sapiens
atgtcccaatggata

SEQ ID NO: 31857 - DNA, 15 bp, Homo sapiens
catgtcccaatggat

SEQ ID NO: 31858 - DNA, 15 bp, Homo sapiens
tcatgtcccaatgga

SEQ ID NO: 31859 - DNA, 15 bp, Homo sapiens
ttcatgtcccaatgg

SEQ ID NO: 31860 - DNA, 15 bp, Homo sapiens
cttcatgtcccaatg

SEQ ID NO: 31861 - DNA, 15 bp, Homo sapiens
acttcatgtcccaat

SEQ ID NO: 31862 - DNA, 15 bp, Homo sapiens
aacttcatgtcccaa

SEQ ID NO: 31863 - DNA, 15 bp, Homo sapiens
taacttcatgtccca

SEQ ID NO: 31864 - DNA, 15 bp, Homo sapiens
ttaacttcatgtccc

SEQ ID NO: 31865 - DNA, 15 bp, Homo sapiens
gttaacttcatgtcc

SEQ ID NO: 31866 - DNA, 15 bp, Homo sapiens
ggttaacttcatgtc

SEQ ID NO: 31867 - DNA, 15 bp, Homo sapiens
tggttaacttcatgt

SEQ ID NO: 31868 - DNA, 15 bp, Homo sapiens
gtggttaacttcatg

SEQ ID NO: 31869 - DNA, 15 bp, Homo sapiens
tgtggttaacttcat

SEQ ID NO: 31870 - DNA, 15 bp, Homo sapiens
ctgtggttaacttca

SEQ ID NO: 31871 - DNA, 15 bp, Homo sapiens
actgtggttaacttc

SEQ ID NO: 31872 - DNA, 15 bp, Homo sapiens
gactgtggttaactt

SEQ ID NO: 31873 - DNA, 15 bp, Homo sapiens
cgactgtggttaact

SEQ ID NO: 31874 - DNA, 15 bp, Homo sapiens
ccgactgtggttaac

SEQ ID NO: 31875 - DNA, 15 bp, Homo sapiens
cccgactgtggttaa

SEQ ID NO: 31876 - DNA, 15 bp, Homo sapiens
tcccgactgtggtta

SEQ ID NO: 31877 - DNA, 15 bp, Homo sapiens
ttcccgactgtggtt

SEQ ID NO: 31878 - DNA, 15 bp, Homo sapiens
tttcccgactgtggt

SEQ ID NO: 31879 - DNA, 15 bp, Homo sapiens
gtttcccgactgtgg

SEQ ID NO: 31880 - DNA, 15 bp, Homo sapiens
tgtttcccgactgtg

SEQ ID NO: 31881 - DNA, 15 bp, Homo sapiens
ttgtttcccgactgt

SEQ ID NO: 31882 - DNA, 15 bp, Homo sapiens
cttgtttcccgactg

SEQ ID NO: 31883 - DNA, 15 bp, Homo sapiens
gcttgtttcccgact

SEQ ID NO: 31884 - DNA, 15 bp, Homo sapiens
tgcttgtttcccgac

SEQ ID NO: 31885 - DNA, 15 bp, Homo sapiens
atgcttgtttcccga

SEQ ID NO: 31886 - DNA, 15 bp, Homo sapiens
tatgcttgtttcccg

SEQ ID NO: 31887 - DNA, 15 bp, Homo sapiens
ctatgcttgtttccc

SEQ ID NO: 31888 - DNA, 15 bp, Homo sapiens
tctatgcttgtttcc

SEQ ID NO: 31889 - DNA, 15 bp, Homo sapiens
ttctatgcttgtttc

SEQ ID NO: 31890 - DNA, 15 bp, Homo sapiens
tttctatgcttgttt

SEQ ID NO: 31891 - DNA, 15 bp, Homo sapiens
atttctatgcttgtt

SEQ ID NO: 31892 - DNA, 15 bp, Homo sapiens
catttctatgcttgt

SEQ ID NO: 31893 - DNA, 15 bp, Homo sapiens
ccatttctatgcttg

SEQ ID NO: 31894 - DNA, 15 bp, Homo sapiens
tccatttctatgctt

SEQ ID NO: 31895 - DNA, 15 bp, Homo sapiens
ttccatttctatgct

SEQ ID NO: 31896 - DNA, 15 bp, Homo sapiens
cttccatttctatgc

SEQ ID NO: 31897 - DNA, 15 bp, Homo sapiens
tcttccatttctatg

SEQ ID NO: 31898 - DNA, 15 bp, Homo sapiens
ttcttccatttctat

SEQ ID NO: 31899 - DNA, 15 bp, Homo sapiens
tttcttccatttcta

SEQ ID NO: 31900 - DNA, 15 bp, Homo sapiens
ctttcttccatttct

SEQ ID NO: 31901 - DNA, 15 bp, Homo sapiens
actttcttccatttc

SEQ ID NO: 31902 - DNA, 15 bp, Homo sapiens
cactttcttccattt

SEQ ID NO: 31903 - DNA, 15 bp, Homo sapiens
tcactttcttccatt

SEQ ID NO: 31904 - DNA, 15 bp, Homo sapiens
ttcactttcttccat

SEQ ID NO: 31905 - DNA, 15 bp, Homo sapiens
gttcactttcttcca

SEQ ID NO: 31906 - DNA, 15 bp, Homo sapiens
agttcactttcttcc

SEQ ID NO: 31907 - DNA, 15 bp, Homo sapiens
aagttcactttcttc

SEQ ID NO: 31908 - DNA, 15 bp, Homo sapiens
caagttcactttctt

SEQ ID NO: 31909 - DNA, 15 bp, Homo sapiens
tcaagttcactttct

SEQ ID NO: 31910 - DNA, 15 bp, Homo sapiens
atcaagttcactttc

SEQ ID NO: 31911 - DNA, 15 bp, Homo sapiens
catcaagttcacttt

SEQ ID NO: 31912 - DNA, 15 bp, Homo sapiens
gcatcaagttcactt

SEQ ID NO: 31913 - DNA, 15 bp, Homo sapiens
agcatcaagttcact

SEQ ID NO: 31914 - DNA, 15 bp, Homo sapiens
gagcatcaagttcac

SEQ ID NO: 31915 - DNA, 15 bp, Homo sapiens
tgagcatcaagttca

SEQ ID NO: 31916 - DNA, 15 bp, Homo sapiens
ctgagcatcaagttc

SEQ ID NO: 31917 - DNA, 15 bp, Homo sapiens
actgagcatcaagtt

SEQ ID NO: 31918 - DNA, 15 bp, Homo sapiens
tactgagcatcaagt

SEQ ID NO: 31919 - DNA, 15 bp, Homo sapiens
atactgagcatcaag

SEQ ID NO: 31920 - DNA, 15 bp, Homo sapiens
aatactgagcatcaa

SEQ ID NO: 31921 - DNA, 15 bp, Homo sapiens
aaatactgagcatca

SEQ ID NO: 31922 - DNA, 15 bp, Homo sapiens
caaatactgagcatc

SEQ ID NO: 31923 - DNA, 15 bp, Homo sapiens
gcaaatactgagcat

SEQ ID NO: 31924 - DNA, 15 bp, Homo sapiens
tgcaaatactgagca

SEQ ID NO: 31925 - DNA, 15 bp, Homo sapiens
ctgcaaatactgagc

SEQ ID NO: 31926 - DNA, 15 bp, Homo sapiens
tctgcaaatactgag

SEQ ID NO: 31927 - DNA, 15 bp, Homo sapiens
ttctgcaaatactga

SEQ ID NO: 31928 - DNA, 15 bp, Homo sapiens
attctgcaaatactg

SEQ ID NO: 31929 - DNA, 15 bp, Homo sapiens
tattctgcaaatact

SEQ ID NO: 31930 - DNA, 15 bp, Homo sapiens
gtattctgcaaatac

SEQ ID NO: 31931 - DNA, 15 bp, Homo sapiens
tgtattctgcaaata

SEQ ID NO: 31932 - DNA, 15 bp, Homo sapiens
atgtattctgcaaat

SEQ ID NO: 31933 - DNA, 15 bp, Homo sapiens
aatgtattctgcaaa

SEQ ID NO: 31934 - DNA, 15 bp, Homo sapiens
gaatgtattctgcaa

SEQ ID NO: 31935 - DNA, 15 bp, Homo sapiens
tgaatgtattctgca

SEQ ID NO: 31936 - DNA, 15 bp, Homo sapiens
ttgaatgtattctgc

SEQ ID NO: 31937 - DNA, 15 bp, Homo sapiens
cttgaatgtattctg

SEQ ID NO: 31938 - DNA, 15 bp, Homo sapiens
ccttgaatgtattct

SEQ ID NO: 31939 - DNA, 15 bp, Homo sapiens
accttgaatgtattc

SEQ ID NO: 31940 - DNA, 15 bp, Homo sapiens
aaccttgaatgtatt

SEQ ID NO: 31941 - DNA, 15 bp, Homo sapiens
aaaccttgaatgtat

SEQ ID NO: 31942 - DNA, 15 bp, Homo sapiens
gaaaccttgaatgta

SEQ ID NO: 31943 - DNA, 15 bp, Homo sapiens
tgaaaccttgaatgt

SEQ ID NO: 31944 - DNA, 15 bp, Homo sapiens
ttgaaaccttgaatg

SEQ ID NO: 31945 - DNA, 15 bp, Homo sapiens
tttgaaaccttgaat

SEQ ID NO: 31946 - DNA, 15 bp, Homo sapiens
ctttgaaaccttgaa

SEQ ID NO: 31947 - DNA, 15 bp, Homo sapiens
gctttgaaaccttga

SEQ ID NO: 31948 - DNA, 15 bp, Homo sapiens
cgctttgaaaccttg

SEQ ID NO: 31949 - DNA, 15 bp, Homo sapiens
gcgctttgaaacctt

SEQ ID NO: 31950 - DNA, 15 bp, Homo sapiens
ggcgctttgaaacct

SEQ ID NO: 31951 - DNA, 15 bp, Homo sapiens
tggcgctttgaaacc

SEQ ID NO: 31952 - DNA, 15 bp, Homo sapiens
ctggcgctttgaaac

SEQ ID NO: 31953 - DNA, 15 bp, Homo sapiens
actggcgctttgaaa

SEQ ID NO: 31954 - DNA, 15 bp, Homo sapiens
gactggcgctttgaa

SEQ ID NO: 31955 - DNA, 15 bp, Homo sapiens
tgactggcgctttga

SEQ ID NO: 31956 - DNA, 15 bp, Homo sapiens
atgactggcgctttg

SEQ ID NO: 31957 - DNA, 15 bp, Homo sapiens
aatgactggcgcttt

SEQ ID NO: 31958 - DNA, 15 bp, Homo sapiens
aaatgactggcgctt

SEQ ID NO: 31959 - DNA, 15 bp, Homo sapiens
caaatgactggcgct

SEQ ID NO: 31960 - DNA, 15 bp, Homo sapiens
gcaaatgactggcgc

SEQ ID NO: 31961 - DNA, 15 bp, Homo sapiens
agcaaatgactggcg

SEQ ID NO: 31962 - DNA, 15 bp, Homo sapiens
gagcaaatgactggc

SEQ ID NO: 31963 - DNA, 15 bp, Homo sapiens
ggagcaaatgactgg

SEQ ID NO: 31964 - DNA, 15 bp, Homo sapiens
cggagcaaatgactg

SEQ ID NO: 31965 - DNA, 15 bp, Homo sapiens
acggagcaaatgact

SEQ ID NO: 31966 - DNA, 15 bp, Homo sapiens
aacggagcaaatgac

SEQ ID NO: 31967 - DNA, 15 bp, Homo sapiens
aaacggagcaaatga

SEQ ID NO: 31968 - DNA, 15 bp, Homo sapiens
aaaacggagcaaatg

SEQ ID NO: 31969 - DNA, 15 bp, Homo sapiens
gaaaacggagcaaat

SEQ ID NO: 31970 - DNA, 15 bp, Homo sapiens
tgaaaacggagcaaa

SEQ ID NO: 31971 - DNA, 15 bp, Homo sapiens
ttgaaaacggagcaa

SEQ ID NO: 31972 - DNA, 15 bp, Homo sapiens
tttgaaaacggagca

SEQ ID NO: 31973 - DNA, 15 bp, Homo sapiens
atttgaaaacggagc

SEQ ID NO: 31974 - DNA, 15 bp, Homo sapiens
gatttgaaaacggag

SEQ ID NO: 31975 - DNA, 15 bp, Homo sapiens
ggatttgaaaacgga

SEQ ID NO: 31976 - DNA, 15 bp, Homo sapiens
tggatttgaaaacgg

SEQ ID NO: 31977 - DNA, 15 bp, Homo sapiens
ctggatttgaaaacg

SEQ ID NO: 31978 - DNA, 15 bp, Homo sapiens
cctggatttgaaaac

SEQ ID NO: 31979 - DNA, 15 bp, Homo sapiens
tcctggatttgaaaa

SEQ ID NO: 31980 - DNA, 15 bp, Homo sapiens
ttcctggatttgaaa

SEQ ID NO: 31981 - DNA, 15 bp, Homo sapiens
tttcctggatttgaa

SEQ ID NO: 31982 - DNA, 15 bp, Homo sapiens
atttcctggatttga

SEQ ID NO: 31983 - DNA, 15 bp, Homo sapiens
catttcctggatttg

SEQ ID NO: 31984 - DNA, 15 bp, Homo sapiens
gcatttcctggattt

SEQ ID NO: 31985 - DNA, 15 bp, Homo sapiens
tgcatttcctggatt

SEQ ID NO: 31986 - DNA, 15 bp, Homo sapiens
ctgcatttcctggat

SEQ ID NO: 31987 - DNA, 15 bp, Homo sapiens
tctgcatttcctgga

SEQ ID NO: 31988 - DNA, 15 bp, Homo sapiens
ttctgcatttcctgg

SEQ ID NO: 31989 - DNA, 15 bp, Homo sapiens
cttctgcatttcctg

SEQ ID NO: 31990 - DNA, 15 bp, Homo sapiens
tcttctgcatttcct

SEQ ID NO: 31991 - DNA, 15 bp, Homo sapiens
ctcttctgcatttcc

SEQ ID NO: 31992 - DNA, 15 bp, Homo sapiens
cctcttctgcatttc

SEQ ID NO: 31993 - DNA, 15 bp, Homo sapiens
tcctcttctgcattt

SEQ ID NO: 31994 - DNA, 15 bp, Homo sapiens
ttcctcttctgcatt

SEQ ID NO: 31995 - DNA, 15 bp, Homo sapiens
attcctcttctgcat

SEQ ID NO: 31996 - DNA, 15 bp, Homo sapiens
cattcctcttctgca

SEQ ID NO: 31997 - DNA, 15 bp, Homo sapiens
acattcctcttctgc

SEQ ID NO: 31998 - DNA, 15 bp, Homo sapiens
cacattcctcttctg

SEQ ID NO: 31999 - DNA, 15 bp, Homo sapiens
gcacattcctcttct

SEQ ID NO: 32000 - DNA, 15 bp, Homo sapiens
tgcacattcctcttc

SEQ ID NO: 32001 - DNA, 15 bp, Homo sapiens
ttgcacattcctctt

SEQ ID NO: 32002 - DNA, 15 bp, Homo sapiens
gttgcacattcctct

SEQ ID NO: 32003 - DNA, 15 bp, Homo sapiens
tgttgcacattcctc

SEQ ID NO: 32004 - DNA, 15 bp, Homo sapiens
atgttgcacattcct

SEQ ID NO: 32005 - DNA, 15 bp, Homo sapiens
aatgttgcacattcc

SEQ ID NO: 32006 - DNA, 15 bp, Homo sapiens
gaatgttgcacattc

SEQ ID NO: 32007 - DNA, 15 bp, Homo sapiens
agaatgttgcacatt

SEQ ID NO: 32008 - DNA, 15 bp, Homo sapiens
gagaatgttgcacat

SEQ ID NO: 32009 - DNA, 15 bp, Homo sapiens
agagaatgttgcaca

SEQ ID NO: 32010 - DNA, 15 bp, Homo sapiens
cagagaatgttgcac

SEQ ID NO: 32011 - DNA, 15 bp, Homo sapiens
gcagagaatgttgca

SEQ ID NO: 32012 - DNA, 15 bp, Homo sapiens
ggcagagaatgttgc

SEQ ID NO: 32013 - DNA, 15 bp, Homo sapiens
gggcagagaatgttg

SEQ ID NO: 32014 - DNA, 15 bp, Homo sapiens
tgggcagagaatgtt

SEQ ID NO: 32015 - DNA, 15 bp, Homo sapiens
gtgggcagagaatgt

SEQ ID NO: 32016 - DNA, 15 bp, Homo sapiens
agtgggcagagaatg

SEQ ID NO: 32017 - DNA, 15 bp, Homo sapiens
gagtgggcagagaat

SEQ ID NO: 32018 - DNA, 15 bp, Homo sapiens
agagtgggcagagaa

SEQ ID NO: 32019 - DNA, 15 bp, Homo sapiens
cagagtgggcagaga

SEQ ID NO: 32020 - DNA, 15 bp, Homo sapiens
ccagagtgggcagag

SEQ ID NO: 32021 - DNA, 15 bp, Homo sapiens
cccagagtgggcaga

SEQ ID NO: 32022 - DNA, 15 bp, Homo sapiens
acccagagtgggcag

SEQ ID NO: 32023 - DNA, 15 bp, Homo sapiens
gacccagagtgggca

SEQ ID NO: 32024 - DNA, 15 bp, Homo sapiens
ggacccagagtgggc

SEQ ID NO: 32025 - DNA, 15 bp, Homo sapiens
aggacccagagtggg

SEQ ID NO: 32026 - DNA, 15 bp, Homo sapiens
aaggacccagagtgg

SEQ ID NO: 32027 - DNA, 15 bp, Homo sapiens
taaggacccagagtg

SEQ ID NO: 32028 - DNA, 15 bp, Homo sapiens
ttaaggacccagagt

SEQ ID NO: 32029 - DNA, 15 bp, Homo sapiens
tttaaggacccagag

SEQ ID NO: 32030 - DNA, 15 bp, Homo sapiens
ctttaaggacccaga

SEQ ID NO: 32031 - DNA, 15 bp, Homo sapiens
tctttaaggacccag

SEQ ID NO: 32032 - DNA, 15 bp, Homo sapiens
ttctttaaggaccca

SEQ ID NO: 32033 - DNA, 15 bp, Homo sapiens
tttctttaaggaccc

SEQ ID NO: 32034 - DNA, 15 bp, Homo sapiens
gtttctttaaggacc

SEQ ID NO: 32035 - DNA, 15 bp, Homo sapiens
tgtttctttaaggac

SEQ ID NO: 32036 - DNA, 15 bp, Homo sapiens
ttgtttctttaagga

SEQ ID NO: 32037 - DNA, 15 bp, Homo sapiens
tttgtttctttaagg

SEQ ID NO: 32038 - DNA, 15 bp, Homo sapiens
ctttgtttctttaag

SEQ ID NO: 32039 - DNA, 15 bp, Homo sapiens
actttgtttctttaa

SEQ ID NO: 32040 - DNA, 15 bp, Homo sapiens
gactttgtttcttta

SEQ ID NO: 32041 - DNA, 15 bp, Homo sapiens
ggactttgtttcttt

SEQ ID NO: 32042 - DNA, 15 bp, Homo sapiens
tggactttgtttctt

SEQ ID NO: 32043 - DNA, 15 bp, Homo sapiens
ttggactttgtttct

SEQ ID NO: 32044 - DNA, 15 bp, Homo sapiens
tttggactttgtttc

SEQ ID NO: 32045 - DNA, 15 bp, Homo sapiens
ttttggactttgttt

SEQ ID NO: 32046 - DNA, 15 bp, Homo sapiens
cttttggactttgtt

SEQ ID NO: 32047 - DNA, 15 bp, Homo sapiens
acttttggactttgt

SEQ ID NO: 32048 - DNA, 15 bp, Homo sapiens
gacttttggactttg

SEQ ID NO: 32049 - DNA, 15 bp, Homo sapiens
tgacttttggacttt

SEQ ID NO: 32050 - DNA, 15 bp, Homo sapiens
gtgacttttggactt

SEQ ID NO: 32051 - DNA, 15 bp, Homo sapiens
agtgacttttggact

SEQ ID NO: 32052 - DNA, 15 bp, Homo sapiens
aagtgacttttggac

SEQ ID NO: 32053 - DNA, 15 bp, Homo sapiens
aaagtgacttttgga

SEQ ID NO: 32054 - DNA, 15 bp, Homo sapiens
aaaagtgacttttgg

SEQ ID NO: 32055 - DNA, 15 bp, Homo sapiens
caaaagtgacttttg

SEQ ID NO: 32056 - DNA, 15 bp, Homo sapiens
tcaaaagtgactttt

SEQ ID NO: 32057 - DNA, 15 bp, Homo sapiens
ttcaaaagtgacttt

SEQ ID NO: 32058 - DNA, 15 bp, Homo sapiens
attcaaaagtgactt

SEQ ID NO: 32059 - DNA, 15 bp, Homo sapiens
cattcaaaagtgact

SEQ ID NO: 32060 - DNA, 15 bp, Homo sapiens
acattcaaaagtgac

SEQ ID NO: 32061 - DNA, 15 bp, Homo sapiens
cacattcaaaagtga

SEQ ID NO: 32062 - DNA, 15 bp, Homo sapiens
tcacattcaaaagtg

SEQ ID NO: 32063 - DNA, 15 bp, Homo sapiens
ttcacattcaaaagt

SEQ ID NO: 32064 - DNA, 15 bp, Homo sapiens
gttcacattcaaaag

SEQ ID NO: 32065 - DNA, 15 bp, Homo sapiens
tgttcacattcaaaa

SEQ ID NO: 32066 - DNA, 15 bp, Homo sapiens
ttgttcacattcaaa

SEQ ID NO: 32067 - DNA, 15 bp, Homo sapiens
tttgttcacattcaa

SEQ ID NO: 32068 - DNA, 15 bp, Homo sapiens
ttttgttcacattca

SEQ ID NO: 32069 - DNA, 15 bp, Homo sapiens
cttttgttcacattc

SEQ ID NO: 32070 - DNA, 15 bp, Homo sapiens
ccttttgttcacatt

SEQ ID NO: 32071 - DNA, 15 bp, Homo sapiens
tccttttgttcacat

SEQ ID NO: 32072 - DNA, 15 bp, Homo sapiens
ttccttttgttcaca

SEQ ID NO: 32073 - DNA, 15 bp, Homo sapiens
cttccttttgttcac

SEQ ID NO: 32074 - DNA, 15 bp, Homo sapiens
tcttccttttgttca

SEQ ID NO: 32075 - DNA, 15 bp, Homo sapiens
ttcttccttttgttc

SEQ ID NO: 32076 - DNA, 15 bp, Homo sapiens
tttcttccttttgtt

SEQ ID NO: 32077 - DNA, 15 bp, Homo sapiens
ttttcttccttttgt

SEQ ID NO: 32078 - DNA, 15 bp, Homo sapiens
attttcttccttttg

SEQ ID NO: 32079 - DNA, 15 bp, Homo sapiens
gattttcttcctttt

SEQ ID NO: 32080 - DNA, 15 bp, Homo sapiens
tgattttcttccttt

SEQ ID NO: 32081 - DNA, 15 bp, Homo sapiens
ttgattttcttcctt

SEQ ID NO: 32082 - DNA, 15 bp, Homo sapiens
cttgattttcttcct

SEQ ID NO: 32083 - DNA, 15 bp, Homo sapiens
ccttgattttcttcc

SEQ ID NO: 32084 - DNA, 15 bp, Homo sapiens
tccttgattttcttc

SEQ ID NO: 32085 - DNA, 15 bp, Homo sapiens
ttccttgattttctt

SEQ ID NO: 32086 - DNA, 15 bp, Homo sapiens
tttccttgattttct

SEQ ID NO: 32087 - DNA, 15 bp, Homo sapiens
ctttccttgattttc

SEQ ID NO: 32088 - DNA, 15 bp, Homo sapiens
tctttccttgatttt

SEQ ID NO: 32089 - DNA, 15 bp, Homo sapiens
ttctttccttgattt

SEQ ID NO: 32090 - DNA, 15 bp, Homo sapiens
attctttccttgatt

SEQ ID NO: 32091 - DNA, 15 bp, Homo sapiens
cattctttccttgat

SEQ ID NO: 32092 - DNA, 15 bp, Homo sapiens
tcattctttccttga

SEQ ID NO: 32093 - DNA, 15 bp, Homo sapiens
ctcattctttccttg

SEQ ID NO: 32094 - DNA, 15 bp, Homo sapiens
actcattctttcctt

SEQ ID NO: 32095 - DNA, 15 bp, Homo sapiens
gactcattctttcct

SEQ ID NO: 32096 - DNA, 15 bp, Homo sapiens
agactcattctttcc

SEQ ID NO: 32097 - DNA, 15 bp, Homo sapiens
tagactcattctttc

SEQ ID NO: 32098 - DNA, 15 bp, Homo sapiens
ttagactcattcttt

SEQ ID NO: 32099 - DNA, 15 bp, Homo sapiens
attagactcattctt

SEQ ID NO: 32100 - DNA, 15 bp, Homo sapiens
tattagactcattct

SEQ ID NO: 32101 - DNA, 15 bp, Homo sapiens
atattagactcattc

SEQ ID NO: 32102 - DNA, 15 bp, Homo sapiens
gatattagactcatt

SEQ ID NO: 32103 - DNA, 15 bp, Homo sapiens
tgatattagactcat

SEQ ID NO: 32104 - DNA, 15 bp, Homo sapiens
ttgatattagactca

SEQ ID NO: 32105 - DNA, 15 bp, Homo sapiens
cttgatattagactc

SEQ ID NO: 32106 - DNA, 15 bp, Homo sapiens
gcttgatattagact

SEQ ID NO: 32107 - DNA, 15 bp, Homo sapiens
ggcttgatattagac

SEQ ID NO: 32108 - DNA, 15 bp, Homo sapiens
aggcttgatattaga

SEQ ID NO: 32109 - DNA, 15 bp, Homo sapiens
caggcttgatattag

SEQ ID NO: 32110 - DNA, 15 bp, Homo sapiens
acaggcttgatatta

SEQ ID NO: 32111 - DNA, 15 bp, Homo sapiens
tacaggcttgatatt

SEQ ID NO: 32112 - DNA, 15 bp, Homo sapiens
gtacaggcttgatat

SEQ ID NO: 32113 - DNA, 15 bp, Homo sapiens
tgtacaggcttgata

SEQ ID NO: 32114 - DNA, 15 bp, Homo sapiens
ctgtacaggcttgat

SEQ ID NO: 32115 - DNA, 15 bp, Homo sapiens
tctgtacaggcttga

SEQ ID NO: 32116 - DNA, 15 bp, Homo sapiens
gtctgtacaggcttg

SEQ ID NO: 32117 - DNA, 15 bp, Homo sapiens
tgtctgtacaggctt

SEQ ID NO: 32118 - DNA, 15 bp, Homo sapiens
ctgtctgtacaggct

SEQ ID NO: 32119 - DNA, 15 bp, Homo sapiens
actgtctgtacaggc

SEQ ID NO: 32120 - DNA, 15 bp, Homo sapiens
aactgtctgtacagg

SEQ ID NO: 32121 - DNA, 15 bp, Homo sapiens
taactgtctgtacag

SEQ ID NO: 32122 - DNA, 15 bp, Homo sapiens
ttaactgtctgtaca

SEQ ID NO: 32123 - DNA, 15 bp, Homo sapiens
attaactgtctgtac

SEQ ID NO: 32124 - DNA, 15 bp, Homo sapiens
tattaactgtctgta

SEQ ID NO: 32125 - DNA, 15 bp, Homo sapiens
atattaactgtctgt

SEQ ID NO: 32126 - DNA, 15 bp, Homo sapiens
gatattaactgtctg

SEQ ID NO: 32127 - DNA, 15 bp, Homo sapiens
tgatattaactgtct

SEQ ID NO: 32128 - DNA, 15 bp, Homo sapiens
gtgatattaactgtc

SEQ ID NO: 32129 - DNA, 15 bp, Homo sapiens
agtgatattaactgt

SEQ ID NO: 32130 - DNA, 15 bp, Homo sapiens
cagtgatattaactg

SEQ ID NO: 32131 - DNA, 15 bp, Homo sapiens
gcagtgatattaact

SEQ ID NO: 32132 - DNA, 15 bp, Homo sapiens
tgcagtgatattaac

SEQ ID NO: 32133 - DNA, 15 bp, Homo sapiens
ctgcagtgatattaa

SEQ ID NO: 32134 - DNA, 15 bp, Homo sapiens
cctgcagtgatatta

SEQ ID NO: 32135 - DNA, 15 bp, Homo sapiens
gcctgcagtgatatt

SEQ ID NO: 32136 - DNA, 15 bp, Homo sapiens
agcctgcagtgatat

SEQ ID NO: 32137 - DNA, 15 bp, Homo sapiens
aagcctgcagtgata

SEQ ID NO: 32138 - DNA, 15 bp, Homo sapiens
aaagcctgcagtgat

SEQ ID NO: 32139 - DNA, 15 bp, Homo sapiens
gaaagcctgcagtga

SEQ ID NO: 32140 - DNA, 15 bp, Homo sapiens
ggaaagcctgcagtg

SEQ ID NO: 32141 - DNA, 15 bp, Homo sapiens
aggaaagcctgcagt

SEQ ID NO: 32142 - DNA, 15 bp, Homo sapiens
caggaaagcctgcag

SEQ ID NO: 32143 - DNA, 15 bp, Homo sapiens
acaggaaagcctgca

SEQ ID NO: 32144 - DNA, 15 bp, Homo sapiens
cacaggaaagcctgc

SEQ ID NO: 32145 - DNA, 15 bp, Homo sapiens
ccacaggaaagcctg

SEQ ID NO: 32146 - DNA, 15 bp, Homo sapiens
accacaggaaagcct

SEQ ID NO: 32147 - DNA, 15 bp, Homo sapiens
aaccacaggaaagcc

SEQ ID NO: 32148 - DNA, 15 bp, Homo sapiens
caaccacaggaaagc

SEQ ID NO: 32149 - DNA, 15 bp, Homo sapiens
ccaaccacaggaaag

SEQ ID NO: 32150 - DNA, 15 bp, Homo sapiens
accaaccacaggaaa

SEQ ID NO: 32151 - DNA, 15 bp, Homo sapiens
gaccaaccacaggaa

SEQ ID NO: 32152 - DNA, 15 bp, Homo sapiens
tgaccaaccacagga

SEQ ID NO: 32153 - DNA, 15 bp, Homo sapiens
ctgaccaaccacagg

SEQ ID NO: 32154 - DNA, 15 bp, Homo sapiens
tctgaccaaccacag

SEQ ID NO: 32155 - DNA, 15 bp, Homo sapiens
ttctgaccaaccaca

SEQ ID NO: 32156 - DNA, 15 bp, Homo sapiens
tttctgaccaaccac

SEQ ID NO: 32157 - DNA, 15 bp, Homo sapiens
ctttctgaccaacca

SEQ ID NO: 32158 - DNA, 15 bp, Homo sapiens
tctttctgaccaacc

SEQ ID NO: 32159 - DNA, 15 bp, Homo sapiens
atctttctgaccaac

SEQ ID NO: 32160 - DNA, 15 bp, Homo sapiens
tatctttctgaccaa

SEQ ID NO: 32161 - DNA, 15 bp, Homo sapiens
ttatctttctgacca

SEQ ID NO: 32162 - DNA, 15 bp, Homo sapiens
cttatctttctgacc

SEQ ID NO: 32163 - DNA, 15 bp, Homo sapiens
gcttatctttctgac

SEQ ID NO: 32164 - DNA, 15 bp, Homo sapiens
ggcttatctttctga

SEQ ID NO: 32165 - DNA, 15 bp, Homo sapiens
tggcttatctttctg

SEQ ID NO: 32166 - DNA, 15 bp, Homo sapiens
ctggcttatctttct

SEQ ID NO: 32167 - DNA, 15 bp, Homo sapiens
actggcttatctttc

SEQ ID NO: 32168 - DNA, 15 bp, Homo sapiens
aactggcttatcttt

SEQ ID NO: 32169 - DNA, 15 bp, Homo sapiens
caactggcttatctt

SEQ ID NO: 32170 - DNA, 15 bp, Homo sapiens
tcaactggcttatct

SEQ ID NO: 32171 - DNA, 15 bp, Homo sapiens
atcaactggcttatc

SEQ ID NO: 32172 - DNA, 15 bp, Homo sapiens
tatcaactggcttat

SEQ ID NO: 32173 - DNA, 15 bp, Homo sapiens
ttatcaactggctta

SEQ ID NO: 32174 - DNA, 15 bp, Homo sapiens
attatcaactggctt

SEQ ID NO: 32175 - DNA, 15 bp, Homo sapiens
cattatcaactggct

SEQ ID NO: 32176 - DNA, 15 bp, Homo sapiens
gcattatcaactggc

SEQ ID NO: 32177 - DNA, 15 bp, Homo sapiens
ggcattatcaactgg

SEQ ID NO: 32178 - DNA, 15 bp, Homo sapiens
tggcattatcaactg

SEQ ID NO: 32179 - DNA, 15 bp, Homo sapiens
ttggcattatcaact

SEQ ID NO: 32180 - DNA, 15 bp, Homo sapiens
tttggcattatcaac

SEQ ID NO: 32181 - DNA, 15 bp, Homo sapiens
atttggcattatcaa

SEQ ID NO: 32182 - DNA, 15 bp, Homo sapiens
catttggcattatca

SEQ ID NO: 32183 - DNA, 15 bp, Homo sapiens
acatttggcattatc

SEQ ID NO: 32184 - DNA, 15 bp, Homo sapiens
tacatttggcattat

SEQ ID NO: 32185 - DNA, 15 bp, Homo sapiens
ctacatttggcatta

SEQ ID NO: 32186 - DNA, 15 bp, Homo sapiens
actacatttggcatt

SEQ ID NO: 32187 - DNA, 15 bp, Homo sapiens
tactacatttggcat

SEQ ID NO: 32188 - DNA, 15 bp, Homo sapiens
atactacatttggca

SEQ ID NO: 32189 - DNA, 15 bp, Homo sapiens
gatactacatttggc

SEQ ID NO: 32190 - DNA, 15 bp, Homo sapiens
tgatactacatttgg

SEQ ID NO: 32191 - DNA, 15 bp, Homo sapiens
ttgatactacatttg

SEQ ID NO: 32192 - DNA, 15 bp, Homo sapiens
tttgatactacattt

SEQ ID NO: 32193 - DNA, 15 bp, Homo sapiens
ctttgatactacatt

SEQ ID NO: 32194 - DNA, 15 bp, Homo sapiens
cctttgatactacat

SEQ ID NO: 32195 - DNA, 15 bp, Homo sapiens
tcctttgatactaca

SEQ ID NO: 32196 - DNA, 15 bp, Homo sapiens
ctcctttgatactac

SEQ ID NO: 32197 - DNA, 15 bp, Homo sapiens
cctcctttgatacta

SEQ ID NO: 32198 - DNA, 15 bp, Homo sapiens
gcctcctttgatact

SEQ ID NO: 32199 - DNA, 15 bp, Homo sapiens
agcctcctttgatac

SEQ ID NO: 32200 - DNA, 15 bp, Homo sapiens
gagcctcctttgata

SEQ ID NO: 32201 - DNA, 15 bp, Homo sapiens
agagcctcctttgat

SEQ ID NO: 32202 - DNA, 15 bp, Homo sapiens
tagagcctcctttga

SEQ ID NO: 32203 - DNA, 15 bp, Homo sapiens
ctagagcctcctttg

SEQ ID NO: 32204 - DNA, 15 bp, Homo sapiens
cctagagcctccttt

SEQ ID NO: 32205 - DNA, 15 bp, Homo sapiens
acctagagcctcctt

SEQ ID NO: 32206 - DNA, 15 bp, Homo sapiens
aacctagagcctcct

SEQ ID NO: 32207 - DNA, 15 bp, Homo sapiens
aaacctagagcctcc

SEQ ID NO: 32208 - DNA, 15 bp, Homo sapiens
aaaacctagagcctc

SEQ ID NO: 32209 - DNA, 15 bp, Homo sapiens
caaaacctagagcct

SEQ ID NO: 32210 - DNA, 15 bp, Homo sapiens
acaaaacctagagcc

SEQ ID NO: 32211 - DNA, 15 bp, Homo sapiens
gacaaaacctagagc

SEQ ID NO: 32212 - DNA, 15 bp, Homo sapiens
agacaaaacctagag

SEQ ID NO: 32213 - DNA, 15 bp, Homo sapiens
tagacaaaacctaga

SEQ ID NO: 32214 - DNA, 15 bp, Homo sapiens
atagacaaaacctag

SEQ ID NO: 32215 - DNA, 15 bp, Homo sapiens
gatagacaaaaccta

SEQ ID NO: 32216 - DNA, 15 bp, Homo sapiens
tgatagacaaaacct

SEQ ID NO: 32217 - DNA, 15 bp, Homo sapiens
atgatagacaaaacc

SEQ ID NO: 32218 - DNA, 15 bp, Homo sapiens
gatgatagacaaaac

SEQ ID NO: 32219 - DNA, 15 bp, Homo sapiens
agatgatagacaaaa

SEQ ID NO: 32220 - DNA, 15 bp, Homo sapiens
gagatgatagacaaa

SEQ ID NO: 32221 - DNA, 15 bp, Homo sapiens
tgagatgatagacaa

SEQ ID NO: 32222 - DNA, 15 bp, Homo sapiens
ctgagatgatagaca

SEQ ID NO: 32223 - DNA, 15 bp, Homo sapiens
actgagatgatagac

SEQ ID NO: 32224 - DNA, 15 bp, Homo sapiens
aactgagatgataga

SEQ ID NO: 32225 - DNA, 15 bp, Homo sapiens
gaactgagatgatag

SEQ ID NO: 32226 - DNA, 15 bp, Homo sapiens
tgaactgagatgata

SEQ ID NO: 32227 - DNA, 15 bp, Homo sapiens
ctgaactgagatgat

SEQ ID NO: 32228 - DNA, 15 bp, Homo sapiens
tctgaactgagatga

SEQ ID NO: 32229 - DNA, 15 bp, Homo sapiens
ctctgaactgagatg

SEQ ID NO: 32230 - DNA, 15 bp, Homo sapiens
cctctgaactgagat

SEQ ID NO: 32231 - DNA, 15 bp, Homo sapiens
gcctctgaactgaga

SEQ ID NO: 32232 - DNA, 15 bp, Homo sapiens
tgcctctgaactgag

SEQ ID NO: 32233 - DNA, 15 bp, Homo sapiens
ttgcctctgaactga

SEQ ID NO: 32234 - DNA, 15 bp, Homo sapiens
gttgcctctgaactg

SEQ ID NO: 32235 - DNA, 15 bp, Homo sapiens
cgttgcctctgaact

SEQ ID NO: 32236 - DNA, 15 bp, Homo sapiens
tcgttgcctctgaac

SEQ ID NO: 32237 - DNA, 15 bp, Homo sapiens
ttcgttgcctctgaa

SEQ ID NO: 32238 - DNA, 15 bp, Homo sapiens
tttcgttgcctctga

SEQ ID NO: 32239 - DNA, 15 bp, Homo sapiens
gtttcgttgcctctg

SEQ ID NO: 32240 - DNA, 15 bp, Homo sapiens
agtttcgttgcctct

SEQ ID NO: 32241 - DNA, 15 bp, Homo sapiens
cagtttcgttgcctc

SEQ ID NO: 32242 - DNA, 15 bp, Homo sapiens
ccagtttcgttgcct

SEQ ID NO: 32243 - DNA, 15 bp, Homo sapiens
tccagtttcgttgcc

SEQ ID NO: 32244 - DNA, 15 bp, Homo sapiens
gtccagtttcgttgc

SEQ ID NO: 32245 - DNA, 15 bp, Homo sapiens
agtccagtttcgttg

SEQ ID NO: 32246 - DNA, 15 bp, Homo sapiens
gagtccagtttcgtt

SEQ ID NO: 32247 - DNA, 15 bp, Homo sapiens
tgagtccagtttcgt

SEQ ID NO: 32248 - DNA, 15 bp, Homo sapiens
atgagtccagtttcg

SEQ ID NO: 32249 - DNA, 15 bp, Homo sapiens
aatgagtccagtttc

SEQ ID NO: 32250 - DNA, 15 bp, Homo sapiens
taatgagtccagttt

SEQ ID NO: 32251 - DNA, 15 bp, Homo sapiens
gtaatgagtccagtt

SEQ ID NO: 32252 - DNA, 15 bp, Homo sapiens
agtaatgagtccagt

SEQ ID NO: 32253 - DNA, 15 bp, Homo sapiens
gagtaatgagtccag

SEQ ID NO: 32254 - DNA, 15 bp, Homo sapiens
ggagtaatgagtcca

SEQ ID NO: 32255 - DNA, 15 bp, Homo sapiens
tggagtaatgagtcc

SEQ ID NO: 32256 - DNA, 15 bp, Homo sapiens
ttggagtaatgagtc

SEQ ID NO: 32257 - DNA, 15 bp, Homo sapiens
tttggagtaatgagt

SEQ ID NO: 32258 - DNA, 15 bp, Homo sapiens
atttggagtaatgag

SEQ ID NO: 32259 - DNA, 15 bp, Homo sapiens
tatttggagtaatga

SEQ ID NO: 32260 - DNA, 15 bp, Homo sapiens
ttatttggagtaatg

SEQ ID NO: 32261 - DNA, 15 bp, Homo sapiens
tttatttggagtaat

SEQ ID NO: 32262 - DNA, 15 bp, Homo sapiens
gtttatttggagtaa

SEQ ID NO: 32263 - DNA, 15 bp, Homo sapiens
tgtttatttggagta

SEQ ID NO: 32264 - DNA, 15 bp, Homo sapiens
atgtttatttggagt

SEQ ID NO: 32265 - DNA, 15 bp, Homo sapiens
catgtttatttggag

SEQ ID NO: 32266 - DNA, 15 bp, Homo sapiens
ccatgtttatttgga

SEQ ID NO: 32267 - DNA, 15 bp, Homo sapiens
tccatgtttatttgg

SEQ ID NO: 32268 - DNA, 15 bp, Homo sapiens
gtccatgtttatttg

SEQ ID NO: 32269 - DNA, 15 bp, Homo sapiens
agtccatgtttattt

SEQ ID NO: 32270 - DNA, 15 bp, Homo sapiens
aagtccatgtttatt

SEQ ID NO: 32271 - DNA, 15 bp, Homo sapiens
aaagtccatgtttat

SEQ ID NO: 32272 - DNA, 15 bp, Homo sapiens
aaaagtccatgttta

SEQ ID NO: 32273 - DNA, 15 bp, Homo sapiens
taaaagtccatgttt

SEQ ID NO: 32274 - DNA, 15 bp, Homo sapiens
gtaaaagtccatgtt

SEQ ID NO: 32275 - DNA, 15 bp, Homo sapiens
tgtaaaagtccatgt

SEQ ID NO: 32276 - DNA, 15 bp, Homo sapiens
ttgtaaaagtccatg

SEQ ID NO: 32277 - DNA, 15 bp, Homo sapiens
tttgtaaaagtccat

SEQ ID NO: 32278 - DNA, 15 bp, Homo sapiens
ttttgtaaaagtcca

SEQ ID NO: 32279 - DNA, 15 bp, Homo sapiens
gttttgtaaaagtcc

SEQ ID NO: 32280 - DNA, 15 bp, Homo sapiens
ggttttgtaaaagtc

SEQ ID NO: 32281 - DNA, 15 bp, Homo sapiens
gggttttgtaaaagt

SEQ ID NO: 32282 - DNA, 15 bp, Homo sapiens
tgggttttgtaaaag

SEQ ID NO: 32283 - DNA, 15 bp, Homo sapiens
atgggttttgtaaaa

SEQ ID NO: 32284 - DNA, 15 bp, Homo sapiens
tatgggttttgtaaa

SEQ ID NO: 32285 - DNA, 15 bp, Homo sapiens
atatgggttttgtaa

SEQ ID NO: 32286 - DNA, 15 bp, Homo sapiens
gatatgggttttgta

SEQ ID NO: 32287 - DNA, 15 bp, Homo sapiens
cgatatgggttttgt

SEQ ID NO: 32288 - DNA, 15 bp, Homo sapiens
acgatatgggttttg

SEQ ID NO: 32289 - DNA, 15 bp, Homo sapiens
tacgatatgggtttt

SEQ ID NO: 32290 - DNA, 15 bp, Homo sapiens
atacgatatgggttt

SEQ ID NO: 32291 - DNA, 15 bp, Homo sapiens
tatacgatatgggtt

SEQ ID NO: 32292 - DNA, 15 bp, Homo sapiens
gtatacgatatgggt

SEQ ID NO: 32293 - DNA, 15 bp, Homo sapiens
ggtatacgatatggg

SEQ ID NO: 32294 - DNA, 15 bp, Homo sapiens
tggtatacgatatgg

SEQ ID NO: 32295 - DNA, 15 bp, Homo sapiens
gtggtatacgatatg

SEQ ID NO: 32296 - DNA, 15 bp, Homo sapiens
ggtggtatacgatat

SEQ ID NO: 32297 - DNA, 15 bp, Homo sapiens
tggtggtatacgata

SEQ ID NO: 32298 - DNA, 15 bp, Homo sapiens
gtggtggtatacgat

SEQ ID NO: 32299 - DNA, 15 bp, Homo sapiens
agtggtggtatacga

SEQ ID NO: 32300 - DNA, 15 bp, Homo sapiens
aagtggtggtatacg

SEQ ID NO: 32301 - DNA, 15 bp, Homo sapiens
aaagtggtggtatac

SEQ ID NO: 32302 - DNA, 15 bp, Homo sapiens
aaaagtggtggtata

SEQ ID NO: 32303 - DNA, 15 bp, Homo sapiens
aaaaagtggtggtat

SEQ ID NO: 32304 - DNA, 15 bp, Homo sapiens
gaaaaagtggtggta

SEQ ID NO: 32305 - DNA, 15 bp, Homo sapiens
ggaaaaagtggtggt

SEQ ID NO: 32306 - DNA, 15 bp, Homo sapiens
gggaaaaagtggtgg

SEQ ID NO: 32307 - DNA, 15 bp, Homo sapiens
tgggaaaaagtggtg

SEQ ID NO: 32308 - DNA, 15 bp, Homo sapiens
atgggaaaaagtggt

SEQ ID NO: 32309 - DNA, 15 bp, Homo sapiens
gatgggaaaaagtgg

SEQ ID NO: 32310 - DNA, 15 bp, Homo sapiens
tgatgggaaaaagtg

SEQ ID NO: 32311 - DNA, 15 bp, Homo sapiens
ttgatgggaaaaagt

SEQ ID NO: 32312 - DNA, 15 bp, Homo sapiens
cttgatgggaaaaag

SEQ ID NO: 32313 - DNA, 15 bp, Homo sapiens
acttgatgggaaaaa

SEQ ID NO: 32314 - DNA, 15 bp, Homo sapiens
gacttgatgggaaaa

SEQ ID NO: 32315 - DNA, 15 bp, Homo sapiens
tgacttgatgggaaa

SEQ ID NO: 32316 - DNA, 15 bp, Homo sapiens
atgacttgatgggaa

SEQ ID NO: 32317 - DNA, 15 bp, Homo sapiens
aatgacttgatggga

SEQ ID NO: 32318 - DNA, 15 bp, Homo sapiens
aaatgacttgatggg

SEQ ID NO: 32319 - DNA, 15 bp, Homo sapiens
caaatgacttgatgg

SEQ ID NO: 32320 - DNA, 15 bp, Homo sapiens
acaaatgacttgatg

SEQ ID NO: 32321 - DNA, 15 bp, Homo sapiens
aacaaatgacttgat

SEQ ID NO: 32322 - DNA, 15 bp, Homo sapiens
taacaaatgacttga

SEQ ID NO: 32323 - DNA, 15 bp, Homo sapiens
ttaacaaatgacttg

SEQ ID NO: 32324 - DNA, 15 bp, Homo sapiens
tttaacaaatgactt

SEQ ID NO: 32325 - DNA, 15 bp, Homo sapiens
ttttaacaaatgact

SEQ ID NO: 32326 - DNA, 15 bp, Homo sapiens
gttttaacaaatgac

SEQ ID NO: 32327 - DNA, 15 bp, Homo sapiens
agttttaacaaatga

SEQ ID NO: 32328 - DNA, 15 bp, Homo sapiens
tagttttaacaaatg

SEQ ID NO: 32329 - DNA, 15 bp, Homo sapiens
ttagttttaacaaat

SEQ ID NO: 32330 - DNA, 15 bp, Homo sapiens
tttagttttaacaaa

SEQ ID NO: 32331 - DNA, 15 bp, Homo sapiens
atttagttttaacaa

SEQ ID NO: 32332 - DNA, 15 bp, Homo sapiens
catttagttttaaca

SEQ ID NO: 32333 - DNA, 15 bp, Homo sapiens
acatttagttttaac

SEQ ID NO: 32334 - DNA, 15 bp, Homo sapiens
tacatttagttttaa

SEQ ID NO: 32335 - DNA, 15 bp, Homo sapiens
ttacatttagtttta

SEQ ID NO: 32336 - DNA, 15 bp, Homo sapiens
cttacatttagtttt

SEQ ID NO: 32337 - DNA, 15 bp, Homo sapiens
tcttacatttagttt

SEQ ID NO: 32338 - DNA, 15 bp, Homo sapiens
ttcttacatttagtt

SEQ ID NO: 32339 - DNA, 15 bp, Homo sapiens
tttcttacatttagt

SEQ ID NO: 32340 - DNA, 15 bp, Homo sapiens
ttttcttacatttag

SEQ ID NO: 32341 - DNA, 15 bp, Homo sapiens
tttttcttacattta

SEQ ID NO: 32342 - DNA, 15 bp, Homo sapiens
atttttcttacattt

SEQ ID NO: 32343 - DNA, 15 bp, Homo sapiens
gatttttcttacatt

SEQ ID NO: 32344 - DNA, 15 bp, Homo sapiens
agatttttcttacat

SEQ ID NO: 32345 - DNA, 15 bp, Homo sapiens
cagatttttcttaca

SEQ ID NO: 32346 - DNA, 15 bp, Homo sapiens
gcagatttttcttac

SEQ ID NO: 32347 - DNA, 15 bp, Homo sapiens
agcagatttttctta

SEQ ID NO: 32348 - DNA, 15 bp, Homo sapiens
tagcagatttttctt

SEQ ID NO: 32349 - DNA, 15 bp, Homo sapiens
ctagcagatttttct

SEQ ID NO: 32350 - DNA, 15 bp, Homo sapiens
tctagcagatttttc

SEQ ID NO: 32351 - DNA, 15 bp, Homo sapiens
ctctagcagattttt

SEQ ID NO: 32352 - DNA, 15 bp, Homo sapiens
cctctagcagatttt

SEQ ID NO: 32353 - DNA, 15 bp, Homo sapiens
tcctctagcagattt

SEQ ID NO: 32354 - DNA, 15 bp, Homo sapiens
ttcctctagcagatt

SEQ ID NO: 32355 - DNA, 15 bp, Homo sapiens
tttcctctagcagat

SEQ ID NO: 32356 - DNA, 15 bp, Homo sapiens
ttttcctctagcaga

SEQ ID NO: 32357 - DNA, 15 bp, Homo sapiens
gttttcctctagcag

SEQ ID NO: 32358 - DNA, 15 bp, Homo sapiens
agttttcctctagca

SEQ ID NO: 32359 - DNA, 15 bp, Homo sapiens
aagttttcctctagc

SEQ ID NO: 32360 - DNA, 15 bp, Homo sapiens
aaagttttcctctag

SEQ ID NO: 32361 - DNA, 15 bp, Homo sapiens
caaagttttcctcta

SEQ ID NO: 32362 - DNA, 15 bp, Homo sapiens
tcaaagttttcctct

SEQ ID NO: 32363 - DNA, 15 bp, Homo sapiens
ctcaaagttttcctc

SEQ ID NO: 32364 - DNA, 15 bp, Homo sapiens
cctcaaagttttcct

SEQ ID NO: 32365 - DNA, 15 bp, Homo sapiens
tcctcaaagttttcc

SEQ ID NO: 32366 - DNA, 15 bp, Homo sapiens
ttcctcaaagttttc

SEQ ID NO: 32367 - DNA, 15 bp, Homo sapiens
gttcctcaaagtttt

SEQ ID NO: 32368 - DNA, 15 bp, Homo sapiens
tgttcctcaaagttt

SEQ ID NO: 32369 - DNA, 15 bp, Homo sapiens
atgttcctcaaagtt

SEQ ID NO: 32370 - DNA, 15 bp, Homo sapiens
aatgttcctcaaagt

SEQ ID NO: 32371 - DNA, 15 bp, Homo sapiens
gaatgttcctcaaag

SEQ ID NO: 32372 - DNA, 15 bp, Homo sapiens
tgaatgttcctcaaa

SEQ ID NO: 32373 - DNA, 15 bp, Homo sapiens
ttgaatgttcctcaa

SEQ ID NO: 32374 - DNA, 15 bp, Homo sapiens
attgaatgttcctca

SEQ ID NO: 32375 - DNA, 15 bp, Homo sapiens
cattgaatgttcctc

SEQ ID NO: 32376 - DNA, 15 bp, Homo sapiens
acattgaatgttcct

SEQ ID NO: 32377 - DNA, 15 bp, Homo sapiens
gacattgaatgttcc

SEQ ID NO: 32378 - DNA, 15 bp, Homo sapiens
tgacattgaatgttc

SEQ ID NO: 32379 - DNA, 15 bp, Homo sapiens
gtgacattgaatgtt

SEQ ID NO: 32380 - DNA, 15 bp, Homo sapiens
ggtgacattgaatgt

SEQ ID NO: 32381 - DNA, 15 bp, Homo sapiens
aggtgacattgaatg

SEQ ID NO: 32382 - DNA, 15 bp, Homo sapiens
caggtgacattgaat

SEQ ID NO: 32383 - DNA, 15 bp, Homo sapiens
tcaggtgacattgaa

SEQ ID NO: 32384 - DNA, 15 bp, Homo sapiens
ttcaggtgacattga

SEQ ID NO: 32385 - DNA, 15 bp, Homo sapiens
tttcaggtgacattg

SEQ ID NO: 32386 - DNA, 15 bp, Homo sapiens
ctttcaggtgacatt

SEQ ID NO: 32387 - DNA, 15 bp, Homo sapiens
tctttcaggtgacat

SEQ ID NO: 32388 - DNA, 15 bp, Homo sapiens
ctctttcaggtgaca

SEQ ID NO: 32389 - DNA, 15 bp, Homo sapiens
tctctttcaggtgac

SEQ ID NO: 32390 - DNA, 15 bp, Homo sapiens
ttctctttcaggtga

SEQ ID NO: 32391 - DNA, 15 bp, Homo sapiens
tttctctttcaggtg

SEQ ID NO: 32392 - DNA, 15 bp, Homo sapiens
atttctctttcaggt

SEQ ID NO: 32393 - DNA, 15 bp, Homo sapiens
catttctctttcagg

SEQ ID NO: 32394 - DNA, 15 bp, Homo sapiens
ccatttctctttcag

SEQ ID NO: 32395 - DNA, 15 bp, Homo sapiens
cccatttctctttca

SEQ ID NO: 32396 - DNA, 15 bp, Homo sapiens
tcccatttctctttc

SEQ ID NO: 32397 - DNA, 15 bp, Homo sapiens
ttcccatttctcttt

SEQ ID NO: 32398 - DNA, 15 bp, Homo sapiens
tttcccatttctctt

SEQ ID NO: 32399 - DNA, 15 bp, Homo sapiens
atttcccatttctct

SEQ ID NO: 32400 - DNA, 15 bp, Homo sapiens
catttcccatttctc

SEQ ID NO: 32401 - DNA, 15 bp, Homo sapiens
tcatttcccatttct

SEQ ID NO: 32402 - DNA, 15 bp, Homo sapiens
ctcatttcccatttc

SEQ ID NO: 32403 - DNA, 15 bp, Homo sapiens
tctcatttcccattt

SEQ ID NO: 32404 - DNA, 15 bp, Homo sapiens
ttctcatttcccatt

SEQ ID NO: 32405 - DNA, 15 bp, Homo sapiens
gttctcatttcccat

SEQ ID NO: 32406 - DNA, 15 bp, Homo sapiens
tgttctcatttccca

SEQ ID NO: 32407 - DNA, 15 bp, Homo sapiens
atgttctcatttccc

SEQ ID NO: 32408 - DNA, 15 bp, Homo sapiens
aatgttctcatttcc

SEQ ID NO: 32409 - DNA, 15 bp, Homo sapiens
gaatgttctcatttc

SEQ ID NO: 32410 - DNA, 15 bp, Homo sapiens
ggaatgttctcattt

SEQ ID NO: 32411 - DNA, 15 bp, Homo sapiens
tggaatgttctcatt

SEQ ID NO: 32412 - DNA, 15 bp, Homo sapiens
ttggaatgttctcat

SEQ ID NO: 32413 - DNA, 15 bp, Homo sapiens
cttggaatgttctca

SEQ ID NO: 32414 - DNA, 15 bp, Homo sapiens
acttggaatgttctc

SEQ ID NO: 32415 - DNA, 15 bp, Homo sapiens
tacttggaatgttct

SEQ ID NO: 32416 - DNA, 15 bp, Homo sapiens
gtacttggaatgttc

SEQ ID NO: 32417 - DNA, 15 bp, Homo sapiens
tgtacttggaatgtt

SEQ ID NO: 32418 - DNA, 15 bp, Homo sapiens
ctgtacttggaatgt

SEQ ID NO: 32419 - DNA, 15 bp, Homo sapiens
actgtacttggaatg

SEQ ID NO: 32420 - DNA, 15 bp, Homo sapiens
cactgtacttggaat

SEQ ID NO: 32421 - DNA, 15 bp, Homo sapiens
tcactgtacttggaa

SEQ ID NO: 32422 - DNA, 15 bp, Homo sapiens
ctcactgtacttgga

SEQ ID NO: 32423 - DNA, 15 bp, Homo sapiens
gctcactgtacttgg

SEQ ID NO: 32424 - DNA, 15 bp, Homo sapiens
tgctcactgtacttg

SEQ ID NO: 32425 - DNA, 15 bp, Homo sapiens
gtgctcactgtactt

SEQ ID NO: 32426 - DNA, 15 bp, Homo sapiens
tgtgctcactgtact

SEQ ID NO: 32427 - DNA, 15 bp, Homo sapiens
ttgtgctcactgtac

SEQ ID NO: 32428 - DNA, 15 bp, Homo sapiens
attgtgctcactgta

SEQ ID NO: 32429 - DNA, 15 bp, Homo sapiens
aattgtgctcactgt

SEQ ID NO: 32430 - DNA, 15 bp, Homo sapiens
taattgtgctcactg

SEQ ID NO: 32431 - DNA, 15 bp, Homo sapiens
ctaattgtgctcact

SEQ ID NO: 32432 - DNA, 15 bp, Homo sapiens
gctaattgtgctcac

SEQ ID NO: 32433 - DNA, 15 bp, Homo sapiens
ggctaattgtgctca

SEQ ID NO: 32434 - DNA, 15 bp, Homo sapiens
cggctaattgtgctc

SEQ ID NO: 32435 - DNA, 15 bp, Homo sapiens
acggctaattgtgct

SEQ ID NO: 32436 - DNA, 15 bp, Homo sapiens
tacggctaattgtgc

SEQ ID NO: 32437 - DNA, 15 bp, Homo sapiens
ttacggctaattgtg

SEQ ID NO: 32438 - DNA, 15 bp, Homo sapiens
attacggctaattgt

SEQ ID NO: 32439 - DNA, 15 bp, Homo sapiens
tattacggctaattg

SEQ ID NO: 32440 - DNA, 15 bp, Homo sapiens
ttattacggctaatt

SEQ ID NO: 32441 - DNA, 15 bp, Homo sapiens
gttattacggctaat

SEQ ID NO: 32442 - DNA, 15 bp, Homo sapiens
tgttattacggctaa

SEQ ID NO: 32443 - DNA, 15 bp, Homo sapiens
atgttattacggcta

SEQ ID NO: 32444 - DNA, 15 bp, Homo sapiens
aatgttattacggct

SEQ ID NO: 32445 - DNA, 15 bp, Homo sapiens
taatgttattacggc

SEQ ID NO: 32446 - DNA, 15 bp, Homo sapiens
ctaatgttattacgg

SEQ ID NO: 32447 - DNA, 15 bp, Homo sapiens
tctaatgttattacg

SEQ ID NO: 32448 - DNA, 15 bp, Homo sapiens
ctctaatgttattac

SEQ ID NO: 32449 - DNA, 15 bp, Homo sapiens
tctctaatgttatta

SEQ ID NO: 32450 - DNA, 15 bp, Homo sapiens
ttctctaatgttatt

SEQ ID NO: 32451 - DNA, 15 bp, Homo sapiens
tttctctaatgttat

SEQ ID NO: 32452 - DNA, 15 bp, Homo sapiens
ttttctctaatgtta

SEQ ID NO: 32453 - DNA, 15 bp, Homo sapiens
attttctctaatgtt

SEQ ID NO: 32454 - DNA, 15 bp, Homo sapiens
cattttctctaatgt

SEQ ID NO: 32455 - DNA, 15 bp, Homo sapiens
acattttctctaatg

SEQ ID NO: 32456 - DNA, 15 bp, Homo sapiens
aacattttctctaat

SEQ ID NO: 32457 - DNA, 15 bp, Homo sapiens
aaacattttctctaa

SEQ ID NO: 32458 - DNA, 15 bp, Homo sapiens
aaaacattttctcta

SEQ ID NO: 32459 - DNA, 15 bp, Homo sapiens
aaaaacattttctct

SEQ ID NO: 32460 - DNA, 15 bp, Homo sapiens
taaaaacattttctc

SEQ ID NO: 32461 - DNA, 15 bp, Homo sapiens
ttaaaaacattttct

SEQ ID NO: 32462 - DNA, 15 bp, Homo sapiens
tttaaaaacattttc

SEQ ID NO: 32463 - DNA, 15 bp, Homo sapiens
ctttaaaaacatttt

SEQ ID NO: 32464 - DNA, 15 bp, Homo sapiens
tctttaaaaacattt

SEQ ID NO: 32465 - DNA, 15 bp, Homo sapiens
ttctttaaaaacatt

SEQ ID NO: 32466 - DNA, 15 bp, Homo sapiens
cttctttaaaaacat

SEQ ID NO: 32467 - DNA, 15 bp, Homo sapiens
gcttctttaaaaaca

SEQ ID NO: 32468 - DNA, 15 bp, Homo sapiens
ggcttctttaaaaac

SEQ ID NO: 32469 - DNA, 15 bp, Homo sapiens
tggcttctttaaaaa

SEQ ID NO: 32470 - DNA, 15 bp, Homo sapiens
ctggcttctttaaaa

SEQ ID NO: 32471 - DNA, 15 bp, Homo sapiens
gctggcttctttaaa

SEQ ID NO: 32472 - DNA, 15 bp, Homo sapiens
agctggcttctttaa

SEQ ID NO: 32473 - DNA, 15 bp, Homo sapiens
gagctggcttcttta

SEQ ID NO: 32474 - DNA, 15 bp, Homo sapiens
tgagctggcttcttt

SEQ ID NO: 32475 - DNA, 15 bp, Homo sapiens
ttgagctggcttctt

SEQ ID NO: 32476 - DNA, 15 bp, Homo sapiens
cttgagctggcttct

SEQ ID NO: 32477 - DNA, 15 bp, Homo sapiens
gcttgagctggcttc

SEQ ID NO: 32478 - DNA, 15 bp, Homo sapiens
tgcttgagctggctt

SEQ ID NO: 32479 - DNA, 15 bp, Homo sapiens
ttgcttgagctggct

SEQ ID NO: 32480 - DNA, 15 bp, Homo sapiens
attgcttgagctggc

SEQ ID NO: 32481 - DNA, 15 bp, Homo sapiens
tattgcttgagctgg

SEQ ID NO: 32482 - DNA, 15 bp, Homo sapiens
atattgcttgagctg

SEQ ID NO: 32483 - DNA, 15 bp, Homo sapiens
aatattgcttgagct

SEQ ID NO: 32484 - DNA, 15 bp, Homo sapiens
taatattgcttgagc

SEQ ID NO: 32485 - DNA, 15 bp, Homo sapiens
ttaatattgcttgag

SEQ ID NO: 32486 - DNA, 15 bp, Homo sapiens
attaatattgcttga

SEQ ID NO: 32487 - DNA, 15 bp, Homo sapiens
cattaatattgcttg

SEQ ID NO: 32488 - DNA, 15 bp, Homo sapiens
tcattaatattgctt

SEQ ID NO: 32489 - DNA, 15 bp, Homo sapiens
ttcattaatattgct

SEQ ID NO: 32490 - DNA, 15 bp, Homo sapiens
cttcattaatattgc

SEQ ID NO: 32491 - DNA, 15 bp, Homo sapiens
acttcattaatattg

SEQ ID NO: 32492 - DNA, 15 bp, Homo sapiens
tacttcattaatatt

SEQ ID NO: 32493 - DNA, 15 bp, Homo sapiens
ctacttcattaatat

SEQ ID NO: 32494 - DNA, 15 bp, Homo sapiens
cctacttcattaata

SEQ ID NO: 32495 - DNA, 15 bp, Homo sapiens
acctacttcattaat

SEQ ID NO: 32496 - DNA, 15 bp, Homo sapiens
aacctacttcattaa

SEQ ID NO: 32497 - DNA, 15 bp, Homo sapiens
gaacctacttcatta

SEQ ID NO: 32498 - DNA, 15 bp, Homo sapiens
ggaacctacttcatt

SEQ ID NO: 32499 - DNA, 15 bp, Homo sapiens
tggaacctacttcat

SEQ ID NO: 32500 - DNA, 15 bp, Homo sapiens
ctggaacctacttca

SEQ ID NO: 32501 - DNA, 15 bp, Homo sapiens
actggaacctacttc

SEQ ID NO: 32502 - DNA, 15 bp, Homo sapiens
tactggaacctactt

SEQ ID NO: 32503 - DNA, 15 bp, Homo sapiens
gtactggaacctact

SEQ ID NO: 32504 - DNA, 15 bp, Homo sapiens
agtactggaacctac

SEQ ID NO: 32505 - DNA, 15 bp, Homo sapiens
tagtactggaaccta

SEQ ID NO: 32506 - DNA, 15 bp, Homo sapiens
ttagtactggaacct

SEQ ID NO: 32507 - DNA, 15 bp, Homo sapiens
attagtactggaacc

SEQ ID NO: 32508 - DNA, 15 bp, Homo sapiens
cattagtactggaac

SEQ ID NO: 32509 - DNA, 15 bp, Homo sapiens
tcattagtactggaa

SEQ ID NO: 32510 - DNA, 15 bp, Homo sapiens
ttcattagtactgga

SEQ ID NO: 32511 - DNA, 15 bp, Homo sapiens
cttcattagtactgg

SEQ ID NO: 32512 - DNA, 15 bp, Homo sapiens
acttcattagtactg

SEQ ID NO: 32513 - DNA, 15 bp, Homo sapiens
cacttcattagtact

SEQ ID NO: 32514 - DNA, 15 bp, Homo sapiens
ccacttcattagtac

SEQ ID NO: 32515 - DNA, 15 bp, Homo sapiens
cccacttcattagta

SEQ ID NO: 32516 - DNA, 15 bp, Homo sapiens
gcccacttcattagt

SEQ ID NO: 32517 - DNA, 15 bp, Homo sapiens
agcccacttcattag

SEQ ID NO: 32518 - DNA, 15 bp, Homo sapiens
gagcccacttcatta

SEQ ID NO: 32519 - DNA, 15 bp, Homo sapiens
ggagcccacttcatt

SEQ ID NO: 32520 - DNA, 15 bp, Homo sapiens
tggagcccacttcat

SEQ ID NO: 32521 - DNA, 15 bp, Homo sapiens
ctggagcccacttca

SEQ ID NO: 32522 - DNA, 15 bp, Homo sapiens
actggagcccacttc

SEQ ID NO: 32523 - DNA, 15 bp, Homo sapiens
tactggagcccactt

SEQ ID NO: 32524 - DNA, 15 bp, Homo sapiens
atactggagcccact

SEQ ID NO: 32525 - DNA, 15 bp, Homo sapiens
aatactggagcccac

SEQ ID NO: 32526 - DNA, 15 bp, Homo sapiens
taatactggagccca

SEQ ID NO: 32527 - DNA, 15 bp, Homo sapiens
ttaatactggagccc

SEQ ID NO: 32528 - DNA, 15 bp, Homo sapiens
attaatactggagcc

SEQ ID NO: 32529 - DNA, 15 bp, Homo sapiens
cattaatactggagc

SEQ ID NO: 32530 - DNA, 15 bp, Homo sapiens
tcattaatactggag

SEQ ID NO: 32531 - DNA, 15 bp, Homo sapiens
ttcattaatactgga

SEQ ID NO: 32532 - DNA, 15 bp, Homo sapiens
tttcattaatactgg

SEQ ID NO: 32533 - DNA, 15 bp, Homo sapiens
atttcattaatactg

SEQ ID NO: 32534 - DNA, 15 bp, Homo sapiens
tatttcattaatact

SEQ ID NO: 32535 - DNA, 15 bp, Homo sapiens
ctatttcattaatac

SEQ ID NO: 32536 - DNA, 15 bp, Homo sapiens
cctatttcattaata

SEQ ID NO: 32537 - DNA, 15 bp, Homo sapiens
acctatttcattaat

SEQ ID NO: 32538 - DNA, 15 bp, Homo sapiens
aacctatttcattaa

SEQ ID NO: 32539 - DNA, 15 bp, Homo sapiens
gaacctatttcatta

SEQ ID NO: 32540 - DNA, 15 bp, Homo sapiens
ggaacctatttcatt

SEQ ID NO: 32541 - DNA, 15 bp, Homo sapiens
tggaacctatttcat

SEQ ID NO: 32542 - DNA, 15 bp, Homo sapiens
ctggaacctatttca

SEQ ID NO: 32543 - DNA, 15 bp, Homo sapiens
actggaacctatttc

SEQ ID NO: 32544 - DNA, 15 bp, Homo sapiens
cactggaacctattt

SEQ ID NO: 32545 - DNA, 15 bp, Homo sapiens
tcactggaacctatt

SEQ ID NO: 32546 - DNA, 15 bp, Homo sapiens
atcactggaacctat

SEQ ID NO: 32547 - DNA, 15 bp, Homo sapiens
catcactggaaccta

SEQ ID NO: 32548 - DNA, 15 bp, Homo sapiens
tcatcactggaacct

SEQ ID NO: 32549 - DNA, 15 bp, Homo sapiens
ttcatcactggaacc

SEQ ID NO: 32550 - DNA, 15 bp, Homo sapiens
tttcatcactggaac

SEQ ID NO: 32551 - DNA, 15 bp, Homo sapiens
ttttcatcactggaa

SEQ ID NO: 32552 - DNA, 15 bp, Homo sapiens
gttttcatcactgga

SEQ ID NO: 32553 - DNA, 15 bp, Homo sapiens
tgttttcatcactgg

SEQ ID NO: 32554 - DNA, 15 bp, Homo sapiens
atgttttcatcactg

SEQ ID NO: 32555 - DNA, 15 bp, Homo sapiens
aatgttttcatcact

SEQ ID NO: 32556 - DNA, 15 bp, Homo sapiens
gaatgttttcatcac

SEQ ID NO: 32557 - DNA, 15 bp, Homo sapiens
tgaatgttttcatca

SEQ ID NO: 32558 - DNA, 15 bp, Homo sapiens
ttgaatgttttcatc

SEQ ID NO: 32559 - DNA, 15 bp, Homo sapiens
cttgaatgttttcat

SEQ ID NO: 32560 - DNA, 15 bp, Homo sapiens
gcttgaatgttttca

SEQ ID NO: 32561 - DNA, 15 bp, Homo sapiens
tgcttgaatgttttc

SEQ ID NO: 32562 - DNA, 15 bp, Homo sapiens
ctgcttgaatgtttt

SEQ ID NO: 32563 - DNA, 15 bp, Homo sapiens
tctgcttgaatgttt

SEQ ID NO: 32564 - DNA, 15 bp, Homo sapiens
ttctgcttgaatgtt

SEQ ID NO: 32565 - DNA, 15 bp, Homo sapiens
gttctgcttgaatgt

SEQ ID NO: 32566 - DNA, 15 bp, Homo sapiens
agttctgcttgaatg

SEQ ID NO: 32567 - DNA, 15 bp, Homo sapiens
tagttctgcttgaat

SEQ ID NO: 32568 - DNA, 15 bp, Homo sapiens
ctagttctgcttgaa

SEQ ID NO: 32569 - DNA, 15 bp, Homo sapiens
cctagttctgcttga

SEQ ID NO: 32570 - DNA, 15 bp, Homo sapiens
acctagttctgcttg

SEQ ID NO: 32571 - DNA, 15 bp, Homo sapiens
tacctagttctgctt

SEQ ID NO: 32572 - DNA, 15 bp, Homo sapiens
ctacctagttctgct

SEQ ID NO: 32573 - DNA, 15 bp, Homo sapiens
tctacctagttctgc

SEQ ID NO: 32574 - DNA, 15 bp, Homo sapiens
ttctacctagttctg

SEQ ID NO: 32575 - DNA, 15 bp, Homo sapiens
tttctacctagttct

SEQ ID NO: 32576 - DNA, 15 bp, Homo sapiens
gtttctacctagttc

SEQ ID NO: 32577 - DNA, 15 bp, Homo sapiens
tgtttctacctagtt

SEQ ID NO: 32578 - DNA, 15 bp, Homo sapiens
ctgtttctacctagt

SEQ ID NO: 32579 - DNA, 15 bp, Homo sapiens
tctgtttctacctag

SEQ ID NO: 32580 - DNA, 15 bp, Homo sapiens
ctctgtttctaccta

SEQ ID NO: 32581 - DNA, 15 bp, Homo sapiens
cctctgtttctacct

SEQ ID NO: 32582 - DNA, 15 bp, Homo sapiens
ccctctgtttctacc

SEQ ID NO: 32583 - DNA, 15 bp, Homo sapiens
gccctctgtttctac

SEQ ID NO: 32584 - DNA, 15 bp, Homo sapiens
ggccctctgtttcta

SEQ ID NO: 32585 - DNA, 15 bp, Homo sapiens
tggccctctgtttct

SEQ ID NO: 32586 - DNA, 15 bp, Homo sapiens
ttggccctctgtttc

SEQ ID NO: 32587 - DNA, 15 bp, Homo sapiens
tttggccctctgttt

SEQ ID NO: 32588 - DNA, 15 bp, Homo sapiens
ttttggccctctgtt

SEQ ID NO: 32589 - DNA, 15 bp, Homo sapiens
attttggccctctgt

SEQ ID NO: 32590 - DNA, 15 bp, Homo sapiens
aattttggccctctg

SEQ ID NO: 32591 - DNA, 15 bp, Homo sapiens
caattttggccctct

SEQ ID NO: 32592 - DNA, 15 bp, Homo sapiens
tcaattttggccctc

SEQ ID NO: 32593 - DNA, 15 bp, Homo sapiens
ttcaattttggccct

SEQ ID NO: 32594 - DNA, 15 bp, Homo sapiens
attcaattttggccc

SEQ ID NO: 32595 - DNA, 15 bp, Homo sapiens
cattcaattttggcc

SEQ ID NO: 32596 - DNA, 15 bp, Homo sapiens
gcattcaattttggc

SEQ ID NO: 32597 - DNA, 15 bp, Homo sapiens
agcattcaattttgg

SEQ ID NO: 32598 - DNA, 15 bp, Homo sapiens
tagcattcaattttg

SEQ ID NO: 32599 - DNA, 15 bp, Homo sapiens
atagcattcaatttt

SEQ ID NO: 32600 - DNA, 15 bp, Homo sapiens
catagcattcaattt

SEQ ID NO: 32601 - DNA, 15 bp, Homo sapiens
gcatagcattcaatt

SEQ ID NO: 32602 - DNA, 15 bp, Homo sapiens
agcatagcattcaat

SEQ ID NO: 32603 - DNA, 15 bp, Homo sapiens
aagcatagcattcaa

SEQ ID NO: 32604 - DNA, 15 bp, Homo sapiens
taagcatagcattca

SEQ ID NO: 32605 - DNA, 15 bp, Homo sapiens
ctaagcatagcattc

SEQ ID NO: 32606 - DNA, 15 bp, Homo sapiens
tctaagcatagcatt

SEQ ID NO: 32607 - DNA, 15 bp, Homo sapiens
atctaagcatagcat

SEQ ID NO: 32608 - DNA, 15 bp, Homo sapiens
aatctaagcatagca

SEQ ID NO: 32609 - DNA, 15 bp, Homo sapiens
taatctaagcatagc

SEQ ID NO: 32610 - DNA, 15 bp, Homo sapiens
ctaatctaagcatag

SEQ ID NO: 32611 - DNA, 15 bp, Homo sapiens
cctaatctaagcata

SEQ ID NO: 32612 - DNA, 15 bp, Homo sapiens
ccctaatctaagcat

SEQ ID NO: 32613 - DNA, 15 bp, Homo sapiens
cccctaatctaagca

SEQ ID NO: 32614 - DNA, 15 bp, Homo sapiens
acccctaatctaagc

SEQ ID NO: 32615 - DNA, 15 bp, Homo sapiens
aacccctaatctaag

SEQ ID NO: 32616 - DNA, 15 bp, Homo sapiens
aaacccctaatctaa

SEQ ID NO: 32617 - DNA, 15 bp, Homo sapiens
aaaacccctaatcta

SEQ ID NO: 32618 - DNA, 15 bp, Homo sapiens
caaaacccctaatct

SEQ ID NO: 32619 - DNA, 15 bp, Homo sapiens
gcaaaacccctaatc

SEQ ID NO: 32620 - DNA, 15 bp, Homo sapiens
tgcaaaacccctaat

SEQ ID NO: 32621 - DNA, 15 bp, Homo sapiens
ttgcaaaacccctaa

SEQ ID NO: 32622 - DNA, 15 bp, Homo sapiens
gttgcaaaaccccta

SEQ ID NO: 32623 - DNA, 15 bp, Homo sapiens
ggttgcaaaacccct

SEQ ID NO: 32624 - DNA, 15 bp, Homo sapiens
aggttgcaaaacccc

SEQ ID NO: 32625 - DNA, 15 bp, Homo sapiens
caggttgcaaaaccc

SEQ ID NO: 32626 - DNA, 15 bp, Homo sapiens
tcaggttgcaaaacc

SEQ ID NO: 32627 - DNA, 15 bp, Homo sapiens
ctcaggttgcaaaac

SEQ ID NO: 32628 - DNA, 15 bp, Homo sapiens
cctcaggttgcaaaa

SEQ ID NO: 32629 - DNA, 15 bp, Homo sapiens
acctcaggttgcaaa

SEQ ID NO: 32630 - DNA, 15 bp, Homo sapiens
gacctcaggttgcaa

SEQ ID NO: 32631 - DNA, 15 bp, Homo sapiens
agacctcaggttgca

SEQ ID NO: 32632 - DNA, 15 bp, Homo sapiens
tagacctcaggttgc

SEQ ID NO: 32633 - DNA, 15 bp, Homo sapiens
atagacctcaggttg

SEQ ID NO: 32634 - DNA, 15 bp, Homo sapiens
tatagacctcaggtt

SEQ ID NO: 32635 - DNA, 15 bp, Homo sapiens
ttatagacctcaggt

SEQ ID NO: 32636 - DNA, 15 bp, Homo sapiens
tttatagacctcagg

SEQ ID NO: 32637 - DNA, 15 bp, Homo sapiens
gtttatagacctcag

SEQ ID NO: 32638 - DNA, 15 bp, Homo sapiens
tgtttatagacctca

SEQ ID NO: 32639 - DNA, 15 bp, Homo sapiens
ttgtttatagacctc

SEQ ID NO: 32640 - DNA, 15 bp, Homo sapiens
tttgtttatagacct

SEQ ID NO: 32641 - DNA, 15 bp, Homo sapiens
ctttgtttatagacc

SEQ ID NO: 32642 - DNA, 15 bp, Homo sapiens
actttgtttatagac

SEQ ID NO: 32643 - DNA, 15 bp, Homo sapiens
gactttgtttataga

SEQ ID NO: 32644 - DNA, 15 bp, Homo sapiens
agactttgtttatag

SEQ ID NO: 32645 - DNA, 15 bp, Homo sapiens
aagactttgtttata

SEQ ID NO: 32646 - DNA, 15 bp, Homo sapiens
gaagactttgtttat

SEQ ID NO: 32647 - DNA, 15 bp, Homo sapiens
ggaagactttgttta

SEQ ID NO: 32648 - DNA, 15 bp, Homo sapiens
aggaagactttgttt

SEQ ID NO: 32649 - DNA, 15 bp, Homo sapiens
caggaagactttgtt

SEQ ID NO: 32650 - DNA, 15 bp, Homo sapiens
ccaggaagactttgt

SEQ ID NO: 32651 - DNA, 15 bp, Homo sapiens
tccaggaagactttg

SEQ ID NO: 32652 - DNA, 15 bp, Homo sapiens
ttccaggaagacttt

SEQ ID NO: 32653 - DNA, 15 bp, Homo sapiens
cttccaggaagactt

SEQ ID NO: 32654 - DNA, 15 bp, Homo sapiens
acttccaggaagact

SEQ ID NO: 32655 - DNA, 15 bp, Homo sapiens
tacttccaggaagac

SEQ ID NO: 32656 - DNA, 15 bp, Homo sapiens
ttacttccaggaaga

SEQ ID NO: 32657 - DNA, 15 bp, Homo sapiens
attacttccaggaag

SEQ ID NO: 32658 - DNA, 15 bp, Homo sapiens
aattacttccaggaa

SEQ ID NO: 32659 - DNA, 15 bp, Homo sapiens
caattacttccagga

SEQ ID NO: 32660 - DNA, 15 bp, Homo sapiens
acaattacttccagg

SEQ ID NO: 32661 - DNA, 15 bp, Homo sapiens
tacaattacttccag

SEQ ID NO: 32662 - DNA, 15 bp, Homo sapiens
ttacaattacttcca

SEQ ID NO: 32663 - DNA, 15 bp, Homo sapiens
cttacaattacttcc

SEQ ID NO: 32664 - DNA, 15 bp, Homo sapiens
gcttacaattacttc

SEQ ID NO: 32665 - DNA, 15 bp, Homo sapiens
tgcttacaattactt

SEQ ID NO: 32666 - DNA, 15 bp, Homo sapiens
atgcttacaattact

SEQ ID NO: 32667 - DNA, 15 bp, Homo sapiens
gatgcttacaattac

SEQ ID NO: 32668 - DNA, 15 bp, Homo sapiens
ggatgcttacaatta

SEQ ID NO: 32669 - DNA, 15 bp, Homo sapiens
aggatgcttacaatt

SEQ ID NO: 32670 - DNA, 15 bp, Homo sapiens
caggatgcttacaat

SEQ ID NO: 32671 - DNA, 15 bp, Homo sapiens
tcaggatgcttacaa

SEQ ID NO: 32672 - DNA, 15 bp, Homo sapiens
ttcaggatgcttaca

SEQ ID NO: 32673 - DNA, 15 bp, Homo sapiens
tttcaggatgcttac

SEQ ID NO: 32674 - DNA, 15 bp, Homo sapiens
atttcaggatgctta

SEQ ID NO: 32675 - DNA, 15 bp, Homo sapiens
tatttcaggatgctt

SEQ ID NO: 32676 - DNA, 15 bp, Homo sapiens
ttatttcaggatgct

SEQ ID NO: 32677 - DNA, 15 bp, Homo sapiens
tttatttcaggatgc

SEQ ID NO: 32678 - DNA, 15 bp, Homo sapiens
ttttatttcaggatg

SEQ ID NO: 32679 - DNA, 15 bp, Homo sapiens
tttttatttcaggat

SEQ ID NO: 32680 - DNA, 15 bp, Homo sapiens
ttttttatttcagga

SEQ ID NO: 32681 - DNA, 15 bp, Homo sapiens
cttttttatttcagg

SEQ ID NO: 32682 - DNA, 15 bp, Homo sapiens
gcttttttatttcag

SEQ ID NO: 32683 - DNA, 15 bp, Homo sapiens
tgcttttttatttca

SEQ ID NO: 32684 - DNA, 15 bp, Homo sapiens
ttgcttttttatttc

SEQ ID NO: 32685 - DNA, 15 bp, Homo sapiens
cttgcttttttattt

SEQ ID NO: 32686 - DNA, 15 bp, Homo sapiens
tcttgcttttttatt

SEQ ID NO: 32687 - DNA, 15 bp, Homo sapiens
ttcttgcttttttat

SEQ ID NO: 32688 - DNA, 15 bp, Homo sapiens
attcttgctttttta

SEQ ID NO: 32689 - DNA, 15 bp, Homo sapiens
tattcttgctttttt

SEQ ID NO: 32690 - DNA, 15 bp, Homo sapiens
atattcttgcttttt

SEQ ID NO: 32691 - DNA, 15 bp, Homo sapiens
catattcttgctttt

SEQ ID NO: 32692 - DNA, 15 bp, Homo sapiens
tcatattcttgcttt

SEQ ID NO: 32693 - DNA, 15 bp, Homo sapiens
ttcatattcttgctt

SEQ ID NO: 32694 - DNA, 15 bp, Homo sapiens
cttcatattcttgct

SEQ ID NO: 32695 - DNA, 15 bp, Homo sapiens
tcttcatattcttgc

SEQ ID NO: 32696 - DNA, 15 bp, Homo sapiens
ttcttcatattcttg

SEQ ID NO: 32697 - DNA, 15 bp, Homo sapiens
cttcttcatattctt

SEQ ID NO: 32698 - DNA, 15 bp, Homo sapiens
acttcttcatattct

SEQ ID NO: 32699 - DNA, 15 bp, Homo sapiens
tacttcttcatattc

SEQ ID NO: 32700 - DNA, 15 bp, Homo sapiens
ctacttcttcatatt

SEQ ID NO: 32701 - DNA, 15 bp, Homo sapiens
actacttcttcatat

SEQ ID NO: 32702 - DNA, 15 bp, Homo sapiens
aactacttcttcata

SEQ ID NO: 32703 - DNA, 15 bp, Homo sapiens
gaactacttcttcat

SEQ ID NO: 32704 - DNA, 15 bp, Homo sapiens
tgaactacttcttca

SEQ ID NO: 32705 - DNA, 15 bp, Homo sapiens
ctgaactacttcttc

SEQ ID NO: 32706 - DNA, 15 bp, Homo sapiens
tctgaactacttctt

SEQ ID NO: 32707 - DNA, 15 bp, Homo sapiens
gtctgaactacttct

SEQ ID NO: 32708 - DNA, 15 bp, Homo sapiens
agtctgaactacttc

SEQ ID NO: 32709 - DNA, 15 bp, Homo sapiens
cagtctgaactactt

SEQ ID NO: 32710 - DNA, 15 bp, Homo sapiens
acagtctgaactact

SEQ ID NO: 32711 - DNA, 15 bp, Homo sapiens
aacagtctgaactac

SEQ ID NO: 32712 - DNA, 15 bp, Homo sapiens
taacagtctgaacta

SEQ ID NO: 32713 - DNA, 15 bp, Homo sapiens
ttaacagtctgaact

SEQ ID NO: 32714 - DNA, 15 bp, Homo sapiens
attaacagtctgaac

SEQ ID NO: 32715 - DNA, 15 bp, Homo sapiens
tattaacagtctgaa

SEQ ID NO: 32716 - DNA, 15 bp, Homo sapiens
gtattaacagtctga

SEQ ID NO: 32717 - DNA, 15 bp, Homo sapiens
tgtattaacagtctg

SEQ ID NO: 32718 - DNA, 15 bp, Homo sapiens
ctgtattaacagtct

SEQ ID NO: 32719 - DNA, 15 bp, Homo sapiens
tctgtattaacagtc

SEQ ID NO: 32720 - DNA, 15 bp, Homo sapiens
atctgtattaacagt

SEQ ID NO: 32721 - DNA, 15 bp, Homo sapiens
aatctgtattaacag

SEQ ID NO: 32722 - DNA, 15 bp, Homo sapiens
aaatctgtattaaca

SEQ ID NO: 32723 - DNA, 15 bp, Homo sapiens
gaaatctgtattaac

SEQ ID NO: 32724 - DNA, 15 bp, Homo sapiens
agaaatctgtattaa

SEQ ID NO: 32725 - DNA, 15 bp, Homo sapiens
gagaaatctgtatta

SEQ ID NO: 32726 - DNA, 15 bp, Homo sapiens
agagaaatctgtatt

SEQ ID NO: 32727 - DNA, 15 bp, Homo sapiens
gagagaaatctgtat

SEQ ID NO: 32728 - DNA, 15 bp, Homo sapiens
ggagagaaatctgta

SEQ ID NO: 32729 - DNA, 15 bp, Homo sapiens
tggagagaaatctgt

SEQ ID NO: 32730 - DNA, 15 bp, Homo sapiens
atggagagaaatctg

SEQ ID NO: 32731 - DNA, 15 bp, Homo sapiens
tatggagagaaatct

SEQ ID NO: 32732 - DNA, 15 bp, Homo sapiens
atatggagagaaatc

SEQ ID NO: 32733 - DNA, 15 bp, Homo sapiens
gatatggagagaaat

SEQ ID NO: 32734 - DNA, 15 bp, Homo sapiens
agatatggagagaaa

SEQ ID NO: 32735 - DNA, 15 bp, Homo sapiens
cagatatggagagaa

SEQ ID NO: 32736 - DNA, 15 bp, Homo sapiens
tcagatatggagaga

SEQ ID NO: 32737 - DNA, 15 bp, Homo sapiens
atcagatatggagag

SEQ ID NO: 32738 - DNA, 15 bp, Homo sapiens
aatcagatatggaga

SEQ ID NO: 32739 - DNA, 15 bp, Homo sapiens
aaatcagatatggag

SEQ ID NO: 32740 - DNA, 15 bp, Homo sapiens
gaaatcagatatgga

SEQ ID NO: 32741 - DNA, 15 bp, Homo sapiens
tgaaatcagatatgg

SEQ ID NO: 32742 - DNA, 15 bp, Homo sapiens
ctgaaatcagatatg

SEQ ID NO: 32743 - DNA, 15 bp, Homo sapiens
tctgaaatcagatat

SEQ ID NO: 32744 - DNA, 15 bp, Homo sapiens
atctgaaatcagata

SEQ ID NO: 32745 - DNA, 15 bp, Homo sapiens
tatctgaaatcagat

SEQ ID NO: 32746 - DNA, 15 bp, Homo sapiens
ttatctgaaatcaga

SEQ ID NO: 32747 - DNA, 15 bp, Homo sapiens
gttatctgaaatcag

SEQ ID NO: 32748 - DNA, 15 bp, Homo sapiens
agttatctgaaatca

SEQ ID NO: 32749 - DNA, 15 bp, Homo sapiens
gggtgaaagggctag

SEQ ID NO: 32750 - DNA, 15 bp, Homo sapiens
tgggtgaaagggcta

SEQ ID NO: 32751 - DNA, 15 bp, Homo sapiens
atgggtgaaagggct

SEQ ID NO: 32752 - DNA, 15 bp, Homo sapiens
tatgggtgaaagggc

SEQ ID NO: 32753 - DNA, 15 bp, Homo sapiens
gtatgggtgaaaggg

SEQ ID NO: 32754 - DNA, 15 bp, Homo sapiens
tgtatgggtgaaagg

SEQ ID NO: 32755 - DNA, 15 bp, Homo sapiens
gtgtatgggtgaaag

SEQ ID NO: 32756 - DNA, 15 bp, Homo sapiens
tgtgtatgggtgaaa

SEQ ID NO: 32757 - DNA, 15 bp, Homo sapiens
atgtgtatgggtgaa

SEQ ID NO: 32758 - DNA, 15 bp, Homo sapiens
aatgtgtatgggtga

SEQ ID NO: 32759 - DNA, 15 bp, Homo sapiens
aaatgtgtatgggtg

SEQ ID NO: 32760 - DNA, 15 bp, Homo sapiens
caaatgtgtatgggt

SEQ ID NO: 32761 - DNA, 15 bp, Homo sapiens
ccaaatgtgtatggg

SEQ ID NO: 32762 - DNA, 15 bp, Homo sapiens
gccaaatgtgtatgg

SEQ ID NO: 32763 - DNA, 15 bp, Homo sapiens
agccaaatgtgtatg

SEQ ID NO: 32764 - DNA, 15 bp, Homo sapiens
gagccaaatgtgtat

SEQ ID NO: 32765 - DNA, 15 bp, Homo sapiens
tgagccaaatgtgta

SEQ ID NO: 32766 - DNA, 15 bp, Homo sapiens
ctgagccaaatgtgt

SEQ ID NO: 32767 - DNA, 15 bp, Homo sapiens
cctgagccaaatgtg

SEQ ID NO: 32768 - DNA, 15 bp, Homo sapiens
ccctgagccaaatgt

SEQ ID NO: 32769 - DNA, 15 bp, Homo sapiens
accctgagccaaatg

SEQ ID NO: 32770 - DNA, 15 bp, Homo sapiens
aaccctgagccaaat

SEQ ID NO: 32771 - DNA, 15 bp, Homo sapiens
taaccctgagccaaa

SEQ ID NO: 32772 - DNA, 15 bp, Homo sapiens
gtaaccctgagccaa

SEQ ID NO: 32773 - DNA, 15 bp, Homo sapiens
ggtaaccctgagcca

SEQ ID NO: 32774 - DNA, 15 bp, Homo sapiens
cggtaaccctgagcc

SEQ ID NO: 32775 - DNA, 15 bp, Homo sapiens
tcggtaaccctgagc

SEQ ID NO: 32776 - DNA, 15 bp, Homo sapiens
ttcggtaaccctgag

SEQ ID NO: 32777 - DNA, 15 bp, Homo sapiens
cttcggtaaccctga

SEQ ID NO: 32778 - DNA, 15 bp, Homo sapiens
tcttcggtaaccctg

SEQ ID NO: 32779 - DNA, 15 bp, Homo sapiens
ctcttcggtaaccct

SEQ ID NO: 32780 - DNA, 15 bp, Homo sapiens
cctcttcggtaaccc

SEQ ID NO: 32781 - DNA, 15 bp, Homo sapiens
ccctcttcggtaacc

SEQ ID NO: 32782 - DNA, 15 bp, Homo sapiens
cccctcttcggtaac

SEQ ID NO: 32783 - DNA, 15 bp, Homo sapiens
gcccctcttcggtaa

SEQ ID NO: 32784 - DNA, 15 bp, Homo sapiens
ggcccctcttcggta

SEQ ID NO: 32785 - DNA, 15 bp, Homo sapiens
tggcccctcttcggt

SEQ ID NO: 32786 - DNA, 15 bp, Homo sapiens
ttggcccctcttcgg

SEQ ID NO: 32787 - DNA, 15 bp, Homo sapiens
cttggcccctcttcg

SEQ ID NO: 32788 - DNA, 15 bp, Homo sapiens
tcttggcccctcttc

SEQ ID NO: 32789 - DNA, 15 bp, Homo sapiens
ttcttggcccctctt

SEQ ID NO: 32790 - DNA, 15 bp, Homo sapiens
tttcttggcccctct

SEQ ID NO: 32791 - DNA, 15 bp, Homo sapiens
atttcttggcccctc

SEQ ID NO: 32792 - DNA, 15 bp, Homo sapiens
aatttcttggcccct

SEQ ID NO: 32793 - DNA, 15 bp, Homo sapiens
taatttcttggcccc

SEQ ID NO: 32794 - DNA, 15 bp, Homo sapiens
ctaatttcttggccc

SEQ ID NO: 32795 - DNA, 15 bp, Homo sapiens
tctaatttcttggcc

SEQ ID NO: 32796 - DNA, 15 bp, Homo sapiens
ctctaatttcttggc

SEQ ID NO: 32797 - DNA, 15 bp, Homo sapiens
actctaatttcttgg

SEQ ID NO: 32798 - DNA, 15 bp, Homo sapiens
gactctaatttcttg

SEQ ID NO: 32799 - DNA, 15 bp, Homo sapiens
ggactctaatttctt

SEQ ID NO: 32800 - DNA, 15 bp, Homo sapiens
aggactctaatttct

SEQ ID NO: 32801 - DNA, 15 bp, Homo sapiens
gaggactctaatttc

SEQ ID NO: 32802 - DNA, 15 bp, Homo sapiens
tgaggactctaattt

SEQ ID NO: 32803 - DNA, 15 bp, Homo sapiens
ctgaggactctaatt

SEQ ID NO: 32804 - DNA, 15 bp, Homo sapiens
tctgaggactctaat

SEQ ID NO: 32805 - DNA, 15 bp, Homo sapiens
ttctgaggactctaa

SEQ ID NO: 32806 - DNA, 15 bp, Homo sapiens
cttctgaggactcta

SEQ ID NO: 32807 - DNA, 15 bp, Homo sapiens
tcttctgaggactct

SEQ ID NO: 32808 - DNA, 15 bp, Homo sapiens
ctcttctgaggactc

SEQ ID NO: 32809 - DNA, 15 bp, Homo sapiens
tctcttctgaggact

SEQ ID NO: 32810 - DNA, 15 bp, Homo sapiens
ttctcttctgaggac

SEQ ID NO: 32811 - DNA, 15 bp, Homo sapiens
gttctcttctgagga

SEQ ID NO: 32812 - DNA, 15 bp, Homo sapiens
agttctcttctgagg

SEQ ID NO: 32813 - DNA, 15 bp, Homo sapiens
aagttctcttctgag

SEQ ID NO: 32814 - DNA, 15 bp, Homo sapiens
gaacattttgtttcc

SEQ ID NO: 32815 - DNA, 15 bp, Homo sapiens
agaacattttgtttc

SEQ ID NO: 32816 - DNA, 15 bp, Homo sapiens
cagaacattttgttt

SEQ ID NO: 32817 - DNA, 15 bp, Homo sapiens
gcagaacattttgtt

SEQ ID NO: 32818 - DNA, 15 bp, Homo sapiens
agcagaacattttgt

SEQ ID NO: 32819 - DNA, 15 bp, Homo sapiens
tagcagaacattttg

SEQ ID NO: 32820 - DNA, 15 bp, Homo sapiens
ctagcagaacatttt

SEQ ID NO: 32821 - DNA, 15 bp, Homo sapiens
gctagcagaacattt

SEQ ID NO: 32822 - DNA, 15 bp, Homo sapiens
agctagcagaacatt

SEQ ID NO: 32823 - DNA, 15 bp, Homo sapiens
aagctagcagaacat

SEQ ID NO: 32824 - DNA, 15 bp, Homo sapiens
caagctagcagaaca

SEQ ID NO: 32825 - DNA, 15 bp, Homo sapiens
acaagctagcagaac

SEQ ID NO: 32826 - DNA, 15 bp, Homo sapiens
aacaagctagcagaa

SEQ ID NO: 32827 - DNA, 15 bp, Homo sapiens
aaacaagctagcaga

SEQ ID NO: 32828 - DNA, 15 bp, Homo sapiens
aaaacaagctagcag

SEQ ID NO: 32829 - DNA, 15 bp, Homo sapiens
gaaaacaagctagca

SEQ ID NO: 32830 - DNA, 15 bp, Homo sapiens
agaaaacaagctagc

SEQ ID NO: 32831 - DNA, 15 bp, Homo sapiens
aagaaaacaagctag

SEQ ID NO: 32832 - DNA, 15 bp, Homo sapiens
gaagaaaacaagcta

SEQ ID NO: 32833 - DNA, 15 bp, Homo sapiens
tgaagaaaacaagct

SEQ ID NO: 32834 - DNA, 15 bp, Homo sapiens
gtgaagaaaacaagc

SEQ ID NO: 32835 - DNA, 15 bp, Homo sapiens
tgtgaagaaaacaag

SEQ ID NO: 32836 - DNA, 15 bp, Homo sapiens
ctgtgaagaaaacaa

SEQ ID NO: 32837 - DNA, 15 bp, Homo sapiens
actgtgaagaaaaca

SEQ ID NO: 32838 - DNA, 15 bp, Homo sapiens
cactgtgaagaaaac

SEQ ID NO: 32839 - DNA, 15 bp, Homo sapiens
gcactgtgaagaaaa

SEQ ID NO: 32840 - DNA, 15 bp, Homo sapiens
tgcactgtgaagaaa

SEQ ID NO: 32841 - DNA, 15 bp, Homo sapiens
ctgcactgtgaagaa

SEQ ID NO: 32842 - DNA, 15 bp, Homo sapiens
actgcactgtgaaga

SEQ ID NO: 32843 - DNA, 15 bp, Homo sapiens
cactgcactgtgaag

SEQ ID NO: 32844 - DNA, 15 bp, Homo sapiens
tcactgcactgtgaa

SEQ ID NO: 32845 - DNA, 15 bp, Homo sapiens
ttcactgcactgtga

SEQ ID NO: 32846 - DNA, 15 bp, Homo sapiens
attcactgcactgtg

SEQ ID NO: 32847 - DNA, 15 bp, Homo sapiens
aattcactgcactgt

SEQ ID NO: 32848 - DNA, 15 bp, Homo sapiens
caattcactgcactg

SEQ ID NO: 32849 - DNA, 15 bp, Homo sapiens
ccaattcactgcact

SEQ ID NO: 32850 - DNA, 15 bp, Homo sapiens
tccaattcactgcac

SEQ ID NO: 32851 - DNA, 15 bp, Homo sapiens
ttccaattcactgca

SEQ ID NO: 32852 - DNA, 15 bp, Homo sapiens
cttccaattcactgc

SEQ ID NO: 32853 - DNA, 15 bp, Homo sapiens
tcttccaattcactg

SEQ ID NO: 32854 - DNA, 15 bp, Homo sapiens
gtcttccaattcact

SEQ ID NO: 32855 - DNA, 15 bp, Homo sapiens
agtcttccaattcac

SEQ ID NO: 32856 - DNA, 15 bp, Homo sapiens
aagtcttccaattca

SEQ ID NO: 32857 - DNA, 15 bp, Homo sapiens
caagtcttccaattc

SEQ ID NO: 32858 - DNA, 15 bp, Homo sapiens
tcaagtcttccaatt

SEQ ID NO: 32859 - DNA, 15 bp, Homo sapiens
gtcaagtcttccaat

SEQ ID NO: 32860 - DNA, 15 bp, Homo sapiens
agtcaagtcttccaa

SEQ ID NO: 32861 - DNA, 15 bp, Homo sapiens
cagtcaagtcttcca

SEQ ID NO: 32862 - DNA, 15 bp, Homo sapiens
gcagtcaagtcttcc

SEQ ID NO: 32863 - DNA, 15 bp, Homo sapiens
tgcagtcaagtcttc

SEQ ID NO: 32864 - DNA, 15 bp, Homo sapiens
ttgcagtcaagtctt

SEQ ID NO: 32865 - DNA, 15 bp, Homo sapiens
tttgcagtcaagtct

SEQ ID NO: 32866 - DNA, 15 bp, Homo sapiens
atttgcagtcaagtc

SEQ ID NO: 32867 - DNA, 15 bp, Homo sapiens
tatttgcagtcaagt

SEQ ID NO: 32868 - DNA, 15 bp, Homo sapiens
gtatttgcagtcaag

SEQ ID NO: 32869 - DNA, 15 bp, Homo sapiens
tgtatttgcagtcaa

SEQ ID NO: 32870 - DNA, 15 bp, Homo sapiens
ttgtatttgcagtca

SEQ ID NO: 32871 - DNA, 15 bp, Homo sapiens
tttgtatttgcagtc

SEQ ID NO: 32872 - DNA, 15 bp, Homo sapiens
gtttgtatttgcagt

SEQ ID NO: 32873 - DNA, 15 bp, Homo sapiens
tgtttgtatttgcag

SEQ ID NO: 32874 - DNA, 15 bp, Homo sapiens
gtgtttgtatttgca

SEQ ID NO: 32875 - DNA, 15 bp, Homo sapiens
ggtgtttgtatttgc

SEQ ID NO: 32876 - DNA, 15 bp, Homo sapiens
gggtgtttgtatttg

SEQ ID NO: 32877 - DNA, 15 bp, Homo sapiens
tgggtgtttgtattt

SEQ ID NO: 32878 - DNA, 15 bp, Homo sapiens
ctgggtgtttgtatt

SEQ ID NO: 32879 - DNA, 15 bp, Homo sapiens
cctgggtgtttgtat

SEQ ID NO: 32880 - DNA, 15 bp, Homo sapiens
tcctgggtgtttgta

SEQ ID NO: 32881 - DNA, 15 bp, Homo sapiens
atcctgggtgtttgt

SEQ ID NO: 32882 - DNA, 15 bp, Homo sapiens
gatcctgggtgtttg

SEQ ID NO: 32883 - DNA, 15 bp, Homo sapiens
ggatcctgggtgttt

SEQ ID NO: 32884 - DNA, 15 bp, Homo sapiens
aggatcctgggtgtt

SEQ ID NO: 32885 - DNA, 15 bp, Homo sapiens
aaggatcctgggtgt

SEQ ID NO: 32886 - DNA, 15 bp, Homo sapiens
aaaggatcctgggtg

SEQ ID NO: 32887 - DNA, 15 bp, Homo sapiens
gaaaggatcctgggt

SEQ ID NO: 32888 - DNA, 15 bp, Homo sapiens
agaaaggatcctggg

SEQ ID NO: 32889 - DNA, 15 bp, Homo sapiens
aagaaaggatcctgg

SEQ ID NO: 32890 - DNA, 15 bp, Homo sapiens
caagaaaggatcctg

SEQ ID NO: 32891 - DNA, 15 bp, Homo sapiens
tcaagaaaggatcct

SEQ ID NO: 32892 - DNA, 15 bp, Homo sapiens
atcaagaaaggatcc

SEQ ID NO: 32893 - DNA, 15 bp, Homo sapiens
aatcaagaaaggatc

SEQ ID NO: 32894 - DNA, 15 bp, Homo sapiens
caatcaagaaaggat

SEQ ID NO: 32895 - DNA, 15 bp, Homo sapiens
ccaatcaagaaagga

SEQ ID NO: 32896 - DNA, 15 bp, Homo sapiens
accaatcaagaaagg

SEQ ID NO: 32897 - DNA, 15 bp, Homo sapiens
aaccaatcaagaaag

SEQ ID NO: 32898 - DNA, 15 bp, Homo sapiens
gaaccaatcaagaaa

SEQ ID NO: 32899 - DNA, 15 bp, Homo sapiens
agaaccaatcaagaa

SEQ ID NO: 32900 - DNA, 15 bp, Homo sapiens
aagaaccaatcaaga

SEQ ID NO: 32901 - DNA, 15 bp, Homo sapiens
gaagaaccaatcaag

SEQ ID NO: 32902 - DNA, 15 bp, Homo sapiens
ggaagaaccaatcaa

SEQ ID NO: 32903 - DNA, 15 bp, Homo sapiens
tggaagaaccaatca

SEQ ID NO: 32904 - DNA, 15 bp, Homo sapiens
ttggaagaaccaatc

SEQ ID NO: 32905 - DNA, 15 bp, Homo sapiens
tttggaagaaccaat

SEQ ID NO: 32906 - DNA, 15 bp, Homo sapiens
gtttggaagaaccaa

SEQ ID NO: 32907 - DNA, 15 bp, Homo sapiens
tgtttggaagaacca

SEQ ID NO: 32908 - DNA, 15 bp, Homo sapiens
ttgtttggaagaacc

SEQ ID NO: 32909 - DNA, 15 bp, Homo sapiens
tttgtttggaagaac

SEQ ID NO: 32910 - DNA, 15 bp, Homo sapiens
atttgtttggaagaa

SEQ ID NO: 32911 - DNA, 15 bp, Homo sapiens
catttgtttggaaga

SEQ ID NO: 32912 - DNA, 15 bp, Homo sapiens
tcatttgtttggaag

SEQ ID NO: 32913 - DNA, 15 bp, Homo sapiens
ctcatttgtttggaa

SEQ ID NO: 32914 - DNA, 15 bp, Homo sapiens
cctcatttgtttgga

SEQ ID NO: 32915 - DNA, 15 bp, Homo sapiens
gcctcatttgtttgg

SEQ ID NO: 32916 - DNA, 15 bp, Homo sapiens
tgcctcatttgtttg

SEQ ID NO: 32917 - DNA, 15 bp, Homo sapiens
atgcctcatttgttt

SEQ ID NO: 32918 - DNA, 15 bp, Homo sapiens
gatgcctcatttgtt

SEQ ID NO: 32919 - DNA, 15 bp, Homo sapiens
tgatgcctcatttgt

SEQ ID NO: 32920 - DNA, 15 bp, Homo sapiens
ctgatgcctcatttg

SEQ ID NO: 32921 - DNA, 15 bp, Homo sapiens
actgatgcctcattt

SEQ ID NO: 32922 - DNA, 15 bp, Homo sapiens
gactgatgcctcatt

SEQ ID NO: 32923 - DNA, 15 bp, Homo sapiens
agactgatgcctcat

SEQ ID NO: 32924 - DNA, 15 bp, Homo sapiens
cagactgatgcctca

SEQ ID NO: 32925 - DNA, 15 bp, Homo sapiens
tcagactgatgcctc

SEQ ID NO: 32926 - DNA, 15 bp, Homo sapiens
ttcagactgatgcct

SEQ ID NO: 32927 - DNA, 15 bp, Homo sapiens
tttcagactgatgcc

SEQ ID NO: 32928 - DNA, 15 bp, Homo sapiens
ctttcagactgatgc

SEQ ID NO: 32929 - DNA, 15 bp, Homo sapiens
gctttcagactgatg

SEQ ID NO: 32930 - DNA, 15 bp, Homo sapiens
ggctttcagactgat

SEQ ID NO: 32931 - DNA, 15 bp, Homo sapiens
tggctttcagactga

SEQ ID NO: 32932 - DNA, 15 bp, Homo sapiens
ctggctttcagactg

SEQ ID NO: 32933 - DNA, 15 bp, Homo sapiens
cctggctttcagact

SEQ ID NO: 32934 - DNA, 15 bp, Homo sapiens
ccctggctttcagac

SEQ ID NO: 32935 - DNA, 15 bp, Homo sapiens
tccctggctttcaga

SEQ ID NO: 32936 - DNA, 15 bp, Homo sapiens
ctccctggctttcag

SEQ ID NO: 32937 - DNA, 15 bp, Homo sapiens
actccctggctttca

SEQ ID NO: 32938 - DNA, 15 bp, Homo sapiens
aactccctggctttc

SEQ ID NO: 32939 - DNA, 15 bp, Homo sapiens
caactccctggcttt

SEQ ID NO: 32940 - DNA, 15 bp, Homo sapiens
ccaactccctggctt

SEQ ID NO: 32941 - DNA, 15 bp, Homo sapiens
accaactccctggct

SEQ ID NO: 32942 - DNA, 15 bp, Homo sapiens
gaccaactccctggc

SEQ ID NO: 32943 - DNA, 15 bp, Homo sapiens
agaccaactccctgg

SEQ ID NO: 32944 - DNA, 15 bp, Homo sapiens
cagaccaactccctg

SEQ ID NO: 32945 - DNA, 15 bp, Homo sapiens
tcagaccaactccct

SEQ ID NO: 32946 - DNA, 15 bp, Homo sapiens
ctcagaccaactccc

SEQ ID NO: 32947 - DNA, 15 bp, Homo sapiens
actcagaccaactcc

SEQ ID NO: 32948 - DNA, 15 bp, Homo sapiens
cactcagaccaactc

SEQ ID NO: 32949 - DNA, 15 bp, Homo sapiens
tcactcagaccaact

SEQ ID NO: 32950 - DNA, 15 bp, Homo sapiens
gtcactcagaccaac

SEQ ID NO: 32951 - DNA, 15 bp, Homo sapiens
tgtcactcagaccaa

SEQ ID NO: 32952 - DNA, 15 bp, Homo sapiens
ttgtcactcagacca

SEQ ID NO: 32953 - DNA, 15 bp, Homo sapiens
cttgtcactcagacc

SEQ ID NO: 32954 - DNA, 15 bp, Homo sapiens
ccttgtcactcagac

SEQ ID NO: 32955 - DNA, 15 bp, Homo sapiens
tccttgtcactcaga

SEQ ID NO: 32956 - DNA, 15 bp, Homo sapiens
ttccttgtcactcag

SEQ ID NO: 32957 - DNA, 15 bp, Homo sapiens
attccttgtcactca

SEQ ID NO: 32958 - DNA, 15 bp, Homo sapiens
aattccttgtcactc

SEQ ID NO: 32959 - DNA, 15 bp, Homo sapiens
caattccttgtcact

SEQ ID NO: 32960 - DNA, 15 bp, Homo sapiens
ccaattccttgtcac

SEQ ID NO: 32961 - DNA, 15 bp, Homo sapiens
accaattccttgtca

SEQ ID NO: 32962 - DNA, 15 bp, Homo sapiens
aaccaattccttgtc

SEQ ID NO: 32963 - DNA, 15 bp, Homo sapiens
aaaccaattccttgt

SEQ ID NO: 32964 - DNA, 15 bp, Homo sapiens
gaaaccaattccttg

SEQ ID NO: 32965 - DNA, 15 bp, Homo sapiens
tgaaaccaattcctt

SEQ ID NO: 32966 - DNA, 15 bp, Homo sapiens
ctgaaaccaattcct

SEQ ID NO: 32967 - DNA, 15 bp, Homo sapiens
tctgaaaccaattcc

SEQ ID NO: 32968 - DNA, 15 bp, Homo sapiens
atctgaaaccaattc

SEQ ID NO: 32969 - DNA, 15 bp, Homo sapiens
catctgaaaccaatt

SEQ ID NO: 32970 - DNA, 15 bp, Homo sapiens
tcatctgaaaccaat

SEQ ID NO: 32971 - DNA, 15 bp, Homo sapiens
atcatctgaaaccaa

SEQ ID NO: 32972 - DNA, 15 bp, Homo sapiens
catcatctgaaacca

SEQ ID NO: 32973 - DNA, 15 bp, Homo sapiens
tcatcatctgaaacc

SEQ ID NO: 32974 - DNA, 15 bp, Homo sapiens
ttcatcatctgaaac

SEQ ID NO: 32975 - DNA, 15 bp, Homo sapiens
cttcatcatctgaaa

SEQ ID NO: 32976 - DNA, 15 bp, Homo sapiens
tcttcatcatctgaa

SEQ ID NO: 32977 - DNA, 15 bp, Homo sapiens
ttcttcatcatctga

SEQ ID NO: 32978 - DNA, 15 bp, Homo sapiens
tttcttcatcatctg

SEQ ID NO: 32979 - DNA, 15 bp, Homo sapiens
ctttcttcatcatct

SEQ ID NO: 32980 - DNA, 15 bp, Homo sapiens
tctttcttcatcatc

SEQ ID NO: 32981 - DNA, 15 bp, Homo sapiens
ctctttcttcatcat

SEQ ID NO: 32982 - DNA, 15 bp, Homo sapiens
cctctttcttcatca

SEQ ID NO: 32983 - DNA, 15 bp, Homo sapiens
tcctctttcttcatc

SEQ ID NO: 32984 - DNA, 15 bp, Homo sapiens
ttcctctttcttcat

SEQ ID NO: 32985 - DNA, 15 bp, Homo sapiens
gttcctctttcttca

SEQ ID NO: 32986 - DNA, 15 bp, Homo sapiens
cgttcctctttcttc

SEQ ID NO: 32987 - DNA, 15 bp, Homo sapiens
ccgttcctctttctt

SEQ ID NO: 32988 - DNA, 15 bp, Homo sapiens
cccgttcctctttct

SEQ ID NO: 32989 - DNA, 15 bp, Homo sapiens
gcccgttcctctttc

SEQ ID NO: 32990 - DNA, 15 bp, Homo sapiens
agcccgttcctcttt

SEQ ID NO: 32991 - DNA, 15 bp, Homo sapiens
aagcccgttcctctt

SEQ ID NO: 32992 - DNA, 15 bp, Homo sapiens
caagcccgttcctct

SEQ ID NO: 32993 - DNA, 15 bp, Homo sapiens
ccaagcccgttcctc

SEQ ID NO: 32994 - DNA, 15 bp, Homo sapiens
tccaagcccgttcct

SEQ ID NO: 32995 - DNA, 15 bp, Homo sapiens
ttccaagcccgttcc

SEQ ID NO: 32996 - DNA, 15 bp, Homo sapiens
cttccaagcccgttc

SEQ ID NO: 32997 - DNA, 15 bp, Homo sapiens
tcttccaagcccgtt

SEQ ID NO: 32998 - DNA, 15 bp, Homo sapiens
ttcttccaagcccgt

SEQ ID NO: 32999 - DNA, 15 bp, Homo sapiens
tttcttccaagcccg

SEQ ID NO: 33000 - DNA, 15 bp, Homo sapiens
ttttcttccaagccc

SEQ ID NO: 33001 - DNA, 15 bp, Homo sapiens
attttcttccaagcc

SEQ ID NO: 33002 - DNA, 15 bp, Homo sapiens
tattttcttccaagc

SEQ ID NO: 33003 - DNA, 15 bp, Homo sapiens
ttattttcttccaag

SEQ ID NO: 33004 - DNA, 15 bp, Homo sapiens
attattttcttccaa

SEQ ID NO: 33005 - DNA, 15 bp, Homo sapiens
gattattttcttcca

SEQ ID NO: 33006 - DNA, 15 bp, Homo sapiens
tgattattttcttcc

SEQ ID NO: 33007 - DNA, 15 bp, Homo sapiens
ttgattattttcttc

SEQ ID NO: 33008 - DNA, 15 bp, Homo sapiens
cttgattattttctt

SEQ ID NO: 33009 - DNA, 15 bp, Homo sapiens
tcttgattattttct

SEQ ID NO: 33010 - DNA, 15 bp, Homo sapiens
ttcttgattattttc

SEQ ID NO: 33011 - DNA, 15 bp, Homo sapiens
cttcttgattatttt

SEQ ID NO: 33012 - DNA, 15 bp, Homo sapiens
tcttcttgattattt

SEQ ID NO: 33013 - DNA, 15 bp, Homo sapiens
ctcttcttgattatt

SEQ ID NO: 33014 - DNA, 15 bp, Homo sapiens
gctcttcttgattat

SEQ ID NO: 33015 - DNA, 15 bp, Homo sapiens
tgctcttcttgatta

SEQ ID NO: 33016 - DNA, 15 bp, Homo sapiens
ttgctcttcttgatt

SEQ ID NO: 33017 - DNA, 15 bp, Homo sapiens
tttgctcttcttgat

SEQ ID NO: 33018 - DNA, 15 bp, Homo sapiens
ctttgctcttcttga

SEQ ID NO: 33019 - DNA, 15 bp, Homo sapiens
gctttgctcttcttg

SEQ ID NO: 33020 - DNA, 15 bp, Homo sapiens
tgctttgctcttctt

SEQ ID NO: 33021 - DNA, 15 bp, Homo sapiens
atgctttgctcttct

SEQ ID NO: 33022 - DNA, 15 bp, Homo sapiens
catgctttgctcttc

SEQ ID NO: 33023 - DNA, 15 bp, Homo sapiens
ccatgctttgctctt

SEQ ID NO: 33024 - DNA, 15 bp, Homo sapiens
tccatgctttgctct

SEQ ID NO: 33025 - DNA, 15 bp, Homo sapiens
atccatgctttgctc

SEQ ID NO: 33026 - DNA, 15 bp, Homo sapiens
aatccatgctttgct

SEQ ID NO: 33027 - DNA, 15 bp, Homo sapiens
gaatccatgctttgc

SEQ ID NO: 33028 - DNA, 15 bp, Homo sapiens
tgaatccatgctttg

SEQ ID NO: 33029 - DNA, 15 bp, Homo sapiens
ttgaatccatgcttt

SEQ ID NO: 33030 - DNA, 15 bp, Homo sapiens
tttgaatccatgctt

SEQ ID NO: 33031 - DNA, 15 bp, Homo sapiens
gtttgaatccatgct

SEQ ID NO: 33032 - DNA, 15 bp, Homo sapiens
agtttgaatccatgc

SEQ ID NO: 33033 - DNA, 15 bp, Homo sapiens
aagtttgaatccatg

SEQ ID NO: 33034 - DNA, 15 bp, Homo sapiens
taagtttgaatccat

SEQ ID NO: 33035 - DNA, 15 bp, Homo sapiens
ctaagtttgaatcca

SEQ ID NO: 33036 - DNA, 15 bp, Homo sapiens
cctaagtttgaatcc

SEQ ID NO: 33037 - DNA, 15 bp, Homo sapiens
acctaagtttgaatc

SEQ ID NO: 33038 - DNA, 15 bp, Homo sapiens
tacctaagtttgaat

SEQ ID NO: 33039 - DNA, 15 bp, Homo sapiens
atacctaagtttgaa

SEQ ID NO: 33040 - DNA, 15 bp, Homo sapiens
aatacctaagtttga

SEQ ID NO: 33041 - DNA, 15 bp, Homo sapiens
caatacctaagtttg

SEQ ID NO: 33042 - DNA, 15 bp, Homo sapiens
ccaatacctaagttt

SEQ ID NO: 33043 - DNA, 15 bp, Homo sapiens
tccaatacctaagtt

SEQ ID NO: 33044 - DNA, 15 bp, Homo sapiens
ttccaatacctaagt

SEQ ID NO: 33045 - DNA, 15 bp, Homo sapiens
gttccaatacctaag

SEQ ID NO: 33046 - DNA, 15 bp, Homo sapiens
ggttccaatacctaa

SEQ ID NO: 33047 - DNA, 15 bp, Homo sapiens
tggttccaataccta

SEQ ID NO: 33048 - DNA, 15 bp, Homo sapiens
ctggttccaatacct

SEQ ID NO: 33049 - DNA, 15 bp, Homo sapiens
cctggttccaatacc

SEQ ID NO: 33050 - DNA, 15 bp, Homo sapiens
acctggttccaatac

SEQ ID NO: 33051 - DNA, 15 bp, Homo sapiens
aacctggttccaata

SEQ ID NO: 33052 - DNA, 15 bp, Homo sapiens
aaacctggttccaat

SEQ ID NO: 33053 - DNA, 15 bp, Homo sapiens
aaaacctggttccaa

SEQ ID NO: 33054 - DNA, 15 bp, Homo sapiens
aaaaacctggttcca

SEQ ID NO: 33055 - DNA, 15 bp, Homo sapiens
caaaaacctggttcc

SEQ ID NO: 33056 - DNA, 15 bp, Homo sapiens
acaaaaacctggttc

SEQ ID NO: 33057 - DNA, 15 bp, Homo sapiens
cacaaaaacctggtt

SEQ ID NO: 33058 - DNA, 15 bp, Homo sapiens
acacaaaaacctggt

SEQ ID NO: 33059 - DNA, 15 bp, Homo sapiens
aacacaaaaacctgg

SEQ ID NO: 33060 - DNA, 15 bp, Homo sapiens
aaacacaaaaacctg

SEQ ID NO: 33061 - DNA, 15 bp, Homo sapiens
caaacacaaaaacct

SEQ ID NO: 33062 - DNA, 15 bp, Homo sapiens
gcaaacacaaaaacc

SEQ ID NO: 33063 - DNA, 15 bp, Homo sapiens
ggcaaacacaaaaac

SEQ ID NO: 33064 - DNA, 15 bp, Homo sapiens
gggcaaacacaaaaa

SEQ ID NO: 33065 - DNA, 15 bp, Homo sapiens
ggggcaaacacaaaa

SEQ ID NO: 33066 - DNA, 15 bp, Homo sapiens
tggggcaaacacaaa

SEQ ID NO: 33067 - DNA, 15 bp, Homo sapiens
ctggggcaaacacaa

SEQ ID NO: 33068 - DNA, 15 bp, Homo sapiens
actggggcaaacaca

SEQ ID NO: 33069 - DNA, 15 bp, Homo sapiens
gactggggcaaacac

SEQ ID NO: 33070 - DNA, 15 bp, Homo sapiens
agactggggcaaaca

SEQ ID NO: 33071 - DNA, 15 bp, Homo sapiens
tagactggggcaaac

SEQ ID NO: 33072 - DNA, 15 bp, Homo sapiens
atagactggggcaaa

SEQ ID NO: 33073 - DNA, 15 bp, Homo sapiens
aatagactggggcaa

SEQ ID NO: 33074 - DNA, 15 bp, Homo sapiens
aaatagactggggca

SEQ ID NO: 33075 - DNA, 15 bp, Homo sapiens
taaatagactggggc

SEQ ID NO: 33076 - DNA, 15 bp, Homo sapiens
ataaatagactgggg

SEQ ID NO: 33077 - DNA, 15 bp, Homo sapiens
tataaatagactggg

SEQ ID NO: 33078 - DNA, 15 bp, Homo sapiens
ctataaatagactgg

SEQ ID NO: 33079 - DNA, 15 bp, Homo sapiens
tctataaatagactg

SEQ ID NO: 33080 - DNA, 15 bp, Homo sapiens
ttctataaatagact

SEQ ID NO: 33081 - DNA, 15 bp, Homo sapiens
cttctataaatagac

SEQ ID NO: 33082 - DNA, 15 bp, Homo sapiens
acttctataaataga

SEQ ID NO: 33083 - DNA, 15 bp, Homo sapiens
cacttctataaatag

SEQ ID NO: 33084 - DNA, 15 bp, Homo sapiens
tcacttctataaata

SEQ ID NO: 33085 - DNA, 15 bp, Homo sapiens
ctcacttctataaat

SEQ ID NO: 33086 - DNA, 15 bp, Homo sapiens
gctcacttctataaa

SEQ ID NO: 33087 - DNA, 15 bp, Homo sapiens
agctcacttctataa

SEQ ID NO: 33088 - DNA, 15 bp, Homo sapiens
tagctcacttctata

SEQ ID NO: 33089 - DNA, 15 bp, Homo sapiens
ttagctcacttctat

SEQ ID NO: 33090 - DNA, 15 bp, Homo sapiens
tttagctcacttcta

SEQ ID NO: 33091 - DNA, 15 bp, Homo sapiens
atttagctcacttct

SEQ ID NO: 33092 - DNA, 15 bp, Homo sapiens
catttagctcacttc

SEQ ID NO: 33093 - DNA, 15 bp, Homo sapiens
acatttagctcactt

SEQ ID NO: 33094 - DNA, 15 bp, Homo sapiens
aacatttagctcact

SEQ ID NO: 33095 - DNA, 15 bp, Homo sapiens
aaacatttagctcac

SEQ ID NO: 33096 - DNA, 15 bp, Homo sapiens
taaacatttagctca

SEQ ID NO: 33097 - DNA, 15 bp, Homo sapiens
ataaacatttagctc

SEQ ID NO: 33098 - DNA, 15 bp, Homo sapiens
cataaacatttagct

SEQ ID NO: 33099 - DNA, 15 bp, Homo sapiens
gcataaacatttagc

SEQ ID NO: 33100 - DNA, 15 bp, Homo sapiens
agcataaacatttag

SEQ ID NO: 33101 - DNA, 15 bp, Homo sapiens
aagcataaacattta

SEQ ID NO: 33102 - DNA, 15 bp, Homo sapiens
aaagcataaacattt

SEQ ID NO: 33103 - DNA, 15 bp, Homo sapiens
aaaagcataaacatt

SEQ ID NO: 33104 - DNA, 15 bp, Homo sapiens
caaaagcataaacat

SEQ ID NO: 33105 - DNA, 15 bp, Homo sapiens
ccaaaagcataaaca

SEQ ID NO: 33106 - DNA, 15 bp, Homo sapiens
cccaaaagcataaac

SEQ ID NO: 33107 - DNA, 15 bp, Homo sapiens
ccccaaaagcataaa

SEQ ID NO: 33108 - DNA, 15 bp, Homo sapiens
tccccaaaagcataa

SEQ ID NO: 33109 - DNA, 15 bp, Homo sapiens
ctccccaaaagcata

SEQ ID NO: 33110 - DNA, 15 bp, Homo sapiens
gctccccaaaagcat

SEQ ID NO: 33111 - DNA, 15 bp, Homo sapiens
tgctccccaaaagca

SEQ ID NO: 33112 - DNA, 15 bp, Homo sapiens
gtgctccccaaaagc

SEQ ID NO: 33113 - DNA, 15 bp, Homo sapiens
tgtgctccccaaaag

SEQ ID NO: 33114 - DNA, 15 bp, Homo sapiens
atgtgctccccaaaa

SEQ ID NO: 33115 - DNA, 15 bp, Homo sapiens
aatgtgctccccaaa

SEQ ID NO: 33116 - DNA, 15 bp, Homo sapiens
aaatgtgctccccaa

SEQ ID NO: 33117 - DNA, 15 bp, Homo sapiens
aaaatgtgctcccca

SEQ ID NO: 33118 - DNA, 15 bp, Homo sapiens
taaaatgtgctcccc

SEQ ID NO: 33119 - DNA, 15 bp, Homo sapiens
gtaaaatgtgctccc

SEQ ID NO: 33120 - DNA, 15 bp, Homo sapiens
tgtaaaatgtgctcc

SEQ ID NO: 33121 - DNA, 15 bp, Homo sapiens
ttgtaaaatgtgctc

SEQ ID NO: 33122 - DNA, 15 bp, Homo sapiens
tttgtaaaatgtgct

SEQ ID NO: 33123 - DNA, 15 bp, Homo sapiens
atttgtaaaatgtgc

SEQ ID NO: 33124 - DNA, 15 bp, Homo sapiens
aatttgtaaaatgtg

SEQ ID NO: 33125 - DNA, 15 bp, Homo sapiens
aaatttgtaaaatgt

SEQ ID NO: 33126 - DNA, 15 bp, Homo sapiens
gaaatttgtaaaatg

SEQ ID NO: 33127 - DNA, 15 bp, Homo sapiens
ggaaatttgtaaaat

SEQ ID NO: 33128 - DNA, 15 bp, Homo sapiens
tggaaatttgtaaaa

SEQ ID NO: 33129 - DNA, 15 bp, Homo sapiens
ttggaaatttgtaaa

SEQ ID NO: 33130 - DNA, 15 bp, Homo sapiens
cttggaaatttgtaa

SEQ ID NO: 33131 - DNA, 15 bp, Homo sapiens
acttggaaatttgta

SEQ ID NO: 33132 - DNA, 15 bp, Homo sapiens
tacttggaaatttgt

SEQ ID NO: 33133 - DNA, 15 bp, Homo sapiens
atacttggaaatttg

SEQ ID NO: 33134 - DNA, 15 bp, Homo sapiens
tatacttggaaattt

SEQ ID NO: 33135 - DNA, 15 bp, Homo sapiens
ctatacttggaaatt

SEQ ID NO: 33136 - DNA, 15 bp, Homo sapiens
actatacttggaaat

SEQ ID NO: 33137 - DNA, 15 bp, Homo sapiens
aactatacttggaaa

SEQ ID NO: 33138 - DNA, 15 bp, Homo sapiens
taactatacttggaa

SEQ ID NO: 33139 - DNA, 15 bp, Homo sapiens
ttaactatacttgga

SEQ ID NO: 33140 - DNA, 15 bp, Homo sapiens
tttaactatacttgg

SEQ ID NO: 33141 - DNA, 15 bp, Homo sapiens
ctttaactatacttg

SEQ ID NO: 33142 - DNA, 15 bp, Homo sapiens
cctttaactatactt

SEQ ID NO: 33143 - DNA, 15 bp, Homo sapiens
tcctttaactatact

SEQ ID NO: 33144 - DNA, 15 bp, Homo sapiens
ttcctttaactatac

SEQ ID NO: 33145 - DNA, 15 bp, Homo sapiens
gttcctttaactata

SEQ ID NO: 33146 - DNA, 15 bp, Homo sapiens
agttcctttaactat

SEQ ID NO: 33147 - DNA, 15 bp, Homo sapiens
cagttcctttaacta

SEQ ID NO: 33148 - DNA, 15 bp, Homo sapiens
gcagttcctttaact

SEQ ID NO: 33149 - DNA, 15 bp, Homo sapiens
agcagttcctttaac

SEQ ID NO: 33150 - DNA, 15 bp, Homo sapiens
aagcagttcctttaa

SEQ ID NO: 33151 - DNA, 15 bp, Homo sapiens
gaagcagttccttta

SEQ ID NO: 33152 - DNA, 15 bp, Homo sapiens
agaagcagttccttt

SEQ ID NO: 33153 - DNA, 15 bp, Homo sapiens
aagaagcagttcctt

SEQ ID NO: 33154 - DNA, 15 bp, Homo sapiens
taagaagcagttcct

SEQ ID NO: 33155 - DNA, 15 bp, Homo sapiens
ttaagaagcagttcc

SEQ ID NO: 33156 - DNA, 15 bp, Homo sapiens
tttaagaagcagttc

SEQ ID NO: 33157 - DNA, 15 bp, Homo sapiens
gtttaagaagcagtt

SEQ ID NO: 33158 - DNA, 15 bp, Homo sapiens
agtttaagaagcagt

SEQ ID NO: 33159 - DNA, 15 bp, Homo sapiens
aagtttaagaagcag

SEQ ID NO: 33160 - DNA, 15 bp, Homo sapiens
caagtttaagaagca

SEQ ID NO: 33161 - DNA, 15 bp, Homo sapiens
tcaagtttaagaagc

SEQ ID NO: 33162 - DNA, 15 bp, Homo sapiens
ttcaagtttaagaag

SEQ ID NO: 33163 - DNA, 15 bp, Homo sapiens
tttcaagtttaagaa

SEQ ID NO: 33164 - DNA, 15 bp, Homo sapiens
gtttcaagtttaaga

SEQ ID NO: 33165 - DNA, 15 bp, Homo sapiens
tgtttcaagtttaag

SEQ ID NO: 33166 - DNA, 15 bp, Homo sapiens
atgtttcaagtttaa

SEQ ID NO: 33167 - DNA, 15 bp, Homo sapiens
catgtttcaagttta

SEQ ID NO: 33168 - DNA, 15 bp, Homo sapiens
acatgtttcaagttt

SEQ ID NO: 33169 - DNA, 15 bp, Homo sapiens
aacatgtttcaagtt

SEQ ID NO: 33170 - DNA, 15 bp, Homo sapiens
gaacatgtttcaagt

SEQ ID NO: 33171 - DNA, 15 bp, Homo sapiens
ggaacatgtttcaag

SEQ ID NO: 33172 - DNA, 15 bp, Homo sapiens
aggaacatgtttcaa

SEQ ID NO: 33173 - DNA, 15 bp, Homo sapiens
gaggaacatgtttca

SEQ ID NO: 33174 - DNA, 15 bp, Homo sapiens
ggaggaacatgtttc

SEQ ID NO: 33175 - DNA, 15 bp, Homo sapiens
aggaggaacatgttt

SEQ ID NO: 33176 - DNA, 15 bp, Homo sapiens
taggaggaacatgtt

SEQ ID NO: 33177 - DNA, 15 bp, Homo sapiens
ttaggaggaacatgt

SEQ ID NO: 33178 - DNA, 15 bp, Homo sapiens
cttaggaggaacatg

SEQ ID NO: 33179 - DNA, 15 bp, Homo sapiens
ccttaggaggaacat

SEQ ID NO: 33180 - DNA, 15 bp, Homo sapiens
accttaggaggaaca

SEQ ID NO: 33181 - DNA, 15 bp, Homo sapiens
caccttaggaggaac

SEQ ID NO: 33182 - DNA, 15 bp, Homo sapiens
gcaccttaggaggaa

SEQ ID NO: 33183 - DNA, 15 bp, Homo sapiens
agcaccttaggagga

SEQ ID NO: 33184 - DNA, 15 bp, Homo sapiens
aagcaccttaggagg

SEQ ID NO: 33185 - DNA, 15 bp, Homo sapiens
aaagcaccttaggag

SEQ ID NO: 33186 - DNA, 15 bp, Homo sapiens
aaaagcaccttagga

SEQ ID NO: 33187 - DNA, 15 bp, Homo sapiens
gaaaagcaccttagg

SEQ ID NO: 33188 - DNA, 15 bp, Homo sapiens
tgaaaagcaccttag

SEQ ID NO: 33189 - DNA, 15 bp, Homo sapiens
atgaaaagcacctta

SEQ ID NO: 33190 - DNA, 15 bp, Homo sapiens
tatgaaaagcacctt

SEQ ID NO: 33191 - DNA, 15 bp, Homo sapiens
ctatgaaaagcacct

SEQ ID NO: 33192 - DNA, 15 bp, Homo sapiens
tctatgaaaagcacc

SEQ ID NO: 33193 - DNA, 15 bp, Homo sapiens
ttctatgaaaagcac

SEQ ID NO: 33194 - DNA, 15 bp, Homo sapiens
tttctatgaaaagca

SEQ ID NO: 33195 - DNA, 15 bp, Homo sapiens
ttttctatgaaaagc

SEQ ID NO: 33196 - DNA, 15 bp, Homo sapiens
tttttctatgaaaag

SEQ ID NO: 33197 - DNA, 15 bp, Homo sapiens
ttttttctatgaaaa

SEQ ID NO: 33198 - DNA, 15 bp, Homo sapiens
cttttttctatgaaa

SEQ ID NO: 33199 - DNA, 15 bp, Homo sapiens
acttttttctatgaa

SEQ ID NO: 33200 - DNA, 15 bp, Homo sapiens
gacttttttctatga

SEQ ID NO: 33201 - DNA, 15 bp, Homo sapiens
ggacttttttctatg

SEQ ID NO: 33202 - DNA, 15 bp, Homo sapiens
aggacttttttctat

SEQ ID NO: 33203 - DNA, 15 bp, Homo sapiens
aaggacttttttcta

SEQ ID NO: 33204 - DNA, 15 bp, Homo sapiens
gaaggacttttttct

SEQ ID NO: 33205 - DNA, 15 bp, Homo sapiens
tgaaggacttttttc

SEQ ID NO: 33206 - DNA, 15 bp, Homo sapiens
gtgaaggactttttt

SEQ ID NO: 33207 - DNA, 15 bp, Homo sapiens
tgtgaaggacttttt

SEQ ID NO: 33208 - DNA, 15 bp, Homo sapiens
gtgtgaaggactttt

SEQ ID NO: 33209 - DNA, 15 bp, Homo sapiens
tgtgtgaaggacttt

SEQ ID NO: 33210 - DNA, 15 bp, Homo sapiens
ctgtgtgaaggactt

SEQ ID NO: 33211 - DNA, 15 bp, Homo sapiens
gctgtgtgaaggact

SEQ ID NO: 33212 - DNA, 15 bp, Homo sapiens
agctgtgtgaaggac

SEQ ID NO: 33213 - DNA, 15 bp, Homo sapiens
tagctgtgtgaagga

SEQ ID NO: 33214 - DNA, 15 bp, Homo sapiens
ctagctgtgtgaagg

SEQ ID NO: 33215 - DNA, 15 bp, Homo sapiens
cctagctgtgtgaag

SEQ ID NO: 33216 - DNA, 15 bp, Homo sapiens
tcctagctgtgtgaa

SEQ ID NO: 33217 - DNA, 15 bp, Homo sapiens
gtcctagctgtgtga

SEQ ID NO: 33218 - DNA, 15 bp, Homo sapiens
cgtcctagctgtgtg

SEQ ID NO: 33219 - DNA, 15 bp, Homo sapiens
acgtcctagctgtgt

SEQ ID NO: 33220 - DNA, 15 bp, Homo sapiens
gacgtcctagctgtg

SEQ ID NO: 33221 - DNA, 15 bp, Homo sapiens
tgacgtcctagctgt

SEQ ID NO: 33222 - DNA, 15 bp, Homo sapiens
atgacgtcctagctg

SEQ ID NO: 33223 - DNA, 15 bp, Homo sapiens
gatgacgtcctagct

SEQ ID NO: 33224 - DNA, 15 bp, Homo sapiens
agatgacgtcctagc

SEQ ID NO: 33225 - DNA, 15 bp, Homo sapiens
aagatgacgtcctag

SEQ ID NO: 33226 - DNA, 15 bp, Homo sapiens
aaagatgacgtccta

SEQ ID NO: 33227 - DNA, 15 bp, Homo sapiens
caaagatgacgtcct

SEQ ID NO: 33228 - DNA, 15 bp, Homo sapiens
tcaaagatgacgtcc

SEQ ID NO: 33229 - DNA, 15 bp, Homo sapiens
gtcaaagatgacgtc

SEQ ID NO: 33230 - DNA, 15 bp, Homo sapiens
agtcaaagatgacgt

SEQ ID NO: 33231 - DNA, 15 bp, Homo sapiens
cagtcaaagatgacg

SEQ ID NO: 33232 - DNA, 15 bp, Homo sapiens
tcagtcaaagatgac

SEQ ID NO: 33233 - DNA, 15 bp, Homo sapiens
ttcagtcaaagatga

SEQ ID NO: 33234 - DNA, 15 bp, Homo sapiens
attcagtcaaagatg

SEQ ID NO: 33235 - DNA, 15 bp, Homo sapiens
cattcagtcaaagat

SEQ ID NO: 33236 - DNA, 15 bp, Homo sapiens
tcattcagtcaaaga

SEQ ID NO: 33237 - DNA, 15 bp, Homo sapiens
ctcattcagtcaaag

SEQ ID NO: 33238 - DNA, 15 bp, Homo sapiens
gctcattcagtcaaa

SEQ ID NO: 33239 - DNA, 15 bp, Homo sapiens
agctcattcagtcaa

SEQ ID NO: 33240 - DNA, 15 bp, Homo sapiens
aagctcattcagtca

SEQ ID NO: 33241 - DNA, 15 bp, Homo sapiens
aaagctcattcagtc

SEQ ID NO: 33242 - DNA, 15 bp, Homo sapiens
taaagctcattcagt

SEQ ID NO: 33243 - DNA, 15 bp, Homo sapiens
ttaaagctcattcag

SEQ ID NO: 33244 - DNA, 15 bp, Homo sapiens
gttaaagctcattca

SEQ ID NO: 33245 - DNA, 15 bp, Homo sapiens
tgttaaagctcattc

SEQ ID NO: 33246 - DNA, 15 bp, Homo sapiens
atgttaaagctcatt

SEQ ID NO: 33247 - DNA, 15 bp, Homo sapiens
gatgttaaagctcat

SEQ ID NO: 33248 - DNA, 15 bp, Homo sapiens
ggatgttaaagctca

SEQ ID NO: 33249 - DNA, 15 bp, Homo sapiens
aggatgttaaagctc

SEQ ID NO: 33250 - DNA, 15 bp, Homo sapiens
taggatgttaaagct

SEQ ID NO: 33251 - DNA, 15 bp, Homo sapiens
ttaggatgttaaagc

SEQ ID NO: 33252 - DNA, 15 bp, Homo sapiens
attaggatgttaaag

SEQ ID NO: 33253 - DNA, 15 bp, Homo sapiens
aattaggatgttaaa

SEQ ID NO: 33254 - DNA, 15 bp, Homo sapiens
taattaggatgttaa

SEQ ID NO: 33255 - DNA, 15 bp, Homo sapiens
gtaattaggatgtta

SEQ ID NO: 33256 - DNA, 15 bp, Homo sapiens
agtaattaggatgtt

SEQ ID NO: 33257 - DNA, 15 bp, Homo sapiens
cagtaattaggatgt

SEQ ID NO: 33258 - DNA, 15 bp, Homo sapiens
ccagtaattaggatg

SEQ ID NO: 33259 - DNA, 15 bp, Homo sapiens
accagtaattaggat

SEQ ID NO: 33260 - DNA, 15 bp, Homo sapiens
caccagtaattagga

SEQ ID NO: 33261 - DNA, 15 bp, Homo sapiens
ccaccagtaattagg

SEQ ID NO: 33262 - DNA, 15 bp, Homo sapiens
tccaccagtaattag

SEQ ID NO: 33263 - DNA, 15 bp, Homo sapiens
gtccaccagtaatta

SEQ ID NO: 33264 - DNA, 15 bp, Homo sapiens
agtccaccagtaatt

SEQ ID NO: 33265 - DNA, 15 bp, Homo sapiens
aagtccaccagtaat

SEQ ID NO: 33266 - DNA, 15 bp, Homo sapiens
taagtccaccagtaa

SEQ ID NO: 33267 - DNA, 15 bp, Homo sapiens
gtaagtccaccagta

SEQ ID NO: 33268 - DNA, 15 bp, Homo sapiens
agtaagtccaccagt

SEQ ID NO: 33269 - DNA, 15 bp, Homo sapiens
aagtaagtccaccag

SEQ ID NO: 33270 - DNA, 15 bp, Homo sapiens
gaagtaagtccacca

SEQ ID NO: 33271 - DNA, 15 bp, Homo sapiens
agaagtaagtccacc

SEQ ID NO: 33272 - DNA, 15 bp, Homo sapiens
cagaagtaagtccac

SEQ ID NO: 33273 - DNA, 15 bp, Homo sapiens
ccagaagtaagtcca

SEQ ID NO: 33274 - DNA, 15 bp, Homo sapiens
accagaagtaagtcc

SEQ ID NO: 33275 - DNA, 15 bp, Homo sapiens
aaccagaagtaagtc

SEQ ID NO: 33276 - DNA, 15 bp, Homo sapiens
aaaccagaagtaagt

SEQ ID NO: 33277 - DNA, 15 bp, Homo sapiens
gaaaccagaagtaag

SEQ ID NO: 33278 - DNA, 15 bp, Homo sapiens
tgaaaccagaagtaa

SEQ ID NO: 33279 - DNA, 15 bp, Homo sapiens
atgaaaccagaagta

SEQ ID NO: 33280 - DNA, 15 bp, Homo sapiens
aatgaaaccagaagt

SEQ ID NO: 33281 - DNA, 15 bp, Homo sapiens
aaatgaaaccagaag

SEQ ID NO: 33282 - DNA, 15 bp, Homo sapiens
aaaatgaaaccagaa

SEQ ID NO: 33283 - DNA, 15 bp, Homo sapiens
taaaatgaaaccaga

SEQ ID NO: 33284 - DNA, 15 bp, Homo sapiens
ataaaatgaaaccag

SEQ ID NO: 33285 - DNA, 15 bp, Homo sapiens
tataaaatgaaacca

SEQ ID NO: 33286 - DNA, 15 bp, Homo sapiens
ttataaaatgaaacc

SEQ ID NO: 33287 - DNA, 15 bp, Homo sapiens
tttataaaatgaaac

SEQ ID NO: 33288 - DNA, 15 bp, Homo sapiens
ttttataaaatgaaa

SEQ ID NO: 33289 - DNA, 15 bp, Homo sapiens
cttttataaaatgaa

SEQ ID NO: 33290 - DNA, 15 bp, Homo sapiens
gcttttataaaatga

SEQ ID NO: 33291 - DNA, 15 bp, Homo sapiens
tgcttttataaaatg

SEQ ID NO: 33292 - DNA, 15 bp, Homo sapiens
ttgcttttataaaat

SEQ ID NO: 33293 - DNA, 15 bp, Homo sapiens
tttgcttttataaaa

SEQ ID NO: 33294 - DNA, 15 bp, Homo sapiens
atttgcttttataaa

SEQ ID NO: 33295 - DNA, 15 bp, Homo sapiens
gatttgcttttataa

SEQ ID NO: 33296 - DNA, 15 bp, Homo sapiens
ggatttgcttttata

SEQ ID NO: 33297 - DNA, 15 bp, Homo sapiens
tggatttgcttttat

SEQ ID NO: 33298 - DNA, 15 bp, Homo sapiens
ctggatttgctttta

SEQ ID NO: 33299 - DNA, 15 bp, Homo sapiens
cctggatttgctttt

SEQ ID NO: 33300 - DNA, 15 bp, Homo sapiens
acctggatttgcttt

SEQ ID NO: 33301 - DNA, 15 bp, Homo sapiens
cacctggatttgctt

SEQ ID NO: 33302 - DNA, 15 bp, Homo sapiens
acacctggatttgct

SEQ ID NO: 33303 - DNA, 15 bp, Homo sapiens
gacacctggatttgc

SEQ ID NO: 33304 - DNA, 15 bp, Homo sapiens
ggacacctggatttg

SEQ ID NO: 33305 - DNA, 15 bp, Homo sapiens
gggacacctggattt

SEQ ID NO: 33306 - DNA, 15 bp, Homo sapiens
tgggacacctggatt

SEQ ID NO: 33307 - DNA, 15 bp, Homo sapiens
ttgggacacctggat

SEQ ID NO: 33308 - DNA, 15 bp, Homo sapiens
tttgggacacctgga

SEQ ID NO: 33309 - DNA, 15 bp, Homo sapiens
ctttgggacacctgg

SEQ ID NO: 33310 - DNA, 15 bp, Homo sapiens
gctttgggacacctg

SEQ ID NO: 33311 - DNA, 15 bp, Homo sapiens
tgctttgggacacct

SEQ ID NO: 33312 - DNA, 15 bp, Homo sapiens
ttgctttgggacacc

SEQ ID NO: 33313 - DNA, 15 bp, Homo sapiens
cttgctttgggacac

SEQ ID NO: 33314 - DNA, 15 bp, Homo sapiens
ccttgctttgggaca

SEQ ID NO: 33315 - DNA, 15 bp, Homo sapiens
tccttgctttgggac

SEQ ID NO: 33316 - DNA, 15 bp, Homo sapiens
ttccttgctttggga

SEQ ID NO: 33317 - DNA, 15 bp, Homo sapiens
attccttgctttggg

SEQ ID NO: 33318 - DNA, 15 bp, Homo sapiens
aattccttgctttgg

SEQ ID NO: 33319 - DNA, 15 bp, Homo sapiens
aaattccttgctttg

SEQ ID NO: 33320 - DNA, 15 bp, Homo sapiens
taaattccttgcttt

SEQ ID NO: 33321 - DNA, 15 bp, Homo sapiens
ttaaattccttgctt

SEQ ID NO: 33322 - DNA, 15 bp, Homo sapiens
attaaattccttgct

SEQ ID NO: 33323 - DNA, 15 bp, Homo sapiens
gattaaattccttgc

SEQ ID NO: 33324 - DNA, 15 bp, Homo sapiens
tgattaaattccttg

SEQ ID NO: 33325 - DNA, 15 bp, Homo sapiens
atgattaaattcctt

SEQ ID NO: 33326 - DNA, 15 bp, Homo sapiens
aatgattaaattcct

SEQ ID NO: 33327 - DNA, 15 bp, Homo sapiens
aaatgattaaattcc

SEQ ID NO: 33328 - DNA, 15 bp, Homo sapiens
aaaatgattaaattc

SEQ ID NO: 33329 - DNA, 15 bp, Homo sapiens
caaaatgattaaatt

SEQ ID NO: 33330 - DNA, 15 bp, Homo sapiens
acaaaatgattaaat

SEQ ID NO: 33331 - DNA, 15 bp, Homo sapiens
cacaaaatgattaaa

SEQ ID NO: 33332 - DNA, 15 bp, Homo sapiens
acacaaaatgattaa

SEQ ID NO: 33333 - DNA, 15 bp, Homo sapiens
cacacaaaatgatta

SEQ ID NO: 33334 - DNA, 15 bp, Homo sapiens
tcacacaaaatgatt

SEQ ID NO: 33335 - DNA, 15 bp, Homo sapiens
gtcacacaaaatgat

SEQ ID NO: 33336 - DNA, 15 bp, Homo sapiens
tgtcacacaaaatga

SEQ ID NO: 33337 - DNA, 15 bp, Homo sapiens
atgtcacacaaaatg

SEQ ID NO: 33338 - DNA, 15 bp, Homo sapiens
catgtcacacaaaat

SEQ ID NO: 33339 - DNA, 15 bp, Homo sapiens
tcatgtcacacaaaa

SEQ ID NO: 33340 - DNA, 15 bp, Homo sapiens
ttcatgtcacacaaa

SEQ ID NO: 33341 - DNA, 15 bp, Homo sapiens
tttcatgtcacacaa

SEQ ID NO: 33342 - DNA, 15 bp, Homo sapiens
ctttcatgtcacaca

SEQ ID NO: 33343 - DNA, 15 bp, Homo sapiens
actttcatgtcacac

SEQ ID NO: 33344 - DNA, 15 bp, Homo sapiens
tactttcatgtcaca

SEQ ID NO: 33345 - DNA, 15 bp, Homo sapiens
ttactttcatgtcac

SEQ ID NO: 33346 - DNA, 15 bp, Homo sapiens
tttactttcatgtca

SEQ ID NO: 33347 - DNA, 15 bp, Homo sapiens
atttactttcatgtc

SEQ ID NO: 33348 - DNA, 15 bp, Homo sapiens
gatttactttcatgt

SEQ ID NO: 33349 - DNA, 15 bp, Homo sapiens
ggatttactttcatg

SEQ ID NO: 33350 - DNA, 15 bp, Homo sapiens
tggatttactttcat

SEQ ID NO: 33351 - DNA, 15 bp, Homo sapiens
ctggatttactttca

SEQ ID NO: 33352 - DNA, 15 bp, Homo sapiens
actggatttactttc

SEQ ID NO: 33353 - DNA, 15 bp, Homo sapiens
gactggatttacttt

SEQ ID NO: 33354 - DNA, 15 bp, Homo sapiens
ggactggatttactt

SEQ ID NO: 33355 - DNA, 15 bp, Homo sapiens
aggactggatttact

SEQ ID NO: 33356 - DNA, 15 bp, Homo sapiens
caggactggatttac

SEQ ID NO: 33357 - DNA, 15 bp, Homo sapiens
gcaggactggattta

SEQ ID NO: 33358 - DNA, 15 bp, Homo sapiens
ggcaggactggattt

SEQ ID NO: 33359 - DNA, 15 bp, Homo sapiens
tggcaggactggatt

SEQ ID NO: 33360 - DNA, 15 bp, Homo sapiens
ttggcaggactggat

SEQ ID NO: 33361 - DNA, 15 bp, Homo sapiens
attggcaggactgga

SEQ ID NO: 33362 - DNA, 15 bp, Homo sapiens
cattggcaggactgg

SEQ ID NO: 33363 - DNA, 15 bp, Homo sapiens
tcattggcaggactg

SEQ ID NO: 33364 - DNA, 15 bp, Homo sapiens
ctcattggcaggact

SEQ ID NO: 33365 - DNA, 15 bp, Homo sapiens
tctcattggcaggac

SEQ ID NO: 33366 - DNA, 15 bp, Homo sapiens
ttctcattggcagga

SEQ ID NO: 33367 - DNA, 15 bp, Homo sapiens
cttctcattggcagg

SEQ ID NO: 33368 - DNA, 15 bp, Homo sapiens
tcttctcattggcag

SEQ ID NO: 33369 - DNA, 15 bp, Homo sapiens
ttcttctcattggca

SEQ ID NO: 33370 - DNA, 15 bp, Homo sapiens
tttcttctcattggc

SEQ ID NO: 33371 - DNA, 15 bp, Homo sapiens
ttttcttctcattgg

SEQ ID NO: 33372 - DNA, 15 bp, Homo sapiens
tttttcttctcattg

SEQ ID NO: 33373 - DNA, 15 bp, Homo sapiens
ctttttcttctcatt

SEQ ID NO: 33374 - DNA, 15 bp, Homo sapiens
tctttttcttctcat

SEQ ID NO: 33375 - DNA, 15 bp, Homo sapiens
gtctttttcttctca

SEQ ID NO: 33376 - DNA, 15 bp, Homo sapiens
tgtctttttcttctc

SEQ ID NO: 33377 - DNA, 15 bp, Homo sapiens
gtgtctttttcttct

SEQ ID NO: 33378 - DNA, 15 bp, Homo sapiens
tgtgtctttttcttc

SEQ ID NO: 33379 - DNA, 15 bp, Homo sapiens
ctgtgtctttttctt

SEQ ID NO: 33380 - DNA, 15 bp, Homo sapiens
gctgtgtctttttct

SEQ ID NO: 33381 - DNA, 15 bp, Homo sapiens
tgctgtgtctttttc

SEQ ID NO: 33382 - DNA, 15 bp, Homo sapiens
ttgctgtgtcttttt

SEQ ID NO: 33383 - DNA, 15 bp, Homo sapiens
cttgctgtgtctttt

SEQ ID NO: 33384 - DNA, 15 bp, Homo sapiens
acttgctgtgtcttt

SEQ ID NO: 33385 - DNA, 15 bp, Homo sapiens
aacttgctgtgtctt

SEQ ID NO: 33386 - DNA, 15 bp, Homo sapiens
caacttgctgtgtct

SEQ ID NO: 33387 - DNA, 15 bp, Homo sapiens
gcaacttgctgtgtc

SEQ ID NO: 33388 - DNA, 15 bp, Homo sapiens
tgcaacttgctgtgt

SEQ ID NO: 33389 - DNA, 15 bp, Homo sapiens
ctgcaacttgctgtg

SEQ ID NO: 33390 - DNA, 15 bp, Homo sapiens
gctgcaacttgctgt

SEQ ID NO: 33391 - DNA, 15 bp, Homo sapiens
cgctgcaacttgctg

SEQ ID NO: 33392 - DNA, 15 bp, Homo sapiens
acgctgcaacttgct

SEQ ID NO: 33393 - DNA, 15 bp, Homo sapiens
aacgctgcaacttgc

SEQ ID NO: 33394 - DNA, 15 bp, Homo sapiens
aaacgctgcaacttg

SEQ ID NO: 33395 - DNA, 15 bp, Homo sapiens
taaacgctgcaactt

SEQ ID NO: 33396 - DNA, 15 bp, Homo sapiens
ataaacgctgcaact

SEQ ID NO: 33397 - DNA, 15 bp, Homo sapiens
tataaacgctgcaac

SEQ ID NO: 33398 - DNA, 15 bp, Homo sapiens
ctataaacgctgcaa

SEQ ID NO: 33399 - DNA, 15 bp, Homo sapiens
actataaacgctgca

SEQ ID NO: 33400 - DNA, 15 bp, Homo sapiens
gactataaacgctgc

SEQ ID NO: 33401 - DNA, 15 bp, Homo sapiens
agactataaacgctg

SEQ ID NO: 33402 - DNA, 15 bp, Homo sapiens
cagactataaacgct

SEQ ID NO: 33403 - DNA, 15 bp, Homo sapiens
gcagactataaacgc

SEQ ID NO: 33404 - DNA, 15 bp, Homo sapiens
agcagactataaacg

SEQ ID NO: 33405 - DNA, 15 bp, Homo sapiens
aagcagactataaac

SEQ ID NO: 33406 - DNA, 15 bp, Homo sapiens
aaagcagactataaa

SEQ ID NO: 33407 - DNA, 15 bp, Homo sapiens
aaaagcagactataa

SEQ ID NO: 33408 - DNA, 15 bp, Homo sapiens
taaaagcagactata

SEQ ID NO: 33409 - DNA, 15 bp, Homo sapiens
gtaaaagcagactat

SEQ ID NO: 33410 - DNA, 15 bp, Homo sapiens
tgtaaaagcagacta

SEQ ID NO: 33411 - DNA, 15 bp, Homo sapiens
atgtaaaagcagact

SEQ ID NO: 33412 - DNA, 15 bp, Homo sapiens
gatgtaaaagcagac

SEQ ID NO: 33413 - DNA, 15 bp, Homo sapiens
agatgtaaaagcaga

SEQ ID NO: 33414 - DNA, 15 bp, Homo sapiens
cagatgtaaaagcag

SEQ ID NO: 33415 - DNA, 15 bp, Homo sapiens
tcagatgtaaaagca

SEQ ID NO: 33416 - DNA, 15 bp, Homo sapiens
ttcagatgtaaaagc

SEQ ID NO: 33417 - DNA, 15 bp, Homo sapiens
gttcagatgtaaaag

SEQ ID NO: 33418 - DNA, 15 bp, Homo sapiens
ggttcagatgtaaaa

SEQ ID NO: 33419 - DNA, 15 bp, Homo sapiens
aggttcagatgtaaa

SEQ ID NO: 33420 - DNA, 15 bp, Homo sapiens
gaggttcagatgtaa

SEQ ID NO: 33421 - DNA, 15 bp, Homo sapiens
agaggttcagatgta

SEQ ID NO: 33422 - DNA, 15 bp, Homo sapiens
cagaggttcagatgt

SEQ ID NO: 33423 - DNA, 15 bp, Homo sapiens
acagaggttcagatg

SEQ ID NO: 33424 - DNA, 15 bp, Homo sapiens
aacagaggttcagat

SEQ ID NO: 33425 - DNA, 15 bp, Homo sapiens
aaacagaggttcaga

SEQ ID NO: 33426 - DNA, 15 bp, Homo sapiens
aaaacagaggttcag

SEQ ID NO: 33427 - DNA, 15 bp, Homo sapiens
aaaaacagaggttca

SEQ ID NO: 33428 - DNA, 15 bp, Homo sapiens
caaaaacagaggttc

SEQ ID NO: 33429 - DNA, 15 bp, Homo sapiens
acaaaaacagaggtt

SEQ ID NO: 33430 - DNA, 15 bp, Homo sapiens
aacaaaaacagaggt

SEQ ID NO: 33431 - DNA, 15 bp, Homo sapiens
taacaaaaacagagg

SEQ ID NO: 33432 - DNA, 15 bp, Homo sapiens
ataacaaaaacagag

SEQ ID NO: 33433 - DNA, 15 bp, Homo sapiens
aataacaaaaacaga

SEQ ID NO: 33434 - DNA, 15 bp, Homo sapiens
aaataacaaaaacag

SEQ ID NO: 33435 - DNA, 15 bp, Homo sapiens
taaataacaaaaaca

SEQ ID NO: 33436 - DNA, 15 bp, Homo sapiens
ttaaataacaaaaac

SEQ ID NO: 33437 - DNA, 15 bp, Homo sapiens
cttaaataacaaaaa

SEQ ID NO: 33438 - DNA, 15 bp, Homo sapiens
ccttaaataacaaaa

SEQ ID NO: 33439 - DNA, 15 bp, Homo sapiens
accttaaataacaaa

SEQ ID NO: 33440 - DNA, 15 bp, Homo sapiens
caccttaaataacaa

SEQ ID NO: 33441 - DNA, 15 bp, Homo sapiens
tcaccttaaataaca

SEQ ID NO: 33442 - DNA, 15 bp, Homo sapiens
ttcaccttaaataac

SEQ ID NO: 33443 - DNA, 15 bp, Homo sapiens
cttcaccttaaataa

SEQ ID NO: 33444 - DNA, 15 bp, Homo sapiens
gcttcaccttaaata

SEQ ID NO: 33445 - DNA, 15 bp, Homo sapiens
tgcttcaccttaaat

SEQ ID NO: 33446 - DNA, 15 bp, Homo sapiens
ctgcttcaccttaaa

SEQ ID NO: 33447 - DNA, 15 bp, Homo sapiens
gctgcttcaccttaa

SEQ ID NO: 33448 - DNA, 15 bp, Homo sapiens
tgctgcttcacctta

SEQ ID NO: 33449 - DNA, 15 bp, Homo sapiens
atgctgcttcacctt

SEQ ID NO: 33450 - DNA, 15 bp, Homo sapiens
gatgctgcttcacct

SEQ ID NO: 33451 - DNA, 15 bp, Homo sapiens
agatgctgcttcacc

SEQ ID NO: 33452 - DNA, 15 bp, Homo sapiens
cagatgctgcttcac

SEQ ID NO: 33453 - DNA, 15 bp, Homo sapiens
ccagatgctgcttca

SEQ ID NO: 33454 - DNA, 15 bp, Homo sapiens
cccagatgctgcttc

SEQ ID NO: 33455 - DNA, 15 bp, Homo sapiens
acccagatgctgctt

SEQ ID NO: 33456 - DNA, 15 bp, Homo sapiens
cacccagatgctgct

SEQ ID NO: 33457 - DNA, 15 bp, Homo sapiens
acacccagatgctgc

SEQ ID NO: 33458 - DNA, 15 bp, Homo sapiens
cacacccagatgctg

SEQ ID NO: 33459 - DNA, 15 bp, Homo sapiens
tcacacccagatgct

SEQ ID NO: 33460 - DNA, 15 bp, Homo sapiens
ctcacacccagatgc

SEQ ID NO: 33461 - DNA, 15 bp, Homo sapiens
tctcacacccagatg

SEQ ID NO: 33462 - DNA, 15 bp, Homo sapiens
ctctcacacccagat

SEQ ID NO: 33463 - DNA, 15 bp, Homo sapiens
actctcacacccaga

SEQ ID NO: 33464 - DNA, 15 bp, Homo sapiens
cactctcacacccag

SEQ ID NO: 33465 - DNA, 15 bp, Homo sapiens
tcactctcacaccca

SEQ ID NO: 33466 - DNA, 15 bp, Homo sapiens
ttcactctcacaccc

SEQ ID NO: 33467 - DNA, 15 bp, Homo sapiens
tttcactctcacacc

SEQ ID NO: 33468 - DNA, 15 bp, Homo sapiens
gtttcactctcacac

SEQ ID NO: 33469 - DNA, 15 bp, Homo sapiens
tgtttcactctcaca

SEQ ID NO: 33470 - DNA, 15 bp, Homo sapiens
ttgtttcactctcac

SEQ ID NO: 33471 - DNA, 15 bp, Homo sapiens
cttgtttcactctca

SEQ ID NO: 33472 - DNA, 15 bp, Homo sapiens
gcttgtttcactctc

SEQ ID NO: 33473 - DNA, 15 bp, Homo sapiens
cgcttgtttcactct

SEQ ID NO: 33474 - DNA, 15 bp, Homo sapiens
acgcttgtttcactc

SEQ ID NO: 33475 - DNA, 15 bp, Homo sapiens
gacgcttgtttcact

SEQ ID NO: 33476 - DNA, 15 bp, Homo sapiens
agacgcttgtttcac

SEQ ID NO: 33477 - DNA, 15 bp, Homo sapiens
gagacgcttgtttca

SEQ ID NO: 33478 - DNA, 15 bp, Homo sapiens
agagacgcttgtttc

SEQ ID NO: 33479 - DNA, 15 bp, Homo sapiens
cagagacgcttgttt

SEQ ID NO: 33480 - DNA, 15 bp, Homo sapiens
tcagagacgcttgtt

SEQ ID NO: 33481 - DNA, 15 bp, Homo sapiens
ttcagagacgcttgt

SEQ ID NO: 33482 - DNA, 15 bp, Homo sapiens
cttcagagacgcttg

SEQ ID NO: 33483 - DNA, 15 bp, Homo sapiens
tcttcagagacgctt

SEQ ID NO: 33484 - DNA, 15 bp, Homo sapiens
gtcttcagagacgct

SEQ ID NO: 33485 - DNA, 15 bp, Homo sapiens
agtcttcagagacgc

SEQ ID NO: 33486 - DNA, 15 bp, Homo sapiens
cagtcttcagagacg

SEQ ID NO: 33487 - DNA, 15 bp, Homo sapiens
gcagtcttcagagac

SEQ ID NO: 33488 - DNA, 15 bp, Homo sapiens
agcagtcttcagaga

SEQ ID NO: 33489 - DNA, 15 bp, Homo sapiens
gagcagtcttcagag

SEQ ID NO: 33490 - DNA, 15 bp, Homo sapiens
tgagcagtcttcaga

SEQ ID NO: 33491 - DNA, 15 bp, Homo sapiens
ctgagcagtcttcag

SEQ ID NO: 33492 - DNA, 15 bp, Homo sapiens
cctgagcagtcttca

SEQ ID NO: 33493 - DNA, 15 bp, Homo sapiens
ccctgagcagtcttc

SEQ ID NO: 33494 - DNA, 15 bp, Homo sapiens
gccctgagcagtctt

SEQ ID NO: 33495 - DNA, 15 bp, Homo sapiens
agccctgagcagtct

SEQ ID NO: 33496 - DNA, 15 bp, Homo sapiens
tagccctgagcagtc

SEQ ID NO: 33497 - DNA, 15 bp, Homo sapiens
atagccctgagcagt

SEQ ID NO: 33498 - DNA, 15 bp, Homo sapiens
gatagccctgagcag

SEQ ID NO: 33499 - DNA, 15 bp, Homo sapiens
ggatagccctgagca

SEQ ID NO: 33500 - DNA, 15 bp, Homo sapiens
aggatagccctgagc

SEQ ID NO: 33501 - DNA, 15 bp, Homo sapiens
gaggatagccctgag

SEQ ID NO: 33502 - DNA, 15 bp, Homo sapiens
agaggatagccctga

SEQ ID NO: 33503 - DNA, 15 bp, Homo sapiens
gagaggatagccctg

SEQ ID NO: 33504 - DNA, 15 bp, Homo sapiens
tgagaggatagccct

SEQ ID NO: 33505 - DNA, 15 bp, Homo sapiens
ctgagaggatagccc

SEQ ID NO: 33506 - DNA, 15 bp, Homo sapiens
tctgagaggatagcc

SEQ ID NO: 33507 - DNA, 15 bp, Homo sapiens
ctctgagaggatagc

SEQ ID NO: 33508 - DNA, 15 bp, Homo sapiens
actctgagaggatag

SEQ ID NO: 33509 - DNA, 15 bp, Homo sapiens
cactctgagaggata

SEQ ID NO: 33510 - DNA, 15 bp, Homo sapiens
tcactctgagaggat

SEQ ID NO: 33511 - DNA, 15 bp, Homo sapiens
gtcactctgagagga

SEQ ID NO: 33512 - DNA, 15 bp, Homo sapiens
tgtcactctgagagg

SEQ ID NO: 33513 - DNA, 15 bp, Homo sapiens
atgtcactctgagag

SEQ ID NO: 33514 - DNA, 15 bp, Homo sapiens
aatgtcactctgaga

SEQ ID NO: 33515 - DNA, 15 bp, Homo sapiens
aaatgtcactctgag

SEQ ID NO: 33516 - DNA, 15 bp, Homo sapiens
aaaatgtcactctga

SEQ ID NO: 33517 - DNA, 15 bp, Homo sapiens
taaaatgtcactctg

SEQ ID NO: 33518 - DNA, 15 bp, Homo sapiens
ttaaaatgtcactct

SEQ ID NO: 33519 - DNA, 15 bp, Homo sapiens
gttaaaatgtcactc

SEQ ID NO: 33520 - DNA, 15 bp, Homo sapiens
ggttaaaatgtcact

SEQ ID NO: 33521 - DNA, 15 bp, Homo sapiens
tggttaaaatgtcac

SEQ ID NO: 33522 - DNA, 15 bp, Homo sapiens
gtggttaaaatgtca

SEQ ID NO: 33523 - DNA, 15 bp, Homo sapiens
agtggttaaaatgtc

SEQ ID NO: 33524 - DNA, 15 bp, Homo sapiens
gagtggttaaaatgt

SEQ ID NO: 33525 - DNA, 15 bp, Homo sapiens
tgagtggttaaaatg

SEQ ID NO: 33526 - DNA, 15 bp, Homo sapiens
ctgagtggttaaaat

SEQ ID NO: 33527 - DNA, 15 bp, Homo sapiens
cctgagtggttaaaa

SEQ ID NO: 33528 - DNA, 15 bp, Homo sapiens
acctgagtggttaaa

SEQ ID NO: 33529 - DNA, 15 bp, Homo sapiens
tacctgagtggttaa

SEQ ID NO: 33530 - DNA, 15 bp, Homo sapiens
ttacctgagtggtta

SEQ ID NO: 33531 - DNA, 15 bp, Homo sapiens
tttacctgagtggtt

SEQ ID NO: 33532 - DNA, 15 bp, Homo sapiens
ttttacctgagtggt

SEQ ID NO: 33533 - DNA, 15 bp, Homo sapiens
tttttacctgagtgg

SEQ ID NO: 33534 - DNA, 15 bp, Homo sapiens
ctttttacctgagtg

SEQ ID NO: 33535 - DNA, 15 bp, Homo sapiens
gctttttacctgagt

SEQ ID NO: 33536 - DNA, 15 bp, Homo sapiens
cgctttttacctgag

SEQ ID NO: 33537 - DNA, 15 bp, Homo sapiens
acgctttttacctga

SEQ ID NO: 33538 - DNA, 15 bp, Homo sapiens
cacgctttttacctg

SEQ ID NO: 33539 - DNA, 15 bp, Homo sapiens
acacgctttttacct

SEQ ID NO: 33540 - DNA, 15 bp, Homo sapiens
cacacgctttttacc

SEQ ID NO: 33541 - DNA, 15 bp, Homo sapiens
acacacgctttttac

SEQ ID NO: 33542 - DNA, 15 bp, Homo sapiens
cacacacgcttttta

SEQ ID NO: 33543 - DNA, 15 bp, Homo sapiens
acacacacgcttttt

SEQ ID NO: 33544 - DNA, 15 bp, Homo sapiens
cacacacacgctttt

SEQ ID NO: 33545 - DNA, 15 bp, Homo sapiens
acacacacacgcttt

SEQ ID NO: 33546 - DNA, 15 bp, Homo sapiens
cacacacacacgctt

SEQ ID NO: 33547 - DNA, 15 bp, Homo sapiens
acacacacacacgct

SEQ ID NO: 33548 - DNA, 15 bp, Homo sapiens
cacacacacacacgc

SEQ ID NO: 33549 - DNA, 15 bp, Homo sapiens
gcacacacacacacg

SEQ ID NO: 33550 - DNA, 15 bp, Homo sapiens
tgcacacacacacac

SEQ ID NO: 33551 - DNA, 15 bp, Homo sapiens
gtgcacacacacaca

SEQ ID NO: 33552 - DNA, 15 bp, Homo sapiens
tgtgcacacacacac

SEQ ID NO: 33553 - DNA, 15 bp, Homo sapiens
atgtgcacacacaca

SEQ ID NO: 33554 - DNA, 15 bp, Homo sapiens
catgtgcacacacac

SEQ ID NO: 33555 - DNA, 15 bp, Homo sapiens
gcatgtgcacacaca

SEQ ID NO: 33556 - DNA, 15 bp, Homo sapiens
cgcatgtgcacacac

SEQ ID NO: 33557 - DNA, 15 bp, Homo sapiens
acgcatgtgcacaca

SEQ ID NO: 33558 - DNA, 15 bp, Homo sapiens
cacgcatgtgcacac

SEQ ID NO: 33559 - DNA, 15 bp, Homo sapiens
acacgcatgtgcaca

SEQ ID NO: 33560 - DNA, 15 bp, Homo sapiens
cacacgcatgtgcac

SEQ ID NO: 33561 - DNA, 15 bp, Homo sapiens
acacacgcatgtgca

SEQ ID NO: 33562 - DNA, 15 bp, Homo sapiens
cacacacgcatgtgc

SEQ ID NO: 33563 - DNA, 15 bp, Homo sapiens
acacacacgcatgtg

SEQ ID NO: 33564 - DNA, 15 bp, Homo sapiens
cacacacacgcatgt

SEQ ID NO: 33565 - DNA, 15 bp, Homo sapiens
ccacacacacgcatg

SEQ ID NO: 33566 - DNA, 15 bp, Homo sapiens
accacacacacgcat

SEQ ID NO: 33567 - DNA, 15 bp, Homo sapiens
caccacacacacgca

SEQ ID NO: 33568 - DNA, 15 bp, Homo sapiens
acaccacacacacgc

SEQ ID NO: 33569 - DNA, 15 bp, Homo sapiens
gacaccacacacacg

SEQ ID NO: 33570 - DNA, 15 bp, Homo sapiens
ggacaccacacacac

SEQ ID NO: 33571 - DNA, 15 bp, Homo sapiens
aggacaccacacaca

SEQ ID NO: 33572 - DNA, 15 bp, Homo sapiens
aaggacaccacacac

SEQ ID NO: 33573 - DNA, 15 bp, Homo sapiens
aaaggacaccacaca

SEQ ID NO: 33574 - DNA, 15 bp, Homo sapiens
caaaggacaccacac

SEQ ID NO: 33575 - DNA, 15 bp, Homo sapiens
gcaaaggacaccaca

SEQ ID NO: 33576 - DNA, 15 bp, Homo sapiens
tgcaaaggacaccac

SEQ ID NO: 33577 - DNA, 15 bp, Homo sapiens
atgcaaaggacacca

SEQ ID NO: 33578 - DNA, 15 bp, Homo sapiens
aatgcaaaggacacc

SEQ ID NO: 33579 - DNA, 15 bp, Homo sapiens
gaatgcaaaggacac

SEQ ID NO: 33580 - DNA, 15 bp, Homo sapiens
tgaatgcaaaggaca

SEQ ID NO: 33581 - DNA, 15 bp, Homo sapiens
ctgaatgcaaaggac

SEQ ID NO: 33582 - DNA, 15 bp, Homo sapiens
actgaatgcaaagga

SEQ ID NO: 33583 - DNA, 15 bp, Homo sapiens
tactgaatgcaaagg

SEQ ID NO: 33584 - DNA, 15 bp, Homo sapiens
ctactgaatgcaaag

SEQ ID NO: 33585 - DNA, 15 bp, Homo sapiens
actactgaatgcaaa

SEQ ID NO: 33586 - DNA, 15 bp, Homo sapiens
tactactgaatgcaa

SEQ ID NO: 33587 - DNA, 15 bp, Homo sapiens
atactactgaatgca

SEQ ID NO: 33588 - DNA, 15 bp, Homo sapiens
catactactgaatgc

SEQ ID NO: 33589 - DNA, 15 bp, Homo sapiens
acatactactgaatg

SEQ ID NO: 33590 - DNA, 15 bp, Homo sapiens
tacatactactgaat

SEQ ID NO: 33591 - DNA, 15 bp, Homo sapiens
atacatactactgaa

SEQ ID NO: 33592 - DNA, 15 bp, Homo sapiens
gatacatactactga

SEQ ID NO: 33593 - DNA, 15 bp, Homo sapiens
ggatacatactactg

SEQ ID NO: 33594 - DNA, 15 bp, Homo sapiens
gggatacatactact

SEQ ID NO: 33595 - DNA, 15 bp, Homo sapiens
tgggatacatactac

SEQ ID NO: 33596 - DNA, 15 bp, Homo sapiens
gtgggatacatacta

SEQ ID NO: 33597 - DNA, 15 bp, Homo sapiens
tgtgggatacatact

SEQ ID NO: 33598 - DNA, 15 bp, Homo sapiens
atgtgggatacatac

SEQ ID NO: 33599 - DNA, 15 bp, Homo sapiens
aatgtgggatacata

SEQ ID NO: 33600 - DNA, 15 bp, Homo sapiens
gaatgtgggatacat

SEQ ID NO: 33601 - DNA, 15 bp, Homo sapiens
agaatgtgggataca

SEQ ID NO: 33602 - DNA, 15 bp, Homo sapiens
aagaatgtgggatac

SEQ ID NO: 33603 - DNA, 15 bp, Homo sapiens
taagaatgtgggata

SEQ ID NO: 33604 - DNA, 15 bp, Homo sapiens
ctaagaatgtgggat

SEQ ID NO: 33605 - DNA, 15 bp, Homo sapiens
cctaagaatgtggga

SEQ ID NO: 33606 - DNA, 15 bp, Homo sapiens
acctaagaatgtggg

SEQ ID NO: 33607 - DNA, 15 bp, Homo sapiens
aacctaagaatgtgg

SEQ ID NO: 33608 - DNA, 15 bp, Homo sapiens
aaacctaagaatgtg

SEQ ID NO: 33609 - DNA, 15 bp, Homo sapiens
caaacctaagaatgt

SEQ ID NO: 33610 - DNA, 15 bp, Homo sapiens
gcaaacctaagaatg

SEQ ID NO: 33611 - DNA, 15 bp, Homo sapiens
agcaaacctaagaat

SEQ ID NO: 33612 - DNA, 15 bp, Homo sapiens
cagcaaacctaagaa

SEQ ID NO: 33613 - DNA, 15 bp, Homo sapiens
tcagcaaacctaaga

SEQ ID NO: 33614 - DNA, 15 bp, Homo sapiens
gtcagcaaacctaag

SEQ ID NO: 33615 - DNA, 15 bp, Homo sapiens
tgtcagcaaacctaa

SEQ ID NO: 33616 - DNA, 15 bp, Homo sapiens
atgtcagcaaaccta

SEQ ID NO: 33617 - DNA, 15 bp, Homo sapiens
gatgtcagcaaacct

SEQ ID NO: 33618 - DNA, 15 bp, Homo sapiens
tgatgtcagcaaacc

SEQ ID NO: 33619 - DNA, 15 bp, Homo sapiens
atgatgtcagcaaac

SEQ ID NO: 33620 - DNA, 15 bp, Homo sapiens
gatgatgtcagcaaa

SEQ ID NO: 33621 - DNA, 15 bp, Homo sapiens
agatgatgtcagcaa

SEQ ID NO: 33622 - DNA, 15 bp, Homo sapiens
gagatgatgtcagca

SEQ ID NO: 33623 - DNA, 15 bp, Homo sapiens
agagatgatgtcagc

SEQ ID NO: 33624 - DNA, 15 bp, Homo sapiens
aagagatgatgtcag

SEQ ID NO: 33625 - DNA, 15 bp, Homo sapiens
aaagagatgatgtca

SEQ ID NO: 33626 - DNA, 15 bp, Homo sapiens
caaagagatgatgtc

SEQ ID NO: 33627 - DNA, 15 bp, Homo sapiens
tcaaagagatgatgt

SEQ ID NO: 33628 - DNA, 15 bp, Homo sapiens
ttcaaagagatgatg

SEQ ID NO: 33629 - DNA, 15 bp, Homo sapiens
attcaaagagatgat

SEQ ID NO: 33630 - DNA, 15 bp, Homo sapiens
aattcaaagagatga

SEQ ID NO: 33631 - DNA, 15 bp, Homo sapiens
taattcaaagagatg

SEQ ID NO: 33632 - DNA, 15 bp, Homo sapiens
ttaattcaaagagat

SEQ ID NO: 33633 - DNA, 15 bp, Homo sapiens
attaattcaaagaga

SEQ ID NO: 33634 - DNA, 15 bp, Homo sapiens
cattaattcaaagag

SEQ ID NO: 33635 - DNA, 15 bp, Homo sapiens
ccattaattcaaaga

SEQ ID NO: 33636 - DNA, 15 bp, Homo sapiens
gccattaattcaaag

SEQ ID NO: 33637 - DNA, 15 bp, Homo sapiens
tgccattaattcaaa

SEQ ID NO: 33638 - DNA, 15 bp, Homo sapiens
gtgccattaattcaa

SEQ ID NO: 33639 - DNA, 15 bp, Homo sapiens
tgtgccattaattca

SEQ ID NO: 33640 - DNA, 15 bp, Homo sapiens
ttgtgccattaattc

SEQ ID NO: 33641 - DNA, 15 bp, Homo sapiens
attgtgccattaatt

SEQ ID NO: 33642 - DNA, 15 bp, Homo sapiens
aattgtgccattaat

SEQ ID NO: 33643 - DNA, 15 bp, Homo sapiens
caattgtgccattaa

SEQ ID NO: 33644 - DNA, 15 bp, Homo sapiens
acaattgtgccatta

SEQ ID NO: 33645 - DNA, 15 bp, Homo sapiens
aacaattgtgccatt

SEQ ID NO: 33646 - DNA, 15 bp, Homo sapiens
aaacaattgtgccat

SEQ ID NO: 33647 - DNA, 15 bp, Homo sapiens
caaacaattgtgcca

SEQ ID NO: 33648 - DNA, 15 bp, Homo sapiens
acaaacaattgtgcc

SEQ ID NO: 33649 - DNA, 15 bp, Homo sapiens
cacaaacaattgtgc

SEQ ID NO: 33650 - DNA, 15 bp, Homo sapiens
ccacaaacaattgtg

SEQ ID NO: 33651 - DNA, 15 bp, Homo sapiens
accacaaacaattgt

SEQ ID NO: 33652 - DNA, 15 bp, Homo sapiens
aaccacaaacaattg

SEQ ID NO: 33653 - DNA, 15 bp, Homo sapiens
gaaccacaaacaatt

SEQ ID NO: 33654 - DNA, 15 bp, Homo sapiens
tgaaccacaaacaat

SEQ ID NO: 33655 - DNA, 15 bp, Homo sapiens
atgaaccacaaacaa

SEQ ID NO: 33656 - DNA, 15 bp, Homo sapiens
aatgaaccacaaaca

SEQ ID NO: 33657 - DNA, 15 bp, Homo sapiens
caatgaaccacaaac

SEQ ID NO: 33658 - DNA, 15 bp, Homo sapiens
acaatgaaccacaaa

SEQ ID NO: 33659 - DNA, 15 bp, Homo sapiens
gacaatgaaccacaa

SEQ ID NO: 33660 - DNA, 15 bp, Homo sapiens
agacaatgaaccaca

SEQ ID NO: 33661 - DNA, 15 bp, Homo sapiens
gagacaatgaaccac

SEQ ID NO: 33662 - DNA, 15 bp, Homo sapiens
ggagacaatgaacca

SEQ ID NO: 33663 - DNA, 15 bp, Homo sapiens
aggagacaatgaacc

SEQ ID NO: 33664 - DNA, 15 bp, Homo sapiens
aaggagacaatgaac

SEQ ID NO: 33665 - DNA, 15 bp, Homo sapiens
taaggagacaatgaa

SEQ ID NO: 33666 - DNA, 15 bp, Homo sapiens
ttaaggagacaatga

SEQ ID NO: 33667 - DNA, 15 bp, Homo sapiens
tttaaggagacaatg

SEQ ID NO: 33668 - DNA, 15 bp, Homo sapiens
atttaaggagacaat

SEQ ID NO: 33669 - DNA, 15 bp, Homo sapiens
aatttaaggagacaa

SEQ ID NO: 33670 - DNA, 15 bp, Homo sapiens
taatttaaggagaca

SEQ ID NO: 33671 - DNA, 15 bp, Homo sapiens
ctaatttaaggagac

SEQ ID NO: 33672 - DNA, 15 bp, Homo sapiens
tctaatttaaggaga

SEQ ID NO: 33673 - DNA, 15 bp, Homo sapiens
gtctaatttaaggag

SEQ ID NO: 33674 - DNA, 15 bp, Homo sapiens
agtctaatttaagga

SEQ ID NO: 33675 - DNA, 15 bp, Homo sapiens
cagtctaatttaagg

SEQ ID NO: 33676 - DNA, 15 bp, Homo sapiens
acagtctaatttaag

SEQ ID NO: 33677 - DNA, 15 bp, Homo sapiens
tacagtctaatttaa

SEQ ID NO: 33678 - DNA, 15 bp, Homo sapiens
ttacagtctaattta

SEQ ID NO: 33679 - DNA, 15 bp, Homo sapiens
cttacagtctaattt

SEQ ID NO: 33680 - DNA, 15 bp, Homo sapiens
gcttacagtctaatt

SEQ ID NO: 33681 - DNA, 15 bp, Homo sapiens
tgcttacagtctaat

SEQ ID NO: 33682 - DNA, 15 bp, Homo sapiens
gtgcttacagtctaa

SEQ ID NO: 33683 - DNA, 15 bp, Homo sapiens
ggtgcttacagtcta

SEQ ID NO: 33684 - DNA, 15 bp, Homo sapiens
aggtgcttacagtct

SEQ ID NO: 33685 - DNA, 15 bp, Homo sapiens
aaggtgcttacagtc

SEQ ID NO: 33686 - DNA, 15 bp, Homo sapiens
caaggtgcttacagt

SEQ ID NO: 33687 - DNA, 15 bp, Homo sapiens
tcaaggtgcttacag

SEQ ID NO: 33688 - DNA, 15 bp, Homo sapiens
atcaaggtgcttaca

SEQ ID NO: 33689 - DNA, 15 bp, Homo sapiens
catcaaggtgcttac

SEQ ID NO: 33690 - DNA, 15 bp, Homo sapiens
ccatcaaggtgctta

SEQ ID NO: 33691 - DNA, 15 bp, Homo sapiens
tccatcaaggtgctt

SEQ ID NO: 33692 - DNA, 15 bp, Homo sapiens
ttccatcaaggtgct

SEQ ID NO: 33693 - DNA, 15 bp, Homo sapiens
gttccatcaaggtgc

SEQ ID NO: 33694 - DNA, 15 bp, Homo sapiens
agttccatcaaggtg

SEQ ID NO: 33695 - DNA, 15 bp, Homo sapiens
gagttccatcaaggt

SEQ ID NO: 33696 - DNA, 15 bp, Homo sapiens
tgagttccatcaagg

SEQ ID NO: 33697 - DNA, 15 bp, Homo sapiens
atgagttccatcaag

SEQ ID NO: 33698 - DNA, 15 bp, Homo sapiens
tatgagttccatcaa

SEQ ID NO: 33699 - DNA, 15 bp, Homo sapiens
gtatgagttccatca

SEQ ID NO: 33700 - DNA, 15 bp, Homo sapiens
agtatgagttccatc

SEQ ID NO: 33701 - DNA, 15 bp, Homo sapiens
tagtatgagttccat

SEQ ID NO: 33702 - DNA, 15 bp, Homo sapiens
gtagtatgagttcca

SEQ ID NO: 33703 - DNA, 15 bp, Homo sapiens
ggtagtatgagttcc

SEQ ID NO: 33704 - DNA, 15 bp, Homo sapiens
aggtagtatgagttc

SEQ ID NO: 33705 - DNA, 15 bp, Homo sapiens
aaggtagtatgagtt

SEQ ID NO: 33706 - DNA, 15 bp, Homo sapiens
aaaggtagtatgagt

SEQ ID NO: 33707 - DNA, 15 bp, Homo sapiens
aaaaggtagtatgag

SEQ ID NO: 33708 - DNA, 15 bp, Homo sapiens
taaaaggtagtatga

SEQ ID NO: 33709 - DNA, 15 bp, Homo sapiens
ataaaaggtagtatg

SEQ ID NO: 33710 - DNA, 15 bp, Homo sapiens
aataaaaggtagtat

SEQ ID NO: 33711 - DNA, 15 bp, Homo sapiens
aaataaaaggtagta

SEQ ID NO: 33712 - DNA, 15 bp, Homo sapiens
gaaataaaaggtagt

SEQ ID NO: 33713 - DNA, 15 bp, Homo sapiens
tgaaataaaaggtag

SEQ ID NO: 33714 - DNA, 15 bp, Homo sapiens
gtgaaataaaaggta

SEQ ID NO: 33715 - DNA, 15 bp, Homo sapiens
tgtgaaataaaaggt

SEQ ID NO: 33716 - DNA, 15 bp, Homo sapiens
gtgtgaaataaaagg

SEQ ID NO: 33717 - DNA, 15 bp, Homo sapiens
tgtgtgaaataaaag

SEQ ID NO: 33718 - DNA, 15 bp, Homo sapiens
gtgtgtgaaataaaa

SEQ ID NO: 33719 - DNA, 15 bp, Homo sapiens
tgtgtgtgaaataaa

SEQ ID NO: 33720 - DNA, 15 bp, Homo sapiens
gtgtgtgtgaaataa

SEQ ID NO: 33721 - DNA, 15 bp, Homo sapiens
cgtgtgtgtgaaata

SEQ ID NO: 33722 - DNA, 15 bp, Homo sapiens
gcgtgtgtgtgaaat

SEQ ID NO: 33723 - DNA, 15 bp, Homo sapiens
tgcgtgtgtgtgaaa

SEQ ID NO: 33724 - DNA, 15 bp, Homo sapiens
gtgcgtgtgtgtgaa

SEQ ID NO: 33725 - DNA, 15 bp, Homo sapiens
tgtgcgtgtgtgtga

SEQ ID NO: 33726 - DNA, 15 bp, Homo sapiens
gtgtgcgtgtgtgtg

SEQ ID NO: 33727 - DNA, 15 bp, Homo sapiens
cgtgtgcgtgtgtgt

SEQ ID NO: 33728 - DNA, 15 bp, Homo sapiens
gcgtgtgcgtgtgtg

SEQ ID NO: 33729 - DNA, 15 bp, Homo sapiens
cgcgtgtgcgtgtgt

SEQ ID NO: 33730 - DNA, 15 bp, Homo sapiens
gcgcgtgtgcgtgtg

SEQ ID NO: 33731 - DNA, 15 bp, Homo sapiens
tgcgcgtgtgcgtgt

SEQ ID NO: 33732 - DNA, 15 bp, Homo sapiens
gtgcgcgtgtgcgtg

SEQ ID NO: 33733 - DNA, 15 bp, Homo sapiens
tgtgcgcgtgtgcgt

SEQ ID NO: 33734 - DNA, 15 bp, Homo sapiens
gtgtgcgcgtgtgcg

SEQ ID NO: 33735 - DNA, 15 bp, Homo sapiens
tgtgtgcgcgtgtgc

SEQ ID NO: 33736 - DNA, 15 bp, Homo sapiens
gtgtgtgcgcgtgtg

SEQ ID NO: 33737 - DNA, 15 bp, Homo sapiens
tgtgtgtgcgcgtgt

SEQ ID NO: 33738 - DNA, 15 bp, Homo sapiens
ctgtgtgtgcgcgtg

SEQ ID NO: 33739 - DNA, 15 bp, Homo sapiens
gctgtgtgtgcgcgt

SEQ ID NO: 33740 - DNA, 15 bp, Homo sapiens
ggctgtgtgtgcgcg

SEQ ID NO: 33741 - DNA, 15 bp, Homo sapiens
aggctgtgtgtgcgc

SEQ ID NO: 33742 - DNA, 15 bp, Homo sapiens
taggctgtgtgtgcg

SEQ ID NO: 33743 - DNA, 15 bp, Homo sapiens
gtaggctgtgtgtgc

SEQ ID NO: 33744 - DNA, 15 bp, Homo sapiens
tgtaggctgtgtgtg

SEQ ID NO: 33745 - DNA, 15 bp, Homo sapiens
gtgtaggctgtgtgt

SEQ ID NO: 33746 - DNA, 15 bp, Homo sapiens
tgtgtaggctgtgtg

SEQ ID NO: 33747 - DNA, 15 bp, Homo sapiens
atgtgtaggctgtgt

SEQ ID NO: 33748 - DNA, 15 bp, Homo sapiens
tatgtgtaggctgtg

SEQ ID NO: 33749 - DNA, 15 bp, Homo sapiens
gtatgtgtaggctgt

SEQ ID NO: 33750 - DNA, 15 bp, Homo sapiens
tgtatgtgtaggctg

SEQ ID NO: 33751 - DNA, 15 bp, Homo sapiens
gtgtatgtgtaggct

SEQ ID NO: 33752 - DNA, 15 bp, Homo sapiens
agtgtatgtgtaggc

SEQ ID NO: 33753 - DNA, 15 bp, Homo sapiens
cagtgtatgtgtagg

SEQ ID NO: 33754 - DNA, 15 bp, Homo sapiens
gcagtgtatgtgtag

SEQ ID NO: 33755 - DNA, 15 bp, Homo sapiens
ggcagtgtatgtgta

SEQ ID NO: 33756 - DNA, 15 bp, Homo sapiens
aggcagtgtatgtgt

SEQ ID NO: 33757 - DNA, 15 bp, Homo sapiens
taggcagtgtatgtg

SEQ ID NO: 33758 - DNA, 15 bp, Homo sapiens
ctaggcagtgtatgt

SEQ ID NO: 33759 - DNA, 15 bp, Homo sapiens
gctaggcagtgtatg

SEQ ID NO: 33760 - DNA, 15 bp, Homo sapiens
agctaggcagtgtat

SEQ ID NO: 33761 - DNA, 15 bp, Homo sapiens
gagctaggcagtgta

SEQ ID NO: 33762 - DNA, 15 bp, Homo sapiens
tgagctaggcagtgt

SEQ ID NO: 33763 - DNA, 15 bp, Homo sapiens
atgagctaggcagtg

SEQ ID NO: 33764 - DNA, 15 bp, Homo sapiens
aatgagctaggcagt

SEQ ID NO: 33765 - DNA, 15 bp, Homo sapiens
caatgagctaggcag

SEQ ID NO: 33766 - DNA, 15 bp, Homo sapiens
acaatgagctaggca

SEQ ID NO: 33767 - DNA, 15 bp, Homo sapiens
tacaatgagctaggc

SEQ ID NO: 33768 - DNA, 15 bp, Homo sapiens
ctacaatgagctagg

SEQ ID NO: 33769 - DNA, 15 bp, Homo sapiens
gctacaatgagctag

SEQ ID NO: 33770 - DNA, 15 bp, Homo sapiens
tgctacaatgagcta

SEQ ID NO: 33771 - DNA, 15 bp, Homo sapiens
atgctacaatgagct

SEQ ID NO: 33772 - DNA, 15 bp, Homo sapiens
tatgctacaatgagc

SEQ ID NO: 33773 - DNA, 15 bp, Homo sapiens
gtatgctacaatgag

SEQ ID NO: 33774 - DNA, 15 bp, Homo sapiens
agtatgctacaatga

SEQ ID NO: 33775 - DNA, 15 bp, Homo sapiens
tagtatgctacaatg

SEQ ID NO: 33776 - DNA, 15 bp, Homo sapiens
ttagtatgctacaat

SEQ ID NO: 33777 - DNA, 15 bp, Homo sapiens
tttagtatgctacaa

SEQ ID NO: 33778 - DNA, 15 bp, Homo sapiens
atttagtatgctaca

SEQ ID NO: 33779 - DNA, 15 bp, Homo sapiens
tatttagtatgctac

SEQ ID NO: 33780 - DNA, 15 bp, Homo sapiens
gtatttagtatgcta

SEQ ID NO: 33781 - DNA, 15 bp, Homo sapiens
agtatttagtatgct

SEQ ID NO: 33782 - DNA, 15 bp, Homo sapiens
cagtatttagtatgc

SEQ ID NO: 33783 - DNA, 15 bp, Homo sapiens
tcagtatttagtatg

SEQ ID NO: 33784 - DNA, 15 bp, Homo sapiens
atcagtatttagtat

SEQ ID NO: 33785 - DNA, 15 bp, Homo sapiens
aatcagtatttagta

SEQ ID NO: 33786 - DNA, 15 bp, Homo sapiens
aaatcagtatttagt

SEQ ID NO: 33787 - DNA, 15 bp, Homo sapiens
aaaatcagtatttag

SEQ ID NO: 33788 - DNA, 15 bp, Homo sapiens
taaaatcagtattta

SEQ ID NO: 33789 - DNA, 15 bp, Homo sapiens
ttaaaatcagtattt

SEQ ID NO: 33790 - DNA, 15 bp, Homo sapiens
attaaaatcagtatt

SEQ ID NO: 33791 - DNA, 15 bp, Homo sapiens
cattaaaatcagtat

SEQ ID NO: 33792 - DNA, 15 bp, Homo sapiens
tcattaaaatcagta

SEQ ID NO: 33793 - DNA, 15 bp, Homo sapiens
ttcattaaaatcagt

SEQ ID NO: 33794 - DNA, 15 bp, Homo sapiens
attcattaaaatcag

SEQ ID NO: 33795 - DNA, 15 bp, Homo sapiens
tattcattaaaatca

SEQ ID NO: 33796 - DNA, 15 bp, Homo sapiens
ttattcattaaaatc

SEQ ID NO: 33797 - DNA, 15 bp, Homo sapiens
cttattcattaaaat

SEQ ID NO: 33798 - DNA, 15 bp, Homo sapiens
gcttattcattaaaa

SEQ ID NO: 33799 - DNA, 15 bp, Homo sapiens
agcttattcattaaa

SEQ ID NO: 33800 - DNA, 15 bp, Homo sapiens
tagcttattcattaa

SEQ ID NO: 33801 - DNA, 15 bp, Homo sapiens
ttagcttattcatta

SEQ ID NO: 33802 - DNA, 15 bp, Homo sapiens
tttagcttattcatt

SEQ ID NO: 33803 - DNA, 15 bp, Homo sapiens
gtttagcttattcat

SEQ ID NO: 33804 - DNA, 15 bp, Homo sapiens
ggtttagcttattca

SEQ ID NO: 33805 - DNA, 15 bp, Homo sapiens
aggtttagcttattc

SEQ ID NO: 33806 - DNA, 15 bp, Homo sapiens
aaggtttagcttatt

SEQ ID NO: 33807 - DNA, 15 bp, Homo sapiens
gaaggtttagcttat

SEQ ID NO: 33808 - DNA, 15 bp, Homo sapiens
cgaaggtttagctta

SEQ ID NO: 33809 - DNA, 15 bp, Homo sapiens
tcgaaggtttagctt

SEQ ID NO: 33810 - DNA, 15 bp, Homo sapiens
ttcgaaggtttagct

SEQ ID NO: 33811 - DNA, 15 bp, Homo sapiens
tttcgaaggtttagc

SEQ ID NO: 33812 - DNA, 15 bp, Homo sapiens
gtttcgaaggtttag

SEQ ID NO: 33813 - DNA, 15 bp, Homo sapiens
ggtttcgaaggttta

SEQ ID NO: 33814 - DNA, 15 bp, Homo sapiens
gggtttcgaaggttt

SEQ ID NO: 33815 - DNA, 15 bp, Homo sapiens
tgggtttcgaaggtt

SEQ ID NO: 33816 - DNA, 15 bp, Homo sapiens
atgggtttcgaaggt

SEQ ID NO: 33817 - DNA, 15 bp, Homo sapiens
aatgggtttcgaagg

SEQ ID NO: 33818 - DNA, 15 bp, Homo sapiens
aaatgggtttcgaag

SEQ ID NO: 33819 - DNA, 15 bp, Homo sapiens
caaatgggtttcgaa

SEQ ID NO: 33820 - DNA, 15 bp, Homo sapiens
gcaaatgggtttcga

SEQ ID NO: 33821 - DNA, 15 bp, Homo sapiens
agcaaatgggtttcg

SEQ ID NO: 33822 - DNA, 15 bp, Homo sapiens
tagcaaatgggtttc

SEQ ID NO: 33823 - DNA, 15 bp, Homo sapiens
ttagcaaatgggttt

SEQ ID NO: 33824 - DNA, 15 bp, Homo sapiens
attagcaaatgggtt

SEQ ID NO: 33825 - DNA, 15 bp, Homo sapiens
gattagcaaatgggt

SEQ ID NO: 33826 - DNA, 15 bp, Homo sapiens
ggattagcaaatggg

SEQ ID NO: 33827 - DNA, 15 bp, Homo sapiens
gggattagcaaatgg

SEQ ID NO: 33828 - DNA, 15 bp, Homo sapiens
tgggattagcaaatg

SEQ ID NO: 33829 - DNA, 15 bp, Homo sapiens
ctgggattagcaaat

SEQ ID NO: 33830 - DNA, 15 bp, Homo sapiens
gctgggattagcaaa

SEQ ID NO: 33831 - DNA, 15 bp, Homo sapiens
tgctgggattagcaa

SEQ ID NO: 33832 - DNA, 15 bp, Homo sapiens
gtgctgggattagca

SEQ ID NO: 33833 - DNA, 15 bp, Homo sapiens
agtgctgggattagc

SEQ ID NO: 33834 - DNA, 15 bp, Homo sapiens
aagtgctgggattag

SEQ ID NO: 33835 - DNA, 15 bp, Homo sapiens
cccaccttggcctcc

SEQ ID NO: 33836 - DNA, 15 bp, Homo sapiens
acccaccttggcctc

SEQ ID NO: 33837 - DNA, 15 bp, Homo sapiens
cacccaccttggcct

SEQ ID NO: 33838 - DNA, 15 bp, Homo sapiens
ccacccaccttggcc

SEQ ID NO: 33839 - DNA, 15 bp, Homo sapiens
tccacccaccttggc

SEQ ID NO: 33840 - DNA, 15 bp, Homo sapiens
atccacccaccttgg

SEQ ID NO: 33841 - DNA, 15 bp, Homo sapiens
gatccacccaccttg

SEQ ID NO: 33842 - DNA, 15 bp, Homo sapiens
tgatccacccacctt

SEQ ID NO: 33843 - DNA, 15 bp, Homo sapiens
gtgatccacccacct

SEQ ID NO: 33844 - DNA, 15 bp, Homo sapiens
ggtgatccacccacc

SEQ ID NO: 33845 - DNA, 15 bp, Homo sapiens
gaggtgatccaccca

SEQ ID NO: 33846 - DNA, 15 bp, Homo sapiens
tgaggtgatccaccc

SEQ ID NO: 33847 - DNA, 15 bp, Homo sapiens
ctgaggtgatccacc

SEQ ID NO: 33848 - DNA, 15 bp, Homo sapiens
cctgaggtgatccac

SEQ ID NO: 33849 - DNA, 15 bp, Homo sapiens
acctgaggtgatcca

SEQ ID NO: 33850 - DNA, 15 bp, Homo sapiens
gacctgaggtgatcc

SEQ ID NO: 33851 - DNA, 15 bp, Homo sapiens
tgacctgaggtgatc

SEQ ID NO: 33852 - DNA, 15 bp, Homo sapiens
ctgacctgaggtgat

SEQ ID NO: 33853 - DNA, 15 bp, Homo sapiens
tctgacctgaggtga

SEQ ID NO: 33854 - DNA, 15 bp, Homo sapiens
ttctgacctgaggtg

SEQ ID NO: 33855 - DNA, 15 bp, Homo sapiens
cttctgacctgaggt

SEQ ID NO: 33856 - DNA, 15 bp, Homo sapiens
acttctgacctgagg

SEQ ID NO: 33857 - DNA, 15 bp, Homo sapiens
aacttctgacctgag

SEQ ID NO: 33858 - DNA, 15 bp, Homo sapiens
aaacttctgacctga

SEQ ID NO: 33859 - DNA, 15 bp, Homo sapiens
caaacttctgacctg

SEQ ID NO: 33860 - DNA, 15 bp, Homo sapiens
tcaaacttctgacct

SEQ ID NO: 33861 - DNA, 15 bp, Homo sapiens
ctcaaacttctgacc

SEQ ID NO: 33862 - DNA, 15 bp, Homo sapiens
tctcaaacttctgac

SEQ ID NO: 33863 - DNA, 15 bp, Homo sapiens
gtctcaaacttctga

SEQ ID NO: 33864 - DNA, 15 bp, Homo sapiens
ggtctcaaacttctg

SEQ ID NO: 33865 - DNA, 15 bp, Homo sapiens
tggtctcaaacttct

SEQ ID NO: 33866 - DNA, 15 bp, Homo sapiens
ctggtctcaaacttc

SEQ ID NO: 33867 - DNA, 15 bp, Homo sapiens
gctggtctcaaactt

SEQ ID NO: 33868 - DNA, 15 bp, Homo sapiens
gtggggtttcaccat

SEQ ID NO: 33869 - DNA, 15 bp, Homo sapiens
tgtggggtttcacca

SEQ ID NO: 33870 - DNA, 15 bp, Homo sapiens
atgtggggtttcacc

SEQ ID NO: 33871 - DNA, 15 bp, Homo sapiens
gatgtggggtttcac

SEQ ID NO: 33872 - DNA, 15 bp, Homo sapiens
agatgtggggtttca

SEQ ID NO: 33873 - DNA, 15 bp, Homo sapiens
tagatgtggggtttc

SEQ ID NO: 33874 - DNA, 15 bp, Homo sapiens
gtagatgtggggttt

SEQ ID NO: 33875 - DNA, 15 bp, Homo sapiens
agtagatgtggggtt

SEQ ID NO: 33876 - DNA, 15 bp, Homo sapiens
tagtagatgtggggt

SEQ ID NO: 33877 - DNA, 15 bp, Homo sapiens
ttagtagatgtgggg

SEQ ID NO: 33878 - DNA, 15 bp, Homo sapiens
tttagtagatgtggg

SEQ ID NO: 33879 - DNA, 15 bp, Homo sapiens
ttttagtagatgtgg

SEQ ID NO: 33880 - DNA, 15 bp, Homo sapiens
tttttagtagatgtg

SEQ ID NO: 33881 - DNA, 15 bp, Homo sapiens
atttttagtagatgt

SEQ ID NO: 33882 - DNA, 15 bp, Homo sapiens
tatttttagtagatg

SEQ ID NO: 33883 - DNA, 15 bp, Homo sapiens
gtatttttagtagat

SEQ ID NO: 33884 - DNA, 15 bp, Homo sapiens
ccacgcccagctaat

SEQ ID NO: 33885 - DNA, 15 bp, Homo sapiens
ggccaccacgcccag

SEQ ID NO: 33886 - DNA, 15 bp, Homo sapiens
tggccaccacgccca

SEQ ID NO: 33887 - DNA, 15 bp, Homo sapiens
ttggccaccacgccc

SEQ ID NO: 33888 - DNA, 15 bp, Homo sapiens
attggccaccacgcc

SEQ ID NO: 33889 - DNA, 15 bp, Homo sapiens
cattggccaccacgc

SEQ ID NO: 33890 - DNA, 15 bp, Homo sapiens
gcattggccaccacg

SEQ ID NO: 33891 - DNA, 15 bp, Homo sapiens
ggcattggccaccac

SEQ ID NO: 33892 - DNA, 15 bp, Homo sapiens
aggcattggccacca

SEQ ID NO: 33893 - DNA, 15 bp, Homo sapiens
aaggcattggccacc

SEQ ID NO: 33894 - DNA, 15 bp, Homo sapiens
caaggcattggccac

SEQ ID NO: 33895 - DNA, 15 bp, Homo sapiens
acaaggcattggcca

SEQ ID NO: 33896 - DNA, 15 bp, Homo sapiens
tacaaggcattggcc

SEQ ID NO: 33897 - DNA, 15 bp, Homo sapiens
ttacaaggcattggc

SEQ ID NO: 33898 - DNA, 15 bp, Homo sapiens
attacaaggcattgg

SEQ ID NO: 33899 - DNA, 15 bp, Homo sapiens
gattacaaggcattg

SEQ ID NO: 33900 - DNA, 15 bp, Homo sapiens
ggattacaaggcatt

SEQ ID NO: 33901 - DNA, 15 bp, Homo sapiens
gggattacaaggcat

SEQ ID NO: 33902 - DNA, 15 bp, Homo sapiens
tgggattacaaggca

SEQ ID NO: 33903 - DNA, 15 bp, Homo sapiens
ctgggattacaaggc

SEQ ID NO: 33904 - DNA, 15 bp, Homo sapiens
gctgggattacaagg

SEQ ID NO: 33905 - DNA, 15 bp, Homo sapiens
atagctgggattaca

SEQ ID NO: 33906 - DNA, 15 bp, Homo sapiens
aatagctgggattac

SEQ ID NO: 33907 - DNA, 15 bp, Homo sapiens
gaatagctgggatta

SEQ ID NO: 33908 - DNA, 15 bp, Homo sapiens
agaatagctgggatt

SEQ ID NO: 33909 - DNA, 15 bp, Homo sapiens
cagaatagctgggat

SEQ ID NO: 33910 - DNA, 15 bp, Homo sapiens
ccagaatagctggga

SEQ ID NO: 33911 - DNA, 15 bp, Homo sapiens
tccagaatagctggg

SEQ ID NO: 33912 - DNA, 15 bp, Homo sapiens
ctccagaatagctgg

SEQ ID NO: 33913 - DNA, 15 bp, Homo sapiens
cctccagaatagctg

SEQ ID NO: 33914 - DNA, 15 bp, Homo sapiens
gcctccagaatagct

SEQ ID NO: 33915 - DNA, 15 bp, Homo sapiens
agcctccagaatagc

SEQ ID NO: 33916 - DNA, 15 bp, Homo sapiens
cagcctccagaatag

SEQ ID NO: 33917 - DNA, 15 bp, Homo sapiens
tcagcctccagaata

SEQ ID NO: 33918 - DNA, 15 bp, Homo sapiens
ctcagcctccagaat

SEQ ID NO: 33919 - DNA, 15 bp, Homo sapiens
tctcagcctccagaa

SEQ ID NO: 33920 - DNA, 15 bp, Homo sapiens
gtctcagcctccaga

SEQ ID NO: 33921 - DNA, 15 bp, Homo sapiens
tgtctcagcctccag

SEQ ID NO: 33922 - DNA, 15 bp, Homo sapiens
ctgtctcagcctcca

SEQ ID NO: 33923 - DNA, 15 bp, Homo sapiens
cctgtctcagcctcc

SEQ ID NO: 33924 - DNA, 15 bp, Homo sapiens
tcctgtctcagcctc

SEQ ID NO: 33925 - DNA, 15 bp, Homo sapiens
ctcctgtctcagcct

SEQ ID NO: 33926 - DNA, 15 bp, Homo sapiens
tctcctgtctcagcc

SEQ ID NO: 33927 - DNA, 15 bp, Homo sapiens
ttctcctgtctcagc

SEQ ID NO: 33928 - DNA, 15 bp, Homo sapiens
attctcctgtctcag

SEQ ID NO: 33929 - DNA, 15 bp, Homo sapiens
gattctcctgtctca

SEQ ID NO: 33930 - DNA, 15 bp, Homo sapiens
cgattctcctgtctc

SEQ ID NO: 33931 - DNA, 15 bp, Homo sapiens
gcgattctcctgtct

SEQ ID NO: 33932 - DNA, 15 bp, Homo sapiens
ggcgattctcctgtc

SEQ ID NO: 33933 - DNA, 15 bp, Homo sapiens
aggcgattctcctgt

SEQ ID NO: 33934 - DNA, 15 bp, Homo sapiens
caggcgattctcctg

SEQ ID NO: 33935 - DNA, 15 bp, Homo sapiens
tcaggcgattctcct

SEQ ID NO: 33936 - DNA, 15 bp, Homo sapiens
ttcaggcgattctcc

SEQ ID NO: 33937 - DNA, 15 bp, Homo sapiens
gttcaggcgattctc

SEQ ID NO: 33938 - DNA, 15 bp, Homo sapiens
ggttcaggcgattct

SEQ ID NO: 33939 - DNA, 15 bp, Homo sapiens
aggttcaggcgattc

SEQ ID NO: 33940 - DNA, 15 bp, Homo sapiens
caggttcaggcgatt

SEQ ID NO: 33941 - DNA, 15 bp, Homo sapiens
ccaggttcaggcgat

SEQ ID NO: 33942 - DNA, 15 bp, Homo sapiens
cccaggttcaggcga

SEQ ID NO: 33943 - DNA, 15 bp, Homo sapiens
tcccaggttcaggcg

SEQ ID NO: 33944 - DNA, 15 bp, Homo sapiens
ctcccaggttcaggc

SEQ ID NO: 33945 - DNA, 15 bp, Homo sapiens
cctcccaggttcagg

SEQ ID NO: 33946 - DNA, 15 bp, Homo sapiens
gcctcccaggttcag

SEQ ID NO: 33947 - DNA, 15 bp, Homo sapiens
gtgcaacctccgcct

SEQ ID NO: 33948 - DNA, 15 bp, Homo sapiens
agtgcaacctccgcc

SEQ ID NO: 33949 - DNA, 15 bp, Homo sapiens
cagtgcaacctccgc

SEQ ID NO: 33950 - DNA, 15 bp, Homo sapiens
tcagtgcaacctccg

SEQ ID NO: 33951 - DNA, 15 bp, Homo sapiens
ctcagtgcaacctcc

SEQ ID NO: 33952 - DNA, 15 bp, Homo sapiens
gctcagtgcaacctc

SEQ ID NO: 33953 - DNA, 15 bp, Homo sapiens
agctcagtgcaacct

SEQ ID NO: 33954 - DNA, 15 bp, Homo sapiens
cagctcagtgcaacc

SEQ ID NO: 33955 - DNA, 15 bp, Homo sapiens
ccagctcagtgcaac

SEQ ID NO: 33956 - DNA, 15 bp, Homo sapiens
cccagctcagtgcaa

SEQ ID NO: 33957 - DNA, 15 bp, Homo sapiens
tcccagctcagtgca

SEQ ID NO: 33958 - DNA, 15 bp, Homo sapiens
atcccagctcagtgc

SEQ ID NO: 33959 - DNA, 15 bp, Homo sapiens
aatcccagctcagtg

SEQ ID NO: 33960 - DNA, 15 bp, Homo sapiens
caatcccagctcagt

SEQ ID NO: 33961 - DNA, 15 bp, Homo sapiens
acaatcccagctcag

SEQ ID NO: 33962 - DNA, 15 bp, Homo sapiens
tacaatcccagctca

SEQ ID NO: 33963 - DNA, 15 bp, Homo sapiens
gtacaatcccagctc

SEQ ID NO: 33964 - DNA, 15 bp, Homo sapiens
ggtacaatcccagct

SEQ ID NO: 33965 - DNA, 15 bp, Homo sapiens
tggtacaatcccagc

SEQ ID NO: 33966 - DNA, 15 bp, Homo sapiens
gtggtacaatcccag

SEQ ID NO: 33967 - DNA, 15 bp, Homo sapiens
agtggtacaatccca

SEQ ID NO: 33968 - DNA, 15 bp, Homo sapiens
cagtggtacaatccc

SEQ ID NO: 33969 - DNA, 15 bp, Homo sapiens
gcagtggtacaatcc

SEQ ID NO: 33970 - DNA, 15 bp, Homo sapiens
tgcagtggtacaatc

SEQ ID NO: 33971 - DNA, 15 bp, Homo sapiens
gtgcagtggtacaat

SEQ ID NO: 33972 - DNA, 15 bp, Homo sapiens
agtgcagtggtacaa

SEQ ID NO: 33973 - DNA, 15 bp, Homo sapiens
gagtgcagtggtaca

SEQ ID NO: 33974 - DNA, 15 bp, Homo sapiens
ggagtgcagtggtac

SEQ ID NO: 33975 - DNA, 15 bp, Homo sapiens
tggagtgcagtggta

SEQ ID NO: 33976 - DNA, 15 bp, Homo sapiens
ttgtcacccaggctg

SEQ ID NO: 33977 - DNA, 15 bp, Homo sapiens
tttgtcacccaggct

SEQ ID NO: 33978 - DNA, 15 bp, Homo sapiens
ctttgtcacccaggc

SEQ ID NO: 33979 - DNA, 15 bp, Homo sapiens
actttgtcacccagg

SEQ ID NO: 33980 - DNA, 15 bp, Homo sapiens
cactttgtcacccag

SEQ ID NO: 33981 - DNA, 15 bp, Homo sapiens
tcactttgtcaccca

SEQ ID NO: 33982 - DNA, 15 bp, Homo sapiens
ctcactttgtcaccc

SEQ ID NO: 33983 - DNA, 15 bp, Homo sapiens
tctcactttgtcacc

SEQ ID NO: 33984 - DNA, 15 bp, Homo sapiens
gtctcactttgtcac

SEQ ID NO: 33985 - DNA, 15 bp, Homo sapiens
agtctcactttgtca

SEQ ID NO: 33986 - DNA, 15 bp, Homo sapiens
gagtctcactttgtc

SEQ ID NO: 33987 - DNA, 15 bp, Homo sapiens
ggagtctcactttgt

SEQ ID NO: 33988 - DNA, 15 bp, Homo sapiens
tggagtctcactttg

SEQ ID NO: 33989 - DNA, 15 bp, Homo sapiens
atggagtctcacttt

SEQ ID NO: 33990 - DNA, 15 bp, Homo sapiens
gatggagtctcactt

SEQ ID NO: 33991 - DNA, 15 bp, Homo sapiens
tgagatggagtctca

SEQ ID NO: 33992 - DNA, 15 bp, Homo sapiens
gtttttgagatggag

SEQ ID NO: 33993 - DNA, 15 bp, Homo sapiens
tgtttttgagatgga

SEQ ID NO: 33994 - DNA, 15 bp, Homo sapiens
ttgtttttgagatgg

SEQ ID NO: 33995 - DNA, 15 bp, Homo sapiens
tttgtttttgagatg

SEQ ID NO: 33996 - DNA, 15 bp, Homo sapiens
gtttgtttttgagat

SEQ ID NO: 33997 - DNA, 15 bp, Homo sapiens
tgtttgtttttgaga

SEQ ID NO: 33998 - DNA, 15 bp, Homo sapiens
ttgtttgtttttgag

SEQ ID NO: 33999 - DNA, 15 bp, Homo sapiens
tttgtttgtttttga

SEQ ID NO: 34000 - DNA, 15 bp, Homo sapiens
gtttgtttgtttttg

SEQ ID NO: 34001 - DNA, 15 bp, Homo sapiens
tgtttgtttgttttt

SEQ ID NO: 34002 - DNA, 15 bp, Homo sapiens
ttgtttgtttgtttt

SEQ ID NO: 34003 - DNA, 15 bp, Homo sapiens
tttgtttgtttgttt

SEQ ID NO: 34004 - DNA, 15 bp, Homo sapiens
ttttgtttgtttgtt

SEQ ID NO: 34005 - DNA, 15 bp, Homo sapiens
tttttgtttgtttgt

SEQ ID NO: 34006 - DNA, 15 bp, Homo sapiens
gtttttgtttgtttg

SEQ ID NO: 34007 - DNA, 15 bp, Homo sapiens
tgtttttgtttgttt

SEQ ID NO: 34008 - DNA, 15 bp, Homo sapiens
gtgtttttgtttgtt

SEQ ID NO: 34009 - DNA, 15 bp, Homo sapiens
tgtgtttttgtttgt

SEQ ID NO: 34010 - DNA, 15 bp, Homo sapiens
atgtgtttttgtttg

SEQ ID NO: 34011 - DNA, 15 bp, Homo sapiens
gatgtgtttttgttt

SEQ ID NO: 34012 - DNA, 15 bp, Homo sapiens
tgatgtgtttttgtt

SEQ ID NO: 34013 - DNA, 15 bp, Homo sapiens
atgatgtgtttttgt

SEQ ID NO: 34014 - DNA, 15 bp, Homo sapiens
aatgatgtgtttttg

SEQ ID NO: 34015 - DNA, 15 bp, Homo sapiens
aaatgatgtgttttt

SEQ ID NO: 34016 - DNA, 15 bp, Homo sapiens
gaaatgatgtgtttt

SEQ ID NO: 34017 - DNA, 15 bp, Homo sapiens
ggaaatgatgtgttt

SEQ ID NO: 34018 - DNA, 15 bp, Homo sapiens
gggaaatgatgtgtt

SEQ ID NO: 34019 - DNA, 15 bp, Homo sapiens
ggggaaatgatgtgt

SEQ ID NO: 34020 - DNA, 15 bp, Homo sapiens
aggggaaatgatgtg

SEQ ID NO: 34021 - DNA, 15 bp, Homo sapiens
taggggaaatgatgt

SEQ ID NO: 34022 - DNA, 15 bp, Homo sapiens
ataggggaaatgatg

SEQ ID NO: 34023 - DNA, 15 bp, Homo sapiens
tataggggaaatgat

SEQ ID NO: 34024 - DNA, 15 bp, Homo sapiens
ctataggggaaatga

SEQ ID NO: 34025 - DNA, 15 bp, Homo sapiens
gctataggggaaatg

SEQ ID NO: 34026 - DNA, 15 bp, Homo sapiens
tgctataggggaaat

SEQ ID NO: 34027 - DNA, 15 bp, Homo sapiens
ttgctataggggaaa

SEQ ID NO: 34028 - DNA, 15 bp, Homo sapiens
tttgctataggggaa

SEQ ID NO: 34029 - DNA, 15 bp, Homo sapiens
ttttgctatagggga

SEQ ID NO: 34030 - DNA, 15 bp, Homo sapiens
tttttgctatagggg

SEQ ID NO: 34031 - DNA, 15 bp, Homo sapiens
gtttttgctataggg

SEQ ID NO: 34032 - DNA, 15 bp, Homo sapiens
tgtttttgctatagg

SEQ ID NO: 34033 - DNA, 15 bp, Homo sapiens
atgtttttgctatag

SEQ ID NO: 34034 - DNA, 15 bp, Homo sapiens
catgtttttgctata

SEQ ID NO: 34035 - DNA, 15 bp, Homo sapiens
tcatgtttttgctat

SEQ ID NO: 34036 - DNA, 15 bp, Homo sapiens
gtcatgtttttgcta

SEQ ID NO: 34037 - DNA, 15 bp, Homo sapiens
cgtcatgtttttgct

SEQ ID NO: 34038 - DNA, 15 bp, Homo sapiens
ccgtcatgtttttgc

SEQ ID NO: 34039 - DNA, 15 bp, Homo sapiens
gccgtcatgtttttg

SEQ ID NO: 34040 - DNA, 15 bp, Homo sapiens
tgccgtcatgttttt

SEQ ID NO: 34041 - DNA, 15 bp, Homo sapiens
gtgccgtcatgtttt

SEQ ID NO: 34042 - DNA, 15 bp, Homo sapiens
agtgccgtcatgttt

SEQ ID NO: 34043 - DNA, 15 bp, Homo sapiens
aagtgccgtcatgtt

SEQ ID NO: 34044 - DNA, 15 bp, Homo sapiens
taagtgccgtcatgt

SEQ ID NO: 34045 - DNA, 15 bp, Homo sapiens
gtaagtgccgtcatg

SEQ ID NO: 34046 - DNA, 15 bp, Homo sapiens
agtaagtgccgtcat

SEQ ID NO: 34047 - DNA, 15 bp, Homo sapiens
cagtaagtgccgtca

SEQ ID NO: 34048 - DNA, 15 bp, Homo sapiens
acagtaagtgccgtc

SEQ ID NO: 34049 - DNA, 15 bp, Homo sapiens
tacagtaagtgccgt

SEQ ID NO: 34050 - DNA, 15 bp, Homo sapiens
atacagtaagtgccg

SEQ ID NO: 34051 - DNA, 15 bp, Homo sapiens
gatacagtaagtgcc

SEQ ID NO: 34052 - DNA, 15 bp, Homo sapiens
tgatacagtaagtgc

SEQ ID NO: 34053 - DNA, 15 bp, Homo sapiens
ttgatacagtaagtg

SEQ ID NO: 34054 - DNA, 15 bp, Homo sapiens
cttgatacagtaagt

SEQ ID NO: 34055 - DNA, 15 bp, Homo sapiens
tcttgatacagtaag

SEQ ID NO: 34056 - DNA, 15 bp, Homo sapiens
ctcttgatacagtaa

SEQ ID NO: 34057 - DNA, 15 bp, Homo sapiens
tctcttgatacagta

SEQ ID NO: 34058 - DNA, 15 bp, Homo sapiens
ctctcttgatacagt

SEQ ID NO: 34059 - DNA, 15 bp, Homo sapiens
cctctcttgatacag

SEQ ID NO: 34060 - DNA, 15 bp, Homo sapiens
acctctcttgataca

SEQ ID NO: 34061 - DNA, 15 bp, Homo sapiens
cacctctcttgatac

SEQ ID NO: 34062 - DNA, 15 bp, Homo sapiens
tcacctctcttgata

SEQ ID NO: 34063 - DNA, 15 bp, Homo sapiens
ctcacctctcttgat

SEQ ID NO: 34064 - DNA, 15 bp, Homo sapiens
tctcacctctcttga

SEQ ID NO: 34065 - DNA, 15 bp, Homo sapiens
ttctcacctctcttg

SEQ ID NO: 34066 - DNA, 15 bp, Homo sapiens
tttctcacctctctt

SEQ ID NO: 34067 - DNA, 15 bp, Homo sapiens
ttttctcacctctct

SEQ ID NO: 34068 - DNA, 15 bp, Homo sapiens
tttttctcacctctc

SEQ ID NO: 34069 - DNA, 15 bp, Homo sapiens
ctttttctcacctct

SEQ ID NO: 34070 - DNA, 15 bp, Homo sapiens
cctttttctcacctc

SEQ ID NO: 34071 - DNA, 15 bp, Homo sapiens
tcctttttctcacct

SEQ ID NO: 34072 - DNA, 15 bp, Homo sapiens
ctcctttttctcacc

SEQ ID NO: 34073 - DNA, 15 bp, Homo sapiens
gctcctttttctcac

SEQ ID NO: 34074 - DNA, 15 bp, Homo sapiens
ggctcctttttctca

SEQ ID NO: 34075 - DNA, 15 bp, Homo sapiens
tggctcctttttctc

SEQ ID NO: 34076 - DNA, 15 bp, Homo sapiens
gtggctcctttttct

SEQ ID NO: 34077 - DNA, 15 bp, Homo sapiens
tgtggctcctttttc

SEQ ID NO: 34078 - DNA, 15 bp, Homo sapiens
ctgtggctccttttt

SEQ ID NO: 34079 - DNA, 15 bp, Homo sapiens
gctgtggctcctttt

SEQ ID NO: 34080 - DNA, 15 bp, Homo sapiens
tgctgtggctccttt

SEQ ID NO: 34081 - DNA, 15 bp, Homo sapiens
ctgctgtggctcctt

SEQ ID NO: 34082 - DNA, 15 bp, Homo sapiens
cctgctgtggctcct

SEQ ID NO: 34083 - DNA, 15 bp, Homo sapiens
tcctgctgtggctcc

SEQ ID NO: 34084 - DNA, 15 bp, Homo sapiens
atcctgctgtggctc

SEQ ID NO: 34085 - DNA, 15 bp, Homo sapiens
catcctgctgtggct

SEQ ID NO: 34086 - DNA, 15 bp, Homo sapiens
tcatcctgctgtggc

SEQ ID NO: 34087 - DNA, 15 bp, Homo sapiens
atcatcctgctgtgg

SEQ ID NO: 34088 - DNA, 15 bp, Homo sapiens
aatcatcctgctgtg

SEQ ID NO: 34089 - DNA, 15 bp, Homo sapiens
gaatcatcctgctgt

SEQ ID NO: 34090 - DNA, 15 bp, Homo sapiens
tgaatcatcctgctg

SEQ ID NO: 34091 - DNA, 15 bp, Homo sapiens
ttgaatcatcctgct

SEQ ID NO: 34092 - DNA, 15 bp, Homo sapiens
cttgaatcatcctgc

SEQ ID NO: 34093 - DNA, 15 bp, Homo sapiens
ccttgaatcatcctg

SEQ ID NO: 34094 - DNA, 15 bp, Homo sapiens
cccttgaatcatcct

SEQ ID NO: 34095 - DNA, 15 bp, Homo sapiens
tcccttgaatcatcc

SEQ ID NO: 34096 - DNA, 15 bp, Homo sapiens
gtcccttgaatcatc

SEQ ID NO: 34097 - DNA, 15 bp, Homo sapiens
agtcccttgaatcat

SEQ ID NO: 34098 - DNA, 15 bp, Homo sapiens
gagtcccttgaatca

SEQ ID NO: 34099 - DNA, 15 bp, Homo sapiens
agagtcccttgaatc

SEQ ID NO: 34100 - DNA, 15 bp, Homo sapiens
cagagtcccttgaat

SEQ ID NO: 34101 - DNA, 15 bp, Homo sapiens
gcagagtcccttgaa

SEQ ID NO: 34102 - DNA, 15 bp, Homo sapiens
tgcagagtcccttga

SEQ ID NO: 34103 - DNA, 15 bp, Homo sapiens
atgcagagtcccttg

SEQ ID NO: 34104 - DNA, 15 bp, Homo sapiens
tatgcagagtccctt

SEQ ID NO: 34105 - DNA, 15 bp, Homo sapiens
ctatgcagagtccct

SEQ ID NO: 34106 - DNA, 15 bp, Homo sapiens
gctatgcagagtccc

SEQ ID NO: 34107 - DNA, 15 bp, Homo sapiens
agctatgcagagtcc

SEQ ID NO: 34108 - DNA, 15 bp, Homo sapiens
gagctatgcagagtc

SEQ ID NO: 34109 - DNA, 15 bp, Homo sapiens
ggagctatgcagagt

SEQ ID NO: 34110 - DNA, 15 bp, Homo sapiens
tggagctatgcagag

SEQ ID NO: 34111 - DNA, 15 bp, Homo sapiens
atggagctatgcaga

SEQ ID NO: 34112 - DNA, 15 bp, Homo sapiens
aatggagctatgcag

SEQ ID NO: 34113 - DNA, 15 bp, Homo sapiens
aaatggagctatgca

SEQ ID NO: 34114 - DNA, 15 bp, Homo sapiens
aaaatggagctatgc

SEQ ID NO: 34115 - DNA, 15 bp, Homo sapiens
taaaatggagctatg

SEQ ID NO: 34116 - DNA, 15 bp, Homo sapiens
ttaaaatggagctat

SEQ ID NO: 34117 - DNA, 15 bp, Homo sapiens
cttaaaatggagcta

SEQ ID NO: 34118 - DNA, 15 bp, Homo sapiens
tcttaaaatggagct

SEQ ID NO: 34119 - DNA, 15 bp, Homo sapiens
ttcttaaaatggagc

SEQ ID NO: 34120 - DNA, 15 bp, Homo sapiens
attcttaaaatggag

SEQ ID NO: 34121 - DNA, 15 bp, Homo sapiens
tattcttaaaatgga

SEQ ID NO: 34122 - DNA, 15 bp, Homo sapiens
atattcttaaaatgg

SEQ ID NO: 34123 - DNA, 15 bp, Homo sapiens
catattcttaaaatg

SEQ ID NO: 34124 - DNA, 15 bp, Homo sapiens
gcatattcttaaaat

SEQ ID NO: 34125 - DNA, 15 bp, Homo sapiens
ggcatattcttaaaa

SEQ ID NO: 34126 - DNA, 15 bp, Homo sapiens
aggcatattcttaaa

SEQ ID NO: 34127 - DNA, 15 bp, Homo sapiens
taggcatattcttaa

SEQ ID NO: 34128 - DNA, 15 bp, Homo sapiens
gtaggcatattctta

SEQ ID NO: 34129 - DNA, 15 bp, Homo sapiens
agtaggcatattctt

SEQ ID NO: 34130 - DNA, 15 bp, Homo sapiens
cagtaggcatattct

SEQ ID NO: 34131 - DNA, 15 bp, Homo sapiens
gcagtaggcatattc

SEQ ID NO: 34132 - DNA, 15 bp, Homo sapiens
tgcagtaggcatatt

SEQ ID NO: 34133 - DNA, 15 bp, Homo sapiens
ctgcagtaggcatat

SEQ ID NO: 34134 - DNA, 15 bp, Homo sapiens
cctgcagtaggcata

SEQ ID NO: 34135 - DNA, 15 bp, Homo sapiens
acctgcagtaggcat

SEQ ID NO: 34136 - DNA, 15 bp, Homo sapiens
gacctgcagtaggca

SEQ ID NO: 34137 - DNA, 15 bp, Homo sapiens
tgacctgcagtaggc

SEQ ID NO: 34138 - DNA, 15 bp, Homo sapiens
ctgacctgcagtagg

SEQ ID NO: 34139 - DNA, 15 bp, Homo sapiens
tctgacctgcagtag

SEQ ID NO: 34140 - DNA, 15 bp, Homo sapiens
ctctgacctgcagta

SEQ ID NO: 34141 - DNA, 15 bp, Homo sapiens
tctctgacctgcagt

SEQ ID NO: 34142 - DNA, 15 bp, Homo sapiens
ttctctgacctgcag

SEQ ID NO: 34143 - DNA, 15 bp, Homo sapiens
cttctctgacctgca

SEQ ID NO: 34144 - DNA, 15 bp, Homo sapiens
ccttctctgacctgc

SEQ ID NO: 34145 - DNA, 15 bp, Homo sapiens
accttctctgacctg

SEQ ID NO: 34146 - DNA, 15 bp, Homo sapiens
taccttctctgacct

SEQ ID NO: 34147 - DNA, 15 bp, Homo sapiens
ttaccttctctgacc

SEQ ID NO: 34148 - DNA, 15 bp, Homo sapiens
cttaccttctctgac

SEQ ID NO: 34149 - DNA, 15 bp, Homo sapiens
gcttaccttctctga

SEQ ID NO: 34150 - DNA, 15 bp, Homo sapiens
tgcttaccttctctg

SEQ ID NO: 34151 - DNA, 15 bp, Homo sapiens
ttgcttaccttctct

SEQ ID NO: 34152 - DNA, 15 bp, Homo sapiens
tttgcttaccttctc

SEQ ID NO: 34153 - DNA, 15 bp, Homo sapiens
gtttgcttaccttct

SEQ ID NO: 34154 - DNA, 15 bp, Homo sapiens
agtttgcttaccttc

SEQ ID NO: 34155 - DNA, 15 bp, Homo sapiens
cagtttgcttacctt

SEQ ID NO: 34156 - DNA, 15 bp, Homo sapiens
gcagtttgcttacct

SEQ ID NO: 34157 - DNA, 15 bp, Homo sapiens
ggcagtttgcttacc

SEQ ID NO: 34158 - DNA, 15 bp, Homo sapiens
aggcagtttgcttac

SEQ ID NO: 34159 - DNA, 15 bp, Homo sapiens
taggcagtttgctta

SEQ ID NO: 34160 - DNA, 15 bp, Homo sapiens
ttaggcagtttgctt

SEQ ID NO: 34161 - DNA, 15 bp, Homo sapiens
cttaggcagtttgct

SEQ ID NO: 34162 - DNA, 15 bp, Homo sapiens
ccttaggcagtttgc

SEQ ID NO: 34163 - DNA, 15 bp, Homo sapiens
gccttaggcagtttg

SEQ ID NO: 34164 - DNA, 15 bp, Homo sapiens
ggccttaggcagttt

SEQ ID NO: 34165 - DNA, 15 bp, Homo sapiens
tggccttaggcagtt

SEQ ID NO: 34166 - DNA, 15 bp, Homo sapiens
gtggccttaggcagt

SEQ ID NO: 34167 - DNA, 15 bp, Homo sapiens
tgtggccttaggcag

SEQ ID NO: 34168 - DNA, 15 bp, Homo sapiens
gtgtggccttaggca

SEQ ID NO: 34169 - DNA, 15 bp, Homo sapiens
tgtgtggccttaggc

SEQ ID NO: 34170 - DNA, 15 bp, Homo sapiens
ctgtgtggccttagg

SEQ ID NO: 34171 - DNA, 15 bp, Homo sapiens
gctgtgtggccttag

SEQ ID NO: 34172 - DNA, 15 bp, Homo sapiens
ggctgtgtggcctta

SEQ ID NO: 34173 - DNA, 15 bp, Homo sapiens
tggctgtgtggcctt

SEQ ID NO: 34174 - DNA, 15 bp, Homo sapiens
ctggctgtgtggcct

SEQ ID NO: 34175 - DNA, 15 bp, Homo sapiens
cctggctgtgtggcc

SEQ ID NO: 34176 - DNA, 15 bp, Homo sapiens
acctggctgtgtggc

SEQ ID NO: 34177 - DNA, 15 bp, Homo sapiens
tacctggctgtgtgg

SEQ ID NO: 34178 - DNA, 15 bp, Homo sapiens
gtacctggctgtgtg

SEQ ID NO: 34179 - DNA, 15 bp, Homo sapiens
tgtacctggctgtgt

SEQ ID NO: 34180 - DNA, 15 bp, Homo sapiens
ctgtacctggctgtg

SEQ ID NO: 34181 - DNA, 15 bp, Homo sapiens
tctgtacctggctgt

SEQ ID NO: 34182 - DNA, 15 bp, Homo sapiens
ttctgtacctggctg

SEQ ID NO: 34183 - DNA, 15 bp, Homo sapiens
gttctgtacctggct

SEQ ID NO: 34184 - DNA, 15 bp, Homo sapiens
agttctgtacctggc

SEQ ID NO: 34185 - DNA, 15 bp, Homo sapiens
gagttctgtacctgg

SEQ ID NO: 34186 - DNA, 15 bp, Homo sapiens
agagttctgtacctg

SEQ ID NO: 34187 - DNA, 15 bp, Homo sapiens
gagagttctgtacct

SEQ ID NO: 34188 - DNA, 15 bp, Homo sapiens
tgagagttctgtacc

SEQ ID NO: 34189 - DNA, 15 bp, Homo sapiens
gtgagagttctgtac

SEQ ID NO: 34190 - DNA, 15 bp, Homo sapiens
ggtgagagttctgta

SEQ ID NO: 34191 - DNA, 15 bp, Homo sapiens
tggtgagagttctgt

SEQ ID NO: 34192 - DNA, 15 bp, Homo sapiens
ttggtgagagttctg

SEQ ID NO: 34193 - DNA, 15 bp, Homo sapiens
attggtgagagttct

SEQ ID NO: 34194 - DNA, 15 bp, Homo sapiens
tattggtgagagttc

SEQ ID NO: 34195 - DNA, 15 bp, Homo sapiens
atattggtgagagtt

SEQ ID NO: 34196 - DNA, 15 bp, Homo sapiens
aatattggtgagagt

SEQ ID NO: 34197 - DNA, 15 bp, Homo sapiens
taatattggtgagag

SEQ ID NO: 34198 - DNA, 15 bp, Homo sapiens
ataatattggtgaga

SEQ ID NO: 34199 - DNA, 15 bp, Homo sapiens
aataatattggtgag

SEQ ID NO: 34200 - DNA, 15 bp, Homo sapiens
caataatattggtga

SEQ ID NO: 34201 - DNA, 15 bp, Homo sapiens
gcaataatattggtg

SEQ ID NO: 34202 - DNA, 15 bp, Homo sapiens
ggcaataatattggt

SEQ ID NO: 34203 - DNA, 15 bp, Homo sapiens
tggcaataatattgg

SEQ ID NO: 34204 - DNA, 15 bp, Homo sapiens
ctggcaataatattg

SEQ ID NO: 34205 - DNA, 15 bp, Homo sapiens
gctggcaataatatt

SEQ ID NO: 34206 - DNA, 15 bp, Homo sapiens
tgctggcaataatat

SEQ ID NO: 34207 - DNA, 15 bp, Homo sapiens
ttgctggcaataata

SEQ ID NO: 34208 - DNA, 15 bp, Homo sapiens
attgctggcaataat

SEQ ID NO: 34209 - DNA, 15 bp, Homo sapiens
gattgctggcaataa

SEQ ID NO: 34210 - DNA, 15 bp, Homo sapiens
cgattgctggcaata

SEQ ID NO: 34211 - DNA, 15 bp, Homo sapiens
gcgattgctggcaat

SEQ ID NO: 34212 - DNA, 15 bp, Homo sapiens
tgcgattgctggcaa

SEQ ID NO: 34213 - DNA, 15 bp, Homo sapiens
ttgcgattgctggca

SEQ ID NO: 34214 - DNA, 15 bp, Homo sapiens
attgcgattgctggc

SEQ ID NO: 34215 - DNA, 15 bp, Homo sapiens
aattgcgattgctgg

SEQ ID NO: 34216 - DNA, 15 bp, Homo sapiens
aaattgcgattgctg

SEQ ID NO: 34217 - DNA, 15 bp, Homo sapiens
aaaattgcgattgct

SEQ ID NO: 34218 - DNA, 15 bp, Homo sapiens
caaaattgcgattgc

SEQ ID NO: 34219 - DNA, 15 bp, Homo sapiens
ccaaaattgcgattg

SEQ ID NO: 34220 - DNA, 15 bp, Homo sapiens
accaaaattgcgatt

SEQ ID NO: 34221 - DNA, 15 bp, Homo sapiens
caccaaaattgcgat

SEQ ID NO: 34222 - DNA, 15 bp, Homo sapiens
acaccaaaattgcga

SEQ ID NO: 34223 - DNA, 15 bp, Homo sapiens
aacaccaaaattgcg

SEQ ID NO: 34224 - DNA, 15 bp, Homo sapiens
aaacaccaaaattgc

SEQ ID NO: 34225 - DNA, 15 bp, Homo sapiens
taaacaccaaaattg

SEQ ID NO: 34226 - DNA, 15 bp, Homo sapiens
ataaacaccaaaatt

SEQ ID NO: 34227 - DNA, 15 bp, Homo sapiens
aataaacaccaaaat

SEQ ID NO: 34228 - DNA, 15 bp, Homo sapiens
gaataaacaccaaaa

SEQ ID NO: 34229 - DNA, 15 bp, Homo sapiens
agaataaacaccaaa

SEQ ID NO: 34230 - DNA, 15 bp, Homo sapiens
aagaataaacaccaa

SEQ ID NO: 34231 - DNA, 15 bp, Homo sapiens
caagaataaacacca

SEQ ID NO: 34232 - DNA, 15 bp, Homo sapiens
ccaagaataaacacc

SEQ ID NO: 34233 - DNA, 15 bp, Homo sapiens
accaagaataaacac

SEQ ID NO: 34234 - DNA, 15 bp, Homo sapiens
taccaagaataaaca

SEQ ID NO: 34235 - DNA, 15 bp, Homo sapiens
gtaccaagaataaac

SEQ ID NO: 34236 - DNA, 15 bp, Homo sapiens
ggtaccaagaataaa

SEQ ID NO: 34237 - DNA, 15 bp, Homo sapiens
tggtaccaagaataa

SEQ ID NO: 34238 - DNA, 15 bp, Homo sapiens
ttggtaccaagaata

SEQ ID NO: 34239 - DNA, 15 bp, Homo sapiens
cttggtaccaagaat

SEQ ID NO: 34240 - DNA, 15 bp, Homo sapiens
acttggtaccaagaa

SEQ ID NO: 34241 - DNA, 15 bp, Homo sapiens
aacttggtaccaaga

SEQ ID NO: 34242 - DNA, 15 bp, Homo sapiens
caacttggtaccaag

SEQ ID NO: 34243 - DNA, 15 bp, Homo sapiens
ccaacttggtaccaa

SEQ ID NO: 34244 - DNA, 15 bp, Homo sapiens
tccaacttggtacca

SEQ ID NO: 34245 - DNA, 15 bp, Homo sapiens
ctccaacttggtacc

SEQ ID NO: 34246 - DNA, 15 bp, Homo sapiens
tctccaacttggtac

SEQ ID NO: 34247 - DNA, 15 bp, Homo sapiens
gtctccaacttggta

SEQ ID NO: 34248 - DNA, 15 bp, Homo sapiens
agtctccaacttggt

SEQ ID NO: 34249 - DNA, 15 bp, Homo sapiens
tagtctccaacttgg

SEQ ID NO: 34250 - DNA, 15 bp, Homo sapiens
atagtctccaacttg

SEQ ID NO: 34251 - DNA, 15 bp, Homo sapiens
tatagtctccaactt

SEQ ID NO: 34252 - DNA, 15 bp, Homo sapiens
ctatagtctccaact

SEQ ID NO: 34253 - DNA, 15 bp, Homo sapiens
cctatagtctccaac

SEQ ID NO: 34254 - DNA, 15 bp, Homo sapiens
ccctatagtctccaa

SEQ ID NO: 34255 - DNA, 15 bp, Homo sapiens
accctatagtctcca

SEQ ID NO: 34256 - DNA, 15 bp, Homo sapiens
aaccctatagtctcc

SEQ ID NO: 34257 - DNA, 15 bp, Homo sapiens
gaaccctatagtctc

SEQ ID NO: 34258 - DNA, 15 bp, Homo sapiens
agaaccctatagtct

SEQ ID NO: 34259 - DNA, 15 bp, Homo sapiens
gagaaccctatagtc

SEQ ID NO: 34260 - DNA, 15 bp, Homo sapiens
agagaaccctatagt

SEQ ID NO: 34261 - DNA, 15 bp, Homo sapiens
aagagaaccctatag

SEQ ID NO: 34262 - DNA, 15 bp, Homo sapiens
gaagagaaccctata

SEQ ID NO: 34263 - DNA, 15 bp, Homo sapiens
ggaagagaaccctat

SEQ ID NO: 34264 - DNA, 15 bp, Homo sapiens
aggaagagaacccta

SEQ ID NO: 34265 - DNA, 15 bp, Homo sapiens
taggaagagaaccct

SEQ ID NO: 34266 - DNA, 15 bp, Homo sapiens
ttaggaagagaaccc

SEQ ID NO: 34267 - DNA, 15 bp, Homo sapiens
attaggaagagaacc

SEQ ID NO: 34268 - DNA, 15 bp, Homo sapiens
tattaggaagagaac

SEQ ID NO: 34269 - DNA, 15 bp, Homo sapiens
ctattaggaagagaa

SEQ ID NO: 34270 - DNA, 15 bp, Homo sapiens
tctattaggaagaga

SEQ ID NO: 34271 - DNA, 15 bp, Homo sapiens
ctctattaggaagag

SEQ ID NO: 34272 - DNA, 15 bp, Homo sapiens
tctctattaggaaga

SEQ ID NO: 34273 - DNA, 15 bp, Homo sapiens
gtctctattaggaag

SEQ ID NO: 34274 - DNA, 15 bp, Homo sapiens
ggtctctattaggaa

SEQ ID NO: 34275 - DNA, 15 bp, Homo sapiens
tggtctctattagga

SEQ ID NO: 34276 - DNA, 15 bp, Homo sapiens
atggtctctattagg

SEQ ID NO: 34277 - DNA, 15 bp, Homo sapiens
gatggtctctattag

SEQ ID NO: 34278 - DNA, 15 bp, Homo sapiens
agatggtctctatta

SEQ ID NO: 34279 - DNA, 15 bp, Homo sapiens
tagatggtctctatt

SEQ ID NO: 34280 - DNA, 15 bp, Homo sapiens
ctagatggtctctat

SEQ ID NO: 34281 - DNA, 15 bp, Homo sapiens
gctagatggtctcta

SEQ ID NO: 34282 - DNA, 15 bp, Homo sapiens
ggctagatggtctct

SEQ ID NO: 34283 - DNA, 15 bp, Homo sapiens
aggctagatggtctc

SEQ ID NO: 34284 - DNA, 15 bp, Homo sapiens
aaggctagatggtct

SEQ ID NO: 34285 - DNA, 15 bp, Homo sapiens
aaaggctagatggtc

SEQ ID NO: 34286 - DNA, 15 bp, Homo sapiens
gaaaggctagatggt

SEQ ID NO: 34287 - DNA, 15 bp, Homo sapiens
tgaaaggctagatgg

SEQ ID NO: 34288 - DNA, 15 bp, Homo sapiens
gtgaaaggctagatg

SEQ ID NO: 34289 - DNA, 15 bp, Homo sapiens
agtgaaaggctagat

SEQ ID NO: 34290 - DNA, 15 bp, Homo sapiens
cagtgaaaggctaga

SEQ ID NO: 34291 - DNA, 15 bp, Homo sapiens
acagtgaaaggctag

SEQ ID NO: 34292 - DNA, 15 bp, Homo sapiens
aacagtgaaaggcta

SEQ ID NO: 34293 - DNA, 15 bp, Homo sapiens
aaacagtgaaaggct

SEQ ID NO: 34294 - DNA, 15 bp, Homo sapiens
aaaacagtgaaaggc

SEQ ID NO: 34295 - DNA, 15 bp, Homo sapiens
caaaacagtgaaagg

SEQ ID NO: 34296 - DNA, 15 bp, Homo sapiens
acaaaacagtgaaag

SEQ ID NO: 34297 - DNA, 15 bp, Homo sapiens
cacaaaacagtgaaa

SEQ ID NO: 34298 - DNA, 15 bp, Homo sapiens
ccacaaaacagtgaa

SEQ ID NO: 34299 - DNA, 15 bp, Homo sapiens
tccacaaaacagtga

SEQ ID NO: 34300 - DNA, 15 bp, Homo sapiens
atccacaaaacagtg

SEQ ID NO: 34301 - DNA, 15 bp, Homo sapiens
tatccacaaaacagt

SEQ ID NO: 34302 - DNA, 15 bp, Homo sapiens
gtatccacaaaacag

SEQ ID NO: 34303 - DNA, 15 bp, Homo sapiens
agtatccacaaaaca

SEQ ID NO: 34304 - DNA, 15 bp, Homo sapiens
aagtatccacaaaac

SEQ ID NO: 34305 - DNA, 15 bp, Homo sapiens
gaagtatccacaaaa

SEQ ID NO: 34306 - DNA, 15 bp, Homo sapiens
agaagtatccacaaa

SEQ ID NO: 34307 - DNA, 15 bp, Homo sapiens
aagaagtatccacaa

SEQ ID NO: 34308 - DNA, 15 bp, Homo sapiens
aaagaagtatccaca

SEQ ID NO: 34309 - DNA, 15 bp, Homo sapiens
gaaagaagtatccac

SEQ ID NO: 34310 - DNA, 15 bp, Homo sapiens
agaaagaagtatcca

SEQ ID NO: 34311 - DNA, 15 bp, Homo sapiens
gagaaagaagtatcc

SEQ ID NO: 34312 - DNA, 15 bp, Homo sapiens
agagaaagaagtatc

SEQ ID NO: 34313 - DNA, 15 bp, Homo sapiens
aagagaaagaagtat

SEQ ID NO: 34314 - DNA, 15 bp, Homo sapiens
gaagagaaagaagta

SEQ ID NO: 34315 - DNA, 15 bp, Homo sapiens
agaagagaaagaagt

SEQ ID NO: 34316 - DNA, 15 bp, Homo sapiens
aagaagagaaagaag

SEQ ID NO: 34317 - DNA, 15 bp, Homo sapiens
gaagaagagaaagaa

SEQ ID NO: 34318 - DNA, 15 bp, Homo sapiens
agaagaagagaaaga

SEQ ID NO: 34319 - DNA, 15 bp, Homo sapiens
aagaagaagagaaag

SEQ ID NO: 34320 - DNA, 15 bp, Homo sapiens
aaagaagaagagaaa

SEQ ID NO: 34321 - DNA, 15 bp, Homo sapiens
aaaagaagaagagaa

SEQ ID NO: 34322 - DNA, 15 bp, Homo sapiens
aaaaagaagaagaga

SEQ ID NO: 34323 - DNA, 15 bp, Homo sapiens
aaaaaagaagaagag

SEQ ID NO: 34324 - DNA, 15 bp, Homo sapiens
aaaaaaagaagaaga

SEQ ID NO: 34325 - DNA, 15 bp, Homo sapiens
aaaaaaaagaagaag

SEQ ID NO: 34326 - DNA, 15 bp, Homo sapiens
aaaaaaaaagaagaa

SEQ ID NO: 34327 - DNA, 15 bp, Homo sapiens
aaaaaaaaaagaaga

SEQ ID NO: 34328 - DNA, 15 bp, Homo sapiens
aaaaaaaaaaagaag

SEQ ID NO: 34329 - DNA, 15 bp, Homo sapiens
gaaaaaaaaaaagaa

SEQ ID NO: 34330 - DNA, 15 bp, Homo sapiens
ggaaaaaaaaaaaga

SEQ ID NO: 34331 - DNA, 15 bp, Homo sapiens
gggaaaaaaaaaaag

SEQ ID NO: 34332 - DNA, 15 bp, Homo sapiens
agggaaaaaaaaaaa

SEQ ID NO: 34333 - DNA, 15 bp, Homo sapiens
aagggaaaaaaaaaa

SEQ ID NO: 34334 - DNA, 15 bp, Homo sapiens
aaagggaaaaaaaaa

SEQ ID NO: 34335 - DNA, 15 bp, Homo sapiens
aaaagggaaaaaaaa

SEQ ID NO: 34336 - DNA, 15 bp, Homo sapiens
taaaagggaaaaaaa

SEQ ID NO: 34337 - DNA, 15 bp, Homo sapiens
ttaaaagggaaaaaa

SEQ ID NO: 34338 - DNA, 15 bp, Homo sapiens
tttaaaagggaaaaa

SEQ ID NO: 34339 - DNA, 15 bp, Homo sapiens
ttttaaaagggaaaa

SEQ ID NO: 34340 - DNA, 15 bp, Homo sapiens
attttaaaagggaaa

SEQ ID NO: 34341 - DNA, 15 bp, Homo sapiens
gattttaaaagggaa

SEQ ID NO: 34342 - DNA, 15 bp, Homo sapiens
agattttaaaaggga

SEQ ID NO: 34343 - DNA, 15 bp, Homo sapiens
tagattttaaaaggg

SEQ ID NO: 34344 - DNA, 15 bp, Homo sapiens
ctagattttaaaagg

SEQ ID NO: 34345 - DNA, 15 bp, Homo sapiens
actagattttaaaag

SEQ ID NO: 34346 - DNA, 15 bp, Homo sapiens
aactagattttaaaa

SEQ ID NO: 34347 - DNA, 15 bp, Homo sapiens
taactagattttaaa

SEQ ID NO: 34348 - DNA, 15 bp, Homo sapiens
ataactagattttaa

SEQ ID NO: 34349 - DNA, 15 bp, Homo sapiens
aataactagatttta

SEQ ID NO: 34350 - DNA, 15 bp, Homo sapiens
aaataactagatttt

SEQ ID NO: 34351 - DNA, 15 bp, Homo sapiens
aaaataactagattt

SEQ ID NO: 34352 - DNA, 15 bp, Homo sapiens
aaaaataactagatt

SEQ ID NO: 34353 - DNA, 15 bp, Homo sapiens
aaaaaataactagat

SEQ ID NO: 34354 - DNA, 15 bp, Homo sapiens
aaaaaaataactaga

SEQ ID NO: 34355 - DNA, 15 bp, Homo sapiens
gaaaaaaataactag

SEQ ID NO: 34356 - DNA, 15 bp, Homo sapiens
agaaaaaaataacta

SEQ ID NO: 34357 - DNA, 15 bp, Homo sapiens
aagaaaaaaataact

SEQ ID NO: 34358 - DNA, 15 bp, Homo sapiens
aaagaaaaaaataac

SEQ ID NO: 34359 - DNA, 15 bp, Homo sapiens
aaaagaaaaaaataa

SEQ ID NO: 34360 - DNA, 15 bp, Homo sapiens
aaaaagaaaaaaata

SEQ ID NO: 34361 - DNA, 15 bp, Homo sapiens
caaaaagaaaaaaat

SEQ ID NO: 34362 - DNA, 15 bp, Homo sapiens
ccaaaaagaaaaaaa

SEQ ID NO: 34363 - DNA, 15 bp, Homo sapiens
accaaaaagaaaaaa

SEQ ID NO: 34364 - DNA, 15 bp, Homo sapiens
aaccaaaaagaaaaa

SEQ ID NO: 34365 - DNA, 15 bp, Homo sapiens
aaaccaaaaagaaaa

SEQ ID NO: 34366 - DNA, 15 bp, Homo sapiens
gaaaccaaaaagaaa

SEQ ID NO: 34367 - DNA, 15 bp, Homo sapiens
agaaaccaaaaagaa

SEQ ID NO: 34368 - DNA, 15 bp, Homo sapiens
aagaaaccaaaaaga

SEQ ID NO: 34369 - DNA, 15 bp, Homo sapiens
aaagaaaccaaaaag

SEQ ID NO: 34370 - DNA, 15 bp, Homo sapiens
caaagaaaccaaaaa

SEQ ID NO: 34371 - DNA, 15 bp, Homo sapiens
tcaaagaaaccaaaa

SEQ ID NO: 34372 - DNA, 15 bp, Homo sapiens
gtcaaagaaaccaaa

SEQ ID NO: 34373 - DNA, 15 bp, Homo sapiens
tgtcaaagaaaccaa

SEQ ID NO: 34374 - DNA, 15 bp, Homo sapiens
gtgtcaaagaaacca

SEQ ID NO: 34375 - DNA, 15 bp, Homo sapiens
tgtgtcaaagaaacc

SEQ ID NO: 34376 - DNA, 15 bp, Homo sapiens
ctgtgtcaaagaaac

SEQ ID NO: 34377 - DNA, 15 bp, Homo sapiens
cctgtgtcaaagaaa

SEQ ID NO: 34378 - DNA, 15 bp, Homo sapiens
ccctgtgtcaaagaa

SEQ ID NO: 34379 - DNA, 15 bp, Homo sapiens
accctgtgtcaaaga

SEQ ID NO: 34380 - DNA, 15 bp, Homo sapiens
gaccctgtgtcaaag

SEQ ID NO: 34381 - DNA, 15 bp, Homo sapiens
agaccctgtgtcaaa

SEQ ID NO: 34382 - DNA, 15 bp, Homo sapiens
gagaccctgtgtcaa

SEQ ID NO: 34383 - DNA, 15 bp, Homo sapiens
agagaccctgtgtca

SEQ ID NO: 34384 - DNA, 15 bp, Homo sapiens
aagagaccctgtgtc

SEQ ID NO: 34385 - DNA, 15 bp, Homo sapiens
taagagaccctgtgt

SEQ ID NO: 34386 - DNA, 15 bp, Homo sapiens
gtaagagaccctgtg

SEQ ID NO: 34387 - DNA, 15 bp, Homo sapiens
agtaagagaccctgt

SEQ ID NO: 34388 - DNA, 15 bp, Homo sapiens
gagtaagagaccctg

SEQ ID NO: 34389 - DNA, 15 bp, Homo sapiens
agagtaagagaccct

SEQ ID NO: 34390 - DNA, 15 bp, Homo sapiens
cagagtaagagaccc

SEQ ID NO: 34391 - DNA, 15 bp, Homo sapiens
acagagtaagagacc

SEQ ID NO: 34392 - DNA, 15 bp, Homo sapiens
aacagagtaagagac

SEQ ID NO: 34393 - DNA, 15 bp, Homo sapiens
taacagagtaagaga

SEQ ID NO: 34394 - DNA, 15 bp, Homo sapiens
gtaacagagtaagag

SEQ ID NO: 34395 - DNA, 15 bp, Homo sapiens
ggtaacagagtaaga

SEQ ID NO: 34396 - DNA, 15 bp, Homo sapiens
gggtaacagagtaag

SEQ ID NO: 34397 - DNA, 15 bp, Homo sapiens
tgggtaacagagtaa

SEQ ID NO: 34398 - DNA, 15 bp, Homo sapiens
ctgggtaacagagta

SEQ ID NO: 34399 - DNA, 15 bp, Homo sapiens
cctgggtaacagagt

SEQ ID NO: 34400 - DNA, 15 bp, Homo sapiens
gcctgggtaacagag

SEQ ID NO: 34401 - DNA, 15 bp, Homo sapiens
agcctgggtaacaga

SEQ ID NO: 34402 - DNA, 15 bp, Homo sapiens
cagcctgggtaacag

SEQ ID NO: 34403 - DNA, 15 bp, Homo sapiens
ccagcctgggtaaca

SEQ ID NO: 34404 - DNA, 15 bp, Homo sapiens
tccagcctgggtaac

SEQ ID NO: 34405 - DNA, 15 bp, Homo sapiens
ttccagcctgggtaa

SEQ ID NO: 34406 - DNA, 15 bp, Homo sapiens
attccagcctgggta

SEQ ID NO: 34407 - DNA, 15 bp, Homo sapiens
ccattccagcctggg

SEQ ID NO: 34408 - DNA, 15 bp, Homo sapiens
tccattccagcctgg

SEQ ID NO: 34409 - DNA, 15 bp, Homo sapiens
ctccattccagcctg

SEQ ID NO: 34410 - DNA, 15 bp, Homo sapiens
actccattccagcct

SEQ ID NO: 34411 - DNA, 15 bp, Homo sapiens
tactccattccagcc

SEQ ID NO: 34412 - DNA, 15 bp, Homo sapiens
ctactccattccagc

SEQ ID NO: 34413 - DNA, 15 bp, Homo sapiens
actactccattccag

SEQ ID NO: 34414 - DNA, 15 bp, Homo sapiens
cactactccattcca

SEQ ID NO: 34415 - DNA, 15 bp, Homo sapiens
gcactactccattcc

SEQ ID NO: 34416 - DNA, 15 bp, Homo sapiens
tgcactactccattc

SEQ ID NO: 34417 - DNA, 15 bp, Homo sapiens
ctgcactactccatt

SEQ ID NO: 34418 - DNA, 15 bp, Homo sapiens
actgcactactccat

SEQ ID NO: 34419 - DNA, 15 bp, Homo sapiens
gactgcactactcca

SEQ ID NO: 34420 - DNA, 15 bp, Homo sapiens
tgactgcactactcc

SEQ ID NO: 34421 - DNA, 15 bp, Homo sapiens
atgactgcactactc

SEQ ID NO: 34422 - DNA, 15 bp, Homo sapiens
catgactgcactact

SEQ ID NO: 34423 - DNA, 15 bp, Homo sapiens
ccatgactgcactac

SEQ ID NO: 34424 - DNA, 15 bp, Homo sapiens
accatgactgcacta

SEQ ID NO: 34425 - DNA, 15 bp, Homo sapiens
aaccatgactgcact

SEQ ID NO: 34426 - DNA, 15 bp, Homo sapiens
gaaccatgactgcac

SEQ ID NO: 34427 - DNA, 15 bp, Homo sapiens
tgaaccatgactgca

SEQ ID NO: 34428 - DNA, 15 bp, Homo sapiens
gtgaaccatgactgc

SEQ ID NO: 34429 - DNA, 15 bp, Homo sapiens
agtgaaccatgactg

SEQ ID NO: 34430 - DNA, 15 bp, Homo sapiens
cagtgaaccatgact

SEQ ID NO: 34431 - DNA, 15 bp, Homo sapiens
acagtgaaccatgac

SEQ ID NO: 34432 - DNA, 15 bp, Homo sapiens
tacagtgaaccatga

SEQ ID NO: 34433 - DNA, 15 bp, Homo sapiens
ctacagtgaaccatg

SEQ ID NO: 34434 - DNA, 15 bp, Homo sapiens
gctacagtgaaccat

SEQ ID NO: 34435 - DNA, 15 bp, Homo sapiens
agctacagtgaacca

SEQ ID NO: 34436 - DNA, 15 bp, Homo sapiens
aagctacagtgaacc

SEQ ID NO: 34437 - DNA, 15 bp, Homo sapiens
aaagctacagtgaac

SEQ ID NO: 34438 - DNA, 15 bp, Homo sapiens
caaagctacagtgaa

SEQ ID NO: 34439 - DNA, 15 bp, Homo sapiens
tcaaagctacagtga

SEQ ID NO: 34440 - DNA, 15 bp, Homo sapiens
gtcaaagctacagtg

SEQ ID NO: 34441 - DNA, 15 bp, Homo sapiens
agtcaaagctacagt

SEQ ID NO: 34442 - DNA, 15 bp, Homo sapiens
aagtcaaagctacag

SEQ ID NO: 34443 - DNA, 15 bp, Homo sapiens
gaagtcaaagctaca

SEQ ID NO: 34444 - DNA, 15 bp, Homo sapiens
ggaagtcaaagctac

SEQ ID NO: 34445 - DNA, 15 bp, Homo sapiens
aggaagtcaaagcta

SEQ ID NO: 34446 - DNA, 15 bp, Homo sapiens
caggaagtcaaagct

SEQ ID NO: 34447 - DNA, 15 bp, Homo sapiens
ccaggaagtcaaagc

SEQ ID NO: 34448 - DNA, 15 bp, Homo sapiens
cccaggaagtcaaag

SEQ ID NO: 34449 - DNA, 15 bp, Homo sapiens
gcccaggaagtcaaa

SEQ ID NO: 34450 - DNA, 15 bp, Homo sapiens
agcccaggaagtcaa

SEQ ID NO: 34451 - DNA, 15 bp, Homo sapiens
gagcccaggaagtca

SEQ ID NO: 34452 - DNA, 15 bp, Homo sapiens
tgagcccaggaagtc

SEQ ID NO: 34453 - DNA, 15 bp, Homo sapiens
ttgagcccaggaagt

SEQ ID NO: 34454 - DNA, 15 bp, Homo sapiens
cttgagcccaggaag

SEQ ID NO: 34455 - DNA, 15 bp, Homo sapiens
gcttgagcccaggaa

SEQ ID NO: 34456 - DNA, 15 bp, Homo sapiens
cgcttgagcccagga

SEQ ID NO: 34457 - DNA, 15 bp, Homo sapiens
tcgcttgagcccagg

SEQ ID NO: 34458 - DNA, 15 bp, Homo sapiens
atcgcttgagcccag

SEQ ID NO: 34459 - DNA, 15 bp, Homo sapiens
gatcgcttgagccca

SEQ ID NO: 34460 - DNA, 15 bp, Homo sapiens
ggatcgcttgagccc

SEQ ID NO: 34461 - DNA, 15 bp, Homo sapiens
gaggatcgcttgagc

SEQ ID NO: 34462 - DNA, 15 bp, Homo sapiens
ggaggatcgcttgag

SEQ ID NO: 34463 - DNA, 15 bp, Homo sapiens
aggaggatcgcttga

SEQ ID NO: 34464 - DNA, 15 bp, Homo sapiens
taggaggatcgcttg

SEQ ID NO: 34465 - DNA, 15 bp, Homo sapiens
gtaggaggatcgctt

SEQ ID NO: 34466 - DNA, 15 bp, Homo sapiens
ggtaggaggatcgct

SEQ ID NO: 34467 - DNA, 15 bp, Homo sapiens
aggtaggaggatcgc

SEQ ID NO: 34468 - DNA, 15 bp, Homo sapiens
gaggtaggaggatcg

SEQ ID NO: 34469 - DNA, 15 bp, Homo sapiens
tgaggtaggaggatc

SEQ ID NO: 34470 - DNA, 15 bp, Homo sapiens
ctgaggtaggaggat

SEQ ID NO: 34471 - DNA, 15 bp, Homo sapiens
gctgaggtaggagga

SEQ ID NO: 34472 - DNA, 15 bp, Homo sapiens
agctgaggtaggagg

SEQ ID NO: 34473 - DNA, 15 bp, Homo sapiens
aagctgaggtaggag

SEQ ID NO: 34474 - DNA, 15 bp, Homo sapiens
gaagctgaggtagga

SEQ ID NO: 34475 - DNA, 15 bp, Homo sapiens
ggaagctgaggtagg

SEQ ID NO: 34476 - DNA, 15 bp, Homo sapiens
gggaagctgaggtag

SEQ ID NO: 34477 - DNA, 15 bp, Homo sapiens
cgggaagctgaggta

SEQ ID NO: 34478 - DNA, 15 bp, Homo sapiens
tcgggaagctgaggt

SEQ ID NO: 34479 - DNA, 15 bp, Homo sapiens
ctcgggaagctgagg

SEQ ID NO: 34480 - DNA, 15 bp, Homo sapiens
actcgggaagctgag

SEQ ID NO: 34481 - DNA, 15 bp, Homo sapiens
tactcgggaagctga

SEQ ID NO: 34482 - DNA, 15 bp, Homo sapiens
ctactcgggaagctg

SEQ ID NO: 34483 - DNA, 15 bp, Homo sapiens
gctactcgggaagct

SEQ ID NO: 34484 - DNA, 15 bp, Homo sapiens
agctactcgggaagc

SEQ ID NO: 34485 - DNA, 15 bp, Homo sapiens
cagctactcgggaag

SEQ ID NO: 34486 - DNA, 15 bp, Homo sapiens
ccagctactcgggaa

SEQ ID NO: 34487 - DNA, 15 bp, Homo sapiens
ggtcccagctactcg

SEQ ID NO: 34488 - DNA, 15 bp, Homo sapiens
tggtcccagctactc

SEQ ID NO: 34489 - DNA, 15 bp, Homo sapiens
gtggtcccagctact

SEQ ID NO: 34490 - DNA, 15 bp, Homo sapiens
tgtggtcccagctac

SEQ ID NO: 34491 - DNA, 15 bp, Homo sapiens
ctgtggtcccagcta

SEQ ID NO: 34492 - DNA, 15 bp, Homo sapiens
cctgtggtcccagct

SEQ ID NO: 34493 - DNA, 15 bp, Homo sapiens
gcctgtggtcccagc

SEQ ID NO: 34494 - DNA, 15 bp, Homo sapiens
cgcctgtggtcccag

SEQ ID NO: 34495 - DNA, 15 bp, Homo sapiens
gcgcctgtggtccca

SEQ ID NO: 34496 - DNA, 15 bp, Homo sapiens
ggcgcctgtggtccc

SEQ ID NO: 34497 - DNA, 15 bp, Homo sapiens
gggcgcctgtggtcc

SEQ ID NO: 34498 - DNA, 15 bp, Homo sapiens
tgggcgcctgtggtc

SEQ ID NO: 34499 - DNA, 15 bp, Homo sapiens
gtgggcgcctgtggt

SEQ ID NO: 34500 - DNA, 15 bp, Homo sapiens
ggtgggcgcctgtgg

SEQ ID NO: 34501 - DNA, 15 bp, Homo sapiens
tggtgggcgcctgtg

SEQ ID NO: 34502 - DNA, 15 bp, Homo sapiens
ttggtgggcgcctgt

SEQ ID NO: 34503 - DNA, 15 bp, Homo sapiens
gttggtgggcgcctg

SEQ ID NO: 34504 - DNA, 15 bp, Homo sapiens
tgttggtgggcgcct

SEQ ID NO: 34505 - DNA, 15 bp, Homo sapiens
gtgttggtgggcgcc

SEQ ID NO: 34506 - DNA, 15 bp, Homo sapiens
ggtgttggtgggcgc

SEQ ID NO: 34507 - DNA, 15 bp, Homo sapiens
aggtgttggtgggcg

SEQ ID NO: 34508 - DNA, 15 bp, Homo sapiens
gaggtgttggtgggc

SEQ ID NO: 34509 - DNA, 15 bp, Homo sapiens
ggaggtgttggtggg

SEQ ID NO: 34510 - DNA, 15 bp, Homo sapiens
tggaggtgttggtgg

SEQ ID NO: 34511 - DNA, 15 bp, Homo sapiens
ctggaggtgttggtg

SEQ ID NO: 34512 - DNA, 15 bp, Homo sapiens
gctggaggtgttggt

SEQ ID NO: 34513 - DNA, 15 bp, Homo sapiens
agctggaggtgttgg

SEQ ID NO: 34514 - DNA, 15 bp, Homo sapiens
tagctggaggtgttg

SEQ ID NO: 34515 - DNA, 15 bp, Homo sapiens
ttagctggaggtgtt

SEQ ID NO: 34516 - DNA, 15 bp, Homo sapiens
attagctggaggtgt

SEQ ID NO: 34517 - DNA, 15 bp, Homo sapiens
aattagctggaggtg

SEQ ID NO: 34518 - DNA, 15 bp, Homo sapiens
aaattagctggaggt

SEQ ID NO: 34519 - DNA, 15 bp, Homo sapiens
aaaattagctggagg

SEQ ID NO: 34520 - DNA, 15 bp, Homo sapiens
aaaaattagctggag

SEQ ID NO: 34521 - DNA, 15 bp, Homo sapiens
taaaaattagctgga

SEQ ID NO: 34522 - DNA, 15 bp, Homo sapiens
aaaacttaaaaatta

SEQ ID NO: 34523 - DNA, 15 bp, Homo sapiens
aaaaacttaaaaatt

SEQ ID NO: 34524 - DNA, 15 bp, Homo sapiens
taaaaacttaaaaat

SEQ ID NO: 34525 - DNA, 15 bp, Homo sapiens
gtaaaaacttaaaaa

SEQ ID NO: 34526 - DNA, 15 bp, Homo sapiens
agtaaaaacttaaaa

SEQ ID NO: 34527 - DNA, 15 bp, Homo sapiens
tagtaaaaacttaaa

SEQ ID NO: 34528 - DNA, 15 bp, Homo sapiens
ctagtaaaaacttaa

SEQ ID NO: 34529 - DNA, 15 bp, Homo sapiens
tctagtaaaaactta

SEQ ID NO: 34530 - DNA, 15 bp, Homo sapiens
ctctagtaaaaactt

SEQ ID NO: 34531 - DNA, 15 bp, Homo sapiens
tctctagtaaaaact

SEQ ID NO: 34532 - DNA, 15 bp, Homo sapiens
gtctctagtaaaaac

SEQ ID NO: 34533 - DNA, 15 bp, Homo sapiens
tgtctctagtaaaaa

SEQ ID NO: 34534 - DNA, 15 bp, Homo sapiens
ttgtctctagtaaaa

SEQ ID NO: 34535 - DNA, 15 bp, Homo sapiens
gttgtctctagtaaa

SEQ ID NO: 34536 - DNA, 15 bp, Homo sapiens
tgttgtctctagtaa

SEQ ID NO: 34537 - DNA, 15 bp, Homo sapiens
atgttgtctctagta

SEQ ID NO: 34538 - DNA, 15 bp, Homo sapiens
gatgttgtctctagt

SEQ ID NO: 34539 - DNA, 15 bp, Homo sapiens
agatgttgtctctag

SEQ ID NO: 34540 - DNA, 15 bp, Homo sapiens
gagatgttgtctcta

SEQ ID NO: 34541 - DNA, 15 bp, Homo sapiens
tgagatgttgtctct

SEQ ID NO: 34542 - DNA, 15 bp, Homo sapiens
gtgagatgttgtctc

SEQ ID NO: 34543 - DNA, 15 bp, Homo sapiens
agtgagatgttgtct

SEQ ID NO: 34544 - DNA, 15 bp, Homo sapiens
tagtgagatgttgtc

SEQ ID NO: 34545 - DNA, 15 bp, Homo sapiens
atagtgagatgttgt

SEQ ID NO: 34546 - DNA, 15 bp, Homo sapiens
catagtgagatgttg

SEQ ID NO: 34547 - DNA, 15 bp, Homo sapiens
acatagtgagatgtt

SEQ ID NO: 34548 - DNA, 15 bp, Homo sapiens
aacatagtgagatgt

SEQ ID NO: 34549 - DNA, 15 bp, Homo sapiens
caacatagtgagatg

SEQ ID NO: 34550 - DNA, 15 bp, Homo sapiens
gcaacatagtgagat

SEQ ID NO: 34551 - DNA, 15 bp, Homo sapiens
ggcaacatagtgaga

SEQ ID NO: 34552 - DNA, 15 bp, Homo sapiens
gggcaacatagtgag

SEQ ID NO: 34553 - DNA, 15 bp, Homo sapiens
tgggcaacatagtga

SEQ ID NO: 34554 - DNA, 15 bp, Homo sapiens
ctgggcaacatagtg

SEQ ID NO: 34555 - DNA, 15 bp, Homo sapiens
cctgggcaacatagt

SEQ ID NO: 34556 - DNA, 15 bp, Homo sapiens
gcctgggcaacatag

SEQ ID NO: 34557 - DNA, 15 bp, Homo sapiens
agcctgggcaacata

SEQ ID NO: 34558 - DNA, 15 bp, Homo sapiens
gaccagcctgggcaa

SEQ ID NO: 34559 - DNA, 15 bp, Homo sapiens
agaccagcctgggca

SEQ ID NO: 34560 - DNA, 15 bp, Homo sapiens
gagaccagcctgggc

SEQ ID NO: 34561 - DNA, 15 bp, Homo sapiens
tgagaccagcctggg

SEQ ID NO: 34562 - DNA, 15 bp, Homo sapiens
ttttgagaccagcct

SEQ ID NO: 34563 - DNA, 15 bp, Homo sapiens
attttgagaccagcc

SEQ ID NO: 34564 - DNA, 15 bp, Homo sapiens
gattttgagaccagc

SEQ ID NO: 34565 - DNA, 15 bp, Homo sapiens
ggattttgagaccag

SEQ ID NO: 34566 - DNA, 15 bp, Homo sapiens
aggattttgagacca

SEQ ID NO: 34567 - DNA, 15 bp, Homo sapiens
caggattttgagacc

SEQ ID NO: 34568 - DNA, 15 bp, Homo sapiens
ccaggattttgagac

SEQ ID NO: 34569 - DNA, 15 bp, Homo sapiens
cccaggattttgaga

SEQ ID NO: 34570 - DNA, 15 bp, Homo sapiens
gcccaggattttgag

SEQ ID NO: 34571 - DNA, 15 bp, Homo sapiens
agcccaggattttga

SEQ ID NO: 34572 - DNA, 15 bp, Homo sapiens
gagcccaggattttg

SEQ ID NO: 34573 - DNA, 15 bp, Homo sapiens
tgagcccaggatttt

SEQ ID NO: 34574 - DNA, 15 bp, Homo sapiens
ttgagcccaggattt

SEQ ID NO: 34575 - DNA, 15 bp, Homo sapiens
cttgagcccaggatt

SEQ ID NO: 34576 - DNA, 15 bp, Homo sapiens
acttgagcccaggat

SEQ ID NO: 34577 - DNA, 15 bp, Homo sapiens
cacttgagcccagga

SEQ ID NO: 34578 - DNA, 15 bp, Homo sapiens
tcacttgagcccagg

SEQ ID NO: 34579 - DNA, 15 bp, Homo sapiens
atcacttgagcccag

SEQ ID NO: 34580 - DNA, 15 bp, Homo sapiens
gatcacttgagccca

SEQ ID NO: 34581 - DNA, 15 bp, Homo sapiens
ggatcacttgagccc

SEQ ID NO: 34582 - DNA, 15 bp, Homo sapiens
gggatcacttgagcc

SEQ ID NO: 34583 - DNA, 15 bp, Homo sapiens
tgggatcacttgagc

SEQ ID NO: 34584 - DNA, 15 bp, Homo sapiens
gtgggatcacttgag

SEQ ID NO: 34585 - DNA, 15 bp, Homo sapiens
ggtgggatcacttga

SEQ ID NO: 34586 - DNA, 15 bp, Homo sapiens
aggtgggatcacttg

SEQ ID NO: 34587 - DNA, 15 bp, Homo sapiens
gaggtgggatcactt

SEQ ID NO: 34588 - DNA, 15 bp, Homo sapiens
tgaggtgggatcact

SEQ ID NO: 34589 - DNA, 15 bp, Homo sapiens
ctgaggtgggatcac

SEQ ID NO: 34590 - DNA, 15 bp, Homo sapiens
gctgaggtgggatca

SEQ ID NO: 34591 - DNA, 15 bp, Homo sapiens
ggctgaggtgggatc

SEQ ID NO: 34592 - DNA, 15 bp, Homo sapiens
aggctgaggtgggat

SEQ ID NO: 34593 - DNA, 15 bp, Homo sapiens
ttttgggaggctgag

SEQ ID NO: 34594 - DNA, 15 bp, Homo sapiens
attttgggaggctga

SEQ ID NO: 34595 - DNA, 15 bp, Homo sapiens
cattttgggaggctg

SEQ ID NO: 34596 - DNA, 15 bp, Homo sapiens
gcattttgggaggct

SEQ ID NO: 34597 - DNA, 15 bp, Homo sapiens
acacacctgtaatcc

SEQ ID NO: 34598 - DNA, 15 bp, Homo sapiens
cacacacctgtaatc

SEQ ID NO: 34599 - DNA, 15 bp, Homo sapiens
gcacacacctgtaat

SEQ ID NO: 34600 - DNA, 15 bp, Homo sapiens
tgcacacacctgtaa

SEQ ID NO: 34601 - DNA, 15 bp, Homo sapiens
ttgcacacacctgta

SEQ ID NO: 34602 - DNA, 15 bp, Homo sapiens
gttgcacacacctgt

SEQ ID NO: 34603 - DNA, 15 bp, Homo sapiens
ggttgcacacacctg

SEQ ID NO: 34604 - DNA, 15 bp, Homo sapiens
tggttgcacacacct

SEQ ID NO: 34605 - DNA, 15 bp, Homo sapiens
gtggttgcacacacc

SEQ ID NO: 34606 - DNA, 15 bp, Homo sapiens
cgtggttgcacacac

SEQ ID NO: 34607 - DNA, 15 bp, Homo sapiens
gcgtggttgcacaca

SEQ ID NO: 34608 - DNA, 15 bp, Homo sapiens
ggcgtggttgcacac

SEQ ID NO: 34609 - DNA, 15 bp, Homo sapiens
aggcgtggttgcaca

SEQ ID NO: 34610 - DNA, 15 bp, Homo sapiens
caggcgtggttgcac

SEQ ID NO: 34611 - DNA, 15 bp, Homo sapiens
ccaggcgtggttgca

SEQ ID NO: 34612 - DNA, 15 bp, Homo sapiens
gccaggcgtggttgc

SEQ ID NO: 34613 - DNA, 15 bp, Homo sapiens
ggccaggcgtggttg

SEQ ID NO: 34614 - DNA, 15 bp, Homo sapiens
aggccaggcgtggtt

SEQ ID NO: 34615 - DNA, 15 bp, Homo sapiens
taggccaggcgtggt

SEQ ID NO: 34616 - DNA, 15 bp, Homo sapiens
ataggccaggcgtgg

SEQ ID NO: 34617 - DNA, 15 bp, Homo sapiens
aataggccaggcgtg

SEQ ID NO: 34618 - DNA, 15 bp, Homo sapiens
aaataggccaggcgt

SEQ ID NO: 34619 - DNA, 15 bp, Homo sapiens
aaaataggccaggcg

SEQ ID NO: 34620 - DNA, 15 bp, Homo sapiens
aaaaataggccaggc

SEQ ID NO: 34621 - DNA, 15 bp, Homo sapiens
aaaaaataggccagg

SEQ ID NO: 34622 - DNA, 15 bp, Homo sapiens
aaaaaaataggccag

SEQ ID NO: 34623 - DNA, 15 bp, Homo sapiens
aaaaaaaataggcca

SEQ ID NO: 34624 - DNA, 15 bp, Homo sapiens
aaaaaaaaataggcc

SEQ ID NO: 34625 - DNA, 15 bp, Homo sapiens
aaaaaaaaaataggc

SEQ ID NO: 34626 - DNA, 15 bp, Homo sapiens
taaaaaaaaaatagg

SEQ ID NO: 34627 - DNA, 15 bp, Homo sapiens
ttaaaaaaaaaatag

SEQ ID NO: 34628 - DNA, 15 bp, Homo sapiens
attaaaaaaaaaata

SEQ ID NO: 34629 - DNA, 15 bp, Homo sapiens
aattaaaaaaaaaat

SEQ ID NO: 34630 - DNA, 15 bp, Homo sapiens
caattaaaaaaaaaa

SEQ ID NO: 34631 - DNA, 15 bp, Homo sapiens
gcaattaaaaaaaaa

SEQ ID NO: 34632 - DNA, 15 bp, Homo sapiens
agcaattaaaaaaaa

SEQ ID NO: 34633 - DNA, 15 bp, Homo sapiens
gagcaattaaaaaaa

SEQ ID NO: 34634 - DNA, 15 bp, Homo sapiens
tgagcaattaaaaaa

SEQ ID NO: 34635 - DNA, 15 bp, Homo sapiens
atgagcaattaaaaa

SEQ ID NO: 34636 - DNA, 15 bp, Homo sapiens
tatgagcaattaaaa

SEQ ID NO: 34637 - DNA, 15 bp, Homo sapiens
ttatgagcaattaaa

SEQ ID NO: 34638 - DNA, 15 bp, Homo sapiens
tttatgagcaattaa

SEQ ID NO: 34639 - DNA, 15 bp, Homo sapiens
atttatgagcaatta

SEQ ID NO: 34640 - DNA, 15 bp, Homo sapiens
gatttatgagcaatt

SEQ ID NO: 34641 - DNA, 15 bp, Homo sapiens
tgatttatgagcaat

SEQ ID NO: 34642 - DNA, 15 bp, Homo sapiens
atgatttatgagcaa

SEQ ID NO: 34643 - DNA, 15 bp, Homo sapiens
gatgatttatgagca

SEQ ID NO: 34644 - DNA, 15 bp, Homo sapiens
agatgatttatgagc

SEQ ID NO: 34645 - DNA, 15 bp, Homo sapiens
aagatgatttatgag

SEQ ID NO: 34646 - DNA, 15 bp, Homo sapiens
aaagatgatttatga

SEQ ID NO: 34647 - DNA, 15 bp, Homo sapiens
aaaagatgatttatg

SEQ ID NO: 34648 - DNA, 15 bp, Homo sapiens
aaaaagatgatttat

SEQ ID NO: 34649 - DNA, 15 bp, Homo sapiens
aaaaaagatgattta

SEQ ID NO: 34650 - DNA, 15 bp, Homo sapiens
gaaaaaagatgattt

SEQ ID NO: 34651 - DNA, 15 bp, Homo sapiens
agaaaaaagatgatt

SEQ ID NO: 34652 - DNA, 15 bp, Homo sapiens
aagaaaaaagatgat

SEQ ID NO: 34653 - DNA, 15 bp, Homo sapiens
aaagaaaaaagatga

SEQ ID NO: 34654 - DNA, 15 bp, Homo sapiens
taaagaaaaaagatg

SEQ ID NO: 34655 - DNA, 15 bp, Homo sapiens
ttaaagaaaaaagat

SEQ ID NO: 34656 - DNA, 15 bp, Homo sapiens
tttaaagaaaaaaga

SEQ ID NO: 34657 - DNA, 15 bp, Homo sapiens
ttttaaagaaaaaag

SEQ ID NO: 34658 - DNA, 15 bp, Homo sapiens
tttttaaagaaaaaa

SEQ ID NO: 34659 - DNA, 15 bp, Homo sapiens
ttttttaaagaaaaa

SEQ ID NO: 34660 - DNA, 15 bp, Homo sapiens
tttttttaaagaaaa

SEQ ID NO: 34661 - DNA, 15 bp, Homo sapiens
ttttttttaaagaaa

SEQ ID NO: 34662 - DNA, 15 bp, Homo sapiens
cttttttttaaagaa

SEQ ID NO: 34663 - DNA, 15 bp, Homo sapiens
tcttttttttaaaga

SEQ ID NO: 34664 - DNA, 15 bp, Homo sapiens
ttcttttttttaaag

SEQ ID NO: 34665 - DNA, 15 bp, Homo sapiens
tttcttttttttaaa

SEQ ID NO: 34666 - DNA, 15 bp, Homo sapiens
ctttcttttttttaa

SEQ ID NO: 34667 - DNA, 15 bp, Homo sapiens
tctttctttttttta

SEQ ID NO: 34668 - DNA, 15 bp, Homo sapiens
atctttctttttttt

SEQ ID NO: 34669 - DNA, 15 bp, Homo sapiens
catctttcttttttt

SEQ ID NO: 34670 - DNA, 15 bp, Homo sapiens
ccatctttctttttt

SEQ ID NO: 34671 - DNA, 15 bp, Homo sapiens
cccatctttcttttt

SEQ ID NO: 34672 - DNA, 15 bp, Homo sapiens
tcccatctttctttt

SEQ ID NO: 34673 - DNA, 15 bp, Homo sapiens
ctcccatctttcttt

SEQ ID NO: 34674 - DNA, 15 bp, Homo sapiens
cctcccatctttctt

SEQ ID NO: 34675 - DNA, 15 bp, Homo sapiens
gcctcccatctttct

SEQ ID NO: 34676 - DNA, 15 bp, Homo sapiens
agcctcccatctttc

SEQ ID NO: 34677 - DNA, 15 bp, Homo sapiens
tagcctcccatcttt

SEQ ID NO: 34678 - DNA, 15 bp, Homo sapiens
ttagcctcccatctt

SEQ ID NO: 34679 - DNA, 15 bp, Homo sapiens
tttagcctcccatct

SEQ ID NO: 34680 - DNA, 15 bp, Homo sapiens
ctttagcctcccatc

SEQ ID NO: 34681 - DNA, 15 bp, Homo sapiens
gctttagcctcccat

SEQ ID NO: 34682 - DNA, 15 bp, Homo sapiens
tgctttagcctccca

SEQ ID NO: 34683 - DNA, 15 bp, Homo sapiens
ctgctttagcctccc

SEQ ID NO: 34684 - DNA, 15 bp, Homo sapiens
cctgctttagcctcc

SEQ ID NO: 34685 - DNA, 15 bp, Homo sapiens
tcctgctttagcctc

SEQ ID NO: 34686 - DNA, 15 bp, Homo sapiens
ctcctgctttagcct

SEQ ID NO: 34687 - DNA, 15 bp, Homo sapiens
tctcctgctttagcc

SEQ ID NO: 34688 - DNA, 15 bp, Homo sapiens
ttctcctgctttagc

SEQ ID NO: 34689 - DNA, 15 bp, Homo sapiens
attctcctgctttag

SEQ ID NO: 34690 - DNA, 15 bp, Homo sapiens
gattctcctgcttta

SEQ ID NO: 34691 - DNA, 15 bp, Homo sapiens
tgattctcctgcttt

SEQ ID NO: 34692 - DNA, 15 bp, Homo sapiens
gtgattctcctgctt

SEQ ID NO: 34693 - DNA, 15 bp, Homo sapiens
agtgattctcctgct

SEQ ID NO: 34694 - DNA, 15 bp, Homo sapiens
tgggttcaagtgatt

SEQ ID NO: 34695 - DNA, 15 bp, Homo sapiens
cgcctcctgggttca

SEQ ID NO: 34696 - DNA, 15 bp, Homo sapiens
ccgcctcctgggttc

SEQ ID NO: 34697 - DNA, 15 bp, Homo sapiens
tccgcctcctgggtt

SEQ ID NO: 34698 - DNA, 15 bp, Homo sapiens
ctccgcctcctgggt

SEQ ID NO: 34699 - DNA, 15 bp, Homo sapiens
cctccgcctcctggg

SEQ ID NO: 34700 - DNA, 15 bp, Homo sapiens
acctccgcctcctgg

SEQ ID NO: 34701 - DNA, 15 bp, Homo sapiens
gatctcagctcactg

SEQ ID NO: 34702 - DNA, 15 bp, Homo sapiens
tgatctcagctcact

SEQ ID NO: 34703 - DNA, 15 bp, Homo sapiens
atgatctcagctcac

SEQ ID NO: 34704 - DNA, 15 bp, Homo sapiens
catgatctcagctca

SEQ ID NO: 34705 - DNA, 15 bp, Homo sapiens
gcatgatctcagctc

SEQ ID NO: 34706 - DNA, 15 bp, Homo sapiens
agcatgatctcagct

SEQ ID NO: 34707 - DNA, 15 bp, Homo sapiens
cagcatgatctcagc

SEQ ID NO: 34708 - DNA, 15 bp, Homo sapiens
gcagcatgatctcag

SEQ ID NO: 34709 - DNA, 15 bp, Homo sapiens
agcagcatgatctca

SEQ ID NO: 34710 - DNA, 15 bp, Homo sapiens
cagcagcatgatctc

SEQ ID NO: 34711 - DNA, 15 bp, Homo sapiens
gcagcagcatgatct

SEQ ID NO: 34712 - DNA, 15 bp, Homo sapiens
agcagcagcatgatc

SEQ ID NO: 34713 - DNA, 15 bp, Homo sapiens
gagcagcagcatgat

SEQ ID NO: 34714 - DNA, 15 bp, Homo sapiens
agagcagcagcatga

SEQ ID NO: 34715 - DNA, 15 bp, Homo sapiens
gagagcagcagcatg

SEQ ID NO: 34716 - DNA, 15 bp, Homo sapiens
ggagagcagcagcat

SEQ ID NO: 34717 - DNA, 15 bp, Homo sapiens
tggagagcagcagca

SEQ ID NO: 34718 - DNA, 15 bp, Homo sapiens
ctggagagcagcagc

SEQ ID NO: 34719 - DNA, 15 bp, Homo sapiens
gctggagagcagcag

SEQ ID NO: 34720 - DNA, 15 bp, Homo sapiens
ggctggagagcagca

SEQ ID NO: 34721 - DNA, 15 bp, Homo sapiens
aggctggagagcagc

SEQ ID NO: 34722 - DNA, 15 bp, Homo sapiens
caggctggagagcag

SEQ ID NO: 34723 - DNA, 15 bp, Homo sapiens
ccaggctggagagca

SEQ ID NO: 34724 - DNA, 15 bp, Homo sapiens
cccaggctggagagc

SEQ ID NO: 34725 - DNA, 15 bp, Homo sapiens
gcccaggctggagag

SEQ ID NO: 34726 - DNA, 15 bp, Homo sapiens
tgcccaggctggaga

SEQ ID NO: 34727 - DNA, 15 bp, Homo sapiens
cttgttgcccaggct

SEQ ID NO: 34728 - DNA, 15 bp, Homo sapiens
tcttgttgcccaggc

SEQ ID NO: 34729 - DNA, 15 bp, Homo sapiens
ctcttgttgcccagg

SEQ ID NO: 34730 - DNA, 15 bp, Homo sapiens
actcttgttgcccag

SEQ ID NO: 34731 - DNA, 15 bp, Homo sapiens
cactcttgttgccca

SEQ ID NO: 34732 - DNA, 15 bp, Homo sapiens
tcactcttgttgccc

SEQ ID NO: 34733 - DNA, 15 bp, Homo sapiens
ttctttttttttttt

SEQ ID NO: 34734 - DNA, 15 bp, Homo sapiens
ctttctttttttttt

SEQ ID NO: 34735 - DNA, 15 bp, Homo sapiens
actttcttttttttt

SEQ ID NO: 34736 - DNA, 15 bp, Homo sapiens
tactttctttttttt

SEQ ID NO: 34737 - DNA, 15 bp, Homo sapiens
gtactttcttttttt

SEQ ID NO: 34738 - DNA, 15 bp, Homo sapiens
tgtactttctttttt

SEQ ID NO: 34739 - DNA, 15 bp, Homo sapiens
gtgtactttcttttt

SEQ ID NO: 34740 - DNA, 15 bp, Homo sapiens
tgtgtactttctttt

SEQ ID NO: 34741 - DNA, 15 bp, Homo sapiens
ttgtgtactttcttt

SEQ ID NO: 34742 - DNA, 15 bp, Homo sapiens
attgtgtactttctt

SEQ ID NO: 34743 - DNA, 15 bp, Homo sapiens
aattgtgtactttct

SEQ ID NO: 34744 - DNA, 15 bp, Homo sapiens
aaattgtgtactttc

SEQ ID NO: 34745 - DNA, 15 bp, Homo sapiens
aaaattgtgtacttt

SEQ ID NO: 34746 - DNA, 15 bp, Homo sapiens
taaaattgtgtactt

SEQ ID NO: 34747 - DNA, 15 bp, Homo sapiens
gtaaaattgtgtact

SEQ ID NO: 34748 - DNA, 15 bp, Homo sapiens
agtaaaattgtgtac

SEQ ID NO: 34749 - DNA, 15 bp, Homo sapiens
aagtaaaattgtgta

SEQ ID NO: 34750 - DNA, 15 bp, Homo sapiens
aaagtaaaattgtgt

SEQ ID NO: 34751 - DNA, 15 bp, Homo sapiens
gaaagtaaaattgtg

SEQ ID NO: 34752 - DNA, 15 bp, Homo sapiens
agaaagtaaaattgt

SEQ ID NO: 34753 - DNA, 15 bp, Homo sapiens
cagaaagtaaaattg

SEQ ID NO: 34754 - DNA, 15 bp, Homo sapiens
ccagaaagtaaaatt

SEQ ID NO: 34755 - DNA, 15 bp, Homo sapiens
tccagaaagtaaaat

SEQ ID NO: 34756 - DNA, 15 bp, Homo sapiens
gtccagaaagtaaaa

SEQ ID NO: 34757 - DNA, 15 bp, Homo sapiens
ggtccagaaagtaaa

SEQ ID NO: 34758 - DNA, 15 bp, Homo sapiens
aggtccagaaagtaa

SEQ ID NO: 34759 - DNA, 15 bp, Homo sapiens
taggtccagaaagta

SEQ ID NO: 34760 - DNA, 15 bp, Homo sapiens
ttaggtccagaaagt

SEQ ID NO: 34761 - DNA, 15 bp, Homo sapiens
attaggtccagaaag

SEQ ID NO: 34762 - DNA, 15 bp, Homo sapiens
cattaggtccagaaa

SEQ ID NO: 34763 - DNA, 15 bp, Homo sapiens
ccattaggtccagaa

SEQ ID NO: 34764 - DNA, 15 bp, Homo sapiens
accattaggtccaga

SEQ ID NO: 34765 - DNA, 15 bp, Homo sapiens
gaccattaggtccag

SEQ ID NO: 34766 - DNA, 15 bp, Homo sapiens
tgaccattaggtcca

SEQ ID NO: 34767 - DNA, 15 bp, Homo sapiens
ttgaccattaggtcc

SEQ ID NO: 34768 - DNA, 15 bp, Homo sapiens
cttgaccattaggtc

SEQ ID NO: 34769 - DNA, 15 bp, Homo sapiens
ccttgaccattaggt

SEQ ID NO: 34770 - DNA, 15 bp, Homo sapiens
gccttgaccattagg

SEQ ID NO: 34771 - DNA, 15 bp, Homo sapiens
ggccttgaccattag

SEQ ID NO: 34772 - DNA, 15 bp, Homo sapiens
tggccttgaccatta

SEQ ID NO: 34773 - DNA, 15 bp, Homo sapiens
ttggccttgaccatt

SEQ ID NO: 34774 - DNA, 15 bp, Homo sapiens
attggccttgaccat

SEQ ID NO: 34775 - DNA, 15 bp, Homo sapiens
tattggccttgacca

SEQ ID NO: 34776 - DNA, 15 bp, Homo sapiens
ttattggccttgacc

SEQ ID NO: 34777 - DNA, 15 bp, Homo sapiens
attattggccttgac

SEQ ID NO: 34778 - DNA, 15 bp, Homo sapiens
aattattggccttga

SEQ ID NO: 34779 - DNA, 15 bp, Homo sapiens
aaattattggccttg

SEQ ID NO: 34780 - DNA, 15 bp, Homo sapiens
caaattattggcctt

SEQ ID NO: 34781 - DNA, 15 bp, Homo sapiens
ccaaattattggcct

SEQ ID NO: 34782 - DNA, 15 bp, Homo sapiens
accaaattattggcc

SEQ ID NO: 34783 - DNA, 15 bp, Homo sapiens
gaccaaattattggc

SEQ ID NO: 34784 - DNA, 15 bp, Homo sapiens
tgaccaaattattgg

SEQ ID NO: 34785 - DNA, 15 bp, Homo sapiens
gtgaccaaattattg

SEQ ID NO: 34786 - DNA, 15 bp, Homo sapiens
ggtgaccaaattatt

SEQ ID NO: 34787 - DNA, 15 bp, Homo sapiens
aggtgaccaaattat

SEQ ID NO: 34788 - DNA, 15 bp, Homo sapiens
taggtgaccaaatta

SEQ ID NO: 34789 - DNA, 15 bp, Homo sapiens
ataggtgaccaaatt

SEQ ID NO: 34790 - DNA, 15 bp, Homo sapiens
cataggtgaccaaat

SEQ ID NO: 34791 - DNA, 15 bp, Homo sapiens
tcataggtgaccaaa

SEQ ID NO: 34792 - DNA, 15 bp, Homo sapiens
ttcataggtgaccaa

SEQ ID NO: 34793 - DNA, 15 bp, Homo sapiens
tttcataggtgacca

SEQ ID NO: 34794 - DNA, 15 bp, Homo sapiens
atttcataggtgacc

SEQ ID NO: 34795 - DNA, 15 bp, Homo sapiens
tatttcataggtgac

SEQ ID NO: 34796 - DNA, 15 bp, Homo sapiens
ttatttcataggtga

SEQ ID NO: 34797 - DNA, 15 bp, Homo sapiens
tttatttcataggtg

SEQ ID NO: 34798 - DNA, 15 bp, Homo sapiens
atttatttcataggt

SEQ ID NO: 34799 - DNA, 15 bp, Homo sapiens
tatttatttcatagg

SEQ ID NO: 34800 - DNA, 15 bp, Homo sapiens
ttatttatttcatag

SEQ ID NO: 34801 - DNA, 15 bp, Homo sapiens
tttatttatttcata

SEQ ID NO: 34802 - DNA, 15 bp, Homo sapiens
ttttatttatttcat

SEQ ID NO: 34803 - DNA, 15 bp, Homo sapiens
cttttatttatttca

SEQ ID NO: 34804 - DNA, 15 bp, Homo sapiens
gcttttatttatttc

SEQ ID NO: 34805 - DNA, 15 bp, Homo sapiens
agcttttatttattt

SEQ ID NO: 34806 - DNA, 15 bp, Homo sapiens
aagcttttatttatt

SEQ ID NO: 34807 - DNA, 15 bp, Homo sapiens
aaagcttttatttat

SEQ ID NO: 34808 - DNA, 15 bp, Homo sapiens
taaagcttttattta

SEQ ID NO: 34809 - DNA, 15 bp, Homo sapiens
gtaaagcttttattt

SEQ ID NO: 34810 - DNA, 15 bp, Homo sapiens
ggtaaagcttttatt

SEQ ID NO: 34811 - DNA, 15 bp, Homo sapiens
tggtaaagcttttat

SEQ ID NO: 34812 - DNA, 15 bp, Homo sapiens
atggtaaagctttta

SEQ ID NO: 34813 - DNA, 15 bp, Homo sapiens
tatggtaaagctttt

SEQ ID NO: 34814 - DNA, 15 bp, Homo sapiens
atatggtaaagcttt

SEQ ID NO: 34815 - DNA, 15 bp, Homo sapiens
tatatggtaaagctt

SEQ ID NO: 34816 - DNA, 15 bp, Homo sapiens
atatatggtaaagct

SEQ ID NO: 34817 - DNA, 15 bp, Homo sapiens
tatatatggtaaagc

SEQ ID NO: 34818 - DNA, 15 bp, Homo sapiens
atatatatggtaaag

SEQ ID NO: 34819 - DNA, 15 bp, Homo sapiens
catatatatggtaaa

SEQ ID NO: 34820 - DNA, 15 bp, Homo sapiens
tcatatatatggtaa

SEQ ID NO: 34821 - DNA, 15 bp, Homo sapiens
gtcatatatatggta

SEQ ID NO: 34822 - DNA, 15 bp, Homo sapiens
ggtcatatatatggt

SEQ ID NO: 34823 - DNA, 15 bp, Homo sapiens
tggtcatatatatgg

SEQ ID NO: 34824 - DNA, 15 bp, Homo sapiens
atggtcatatatatg

SEQ ID NO: 34825 - DNA, 15 bp, Homo sapiens
aatggtcatatatat

SEQ ID NO: 34826 - DNA, 15 bp, Homo sapiens
aaatggtcatatata

SEQ ID NO: 34827 - DNA, 15 bp, Homo sapiens
caaatggtcatatat

SEQ ID NO: 34828 - DNA, 15 bp, Homo sapiens
cattgtttcactctc

SEQ ID NO: 34829 - DNA, 15 bp, Homo sapiens
acattgtttcactct

SEQ ID NO: 34830 - DNA, 15 bp, Homo sapiens
cacattgtttcactc

SEQ ID NO: 34831 - DNA, 15 bp, Homo sapiens
acacattgtttcact

SEQ ID NO: 34832 - DNA, 15 bp, Homo sapiens
aacacattgtttcac

SEQ ID NO: 34833 - DNA, 15 bp, Homo sapiens
gaacacattgtttca

SEQ ID NO: 34834 - DNA, 15 bp, Homo sapiens
ggaacacattgtttc

SEQ ID NO: 34835 - DNA, 15 bp, Homo sapiens
aggaacacattgttt

SEQ ID NO: 34836 - DNA, 15 bp, Homo sapiens
caggaacacattgtt

SEQ ID NO: 34837 - DNA, 15 bp, Homo sapiens
gcaggaacacattgt

SEQ ID NO: 34838 - DNA, 15 bp, Homo sapiens
ggcaggaacacattg

SEQ ID NO: 34839 - DNA, 15 bp, Homo sapiens
gggcaggaacacatt

SEQ ID NO: 34840 - DNA, 15 bp, Homo sapiens
agggcaggaacacat

SEQ ID NO: 34841 - DNA, 15 bp, Homo sapiens
tagggcaggaacaca

SEQ ID NO: 34842 - DNA, 15 bp, Homo sapiens
gtagggcaggaacac

SEQ ID NO: 34843 - DNA, 15 bp, Homo sapiens
agtagggcaggaaca

SEQ ID NO: 34844 - DNA, 15 bp, Homo sapiens
gagtagggcaggaac

SEQ ID NO: 34845 - DNA, 15 bp, Homo sapiens
ggagtagggcaggaa

SEQ ID NO: 34846 - DNA, 15 bp, Homo sapiens
gggagtagggcagga

SEQ ID NO: 34847 - DNA, 15 bp, Homo sapiens
ggggagtagggcagg

SEQ ID NO: 34848 - DNA, 15 bp, Homo sapiens
gggggagtagggcag

SEQ ID NO: 34849 - DNA, 15 bp, Homo sapiens
tgggggagtagggca

SEQ ID NO: 34850 - DNA, 15 bp, Homo sapiens
gtgggggagtagggc

SEQ ID NO: 34851 - DNA, 15 bp, Homo sapiens
agtgggggagtaggg

SEQ ID NO: 34852 - DNA, 15 bp, Homo sapiens
cagtgggggagtagg

SEQ ID NO: 34853 - DNA, 15 bp, Homo sapiens
ccagtgggggagtag

SEQ ID NO: 34854 - DNA, 15 bp, Homo sapiens
tccagtgggggagta

SEQ ID NO: 34855 - DNA, 15 bp, Homo sapiens
gtccagtgggggagt

SEQ ID NO: 34856 - DNA, 15 bp, Homo sapiens
agtccagtgggggag

SEQ ID NO: 34857 - DNA, 15 bp, Homo sapiens
aagtccagtggggga

SEQ ID NO: 34858 - DNA, 15 bp, Homo sapiens
aaagtccagtggggg

SEQ ID NO: 34859 - DNA, 15 bp, Homo sapiens
aaaagtccagtgggg

SEQ ID NO: 34860 - DNA, 15 bp, Homo sapiens
aaaaagtccagtggg

SEQ ID NO: 34861 - DNA, 15 bp, Homo sapiens
caaaaagtccagtgg

SEQ ID NO: 34862 - DNA, 15 bp, Homo sapiens
ccaaaaagtccagtg

SEQ ID NO: 34863 - DNA, 15 bp, Homo sapiens
gccaaaaagtccagt

SEQ ID NO: 34864 - DNA, 15 bp, Homo sapiens
tgccaaaaagtccag

SEQ ID NO: 34865 - DNA, 15 bp, Homo sapiens
ttgccaaaaagtcca

SEQ ID NO: 34866 - DNA, 15 bp, Homo sapiens
gttgccaaaaagtcc

SEQ ID NO: 34867 - DNA, 15 bp, Homo sapiens
ggttgccaaaaagtc

SEQ ID NO: 34868 - DNA, 15 bp, Homo sapiens
tggttgccaaaaagt

SEQ ID NO: 34869 - DNA, 15 bp, Homo sapiens
atggttgccaaaaag

SEQ ID NO: 34870 - DNA, 15 bp, Homo sapiens
aatggttgccaaaaa

SEQ ID NO: 34871 - DNA, 15 bp, Homo sapiens
caatggttgccaaaa

SEQ ID NO: 34872 - DNA, 15 bp, Homo sapiens
gcaatggttgccaaa

SEQ ID NO: 34873 - DNA, 15 bp, Homo sapiens
agcaatggttgccaa

SEQ ID NO: 34874 - DNA, 15 bp, Homo sapiens
cagcaatggttgcca

SEQ ID NO: 34875 - DNA, 15 bp, Homo sapiens
acagcaatggttgcc

SEQ ID NO: 34876 - DNA, 15 bp, Homo sapiens
aacagcaatggttgc

SEQ ID NO: 34877 - DNA, 15 bp, Homo sapiens
gaacagcaatggttg

SEQ ID NO: 34878 - DNA, 15 bp, Homo sapiens
ggaacagcaatggtt

SEQ ID NO: 34879 - DNA, 15 bp, Homo sapiens
aggaacagcaatggt

SEQ ID NO: 34880 - DNA, 15 bp, Homo sapiens
aaggaacagcaatgg

SEQ ID NO: 34881 - DNA, 15 bp, Homo sapiens
gaaggaacagcaatg

SEQ ID NO: 34882 - DNA, 15 bp, Homo sapiens
agaaggaacagcaat

SEQ ID NO: 34883 - DNA, 15 bp, Homo sapiens
tagaaggaacagcaa

SEQ ID NO: 34884 - DNA, 15 bp, Homo sapiens
ttagaaggaacagca

SEQ ID NO: 34885 - DNA, 15 bp, Homo sapiens
tttagaaggaacagc

SEQ ID NO: 34886 - DNA, 15 bp, Homo sapiens
ttttagaaggaacag

SEQ ID NO: 34887 - DNA, 15 bp, Homo sapiens
cttttagaaggaaca

SEQ ID NO: 34888 - DNA, 15 bp, Homo sapiens
acttttagaaggaac

SEQ ID NO: 34889 - DNA, 15 bp, Homo sapiens
cacttttagaaggaa

SEQ ID NO: 34890 - DNA, 15 bp, Homo sapiens
tcacttttagaagga

SEQ ID NO: 34891 - DNA, 15 bp, Homo sapiens
atcacttttagaagg

SEQ ID NO: 34892 - DNA, 15 bp, Homo sapiens
aatcacttttagaag

SEQ ID NO: 34893 - DNA, 15 bp, Homo sapiens
aaatcacttttagaa

SEQ ID NO: 34894 - DNA, 15 bp, Homo sapiens
aaaatcacttttaga

SEQ ID NO: 34895 - DNA, 15 bp, Homo sapiens
aaaaatcacttttag

SEQ ID NO: 34896 - DNA, 15 bp, Homo sapiens
taaaaatcactttta

SEQ ID NO: 34897 - DNA, 15 bp, Homo sapiens
ttaaaaatcactttt

SEQ ID NO: 34898 - DNA, 15 bp, Homo sapiens
tttaaaaatcacttt

SEQ ID NO: 34899 - DNA, 15 bp, Homo sapiens
gtttaaaaatcactt

SEQ ID NO: 34900 - DNA, 15 bp, Homo sapiens
tgtttaaaaatcact

SEQ ID NO: 34901 - DNA, 15 bp, Homo sapiens
atgtttaaaaatcac

SEQ ID NO: 34902 - DNA, 15 bp, Homo sapiens
catgtttaaaaatca

SEQ ID NO: 34903 - DNA, 15 bp, Homo sapiens
acatgtttaaaaatc

SEQ ID NO: 34904 - DNA, 15 bp, Homo sapiens
tacatgtttaaaaat

SEQ ID NO: 34905 - DNA, 15 bp, Homo sapiens
atacatgtttaaaaa

SEQ ID NO: 34906 - DNA, 15 bp, Homo sapiens
tatacatgtttaaaa

SEQ ID NO: 34907 - DNA, 15 bp, Homo sapiens
atatacatgtttaaa

SEQ ID NO: 34908 - DNA, 15 bp, Homo sapiens
aatatacatgtttaa

SEQ ID NO: 34909 - DNA, 15 bp, Homo sapiens
aaatatacatgttta

SEQ ID NO: 34910 - DNA, 15 bp, Homo sapiens
aaaatatacatgttt

SEQ ID NO: 34911 - DNA, 15 bp, Homo sapiens
caaaatatacatgtt

SEQ ID NO: 34912 - DNA, 15 bp, Homo sapiens
tcaaaatatacatgt

SEQ ID NO: 34913 - DNA, 15 bp, Homo sapiens
ttcaaaatatacatg

SEQ ID NO: 34914 - DNA, 15 bp, Homo sapiens
cttcaaaatatacat

SEQ ID NO: 34915 - DNA, 15 bp, Homo sapiens
gcttcaaaatataca

SEQ ID NO: 34916 - DNA, 15 bp, Homo sapiens
ggcttcaaaatatac

SEQ ID NO: 34917 - DNA, 15 bp, Homo sapiens
tggcttcaaaatata

SEQ ID NO: 34918 - DNA, 15 bp, Homo sapiens
ctggcttcaaaatat

SEQ ID NO: 34919 - DNA, 15 bp, Homo sapiens
cctggcttcaaaata

SEQ ID NO: 34920 - DNA, 15 bp, Homo sapiens
gcctggcttcaaaat

SEQ ID NO: 34921 - DNA, 15 bp, Homo sapiens
tgcctggcttcaaaa

SEQ ID NO: 34922 - DNA, 15 bp, Homo sapiens
gtgcctggcttcaaa

SEQ ID NO: 34923 - DNA, 15 bp, Homo sapiens
tgtgcctggcttcaa

SEQ ID NO: 34924 - DNA, 15 bp, Homo sapiens
ctgtgcctggcttca

SEQ ID NO: 34925 - DNA, 15 bp, Homo sapiens
actgtgcctggcttc

SEQ ID NO: 34926 - DNA, 15 bp, Homo sapiens
cactgtgcctggctt

SEQ ID NO: 34927 - DNA, 15 bp, Homo sapiens
tcactgtgcctggct

SEQ ID NO: 34928 - DNA, 15 bp, Homo sapiens
gtcactgtgcctggc

SEQ ID NO: 34929 - DNA, 15 bp, Homo sapiens
agtcactgtgcctgg

SEQ ID NO: 34930 - DNA, 15 bp, Homo sapiens
gagtcactgtgcctg

SEQ ID NO: 34931 - DNA, 15 bp, Homo sapiens
tgagtcactgtgcct

SEQ ID NO: 34932 - DNA, 15 bp, Homo sapiens
gtgagtcactgtgcc

SEQ ID NO: 34933 - DNA, 15 bp, Homo sapiens
cgtgagtcactgtgc

SEQ ID NO: 34934 - DNA, 15 bp, Homo sapiens
acgtgagtcactgtg

SEQ ID NO: 34935 - DNA, 15 bp, Homo sapiens
gacgtgagtcactgt

SEQ ID NO: 34936 - DNA, 15 bp, Homo sapiens
agacgtgagtcactg

SEQ ID NO: 34937 - DNA, 15 bp, Homo sapiens
cagacgtgagtcact

SEQ ID NO: 34938 - DNA, 15 bp, Homo sapiens
acagacgtgagtcac

SEQ ID NO: 34939 - DNA, 15 bp, Homo sapiens
tacagacgtgagtca

SEQ ID NO: 34940 - DNA, 15 bp, Homo sapiens
ttacagacgtgagtc

SEQ ID NO: 34941 - DNA, 15 bp, Homo sapiens
attacagacgtgagt

SEQ ID NO: 34942 - DNA, 15 bp, Homo sapiens
gattacagacgtgag

SEQ ID NO: 34943 - DNA, 15 bp, Homo sapiens
ggattacagacgtga

SEQ ID NO: 34944 - DNA, 15 bp, Homo sapiens
gggattacagacgtg

SEQ ID NO: 34945 - DNA, 15 bp, Homo sapiens
tgggattacagacgt

SEQ ID NO: 34946 - DNA, 15 bp, Homo sapiens
ctgggattacagacg

SEQ ID NO: 34947 - DNA, 15 bp, Homo sapiens
tgctgggattacaga

SEQ ID NO: 34948 - DNA, 15 bp, Homo sapiens
cgcctcggcctccca

SEQ ID NO: 34949 - DNA, 15 bp, Homo sapiens
ccgcctcggcctccc

SEQ ID NO: 34950 - DNA, 15 bp, Homo sapiens
cccgcctcggcctcc

SEQ ID NO: 34951 - DNA, 15 bp, Homo sapiens
gcccgcctcggcctc

SEQ ID NO: 34952 - DNA, 15 bp, Homo sapiens
tgcccgcctcggcct

SEQ ID NO: 34953 - DNA, 15 bp, Homo sapiens
ctgcccgcctcggcc

SEQ ID NO: 34954 - DNA, 15 bp, Homo sapiens
tctgcccgcctcggc

SEQ ID NO: 34955 - DNA, 15 bp, Homo sapiens
atctgcccgcctcgg

SEQ ID NO: 34956 - DNA, 15 bp, Homo sapiens
gatctgcccgcctcg

SEQ ID NO: 34957 - DNA, 15 bp, Homo sapiens
ggtgatctgcccgcc

SEQ ID NO: 34958 - DNA, 15 bp, Homo sapiens
aggtgatctgcccgc

SEQ ID NO: 34959 - DNA, 15 bp, Homo sapiens
caggtgatctgcccg

SEQ ID NO: 34960 - DNA, 15 bp, Homo sapiens
tcaggtgatctgccc

SEQ ID NO: 34961 - DNA, 15 bp, Homo sapiens
gccaggctggtcttg

SEQ ID NO: 34962 - DNA, 15 bp, Homo sapiens
cctaatttttgtatt

SEQ ID NO: 34963 - DNA, 15 bp, Homo sapiens
gcctaatttttgtat

SEQ ID NO: 34964 - DNA, 15 bp, Homo sapiens
ggcctaatttttgta

SEQ ID NO: 34965 - DNA, 15 bp, Homo sapiens
tggcctaatttttgt

SEQ ID NO: 34966 - DNA, 15 bp, Homo sapiens
ctggcctaatttttg

SEQ ID NO: 34967 - DNA, 15 bp, Homo sapiens
cctggcctaattttt

SEQ ID NO: 34968 - DNA, 15 bp, Homo sapiens
acctggcctaatttt

SEQ ID NO: 34969 - DNA, 15 bp, Homo sapiens
cacctggcctaattt

SEQ ID NO: 34970 - DNA, 15 bp, Homo sapiens
acacctggcctaatt

SEQ ID NO: 34971 - DNA, 15 bp, Homo sapiens
cacacctggcctaat

SEQ ID NO: 34972 - DNA, 15 bp, Homo sapiens
ccacacctggcctaa

SEQ ID NO: 34973 - DNA, 15 bp, Homo sapiens
accacacctggccta

SEQ ID NO: 34974 - DNA, 15 bp, Homo sapiens
caccacacctggcct

SEQ ID NO: 34975 - DNA, 15 bp, Homo sapiens
ccaccacacctggcc

SEQ ID NO: 34976 - DNA, 15 bp, Homo sapiens
agccaccacacctgg

SEQ ID NO: 34977 - DNA, 15 bp, Homo sapiens
gagccaccacacctg

SEQ ID NO: 34978 - DNA, 15 bp, Homo sapiens
tgagccaccacacct

SEQ ID NO: 34979 - DNA, 15 bp, Homo sapiens
tcccgcctcggcctc

SEQ ID NO: 34980 - DNA, 15 bp, Homo sapiens
ctcccgcctcggcct

SEQ ID NO: 34981 - DNA, 15 bp, Homo sapiens
cctcccgcctcggcc

SEQ ID NO: 34982 - DNA, 15 bp, Homo sapiens
tcctcccgcctcggc

SEQ ID NO: 34983 - DNA, 15 bp, Homo sapiens
atcctcccgcctcgg

SEQ ID NO: 34984 - DNA, 15 bp, Homo sapiens
gatcctcccgcctcg

SEQ ID NO: 34985 - DNA, 15 bp, Homo sapiens
tgatcctcccgcctc

SEQ ID NO: 34986 - DNA, 15 bp, Homo sapiens
atgatcctcccgcct

SEQ ID NO: 34987 - DNA, 15 bp, Homo sapiens
catgatcctcccgcc

SEQ ID NO: 34988 - DNA, 15 bp, Homo sapiens
acatgatcctcccgc

SEQ ID NO: 34989 - DNA, 15 bp, Homo sapiens
cacatgatcctcccg

SEQ ID NO: 34990 - DNA, 15 bp, Homo sapiens
ccacatgatcctccc

SEQ ID NO: 34991 - DNA, 15 bp, Homo sapiens
accacatgatcctcc

SEQ ID NO: 34992 - DNA, 15 bp, Homo sapiens
gaccacatgatcctc

SEQ ID NO: 34993 - DNA, 15 bp, Homo sapiens
tgaccacatgatcct

SEQ ID NO: 34994 - DNA, 15 bp, Homo sapiens
ctgaccacatgatcc

SEQ ID NO: 34995 - DNA, 15 bp, Homo sapiens
cctgaccacatgatc

SEQ ID NO: 34996 - DNA, 15 bp, Homo sapiens
tcctgaccacatgat

SEQ ID NO: 34997 - DNA, 15 bp, Homo sapiens
ctcctgaccacatga

SEQ ID NO: 34998 - DNA, 15 bp, Homo sapiens
tctcctgaccacatg

SEQ ID NO: 34999 - DNA, 15 bp, Homo sapiens
atctcctgaccacat

SEQ ID NO: 35000 - DNA, 15 bp, Homo sapiens
gatctcctgaccaca

SEQ ID NO: 35001 - DNA, 15 bp, Homo sapiens
ggatctcctgaccac

SEQ ID NO: 35002 - DNA, 15 bp, Homo sapiens
tggatctcctgacca

SEQ ID NO: 35003 - DNA, 15 bp, Homo sapiens
ctggatctcctgacc

SEQ ID NO: 35004 - DNA, 15 bp, Homo sapiens
tctggatctcctgac

SEQ ID NO: 35005 - DNA, 15 bp, Homo sapiens
gtctggatctcctga

SEQ ID NO: 35006 - DNA, 15 bp, Homo sapiens
ggtctggatctcctg

SEQ ID NO: 35007 - DNA, 15 bp, Homo sapiens
tggtctggatctcct

SEQ ID NO: 35008 - DNA, 15 bp, Homo sapiens
atggtctggatctcc

SEQ ID NO: 35009 - DNA, 15 bp, Homo sapiens
gatggtctggatctc

SEQ ID NO: 35010 - DNA, 15 bp, Homo sapiens
ggatggtctggatct

SEQ ID NO: 35011 - DNA, 15 bp, Homo sapiens
aggatggtctggatc

SEQ ID NO: 35012 - DNA, 15 bp, Homo sapiens
caggatggtctggat

SEQ ID NO: 35013 - DNA, 15 bp, Homo sapiens
ccaggatggtctgga

SEQ ID NO: 35014 - DNA, 15 bp, Homo sapiens
gccaggatggtctgg

SEQ ID NO: 35015 - DNA, 15 bp, Homo sapiens
agccaggatggtctg

SEQ ID NO: 35016 - DNA, 15 bp, Homo sapiens
cgtgttagccaggat

SEQ ID NO: 35017 - DNA, 15 bp, Homo sapiens
ccgtgttagccagga

SEQ ID NO: 35018 - DNA, 15 bp, Homo sapiens
accgtgttagccagg

SEQ ID NO: 35019 - DNA, 15 bp, Homo sapiens
caccgtgttagccag

SEQ ID NO: 35020 - DNA, 15 bp, Homo sapiens
tcaccgtgttagcca

SEQ ID NO: 35021 - DNA, 15 bp, Homo sapiens
ttcaccgtgttagcc

SEQ ID NO: 35022 - DNA, 15 bp, Homo sapiens
tttcaccgtgttagc

SEQ ID NO: 35023 - DNA, 15 bp, Homo sapiens
gtttcaccgtgttag

SEQ ID NO: 35024 - DNA, 15 bp, Homo sapiens
tgtttcaccgtgtta

SEQ ID NO: 35025 - DNA, 15 bp, Homo sapiens
gtgtttcaccgtgtt

SEQ ID NO: 35026 - DNA, 15 bp, Homo sapiens
ggtgtttcaccgtgt

SEQ ID NO: 35027 - DNA, 15 bp, Homo sapiens
tggtgtttcaccgtg

SEQ ID NO: 35028 - DNA, 15 bp, Homo sapiens
atggtgtttcaccgt

SEQ ID NO: 35029 - DNA, 15 bp, Homo sapiens
aatggtgtttcaccg

SEQ ID NO: 35030 - DNA, 15 bp, Homo sapiens
aaatggtgtttcacc

SEQ ID NO: 35031 - DNA, 15 bp, Homo sapiens
gaaatggtgtttcac

SEQ ID NO: 35032 - DNA, 15 bp, Homo sapiens
agaaatggtgtttca

SEQ ID NO: 35033 - DNA, 15 bp, Homo sapiens
tagaaatggtgtttc

SEQ ID NO: 35034 - DNA, 15 bp, Homo sapiens
gtagaaatggtgttt

SEQ ID NO: 35035 - DNA, 15 bp, Homo sapiens
agtagaaatggtgtt

SEQ ID NO: 35036 - DNA, 15 bp, Homo sapiens
tagtagaaatggtgt

SEQ ID NO: 35037 - DNA, 15 bp, Homo sapiens
ttagtagaaatggtg

SEQ ID NO: 35038 - DNA, 15 bp, Homo sapiens
tttagtagaaatggt

SEQ ID NO: 35039 - DNA, 15 bp, Homo sapiens
ttttagtagaaatgg

SEQ ID NO: 35040 - DNA, 15 bp, Homo sapiens
tttttagtagaaatg

SEQ ID NO: 35041 - DNA, 15 bp, Homo sapiens
atttttagtagaaat

SEQ ID NO: 35042 - DNA, 15 bp, Homo sapiens
tatttttagtagaaa

SEQ ID NO: 35043 - DNA, 15 bp, Homo sapiens
gtatttttagtagaa

SEQ ID NO: 35044 - DNA, 15 bp, Homo sapiens
tgcccagctaatttt

SEQ ID NO: 35045 - DNA, 15 bp, Homo sapiens
atgcccagctaattt

SEQ ID NO: 35046 - DNA, 15 bp, Homo sapiens
caccatgcccagcta

SEQ ID NO: 35047 - DNA, 15 bp, Homo sapiens
ccaccatgcccagct

SEQ ID NO: 35048 - DNA, 15 bp, Homo sapiens
cgccaccatgcccag

SEQ ID NO: 35049 - DNA, 15 bp, Homo sapiens
ccgccaccatgccca

SEQ ID NO: 35050 - DNA, 15 bp, Homo sapiens
cccgccaccatgccc

SEQ ID NO: 35051 - DNA, 15 bp, Homo sapiens
gcccgccaccatgcc

SEQ ID NO: 35052 - DNA, 15 bp, Homo sapiens
cgcccgccaccatgc

SEQ ID NO: 35053 - DNA, 15 bp, Homo sapiens
gcgcccgccaccatg

SEQ ID NO: 35054 - DNA, 15 bp, Homo sapiens
ggcgcccgccaccat

SEQ ID NO: 35055 - DNA, 15 bp, Homo sapiens
aggcgcccgccacca

SEQ ID NO: 35056 - DNA, 15 bp, Homo sapiens
caggcgcccgccacc

SEQ ID NO: 35057 - DNA, 15 bp, Homo sapiens
acaggcgcccgccac

SEQ ID NO: 35058 - DNA, 15 bp, Homo sapiens
tacaggcgcccgcca

SEQ ID NO: 35059 - DNA, 15 bp, Homo sapiens
ttacaggcgcccgcc

SEQ ID NO: 35060 - DNA, 15 bp, Homo sapiens
attacaggcgcccgc

SEQ ID NO: 35061 - DNA, 15 bp, Homo sapiens
gattacaggcgcccg

SEQ ID NO: 35062 - DNA, 15 bp, Homo sapiens
ggattacaggcgccc

SEQ ID NO: 35063 - DNA, 15 bp, Homo sapiens
gggattacaggcgcc

SEQ ID NO: 35064 - DNA, 15 bp, Homo sapiens
tgggattacaggcgc

SEQ ID NO: 35065 - DNA, 15 bp, Homo sapiens
ttcagcctcctgagt

SEQ ID NO: 35066 - DNA, 15 bp, Homo sapiens
cttcagcctcctgag

SEQ ID NO: 35067 - DNA, 15 bp, Homo sapiens
gcttcagcctcctga

SEQ ID NO: 35068 - DNA, 15 bp, Homo sapiens
tgcttcagcctcctg

SEQ ID NO: 35069 - DNA, 15 bp, Homo sapiens
ctgcttcagcctcct

SEQ ID NO: 35070 - DNA, 15 bp, Homo sapiens
tctgcttcagcctcc

SEQ ID NO: 35071 - DNA, 15 bp, Homo sapiens
ttctgcttcagcctc

SEQ ID NO: 35072 - DNA, 15 bp, Homo sapiens
cttctgcttcagcct

SEQ ID NO: 35073 - DNA, 15 bp, Homo sapiens
tcttctgcttcagcc

SEQ ID NO: 35074 - DNA, 15 bp, Homo sapiens
ttcttctgcttcagc

SEQ ID NO: 35075 - DNA, 15 bp, Homo sapiens
attcttctgcttcag

SEQ ID NO: 35076 - DNA, 15 bp, Homo sapiens
cattcttctgcttca

SEQ ID NO: 35077 - DNA, 15 bp, Homo sapiens
ccattcttctgcttc

SEQ ID NO: 35078 - DNA, 15 bp, Homo sapiens
gccattcttctgctt

SEQ ID NO: 35079 - DNA, 15 bp, Homo sapiens
agccattcttctgct

SEQ ID NO: 35080 - DNA, 15 bp, Homo sapiens
aagccattcttctgc

SEQ ID NO: 35081 - DNA, 15 bp, Homo sapiens
caagccattcttctg

SEQ ID NO: 35082 - DNA, 15 bp, Homo sapiens
tcaagccattcttct

SEQ ID NO: 35083 - DNA, 15 bp, Homo sapiens
ttcaagccattcttc

SEQ ID NO: 35084 - DNA, 15 bp, Homo sapiens
gttcaagccattctt

SEQ ID NO: 35085 - DNA, 15 bp, Homo sapiens
ggttcaagccattct

SEQ ID NO: 35086 - DNA, 15 bp, Homo sapiens
aggttcaagccattc

SEQ ID NO: 35087 - DNA, 15 bp, Homo sapiens
caggttcaagccatt

SEQ ID NO: 35088 - DNA, 15 bp, Homo sapiens
ccaggttcaagccat

SEQ ID NO: 35089 - DNA, 15 bp, Homo sapiens
cccaggttcaagcca

SEQ ID NO: 35090 - DNA, 15 bp, Homo sapiens
tcccaggttcaagcc

SEQ ID NO: 35091 - DNA, 15 bp, Homo sapiens
ctcccaggttcaagc

SEQ ID NO: 35092 - DNA, 15 bp, Homo sapiens
gctccgcctcccagg

SEQ ID NO: 35093 - DNA, 15 bp, Homo sapiens
agctccgcctcccag

SEQ ID NO: 35094 - DNA, 15 bp, Homo sapiens
aagctccgcctccca

SEQ ID NO: 35095 - DNA, 15 bp, Homo sapiens
ttcactgcaagctcc

SEQ ID NO: 35096 - DNA, 15 bp, Homo sapiens
gttcactgcaagctc

SEQ ID NO: 35097 - DNA, 15 bp, Homo sapiens
ggttcactgcaagct

SEQ ID NO: 35098 - DNA, 15 bp, Homo sapiens
tggttcactgcaagc

SEQ ID NO: 35099 - DNA, 15 bp, Homo sapiens
ttggttcactgcaag

SEQ ID NO: 35100 - DNA, 15 bp, Homo sapiens
cttggttcactgcaa

SEQ ID NO: 35101 - DNA, 15 bp, Homo sapiens
tcttggttcactgca

SEQ ID NO: 35102 - DNA, 15 bp, Homo sapiens
atcttggttcactgc

SEQ ID NO: 35103 - DNA, 15 bp, Homo sapiens
aatcttggttcactg

SEQ ID NO: 35104 - DNA, 15 bp, Homo sapiens
caatcttggttcact

SEQ ID NO: 35105 - DNA, 15 bp, Homo sapiens
gcaatcttggttcac

SEQ ID NO: 35106 - DNA, 15 bp, Homo sapiens
cgcaatcttggttca

SEQ ID NO: 35107 - DNA, 15 bp, Homo sapiens
gcgcaatcttggttc

SEQ ID NO: 35108 - DNA, 15 bp, Homo sapiens
ggcgcaatcttggtt

SEQ ID NO: 35109 - DNA, 15 bp, Homo sapiens
tggcgcaatcttggt

SEQ ID NO: 35110 - DNA, 15 bp, Homo sapiens
gtggcgcaatcttgg

SEQ ID NO: 35111 - DNA, 15 bp, Homo sapiens
agtggcgcaatcttg

SEQ ID NO: 35112 - DNA, 15 bp, Homo sapiens
cagtggcgcaatctt

SEQ ID NO: 35113 - DNA, 15 bp, Homo sapiens
actttgttgcccagg

SEQ ID NO: 35114 - DNA, 15 bp, Homo sapiens
cactttgttgcccag

SEQ ID NO: 35115 - DNA, 15 bp, Homo sapiens
tcactttgttgccca

SEQ ID NO: 35116 - DNA, 15 bp, Homo sapiens
ctcactttgttgccc

SEQ ID NO: 35117 - DNA, 15 bp, Homo sapiens
tctcactttgttgcc

SEQ ID NO: 35118 - DNA, 15 bp, Homo sapiens
gtctcactttgttgc

SEQ ID NO: 35119 - DNA, 15 bp, Homo sapiens
agtctcactttgttg

SEQ ID NO: 35120 - DNA, 15 bp, Homo sapiens
gagtctcactttgtt

SEQ ID NO: 35121 - DNA, 15 bp, Homo sapiens
cggagtctcactttg

SEQ ID NO: 35122 - DNA, 15 bp, Homo sapiens
acggagtctcacttt

SEQ ID NO: 35123 - DNA, 15 bp, Homo sapiens
gacggagtctcactt

SEQ ID NO: 35124 - DNA, 15 bp, Homo sapiens
agacggagtctcact

SEQ ID NO: 35125 - DNA, 15 bp, Homo sapiens
gagacggagtctcac

SEQ ID NO: 35126 - DNA, 15 bp, Homo sapiens
tgagacggagtctca

SEQ ID NO: 35127 - DNA, 15 bp, Homo sapiens
gactaattttttttt

SEQ ID NO: 35128 - DNA, 15 bp, Homo sapiens
cgactaatttttttt

SEQ ID NO: 35129 - DNA, 15 bp, Homo sapiens
ccgactaattttttt

SEQ ID NO: 35130 - DNA, 15 bp, Homo sapiens
cccgactaatttttt

SEQ ID NO: 35131 - DNA, 15 bp, Homo sapiens
gcccgactaattttt

SEQ ID NO: 35132 - DNA, 15 bp, Homo sapiens
tgcccgactaatttt

SEQ ID NO: 35133 - DNA, 15 bp, Homo sapiens
atgcccgactaattt

SEQ ID NO: 35134 - DNA, 15 bp, Homo sapiens
catgcccgactaatt

SEQ ID NO: 35135 - DNA, 15 bp, Homo sapiens
ccatgcccgactaat

SEQ ID NO: 35136 - DNA, 15 bp, Homo sapiens
accatgcccgactaa

SEQ ID NO: 35137 - DNA, 15 bp, Homo sapiens
taccatgcccgacta

SEQ ID NO: 35138 - DNA, 15 bp, Homo sapiens
ttaccatgcccgact

SEQ ID NO: 35139 - DNA, 15 bp, Homo sapiens
gttaccatgcccgac

SEQ ID NO: 35140 - DNA, 15 bp, Homo sapiens
tgttaccatgcccga

SEQ ID NO: 35141 - DNA, 15 bp, Homo sapiens
ctgttaccatgcccg

SEQ ID NO: 35142 - DNA, 15 bp, Homo sapiens
cctgttaccatgccc

SEQ ID NO: 35143 - DNA, 15 bp, Homo sapiens
acctgttaccatgcc

SEQ ID NO: 35144 - DNA, 15 bp, Homo sapiens
cacctgttaccatgc

SEQ ID NO: 35145 - DNA, 15 bp, Homo sapiens
gcacctgttaccatg

SEQ ID NO: 35146 - DNA, 15 bp, Homo sapiens
ggcacctgttaccat

SEQ ID NO: 35147 - DNA, 15 bp, Homo sapiens
aggcacctgttacca

SEQ ID NO: 35148 - DNA, 15 bp, Homo sapiens
caggcacctgttacc

SEQ ID NO: 35149 - DNA, 15 bp, Homo sapiens
acaggcacctgttac

SEQ ID NO: 35150 - DNA, 15 bp, Homo sapiens
tacaggcacctgtta

SEQ ID NO: 35151 - DNA, 15 bp, Homo sapiens
ttacaggcacctgtt

SEQ ID NO: 35152 - DNA, 15 bp, Homo sapiens
attacaggcacctgt

SEQ ID NO: 35153 - DNA, 15 bp, Homo sapiens
gattacaggcacctg

SEQ ID NO: 35154 - DNA, 15 bp, Homo sapiens
ggattacaggcacct

SEQ ID NO: 35155 - DNA, 15 bp, Homo sapiens
gggattacaggcacc

SEQ ID NO: 35156 - DNA, 15 bp, Homo sapiens
tcaagtagctgggat

SEQ ID NO: 35157 - DNA, 15 bp, Homo sapiens
ctcaagtagctggga

SEQ ID NO: 35158 - DNA, 15 bp, Homo sapiens
tctcaagtagctggg

SEQ ID NO: 35159 - DNA, 15 bp, Homo sapiens
ctctcaagtagctgg

SEQ ID NO: 35160 - DNA, 15 bp, Homo sapiens
cctctcaagtagctg

SEQ ID NO: 35161 - DNA, 15 bp, Homo sapiens
gcctctcaagtagct

SEQ ID NO: 35162 - DNA, 15 bp, Homo sapiens
agcctctcaagtagc

SEQ ID NO: 35163 - DNA, 15 bp, Homo sapiens
cagcctctcaagtag

SEQ ID NO: 35164 - DNA, 15 bp, Homo sapiens
tcagcctctcaagta

SEQ ID NO: 35165 - DNA, 15 bp, Homo sapiens
ctcagcctctcaagt

SEQ ID NO: 35166 - DNA, 15 bp, Homo sapiens
cctcagcctctcaag

SEQ ID NO: 35167 - DNA, 15 bp, Homo sapiens
gcctcagcctctcaa

SEQ ID NO: 35168 - DNA, 15 bp, Homo sapiens
tgcctcagcctctca

SEQ ID NO: 35169 - DNA, 15 bp, Homo sapiens
ctgcctcagcctctc

SEQ ID NO: 35170 - DNA, 15 bp, Homo sapiens
cctgcctcagcctct

SEQ ID NO: 35171 - DNA, 15 bp, Homo sapiens
ccctgcctcagcctc

SEQ ID NO: 35172 - DNA, 15 bp, Homo sapiens
tccctgcctcagcct

SEQ ID NO: 35173 - DNA, 15 bp, Homo sapiens
ctccctgcctcagcc

SEQ ID NO: 35174 - DNA, 15 bp, Homo sapiens
tctccctgcctcagc

SEQ ID NO: 35175 - DNA, 15 bp, Homo sapiens
ttctccctgcctcag

SEQ ID NO: 35176 - DNA, 15 bp, Homo sapiens
attctccctgcctca

SEQ ID NO: 35177 - DNA, 15 bp, Homo sapiens
aattctccctgcctc

SEQ ID NO: 35178 - DNA, 15 bp, Homo sapiens
caattctccctgcct

SEQ ID NO: 35179 - DNA, 15 bp, Homo sapiens
gcaattctccctgcc

SEQ ID NO: 35180 - DNA, 15 bp, Homo sapiens
agcaattctccctgc

SEQ ID NO: 35181 - DNA, 15 bp, Homo sapiens
aagcaattctccctg

SEQ ID NO: 35182 - DNA, 15 bp, Homo sapiens
caagcaattctccct

SEQ ID NO: 35183 - DNA, 15 bp, Homo sapiens
tcaagcaattctccc

SEQ ID NO: 35184 - DNA, 15 bp, Homo sapiens
tggttcaagcaattc

SEQ ID NO: 35185 - DNA, 15 bp, Homo sapiens
ctggttcaagcaatt

SEQ ID NO: 35186 - DNA, 15 bp, Homo sapiens
cctggttcaagcaat

SEQ ID NO: 35187 - DNA, 15 bp, Homo sapiens
acctggttcaagcaa

SEQ ID NO: 35188 - DNA, 15 bp, Homo sapiens
tacctggttcaagca

SEQ ID NO: 35189 - DNA, 15 bp, Homo sapiens
ctacctggttcaagc

SEQ ID NO: 35190 - DNA, 15 bp, Homo sapiens
cctacctggttcaag

SEQ ID NO: 35191 - DNA, 15 bp, Homo sapiens
gcctacctggttcaa

SEQ ID NO: 35192 - DNA, 15 bp, Homo sapiens
cgcctacctggttca

SEQ ID NO: 35193 - DNA, 15 bp, Homo sapiens
ccgcctacctggttc

SEQ ID NO: 35194 - DNA, 15 bp, Homo sapiens
tccgcctacctggtt

SEQ ID NO: 35195 - DNA, 15 bp, Homo sapiens
ctccgcctacctggt

SEQ ID NO: 35196 - DNA, 15 bp, Homo sapiens
cctccgcctacctgg

SEQ ID NO: 35197 - DNA, 15 bp, Homo sapiens
acctccgcctacctg

SEQ ID NO: 35198 - DNA, 15 bp, Homo sapiens
aacctccgcctacct

SEQ ID NO: 35199 - DNA, 15 bp, Homo sapiens
caacctccgcctacc

SEQ ID NO: 35200 - DNA, 15 bp, Homo sapiens
gcaacctccgcctac

SEQ ID NO: 35201 - DNA, 15 bp, Homo sapiens
tgcaacctccgccta

SEQ ID NO: 35202 - DNA, 15 bp, Homo sapiens
gtggtgcgatcttgg

SEQ ID NO: 35203 - DNA, 15 bp, Homo sapiens
agtggtgcgatcttg

SEQ ID NO: 35204 - DNA, 15 bp, Homo sapiens
cagtggtgcgatctt

SEQ ID NO: 35205 - DNA, 15 bp, Homo sapiens
gcagtggtgcgatct

SEQ ID NO: 35206 - DNA, 15 bp, Homo sapiens
tgcagtggtgcgatc

SEQ ID NO: 35207 - DNA, 15 bp, Homo sapiens
gtgcagtggtgcgat

SEQ ID NO: 35208 - DNA, 15 bp, Homo sapiens
agtgcagtggtgcga

SEQ ID NO: 35209 - DNA, 15 bp, Homo sapiens
gagtgcagtggtgcg

SEQ ID NO: 35210 - DNA, 15 bp, Homo sapiens
ccccaggctggagtg

SEQ ID NO: 35211 - DNA, 15 bp, Homo sapiens
gccccaggctggagt

SEQ ID NO: 35212 - DNA, 15 bp, Homo sapiens
tgccccaggctggag

SEQ ID NO: 35213 - DNA, 15 bp, Homo sapiens
ttgccccaggctgga

SEQ ID NO: 35214 - DNA, 15 bp, Homo sapiens
gttgccccaggctgg

SEQ ID NO: 35215 - DNA, 15 bp, Homo sapiens
tgttgccccaggctg

SEQ ID NO: 35216 - DNA, 15 bp, Homo sapiens
ctgttgccccaggct

SEQ ID NO: 35217 - DNA, 15 bp, Homo sapiens
tctgttgccccaggc

SEQ ID NO: 35218 - DNA, 15 bp, Homo sapiens
ctctgttgccccagg

SEQ ID NO: 35219 - DNA, 15 bp, Homo sapiens
gctctgttgccccag

SEQ ID NO: 35220 - DNA, 15 bp, Homo sapiens
tgctctgttgcccca

SEQ ID NO: 35221 - DNA, 15 bp, Homo sapiens
ttgctctgttgcccc

SEQ ID NO: 35222 - DNA, 15 bp, Homo sapiens
cttgctctgttgccc

SEQ ID NO: 35223 - DNA, 15 bp, Homo sapiens
gtcttgctctgttgc

SEQ ID NO: 35224 - DNA, 15 bp, Homo sapiens
agtcttgctctgttg

SEQ ID NO: 35225 - DNA, 15 bp, Homo sapiens
cagtcttgctctgtt

SEQ ID NO: 35226 - DNA, 15 bp, Homo sapiens
acagtcttgctctgt

SEQ ID NO: 35227 - DNA, 15 bp, Homo sapiens
gacagtcttgctctg

SEQ ID NO: 35228 - DNA, 15 bp, Homo sapiens
agacagtcttgctct

SEQ ID NO: 35229 - DNA, 15 bp, Homo sapiens
gagacagtcttgctc

SEQ ID NO: 35230 - DNA, 15 bp, Homo sapiens
tgagacagtcttgct

SEQ ID NO: 35231 - DNA, 15 bp, Homo sapiens
ttgagacagtcttgc

SEQ ID NO: 35232 - DNA, 15 bp, Homo sapiens
tttgagacagtcttg

SEQ ID NO: 35233 - DNA, 15 bp, Homo sapiens
ttttgagacagtctt

SEQ ID NO: 35234 - DNA, 15 bp, Homo sapiens
tttttgagacagtct

SEQ ID NO: 35235 - DNA, 15 bp, Homo sapiens
ttttttgagacagtc

SEQ ID NO: 35236 - DNA, 15 bp, Homo sapiens
attttttttgagaca

SEQ ID NO: 35237 - DNA, 15 bp, Homo sapiens
tattttttttgagac

SEQ ID NO: 35238 - DNA, 15 bp, Homo sapiens
ttattttttttgaga

SEQ ID NO: 35239 - DNA, 15 bp, Homo sapiens
tttattttttttgag

SEQ ID NO: 35240 - DNA, 15 bp, Homo sapiens
atttattttttttga

SEQ ID NO: 35241 - DNA, 15 bp, Homo sapiens
tatttattttttttg

SEQ ID NO: 35242 - DNA, 15 bp, Homo sapiens
ttatttatttttttt

SEQ ID NO: 35243 - DNA, 15 bp, Homo sapiens
tttatttattttttt

SEQ ID NO: 35244 - DNA, 15 bp, Homo sapiens
atttatttatttttt

SEQ ID NO: 35245 - DNA, 15 bp, Homo sapiens
tatttatttattttt

SEQ ID NO: 35246 - DNA, 15 bp, Homo sapiens
ttttatttatttatt

SEQ ID NO: 35247 - DNA, 15 bp, Homo sapiens
attttatttatttat

SEQ ID NO: 35248 - DNA, 15 bp, Homo sapiens
tattttatttattta

SEQ ID NO: 35249 - DNA, 15 bp, Homo sapiens
ttattttatttattt

SEQ ID NO: 35250 - DNA, 15 bp, Homo sapiens
tttattttatttatt

SEQ ID NO: 35251 - DNA, 15 bp, Homo sapiens
atttattttatttat

SEQ ID NO: 35252 - DNA, 15 bp, Homo sapiens
aatttattttattta

SEQ ID NO: 35253 - DNA, 15 bp, Homo sapiens
gaatttattttattt

SEQ ID NO: 35254 - DNA, 15 bp, Homo sapiens
agaatttattttatt

SEQ ID NO: 35255 - DNA, 15 bp, Homo sapiens
aagaatttattttat

SEQ ID NO: 35256 - DNA, 15 bp, Homo sapiens
taagaatttatttta

SEQ ID NO: 35257 - DNA, 15 bp, Homo sapiens
ttaagaatttatttt

SEQ ID NO: 35258 - DNA, 15 bp, Homo sapiens
cttaagaatttattt

SEQ ID NO: 35259 - DNA, 15 bp, Homo sapiens
tcttaagaatttatt

SEQ ID NO: 35260 - DNA, 15 bp, Homo sapiens
ttcttaagaatttat

SEQ ID NO: 35261 - DNA, 15 bp, Homo sapiens
cttcttaagaattta

SEQ ID NO: 35262 - DNA, 15 bp, Homo sapiens
ccttcttaagaattt

SEQ ID NO: 35263 - DNA, 15 bp, Homo sapiens
tccttcttaagaatt

SEQ ID NO: 35264 - DNA, 15 bp, Homo sapiens
atccttcttaagaat

SEQ ID NO: 35265 - DNA, 15 bp, Homo sapiens
tatccttcttaagaa

SEQ ID NO: 35266 - DNA, 15 bp, Homo sapiens
atatccttcttaaga

SEQ ID NO: 35267 - DNA, 15 bp, Homo sapiens
aatatccttcttaag

SEQ ID NO: 35268 - DNA, 15 bp, Homo sapiens
aaatatccttcttaa

SEQ ID NO: 35269 - DNA, 15 bp, Homo sapiens
aaaatatccttctta

SEQ ID NO: 35270 - DNA, 15 bp, Homo sapiens
caaaatatccttctt

SEQ ID NO: 35271 - DNA, 15 bp, Homo sapiens
ccaaaatatccttct

SEQ ID NO: 35272 - DNA, 15 bp, Homo sapiens
tccaaaatatccttc

SEQ ID NO: 35273 - DNA, 15 bp, Homo sapiens
ttccaaaatatcctt

SEQ ID NO: 35274 - DNA, 15 bp, Homo sapiens
tttccaaaatatcct

SEQ ID NO: 35275 - DNA, 15 bp, Homo sapiens
ttttccaaaatatcc

SEQ ID NO: 35276 - DNA, 15 bp, Homo sapiens
gttttccaaaatatc

SEQ ID NO: 35277 - DNA, 15 bp, Homo sapiens
agttttccaaaatat

SEQ ID NO: 35278 - DNA, 15 bp, Homo sapiens
gagttttccaaaata

SEQ ID NO: 35279 - DNA, 15 bp, Homo sapiens
ggagttttccaaaat

SEQ ID NO: 35280 - DNA, 15 bp, Homo sapiens
aggagttttccaaaa

SEQ ID NO: 35281 - DNA, 15 bp, Homo sapiens
aaggagttttccaaa

SEQ ID NO: 35282 - DNA, 15 bp, Homo sapiens
taaggagttttccaa

SEQ ID NO: 35283 - DNA, 15 bp, Homo sapiens
gtaaggagttttcca

SEQ ID NO: 35284 - DNA, 15 bp, Homo sapiens
tgtaaggagttttcc

SEQ ID NO: 35285 - DNA, 15 bp, Homo sapiens
atgtaaggagttttc

SEQ ID NO: 35286 - DNA, 15 bp, Homo sapiens
tatgtaaggagtttt

SEQ ID NO: 35287 - DNA, 15 bp, Homo sapiens
gtatgtaaggagttt

SEQ ID NO: 35288 - DNA, 15 bp, Homo sapiens
ggtatgtaaggagtt

SEQ ID NO: 35289 - DNA, 15 bp, Homo sapiens
aggtatgtaaggagt

SEQ ID NO: 35290 - DNA, 15 bp, Homo sapiens
taggtatgtaaggag

SEQ ID NO: 35291 - DNA, 15 bp, Homo sapiens
ttaggtatgtaagga

SEQ ID NO: 35292 - DNA, 15 bp, Homo sapiens
tttaggtatgtaagg

SEQ ID NO: 35293 - DNA, 15 bp, Homo sapiens
atttaggtatgtaag

SEQ ID NO: 35294 - DNA, 15 bp, Homo sapiens
aatttaggtatgtaa

SEQ ID NO: 35295 - DNA, 15 bp, Homo sapiens
gaatttaggtatgta

SEQ ID NO: 35296 - DNA, 15 bp, Homo sapiens
agaatttaggtatgt

SEQ ID NO: 35297 - DNA, 15 bp, Homo sapiens
aagaatttaggtatg

SEQ ID NO: 35298 - DNA, 15 bp, Homo sapiens
aaagaatttaggtat

SEQ ID NO: 35299 - DNA, 15 bp, Homo sapiens
caaagaatttaggta

SEQ ID NO: 35300 - DNA, 15 bp, Homo sapiens
acaaagaatttaggt

SEQ ID NO: 35301 - DNA, 15 bp, Homo sapiens
aacaaagaatttagg

SEQ ID NO: 35302 - DNA, 15 bp, Homo sapiens
aaacaaagaatttag

SEQ ID NO: 35303 - DNA, 15 bp, Homo sapiens
taaacaaagaattta

SEQ ID NO: 35304 - DNA, 15 bp, Homo sapiens
ataaacaaagaattt

SEQ ID NO: 35305 - DNA, 15 bp, Homo sapiens
gataaacaaagaatt

SEQ ID NO: 35306 - DNA, 15 bp, Homo sapiens
tgataaacaaagaat

SEQ ID NO: 35307 - DNA, 15 bp, Homo sapiens
ttgataaacaaagaa

SEQ ID NO: 35308 - DNA, 15 bp, Homo sapiens
tttgataaacaaaga

SEQ ID NO: 35309 - DNA, 15 bp, Homo sapiens
atttgataaacaaag

SEQ ID NO: 35310 - DNA, 15 bp, Homo sapiens
tatttgataaacaaa

SEQ ID NO: 35311 - DNA, 15 bp, Homo sapiens
gtatttgataaacaa

SEQ ID NO: 35312 - DNA, 15 bp, Homo sapiens
agtatttgataaaca

SEQ ID NO: 35313 - DNA, 15 bp, Homo sapiens
aagtatttgataaac

SEQ ID NO: 35314 - DNA, 15 bp, Homo sapiens
caagtatttgataaa

SEQ ID NO: 35315 - DNA, 15 bp, Homo sapiens
ccaagtatttgataa

SEQ ID NO: 35316 - DNA, 15 bp, Homo sapiens
tccaagtatttgata

SEQ ID NO: 35317 - DNA, 15 bp, Homo sapiens
gtccaagtatttgat

SEQ ID NO: 35318 - DNA, 15 bp, Homo sapiens
agtccaagtatttga

SEQ ID NO: 35319 - DNA, 15 bp, Homo sapiens
aagtccaagtatttg

SEQ ID NO: 35320 - DNA, 15 bp, Homo sapiens
taagtccaagtattt

SEQ ID NO: 35321 - DNA, 15 bp, Homo sapiens
ctaagtccaagtatt

SEQ ID NO: 35322 - DNA, 15 bp, Homo sapiens
gctaagtccaagtat

SEQ ID NO: 35323 - DNA, 15 bp, Homo sapiens
tgctaagtccaagta

SEQ ID NO: 35324 - DNA, 15 bp, Homo sapiens
gtgctaagtccaagt

SEQ ID NO: 35325 - DNA, 15 bp, Homo sapiens
tgtgctaagtccaag

SEQ ID NO: 35326 - DNA, 15 bp, Homo sapiens
gtgtgctaagtccaa

SEQ ID NO: 35327 - DNA, 15 bp, Homo sapiens
agtgtgctaagtcca

SEQ ID NO: 35328 - DNA, 15 bp, Homo sapiens
gagtgtgctaagtcc

SEQ ID NO: 35329 - DNA, 15 bp, Homo sapiens
agagtgtgctaagtc

SEQ ID NO: 35330 - DNA, 15 bp, Homo sapiens
aagagtgtgctaagt

SEQ ID NO: 35331 - DNA, 15 bp, Homo sapiens
gaagagtgtgctaag

SEQ ID NO: 35332 - DNA, 15 bp, Homo sapiens
agaagagtgtgctaa

SEQ ID NO: 35333 - DNA, 15 bp, Homo sapiens
aagaagagtgtgcta

SEQ ID NO: 35334 - DNA, 15 bp, Homo sapiens
aaagaagagtgtgct

SEQ ID NO: 35335 - DNA, 15 bp, Homo sapiens
caaagaagagtgtgc

SEQ ID NO: 35336 - DNA, 15 bp, Homo sapiens
tcaaagaagagtgtg

SEQ ID NO: 35337 - DNA, 15 bp, Homo sapiens
ttcaaagaagagtgt

SEQ ID NO: 35338 - DNA, 15 bp, Homo sapiens
tttcaaagaagagtg

SEQ ID NO: 35339 - DNA, 15 bp, Homo sapiens
atttcaaagaagagt

SEQ ID NO: 35340 - DNA, 15 bp, Homo sapiens
catttcaaagaagag

SEQ ID NO: 35341 - DNA, 15 bp, Homo sapiens
ccatttcaaagaaga

SEQ ID NO: 35342 - DNA, 15 bp, Homo sapiens
tccatttcaaagaag

SEQ ID NO: 35343 - DNA, 15 bp, Homo sapiens
gtccatttcaaagaa

SEQ ID NO: 35344 - DNA, 15 bp, Homo sapiens
ggtccatttcaaaga

SEQ ID NO: 35345 - DNA, 15 bp, Homo sapiens
tggtccatttcaaag

SEQ ID NO: 35346 - DNA, 15 bp, Homo sapiens
ttggtccatttcaaa

SEQ ID NO: 35347 - DNA, 15 bp, Homo sapiens
attggtccatttcaa

SEQ ID NO: 35348 - DNA, 15 bp, Homo sapiens
tattggtccatttca

SEQ ID NO: 35349 - DNA, 15 bp, Homo sapiens
ttattggtccatttc

SEQ ID NO: 35350 - DNA, 15 bp, Homo sapiens
tttattggtccattt

SEQ ID NO: 35351 - DNA, 15 bp, Homo sapiens
gtttattggtccatt

SEQ ID NO: 35352 - DNA, 15 bp, Homo sapiens
tgtttattggtccat

SEQ ID NO: 35353 - DNA, 15 bp, Homo sapiens
ttgtttattggtcca

SEQ ID NO: 35354 - DNA, 15 bp, Homo sapiens
gttgtttattggtcc

SEQ ID NO: 35355 - DNA, 15 bp, Homo sapiens
tgttgtttattggtc

SEQ ID NO: 35356 - DNA, 15 bp, Homo sapiens
ctgttgtttattggt

SEQ ID NO: 35357 - DNA, 15 bp, Homo sapiens
cctgttgtttattgg

SEQ ID NO: 35358 - DNA, 15 bp, Homo sapiens
tcctgttgtttattg

SEQ ID NO: 35359 - DNA, 15 bp, Homo sapiens
ctcctgttgtttatt

SEQ ID NO: 35360 - DNA, 15 bp, Homo sapiens
gctcctgttgtttat

SEQ ID NO: 35361 - DNA, 15 bp, Homo sapiens
ggctcctgttgttta

SEQ ID NO: 35362 - DNA, 15 bp, Homo sapiens
gggctcctgttgttt

SEQ ID NO: 35363 - DNA, 15 bp, Homo sapiens
tgggctcctgttgtt

SEQ ID NO: 35364 - DNA, 15 bp, Homo sapiens
atgggctcctgttgt

SEQ ID NO: 35365 - DNA, 15 bp, Homo sapiens
tatgggctcctgttg

SEQ ID NO: 35366 - DNA, 15 bp, Homo sapiens
ttatgggctcctgtt

SEQ ID NO: 35367 - DNA, 15 bp, Homo sapiens
cttatgggctcctgt

SEQ ID NO: 35368 - DNA, 15 bp, Homo sapiens
gcttatgggctcctg

SEQ ID NO: 35369 - DNA, 15 bp, Homo sapiens
tgcttatgggctcct

SEQ ID NO: 35370 - DNA, 15 bp, Homo sapiens
ttgcttatgggctcc

SEQ ID NO: 35371 - DNA, 15 bp, Homo sapiens
tttgcttatgggctc

SEQ ID NO: 35372 - DNA, 15 bp, Homo sapiens
ttttgcttatgggct

SEQ ID NO: 35373 - DNA, 15 bp, Homo sapiens
tttttgcttatgggc

SEQ ID NO: 35374 - DNA, 15 bp, Homo sapiens
ctttttgcttatggg

SEQ ID NO: 35375 - DNA, 15 bp, Homo sapiens
tctttttgcttatgg

SEQ ID NO: 35376 - DNA, 15 bp, Homo sapiens
ttctttttgcttatg

SEQ ID NO: 35377 - DNA, 15 bp, Homo sapiens
gttctttttgcttat

SEQ ID NO: 35378 - DNA, 15 bp, Homo sapiens
agttctttttgctta

SEQ ID NO: 35379 - DNA, 15 bp, Homo sapiens
gagttctttttgctt

SEQ ID NO: 35380 - DNA, 15 bp, Homo sapiens
tgagttctttttgct

SEQ ID NO: 35381 - DNA, 15 bp, Homo sapiens
atgagttctttttgc

SEQ ID NO: 35382 - DNA, 15 bp, Homo sapiens
aatgagttctttttg

SEQ ID NO: 35383 - DNA, 15 bp, Homo sapiens
taatgagttcttttt

SEQ ID NO: 35384 - DNA, 15 bp, Homo sapiens
ataatgagttctttt

SEQ ID NO: 35385 - DNA, 15 bp, Homo sapiens
aataatgagttcttt

SEQ ID NO: 35386 - DNA, 15 bp, Homo sapiens
aaataatgagttctt

SEQ ID NO: 35387 - DNA, 15 bp, Homo sapiens
aaaataatgagttct

SEQ ID NO: 35388 - DNA, 15 bp, Homo sapiens
taaaataatgagttc

SEQ ID NO: 35389 - DNA, 15 bp, Homo sapiens
ttaaaataatgagtt

SEQ ID NO: 35390 - DNA, 15 bp, Homo sapiens
tttaaaataatgagt

SEQ ID NO: 35391 - DNA, 15 bp, Homo sapiens
ttttaaaataatgag

SEQ ID NO: 35392 - DNA, 15 bp, Homo sapiens
tttttaaaataatga

SEQ ID NO: 35393 - DNA, 15 bp, Homo sapiens
gtttttaaaataatg

SEQ ID NO: 35394 - DNA, 15 bp, Homo sapiens
tgtttttaaaataat

SEQ ID NO: 35395 - DNA, 15 bp, Homo sapiens
ctgtttttaaaataa

SEQ ID NO: 35396 - DNA, 15 bp, Homo sapiens
actgtttttaaaata

SEQ ID NO: 35397 - DNA, 15 bp, Homo sapiens
tactgtttttaaaat

SEQ ID NO: 35398 - DNA, 15 bp, Homo sapiens
ttactgtttttaaaa

SEQ ID NO: 35399 - DNA, 15 bp, Homo sapiens
gttactgtttttaaa

SEQ ID NO: 35400 - DNA, 15 bp, Homo sapiens
agttactgtttttaa

SEQ ID NO: 35401 - DNA, 15 bp, Homo sapiens
tagttactgttttta

SEQ ID NO: 35402 - DNA, 15 bp, Homo sapiens
atagttactgttttt

SEQ ID NO: 35403 - DNA, 15 bp, Homo sapiens
gatagttactgtttt

SEQ ID NO: 35404 - DNA, 15 bp, Homo sapiens
ggatagttactgttt

SEQ ID NO: 35405 - DNA, 15 bp, Homo sapiens
aggatagttactgtt

SEQ ID NO: 35406 - DNA, 15 bp, Homo sapiens
aaggatagttactgt

SEQ ID NO: 35407 - DNA, 15 bp, Homo sapiens
taaggatagttactg

SEQ ID NO: 35408 - DNA, 15 bp, Homo sapiens
gtaaggatagttact

SEQ ID NO: 35409 - DNA, 15 bp, Homo sapiens
tgtaaggatagttac

SEQ ID NO: 35410 - DNA, 15 bp, Homo sapiens
ctgtaaggatagtta

SEQ ID NO: 35411 - DNA, 15 bp, Homo sapiens
cctgtaaggatagtt

SEQ ID NO: 35412 - DNA, 15 bp, Homo sapiens
gcctgtaaggatagt

SEQ ID NO: 35413 - DNA, 15 bp, Homo sapiens
agcctgtaaggatag

SEQ ID NO: 35414 - DNA, 15 bp, Homo sapiens
aagcctgtaaggata

SEQ ID NO: 35415 - DNA, 15 bp, Homo sapiens
aaagcctgtaaggat

SEQ ID NO: 35416 - DNA, 15 bp, Homo sapiens
gaaagcctgtaagga

SEQ ID NO: 35417 - DNA, 15 bp, Homo sapiens
agaaagcctgtaagg

SEQ ID NO: 35418 - DNA, 15 bp, Homo sapiens
gagaaagcctgtaag

SEQ ID NO: 35419 - DNA, 15 bp, Homo sapiens
tgagaaagcctgtaa

SEQ ID NO: 35420 - DNA, 15 bp, Homo sapiens
ctgagaaagcctgta

SEQ ID NO: 35421 - DNA, 15 bp, Homo sapiens
cctgagaaagcctgt

SEQ ID NO: 35422 - DNA, 15 bp, Homo sapiens
ccctgagaaagcctg

SEQ ID NO: 35423 - DNA, 15 bp, Homo sapiens
gccctgagaaagcct

SEQ ID NO: 35424 - DNA, 15 bp, Homo sapiens
agccctgagaaagcc

SEQ ID NO: 35425 - DNA, 15 bp, Homo sapiens
gagccctgagaaagc

SEQ ID NO: 35426 - DNA, 15 bp, Homo sapiens
agagccctgagaaag

SEQ ID NO: 35427 - DNA, 15 bp, Homo sapiens
aagagccctgagaaa

SEQ ID NO: 35428 - DNA, 15 bp, Homo sapiens
aaagagccctgagaa

SEQ ID NO: 35429 - DNA, 15 bp, Homo sapiens
gaaagagccctgaga

SEQ ID NO: 35430 - DNA, 15 bp, Homo sapiens
agaaagagccctgag

SEQ ID NO: 35431 - DNA, 15 bp, Homo sapiens
cagaaagagccctga

SEQ ID NO: 35432 - DNA, 15 bp, Homo sapiens
acagaaagagccctg

SEQ ID NO: 35433 - DNA, 15 bp, Homo sapiens
aacagaaagagccct

SEQ ID NO: 35434 - DNA, 15 bp, Homo sapiens
caacagaaagagccc

SEQ ID NO: 35435 - DNA, 15 bp, Homo sapiens
ccaacagaaagagcc

SEQ ID NO: 35436 - DNA, 15 bp, Homo sapiens
tccaacagaaagagc

SEQ ID NO: 35437 - DNA, 15 bp, Homo sapiens
atccaacagaaagag

SEQ ID NO: 35438 - DNA, 15 bp, Homo sapiens
gatccaacagaaaga

SEQ ID NO: 35439 - DNA, 15 bp, Homo sapiens
ggatccaacagaaag

SEQ ID NO: 35440 - DNA, 15 bp, Homo sapiens
aggatccaacagaaa

SEQ ID NO: 35441 - DNA, 15 bp, Homo sapiens
aaggatccaacagaa

SEQ ID NO: 35442 - DNA, 15 bp, Homo sapiens
gaaggatccaacaga

SEQ ID NO: 35443 - DNA, 15 bp, Homo sapiens
ggaaggatccaacag

SEQ ID NO: 35444 - DNA, 15 bp, Homo sapiens
gggaaggatccaaca

SEQ ID NO: 35445 - DNA, 15 bp, Homo sapiens
agggaaggatccaac

SEQ ID NO: 35446 - DNA, 15 bp, Homo sapiens
gagggaaggatccaa

SEQ ID NO: 35447 - DNA, 15 bp, Homo sapiens
agagggaaggatcca

SEQ ID NO: 35448 - DNA, 15 bp, Homo sapiens
gagagggaaggatcc

SEQ ID NO: 35449 - DNA, 15 bp, Homo sapiens
tgagagggaaggatc

SEQ ID NO: 35450 - DNA, 15 bp, Homo sapiens
gtgagagggaaggat

SEQ ID NO: 35451 - DNA, 15 bp, Homo sapiens
tgtgagagggaagga

SEQ ID NO: 35452 - DNA, 15 bp, Homo sapiens
ctgtgagagggaagg

SEQ ID NO: 35453 - DNA, 15 bp, Homo sapiens
cctgtgagagggaag

SEQ ID NO: 35454 - DNA, 15 bp, Homo sapiens
acctgtgagagggaa

SEQ ID NO: 35455 - DNA, 15 bp, Homo sapiens
gacctgtgagaggga

SEQ ID NO: 35456 - DNA, 15 bp, Homo sapiens
ggacctgtgagaggg

SEQ ID NO: 35457 - DNA, 15 bp, Homo sapiens
aggacctgtgagagg

SEQ ID NO: 35458 - DNA, 15 bp, Homo sapiens
aaggacctgtgagag

SEQ ID NO: 35459 - DNA, 15 bp, Homo sapiens
caaggacctgtgaga

SEQ ID NO: 35460 - DNA, 15 bp, Homo sapiens
gcaaggacctgtgag

SEQ ID NO: 35461 - DNA, 15 bp, Homo sapiens
agcaaggacctgtga

SEQ ID NO: 35462 - DNA, 15 bp, Homo sapiens
tagcaaggacctgtg

SEQ ID NO: 35463 - DNA, 15 bp, Homo sapiens
ttagcaaggacctgt

SEQ ID NO: 35464 - DNA, 15 bp, Homo sapiens
attagcaaggacctg

SEQ ID NO: 35465 - DNA, 15 bp, Homo sapiens
cattagcaaggacct

SEQ ID NO: 35466 - DNA, 15 bp, Homo sapiens
tcattagcaaggacc

SEQ ID NO: 35467 - DNA, 15 bp, Homo sapiens
atcattagcaaggac

SEQ ID NO: 35468 - DNA, 15 bp, Homo sapiens
gatcattagcaagga

SEQ ID NO: 35469 - DNA, 15 bp, Homo sapiens
agatcattagcaagg

SEQ ID NO: 35470 - DNA, 15 bp, Homo sapiens
gagatcattagcaag

SEQ ID NO: 35471 - DNA, 15 bp, Homo sapiens
agagatcattagcaa

SEQ ID NO: 35472 - DNA, 15 bp, Homo sapiens
tagagatcattagca

SEQ ID NO: 35473 - DNA, 15 bp, Homo sapiens
ctagagatcattagc

SEQ ID NO: 35474 - DNA, 15 bp, Homo sapiens
cctagagatcattag

SEQ ID NO: 35475 - DNA, 15 bp, Homo sapiens
acctagagatcatta

SEQ ID NO: 35476 - DNA, 15 bp, Homo sapiens
cacctagagatcatt

SEQ ID NO: 35477 - DNA, 15 bp, Homo sapiens
ccacctagagatcat

SEQ ID NO: 35478 - DNA, 15 bp, Homo sapiens
tccacctagagatca

SEQ ID NO: 35479 - DNA, 15 bp, Homo sapiens
gtccacctagagatc

SEQ ID NO: 35480 - DNA, 15 bp, Homo sapiens
tgtccacctagagat

SEQ ID NO: 35481 - DNA, 15 bp, Homo sapiens
gtgtccacctagaga

SEQ ID NO: 35482 - DNA, 15 bp, Homo sapiens
tgtgtccacctagag

SEQ ID NO: 35483 - DNA, 15 bp, Homo sapiens
atgtgtccacctaga

SEQ ID NO: 35484 - DNA, 15 bp, Homo sapiens
aatgtgtccacctag

SEQ ID NO: 35485 - DNA, 15 bp, Homo sapiens
gaatgtgtccaccta

SEQ ID NO: 35486 - DNA, 15 bp, Homo sapiens
agaatgtgtccacct

SEQ ID NO: 35487 - DNA, 15 bp, Homo sapiens
tagaatgtgtccacc

SEQ ID NO: 35488 - DNA, 15 bp, Homo sapiens
ctagaatgtgtccac

SEQ ID NO: 35489 - DNA, 15 bp, Homo sapiens
tctagaatgtgtcca

SEQ ID NO: 35490 - DNA, 15 bp, Homo sapiens
atctagaatgtgtcc

SEQ ID NO: 35491 - DNA, 15 bp, Homo sapiens
catctagaatgtgtc

SEQ ID NO: 35492 - DNA, 15 bp, Homo sapiens
tcatctagaatgtgt

SEQ ID NO: 35493 - DNA, 15 bp, Homo sapiens
ctcatctagaatgtg

SEQ ID NO: 35494 - DNA, 15 bp, Homo sapiens
tctcatctagaatgt

SEQ ID NO: 35495 - DNA, 15 bp, Homo sapiens
atctcatctagaatg

SEQ ID NO: 35496 - DNA, 15 bp, Homo sapiens
catctcatctagaat

SEQ ID NO: 35497 - DNA, 15 bp, Homo sapiens
acatctcatctagaa

SEQ ID NO: 35498 - DNA, 15 bp, Homo sapiens
gacatctcatctaga

SEQ ID NO: 35499 - DNA, 15 bp, Homo sapiens
ggacatctcatctag

SEQ ID NO: 35500 - DNA, 15 bp, Homo sapiens
gggacatctcatcta

SEQ ID NO: 35501 - DNA, 15 bp, Homo sapiens
agggacatctcatct

SEQ ID NO: 35502 - DNA, 15 bp, Homo sapiens
cagggacatctcatc

SEQ ID NO: 35503 - DNA, 15 bp, Homo sapiens
acagggacatctcat

SEQ ID NO: 35504 - DNA, 15 bp, Homo sapiens
gacagggacatctca

SEQ ID NO: 35505 - DNA, 15 bp, Homo sapiens
agacagggacatctc

SEQ ID NO: 35506 - DNA, 15 bp, Homo sapiens
tagacagggacatct

SEQ ID NO: 35507 - DNA, 15 bp, Homo sapiens
ctagacagggacatc

SEQ ID NO: 35508 - DNA, 15 bp, Homo sapiens
tctagacagggacat

SEQ ID NO: 35509 - DNA, 15 bp, Homo sapiens
ttctagacagggaca

SEQ ID NO: 35510 - DNA, 15 bp, Homo sapiens
attctagacagggac

SEQ ID NO: 35511 - DNA, 15 bp, Homo sapiens
cattctagacaggga

SEQ ID NO: 35512 - DNA, 15 bp, Homo sapiens
ccattctagacaggg

SEQ ID NO: 35513 - DNA, 15 bp, Homo sapiens
gccattctagacagg

SEQ ID NO: 35514 - DNA, 15 bp, Homo sapiens
tgccattctagacag

SEQ ID NO: 35515 - DNA, 15 bp, Homo sapiens
ctgccattctagaca

SEQ ID NO: 35516 - DNA, 15 bp, Homo sapiens
gctgccattctagac

SEQ ID NO: 35517 - DNA, 15 bp, Homo sapiens
tgctgccattctaga

SEQ ID NO: 35518 - DNA, 15 bp, Homo sapiens
gtgctgccattctag

SEQ ID NO: 35519 - DNA, 15 bp, Homo sapiens
ggtgctgccattcta

SEQ ID NO: 35520 - DNA, 15 bp, Homo sapiens
tggtgctgccattct

SEQ ID NO: 35521 - DNA, 15 bp, Homo sapiens
atggtgctgccattc

SEQ ID NO: 35522 - DNA, 15 bp, Homo sapiens
catggtgctgccatt

SEQ ID NO: 35523 - DNA, 15 bp, Homo sapiens
tcatggtgctgccat

SEQ ID NO: 35524 - DNA, 15 bp, Homo sapiens
ctcatggtgctgcca

SEQ ID NO: 35525 - DNA, 15 bp, Homo sapiens
cctcatggtgctgcc

SEQ ID NO: 35526 - DNA, 15 bp, Homo sapiens
ccctcatggtgctgc

SEQ ID NO: 35527 - DNA, 15 bp, Homo sapiens
gccctcatggtgctg

SEQ ID NO: 35528 - DNA, 15 bp, Homo sapiens
agccctcatggtgct

SEQ ID NO: 35529 - DNA, 15 bp, Homo sapiens
tagccctcatggtgc

SEQ ID NO: 35530 - DNA, 15 bp, Homo sapiens
atagccctcatggtg

SEQ ID NO: 35531 - DNA, 15 bp, Homo sapiens
tatagccctcatggt

SEQ ID NO: 35532 - DNA, 15 bp, Homo sapiens
atatagccctcatgg

SEQ ID NO: 35533 - DNA, 15 bp, Homo sapiens
gatatagccctcatg

SEQ ID NO: 35534 - DNA, 15 bp, Homo sapiens
ggatatagccctcat

SEQ ID NO: 35535 - DNA, 15 bp, Homo sapiens
aggatatagccctca

SEQ ID NO: 35536 - DNA, 15 bp, Homo sapiens
gaggatatagccctc

SEQ ID NO: 35537 - DNA, 15 bp, Homo sapiens
tgaggatatagccct

SEQ ID NO: 35538 - DNA, 15 bp, Homo sapiens
ctgaggatatagccc

SEQ ID NO: 35539 - DNA, 15 bp, Homo sapiens
actgaggatatagcc

SEQ ID NO: 35540 - DNA, 15 bp, Homo sapiens
tactgaggatatagc

SEQ ID NO: 35541 - DNA, 15 bp, Homo sapiens
gtactgaggatatag

SEQ ID NO: 35542 - DNA, 15 bp, Homo sapiens
agtactgaggatata

SEQ ID NO: 35543 - DNA, 15 bp, Homo sapiens
tagtactgaggatat

SEQ ID NO: 35544 - DNA, 15 bp, Homo sapiens
ctagtactgaggata

SEQ ID NO: 35545 - DNA, 15 bp, Homo sapiens
cctagtactgaggat

SEQ ID NO: 35546 - DNA, 15 bp, Homo sapiens
tcctagtactgagga

SEQ ID NO: 35547 - DNA, 15 bp, Homo sapiens
gtcctagtactgagg

SEQ ID NO: 35548 - DNA, 15 bp, Homo sapiens
tgtcctagtactgag

SEQ ID NO: 35549 - DNA, 15 bp, Homo sapiens
ctgtcctagtactga

SEQ ID NO: 35550 - DNA, 15 bp, Homo sapiens
gctgtcctagtactg

SEQ ID NO: 35551 - DNA, 15 bp, Homo sapiens
cgctgtcctagtact

SEQ ID NO: 35552 - DNA, 15 bp, Homo sapiens
gcgctgtcctagtac

SEQ ID NO: 35553 - DNA, 15 bp, Homo sapiens
ggcgctgtcctagta

SEQ ID NO: 35554 - DNA, 15 bp, Homo sapiens
aggcgctgtcctagt

SEQ ID NO: 35555 - DNA, 15 bp, Homo sapiens
caggcgctgtcctag

SEQ ID NO: 35556 - DNA, 15 bp, Homo sapiens
ccaggcgctgtccta

SEQ ID NO: 35557 - DNA, 15 bp, Homo sapiens
accaggcgctgtcct

SEQ ID NO: 35558 - DNA, 15 bp, Homo sapiens
caccaggcgctgtcc

SEQ ID NO: 35559 - DNA, 15 bp, Homo sapiens
gcaccaggcgctgtc

SEQ ID NO: 35560 - DNA, 15 bp, Homo sapiens
agcaccaggcgctgt

SEQ ID NO: 35561 - DNA, 15 bp, Homo sapiens
aagcaccaggcgctg

SEQ ID NO: 35562 - DNA, 15 bp, Homo sapiens
taagcaccaggcgct

SEQ ID NO: 35563 - DNA, 15 bp, Homo sapiens
ttaagcaccaggcgc

SEQ ID NO: 35564 - DNA, 15 bp, Homo sapiens
attaagcaccaggcg

SEQ ID NO: 35565 - DNA, 15 bp, Homo sapiens
tattaagcaccaggc

SEQ ID NO: 35566 - DNA, 15 bp, Homo sapiens
ctattaagcaccagg

SEQ ID NO: 35567 - DNA, 15 bp, Homo sapiens
tctattaagcaccag

SEQ ID NO: 35568 - DNA, 15 bp, Homo sapiens
atctattaagcacca

SEQ ID NO: 35569 - DNA, 15 bp, Homo sapiens
tatctattaagcacc

SEQ ID NO: 35570 - DNA, 15 bp, Homo sapiens
ctatctattaagcac

SEQ ID NO: 35571 - DNA, 15 bp, Homo sapiens
actatctattaagca

SEQ ID NO: 35572 - DNA, 15 bp, Homo sapiens
tactatctattaagc

SEQ ID NO: 35573 - DNA, 15 bp, Homo sapiens
ttactatctattaag

SEQ ID NO: 35574 - DNA, 15 bp, Homo sapiens
tttactatctattaa

SEQ ID NO: 35575 - DNA, 15 bp, Homo sapiens
atttactatctatta

SEQ ID NO: 35576 - DNA, 15 bp, Homo sapiens
tatttactatctatt

SEQ ID NO: 35577 - DNA, 15 bp, Homo sapiens
ctatttactatctat

SEQ ID NO: 35578 - DNA, 15 bp, Homo sapiens
actatttactatcta

SEQ ID NO: 35579 - DNA, 15 bp, Homo sapiens
aactatttactatct

SEQ ID NO: 35580 - DNA, 15 bp, Homo sapiens
caactatttactatc

SEQ ID NO: 35581 - DNA, 15 bp, Homo sapiens
acaactatttactat

SEQ ID NO: 35582 - DNA, 15 bp, Homo sapiens
gacaactatttacta

SEQ ID NO: 35583 - DNA, 15 bp, Homo sapiens
agacaactatttact

SEQ ID NO: 35584 - DNA, 15 bp, Homo sapiens
tagacaactatttac

SEQ ID NO: 35585 - DNA, 15 bp, Homo sapiens
ttagacaactattta

SEQ ID NO: 35586 - DNA, 15 bp, Homo sapiens
attagacaactattt

SEQ ID NO: 35587 - DNA, 15 bp, Homo sapiens
aattagacaactatt

SEQ ID NO: 35588 - DNA, 15 bp, Homo sapiens
taattagacaactat

SEQ ID NO: 35589 - DNA, 15 bp, Homo sapiens
ttaattagacaacta

SEQ ID NO: 35590 - DNA, 15 bp, Homo sapiens
gttaattagacaact

SEQ ID NO: 35591 - DNA, 15 bp, Homo sapiens
agttaattagacaac

SEQ ID NO: 35592 - DNA, 15 bp, Homo sapiens
cagttaattagacaa

SEQ ID NO: 35593 - DNA, 15 bp, Homo sapiens
tcagttaattagaca

SEQ ID NO: 35594 - DNA, 15 bp, Homo sapiens
ctcagttaattagac

SEQ ID NO: 35595 - DNA, 15 bp, Homo sapiens
gctcagttaattaga

SEQ ID NO: 35596 - DNA, 15 bp, Homo sapiens
tgctcagttaattag

SEQ ID NO: 35597 - DNA, 15 bp, Homo sapiens
ttgctcagttaatta

SEQ ID NO: 35598 - DNA, 15 bp, Homo sapiens
tttgctcagttaatt

SEQ ID NO: 35599 - DNA, 15 bp, Homo sapiens
gtttgctcagttaat

SEQ ID NO: 35600 - DNA, 15 bp, Homo sapiens
tgtttgctcagttaa

SEQ ID NO: 35601 - DNA, 15 bp, Homo sapiens
ctgtttgctcagtta

SEQ ID NO: 35602 - DNA, 15 bp, Homo sapiens
tctgtttgctcagtt

SEQ ID NO: 35603 - DNA, 15 bp, Homo sapiens
atctgtttgctcagt

SEQ ID NO: 35604 - DNA, 15 bp, Homo sapiens
tatctgtttgctcag

SEQ ID NO: 35605 - DNA, 15 bp, Homo sapiens
ctatctgtttgctca

SEQ ID NO: 35606 - DNA, 15 bp, Homo sapiens
tctatctgtttgctc

SEQ ID NO: 35607 - DNA, 15 bp, Homo sapiens
atctatctgtttgct

SEQ ID NO: 35608 - DNA, 15 bp, Homo sapiens
aatctatctgtttgc

SEQ ID NO: 35609 - DNA, 15 bp, Homo sapiens
gaatctatctgtttg

SEQ ID NO: 35610 - DNA, 15 bp, Homo sapiens
tgaatctatctgttt

SEQ ID NO: 35611 - DNA, 15 bp, Homo sapiens
atgaatctatctgtt

SEQ ID NO: 35612 - DNA, 15 bp, Homo sapiens
catgaatctatctgt

SEQ ID NO: 35613 - DNA, 15 bp, Homo sapiens
tcatgaatctatctg

SEQ ID NO: 35614 - DNA, 15 bp, Homo sapiens
ttcatgaatctatct

SEQ ID NO: 35615 - DNA, 15 bp, Homo sapiens
attcatgaatctatc

SEQ ID NO: 35616 - DNA, 15 bp, Homo sapiens
aattcatgaatctat

SEQ ID NO: 35617 - DNA, 15 bp, Homo sapiens
taattcatgaatcta

SEQ ID NO: 35618 - DNA, 15 bp, Homo sapiens
ctaattcatgaatct

SEQ ID NO: 35619 - DNA, 15 bp, Homo sapiens
gctaattcatgaatc

SEQ ID NO: 35620 - DNA, 15 bp, Homo sapiens
agctaattcatgaat

SEQ ID NO: 35621 - DNA, 15 bp, Homo sapiens
aagctaattcatgaa

SEQ ID NO: 35622 - DNA, 15 bp, Homo sapiens
aaagctaattcatga

SEQ ID NO: 35623 - DNA, 15 bp, Homo sapiens
aaaagctaattcatg

SEQ ID NO: 35624 - DNA, 15 bp, Homo sapiens
aaaaagctaattcat

SEQ ID NO: 35625 - DNA, 15 bp, Homo sapiens
caaaaagctaattca

SEQ ID NO: 35626 - DNA, 15 bp, Homo sapiens
gcaaaaagctaattc

SEQ ID NO: 35627 - DNA, 15 bp, Homo sapiens
agcaaaaagctaatt

SEQ ID NO: 35628 - DNA, 15 bp, Homo sapiens
aagcaaaaagctaat

SEQ ID NO: 35629 - DNA, 15 bp, Homo sapiens
aaagcaaaaagctaa

SEQ ID NO: 35630 - DNA, 15 bp, Homo sapiens
aaaagcaaaaagcta

SEQ ID NO: 35631 - DNA, 15 bp, Homo sapiens
aaaaagcaaaaagct

SEQ ID NO: 35632 - DNA, 15 bp, Homo sapiens
gaaaaagcaaaaagc

SEQ ID NO: 35633 - DNA, 15 bp, Homo sapiens
agaaaaagcaaaaag

SEQ ID NO: 35634 - DNA, 15 bp, Homo sapiens
cagaaaaagcaaaaa

SEQ ID NO: 35635 - DNA, 15 bp, Homo sapiens
acagaaaaagcaaaa

SEQ ID NO: 35636 - DNA, 15 bp, Homo sapiens
aacagaaaaagcaaa

SEQ ID NO: 35637 - DNA, 15 bp, Homo sapiens
taacagaaaaagcaa

SEQ ID NO: 35638 - DNA, 15 bp, Homo sapiens
ctaacagaaaaagca

SEQ ID NO: 35639 - DNA, 15 bp, Homo sapiens
tctaacagaaaaagc

SEQ ID NO: 35640 - DNA, 15 bp, Homo sapiens
ttctaacagaaaaag

SEQ ID NO: 35641 - DNA, 15 bp, Homo sapiens
tttctaacagaaaaa

SEQ ID NO: 35642 - DNA, 15 bp, Homo sapiens
gtttctaacagaaaa

SEQ ID NO: 35643 - DNA, 15 bp, Homo sapiens
agtttctaacagaaa

SEQ ID NO: 35644 - DNA, 15 bp, Homo sapiens
tagtttctaacagaa

SEQ ID NO: 35645 - DNA, 15 bp, Homo sapiens
ttagtttctaacaga

SEQ ID NO: 35646 - DNA, 15 bp, Homo sapiens
tttagtttctaacag

SEQ ID NO: 35647 - DNA, 15 bp, Homo sapiens
ctttagtttctaaca

SEQ ID NO: 35648 - DNA, 15 bp, Homo sapiens
cctttagtttctaac

SEQ ID NO: 35649 - DNA, 15 bp, Homo sapiens
acctttagtttctaa

SEQ ID NO: 35650 - DNA, 15 bp, Homo sapiens
aacctttagtttcta

SEQ ID NO: 35651 - DNA, 15 bp, Homo sapiens
gaacctttagtttct

SEQ ID NO: 35652 - DNA, 15 bp, Homo sapiens
tgaacctttagtttc

SEQ ID NO: 35653 - DNA, 15 bp, Homo sapiens
ctgaacctttagttt

SEQ ID NO: 35654 - DNA, 15 bp, Homo sapiens
cctgaacctttagtt

SEQ ID NO: 35655 - DNA, 15 bp, Homo sapiens
acctgaacctttagt

SEQ ID NO: 35656 - DNA, 15 bp, Homo sapiens
gacctgaacctttag

SEQ ID NO: 35657 - DNA, 15 bp, Homo sapiens
tgacctgaaccttta

SEQ ID NO: 35658 - DNA, 15 bp, Homo sapiens
ctgacctgaaccttt

SEQ ID NO: 35659 - DNA, 15 bp, Homo sapiens
cctgacctgaacctt

SEQ ID NO: 35660 - DNA, 15 bp, Homo sapiens
gcctgacctgaacct

SEQ ID NO: 35661 - DNA, 15 bp, Homo sapiens
tgcctgacctgaacc

SEQ ID NO: 35662 - DNA, 15 bp, Homo sapiens
gtgcctgacctgaac

SEQ ID NO: 35663 - DNA, 15 bp, Homo sapiens
tgtgcctgacctgaa

SEQ ID NO: 35664 - DNA, 15 bp, Homo sapiens
ttgtgcctgacctga

SEQ ID NO: 35665 - DNA, 15 bp, Homo sapiens
attgtgcctgacctg

SEQ ID NO: 35666 - DNA, 15 bp, Homo sapiens
cattgtgcctgacct

SEQ ID NO: 35667 - DNA, 15 bp, Homo sapiens
ccattgtgcctgacc

SEQ ID NO: 35668 - DNA, 15 bp, Homo sapiens
gccattgtgcctgac

SEQ ID NO: 35669 - DNA, 15 bp, Homo sapiens
cgccattgtgcctga

SEQ ID NO: 35670 - DNA, 15 bp, Homo sapiens
gcgccattgtgcctg

SEQ ID NO: 35671 - DNA, 15 bp, Homo sapiens
tgcgccattgtgcct

SEQ ID NO: 35672 - DNA, 15 bp, Homo sapiens
atgcgccattgtgcc

SEQ ID NO: 35673 - DNA, 15 bp, Homo sapiens
catgcgccattgtgc

SEQ ID NO: 35674 - DNA, 15 bp, Homo sapiens
acatgcgccattgtg

SEQ ID NO: 35675 - DNA, 15 bp, Homo sapiens
gacatgcgccattgt

SEQ ID NO: 35676 - DNA, 15 bp, Homo sapiens
agacatgcgccattg

SEQ ID NO: 35677 - DNA, 15 bp, Homo sapiens
gagacatgcgccatt

SEQ ID NO: 35678 - DNA, 15 bp, Homo sapiens
agagacatgcgccat

SEQ ID NO: 35679 - DNA, 15 bp, Homo sapiens
tagagacatgcgcca

SEQ ID NO: 35680 - DNA, 15 bp, Homo sapiens
ttagagacatgcgcc

SEQ ID NO: 35681 - DNA, 15 bp, Homo sapiens
attagagacatgcgc

SEQ ID NO: 35682 - DNA, 15 bp, Homo sapiens
gattagagacatgcg

SEQ ID NO: 35683 - DNA, 15 bp, Homo sapiens
ggattagagacatgc

SEQ ID NO: 35684 - DNA, 15 bp, Homo sapiens
gggattagagacatg

SEQ ID NO: 35685 - DNA, 15 bp, Homo sapiens
tgggattagagacat

SEQ ID NO: 35686 - DNA, 15 bp, Homo sapiens
ctgggattagagaca

SEQ ID NO: 35687 - DNA, 15 bp, Homo sapiens
gctgggattagagac

SEQ ID NO: 35688 - DNA, 15 bp, Homo sapiens
tgctgggattagaga

SEQ ID NO: 35689 - DNA, 15 bp, Homo sapiens
gtgctgggattagag

SEQ ID NO: 35690 - DNA, 15 bp, Homo sapiens
agtgctgggattaga

SEQ ID NO: 35691 - DNA, 15 bp, Homo sapiens
agcccgcctcggcct

SEQ ID NO: 35692 - DNA, 15 bp, Homo sapiens
cagcccgcctcggcc

SEQ ID NO: 35693 - DNA, 15 bp, Homo sapiens
tcagcccgcctcggc

SEQ ID NO: 35694 - DNA, 15 bp, Homo sapiens
atcagcccgcctcgg

SEQ ID NO: 35695 - DNA, 15 bp, Homo sapiens
gatcagcccgcctcg

SEQ ID NO: 35696 - DNA, 15 bp, Homo sapiens
tgatcagcccgcctc

SEQ ID NO: 35697 - DNA, 15 bp, Homo sapiens
gtgatcagcccgcct

SEQ ID NO: 35698 - DNA, 15 bp, Homo sapiens
agtgatcagcccgcc

SEQ ID NO: 35699 - DNA, 15 bp, Homo sapiens
aagtgatcagcccgc

SEQ ID NO: 35700 - DNA, 15 bp, Homo sapiens
caagtgatcagcccg

SEQ ID NO: 35701 - DNA, 15 bp, Homo sapiens
tcaagtgatcagccc

SEQ ID NO: 35702 - DNA, 15 bp, Homo sapiens
ctcaagtgatcagcc

SEQ ID NO: 35703 - DNA, 15 bp, Homo sapiens
cctcaagtgatcagc

SEQ ID NO: 35704 - DNA, 15 bp, Homo sapiens
acctcaagtgatcag

SEQ ID NO: 35705 - DNA, 15 bp, Homo sapiens
gacctcaagtgatca

SEQ ID NO: 35706 - DNA, 15 bp, Homo sapiens
actatgttggccagg

SEQ ID NO: 35707 - DNA, 15 bp, Homo sapiens
tactatgttggccag

SEQ ID NO: 35708 - DNA, 15 bp, Homo sapiens
ttactatgttggcca

SEQ ID NO: 35709 - DNA, 15 bp, Homo sapiens
tttactatgttggcc

SEQ ID NO: 35710 - DNA, 15 bp, Homo sapiens
ttttactatgttggc

SEQ ID NO: 35711 - DNA, 15 bp, Homo sapiens
gttttactatgttgg

SEQ ID NO: 35712 - DNA, 15 bp, Homo sapiens
ggttttactatgttg

SEQ ID NO: 35713 - DNA, 15 bp, Homo sapiens
gggttttactatgtt

SEQ ID NO: 35714 - DNA, 15 bp, Homo sapiens
agggttttactatgt

SEQ ID NO: 35715 - DNA, 15 bp, Homo sapiens
cagggttttactatg

SEQ ID NO: 35716 - DNA, 15 bp, Homo sapiens
acagggttttactat

SEQ ID NO: 35717 - DNA, 15 bp, Homo sapiens
aacagggttttacta

SEQ ID NO: 35718 - DNA, 15 bp, Homo sapiens
aaacagggttttact

SEQ ID NO: 35719 - DNA, 15 bp, Homo sapiens
gaaacagggttttac

SEQ ID NO: 35720 - DNA, 15 bp, Homo sapiens
agaaacagggtttta

SEQ ID NO: 35721 - DNA, 15 bp, Homo sapiens
tagaaacagggtttt

SEQ ID NO: 35722 - DNA, 15 bp, Homo sapiens
gtagaaacagggttt

SEQ ID NO: 35723 - DNA, 15 bp, Homo sapiens
tgtagaaacagggtt

SEQ ID NO: 35724 - DNA, 15 bp, Homo sapiens
ttgtagaaacagggt

SEQ ID NO: 35725 - DNA, 15 bp, Homo sapiens
tttgtagaaacaggg

SEQ ID NO: 35726 - DNA, 15 bp, Homo sapiens
ttttgtagaaacagg

SEQ ID NO: 35727 - DNA, 15 bp, Homo sapiens
tttttgtagaaacag

SEQ ID NO: 35728 - DNA, 15 bp, Homo sapiens
atttttgtagaaaca

SEQ ID NO: 35729 - DNA, 15 bp, Homo sapiens
aatttttgtagaaac

SEQ ID NO: 35730 - DNA, 15 bp, Homo sapiens
taatttttgtagaaa

SEQ ID NO: 35731 - DNA, 15 bp, Homo sapiens
gtaatttttgtagaa

SEQ ID NO: 35732 - DNA, 15 bp, Homo sapiens
ggtaatttttgtaga

SEQ ID NO: 35733 - DNA, 15 bp, Homo sapiens
tggtaatttttgtag

SEQ ID NO: 35734 - DNA, 15 bp, Homo sapiens
ttggtaatttttgta

SEQ ID NO: 35735 - DNA, 15 bp, Homo sapiens
tttggtaatttttgt

SEQ ID NO: 35736 - DNA, 15 bp, Homo sapiens
ttttggtaatttttg

SEQ ID NO: 35737 - DNA, 15 bp, Homo sapiens
attttggtaattttt

SEQ ID NO: 35738 - DNA, 15 bp, Homo sapiens
aattttggtaatttt

SEQ ID NO: 35739 - DNA, 15 bp, Homo sapiens
taattttggtaattt

SEQ ID NO: 35740 - DNA, 15 bp, Homo sapiens
ctaattttggtaatt

SEQ ID NO: 35741 - DNA, 15 bp, Homo sapiens
gctaattttggtaat

SEQ ID NO: 35742 - DNA, 15 bp, Homo sapiens
ggctaattttggtaa

SEQ ID NO: 35743 - DNA, 15 bp, Homo sapiens
cggctaattttggta

SEQ ID NO: 35744 - DNA, 15 bp, Homo sapiens
ccggctaattttggt

SEQ ID NO: 35745 - DNA, 15 bp, Homo sapiens
cccggctaattttgg

SEQ ID NO: 35746 - DNA, 15 bp, Homo sapiens
gcccggctaattttg

SEQ ID NO: 35747 - DNA, 15 bp, Homo sapiens
gacgcccggctaatt

SEQ ID NO: 35748 - DNA, 15 bp, Homo sapiens
agacgcccggctaat

SEQ ID NO: 35749 - DNA, 15 bp, Homo sapiens
aagacgcccggctaa

SEQ ID NO: 35750 - DNA, 15 bp, Homo sapiens
caagacgcccggcta

SEQ ID NO: 35751 - DNA, 15 bp, Homo sapiens
ccaagacgcccggct

SEQ ID NO: 35752 - DNA, 15 bp, Homo sapiens
gccaagacgcccggc

SEQ ID NO: 35753 - DNA, 15 bp, Homo sapiens
tgccaagacgcccgg

SEQ ID NO: 35754 - DNA, 15 bp, Homo sapiens
ttgccaagacgcccg

SEQ ID NO: 35755 - DNA, 15 bp, Homo sapiens
cttgccaagacgccc

SEQ ID NO: 35756 - DNA, 15 bp, Homo sapiens
gcttgccaagacgcc

SEQ ID NO: 35757 - DNA, 15 bp, Homo sapiens
tgcttgccaagacgc

SEQ ID NO: 35758 - DNA, 15 bp, Homo sapiens
gtgcttgccaagacg

SEQ ID NO: 35759 - DNA, 15 bp, Homo sapiens
ggtgcttgccaagac

SEQ ID NO: 35760 - DNA, 15 bp, Homo sapiens
aggtgcttgccaaga

SEQ ID NO: 35761 - DNA, 15 bp, Homo sapiens
caggtgcttgccaag

SEQ ID NO: 35762 - DNA, 15 bp, Homo sapiens
acaggtgcttgccaa

SEQ ID NO: 35763 - DNA, 15 bp, Homo sapiens
tacaggtgcttgcca

SEQ ID NO: 35764 - DNA, 15 bp, Homo sapiens
ttacaggtgcttgcc

SEQ ID NO: 35765 - DNA, 15 bp, Homo sapiens
attacaggtgcttgc

SEQ ID NO: 35766 - DNA, 15 bp, Homo sapiens
cattacaggtgcttg

SEQ ID NO: 35767 - DNA, 15 bp, Homo sapiens
gcattacaggtgctt

SEQ ID NO: 35768 - DNA, 15 bp, Homo sapiens
ggcattacaggtgct

SEQ ID NO: 35769 - DNA, 15 bp, Homo sapiens
tggcattacaggtgc

SEQ ID NO: 35770 - DNA, 15 bp, Homo sapiens
ctggcattacaggtg

SEQ ID NO: 35771 - DNA, 15 bp, Homo sapiens
gctggcattacaggt

SEQ ID NO: 35772 - DNA, 15 bp, Homo sapiens
agctggcattacagg

SEQ ID NO: 35773 - DNA, 15 bp, Homo sapiens
tagctggcattacag

SEQ ID NO: 35774 - DNA, 15 bp, Homo sapiens
gtagctggcattaca

SEQ ID NO: 35775 - DNA, 15 bp, Homo sapiens
agtagctggcattac

SEQ ID NO: 35776 - DNA, 15 bp, Homo sapiens
aagtagctggcatta

SEQ ID NO: 35777 - DNA, 15 bp, Homo sapiens
caagtagctggcatt

SEQ ID NO: 35778 - DNA, 15 bp, Homo sapiens
tcaagtagctggcat

SEQ ID NO: 35779 - DNA, 15 bp, Homo sapiens
ctcaagtagctggca

SEQ ID NO: 35780 - DNA, 15 bp, Homo sapiens
tctcaagtagctggc

SEQ ID NO: 35781 - DNA, 15 bp, Homo sapiens
acctcagcctctcaa

SEQ ID NO: 35782 - DNA, 15 bp, Homo sapiens
cacctcagcctctca

SEQ ID NO: 35783 - DNA, 15 bp, Homo sapiens
ccacctcagcctctc

SEQ ID NO: 35784 - DNA, 15 bp, Homo sapiens
cccacctcagcctct

SEQ ID NO: 35785 - DNA, 15 bp, Homo sapiens
tctcccacctcagcc

SEQ ID NO: 35786 - DNA, 15 bp, Homo sapiens
ttctcccacctcagc

SEQ ID NO: 35787 - DNA, 15 bp, Homo sapiens
attctcccacctcag

SEQ ID NO: 35788 - DNA, 15 bp, Homo sapiens
gattctcccacctca

SEQ ID NO: 35789 - DNA, 15 bp, Homo sapiens
cgattctcccacctc

SEQ ID NO: 35790 - DNA, 15 bp, Homo sapiens
gcgattctcccacct

SEQ ID NO: 35791 - DNA, 15 bp, Homo sapiens
agcgattctcccacc

SEQ ID NO: 35792 - DNA, 15 bp, Homo sapiens
aagcgattctcccac

SEQ ID NO: 35793 - DNA, 15 bp, Homo sapiens
caagcgattctccca

SEQ ID NO: 35794 - DNA, 15 bp, Homo sapiens
tcaagcgattctccc

SEQ ID NO: 35795 - DNA, 15 bp, Homo sapiens
aggttcaagcgattc

SEQ ID NO: 35796 - DNA, 15 bp, Homo sapiens
caggttcaagcgatt

SEQ ID NO: 35797 - DNA, 15 bp, Homo sapiens
ccaggttcaagcgat

SEQ ID NO: 35798 - DNA, 15 bp, Homo sapiens
cccaggttcaagcga

SEQ ID NO: 35799 - DNA, 15 bp, Homo sapiens
tcccaggttcaagcg

SEQ ID NO: 35800 - DNA, 15 bp, Homo sapiens
tcctcccaggttcaa

SEQ ID NO: 35801 - DNA, 15 bp, Homo sapiens
ttcctcccaggttca

SEQ ID NO: 35802 - DNA, 15 bp, Homo sapiens
cttcctcccaggttc

SEQ ID NO: 35803 - DNA, 15 bp, Homo sapiens
tcttcctcccaggtt

SEQ ID NO: 35804 - DNA, 15 bp, Homo sapiens
ctcttcctcccaggt

SEQ ID NO: 35805 - DNA, 15 bp, Homo sapiens
cctcttcctcccagg

SEQ ID NO: 35806 - DNA, 15 bp, Homo sapiens
acctcttcctcccag

SEQ ID NO: 35807 - DNA, 15 bp, Homo sapiens
aacctcttcctccca

SEQ ID NO: 35808 - DNA, 15 bp, Homo sapiens
caacctcttcctccc

SEQ ID NO: 35809 - DNA, 15 bp, Homo sapiens
gcaacctcttcctcc

SEQ ID NO: 35810 - DNA, 15 bp, Homo sapiens
tgcaacctcttcctc

SEQ ID NO: 35811 - DNA, 15 bp, Homo sapiens
ctgcaacctcttcct

SEQ ID NO: 35812 - DNA, 15 bp, Homo sapiens
actgcaacctcttcc

SEQ ID NO: 35813 - DNA, 15 bp, Homo sapiens
cactgcaacctcttc

SEQ ID NO: 35814 - DNA, 15 bp, Homo sapiens
tcactgcaacctctt

SEQ ID NO: 35815 - DNA, 15 bp, Homo sapiens
catctcggctcactg

SEQ ID NO: 35816 - DNA, 15 bp, Homo sapiens
ccatctcggctcact

SEQ ID NO: 35817 - DNA, 15 bp, Homo sapiens
accatctcggctcac

SEQ ID NO: 35818 - DNA, 15 bp, Homo sapiens
caccatctcggctca

SEQ ID NO: 35819 - DNA, 15 bp, Homo sapiens
ttggcaccatctcgg

SEQ ID NO: 35820 - DNA, 15 bp, Homo sapiens
gttggcaccatctcg

SEQ ID NO: 35821 - DNA, 15 bp, Homo sapiens
ggttggcaccatctc

SEQ ID NO: 35822 - DNA, 15 bp, Homo sapiens
aggttggcaccatct

SEQ ID NO: 35823 - DNA, 15 bp, Homo sapiens
caggttggcaccatc

SEQ ID NO: 35824 - DNA, 15 bp, Homo sapiens
ccaggttggcaccat

SEQ ID NO: 35825 - DNA, 15 bp, Homo sapiens
cccaggttggcacca

SEQ ID NO: 35826 - DNA, 15 bp, Homo sapiens
acccaggttggcacc

SEQ ID NO: 35827 - DNA, 15 bp, Homo sapiens
cacccaggttggcac

SEQ ID NO: 35828 - DNA, 15 bp, Homo sapiens
tcacccaggttggca

SEQ ID NO: 35829 - DNA, 15 bp, Homo sapiens
gtcacccaggttggc

SEQ ID NO: 35830 - DNA, 15 bp, Homo sapiens
cctctgtcacccagg

SEQ ID NO: 35831 - DNA, 15 bp, Homo sapiens
ccctctgtcacccag

SEQ ID NO: 35832 - DNA, 15 bp, Homo sapiens
tccctctgtcaccca

SEQ ID NO: 35833 - DNA, 15 bp, Homo sapiens
ctccctctgtcaccc

SEQ ID NO: 35834 - DNA, 15 bp, Homo sapiens
tctccctctgtcacc

SEQ ID NO: 35835 - DNA, 15 bp, Homo sapiens
gtctccctctgtcac

SEQ ID NO: 35836 - DNA, 15 bp, Homo sapiens
agtctccctctgtca

SEQ ID NO: 35837 - DNA, 15 bp, Homo sapiens
aagtctccctctgtc

SEQ ID NO: 35838 - DNA, 15 bp, Homo sapiens
taagtctccctctgt

SEQ ID NO: 35839 - DNA, 15 bp, Homo sapiens
ttaagtctccctctg

SEQ ID NO: 35840 - DNA, 15 bp, Homo sapiens
tttaagtctccctct

SEQ ID NO: 35841 - DNA, 15 bp, Homo sapiens
ttttaagtctccctc

SEQ ID NO: 35842 - DNA, 15 bp, Homo sapiens
tttttaagtctccct

SEQ ID NO: 35843 - DNA, 15 bp, Homo sapiens
ttttttaagtctccc

SEQ ID NO: 35844 - DNA, 15 bp, Homo sapiens
tttttttaagtctcc

SEQ ID NO: 35845 - DNA, 15 bp, Homo sapiens
ttttttttaagtctc

SEQ ID NO: 35846 - DNA, 15 bp, Homo sapiens
tttttttttaagtct

SEQ ID NO: 35847 - DNA, 15 bp, Homo sapiens
ttttttttttaagtc

SEQ ID NO: 35848 - DNA, 15 bp, Homo sapiens
tttttttttttaagt

SEQ ID NO: 35849 - DNA, 15 bp, Homo sapiens
ctttttttttttaag

SEQ ID NO: 35850 - DNA, 15 bp, Homo sapiens
tctttttttttttaa

SEQ ID NO: 35851 - DNA, 15 bp, Homo sapiens
ttcttttttttttta

SEQ ID NO: 35852 - DNA, 15 bp, Homo sapiens
tctttcttttttttt

SEQ ID NO: 35853 - DNA, 15 bp, Homo sapiens
ttctttctttttttt

SEQ ID NO: 35854 - DNA, 15 bp, Homo sapiens
tttctttcttttttt

SEQ ID NO: 35855 - DNA, 15 bp, Homo sapiens
ctttctttctttttt

SEQ ID NO: 35856 - DNA, 15 bp, Homo sapiens
tctttctttcttttt

SEQ ID NO: 35857 - DNA, 15 bp, Homo sapiens
ttctttctttctttt

SEQ ID NO: 35858 - DNA, 15 bp, Homo sapiens
tttctttctttcttt

SEQ ID NO: 35859 - DNA, 15 bp, Homo sapiens
ctttctttctttctt

SEQ ID NO: 35860 - DNA, 15 bp, Homo sapiens
tctttctttctttct

SEQ ID NO: 35861 - DNA, 15 bp, Homo sapiens
ttctttctttctttc

SEQ ID NO: 35862 - DNA, 15 bp, Homo sapiens
ttttctttctttctt

SEQ ID NO: 35863 - DNA, 15 bp, Homo sapiens
cttttctttctttct

SEQ ID NO: 35864 - DNA, 15 bp, Homo sapiens
tcttttctttctttc

SEQ ID NO: 35865 - DNA, 15 bp, Homo sapiens
ttcttttctttcttt

SEQ ID NO: 35866 - DNA, 15 bp, Homo sapiens
tttcttttctttctt

SEQ ID NO: 35867 - DNA, 15 bp, Homo sapiens
gtttcttttctttct

SEQ ID NO: 35868 - DNA, 15 bp, Homo sapiens
agtttcttttctttc

SEQ ID NO: 35869 - DNA, 15 bp, Homo sapiens
tagtttcttttcttt

SEQ ID NO: 35870 - DNA, 15 bp, Homo sapiens
ttagtttcttttctt

SEQ ID NO: 35871 - DNA, 15 bp, Homo sapiens
tttagtttcttttct

SEQ ID NO: 35872 - DNA, 15 bp, Homo sapiens
ctttagtttcttttc

SEQ ID NO: 35873 - DNA, 15 bp, Homo sapiens
cctttagtttctttt

SEQ ID NO: 35874 - DNA, 15 bp, Homo sapiens
acctttagtttcttt

SEQ ID NO: 35875 - DNA, 15 bp, Homo sapiens
aacctttagtttctt

SEQ ID NO: 35876 - DNA, 15 bp, Homo sapiens
ttgaacctttagttt

SEQ ID NO: 35877 - DNA, 15 bp, Homo sapiens
tttgaacctttagtt

SEQ ID NO: 35878 - DNA, 15 bp, Homo sapiens
ctttgaacctttagt

SEQ ID NO: 35879 - DNA, 15 bp, Homo sapiens
tctttgaacctttag

SEQ ID NO: 35880 - DNA, 15 bp, Homo sapiens
ttctttgaaccttta

SEQ ID NO: 35881 - DNA, 15 bp, Homo sapiens
attctttgaaccttt

SEQ ID NO: 35882 - DNA, 15 bp, Homo sapiens
gattctttgaacctt

SEQ ID NO: 35883 - DNA, 15 bp, Homo sapiens
ggattctttgaacct

SEQ ID NO: 35884 - DNA, 15 bp, Homo sapiens
gggattctttgaacc

SEQ ID NO: 35885 - DNA, 15 bp, Homo sapiens
tgggattctttgaac

SEQ ID NO: 35886 - DNA, 15 bp, Homo sapiens
ctgggattctttgaa

SEQ ID NO: 35887 - DNA, 15 bp, Homo sapiens
tctgggattctttga

SEQ ID NO: 35888 - DNA, 15 bp, Homo sapiens
ttctgggattctttg

SEQ ID NO: 35889 - DNA, 15 bp, Homo sapiens
tttctgggattcttt

SEQ ID NO: 35890 - DNA, 15 bp, Homo sapiens
ttttctgggattctt

SEQ ID NO: 35891 - DNA, 15 bp, Homo sapiens
cttttctgggattct

SEQ ID NO: 35892 - DNA, 15 bp, Homo sapiens
ccttttctgggattc

SEQ ID NO: 35893 - DNA, 15 bp, Homo sapiens
tccttttctgggatt

SEQ ID NO: 35894 - DNA, 15 bp, Homo sapiens
ttccttttctgggat

SEQ ID NO: 35895 - DNA, 15 bp, Homo sapiens
cttccttttctggga

SEQ ID NO: 35896 - DNA, 15 bp, Homo sapiens
tcttccttttctggg

SEQ ID NO: 35897 - DNA, 15 bp, Homo sapiens
ctcttccttttctgg

SEQ ID NO: 35898 - DNA, 15 bp, Homo sapiens
actcttccttttctg

SEQ ID NO: 35899 - DNA, 15 bp, Homo sapiens
gactcttccttttct

SEQ ID NO: 35900 - DNA, 15 bp, Homo sapiens
ggactcttccttttc

SEQ ID NO: 35901 - DNA, 15 bp, Homo sapiens
aggactcttcctttt

SEQ ID NO: 35902 - DNA, 15 bp, Homo sapiens
gaggactcttccttt

SEQ ID NO: 35903 - DNA, 15 bp, Homo sapiens
tgaggactcttcctt

SEQ ID NO: 35904 - DNA, 15 bp, Homo sapiens
gtgaggactcttcct

SEQ ID NO: 35905 - DNA, 15 bp, Homo sapiens
tgtgaggactcttcc

SEQ ID NO: 35906 - DNA, 15 bp, Homo sapiens
ttgtgaggactcttc

SEQ ID NO: 35907 - DNA, 15 bp, Homo sapiens
cttgtgaggactctt

SEQ ID NO: 35908 - DNA, 15 bp, Homo sapiens
gcttgtgaggactct

SEQ ID NO: 35909 - DNA, 15 bp, Homo sapiens
ggcttgtgaggactc

SEQ ID NO: 35910 - DNA, 15 bp, Homo sapiens
tggcttgtgaggact

SEQ ID NO: 35911 - DNA, 15 bp, Homo sapiens
ctggcttgtgaggac

SEQ ID NO: 35912 - DNA, 15 bp, Homo sapiens
actggcttgtgagga

SEQ ID NO: 35913 - DNA, 15 bp, Homo sapiens
tactggcttgtgagg

SEQ ID NO: 35914 - DNA, 15 bp, Homo sapiens
ttactggcttgtgag

SEQ ID NO: 35915 - DNA, 15 bp, Homo sapiens
attactggcttgtga

SEQ ID NO: 35916 - DNA, 15 bp, Homo sapiens
gattactggcttgtg

SEQ ID NO: 35917 - DNA, 15 bp, Homo sapiens
agattactggcttgt

SEQ ID NO: 35918 - DNA, 15 bp, Homo sapiens
tagattactggcttg

SEQ ID NO: 35919 - DNA, 15 bp, Homo sapiens
ctagattactggctt

SEQ ID NO: 35920 - DNA, 15 bp, Homo sapiens
cctagattactggct

SEQ ID NO: 35921 - DNA, 15 bp, Homo sapiens
gcctagattactggc

SEQ ID NO: 35922 - DNA, 15 bp, Homo sapiens
tgcctagattactgg

SEQ ID NO: 35923 - DNA, 15 bp, Homo sapiens
ctgcctagattactg

SEQ ID NO: 35924 - DNA, 15 bp, Homo sapiens
cctgcctagattact

SEQ ID NO: 35925 - DNA, 15 bp, Homo sapiens
tcctgcctagattac

SEQ ID NO: 35926 - DNA, 15 bp, Homo sapiens
atcctgcctagatta

SEQ ID NO: 35927 - DNA, 15 bp, Homo sapiens
aatcctgcctagatt

SEQ ID NO: 35928 - DNA, 15 bp, Homo sapiens
taatcctgcctagat

SEQ ID NO: 35929 - DNA, 15 bp, Homo sapiens
gtaatcctgcctaga

SEQ ID NO: 35930 - DNA, 15 bp, Homo sapiens
agtaatcctgcctag

SEQ ID NO: 35931 - DNA, 15 bp, Homo sapiens
cagtaatcctgccta

SEQ ID NO: 35932 - DNA, 15 bp, Homo sapiens
tcagtaatcctgcct

SEQ ID NO: 35933 - DNA, 15 bp, Homo sapiens
atcagtaatcctgcc

SEQ ID NO: 35934 - DNA, 15 bp, Homo sapiens
tatcagtaatcctgc

SEQ ID NO: 35935 - DNA, 15 bp, Homo sapiens
ctatcagtaatcctg

SEQ ID NO: 35936 - DNA, 15 bp, Homo sapiens
actatcagtaatcct

SEQ ID NO: 35937 - DNA, 15 bp, Homo sapiens
tactatcagtaatcc

SEQ ID NO: 35938 - DNA, 15 bp, Homo sapiens
atactatcagtaatc

SEQ ID NO: 35939 - DNA, 15 bp, Homo sapiens
aatactatcagtaat

SEQ ID NO: 35940 - DNA, 15 bp, Homo sapiens
aaatactatcagtaa

SEQ ID NO: 35941 - DNA, 15 bp, Homo sapiens
aaaatactatcagta

SEQ ID NO: 35942 - DNA, 15 bp, Homo sapiens
aaaaatactatcagt

SEQ ID NO: 35943 - DNA, 15 bp, Homo sapiens
taaaaatactatcag

SEQ ID NO: 35944 - DNA, 15 bp, Homo sapiens
ataaaaatactatca

SEQ ID NO: 35945 - DNA, 15 bp, Homo sapiens
tataaaaatactatc

SEQ ID NO: 35946 - DNA, 15 bp, Homo sapiens
atataaaaatactat

SEQ ID NO: 35947 - DNA, 15 bp, Homo sapiens
aatataaaaatacta

SEQ ID NO: 35948 - DNA, 15 bp, Homo sapiens
aaatataaaaatact

SEQ ID NO: 35949 - DNA, 15 bp, Homo sapiens
caaatataaaaatac

SEQ ID NO: 35950 - DNA, 15 bp, Homo sapiens
acaaatataaaaata

SEQ ID NO: 35951 - DNA, 15 bp, Homo sapiens
aacaaatataaaaat

SEQ ID NO: 35952 - DNA, 15 bp, Homo sapiens
caacaaatataaaaa

SEQ ID NO: 35953 - DNA, 15 bp, Homo sapiens
acaacaaatataaaa

SEQ ID NO: 35954 - DNA, 15 bp, Homo sapiens
tacaacaaatataaa

SEQ ID NO: 35955 - DNA, 15 bp, Homo sapiens
atacaacaaatataa

SEQ ID NO: 35956 - DNA, 15 bp, Homo sapiens
aatacaacaaatata

SEQ ID NO: 35957 - DNA, 15 bp, Homo sapiens
aaatacaacaaatat

SEQ ID NO: 35958 - DNA, 15 bp, Homo sapiens
aaaatacaacaaata

SEQ ID NO: 35959 - DNA, 15 bp, Homo sapiens
aaaaatacaacaaat

SEQ ID NO: 35960 - DNA, 15 bp, Homo sapiens
ataaaaatacaacaa

SEQ ID NO: 35961 - DNA, 15 bp, Homo sapiens
tataaaaatacaaca

SEQ ID NO: 35962 - DNA, 15 bp, Homo sapiens
ttataaaaatacaac

SEQ ID NO: 35963 - DNA, 15 bp, Homo sapiens
tttataaaaatacaa

SEQ ID NO: 35964 - DNA, 15 bp, Homo sapiens
ttttataaaaataca

SEQ ID NO: 35965 - DNA, 15 bp, Homo sapiens
attttataaaaatac

SEQ ID NO: 35966 - DNA, 15 bp, Homo sapiens
cattttataaaaata

SEQ ID NO: 35967 - DNA, 15 bp, Homo sapiens
gcattttataaaaat

SEQ ID NO: 35968 - DNA, 15 bp, Homo sapiens
ggcattttataaaaa

SEQ ID NO: 35969 - DNA, 15 bp, Homo sapiens
tggcattttataaaa

SEQ ID NO: 35970 - DNA, 15 bp, Homo sapiens
atggcattttataaa

SEQ ID NO: 35971 - DNA, 15 bp, Homo sapiens
tatggcattttataa

SEQ ID NO: 35972 - DNA, 15 bp, Homo sapiens
ctatggcattttata

SEQ ID NO: 35973 - DNA, 15 bp, Homo sapiens
tctatggcattttat

SEQ ID NO: 35974 - DNA, 15 bp, Homo sapiens
atctatggcatttta

SEQ ID NO: 35975 - DNA, 15 bp, Homo sapiens
tatctatggcatttt

SEQ ID NO: 35976 - DNA, 15 bp, Homo sapiens
ctatctatggcattt

SEQ ID NO: 35977 - DNA, 15 bp, Homo sapiens
tctatctatggcatt

SEQ ID NO: 35978 - DNA, 15 bp, Homo sapiens
ctctatctatggcat

SEQ ID NO: 35979 - DNA, 15 bp, Homo sapiens
cctctatctatggca

SEQ ID NO: 35980 - DNA, 15 bp, Homo sapiens
ccctctatctatggc

SEQ ID NO: 35981 - DNA, 15 bp, Homo sapiens
gccctctatctatgg

SEQ ID NO: 35982 - DNA, 15 bp, Homo sapiens
agccctctatctatg

SEQ ID NO: 35983 - DNA, 15 bp, Homo sapiens
aagccctctatctat

SEQ ID NO: 35984 - DNA, 15 bp, Homo sapiens
aaagccctctatcta

SEQ ID NO: 35985 - DNA, 15 bp, Homo sapiens
aaaagccctctatct

SEQ ID NO: 35986 - DNA, 15 bp, Homo sapiens
aaaaagccctctatc

SEQ ID NO: 35987 - DNA, 15 bp, Homo sapiens
aaaaaagccctctat

SEQ ID NO: 35988 - DNA, 15 bp, Homo sapiens
gaaaaaagccctcta

SEQ ID NO: 35989 - DNA, 15 bp, Homo sapiens
tgaaaaaagccctct

SEQ ID NO: 35990 - DNA, 15 bp, Homo sapiens
ttgaaaaaagccctc

SEQ ID NO: 35991 - DNA, 15 bp, Homo sapiens
gttgaaaaaagccct

SEQ ID NO: 35992 - DNA, 15 bp, Homo sapiens
tgttgaaaaaagccc

SEQ ID NO: 35993 - DNA, 15 bp, Homo sapiens
atgttgaaaaaagcc

SEQ ID NO: 35994 - DNA, 15 bp, Homo sapiens
aatgttgaaaaaagc

SEQ ID NO: 35995 - DNA, 15 bp, Homo sapiens
taatgttgaaaaaag

SEQ ID NO: 35996 - DNA, 15 bp, Homo sapiens
gtaatgttgaaaaaa

SEQ ID NO: 35997 - DNA, 15 bp, Homo sapiens
tgtaatgttgaaaaa

SEQ ID NO: 35998 - DNA, 15 bp, Homo sapiens
atgtaatgttgaaaa

SEQ ID NO: 35999 - DNA, 15 bp, Homo sapiens
gatgtaatgttgaaa

SEQ ID NO: 36000 - DNA, 15 bp, Homo sapiens
tgatgtaatgttgaa

SEQ ID NO: 36001 - DNA, 15 bp, Homo sapiens
ctgatgtaatgttga

SEQ ID NO: 36002 - DNA, 15 bp, Homo sapiens
actgatgtaatgttg

SEQ ID NO: 36003 - DNA, 15 bp, Homo sapiens
gactgatgtaatgtt

SEQ ID NO: 36004 - DNA, 15 bp, Homo sapiens
agactgatgtaatgt

SEQ ID NO: 36005 - DNA, 15 bp, Homo sapiens
tagactgatgtaatg

SEQ ID NO: 36006 - DNA, 15 bp, Homo sapiens
ttagactgatgtaat

SEQ ID NO: 36007 - DNA, 15 bp, Homo sapiens
tttagactgatgtaa

SEQ ID NO: 36008 - DNA, 15 bp, Homo sapiens
ttttagactgatgta

SEQ ID NO: 36009 - DNA, 15 bp, Homo sapiens
tttttagactgatgt

SEQ ID NO: 36010 - DNA, 15 bp, Homo sapiens
atttttagactgatg

SEQ ID NO: 36011 - DNA, 15 bp, Homo sapiens
gatttttagactgat

SEQ ID NO: 36012 - DNA, 15 bp, Homo sapiens
tgatttttagactga

SEQ ID NO: 36013 - DNA, 15 bp, Homo sapiens
gtgatttttagactg

SEQ ID NO: 36014 - DNA, 15 bp, Homo sapiens
tgtgatttttagact

SEQ ID NO: 36015 - DNA, 15 bp, Homo sapiens
gtgtgatttttagac

SEQ ID NO: 36016 - DNA, 15 bp, Homo sapiens
tgtgtgatttttaga

SEQ ID NO: 36017 - DNA, 15 bp, Homo sapiens
atgtgtgatttttag

SEQ ID NO: 36018 - DNA, 15 bp, Homo sapiens
aatgtgtgattttta

SEQ ID NO: 36019 - DNA, 15 bp, Homo sapiens
aaatgtgtgattttt

SEQ ID NO: 36020 - DNA, 15 bp, Homo sapiens
aaaatgtgtgatttt

SEQ ID NO: 36021 - DNA, 15 bp, Homo sapiens
aaaaatgtgtgattt

SEQ ID NO: 36022 - DNA, 15 bp, Homo sapiens
taaaaatgtgtgatt

SEQ ID NO: 36023 - DNA, 15 bp, Homo sapiens
ataaaaatgtgtgat

SEQ ID NO: 36024 - DNA, 15 bp, Homo sapiens
tataaaaatgtgtga

SEQ ID NO: 36025 - DNA, 15 bp, Homo sapiens
atataaaaatgtgtg

SEQ ID NO: 36026 - DNA, 15 bp, Homo sapiens
catataaaaatgtgt

SEQ ID NO: 36027 - DNA, 15 bp, Homo sapiens
tcatataaaaatgtg

SEQ ID NO: 36028 - DNA, 15 bp, Homo sapiens
ttcatataaaaatgt

SEQ ID NO: 36029 - DNA, 15 bp, Homo sapiens
gttcatataaaaatg

SEQ ID NO: 36030 - DNA, 15 bp, Homo sapiens
agttcatataaaaat

SEQ ID NO: 36031 - DNA, 15 bp, Homo sapiens
tagttcatataaaaa

SEQ ID NO: 36032 - DNA, 15 bp, Homo sapiens
ttagttcatataaaa

SEQ ID NO: 36033 - DNA, 15 bp, Homo sapiens
gttagttcatataaa

SEQ ID NO: 36034 - DNA, 15 bp, Homo sapiens
ggttagttcatataa

SEQ ID NO: 36035 - DNA, 15 bp, Homo sapiens
aggttagttcatata

SEQ ID NO: 36036 - DNA, 15 bp, Homo sapiens
taggttagttcatat

SEQ ID NO: 36037 - DNA, 15 bp, Homo sapiens
ttaggttagttcata

SEQ ID NO: 36038 - DNA, 15 bp, Homo sapiens
tttaggttagttcat

SEQ ID NO: 36039 - DNA, 15 bp, Homo sapiens
atttaggttagttca

SEQ ID NO: 36040 - DNA, 15 bp, Homo sapiens
catttaggttagttc

SEQ ID NO: 36041 - DNA, 15 bp, Homo sapiens
acatttaggttagtt

SEQ ID NO: 36042 - DNA, 15 bp, Homo sapiens
gacatttaggttagt

SEQ ID NO: 36043 - DNA, 15 bp, Homo sapiens
agacatttaggttag

SEQ ID NO: 36044 - DNA, 15 bp, Homo sapiens
cagacatttaggtta

SEQ ID NO: 36045 - DNA, 15 bp, Homo sapiens
tcagacatttaggtt

SEQ ID NO: 36046 - DNA, 15 bp, Homo sapiens
atcagacatttaggt

SEQ ID NO: 36047 - DNA, 15 bp, Homo sapiens
catcagacatttagg

SEQ ID NO: 36048 - DNA, 15 bp, Homo sapiens
tcatcagacatttag

SEQ ID NO: 36049 - DNA, 15 bp, Homo sapiens
ttcatcagacattta

SEQ ID NO: 36050 - DNA, 15 bp, Homo sapiens
attcatcagacattt

SEQ ID NO: 36051 - DNA, 15 bp, Homo sapiens
gattcatcagacatt

SEQ ID NO: 36052 - DNA, 15 bp, Homo sapiens
agattcatcagacat

SEQ ID NO: 36053 - DNA, 15 bp, Homo sapiens
gagattcatcagaca

SEQ ID NO: 36054 - DNA, 15 bp, Homo sapiens
tgagattcatcagac

SEQ ID NO: 36055 - DNA, 15 bp, Homo sapiens
gtgagattcatcaga

SEQ ID NO: 36056 - DNA, 15 bp, Homo sapiens
tgtgagattcatcag

SEQ ID NO: 36057 - DNA, 15 bp, Homo sapiens
ttgtgagattcatca

SEQ ID NO: 36058 - DNA, 15 bp, Homo sapiens
gttgtgagattcatc

SEQ ID NO: 36059 - DNA, 15 bp, Homo sapiens
tgttgtgagattcat

SEQ ID NO: 36060 - DNA, 15 bp, Homo sapiens
gtgttgtgagattca

SEQ ID NO: 36061 - DNA, 15 bp, Homo sapiens
ggtgttgtgagattc

SEQ ID NO: 36062 - DNA, 15 bp, Homo sapiens
tggtgttgtgagatt

SEQ ID NO: 36063 - DNA, 15 bp, Homo sapiens
ttggtgttgtgagat

SEQ ID NO: 36064 - DNA, 15 bp, Homo sapiens
cttggtgttgtgaga

SEQ ID NO: 36065 - DNA, 15 bp, Homo sapiens
acttggtgttgtgag

SEQ ID NO: 36066 - DNA, 15 bp, Homo sapiens
gacttggtgttgtga

SEQ ID NO: 36067 - DNA, 15 bp, Homo sapiens
agacttggtgttgtg

SEQ ID NO: 36068 - DNA, 15 bp, Homo sapiens
aagacttggtgttgt

SEQ ID NO: 36069 - DNA, 15 bp, Homo sapiens
aaagacttggtgttg

SEQ ID NO: 36070 - DNA, 15 bp, Homo sapiens
caaagacttggtgtt

SEQ ID NO: 36071 - DNA, 15 bp, Homo sapiens
tcaaagacttggtgt

SEQ ID NO: 36072 - DNA, 15 bp, Homo sapiens
ttcaaagacttggtg

SEQ ID NO: 36073 - DNA, 15 bp, Homo sapiens
tttcaaagacttggt

SEQ ID NO: 36074 - DNA, 15 bp, Homo sapiens
atttcaaagacttgg

SEQ ID NO: 36075 - DNA, 15 bp, Homo sapiens
catttcaaagacttg

SEQ ID NO: 36076 - DNA, 15 bp, Homo sapiens
acatttcaaagactt

SEQ ID NO: 36077 - DNA, 15 bp, Homo sapiens
cacatttcaaagact

SEQ ID NO: 36078 - DNA, 15 bp, Homo sapiens
gcacatttcaaagac

SEQ ID NO: 36079 - DNA, 15 bp, Homo sapiens
ggcacatttcaaaga

SEQ ID NO: 36080 - DNA, 15 bp, Homo sapiens
gggcacatttcaaag

SEQ ID NO: 36081 - DNA, 15 bp, Homo sapiens
tgggcacatttcaaa

SEQ ID NO: 36082 - DNA, 15 bp, Homo sapiens
atgggcacatttcaa

SEQ ID NO: 36083 - DNA, 15 bp, Homo sapiens
tatgggcacatttca

SEQ ID NO: 36084 - DNA, 15 bp, Homo sapiens
atatgggcacatttc

SEQ ID NO: 36085 - DNA, 15 bp, Homo sapiens
tatatgggcacattt

SEQ ID NO: 36086 - DNA, 15 bp, Homo sapiens
ttatatgggcacatt

SEQ ID NO: 36087 - DNA, 15 bp, Homo sapiens
tttatatgggcacat

SEQ ID NO: 36088 - DNA, 15 bp, Homo sapiens
atttatatgggcaca

SEQ ID NO: 36089 - DNA, 15 bp, Homo sapiens
tatttatatgggcac

SEQ ID NO: 36090 - DNA, 15 bp, Homo sapiens
ttatttatatgggca

SEQ ID NO: 36091 - DNA, 15 bp, Homo sapiens
tttatttatatgggc

SEQ ID NO: 36092 - DNA, 15 bp, Homo sapiens
ttttatttatatggg

SEQ ID NO: 36093 - DNA, 15 bp, Homo sapiens
attttatttatatgg

SEQ ID NO: 36094 - DNA, 15 bp, Homo sapiens
cattttatttatatg

SEQ ID NO: 36095 - DNA, 15 bp, Homo sapiens
acattttatttatat

SEQ ID NO: 36096 - DNA, 15 bp, Homo sapiens
aacattttatttata

SEQ ID NO: 36097 - DNA, 15 bp, Homo sapiens
taacattttatttat

SEQ ID NO: 36098 - DNA, 15 bp, Homo sapiens
ttaacattttattta

SEQ ID NO: 36099 - DNA, 15 bp, Homo sapiens
gttaacattttattt

SEQ ID NO: 36100 - DNA, 15 bp, Homo sapiens
tgttaacattttatt

SEQ ID NO: 36101 - DNA, 15 bp, Homo sapiens
ctgttaacattttat

SEQ ID NO: 36102 - DNA, 15 bp, Homo sapiens
tctgttaacatttta

SEQ ID NO: 36103 - DNA, 15 bp, Homo sapiens
atctgttaacatttt

SEQ ID NO: 36104 - DNA, 15 bp, Homo sapiens
aatctgttaacattt

SEQ ID NO: 36105 - DNA, 15 bp, Homo sapiens
gaatctgttaacatt

SEQ ID NO: 36106 - DNA, 15 bp, Homo sapiens
tgaatctgttaacat

SEQ ID NO: 36107 - DNA, 15 bp, Homo sapiens
atgaatctgttaaca

SEQ ID NO: 36108 - DNA, 15 bp, Homo sapiens
catgaatctgttaac

SEQ ID NO: 36109 - DNA, 15 bp, Homo sapiens
gcatgaatctgttaa

SEQ ID NO: 36110 - DNA, 15 bp, Homo sapiens
agcatgaatctgtta

SEQ ID NO: 36111 - DNA, 15 bp, Homo sapiens
tagcatgaatctgtt

SEQ ID NO: 36112 - DNA, 15 bp, Homo sapiens
ttagcatgaatctgt

SEQ ID NO: 36113 - DNA, 15 bp, Homo sapiens
attagcatgaatctg

SEQ ID NO: 36114 - DNA, 15 bp, Homo sapiens
aattagcatgaatct

SEQ ID NO: 36115 - DNA, 15 bp, Homo sapiens
aaattagcatgaatc

SEQ ID NO: 36116 - DNA, 15 bp, Homo sapiens
aaaattagcatgaat

SEQ ID NO: 36117 - DNA, 15 bp, Homo sapiens
taaaattagcatgaa

SEQ ID NO: 36118 - DNA, 15 bp, Homo sapiens
ttaaaattagcatga

SEQ ID NO: 36119 - DNA, 15 bp, Homo sapiens
tttaaaattagcatg

SEQ ID NO: 36120 - DNA, 15 bp, Homo sapiens
atttaaaattagcat

SEQ ID NO: 36121 - DNA, 15 bp, Homo sapiens
tatttaaaattagca

SEQ ID NO: 36122 - DNA, 15 bp, Homo sapiens
atatttaaaattagc

SEQ ID NO: 36123 - DNA, 15 bp, Homo sapiens
gatatttaaaattag

SEQ ID NO: 36124 - DNA, 15 bp, Homo sapiens
cgatatttaaaatta

SEQ ID NO: 36125 - DNA, 15 bp, Homo sapiens
tcgatatttaaaatt

SEQ ID NO: 36126 - DNA, 15 bp, Homo sapiens
atcgatatttaaaat

SEQ ID NO: 36127 - DNA, 15 bp, Homo sapiens
tatcgatatttaaaa

SEQ ID NO: 36128 - DNA, 15 bp, Homo sapiens
ctatcgatatttaaa

SEQ ID NO: 36129 - DNA, 15 bp, Homo sapiens
actatcgatatttaa

SEQ ID NO: 36130 - DNA, 15 bp, Homo sapiens
cactatcgatattta

SEQ ID NO: 36131 - DNA, 15 bp, Homo sapiens
acactatcgatattt

SEQ ID NO: 36132 - DNA, 15 bp, Homo sapiens
aacactatcgatatt

SEQ ID NO: 36133 - DNA, 15 bp, Homo sapiens
aaacactatcgatat

SEQ ID NO: 36134 - DNA, 15 bp, Homo sapiens
taaacactatcgata

SEQ ID NO: 36135 - DNA, 15 bp, Homo sapiens
ttaaacactatcgat

SEQ ID NO: 36136 - DNA, 15 bp, Homo sapiens
tttaaacactatcga

SEQ ID NO: 36137 - DNA, 15 bp, Homo sapiens
atttaaacactatcg

SEQ ID NO: 36138 - DNA, 15 bp, Homo sapiens
catttaaacactatc

SEQ ID NO: 36139 - DNA, 15 bp, Homo sapiens
gcatttaaacactat

SEQ ID NO: 36140 - DNA, 15 bp, Homo sapiens
ggcatttaaacacta

SEQ ID NO: 36141 - DNA, 15 bp, Homo sapiens
aggcatttaaacact

SEQ ID NO: 36142 - DNA, 15 bp, Homo sapiens
aaggcatttaaacac

SEQ ID NO: 36143 - DNA, 15 bp, Homo sapiens
taaggcatttaaaca

SEQ ID NO: 36144 - DNA, 15 bp, Homo sapiens
ttaaggcatttaaac

SEQ ID NO: 36145 - DNA, 15 bp, Homo sapiens
attaaggcatttaaa

SEQ ID NO: 36146 - DNA, 15 bp, Homo sapiens
aattaaggcatttaa

SEQ ID NO: 36147 - DNA, 15 bp, Homo sapiens
taattaaggcattta

SEQ ID NO: 36148 - DNA, 15 bp, Homo sapiens
ataattaaggcattt

SEQ ID NO: 36149 - DNA, 15 bp, Homo sapiens
aataattaaggcatt

SEQ ID NO: 36150 - DNA, 15 bp, Homo sapiens
aaataattaaggcat

SEQ ID NO: 36151 - DNA, 15 bp, Homo sapiens
aaaataattaaggca

SEQ ID NO: 36152 - DNA, 15 bp, Homo sapiens
aaaaataattaaggc

SEQ ID NO: 36153 - DNA, 15 bp, Homo sapiens
aaaaaataattaagg

SEQ ID NO: 36154 - DNA, 15 bp, Homo sapiens
gaaaaaataattaag

SEQ ID NO: 36155 - DNA, 15 bp, Homo sapiens
tgaaaaaataattaa

SEQ ID NO: 36156 - DNA, 15 bp, Homo sapiens
gtgaaaaaataatta

SEQ ID NO: 36157 - DNA, 15 bp, Homo sapiens
agtgaaaaaataatt

SEQ ID NO: 36158 - DNA, 15 bp, Homo sapiens
gagtgaaaaaataat

SEQ ID NO: 36159 - DNA, 15 bp, Homo sapiens
ggagtgaaaaaataa

SEQ ID NO: 36160 - DNA, 15 bp, Homo sapiens
gggagtgaaaaaata

SEQ ID NO: 36161 - DNA, 15 bp, Homo sapiens
agggagtgaaaaaat

SEQ ID NO: 36162 - DNA, 15 bp, Homo sapiens
tagggagtgaaaaaa

SEQ ID NO: 36163 - DNA, 15 bp, Homo sapiens
ctagggagtgaaaaa

SEQ ID NO: 36164 - DNA, 15 bp, Homo sapiens
gctagggagtgaaaa

SEQ ID NO: 36165 - DNA, 15 bp, Homo sapiens
agctagggagtgaaa

SEQ ID NO: 36166 - DNA, 15 bp, Homo sapiens
aagctagggagtgaa

SEQ ID NO: 36167 - DNA, 15 bp, Homo sapiens
aaagctagggagtga

SEQ ID NO: 36168 - DNA, 15 bp, Homo sapiens
taaagctagggagtg

SEQ ID NO: 36169 - DNA, 15 bp, Homo sapiens
ttaaagctagggagt

SEQ ID NO: 36170 - DNA, 15 bp, Homo sapiens
tttaaagctagggag

SEQ ID NO: 36171 - DNA, 15 bp, Homo sapiens
ttttaaagctaggga

SEQ ID NO: 36172 - DNA, 15 bp, Homo sapiens
cttttaaagctaggg

SEQ ID NO: 36173 - DNA, 15 bp, Homo sapiens
tcttttaaagctagg

SEQ ID NO: 36174 - DNA, 15 bp, Homo sapiens
ttcttttaaagctag

SEQ ID NO: 36175 - DNA, 15 bp, Homo sapiens
tttcttttaaagcta

SEQ ID NO: 36176 - DNA, 15 bp, Homo sapiens
ttttcttttaaagct

SEQ ID NO: 36177 - DNA, 15 bp, Homo sapiens
attttcttttaaagc

SEQ ID NO: 36178 - DNA, 15 bp, Homo sapiens
tattttcttttaaag

SEQ ID NO: 36179 - DNA, 15 bp, Homo sapiens
ttattttcttttaaa

SEQ ID NO: 36180 - DNA, 15 bp, Homo sapiens
gttattttcttttaa

SEQ ID NO: 36181 - DNA, 15 bp, Homo sapiens
ggttattttctttta

SEQ ID NO: 36182 - DNA, 15 bp, Homo sapiens
tggttattttctttt

SEQ ID NO: 36183 - DNA, 15 bp, Homo sapiens
ttggttattttcttt

SEQ ID NO: 36184 - DNA, 15 bp, Homo sapiens
gttggttattttctt

SEQ ID NO: 36185 - DNA, 15 bp, Homo sapiens
agttggttattttct

SEQ ID NO: 36186 - DNA, 15 bp, Homo sapiens
aagttggttattttc

SEQ ID NO: 36187 - DNA, 15 bp, Homo sapiens
gaagttggttatttt

SEQ ID NO: 36188 - DNA, 15 bp, Homo sapiens
tgaagttggttattt

SEQ ID NO: 36189 - DNA, 15 bp, Homo sapiens
ttgaagttggttatt

SEQ ID NO: 36190 - DNA, 15 bp, Homo sapiens
tttgaagttggttat

SEQ ID NO: 36191 - DNA, 15 bp, Homo sapiens
ttttgaagttggtta

SEQ ID NO: 36192 - DNA, 15 bp, Homo sapiens
cttttgaagttggtt

SEQ ID NO: 36193 - DNA, 15 bp, Homo sapiens
ccttttgaagttggt

SEQ ID NO: 36194 - DNA, 15 bp, Homo sapiens
tccttttgaagttgg

SEQ ID NO: 36195 - DNA, 15 bp, Homo sapiens
gtccttttgaagttg

SEQ ID NO: 36196 - DNA, 15 bp, Homo sapiens
tgtccttttgaagtt

SEQ ID NO: 36197 - DNA, 15 bp, Homo sapiens
atgtccttttgaagt

SEQ ID NO: 36198 - DNA, 15 bp, Homo sapiens
gatgtccttttgaag

SEQ ID NO: 36199 - DNA, 15 bp, Homo sapiens
tgatgtccttttgaa

SEQ ID NO: 36200 - DNA, 15 bp, Homo sapiens
gtgatgtccttttga

SEQ ID NO: 36201 - DNA, 15 bp, Homo sapiens
tgtgatgtccttttg

SEQ ID NO: 36202 - DNA, 15 bp, Homo sapiens
ttgtgatgtcctttt

SEQ ID NO: 36203 - DNA, 15 bp, Homo sapiens
attgtgatgtccttt

SEQ ID NO: 36204 - DNA, 15 bp, Homo sapiens
tattgtgatgtcctt

SEQ ID NO: 36205 - DNA, 15 bp, Homo sapiens
ttattgtgatgtcct

SEQ ID NO: 36206 - DNA, 15 bp, Homo sapiens
gttattgtgatgtcc

SEQ ID NO: 36207 - DNA, 15 bp, Homo sapiens
tgttattgtgatgtc

SEQ ID NO: 36208 - DNA, 15 bp, Homo sapiens
atgttattgtgatgt

SEQ ID NO: 36209 - DNA, 15 bp, Homo sapiens
gatgttattgtgatg

SEQ ID NO: 36210 - DNA, 15 bp, Homo sapiens
tgatgttattgtgat

SEQ ID NO: 36211 - DNA, 15 bp, Homo sapiens
ttgatgttattgtga

SEQ ID NO: 36212 - DNA, 15 bp, Homo sapiens
cttgatgttattgtg

SEQ ID NO: 36213 - DNA, 15 bp, Homo sapiens
acttgatgttattgt

SEQ ID NO: 36214 - DNA, 15 bp, Homo sapiens
gacttgatgttattg

SEQ ID NO: 36215 - DNA, 15 bp, Homo sapiens
agacttgatgttatt

SEQ ID NO: 36216 - DNA, 15 bp, Homo sapiens
tagacttgatgttat

SEQ ID NO: 36217 - DNA, 15 bp, Homo sapiens
atagacttgatgtta

SEQ ID NO: 36218 - DNA, 15 bp, Homo sapiens
aatagacttgatgtt

SEQ ID NO: 36219 - DNA, 15 bp, Homo sapiens
aaatagacttgatgt

SEQ ID NO: 36220 - DNA, 15 bp, Homo sapiens
caaatagacttgatg

SEQ ID NO: 36221 - DNA, 15 bp, Homo sapiens
ccaaatagacttgat

SEQ ID NO: 36222 - DNA, 15 bp, Homo sapiens
cccaaatagacttga

SEQ ID NO: 36223 - DNA, 15 bp, Homo sapiens
ccccaaatagacttg

SEQ ID NO: 36224 - DNA, 15 bp, Homo sapiens
cccccaaatagactt

SEQ ID NO: 36225 - DNA, 15 bp, Homo sapiens
tcccccaaatagact

SEQ ID NO: 36226 - DNA, 15 bp, Homo sapiens
ttcccccaaatagac

SEQ ID NO: 36227 - DNA, 15 bp, Homo sapiens
attcccccaaataga

SEQ ID NO: 36228 - DNA, 15 bp, Homo sapiens
aattcccccaaatag

SEQ ID NO: 36229 - DNA, 15 bp, Homo sapiens
aaattcccccaaata

SEQ ID NO: 36230 - DNA, 15 bp, Homo sapiens
caaattcccccaaat

SEQ ID NO: 36231 - DNA, 15 bp, Homo sapiens
tcaaattcccccaaa

SEQ ID NO: 36232 - DNA, 15 bp, Homo sapiens
ctcaaattcccccaa

SEQ ID NO: 36233 - DNA, 15 bp, Homo sapiens
cctcaaattccccca

SEQ ID NO: 36234 - DNA, 15 bp, Homo sapiens
tcctcaaattccccc

SEQ ID NO: 36235 - DNA, 15 bp, Homo sapiens
atcctcaaattcccc

SEQ ID NO: 36236 - DNA, 15 bp, Homo sapiens
aatcctcaaattccc

SEQ ID NO: 36237 - DNA, 15 bp, Homo sapiens
aaatcctcaaattcc

SEQ ID NO: 36238 - DNA, 15 bp, Homo sapiens
aaaatcctcaaattc

SEQ ID NO: 36239 - DNA, 15 bp, Homo sapiens
aaaaatcctcaaatt

SEQ ID NO: 36240 - DNA, 15 bp, Homo sapiens
aaaaaatcctcaaat

SEQ ID NO: 36241 - DNA, 15 bp, Homo sapiens
gaaaaaatcctcaaa

SEQ ID NO: 36242 - DNA, 15 bp, Homo sapiens
ggaaaaaatcctcaa

SEQ ID NO: 36243 - DNA, 15 bp, Homo sapiens
gggaaaaaatcctca

SEQ ID NO: 36244 - DNA, 15 bp, Homo sapiens
agggaaaaaatcctc

SEQ ID NO: 36245 - DNA, 15 bp, Homo sapiens
gagggaaaaaatcct

SEQ ID NO: 36246 - DNA, 15 bp, Homo sapiens
tgagggaaaaaatcc

SEQ ID NO: 36247 - DNA, 15 bp, Homo sapiens
gtgagggaaaaaatc

SEQ ID NO: 36248 - DNA, 15 bp, Homo sapiens
agtgagggaaaaaat

SEQ ID NO: 36249 - DNA, 15 bp, Homo sapiens
tagtgagggaaaaaa

SEQ ID NO: 36250 - DNA, 15 bp, Homo sapiens
ttagtgagggaaaaa

SEQ ID NO: 36251 - DNA, 15 bp, Homo sapiens
gttagtgagggaaaa

SEQ ID NO: 36252 - DNA, 15 bp, Homo sapiens
tgttagtgagggaaa

SEQ ID NO: 36253 - DNA, 15 bp, Homo sapiens
atgttagtgagggaa

SEQ ID NO: 36254 - DNA, 15 bp, Homo sapiens
gatgttagtgaggga

SEQ ID NO: 36255 - DNA, 15 bp, Homo sapiens
tgatgttagtgaggg

SEQ ID NO: 36256 - DNA, 15 bp, Homo sapiens
atgatgttagtgagg

SEQ ID NO: 36257 - DNA, 15 bp, Homo sapiens
aatgatgttagtgag

SEQ ID NO: 36258 - DNA, 15 bp, Homo sapiens
aaatgatgttagtga

SEQ ID NO: 36259 - DNA, 15 bp, Homo sapiens
caaatgatgttagtg

SEQ ID NO: 36260 - DNA, 15 bp, Homo sapiens
ccaaatgatgttagt

SEQ ID NO: 36261 - DNA, 15 bp, Homo sapiens
tccaaatgatgttag

SEQ ID NO: 36262 - DNA, 15 bp, Homo sapiens
ttccaaatgatgtta

SEQ ID NO: 36263 - DNA, 15 bp, Homo sapiens
tttccaaatgatgtt

SEQ ID NO: 36264 - DNA, 15 bp, Homo sapiens
atttccaaatgatgt

SEQ ID NO: 36265 - DNA, 15 bp, Homo sapiens
tatttccaaatgatg

SEQ ID NO: 36266 - DNA, 15 bp, Homo sapiens
ttatttccaaatgat

SEQ ID NO: 36267 - DNA, 15 bp, Homo sapiens
attatttccaaatga

SEQ ID NO: 36268 - DNA, 15 bp, Homo sapiens
aattatttccaaatg

SEQ ID NO: 36269 - DNA, 15 bp, Homo sapiens
aaattatttccaaat

SEQ ID NO: 36270 - DNA, 15 bp, Homo sapiens
gaaattatttccaaa

SEQ ID NO: 36271 - DNA, 15 bp, Homo sapiens
tgaaattatttccaa

SEQ ID NO: 36272 - DNA, 15 bp, Homo sapiens
atgaaattatttcca

SEQ ID NO: 36273 - DNA, 15 bp, Homo sapiens
catgaaattatttcc

SEQ ID NO: 36274 - DNA, 15 bp, Homo sapiens
ccatgaaattatttc

SEQ ID NO: 36275 - DNA, 15 bp, Homo sapiens
cccatgaaattattt

SEQ ID NO: 36276 - DNA, 15 bp, Homo sapiens
gcccatgaaattatt

SEQ ID NO: 36277 - DNA, 15 bp, Homo sapiens
tgcccatgaaattat

SEQ ID NO: 36278 - DNA, 15 bp, Homo sapiens
atgcccatgaaatta

SEQ ID NO: 36279 - DNA, 15 bp, Homo sapiens
aatgcccatgaaatt

SEQ ID NO: 36280 - DNA, 15 bp, Homo sapiens
taatgcccatgaaat

SEQ ID NO: 36281 - DNA, 15 bp, Homo sapiens
ttaatgcccatgaaa

SEQ ID NO: 36282 - DNA, 15 bp, Homo sapiens
attaatgcccatgaa

SEQ ID NO: 36283 - DNA, 15 bp, Homo sapiens
aattaatgcccatga

SEQ ID NO: 36284 - DNA, 15 bp, Homo sapiens
caattaatgcccatg

SEQ ID NO: 36285 - DNA, 15 bp, Homo sapiens
gcaattaatgcccat

SEQ ID NO: 36286 - DNA, 15 bp, Homo sapiens
tgcaattaatgccca

SEQ ID NO: 36287 - DNA, 15 bp, Homo sapiens
atgcaattaatgccc

SEQ ID NO: 36288 - DNA, 15 bp, Homo sapiens
catgcaattaatgcc

SEQ ID NO: 36289 - DNA, 15 bp, Homo sapiens
tcatgcaattaatgc

SEQ ID NO: 36290 - DNA, 15 bp, Homo sapiens
ttcatgcaattaatg

SEQ ID NO: 36291 - DNA, 15 bp, Homo sapiens
attcatgcaattaat

SEQ ID NO: 36292 - DNA, 15 bp, Homo sapiens
cattcatgcaattaa

SEQ ID NO: 36293 - DNA, 15 bp, Homo sapiens
acattcatgcaatta

SEQ ID NO: 36294 - DNA, 15 bp, Homo sapiens
cacattcatgcaatt

SEQ ID NO: 36295 - DNA, 15 bp, Homo sapiens
ccacattcatgcaat

SEQ ID NO: 36296 - DNA, 15 bp, Homo sapiens
accacattcatgcaa

SEQ ID NO: 36297 - DNA, 15 bp, Homo sapiens
aaccacattcatgca

SEQ ID NO: 36298 - DNA, 15 bp, Homo sapiens
taaccacattcatgc

SEQ ID NO: 36299 - DNA, 15 bp, Homo sapiens
ctaaccacattcatg

SEQ ID NO: 36300 - DNA, 15 bp, Homo sapiens
tctaaccacattcat

SEQ ID NO: 36301 - DNA, 15 bp, Homo sapiens
atctaaccacattca

SEQ ID NO: 36302 - DNA, 15 bp, Homo sapiens
aatctaaccacattc

SEQ ID NO: 36303 - DNA, 15 bp, Homo sapiens
taatctaaccacatt

SEQ ID NO: 36304 - DNA, 15 bp, Homo sapiens
ttaatctaaccacat

SEQ ID NO: 36305 - DNA, 15 bp, Homo sapiens
tttaatctaaccaca

SEQ ID NO: 36306 - DNA, 15 bp, Homo sapiens
ttttaatctaaccac

SEQ ID NO: 36307 - DNA, 15 bp, Homo sapiens
cttttaatctaacca

SEQ ID NO: 36308 - DNA, 15 bp, Homo sapiens
ccttttaatctaacc

SEQ ID NO: 36309 - DNA, 15 bp, Homo sapiens
accttttaatctaac

SEQ ID NO: 36310 - DNA, 15 bp, Homo sapiens
caccttttaatctaa

SEQ ID NO: 36311 - DNA, 15 bp, Homo sapiens
acaccttttaatcta

SEQ ID NO: 36312 - DNA, 15 bp, Homo sapiens
aacaccttttaatct

SEQ ID NO: 36313 - DNA, 15 bp, Homo sapiens
gaacaccttttaatc

SEQ ID NO: 36314 - DNA, 15 bp, Homo sapiens
tgaacaccttttaat

SEQ ID NO: 36315 - DNA, 15 bp, Homo sapiens
ctgaacaccttttaa

SEQ ID NO: 36316 - DNA, 15 bp, Homo sapiens
gctgaacacctttta

SEQ ID NO: 36317 - DNA, 15 bp, Homo sapiens
agctgaacacctttt

SEQ ID NO: 36318 - DNA, 15 bp, Homo sapiens
tagctgaacaccttt

SEQ ID NO: 36319 - DNA, 15 bp, Homo sapiens
ctagctgaacacctt

SEQ ID NO: 36320 - DNA, 15 bp, Homo sapiens
tctagctgaacacct

SEQ ID NO: 36321 - DNA, 15 bp, Homo sapiens
ttctagctgaacacc

SEQ ID NO: 36322 - DNA, 15 bp, Homo sapiens
gttctagctgaacac

SEQ ID NO: 36323 - DNA, 15 bp, Homo sapiens
agttctagctgaaca

SEQ ID NO: 36324 - DNA, 15 bp, Homo sapiens
aagttctagctgaac

SEQ ID NO: 36325 - DNA, 15 bp, Homo sapiens
caagttctagctgaa

SEQ ID NO: 36326 - DNA, 15 bp, Homo sapiens
acaagttctagctga

SEQ ID NO: 36327 - DNA, 15 bp, Homo sapiens
tacaagttctagctg

SEQ ID NO: 36328 - DNA, 15 bp, Homo sapiens
ctacaagttctagct

SEQ ID NO: 36329 - DNA, 15 bp, Homo sapiens
actacaagttctagc

SEQ ID NO: 36330 - DNA, 15 bp, Homo sapiens
aactacaagttctag

SEQ ID NO: 36331 - DNA, 15 bp, Homo sapiens
gaactacaagttcta

SEQ ID NO: 36332 - DNA, 15 bp, Homo sapiens
ggaactacaagttct

SEQ ID NO: 36333 - DNA, 15 bp, Homo sapiens
tggaactacaagttc

SEQ ID NO: 36334 - DNA, 15 bp, Homo sapiens
atggaactacaagtt

SEQ ID NO: 36335 - DNA, 15 bp, Homo sapiens
tatggaactacaagt

SEQ ID NO: 36336 - DNA, 15 bp, Homo sapiens
gtatggaactacaag

SEQ ID NO: 36337 - DNA, 15 bp, Homo sapiens
agtatggaactacaa

SEQ ID NO: 36338 - DNA, 15 bp, Homo sapiens
tagtatggaactaca

SEQ ID NO: 36339 - DNA, 15 bp, Homo sapiens
ctagtatggaactac

SEQ ID NO: 36340 - DNA, 15 bp, Homo sapiens
cctagtatggaacta

SEQ ID NO: 36341 - DNA, 15 bp, Homo sapiens
acctagtatggaact

SEQ ID NO: 36342 - DNA, 15 bp, Homo sapiens
cacctagtatggaac

SEQ ID NO: 36343 - DNA, 15 bp, Homo sapiens
tcacctagtatggaa

SEQ ID NO: 36344 - DNA, 15 bp, Homo sapiens
atcacctagtatgga

SEQ ID NO: 36345 - DNA, 15 bp, Homo sapiens
aatcacctagtatgg

SEQ ID NO: 36346 - DNA, 15 bp, Homo sapiens
aaatcacctagtatg

SEQ ID NO: 36347 - DNA, 15 bp, Homo sapiens
gaaatcacctagtat

SEQ ID NO: 36348 - DNA, 15 bp, Homo sapiens
tgaaatcacctagta

SEQ ID NO: 36349 - DNA, 15 bp, Homo sapiens
ttgaaatcacctagt

SEQ ID NO: 36350 - DNA, 15 bp, Homo sapiens
attgaaatcacctag

SEQ ID NO: 36351 - DNA, 15 bp, Homo sapiens
aattgaaatcaccta

SEQ ID NO: 36352 - DNA, 15 bp, Homo sapiens
gaattgaaatcacct

SEQ ID NO: 36353 - DNA, 15 bp, Homo sapiens
ggaattgaaatcacc

SEQ ID NO: 36354 - DNA, 15 bp, Homo sapiens
aggaattgaaatcac

SEQ ID NO: 36355 - DNA, 15 bp, Homo sapiens
caggaattgaaatca

SEQ ID NO: 36356 - DNA, 15 bp, Homo sapiens
acaggaattgaaatc

SEQ ID NO: 36357 - DNA, 15 bp, Homo sapiens
cacaggaattgaaat

SEQ ID NO: 36358 - DNA, 15 bp, Homo sapiens
gcacaggaattgaaa

SEQ ID NO: 36359 - DNA, 15 bp, Homo sapiens
agcacaggaattgaa

SEQ ID NO: 36360 - DNA, 15 bp, Homo sapiens
tagcacaggaattga

SEQ ID NO: 36361 - DNA, 15 bp, Homo sapiens
ttagcacaggaattg

SEQ ID NO: 36362 - DNA, 15 bp, Homo sapiens
tttagcacaggaatt

SEQ ID NO: 36363 - DNA, 15 bp, Homo sapiens
ttttagcacaggaat

SEQ ID NO: 36364 - DNA, 15 bp, Homo sapiens
attttagcacaggaa

SEQ ID NO: 36365 - DNA, 15 bp, Homo sapiens
aattttagcacagga

SEQ ID NO: 36366 - DNA, 15 bp, Homo sapiens
taattttagcacagg

SEQ ID NO: 36367 - DNA, 15 bp, Homo sapiens
ttaattttagcacag

SEQ ID NO: 36368 - DNA, 15 bp, Homo sapiens
attaattttagcaca

SEQ ID NO: 36369 - DNA, 15 bp, Homo sapiens
aattaattttagcac

SEQ ID NO: 36370 - DNA, 15 bp, Homo sapiens
aaattaattttagca

SEQ ID NO: 36371 - DNA, 15 bp, Homo sapiens
caaattaattttagc

SEQ ID NO: 36372 - DNA, 15 bp, Homo sapiens
acaaattaattttag

SEQ ID NO: 36373 - DNA, 15 bp, Homo sapiens
tacaaattaatttta

SEQ ID NO: 36374 - DNA, 15 bp, Homo sapiens
atacaaattaatttt

SEQ ID NO: 36375 - DNA, 15 bp, Homo sapiens
catacaaattaattt

SEQ ID NO: 36376 - DNA, 15 bp, Homo sapiens
tcatacaaattaatt

SEQ ID NO: 36377 - DNA, 15 bp, Homo sapiens
atcatacaaattaat

SEQ ID NO: 36378 - DNA, 15 bp, Homo sapiens
tatcatacaaattaa

SEQ ID NO: 36379 - DNA, 15 bp, Homo sapiens
atatcatacaaatta

SEQ ID NO: 36380 - DNA, 15 bp, Homo sapiens
tatatcatacaaatt

SEQ ID NO: 36381 - DNA, 15 bp, Homo sapiens
atatatcatacaaat

SEQ ID NO: 36382 - DNA, 15 bp, Homo sapiens
aatatatcatacaaa

SEQ ID NO: 36383 - DNA, 15 bp, Homo sapiens
aaatatatcatacaa

SEQ ID NO: 36384 - DNA, 15 bp, Homo sapiens
aaaatatatcataca

SEQ ID NO: 36385 - DNA, 15 bp, Homo sapiens
gaaaatatatcatac

SEQ ID NO: 36386 - DNA, 15 bp, Homo sapiens
tgaaaatatatcata

SEQ ID NO: 36387 - DNA, 15 bp, Homo sapiens
atgaaaatatatcat

SEQ ID NO: 36388 - DNA, 15 bp, Homo sapiens
aatgaaaatatatca

SEQ ID NO: 36389 - DNA, 15 bp, Homo sapiens
aaatgaaaatatatc

SEQ ID NO: 36390 - DNA, 15 bp, Homo sapiens
taaatgaaaatatat

SEQ ID NO: 36391 - DNA, 15 bp, Homo sapiens
ttaaatgaaaatata

SEQ ID NO: 36392 - DNA, 15 bp, Homo sapiens
attaaatgaaaatat

SEQ ID NO: 36393 - DNA, 15 bp, Homo sapiens
cattaaatgaaaata

SEQ ID NO: 36394 - DNA, 15 bp, Homo sapiens
ccattaaatgaaaat

SEQ ID NO: 36395 - DNA, 15 bp, Homo sapiens
tccattaaatgaaaa

SEQ ID NO: 36396 - DNA, 15 bp, Homo sapiens
ttccattaaatgaaa

SEQ ID NO: 36397 - DNA, 15 bp, Homo sapiens
tttccattaaatgaa

SEQ ID NO: 36398 - DNA, 15 bp, Homo sapiens
ctttccattaaatga

SEQ ID NO: 36399 - DNA, 15 bp, Homo sapiens
gctttccattaaatg

SEQ ID NO: 36400 - DNA, 15 bp, Homo sapiens
agctttccattaaat

SEQ ID NO: 36401 - DNA, 15 bp, Homo sapiens
aagctttccattaaa

SEQ ID NO: 36402 - DNA, 15 bp, Homo sapiens
gaagctttccattaa

SEQ ID NO: 36403 - DNA, 15 bp, Homo sapiens
agaagctttccatta

SEQ ID NO: 36404 - DNA, 15 bp, Homo sapiens
gagaagctttccatt

SEQ ID NO: 36405 - DNA, 15 bp, Homo sapiens
tgagaagctttccat

SEQ ID NO: 36406 - DNA, 15 bp, Homo sapiens
ttgagaagctttcca

SEQ ID NO: 36407 - DNA, 15 bp, Homo sapiens
tttgagaagctttcc

SEQ ID NO: 36408 - DNA, 15 bp, Homo sapiens
ctttgagaagctttc

SEQ ID NO: 36409 - DNA, 15 bp, Homo sapiens
actttgagaagcttt

SEQ ID NO: 36410 - DNA, 15 bp, Homo sapiens
tactttgagaagctt

SEQ ID NO: 36411 - DNA, 15 bp, Homo sapiens
atactttgagaagct

SEQ ID NO: 36412 - DNA, 15 bp, Homo sapiens
aatactttgagaagc

SEQ ID NO: 36413 - DNA, 15 bp, Homo sapiens
aaatactttgagaag

SEQ ID NO: 36414 - DNA, 15 bp, Homo sapiens
gaaatactttgagaa

SEQ ID NO: 36415 - DNA, 15 bp, Homo sapiens
tgaaatactttgaga

SEQ ID NO: 36416 - DNA, 15 bp, Homo sapiens
atgaaatactttgag

SEQ ID NO: 36417 - DNA, 15 bp, Homo sapiens
aatgaaatactttga

SEQ ID NO: 36418 - DNA, 15 bp, Homo sapiens
aaatgaaatactttg

SEQ ID NO: 36419 - DNA, 15 bp, Homo sapiens
aaaatgaaatacttt

SEQ ID NO: 36420 - DNA, 15 bp, Homo sapiens
gaaaatgaaatactt

SEQ ID NO: 36421 - DNA, 15 bp, Homo sapiens
agaaaatgaaatact

SEQ ID NO: 36422 - DNA, 15 bp, Homo sapiens
aagaaaatgaaatac

SEQ ID NO: 36423 - DNA, 15 bp, Homo sapiens
caagaaaatgaaata

SEQ ID NO: 36424 - DNA, 15 bp, Homo sapiens
ccaagaaaatgaaat

SEQ ID NO: 36425 - DNA, 15 bp, Homo sapiens
accaagaaaatgaaa

SEQ ID NO: 36426 - DNA, 15 bp, Homo sapiens
caccaagaaaatgaa

SEQ ID NO: 36427 - DNA, 15 bp, Homo sapiens
gcaccaagaaaatga

SEQ ID NO: 36428 - DNA, 15 bp, Homo sapiens
ggcaccaagaaaatg

SEQ ID NO: 36429 - DNA, 15 bp, Homo sapiens
tggcaccaagaaaat

SEQ ID NO: 36430 - DNA, 15 bp, Homo sapiens
atggcaccaagaaaa

SEQ ID NO: 36431 - DNA, 15 bp, Homo sapiens
aatggcaccaagaaa

SEQ ID NO: 36432 - DNA, 15 bp, Homo sapiens
aaatggcaccaagaa

SEQ ID NO: 36433 - DNA, 15 bp, Homo sapiens
taaatggcaccaaga

SEQ ID NO: 36434 - DNA, 15 bp, Homo sapiens
ataaatggcaccaag

SEQ ID NO: 36435 - DNA, 15 bp, Homo sapiens
gataaatggcaccaa

SEQ ID NO: 36436 - DNA, 15 bp, Homo sapiens
cgataaatggcacca

SEQ ID NO: 36437 - DNA, 15 bp, Homo sapiens
acgataaatggcacc

SEQ ID NO: 36438 - DNA, 15 bp, Homo sapiens
aacgataaatggcac

SEQ ID NO: 36439 - DNA, 15 bp, Homo sapiens
aaacgataaatggca

SEQ ID NO: 36440 - DNA, 15 bp, Homo sapiens
aaaacgataaatggc

SEQ ID NO: 36441 - DNA, 15 bp, Homo sapiens
aaaaacgataaatgg

SEQ ID NO: 36442 - DNA, 15 bp, Homo sapiens
caaaaacgataaatg

SEQ ID NO: 36443 - DNA, 15 bp, Homo sapiens
tcaaaaacgataaat

SEQ ID NO: 36444 - DNA, 15 bp, Homo sapiens
ttcaaaaacgataaa

SEQ ID NO: 36445 - DNA, 15 bp, Homo sapiens
cttcaaaaacgataa

SEQ ID NO: 36446 - DNA, 15 bp, Homo sapiens
gcttcaaaaacgata

SEQ ID NO: 36447 - DNA, 15 bp, Homo sapiens
tgcttcaaaaacgat

SEQ ID NO: 36448 - DNA, 15 bp, Homo sapiens
ctgcttcaaaaacga

SEQ ID NO: 36449 - DNA, 15 bp, Homo sapiens
tctgcttcaaaaacg

SEQ ID NO: 36450 - DNA, 15 bp, Homo sapiens
ctctgcttcaaaaac

SEQ ID NO: 36451 - DNA, 15 bp, Homo sapiens
cctctgcttcaaaaa

SEQ ID NO: 36452 - DNA, 15 bp, Homo sapiens
ccctctgcttcaaaa

SEQ ID NO: 36453 - DNA, 15 bp, Homo sapiens
tccctctgcttcaaa

SEQ ID NO: 36454 - DNA, 15 bp, Homo sapiens
atccctctgcttcaa

SEQ ID NO: 36455 - DNA, 15 bp, Homo sapiens
tatccctctgcttca

SEQ ID NO: 36456 - DNA, 15 bp, Homo sapiens
gtatccctctgcttc

SEQ ID NO: 36457 - DNA, 15 bp, Homo sapiens
ggtatccctctgctt

SEQ ID NO: 36458 - DNA, 15 bp, Homo sapiens
tggtatccctctgct

SEQ ID NO: 36459 - DNA, 15 bp, Homo sapiens
atggtatccctctgc

SEQ ID NO: 36460 - DNA, 15 bp, Homo sapiens
catggtatccctctg

SEQ ID NO: 36461 - DNA, 15 bp, Homo sapiens
gcatggtatccctct

SEQ ID NO: 36462 - DNA, 15 bp, Homo sapiens
tgcatggtatccctc

SEQ ID NO: 36463 - DNA, 15 bp, Homo sapiens
ttgcatggtatccct

SEQ ID NO: 36464 - DNA, 15 bp, Homo sapiens
gttgcatggtatccc

SEQ ID NO: 36465 - DNA, 15 bp, Homo sapiens
tgttgcatggtatcc

SEQ ID NO: 36466 - DNA, 15 bp, Homo sapiens
atgttgcatggtatc

SEQ ID NO: 36467 - DNA, 15 bp, Homo sapiens
tatgttgcatggtat

SEQ ID NO: 36468 - DNA, 15 bp, Homo sapiens
ttatgttgcatggta

SEQ ID NO: 36469 - DNA, 15 bp, Homo sapiens
gttatgttgcatggt

SEQ ID NO: 36470 - DNA, 15 bp, Homo sapiens
ggttatgttgcatgg

SEQ ID NO: 36471 - DNA, 15 bp, Homo sapiens
aggttatgttgcatg

SEQ ID NO: 36472 - DNA, 15 bp, Homo sapiens
caggttatgttgcat

SEQ ID NO: 36473 - DNA, 15 bp, Homo sapiens
tcaggttatgttgca

SEQ ID NO: 36474 - DNA, 15 bp, Homo sapiens
atcaggttatgttgc

SEQ ID NO: 36475 - DNA, 15 bp, Homo sapiens
tatcaggttatgttg

SEQ ID NO: 36476 - DNA, 15 bp, Homo sapiens
ttatcaggttatgtt

SEQ ID NO: 36477 - DNA, 15 bp, Homo sapiens
tttatcaggttatgt

SEQ ID NO: 36478 - DNA, 15 bp, Homo sapiens
ctttatcaggttatg

SEQ ID NO: 36479 - DNA, 15 bp, Homo sapiens
gctttatcaggttat

SEQ ID NO: 36480 - DNA, 15 bp, Homo sapiens
agctttatcaggtta

SEQ ID NO: 36481 - DNA, 15 bp, Homo sapiens
gagctttatcaggtt

SEQ ID NO: 36482 - DNA, 15 bp, Homo sapiens
ggagctttatcaggt

SEQ ID NO: 36483 - DNA, 15 bp, Homo sapiens
tggagctttatcagg

SEQ ID NO: 36484 - DNA, 15 bp, Homo sapiens
ctggagctttatcag

SEQ ID NO: 36485 - DNA, 15 bp, Homo sapiens
gctggagctttatca

SEQ ID NO: 36486 - DNA, 15 bp, Homo sapiens
tgctggagctttatc

SEQ ID NO: 36487 - DNA, 15 bp, Homo sapiens
ctgctggagctttat

SEQ ID NO: 36488 - DNA, 15 bp, Homo sapiens
cctgctggagcttta

SEQ ID NO: 36489 - DNA, 15 bp, Homo sapiens
tcctgctggagcttt

SEQ ID NO: 36490 - DNA, 15 bp, Homo sapiens
ttcctgctggagctt

SEQ ID NO: 36491 - DNA, 15 bp, Homo sapiens
tttcctgctggagct

SEQ ID NO: 36492 - DNA, 15 bp, Homo sapiens
atttcctgctggagc

SEQ ID NO: 36493 - DNA, 15 bp, Homo sapiens
catttcctgctggag

SEQ ID NO: 36494 - DNA, 15 bp, Homo sapiens
ccatttcctgctgga

SEQ ID NO: 36495 - DNA, 15 bp, Homo sapiens
gccatttcctgctgg

SEQ ID NO: 36496 - DNA, 15 bp, Homo sapiens
agccatttcctgctg

SEQ ID NO: 36497 - DNA, 15 bp, Homo sapiens
cagccatttcctgct

SEQ ID NO: 36498 - DNA, 15 bp, Homo sapiens
tcagccatttcctgc

SEQ ID NO: 36499 - DNA, 15 bp, Homo sapiens
ttcagccatttcctg

SEQ ID NO: 36500 - DNA, 15 bp, Homo sapiens
gttcagccatttcct

SEQ ID NO: 36501 - DNA, 15 bp, Homo sapiens
agttcagccatttcc

SEQ ID NO: 36502 - DNA, 15 bp, Homo sapiens
tagttcagccatttc

SEQ ID NO: 36503 - DNA, 15 bp, Homo sapiens
ctagttcagccattt

SEQ ID NO: 36504 - DNA, 15 bp, Homo sapiens
tctagttcagccatt

SEQ ID NO: 36505 - DNA, 15 bp, Homo sapiens
ttctagttcagccat

SEQ ID NO: 36506 - DNA, 15 bp, Homo sapiens
cttctagttcagcca

SEQ ID NO: 36507 - DNA, 15 bp, Homo sapiens
gcttctagttcagcc

SEQ ID NO: 36508 - DNA, 15 bp, Homo sapiens
agcttctagttcagc

SEQ ID NO: 36509 - DNA, 15 bp, Homo sapiens
cagcttctagttcag

SEQ ID NO: 36510 - DNA, 15 bp, Homo sapiens
acagcttctagttca

SEQ ID NO: 36511 - DNA, 15 bp, Homo sapiens
cacagcttctagttc

SEQ ID NO: 36512 - DNA, 15 bp, Homo sapiens
acacagcttctagtt

SEQ ID NO: 36513 - DNA, 15 bp, Homo sapiens
aacacagcttctagt

SEQ ID NO: 36514 - DNA, 15 bp, Homo sapiens
taacacagcttctag

SEQ ID NO: 36515 - DNA, 15 bp, Homo sapiens
ctaacacagcttcta

SEQ ID NO: 36516 - DNA, 15 bp, Homo sapiens
tctaacacagcttct

SEQ ID NO: 36517 - DNA, 15 bp, Homo sapiens
ttctaacacagcttc

SEQ ID NO: 36518 - DNA, 15 bp, Homo sapiens
gttctaacacagctt

SEQ ID NO: 36519 - DNA, 15 bp, Homo sapiens
tgttctaacacagct

SEQ ID NO: 36520 - DNA, 15 bp, Homo sapiens
ctgttctaacacagc

SEQ ID NO: 36521 - DNA, 15 bp, Homo sapiens
gctgttctaacacag

SEQ ID NO: 36522 - DNA, 15 bp, Homo sapiens
tgctgttctaacaca

SEQ ID NO: 36523 - DNA, 15 bp, Homo sapiens
atgctgttctaacac

SEQ ID NO: 36524 - DNA, 15 bp, Homo sapiens
catgctgttctaaca

SEQ ID NO: 36525 - DNA, 15 bp, Homo sapiens
ccatgctgttctaac

SEQ ID NO: 36526 - DNA, 15 bp, Homo sapiens
cccatgctgttctaa

SEQ ID NO: 36527 - DNA, 15 bp, Homo sapiens
tcccatgctgttcta

SEQ ID NO: 36528 - DNA, 15 bp, Homo sapiens
ctcccatgctgttct

SEQ ID NO: 36529 - DNA, 15 bp, Homo sapiens
gctcccatgctgttc

SEQ ID NO: 36530 - DNA, 15 bp, Homo sapiens
ggctcccatgctgtt

SEQ ID NO: 36531 - DNA, 15 bp, Homo sapiens
tggctcccatgctgt

SEQ ID NO: 36532 - DNA, 15 bp, Homo sapiens
ctggctcccatgctg

SEQ ID NO: 36533 - DNA, 15 bp, Homo sapiens
gctggctcccatgct

SEQ ID NO: 36534 - DNA, 15 bp, Homo sapiens
ggctggctcccatgc

SEQ ID NO: 36535 - DNA, 15 bp, Homo sapiens
aggctggctcccatg

SEQ ID NO: 36536 - DNA, 15 bp, Homo sapiens
aaggctggctcccat

SEQ ID NO: 36537 - DNA, 15 bp, Homo sapiens
gaaggctggctccca

SEQ ID NO: 36538 - DNA, 15 bp, Homo sapiens
agaaggctggctccc

SEQ ID NO: 36539 - DNA, 15 bp, Homo sapiens
tagaaggctggctcc

SEQ ID NO: 36540 - DNA, 15 bp, Homo sapiens
ttagaaggctggctc

SEQ ID NO: 36541 - DNA, 15 bp, Homo sapiens
gttagaaggctggct

SEQ ID NO: 36542 - DNA, 15 bp, Homo sapiens
tgttagaaggctggc

SEQ ID NO: 36543 - DNA, 15 bp, Homo sapiens
ctgttagaaggctgg

SEQ ID NO: 36544 - DNA, 15 bp, Homo sapiens
gctgttagaaggctg

SEQ ID NO: 36545 - DNA, 15 bp, Homo sapiens
agctgttagaaggct

SEQ ID NO: 36546 - DNA, 15 bp, Homo sapiens
tagctgttagaaggc

SEQ ID NO: 36547 - DNA, 15 bp, Homo sapiens
gtagctgttagaagg

SEQ ID NO: 36548 - DNA, 15 bp, Homo sapiens
ggtagctgttagaag

SEQ ID NO: 36549 - DNA, 15 bp, Homo sapiens
gggtagctgttagaa

SEQ ID NO: 36550 - DNA, 15 bp, Homo sapiens
agggtagctgttaga

SEQ ID NO: 36551 - DNA, 15 bp, Homo sapiens
aagggtagctgttag

SEQ ID NO: 36552 - DNA, 15 bp, Homo sapiens
gaagggtagctgtta

SEQ ID NO: 36553 - DNA, 15 bp, Homo sapiens
ggaagggtagctgtt

SEQ ID NO: 36554 - DNA, 15 bp, Homo sapiens
tggaagggtagctgt

SEQ ID NO: 36555 - DNA, 15 bp, Homo sapiens
atggaagggtagctg

SEQ ID NO: 36556 - DNA, 15 bp, Homo sapiens
gatggaagggtagct

SEQ ID NO: 36557 - DNA, 15 bp, Homo sapiens
tgatggaagggtagc

SEQ ID NO: 36558 - DNA, 15 bp, Homo sapiens
atgatggaagggtag

SEQ ID NO: 36559 - DNA, 15 bp, Homo sapiens
tatgatggaagggta

SEQ ID NO: 36560 - DNA, 15 bp, Homo sapiens
ttatgatggaagggt

SEQ ID NO: 36561 - DNA, 15 bp, Homo sapiens
cttatgatggaaggg

SEQ ID NO: 36562 - DNA, 15 bp, Homo sapiens
acttatgatggaagg

SEQ ID NO: 36563 - DNA, 15 bp, Homo sapiens
cacttatgatggaag

SEQ ID NO: 36564 - DNA, 15 bp, Homo sapiens
tcacttatgatggaa

SEQ ID NO: 36565 - DNA, 15 bp, Homo sapiens
gtcacttatgatgga

SEQ ID NO: 36566 - DNA, 15 bp, Homo sapiens
agtcacttatgatgg

SEQ ID NO: 36567 - DNA, 15 bp, Homo sapiens
gagtcacttatgatg

SEQ ID NO: 36568 - DNA, 15 bp, Homo sapiens
agagtcacttatgat

SEQ ID NO: 36569 - DNA, 15 bp, Homo sapiens
aagagtcacttatga

SEQ ID NO: 36570 - DNA, 15 bp, Homo sapiens
gaagagtcacttatg

SEQ ID NO: 36571 - DNA, 15 bp, Homo sapiens
agaagagtcacttat

SEQ ID NO: 36572 - DNA, 15 bp, Homo sapiens
cagaagagtcactta

SEQ ID NO: 36573 - DNA, 15 bp, Homo sapiens
gcagaagagtcactt

SEQ ID NO: 36574 - DNA, 15 bp, Homo sapiens
ggcagaagagtcact

SEQ ID NO: 36575 - DNA, 15 bp, Homo sapiens
gggcagaagagtcac

SEQ ID NO: 36576 - DNA, 15 bp, Homo sapiens
agggcagaagagtca

SEQ ID NO: 36577 - DNA, 15 bp, Homo sapiens
aagggcagaagagtc

SEQ ID NO: 36578 - DNA, 15 bp, Homo sapiens
caagggcagaagagt

SEQ ID NO: 36579 - DNA, 15 bp, Homo sapiens
tcaagggcagaagag

SEQ ID NO: 36580 - DNA, 15 bp, Homo sapiens
ctcaagggcagaaga

SEQ ID NO: 36581 - DNA, 15 bp, Homo sapiens
cctcaagggcagaag

SEQ ID NO: 36582 - DNA, 15 bp, Homo sapiens
tcctcaagggcagaa

SEQ ID NO: 36583 - DNA, 15 bp, Homo sapiens
gtcctcaagggcaga

SEQ ID NO: 36584 - DNA, 15 bp, Homo sapiens
ggtcctcaagggcag

SEQ ID NO: 36585 - DNA, 15 bp, Homo sapiens
aggtcctcaagggca

SEQ ID NO: 36586 - DNA, 15 bp, Homo sapiens
caggtcctcaagggc

SEQ ID NO: 36587 - DNA, 15 bp, Homo sapiens
gcaggtcctcaaggg

SEQ ID NO: 36588 - DNA, 15 bp, Homo sapiens
cgcaggtcctcaagg

SEQ ID NO: 36589 - DNA, 15 bp, Homo sapiens
tcgcaggtcctcaag

SEQ ID NO: 36590 - DNA, 15 bp, Homo sapiens
ttcgcaggtcctcaa

SEQ ID NO: 36591 - DNA, 15 bp, Homo sapiens
tttcgcaggtcctca

SEQ ID NO: 36592 - DNA, 15 bp, Homo sapiens
atttcgcaggtcctc

SEQ ID NO: 36593 - DNA, 15 bp, Homo sapiens
gatttcgcaggtcct

SEQ ID NO: 36594 - DNA, 15 bp, Homo sapiens
ggatttcgcaggtcc

SEQ ID NO: 36595 - DNA, 15 bp, Homo sapiens
tggatttcgcaggtc

SEQ ID NO: 36596 - DNA, 15 bp, Homo sapiens
ctggatttcgcaggt

SEQ ID NO: 36597 - DNA, 15 bp, Homo sapiens
tctggatttcgcagg

SEQ ID NO: 36598 - DNA, 15 bp, Homo sapiens
ttctggatttcgcag

SEQ ID NO: 36599 - DNA, 15 bp, Homo sapiens
gttctggatttcgca

SEQ ID NO: 36600 - DNA, 15 bp, Homo sapiens
tgttctggatttcgc

SEQ ID NO: 36601 - DNA, 15 bp, Homo sapiens
ttgttctggatttcg

SEQ ID NO: 36602 - DNA, 15 bp, Homo sapiens
tttgttctggatttc

SEQ ID NO: 36603 - DNA, 15 bp, Homo sapiens
ctttgttctggattt

SEQ ID NO: 36604 - DNA, 15 bp, Homo sapiens
gctttgttctggatt

SEQ ID NO: 36605 - DNA, 15 bp, Homo sapiens
tgctttgttctggat

SEQ ID NO: 36606 - DNA, 15 bp, Homo sapiens
gtgctttgttctgga

SEQ ID NO: 36607 - DNA, 15 bp, Homo sapiens
tgtgctttgttctgg

SEQ ID NO: 36608 - DNA, 15 bp, Homo sapiens
atgtgctttgttctg

SEQ ID NO: 36609 - DNA, 15 bp, Homo sapiens
gatgtgctttgttct

SEQ ID NO: 36610 - DNA, 15 bp, Homo sapiens
tgatgtgctttgttc

SEQ ID NO: 36611 - DNA, 15 bp, Homo sapiens
ctgatgtgctttgtt

SEQ ID NO: 36612 - DNA, 15 bp, Homo sapiens
tctgatgtgctttgt

SEQ ID NO: 36613 - DNA, 15 bp, Homo sapiens
ttctgatgtgctttg

SEQ ID NO: 36614 - DNA, 15 bp, Homo sapiens
tttctgatgtgcttt

SEQ ID NO: 36615 - DNA, 15 bp, Homo sapiens
ttttctgatgtgctt

SEQ ID NO: 36616 - DNA, 15 bp, Homo sapiens
tttttctgatgtgct

SEQ ID NO: 36617 - DNA, 15 bp, Homo sapiens
ctttttctgatgtgc

SEQ ID NO: 36618 - DNA, 15 bp, Homo sapiens
cctttttctgatgtg

SEQ ID NO: 36619 - DNA, 15 bp, Homo sapiens
acctttttctgatgt

SEQ ID NO: 36620 - DNA, 15 bp, Homo sapiens
cacctttttctgatg

SEQ ID NO: 36621 - DNA, 15 bp, Homo sapiens
acacctttttctgat

SEQ ID NO: 36622 - DNA, 15 bp, Homo sapiens
cacacctttttctga

SEQ ID NO: 36623 - DNA, 15 bp, Homo sapiens
acacacctttttctg

SEQ ID NO: 36624 - DNA, 15 bp, Homo sapiens
tacacacctttttct

SEQ ID NO: 36625 - DNA, 15 bp, Homo sapiens
atacacacctttttc

SEQ ID NO: 36626 - DNA, 15 bp, Homo sapiens
aatacacaccttttt

SEQ ID NO: 36627 - DNA, 15 bp, Homo sapiens
caatacacacctttt

SEQ ID NO: 36628 - DNA, 15 bp, Homo sapiens
acaatacacaccttt

SEQ ID NO: 36629 - DNA, 15 bp, Homo sapiens
aacaatacacacctt

SEQ ID NO: 36630 - DNA, 15 bp, Homo sapiens
caacaatacacacct

SEQ ID NO: 36631 - DNA, 15 bp, Homo sapiens
ccaacaatacacacc

SEQ ID NO: 36632 - DNA, 15 bp, Homo sapiens
gccaacaatacacac

SEQ ID NO: 36633 - DNA, 15 bp, Homo sapiens
ggccaacaatacaca

SEQ ID NO: 36634 - DNA, 15 bp, Homo sapiens
tggccaacaatacac

SEQ ID NO: 36635 - DNA, 15 bp, Homo sapiens
ttggccaacaataca

SEQ ID NO: 36636 - DNA, 15 bp, Homo sapiens
tttggccaacaatac

SEQ ID NO: 36637 - DNA, 15 bp, Homo sapiens
gtttggccaacaata

SEQ ID NO: 36638 - DNA, 15 bp, Homo sapiens
tgtttggccaacaat

SEQ ID NO: 36639 - DNA, 15 bp, Homo sapiens
gtgtttggccaacaa

SEQ ID NO: 36640 - DNA, 15 bp, Homo sapiens
agtgtttggccaaca

SEQ ID NO: 36641 - DNA, 15 bp, Homo sapiens
cagtgtttggccaac

SEQ ID NO: 36642 - DNA, 15 bp, Homo sapiens
tcagtgtttggccaa

SEQ ID NO: 36643 - DNA, 15 bp, Homo sapiens
atcagtgtttggcca

SEQ ID NO: 36644 - DNA, 15 bp, Homo sapiens
tatcagtgtttggcc

SEQ ID NO: 36645 - DNA, 15 bp, Homo sapiens
atatcagtgtttggc

SEQ ID NO: 36646 - DNA, 15 bp, Homo sapiens
gatatcagtgtttgg

SEQ ID NO: 36647 - DNA, 15 bp, Homo sapiens
agatatcagtgtttg

SEQ ID NO: 36648 - DNA, 15 bp, Homo sapiens
aagatatcagtgttt

SEQ ID NO: 36649 - DNA, 15 bp, Homo sapiens
taagatatcagtgtt

SEQ ID NO: 36650 - DNA, 15 bp, Homo sapiens
ttaagatatcagtgt

SEQ ID NO: 36651 - DNA, 15 bp, Homo sapiens
cttaagatatcagtg

SEQ ID NO: 36652 - DNA, 15 bp, Homo sapiens
gcttaagatatcagt

SEQ ID NO: 36653 - DNA, 15 bp, Homo sapiens
tgcttaagatatcag

SEQ ID NO: 36654 - DNA, 15 bp, Homo sapiens
ttgcttaagatatca

SEQ ID NO: 36655 - DNA, 15 bp, Homo sapiens
tttgcttaagatatc

SEQ ID NO: 36656 - DNA, 15 bp, Homo sapiens
ttttgcttaagatat

SEQ ID NO: 36657 - DNA, 15 bp, Homo sapiens
attttgcttaagata

SEQ ID NO: 36658 - DNA, 15 bp, Homo sapiens
aattttgcttaagat

SEQ ID NO: 36659 - DNA, 15 bp, Homo sapiens
gaattttgcttaaga

SEQ ID NO: 36660 - DNA, 15 bp, Homo sapiens
agaattttgcttaag

SEQ ID NO: 36661 - DNA, 15 bp, Homo sapiens
aagaattttgcttaa

SEQ ID NO: 36662 - DNA, 15 bp, Homo sapiens
aaagaattttgctta

SEQ ID NO: 36663 - DNA, 15 bp, Homo sapiens
gaaagaattttgctt

SEQ ID NO: 36664 - DNA, 15 bp, Homo sapiens
ggaaagaattttgct

SEQ ID NO: 36665 - DNA, 15 bp, Homo sapiens
aggaaagaattttgc

SEQ ID NO: 36666 - DNA, 15 bp, Homo sapiens
aaggaaagaattttg

SEQ ID NO: 36667 - DNA, 15 bp, Homo sapiens
gaaggaaagaatttt

SEQ ID NO: 36668 - DNA, 15 bp, Homo sapiens
ggaaggaaagaattt

SEQ ID NO: 36669 - DNA, 15 bp, Homo sapiens
gggaaggaaagaatt

SEQ ID NO: 36670 - DNA, 15 bp, Homo sapiens
ggggaaggaaagaat

SEQ ID NO: 36671 - DNA, 15 bp, Homo sapiens
aggggaaggaaagaa

SEQ ID NO: 36672 - DNA, 15 bp, Homo sapiens
aaggggaaggaaaga

SEQ ID NO: 36673 - DNA, 15 bp, Homo sapiens
aaaggggaaggaaag

SEQ ID NO: 36674 - DNA, 15 bp, Homo sapiens
taaaggggaaggaaa

SEQ ID NO: 36675 - DNA, 15 bp, Homo sapiens
ataaaggggaaggaa

SEQ ID NO: 36676 - DNA, 15 bp, Homo sapiens
gataaaggggaagga

SEQ ID NO: 36677 - DNA, 15 bp, Homo sapiens
agataaaggggaagg

SEQ ID NO: 36678 - DNA, 15 bp, Homo sapiens
gagataaaggggaag

SEQ ID NO: 36679 - DNA, 15 bp, Homo sapiens
ggagataaaggggaa

SEQ ID NO: 36680 - DNA, 15 bp, Homo sapiens
aggagataaagggga

SEQ ID NO: 36681 - DNA, 15 bp, Homo sapiens
aaggagataaagggg

SEQ ID NO: 36682 - DNA, 15 bp, Homo sapiens
gaaggagataaaggg

SEQ ID NO: 36683 - DNA, 15 bp, Homo sapiens
agaaggagataaagg

SEQ ID NO: 36684 - DNA, 15 bp, Homo sapiens
cagaaggagataaag

SEQ ID NO: 36685 - DNA, 15 bp, Homo sapiens
tcagaaggagataaa

SEQ ID NO: 36686 - DNA, 15 bp, Homo sapiens
ttcagaaggagataa

SEQ ID NO: 36687 - DNA, 15 bp, Homo sapiens
cttcagaaggagata

SEQ ID NO: 36688 - DNA, 15 bp, Homo sapiens
tcttcagaaggagat

SEQ ID NO: 36689 - DNA, 15 bp, Homo sapiens
ctcttcagaaggaga

SEQ ID NO: 36690 - DNA, 15 bp, Homo sapiens
actcttcagaaggag

SEQ ID NO: 36691 - DNA, 15 bp, Homo sapiens
tactcttcagaagga

SEQ ID NO: 36692 - DNA, 15 bp, Homo sapiens
ttactcttcagaagg

SEQ ID NO: 36693 - DNA, 15 bp, Homo sapiens
cttactcttcagaag

SEQ ID NO: 36694 - DNA, 15 bp, Homo sapiens
ccttactcttcagaa

SEQ ID NO: 36695 - DNA, 15 bp, Homo sapiens
tccttactcttcaga

SEQ ID NO: 36696 - DNA, 15 bp, Homo sapiens
gtccttactcttcag

SEQ ID NO: 36697 - DNA, 15 bp, Homo sapiens
ggtccttactcttca

SEQ ID NO: 36698 - DNA, 15 bp, Homo sapiens
aggtccttactcttc

SEQ ID NO: 36699 - DNA, 15 bp, Homo sapiens
taggtccttactctt

SEQ ID NO: 36700 - DNA, 15 bp, Homo sapiens
ctaggtccttactct

SEQ ID NO: 36701 - DNA, 15 bp, Homo sapiens
gctaggtccttactc

SEQ ID NO: 36702 - DNA, 15 bp, Homo sapiens
agctaggtccttact

SEQ ID NO: 36703 - DNA, 15 bp, Homo sapiens
gagctaggtccttac

SEQ ID NO: 36704 - DNA, 15 bp, Homo sapiens
ggagctaggtcctta

SEQ ID NO: 36705 - DNA, 15 bp, Homo sapiens
tggagctaggtcctt

SEQ ID NO: 36706 - DNA, 15 bp, Homo sapiens
ttggagctaggtcct

SEQ ID NO: 36707 - DNA, 15 bp, Homo sapiens
gttggagctaggtcc

SEQ ID NO: 36708 - DNA, 15 bp, Homo sapiens
tgttggagctaggtc

SEQ ID NO: 36709 - DNA, 15 bp, Homo sapiens
atgttggagctaggt

SEQ ID NO: 36710 - DNA, 15 bp, Homo sapiens
aatgttggagctagg

SEQ ID NO: 36711 - DNA, 15 bp, Homo sapiens
aaatgttggagctag

SEQ ID NO: 36712 - DNA, 15 bp, Homo sapiens
aaaatgttggagcta

SEQ ID NO: 36713 - DNA, 15 bp, Homo sapiens
taaaatgttggagct

SEQ ID NO: 36714 - DNA, 15 bp, Homo sapiens
ataaaatgttggagc

SEQ ID NO: 36715 - DNA, 15 bp, Homo sapiens
cataaaatgttggag

SEQ ID NO: 36716 - DNA, 15 bp, Homo sapiens
tcataaaatgttgga

SEQ ID NO: 36717 - DNA, 15 bp, Homo sapiens
atcataaaatgttgg

SEQ ID NO: 36718 - DNA, 15 bp, Homo sapiens
gatcataaaatgttg

SEQ ID NO: 36719 - DNA, 15 bp, Homo sapiens
ggatcataaaatgtt

SEQ ID NO: 36720 - DNA, 15 bp, Homo sapiens
aggatcataaaatgt

SEQ ID NO: 36721 - DNA, 15 bp, Homo sapiens
aaggatcataaaatg

SEQ ID NO: 36722 - DNA, 15 bp, Homo sapiens
caaggatcataaaat

SEQ ID NO: 36723 - DNA, 15 bp, Homo sapiens
gcaaggatcataaaa

SEQ ID NO: 36724 - DNA, 15 bp, Homo sapiens
agcaaggatcataaa

SEQ ID NO: 36725 - DNA, 15 bp, Homo sapiens
gagcaaggatcataa

SEQ ID NO: 36726 - DNA, 15 bp, Homo sapiens
tgagcaaggatcata

SEQ ID NO: 36727 - DNA, 15 bp, Homo sapiens
ctgagcaaggatcat

SEQ ID NO: 36728 - DNA, 15 bp, Homo sapiens
gctgagcaaggatca

SEQ ID NO: 36729 - DNA, 15 bp, Homo sapiens
tgctgagcaaggatc

SEQ ID NO: 36730 - DNA, 15 bp, Homo sapiens
gtgctgagcaaggat

SEQ ID NO: 36731 - DNA, 15 bp, Homo sapiens
tgtgctgagcaagga

SEQ ID NO: 36732 - DNA, 15 bp, Homo sapiens
atgtgctgagcaagg

SEQ ID NO: 36733 - DNA, 15 bp, Homo sapiens
catgtgctgagcaag

SEQ ID NO: 36734 - DNA, 15 bp, Homo sapiens
ccatgtgctgagcaa

SEQ ID NO: 36735 - DNA, 15 bp, Homo sapiens
cccatgtgctgagca

SEQ ID NO: 36736 - DNA, 15 bp, Homo sapiens
acccatgtgctgagc

SEQ ID NO: 36737 - DNA, 15 bp, Homo sapiens
tacccatgtgctgag

SEQ ID NO: 36738 - DNA, 15 bp, Homo sapiens
ttacccatgtgctga

SEQ ID NO: 36739 - DNA, 15 bp, Homo sapiens
attacccatgtgctg

SEQ ID NO: 36740 - DNA, 15 bp, Homo sapiens
aattacccatgtgct

SEQ ID NO: 36741 - DNA, 15 bp, Homo sapiens
taattacccatgtgc

SEQ ID NO: 36742 - DNA, 15 bp, Homo sapiens
ataattacccatgtg

SEQ ID NO: 36743 - DNA, 15 bp, Homo sapiens
cataattacccatgt

SEQ ID NO: 36744 - DNA, 15 bp, Homo sapiens
ccataattacccatg

SEQ ID NO: 36745 - DNA, 15 bp, Homo sapiens
tccataattacccat

SEQ ID NO: 36746 - DNA, 15 bp, Homo sapiens
ctccataattaccca

SEQ ID NO: 36747 - DNA, 15 bp, Homo sapiens
gctccataattaccc

SEQ ID NO: 36748 - DNA, 15 bp, Homo sapiens
ggctccataattacc

SEQ ID NO: 36749 - DNA, 15 bp, Homo sapiens
aggctccataattac

SEQ ID NO: 36750 - DNA, 15 bp, Homo sapiens
aaggctccataatta

SEQ ID NO: 36751 - DNA, 15 bp, Homo sapiens
caaggctccataatt

SEQ ID NO: 36752 - DNA, 15 bp, Homo sapiens
ccaaggctccataat

SEQ ID NO: 36753 - DNA, 15 bp, Homo sapiens
accaaggctccataa

SEQ ID NO: 36754 - DNA, 15 bp, Homo sapiens
aaccaaggctccata

SEQ ID NO: 36755 - DNA, 15 bp, Homo sapiens
gaaccaaggctccat

SEQ ID NO: 36756 - DNA, 15 bp, Homo sapiens
agaaccaaggctcca

SEQ ID NO: 36757 - DNA, 15 bp, Homo sapiens
aagaaccaaggctcc

SEQ ID NO: 36758 - DNA, 15 bp, Homo sapiens
caagaaccaaggctc

SEQ ID NO: 36759 - DNA, 15 bp, Homo sapiens
acaagaaccaaggct

SEQ ID NO: 36760 - DNA, 15 bp, Homo sapiens
gacaagaaccaaggc

SEQ ID NO: 36761 - DNA, 15 bp, Homo sapiens
ggacaagaaccaagg

SEQ ID NO: 36762 - DNA, 15 bp, Homo sapiens
gggacaagaaccaag

SEQ ID NO: 36763 - DNA, 15 bp, Homo sapiens
agggacaagaaccaa

SEQ ID NO: 36764 - DNA, 15 bp, Homo sapiens
cagggacaagaacca

SEQ ID NO: 36765 - DNA, 15 bp, Homo sapiens
gcagggacaagaacc

SEQ ID NO: 36766 - DNA, 15 bp, Homo sapiens
agcagggacaagaac

SEQ ID NO: 36767 - DNA, 15 bp, Homo sapiens
gagcagggacaagaa

SEQ ID NO: 36768 - DNA, 15 bp, Homo sapiens
tgagcagggacaaga

SEQ ID NO: 36769 - DNA, 15 bp, Homo sapiens
gtgagcagggacaag

SEQ ID NO: 36770 - DNA, 15 bp, Homo sapiens
tgtgagcagggacaa

SEQ ID NO: 36771 - DNA, 15 bp, Homo sapiens
ttgtgagcagggaca

SEQ ID NO: 36772 - DNA, 15 bp, Homo sapiens
gttgtgagcagggac

SEQ ID NO: 36773 - DNA, 15 bp, Homo sapiens
agttgtgagcaggga

SEQ ID NO: 36774 - DNA, 15 bp, Homo sapiens
tagttgtgagcaggg

SEQ ID NO: 36775 - DNA, 15 bp, Homo sapiens
ttagttgtgagcagg

SEQ ID NO: 36776 - DNA, 15 bp, Homo sapiens
attagttgtgagcag

SEQ ID NO: 36777 - DNA, 15 bp, Homo sapiens
tattagttgtgagca

SEQ ID NO: 36778 - DNA, 15 bp, Homo sapiens
atattagttgtgagc

SEQ ID NO: 36779 - DNA, 15 bp, Homo sapiens
tatattagttgtgag

SEQ ID NO: 36780 - DNA, 15 bp, Homo sapiens
gtatattagttgtga

SEQ ID NO: 36781 - DNA, 15 bp, Homo sapiens
ggtatattagttgtg

SEQ ID NO: 36782 - DNA, 15 bp, Homo sapiens
tggtatattagttgt

SEQ ID NO: 36783 - DNA, 15 bp, Homo sapiens
ctggtatattagttg

SEQ ID NO: 36784 - DNA, 15 bp, Homo sapiens
actggtatattagtt

SEQ ID NO: 36785 - DNA, 15 bp, Homo sapiens
gactggtatattagt

SEQ ID NO: 36786 - DNA, 15 bp, Homo sapiens
tgactggtatattag

SEQ ID NO: 36787 - DNA, 15 bp, Homo sapiens
ctgactggtatatta

SEQ ID NO: 36788 - DNA, 15 bp, Homo sapiens
tctgactggtatatt

SEQ ID NO: 36789 - DNA, 15 bp, Homo sapiens
ctctgactggtatat

SEQ ID NO: 36790 - DNA, 15 bp, Homo sapiens
cctctgactggtata

SEQ ID NO: 36791 - DNA, 15 bp, Homo sapiens
ccctctgactggtat

SEQ ID NO: 36792 - DNA, 15 bp, Homo sapiens
tccctctgactggta

SEQ ID NO: 36793 - DNA, 15 bp, Homo sapiens
gtccctctgactggt

SEQ ID NO: 36794 - DNA, 15 bp, Homo sapiens
ggtccctctgactgg

SEQ ID NO: 36795 - DNA, 15 bp, Homo sapiens
gggtccctctgactg

SEQ ID NO: 36796 - DNA, 15 bp, Homo sapiens
tgggtccctctgact

SEQ ID NO: 36797 - DNA, 15 bp, Homo sapiens
ttgggtccctctgac

SEQ ID NO: 36798 - DNA, 15 bp, Homo sapiens
cttgggtccctctga

SEQ ID NO: 36799 - DNA, 15 bp, Homo sapiens
ccttgggtccctctg

SEQ ID NO: 36800 - DNA, 15 bp, Homo sapiens
gccttgggtccctct

SEQ ID NO: 36801 - DNA, 15 bp, Homo sapiens
tgccttgggtccctc

SEQ ID NO: 36802 - DNA, 15 bp, Homo sapiens
ctgccttgggtccct

SEQ ID NO: 36803 - DNA, 15 bp, Homo sapiens
actgccttgggtccc

SEQ ID NO: 36804 - DNA, 15 bp, Homo sapiens
gactgccttgggtcc

SEQ ID NO: 36805 - DNA, 15 bp, Homo sapiens
tgactgccttgggtc

SEQ ID NO: 36806 - DNA, 15 bp, Homo sapiens
atgactgccttgggt

SEQ ID NO: 36807 - DNA, 15 bp, Homo sapiens
aatgactgccttggg

SEQ ID NO: 36808 - DNA, 15 bp, Homo sapiens
gaatgactgccttgg

SEQ ID NO: 36809 - DNA, 15 bp, Homo sapiens
tgaatgactgccttg

SEQ ID NO: 36810 - DNA, 15 bp, Homo sapiens
atgaatgactgcctt

SEQ ID NO: 36811 - DNA, 15 bp, Homo sapiens
catgaatgactgcct

SEQ ID NO: 36812 - DNA, 15 bp, Homo sapiens
acatgaatgactgcc

SEQ ID NO: 36813 - DNA, 15 bp, Homo sapiens
aacatgaatgactgc

SEQ ID NO: 36814 - DNA, 15 bp, Homo sapiens
caacatgaatgactg

SEQ ID NO: 36815 - DNA, 15 bp, Homo sapiens
acaacatgaatgact

SEQ ID NO: 36816 - DNA, 15 bp, Homo sapiens
gacaacatgaatgac

SEQ ID NO: 36817 - DNA, 15 bp, Homo sapiens
tgacaacatgaatga

SEQ ID NO: 36818 - DNA, 15 bp, Homo sapiens
atgacaacatgaatg

SEQ ID NO: 36819 - DNA, 15 bp, Homo sapiens
gatgacaacatgaat

SEQ ID NO: 36820 - DNA, 15 bp, Homo sapiens
agatgacaacatgaa

SEQ ID NO: 36821 - DNA, 15 bp, Homo sapiens
cagatgacaacatga

SEQ ID NO: 36822 - DNA, 15 bp, Homo sapiens
tcagatgacaacatg

SEQ ID NO: 36823 - DNA, 15 bp, Homo sapiens
ctcagatgacaacat

SEQ ID NO: 36824 - DNA, 15 bp, Homo sapiens
actcagatgacaaca

SEQ ID NO: 36825 - DNA, 15 bp, Homo sapiens
tactcagatgacaac

SEQ ID NO: 36826 - DNA, 15 bp, Homo sapiens
gtactcagatgacaa

SEQ ID NO: 36827 - DNA, 15 bp, Homo sapiens
ggtactcagatgaca

SEQ ID NO: 36828 - DNA, 15 bp, Homo sapiens
aggtactcagatgac

SEQ ID NO: 36829 - DNA, 15 bp, Homo sapiens
taggtactcagatga

SEQ ID NO: 36830 - DNA, 15 bp, Homo sapiens
gtaggtactcagatg

SEQ ID NO: 36831 - DNA, 15 bp, Homo sapiens
tgtaggtactcagat

SEQ ID NO: 36832 - DNA, 15 bp, Homo sapiens
ttgtaggtactcaga

SEQ ID NO: 36833 - DNA, 15 bp, Homo sapiens
gttgtaggtactcag

SEQ ID NO: 36834 - DNA, 15 bp, Homo sapiens
tgttgtaggtactca

SEQ ID NO: 36835 - DNA, 15 bp, Homo sapiens
ttgttgtaggtactc

SEQ ID NO: 36836 - DNA, 15 bp, Homo sapiens
cttgttgtaggtact

SEQ ID NO: 36837 - DNA, 15 bp, Homo sapiens
acttgttgtaggtac

SEQ ID NO: 36838 - DNA, 15 bp, Homo sapiens
tacttgttgtaggta

SEQ ID NO: 36839 - DNA, 15 bp, Homo sapiens
ctacttgttgtaggt

SEQ ID NO: 36840 - DNA, 15 bp, Homo sapiens
tctacttgttgtagg

SEQ ID NO: 36841 - DNA, 15 bp, Homo sapiens
atctacttgttgtag

SEQ ID NO: 36842 - DNA, 15 bp, Homo sapiens
catctacttgttgta

SEQ ID NO: 36843 - DNA, 15 bp, Homo sapiens
gcatctacttgttgt

SEQ ID NO: 36844 - DNA, 15 bp, Homo sapiens
agcatctacttgttg

SEQ ID NO: 36845 - DNA, 15 bp, Homo sapiens
tagcatctacttgtt

SEQ ID NO: 36846 - DNA, 15 bp, Homo sapiens
atagcatctacttgt

SEQ ID NO: 36847 - DNA, 15 bp, Homo sapiens
catagcatctacttg

SEQ ID NO: 36848 - DNA, 15 bp, Homo sapiens
ccatagcatctactt

SEQ ID NO: 36849 - DNA, 15 bp, Homo sapiens
cccatagcatctact

SEQ ID NO: 36850 - DNA, 15 bp, Homo sapiens
ccccatagcatctac

SEQ ID NO: 36851 - DNA, 15 bp, Homo sapiens
tccccatagcatcta

SEQ ID NO: 36852 - DNA, 15 bp, Homo sapiens
ctccccatagcatct

SEQ ID NO: 36853 - DNA, 15 bp, Homo sapiens
gctccccatagcatc

SEQ ID NO: 36854 - DNA, 15 bp, Homo sapiens
ggctccccatagcat

SEQ ID NO: 36855 - DNA, 15 bp, Homo sapiens
gggctccccatagca

SEQ ID NO: 36856 - DNA, 15 bp, Homo sapiens
tgggctccccatagc

SEQ ID NO: 36857 - DNA, 15 bp, Homo sapiens
atgggctccccatag

SEQ ID NO: 36858 - DNA, 15 bp, Homo sapiens
catgggctccccata

SEQ ID NO: 36859 - DNA, 15 bp, Homo sapiens
ccatgggctccccat

SEQ ID NO: 36860 - DNA, 15 bp, Homo sapiens
tccatgggctcccca

SEQ ID NO: 36861 - DNA, 15 bp, Homo sapiens
ttccatgggctcccc

SEQ ID NO: 36862 - DNA, 15 bp, Homo sapiens
cttccatgggctccc

SEQ ID NO: 36863 - DNA, 15 bp, Homo sapiens
tcttccatgggctcc

SEQ ID NO: 36864 - DNA, 15 bp, Homo sapiens
atcttccatgggctc

SEQ ID NO: 36865 - DNA, 15 bp, Homo sapiens
tatcttccatgggct

SEQ ID NO: 36866 - DNA, 15 bp, Homo sapiens
gtatcttccatgggc

SEQ ID NO: 36867 - DNA, 15 bp, Homo sapiens
tgtatcttccatggg

SEQ ID NO: 36868 - DNA, 15 bp, Homo sapiens
atgtatcttccatgg

SEQ ID NO: 36869 - DNA, 15 bp, Homo sapiens
catgtatcttccatg

SEQ ID NO: 36870 - DNA, 15 bp, Homo sapiens
ccatgtatcttccat

SEQ ID NO: 36871 - DNA, 15 bp, Homo sapiens
accatgtatcttcca

SEQ ID NO: 36872 - DNA, 15 bp, Homo sapiens
taccatgtatcttcc

SEQ ID NO: 36873 - DNA, 15 bp, Homo sapiens
ataccatgtatcttc

SEQ ID NO: 36874 - DNA, 15 bp, Homo sapiens
tataccatgtatctt

SEQ ID NO: 36875 - DNA, 15 bp, Homo sapiens
gtataccatgtatct

SEQ ID NO: 36876 - DNA, 15 bp, Homo sapiens
tgtataccatgtatc

SEQ ID NO: 36877 - DNA, 15 bp, Homo sapiens
ttgtataccatgtat

SEQ ID NO: 36878 - DNA, 15 bp, Homo sapiens
gttgtataccatgta

SEQ ID NO: 36879 - DNA, 15 bp, Homo sapiens
tgttgtataccatgt

SEQ ID NO: 36880 - DNA, 15 bp, Homo sapiens
atgttgtataccatg

SEQ ID NO: 36881 - DNA, 15 bp, Homo sapiens
tatgttgtataccat

SEQ ID NO: 36882 - DNA, 15 bp, Homo sapiens
ctatgttgtatacca

SEQ ID NO: 36883 - DNA, 15 bp, Homo sapiens
gctatgttgtatacc

SEQ ID NO: 36884 - DNA, 15 bp, Homo sapiens
agctatgttgtatac

SEQ ID NO: 36885 - DNA, 15 bp, Homo sapiens
gagctatgttgtata

SEQ ID NO: 36886 - DNA, 15 bp, Homo sapiens
agagctatgttgtat

SEQ ID NO: 36887 - DNA, 15 bp, Homo sapiens
aagagctatgttgta

SEQ ID NO: 36888 - DNA, 15 bp, Homo sapiens
caagagctatgttgt

SEQ ID NO: 36889 - DNA, 15 bp, Homo sapiens
gcaagagctatgttg

SEQ ID NO: 36890 - DNA, 15 bp, Homo sapiens
agcaagagctatgtt

SEQ ID NO: 36891 - DNA, 15 bp, Homo sapiens
gagcaagagctatgt

SEQ ID NO: 36892 - DNA, 15 bp, Homo sapiens
agagcaagagctatg

SEQ ID NO: 36893 - DNA, 15 bp, Homo sapiens
tagagcaagagctat

SEQ ID NO: 36894 - DNA, 15 bp, Homo sapiens
atagagcaagagcta

SEQ ID NO: 36895 - DNA, 15 bp, Homo sapiens
aatagagcaagagct

SEQ ID NO: 36896 - DNA, 15 bp, Homo sapiens
caatagagcaagagc

SEQ ID NO: 36897 - DNA, 15 bp, Homo sapiens
ccaatagagcaagag

SEQ ID NO: 36898 - DNA, 15 bp, Homo sapiens
tccaatagagcaaga

SEQ ID NO: 36899 - DNA, 15 bp, Homo sapiens
ttccaatagagcaag

SEQ ID NO: 36900 - DNA, 15 bp, Homo sapiens
cttccaatagagcaa

SEQ ID NO: 36901 - DNA, 15 bp, Homo sapiens
gcttccaatagagca

SEQ ID NO: 36902 - DNA, 15 bp, Homo sapiens
agcttccaatagagc

SEQ ID NO: 36903 - DNA, 15 bp, Homo sapiens
tagcttccaatagag

SEQ ID NO: 36904 - DNA, 15 bp, Homo sapiens
ttagcttccaataga

SEQ ID NO: 36905 - DNA, 15 bp, Homo sapiens
cttagcttccaatag

SEQ ID NO: 36906 - DNA, 15 bp, Homo sapiens
acttagcttccaata

SEQ ID NO: 36907 - DNA, 15 bp, Homo sapiens
cacttagcttccaat

SEQ ID NO: 36908 - DNA, 15 bp, Homo sapiens
ccacttagcttccaa

SEQ ID NO: 36909 - DNA, 15 bp, Homo sapiens
tccacttagcttcca

SEQ ID NO: 36910 - DNA, 15 bp, Homo sapiens
ttccacttagcttcc

SEQ ID NO: 36911 - DNA, 15 bp, Homo sapiens
attccacttagcttc

SEQ ID NO: 36912 - DNA, 15 bp, Homo sapiens
cattccacttagctt

SEQ ID NO: 36913 - DNA, 15 bp, Homo sapiens
ccattccacttagct

SEQ ID NO: 36914 - DNA, 15 bp, Homo sapiens
cccattccacttagc

SEQ ID NO: 36915 - DNA, 15 bp, Homo sapiens
tcccattccacttag

SEQ ID NO: 36916 - DNA, 15 bp, Homo sapiens
ctcccattccactta

SEQ ID NO: 36917 - DNA, 15 bp, Homo sapiens
tctcccattccactt

SEQ ID NO: 36918 - DNA, 15 bp, Homo sapiens
ttctcccattccact

SEQ ID NO: 36919 - DNA, 15 bp, Homo sapiens
tttctcccattccac

SEQ ID NO: 36920 - DNA, 15 bp, Homo sapiens
atttctcccattcca

SEQ ID NO: 36921 - DNA, 15 bp, Homo sapiens
aatttctcccattcc

SEQ ID NO: 36922 - DNA, 15 bp, Homo sapiens
caatttctcccattc

SEQ ID NO: 36923 - DNA, 15 bp, Homo sapiens
ccaatttctcccatt

SEQ ID NO: 36924 - DNA, 15 bp, Homo sapiens
accaatttctcccat

SEQ ID NO: 36925 - DNA, 15 bp, Homo sapiens
caccaatttctccca

SEQ ID NO: 36926 - DNA, 15 bp, Homo sapiens
tcaccaatttctccc

SEQ ID NO: 36927 - DNA, 15 bp, Homo sapiens
gtcaccaatttctcc

SEQ ID NO: 36928 - DNA, 15 bp, Homo sapiens
tgtcaccaatttctc

SEQ ID NO: 36929 - DNA, 15 bp, Homo sapiens
ctgtcaccaatttct

SEQ ID NO: 36930 - DNA, 15 bp, Homo sapiens
cctgtcaccaatttc

SEQ ID NO: 36931 - DNA, 15 bp, Homo sapiens
gcctgtcaccaattt

SEQ ID NO: 36932 - DNA, 15 bp, Homo sapiens
tgcctgtcaccaatt

SEQ ID NO: 36933 - DNA, 15 bp, Homo sapiens
ttgcctgtcaccaat

SEQ ID NO: 36934 - DNA, 15 bp, Homo sapiens
gttgcctgtcaccaa

SEQ ID NO: 36935 - DNA, 15 bp, Homo sapiens
ggttgcctgtcacca

SEQ ID NO: 36936 - DNA, 15 bp, Homo sapiens
gggttgcctgtcacc

SEQ ID NO: 36937 - DNA, 15 bp, Homo sapiens
ggggttgcctgtcac

SEQ ID NO: 36938 - DNA, 15 bp, Homo sapiens
tggggttgcctgtca

SEQ ID NO: 36939 - DNA, 15 bp, Homo sapiens
atggggttgcctgtc

SEQ ID NO: 36940 - DNA, 15 bp, Homo sapiens
tatggggttgcctgt

SEQ ID NO: 36941 - DNA, 15 bp, Homo sapiens
ttatggggttgcctg

SEQ ID NO: 36942 - DNA, 15 bp, Homo sapiens
attatggggttgcct

SEQ ID NO: 36943 - DNA, 15 bp, Homo sapiens
aattatggggttgcc

SEQ ID NO: 36944 - DNA, 15 bp, Homo sapiens
aaattatggggttgc

SEQ ID NO: 36945 - DNA, 15 bp, Homo sapiens
gaaattatggggttg

SEQ ID NO: 36946 - DNA, 15 bp, Homo sapiens
tgaaattatggggtt

SEQ ID NO: 36947 - DNA, 15 bp, Homo sapiens
ctgaaattatggggt

SEQ ID NO: 36948 - DNA, 15 bp, Homo sapiens
tctgaaattatgggg

SEQ ID NO: 36949 - DNA, 15 bp, Homo sapiens
ttctgaaattatggg

SEQ ID NO: 36950 - DNA, 15 bp, Homo sapiens
tttctgaaattatgg

SEQ ID NO: 36951 - DNA, 15 bp, Homo sapiens
ctttctgaaattatg

SEQ ID NO: 36952 - DNA, 15 bp, Homo sapiens
gctttctgaaattat

SEQ ID NO: 36953 - DNA, 15 bp, Homo sapiens
agctttctgaaatta

SEQ ID NO: 36954 - DNA, 15 bp, Homo sapiens
tagctttctgaaatt

SEQ ID NO: 36955 - DNA, 15 bp, Homo sapiens
atagctttctgaaat

SEQ ID NO: 36956 - DNA, 15 bp, Homo sapiens
catagctttctgaaa

SEQ ID NO: 36957 - DNA, 15 bp, Homo sapiens
tcatagctttctgaa

SEQ ID NO: 36958 - DNA, 15 bp, Homo sapiens
ttcatagctttctga

SEQ ID NO: 36959 - DNA, 15 bp, Homo sapiens
tttcatagctttctg

SEQ ID NO: 36960 - DNA, 15 bp, Homo sapiens
ttttcatagctttct

SEQ ID NO: 36961 - DNA, 15 bp, Homo sapiens
tttttcatagctttc

SEQ ID NO: 36962 - DNA, 15 bp, Homo sapiens
ctttttcatagcttt

SEQ ID NO: 36963 - DNA, 15 bp, Homo sapiens
actttttcatagctt

SEQ ID NO: 36964 - DNA, 15 bp, Homo sapiens
tactttttcatagct

SEQ ID NO: 36965 - DNA, 15 bp, Homo sapiens
gtactttttcatagc

SEQ ID NO: 36966 - DNA, 15 bp, Homo sapiens
agtactttttcatag

SEQ ID NO: 36967 - DNA, 15 bp, Homo sapiens
gagtactttttcata

SEQ ID NO: 36968 - DNA, 15 bp, Homo sapiens
tgagtactttttcat

SEQ ID NO: 36969 - DNA, 15 bp, Homo sapiens
ctgagtactttttca

SEQ ID NO: 36970 - DNA, 15 bp, Homo sapiens
tctgagtactttttc

SEQ ID NO: 36971 - DNA, 15 bp, Homo sapiens
gtctgagtacttttt

SEQ ID NO: 36972 - DNA, 15 bp, Homo sapiens
tgtctgagtactttt

SEQ ID NO: 36973 - DNA, 15 bp, Homo sapiens
atgtctgagtacttt

SEQ ID NO: 36974 - DNA, 15 bp, Homo sapiens
tatgtctgagtactt

SEQ ID NO: 36975 - DNA, 15 bp, Homo sapiens
atatgtctgagtact

SEQ ID NO: 36976 - DNA, 15 bp, Homo sapiens
aatatgtctgagtac

SEQ ID NO: 36977 - DNA, 15 bp, Homo sapiens
gaatatgtctgagta

SEQ ID NO: 36978 - DNA, 15 bp, Homo sapiens
ggaatatgtctgagt

SEQ ID NO: 36979 - DNA, 15 bp, Homo sapiens
aggaatatgtctgag

SEQ ID NO: 36980 - DNA, 15 bp, Homo sapiens
aaggaatatgtctga

SEQ ID NO: 36981 - DNA, 15 bp, Homo sapiens
taaggaatatgtctg

SEQ ID NO: 36982 - DNA, 15 bp, Homo sapiens
ataaggaatatgtct

SEQ ID NO: 36983 - DNA, 15 bp, Homo sapiens
tataaggaatatgtc

SEQ ID NO: 36984 - DNA, 15 bp, Homo sapiens
ttataaggaatatgt

SEQ ID NO: 36985 - DNA, 15 bp, Homo sapiens
gttataaggaatatg

SEQ ID NO: 36986 - DNA, 15 bp, Homo sapiens
tgttataaggaatat

SEQ ID NO: 36987 - DNA, 15 bp, Homo sapiens
gtgttataaggaata

SEQ ID NO: 36988 - DNA, 15 bp, Homo sapiens
agtgttataaggaat

SEQ ID NO: 36989 - DNA, 15 bp, Homo sapiens
cagtgttataaggaa

SEQ ID NO: 36990 - DNA, 15 bp, Homo sapiens
ccagtgttataagga

SEQ ID NO: 36991 - DNA, 15 bp, Homo sapiens
accagtgttataagg

SEQ ID NO: 36992 - DNA, 15 bp, Homo sapiens
caccagtgttataag

SEQ ID NO: 36993 - DNA, 15 bp, Homo sapiens
acaccagtgttataa

SEQ ID NO: 36994 - DNA, 15 bp, Homo sapiens
gacaccagtgttata

SEQ ID NO: 36995 - DNA, 15 bp, Homo sapiens
tgacaccagtgttat

SEQ ID NO: 36996 - DNA, 15 bp, Homo sapiens
gtgacaccagtgtta

SEQ ID NO: 36997 - DNA, 15 bp, Homo sapiens
tgtgacaccagtgtt

SEQ ID NO: 36998 - DNA, 15 bp, Homo sapiens
atgtgacaccagtgt

SEQ ID NO: 36999 - DNA, 15 bp, Homo sapiens
gatgtgacaccagtg

SEQ ID NO: 37000 - DNA, 15 bp, Homo sapiens
tgatgtgacaccagt

SEQ ID NO: 37001 - DNA, 15 bp, Homo sapiens
gtgatgtgacaccag

SEQ ID NO: 37002 - DNA, 15 bp, Homo sapiens
tgtgatgtgacacca

SEQ ID NO: 37003 - DNA, 15 bp, Homo sapiens
ttgtgatgtgacacc

SEQ ID NO: 37004 - DNA, 15 bp, Homo sapiens
tttgtgatgtgacac

SEQ ID NO: 37005 - DNA, 15 bp, Homo sapiens
ctttgtgatgtgaca

SEQ ID NO: 37006 - DNA, 15 bp, Homo sapiens
tctttgtgatgtgac

SEQ ID NO: 37007 - DNA, 15 bp, Homo sapiens
gtctttgtgatgtga

SEQ ID NO: 37008 - DNA, 15 bp, Homo sapiens
ggtctttgtgatgtg

SEQ ID NO: 37009 - DNA, 15 bp, Homo sapiens
aggtctttgtgatgt

SEQ ID NO: 37010 - DNA, 15 bp, Homo sapiens
taggtctttgtgatg

SEQ ID NO: 37011 - DNA, 15 bp, Homo sapiens
ataggtctttgtgat

SEQ ID NO: 37012 - DNA, 15 bp, Homo sapiens
aataggtctttgtga

SEQ ID NO: 37013 - DNA, 15 bp, Homo sapiens
aaataggtctttgtg

SEQ ID NO: 37014 - DNA, 15 bp, Homo sapiens
taaataggtctttgt

SEQ ID NO: 37015 - DNA, 15 bp, Homo sapiens
ttaaataggtctttg

SEQ ID NO: 37016 - DNA, 15 bp, Homo sapiens
attaaataggtcttt

SEQ ID NO: 37017 - DNA, 15 bp, Homo sapiens
cattaaataggtctt

SEQ ID NO: 37018 - DNA, 15 bp, Homo sapiens
acattaaataggtct

SEQ ID NO: 37019 - DNA, 15 bp, Homo sapiens
cacattaaataggtc

SEQ ID NO: 37020 - DNA, 15 bp, Homo sapiens
gcacattaaataggt

SEQ ID NO: 37021 - DNA, 15 bp, Homo sapiens
agcacattaaatagg

SEQ ID NO: 37022 - DNA, 15 bp, Homo sapiens
aagcacattaaatag

SEQ ID NO: 37023 - DNA, 15 bp, Homo sapiens
gaagcacattaaata

SEQ ID NO: 37024 - DNA, 15 bp, Homo sapiens
agaagcacattaaat

SEQ ID NO: 37025 - DNA, 15 bp, Homo sapiens
cagaagcacattaaa

SEQ ID NO: 37026 - DNA, 15 bp, Homo sapiens
tcagaagcacattaa

SEQ ID NO: 37027 - DNA, 15 bp, Homo sapiens
atcagaagcacatta

SEQ ID NO: 37028 - DNA, 15 bp, Homo sapiens
aatcagaagcacatt

SEQ ID NO: 37029 - DNA, 15 bp, Homo sapiens
aaatcagaagcacat

SEQ ID NO: 37030 - DNA, 15 bp, Homo sapiens
taaatcagaagcaca

SEQ ID NO: 37031 - DNA, 15 bp, Homo sapiens
ataaatcagaagcac

SEQ ID NO: 37032 - DNA, 15 bp, Homo sapiens
tataaatcagaagca

SEQ ID NO: 37033 - DNA, 15 bp, Homo sapiens
ctataaatcagaagc

SEQ ID NO: 37034 - DNA, 15 bp, Homo sapiens
cctataaatcagaag

SEQ ID NO: 37035 - DNA, 15 bp, Homo sapiens
ccctataaatcagaa

SEQ ID NO: 37036 - DNA, 15 bp, Homo sapiens
tccctataaatcaga

SEQ ID NO: 37037 - DNA, 15 bp, Homo sapiens
ctccctataaatcag

SEQ ID NO: 37038 - DNA, 15 bp, Homo sapiens
tctccctataaatca

SEQ ID NO: 37039 - DNA, 15 bp, Homo sapiens
ctctccctataaatc

SEQ ID NO: 37040 - DNA, 15 bp, Homo sapiens
tctctccctataaat

SEQ ID NO: 37041 - DNA, 15 bp, Homo sapiens
gtctctccctataaa

SEQ ID NO: 37042 - DNA, 15 bp, Homo sapiens
tgtctctccctataa

SEQ ID NO: 37043 - DNA, 15 bp, Homo sapiens
atgtctctccctata

SEQ ID NO: 37044 - DNA, 15 bp, Homo sapiens
gatgtctctccctat

SEQ ID NO: 37045 - DNA, 15 bp, Homo sapiens
ggatgtctctcccta

SEQ ID NO: 37046 - DNA, 15 bp, Homo sapiens
aggatgtctctccct

SEQ ID NO: 37047 - DNA, 15 bp, Homo sapiens
taggatgtctctccc

SEQ ID NO: 37048 - DNA, 15 bp, Homo sapiens
ataggatgtctctcc

SEQ ID NO: 37049 - DNA, 15 bp, Homo sapiens
tataggatgtctctc

SEQ ID NO: 37050 - DNA, 15 bp, Homo sapiens
gtataggatgtctct

SEQ ID NO: 37051 - DNA, 15 bp, Homo sapiens
agtataggatgtctc

SEQ ID NO: 37052 - DNA, 15 bp, Homo sapiens
aagtataggatgtct

SEQ ID NO: 37053 - DNA, 15 bp, Homo sapiens
gaagtataggatgtc

SEQ ID NO: 37054 - DNA, 15 bp, Homo sapiens
tgaagtataggatgt

SEQ ID NO: 37055 - DNA, 15 bp, Homo sapiens
ctgaagtataggatg

SEQ ID NO: 37056 - DNA, 15 bp, Homo sapiens
cctgaagtataggat

SEQ ID NO: 37057 - DNA, 15 bp, Homo sapiens
tcctgaagtatagga

SEQ ID NO: 37058 - DNA, 15 bp, Homo sapiens
ttcctgaagtatagg

SEQ ID NO: 37059 - DNA, 15 bp, Homo sapiens
gttcctgaagtatag

SEQ ID NO: 37060 - DNA, 15 bp, Homo sapiens
agttcctgaagtata

SEQ ID NO: 37061 - DNA, 15 bp, Homo sapiens
cagttcctgaagtat

SEQ ID NO: 37062 - DNA, 15 bp, Homo sapiens
gcagttcctgaagta

SEQ ID NO: 37063 - DNA, 15 bp, Homo sapiens
tgcagttcctgaagt

SEQ ID NO: 37064 - DNA, 15 bp, Homo sapiens
gtgcagttcctgaag

SEQ ID NO: 37065 - DNA, 15 bp, Homo sapiens
agtgcagttcctgaa

SEQ ID NO: 37066 - DNA, 15 bp, Homo sapiens
aagtgcagttcctga

SEQ ID NO: 37067 - DNA, 15 bp, Homo sapiens
aaagtgcagttcctg

SEQ ID NO: 37068 - DNA, 15 bp, Homo sapiens
caaagtgcagttcct

SEQ ID NO: 37069 - DNA, 15 bp, Homo sapiens
tcaaagtgcagttcc

SEQ ID NO: 37070 - DNA, 15 bp, Homo sapiens
atcaaagtgcagttc

SEQ ID NO: 37071 - DNA, 15 bp, Homo sapiens
gatcaaagtgcagtt

SEQ ID NO: 37072 - DNA, 15 bp, Homo sapiens
ggatcaaagtgcagt

SEQ ID NO: 37073 - DNA, 15 bp, Homo sapiens
tggatcaaagtgcag

SEQ ID NO: 37074 - DNA, 15 bp, Homo sapiens
gtggatcaaagtgca

SEQ ID NO: 37075 - DNA, 15 bp, Homo sapiens
tgtggatcaaagtgc

SEQ ID NO: 37076 - DNA, 15 bp, Homo sapiens
ctgtggatcaaagtg

SEQ ID NO: 37077 - DNA, 15 bp, Homo sapiens
tctgtggatcaaagt

SEQ ID NO: 37078 - DNA, 15 bp, Homo sapiens
ttctgtggatcaaag

SEQ ID NO: 37079 - DNA, 15 bp, Homo sapiens
tttctgtggatcaaa

SEQ ID NO: 37080 - DNA, 15 bp, Homo sapiens
ctttctgtggatcaa

SEQ ID NO: 37081 - DNA, 15 bp, Homo sapiens
gctttctgtggatca

SEQ ID NO: 37082 - DNA, 15 bp, Homo sapiens
ggctttctgtggatc

SEQ ID NO: 37083 - DNA, 15 bp, Homo sapiens
aggctttctgtggat

SEQ ID NO: 37084 - DNA, 15 bp, Homo sapiens
taggctttctgtgga

SEQ ID NO: 37085 - DNA, 15 bp, Homo sapiens
ctaggctttctgtgg

SEQ ID NO: 37086 - DNA, 15 bp, Homo sapiens
actaggctttctgtg

SEQ ID NO: 37087 - DNA, 15 bp, Homo sapiens
cactaggctttctgt

SEQ ID NO: 37088 - DNA, 15 bp, Homo sapiens
tcactaggctttctg

SEQ ID NO: 37089 - DNA, 15 bp, Homo sapiens
atcactaggctttct

SEQ ID NO: 37090 - DNA, 15 bp, Homo sapiens
catcactaggctttc

SEQ ID NO: 37091 - DNA, 15 bp, Homo sapiens
acatcactaggcttt

SEQ ID NO: 37092 - DNA, 15 bp, Homo sapiens
tacatcactaggctt

SEQ ID NO: 37093 - DNA, 15 bp, Homo sapiens
ctacatcactaggct

SEQ ID NO: 37094 - DNA, 15 bp, Homo sapiens
tctacatcactaggc

SEQ ID NO: 37095 - DNA, 15 bp, Homo sapiens
ctctacatcactagg

SEQ ID NO: 37096 - DNA, 15 bp, Homo sapiens
gctctacatcactag

SEQ ID NO: 37097 - DNA, 15 bp, Homo sapiens
agctctacatcacta

SEQ ID NO: 37098 - DNA, 15 bp, Homo sapiens
gagctctacatcact

SEQ ID NO: 37099 - DNA, 15 bp, Homo sapiens
ggagctctacatcac

SEQ ID NO: 37100 - DNA, 15 bp, Homo sapiens
aggagctctacatca

SEQ ID NO: 37101 - DNA, 15 bp, Homo sapiens
caggagctctacatc

SEQ ID NO: 37102 - DNA, 15 bp, Homo sapiens
acaggagctctacat

SEQ ID NO: 37103 - DNA, 15 bp, Homo sapiens
aacaggagctctaca

SEQ ID NO: 37104 - DNA, 15 bp, Homo sapiens
taacaggagctctac

SEQ ID NO: 37105 - DNA, 15 bp, Homo sapiens
ctaacaggagctcta

SEQ ID NO: 37106 - DNA, 15 bp, Homo sapiens
actaacaggagctct

SEQ ID NO: 37107 - DNA, 15 bp, Homo sapiens
aactaacaggagctc

SEQ ID NO: 37108 - DNA, 15 bp, Homo sapiens
gaactaacaggagct

SEQ ID NO: 37109 - DNA, 15 bp, Homo sapiens
tgaactaacaggagc

SEQ ID NO: 37110 - DNA, 15 bp, Homo sapiens
ttgaactaacaggag

SEQ ID NO: 37111 - DNA, 15 bp, Homo sapiens
tttgaactaacagga

SEQ ID NO: 37112 - DNA, 15 bp, Homo sapiens
ttttgaactaacagg

SEQ ID NO: 37113 - DNA, 15 bp, Homo sapiens
cttttgaactaacag

SEQ ID NO: 37114 - DNA, 15 bp, Homo sapiens
ccttttgaactaaca

SEQ ID NO: 37115 - DNA, 15 bp, Homo sapiens
tccttttgaactaac

SEQ ID NO: 37116 - DNA, 15 bp, Homo sapiens
ttccttttgaactaa

SEQ ID NO: 37117 - DNA, 15 bp, Homo sapiens
tttccttttgaacta

SEQ ID NO: 37118 - DNA, 15 bp, Homo sapiens
ttttccttttgaact

SEQ ID NO: 37119 - DNA, 15 bp, Homo sapiens
cttttccttttgaac

SEQ ID NO: 37120 - DNA, 15 bp, Homo sapiens
tcttttccttttgaa

SEQ ID NO: 37121 - DNA, 15 bp, Homo sapiens
ttcttttccttttga

SEQ ID NO: 37122 - DNA, 15 bp, Homo sapiens
tttcttttccttttg

SEQ ID NO: 37123 - DNA, 15 bp, Homo sapiens
ttttcttttcctttt

SEQ ID NO: 37124 - DNA, 15 bp, Homo sapiens
cttttcttttccttt

SEQ ID NO: 37125 - DNA, 15 bp, Homo sapiens
tcttttcttttcctt

SEQ ID NO: 37126 - DNA, 15 bp, Homo sapiens
ttcttttcttttcct

SEQ ID NO: 37127 - DNA, 15 bp, Homo sapiens
gttcttttcttttcc

SEQ ID NO: 37128 - DNA, 15 bp, Homo sapiens
tgttcttttcttttc

SEQ ID NO: 37129 - DNA, 15 bp, Homo sapiens
ttgttcttttctttt

SEQ ID NO: 37130 - DNA, 15 bp, Homo sapiens
gttgttcttttcttt

SEQ ID NO: 37131 - DNA, 15 bp, Homo sapiens
tgttgttcttttctt

SEQ ID NO: 37132 - DNA, 15 bp, Homo sapiens
gtgttgttcttttct

SEQ ID NO: 37133 - DNA, 15 bp, Homo sapiens
tgtgttgttcttttc

SEQ ID NO: 37134 - DNA, 15 bp, Homo sapiens
ctgtgttgttctttt

SEQ ID NO: 37135 - DNA, 15 bp, Homo sapiens
tctgtgttgttcttt

SEQ ID NO: 37136 - DNA, 15 bp, Homo sapiens
ttctgtgttgttctt

SEQ ID NO: 37137 - DNA, 15 bp, Homo sapiens
tttctgtgttgttct

SEQ ID NO: 37138 - DNA, 15 bp, Homo sapiens
ctttctgtgttgttc

SEQ ID NO: 37139 - DNA, 15 bp, Homo sapiens
gctttctgtgttgtt

SEQ ID NO: 37140 - DNA, 15 bp, Homo sapiens
ggctttctgtgttgt

SEQ ID NO: 37141 - DNA, 15 bp, Homo sapiens
aggctttctgtgttg

SEQ ID NO: 37142 - DNA, 15 bp, Homo sapiens
taggctttctgtgtt

SEQ ID NO: 37143 - DNA, 15 bp, Homo sapiens
ttaggctttctgtgt

SEQ ID NO: 37144 - DNA, 15 bp, Homo sapiens
attaggctttctgtg

SEQ ID NO: 37145 - DNA, 15 bp, Homo sapiens
aattaggctttctgt

SEQ ID NO: 37146 - DNA, 15 bp, Homo sapiens
taattaggctttctg

SEQ ID NO: 37147 - DNA, 15 bp, Homo sapiens
ataattaggctttct

SEQ ID NO: 37148 - DNA, 15 bp, Homo sapiens
cataattaggctttc

SEQ ID NO: 37149 - DNA, 15 bp, Homo sapiens
gcataattaggcttt

SEQ ID NO: 37150 - DNA, 15 bp, Homo sapiens
tgcataattaggctt

SEQ ID NO: 37151 - DNA, 15 bp, Homo sapiens
ttgcataattaggct

SEQ ID NO: 37152 - DNA, 15 bp, Homo sapiens
attgcataattaggc

SEQ ID NO: 37153 - DNA, 15 bp, Homo sapiens
tattgcataattagg

SEQ ID NO: 37154 - DNA, 15 bp, Homo sapiens
ctattgcataattag

SEQ ID NO: 37155 - DNA, 15 bp, Homo sapiens
tctattgcataatta

SEQ ID NO: 37156 - DNA, 15 bp, Homo sapiens
ctctattgcataatt

SEQ ID NO: 37157 - DNA, 15 bp, Homo sapiens
actctattgcataat

SEQ ID NO: 37158 - DNA, 15 bp, Homo sapiens
gactctattgcataa

SEQ ID NO: 37159 - DNA, 15 bp, Homo sapiens
tgactctattgcata

SEQ ID NO: 37160 - DNA, 15 bp, Homo sapiens
ttgactctattgcat

SEQ ID NO: 37161 - DNA, 15 bp, Homo sapiens
cttgactctattgca

SEQ ID NO: 37162 - DNA, 15 bp, Homo sapiens
acttgactctattgc

SEQ ID NO: 37163 - DNA, 15 bp, Homo sapiens
cacttgactctattg

SEQ ID NO: 37164 - DNA, 15 bp, Homo sapiens
gcacttgactctatt

SEQ ID NO: 37165 - DNA, 15 bp, Homo sapiens
agcacttgactctat

SEQ ID NO: 37166 - DNA, 15 bp, Homo sapiens
aagcacttgactcta

SEQ ID NO: 37167 - DNA, 15 bp, Homo sapiens
aaagcacttgactct

SEQ ID NO: 37168 - DNA, 15 bp, Homo sapiens
taaagcacttgactc

SEQ ID NO: 37169 - DNA, 15 bp, Homo sapiens
ataaagcacttgact

SEQ ID NO: 37170 - DNA, 15 bp, Homo sapiens
tataaagcacttgac

SEQ ID NO: 37171 - DNA, 15 bp, Homo sapiens
ctataaagcacttga

SEQ ID NO: 37172 - DNA, 15 bp, Homo sapiens
gctataaagcacttg

SEQ ID NO: 37173 - DNA, 15 bp, Homo sapiens
tgctataaagcactt

SEQ ID NO: 37174 - DNA, 15 bp, Homo sapiens
ttgctataaagcact

SEQ ID NO: 37175 - DNA, 15 bp, Homo sapiens
attgctataaagcac

SEQ ID NO: 37176 - DNA, 15 bp, Homo sapiens
cattgctataaagca

SEQ ID NO: 37177 - DNA, 15 bp, Homo sapiens
acattgctataaagc

SEQ ID NO: 37178 - DNA, 15 bp, Homo sapiens
aacattgctataaag

SEQ ID NO: 37179 - DNA, 15 bp, Homo sapiens
taacattgctataaa

SEQ ID NO: 37180 - DNA, 15 bp, Homo sapiens
gtaacattgctataa

SEQ ID NO: 37181 - DNA, 15 bp, Homo sapiens
tgtaacattgctata

SEQ ID NO: 37182 - DNA, 15 bp, Homo sapiens
ctgtaacattgctat

SEQ ID NO: 37183 - DNA, 15 bp, Homo sapiens
actgtaacattgcta

SEQ ID NO: 37184 - DNA, 15 bp, Homo sapiens
aactgtaacattgct

SEQ ID NO: 37185 - DNA, 15 bp, Homo sapiens
taactgtaacattgc

SEQ ID NO: 37186 - DNA, 15 bp, Homo sapiens
ataactgtaacattg

SEQ ID NO: 37187 - DNA, 15 bp, Homo sapiens
gataactgtaacatt

SEQ ID NO: 37188 - DNA, 15 bp, Homo sapiens
tgataactgtaacat

SEQ ID NO: 37189 - DNA, 15 bp, Homo sapiens
ttgataactgtaaca

SEQ ID NO: 37190 - DNA, 15 bp, Homo sapiens
tttgataactgtaac

SEQ ID NO: 37191 - DNA, 15 bp, Homo sapiens
ttttgataactgtaa

SEQ ID NO: 37192 - DNA, 15 bp, Homo sapiens
tttttgataactgta

SEQ ID NO: 37193 - DNA, 15 bp, Homo sapiens
ttttttgataactgt

SEQ ID NO: 37194 - DNA, 15 bp, Homo sapiens
tttttttgataactg

SEQ ID NO: 37195 - DNA, 15 bp, Homo sapiens
ttttttttgataact

SEQ ID NO: 37196 - DNA, 15 bp, Homo sapiens
attttttttgataac

SEQ ID NO: 37197 - DNA, 15 bp, Homo sapiens
gattttttttgataa

SEQ ID NO: 37198 - DNA, 15 bp, Homo sapiens
ggattttttttgata

SEQ ID NO: 37199 - DNA, 15 bp, Homo sapiens
tggattttttttgat

SEQ ID NO: 37200 - DNA, 15 bp, Homo sapiens
ctggattttttttga

SEQ ID NO: 37201 - DNA, 15 bp, Homo sapiens
tctggattttttttg

SEQ ID NO: 37202 - DNA, 15 bp, Homo sapiens
atctggatttttttt

SEQ ID NO: 37203 - DNA, 15 bp, Homo sapiens
catctggattttttt

SEQ ID NO: 37204 - DNA, 15 bp, Homo sapiens
ccatctggatttttt

SEQ ID NO: 37205 - DNA, 15 bp, Homo sapiens
tccatctggattttt

SEQ ID NO: 37206 - DNA, 15 bp, Homo sapiens
gtccatctggatttt

SEQ ID NO: 37207 - DNA, 15 bp, Homo sapiens
ggtccatctggattt

SEQ ID NO: 37208 - DNA, 15 bp, Homo sapiens
aggtccatctggatt

SEQ ID NO: 37209 - DNA, 15 bp, Homo sapiens
gaggtccatctggat

SEQ ID NO: 37210 - DNA, 15 bp, Homo sapiens
agaggtccatctgga

SEQ ID NO: 37211 - DNA, 15 bp, Homo sapiens
cagaggtccatctgg

SEQ ID NO: 37212 - DNA, 15 bp, Homo sapiens
tcagaggtccatctg

SEQ ID NO: 37213 - DNA, 15 bp, Homo sapiens
ctcagaggtccatct

SEQ ID NO: 37214 - DNA, 15 bp, Homo sapiens
tctcagaggtccatc

SEQ ID NO: 37215 - DNA, 15 bp, Homo sapiens
ctctcagaggtccat

SEQ ID NO: 37216 - DNA, 15 bp, Homo sapiens
cctctcagaggtcca

SEQ ID NO: 37217 - DNA, 15 bp, Homo sapiens
tcctctcagaggtcc

SEQ ID NO: 37218 - DNA, 15 bp, Homo sapiens
atcctctcagaggtc

SEQ ID NO: 37219 - DNA, 15 bp, Homo sapiens
catcctctcagaggt

SEQ ID NO: 37220 - DNA, 15 bp, Homo sapiens
gcatcctctcagagg

SEQ ID NO: 37221 - DNA, 15 bp, Homo sapiens
ggcatcctctcagag

SEQ ID NO: 37222 - DNA, 15 bp, Homo sapiens
tggcatcctctcaga

SEQ ID NO: 37223 - DNA, 15 bp, Homo sapiens
atggcatcctctcag

SEQ ID NO: 37224 - DNA, 15 bp, Homo sapiens
aatggcatcctctca

SEQ ID NO: 37225 - DNA, 15 bp, Homo sapiens
caatggcatcctctc

SEQ ID NO: 37226 - DNA, 15 bp, Homo sapiens
ccaatggcatcctct

SEQ ID NO: 37227 - DNA, 15 bp, Homo sapiens
tccaatggcatcctc

SEQ ID NO: 37228 - DNA, 15 bp, Homo sapiens
ctccaatggcatcct

SEQ ID NO: 37229 - DNA, 15 bp, Homo sapiens
actccaatggcatcc

SEQ ID NO: 37230 - DNA, 15 bp, Homo sapiens
tactccaatggcatc

SEQ ID NO: 37231 - DNA, 15 bp, Homo sapiens
ttactccaatggcat

SEQ ID NO: 37232 - DNA, 15 bp, Homo sapiens
gttactccaatggca

SEQ ID NO: 37233 - DNA, 15 bp, Homo sapiens
ggttactccaatggc

SEQ ID NO: 37234 - DNA, 15 bp, Homo sapiens
tggttactccaatgg

SEQ ID NO: 37235 - DNA, 15 bp, Homo sapiens
ctggttactccaatg

SEQ ID NO: 37236 - DNA, 15 bp, Homo sapiens
cctggttactccaat

SEQ ID NO: 37237 - DNA, 15 bp, Homo sapiens
gcctggttactccaa

SEQ ID NO: 37238 - DNA, 15 bp, Homo sapiens
tgcctggttactcca

SEQ ID NO: 37239 - DNA, 15 bp, Homo sapiens
ctgcctggttactcc

SEQ ID NO: 37240 - DNA, 15 bp, Homo sapiens
tctgcctggttactc

SEQ ID NO: 37241 - DNA, 15 bp, Homo sapiens
atctgcctggttact

SEQ ID NO: 37242 - DNA, 15 bp, Homo sapiens
catctgcctggttac

SEQ ID NO: 37243 - DNA, 15 bp, Homo sapiens
gcatctgcctggtta

SEQ ID NO: 37244 - DNA, 15 bp, Homo sapiens
tgcatctgcctggtt

SEQ ID NO: 37245 - DNA, 15 bp, Homo sapiens
ctgcatctgcctggt

SEQ ID NO: 37246 - DNA, 15 bp, Homo sapiens
actgcatctgcctgg

SEQ ID NO: 37247 - DNA, 15 bp, Homo sapiens
aactgcatctgcctg

SEQ ID NO: 37248 - DNA, 15 bp, Homo sapiens
caactgcatctgcct

SEQ ID NO: 37249 - DNA, 15 bp, Homo sapiens
tcaactgcatctgcc

SEQ ID NO: 37250 - DNA, 15 bp, Homo sapiens
atcaactgcatctgc

SEQ ID NO: 37251 - DNA, 15 bp, Homo sapiens
gatcaactgcatctg

SEQ ID NO: 37252 - DNA, 15 bp, Homo sapiens
tgatcaactgcatct

SEQ ID NO: 37253 - DNA, 15 bp, Homo sapiens
ctgatcaactgcatc

SEQ ID NO: 37254 - DNA, 15 bp, Homo sapiens
tctgatcaactgcat

SEQ ID NO: 37255 - DNA, 15 bp, Homo sapiens
ctctgatcaactgca

SEQ ID NO: 37256 - DNA, 15 bp, Homo sapiens
gctctgatcaactgc

SEQ ID NO: 37257 - DNA, 15 bp, Homo sapiens
agctctgatcaactg

SEQ ID NO: 37258 - DNA, 15 bp, Homo sapiens
cagctctgatcaact

SEQ ID NO: 37259 - DNA, 15 bp, Homo sapiens
tcagctctgatcaac

SEQ ID NO: 37260 - DNA, 15 bp, Homo sapiens
gtcagctctgatcaa

SEQ ID NO: 37261 - DNA, 15 bp, Homo sapiens
agtcagctctgatca

SEQ ID NO: 37262 - DNA, 15 bp, Homo sapiens
aagtcagctctgatc

SEQ ID NO: 37263 - DNA, 15 bp, Homo sapiens
gaagtcagctctgat

SEQ ID NO: 37264 - DNA, 15 bp, Homo sapiens
ggaagtcagctctga

SEQ ID NO: 37265 - DNA, 15 bp, Homo sapiens
aggaagtcagctctg

SEQ ID NO: 37266 - DNA, 15 bp, Homo sapiens
taggaagtcagctct

SEQ ID NO: 37267 - DNA, 15 bp, Homo sapiens
ataggaagtcagctc

SEQ ID NO: 37268 - DNA, 15 bp, Homo sapiens
tataggaagtcagct

SEQ ID NO: 37269 - DNA, 15 bp, Homo sapiens
ttataggaagtcagc

SEQ ID NO: 37270 - DNA, 15 bp, Homo sapiens
cttataggaagtcag

SEQ ID NO: 37271 - DNA, 15 bp, Homo sapiens
tcttataggaagtca

SEQ ID NO: 37272 - DNA, 15 bp, Homo sapiens
ttcttataggaagtc

SEQ ID NO: 37273 - DNA, 15 bp, Homo sapiens
cttcttataggaagt

SEQ ID NO: 37274 - DNA, 15 bp, Homo sapiens
acttcttataggaag

SEQ ID NO: 37275 - DNA, 15 bp, Homo sapiens
cacttcttataggaa

SEQ ID NO: 37276 - DNA, 15 bp, Homo sapiens
tcacttcttatagga

SEQ ID NO: 37277 - DNA, 15 bp, Homo sapiens
ctcacttcttatagg

SEQ ID NO: 37278 - DNA, 15 bp, Homo sapiens
gctcacttcttatag

SEQ ID NO: 37279 - DNA, 15 bp, Homo sapiens
tgctcacttcttata

SEQ ID NO: 37280 - DNA, 15 bp, Homo sapiens
gtgctcacttcttat

SEQ ID NO: 37281 - DNA, 15 bp, Homo sapiens
agtgctcacttctta

SEQ ID NO: 37282 - DNA, 15 bp, Homo sapiens
cagtgctcacttctt

SEQ ID NO: 37283 - DNA, 15 bp, Homo sapiens
tcagtgctcacttct

SEQ ID NO: 37284 - DNA, 15 bp, Homo sapiens
ctcagtgctcacttc

SEQ ID NO: 37285 - DNA, 15 bp, Homo sapiens
gctcagtgctcactt

SEQ ID NO: 37286 - DNA, 15 bp, Homo sapiens
agctcagtgctcact

SEQ ID NO: 37287 - DNA, 15 bp, Homo sapiens
cagctcagtgctcac

SEQ ID NO: 37288 - DNA, 15 bp, Homo sapiens
tcagctcagtgctca

SEQ ID NO: 37289 - DNA, 15 bp, Homo sapiens
ctcagctcagtgctc

SEQ ID NO: 37290 - DNA, 15 bp, Homo sapiens
cctcagctcagtgct

SEQ ID NO: 37291 - DNA, 15 bp, Homo sapiens
tcctcagctcagtgc

SEQ ID NO: 37292 - DNA, 15 bp, Homo sapiens
ttcctcagctcagtg

SEQ ID NO: 37293 - DNA, 15 bp, Homo sapiens
attcctcagctcagt

SEQ ID NO: 37294 - DNA, 15 bp, Homo sapiens
tattcctcagctcag

SEQ ID NO: 37295 - DNA, 15 bp, Homo sapiens
ttattcctcagctca

SEQ ID NO: 37296 - DNA, 15 bp, Homo sapiens
attattcctcagctc

SEQ ID NO: 37297 - DNA, 15 bp, Homo sapiens
cattattcctcagct

SEQ ID NO: 37298 - DNA, 15 bp, Homo sapiens
ccattattcctcagc

SEQ ID NO: 37299 - DNA, 15 bp, Homo sapiens
gccattattcctcag

SEQ ID NO: 37300 - DNA, 15 bp, Homo sapiens
tgccattattcctca

SEQ ID NO: 37301 - DNA, 15 bp, Homo sapiens
atgccattattcctc

SEQ ID NO: 37302 - DNA, 15 bp, Homo sapiens
tatgccattattcct

SEQ ID NO: 37303 - DNA, 15 bp, Homo sapiens
ttatgccattattcc

SEQ ID NO: 37304 - DNA, 15 bp, Homo sapiens
tttatgccattattc

SEQ ID NO: 37305 - DNA, 15 bp, Homo sapiens
atttatgccattatt

SEQ ID NO: 37306 - DNA, 15 bp, Homo sapiens
catttatgccattat

SEQ ID NO: 37307 - DNA, 15 bp, Homo sapiens
tcatttatgccatta

SEQ ID NO: 37308 - DNA, 15 bp, Homo sapiens
ttcatttatgccatt

SEQ ID NO: 37309 - DNA, 15 bp, Homo sapiens
cttcatttatgccat

SEQ ID NO: 37310 - DNA, 15 bp, Homo sapiens
ccttcatttatgcca

SEQ ID NO: 37311 - DNA, 15 bp, Homo sapiens
tccttcatttatgcc

SEQ ID NO: 37312 - DNA, 15 bp, Homo sapiens
ttccttcatttatgc

SEQ ID NO: 37313 - DNA, 15 bp, Homo sapiens
tttccttcatttatg

SEQ ID NO: 37314 - DNA, 15 bp, Homo sapiens
ctttccttcatttat

SEQ ID NO: 37315 - DNA, 15 bp, Homo sapiens
actttccttcattta

SEQ ID NO: 37316 - DNA, 15 bp, Homo sapiens
cactttccttcattt

SEQ ID NO: 37317 - DNA, 15 bp, Homo sapiens
tcactttccttcatt

SEQ ID NO: 37318 - DNA, 15 bp, Homo sapiens
ctcactttccttcat

SEQ ID NO: 37319 - DNA, 15 bp, Homo sapiens
tctcactttccttca

SEQ ID NO: 37320 - DNA, 15 bp, Homo sapiens
atctcactttccttc

SEQ ID NO: 37321 - DNA, 15 bp, Homo sapiens
catctcactttcctt

SEQ ID NO: 37322 - DNA, 15 bp, Homo sapiens
ccatctcactttcct

SEQ ID NO: 37323 - DNA, 15 bp, Homo sapiens
tccatctcactttcc

SEQ ID NO: 37324 - DNA, 15 bp, Homo sapiens
ttccatctcactttc

SEQ ID NO: 37325 - DNA, 15 bp, Homo sapiens
tttccatctcacttt

SEQ ID NO: 37326 - DNA, 15 bp, Homo sapiens
atttccatctcactt

SEQ ID NO: 37327 - DNA, 15 bp, Homo sapiens
aatttccatctcact

SEQ ID NO: 37328 - DNA, 15 bp, Homo sapiens
aaatttccatctcac

SEQ ID NO: 37329 - DNA, 15 bp, Homo sapiens
caaatttccatctca

SEQ ID NO: 37330 - DNA, 15 bp, Homo sapiens
tcaaatttccatctc

SEQ ID NO: 37331 - DNA, 15 bp, Homo sapiens
ctcaaatttccatct

SEQ ID NO: 37332 - DNA, 15 bp, Homo sapiens
actcaaatttccatc

SEQ ID NO: 37333 - DNA, 15 bp, Homo sapiens
aactcaaatttccat

SEQ ID NO: 37334 - DNA, 15 bp, Homo sapiens
aaactcaaatttcca

SEQ ID NO: 37335 - DNA, 15 bp, Homo sapiens
aaaactcaaatttcc

SEQ ID NO: 37336 - DNA, 15 bp, Homo sapiens
aaaaactcaaatttc

SEQ ID NO: 37337 - DNA, 15 bp, Homo sapiens
taaaaactcaaattt

SEQ ID NO: 37338 - DNA, 15 bp, Homo sapiens
ttaaaaactcaaatt

SEQ ID NO: 37339 - DNA, 15 bp, Homo sapiens
attaaaaactcaaat

SEQ ID NO: 37340 - DNA, 15 bp, Homo sapiens
aattaaaaactcaaa

SEQ ID NO: 37341 - DNA, 15 bp, Homo sapiens
caattaaaaactcaa

SEQ ID NO: 37342 - DNA, 15 bp, Homo sapiens
ccaattaaaaactca

SEQ ID NO: 37343 - DNA, 15 bp, Homo sapiens
tccaattaaaaactc

SEQ ID NO: 37344 - DNA, 15 bp, Homo sapiens
ttccaattaaaaact

SEQ ID NO: 37345 - DNA, 15 bp, Homo sapiens
tttccaattaaaaac

SEQ ID NO: 37346 - DNA, 15 bp, Homo sapiens
ctttccaattaaaaa

SEQ ID NO: 37347 - DNA, 15 bp, Homo sapiens
tctttccaattaaaa

SEQ ID NO: 37348 - DNA, 15 bp, Homo sapiens
gtctttccaattaaa

SEQ ID NO: 37349 - DNA, 15 bp, Homo sapiens
tgtctttccaattaa

SEQ ID NO: 37350 - DNA, 15 bp, Homo sapiens
ttgtctttccaatta

SEQ ID NO: 37351 - DNA, 15 bp, Homo sapiens
attgtctttccaatt

SEQ ID NO: 37352 - DNA, 15 bp, Homo sapiens
tattgtctttccaat

SEQ ID NO: 37353 - DNA, 15 bp, Homo sapiens
gtattgtctttccaa

SEQ ID NO: 37354 - DNA, 15 bp, Homo sapiens
tgtattgtctttcca

SEQ ID NO: 37355 - DNA, 15 bp, Homo sapiens
atgtattgtctttcc

SEQ ID NO: 37356 - DNA, 15 bp, Homo sapiens
gatgtattgtctttc

SEQ ID NO: 37357 - DNA, 15 bp, Homo sapiens
tgatgtattgtcttt

SEQ ID NO: 37358 - DNA, 15 bp, Homo sapiens
ctgatgtattgtctt

SEQ ID NO: 37359 - DNA, 15 bp, Homo sapiens
cctgatgtattgtct

SEQ ID NO: 37360 - DNA, 15 bp, Homo sapiens
gcctgatgtattgtc

SEQ ID NO: 37361 - DNA, 15 bp, Homo sapiens
tgcctgatgtattgt

SEQ ID NO: 37362 - DNA, 15 bp, Homo sapiens
ctgcctgatgtattg

SEQ ID NO: 37363 - DNA, 15 bp, Homo sapiens
tctgcctgatgtatt

SEQ ID NO: 37364 - DNA, 15 bp, Homo sapiens
atctgcctgatgtat

SEQ ID NO: 37365 - DNA, 15 bp, Homo sapiens
aatctgcctgatgta

SEQ ID NO: 37366 - DNA, 15 bp, Homo sapiens
aaatctgcctgatgt

SEQ ID NO: 37367 - DNA, 15 bp, Homo sapiens
aaaatctgcctgatg

SEQ ID NO: 37368 - DNA, 15 bp, Homo sapiens
aaaaatctgcctgat

SEQ ID NO: 37369 - DNA, 15 bp, Homo sapiens
taaaaatctgcctga

SEQ ID NO: 37370 - DNA, 15 bp, Homo sapiens
ttaaaaatctgcctg

SEQ ID NO: 37371 - DNA, 15 bp, Homo sapiens
tttaaaaatctgcct

SEQ ID NO: 37372 - DNA, 15 bp, Homo sapiens
atttaaaaatctgcc

SEQ ID NO: 37373 - DNA, 15 bp, Homo sapiens
tatttaaaaatctgc

SEQ ID NO: 37374 - DNA, 15 bp, Homo sapiens
ctatttaaaaatctg

SEQ ID NO: 37375 - DNA, 15 bp, Homo sapiens
cctatttaaaaatct

SEQ ID NO: 37376 - DNA, 15 bp, Homo sapiens
ccctatttaaaaatc

SEQ ID NO: 37377 - DNA, 15 bp, Homo sapiens
cccctatttaaaaat

SEQ ID NO: 37378 - DNA, 15 bp, Homo sapiens
gcccctatttaaaaa

SEQ ID NO: 37379 - DNA, 15 bp, Homo sapiens
tgcccctatttaaaa

SEQ ID NO: 37380 - DNA, 15 bp, Homo sapiens
ttgcccctatttaaa

SEQ ID NO: 37381 - DNA, 15 bp, Homo sapiens
tttgcccctatttaa

SEQ ID NO: 37382 - DNA, 15 bp, Homo sapiens
gtttgcccctattta

SEQ ID NO: 37383 - DNA, 15 bp, Homo sapiens
tgtttgcccctattt

SEQ ID NO: 37384 - DNA, 15 bp, Homo sapiens
ttgtttgcccctatt

SEQ ID NO: 37385 - DNA, 15 bp, Homo sapiens
tttgtttgcccctat

SEQ ID NO: 37386 - DNA, 15 bp, Homo sapiens
gtttgtttgccccta

SEQ ID NO: 37387 - DNA, 15 bp, Homo sapiens
tgtttgtttgcccct

SEQ ID NO: 37388 - DNA, 15 bp, Homo sapiens
ctgtttgtttgcccc

SEQ ID NO: 37389 - DNA, 15 bp, Homo sapiens
tctgtttgtttgccc

SEQ ID NO: 37390 - DNA, 15 bp, Homo sapiens
gtctgtttgtttgcc

SEQ ID NO: 37391 - DNA, 15 bp, Homo sapiens
tgtctgtttgtttgc

SEQ ID NO: 37392 - DNA, 15 bp, Homo sapiens
gtgtctgtttgtttg

SEQ ID NO: 37393 - DNA, 15 bp, Homo sapiens
tgtgtctgtttgttt

SEQ ID NO: 37394 - DNA, 15 bp, Homo sapiens
atgtgtctgtttgtt

SEQ ID NO: 37395 - DNA, 15 bp, Homo sapiens
tatgtgtctgtttgt

SEQ ID NO: 37396 - DNA, 15 bp, Homo sapiens
ctatgtgtctgtttg

SEQ ID NO: 37397 - DNA, 15 bp, Homo sapiens
cctatgtgtctgttt

SEQ ID NO: 37398 - DNA, 15 bp, Homo sapiens
tcctatgtgtctgtt

SEQ ID NO: 37399 - DNA, 15 bp, Homo sapiens
ctcctatgtgtctgt

SEQ ID NO: 37400 - DNA, 15 bp, Homo sapiens
tctcctatgtgtctg

SEQ ID NO: 37401 - DNA, 15 bp, Homo sapiens
atctcctatgtgtct

SEQ ID NO: 37402 - DNA, 15 bp, Homo sapiens
catctcctatgtgtc

SEQ ID NO: 37403 - DNA, 15 bp, Homo sapiens
gcatctcctatgtgt

SEQ ID NO: 37404 - DNA, 15 bp, Homo sapiens
agcatctcctatgtg

SEQ ID NO: 37405 - DNA, 15 bp, Homo sapiens
tagcatctcctatgt

SEQ ID NO: 37406 - DNA, 15 bp, Homo sapiens
ctagcatctcctatg

SEQ ID NO: 37407 - DNA, 15 bp, Homo sapiens
cctagcatctcctat

SEQ ID NO: 37408 - DNA, 15 bp, Homo sapiens
gcctagcatctccta

SEQ ID NO: 37409 - DNA, 15 bp, Homo sapiens
tgcctagcatctcct

SEQ ID NO: 37410 - DNA, 15 bp, Homo sapiens
atgcctagcatctcc

SEQ ID NO: 37411 - DNA, 15 bp, Homo sapiens
catgcctagcatctc

SEQ ID NO: 37412 - DNA, 15 bp, Homo sapiens
ccatgcctagcatct

SEQ ID NO: 37413 - DNA, 15 bp, Homo sapiens
cccatgcctagcatc

SEQ ID NO: 37414 - DNA, 15 bp, Homo sapiens
ccccatgcctagcat

SEQ ID NO: 37415 - DNA, 15 bp, Homo sapiens
accccatgcctagca

SEQ ID NO: 37416 - DNA, 15 bp, Homo sapiens
gaccccatgcctagc

SEQ ID NO: 37417 - DNA, 15 bp, Homo sapiens
ggaccccatgcctag

SEQ ID NO: 37418 - DNA, 15 bp, Homo sapiens
gggaccccatgccta

SEQ ID NO: 37419 - DNA, 15 bp, Homo sapiens
ggggaccccatgcct

SEQ ID NO: 37420 - DNA, 15 bp, Homo sapiens
tggggaccccatgcc

SEQ ID NO: 37421 - DNA, 15 bp, Homo sapiens
gtggggaccccatgc

SEQ ID NO: 37422 - DNA, 15 bp, Homo sapiens
agtggggaccccatg

SEQ ID NO: 37423 - DNA, 15 bp, Homo sapiens
tagtggggaccccat

SEQ ID NO: 37424 - DNA, 15 bp, Homo sapiens
ctagtggggacccca

SEQ ID NO: 37425 - DNA, 15 bp, Homo sapiens
cctagtggggacccc

SEQ ID NO: 37426 - DNA, 15 bp, Homo sapiens
tcctagtggggaccc

SEQ ID NO: 37427 - DNA, 15 bp, Homo sapiens
atcctagtggggacc

SEQ ID NO: 37428 - DNA, 15 bp, Homo sapiens
catcctagtggggac

SEQ ID NO: 37429 - DNA, 15 bp, Homo sapiens
gcatcctagtgggga

SEQ ID NO: 37430 - DNA, 15 bp, Homo sapiens
agcatcctagtgggg

SEQ ID NO: 37431 - DNA, 15 bp, Homo sapiens
cagcatcctagtggg

SEQ ID NO: 37432 - DNA, 15 bp, Homo sapiens
gcagcatcctagtgg

SEQ ID NO: 37433 - DNA, 15 bp, Homo sapiens
agcagcatcctagtg

SEQ ID NO: 37434 - DNA, 15 bp, Homo sapiens
aagcagcatcctagt

SEQ ID NO: 37435 - DNA, 15 bp, Homo sapiens
taagcagcatcctag

SEQ ID NO: 37436 - DNA, 15 bp, Homo sapiens
ctaagcagcatccta

SEQ ID NO: 37437 - DNA, 15 bp, Homo sapiens
tctaagcagcatcct

SEQ ID NO: 37438 - DNA, 15 bp, Homo sapiens
ttctaagcagcatcc

SEQ ID NO: 37439 - DNA, 15 bp, Homo sapiens
tttctaagcagcatc

SEQ ID NO: 37440 - DNA, 15 bp, Homo sapiens
gtttctaagcagcat

SEQ ID NO: 37441 - DNA, 15 bp, Homo sapiens
tgtttctaagcagca

SEQ ID NO: 37442 - DNA, 15 bp, Homo sapiens
atgtttctaagcagc

SEQ ID NO: 37443 - DNA, 15 bp, Homo sapiens
catgtttctaagcag

SEQ ID NO: 37444 - DNA, 15 bp, Homo sapiens
gcatgtttctaagca

SEQ ID NO: 37445 - DNA, 15 bp, Homo sapiens
tgcatgtttctaagc

SEQ ID NO: 37446 - DNA, 15 bp, Homo sapiens
ctgcatgtttctaag

SEQ ID NO: 37447 - DNA, 15 bp, Homo sapiens
cctgcatgtttctaa

SEQ ID NO: 37448 - DNA, 15 bp, Homo sapiens
ccctgcatgtttcta

SEQ ID NO: 37449 - DNA, 15 bp, Homo sapiens
cccctgcatgtttct

SEQ ID NO: 37450 - DNA, 15 bp, Homo sapiens
acccctgcatgtttc

SEQ ID NO: 37451 - DNA, 15 bp, Homo sapiens
cacccctgcatgttt

SEQ ID NO: 37452 - DNA, 15 bp, Homo sapiens
ccacccctgcatgtt

SEQ ID NO: 37453 - DNA, 15 bp, Homo sapiens
accacccctgcatgt

SEQ ID NO: 37454 - DNA, 15 bp, Homo sapiens
caccacccctgcatg

SEQ ID NO: 37455 - DNA, 15 bp, Homo sapiens
tcaccacccctgcat

SEQ ID NO: 37456 - DNA, 15 bp, Homo sapiens
ctcaccacccctgca

SEQ ID NO: 37457 - DNA, 15 bp, Homo sapiens
actcaccacccctgc

SEQ ID NO: 37458 - DNA, 15 bp, Homo sapiens
tactcaccacccctg

SEQ ID NO: 37459 - DNA, 15 bp, Homo sapiens
gtactcaccacccct

SEQ ID NO: 37460 - DNA, 15 bp, Homo sapiens
agtactcaccacccc

SEQ ID NO: 37461 - DNA, 15 bp, Homo sapiens
gagtactcaccaccc

SEQ ID NO: 37462 - DNA, 15 bp, Homo sapiens
ggagtactcaccacc

SEQ ID NO: 37463 - DNA, 15 bp, Homo sapiens
gggagtactcaccac

SEQ ID NO: 37464 - DNA, 15 bp, Homo sapiens
tgggagtactcacca

SEQ ID NO: 37465 - DNA, 15 bp, Homo sapiens
ttgggagtactcacc

SEQ ID NO: 37466 - DNA, 15 bp, Homo sapiens
tttgggagtactcac

SEQ ID NO: 37467 - DNA, 15 bp, Homo sapiens
ctttgggagtactca

SEQ ID NO: 37468 - DNA, 15 bp, Homo sapiens
actttgggagtactc

SEQ ID NO: 37469 - DNA, 15 bp, Homo sapiens
tactttgggagtact

SEQ ID NO: 37470 - DNA, 15 bp, Homo sapiens
gtactttgggagtac

SEQ ID NO: 37471 - DNA, 15 bp, Homo sapiens
tgtactttgggagta

SEQ ID NO: 37472 - DNA, 15 bp, Homo sapiens
gtgtactttgggagt

SEQ ID NO: 37473 - DNA, 15 bp, Homo sapiens
agtgtactttgggag

SEQ ID NO: 37474 - DNA, 15 bp, Homo sapiens
aagtgtactttggga

SEQ ID NO: 37475 - DNA, 15 bp, Homo sapiens
gaagtgtactttggg

SEQ ID NO: 37476 - DNA, 15 bp, Homo sapiens
tgaagtgtactttgg

SEQ ID NO: 37477 - DNA, 15 bp, Homo sapiens
atgaagtgtactttg

SEQ ID NO: 37478 - DNA, 15 bp, Homo sapiens
aatgaagtgtacttt

SEQ ID NO: 37479 - DNA, 15 bp, Homo sapiens
gaatgaagtgtactt

SEQ ID NO: 37480 - DNA, 15 bp, Homo sapiens
ggaatgaagtgtact

SEQ ID NO: 37481 - DNA, 15 bp, Homo sapiens
aggaatgaagtgtac

SEQ ID NO: 37482 - DNA, 15 bp, Homo sapiens
taggaatgaagtgta

SEQ ID NO: 37483 - DNA, 15 bp, Homo sapiens
ctaggaatgaagtgt

SEQ ID NO: 37484 - DNA, 15 bp, Homo sapiens
gctaggaatgaagtg

SEQ ID NO: 37485 - DNA, 15 bp, Homo sapiens
agctaggaatgaagt

SEQ ID NO: 37486 - DNA, 15 bp, Homo sapiens
gagctaggaatgaag

SEQ ID NO: 37487 - DNA, 15 bp, Homo sapiens
tgagctaggaatgaa

SEQ ID NO: 37488 - DNA, 15 bp, Homo sapiens
ctgagctaggaatga

SEQ ID NO: 37489 - DNA, 15 bp, Homo sapiens
actgagctaggaatg

SEQ ID NO: 37490 - DNA, 15 bp, Homo sapiens
cactgagctaggaat

SEQ ID NO: 37491 - DNA, 15 bp, Homo sapiens
tcactgagctaggaa

SEQ ID NO: 37492 - DNA, 15 bp, Homo sapiens
atcactgagctagga

SEQ ID NO: 37493 - DNA, 15 bp, Homo sapiens
aatcactgagctagg

SEQ ID NO: 37494 - DNA, 15 bp, Homo sapiens
gaatcactgagctag

SEQ ID NO: 37495 - DNA, 15 bp, Homo sapiens
agaatcactgagcta

SEQ ID NO: 37496 - DNA, 15 bp, Homo sapiens
aagaatcactgagct

SEQ ID NO: 37497 - DNA, 15 bp, Homo sapiens
taagaatcactgagc

SEQ ID NO: 37498 - DNA, 15 bp, Homo sapiens
ataagaatcactgag

SEQ ID NO: 37499 - DNA, 15 bp, Homo sapiens
gataagaatcactga

SEQ ID NO: 37500 - DNA, 15 bp, Homo sapiens
agataagaatcactg

SEQ ID NO: 37501 - DNA, 15 bp, Homo sapiens
cagataagaatcact

SEQ ID NO: 37502 - DNA, 15 bp, Homo sapiens
tcagataagaatcac

SEQ ID NO: 37503 - DNA, 15 bp, Homo sapiens
ctcagataagaatca

SEQ ID NO: 37504 - DNA, 15 bp, Homo sapiens
actcagataagaatc

SEQ ID NO: 37505 - DNA, 15 bp, Homo sapiens
cactcagataagaat

SEQ ID NO: 37506 - DNA, 15 bp, Homo sapiens
acactcagataagaa

SEQ ID NO: 37507 - DNA, 15 bp, Homo sapiens
aacactcagataaga

SEQ ID NO: 37508 - DNA, 15 bp, Homo sapiens
taacactcagataag

SEQ ID NO: 37509 - DNA, 15 bp, Homo sapiens
ttaacactcagataa

SEQ ID NO: 37510 - DNA, 15 bp, Homo sapiens
tttaacactcagata

SEQ ID NO: 37511 - DNA, 15 bp, Homo sapiens
ctttaacactcagat

SEQ ID NO: 37512 - DNA, 15 bp, Homo sapiens
actttaacactcaga

SEQ ID NO: 37513 - DNA, 15 bp, Homo sapiens
aactttaacactcag

SEQ ID NO: 37514 - DNA, 15 bp, Homo sapiens
gaactttaacactca

SEQ ID NO: 37515 - DNA, 15 bp, Homo sapiens
ggaactttaacactc

SEQ ID NO: 37516 - DNA, 15 bp, Homo sapiens
aggaactttaacact

SEQ ID NO: 37517 - DNA, 15 bp, Homo sapiens
aaggaactttaacac

SEQ ID NO: 37518 - DNA, 15 bp, Homo sapiens
gaaggaactttaaca

SEQ ID NO: 37519 - DNA, 15 bp, Homo sapiens
agaaggaactttaac

SEQ ID NO: 37520 - DNA, 15 bp, Homo sapiens
aagaaggaactttaa

SEQ ID NO: 37521 - DNA, 15 bp, Homo sapiens
gaagaaggaacttta

SEQ ID NO: 37522 - DNA, 15 bp, Homo sapiens
tgaagaaggaacttt

SEQ ID NO: 37523 - DNA, 15 bp, Homo sapiens
ctgaagaaggaactt

SEQ ID NO: 37524 - DNA, 15 bp, Homo sapiens
gctgaagaaggaact

SEQ ID NO: 37525 - DNA, 15 bp, Homo sapiens
tgctgaagaaggaac

SEQ ID NO: 37526 - DNA, 15 bp, Homo sapiens
gtgctgaagaaggaa

SEQ ID NO: 37527 - DNA, 15 bp, Homo sapiens
ggtgctgaagaagga

SEQ ID NO: 37528 - DNA, 15 bp, Homo sapiens
gggtgctgaagaagg

SEQ ID NO: 37529 - DNA, 15 bp, Homo sapiens
ggggtgctgaagaag

SEQ ID NO: 37530 - DNA, 15 bp, Homo sapiens
cggggtgctgaagaa

SEQ ID NO: 37531 - DNA, 15 bp, Homo sapiens
acggggtgctgaaga

SEQ ID NO: 37532 - DNA, 15 bp, Homo sapiens
aacggggtgctgaag

SEQ ID NO: 37533 - DNA, 15 bp, Homo sapiens
gaacggggtgctgaa

SEQ ID NO: 37534 - DNA, 15 bp, Homo sapiens
ggaacggggtgctga

SEQ ID NO: 37535 - DNA, 15 bp, Homo sapiens
tggaacggggtgctg

SEQ ID NO: 37536 - DNA, 15 bp, Homo sapiens
gtggaacggggtgct

SEQ ID NO: 37537 - DNA, 15 bp, Homo sapiens
tgtggaacggggtgc

SEQ ID NO: 37538 - DNA, 15 bp, Homo sapiens
ctgtggaacggggtg

SEQ ID NO: 37539 - DNA, 15 bp, Homo sapiens
actgtggaacggggt

SEQ ID NO: 37540 - DNA, 15 bp, Homo sapiens
gactgtggaacgggg

SEQ ID NO: 37541 - DNA, 15 bp, Homo sapiens
ggactgtggaacggg

SEQ ID NO: 37542 - DNA, 15 bp, Homo sapiens
tggactgtggaacgg

SEQ ID NO: 37543 - DNA, 15 bp, Homo sapiens
ttggactgtggaacg

SEQ ID NO: 37544 - DNA, 15 bp, Homo sapiens
gttggactgtggaac

SEQ ID NO: 37545 - DNA, 15 bp, Homo sapiens
agttggactgtggaa

SEQ ID NO: 37546 - DNA, 15 bp, Homo sapiens
cagttggactgtgga

SEQ ID NO: 37547 - DNA, 15 bp, Homo sapiens
ccagttggactgtgg

SEQ ID NO: 37548 - DNA, 15 bp, Homo sapiens
cccagttggactgtg

SEQ ID NO: 37549 - DNA, 15 bp, Homo sapiens
tcccagttggactgt

SEQ ID NO: 37550 - DNA, 15 bp, Homo sapiens
ttcccagttggactg

SEQ ID NO: 37551 - DNA, 15 bp, Homo sapiens
gttcccagttggact

SEQ ID NO: 37552 - DNA, 15 bp, Homo sapiens
agttcccagttggac

SEQ ID NO: 37553 - DNA, 15 bp, Homo sapiens
aagttcccagttgga

SEQ ID NO: 37554 - DNA, 15 bp, Homo sapiens
aaagttcccagttgg

SEQ ID NO: 37555 - DNA, 15 bp, Homo sapiens
taaagttcccagttg

SEQ ID NO: 37556 - DNA, 15 bp, Homo sapiens
ttaaagttcccagtt

SEQ ID NO: 37557 - DNA, 15 bp, Homo sapiens
cttaaagttcccagt

SEQ ID NO: 37558 - DNA, 15 bp, Homo sapiens
tcttaaagttcccag

SEQ ID NO: 37559 - DNA, 15 bp, Homo sapiens
gtcttaaagttccca

SEQ ID NO: 37560 - DNA, 15 bp, Homo sapiens
ggtcttaaagttccc

SEQ ID NO: 37561 - DNA, 15 bp, Homo sapiens
aggtcttaaagttcc

SEQ ID NO: 37562 - DNA, 15 bp, Homo sapiens
aaggtcttaaagttc

SEQ ID NO: 37563 - DNA, 15 bp, Homo sapiens
aaaggtcttaaagtt

SEQ ID NO: 37564 - DNA, 15 bp, Homo sapiens
gaaaggtcttaaagt

SEQ ID NO: 37565 - DNA, 15 bp, Homo sapiens
agaaaggtcttaaag

SEQ ID NO: 37566 - DNA, 15 bp, Homo sapiens
aagaaaggtcttaaa

SEQ ID NO: 37567 - DNA, 15 bp, Homo sapiens
caagaaaggtcttaa

SEQ ID NO: 37568 - DNA, 15 bp, Homo sapiens
ccaagaaaggtctta

SEQ ID NO: 37569 - DNA, 15 bp, Homo sapiens
tccaagaaaggtctt

SEQ ID NO: 37570 - DNA, 15 bp, Homo sapiens
ctccaagaaaggtct

SEQ ID NO: 37571 - DNA, 15 bp, Homo sapiens
actccaagaaaggtc

SEQ ID NO: 37572 - DNA, 15 bp, Homo sapiens
gactccaagaaaggt

SEQ ID NO: 37573 - DNA, 15 bp, Homo sapiens
agactccaagaaagg

SEQ ID NO: 37574 - DNA, 15 bp, Homo sapiens
aagactccaagaaag

SEQ ID NO: 37575 - DNA, 15 bp, Homo sapiens
aaagactccaagaaa

SEQ ID NO: 37576 - DNA, 15 bp, Homo sapiens
gaaagactccaagaa

SEQ ID NO: 37577 - DNA, 15 bp, Homo sapiens
agaaagactccaaga

SEQ ID NO: 37578 - DNA, 15 bp, Homo sapiens
tagaaagactccaag

SEQ ID NO: 37579 - DNA, 15 bp, Homo sapiens
ctagaaagactccaa

SEQ ID NO: 37580 - DNA, 15 bp, Homo sapiens
cctagaaagactcca

SEQ ID NO: 37581 - DNA, 15 bp, Homo sapiens
tcctagaaagactcc

SEQ ID NO: 37582 - DNA, 15 bp, Homo sapiens
ttcctagaaagactc

SEQ ID NO: 37583 - DNA, 15 bp, Homo sapiens
gttcctagaaagact

SEQ ID NO: 37584 - DNA, 15 bp, Homo sapiens
agttcctagaaagac

SEQ ID NO: 37585 - DNA, 15 bp, Homo sapiens
gagttcctagaaaga

SEQ ID NO: 37586 - DNA, 15 bp, Homo sapiens
tgagttcctagaaag

SEQ ID NO: 37587 - DNA, 15 bp, Homo sapiens
ttgagttcctagaaa

SEQ ID NO: 37588 - DNA, 15 bp, Homo sapiens
cttgagttcctagaa

SEQ ID NO: 37589 - DNA, 15 bp, Homo sapiens
acttgagttcctaga

SEQ ID NO: 37590 - DNA, 15 bp, Homo sapiens
gacttgagttcctag

SEQ ID NO: 37591 - DNA, 15 bp, Homo sapiens
agacttgagttccta

SEQ ID NO: 37592 - DNA, 15 bp, Homo sapiens
cagacttgagttcct

SEQ ID NO: 37593 - DNA, 15 bp, Homo sapiens
gcagacttgagttcc

SEQ ID NO: 37594 - DNA, 15 bp, Homo sapiens
agcagacttgagttc

SEQ ID NO: 37595 - DNA, 15 bp, Homo sapiens
tagcagacttgagtt

SEQ ID NO: 37596 - DNA, 15 bp, Homo sapiens
gtagcagacttgagt

SEQ ID NO: 37597 - DNA, 15 bp, Homo sapiens
agtagcagacttgag

SEQ ID NO: 37598 - DNA, 15 bp, Homo sapiens
aagtagcagacttga

SEQ ID NO: 37599 - DNA, 15 bp, Homo sapiens
taagtagcagacttg

SEQ ID NO: 37600 - DNA, 15 bp, Homo sapiens
ataagtagcagactt

SEQ ID NO: 37601 - DNA, 15 bp, Homo sapiens
tataagtagcagact

SEQ ID NO: 37602 - DNA, 15 bp, Homo sapiens
gtataagtagcagac

SEQ ID NO: 37603 - DNA, 15 bp, Homo sapiens
tgtataagtagcaga

SEQ ID NO: 37604 - DNA, 15 bp, Homo sapiens
ctgtataagtagcag

SEQ ID NO: 37605 - DNA, 15 bp, Homo sapiens
tctgtataagtagca

SEQ ID NO: 37606 - DNA, 15 bp, Homo sapiens
ttctgtataagtagc

SEQ ID NO: 37607 - DNA, 15 bp, Homo sapiens
gttctgtataagtag

SEQ ID NO: 37608 - DNA, 15 bp, Homo sapiens
tgttctgtataagta

SEQ ID NO: 37609 - DNA, 15 bp, Homo sapiens
ctgttctgtataagt

SEQ ID NO: 37610 - DNA, 15 bp, Homo sapiens
actgttctgtataag

SEQ ID NO: 37611 - DNA, 15 bp, Homo sapiens
cactgttctgtataa

SEQ ID NO: 37612 - DNA, 15 bp, Homo sapiens
ccactgttctgtata

SEQ ID NO: 37613 - DNA, 15 bp, Homo sapiens
gccactgttctgtat

SEQ ID NO: 37614 - DNA, 15 bp, Homo sapiens
agccactgttctgta

SEQ ID NO: 37615 - DNA, 15 bp, Homo sapiens
aagccactgttctgt

SEQ ID NO: 37616 - DNA, 15 bp, Homo sapiens
aaagccactgttctg

SEQ ID NO: 37617 - DNA, 15 bp, Homo sapiens
caaagccactgttct

SEQ ID NO: 37618 - DNA, 15 bp, Homo sapiens
ccaaagccactgttc

SEQ ID NO: 37619 - DNA, 15 bp, Homo sapiens
accaaagccactgtt

SEQ ID NO: 37620 - DNA, 15 bp, Homo sapiens
gaccaaagccactgt

SEQ ID NO: 37621 - DNA, 15 bp, Homo sapiens
ggaccaaagccactg

SEQ ID NO: 37622 - DNA, 15 bp, Homo sapiens
gggaccaaagccact

SEQ ID NO: 37623 - DNA, 15 bp, Homo sapiens
ggggaccaaagccac

SEQ ID NO: 37624 - DNA, 15 bp, Homo sapiens
tggggaccaaagcca

SEQ ID NO: 37625 - DNA, 15 bp, Homo sapiens
ctggggaccaaagcc

SEQ ID NO: 37626 - DNA, 15 bp, Homo sapiens
actggggaccaaagc

SEQ ID NO: 37627 - DNA, 15 bp, Homo sapiens
aactggggaccaaag

SEQ ID NO: 37628 - DNA, 15 bp, Homo sapiens
caactggggaccaaa

SEQ ID NO: 37629 - DNA, 15 bp, Homo sapiens
acaactggggaccaa

SEQ ID NO: 37630 - DNA, 15 bp, Homo sapiens
cacaactggggacca

SEQ ID NO: 37631 - DNA, 15 bp, Homo sapiens
gcacaactggggacc

SEQ ID NO: 37632 - DNA, 15 bp, Homo sapiens
ggcacaactggggac

SEQ ID NO: 37633 - DNA, 15 bp, Homo sapiens
aggcacaactgggga

SEQ ID NO: 37634 - DNA, 15 bp, Homo sapiens
aaggcacaactgggg

SEQ ID NO: 37635 - DNA, 15 bp, Homo sapiens
caaggcacaactggg

SEQ ID NO: 37636 - DNA, 15 bp, Homo sapiens
gcaaggcacaactgg

SEQ ID NO: 37637 - DNA, 15 bp, Homo sapiens
tgcaaggcacaactg

SEQ ID NO: 37638 - DNA, 15 bp, Homo sapiens
ctgcaaggcacaact

SEQ ID NO: 37639 - DNA, 15 bp, Homo sapiens
actgcaaggcacaac

SEQ ID NO: 37640 - DNA, 15 bp, Homo sapiens
tactgcaaggcacaa

SEQ ID NO: 37641 - DNA, 15 bp, Homo sapiens
atactgcaaggcaca

SEQ ID NO: 37642 - DNA, 15 bp, Homo sapiens
aatactgcaaggcac

SEQ ID NO: 37643 - DNA, 15 bp, Homo sapiens
aaatactgcaaggca

SEQ ID NO: 37644 - DNA, 15 bp, Homo sapiens
aaaatactgcaaggc

SEQ ID NO: 37645 - DNA, 15 bp, Homo sapiens
aaaaatactgcaagg

SEQ ID NO: 37646 - DNA, 15 bp, Homo sapiens
caaaaatactgcaag

SEQ ID NO: 37647 - DNA, 15 bp, Homo sapiens
acaaaaatactgcaa

SEQ ID NO: 37648 - DNA, 15 bp, Homo sapiens
cacaaaaatactgca

SEQ ID NO: 37649 - DNA, 15 bp, Homo sapiens
acacaaaaatactgc

SEQ ID NO: 37650 - DNA, 15 bp, Homo sapiens
aacacaaaaatactg

SEQ ID NO: 37651 - DNA, 15 bp, Homo sapiens
gaacacaaaaatact

SEQ ID NO: 37652 - DNA, 15 bp, Homo sapiens
tgaacacaaaaatac

SEQ ID NO: 37653 - DNA, 15 bp, Homo sapiens
ctgaacacaaaaata

SEQ ID NO: 37654 - DNA, 15 bp, Homo sapiens
cctgaacacaaaaat

SEQ ID NO: 37655 - DNA, 15 bp, Homo sapiens
tcctgaacacaaaaa

SEQ ID NO: 37656 - DNA, 15 bp, Homo sapiens
ttcctgaacacaaaa

SEQ ID NO: 37657 - DNA, 15 bp, Homo sapiens
cttcctgaacacaaa

SEQ ID NO: 37658 - DNA, 15 bp, Homo sapiens
tcttcctgaacacaa

SEQ ID NO: 37659 - DNA, 15 bp, Homo sapiens
ttcttcctgaacaca

SEQ ID NO: 37660 - DNA, 15 bp, Homo sapiens
tttcttcctgaacac

SEQ ID NO: 37661 - DNA, 15 bp, Homo sapiens
gtttcttcctgaaca

SEQ ID NO: 37662 - DNA, 15 bp, Homo sapiens
tgtttcttcctgaac

SEQ ID NO: 37663 - DNA, 15 bp, Homo sapiens
ctgtttcttcctgaa

SEQ ID NO: 37664 - DNA, 15 bp, Homo sapiens
actgtttcttcctga

SEQ ID NO: 37665 - DNA, 15 bp, Homo sapiens
tactgtttcttcctg

SEQ ID NO: 37666 - DNA, 15 bp, Homo sapiens
ctactgtttcttcct

SEQ ID NO: 37667 - DNA, 15 bp, Homo sapiens
gctactgtttcttcc

SEQ ID NO: 37668 - DNA, 15 bp, Homo sapiens
agctactgtttcttc

SEQ ID NO: 37669 - DNA, 15 bp, Homo sapiens
gagctactgtttctt

SEQ ID NO: 37670 - DNA, 15 bp, Homo sapiens
agagctactgtttct

SEQ ID NO: 37671 - DNA, 15 bp, Homo sapiens
aagagctactgtttc

SEQ ID NO: 37672 - DNA, 15 bp, Homo sapiens
caagagctactgttt

SEQ ID NO: 37673 - DNA, 15 bp, Homo sapiens
ccaagagctactgtt

SEQ ID NO: 37674 - DNA, 15 bp, Homo sapiens
tccaagagctactgt

SEQ ID NO: 37675 - DNA, 15 bp, Homo sapiens
atccaagagctactg

SEQ ID NO: 37676 - DNA, 15 bp, Homo sapiens
tatccaagagctact

SEQ ID NO: 37677 - DNA, 15 bp, Homo sapiens
ttatccaagagctac

SEQ ID NO: 37678 - DNA, 15 bp, Homo sapiens
tttatccaagagcta

SEQ ID NO: 37679 - DNA, 15 bp, Homo sapiens
ctttatccaagagct

SEQ ID NO: 37680 - DNA, 15 bp, Homo sapiens
tctttatccaagagc

SEQ ID NO: 37681 - DNA, 15 bp, Homo sapiens
ttctttatccaagag

SEQ ID NO: 37682 - DNA, 15 bp, Homo sapiens
cttctttatccaaga

SEQ ID NO: 37683 - DNA, 15 bp, Homo sapiens
gcttctttatccaag

SEQ ID NO: 37684 - DNA, 15 bp, Homo sapiens
agcttctttatccaa

SEQ ID NO: 37685 - DNA, 15 bp, Homo sapiens
tagcttctttatcca

SEQ ID NO: 37686 - DNA, 15 bp, Homo sapiens
ctagcttctttatcc

SEQ ID NO: 37687 - DNA, 15 bp, Homo sapiens
gctagcttctttatc

SEQ ID NO: 37688 - DNA, 15 bp, Homo sapiens
agctagcttctttat

SEQ ID NO: 37689 - DNA, 15 bp, Homo sapiens
tagctagcttcttta

SEQ ID NO: 37690 - DNA, 15 bp, Homo sapiens
ctagctagcttcttt

SEQ ID NO: 37691 - DNA, 15 bp, Homo sapiens
tctagctagcttctt

SEQ ID NO: 37692 - DNA, 15 bp, Homo sapiens
ttctagctagcttct

SEQ ID NO: 37693 - DNA, 15 bp, Homo sapiens
tttctagctagcttc

SEQ ID NO: 37694 - DNA, 15 bp, Homo sapiens
gtttctagctagctt

SEQ ID NO: 37695 - DNA, 15 bp, Homo sapiens
agtttctagctagct

SEQ ID NO: 37696 - DNA, 15 bp, Homo sapiens
gagtttctagctagc

SEQ ID NO: 37697 - DNA, 15 bp, Homo sapiens
agagtttctagctag

SEQ ID NO: 37698 - DNA, 15 bp, Homo sapiens
cagagtttctagcta

SEQ ID NO: 37699 - DNA, 15 bp, Homo sapiens
acagagtttctagct

SEQ ID NO: 37700 - DNA, 15 bp, Homo sapiens
aacagagtttctagc

SEQ ID NO: 37701 - DNA, 15 bp, Homo sapiens
caacagagtttctag

SEQ ID NO: 37702 - DNA, 15 bp, Homo sapiens
gcaacagagtttcta

SEQ ID NO: 37703 - DNA, 15 bp, Homo sapiens
agcaacagagtttct

SEQ ID NO: 37704 - DNA, 15 bp, Homo sapiens
tagcaacagagtttc

SEQ ID NO: 37705 - DNA, 15 bp, Homo sapiens
atagcaacagagttt

SEQ ID NO: 37706 - DNA, 15 bp, Homo sapiens
catagcaacagagtt

SEQ ID NO: 37707 - DNA, 15 bp, Homo sapiens
ccatagcaacagagt

SEQ ID NO: 37708 - DNA, 15 bp, Homo sapiens
gccatagcaacagag

SEQ ID NO: 37709 - DNA, 15 bp, Homo sapiens
tgccatagcaacaga

SEQ ID NO: 37710 - DNA, 15 bp, Homo sapiens
ctgccatagcaacag

SEQ ID NO: 37711 - DNA, 15 bp, Homo sapiens
actgccatagcaaca

SEQ ID NO: 37712 - DNA, 15 bp, Homo sapiens
cactgccatagcaac

SEQ ID NO: 37713 - DNA, 15 bp, Homo sapiens
gcactgccatagcaa

SEQ ID NO: 37714 - DNA, 15 bp, Homo sapiens
agcactgccatagca

SEQ ID NO: 37715 - DNA, 15 bp, Homo sapiens
aagcactgccatagc

SEQ ID NO: 37716 - DNA, 15 bp, Homo sapiens
gaagcactgccatag

SEQ ID NO: 37717 - DNA, 15 bp, Homo sapiens
tgaagcactgccata

SEQ ID NO: 37718 - DNA, 15 bp, Homo sapiens
ttgaagcactgccat

SEQ ID NO: 37719 - DNA, 15 bp, Homo sapiens
tttgaagcactgcca

SEQ ID NO: 37720 - DNA, 15 bp, Homo sapiens
ttttgaagcactgcc

SEQ ID NO: 37721 - DNA, 15 bp, Homo sapiens
attttgaagcactgc

SEQ ID NO: 37722 - DNA, 15 bp, Homo sapiens
cattttgaagcactg

SEQ ID NO: 37723 - DNA, 15 bp, Homo sapiens
acattttgaagcact

SEQ ID NO: 37724 - DNA, 15 bp, Homo sapiens
tacattttgaagcac

SEQ ID NO: 37725 - DNA, 15 bp, Homo sapiens
atacattttgaagca

SEQ ID NO: 37726 - DNA, 15 bp, Homo sapiens
aatacattttgaagc

SEQ ID NO: 37727 - DNA, 15 bp, Homo sapiens
aaatacattttgaag

SEQ ID NO: 37728 - DNA, 15 bp, Homo sapiens
gaaatacattttgaa

SEQ ID NO: 37729 - DNA, 15 bp, Homo sapiens
ggaaatacattttga

SEQ ID NO: 37730 - DNA, 15 bp, Homo sapiens
aggaaatacattttg

SEQ ID NO: 37731 - DNA, 15 bp, Homo sapiens
aaggaaatacatttt

SEQ ID NO: 37732 - DNA, 15 bp, Homo sapiens
taaggaaatacattt

SEQ ID NO: 37733 - DNA, 15 bp, Homo sapiens
ttaaggaaatacatt

SEQ ID NO: 37734 - DNA, 15 bp, Homo sapiens
tttaaggaaatacat

SEQ ID NO: 37735 - DNA, 15 bp, Homo sapiens
atttaaggaaataca

SEQ ID NO: 37736 - DNA, 15 bp, Homo sapiens
catttaaggaaatac

SEQ ID NO: 37737 - DNA, 15 bp, Homo sapiens
gcatttaaggaaata

SEQ ID NO: 37738 - DNA, 15 bp, Homo sapiens
agcatttaaggaaat

SEQ ID NO: 37739 - DNA, 15 bp, Homo sapiens
aagcatttaaggaaa

SEQ ID NO: 37740 - DNA, 15 bp, Homo sapiens
aaagcatttaaggaa

SEQ ID NO: 37741 - DNA, 15 bp, Homo sapiens
gaaagcatttaagga

SEQ ID NO: 37742 - DNA, 15 bp, Homo sapiens
agaaagcatttaagg

SEQ ID NO: 37743 - DNA, 15 bp, Homo sapiens
aagaaagcatttaag

SEQ ID NO: 37744 - DNA, 15 bp, Homo sapiens
aaagaaagcatttaa

SEQ ID NO: 37745 - DNA, 15 bp, Homo sapiens
caaagaaagcattta

SEQ ID NO: 37746 - DNA, 15 bp, Homo sapiens
acaaagaaagcattt

SEQ ID NO: 37747 - DNA, 15 bp, Homo sapiens
tacaaagaaagcatt

SEQ ID NO: 37748 - DNA, 15 bp, Homo sapiens
ttacaaagaaagcat

SEQ ID NO: 37749 - DNA, 15 bp, Homo sapiens
gttacaaagaaagca

SEQ ID NO: 37750 - DNA, 15 bp, Homo sapiens
agttacaaagaaagc

SEQ ID NO: 37751 - DNA, 15 bp, Homo sapiens
tagttacaaagaaag

SEQ ID NO: 37752 - DNA, 15 bp, Homo sapiens
atagttacaaagaaa

SEQ ID NO: 37753 - DNA, 15 bp, Homo sapiens
gatagttacaaagaa

SEQ ID NO: 37754 - DNA, 15 bp, Homo sapiens
agatagttacaaaga

SEQ ID NO: 37755 - DNA, 15 bp, Homo sapiens
aagatagttacaaag

SEQ ID NO: 37756 - DNA, 15 bp, Homo sapiens
gaagatagttacaaa

SEQ ID NO: 37757 - DNA, 15 bp, Homo sapiens
tgaagatagttacaa

SEQ ID NO: 37758 - DNA, 15 bp, Homo sapiens
atgaagatagttaca

SEQ ID NO: 37759 - DNA, 15 bp, Homo sapiens
aatgaagatagttac

SEQ ID NO: 37760 - DNA, 15 bp, Homo sapiens
aaatgaagatagtta

SEQ ID NO: 37761 - DNA, 15 bp, Homo sapiens
taaatgaagatagtt

SEQ ID NO: 37762 - DNA, 15 bp, Homo sapiens
ctaaatgaagatagt

SEQ ID NO: 37763 - DNA, 15 bp, Homo sapiens
actaaatgaagatag

SEQ ID NO: 37764 - DNA, 15 bp, Homo sapiens
aactaaatgaagata

SEQ ID NO: 37765 - DNA, 15 bp, Homo sapiens
gaactaaatgaagat

SEQ ID NO: 37766 - DNA, 15 bp, Homo sapiens
tgaactaaatgaaga

SEQ ID NO: 37767 - DNA, 15 bp, Homo sapiens
atgaactaaatgaag

SEQ ID NO: 37768 - DNA, 15 bp, Homo sapiens
gatgaactaaatgaa

SEQ ID NO: 37769 - DNA, 15 bp, Homo sapiens
agatgaactaaatga

SEQ ID NO: 37770 - DNA, 15 bp, Homo sapiens
gagatgaactaaatg

SEQ ID NO: 37771 - DNA, 15 bp, Homo sapiens
agagatgaactaaat

SEQ ID NO: 37772 - DNA, 15 bp, Homo sapiens
gagagatgaactaaa

SEQ ID NO: 37773 - DNA, 15 bp, Homo sapiens
tgagagatgaactaa

SEQ ID NO: 37774 - DNA, 15 bp, Homo sapiens
ctgagagatgaacta

SEQ ID NO: 37775 - DNA, 15 bp, Homo sapiens
tctgagagatgaact

SEQ ID NO: 37776 - DNA, 15 bp, Homo sapiens
atctgagagatgaac

SEQ ID NO: 37777 - DNA, 15 bp, Homo sapiens
tatctgagagatgaa

SEQ ID NO: 37778 - DNA, 15 bp, Homo sapiens
ttatctgagagatga

SEQ ID NO: 37779 - DNA, 15 bp, Homo sapiens
attatctgagagatg

SEQ ID NO: 37780 - DNA, 15 bp, Homo sapiens
cattatctgagagat

SEQ ID NO: 37781 - DNA, 15 bp, Homo sapiens
tcattatctgagaga

SEQ ID NO: 37782 - DNA, 15 bp, Homo sapiens
ctcattatctgagag

SEQ ID NO: 37783 - DNA, 15 bp, Homo sapiens
tctcattatctgaga

SEQ ID NO: 37784 - DNA, 15 bp, Homo sapiens
ctctcattatctgag

SEQ ID NO: 37785 - DNA, 15 bp, Homo sapiens
tctctcattatctga

SEQ ID NO: 37786 - DNA, 15 bp, Homo sapiens
atctctcattatctg

SEQ ID NO: 37787 - DNA, 15 bp, Homo sapiens
gatctctcattatct

SEQ ID NO: 37788 - DNA, 15 bp, Homo sapiens
tgatctctcattatc

SEQ ID NO: 37789 - DNA, 15 bp, Homo sapiens
ctgatctctcattat

SEQ ID NO: 37790 - DNA, 15 bp, Homo sapiens
tctgatctctcatta

SEQ ID NO: 37791 - DNA, 15 bp, Homo sapiens
ctctgatctctcatt

SEQ ID NO: 37792 - DNA, 15 bp, Homo sapiens
actctgatctctcat

SEQ ID NO: 37793 - DNA, 15 bp, Homo sapiens
gactctgatctctca

SEQ ID NO: 37794 - DNA, 15 bp, Homo sapiens
ggactctgatctctc

SEQ ID NO: 37795 - DNA, 15 bp, Homo sapiens
gggactctgatctct

SEQ ID NO: 37796 - DNA, 15 bp, Homo sapiens
tgggactctgatctc

SEQ ID NO: 37797 - DNA, 15 bp, Homo sapiens
atgggactctgatct

SEQ ID NO: 37798 - DNA, 15 bp, Homo sapiens
gatgggactctgatc

SEQ ID NO: 37799 - DNA, 15 bp, Homo sapiens
ggatgggactctgat

SEQ ID NO: 37800 - DNA, 15 bp, Homo sapiens
gggatgggactctga

SEQ ID NO: 37801 - DNA, 15 bp, Homo sapiens
ggggatgggactctg

SEQ ID NO: 37802 - DNA, 15 bp, Homo sapiens
tggggatgggactct

SEQ ID NO: 37803 - DNA, 15 bp, Homo sapiens
ctggggatgggactc

SEQ ID NO: 37804 - DNA, 15 bp, Homo sapiens
actggggatgggact

SEQ ID NO: 37805 - DNA, 15 bp, Homo sapiens
tactggggatgggac

SEQ ID NO: 37806 - DNA, 15 bp, Homo sapiens
atactggggatggga

SEQ ID NO: 37807 - DNA, 15 bp, Homo sapiens
tatactggggatggg

SEQ ID NO: 37808 - DNA, 15 bp, Homo sapiens
ttatactggggatgg

SEQ ID NO: 37809 - DNA, 15 bp, Homo sapiens
attatactggggatg

SEQ ID NO: 37810 - DNA, 15 bp, Homo sapiens
tattatactggggat

SEQ ID NO: 37811 - DNA, 15 bp, Homo sapiens
gtattatactgggga

SEQ ID NO: 37812 - DNA, 15 bp, Homo sapiens
agtattatactgggg

SEQ ID NO: 37813 - DNA, 15 bp, Homo sapiens
gagtattatactggg

SEQ ID NO: 37814 - DNA, 15 bp, Homo sapiens
agagtattatactgg

SEQ ID NO: 37815 - DNA, 15 bp, Homo sapiens
aagagtattatactg

SEQ ID NO: 37816 - DNA, 15 bp, Homo sapiens
gaagagtattatact

SEQ ID NO: 37817 - DNA, 15 bp, Homo sapiens
agaagagtattatac

SEQ ID NO: 37818 - DNA, 15 bp, Homo sapiens
aagaagagtattata

SEQ ID NO: 37819 - DNA, 15 bp, Homo sapiens
aaagaagagtattat

SEQ ID NO: 37820 - DNA, 15 bp, Homo sapiens
taaagaagagtatta

SEQ ID NO: 37821 - DNA, 15 bp, Homo sapiens
ctaaagaagagtatt

SEQ ID NO: 37822 - DNA, 15 bp, Homo sapiens
cctaaagaagagtat

SEQ ID NO: 37823 - DNA, 15 bp, Homo sapiens
ccctaaagaagagta

SEQ ID NO: 37824 - DNA, 15 bp, Homo sapiens
accctaaagaagagt

SEQ ID NO: 37825 - DNA, 15 bp, Homo sapiens
taccctaaagaagag

SEQ ID NO: 37826 - DNA, 15 bp, Homo sapiens
gtaccctaaagaaga

SEQ ID NO: 37827 - DNA, 15 bp, Homo sapiens
agtaccctaaagaag

SEQ ID NO: 37828 - DNA, 15 bp, Homo sapiens
aagtaccctaaagaa

SEQ ID NO: 37829 - DNA, 15 bp, Homo sapiens
aaagtaccctaaaga

SEQ ID NO: 37830 - DNA, 15 bp, Homo sapiens
gaaagtaccctaaag

SEQ ID NO: 37831 - DNA, 15 bp, Homo sapiens
tgaaagtaccctaaa

SEQ ID NO: 37832 - DNA, 15 bp, Homo sapiens
gtgaaagtaccctaa

SEQ ID NO: 37833 - DNA, 15 bp, Homo sapiens
ggtgaaagtacccta

SEQ ID NO: 37834 - DNA, 15 bp, Homo sapiens
tggtgaaagtaccct

SEQ ID NO: 37835 - DNA, 15 bp, Homo sapiens
atggtgaaagtaccc

SEQ ID NO: 37836 - DNA, 15 bp, Homo sapiens
gatggtgaaagtacc

SEQ ID NO: 37837 - DNA, 15 bp, Homo sapiens
agatggtgaaagtac

SEQ ID NO: 37838 - DNA, 15 bp, Homo sapiens
aagatggtgaaagta

SEQ ID NO: 37839 - DNA, 15 bp, Homo sapiens
gaagatggtgaaagt

SEQ ID NO: 37840 - DNA, 15 bp, Homo sapiens
tgaagatggtgaaag

SEQ ID NO: 37841 - DNA, 15 bp, Homo sapiens
ctgaagatggtgaaa

SEQ ID NO: 37842 - DNA, 15 bp, Homo sapiens
actgaagatggtgaa

SEQ ID NO: 37843 - DNA, 15 bp, Homo sapiens
gactgaagatggtga

SEQ ID NO: 37844 - DNA, 15 bp, Homo sapiens
agactgaagatggtg

SEQ ID NO: 37845 - DNA, 15 bp, Homo sapiens
tagactgaagatggt

SEQ ID NO: 37846 - DNA, 15 bp, Homo sapiens
ttagactgaagatgg

SEQ ID NO: 37847 - DNA, 15 bp, Homo sapiens
tttagactgaagatg

SEQ ID NO: 37848 - DNA, 15 bp, Homo sapiens
gtttagactgaagat

SEQ ID NO: 37849 - DNA, 15 bp, Homo sapiens
tgtttagactgaaga

SEQ ID NO: 37850 - DNA, 15 bp, Homo sapiens
gtgtttagactgaag

SEQ ID NO: 37851 - DNA, 15 bp, Homo sapiens
tgtgtttagactgaa

SEQ ID NO: 37852 - DNA, 15 bp, Homo sapiens
ctgtgtttagactga

SEQ ID NO: 37853 - DNA, 15 bp, Homo sapiens
tctgtgtttagactg

SEQ ID NO: 37854 - DNA, 15 bp, Homo sapiens
gtctgtgtttagact

SEQ ID NO: 37855 - DNA, 15 bp, Homo sapiens
agtctgtgtttagac

SEQ ID NO: 37856 - DNA, 15 bp, Homo sapiens
tagtctgtgtttaga

SEQ ID NO: 37857 - DNA, 15 bp, Homo sapiens
ctagtctgtgtttag

SEQ ID NO: 37858 - DNA, 15 bp, Homo sapiens
tctagtctgtgttta

SEQ ID NO: 37859 - DNA, 15 bp, Homo sapiens
gtctagtctgtgttt

SEQ ID NO: 37860 - DNA, 15 bp, Homo sapiens
agtctagtctgtgtt

SEQ ID NO: 37861 - DNA, 15 bp, Homo sapiens
aagtctagtctgtgt

SEQ ID NO: 37862 - DNA, 15 bp, Homo sapiens
aaagtctagtctgtg

SEQ ID NO: 37863 - DNA, 15 bp, Homo sapiens
gaaagtctagtctgt

SEQ ID NO: 37864 - DNA, 15 bp, Homo sapiens
tgaaagtctagtctg

SEQ ID NO: 37865 - DNA, 15 bp, Homo sapiens
ttgaaagtctagtct

SEQ ID NO: 37866 - DNA, 15 bp, Homo sapiens
attgaaagtctagtc

SEQ ID NO: 37867 - DNA, 15 bp, Homo sapiens
aattgaaagtctagt

SEQ ID NO: 37868 - DNA, 15 bp, Homo sapiens
taattgaaagtctag

SEQ ID NO: 37869 - DNA, 15 bp, Homo sapiens
ataattgaaagtcta

SEQ ID NO: 37870 - DNA, 15 bp, Homo sapiens
tataattgaaagtct

SEQ ID NO: 37871 - DNA, 15 bp, Homo sapiens
ttataattgaaagtc

SEQ ID NO: 37872 - DNA, 15 bp, Homo sapiens
attataattgaaagt

SEQ ID NO: 37873 - DNA, 15 bp, Homo sapiens
cattataattgaaag

SEQ ID NO: 37874 - DNA, 15 bp, Homo sapiens
acattataattgaaa

SEQ ID NO: 37875 - DNA, 15 bp, Homo sapiens
cacattataattgaa

SEQ ID NO: 37876 - DNA, 15 bp, Homo sapiens
acacattataattga

SEQ ID NO: 37877 - DNA, 15 bp, Homo sapiens
tacacattataattg

SEQ ID NO: 37878 - DNA, 15 bp, Homo sapiens
ttacacattataatt

SEQ ID NO: 37879 - DNA, 15 bp, Homo sapiens
cttacacattataat

SEQ ID NO: 37880 - DNA, 15 bp, Homo sapiens
tcttacacattataa

SEQ ID NO: 37881 - DNA, 15 bp, Homo sapiens
atcttacacattata

SEQ ID NO: 37882 - DNA, 15 bp, Homo sapiens
aatcttacacattat

SEQ ID NO: 37883 - DNA, 15 bp, Homo sapiens
aaatcttacacatta

SEQ ID NO: 37884 - DNA, 15 bp, Homo sapiens
taaatcttacacatt

SEQ ID NO: 37885 - DNA, 15 bp, Homo sapiens
ttaaatcttacacat

SEQ ID NO: 37886 - DNA, 15 bp, Homo sapiens
tttaaatcttacaca

SEQ ID NO: 37887 - DNA, 15 bp, Homo sapiens
ttttaaatcttacac

SEQ ID NO: 37888 - DNA, 15 bp, Homo sapiens
attttaaatcttaca

SEQ ID NO: 37889 - DNA, 15 bp, Homo sapiens
cattttaaatcttac

SEQ ID NO: 37890 - DNA, 15 bp, Homo sapiens
acattttaaatctta

SEQ ID NO: 37891 - DNA, 15 bp, Homo sapiens
aacattttaaatctt

SEQ ID NO: 37892 - DNA, 15 bp, Homo sapiens
taacattttaaatct

SEQ ID NO: 37893 - DNA, 15 bp, Homo sapiens
ataacattttaaatc

SEQ ID NO: 37894 - DNA, 15 bp, Homo sapiens
aataacattttaaat

SEQ ID NO: 37895 - DNA, 15 bp, Homo sapiens
taataacattttaaa

SEQ ID NO: 37896 - DNA, 15 bp, Homo sapiens
ataataacattttaa

SEQ ID NO: 37897 - DNA, 15 bp, Homo sapiens
aataataacatttta

SEQ ID NO: 37898 - DNA, 15 bp, Homo sapiens
caataataacatttt

SEQ ID NO: 37899 - DNA, 15 bp, Homo sapiens
acaataataacattt

SEQ ID NO: 37900 - DNA, 15 bp, Homo sapiens
cacaataataacatt

SEQ ID NO: 37901 - DNA, 15 bp, Homo sapiens
acacaataataacat

SEQ ID NO: 37902 - DNA, 15 bp, Homo sapiens
cacacaataataaca

SEQ ID NO: 37903 - DNA, 15 bp, Homo sapiens
tcacacaataataac

SEQ ID NO: 37904 - DNA, 15 bp, Homo sapiens
gtcacacaataataa

SEQ ID NO: 37905 - DNA, 15 bp, Homo sapiens
agtcacacaataata

SEQ ID NO: 37906 - DNA, 15 bp, Homo sapiens
aagtcacacaataat

SEQ ID NO: 37907 - DNA, 15 bp, Homo sapiens
aaagtcacacaataa

SEQ ID NO: 37908 - DNA, 15 bp, Homo sapiens
caaagtcacacaata

SEQ ID NO: 37909 - DNA, 15 bp, Homo sapiens
tcaaagtcacacaat

SEQ ID NO: 37910 - DNA, 15 bp, Homo sapiens
ttcaaagtcacacaa

SEQ ID NO: 37911 - DNA, 15 bp, Homo sapiens
attcaaagtcacaca

SEQ ID NO: 37912 - DNA, 15 bp, Homo sapiens
tattcaaagtcacac

SEQ ID NO: 37913 - DNA, 15 bp, Homo sapiens
atattcaaagtcaca

SEQ ID NO: 37914 - DNA, 15 bp, Homo sapiens
gatattcaaagtcac

SEQ ID NO: 37915 - DNA, 15 bp, Homo sapiens
agatattcaaagtca

SEQ ID NO: 37916 - DNA, 15 bp, Homo sapiens
cagatattcaaagtc

SEQ ID NO: 37917 - DNA, 15 bp, Homo sapiens
acagatattcaaagt

SEQ ID NO: 37918 - DNA, 15 bp, Homo sapiens
cacagatattcaaag

SEQ ID NO: 37919 - DNA, 15 bp, Homo sapiens
acacagatattcaaa

SEQ ID NO: 37920 - DNA, 15 bp, Homo sapiens
tacacagatattcaa

SEQ ID NO: 37921 - DNA, 15 bp, Homo sapiens
ttacacagatattca

SEQ ID NO: 37922 - DNA, 15 bp, Homo sapiens
tttacacagatattc

SEQ ID NO: 37923 - DNA, 15 bp, Homo sapiens
atttacacagatatt

SEQ ID NO: 37924 - DNA, 15 bp, Homo sapiens
gatttacacagatat

SEQ ID NO: 37925 - DNA, 15 bp, Homo sapiens
agatttacacagata

SEQ ID NO: 37926 - DNA, 15 bp, Homo sapiens
tagatttacacagat

SEQ ID NO: 37927 - DNA, 15 bp, Homo sapiens
gtagatttacacaga

SEQ ID NO: 37928 - DNA, 15 bp, Homo sapiens
agtagatttacacag

SEQ ID NO: 37929 - DNA, 15 bp, Homo sapiens
tagtagatttacaca

SEQ ID NO: 37930 - DNA, 15 bp, Homo sapiens
atagtagatttacac

SEQ ID NO: 37931 - DNA, 15 bp, Homo sapiens
gatagtagatttaca

SEQ ID NO: 37932 - DNA, 15 bp, Homo sapiens
agatagtagatttac

SEQ ID NO: 37933 - DNA, 15 bp, Homo sapiens
gagatagtagattta

SEQ ID NO: 37934 - DNA, 15 bp, Homo sapiens
ggagatagtagattt

SEQ ID NO: 37935 - DNA, 15 bp, Homo sapiens
aggagatagtagatt

SEQ ID NO: 37936 - DNA, 15 bp, Homo sapiens
gaggagatagtagat

SEQ ID NO: 37937 - DNA, 15 bp, Homo sapiens
agaggagatagtaga

SEQ ID NO: 37938 - DNA, 15 bp, Homo sapiens
aagaggagatagtag

SEQ ID NO: 37939 - DNA, 15 bp, Homo sapiens
aaagaggagatagta

SEQ ID NO: 37940 - DNA, 15 bp, Homo sapiens
caaagaggagatagt

SEQ ID NO: 37941 - DNA, 15 bp, Homo sapiens
ccaaagaggagatag

SEQ ID NO: 37942 - DNA, 15 bp, Homo sapiens
accaaagaggagata

SEQ ID NO: 37943 - DNA, 15 bp, Homo sapiens
taccaaagaggagat

SEQ ID NO: 37944 - DNA, 15 bp, Homo sapiens
ataccaaagaggaga

SEQ ID NO: 37945 - DNA, 15 bp, Homo sapiens
tataccaaagaggag

SEQ ID NO: 37946 - DNA, 15 bp, Homo sapiens
atataccaaagagga

SEQ ID NO: 37947 - DNA, 15 bp, Homo sapiens
tatataccaaagagg

SEQ ID NO: 37948 - DNA, 15 bp, Homo sapiens
gtatataccaaagag

SEQ ID NO: 37949 - DNA, 15 bp, Homo sapiens
cgtatataccaaaga

SEQ ID NO: 37950 - DNA, 15 bp, Homo sapiens
acgtatataccaaag

SEQ ID NO: 37951 - DNA, 15 bp, Homo sapiens
cacgtatataccaaa

SEQ ID NO: 37952 - DNA, 15 bp, Homo sapiens
acacgtatataccaa

SEQ ID NO: 37953 - DNA, 15 bp, Homo sapiens
cacacgtatatacca

SEQ ID NO: 37954 - DNA, 15 bp, Homo sapiens
acacacgtatatacc

SEQ ID NO: 37955 - DNA, 15 bp, Homo sapiens
aacacacgtatatac

SEQ ID NO: 37956 - DNA, 15 bp, Homo sapiens
aaacacacgtatata

SEQ ID NO: 37957 - DNA, 15 bp, Homo sapiens
taaacacacgtatat

SEQ ID NO: 37958 - DNA, 15 bp, Homo sapiens
ataaacacacgtata

SEQ ID NO: 37959 - DNA, 15 bp, Homo sapiens
aataaacacacgtat

SEQ ID NO: 37960 - DNA, 15 bp, Homo sapiens
aaataaacacacgta

SEQ ID NO: 37961 - DNA, 15 bp, Homo sapiens
aaaataaacacacgt

SEQ ID NO: 37962 - DNA, 15 bp, Homo sapiens
aaaaataaacacacg

SEQ ID NO: 37963 - DNA, 15 bp, Homo sapiens
aaaaaataaacacac

SEQ ID NO: 37964 - DNA, 15 bp, Homo sapiens
aaaaaaataaacaca

SEQ ID NO: 37965 - DNA, 15 bp, Homo sapiens
gaaaaaaataaacac

SEQ ID NO: 37966 - DNA, 15 bp, Homo sapiens
agaaaaaaataaaca

SEQ ID NO: 37967 - DNA, 15 bp, Homo sapiens
cagaaaaaaataaac

SEQ ID NO: 37968 - DNA, 15 bp, Homo sapiens
ccagaaaaaaataaa

SEQ ID NO: 37969 - DNA, 15 bp, Homo sapiens
tccagaaaaaaataa

SEQ ID NO: 37970 - DNA, 15 bp, Homo sapiens
ctccagaaaaaaata

SEQ ID NO: 37971 - DNA, 15 bp, Homo sapiens
tctccagaaaaaaat

SEQ ID NO: 37972 - DNA, 15 bp, Homo sapiens
atctccagaaaaaaa

SEQ ID NO: 37973 - DNA, 15 bp, Homo sapiens
gatctccagaaaaaa

SEQ ID NO: 37974 - DNA, 15 bp, Homo sapiens
agatctccagaaaaa

SEQ ID NO: 37975 - DNA, 15 bp, Homo sapiens
cagatctccagaaaa

SEQ ID NO: 37976 - DNA, 15 bp, Homo sapiens
acagatctccagaaa

SEQ ID NO: 37977 - DNA, 15 bp, Homo sapiens
tacagatctccagaa

SEQ ID NO: 37978 - DNA, 15 bp, Homo sapiens
ttacagatctccaga

SEQ ID NO: 37979 - DNA, 15 bp, Homo sapiens
gttacagatctccag

SEQ ID NO: 37980 - DNA, 15 bp, Homo sapiens
agttacagatctcca

SEQ ID NO: 37981 - DNA, 15 bp, Homo sapiens
cagttacagatctcc

SEQ ID NO: 37982 - DNA, 15 bp, Homo sapiens
tcagttacagatctc

SEQ ID NO: 37983 - DNA, 15 bp, Homo sapiens
ttcagttacagatct

SEQ ID NO: 37984 - DNA, 15 bp, Homo sapiens
tttcagttacagatc

SEQ ID NO: 37985 - DNA, 15 bp, Homo sapiens
atttcagttacagat

SEQ ID NO: 37986 - DNA, 15 bp, Homo sapiens
catttcagttacaga

SEQ ID NO: 37987 - DNA, 15 bp, Homo sapiens
gcatttcagttacag

SEQ ID NO: 37988 - DNA, 15 bp, Homo sapiens
agcatttcagttaca

SEQ ID NO: 37989 - DNA, 15 bp, Homo sapiens
aagcatttcagttac

SEQ ID NO: 37990 - DNA, 15 bp, Homo sapiens
taagcatttcagtta

SEQ ID NO: 37991 - DNA, 15 bp, Homo sapiens
ttaagcatttcagtt

SEQ ID NO: 37992 - DNA, 15 bp, Homo sapiens
attaagcatttcagt

SEQ ID NO: 37993 - DNA, 15 bp, Homo sapiens
aattaagcatttcag

SEQ ID NO: 37994 - DNA, 15 bp, Homo sapiens
aaattaagcatttca

SEQ ID NO: 37995 - DNA, 15 bp, Homo sapiens
gaaattaagcatttc

SEQ ID NO: 37996 - DNA, 15 bp, Homo sapiens
agaaattaagcattt

SEQ ID NO: 37997 - DNA, 15 bp, Homo sapiens
cagaaattaagcatt

SEQ ID NO: 37998 - DNA, 15 bp, Homo sapiens
tcagaaattaagcat

SEQ ID NO: 37999 - DNA, 15 bp, Homo sapiens
ttcagaaattaagca

SEQ ID NO: 38000 - DNA, 15 bp, Homo sapiens
attcagaaattaagc

SEQ ID NO: 38001 - DNA, 15 bp, Homo sapiens
aattcagaaattaag

SEQ ID NO: 38002 - DNA, 15 bp, Homo sapiens
caattcagaaattaa

SEQ ID NO: 38003 - DNA, 15 bp, Homo sapiens
acaattcagaaatta

SEQ ID NO: 38004 - DNA, 15 bp, Homo sapiens
aacaattcagaaatt

SEQ ID NO: 38005 - DNA, 15 bp, Homo sapiens
aaacaattcagaaat

SEQ ID NO: 38006 - DNA, 15 bp, Homo sapiens
aaaacaattcagaaa

SEQ ID NO: 38007 - DNA, 15 bp, Homo sapiens
caaaacaattcagaa

SEQ ID NO: 38008 - DNA, 15 bp, Homo sapiens
ccaaaacaattcaga

SEQ ID NO: 38009 - DNA, 15 bp, Homo sapiens
tccaaaacaattcag

SEQ ID NO: 38010 - DNA, 15 bp, Homo sapiens
atccaaaacaattca

SEQ ID NO: 38011 - DNA, 15 bp, Homo sapiens
tatccaaaacaattc

SEQ ID NO: 38012 - DNA, 15 bp, Homo sapiens
atatccaaaacaatt

SEQ ID NO: 38013 - DNA, 15 bp, Homo sapiens
gatatccaaaacaat

SEQ ID NO: 38014 - DNA, 15 bp, Homo sapiens
tgatatccaaaacaa

SEQ ID NO: 38015 - DNA, 15 bp, Homo sapiens
gtgatatccaaaaca

SEQ ID NO: 38016 - DNA, 15 bp, Homo sapiens
tgtgatatccaaaac

SEQ ID NO: 38017 - DNA, 15 bp, Homo sapiens
ttgtgatatccaaaa

SEQ ID NO: 38018 - DNA, 15 bp, Homo sapiens
gttgtgatatccaaa

SEQ ID NO: 38019 - DNA, 15 bp, Homo sapiens
agttgtgatatccaa

SEQ ID NO: 38020 - DNA, 15 bp, Homo sapiens
aagttgtgatatcca

SEQ ID NO: 38021 - DNA, 15 bp, Homo sapiens
taagttgtgatatcc

SEQ ID NO: 38022 - DNA, 15 bp, Homo sapiens
ttaagttgtgatatc

SEQ ID NO: 38023 - DNA, 15 bp, Homo sapiens
attaagttgtgatat

SEQ ID NO: 38024 - DNA, 15 bp, Homo sapiens
tattaagttgtgata

SEQ ID NO: 38025 - DNA, 15 bp, Homo sapiens
gtattaagttgtgat

SEQ ID NO: 38026 - DNA, 15 bp, Homo sapiens
ggtattaagttgtga

SEQ ID NO: 38027 - DNA, 15 bp, Homo sapiens
tggtattaagttgtg

SEQ ID NO: 38028 - DNA, 15 bp, Homo sapiens
ttggtattaagttgt

SEQ ID NO: 38029 - DNA, 15 bp, Homo sapiens
gttggtattaagttg

SEQ ID NO: 38030 - DNA, 15 bp, Homo sapiens
tgttggtattaagtt

SEQ ID NO: 38031 - DNA, 15 bp, Homo sapiens
atgttggtattaagt

SEQ ID NO: 38032 - DNA, 15 bp, Homo sapiens
tatgttggtattaag

SEQ ID NO: 38033 - DNA, 15 bp, Homo sapiens
ttatgttggtattaa

SEQ ID NO: 38034 - DNA, 15 bp, Homo sapiens
cttatgttggtatta

SEQ ID NO: 38035 - DNA, 15 bp, Homo sapiens
acttatgttggtatt

SEQ ID NO: 38036 - DNA, 15 bp, Homo sapiens
aacttatgttggtat

SEQ ID NO: 38037 - DNA, 15 bp, Homo sapiens
aaacttatgttggta

SEQ ID NO: 38038 - DNA, 15 bp, Homo sapiens
aaaacttatgttggt

SEQ ID NO: 38039 - DNA, 15 bp, Homo sapiens
caaaacttatgttgg

SEQ ID NO: 38040 - DNA, 15 bp, Homo sapiens
tcaaaacttatgttg

SEQ ID NO: 38041 - DNA, 15 bp, Homo sapiens
ctcaaaacttatgtt

SEQ ID NO: 38042 - DNA, 15 bp, Homo sapiens
gctcaaaacttatgt

SEQ ID NO: 38043 - DNA, 15 bp, Homo sapiens
ggctcaaaacttatg

SEQ ID NO: 38044 - DNA, 15 bp, Homo sapiens
aggctcaaaacttat

SEQ ID NO: 38045 - DNA, 15 bp, Homo sapiens
aaggctcaaaactta

SEQ ID NO: 38046 - DNA, 15 bp, Homo sapiens
aaaggctcaaaactt

SEQ ID NO: 38047 - DNA, 15 bp, Homo sapiens
aaaaggctcaaaact

SEQ ID NO: 38048 - DNA, 15 bp, Homo sapiens
aaaaaggctcaaaac

SEQ ID NO: 38049 - DNA, 15 bp, Homo sapiens
gaaaaaggctcaaaa

SEQ ID NO: 38050 - DNA, 15 bp, Homo sapiens
agaaaaaggctcaaa

SEQ ID NO: 38051 - DNA, 15 bp, Homo sapiens
gagaaaaaggctcaa

SEQ ID NO: 38052 - DNA, 15 bp, Homo sapiens
ggagaaaaaggctca

SEQ ID NO: 38053 - DNA, 15 bp, Homo sapiens
gggagaaaaaggctc

SEQ ID NO: 38054 - DNA, 15 bp, Homo sapiens
agggagaaaaaggct

SEQ ID NO: 38055 - DNA, 15 bp, Homo sapiens
tagggagaaaaaggc

SEQ ID NO: 38056 - DNA, 15 bp, Homo sapiens
ttagggagaaaaagg

SEQ ID NO: 38057 - DNA, 15 bp, Homo sapiens
tttagggagaaaaag

SEQ ID NO: 38058 - DNA, 15 bp, Homo sapiens
atttagggagaaaaa

SEQ ID NO: 38059 - DNA, 15 bp, Homo sapiens
gatttagggagaaaa

SEQ ID NO: 38060 - DNA, 15 bp, Homo sapiens
agatttagggagaaa

SEQ ID NO: 38061 - DNA, 15 bp, Homo sapiens
cagatttagggagaa

SEQ ID NO: 38062 - DNA, 15 bp, Homo sapiens
ccagatttagggaga

SEQ ID NO: 38063 - DNA, 15 bp, Homo sapiens
accagatttagggag

SEQ ID NO: 38064 - DNA, 15 bp, Homo sapiens
caccagatttaggga

SEQ ID NO: 38065 - DNA, 15 bp, Homo sapiens
acaccagatttaggg

SEQ ID NO: 38066 - DNA, 15 bp, Homo sapiens
cacaccagatttagg

SEQ ID NO: 38067 - DNA, 15 bp, Homo sapiens
tcacaccagatttag

SEQ ID NO: 38068 - DNA, 15 bp, Homo sapiens
ctcacaccagattta

SEQ ID NO: 38069 - DNA, 15 bp, Homo sapiens
actcacaccagattt

SEQ ID NO: 38070 - DNA, 15 bp, Homo sapiens
gactcacaccagatt

SEQ ID NO: 38071 - DNA, 15 bp, Homo sapiens
agactcacaccagat

SEQ ID NO: 38072 - DNA, 15 bp, Homo sapiens
tagactcacaccaga

SEQ ID NO: 38073 - DNA, 15 bp, Homo sapiens
ttagactcacaccag

SEQ ID NO: 38074 - DNA, 15 bp, Homo sapiens
gttagactcacacca

SEQ ID NO: 38075 - DNA, 15 bp, Homo sapiens
agttagactcacacc

SEQ ID NO: 38076 - DNA, 15 bp, Homo sapiens
cagttagactcacac

SEQ ID NO: 38077 - DNA, 15 bp, Homo sapiens
tcagttagactcaca

SEQ ID NO: 38078 - DNA, 15 bp, Homo sapiens
ttcagttagactcac

SEQ ID NO: 38079 - DNA, 15 bp, Homo sapiens
tttcagttagactca

SEQ ID NO: 38080 - DNA, 15 bp, Homo sapiens
gtttcagttagactc

SEQ ID NO: 38081 - DNA, 15 bp, Homo sapiens
agtttcagttagact

SEQ ID NO: 38082 - DNA, 15 bp, Homo sapiens
gagtttcagttagac

SEQ ID NO: 38083 - DNA, 15 bp, Homo sapiens
tgagtttcagttaga

SEQ ID NO: 38084 - DNA, 15 bp, Homo sapiens
ttgagtttcagttag

SEQ ID NO: 38085 - DNA, 15 bp, Homo sapiens
tttgagtttcagtta

SEQ ID NO: 38086 - DNA, 15 bp, Homo sapiens
atttgagtttcagtt

SEQ ID NO: 38087 - DNA, 15 bp, Homo sapiens
catttgagtttcagt

SEQ ID NO: 38088 - DNA, 15 bp, Homo sapiens
tcatttgagtttcag

SEQ ID NO: 38089 - DNA, 15 bp, Homo sapiens
ttcatttgagtttca

SEQ ID NO: 38090 - DNA, 15 bp, Homo sapiens
gttcatttgagtttc

SEQ ID NO: 38091 - DNA, 15 bp, Homo sapiens
agttcatttgagttt

SEQ ID NO: 38092 - DNA, 15 bp, Homo sapiens
aagttcatttgagtt

SEQ ID NO: 38093 - DNA, 15 bp, Homo sapiens
aaagttcatttgagt

SEQ ID NO: 38094 - DNA, 15 bp, Homo sapiens
aaaagttcatttgag

SEQ ID NO: 38095 - DNA, 15 bp, Homo sapiens
aaaaagttcatttga

SEQ ID NO: 38096 - DNA, 15 bp, Homo sapiens
taaaaagttcatttg

SEQ ID NO: 38097 - DNA, 15 bp, Homo sapiens
ttaaaaagttcattt

SEQ ID NO: 38098 - DNA, 15 bp, Homo sapiens
tttaaaaagttcatt

SEQ ID NO: 38099 - DNA, 15 bp, Homo sapiens
ttttaaaaagttcat

SEQ ID NO: 38100 - DNA, 15 bp, Homo sapiens
tttttaaaaagttca

SEQ ID NO: 38101 - DNA, 15 bp, Homo sapiens
atttttaaaaagttc

SEQ ID NO: 38102 - DNA, 15 bp, Homo sapiens
tatttttaaaaagtt

SEQ ID NO: 38103 - DNA, 15 bp, Homo sapiens
ttatttttaaaaagt

SEQ ID NO: 38104 - DNA, 15 bp, Homo sapiens
attatttttaaaaag

SEQ ID NO: 38105 - DNA, 15 bp, Homo sapiens
aattatttttaaaaa

SEQ ID NO: 38106 - DNA, 15 bp, Homo sapiens
aaattatttttaaaa

SEQ ID NO: 38107 - DNA, 15 bp, Homo sapiens
aaaattatttttaaa

SEQ ID NO: 38108 - DNA, 15 bp, Homo sapiens
aaaaattatttttaa

SEQ ID NO: 38109 - DNA, 15 bp, Homo sapiens
aaaaaattattttta

SEQ ID NO: 38110 - DNA, 15 bp, Homo sapiens
gaaaaaattattttt

SEQ ID NO: 38111 - DNA, 15 bp, Homo sapiens
agaaaaaattatttt

SEQ ID NO: 38112 - DNA, 15 bp, Homo sapiens
aagaaaaaattattt

SEQ ID NO: 38113 - DNA, 15 bp, Homo sapiens
aaagaaaaaattatt

SEQ ID NO: 38114 - DNA, 15 bp, Homo sapiens
aaaagaaaaaattat

SEQ ID NO: 38115 - DNA, 15 bp, Homo sapiens
gaaaagaaaaaatta

SEQ ID NO: 38116 - DNA, 15 bp, Homo sapiens
agaaaagaaaaaatt

SEQ ID NO: 38117 - DNA, 15 bp, Homo sapiens
aagaaaagaaaaaat

SEQ ID NO: 38118 - DNA, 15 bp, Homo sapiens
taaagaaaagaaaaa

SEQ ID NO: 38119 - DNA, 15 bp, Homo sapiens
ttaaagaaaagaaaa

SEQ ID NO: 38120 - DNA, 15 bp, Homo sapiens
attaaagaaaagaaa

SEQ ID NO: 38121 - DNA, 15 bp, Homo sapiens
aattaaagaaaagaa

SEQ ID NO: 38122 - DNA, 15 bp, Homo sapiens
aaattaaagaaaaga

SEQ ID NO: 38123 - DNA, 15 bp, Homo sapiens
aaaattaaagaaaag

SEQ ID NO: 38124 - DNA, 15 bp, Homo sapiens
aaaaattaaagaaaa

SEQ ID NO: 38125 - DNA, 15 bp, Homo sapiens
aaaaaattaaagaaa

SEQ ID NO: 38126 - DNA, 15 bp, Homo sapiens
aaaaaaaattaaaga

SEQ ID NO: 38127 - DNA, 15 bp, Homo sapiens
aaaaaaaaattaaag

SEQ ID NO: 38128 - DNA, 15 bp, Homo sapiens
aaaaaaaaaattaaa

SEQ ID NO: 38129 - DNA, 15 bp, Homo sapiens
taaaaaaaaaattaa

SEQ ID NO: 38130 - DNA, 15 bp, Homo sapiens
ttaaaaaaaaaatta

SEQ ID NO: 38131 - DNA, 15 bp, Homo sapiens
cttaaaaaaaaaatt

SEQ ID NO: 38132 - DNA, 15 bp, Homo sapiens
acttaaaaaaaaaat

SEQ ID NO: 38133 - DNA, 15 bp, Homo sapiens
tacttaaaaaaaaaa

SEQ ID NO: 38134 - DNA, 15 bp, Homo sapiens
ctacttaaaaaaaaa

SEQ ID NO: 38135 - DNA, 15 bp, Homo sapiens
tctacttaaaaaaaa

SEQ ID NO: 38136 - DNA, 15 bp, Homo sapiens
ctctacttaaaaaaa

SEQ ID NO: 38137 - DNA, 15 bp, Homo sapiens
tctctacttaaaaaa

SEQ ID NO: 38138 - DNA, 15 bp, Homo sapiens
gtctctacttaaaaa

SEQ ID NO: 38139 - DNA, 15 bp, Homo sapiens
tgtctctacttaaaa

SEQ ID NO: 38140 - DNA, 15 bp, Homo sapiens
ctgtctctacttaaa

SEQ ID NO: 38141 - DNA, 15 bp, Homo sapiens
cctgtctctacttaa

SEQ ID NO: 38142 - DNA, 15 bp, Homo sapiens
ccctgtctctactta

SEQ ID NO: 38143 - DNA, 15 bp, Homo sapiens
tccctgtctctactt

SEQ ID NO: 38144 - DNA, 15 bp, Homo sapiens
gtccctgtctctact

SEQ ID NO: 38145 - DNA, 15 bp, Homo sapiens
cgtccctgtctctac

SEQ ID NO: 38146 - DNA, 15 bp, Homo sapiens
gcgtccctgtctcta

SEQ ID NO: 38147 - DNA, 15 bp, Homo sapiens
tgcgtccctgtctct

SEQ ID NO: 38148 - DNA, 15 bp, Homo sapiens
gtgcgtccctgtctc

SEQ ID NO: 38149 - DNA, 15 bp, Homo sapiens
agtgcgtccctgtct

SEQ ID NO: 38150 - DNA, 15 bp, Homo sapiens
cagtgcgtccctgtc

SEQ ID NO: 38151 - DNA, 15 bp, Homo sapiens
acagtgcgtccctgt

SEQ ID NO: 38152 - DNA, 15 bp, Homo sapiens
aacagtgcgtccctg

SEQ ID NO: 38153 - DNA, 15 bp, Homo sapiens
taacagtgcgtccct

SEQ ID NO: 38154 - DNA, 15 bp, Homo sapiens
ttaacagtgcgtccc

SEQ ID NO: 38155 - DNA, 15 bp, Homo sapiens
gttaacagtgcgtcc

SEQ ID NO: 38156 - DNA, 15 bp, Homo sapiens
agttaacagtgcgtc

SEQ ID NO: 38157 - DNA, 15 bp, Homo sapiens
tagttaacagtgcgt

SEQ ID NO: 38158 - DNA, 15 bp, Homo sapiens
ctagttaacagtgcg

SEQ ID NO: 38159 - DNA, 15 bp, Homo sapiens
cctagttaacagtgc

SEQ ID NO: 38160 - DNA, 15 bp, Homo sapiens
gcctagttaacagtg

SEQ ID NO: 38161 - DNA, 15 bp, Homo sapiens
agcctagttaacagt

SEQ ID NO: 38162 - DNA, 15 bp, Homo sapiens
cagcctagttaacag

SEQ ID NO: 38163 - DNA, 15 bp, Homo sapiens
ccagcctagttaaca

SEQ ID NO: 38164 - DNA, 15 bp, Homo sapiens
accagcctagttaac

SEQ ID NO: 38165 - DNA, 15 bp, Homo sapiens
gaccagcctagttaa

SEQ ID NO: 38166 - DNA, 15 bp, Homo sapiens
agaccagcctagtta

SEQ ID NO: 38167 - DNA, 15 bp, Homo sapiens
aagaccagcctagtt

SEQ ID NO: 38168 - DNA, 15 bp, Homo sapiens
caagaccagcctagt

SEQ ID NO: 38169 - DNA, 15 bp, Homo sapiens
tcaagaccagcctag

SEQ ID NO: 38170 - DNA, 15 bp, Homo sapiens
ttcaagaccagccta

SEQ ID NO: 38171 - DNA, 15 bp, Homo sapiens
atcaggagttcaaga

SEQ ID NO: 38172 - DNA, 15 bp, Homo sapiens
gatcaggagttcaag

SEQ ID NO: 38173 - DNA, 15 bp, Homo sapiens
agatcaggagttcaa

SEQ ID NO: 38174 - DNA, 15 bp, Homo sapiens
aagatcaggagttca

SEQ ID NO: 38175 - DNA, 15 bp, Homo sapiens
caagatcaggagttc

SEQ ID NO: 38176 - DNA, 15 bp, Homo sapiens
tcaagatcaggagtt

SEQ ID NO: 38177 - DNA, 15 bp, Homo sapiens
ctcaagatcaggagt

SEQ ID NO: 38178 - DNA, 15 bp, Homo sapiens
gctcaagatcaggag

SEQ ID NO: 38179 - DNA, 15 bp, Homo sapiens
ggctcaagatcagga

SEQ ID NO: 38180 - DNA, 15 bp, Homo sapiens
tggctcaagatcagg

SEQ ID NO: 38181 - DNA, 15 bp, Homo sapiens
atggctcaagatcag

SEQ ID NO: 38182 - DNA, 15 bp, Homo sapiens
gatggctcaagatca

SEQ ID NO: 38183 - DNA, 15 bp, Homo sapiens
ggatggctcaagatc

SEQ ID NO: 38184 - DNA, 15 bp, Homo sapiens
aggatggctcaagat

SEQ ID NO: 38185 - DNA, 15 bp, Homo sapiens
gaggatggctcaaga

SEQ ID NO: 38186 - DNA, 15 bp, Homo sapiens
ggaggatggctcaag

SEQ ID NO: 38187 - DNA, 15 bp, Homo sapiens
gggaggatggctcaa

SEQ ID NO: 38188 - DNA, 15 bp, Homo sapiens
ggggaggatggctca

SEQ ID NO: 38189 - DNA, 15 bp, Homo sapiens
cggggaggatggctc

SEQ ID NO: 38190 - DNA, 15 bp, Homo sapiens
tcggggaggatggct

SEQ ID NO: 38191 - DNA, 15 bp, Homo sapiens
gtcggggaggatggc

SEQ ID NO: 38192 - DNA, 15 bp, Homo sapiens
ggtcggggaggatgg

SEQ ID NO: 38193 - DNA, 15 bp, Homo sapiens
aggtcggggaggatg

SEQ ID NO: 38194 - DNA, 15 bp, Homo sapiens
caggtcggggaggat

SEQ ID NO: 38195 - DNA, 15 bp, Homo sapiens
tcaggtcggggagga

SEQ ID NO: 38196 - DNA, 15 bp, Homo sapiens
ctcaggtcggggagg

SEQ ID NO: 38197 - DNA, 15 bp, Homo sapiens
gctcaggtcggggag

SEQ ID NO: 38198 - DNA, 15 bp, Homo sapiens
ggctcaggtcgggga

SEQ ID NO: 38199 - DNA, 15 bp, Homo sapiens
aggctcaggtcgggg

SEQ ID NO: 38200 - DNA, 15 bp, Homo sapiens
gaggctcaggtcggg

SEQ ID NO: 38201 - DNA, 15 bp, Homo sapiens
tgaggctcaggtcgg

SEQ ID NO: 38202 - DNA, 15 bp, Homo sapiens
gtgaggctcaggtcg

SEQ ID NO: 38203 - DNA, 15 bp, Homo sapiens
ggtgaggctcaggtc

SEQ ID NO: 38204 - DNA, 15 bp, Homo sapiens
aggtgaggctcaggt

SEQ ID NO: 38205 - DNA, 15 bp, Homo sapiens
aaggtgaggctcagg

SEQ ID NO: 38206 - DNA, 15 bp, Homo sapiens
taaggtgaggctcag

SEQ ID NO: 38207 - DNA, 15 bp, Homo sapiens
ataaggtgaggctca

SEQ ID NO: 38208 - DNA, 15 bp, Homo sapiens
tataaggtgaggctc

SEQ ID NO: 38209 - DNA, 15 bp, Homo sapiens
ctataaggtgaggct

SEQ ID NO: 38210 - DNA, 15 bp, Homo sapiens
tctataaggtgaggc

SEQ ID NO: 38211 - DNA, 15 bp, Homo sapiens
ctctataaggtgagg

SEQ ID NO: 38212 - DNA, 15 bp, Homo sapiens
tctctataaggtgag

SEQ ID NO: 38213 - DNA, 15 bp, Homo sapiens
ctctctataaggtga

SEQ ID NO: 38214 - DNA, 15 bp, Homo sapiens
cctctctataaggtg

SEQ ID NO: 38215 - DNA, 15 bp, Homo sapiens
ccctctctataaggt

SEQ ID NO: 38216 - DNA, 15 bp, Homo sapiens
accctctctataagg

SEQ ID NO: 38217 - DNA, 15 bp, Homo sapiens
gaccctctctataag

SEQ ID NO: 38218 - DNA, 15 bp, Homo sapiens
agaccctctctataa

SEQ ID NO: 38219 - DNA, 15 bp, Homo sapiens
aagaccctctctata

SEQ ID NO: 38220 - DNA, 15 bp, Homo sapiens
accattgcactccag

SEQ ID NO: 38221 - DNA, 15 bp, Homo sapiens
caccattgcactcca

SEQ ID NO: 38222 - DNA, 15 bp, Homo sapiens
acaccattgcactcc

SEQ ID NO: 38223 - DNA, 15 bp, Homo sapiens
cacaccattgcactc

SEQ ID NO: 38224 - DNA, 15 bp, Homo sapiens
tcacaccattgcact

SEQ ID NO: 38225 - DNA, 15 bp, Homo sapiens
atcacaccattgcac

SEQ ID NO: 38226 - DNA, 15 bp, Homo sapiens
aatcacaccattgca

SEQ ID NO: 38227 - DNA, 15 bp, Homo sapiens
aaatcacaccattgc

SEQ ID NO: 38228 - DNA, 15 bp, Homo sapiens
gaaatcacaccattg

SEQ ID NO: 38229 - DNA, 15 bp, Homo sapiens
cgaaatcacaccatt

SEQ ID NO: 38230 - DNA, 15 bp, Homo sapiens
ccgaaatcacaccat

SEQ ID NO: 38231 - DNA, 15 bp, Homo sapiens
gccgaaatcacacca

SEQ ID NO: 38232 - DNA, 15 bp, Homo sapiens
agccgaaatcacacc

SEQ ID NO: 38233 - DNA, 15 bp, Homo sapiens
gagccgaaatcacac

SEQ ID NO: 38234 - DNA, 15 bp, Homo sapiens
tgagccgaaatcaca

SEQ ID NO: 38235 - DNA, 15 bp, Homo sapiens
atgagccgaaatcac

SEQ ID NO: 38236 - DNA, 15 bp, Homo sapiens
aatgagccgaaatca

SEQ ID NO: 38237 - DNA, 15 bp, Homo sapiens
taatgagccgaaatc

SEQ ID NO: 38238 - DNA, 15 bp, Homo sapiens
gtaatgagccgaaat

SEQ ID NO: 38239 - DNA, 15 bp, Homo sapiens
tgtaatgagccgaaa

SEQ ID NO: 38240 - DNA, 15 bp, Homo sapiens
ttgtaatgagccgaa

SEQ ID NO: 38241 - DNA, 15 bp, Homo sapiens
attgtaatgagccga

SEQ ID NO: 38242 - DNA, 15 bp, Homo sapiens
cattgtaatgagccg

SEQ ID NO: 38243 - DNA, 15 bp, Homo sapiens
acattgtaatgagcc

SEQ ID NO: 38244 - DNA, 15 bp, Homo sapiens
gacattgtaatgagc

SEQ ID NO: 38245 - DNA, 15 bp, Homo sapiens
ggacattgtaatgag

SEQ ID NO: 38246 - DNA, 15 bp, Homo sapiens
cggacattgtaatga

SEQ ID NO: 38247 - DNA, 15 bp, Homo sapiens
gcggacattgtaatg

SEQ ID NO: 38248 - DNA, 15 bp, Homo sapiens
ggcggacattgtaat

SEQ ID NO: 38249 - DNA, 15 bp, Homo sapiens
aggcggacattgtaa

SEQ ID NO: 38250 - DNA, 15 bp, Homo sapiens
gaggcggacattgta

SEQ ID NO: 38251 - DNA, 15 bp, Homo sapiens
tgaggcggacattgt

SEQ ID NO: 38252 - DNA, 15 bp, Homo sapiens
ctgaggcggacattg

SEQ ID NO: 38253 - DNA, 15 bp, Homo sapiens
gctgaggcggacatt

SEQ ID NO: 38254 - DNA, 15 bp, Homo sapiens
ggctgaggcggacat

SEQ ID NO: 38255 - DNA, 15 bp, Homo sapiens
aggctgaggcggaca

SEQ ID NO: 38256 - DNA, 15 bp, Homo sapiens
gaggctgaggcggac

SEQ ID NO: 38257 - DNA, 15 bp, Homo sapiens
ggaggctgaggcgga

SEQ ID NO: 38258 - DNA, 15 bp, Homo sapiens
aggaggctgaggcgg

SEQ ID NO: 38259 - DNA, 15 bp, Homo sapiens
caggaggctgaggcg

SEQ ID NO: 38260 - DNA, 15 bp, Homo sapiens
acccaggaggctgag

SEQ ID NO: 38261 - DNA, 15 bp, Homo sapiens
tacccaggaggctga

SEQ ID NO: 38262 - DNA, 15 bp, Homo sapiens
ctacccaggaggctg

SEQ ID NO: 38263 - DNA, 15 bp, Homo sapiens
gctacccaggaggct

SEQ ID NO: 38264 - DNA, 15 bp, Homo sapiens
agctacccaggaggc

SEQ ID NO: 38265 - DNA, 15 bp, Homo sapiens
cagctacccaggagg

SEQ ID NO: 38266 - DNA, 15 bp, Homo sapiens
ccagctacccaggag

SEQ ID NO: 38267 - DNA, 15 bp, Homo sapiens
cccagctacccagga

SEQ ID NO: 38268 - DNA, 15 bp, Homo sapiens
tcccagctacccagg

SEQ ID NO: 38269 - DNA, 15 bp, Homo sapiens
atcccagctacccag

SEQ ID NO: 38270 - DNA, 15 bp, Homo sapiens
aatcccagctaccca

SEQ ID NO: 38271 - DNA, 15 bp, Homo sapiens
taatcccagctaccc

SEQ ID NO: 38272 - DNA, 15 bp, Homo sapiens
gtaatcccagctacc

SEQ ID NO: 38273 - DNA, 15 bp, Homo sapiens
cgggtgcctgtaatc

SEQ ID NO: 38274 - DNA, 15 bp, Homo sapiens
gcgggtgcctgtaat

SEQ ID NO: 38275 - DNA, 15 bp, Homo sapiens
ggcgggtgcctgtaa

SEQ ID NO: 38276 - DNA, 15 bp, Homo sapiens
gtggtggcgggtgcc

SEQ ID NO: 38277 - DNA, 15 bp, Homo sapiens
cgtggtggcgggtgc

SEQ ID NO: 38278 - DNA, 15 bp, Homo sapiens
gcgtggtggcgggtg

SEQ ID NO: 38279 - DNA, 15 bp, Homo sapiens
ggcgtggtggcgggt

SEQ ID NO: 38280 - DNA, 15 bp, Homo sapiens
gggcgtggtggcggg

SEQ ID NO: 38281 - DNA, 15 bp, Homo sapiens
tgggcgtggtggcgg

SEQ ID NO: 38282 - DNA, 15 bp, Homo sapiens
ctgggcgtggtggcg

SEQ ID NO: 38283 - DNA, 15 bp, Homo sapiens
cggccaacatggtga

SEQ ID NO: 38284 - DNA, 15 bp, Homo sapiens
ccggccaacatggtg

SEQ ID NO: 38285 - DNA, 15 bp, Homo sapiens
cccggccaacatggt

SEQ ID NO: 38286 - DNA, 15 bp, Homo sapiens
gcccggccaacatgg

SEQ ID NO: 38287 - DNA, 15 bp, Homo sapiens
agcccggccaacatg

SEQ ID NO: 38288 - DNA, 15 bp, Homo sapiens
cagcccggccaacat

SEQ ID NO: 38289 - DNA, 15 bp, Homo sapiens
ccagcccggccaaca

SEQ ID NO: 38290 - DNA, 15 bp, Homo sapiens
accagcccggccaac

SEQ ID NO: 38291 - DNA, 15 bp, Homo sapiens
gaccagcccggccaa

SEQ ID NO: 38292 - DNA, 15 bp, Homo sapiens
agaccagcccggcca

SEQ ID NO: 38293 - DNA, 15 bp, Homo sapiens
gagaccagcccggcc

SEQ ID NO: 38294 - DNA, 15 bp, Homo sapiens
tgagaccagcccggc

SEQ ID NO: 38295 - DNA, 15 bp, Homo sapiens
ttgagaccagcccgg

SEQ ID NO: 38296 - DNA, 15 bp, Homo sapiens
tttgagaccagcccg

SEQ ID NO: 38297 - DNA, 15 bp, Homo sapiens
gtttgagaccagccc

SEQ ID NO: 38298 - DNA, 15 bp, Homo sapiens
acagatcacctgagg

SEQ ID NO: 38299 - DNA, 15 bp, Homo sapiens
gacagatcacctgag

SEQ ID NO: 38300 - DNA, 15 bp, Homo sapiens
ggacagatcacctga

SEQ ID NO: 38301 - DNA, 15 bp, Homo sapiens
tggacagatcacctg

SEQ ID NO: 38302 - DNA, 15 bp, Homo sapiens
gtggacagatcacct

SEQ ID NO: 38303 - DNA, 15 bp, Homo sapiens
ggtggacagatcacc

SEQ ID NO: 38304 - DNA, 15 bp, Homo sapiens
aggtggacagatcac

SEQ ID NO: 38305 - DNA, 15 bp, Homo sapiens
gaggtggacagatca

SEQ ID NO: 38306 - DNA, 15 bp, Homo sapiens
cgaggtggacagatc

SEQ ID NO: 38307 - DNA, 15 bp, Homo sapiens
ccgaggtggacagat

SEQ ID NO: 38308 - DNA, 15 bp, Homo sapiens
gccgaggtggacaga

SEQ ID NO: 38309 - DNA, 15 bp, Homo sapiens
ggccgaggtggacag

SEQ ID NO: 38310 - DNA, 15 bp, Homo sapiens
aggccgaggtggaca

SEQ ID NO: 38311 - DNA, 15 bp, Homo sapiens
gaggccgaggtggac

SEQ ID NO: 38312 - DNA, 15 bp, Homo sapiens
agaggccgaggtgga

SEQ ID NO: 38313 - DNA, 15 bp, Homo sapiens
gagaggccgaggtgg

SEQ ID NO: 38314 - DNA, 15 bp, Homo sapiens
tgagaggccgaggtg

SEQ ID NO: 38315 - DNA, 15 bp, Homo sapiens
ttgagaggccgaggt

SEQ ID NO: 38316 - DNA, 15 bp, Homo sapiens
tttgagaggccgagg

SEQ ID NO: 38317 - DNA, 15 bp, Homo sapiens
ctttgagaggccgag

SEQ ID NO: 38318 - DNA, 15 bp, Homo sapiens
actttgagaggccga

SEQ ID NO: 38319 - DNA, 15 bp, Homo sapiens
cactttgagaggccg

SEQ ID NO: 38320 - DNA, 15 bp, Homo sapiens
gcactttgagaggcc

SEQ ID NO: 38321 - DNA, 15 bp, Homo sapiens
agcactttgagaggc

SEQ ID NO: 38322 - DNA, 15 bp, Homo sapiens
cagcactttgagagg

SEQ ID NO: 38323 - DNA, 15 bp, Homo sapiens
ccagcactttgagag

SEQ ID NO: 38324 - DNA, 15 bp, Homo sapiens
cccagcactttgaga

SEQ ID NO: 38325 - DNA, 15 bp, Homo sapiens
tcccagcactttgag

SEQ ID NO: 38326 - DNA, 15 bp, Homo sapiens
atcccagcactttga

SEQ ID NO: 38327 - DNA, 15 bp, Homo sapiens
caatcccagcacttt

SEQ ID NO: 38328 - DNA, 15 bp, Homo sapiens
acaatcccagcactt

SEQ ID NO: 38329 - DNA, 15 bp, Homo sapiens
tacaatcccagcact

SEQ ID NO: 38330 - DNA, 15 bp, Homo sapiens
ctacaatcccagcac

SEQ ID NO: 38331 - DNA, 15 bp, Homo sapiens
cctacaatcccagca

SEQ ID NO: 38332 - DNA, 15 bp, Homo sapiens
gcctacaatcccagc

SEQ ID NO: 38333 - DNA, 15 bp, Homo sapiens
cgcctacaatcccag

SEQ ID NO: 38334 - DNA, 15 bp, Homo sapiens
acgcctacaatccca

SEQ ID NO: 38335 - DNA, 15 bp, Homo sapiens
cacgcctacaatccc

SEQ ID NO: 38336 - DNA, 15 bp, Homo sapiens
tcacgcctacaatcc

SEQ ID NO: 38337 - DNA, 15 bp, Homo sapiens
ctcacgcctacaatc

SEQ ID NO: 38338 - DNA, 15 bp, Homo sapiens
gctcacgcctacaat

SEQ ID NO: 38339 - DNA, 15 bp, Homo sapiens
ggctcacgcctacaa

SEQ ID NO: 38340 - DNA, 15 bp, Homo sapiens
tggctcacgcctaca

SEQ ID NO: 38341 - DNA, 15 bp, Homo sapiens
gtggctcacgcctac

SEQ ID NO: 38342 - DNA, 15 bp, Homo sapiens
tgtggctcacgccta

SEQ ID NO: 38343 - DNA, 15 bp, Homo sapiens
atgtggctcacgcct

SEQ ID NO: 38344 - DNA, 15 bp, Homo sapiens
gatgtggctcacgcc

SEQ ID NO: 38345 - DNA, 15 bp, Homo sapiens
tgatgtggctcacgc

SEQ ID NO: 38346 - DNA, 15 bp, Homo sapiens
gtgatgtggctcacg

SEQ ID NO: 38347 - DNA, 15 bp, Homo sapiens
ggtgatgtggctcac

SEQ ID NO: 38348 - DNA, 15 bp, Homo sapiens
aggtgatgtggctca

SEQ ID NO: 38349 - DNA, 15 bp, Homo sapiens
caggtgatgtggctc

SEQ ID NO: 38350 - DNA, 15 bp, Homo sapiens
ccaggtgatgtggct

SEQ ID NO: 38351 - DNA, 15 bp, Homo sapiens
gccaggtgatgtggc

SEQ ID NO: 38352 - DNA, 15 bp, Homo sapiens
ggccaggtgatgtgg

SEQ ID NO: 38353 - DNA, 15 bp, Homo sapiens
tggccaggtgatgtg

SEQ ID NO: 38354 - DNA, 15 bp, Homo sapiens
gtggccaggtgatgt

SEQ ID NO: 38355 - DNA, 15 bp, Homo sapiens
agtggccaggtgatg

SEQ ID NO: 38356 - DNA, 15 bp, Homo sapiens
aagtggccaggtgat

SEQ ID NO: 38357 - DNA, 15 bp, Homo sapiens
aaagtggccaggtga

SEQ ID NO: 38358 - DNA, 15 bp, Homo sapiens
aaaagtggccaggtg

SEQ ID NO: 38359 - DNA, 15 bp, Homo sapiens
aaaaagtggccaggt

SEQ ID NO: 38360 - DNA, 15 bp, Homo sapiens
aaaaaagtggccagg

SEQ ID NO: 38361 - DNA, 15 bp, Homo sapiens
taaaaaagtggccag

SEQ ID NO: 38362 - DNA, 15 bp, Homo sapiens
ttaaaaaagtggcca

SEQ ID NO: 38363 - DNA, 15 bp, Homo sapiens
gttaaaaaagtggcc

SEQ ID NO: 38364 - DNA, 15 bp, Homo sapiens
agttaaaaaagtggc

SEQ ID NO: 38365 - DNA, 15 bp, Homo sapiens
gagttaaaaaagtgg

SEQ ID NO: 38366 - DNA, 15 bp, Homo sapiens
agagttaaaaaagtg

SEQ ID NO: 38367 - DNA, 15 bp, Homo sapiens
aagagttaaaaaagt

SEQ ID NO: 38368 - DNA, 15 bp, Homo sapiens
aaagagttaaaaaag

SEQ ID NO: 38369 - DNA, 15 bp, Homo sapiens
gaaagagttaaaaaa

SEQ ID NO: 38370 - DNA, 15 bp, Homo sapiens
ggaaagagttaaaaa

SEQ ID NO: 38371 - DNA, 15 bp, Homo sapiens
tggaaagagttaaaa

SEQ ID NO: 38372 - DNA, 15 bp, Homo sapiens
ttggaaagagttaaa

SEQ ID NO: 38373 - DNA, 15 bp, Homo sapiens
attggaaagagttaa

SEQ ID NO: 38374 - DNA, 15 bp, Homo sapiens
cattggaaagagtta

SEQ ID NO: 38375 - DNA, 15 bp, Homo sapiens
ccattggaaagagtt

SEQ ID NO: 38376 - DNA, 15 bp, Homo sapiens
accattggaaagagt

SEQ ID NO: 38377 - DNA, 15 bp, Homo sapiens
aaccattggaaagag

SEQ ID NO: 38378 - DNA, 15 bp, Homo sapiens
taaccattggaaaga

SEQ ID NO: 38379 - DNA, 15 bp, Homo sapiens
ttaaccattggaaag

SEQ ID NO: 38380 - DNA, 15 bp, Homo sapiens
attaaccattggaaa

SEQ ID NO: 38381 - DNA, 15 bp, Homo sapiens
aattaaccattggaa

SEQ ID NO: 38382 - DNA, 15 bp, Homo sapiens
gaattaaccattgga

SEQ ID NO: 38383 - DNA, 15 bp, Homo sapiens
ggaattaaccattgg

SEQ ID NO: 38384 - DNA, 15 bp, Homo sapiens
cggaattaaccattg

SEQ ID NO: 38385 - DNA, 15 bp, Homo sapiens
acggaattaaccatt

SEQ ID NO: 38386 - DNA, 15 bp, Homo sapiens
aacggaattaaccat

SEQ ID NO: 38387 - DNA, 15 bp, Homo sapiens
aaacggaattaacca

SEQ ID NO: 38388 - DNA, 15 bp, Homo sapiens
caaacggaattaacc

SEQ ID NO: 38389 - DNA, 15 bp, Homo sapiens
tcaaacggaattaac

SEQ ID NO: 38390 - DNA, 15 bp, Homo sapiens
atcaaacggaattaa

SEQ ID NO: 38391 - DNA, 15 bp, Homo sapiens
tatcaaacggaatta

SEQ ID NO: 38392 - DNA, 15 bp, Homo sapiens
atatcaaacggaatt

SEQ ID NO: 38393 - DNA, 15 bp, Homo sapiens
catatcaaacggaat

SEQ ID NO: 38394 - DNA, 15 bp, Homo sapiens
ccatatcaaacggaa

SEQ ID NO: 38395 - DNA, 15 bp, Homo sapiens
accatatcaaacgga

SEQ ID NO: 38396 - DNA, 15 bp, Homo sapiens
aaccatatcaaacgg

SEQ ID NO: 38397 - DNA, 15 bp, Homo sapiens
gaaccatatcaaacg

SEQ ID NO: 38398 - DNA, 15 bp, Homo sapiens
ggaaccatatcaaac

SEQ ID NO: 38399 - DNA, 15 bp, Homo sapiens
aggaaccatatcaaa

SEQ ID NO: 38400 - DNA, 15 bp, Homo sapiens
aaggaaccatatcaa

SEQ ID NO: 38401 - DNA, 15 bp, Homo sapiens
caaggaaccatatca

SEQ ID NO: 38402 - DNA, 15 bp, Homo sapiens
ccaaggaaccatatc

SEQ ID NO: 38403 - DNA, 15 bp, Homo sapiens
tccaaggaaccatat

SEQ ID NO: 38404 - DNA, 15 bp, Homo sapiens
ttccaaggaaccata

SEQ ID NO: 38405 - DNA, 15 bp, Homo sapiens
gttccaaggaaccat

SEQ ID NO: 38406 - DNA, 15 bp, Homo sapiens
agttccaaggaacca

SEQ ID NO: 38407 - DNA, 15 bp, Homo sapiens
aagttccaaggaacc

SEQ ID NO: 38408 - DNA, 15 bp, Homo sapiens
caagttccaaggaac

SEQ ID NO: 38409 - DNA, 15 bp, Homo sapiens
gcaagttccaaggaa

SEQ ID NO: 38410 - DNA, 15 bp, Homo sapiens
tgcaagttccaagga

SEQ ID NO: 38411 - DNA, 15 bp, Homo sapiens
gtgcaagttccaagg

SEQ ID NO: 38412 - DNA, 15 bp, Homo sapiens
tgtgcaagttccaag

SEQ ID NO: 38413 - DNA, 15 bp, Homo sapiens
atgtgcaagttccaa

SEQ ID NO: 38414 - DNA, 15 bp, Homo sapiens
aatgtgcaagttcca

SEQ ID NO: 38415 - DNA, 15 bp, Homo sapiens
taatgtgcaagttcc

SEQ ID NO: 38416 - DNA, 15 bp, Homo sapiens
gtaatgtgcaagttc

SEQ ID NO: 38417 - DNA, 15 bp, Homo sapiens
ggtaatgtgcaagtt

SEQ ID NO: 38418 - DNA, 15 bp, Homo sapiens
gggtaatgtgcaagt

SEQ ID NO: 38419 - DNA, 15 bp, Homo sapiens
agggtaatgtgcaag

SEQ ID NO: 38420 - DNA, 15 bp, Homo sapiens
aagggtaatgtgcaa

SEQ ID NO: 38421 - DNA, 15 bp, Homo sapiens
aaagggtaatgtgca

SEQ ID NO: 38422 - DNA, 15 bp, Homo sapiens
taaagggtaatgtgc

SEQ ID NO: 38423 - DNA, 15 bp, Homo sapiens
ataaagggtaatgtg

SEQ ID NO: 38424 - DNA, 15 bp, Homo sapiens
gataaagggtaatgt

SEQ ID NO: 38425 - DNA, 15 bp, Homo sapiens
tgataaagggtaatg

SEQ ID NO: 38426 - DNA, 15 bp, Homo sapiens
ttgataaagggtaat

SEQ ID NO: 38427 - DNA, 15 bp, Homo sapiens
attgataaagggtaa

SEQ ID NO: 38428 - DNA, 15 bp, Homo sapiens
aattgataaagggta

SEQ ID NO: 38429 - DNA, 15 bp, Homo sapiens
taattgataaagggt

SEQ ID NO: 38430 - DNA, 15 bp, Homo sapiens
ataattgataaaggg

SEQ ID NO: 38431 - DNA, 15 bp, Homo sapiens
gataattgataaagg

SEQ ID NO: 38432 - DNA, 15 bp, Homo sapiens
tgataattgataaag

SEQ ID NO: 38433 - DNA, 15 bp, Homo sapiens
gtgataattgataaa

SEQ ID NO: 38434 - DNA, 15 bp, Homo sapiens
ggtgataattgataa

SEQ ID NO: 38435 - DNA, 15 bp, Homo sapiens
gggtgataattgata

SEQ ID NO: 38436 - DNA, 15 bp, Homo sapiens
agggtgataattgat

SEQ ID NO: 38437 - DNA, 15 bp, Homo sapiens
cagggtgataattga

SEQ ID NO: 38438 - DNA, 15 bp, Homo sapiens
acagggtgataattg

SEQ ID NO: 38439 - DNA, 15 bp, Homo sapiens
tacagggtgataatt

SEQ ID NO: 38440 - DNA, 15 bp, Homo sapiens
atacagggtgataat

SEQ ID NO: 38441 - DNA, 15 bp, Homo sapiens
aatacagggtgataa

SEQ ID NO: 38442 - DNA, 15 bp, Homo sapiens
caatacagggtgata

SEQ ID NO: 38443 - DNA, 15 bp, Homo sapiens
ccaatacagggtgat

SEQ ID NO: 38444 - DNA, 15 bp, Homo sapiens
cccaatacagggtga

SEQ ID NO: 38445 - DNA, 15 bp, Homo sapiens
ccccaatacagggtg

SEQ ID NO: 38446 - DNA, 15 bp, Homo sapiens
cccccaatacagggt

SEQ ID NO: 38447 - DNA, 15 bp, Homo sapiens
acccccaatacaggg

SEQ ID NO: 38448 - DNA, 15 bp, Homo sapiens
cacccccaatacagg

SEQ ID NO: 38449 - DNA, 15 bp, Homo sapiens
ccacccccaatacag

SEQ ID NO: 38450 - DNA, 15 bp, Homo sapiens
cccacccccaataca

SEQ ID NO: 38451 - DNA, 15 bp, Homo sapiens
ccccacccccaatac

SEQ ID NO: 38452 - DNA, 15 bp, Homo sapiens
tccccacccccaata

SEQ ID NO: 38453 - DNA, 15 bp, Homo sapiens
ctccccacccccaat

SEQ ID NO: 38454 - DNA, 15 bp, Homo sapiens
cctccccacccccaa

SEQ ID NO: 38455 - DNA, 15 bp, Homo sapiens
tcctccccaccccca

SEQ ID NO: 38456 - DNA, 15 bp, Homo sapiens
atcctccccaccccc

SEQ ID NO: 38457 - DNA, 15 bp, Homo sapiens
catcctccccacccc

SEQ ID NO: 38458 - DNA, 15 bp, Homo sapiens
tcatcctccccaccc

SEQ ID NO: 38459 - DNA, 15 bp, Homo sapiens
atcatcctccccacc

SEQ ID NO: 38460 - DNA, 15 bp, Homo sapiens
tatcatcctccccac

SEQ ID NO: 38461 - DNA, 15 bp, Homo sapiens
gtatcatcctcccca

SEQ ID NO: 38462 - DNA, 15 bp, Homo sapiens
ggtatcatcctcccc

SEQ ID NO: 38463 - DNA, 15 bp, Homo sapiens
aggtatcatcctccc

SEQ ID NO: 38464 - DNA, 15 bp, Homo sapiens
gaggtatcatcctcc

SEQ ID NO: 38465 - DNA, 15 bp, Homo sapiens
agaggtatcatcctc

SEQ ID NO: 38466 - DNA, 15 bp, Homo sapiens
gagaggtatcatcct

SEQ ID NO: 38467 - DNA, 15 bp, Homo sapiens
agagaggtatcatcc

SEQ ID NO: 38468 - DNA, 15 bp, Homo sapiens
aagagaggtatcatc

SEQ ID NO: 38469 - DNA, 15 bp, Homo sapiens
gaagagaggtatcat

SEQ ID NO: 38470 - DNA, 15 bp, Homo sapiens
tgaagagaggtatca

SEQ ID NO: 38471 - DNA, 15 bp, Homo sapiens
atgaagagaggtatc

SEQ ID NO: 38472 - DNA, 15 bp, Homo sapiens
tatgaagagaggtat

SEQ ID NO: 38473 - DNA, 15 bp, Homo sapiens
ctatgaagagaggta

SEQ ID NO: 38474 - DNA, 15 bp, Homo sapiens
actatgaagagaggt

SEQ ID NO: 38475 - DNA, 15 bp, Homo sapiens
aactatgaagagagg

SEQ ID NO: 38476 - DNA, 15 bp, Homo sapiens
taactatgaagagag

SEQ ID NO: 38477 - DNA, 15 bp, Homo sapiens
ctaactatgaagaga

SEQ ID NO: 38478 - DNA, 15 bp, Homo sapiens
tctaactatgaagag

SEQ ID NO: 38479 - DNA, 15 bp, Homo sapiens
atctaactatgaaga

SEQ ID NO: 38480 - DNA, 15 bp, Homo sapiens
gatctaactatgaag

SEQ ID NO: 38481 - DNA, 15 bp, Homo sapiens
ggatctaactatgaa

SEQ ID NO: 38482 - DNA, 15 bp, Homo sapiens
aggatctaactatga

SEQ ID NO: 38483 - DNA, 15 bp, Homo sapiens
taggatctaactatg

SEQ ID NO: 38484 - DNA, 15 bp, Homo sapiens
gtaggatctaactat

SEQ ID NO: 38485 - DNA, 15 bp, Homo sapiens
agtaggatctaacta

SEQ ID NO: 38486 - DNA, 15 bp, Homo sapiens
aagtaggatctaact

SEQ ID NO: 38487 - DNA, 15 bp, Homo sapiens
taagtaggatctaac

SEQ ID NO: 38488 - DNA, 15 bp, Homo sapiens
gtaagtaggatctaa

SEQ ID NO: 38489 - DNA, 15 bp, Homo sapiens
agtaagtaggatcta

SEQ ID NO: 38490 - DNA, 15 bp, Homo sapiens
aagtaagtaggatct

SEQ ID NO: 38491 - DNA, 15 bp, Homo sapiens
aaagtaagtaggatc

SEQ ID NO: 38492 - DNA, 15 bp, Homo sapiens
gaaagtaagtaggat

SEQ ID NO: 38493 - DNA, 15 bp, Homo sapiens
tgaaagtaagtagga

SEQ ID NO: 38494 - DNA, 15 bp, Homo sapiens
ttgaaagtaagtagg

SEQ ID NO: 38495 - DNA, 15 bp, Homo sapiens
gttgaaagtaagtag

SEQ ID NO: 38496 - DNA, 15 bp, Homo sapiens
tgttgaaagtaagta

SEQ ID NO: 38497 - DNA, 15 bp, Homo sapiens
ctgttgaaagtaagt

SEQ ID NO: 38498 - DNA, 15 bp, Homo sapiens
tctgttgaaagtaag

SEQ ID NO: 38499 - DNA, 15 bp, Homo sapiens
ctctgttgaaagtaa

SEQ ID NO: 38500 - DNA, 15 bp, Homo sapiens
actctgttgaaagta

SEQ ID NO: 38501 - DNA, 15 bp, Homo sapiens
aactctgttgaaagt

SEQ ID NO: 38502 - DNA, 15 bp, Homo sapiens
gaactctgttgaaag

SEQ ID NO: 38503 - DNA, 15 bp, Homo sapiens
agaactctgttgaaa

SEQ ID NO: 38504 - DNA, 15 bp, Homo sapiens
aagaactctgttgaa

SEQ ID NO: 38505 - DNA, 15 bp, Homo sapiens
taagaactctgttga

SEQ ID NO: 38506 - DNA, 15 bp, Homo sapiens
ttaagaactctgttg

SEQ ID NO: 38507 - DNA, 15 bp, Homo sapiens
gttaagaactctgtt

SEQ ID NO: 38508 - DNA, 15 bp, Homo sapiens
tgttaagaactctgt

SEQ ID NO: 38509 - DNA, 15 bp, Homo sapiens
ttgttaagaactctg

SEQ ID NO: 38510 - DNA, 15 bp, Homo sapiens
attgttaagaactct

SEQ ID NO: 38511 - DNA, 15 bp, Homo sapiens
gattgttaagaactc

SEQ ID NO: 38512 - DNA, 15 bp, Homo sapiens
ggattgttaagaact

SEQ ID NO: 38513 - DNA, 15 bp, Homo sapiens
aggattgttaagaac

SEQ ID NO: 38514 - DNA, 15 bp, Homo sapiens
taggattgttaagaa

SEQ ID NO: 38515 - DNA, 15 bp, Homo sapiens
ctaggattgttaaga

SEQ ID NO: 38516 - DNA, 15 bp, Homo sapiens
tctaggattgttaag

SEQ ID NO: 38517 - DNA, 15 bp, Homo sapiens
ttctaggattgttaa

SEQ ID NO: 38518 - DNA, 15 bp, Homo sapiens
tttctaggattgtta

SEQ ID NO: 38519 - DNA, 15 bp, Homo sapiens
gtttctaggattgtt

SEQ ID NO: 38520 - DNA, 15 bp, Homo sapiens
agtttctaggattgt

SEQ ID NO: 38521 - DNA, 15 bp, Homo sapiens
gagtttctaggattg

SEQ ID NO: 38522 - DNA, 15 bp, Homo sapiens
tgagtttctaggatt

SEQ ID NO: 38523 - DNA, 15 bp, Homo sapiens
gtgagtttctaggat

SEQ ID NO: 38524 - DNA, 15 bp, Homo sapiens
tgtgagtttctagga

SEQ ID NO: 38525 - DNA, 15 bp, Homo sapiens
ctgtgagtttctagg

SEQ ID NO: 38526 - DNA, 15 bp, Homo sapiens
cctgtgagtttctag

SEQ ID NO: 38527 - DNA, 15 bp, Homo sapiens
acctgtgagtttcta

SEQ ID NO: 38528 - DNA, 15 bp, Homo sapiens
gacctgtgagtttct

SEQ ID NO: 38529 - DNA, 15 bp, Homo sapiens
ggacctgtgagtttc

SEQ ID NO: 38530 - DNA, 15 bp, Homo sapiens
tggacctgtgagttt

SEQ ID NO: 38531 - DNA, 15 bp, Homo sapiens
ctggacctgtgagtt

SEQ ID NO: 38532 - DNA, 15 bp, Homo sapiens
tctggacctgtgagt

SEQ ID NO: 38533 - DNA, 15 bp, Homo sapiens
ttctggacctgtgag

SEQ ID NO: 38534 - DNA, 15 bp, Homo sapiens
tttctggacctgtga

SEQ ID NO: 38535 - DNA, 15 bp, Homo sapiens
ttttctggacctgtg

SEQ ID NO: 38536 - DNA, 15 bp, Homo sapiens
cttttctggacctgt

SEQ ID NO: 38537 - DNA, 15 bp, Homo sapiens
tcttttctggacctg

SEQ ID NO: 38538 - DNA, 15 bp, Homo sapiens
gtcttttctggacct

SEQ ID NO: 38539 - DNA, 15 bp, Homo sapiens
tgtcttttctggacc

SEQ ID NO: 38540 - DNA, 15 bp, Homo sapiens
ttgtcttttctggac

SEQ ID NO: 38541 - DNA, 15 bp, Homo sapiens
cttgtcttttctgga

SEQ ID NO: 38542 - DNA, 15 bp, Homo sapiens
gcttgtcttttctgg

SEQ ID NO: 38543 - DNA, 15 bp, Homo sapiens
tgcttgtcttttctg

SEQ ID NO: 38544 - DNA, 15 bp, Homo sapiens
atgcttgtcttttct

SEQ ID NO: 38545 - DNA, 15 bp, Homo sapiens
tatgcttgtcttttc

SEQ ID NO: 38546 - DNA, 15 bp, Homo sapiens
ttatgcttgtctttt

SEQ ID NO: 38547 - DNA, 15 bp, Homo sapiens
tttatgcttgtcttt

SEQ ID NO: 38548 - DNA, 15 bp, Homo sapiens
ctttatgcttgtctt

SEQ ID NO: 38549 - DNA, 15 bp, Homo sapiens
cctttatgcttgtct

SEQ ID NO: 38550 - DNA, 15 bp, Homo sapiens
tcctttatgcttgtc

SEQ ID NO: 38551 - DNA, 15 bp, Homo sapiens
ttcctttatgcttgt

SEQ ID NO: 38552 - DNA, 15 bp, Homo sapiens
tttcctttatgcttg

SEQ ID NO: 38553 - DNA, 15 bp, Homo sapiens
gtttcctttatgctt

SEQ ID NO: 38554 - DNA, 15 bp, Homo sapiens
agtttcctttatgct

SEQ ID NO: 38555 - DNA, 15 bp, Homo sapiens
tagtttcctttatgc

SEQ ID NO: 38556 - DNA, 15 bp, Homo sapiens
atagtttcctttatg

SEQ ID NO: 38557 - DNA, 15 bp, Homo sapiens
tatagtttcctttat

SEQ ID NO: 38558 - DNA, 15 bp, Homo sapiens
ttatagtttccttta

SEQ ID NO: 38559 - DNA, 15 bp, Homo sapiens
tttatagtttccttt

SEQ ID NO: 38560 - DNA, 15 bp, Homo sapiens
atttatagtttcctt

SEQ ID NO: 38561 - DNA, 15 bp, Homo sapiens
tatttatagtttcct

SEQ ID NO: 38562 - DNA, 15 bp, Homo sapiens
ttatttatagtttcc

SEQ ID NO: 38563 - DNA, 15 bp, Homo sapiens
attatttatagtttc

SEQ ID NO: 38564 - DNA, 15 bp, Homo sapiens
cattatttatagttt

SEQ ID NO: 38565 - DNA, 15 bp, Homo sapiens
gcattatttatagtt

SEQ ID NO: 38566 - DNA, 15 bp, Homo sapiens
tgcattatttatagt

SEQ ID NO: 38567 - DNA, 15 bp, Homo sapiens
atgcattatttatag

SEQ ID NO: 38568 - DNA, 15 bp, Homo sapiens
aatgcattatttata

SEQ ID NO: 38569 - DNA, 15 bp, Homo sapiens
aaatgcattatttat

SEQ ID NO: 38570 - DNA, 15 bp, Homo sapiens
caaatgcattattta

SEQ ID NO: 38571 - DNA, 15 bp, Homo sapiens
tcaaatgcattattt

SEQ ID NO: 38572 - DNA, 15 bp, Homo sapiens
ttcaaatgcattatt

SEQ ID NO: 38573 - DNA, 15 bp, Homo sapiens
cttcaaatgcattat

SEQ ID NO: 38574 - DNA, 15 bp, Homo sapiens
tcttcaaatgcatta

SEQ ID NO: 38575 - DNA, 15 bp, Homo sapiens
gtcttcaaatgcatt

SEQ ID NO: 38576 - DNA, 15 bp, Homo sapiens
agtcttcaaatgcat

SEQ ID NO: 38577 - DNA, 15 bp, Homo sapiens
tagtcttcaaatgca

SEQ ID NO: 38578 - DNA, 15 bp, Homo sapiens
ttagtcttcaaatgc

SEQ ID NO: 38579 - DNA, 15 bp, Homo sapiens
gttagtcttcaaatg

SEQ ID NO: 38580 - DNA, 15 bp, Homo sapiens
agttagtcttcaaat

SEQ ID NO: 38581 - DNA, 15 bp, Homo sapiens
gagttagtcttcaaa

SEQ ID NO: 38582 - DNA, 15 bp, Homo sapiens
tgagttagtcttcaa

SEQ ID NO: 38583 - DNA, 15 bp, Homo sapiens
ctgagttagtcttca

SEQ ID NO: 38584 - DNA, 15 bp, Homo sapiens
cctgagttagtcttc

SEQ ID NO: 38585 - DNA, 15 bp, Homo sapiens
tcctgagttagtctt

SEQ ID NO: 38586 - DNA, 15 bp, Homo sapiens
ttcctgagttagtct

SEQ ID NO: 38587 - DNA, 15 bp, Homo sapiens
tttcctgagttagtc

SEQ ID NO: 38588 - DNA, 15 bp, Homo sapiens
atttcctgagttagt

SEQ ID NO: 38589 - DNA, 15 bp, Homo sapiens
gatttcctgagttag

SEQ ID NO: 38590 - DNA, 15 bp, Homo sapiens
tgatttcctgagtta

SEQ ID NO: 38591 - DNA, 15 bp, Homo sapiens
ttgatttcctgagtt

SEQ ID NO: 38592 - DNA, 15 bp, Homo sapiens
attgatttcctgagt

SEQ ID NO: 38593 - DNA, 15 bp, Homo sapiens
cattgatttcctgag

SEQ ID NO: 38594 - DNA, 15 bp, Homo sapiens
tcattgatttcctga

SEQ ID NO: 38595 - DNA, 15 bp, Homo sapiens
atcattgatttcctg

SEQ ID NO: 38596 - DNA, 15 bp, Homo sapiens
aatcattgatttcct

SEQ ID NO: 38597 - DNA, 15 bp, Homo sapiens
taatcattgatttcc

SEQ ID NO: 38598 - DNA, 15 bp, Homo sapiens
ataatcattgatttc

SEQ ID NO: 38599 - DNA, 15 bp, Homo sapiens
aataatcattgattt

SEQ ID NO: 38600 - DNA, 15 bp, Homo sapiens
aaataatcattgatt

SEQ ID NO: 38601 - DNA, 15 bp, Homo sapiens
gaaataatcattgat

SEQ ID NO: 38602 - DNA, 15 bp, Homo sapiens
ggaaataatcattga

SEQ ID NO: 38603 - DNA, 15 bp, Homo sapiens
gggaaataatcattg

SEQ ID NO: 38604 - DNA, 15 bp, Homo sapiens
ggggaaataatcatt

SEQ ID NO: 38605 - DNA, 15 bp, Homo sapiens
gggggaaataatcat

SEQ ID NO: 38606 - DNA, 15 bp, Homo sapiens
ggggggaaataatca

SEQ ID NO: 38607 - DNA, 15 bp, Homo sapiens
tggggggaaataatc

SEQ ID NO: 38608 - DNA, 15 bp, Homo sapiens
ctggggggaaataat

SEQ ID NO: 38609 - DNA, 15 bp, Homo sapiens
cctggggggaaataa

SEQ ID NO: 38610 - DNA, 15 bp, Homo sapiens
gcctggggggaaata

SEQ ID NO: 38611 - DNA, 15 bp, Homo sapiens
agcctggggggaaat

SEQ ID NO: 38612 - DNA, 15 bp, Homo sapiens
tagcctggggggaaa

SEQ ID NO: 38613 - DNA, 15 bp, Homo sapiens
gtagcctggggggaa

SEQ ID NO: 38614 - DNA, 15 bp, Homo sapiens
ggtagcctgggggga

SEQ ID NO: 38615 - DNA, 15 bp, Homo sapiens
gggtagcctgggggg

SEQ ID NO: 38616 - DNA, 15 bp, Homo sapiens
tgggtagcctggggg

SEQ ID NO: 38617 - DNA, 15 bp, Homo sapiens
ctgggtagcctgggg

SEQ ID NO: 38618 - DNA, 15 bp, Homo sapiens
actgggtagcctggg

SEQ ID NO: 38619 - DNA, 15 bp, Homo sapiens
cactgggtagcctgg

SEQ ID NO: 38620 - DNA, 15 bp, Homo sapiens
acactgggtagcctg

SEQ ID NO: 38621 - DNA, 15 bp, Homo sapiens
gacactgggtagcct

SEQ ID NO: 38622 - DNA, 15 bp, Homo sapiens
agacactgggtagcc

SEQ ID NO: 38623 - DNA, 15 bp, Homo sapiens
aagacactgggtagc

SEQ ID NO: 38624 - DNA, 15 bp, Homo sapiens
taagacactgggtag

SEQ ID NO: 38625 - DNA, 15 bp, Homo sapiens
ttaagacactgggta

SEQ ID NO: 38626 - DNA, 15 bp, Homo sapiens
tttaagacactgggt

SEQ ID NO: 38627 - DNA, 15 bp, Homo sapiens
ttttaagacactggg

SEQ ID NO: 38628 - DNA, 15 bp, Homo sapiens
tttttaagacactgg

SEQ ID NO: 38629 - DNA, 15 bp, Homo sapiens
ttttttaagacactg

SEQ ID NO: 38630 - DNA, 15 bp, Homo sapiens
tttttttaagacact

SEQ ID NO: 38631 - DNA, 15 bp, Homo sapiens
gtttttttaagacac

SEQ ID NO: 38632 - DNA, 15 bp, Homo sapiens
tgtttttttaagaca

SEQ ID NO: 38633 - DNA, 15 bp, Homo sapiens
ctgtttttttaagac

SEQ ID NO: 38634 - DNA, 15 bp, Homo sapiens
actgtttttttaaga

SEQ ID NO: 38635 - DNA, 15 bp, Homo sapiens
aactgtttttttaag

SEQ ID NO: 38636 - DNA, 15 bp, Homo sapiens
aaactgtttttttaa

SEQ ID NO: 38637 - DNA, 15 bp, Homo sapiens
taaactgttttttta

SEQ ID NO: 38638 - DNA, 15 bp, Homo sapiens
ttaaactgttttttt

SEQ ID NO: 38639 - DNA, 15 bp, Homo sapiens
attaaactgtttttt

SEQ ID NO: 38640 - DNA, 15 bp, Homo sapiens
aattaaactgttttt

SEQ ID NO: 38641 - DNA, 15 bp, Homo sapiens
taattaaactgtttt

SEQ ID NO: 38642 - DNA, 15 bp, Homo sapiens
ttaattaaactgttt

SEQ ID NO: 38643 - DNA, 15 bp, Homo sapiens
attaattaaactgtt

SEQ ID NO: 38644 - DNA, 15 bp, Homo sapiens
tattaattaaactgt

SEQ ID NO: 38645 - DNA, 15 bp, Homo sapiens
gtattaattaaactg

SEQ ID NO: 38646 - DNA, 15 bp, Homo sapiens
tgtattaattaaact

SEQ ID NO: 38647 - DNA, 15 bp, Homo sapiens
ttgtattaattaaac

SEQ ID NO: 38648 - DNA, 15 bp, Homo sapiens
attgtattaattaaa

SEQ ID NO: 38649 - DNA, 15 bp, Homo sapiens
gattgtattaattaa

SEQ ID NO: 38650 - DNA, 15 bp, Homo sapiens
agattgtattaatta

SEQ ID NO: 38651 - DNA, 15 bp, Homo sapiens
aagattgtattaatt

SEQ ID NO: 38652 - DNA, 15 bp, Homo sapiens
aaagattgtattaat

SEQ ID NO: 38653 - DNA, 15 bp, Homo sapiens
aaaagattgtattaa

SEQ ID NO: 38654 - DNA, 15 bp, Homo sapiens
caaaagattgtatta

SEQ ID NO: 38655 - DNA, 15 bp, Homo sapiens
acaaaagattgtatt

SEQ ID NO: 38656 - DNA, 15 bp, Homo sapiens
aacaaaagattgtat

SEQ ID NO: 38657 - DNA, 15 bp, Homo sapiens
aaacaaaagattgta

SEQ ID NO: 38658 - DNA, 15 bp, Homo sapiens
gaaacaaaagattgt

SEQ ID NO: 38659 - DNA, 15 bp, Homo sapiens
tgaaacaaaagattg

SEQ ID NO: 38660 - DNA, 15 bp, Homo sapiens
ttgaaacaaaagatt

SEQ ID NO: 38661 - DNA, 15 bp, Homo sapiens
attgaaacaaaagat

SEQ ID NO: 38662 - DNA, 15 bp, Homo sapiens
aattgaaacaaaaga

SEQ ID NO: 38663 - DNA, 15 bp, Homo sapiens
aaattgaaacaaaag

SEQ ID NO: 38664 - DNA, 15 bp, Homo sapiens
aaaattgaaacaaaa

SEQ ID NO: 38665 - DNA, 15 bp, Homo sapiens
gaaaattgaaacaaa

SEQ ID NO: 38666 - DNA, 15 bp, Homo sapiens
agaaaattgaaacaa

SEQ ID NO: 38667 - DNA, 15 bp, Homo sapiens
tagaaaattgaaaca

SEQ ID NO: 38668 - DNA, 15 bp, Homo sapiens
gtagaaaattgaaac

SEQ ID NO: 38669 - DNA, 15 bp, Homo sapiens
ggtagaaaattgaaa

SEQ ID NO: 38670 - DNA, 15 bp, Homo sapiens
aggtagaaaattgaa

SEQ ID NO: 38671 - DNA, 15 bp, Homo sapiens
taggtagaaaattga

SEQ ID NO: 38672 - DNA, 15 bp, Homo sapiens
ataggtagaaaattg

SEQ ID NO: 38673 - DNA, 15 bp, Homo sapiens
tataggtagaaaatt

SEQ ID NO: 38674 - DNA, 15 bp, Homo sapiens
atataggtagaaaat

SEQ ID NO: 38675 - DNA, 15 bp, Homo sapiens
aatataggtagaaaa

SEQ ID NO: 38676 - DNA, 15 bp, Homo sapiens
aaatataggtagaaa

SEQ ID NO: 38677 - DNA, 15 bp, Homo sapiens
taaatataggtagaa

SEQ ID NO: 38678 - DNA, 15 bp, Homo sapiens
ataaatataggtaga

SEQ ID NO: 38679 - DNA, 15 bp, Homo sapiens
cataaatataggtag

SEQ ID NO: 38680 - DNA, 15 bp, Homo sapiens
ccataaatataggta

SEQ ID NO: 38681 - DNA, 15 bp, Homo sapiens
gccataaatataggt

SEQ ID NO: 38682 - DNA, 15 bp, Homo sapiens
agccataaatatagg

SEQ ID NO: 38683 - DNA, 15 bp, Homo sapiens
aagccataaatatag

SEQ ID NO: 38684 - DNA, 15 bp, Homo sapiens
aaagccataaatata

SEQ ID NO: 38685 - DNA, 15 bp, Homo sapiens
aaaagccataaatat

SEQ ID NO: 38686 - DNA, 15 bp, Homo sapiens
taaaagccataaata

SEQ ID NO: 38687 - DNA, 15 bp, Homo sapiens
ctaaaagccataaat

SEQ ID NO: 38688 - DNA, 15 bp, Homo sapiens
gctaaaagccataaa

SEQ ID NO: 38689 - DNA, 15 bp, Homo sapiens
agctaaaagccataa

SEQ ID NO: 38690 - DNA, 15 bp, Homo sapiens
aagctaaaagccata

SEQ ID NO: 38691 - DNA, 15 bp, Homo sapiens
aaagctaaaagccat

SEQ ID NO: 38692 - DNA, 15 bp, Homo sapiens
aaaagctaaaagcca

SEQ ID NO: 38693 - DNA, 15 bp, Homo sapiens
gaaaagctaaaagcc

SEQ ID NO: 38694 - DNA, 15 bp, Homo sapiens
agaaaagctaaaagc

SEQ ID NO: 38695 - DNA, 15 bp, Homo sapiens
tagaaaagctaaaag

SEQ ID NO: 38696 - DNA, 15 bp, Homo sapiens
ttagaaaagctaaaa

SEQ ID NO: 38697 - DNA, 15 bp, Homo sapiens
attagaaaagctaaa

SEQ ID NO: 38698 - DNA, 15 bp, Homo sapiens
tattagaaaagctaa

SEQ ID NO: 38699 - DNA, 15 bp, Homo sapiens
ttattagaaaagcta

SEQ ID NO: 38700 - DNA, 15 bp, Homo sapiens
tttattagaaaagct

SEQ ID NO: 38701 - DNA, 15 bp, Homo sapiens
ttttattagaaaagc

SEQ ID NO: 38702 - DNA, 15 bp, Homo sapiens
cttttattagaaaag

SEQ ID NO: 38703 - DNA, 15 bp, Homo sapiens
gcttttattagaaaa

SEQ ID NO: 38704 - DNA, 15 bp, Homo sapiens
agcttttattagaaa

SEQ ID NO: 38705 - DNA, 15 bp, Homo sapiens
gagcttttattagaa

SEQ ID NO: 38706 - DNA, 15 bp, Homo sapiens
tgagcttttattaga

SEQ ID NO: 38707 - DNA, 15 bp, Homo sapiens
ttgagcttttattag

SEQ ID NO: 38708 - DNA, 15 bp, Homo sapiens
tttgagcttttatta

SEQ ID NO: 38709 - DNA, 15 bp, Homo sapiens
ttttgagcttttatt

SEQ ID NO: 38710 - DNA, 15 bp, Homo sapiens
attttgagcttttat

SEQ ID NO: 38711 - DNA, 15 bp, Homo sapiens
cattttgagctttta

SEQ ID NO: 38712 - DNA, 15 bp, Homo sapiens
tcattttgagctttt

SEQ ID NO: 38713 - DNA, 15 bp, Homo sapiens
ttcattttgagcttt

SEQ ID NO: 38714 - DNA, 15 bp, Homo sapiens
attcattttgagctt

SEQ ID NO: 38715 - DNA, 15 bp, Homo sapiens
aattcattttgagct

SEQ ID NO: 38716 - DNA, 15 bp, Homo sapiens
taattcattttgagc

SEQ ID NO: 38717 - DNA, 15 bp, Homo sapiens
gtaattcattttgag

SEQ ID NO: 38718 - DNA, 15 bp, Homo sapiens
tgtaattcattttga

SEQ ID NO: 38719 - DNA, 15 bp, Homo sapiens
ctgtaattcattttg

SEQ ID NO: 38720 - DNA, 15 bp, Homo sapiens
actgtaattcatttt

SEQ ID NO: 38721 - DNA, 15 bp, Homo sapiens
gactgtaattcattt

SEQ ID NO: 38722 - DNA, 15 bp, Homo sapiens
tgactgtaattcatt

SEQ ID NO: 38723 - DNA, 15 bp, Homo sapiens
atgactgtaattcat

SEQ ID NO: 38724 - DNA, 15 bp, Homo sapiens
gatgactgtaattca

SEQ ID NO: 38725 - DNA, 15 bp, Homo sapiens
tgatgactgtaattc

SEQ ID NO: 38726 - DNA, 15 bp, Homo sapiens
ctgatgactgtaatt

SEQ ID NO: 38727 - DNA, 15 bp, Homo sapiens
actgatgactgtaat

SEQ ID NO: 38728 - DNA, 15 bp, Homo sapiens
cactgatgactgtaa

SEQ ID NO: 38729 - DNA, 15 bp, Homo sapiens
tcactgatgactgta

SEQ ID NO: 38730 - DNA, 15 bp, Homo sapiens
gtcactgatgactgt

SEQ ID NO: 38731 - DNA, 15 bp, Homo sapiens
agtcactgatgactg

SEQ ID NO: 38732 - DNA, 15 bp, Homo sapiens
aagtcactgatgact

SEQ ID NO: 38733 - DNA, 15 bp, Homo sapiens
aaagtcactgatgac

SEQ ID NO: 38734 - DNA, 15 bp, Homo sapiens
aaaagtcactgatga

SEQ ID NO: 38735 - DNA, 15 bp, Homo sapiens
aaaaagtcactgatg

SEQ ID NO: 38736 - DNA, 15 bp, Homo sapiens
taaaaagtcactgat

SEQ ID NO: 38737 - DNA, 15 bp, Homo sapiens
ttaaaaagtcactga

SEQ ID NO: 38738 - DNA, 15 bp, Homo sapiens
attaaaaagtcactg

SEQ ID NO: 38739 - DNA, 15 bp, Homo sapiens
cattaaaaagtcact

SEQ ID NO: 38740 - DNA, 15 bp, Homo sapiens
tcattaaaaagtcac

SEQ ID NO: 38741 - DNA, 15 bp, Homo sapiens
ttcattaaaaagtca

SEQ ID NO: 38742 - DNA, 15 bp, Homo sapiens
attcattaaaaagtc

SEQ ID NO: 38743 - DNA, 15 bp, Homo sapiens
tattcattaaaaagt

SEQ ID NO: 38744 - DNA, 15 bp, Homo sapiens
ctattcattaaaaag

SEQ ID NO: 38745 - DNA, 15 bp, Homo sapiens
tctattcattaaaaa

SEQ ID NO: 38746 - DNA, 15 bp, Homo sapiens
ttctattcattaaaa

SEQ ID NO: 38747 - DNA, 15 bp, Homo sapiens
cttctattcattaaa

SEQ ID NO: 38748 - DNA, 15 bp, Homo sapiens
tcttctattcattaa

SEQ ID NO: 38749 - DNA, 15 bp, Homo sapiens
gtcttctattcatta

SEQ ID NO: 38750 - DNA, 15 bp, Homo sapiens
agtcttctattcatt

SEQ ID NO: 38751 - DNA, 15 bp, Homo sapiens
aagtcttctattcat

SEQ ID NO: 38752 - DNA, 15 bp, Homo sapiens
aaagtcttctattca

SEQ ID NO: 38753 - DNA, 15 bp, Homo sapiens
aaaagtcttctattc

SEQ ID NO: 38754 - DNA, 15 bp, Homo sapiens
caaaagtcttctatt

SEQ ID NO: 38755 - DNA, 15 bp, Homo sapiens
gcaaaagtcttctat

SEQ ID NO: 38756 - DNA, 15 bp, Homo sapiens
tgcaaaagtcttcta

SEQ ID NO: 38757 - DNA, 15 bp, Homo sapiens
ttgcaaaagtcttct

SEQ ID NO: 38758 - DNA, 15 bp, Homo sapiens
attgcaaaagtcttc

SEQ ID NO: 38759 - DNA, 15 bp, Homo sapiens
aattgcaaaagtctt

SEQ ID NO: 38760 - DNA, 15 bp, Homo sapiens
aaattgcaaaagtct

SEQ ID NO: 38761 - DNA, 15 bp, Homo sapiens
aaaattgcaaaagtc

SEQ ID NO: 38762 - DNA, 15 bp, Homo sapiens
aaaaattgcaaaagt

SEQ ID NO: 38763 - DNA, 15 bp, Homo sapiens
taaaaattgcaaaag

SEQ ID NO: 38764 - DNA, 15 bp, Homo sapiens
ttaaaaattgcaaaa

SEQ ID NO: 38765 - DNA, 15 bp, Homo sapiens
gttaaaaattgcaaa

SEQ ID NO: 38766 - DNA, 15 bp, Homo sapiens
agttaaaaattgcaa

SEQ ID NO: 38767 - DNA, 15 bp, Homo sapiens
tagttaaaaattgca

SEQ ID NO: 38768 - DNA, 15 bp, Homo sapiens
atagttaaaaattgc

SEQ ID NO: 38769 - DNA, 15 bp, Homo sapiens
aatagttaaaaattg

SEQ ID NO: 38770 - DNA, 15 bp, Homo sapiens
aaatagttaaaaatt

SEQ ID NO: 38771 - DNA, 15 bp, Homo sapiens
caaatagttaaaaat

SEQ ID NO: 38772 - DNA, 15 bp, Homo sapiens
acaaatagttaaaaa

SEQ ID NO: 38773 - DNA, 15 bp, Homo sapiens
aacaaatagttaaaa

SEQ ID NO: 38774 - DNA, 15 bp, Homo sapiens
aaacaaatagttaaa

SEQ ID NO: 38775 - DNA, 15 bp, Homo sapiens
aaaacaaatagttaa

SEQ ID NO: 38776 - DNA, 15 bp, Homo sapiens
aaaaacaaatagtta

SEQ ID NO: 38777 - DNA, 15 bp, Homo sapiens
taaaaacaaatagtt

SEQ ID NO: 38778 - DNA, 15 bp, Homo sapiens
gtaaaaacaaatagt

SEQ ID NO: 38779 - DNA, 15 bp, Homo sapiens
agtaaaaacaaatag

SEQ ID NO: 38780 - DNA, 15 bp, Homo sapiens
aagtaaaaacaaata

SEQ ID NO: 38781 - DNA, 15 bp, Homo sapiens
taagtaaaaacaaat

SEQ ID NO: 38782 - DNA, 15 bp, Homo sapiens
ataagtaaaaacaaa

SEQ ID NO: 38783 - DNA, 15 bp, Homo sapiens
aataagtaaaaacaa

SEQ ID NO: 38784 - DNA, 15 bp, Homo sapiens
taataagtaaaaaca

SEQ ID NO: 38785 - DNA, 15 bp, Homo sapiens
ttaataagtaaaaac

SEQ ID NO: 38786 - DNA, 15 bp, Homo sapiens
tttaataagtaaaaa

SEQ ID NO: 38787 - DNA, 15 bp, Homo sapiens
atttaataagtaaaa

SEQ ID NO: 38788 - DNA, 15 bp, Homo sapiens
tatttaataagtaaa

SEQ ID NO: 38789 - DNA, 15 bp, Homo sapiens
atatttaataagtaa

SEQ ID NO: 38790 - DNA, 15 bp, Homo sapiens
aatatttaataagta

SEQ ID NO: 38791 - DNA, 15 bp, Homo sapiens
aaatatttaataagt

SEQ ID NO: 38792 - DNA, 15 bp, Homo sapiens
gaaatatttaataag

SEQ ID NO: 38793 - DNA, 15 bp, Homo sapiens
ggaaatatttaataa

SEQ ID NO: 38794 - DNA, 15 bp, Homo sapiens
cggaaatatttaata

SEQ ID NO: 38795 - DNA, 15 bp, Homo sapiens
gcggaaatatttaat

SEQ ID NO: 38796 - DNA, 15 bp, Homo sapiens
ggcggaaatatttaa

SEQ ID NO: 38797 - DNA, 15 bp, Homo sapiens
aggcggaaatattta

SEQ ID NO: 38798 - DNA, 15 bp, Homo sapiens
aaggcggaaatattt

SEQ ID NO: 38799 - DNA, 15 bp, Homo sapiens
caaggcggaaatatt

SEQ ID NO: 38800 - DNA, 15 bp, Homo sapiens
ccaaggcggaaatat

SEQ ID NO: 38801 - DNA, 15 bp, Homo sapiens
gccaaggcggaaata

SEQ ID NO: 38802 - DNA, 15 bp, Homo sapiens
ggccaaggcggaaat

SEQ ID NO: 38803 - DNA, 15 bp, Homo sapiens
tggccaaggcggaaa

SEQ ID NO: 38804 - DNA, 15 bp, Homo sapiens
ctggccaaggcggaa

SEQ ID NO: 38805 - DNA, 15 bp, Homo sapiens
cctggccaaggcgga

SEQ ID NO: 38806 - DNA, 15 bp, Homo sapiens
gcctggccaaggcgg

SEQ ID NO: 38807 - DNA, 15 bp, Homo sapiens
tgcctggccaaggcg

SEQ ID NO: 38808 - DNA, 15 bp, Homo sapiens
atgcctggccaaggc

SEQ ID NO: 38809 - DNA, 15 bp, Homo sapiens
catgcctggccaagg

SEQ ID NO: 38810 - DNA, 15 bp, Homo sapiens
ccatgcctggccaag

SEQ ID NO: 38811 - DNA, 15 bp, Homo sapiens
accatgcctggccaa

SEQ ID NO: 38812 - DNA, 15 bp, Homo sapiens
caccatgcctggcca

SEQ ID NO: 38813 - DNA, 15 bp, Homo sapiens
cgtgagccaccatgc

SEQ ID NO: 38814 - DNA, 15 bp, Homo sapiens
gcgtgagccaccatg

SEQ ID NO: 38815 - DNA, 15 bp, Homo sapiens
ggcgtgagccaccat

SEQ ID NO: 38816 - DNA, 15 bp, Homo sapiens
cagtgctgggattat

SEQ ID NO: 38817 - DNA, 15 bp, Homo sapiens
acagtgctgggatta

SEQ ID NO: 38818 - DNA, 15 bp, Homo sapiens
cacagtgctgggatt

SEQ ID NO: 38819 - DNA, 15 bp, Homo sapiens
tcacagtgctgggat

SEQ ID NO: 38820 - DNA, 15 bp, Homo sapiens
ctcacagtgctggga

SEQ ID NO: 38821 - DNA, 15 bp, Homo sapiens
tctcacagtgctggg

SEQ ID NO: 38822 - DNA, 15 bp, Homo sapiens
atctcacagtgctgg

SEQ ID NO: 38823 - DNA, 15 bp, Homo sapiens
catctcacagtgctg

SEQ ID NO: 38824 - DNA, 15 bp, Homo sapiens
gcatctcacagtgct

SEQ ID NO: 38825 - DNA, 15 bp, Homo sapiens
ggcatctcacagtgc

SEQ ID NO: 38826 - DNA, 15 bp, Homo sapiens
tggcatctcacagtg

SEQ ID NO: 38827 - DNA, 15 bp, Homo sapiens
ttggcatctcacagt

SEQ ID NO: 38828 - DNA, 15 bp, Homo sapiens
cttggcatctcacag

SEQ ID NO: 38829 - DNA, 15 bp, Homo sapiens
ccttggcatctcaca

SEQ ID NO: 38830 - DNA, 15 bp, Homo sapiens
gccttggcatctcac

SEQ ID NO: 38831 - DNA, 15 bp, Homo sapiens
tgccttggcatctca

SEQ ID NO: 38832 - DNA, 15 bp, Homo sapiens
ctgccttggcatctc

SEQ ID NO: 38833 - DNA, 15 bp, Homo sapiens
cctgccttggcatct

SEQ ID NO: 38834 - DNA, 15 bp, Homo sapiens
aactcaagtgatcct

SEQ ID NO: 38835 - DNA, 15 bp, Homo sapiens
aaactcaagtgatcc

SEQ ID NO: 38836 - DNA, 15 bp, Homo sapiens
taaactcaagtgatc

SEQ ID NO: 38837 - DNA, 15 bp, Homo sapiens
ttaaactcaagtgat

SEQ ID NO: 38838 - DNA, 15 bp, Homo sapiens
cttaaactcaagtga

SEQ ID NO: 38839 - DNA, 15 bp, Homo sapiens
tcttaaactcaagtg

SEQ ID NO: 38840 - DNA, 15 bp, Homo sapiens
ctcttaaactcaagt

SEQ ID NO: 38841 - DNA, 15 bp, Homo sapiens
actcttaaactcaag

SEQ ID NO: 38842 - DNA, 15 bp, Homo sapiens
aactcttaaactcaa

SEQ ID NO: 38843 - DNA, 15 bp, Homo sapiens
gaactcttaaactca

SEQ ID NO: 38844 - DNA, 15 bp, Homo sapiens
agaactcttaaactc

SEQ ID NO: 38845 - DNA, 15 bp, Homo sapiens
tagaactcttaaact

SEQ ID NO: 38846 - DNA, 15 bp, Homo sapiens
ctagaactcttaaac

SEQ ID NO: 38847 - DNA, 15 bp, Homo sapiens
tctagaactcttaaa

SEQ ID NO: 38848 - DNA, 15 bp, Homo sapiens
gtctagaactcttaa

SEQ ID NO: 38849 - DNA, 15 bp, Homo sapiens
ggtctagaactctta

SEQ ID NO: 38850 - DNA, 15 bp, Homo sapiens
tggtctagaactctt

SEQ ID NO: 38851 - DNA, 15 bp, Homo sapiens
ctggtctagaactct

SEQ ID NO: 38852 - DNA, 15 bp, Homo sapiens
cctggtctagaactc

SEQ ID NO: 38853 - DNA, 15 bp, Homo sapiens
gcctggtctagaact

SEQ ID NO: 38854 - DNA, 15 bp, Homo sapiens
agcctggtctagaac

SEQ ID NO: 38855 - DNA, 15 bp, Homo sapiens
cagcctggtctagaa

SEQ ID NO: 38856 - DNA, 15 bp, Homo sapiens
ccagcctggtctaga

SEQ ID NO: 38857 - DNA, 15 bp, Homo sapiens
cccagcctggtctag

SEQ ID NO: 38858 - DNA, 15 bp, Homo sapiens
acccagcctggtcta

SEQ ID NO: 38859 - DNA, 15 bp, Homo sapiens
tacccagcctggtct

SEQ ID NO: 38860 - DNA, 15 bp, Homo sapiens
atacccagcctggtc

SEQ ID NO: 38861 - DNA, 15 bp, Homo sapiens
catacccagcctggt

SEQ ID NO: 38862 - DNA, 15 bp, Homo sapiens
ccatacccagcctgg

SEQ ID NO: 38863 - DNA, 15 bp, Homo sapiens
accatacccagcctg

SEQ ID NO: 38864 - DNA, 15 bp, Homo sapiens
caccatacccagcct

SEQ ID NO: 38865 - DNA, 15 bp, Homo sapiens
ccaccatacccagcc

SEQ ID NO: 38866 - DNA, 15 bp, Homo sapiens
gccaccatacccagc

SEQ ID NO: 38867 - DNA, 15 bp, Homo sapiens
agccaccatacccag

SEQ ID NO: 38868 - DNA, 15 bp, Homo sapiens
gagccaccataccca

SEQ ID NO: 38869 - DNA, 15 bp, Homo sapiens
tgagccaccataccc

SEQ ID NO: 38870 - DNA, 15 bp, Homo sapiens
atgagccaccatacc

SEQ ID NO: 38871 - DNA, 15 bp, Homo sapiens
catgagccaccatac

SEQ ID NO: 38872 - DNA, 15 bp, Homo sapiens
gcatgagccaccata

SEQ ID NO: 38873 - DNA, 15 bp, Homo sapiens
ggcatgagccaccat

SEQ ID NO: 38874 - DNA, 15 bp, Homo sapiens
taggcatgagccacc

SEQ ID NO: 38875 - DNA, 15 bp, Homo sapiens
ataggcatgagccac

SEQ ID NO: 38876 - DNA, 15 bp, Homo sapiens
ctgggattataggca

SEQ ID NO: 38877 - DNA, 15 bp, Homo sapiens
acaaagtgctgggat

SEQ ID NO: 38878 - DNA, 15 bp, Homo sapiens
cacaaagtgctggga

SEQ ID NO: 38879 - DNA, 15 bp, Homo sapiens
tcacaaagtgctggg

SEQ ID NO: 38880 - DNA, 15 bp, Homo sapiens
ctcacaaagtgctgg

SEQ ID NO: 38881 - DNA, 15 bp, Homo sapiens
cctcacaaagtgctg

SEQ ID NO: 38882 - DNA, 15 bp, Homo sapiens
gcctcacaaagtgct

SEQ ID NO: 38883 - DNA, 15 bp, Homo sapiens
ggcctcacaaagtgc

SEQ ID NO: 38884 - DNA, 15 bp, Homo sapiens
tggcctcacaaagtg

SEQ ID NO: 38885 - DNA, 15 bp, Homo sapiens
ttggcctcacaaagt

SEQ ID NO: 38886 - DNA, 15 bp, Homo sapiens
cttggcctcacaaag

SEQ ID NO: 38887 - DNA, 15 bp, Homo sapiens
ccttggcctcacaaa

SEQ ID NO: 38888 - DNA, 15 bp, Homo sapiens
accttggcctcacaa

SEQ ID NO: 38889 - DNA, 15 bp, Homo sapiens
aaccttggcctcaca

SEQ ID NO: 38890 - DNA, 15 bp, Homo sapiens
caaccttggcctcac

SEQ ID NO: 38891 - DNA, 15 bp, Homo sapiens
ccaaccttggcctca

SEQ ID NO: 38892 - DNA, 15 bp, Homo sapiens
gccaaccttggcctc

SEQ ID NO: 38893 - DNA, 15 bp, Homo sapiens
cgccaaccttggcct

SEQ ID NO: 38894 - DNA, 15 bp, Homo sapiens
ccgccaaccttggcc

SEQ ID NO: 38895 - DNA, 15 bp, Homo sapiens
tccgccaaccttggc

SEQ ID NO: 38896 - DNA, 15 bp, Homo sapiens
atccgccaaccttgg

SEQ ID NO: 38897 - DNA, 15 bp, Homo sapiens
gatccgccaaccttg

SEQ ID NO: 38898 - DNA, 15 bp, Homo sapiens
tgatccgccaacctt

SEQ ID NO: 38899 - DNA, 15 bp, Homo sapiens
gtgatccgccaacct

SEQ ID NO: 38900 - DNA, 15 bp, Homo sapiens
ggtgatccgccaacc

SEQ ID NO: 38901 - DNA, 15 bp, Homo sapiens
aggtgatccgccaac

SEQ ID NO: 38902 - DNA, 15 bp, Homo sapiens
caggtgatccgccaa

SEQ ID NO: 38903 - DNA, 15 bp, Homo sapiens
tcaggtgatccgcca

SEQ ID NO: 38904 - DNA, 15 bp, Homo sapiens
taaactcctgacctc

SEQ ID NO: 38905 - DNA, 15 bp, Homo sapiens
ttaaactcctgacct

SEQ ID NO: 38906 - DNA, 15 bp, Homo sapiens
cttaaactcctgacc

SEQ ID NO: 38907 - DNA, 15 bp, Homo sapiens
tcttaaactcctgac

SEQ ID NO: 38908 - DNA, 15 bp, Homo sapiens
gtcttaaactcctga

SEQ ID NO: 38909 - DNA, 15 bp, Homo sapiens
ggtcttaaactcctg

SEQ ID NO: 38910 - DNA, 15 bp, Homo sapiens
tggtcttaaactcct

SEQ ID NO: 38911 - DNA, 15 bp, Homo sapiens
ctggtcttaaactcc

SEQ ID NO: 38912 - DNA, 15 bp, Homo sapiens
taccatgttggccag

SEQ ID NO: 38913 - DNA, 15 bp, Homo sapiens
ttaccatgttggcca

SEQ ID NO: 38914 - DNA, 15 bp, Homo sapiens
tttaccatgttggcc

SEQ ID NO: 38915 - DNA, 15 bp, Homo sapiens
ttttaccatgttggc

SEQ ID NO: 38916 - DNA, 15 bp, Homo sapiens
gttttaccatgttgg

SEQ ID NO: 38917 - DNA, 15 bp, Homo sapiens
ggttttaccatgttg

SEQ ID NO: 38918 - DNA, 15 bp, Homo sapiens
gggttttaccatgtt

SEQ ID NO: 38919 - DNA, 15 bp, Homo sapiens
ggggttttaccatgt

SEQ ID NO: 38920 - DNA, 15 bp, Homo sapiens
tggggttttaccatg

SEQ ID NO: 38921 - DNA, 15 bp, Homo sapiens
atggggttttaccat

SEQ ID NO: 38922 - DNA, 15 bp, Homo sapiens
gatggggttttacca

SEQ ID NO: 38923 - DNA, 15 bp, Homo sapiens
agatggggttttacc

SEQ ID NO: 38924 - DNA, 15 bp, Homo sapiens
gagatggggttttac

SEQ ID NO: 38925 - DNA, 15 bp, Homo sapiens
agagatggggtttta

SEQ ID NO: 38926 - DNA, 15 bp, Homo sapiens
tagagatggggtttt

SEQ ID NO: 38927 - DNA, 15 bp, Homo sapiens
tgtagagatggggtt

SEQ ID NO: 38928 - DNA, 15 bp, Homo sapiens
ttgtagagatggggt

SEQ ID NO: 38929 - DNA, 15 bp, Homo sapiens
tttgtagagatgggg

SEQ ID NO: 38930 - DNA, 15 bp, Homo sapiens
ttttgtagagatggg

SEQ ID NO: 38931 - DNA, 15 bp, Homo sapiens
tttttgtagagatgg

SEQ ID NO: 38932 - DNA, 15 bp, Homo sapiens
attttttgtagagat

SEQ ID NO: 38933 - DNA, 15 bp, Homo sapiens
tattttttgtagaga

SEQ ID NO: 38934 - DNA, 15 bp, Homo sapiens
gtattttttgtagag

SEQ ID NO: 38935 - DNA, 15 bp, Homo sapiens
tgtattttttgtaga

SEQ ID NO: 38936 - DNA, 15 bp, Homo sapiens
ttggctaatttttgt

SEQ ID NO: 38937 - DNA, 15 bp, Homo sapiens
cttggctaatttttg

SEQ ID NO: 38938 - DNA, 15 bp, Homo sapiens
ccttggctaattttt

SEQ ID NO: 38939 - DNA, 15 bp, Homo sapiens
cccttggctaatttt

SEQ ID NO: 38940 - DNA, 15 bp, Homo sapiens
ccccttggctaattt

SEQ ID NO: 38941 - DNA, 15 bp, Homo sapiens
accccttggctaatt

SEQ ID NO: 38942 - DNA, 15 bp, Homo sapiens
caccccttggctaat

SEQ ID NO: 38943 - DNA, 15 bp, Homo sapiens
ccaccccttggctaa

SEQ ID NO: 38944 - DNA, 15 bp, Homo sapiens
accaccccttggcta

SEQ ID NO: 38945 - DNA, 15 bp, Homo sapiens
caccaccccttggct

SEQ ID NO: 38946 - DNA, 15 bp, Homo sapiens
ccaccaccccttggc

SEQ ID NO: 38947 - DNA, 15 bp, Homo sapiens
accaccaccccttgg

SEQ ID NO: 38948 - DNA, 15 bp, Homo sapiens
caccaccaccccttg

SEQ ID NO: 38949 - DNA, 15 bp, Homo sapiens
ccaccaccacccctt

SEQ ID NO: 38950 - DNA, 15 bp, Homo sapiens
cccaccaccacccct

SEQ ID NO: 38951 - DNA, 15 bp, Homo sapiens
gcccaccaccacccc

SEQ ID NO: 38952 - DNA, 15 bp, Homo sapiens
tgcccaccaccaccc

SEQ ID NO: 38953 - DNA, 15 bp, Homo sapiens
gtgcccaccaccacc

SEQ ID NO: 38954 - DNA, 15 bp, Homo sapiens
ggtgcccaccaccac

SEQ ID NO: 38955 - DNA, 15 bp, Homo sapiens
aggtgcccaccacca

SEQ ID NO: 38956 - DNA, 15 bp, Homo sapiens
taggtgcccaccacc

SEQ ID NO: 38957 - DNA, 15 bp, Homo sapiens
ataggtgcccaccac

SEQ ID NO: 38958 - DNA, 15 bp, Homo sapiens
tataggtgcccacca

SEQ ID NO: 38959 - DNA, 15 bp, Homo sapiens
ttataggtgcccacc

SEQ ID NO: 38960 - DNA, 15 bp, Homo sapiens
attataggtgcccac

SEQ ID NO: 38961 - DNA, 15 bp, Homo sapiens
gattataggtgccca

SEQ ID NO: 38962 - DNA, 15 bp, Homo sapiens
ggattataggtgccc

SEQ ID NO: 38963 - DNA, 15 bp, Homo sapiens
gggattataggtgcc

SEQ ID NO: 38964 - DNA, 15 bp, Homo sapiens
tgggattataggtgc

SEQ ID NO: 38965 - DNA, 15 bp, Homo sapiens
atgggattataggtg

SEQ ID NO: 38966 - DNA, 15 bp, Homo sapiens
gatgggattataggt

SEQ ID NO: 38967 - DNA, 15 bp, Homo sapiens
agatgggattatagg

SEQ ID NO: 38968 - DNA, 15 bp, Homo sapiens
aagatgggattatag

SEQ ID NO: 38969 - DNA, 15 bp, Homo sapiens
gaagatgggattata

SEQ ID NO: 38970 - DNA, 15 bp, Homo sapiens
agaagatgggattat

SEQ ID NO: 38971 - DNA, 15 bp, Homo sapiens
aagaagatgggatta

SEQ ID NO: 38972 - DNA, 15 bp, Homo sapiens
caagaagatgggatt

SEQ ID NO: 38973 - DNA, 15 bp, Homo sapiens
ccaagaagatgggat

SEQ ID NO: 38974 - DNA, 15 bp, Homo sapiens
cccaagaagatggga

SEQ ID NO: 38975 - DNA, 15 bp, Homo sapiens
tcccaagaagatggg

SEQ ID NO: 38976 - DNA, 15 bp, Homo sapiens
ctcccaagaagatgg

SEQ ID NO: 38977 - DNA, 15 bp, Homo sapiens
cctcccaagaagatg

SEQ ID NO: 38978 - DNA, 15 bp, Homo sapiens
gcctcccaagaagat

SEQ ID NO: 38979 - DNA, 15 bp, Homo sapiens
agcctcccaagaaga

SEQ ID NO: 38980 - DNA, 15 bp, Homo sapiens
tagcctcccaagaag

SEQ ID NO: 38981 - DNA, 15 bp, Homo sapiens
ttagcctcccaagaa

SEQ ID NO: 38982 - DNA, 15 bp, Homo sapiens
cttagcctcccaaga

SEQ ID NO: 38983 - DNA, 15 bp, Homo sapiens
ccttagcctcccaag

SEQ ID NO: 38984 - DNA, 15 bp, Homo sapiens
gccttagcctcccaa

SEQ ID NO: 38985 - DNA, 15 bp, Homo sapiens
tgccttagcctccca

SEQ ID NO: 38986 - DNA, 15 bp, Homo sapiens
ctgccttagcctccc

SEQ ID NO: 38987 - DNA, 15 bp, Homo sapiens
cctgccttagcctcc

SEQ ID NO: 38988 - DNA, 15 bp, Homo sapiens
tcctgccttagcctc

SEQ ID NO: 38989 - DNA, 15 bp, Homo sapiens
ctcctgccttagcct

SEQ ID NO: 38990 - DNA, 15 bp, Homo sapiens
tctcctgccttagcc

SEQ ID NO: 38991 - DNA, 15 bp, Homo sapiens
ttctcctgccttagc

SEQ ID NO: 38992 - DNA, 15 bp, Homo sapiens
attctcctgccttag

SEQ ID NO: 38993 - DNA, 15 bp, Homo sapiens
gattctcctgcctta

SEQ ID NO: 38994 - DNA, 15 bp, Homo sapiens
cgattctcctgcctt

SEQ ID NO: 38995 - DNA, 15 bp, Homo sapiens
tccaggttcaagcga

SEQ ID NO: 38996 - DNA, 15 bp, Homo sapiens
ctccaggttcaagcg

SEQ ID NO: 38997 - DNA, 15 bp, Homo sapiens
cctccaggttcaagc

SEQ ID NO: 38998 - DNA, 15 bp, Homo sapiens
gcctccaggttcaag

SEQ ID NO: 38999 - DNA, 15 bp, Homo sapiens
tgcctccaggttcaa

SEQ ID NO: 39000 - DNA, 15 bp, Homo sapiens
ctgcctccaggttca

SEQ ID NO: 39001 - DNA, 15 bp, Homo sapiens
tctgcctccaggttc

SEQ ID NO: 39002 - DNA, 15 bp, Homo sapiens
ctctgcctccaggtt

SEQ ID NO: 39003 - DNA, 15 bp, Homo sapiens
cctctgcctccaggt

SEQ ID NO: 39004 - DNA, 15 bp, Homo sapiens
acctctgcctccagg

SEQ ID NO: 39005 - DNA, 15 bp, Homo sapiens
aacctctgcctccag

SEQ ID NO: 39006 - DNA, 15 bp, Homo sapiens
caacctctgcctcca

SEQ ID NO: 39007 - DNA, 15 bp, Homo sapiens
tgatctcggctcact

SEQ ID NO: 39008 - DNA, 15 bp, Homo sapiens
atgatctcggctcac

SEQ ID NO: 39009 - DNA, 15 bp, Homo sapiens
gtggcatgatctcgg

SEQ ID NO: 39010 - DNA, 15 bp, Homo sapiens
agtggcatgatctcg

SEQ ID NO: 39011 - DNA, 15 bp, Homo sapiens
cagtggcatgatctc

SEQ ID NO: 39012 - DNA, 15 bp, Homo sapiens
acagtggcatgatct

SEQ ID NO: 39013 - DNA, 15 bp, Homo sapiens
tacagtggcatgatc

SEQ ID NO: 39014 - DNA, 15 bp, Homo sapiens
atacagtggcatgat

SEQ ID NO: 39015 - DNA, 15 bp, Homo sapiens
aatacagtggcatga

SEQ ID NO: 39016 - DNA, 15 bp, Homo sapiens
gaatacagtggcatg

SEQ ID NO: 39017 - DNA, 15 bp, Homo sapiens
ggaatacagtggcat

SEQ ID NO: 39018 - DNA, 15 bp, Homo sapiens
tggaatacagtggca

SEQ ID NO: 39019 - DNA, 15 bp, Homo sapiens
ctggaatacagtggc

SEQ ID NO: 39020 - DNA, 15 bp, Homo sapiens
gctggaatacagtgg

SEQ ID NO: 39021 - DNA, 15 bp, Homo sapiens
ggctggaatacagtg

SEQ ID NO: 39022 - DNA, 15 bp, Homo sapiens
aggctggaatacagt

SEQ ID NO: 39023 - DNA, 15 bp, Homo sapiens
caggctggaatacag

SEQ ID NO: 39024 - DNA, 15 bp, Homo sapiens
ccaggctggaataca

SEQ ID NO: 39025 - DNA, 15 bp, Homo sapiens
cccaggctggaatac

SEQ ID NO: 39026 - DNA, 15 bp, Homo sapiens
acccaggctggaata

SEQ ID NO: 39027 - DNA, 15 bp, Homo sapiens
tacccaggctggaat

SEQ ID NO: 39028 - DNA, 15 bp, Homo sapiens
ttacccaggctggaa

SEQ ID NO: 39029 - DNA, 15 bp, Homo sapiens
gctctgttacccagg

SEQ ID NO: 39030 - DNA, 15 bp, Homo sapiens
tgctctgttacccag

SEQ ID NO: 39031 - DNA, 15 bp, Homo sapiens
ttgctctgttaccca

SEQ ID NO: 39032 - DNA, 15 bp, Homo sapiens
cttgctctgttaccc

SEQ ID NO: 39033 - DNA, 15 bp, Homo sapiens
tcttgctctgttacc

SEQ ID NO: 39034 - DNA, 15 bp, Homo sapiens
gtcttgctctgttac

SEQ ID NO: 39035 - DNA, 15 bp, Homo sapiens
agtcttgctctgtta

SEQ ID NO: 39036 - DNA, 15 bp, Homo sapiens
gagtcttgctctgtt

SEQ ID NO: 39037 - DNA, 15 bp, Homo sapiens
agagtcttgctctgt

SEQ ID NO: 39038 - DNA, 15 bp, Homo sapiens
cagagtcttgctctg

SEQ ID NO: 39039 - DNA, 15 bp, Homo sapiens
acagagtcttgctct

SEQ ID NO: 39040 - DNA, 15 bp, Homo sapiens
gacagagtcttgctc

SEQ ID NO: 39041 - DNA, 15 bp, Homo sapiens
agacagagtcttgct

SEQ ID NO: 39042 - DNA, 15 bp, Homo sapiens
gagacagagtcttgc

SEQ ID NO: 39043 - DNA, 15 bp, Homo sapiens
tgagacagagtcttg

SEQ ID NO: 39044 - DNA, 15 bp, Homo sapiens
ttgagacagagtctt

SEQ ID NO: 39045 - DNA, 15 bp, Homo sapiens
aactttttttttttt

SEQ ID NO: 39046 - DNA, 15 bp, Homo sapiens
aaacttttttttttt

SEQ ID NO: 39047 - DNA, 15 bp, Homo sapiens
caaactttttttttt

SEQ ID NO: 39048 - DNA, 15 bp, Homo sapiens
tcaaacttttttttt

SEQ ID NO: 39049 - DNA, 15 bp, Homo sapiens
ttcaaactttttttt

SEQ ID NO: 39050 - DNA, 15 bp, Homo sapiens
tttcaaacttttttt

SEQ ID NO: 39051 - DNA, 15 bp, Homo sapiens
gtttcaaactttttt

SEQ ID NO: 39052 - DNA, 15 bp, Homo sapiens
ggtttcaaacttttt

SEQ ID NO: 39053 - DNA, 15 bp, Homo sapiens
tggtttcaaactttt

SEQ ID NO: 39054 - DNA, 15 bp, Homo sapiens
ctggtttcaaacttt

SEQ ID NO: 39055 - DNA, 15 bp, Homo sapiens
gctggtttcaaactt

SEQ ID NO: 39056 - DNA, 15 bp, Homo sapiens
ggctggtttcaaact

SEQ ID NO: 39057 - DNA, 15 bp, Homo sapiens
aggctggtttcaaac

SEQ ID NO: 39058 - DNA, 15 bp, Homo sapiens
caggctggtttcaaa

SEQ ID NO: 39059 - DNA, 15 bp, Homo sapiens
ccaggctggtttcaa

SEQ ID NO: 39060 - DNA, 15 bp, Homo sapiens
accaggctggtttca

SEQ ID NO: 39061 - DNA, 15 bp, Homo sapiens
gaccaggctggtttc

SEQ ID NO: 39062 - DNA, 15 bp, Homo sapiens
tgaccaggctggttt

SEQ ID NO: 39063 - DNA, 15 bp, Homo sapiens
ttgaccaggctggtt

SEQ ID NO: 39064 - DNA, 15 bp, Homo sapiens
gttgaccaggctggt

SEQ ID NO: 39065 - DNA, 15 bp, Homo sapiens
tgttgaccaggctgg

SEQ ID NO: 39066 - DNA, 15 bp, Homo sapiens
gtgttgaccaggctg

SEQ ID NO: 39067 - DNA, 15 bp, Homo sapiens
tgtgttgaccaggct

SEQ ID NO: 39068 - DNA, 15 bp, Homo sapiens
ctgtgttgaccaggc

SEQ ID NO: 39069 - DNA, 15 bp, Homo sapiens
gctgtgttgaccagg

SEQ ID NO: 39070 - DNA, 15 bp, Homo sapiens
tgctgtgttgaccag

SEQ ID NO: 39071 - DNA, 15 bp, Homo sapiens
ttgctgtgttgacca

SEQ ID NO: 39072 - DNA, 15 bp, Homo sapiens
cttgctgtgttgacc

SEQ ID NO: 39073 - DNA, 15 bp, Homo sapiens
tcttgctgtgttgac

SEQ ID NO: 39074 - DNA, 15 bp, Homo sapiens
gtcttgctgtgttga

SEQ ID NO: 39075 - DNA, 15 bp, Homo sapiens
tgtcttgctgtgttg

SEQ ID NO: 39076 - DNA, 15 bp, Homo sapiens
gtgtcttgctgtgtt

SEQ ID NO: 39077 - DNA, 15 bp, Homo sapiens
ggtgtcttgctgtgt

SEQ ID NO: 39078 - DNA, 15 bp, Homo sapiens
gggtgtcttgctgtg

SEQ ID NO: 39079 - DNA, 15 bp, Homo sapiens
tgggtgtcttgctgt

SEQ ID NO: 39080 - DNA, 15 bp, Homo sapiens
atgggtgtcttgctg

SEQ ID NO: 39081 - DNA, 15 bp, Homo sapiens
gatgggtgtcttgct

SEQ ID NO: 39082 - DNA, 15 bp, Homo sapiens
agatgggtgtcttgc

SEQ ID NO: 39083 - DNA, 15 bp, Homo sapiens
gagatgggtgtcttg

SEQ ID NO: 39084 - DNA, 15 bp, Homo sapiens
cgagatgggtgtctt

SEQ ID NO: 39085 - DNA, 15 bp, Homo sapiens
acgagatgggtgtct

SEQ ID NO: 39086 - DNA, 15 bp, Homo sapiens
aacgagatgggtgtc

SEQ ID NO: 39087 - DNA, 15 bp, Homo sapiens
caacgagatgggtgt

SEQ ID NO: 39088 - DNA, 15 bp, Homo sapiens
tcaacgagatgggtg

SEQ ID NO: 39089 - DNA, 15 bp, Homo sapiens
ttcaacgagatgggt

SEQ ID NO: 39090 - DNA, 15 bp, Homo sapiens
tttcaacgagatggg

SEQ ID NO: 39091 - DNA, 15 bp, Homo sapiens
ttttcaacgagatgg

SEQ ID NO: 39092 - DNA, 15 bp, Homo sapiens
tttttcaacgagatg

SEQ ID NO: 39093 - DNA, 15 bp, Homo sapiens
atttttcaacgagat

SEQ ID NO: 39094 - DNA, 15 bp, Homo sapiens
tatttttcaacgaga

SEQ ID NO: 39095 - DNA, 15 bp, Homo sapiens
ttatttttcaacgag

SEQ ID NO: 39096 - DNA, 15 bp, Homo sapiens
gttatttttcaacga

SEQ ID NO: 39097 - DNA, 15 bp, Homo sapiens
cgttatttttcaacg

SEQ ID NO: 39098 - DNA, 15 bp, Homo sapiens
ccgttatttttcaac

SEQ ID NO: 39099 - DNA, 15 bp, Homo sapiens
accgttatttttcaa

SEQ ID NO: 39100 - DNA, 15 bp, Homo sapiens
gaccgttatttttca

SEQ ID NO: 39101 - DNA, 15 bp, Homo sapiens
cgaccgttatttttc

SEQ ID NO: 39102 - DNA, 15 bp, Homo sapiens
ccgaccgttattttt

SEQ ID NO: 39103 - DNA, 15 bp, Homo sapiens
cccgaccgttatttt

SEQ ID NO: 39104 - DNA, 15 bp, Homo sapiens
gcccgaccgttattt

SEQ ID NO: 39105 - DNA, 15 bp, Homo sapiens
cgcccgaccgttatt

SEQ ID NO: 39106 - DNA, 15 bp, Homo sapiens
gcgcccgaccgttat

SEQ ID NO: 39107 - DNA, 15 bp, Homo sapiens
tgcgcccgaccgtta

SEQ ID NO: 39108 - DNA, 15 bp, Homo sapiens
ctgcgcccgaccgtt

SEQ ID NO: 39109 - DNA, 15 bp, Homo sapiens
actgcgcccgaccgt

SEQ ID NO: 39110 - DNA, 15 bp, Homo sapiens
cactgcgcccgaccg

SEQ ID NO: 39111 - DNA, 15 bp, Homo sapiens
ccactgcgcccgacc

SEQ ID NO: 39112 - DNA, 15 bp, Homo sapiens
gccactgcgcccgac

SEQ ID NO: 39113 - DNA, 15 bp, Homo sapiens
agccactgcgcccga

SEQ ID NO: 39114 - DNA, 15 bp, Homo sapiens
gagccactgcgcccg

SEQ ID NO: 39115 - DNA, 15 bp, Homo sapiens
tgagccactgcgccc

SEQ ID NO: 39116 - DNA, 15 bp, Homo sapiens
atgggattacaggcg

SEQ ID NO: 39117 - DNA, 15 bp, Homo sapiens
gatgggattacaggc

SEQ ID NO: 39118 - DNA, 15 bp, Homo sapiens
tgatgggattacagg

SEQ ID NO: 39119 - DNA, 15 bp, Homo sapiens
gtgatgggattacag

SEQ ID NO: 39120 - DNA, 15 bp, Homo sapiens
agtgatgggattaca

SEQ ID NO: 39121 - DNA, 15 bp, Homo sapiens
aagtgatgggattac

SEQ ID NO: 39122 - DNA, 15 bp, Homo sapiens
aaagtgatgggatta

SEQ ID NO: 39123 - DNA, 15 bp, Homo sapiens
caaagtgatgggatt

SEQ ID NO: 39124 - DNA, 15 bp, Homo sapiens
ccaaagtgatgggat

SEQ ID NO: 39125 - DNA, 15 bp, Homo sapiens
cccaaagtgatggga

SEQ ID NO: 39126 - DNA, 15 bp, Homo sapiens
tcccaaagtgatggg

SEQ ID NO: 39127 - DNA, 15 bp, Homo sapiens
ctcccaaagtgatgg

SEQ ID NO: 39128 - DNA, 15 bp, Homo sapiens
cctcccaaagtgatg

SEQ ID NO: 39129 - DNA, 15 bp, Homo sapiens
gcctcccaaagtgat

SEQ ID NO: 39130 - DNA, 15 bp, Homo sapiens
ggcctcccaaagtga

SEQ ID NO: 39131 - DNA, 15 bp, Homo sapiens
cgctggtctcgaact

SEQ ID NO: 39132 - DNA, 15 bp, Homo sapiens
acgctggtctcgaac

SEQ ID NO: 39133 - DNA, 15 bp, Homo sapiens
cacgctggtctcgaa

SEQ ID NO: 39134 - DNA, 15 bp, Homo sapiens
tcacgctggtctcga

SEQ ID NO: 39135 - DNA, 15 bp, Homo sapiens
gtcacgctggtctcg

SEQ ID NO: 39136 - DNA, 15 bp, Homo sapiens
ggtcacgctggtctc

SEQ ID NO: 39137 - DNA, 15 bp, Homo sapiens
tggtcacgctggtct

SEQ ID NO: 39138 - DNA, 15 bp, Homo sapiens
ttggtcacgctggtc

SEQ ID NO: 39139 - DNA, 15 bp, Homo sapiens
gttggtcacgctggt

SEQ ID NO: 39140 - DNA, 15 bp, Homo sapiens
tgttggtcacgctgg

SEQ ID NO: 39141 - DNA, 15 bp, Homo sapiens
atgttggtcacgctg

SEQ ID NO: 39142 - DNA, 15 bp, Homo sapiens
catgttggtcacgct

SEQ ID NO: 39143 - DNA, 15 bp, Homo sapiens
ccatgttggtcacgc

SEQ ID NO: 39144 - DNA, 15 bp, Homo sapiens
tccatgttggtcacg

SEQ ID NO: 39145 - DNA, 15 bp, Homo sapiens
ctccatgttggtcac

SEQ ID NO: 39146 - DNA, 15 bp, Homo sapiens
actaattttgtattt

SEQ ID NO: 39147 - DNA, 15 bp, Homo sapiens
aactaattttgtatt

SEQ ID NO: 39148 - DNA, 15 bp, Homo sapiens
caactaattttgtat

SEQ ID NO: 39149 - DNA, 15 bp, Homo sapiens
ccaactaattttgta

SEQ ID NO: 39150 - DNA, 15 bp, Homo sapiens
cccaactaattttgt

SEQ ID NO: 39151 - DNA, 15 bp, Homo sapiens
gcccaactaattttg

SEQ ID NO: 39152 - DNA, 15 bp, Homo sapiens
cgcccaactaatttt

SEQ ID NO: 39153 - DNA, 15 bp, Homo sapiens
tcgcccaactaattt

SEQ ID NO: 39154 - DNA, 15 bp, Homo sapiens
ctcgcccaactaatt

SEQ ID NO: 39155 - DNA, 15 bp, Homo sapiens
cctcgcccaactaat

SEQ ID NO: 39156 - DNA, 15 bp, Homo sapiens
acctcgcccaactaa

SEQ ID NO: 39157 - DNA, 15 bp, Homo sapiens
cacctcgcccaacta

SEQ ID NO: 39158 - DNA, 15 bp, Homo sapiens
ccacctcgcccaact

SEQ ID NO: 39159 - DNA, 15 bp, Homo sapiens
accacctcgcccaac

SEQ ID NO: 39160 - DNA, 15 bp, Homo sapiens
caccacctcgcccaa

SEQ ID NO: 39161 - DNA, 15 bp, Homo sapiens
gcaccacctcgccca

SEQ ID NO: 39162 - DNA, 15 bp, Homo sapiens
tgcaccacctcgccc

SEQ ID NO: 39163 - DNA, 15 bp, Homo sapiens
atgcaccacctcgcc

SEQ ID NO: 39164 - DNA, 15 bp, Homo sapiens
tatgcaccacctcgc

SEQ ID NO: 39165 - DNA, 15 bp, Homo sapiens
gtatgcaccacctcg

SEQ ID NO: 39166 - DNA, 15 bp, Homo sapiens
ggtatgcaccacctc

SEQ ID NO: 39167 - DNA, 15 bp, Homo sapiens
aggtatgcaccacct

SEQ ID NO: 39168 - DNA, 15 bp, Homo sapiens
caggtatgcaccacc

SEQ ID NO: 39169 - DNA, 15 bp, Homo sapiens
acaggtatgcaccac

SEQ ID NO: 39170 - DNA, 15 bp, Homo sapiens
tacaggtatgcacca

SEQ ID NO: 39171 - DNA, 15 bp, Homo sapiens
ttacaggtatgcacc

SEQ ID NO: 39172 - DNA, 15 bp, Homo sapiens
attacaggtatgcac

SEQ ID NO: 39173 - DNA, 15 bp, Homo sapiens
gattacaggtatgca

SEQ ID NO: 39174 - DNA, 15 bp, Homo sapiens
ggattacaggtatgc

SEQ ID NO: 39175 - DNA, 15 bp, Homo sapiens
gggattacaggtatg

SEQ ID NO: 39176 - DNA, 15 bp, Homo sapiens
tgggattacaggtat

SEQ ID NO: 39177 - DNA, 15 bp, Homo sapiens
ttgggattacaggta

SEQ ID NO: 39178 - DNA, 15 bp, Homo sapiens
gttgggattacaggt

SEQ ID NO: 39179 - DNA, 15 bp, Homo sapiens
agttgggattacagg

SEQ ID NO: 39180 - DNA, 15 bp, Homo sapiens
tagttgggattacag

SEQ ID NO: 39181 - DNA, 15 bp, Homo sapiens
gtagttgggattaca

SEQ ID NO: 39182 - DNA, 15 bp, Homo sapiens
agtagttgggattac

SEQ ID NO: 39183 - DNA, 15 bp, Homo sapiens
aagtagttgggatta

SEQ ID NO: 39184 - DNA, 15 bp, Homo sapiens
caagtagttgggatt

SEQ ID NO: 39185 - DNA, 15 bp, Homo sapiens
ccaagtagttgggat

SEQ ID NO: 39186 - DNA, 15 bp, Homo sapiens
cccaagtagttggga

SEQ ID NO: 39187 - DNA, 15 bp, Homo sapiens
tcccaagtagttggg

SEQ ID NO: 39188 - DNA, 15 bp, Homo sapiens
ctcccaagtagttgg

SEQ ID NO: 39189 - DNA, 15 bp, Homo sapiens
cctcccaagtagttg

SEQ ID NO: 39190 - DNA, 15 bp, Homo sapiens
gcctcccaagtagtt

SEQ ID NO: 39191 - DNA, 15 bp, Homo sapiens
agcctcccaagtagt

SEQ ID NO: 39192 - DNA, 15 bp, Homo sapiens
gttctcctgcctcag

SEQ ID NO: 39193 - DNA, 15 bp, Homo sapiens
tgttctcctgcctca

SEQ ID NO: 39194 - DNA, 15 bp, Homo sapiens
ctgttctcctgcctc

SEQ ID NO: 39195 - DNA, 15 bp, Homo sapiens
gctgttctcctgcct

SEQ ID NO: 39196 - DNA, 15 bp, Homo sapiens
agctgttctcctgcc

SEQ ID NO: 39197 - DNA, 15 bp, Homo sapiens
aagctgttctcctgc

SEQ ID NO: 39198 - DNA, 15 bp, Homo sapiens
caagctgttctcctg

SEQ ID NO: 39199 - DNA, 15 bp, Homo sapiens
tcaagctgttctcct

SEQ ID NO: 39200 - DNA, 15 bp, Homo sapiens
ttcaagctgttctcc

SEQ ID NO: 39201 - DNA, 15 bp, Homo sapiens
gttcaagctgttctc

SEQ ID NO: 39202 - DNA, 15 bp, Homo sapiens
ggttcaagctgttct

SEQ ID NO: 39203 - DNA, 15 bp, Homo sapiens
aggttcaagctgttc

SEQ ID NO: 39204 - DNA, 15 bp, Homo sapiens
caggttcaagctgtt

SEQ ID NO: 39205 - DNA, 15 bp, Homo sapiens
ccaggttcaagctgt

SEQ ID NO: 39206 - DNA, 15 bp, Homo sapiens
cccaggttcaagctg

SEQ ID NO: 39207 - DNA, 15 bp, Homo sapiens
tcccaggttcaagct

SEQ ID NO: 39208 - DNA, 15 bp, Homo sapiens
tctctgcctcccagg

SEQ ID NO: 39209 - DNA, 15 bp, Homo sapiens
ctctctgcctcccag

SEQ ID NO: 39210 - DNA, 15 bp, Homo sapiens
cctctctgcctccca

SEQ ID NO: 39211 - DNA, 15 bp, Homo sapiens
acctctctgcctccc

SEQ ID NO: 39212 - DNA, 15 bp, Homo sapiens
aacctctctgcctcc

SEQ ID NO: 39213 - DNA, 15 bp, Homo sapiens
caacctctctgcctc

SEQ ID NO: 39214 - DNA, 15 bp, Homo sapiens
acaacctctctgcct

SEQ ID NO: 39215 - DNA, 15 bp, Homo sapiens
cacaacctctctgcc

SEQ ID NO: 39216 - DNA, 15 bp, Homo sapiens
ccacaacctctctgc

SEQ ID NO: 39217 - DNA, 15 bp, Homo sapiens
accacaacctctctg

SEQ ID NO: 39218 - DNA, 15 bp, Homo sapiens
caccacaacctctct

SEQ ID NO: 39219 - DNA, 15 bp, Homo sapiens
tcaccacaacctctc

SEQ ID NO: 39220 - DNA, 15 bp, Homo sapiens
ctcaccacaacctct

SEQ ID NO: 39221 - DNA, 15 bp, Homo sapiens
gctcaccacaacctc

SEQ ID NO: 39222 - DNA, 15 bp, Homo sapiens
ggctcaccacaacct

SEQ ID NO: 39223 - DNA, 15 bp, Homo sapiens
tggctcaccacaacc

SEQ ID NO: 39224 - DNA, 15 bp, Homo sapiens
ttggctcaccacaac

SEQ ID NO: 39225 - DNA, 15 bp, Homo sapiens
cttggctcaccacaa

SEQ ID NO: 39226 - DNA, 15 bp, Homo sapiens
tcttggctcaccaca

SEQ ID NO: 39227 - DNA, 15 bp, Homo sapiens
atcttggctcaccac

SEQ ID NO: 39228 - DNA, 15 bp, Homo sapiens
gatcttggctcacca

SEQ ID NO: 39229 - DNA, 15 bp, Homo sapiens
tgatcttggctcacc

SEQ ID NO: 39230 - DNA, 15 bp, Homo sapiens
atgatcttggctcac

SEQ ID NO: 39231 - DNA, 15 bp, Homo sapiens
catgatcttggctca

SEQ ID NO: 39232 - DNA, 15 bp, Homo sapiens
gcatgatcttggctc

SEQ ID NO: 39233 - DNA, 15 bp, Homo sapiens
ggcatgatcttggct

SEQ ID NO: 39234 - DNA, 15 bp, Homo sapiens
atggcatgatcttgg

SEQ ID NO: 39235 - DNA, 15 bp, Homo sapiens
aatggcatgatcttg

SEQ ID NO: 39236 - DNA, 15 bp, Homo sapiens
caatggcatgatctt

SEQ ID NO: 39237 - DNA, 15 bp, Homo sapiens
gcaatggcatgatct

SEQ ID NO: 39238 - DNA, 15 bp, Homo sapiens
tgcaatggcatgatc

SEQ ID NO: 39239 - DNA, 15 bp, Homo sapiens
gtgcaatggcatgat

SEQ ID NO: 39240 - DNA, 15 bp, Homo sapiens
agtgcaatggcatga

SEQ ID NO: 39241 - DNA, 15 bp, Homo sapiens
cagtgcaatggcatg

SEQ ID NO: 39242 - DNA, 15 bp, Homo sapiens
gcagtgcaatggcat

SEQ ID NO: 39243 - DNA, 15 bp, Homo sapiens
tgcagtgcaatggca

SEQ ID NO: 39244 - DNA, 15 bp, Homo sapiens
ctgcagtgcaatggc

SEQ ID NO: 39245 - DNA, 15 bp, Homo sapiens
gctgcagtgcaatgg

SEQ ID NO: 39246 - DNA, 15 bp, Homo sapiens
ggctgcagtgcaatg

SEQ ID NO: 39247 - DNA, 15 bp, Homo sapiens
aggctgcagtgcaat

SEQ ID NO: 39248 - DNA, 15 bp, Homo sapiens
caggctgcagtgcaa

SEQ ID NO: 39249 - DNA, 15 bp, Homo sapiens
cccaggctgcagtgc

SEQ ID NO: 39250 - DNA, 15 bp, Homo sapiens
gcccaggctgcagtg

SEQ ID NO: 39251 - DNA, 15 bp, Homo sapiens
tgcccaggctgcagt

SEQ ID NO: 39252 - DNA, 15 bp, Homo sapiens
ttgcccaggctgcag

SEQ ID NO: 39253 - DNA, 15 bp, Homo sapiens
gttgcccaggctgca

SEQ ID NO: 39254 - DNA, 15 bp, Homo sapiens
tgttgcccaggctgc

SEQ ID NO: 39255 - DNA, 15 bp, Homo sapiens
gctcttgttgcccag

SEQ ID NO: 39256 - DNA, 15 bp, Homo sapiens
tgctcttgttgccca

SEQ ID NO: 39257 - DNA, 15 bp, Homo sapiens
ttgctcttgttgccc

SEQ ID NO: 39258 - DNA, 15 bp, Homo sapiens
tttgctcttgttgcc

SEQ ID NO: 39259 - DNA, 15 bp, Homo sapiens
gtttgctcttgttgc

SEQ ID NO: 39260 - DNA, 15 bp, Homo sapiens
agtttgctcttgttg

SEQ ID NO: 39261 - DNA, 15 bp, Homo sapiens
gagtttgctcttgtt

SEQ ID NO: 39262 - DNA, 15 bp, Homo sapiens
ggagtttgctcttgt

SEQ ID NO: 39263 - DNA, 15 bp, Homo sapiens
tggagtttgctcttg

SEQ ID NO: 39264 - DNA, 15 bp, Homo sapiens
atggagtttgctctt

SEQ ID NO: 39265 - DNA, 15 bp, Homo sapiens
gatggagtttgctct

SEQ ID NO: 39266 - DNA, 15 bp, Homo sapiens
agatggagtttgctc

SEQ ID NO: 39267 - DNA, 15 bp, Homo sapiens
gagatggagtttgct

SEQ ID NO: 39268 - DNA, 15 bp, Homo sapiens
tgagatggagtttgc

SEQ ID NO: 39269 - DNA, 15 bp, Homo sapiens
ttgagatggagtttg

SEQ ID NO: 39270 - DNA, 15 bp, Homo sapiens
attttttttgagatg

SEQ ID NO: 39271 - DNA, 15 bp, Homo sapiens
tattttttttgagat

SEQ ID NO: 39272 - DNA, 15 bp, Homo sapiens
tttttatttatttat

SEQ ID NO: 39273 - DNA, 15 bp, Homo sapiens
atttttatttattta

SEQ ID NO: 39274 - DNA, 15 bp, Homo sapiens
tatttttatttattt

SEQ ID NO: 39275 - DNA, 15 bp, Homo sapiens
ttatttttatttatt

SEQ ID NO: 39276 - DNA, 15 bp, Homo sapiens
tttatttttatttat

SEQ ID NO: 39277 - DNA, 15 bp, Homo sapiens
atttatttttattta

SEQ ID NO: 39278 - DNA, 15 bp, Homo sapiens
tatttatttttattt

SEQ ID NO: 39279 - DNA, 15 bp, Homo sapiens
ttatttatttttatt

SEQ ID NO: 39280 - DNA, 15 bp, Homo sapiens
tttatttatttttat

SEQ ID NO: 39281 - DNA, 15 bp, Homo sapiens
atttatttattttta

SEQ ID NO: 39282 - DNA, 15 bp, Homo sapiens
cttatttatttattt

SEQ ID NO: 39283 - DNA, 15 bp, Homo sapiens
acttatttatttatt

SEQ ID NO: 39284 - DNA, 15 bp, Homo sapiens
tacttatttatttat

SEQ ID NO: 39285 - DNA, 15 bp, Homo sapiens
gtacttatttattta

SEQ ID NO: 39286 - DNA, 15 bp, Homo sapiens
agtacttatttattt

SEQ ID NO: 39287 - DNA, 15 bp, Homo sapiens
aagtacttatttatt

SEQ ID NO: 39288 - DNA, 15 bp, Homo sapiens
gaagtacttatttat

SEQ ID NO: 39289 - DNA, 15 bp, Homo sapiens
agaagtacttattta

SEQ ID NO: 39290 - DNA, 15 bp, Homo sapiens
cagaagtacttattt

SEQ ID NO: 39291 - DNA, 15 bp, Homo sapiens
gcagaagtacttatt

SEQ ID NO: 39292 - DNA, 15 bp, Homo sapiens
ggcagaagtacttat

SEQ ID NO: 39293 - DNA, 15 bp, Homo sapiens
aggcagaagtactta

SEQ ID NO: 39294 - DNA, 15 bp, Homo sapiens
aaggcagaagtactt

SEQ ID NO: 39295 - DNA, 15 bp, Homo sapiens
aaaggcagaagtact

SEQ ID NO: 39296 - DNA, 15 bp, Homo sapiens
taaaggcagaagtac

SEQ ID NO: 39297 - DNA, 15 bp, Homo sapiens
ttaaaggcagaagta

SEQ ID NO: 39298 - DNA, 15 bp, Homo sapiens
cttaaaggcagaagt

SEQ ID NO: 39299 - DNA, 15 bp, Homo sapiens
gcttaaaggcagaag

SEQ ID NO: 39300 - DNA, 15 bp, Homo sapiens
ggcttaaaggcagaa

SEQ ID NO: 39301 - DNA, 15 bp, Homo sapiens
tggcttaaaggcaga

SEQ ID NO: 39302 - DNA, 15 bp, Homo sapiens
gtggcttaaaggcag

SEQ ID NO: 39303 - DNA, 15 bp, Homo sapiens
agtggcttaaaggca

SEQ ID NO: 39304 - DNA, 15 bp, Homo sapiens
aagtggcttaaaggc

SEQ ID NO: 39305 - DNA, 15 bp, Homo sapiens
gaagtggcttaaagg

SEQ ID NO: 39306 - DNA, 15 bp, Homo sapiens
ggaagtggcttaaag

SEQ ID NO: 39307 - DNA, 15 bp, Homo sapiens
aggaagtggcttaaa

SEQ ID NO: 39308 - DNA, 15 bp, Homo sapiens
taggaagtggcttaa

SEQ ID NO: 39309 - DNA, 15 bp, Homo sapiens
ctaggaagtggctta

SEQ ID NO: 39310 - DNA, 15 bp, Homo sapiens
tctaggaagtggctt

SEQ ID NO: 39311 - DNA, 15 bp, Homo sapiens
ttctaggaagtggct

SEQ ID NO: 39312 - DNA, 15 bp, Homo sapiens
cttctaggaagtggc

SEQ ID NO: 39313 - DNA, 15 bp, Homo sapiens
ccttctaggaagtgg

SEQ ID NO: 39314 - DNA, 15 bp, Homo sapiens
gccttctaggaagtg

SEQ ID NO: 39315 - DNA, 15 bp, Homo sapiens
tgccttctaggaagt

SEQ ID NO: 39316 - DNA, 15 bp, Homo sapiens
ctgccttctaggaag

SEQ ID NO: 39317 - DNA, 15 bp, Homo sapiens
actgccttctaggaa

SEQ ID NO: 39318 - DNA, 15 bp, Homo sapiens
cactgccttctagga

SEQ ID NO: 39319 - DNA, 15 bp, Homo sapiens
ccactgccttctagg

SEQ ID NO: 39320 - DNA, 15 bp, Homo sapiens
gccactgccttctag

SEQ ID NO: 39321 - DNA, 15 bp, Homo sapiens
tgccactgccttcta

SEQ ID NO: 39322 - DNA, 15 bp, Homo sapiens
gtgccactgccttct

SEQ ID NO: 39323 - DNA, 15 bp, Homo sapiens
tgtgccactgccttc

SEQ ID NO: 39324 - DNA, 15 bp, Homo sapiens
ttgtgccactgcctt

SEQ ID NO: 39325 - DNA, 15 bp, Homo sapiens
tttgtgccactgcct

SEQ ID NO: 39326 - DNA, 15 bp, Homo sapiens
ctttgtgccactgcc

SEQ ID NO: 39327 - DNA, 15 bp, Homo sapiens
actttgtgccactgc

SEQ ID NO: 39328 - DNA, 15 bp, Homo sapiens
cactttgtgccactg

SEQ ID NO: 39329 - DNA, 15 bp, Homo sapiens
tcactttgtgccact

SEQ ID NO: 39330 - DNA, 15 bp, Homo sapiens
atcactttgtgccac

SEQ ID NO: 39331 - DNA, 15 bp, Homo sapiens
tatcactttgtgcca

SEQ ID NO: 39332 - DNA, 15 bp, Homo sapiens
gtatcactttgtgcc

SEQ ID NO: 39333 - DNA, 15 bp, Homo sapiens
tgtatcactttgtgc

SEQ ID NO: 39334 - DNA, 15 bp, Homo sapiens
atgtatcactttgtg

SEQ ID NO: 39335 - DNA, 15 bp, Homo sapiens
aatgtatcactttgt

SEQ ID NO: 39336 - DNA, 15 bp, Homo sapiens
aaatgtatcactttg

SEQ ID NO: 39337 - DNA, 15 bp, Homo sapiens
caaatgtatcacttt

SEQ ID NO: 39338 - DNA, 15 bp, Homo sapiens
ccaaatgtatcactt

SEQ ID NO: 39339 - DNA, 15 bp, Homo sapiens
tccaaatgtatcact

SEQ ID NO: 39340 - DNA, 15 bp, Homo sapiens
ctccaaatgtatcac

SEQ ID NO: 39341 - DNA, 15 bp, Homo sapiens
cctccaaatgtatca

SEQ ID NO: 39342 - DNA, 15 bp, Homo sapiens
tcctccaaatgtatc

SEQ ID NO: 39343 - DNA, 15 bp, Homo sapiens
ctcctccaaatgtat

SEQ ID NO: 39344 - DNA, 15 bp, Homo sapiens
actcctccaaatgta

SEQ ID NO: 39345 - DNA, 15 bp, Homo sapiens
tactcctccaaatgt

SEQ ID NO: 39346 - DNA, 15 bp, Homo sapiens
ttactcctccaaatg

SEQ ID NO: 39347 - DNA, 15 bp, Homo sapiens
tttactcctccaaat

SEQ ID NO: 39348 - DNA, 15 bp, Homo sapiens
atttactcctccaaa

SEQ ID NO: 39349 - DNA, 15 bp, Homo sapiens
tatttactcctccaa

SEQ ID NO: 39350 - DNA, 15 bp, Homo sapiens
atatttactcctcca

SEQ ID NO: 39351 - DNA, 15 bp, Homo sapiens
tatatttactcctcc

SEQ ID NO: 39352 - DNA, 15 bp, Homo sapiens
atatatttactcctc

SEQ ID NO: 39353 - DNA, 15 bp, Homo sapiens
aatatatttactcct

SEQ ID NO: 39354 - DNA, 15 bp, Homo sapiens
taatatatttactcc

SEQ ID NO: 39355 - DNA, 15 bp, Homo sapiens
gtaatatatttactc

SEQ ID NO: 39356 - DNA, 15 bp, Homo sapiens
tgtaatatatttact

SEQ ID NO: 39357 - DNA, 15 bp, Homo sapiens
ttgtaatatatttac

SEQ ID NO: 39358 - DNA, 15 bp, Homo sapiens
tttgtaatatattta

SEQ ID NO: 39359 - DNA, 15 bp, Homo sapiens
ttttgtaatatattt

SEQ ID NO: 39360 - DNA, 15 bp, Homo sapiens
attttgtaatatatt

SEQ ID NO: 39361 - DNA, 15 bp, Homo sapiens
cattttgtaatatat

SEQ ID NO: 39362 - DNA, 15 bp, Homo sapiens
tcattttgtaatata

SEQ ID NO: 39363 - DNA, 15 bp, Homo sapiens
ttcattttgtaatat

SEQ ID NO: 39364 - DNA, 15 bp, Homo sapiens
attcattttgtaata

SEQ ID NO: 39365 - DNA, 15 bp, Homo sapiens
aattcattttgtaat

SEQ ID NO: 39366 - DNA, 15 bp, Homo sapiens
taattcattttgtaa

SEQ ID NO: 39367 - DNA, 15 bp, Homo sapiens
ctaattcattttgta

SEQ ID NO: 39368 - DNA, 15 bp, Homo sapiens
cctaattcattttgt

SEQ ID NO: 39369 - DNA, 15 bp, Homo sapiens
gcctaattcattttg

SEQ ID NO: 39370 - DNA, 15 bp, Homo sapiens
agcctaattcatttt

SEQ ID NO: 39371 - DNA, 15 bp, Homo sapiens
cagcctaattcattt

SEQ ID NO: 39372 - DNA, 15 bp, Homo sapiens
ccagcctaattcatt

SEQ ID NO: 39373 - DNA, 15 bp, Homo sapiens
cccagcctaattcat

SEQ ID NO: 39374 - DNA, 15 bp, Homo sapiens
gcccagcctaattca

SEQ ID NO: 39375 - DNA, 15 bp, Homo sapiens
cgcccagcctaattc

SEQ ID NO: 39376 - DNA, 15 bp, Homo sapiens
gcgcccagcctaatt

SEQ ID NO: 39377 - DNA, 15 bp, Homo sapiens
tgcgcccagcctaat

SEQ ID NO: 39378 - DNA, 15 bp, Homo sapiens
ctgcgcccagcctaa

SEQ ID NO: 39379 - DNA, 15 bp, Homo sapiens
actgcgcccagccta

SEQ ID NO: 39380 - DNA, 15 bp, Homo sapiens
cactgcgcccagcct

SEQ ID NO: 39381 - DNA, 15 bp, Homo sapiens
ccactgcgcccagcc

SEQ ID NO: 39382 - DNA, 15 bp, Homo sapiens
atgagccactgcgcc

SEQ ID NO: 39383 - DNA, 15 bp, Homo sapiens
catgagccactgcgc

SEQ ID NO: 39384 - DNA, 15 bp, Homo sapiens
acatgagccactgcg

SEQ ID NO: 39385 - DNA, 15 bp, Homo sapiens
gacatgagccactgc

SEQ ID NO: 39386 - DNA, 15 bp, Homo sapiens
ggggattacagacat

SEQ ID NO: 39387 - DNA, 15 bp, Homo sapiens
cggggattacagaca

SEQ ID NO: 39388 - DNA, 15 bp, Homo sapiens
gcggggattacagac

SEQ ID NO: 39389 - DNA, 15 bp, Homo sapiens
tgcggggattacaga

SEQ ID NO: 39390 - DNA, 15 bp, Homo sapiens
gtgcggggattacag

SEQ ID NO: 39391 - DNA, 15 bp, Homo sapiens
agtgcggggattaca

SEQ ID NO: 39392 - DNA, 15 bp, Homo sapiens
aagtgcggggattac

SEQ ID NO: 39393 - DNA, 15 bp, Homo sapiens
aaagtgcggggatta

SEQ ID NO: 39394 - DNA, 15 bp, Homo sapiens
caaagtgcggggatt

SEQ ID NO: 39395 - DNA, 15 bp, Homo sapiens
ccaaagtgcggggat

SEQ ID NO: 39396 - DNA, 15 bp, Homo sapiens
cccaaagtgcgggga

SEQ ID NO: 39397 - DNA, 15 bp, Homo sapiens
tcccaaagtgcgggg

SEQ ID NO: 39398 - DNA, 15 bp, Homo sapiens
ctcccaaagtgcggg

SEQ ID NO: 39399 - DNA, 15 bp, Homo sapiens
cctcccaaagtgcgg

SEQ ID NO: 39400 - DNA, 15 bp, Homo sapiens
gcctcccaaagtgcg

SEQ ID NO: 39401 - DNA, 15 bp, Homo sapiens
tgatccacccgcctt

SEQ ID NO: 39402 - DNA, 15 bp, Homo sapiens
gtgatccacccgcct

SEQ ID NO: 39403 - DNA, 15 bp, Homo sapiens
agtgatccacccgcc

SEQ ID NO: 39404 - DNA, 15 bp, Homo sapiens
aagtgatccacccgc

SEQ ID NO: 39405 - DNA, 15 bp, Homo sapiens
caagtgatccacccg

SEQ ID NO: 39406 - DNA, 15 bp, Homo sapiens
tcaagtgatccaccc

SEQ ID NO: 39407 - DNA, 15 bp, Homo sapiens
ctcaagtgatccacc

SEQ ID NO: 39408 - DNA, 15 bp, Homo sapiens
cctcaagtgatccac

SEQ ID NO: 39409 - DNA, 15 bp, Homo sapiens
agtctcgaactcctg

SEQ ID NO: 39410 - DNA, 15 bp, Homo sapiens
tagtctcgaactcct

SEQ ID NO: 39411 - DNA, 15 bp, Homo sapiens
ctagtctcgaactcc

SEQ ID NO: 39412 - DNA, 15 bp, Homo sapiens
gctagtctcgaactc

SEQ ID NO: 39413 - DNA, 15 bp, Homo sapiens
ggctagtctcgaact

SEQ ID NO: 39414 - DNA, 15 bp, Homo sapiens
aggctagtctcgaac

SEQ ID NO: 39415 - DNA, 15 bp, Homo sapiens
caggctagtctcgaa

SEQ ID NO: 39416 - DNA, 15 bp, Homo sapiens
tcaggctagtctcga

SEQ ID NO: 39417 - DNA, 15 bp, Homo sapiens
atcaggctagtctcg

SEQ ID NO: 39418 - DNA, 15 bp, Homo sapiens
gatcaggctagtctc

SEQ ID NO: 39419 - DNA, 15 bp, Homo sapiens
tgatcaggctagtct

SEQ ID NO: 39420 - DNA, 15 bp, Homo sapiens
ttgatcaggctagtc

SEQ ID NO: 39421 - DNA, 15 bp, Homo sapiens
gttgatcaggctagt

SEQ ID NO: 39422 - DNA, 15 bp, Homo sapiens
tgttgatcaggctag

SEQ ID NO: 39423 - DNA, 15 bp, Homo sapiens
ctgttgatcaggcta

SEQ ID NO: 39424 - DNA, 15 bp, Homo sapiens
cctgttgatcaggct

SEQ ID NO: 39425 - DNA, 15 bp, Homo sapiens
ccctgttgatcaggc

SEQ ID NO: 39426 - DNA, 15 bp, Homo sapiens
accctgttgatcagg

SEQ ID NO: 39427 - DNA, 15 bp, Homo sapiens
taccctgttgatcag

SEQ ID NO: 39428 - DNA, 15 bp, Homo sapiens
ttaccctgttgatca

SEQ ID NO: 39429 - DNA, 15 bp, Homo sapiens
tttaccctgttgatc

SEQ ID NO: 39430 - DNA, 15 bp, Homo sapiens
ttttaccctgttgat

SEQ ID NO: 39431 - DNA, 15 bp, Homo sapiens
attttaccctgttga

SEQ ID NO: 39432 - DNA, 15 bp, Homo sapiens
gattttaccctgttg

SEQ ID NO: 39433 - DNA, 15 bp, Homo sapiens
ggattttaccctgtt

SEQ ID NO: 39434 - DNA, 15 bp, Homo sapiens
gggattttaccctgt

SEQ ID NO: 39435 - DNA, 15 bp, Homo sapiens
tgggattttaccctg

SEQ ID NO: 39436 - DNA, 15 bp, Homo sapiens
atgggattttaccct

SEQ ID NO: 39437 - DNA, 15 bp, Homo sapiens
gatgggattttaccc

SEQ ID NO: 39438 - DNA, 15 bp, Homo sapiens
agatgggattttacc

SEQ ID NO: 39439 - DNA, 15 bp, Homo sapiens
gagatgggattttac

SEQ ID NO: 39440 - DNA, 15 bp, Homo sapiens
agagatgggatttta

SEQ ID NO: 39441 - DNA, 15 bp, Homo sapiens
tagagatgggatttt

SEQ ID NO: 39442 - DNA, 15 bp, Homo sapiens
gtagagatgggattt

SEQ ID NO: 39443 - DNA, 15 bp, Homo sapiens
agtagagatgggatt

SEQ ID NO: 39444 - DNA, 15 bp, Homo sapiens
tagtagagatgggat

SEQ ID NO: 39445 - DNA, 15 bp, Homo sapiens
ttagtagagatggga

SEQ ID NO: 39446 - DNA, 15 bp, Homo sapiens
ggtatttttagtaga

SEQ ID NO: 39447 - DNA, 15 bp, Homo sapiens
tggtatttttagtag

SEQ ID NO: 39448 - DNA, 15 bp, Homo sapiens
ttggtatttttagta

SEQ ID NO: 39449 - DNA, 15 bp, Homo sapiens
tttggtatttttagt

SEQ ID NO: 39450 - DNA, 15 bp, Homo sapiens
ttttggtatttttag

SEQ ID NO: 39451 - DNA, 15 bp, Homo sapiens
tttttggtattttta

SEQ ID NO: 39452 - DNA, 15 bp, Homo sapiens
ttttttggtattttt

SEQ ID NO: 39453 - DNA, 15 bp, Homo sapiens
tttttttggtatttt

SEQ ID NO: 39454 - DNA, 15 bp, Homo sapiens
gtttttttggtattt

SEQ ID NO: 39455 - DNA, 15 bp, Homo sapiens
agtttttttggtatt

SEQ ID NO: 39456 - DNA, 15 bp, Homo sapiens
tagtttttttggtat

SEQ ID NO: 39457 - DNA, 15 bp, Homo sapiens
ctagtttttttggta

SEQ ID NO: 39458 - DNA, 15 bp, Homo sapiens
gctagtttttttggt

SEQ ID NO: 39459 - DNA, 15 bp, Homo sapiens
agctagtttttttgg

SEQ ID NO: 39460 - DNA, 15 bp, Homo sapiens
cagctagtttttttg

SEQ ID NO: 39461 - DNA, 15 bp, Homo sapiens
ccagctagttttttt

SEQ ID NO: 39462 - DNA, 15 bp, Homo sapiens
cccagctagtttttt

SEQ ID NO: 39463 - DNA, 15 bp, Homo sapiens
gcccagctagttttt

SEQ ID NO: 39464 - DNA, 15 bp, Homo sapiens
cgcccagctagtttt

SEQ ID NO: 39465 - DNA, 15 bp, Homo sapiens
acgcccagctagttt

SEQ ID NO: 39466 - DNA, 15 bp, Homo sapiens
cacgcccagctagtt

SEQ ID NO: 39467 - DNA, 15 bp, Homo sapiens
ccacgcccagctagt

SEQ ID NO: 39468 - DNA, 15 bp, Homo sapiens
accacgcccagctag

SEQ ID NO: 39469 - DNA, 15 bp, Homo sapiens
tgccaccacgcccag

SEQ ID NO: 39470 - DNA, 15 bp, Homo sapiens
ctgccaccacgccca

SEQ ID NO: 39471 - DNA, 15 bp, Homo sapiens
cctgccaccacgccc

SEQ ID NO: 39472 - DNA, 15 bp, Homo sapiens
gcctgccaccacgcc

SEQ ID NO: 39473 - DNA, 15 bp, Homo sapiens
tgcctgccaccacgc

SEQ ID NO: 39474 - DNA, 15 bp, Homo sapiens
gtgcctgccaccacg

SEQ ID NO: 39475 - DNA, 15 bp, Homo sapiens
ggtgcctgccaccac

SEQ ID NO: 39476 - DNA, 15 bp, Homo sapiens
aggtgcctgccacca

SEQ ID NO: 39477 - DNA, 15 bp, Homo sapiens
caggtgcctgccacc

SEQ ID NO: 39478 - DNA, 15 bp, Homo sapiens
acaggtgcctgccac

SEQ ID NO: 39479 - DNA, 15 bp, Homo sapiens
tacaggtgcctgcca

SEQ ID NO: 39480 - DNA, 15 bp, Homo sapiens
ttacaggtgcctgcc

SEQ ID NO: 39481 - DNA, 15 bp, Homo sapiens
attacaggtgcctgc

SEQ ID NO: 39482 - DNA, 15 bp, Homo sapiens
cattacaggtgcctg

SEQ ID NO: 39483 - DNA, 15 bp, Homo sapiens
acattacaggtgcct

SEQ ID NO: 39484 - DNA, 15 bp, Homo sapiens
gacattacaggtgcc

SEQ ID NO: 39485 - DNA, 15 bp, Homo sapiens
tgacattacaggtgc

SEQ ID NO: 39486 - DNA, 15 bp, Homo sapiens
ctgacattacaggtg

SEQ ID NO: 39487 - DNA, 15 bp, Homo sapiens
gctgacattacaggt

SEQ ID NO: 39488 - DNA, 15 bp, Homo sapiens
agctgacattacagg

SEQ ID NO: 39489 - DNA, 15 bp, Homo sapiens
tagctgacattacag

SEQ ID NO: 39490 - DNA, 15 bp, Homo sapiens
gtagctgacattaca

SEQ ID NO: 39491 - DNA, 15 bp, Homo sapiens
agtagctgacattac

SEQ ID NO: 39492 - DNA, 15 bp, Homo sapiens
tagtagctgacatta

SEQ ID NO: 39493 - DNA, 15 bp, Homo sapiens
ctagtagctgacatt

SEQ ID NO: 39494 - DNA, 15 bp, Homo sapiens
cctagtagctgacat

SEQ ID NO: 39495 - DNA, 15 bp, Homo sapiens
tcctagtagctgaca

SEQ ID NO: 39496 - DNA, 15 bp, Homo sapiens
ttcctagtagctgac

SEQ ID NO: 39497 - DNA, 15 bp, Homo sapiens
cttcctagtagctga

SEQ ID NO: 39498 - DNA, 15 bp, Homo sapiens
ccttcctagtagctg

SEQ ID NO: 39499 - DNA, 15 bp, Homo sapiens
gccttcctagtagct

SEQ ID NO: 39500 - DNA, 15 bp, Homo sapiens
agccttcctagtagc

SEQ ID NO: 39501 - DNA, 15 bp, Homo sapiens
cagccttcctagtag

SEQ ID NO: 39502 - DNA, 15 bp, Homo sapiens
tcagccttcctagta

SEQ ID NO: 39503 - DNA, 15 bp, Homo sapiens
ctcagccttcctagt

SEQ ID NO: 39504 - DNA, 15 bp, Homo sapiens
cctcagccttcctag

SEQ ID NO: 39505 - DNA, 15 bp, Homo sapiens
gcctcagccttccta

SEQ ID NO: 39506 - DNA, 15 bp, Homo sapiens
tgcctcagccttcct

SEQ ID NO: 39507 - DNA, 15 bp, Homo sapiens
ctgcctcagccttcc

SEQ ID NO: 39508 - DNA, 15 bp, Homo sapiens
cctgcctcagccttc

SEQ ID NO: 39509 - DNA, 15 bp, Homo sapiens
tcctgcctcagcctt

SEQ ID NO: 39510 - DNA, 15 bp, Homo sapiens
ctcctgggttcaagc

SEQ ID NO: 39511 - DNA, 15 bp, Homo sapiens
acctcctgggttcaa

SEQ ID NO: 39512 - DNA, 15 bp, Homo sapiens
cctccacctcctggg

SEQ ID NO: 39513 - DNA, 15 bp, Homo sapiens
acctccacctcctgg

SEQ ID NO: 39514 - DNA, 15 bp, Homo sapiens
aacctccacctcctg

SEQ ID NO: 39515 - DNA, 15 bp, Homo sapiens
tcactgcaacctcca

SEQ ID NO: 39516 - DNA, 15 bp, Homo sapiens
aatcttggctcactg

SEQ ID NO: 39517 - DNA, 15 bp, Homo sapiens
caatcttggctcact

SEQ ID NO: 39518 - DNA, 15 bp, Homo sapiens
gcaatcttggctcac

SEQ ID NO: 39519 - DNA, 15 bp, Homo sapiens
tgcaatcttggctca

SEQ ID NO: 39520 - DNA, 15 bp, Homo sapiens
gtgcaatcttggctc

SEQ ID NO: 39521 - DNA, 15 bp, Homo sapiens
ggtgcaatcttggct

SEQ ID NO: 39522 - DNA, 15 bp, Homo sapiens
tggtgcaatcttggc

SEQ ID NO: 39523 - DNA, 15 bp, Homo sapiens
atggtgcaatcttgg

SEQ ID NO: 39524 - DNA, 15 bp, Homo sapiens
aatggtgcaatcttg

SEQ ID NO: 39525 - DNA, 15 bp, Homo sapiens
caatggtgcaatctt

SEQ ID NO: 39526 - DNA, 15 bp, Homo sapiens
gcaatggtgcaatct

SEQ ID NO: 39527 - DNA, 15 bp, Homo sapiens
tgcaatggtgcaatc

SEQ ID NO: 39528 - DNA, 15 bp, Homo sapiens
gtgcaatggtgcaat

SEQ ID NO: 39529 - DNA, 15 bp, Homo sapiens
agtgcaatggtgcaa

SEQ ID NO: 39530 - DNA, 15 bp, Homo sapiens
aagtgcaatggtgca

SEQ ID NO: 39531 - DNA, 15 bp, Homo sapiens
gaagtgcaatggtgc

SEQ ID NO: 39532 - DNA, 15 bp, Homo sapiens
tgaagtgcaatggtg

SEQ ID NO: 39533 - DNA, 15 bp, Homo sapiens
ctgaagtgcaatggt

SEQ ID NO: 39534 - DNA, 15 bp, Homo sapiens
gctgaagtgcaatgg

SEQ ID NO: 39535 - DNA, 15 bp, Homo sapiens
agctgaagtgcaatg

SEQ ID NO: 39536 - DNA, 15 bp, Homo sapiens
aagctgaagtgcaat

SEQ ID NO: 39537 - DNA, 15 bp, Homo sapiens
caagctgaagtgcaa

SEQ ID NO: 39538 - DNA, 15 bp, Homo sapiens
ccaagctgaagtgca

SEQ ID NO: 39539 - DNA, 15 bp, Homo sapiens
cccaagctgaagtgc

SEQ ID NO: 39540 - DNA, 15 bp, Homo sapiens
gcccaagctgaagtg

SEQ ID NO: 39541 - DNA, 15 bp, Homo sapiens
tgcccaagctgaagt

SEQ ID NO: 39542 - DNA, 15 bp, Homo sapiens
ttgcccaagctgaag

SEQ ID NO: 39543 - DNA, 15 bp, Homo sapiens
gttgcccaagctgaa

SEQ ID NO: 39544 - DNA, 15 bp, Homo sapiens
tgttgcccaagctga

SEQ ID NO: 39545 - DNA, 15 bp, Homo sapiens
ctgttgcccaagctg

SEQ ID NO: 39546 - DNA, 15 bp, Homo sapiens
tctgttgcccaagct

SEQ ID NO: 39547 - DNA, 15 bp, Homo sapiens
ctctgttgcccaagc

SEQ ID NO: 39548 - DNA, 15 bp, Homo sapiens
actctgttgcccaag

SEQ ID NO: 39549 - DNA, 15 bp, Homo sapiens
cactctgttgcccaa

SEQ ID NO: 39550 - DNA, 15 bp, Homo sapiens
tcactctgttgccca

SEQ ID NO: 39551 - DNA, 15 bp, Homo sapiens
ctcactctgttgccc

SEQ ID NO: 39552 - DNA, 15 bp, Homo sapiens
tctcactctgttgcc

SEQ ID NO: 39553 - DNA, 15 bp, Homo sapiens
gtctcactctgttgc

SEQ ID NO: 39554 - DNA, 15 bp, Homo sapiens
ggagtctcactctgt

SEQ ID NO: 39555 - DNA, 15 bp, Homo sapiens
cggagtctcactctg

SEQ ID NO: 39556 - DNA, 15 bp, Homo sapiens
acggagtctcactct

SEQ ID NO: 39557 - DNA, 15 bp, Homo sapiens
gacggagtctcactc

SEQ ID NO: 39558 - DNA, 15 bp, Homo sapiens
tagttcttttttttt

SEQ ID NO: 39559 - DNA, 15 bp, Homo sapiens
ttagttctttttttt

SEQ ID NO: 39560 - DNA, 15 bp, Homo sapiens
gttagttcttttttt

SEQ ID NO: 39561 - DNA, 15 bp, Homo sapiens
tgttagttctttttt

SEQ ID NO: 39562 - DNA, 15 bp, Homo sapiens
atgttagttcttttt

SEQ ID NO: 39563 - DNA, 15 bp, Homo sapiens
catgttagttctttt

SEQ ID NO: 39564 - DNA, 15 bp, Homo sapiens
gcatgttagttcttt

SEQ ID NO: 39565 - DNA, 15 bp, Homo sapiens
ggcatgttagttctt

SEQ ID NO: 39566 - DNA, 15 bp, Homo sapiens
tggcatgttagttct

SEQ ID NO: 39567 - DNA, 15 bp, Homo sapiens
ctggcatgttagttc

SEQ ID NO: 39568 - DNA, 15 bp, Homo sapiens
tctggcatgttagtt

SEQ ID NO: 39569 - DNA, 15 bp, Homo sapiens
ttctggcatgttagt

SEQ ID NO: 39570 - DNA, 15 bp, Homo sapiens
gttctggcatgttag

SEQ ID NO: 39571 - DNA, 15 bp, Homo sapiens
agttctggcatgtta

SEQ ID NO: 39572 - DNA, 15 bp, Homo sapiens
aagttctggcatgtt

SEQ ID NO: 39573 - DNA, 15 bp, Homo sapiens
aaagttctggcatgt

SEQ ID NO: 39574 - DNA, 15 bp, Homo sapiens
caaagttctggcatg

SEQ ID NO: 39575 - DNA, 15 bp, Homo sapiens
gcaaagttctggcat

SEQ ID NO: 39576 - DNA, 15 bp, Homo sapiens
ggcaaagttctggca

SEQ ID NO: 39577 - DNA, 15 bp, Homo sapiens
aggcaaagttctggc

SEQ ID NO: 39578 - DNA, 15 bp, Homo sapiens
aaggcaaagttctgg

SEQ ID NO: 39579 - DNA, 15 bp, Homo sapiens
gaaggcaaagttctg

SEQ ID NO: 39580 - DNA, 15 bp, Homo sapiens
tgaaggcaaagttct

SEQ ID NO: 39581 - DNA, 15 bp, Homo sapiens
ctgaaggcaaagttc

SEQ ID NO: 39582 - DNA, 15 bp, Homo sapiens
actgaaggcaaagtt

SEQ ID NO: 39583 - DNA, 15 bp, Homo sapiens
tactgaaggcaaagt

SEQ ID NO: 39584 - DNA, 15 bp, Homo sapiens
atactgaaggcaaag

SEQ ID NO: 39585 - DNA, 15 bp, Homo sapiens
catactgaaggcaaa

SEQ ID NO: 39586 - DNA, 15 bp, Homo sapiens
acatactgaaggcaa

SEQ ID NO: 39587 - DNA, 15 bp, Homo sapiens
aacatactgaaggca

SEQ ID NO: 39588 - DNA, 15 bp, Homo sapiens
aaacatactgaaggc

SEQ ID NO: 39589 - DNA, 15 bp, Homo sapiens
aaaacatactgaagg

SEQ ID NO: 39590 - DNA, 15 bp, Homo sapiens
caaaacatactgaag

SEQ ID NO: 39591 - DNA, 15 bp, Homo sapiens
acaaaacatactgaa

SEQ ID NO: 39592 - DNA, 15 bp, Homo sapiens
cacaaaacatactga

SEQ ID NO: 39593 - DNA, 15 bp, Homo sapiens
tcacaaaacatactg

SEQ ID NO: 39594 - DNA, 15 bp, Homo sapiens
atcacaaaacatact

SEQ ID NO: 39595 - DNA, 15 bp, Homo sapiens
aatcacaaaacatac

SEQ ID NO: 39596 - DNA, 15 bp, Homo sapiens
aaatcacaaaacata

SEQ ID NO: 39597 - DNA, 15 bp, Homo sapiens
aaaatcacaaaacat

SEQ ID NO: 39598 - DNA, 15 bp, Homo sapiens
aaaaatcacaaaaca

SEQ ID NO: 39599 - DNA, 15 bp, Homo sapiens
gaaaaatcacaaaac

SEQ ID NO: 39600 - DNA, 15 bp, Homo sapiens
ggaaaaatcacaaaa

SEQ ID NO: 39601 - DNA, 15 bp, Homo sapiens
gggaaaaatcacaaa

SEQ ID NO: 39602 - DNA, 15 bp, Homo sapiens
agggaaaaatcacaa

SEQ ID NO: 39603 - DNA, 15 bp, Homo sapiens
aagggaaaaatcaca

SEQ ID NO: 39604 - DNA, 15 bp, Homo sapiens
gaagggaaaaatcac

SEQ ID NO: 39605 - DNA, 15 bp, Homo sapiens
agaagggaaaaatca

SEQ ID NO: 39606 - DNA, 15 bp, Homo sapiens
aagaagggaaaaatc

SEQ ID NO: 39607 - DNA, 15 bp, Homo sapiens
caagaagggaaaaat

SEQ ID NO: 39608 - DNA, 15 bp, Homo sapiens
acaagaagggaaaaa

SEQ ID NO: 39609 - DNA, 15 bp, Homo sapiens
cacaagaagggaaaa

SEQ ID NO: 39610 - DNA, 15 bp, Homo sapiens
gcacaagaagggaaa

SEQ ID NO: 39611 - DNA, 15 bp, Homo sapiens
ggcacaagaagggaa

SEQ ID NO: 39612 - DNA, 15 bp, Homo sapiens
tggcacaagaaggga

SEQ ID NO: 39613 - DNA, 15 bp, Homo sapiens
atggcacaagaaggg

SEQ ID NO: 39614 - DNA, 15 bp, Homo sapiens
aatggcacaagaagg

SEQ ID NO: 39615 - DNA, 15 bp, Homo sapiens
aaatggcacaagaag

SEQ ID NO: 39616 - DNA, 15 bp, Homo sapiens
gaaatggcacaagaa

SEQ ID NO: 39617 - DNA, 15 bp, Homo sapiens
tgaaatggcacaaga

SEQ ID NO: 39618 - DNA, 15 bp, Homo sapiens
atgaaatggcacaag

SEQ ID NO: 39619 - DNA, 15 bp, Homo sapiens
gatgaaatggcacaa

SEQ ID NO: 39620 - DNA, 15 bp, Homo sapiens
tgatgaaatggcaca

SEQ ID NO: 39621 - DNA, 15 bp, Homo sapiens
atgatgaaatggcac

SEQ ID NO: 39622 - DNA, 15 bp, Homo sapiens
aatgatgaaatggca

SEQ ID NO: 39623 - DNA, 15 bp, Homo sapiens
taatgatgaaatggc

SEQ ID NO: 39624 - DNA, 15 bp, Homo sapiens
ctaatgatgaaatgg

SEQ ID NO: 39625 - DNA, 15 bp, Homo sapiens
actaatgatgaaatg

SEQ ID NO: 39626 - DNA, 15 bp, Homo sapiens
aactaatgatgaaat

SEQ ID NO: 39627 - DNA, 15 bp, Homo sapiens
gaactaatgatgaaa

SEQ ID NO: 39628 - DNA, 15 bp, Homo sapiens
ggaactaatgatgaa

SEQ ID NO: 39629 - DNA, 15 bp, Homo sapiens
tggaactaatgatga

SEQ ID NO: 39630 - DNA, 15 bp, Homo sapiens
atggaactaatgatg

SEQ ID NO: 39631 - DNA, 15 bp, Homo sapiens
catggaactaatgat

SEQ ID NO: 39632 - DNA, 15 bp, Homo sapiens
acatggaactaatga

SEQ ID NO: 39633 - DNA, 15 bp, Homo sapiens
tacatggaactaatg

SEQ ID NO: 39634 - DNA, 15 bp, Homo sapiens
atacatggaactaat

SEQ ID NO: 39635 - DNA, 15 bp, Homo sapiens
aatacatggaactaa

SEQ ID NO: 39636 - DNA, 15 bp, Homo sapiens
taatacatggaacta

SEQ ID NO: 39637 - DNA, 15 bp, Homo sapiens
ataatacatggaact

SEQ ID NO: 39638 - DNA, 15 bp, Homo sapiens
aataatacatggaac

SEQ ID NO: 39639 - DNA, 15 bp, Homo sapiens
aaataatacatggaa

SEQ ID NO: 39640 - DNA, 15 bp, Homo sapiens
taaataatacatgga

SEQ ID NO: 39641 - DNA, 15 bp, Homo sapiens
ttaaataatacatgg

SEQ ID NO: 39642 - DNA, 15 bp, Homo sapiens
cttaaataatacatg

SEQ ID NO: 39643 - DNA, 15 bp, Homo sapiens
tcttaaataatacat

SEQ ID NO: 39644 - DNA, 15 bp, Homo sapiens
atcttaaataataca

SEQ ID NO: 39645 - DNA, 15 bp, Homo sapiens
aatcttaaataatac

SEQ ID NO: 39646 - DNA, 15 bp, Homo sapiens
aaatcttaaataata

SEQ ID NO: 39647 - DNA, 15 bp, Homo sapiens
gaaatcttaaataat

SEQ ID NO: 39648 - DNA, 15 bp, Homo sapiens
agaaatcttaaataa

SEQ ID NO: 39649 - DNA, 15 bp, Homo sapiens
aagaaatcttaaata

SEQ ID NO: 39650 - DNA, 15 bp, Homo sapiens
taagaaatcttaaat

SEQ ID NO: 39651 - DNA, 15 bp, Homo sapiens
ataagaaatcttaaa

SEQ ID NO: 39652 - DNA, 15 bp, Homo sapiens
gataagaaatcttaa

SEQ ID NO: 39653 - DNA, 15 bp, Homo sapiens
tgataagaaatctta

SEQ ID NO: 39654 - DNA, 15 bp, Homo sapiens
ttgataagaaatctt

SEQ ID NO: 39655 - DNA, 15 bp, Homo sapiens
gttgataagaaatct

SEQ ID NO: 39656 - DNA, 15 bp, Homo sapiens
ggttgataagaaatc

SEQ ID NO: 39657 - DNA, 15 bp, Homo sapiens
tggttgataagaaat

SEQ ID NO: 39658 - DNA, 15 bp, Homo sapiens
ctggttgataagaaa

SEQ ID NO: 39659 - DNA, 15 bp, Homo sapiens
gctggttgataagaa

SEQ ID NO: 39660 - DNA, 15 bp, Homo sapiens
tgctggttgataaga

SEQ ID NO: 39661 - DNA, 15 bp, Homo sapiens
gtgctggttgataag

SEQ ID NO: 39662 - DNA, 15 bp, Homo sapiens
ggtgctggttgataa

SEQ ID NO: 39663 - DNA, 15 bp, Homo sapiens
aggtgctggttgata

SEQ ID NO: 39664 - DNA, 15 bp, Homo sapiens
aaggtgctggttgat

SEQ ID NO: 39665 - DNA, 15 bp, Homo sapiens
caaggtgctggttga

SEQ ID NO: 39666 - DNA, 15 bp, Homo sapiens
ccaaggtgctggttg

SEQ ID NO: 39667 - DNA, 15 bp, Homo sapiens
cccaaggtgctggtt

SEQ ID NO: 39668 - DNA, 15 bp, Homo sapiens
tcccaaggtgctggt

SEQ ID NO: 39669 - DNA, 15 bp, Homo sapiens
atcccaaggtgctgg

SEQ ID NO: 39670 - DNA, 15 bp, Homo sapiens
aatcccaaggtgctg

SEQ ID NO: 39671 - DNA, 15 bp, Homo sapiens
aaatcccaaggtgct

SEQ ID NO: 39672 - DNA, 15 bp, Homo sapiens
aaaatcccaaggtgc

SEQ ID NO: 39673 - DNA, 15 bp, Homo sapiens
aaaaatcccaaggtg

SEQ ID NO: 39674 - DNA, 15 bp, Homo sapiens
aaaaaatcccaaggt

SEQ ID NO: 39675 - DNA, 15 bp, Homo sapiens
aaaaaaatcccaagg

SEQ ID NO: 39676 - DNA, 15 bp, Homo sapiens
caaaaaaatcccaag

SEQ ID NO: 39677 - DNA, 15 bp, Homo sapiens
acaaaaaaatcccaa

SEQ ID NO: 39678 - DNA, 15 bp, Homo sapiens
cacaaaaaaatccca

SEQ ID NO: 39679 - DNA, 15 bp, Homo sapiens
acacaaaaaaatccc

SEQ ID NO: 39680 - DNA, 15 bp, Homo sapiens
tacacaaaaaaatcc

SEQ ID NO: 39681 - DNA, 15 bp, Homo sapiens
atacacaaaaaaatc

SEQ ID NO: 39682 - DNA, 15 bp, Homo sapiens
catacacaaaaaaat

SEQ ID NO: 39683 - DNA, 15 bp, Homo sapiens
acatacacaaaaaaa

SEQ ID NO: 39684 - DNA, 15 bp, Homo sapiens
cacatacacaaaaaa

SEQ ID NO: 39685 - DNA, 15 bp, Homo sapiens
acacatacacaaaaa

SEQ ID NO: 39686 - DNA, 15 bp, Homo sapiens
aacacatacacaaaa

SEQ ID NO: 39687 - DNA, 15 bp, Homo sapiens
caacacatacacaaa

SEQ ID NO: 39688 - DNA, 15 bp, Homo sapiens
ccaacacatacacaa

SEQ ID NO: 39689 - DNA, 15 bp, Homo sapiens
accaacacatacaca

SEQ ID NO: 39690 - DNA, 15 bp, Homo sapiens
aaccaacacatacac

SEQ ID NO: 39691 - DNA, 15 bp, Homo sapiens
aaaccaacacataca

SEQ ID NO: 39692 - DNA, 15 bp, Homo sapiens
taaaccaacacatac

SEQ ID NO: 39693 - DNA, 15 bp, Homo sapiens
ctaaaccaacacata

SEQ ID NO: 39694 - DNA, 15 bp, Homo sapiens
cctaaaccaacacat

SEQ ID NO: 39695 - DNA, 15 bp, Homo sapiens
ccctaaaccaacaca

SEQ ID NO: 39696 - DNA, 15 bp, Homo sapiens
cccctaaaccaacac

SEQ ID NO: 39697 - DNA, 15 bp, Homo sapiens
ccccctaaaccaaca

SEQ ID NO: 39698 - DNA, 15 bp, Homo sapiens
accccctaaaccaac

SEQ ID NO: 39699 - DNA, 15 bp, Homo sapiens
aaccccctaaaccaa

SEQ ID NO: 39700 - DNA, 15 bp, Homo sapiens
aaaccccctaaacca

SEQ ID NO: 39701 - DNA, 15 bp, Homo sapiens
taaaccccctaaacc

SEQ ID NO: 39702 - DNA, 15 bp, Homo sapiens
ataaaccccctaaac

SEQ ID NO: 39703 - DNA, 15 bp, Homo sapiens
aataaaccccctaaa

SEQ ID NO: 39704 - DNA, 15 bp, Homo sapiens
aaataaaccccctaa

SEQ ID NO: 39705 - DNA, 15 bp, Homo sapiens
caaataaacccccta

SEQ ID NO: 39706 - DNA, 15 bp, Homo sapiens
acaaataaaccccct

SEQ ID NO: 39707 - DNA, 15 bp, Homo sapiens
aacaaataaaccccc

SEQ ID NO: 39708 - DNA, 15 bp, Homo sapiens
aaacaaataaacccc

SEQ ID NO: 39709 - DNA, 15 bp, Homo sapiens
aaaacaaataaaccc

SEQ ID NO: 39710 - DNA, 15 bp, Homo sapiens
aaaaacaaataaacc

SEQ ID NO: 39711 - DNA, 15 bp, Homo sapiens
aaaaaacaaataaac

SEQ ID NO: 39712 - DNA, 15 bp, Homo sapiens
aaaaaaacaaataaa

SEQ ID NO: 39713 - DNA, 15 bp, Homo sapiens
gaaaaaaacaaataa

SEQ ID NO: 39714 - DNA, 15 bp, Homo sapiens
agaaaaaaacaaata

SEQ ID NO: 39715 - DNA, 15 bp, Homo sapiens
aagaaaaaaacaaat

SEQ ID NO: 39716 - DNA, 15 bp, Homo sapiens
aaagaaaaaaacaaa

SEQ ID NO: 39717 - DNA, 15 bp, Homo sapiens
aaaagaaaaaaacaa

SEQ ID NO: 39718 - DNA, 15 bp, Homo sapiens
aaaaagaaaaaaaca

SEQ ID NO: 39719 - DNA, 15 bp, Homo sapiens
aaaaaagaaaaaaac

SEQ ID NO: 39720 - DNA, 15 bp, Homo sapiens
gaaaaaaaagaaaaa

SEQ ID NO: 39721 - DNA, 15 bp, Homo sapiens
cgaaaaaaaagaaaa

SEQ ID NO: 39722 - DNA, 15 bp, Homo sapiens
ccgaaaaaaaagaaa

SEQ ID NO: 39723 - DNA, 15 bp, Homo sapiens
accgaaaaaaaagaa

SEQ ID NO: 39724 - DNA, 15 bp, Homo sapiens
taccgaaaaaaaaga

SEQ ID NO: 39725 - DNA, 15 bp, Homo sapiens
ttaccgaaaaaaaag

SEQ ID NO: 39726 - DNA, 15 bp, Homo sapiens
attaccgaaaaaaaa

SEQ ID NO: 39727 - DNA, 15 bp, Homo sapiens
aattaccgaaaaaaa

SEQ ID NO: 39728 - DNA, 15 bp, Homo sapiens
caattaccgaaaaaa

SEQ ID NO: 39729 - DNA, 15 bp, Homo sapiens
tcaattaccgaaaaa

SEQ ID NO: 39730 - DNA, 15 bp, Homo sapiens
ttcaattaccgaaaa

SEQ ID NO: 39731 - DNA, 15 bp, Homo sapiens
tttcaattaccgaaa

SEQ ID NO: 39732 - DNA, 15 bp, Homo sapiens
ttttcaattaccgaa

SEQ ID NO: 39733 - DNA, 15 bp, Homo sapiens
attttcaattaccga

SEQ ID NO: 39734 - DNA, 15 bp, Homo sapiens
cattttcaattaccg

SEQ ID NO: 39735 - DNA, 15 bp, Homo sapiens
acattttcaattacc

SEQ ID NO: 39736 - DNA, 15 bp, Homo sapiens
cacattttcaattac

SEQ ID NO: 39737 - DNA, 15 bp, Homo sapiens
tcacattttcaatta

SEQ ID NO: 39738 - DNA, 15 bp, Homo sapiens
ttcacattttcaatt

SEQ ID NO: 39739 - DNA, 15 bp, Homo sapiens
cttcacattttcaat

SEQ ID NO: 39740 - DNA, 15 bp, Homo sapiens
gcttcacattttcaa

SEQ ID NO: 39741 - DNA, 15 bp, Homo sapiens
tgcttcacattttca

SEQ ID NO: 39742 - DNA, 15 bp, Homo sapiens
ttgcttcacattttc

SEQ ID NO: 39743 - DNA, 15 bp, Homo sapiens
tttgcttcacatttt

SEQ ID NO: 39744 - DNA, 15 bp, Homo sapiens
ttttgcttcacattt

SEQ ID NO: 39745 - DNA, 15 bp, Homo sapiens
attttgcttcacatt

SEQ ID NO: 39746 - DNA, 15 bp, Homo sapiens
cattttgcttcacat

SEQ ID NO: 39747 - DNA, 15 bp, Homo sapiens
acattttgcttcaca

SEQ ID NO: 39748 - DNA, 15 bp, Homo sapiens
gacattttgcttcac

SEQ ID NO: 39749 - DNA, 15 bp, Homo sapiens
tgacattttgcttca

SEQ ID NO: 39750 - DNA, 15 bp, Homo sapiens
gtgacattttgcttc

SEQ ID NO: 39751 - DNA, 15 bp, Homo sapiens
ggtgacattttgctt

SEQ ID NO: 39752 - DNA, 15 bp, Homo sapiens
aggtgacattttgct

SEQ ID NO: 39753 - DNA, 15 bp, Homo sapiens
caggtgacattttgc

SEQ ID NO: 39754 - DNA, 15 bp, Homo sapiens
acaggtgacattttg

SEQ ID NO: 39755 - DNA, 15 bp, Homo sapiens
aacaggtgacatttt

SEQ ID NO: 39756 - DNA, 15 bp, Homo sapiens
aaacaggtgacattt

SEQ ID NO: 39757 - DNA, 15 bp, Homo sapiens
aaaacaggtgacatt

SEQ ID NO: 39758 - DNA, 15 bp, Homo sapiens
aaaaacaggtgacat

SEQ ID NO: 39759 - DNA, 15 bp, Homo sapiens
aaaaaacaggtgaca

SEQ ID NO: 39760 - DNA, 15 bp, Homo sapiens
gaaaaaacaggtgac

SEQ ID NO: 39761 - DNA, 15 bp, Homo sapiens
agaaaaaacaggtga

SEQ ID NO: 39762 - DNA, 15 bp, Homo sapiens
aagaaaaaacaggtg

SEQ ID NO: 39763 - DNA, 15 bp, Homo sapiens
aaagaaaaaacaggt

SEQ ID NO: 39764 - DNA, 15 bp, Homo sapiens
gaaagaaaaaacagg

SEQ ID NO: 39765 - DNA, 15 bp, Homo sapiens
tgaaagaaaaaacag

SEQ ID NO: 39766 - DNA, 15 bp, Homo sapiens
atgaaagaaaaaaca

SEQ ID NO: 39767 - DNA, 15 bp, Homo sapiens
catgaaagaaaaaac

SEQ ID NO: 39768 - DNA, 15 bp, Homo sapiens
acatgaaagaaaaaa

SEQ ID NO: 39769 - DNA, 15 bp, Homo sapiens
gacatgaaagaaaaa

SEQ ID NO: 39770 - DNA, 15 bp, Homo sapiens
agacatgaaagaaaa

SEQ ID NO: 39771 - DNA, 15 bp, Homo sapiens
cagacatgaaagaaa

SEQ ID NO: 39772 - DNA, 15 bp, Homo sapiens
tcagacatgaaagaa

SEQ ID NO: 39773 - DNA, 15 bp, Homo sapiens
gtcagacatgaaaga

SEQ ID NO: 39774 - DNA, 15 bp, Homo sapiens
tgtcagacatgaaag

SEQ ID NO: 39775 - DNA, 15 bp, Homo sapiens
gtgtcagacatgaaa

SEQ ID NO: 39776 - DNA, 15 bp, Homo sapiens
agtgtcagacatgaa

SEQ ID NO: 39777 - DNA, 15 bp, Homo sapiens
gagtgtcagacatga

SEQ ID NO: 39778 - DNA, 15 bp, Homo sapiens
tgagtgtcagacatg

SEQ ID NO: 39779 - DNA, 15 bp, Homo sapiens
atgagtgtcagacat

SEQ ID NO: 39780 - DNA, 15 bp, Homo sapiens
catgagtgtcagaca

SEQ ID NO: 39781 - DNA, 15 bp, Homo sapiens
acatgagtgtcagac

SEQ ID NO: 39782 - DNA, 15 bp, Homo sapiens
gacatgagtgtcaga

SEQ ID NO: 39783 - DNA, 15 bp, Homo sapiens
agacatgagtgtcag

SEQ ID NO: 39784 - DNA, 15 bp, Homo sapiens
aagacatgagtgtca

SEQ ID NO: 39785 - DNA, 15 bp, Homo sapiens
caagacatgagtgtc

SEQ ID NO: 39786 - DNA, 15 bp, Homo sapiens
acaagacatgagtgt

SEQ ID NO: 39787 - DNA, 15 bp, Homo sapiens
aacaagacatgagtg

SEQ ID NO: 39788 - DNA, 15 bp, Homo sapiens
aaacaagacatgagt

SEQ ID NO: 39789 - DNA, 15 bp, Homo sapiens
taaacaagacatgag

SEQ ID NO: 39790 - DNA, 15 bp, Homo sapiens
gtaaacaagacatga

SEQ ID NO: 39791 - DNA, 15 bp, Homo sapiens
ggtaaacaagacatg

SEQ ID NO: 39792 - DNA, 15 bp, Homo sapiens
gggtaaacaagacat

SEQ ID NO: 39793 - DNA, 15 bp, Homo sapiens
ggggtaaacaagaca

SEQ ID NO: 39794 - DNA, 15 bp, Homo sapiens
gggggtaaacaagac

SEQ ID NO: 39795 - DNA, 15 bp, Homo sapiens
cgggggtaaacaaga

SEQ ID NO: 39796 - DNA, 15 bp, Homo sapiens
tcgggggtaaacaag

SEQ ID NO: 39797 - DNA, 15 bp, Homo sapiens
gtcgggggtaaacaa

SEQ ID NO: 39798 - DNA, 15 bp, Homo sapiens
tgtcgggggtaaaca

SEQ ID NO: 39799 - DNA, 15 bp, Homo sapiens
atgtcgggggtaaac

SEQ ID NO: 39800 - DNA, 15 bp, Homo sapiens
catgtcgggggtaaa

SEQ ID NO: 39801 - DNA, 15 bp, Homo sapiens
gcatgtcgggggtaa

SEQ ID NO: 39802 - DNA, 15 bp, Homo sapiens
tgcatgtcgggggta

SEQ ID NO: 39803 - DNA, 15 bp, Homo sapiens
ctgcatgtcgggggt

SEQ ID NO: 39804 - DNA, 15 bp, Homo sapiens
tctgcatgtcggggg

SEQ ID NO: 39805 - DNA, 15 bp, Homo sapiens
ttctgcatgtcgggg

SEQ ID NO: 39806 - DNA, 15 bp, Homo sapiens
cttctgcatgtcggg

SEQ ID NO: 39807 - DNA, 15 bp, Homo sapiens
gcttctgcatgtcgg

SEQ ID NO: 39808 - DNA, 15 bp, Homo sapiens
agcttctgcatgtcg

SEQ ID NO: 39809 - DNA, 15 bp, Homo sapiens
cagcttctgcatgtc

SEQ ID NO: 39810 - DNA, 15 bp, Homo sapiens
tcagcttctgcatgt

SEQ ID NO: 39811 - DNA, 15 bp, Homo sapiens
ttcagcttctgcatg

SEQ ID NO: 39812 - DNA, 15 bp, Homo sapiens
tttcagcttctgcat

SEQ ID NO: 39813 - DNA, 15 bp, Homo sapiens
atttcagcttctgca

SEQ ID NO: 39814 - DNA, 15 bp, Homo sapiens
gatttcagcttctgc

SEQ ID NO: 39815 - DNA, 15 bp, Homo sapiens
ggatttcagcttctg

SEQ ID NO: 39816 - DNA, 15 bp, Homo sapiens
gggatttcagcttct

SEQ ID NO: 39817 - DNA, 15 bp, Homo sapiens
ggggatttcagcttc

SEQ ID NO: 39818 - DNA, 15 bp, Homo sapiens
tggggatttcagctt

SEQ ID NO: 39819 - DNA, 15 bp, Homo sapiens
atggggatttcagct

SEQ ID NO: 39820 - DNA, 15 bp, Homo sapiens
aatggggatttcagc

SEQ ID NO: 39821 - DNA, 15 bp, Homo sapiens
aaatggggatttcag

SEQ ID NO: 39822 - DNA, 15 bp, Homo sapiens
gaaatggggatttca

SEQ ID NO: 39823 - DNA, 15 bp, Homo sapiens
tgaaatggggatttc

SEQ ID NO: 39824 - DNA, 15 bp, Homo sapiens
atgaaatggggattt

SEQ ID NO: 39825 - DNA, 15 bp, Homo sapiens
tatgaaatggggatt

SEQ ID NO: 39826 - DNA, 15 bp, Homo sapiens
gtatgaaatggggat

SEQ ID NO: 39827 - DNA, 15 bp, Homo sapiens
tgtatgaaatgggga

SEQ ID NO: 39828 - DNA, 15 bp, Homo sapiens
ctgtatgaaatgggg

SEQ ID NO: 39829 - DNA, 15 bp, Homo sapiens
actgtatgaaatggg

SEQ ID NO: 39830 - DNA, 15 bp, Homo sapiens
gactgtatgaaatgg

SEQ ID NO: 39831 - DNA, 15 bp, Homo sapiens
agactgtatgaaatg

SEQ ID NO: 39832 - DNA, 15 bp, Homo sapiens
caaatggaattcaat

SEQ ID NO: 39833 - DNA, 15 bp, Homo sapiens
ccaaatggaattcaa

SEQ ID NO: 39834 - DNA, 15 bp, Homo sapiens
accaaatggaattca

SEQ ID NO: 39835 - DNA, 15 bp, Homo sapiens
caccaaatggaattc

SEQ ID NO: 39836 - DNA, 15 bp, Homo sapiens
gcaccaaatggaatt

SEQ ID NO: 39837 - DNA, 15 bp, Homo sapiens
agcaccaaatggaat

SEQ ID NO: 39838 - DNA, 15 bp, Homo sapiens
tagcaccaaatggaa

SEQ ID NO: 39839 - DNA, 15 bp, Homo sapiens
ctagcaccaaatgga

SEQ ID NO: 39840 - DNA, 15 bp, Homo sapiens
gctagcaccaaatgg

SEQ ID NO: 39841 - DNA, 15 bp, Homo sapiens
tgctagcaccaaatg

SEQ ID NO: 39842 - DNA, 15 bp, Homo sapiens
atgctagcaccaaat

SEQ ID NO: 39843 - DNA, 15 bp, Homo sapiens
gatgctagcaccaaa

SEQ ID NO: 39844 - DNA, 15 bp, Homo sapiens
agatgctagcaccaa

SEQ ID NO: 39845 - DNA, 15 bp, Homo sapiens
cagatgctagcacca

SEQ ID NO: 39846 - DNA, 15 bp, Homo sapiens
acagatgctagcacc

SEQ ID NO: 39847 - DNA, 15 bp, Homo sapiens
gacagatgctagcac

SEQ ID NO: 39848 - DNA, 15 bp, Homo sapiens
agacagatgctagca

SEQ ID NO: 39849 - DNA, 15 bp, Homo sapiens
cagacagatgctagc

SEQ ID NO: 39850 - DNA, 15 bp, Homo sapiens
acagacagatgctag

SEQ ID NO: 39851 - DNA, 15 bp, Homo sapiens
aacagacagatgcta

SEQ ID NO: 39852 - DNA, 15 bp, Homo sapiens
caacagacagatgct

SEQ ID NO: 39853 - DNA, 15 bp, Homo sapiens
gcaacagacagatgc

SEQ ID NO: 39854 - DNA, 15 bp, Homo sapiens
tgcaacagacagatg

SEQ ID NO: 39855 - DNA, 15 bp, Homo sapiens
atgcaacagacagat

SEQ ID NO: 39856 - DNA, 15 bp, Homo sapiens
aatgcaacagacaga

SEQ ID NO: 39857 - DNA, 15 bp, Homo sapiens
caatgcaacagacag

SEQ ID NO: 39858 - DNA, 15 bp, Homo sapiens
gcaatgcaacagaca

SEQ ID NO: 39859 - DNA, 15 bp, Homo sapiens
agcaatgcaacagac

SEQ ID NO: 39860 - DNA, 15 bp, Homo sapiens
aagcaatgcaacaga

SEQ ID NO: 39861 - DNA, 15 bp, Homo sapiens
caagcaatgcaacag

SEQ ID NO: 39862 - DNA, 15 bp, Homo sapiens
acaagcaatgcaaca

SEQ ID NO: 39863 - DNA, 15 bp, Homo sapiens
cacaagcaatgcaac

SEQ ID NO: 39864 - DNA, 15 bp, Homo sapiens
acacaagcaatgcaa

SEQ ID NO: 39865 - DNA, 15 bp, Homo sapiens
aacacaagcaatgca

SEQ ID NO: 39866 - DNA, 15 bp, Homo sapiens
aaacacaagcaatgc

SEQ ID NO: 39867 - DNA, 15 bp, Homo sapiens
taaacacaagcaatg

SEQ ID NO: 39868 - DNA, 15 bp, Homo sapiens
ataaacacaagcaat

SEQ ID NO: 39869 - DNA, 15 bp, Homo sapiens
tataaacacaagcaa

SEQ ID NO: 39870 - DNA, 15 bp, Homo sapiens
ttataaacacaagca

SEQ ID NO: 39871 - DNA, 15 bp, Homo sapiens
tttataaacacaagc

SEQ ID NO: 39872 - DNA, 15 bp, Homo sapiens
ttttataaacacaag

SEQ ID NO: 39873 - DNA, 15 bp, Homo sapiens
attttataaacacaa

SEQ ID NO: 39874 - DNA, 15 bp, Homo sapiens
aattttataaacaca

SEQ ID NO: 39875 - DNA, 15 bp, Homo sapiens
gaattttataaacac

SEQ ID NO: 39876 - DNA, 15 bp, Homo sapiens
agaattttataaaca

SEQ ID NO: 39877 - DNA, 15 bp, Homo sapiens
cagaattttataaac

SEQ ID NO: 39878 - DNA, 15 bp, Homo sapiens
gcagaattttataaa

SEQ ID NO: 39879 - DNA, 15 bp, Homo sapiens
ggcagaattttataa

SEQ ID NO: 39880 - DNA, 15 bp, Homo sapiens
aggcagaattttata

SEQ ID NO: 39881 - DNA, 15 bp, Homo sapiens
caggcagaattttat

SEQ ID NO: 39882 - DNA, 15 bp, Homo sapiens
tcaggcagaatttta

SEQ ID NO: 39883 - DNA, 15 bp, Homo sapiens
atcaggcagaatttt

SEQ ID NO: 39884 - DNA, 15 bp, Homo sapiens
tatcaggcagaattt

SEQ ID NO: 39885 - DNA, 15 bp, Homo sapiens
atatcaggcagaatt

SEQ ID NO: 39886 - DNA, 15 bp, Homo sapiens
tatatcaggcagaat

SEQ ID NO: 39887 - DNA, 15 bp, Homo sapiens
gtatatcaggcagaa

SEQ ID NO: 39888 - DNA, 15 bp, Homo sapiens
agtatatcaggcaga

SEQ ID NO: 39889 - DNA, 15 bp, Homo sapiens
aagtatatcaggcag

SEQ ID NO: 39890 - DNA, 15 bp, Homo sapiens
caagtatatcaggca

SEQ ID NO: 39891 - DNA, 15 bp, Homo sapiens
acaagtatatcaggc

SEQ ID NO: 39892 - DNA, 15 bp, Homo sapiens
aacaagtatatcagg

SEQ ID NO: 39893 - DNA, 15 bp, Homo sapiens
aaacaagtatatcag

SEQ ID NO: 39894 - DNA, 15 bp, Homo sapiens
taaacaagtatatca

SEQ ID NO: 39895 - DNA, 15 bp, Homo sapiens
ttaaacaagtatatc

SEQ ID NO: 39896 - DNA, 15 bp, Homo sapiens
tttaaacaagtatat

SEQ ID NO: 39897 - DNA, 15 bp, Homo sapiens
ttttaaacaagtata

SEQ ID NO: 39898 - DNA, 15 bp, Homo sapiens
tttttaaacaagtat

SEQ ID NO: 39899 - DNA, 15 bp, Homo sapiens
gtttttaaacaagta

SEQ ID NO: 39900 - DNA, 15 bp, Homo sapiens
ggtttttaaacaagt

SEQ ID NO: 39901 - DNA, 15 bp, Homo sapiens
tggtttttaaacaag

SEQ ID NO: 39902 - DNA, 15 bp, Homo sapiens
ttggtttttaaacaa

SEQ ID NO: 39903 - DNA, 15 bp, Homo sapiens
attggtttttaaaca

SEQ ID NO: 39904 - DNA, 15 bp, Homo sapiens
aattggtttttaaac

SEQ ID NO: 39905 - DNA, 15 bp, Homo sapiens
aaattggtttttaaa

SEQ ID NO: 39906 - DNA, 15 bp, Homo sapiens
caaattggtttttaa

SEQ ID NO: 39907 - DNA, 15 bp, Homo sapiens
acaaattggttttta

SEQ ID NO: 39908 - DNA, 15 bp, Homo sapiens
cacaaattggttttt

SEQ ID NO: 39909 - DNA, 15 bp, Homo sapiens
acacaaattggtttt

SEQ ID NO: 39910 - DNA, 15 bp, Homo sapiens
tacacaaattggttt

SEQ ID NO: 39911 - DNA, 15 bp, Homo sapiens
atacacaaattggtt

SEQ ID NO: 39912 - DNA, 15 bp, Homo sapiens
gatacacaaattggt

SEQ ID NO: 39913 - DNA, 15 bp, Homo sapiens
tgatacacaaattgg

SEQ ID NO: 39914 - DNA, 15 bp, Homo sapiens
atgatacacaaattg

SEQ ID NO: 39915 - DNA, 15 bp, Homo sapiens
tatgatacacaaatt

SEQ ID NO: 39916 - DNA, 15 bp, Homo sapiens
ctatgatacacaaat

SEQ ID NO: 39917 - DNA, 15 bp, Homo sapiens
tctatgatacacaaa

SEQ ID NO: 39918 - DNA, 15 bp, Homo sapiens
atctatgatacacaa

SEQ ID NO: 39919 - DNA, 15 bp, Homo sapiens
aatctatgatacaca

SEQ ID NO: 39920 - DNA, 15 bp, Homo sapiens
caatctatgatacac

SEQ ID NO: 39921 - DNA, 15 bp, Homo sapiens
tcaatctatgataca

SEQ ID NO: 39922 - DNA, 15 bp, Homo sapiens
atcaatctatgatac

SEQ ID NO: 39923 - DNA, 15 bp, Homo sapiens
catcaatctatgata

SEQ ID NO: 39924 - DNA, 15 bp, Homo sapiens
gcatcaatctatgat

SEQ ID NO: 39925 - DNA, 15 bp, Homo sapiens
agcatcaatctatga

SEQ ID NO: 39926 - DNA, 15 bp, Homo sapiens
aagcatcaatctatg

SEQ ID NO: 39927 - DNA, 15 bp, Homo sapiens
aaagcatcaatctat

SEQ ID NO: 39928 - DNA, 15 bp, Homo sapiens
aaaagcatcaatcta

SEQ ID NO: 39929 - DNA, 15 bp, Homo sapiens
caaaagcatcaatct

SEQ ID NO: 39930 - DNA, 15 bp, Homo sapiens
tcaaaagcatcaatc

SEQ ID NO: 39931 - DNA, 15 bp, Homo sapiens
ttcaaaagcatcaat

SEQ ID NO: 39932 - DNA, 15 bp, Homo sapiens
tttcaaaagcatcaa

SEQ ID NO: 39933 - DNA, 15 bp, Homo sapiens
ttttcaaaagcatca

SEQ ID NO: 39934 - DNA, 15 bp, Homo sapiens
tttttcaaaagcatc

SEQ ID NO: 39935 - DNA, 15 bp, Homo sapiens
ttttttcaaaagcat

SEQ ID NO: 39936 - DNA, 15 bp, Homo sapiens
tttttttcaaaagca

SEQ ID NO: 39937 - DNA, 15 bp, Homo sapiens
atttttttcaaaagc

SEQ ID NO: 39938 - DNA, 15 bp, Homo sapiens
gatttttttcaaaag

SEQ ID NO: 39939 - DNA, 15 bp, Homo sapiens
tgatttttttcaaaa

SEQ ID NO: 39940 - DNA, 15 bp, Homo sapiens
ctgatttttttcaaa

SEQ ID NO: 39941 - DNA, 15 bp, Homo sapiens
actgatttttttcaa

SEQ ID NO: 39942 - DNA, 15 bp, Homo sapiens
tactgatttttttca

SEQ ID NO: 39943 - DNA, 15 bp, Homo sapiens
atactgatttttttc

SEQ ID NO: 39944 - DNA, 15 bp, Homo sapiens
aatactgattttttt

SEQ ID NO: 39945 - DNA, 15 bp, Homo sapiens
gaatactgatttttt

SEQ ID NO: 39946 - DNA, 15 bp, Homo sapiens
agaatactgattttt

SEQ ID NO: 39947 - DNA, 15 bp, Homo sapiens
tagaatactgatttt

SEQ ID NO: 39948 - DNA, 15 bp, Homo sapiens
ttagaatactgattt

SEQ ID NO: 39949 - DNA, 15 bp, Homo sapiens
gttagaatactgatt

SEQ ID NO: 39950 - DNA, 15 bp, Homo sapiens
ggttagaatactgat

SEQ ID NO: 39951 - DNA, 15 bp, Homo sapiens
aggttagaatactga

SEQ ID NO: 39952 - DNA, 15 bp, Homo sapiens
caggttagaatactg

SEQ ID NO: 39953 - DNA, 15 bp, Homo sapiens
tcaggttagaatact

SEQ ID NO: 39954 - DNA, 15 bp, Homo sapiens
ttcaggttagaatac

SEQ ID NO: 39955 - DNA, 15 bp, Homo sapiens
attcaggttagaata

SEQ ID NO: 39956 - DNA, 15 bp, Homo sapiens
aattcaggttagaat

SEQ ID NO: 39957 - DNA, 15 bp, Homo sapiens
taattcaggttagaa

SEQ ID NO: 39958 - DNA, 15 bp, Homo sapiens
ataattcaggttaga

SEQ ID NO: 39959 - DNA, 15 bp, Homo sapiens
gataattcaggttag

SEQ ID NO: 39960 - DNA, 15 bp, Homo sapiens
tgataattcaggtta

SEQ ID NO: 39961 - DNA, 15 bp, Homo sapiens
gtgataattcaggtt

SEQ ID NO: 39962 - DNA, 15 bp, Homo sapiens
agtgataattcaggt

SEQ ID NO: 39963 - DNA, 15 bp, Homo sapiens
tagtgataattcagg

SEQ ID NO: 39964 - DNA, 15 bp, Homo sapiens
atagtgataattcag

SEQ ID NO: 39965 - DNA, 15 bp, Homo sapiens
gatagtgataattca

SEQ ID NO: 39966 - DNA, 15 bp, Homo sapiens
tgatagtgataattc

SEQ ID NO: 39967 - DNA, 15 bp, Homo sapiens
ctgatagtgataatt

SEQ ID NO: 39968 - DNA, 15 bp, Homo sapiens
tctgatagtgataat

SEQ ID NO: 39969 - DNA, 15 bp, Homo sapiens
ttctgatagtgataa

SEQ ID NO: 39970 - DNA, 15 bp, Homo sapiens
gttctgatagtgata

SEQ ID NO: 39971 - DNA, 15 bp, Homo sapiens
tgttctgatagtgat

SEQ ID NO: 39972 - DNA, 15 bp, Homo sapiens
ttgttctgatagtga

SEQ ID NO: 39973 - DNA, 15 bp, Homo sapiens
tttgttctgatagtg

SEQ ID NO: 39974 - DNA, 15 bp, Homo sapiens
ctttgttctgatagt

SEQ ID NO: 39975 - DNA, 15 bp, Homo sapiens
gctttgttctgatag

SEQ ID NO: 39976 - DNA, 15 bp, Homo sapiens
tgctttgttctgata

SEQ ID NO: 39977 - DNA, 15 bp, Homo sapiens
ctgctttgttctgat

SEQ ID NO: 39978 - DNA, 15 bp, Homo sapiens
actgctttgttctga

SEQ ID NO: 39979 - DNA, 15 bp, Homo sapiens
tactgctttgttctg

SEQ ID NO: 39980 - DNA, 15 bp, Homo sapiens
ttactgctttgttct

SEQ ID NO: 39981 - DNA, 15 bp, Homo sapiens
tttactgctttgttc

SEQ ID NO: 39982 - DNA, 15 bp, Homo sapiens
ctttactgctttgtt

SEQ ID NO: 39983 - DNA, 15 bp, Homo sapiens
actttactgctttgt

SEQ ID NO: 39984 - DNA, 15 bp, Homo sapiens
tactttactgctttg

SEQ ID NO: 39985 - DNA, 15 bp, Homo sapiens
ctactttactgcttt

SEQ ID NO: 39986 - DNA, 15 bp, Homo sapiens
tctactttactgctt

SEQ ID NO: 39987 - DNA, 15 bp, Homo sapiens
atctactttactgct

SEQ ID NO: 39988 - DNA, 15 bp, Homo sapiens
aatctactttactgc

SEQ ID NO: 39989 - DNA, 15 bp, Homo sapiens
aaatctactttactg

SEQ ID NO: 39990 - DNA, 15 bp, Homo sapiens
caaatctactttact

SEQ ID NO: 39991 - DNA, 15 bp, Homo sapiens
acaaatctactttac

SEQ ID NO: 39992 - DNA, 15 bp, Homo sapiens
aacaaatctacttta

SEQ ID NO: 39993 - DNA, 15 bp, Homo sapiens
aaacaaatctacttt

SEQ ID NO: 39994 - DNA, 15 bp, Homo sapiens
aaaacaaatctactt

SEQ ID NO: 39995 - DNA, 15 bp, Homo sapiens
gaaaacaaatctact

SEQ ID NO: 39996 - DNA, 15 bp, Homo sapiens
agaaaacaaatctac

SEQ ID NO: 39997 - DNA, 15 bp, Homo sapiens
gagaaaacaaatcta

SEQ ID NO: 39998 - DNA, 15 bp, Homo sapiens
tgagaaaacaaatct

SEQ ID NO: 39999 - DNA, 15 bp, Homo sapiens
atgagaaaacaaatc

SEQ ID NO: 40000 - DNA, 15 bp, Homo sapiens
aatgagaaaacaaat

SEQ ID NO: 40001 - DNA, 15 bp, Homo sapiens
gaatgagaaaacaaa

SEQ ID NO: 40002 - DNA, 15 bp, Homo sapiens
ggaatgagaaaacaa

SEQ ID NO: 40003 - DNA, 15 bp, Homo sapiens
tggaatgagaaaaca

SEQ ID NO: 40004 - DNA, 15 bp, Homo sapiens
atggaatgagaaaac

SEQ ID NO: 40005 - DNA, 15 bp, Homo sapiens
aatggaatgagaaaa

SEQ ID NO: 40006 - DNA, 15 bp, Homo sapiens
aaatggaatgagaaa

SEQ ID NO: 40007 - DNA, 15 bp, Homo sapiens
taaatggaatgagaa

SEQ ID NO: 40008 - DNA, 15 bp, Homo sapiens
ttaaatggaatgaga

SEQ ID NO: 40009 - DNA, 15 bp, Homo sapiens
tttaaatggaatgag

SEQ ID NO: 40010 - DNA, 15 bp, Homo sapiens
ctttaaatggaatga

SEQ ID NO: 40011 - DNA, 15 bp, Homo sapiens
gctttaaatggaatg

SEQ ID NO: 40012 - DNA, 15 bp, Homo sapiens
tgctttaaatggaat

SEQ ID NO: 40013 - DNA, 15 bp, Homo sapiens
ctgctttaaatggaa

SEQ ID NO: 40014 - DNA, 15 bp, Homo sapiens
actgctttaaatgga

SEQ ID NO: 40015 - DNA, 15 bp, Homo sapiens
tactgctttaaatgg

SEQ ID NO: 40016 - DNA, 15 bp, Homo sapiens
atactgctttaaatg

SEQ ID NO: 40017 - DNA, 15 bp, Homo sapiens
aatactgctttaaat

SEQ ID NO: 40018 - DNA, 15 bp, Homo sapiens
taatactgctttaaa

SEQ ID NO: 40019 - DNA, 15 bp, Homo sapiens
ttaatactgctttaa

SEQ ID NO: 40020 - DNA, 15 bp, Homo sapiens
gttaatactgcttta

SEQ ID NO: 40021 - DNA, 15 bp, Homo sapiens
agttaatactgcttt

SEQ ID NO: 40022 - DNA, 15 bp, Homo sapiens
aagttaatactgctt

SEQ ID NO: 40023 - DNA, 15 bp, Homo sapiens
gaagttaatactgct

SEQ ID NO: 40024 - DNA, 15 bp, Homo sapiens
tgaagttaatactgc

SEQ ID NO: 40025 - DNA, 15 bp, Homo sapiens
gtgaagttaatactg

SEQ ID NO: 40026 - DNA, 15 bp, Homo sapiens
tgtgaagttaatact

SEQ ID NO: 40027 - DNA, 15 bp, Homo sapiens
ctgtgaagttaatac

SEQ ID NO: 40028 - DNA, 15 bp, Homo sapiens
tctgtgaagttaata

SEQ ID NO: 40029 - DNA, 15 bp, Homo sapiens
ttctgtgaagttaat

SEQ ID NO: 40030 - DNA, 15 bp, Homo sapiens
tttctgtgaagttaa

SEQ ID NO: 40031 - DNA, 15 bp, Homo sapiens
ttttctgtgaagtta

SEQ ID NO: 40032 - DNA, 15 bp, Homo sapiens
cttttctgtgaagtt

SEQ ID NO: 40033 - DNA, 15 bp, Homo sapiens
acttttctgtgaagt

SEQ ID NO: 40034 - DNA, 15 bp, Homo sapiens
tacttttctgtgaag

SEQ ID NO: 40035 - DNA, 15 bp, Homo sapiens
ctacttttctgtgaa

SEQ ID NO: 40036 - DNA, 15 bp, Homo sapiens
actacttttctgtga

SEQ ID NO: 40037 - DNA, 15 bp, Homo sapiens
cactacttttctgtg

SEQ ID NO: 40038 - DNA, 15 bp, Homo sapiens
tcactacttttctgt

SEQ ID NO: 40039 - DNA, 15 bp, Homo sapiens
ttcactacttttctg

SEQ ID NO: 40040 - DNA, 15 bp, Homo sapiens
attcactacttttct

SEQ ID NO: 40041 - DNA, 15 bp, Homo sapiens
tattcactacttttc

SEQ ID NO: 40042 - DNA, 15 bp, Homo sapiens
gtattcactactttt

SEQ ID NO: 40043 - DNA, 15 bp, Homo sapiens
ggtattcactacttt

SEQ ID NO: 40044 - DNA, 15 bp, Homo sapiens
gggtattcactactt

SEQ ID NO: 40045 - DNA, 15 bp, Homo sapiens
agggtattcactact

SEQ ID NO: 40046 - DNA, 15 bp, Homo sapiens
tagggtattcactac

SEQ ID NO: 40047 - DNA, 15 bp, Homo sapiens
atagggtattcacta

SEQ ID NO: 40048 - DNA, 15 bp, Homo sapiens
tatagggtattcact

SEQ ID NO: 40049 - DNA, 15 bp, Homo sapiens
ttatagggtattcac

SEQ ID NO: 40050 - DNA, 15 bp, Homo sapiens
cttatagggtattca

SEQ ID NO: 40051 - DNA, 15 bp, Homo sapiens
gcttatagggtattc

SEQ ID NO: 40052 - DNA, 15 bp, Homo sapiens
ggcttatagggtatt

SEQ ID NO: 40053 - DNA, 15 bp, Homo sapiens
tggcttatagggtat

SEQ ID NO: 40054 - DNA, 15 bp, Homo sapiens
ctggcttatagggta

SEQ ID NO: 40055 - DNA, 15 bp, Homo sapiens
tctggcttatagggt

SEQ ID NO: 40056 - DNA, 15 bp, Homo sapiens
ttctggcttataggg

SEQ ID NO: 40057 - DNA, 15 bp, Homo sapiens
attctggcttatagg

SEQ ID NO: 40058 - DNA, 15 bp, Homo sapiens
gattctggcttatag

SEQ ID NO: 40059 - DNA, 15 bp, Homo sapiens
ggattctggcttata

SEQ ID NO: 40060 - DNA, 15 bp, Homo sapiens
tggattctggcttat

SEQ ID NO: 40061 - DNA, 15 bp, Homo sapiens
ctggattctggctta

SEQ ID NO: 40062 - DNA, 15 bp, Homo sapiens
tctggattctggctt

SEQ ID NO: 40063 - DNA, 15 bp, Homo sapiens
ttctggattctggct

SEQ ID NO: 40064 - DNA, 15 bp, Homo sapiens
cttctggattctggc

SEQ ID NO: 40065 - DNA, 15 bp, Homo sapiens
ccttctggattctgg

SEQ ID NO: 40066 - DNA, 15 bp, Homo sapiens
gccttctggattctg

SEQ ID NO: 40067 - DNA, 15 bp, Homo sapiens
ggccttctggattct

SEQ ID NO: 40068 - DNA, 15 bp, Homo sapiens
aggccttctggattc

SEQ ID NO: 40069 - DNA, 15 bp, Homo sapiens
aaggccttctggatt

SEQ ID NO: 40070 - DNA, 15 bp, Homo sapiens
aaaggccttctggat

SEQ ID NO: 40071 - DNA, 15 bp, Homo sapiens
gaaaggccttctgga

SEQ ID NO: 40072 - DNA, 15 bp, Homo sapiens
agaaaggccttctgg

SEQ ID NO: 40073 - DNA, 15 bp, Homo sapiens
cagaaaggccttctg

SEQ ID NO: 40074 - DNA, 15 bp, Homo sapiens
gcagaaaggccttct

SEQ ID NO: 40075 - DNA, 15 bp, Homo sapiens
agcagaaaggccttc

SEQ ID NO: 40076 - DNA, 15 bp, Homo sapiens
cagcagaaaggcctt

SEQ ID NO: 40077 - DNA, 15 bp, Homo sapiens
tcagcagaaaggcct

SEQ ID NO: 40078 - DNA, 15 bp, Homo sapiens
gtcagcagaaaggcc

SEQ ID NO: 40079 - DNA, 15 bp, Homo sapiens
tgtcagcagaaaggc

SEQ ID NO: 40080 - DNA, 15 bp, Homo sapiens
ttgtcagcagaaagg

SEQ ID NO: 40081 - DNA, 15 bp, Homo sapiens
cttgtcagcagaaag

SEQ ID NO: 40082 - DNA, 15 bp, Homo sapiens
acttgtcagcagaaa

SEQ ID NO: 40083 - DNA, 15 bp, Homo sapiens
aacttgtcagcagaa

SEQ ID NO: 40084 - DNA, 15 bp, Homo sapiens
aaacttgtcagcaga

SEQ ID NO: 40085 - DNA, 15 bp, Homo sapiens
caaacttgtcagcag

SEQ ID NO: 40086 - DNA, 15 bp, Homo sapiens
tcaaacttgtcagca

SEQ ID NO: 40087 - DNA, 15 bp, Homo sapiens
ctcaaacttgtcagc

SEQ ID NO: 40088 - DNA, 15 bp, Homo sapiens
cctcaaacttgtcag

SEQ ID NO: 40089 - DNA, 15 bp, Homo sapiens
acctcaaacttgtca

SEQ ID NO: 40090 - DNA, 15 bp, Homo sapiens
cacctcaaacttgtc

SEQ ID NO: 40091 - DNA, 15 bp, Homo sapiens
acacctcaaacttgt

SEQ ID NO: 40092 - DNA, 15 bp, Homo sapiens
gacacctcaaacttg

SEQ ID NO: 40093 - DNA, 15 bp, Homo sapiens
agacacctcaaactt

SEQ ID NO: 40094 - DNA, 15 bp, Homo sapiens
cagacacctcaaact

SEQ ID NO: 40095 - DNA, 15 bp, Homo sapiens
gcagacacctcaaac

SEQ ID NO: 40096 - DNA, 15 bp, Homo sapiens
tgcagacacctcaaa

SEQ ID NO: 40097 - DNA, 15 bp, Homo sapiens
ctgcagacacctcaa

SEQ ID NO: 40098 - DNA, 15 bp, Homo sapiens
tctgcagacacctca

SEQ ID NO: 40099 - DNA, 15 bp, Homo sapiens
atctgcagacacctc

SEQ ID NO: 40100 - DNA, 15 bp, Homo sapiens
tatctgcagacacct

SEQ ID NO: 40101 - DNA, 15 bp, Homo sapiens
ctatctgcagacacc

SEQ ID NO: 40102 - DNA, 15 bp, Homo sapiens
actatctgcagacac

SEQ ID NO: 40103 - DNA, 15 bp, Homo sapiens
aactatctgcagaca

SEQ ID NO: 40104 - DNA, 15 bp, Homo sapiens
gaactatctgcagac

SEQ ID NO: 40105 - DNA, 15 bp, Homo sapiens
agaactatctgcaga

SEQ ID NO: 40106 - DNA, 15 bp, Homo sapiens
tagaactatctgcag

SEQ ID NO: 40107 - DNA, 15 bp, Homo sapiens
gtagaactatctgca

SEQ ID NO: 40108 - DNA, 15 bp, Homo sapiens
ggtagaactatctgc

SEQ ID NO: 40109 - DNA, 15 bp, Homo sapiens
tggtagaactatctg

SEQ ID NO: 40110 - DNA, 15 bp, Homo sapiens
ctggtagaactatct

SEQ ID NO: 40111 - DNA, 15 bp, Homo sapiens
actggtagaactatc

SEQ ID NO: 40112 - DNA, 15 bp, Homo sapiens
tactggtagaactat

SEQ ID NO: 40113 - DNA, 15 bp, Homo sapiens
ttactggtagaacta

SEQ ID NO: 40114 - DNA, 15 bp, Homo sapiens
tttactggtagaact

SEQ ID NO: 40115 - DNA, 15 bp, Homo sapiens
ttttactggtagaac

SEQ ID NO: 40116 - DNA, 15 bp, Homo sapiens
tttttactggtagaa

SEQ ID NO: 40117 - DNA, 15 bp, Homo sapiens
atttttactggtaga

SEQ ID NO: 40118 - DNA, 15 bp, Homo sapiens
tatttttactggtag

SEQ ID NO: 40119 - DNA, 15 bp, Homo sapiens
ttatttttactggta

SEQ ID NO: 40120 - DNA, 15 bp, Homo sapiens
tttatttttactggt

SEQ ID NO: 40121 - DNA, 15 bp, Homo sapiens
ctttatttttactgg

SEQ ID NO: 40122 - DNA, 15 bp, Homo sapiens
tctttatttttactg

SEQ ID NO: 40123 - DNA, 15 bp, Homo sapiens
ttctttatttttact

SEQ ID NO: 40124 - DNA, 15 bp, Homo sapiens
gttctttatttttac

SEQ ID NO: 40125 - DNA, 15 bp, Homo sapiens
ggttctttattttta

SEQ ID NO: 40126 - DNA, 15 bp, Homo sapiens
tggttctttattttt

SEQ ID NO: 40127 - DNA, 15 bp, Homo sapiens
ctggttctttatttt

SEQ ID NO: 40128 - DNA, 15 bp, Homo sapiens
cctggttctttattt

SEQ ID NO: 40129 - DNA, 15 bp, Homo sapiens
tcctggttctttatt

SEQ ID NO: 40130 - DNA, 15 bp, Homo sapiens
ctcctggttctttat

SEQ ID NO: 40131 - DNA, 15 bp, Homo sapiens
actcctggttcttta

SEQ ID NO: 40132 - DNA, 15 bp, Homo sapiens
cactcctggttcttt

SEQ ID NO: 40133 - DNA, 15 bp, Homo sapiens
ccactcctggttctt

SEQ ID NO: 40134 - DNA, 15 bp, Homo sapiens
tccactcctggttct

SEQ ID NO: 40135 - DNA, 15 bp, Homo sapiens
ttccactcctggttc

SEQ ID NO: 40136 - DNA, 15 bp, Homo sapiens
tttccactcctggtt

SEQ ID NO: 40137 - DNA, 15 bp, Homo sapiens
ctttccactcctggt

SEQ ID NO: 40138 - DNA, 15 bp, Homo sapiens
cctttccactcctgg

SEQ ID NO: 40139 - DNA, 15 bp, Homo sapiens
acctttccactcctg

SEQ ID NO: 40140 - DNA, 15 bp, Homo sapiens
tacctttccactcct

SEQ ID NO: 40141 - DNA, 15 bp, Homo sapiens
ttacctttccactcc

SEQ ID NO: 40142 - DNA, 15 bp, Homo sapiens
cttacctttccactc

SEQ ID NO: 40143 - DNA, 15 bp, Homo sapiens
tcttacctttccact

SEQ ID NO: 40144 - DNA, 15 bp, Homo sapiens
ttcttacctttccac

SEQ ID NO: 40145 - DNA, 15 bp, Homo sapiens
tttcttacctttcca

SEQ ID NO: 40146 - DNA, 15 bp, Homo sapiens
gtttcttacctttcc

SEQ ID NO: 40147 - DNA, 15 bp, Homo sapiens
tgtttcttacctttc

SEQ ID NO: 40148 - DNA, 15 bp, Homo sapiens
atgtttcttaccttt

SEQ ID NO: 40149 - DNA, 15 bp, Homo sapiens
gatgtttcttacctt

SEQ ID NO: 40150 - DNA, 15 bp, Homo sapiens
tgatgtttcttacct

SEQ ID NO: 40151 - DNA, 15 bp, Homo sapiens
ttgatgtttcttacc

SEQ ID NO: 40152 - DNA, 15 bp, Homo sapiens
attgatgtttcttac

SEQ ID NO: 40153 - DNA, 15 bp, Homo sapiens
cattgatgtttctta

SEQ ID NO: 40154 - DNA, 15 bp, Homo sapiens
acattgatgtttctt

SEQ ID NO: 40155 - DNA, 15 bp, Homo sapiens
tacattgatgtttct

SEQ ID NO: 40156 - DNA, 15 bp, Homo sapiens
ttacattgatgtttc

SEQ ID NO: 40157 - DNA, 15 bp, Homo sapiens
tttacattgatgttt

SEQ ID NO: 40158 - DNA, 15 bp, Homo sapiens
ctttacattgatgtt

SEQ ID NO: 40159 - DNA, 15 bp, Homo sapiens
tctttacattgatgt

SEQ ID NO: 40160 - DNA, 15 bp, Homo sapiens
atctttacattgatg

SEQ ID NO: 40161 - DNA, 15 bp, Homo sapiens
catctttacattgat

SEQ ID NO: 40162 - DNA, 15 bp, Homo sapiens
gcatctttacattga

SEQ ID NO: 40163 - DNA, 15 bp, Homo sapiens
agcatctttacattg

SEQ ID NO: 40164 - DNA, 15 bp, Homo sapiens
cagcatctttacatt

SEQ ID NO: 40165 - DNA, 15 bp, Homo sapiens
acagcatctttacat

SEQ ID NO: 40166 - DNA, 15 bp, Homo sapiens
cacagcatctttaca

SEQ ID NO: 40167 - DNA, 15 bp, Homo sapiens
ccacagcatctttac

SEQ ID NO: 40168 - DNA, 15 bp, Homo sapiens
accacagcatcttta

SEQ ID NO: 40169 - DNA, 15 bp, Homo sapiens
taccacagcatcttt

SEQ ID NO: 40170 - DNA, 15 bp, Homo sapiens
ataccacagcatctt

SEQ ID NO: 40171 - DNA, 15 bp, Homo sapiens
gataccacagcatct

SEQ ID NO: 40172 - DNA, 15 bp, Homo sapiens
agataccacagcatc

SEQ ID NO: 40173 - DNA, 15 bp, Homo sapiens
cagataccacagcat

SEQ ID NO: 40174 - DNA, 15 bp, Homo sapiens
tcagataccacagca

SEQ ID NO: 40175 - DNA, 15 bp, Homo sapiens
gtcagataccacagc

SEQ ID NO: 40176 - DNA, 15 bp, Homo sapiens
tgtcagataccacag

SEQ ID NO: 40177 - DNA, 15 bp, Homo sapiens
atgtcagataccaca

SEQ ID NO: 40178 - DNA, 15 bp, Homo sapiens
gatgtcagataccac

SEQ ID NO: 40179 - DNA, 15 bp, Homo sapiens
agatgtcagatacca

SEQ ID NO: 40180 - DNA, 15 bp, Homo sapiens
aagatgtcagatacc

SEQ ID NO: 40181 - DNA, 15 bp, Homo sapiens
aaagatgtcagatac

SEQ ID NO: 40182 - DNA, 15 bp, Homo sapiens
taaagatgtcagata

SEQ ID NO: 40183 - DNA, 15 bp, Homo sapiens
ataaagatgtcagat

SEQ ID NO: 40184 - DNA, 15 bp, Homo sapiens
aataaagatgtcaga

SEQ ID NO: 40185 - DNA, 15 bp, Homo sapiens
aaataaagatgtcag

SEQ ID NO: 40186 - DNA, 15 bp, Homo sapiens
taaataaagatgtca

SEQ ID NO: 40187 - DNA, 15 bp, Homo sapiens
ataaataaagatgtc

SEQ ID NO: 40188 - DNA, 15 bp, Homo sapiens
tataaataaagatgt

SEQ ID NO: 40189 - DNA, 15 bp, Homo sapiens
atataaataaagatg

SEQ ID NO: 40190 - DNA, 15 bp, Homo sapiens
aatataaataaagat

SEQ ID NO: 40191 - DNA, 15 bp, Homo sapiens
caatataaataaaga

SEQ ID NO: 40192 - DNA, 15 bp, Homo sapiens
tcaatataaataaag

SEQ ID NO: 40193 - DNA, 15 bp, Homo sapiens
ttcaatataaataaa

SEQ ID NO: 40194 - DNA, 15 bp, Homo sapiens
gttcaatataaataa

SEQ ID NO: 40195 - DNA, 15 bp, Homo sapiens
agttcaatataaata

SEQ ID NO: 40196 - DNA, 15 bp, Homo sapiens
gagttcaatataaat

SEQ ID NO: 40197 - DNA, 15 bp, Homo sapiens
agagttcaatataaa

SEQ ID NO: 40198 - DNA, 15 bp, Homo sapiens
cagagttcaatataa

SEQ ID NO: 40199 - DNA, 15 bp, Homo sapiens
tcagagttcaatata

SEQ ID NO: 40200 - DNA, 15 bp, Homo sapiens
atcagagttcaatat

SEQ ID NO: 40201 - DNA, 15 bp, Homo sapiens
aatcagagttcaata

SEQ ID NO: 40202 - DNA, 15 bp, Homo sapiens
caatcagagttcaat

SEQ ID NO: 40203 - DNA, 15 bp, Homo sapiens
acaatcagagttcaa

SEQ ID NO: 40204 - DNA, 15 bp, Homo sapiens
aacaatcagagttca

SEQ ID NO: 40205 - DNA, 15 bp, Homo sapiens
taacaatcagagttc

SEQ ID NO: 40206 - DNA, 15 bp, Homo sapiens
ttaacaatcagagtt

SEQ ID NO: 40207 - DNA, 15 bp, Homo sapiens
attaacaatcagagt

SEQ ID NO: 40208 - DNA, 15 bp, Homo sapiens
aattaacaatcagag

SEQ ID NO: 40209 - DNA, 15 bp, Homo sapiens
aaattaacaatcaga

SEQ ID NO: 40210 - DNA, 15 bp, Homo sapiens
aaaattaacaatcag

SEQ ID NO: 40211 - DNA, 15 bp, Homo sapiens
aaaaattaacaatca

SEQ ID NO: 40212 - DNA, 15 bp, Homo sapiens
aaaaaattaacaatc

SEQ ID NO: 40213 - DNA, 15 bp, Homo sapiens
aaaaaaattaacaat

SEQ ID NO: 40214 - DNA, 15 bp, Homo sapiens
gaaaaaaattaacaa

SEQ ID NO: 40215 - DNA, 15 bp, Homo sapiens
tgaaaaaaattaaca

SEQ ID NO: 40216 - DNA, 15 bp, Homo sapiens
gtgaaaaaaattaac

SEQ ID NO: 40217 - DNA, 15 bp, Homo sapiens
ggtgaaaaaaattaa

SEQ ID NO: 40218 - DNA, 15 bp, Homo sapiens
tggtgaaaaaaatta

SEQ ID NO: 40219 - DNA, 15 bp, Homo sapiens
atggtgaaaaaaatt

SEQ ID NO: 40220 - DNA, 15 bp, Homo sapiens
tatggtgaaaaaaat

SEQ ID NO: 40221 - DNA, 15 bp, Homo sapiens
gtatggtgaaaaaaa

SEQ ID NO: 40222 - DNA, 15 bp, Homo sapiens
agtatggtgaaaaaa

SEQ ID NO: 40223 - DNA, 15 bp, Homo sapiens
aagtatggtgaaaaa

SEQ ID NO: 40224 - DNA, 15 bp, Homo sapiens
aaagtatggtgaaaa

SEQ ID NO: 40225 - DNA, 15 bp, Homo sapiens
gaaagtatggtgaaa

SEQ ID NO: 40226 - DNA, 15 bp, Homo sapiens
agaaagtatggtgaa

SEQ ID NO: 40227 - DNA, 15 bp, Homo sapiens
gagaaagtatggtga

SEQ ID NO: 40228 - DNA, 15 bp, Homo sapiens
ggagaaagtatggtg

SEQ ID NO: 40229 - DNA, 15 bp, Homo sapiens
tggagaaagtatggt

SEQ ID NO: 40230 - DNA, 15 bp, Homo sapiens
ctggagaaagtatgg

SEQ ID NO: 40231 - DNA, 15 bp, Homo sapiens
actggagaaagtatg

SEQ ID NO: 40232 - DNA, 15 bp, Homo sapiens
aactggagaaagtat

SEQ ID NO: 40233 - DNA, 15 bp, Homo sapiens
aaactggagaaagta

SEQ ID NO: 40234 - DNA, 15 bp, Homo sapiens
aaaactggagaaagt

SEQ ID NO: 40235 - DNA, 15 bp, Homo sapiens
aaaaactggagaaag

SEQ ID NO: 40236 - DNA, 15 bp, Homo sapiens
aaaaaactggagaaa

SEQ ID NO: 40237 - DNA, 15 bp, Homo sapiens
caaaaaactggagaa

SEQ ID NO: 40238 - DNA, 15 bp, Homo sapiens
gcaaaaaactggaga

SEQ ID NO: 40239 - DNA, 15 bp, Homo sapiens
tgcaaaaaactggag

SEQ ID NO: 40240 - DNA, 15 bp, Homo sapiens
atgcaaaaaactgga

SEQ ID NO: 40241 - DNA, 15 bp, Homo sapiens
tatgcaaaaaactgg

SEQ ID NO: 40242 - DNA, 15 bp, Homo sapiens
gtatgcaaaaaactg

SEQ ID NO: 40243 - DNA, 15 bp, Homo sapiens
tgtatgcaaaaaact

SEQ ID NO: 40244 - DNA, 15 bp, Homo sapiens
ctgtatgcaaaaaac

SEQ ID NO: 40245 - DNA, 15 bp, Homo sapiens
cctgtatgcaaaaaa

SEQ ID NO: 40246 - DNA, 15 bp, Homo sapiens
gcctgtatgcaaaaa

SEQ ID NO: 40247 - DNA, 15 bp, Homo sapiens
tgcctgtatgcaaaa

SEQ ID NO: 40248 - DNA, 15 bp, Homo sapiens
atgcctgtatgcaaa

SEQ ID NO: 40249 - DNA, 15 bp, Homo sapiens
aatgcctgtatgcaa

SEQ ID NO: 40250 - DNA, 15 bp, Homo sapiens
aaatgcctgtatgca

SEQ ID NO: 40251 - DNA, 15 bp, Homo sapiens
taaatgcctgtatgc

SEQ ID NO: 40252 - DNA, 15 bp, Homo sapiens
ataaatgcctgtatg

SEQ ID NO: 40253 - DNA, 15 bp, Homo sapiens
tataaatgcctgtat

SEQ ID NO: 40254 - DNA, 15 bp, Homo sapiens
gtataaatgcctgta

SEQ ID NO: 40255 - DNA, 15 bp, Homo sapiens
tgtataaatgcctgt

SEQ ID NO: 40256 - DNA, 15 bp, Homo sapiens
gtgtataaatgcctg

SEQ ID NO: 40257 - DNA, 15 bp, Homo sapiens
agtgtataaatgcct

SEQ ID NO: 40258 - DNA, 15 bp, Homo sapiens
aagtgtataaatgcc

SEQ ID NO: 40259 - DNA, 15 bp, Homo sapiens
aaagtgtataaatgc

SEQ ID NO: 40260 - DNA, 15 bp, Homo sapiens
aaaagtgtataaatg

SEQ ID NO: 40261 - DNA, 15 bp, Homo sapiens
taaaagtgtataaat

SEQ ID NO: 40262 - DNA, 15 bp, Homo sapiens
ataaaagtgtataaa

SEQ ID NO: 40263 - DNA, 15 bp, Homo sapiens
aataaaagtgtataa

SEQ ID NO: 40264 - DNA, 15 bp, Homo sapiens
caataaaagtgtata

SEQ ID NO: 40265 - DNA, 15 bp, Homo sapiens
gcaataaaagtgtat

SEQ ID NO: 40266 - DNA, 15 bp, Homo sapiens
agcaataaaagtgta

SEQ ID NO: 40267 - DNA, 15 bp, Homo sapiens
gagcaataaaagtgt

SEQ ID NO: 40268 - DNA, 15 bp, Homo sapiens
agagcaataaaagtg

SEQ ID NO: 40269 - DNA, 15 bp, Homo sapiens
tagagcaataaaagt

SEQ ID NO: 40270 - DNA, 15 bp, Homo sapiens
ctagagcaataaaag

SEQ ID NO: 40271 - DNA, 15 bp, Homo sapiens
cctagagcaataaaa

SEQ ID NO: 40272 - DNA, 15 bp, Homo sapiens
tcctagagcaataaa

SEQ ID NO: 40273 - DNA, 15 bp, Homo sapiens
atcctagagcaataa

SEQ ID NO: 40274 - DNA, 15 bp, Homo sapiens
tatcctagagcaata

SEQ ID NO: 40275 - DNA, 15 bp, Homo sapiens
gtatcctagagcaat

SEQ ID NO: 40276 - DNA, 15 bp, Homo sapiens
agtatcctagagcaa

SEQ ID NO: 40277 - DNA, 15 bp, Homo sapiens
aagtatcctagagca

SEQ ID NO: 40278 - DNA, 15 bp, Homo sapiens
gaagtatcctagagc

SEQ ID NO: 40279 - DNA, 15 bp, Homo sapiens
agaagtatcctagag

SEQ ID NO: 40280 - DNA, 15 bp, Homo sapiens
aagaagtatcctaga

SEQ ID NO: 40281 - DNA, 15 bp, Homo sapiens
aaagaagtatcctag

SEQ ID NO: 40282 - DNA, 15 bp, Homo sapiens
aaaagaagtatccta

SEQ ID NO: 40283 - DNA, 15 bp, Homo sapiens
caaaagaagtatcct

SEQ ID NO: 40284 - DNA, 15 bp, Homo sapiens
acaaaagaagtatcc

SEQ ID NO: 40285 - DNA, 15 bp, Homo sapiens
aacaaaagaagtatc

SEQ ID NO: 40286 - DNA, 15 bp, Homo sapiens
aaacaaaagaagtat

SEQ ID NO: 40287 - DNA, 15 bp, Homo sapiens
taaacaaaagaagta

SEQ ID NO: 40288 - DNA, 15 bp, Homo sapiens
ttaaacaaaagaagt

SEQ ID NO: 40289 - DNA, 15 bp, Homo sapiens
attaaacaaaagaag

SEQ ID NO: 40290 - DNA, 15 bp, Homo sapiens
gattaaacaaaagaa

SEQ ID NO: 40291 - DNA, 15 bp, Homo sapiens
ggattaaacaaaaga

SEQ ID NO: 40292 - DNA, 15 bp, Homo sapiens
aggattaaacaaaag

SEQ ID NO: 40293 - DNA, 15 bp, Homo sapiens
taggattaaacaaaa

SEQ ID NO: 40294 - DNA, 15 bp, Homo sapiens
ataggattaaacaaa

SEQ ID NO: 40295 - DNA, 15 bp, Homo sapiens
tataggattaaacaa

SEQ ID NO: 40296 - DNA, 15 bp, Homo sapiens
atataggattaaaca

SEQ ID NO: 40297 - DNA, 15 bp, Homo sapiens
tatataggattaaac

SEQ ID NO: 40298 - DNA, 15 bp, Homo sapiens
ctatataggattaaa

SEQ ID NO: 40299 - DNA, 15 bp, Homo sapiens
cctatataggattaa

SEQ ID NO: 40300 - DNA, 15 bp, Homo sapiens
acctatataggatta

SEQ ID NO: 40301 - DNA, 15 bp, Homo sapiens
aacctatataggatt

SEQ ID NO: 40302 - DNA, 15 bp, Homo sapiens
aaacctatataggat

SEQ ID NO: 40303 - DNA, 15 bp, Homo sapiens
aaaacctatatagga

SEQ ID NO: 40304 - DNA, 15 bp, Homo sapiens
aaaaacctatatagg

SEQ ID NO: 40305 - DNA, 15 bp, Homo sapiens
aaaaaacctatatag

SEQ ID NO: 40306 - DNA, 15 bp, Homo sapiens
caaaaaacctatata

SEQ ID NO: 40307 - DNA, 15 bp, Homo sapiens
tcaaaaaacctatat

SEQ ID NO: 40308 - DNA, 15 bp, Homo sapiens
ttcaaaaaacctata

SEQ ID NO: 40309 - DNA, 15 bp, Homo sapiens
gttcaaaaaacctat

SEQ ID NO: 40310 - DNA, 15 bp, Homo sapiens
ggttcaaaaaaccta

SEQ ID NO: 40311 - DNA, 15 bp, Homo sapiens
aggttcaaaaaacct

SEQ ID NO: 40312 - DNA, 15 bp, Homo sapiens
taggttcaaaaaacc

SEQ ID NO: 40313 - DNA, 15 bp, Homo sapiens
ataggttcaaaaaac

SEQ ID NO: 40314 - DNA, 15 bp, Homo sapiens
tataggttcaaaaaa

SEQ ID NO: 40315 - DNA, 15 bp, Homo sapiens
ttataggttcaaaaa

SEQ ID NO: 40316 - DNA, 15 bp, Homo sapiens
gttataggttcaaaa

SEQ ID NO: 40317 - DNA, 15 bp, Homo sapiens
tgttataggttcaaa

SEQ ID NO: 40318 - DNA, 15 bp, Homo sapiens
atgttataggttcaa

SEQ ID NO: 40319 - DNA, 15 bp, Homo sapiens
tatgttataggttca

SEQ ID NO: 40320 - DNA, 15 bp, Homo sapiens
ttatgttataggttc

SEQ ID NO: 40321 - DNA, 15 bp, Homo sapiens
cttatgttataggtt

SEQ ID NO: 40322 - DNA, 15 bp, Homo sapiens
gcttatgttataggt

SEQ ID NO: 40323 - DNA, 15 bp, Homo sapiens
agcttatgttatagg

SEQ ID NO: 40324 - DNA, 15 bp, Homo sapiens
tagcttatgttatag

SEQ ID NO: 40325 - DNA, 15 bp, Homo sapiens
gtagcttatgttata

SEQ ID NO: 40326 - DNA, 15 bp, Homo sapiens
tgtagcttatgttat

SEQ ID NO: 40327 - DNA, 15 bp, Homo sapiens
ttgtagcttatgtta

SEQ ID NO: 40328 - DNA, 15 bp, Homo sapiens
gttgtagcttatgtt

SEQ ID NO: 40329 - DNA, 15 bp, Homo sapiens
tgttgtagcttatgt

SEQ ID NO: 40330 - DNA, 15 bp, Homo sapiens
atgttgtagcttatg

SEQ ID NO: 40331 - DNA, 15 bp, Homo sapiens
catgttgtagcttat

SEQ ID NO: 40332 - DNA, 15 bp, Homo sapiens
tcatgttgtagctta

SEQ ID NO: 40333 - DNA, 15 bp, Homo sapiens
ctcatgttgtagctt

SEQ ID NO: 40334 - DNA, 15 bp, Homo sapiens
tctcatgttgtagct

SEQ ID NO: 40335 - DNA, 15 bp, Homo sapiens
ttctcatgttgtagc

SEQ ID NO: 40336 - DNA, 15 bp, Homo sapiens
tttctcatgttgtag

SEQ ID NO: 40337 - DNA, 15 bp, Homo sapiens
atttctcatgttgta

SEQ ID NO: 40338 - DNA, 15 bp, Homo sapiens
catttctcatgttgt

SEQ ID NO: 40339 - DNA, 15 bp, Homo sapiens
acatttctcatgttg

SEQ ID NO: 40340 - DNA, 15 bp, Homo sapiens
cacatttctcatgtt

SEQ ID NO: 40341 - DNA, 15 bp, Homo sapiens
gcacatttctcatgt

SEQ ID NO: 40342 - DNA, 15 bp, Homo sapiens
cgcacatttctcatg

SEQ ID NO: 40343 - DNA, 15 bp, Homo sapiens
ccgcacatttctcat

SEQ ID NO: 40344 - DNA, 15 bp, Homo sapiens
accgcacatttctca

SEQ ID NO: 40345 - DNA, 15 bp, Homo sapiens
aaccgcacatttctc

SEQ ID NO: 40346 - DNA, 15 bp, Homo sapiens
taaccgcacatttct

SEQ ID NO: 40347 - DNA, 15 bp, Homo sapiens
ctaaccgcacatttc

SEQ ID NO: 40348 - DNA, 15 bp, Homo sapiens
tctaaccgcacattt

SEQ ID NO: 40349 - DNA, 15 bp, Homo sapiens
atctaaccgcacatt

SEQ ID NO: 40350 - DNA, 15 bp, Homo sapiens
tatctaaccgcacat

SEQ ID NO: 40351 - DNA, 15 bp, Homo sapiens
ctatctaaccgcaca

SEQ ID NO: 40352 - DNA, 15 bp, Homo sapiens
tctatctaaccgcac

SEQ ID NO: 40353 - DNA, 15 bp, Homo sapiens
atctatctaaccgca

SEQ ID NO: 40354 - DNA, 15 bp, Homo sapiens
tatctatctaaccgc

SEQ ID NO: 40355 - DNA, 15 bp, Homo sapiens
atatctatctaaccg

SEQ ID NO: 40356 - DNA, 15 bp, Homo sapiens
catatctatctaacc

SEQ ID NO: 40357 - DNA, 15 bp, Homo sapiens
acatatctatctaac

SEQ ID NO: 40358 - DNA, 15 bp, Homo sapiens
gacatatctatctaa

SEQ ID NO: 40359 - DNA, 15 bp, Homo sapiens
ggacatatctatcta

SEQ ID NO: 40360 - DNA, 15 bp, Homo sapiens
gggacatatctatct

SEQ ID NO: 40361 - DNA, 15 bp, Homo sapiens
agggacatatctatc

SEQ ID NO: 40362 - DNA, 15 bp, Homo sapiens
aagggacatatctat

SEQ ID NO: 40363 - DNA, 15 bp, Homo sapiens
gaagggacatatcta

SEQ ID NO: 40364 - DNA, 15 bp, Homo sapiens
agaagggacatatct

SEQ ID NO: 40365 - DNA, 15 bp, Homo sapiens
cagaagggacatatc

SEQ ID NO: 40366 - DNA, 15 bp, Homo sapiens
tcagaagggacatat

SEQ ID NO: 40367 - DNA, 15 bp, Homo sapiens
ttcagaagggacata

SEQ ID NO: 40368 - DNA, 15 bp, Homo sapiens
cttcagaagggacat

SEQ ID NO: 40369 - DNA, 15 bp, Homo sapiens
ccttcagaagggaca

SEQ ID NO: 40370 - DNA, 15 bp, Homo sapiens
accttcagaagggac

SEQ ID NO: 40371 - DNA, 15 bp, Homo sapiens
gaccttcagaaggga

SEQ ID NO: 40372 - DNA, 15 bp, Homo sapiens
tgaccttcagaaggg

SEQ ID NO: 40373 - DNA, 15 bp, Homo sapiens
ctgaccttcagaagg

SEQ ID NO: 40374 - DNA, 15 bp, Homo sapiens
tctgaccttcagaag

SEQ ID NO: 40375 - DNA, 15 bp, Homo sapiens
ttctgaccttcagaa

SEQ ID NO: 40376 - DNA, 15 bp, Homo sapiens
tttctgaccttcaga

SEQ ID NO: 40377 - DNA, 15 bp, Homo sapiens
ttttctgaccttcag

SEQ ID NO: 40378 - DNA, 15 bp, Homo sapiens
tttttctgaccttca

SEQ ID NO: 40379 - DNA, 15 bp, Homo sapiens
ttttttctgaccttc

SEQ ID NO: 40380 - DNA, 15 bp, Homo sapiens
tttttttctgacctt

SEQ ID NO: 40381 - DNA, 15 bp, Homo sapiens
atttttttctgacct

SEQ ID NO: 40382 - DNA, 15 bp, Homo sapiens
tatttttttctgacc

SEQ ID NO: 40383 - DNA, 15 bp, Homo sapiens
atatttttttctgac

SEQ ID NO: 40384 - DNA, 15 bp, Homo sapiens
tatatttttttctga

SEQ ID NO: 40385 - DNA, 15 bp, Homo sapiens
ttatatttttttctg

SEQ ID NO: 40386 - DNA, 15 bp, Homo sapiens
attatatttttttct

SEQ ID NO: 40387 - DNA, 15 bp, Homo sapiens
cattatatttttttc

SEQ ID NO: 40388 - DNA, 15 bp, Homo sapiens
ccattatattttttt

SEQ ID NO: 40389 - DNA, 15 bp, Homo sapiens
tccattatatttttt

SEQ ID NO: 40390 - DNA, 15 bp, Homo sapiens
ctccattatattttt

SEQ ID NO: 40391 - DNA, 15 bp, Homo sapiens
cctccattatatttt

SEQ ID NO: 40392 - DNA, 15 bp, Homo sapiens
acctccattatattt

SEQ ID NO: 40393 - DNA, 15 bp, Homo sapiens
tacctccattatatt

SEQ ID NO: 40394 - DNA, 15 bp, Homo sapiens
ttacctccattatat

SEQ ID NO: 40395 - DNA, 15 bp, Homo sapiens
tttacctccattata

SEQ ID NO: 40396 - DNA, 15 bp, Homo sapiens
ttttacctccattat

SEQ ID NO: 40397 - DNA, 15 bp, Homo sapiens
gttttacctccatta

SEQ ID NO: 40398 - DNA, 15 bp, Homo sapiens
ggttttacctccatt

SEQ ID NO: 40399 - DNA, 15 bp, Homo sapiens
aggttttacctccat

SEQ ID NO: 40400 - DNA, 15 bp, Homo sapiens
caggttttacctcca

SEQ ID NO: 40401 - DNA, 15 bp, Homo sapiens
tcaggttttacctcc

SEQ ID NO: 40402 - DNA, 15 bp, Homo sapiens
ttcaggttttacctc

SEQ ID NO: 40403 - DNA, 15 bp, Homo sapiens
gttcaggttttacct

SEQ ID NO: 40404 - DNA, 15 bp, Homo sapiens
tgttcaggttttacc

SEQ ID NO: 40405 - DNA, 15 bp, Homo sapiens
ttgttcaggttttac

SEQ ID NO: 40406 - DNA, 15 bp, Homo sapiens
cttgttcaggtttta

SEQ ID NO: 40407 - DNA, 15 bp, Homo sapiens
gcttgttcaggtttt

SEQ ID NO: 40408 - DNA, 15 bp, Homo sapiens
agcttgttcaggttt

SEQ ID NO: 40409 - DNA, 15 bp, Homo sapiens
aagcttgttcaggtt

SEQ ID NO: 40410 - DNA, 15 bp, Homo sapiens
caagcttgttcaggt

SEQ ID NO: 40411 - DNA, 15 bp, Homo sapiens
ccaagcttgttcagg

SEQ ID NO: 40412 - DNA, 15 bp, Homo sapiens
tccaagcttgttcag

SEQ ID NO: 40413 - DNA, 15 bp, Homo sapiens
ttccaagcttgttca

SEQ ID NO: 40414 - DNA, 15 bp, Homo sapiens
tttccaagcttgttc

SEQ ID NO: 40415 - DNA, 15 bp, Homo sapiens
gtttccaagcttgtt

SEQ ID NO: 40416 - DNA, 15 bp, Homo sapiens
agtttccaagcttgt

SEQ ID NO: 40417 - DNA, 15 bp, Homo sapiens
cagtttccaagcttg

SEQ ID NO: 40418 - DNA, 15 bp, Homo sapiens
tcagtttccaagctt

SEQ ID NO: 40419 - DNA, 15 bp, Homo sapiens
atcagtttccaagct

SEQ ID NO: 40420 - DNA, 15 bp, Homo sapiens
catcagtttccaagc

SEQ ID NO: 40421 - DNA, 15 bp, Homo sapiens
ccatcagtttccaag

SEQ ID NO: 40422 - DNA, 15 bp, Homo sapiens
accatcagtttccaa

SEQ ID NO: 40423 - DNA, 15 bp, Homo sapiens
taccatcagtttcca

SEQ ID NO: 40424 - DNA, 15 bp, Homo sapiens
ctaccatcagtttcc

SEQ ID NO: 40425 - DNA, 15 bp, Homo sapiens
tctaccatcagtttc

SEQ ID NO: 40426 - DNA, 15 bp, Homo sapiens
gtctaccatcagttt

SEQ ID NO: 40427 - DNA, 15 bp, Homo sapiens
agtctaccatcagtt

SEQ ID NO: 40428 - DNA, 15 bp, Homo sapiens
aagtctaccatcagt

SEQ ID NO: 40429 - DNA, 15 bp, Homo sapiens
gaagtctaccatcag

SEQ ID NO: 40430 - DNA, 15 bp, Homo sapiens
agaagtctaccatca

SEQ ID NO: 40431 - DNA, 15 bp, Homo sapiens
aagaagtctaccatc

SEQ ID NO: 40432 - DNA, 15 bp, Homo sapiens
gaagaagtctaccat

SEQ ID NO: 40433 - DNA, 15 bp, Homo sapiens
tgaagaagtctacca

SEQ ID NO: 40434 - DNA, 15 bp, Homo sapiens
ttgaagaagtctacc

SEQ ID NO: 40435 - DNA, 15 bp, Homo sapiens
cttgaagaagtctac

SEQ ID NO: 40436 - DNA, 15 bp, Homo sapiens
ccttgaagaagtcta

SEQ ID NO: 40437 - DNA, 15 bp, Homo sapiens
gccttgaagaagtct

SEQ ID NO: 40438 - DNA, 15 bp, Homo sapiens
tgccttgaagaagtc

SEQ ID NO: 40439 - DNA, 15 bp, Homo sapiens
ctgccttgaagaagt

SEQ ID NO: 40440 - DNA, 15 bp, Homo sapiens
gctgccttgaagaag

SEQ ID NO: 40441 - DNA, 15 bp, Homo sapiens
ggctgccttgaagaa

SEQ ID NO: 40442 - DNA, 15 bp, Homo sapiens
gggctgccttgaaga

SEQ ID NO: 40443 - DNA, 15 bp, Homo sapiens
agggctgccttgaag

SEQ ID NO: 40444 - DNA, 15 bp, Homo sapiens
aagggctgccttgaa

SEQ ID NO: 40445 - DNA, 15 bp, Homo sapiens
caagggctgccttga

SEQ ID NO: 40446 - DNA, 15 bp, Homo sapiens
gcaagggctgccttg

SEQ ID NO: 40447 - DNA, 15 bp, Homo sapiens
ggcaagggctgcctt

SEQ ID NO: 40448 - DNA, 15 bp, Homo sapiens
gggcaagggctgcct

SEQ ID NO: 40449 - DNA, 15 bp, Homo sapiens
agggcaagggctgcc

SEQ ID NO: 40450 - DNA, 15 bp, Homo sapiens
tagggcaagggctgc

SEQ ID NO: 40451 - DNA, 15 bp, Homo sapiens
ttagggcaagggctg

SEQ ID NO: 40452 - DNA, 15 bp, Homo sapiens
attagggcaagggct

SEQ ID NO: 40453 - DNA, 15 bp, Homo sapiens
aattagggcaagggc

SEQ ID NO: 40454 - DNA, 15 bp, Homo sapiens
taattagggcaaggg

SEQ ID NO: 40455 - DNA, 15 bp, Homo sapiens
ttaattagggcaagg

SEQ ID NO: 40456 - DNA, 15 bp, Homo sapiens
tttaattagggcaag

SEQ ID NO: 40457 - DNA, 15 bp, Homo sapiens
ttttaattagggcaa

SEQ ID NO: 40458 - DNA, 15 bp, Homo sapiens
attttaattagggca

SEQ ID NO: 40459 - DNA, 15 bp, Homo sapiens
aattttaattagggc

SEQ ID NO: 40460 - DNA, 15 bp, Homo sapiens
gaattttaattaggg

SEQ ID NO: 40461 - DNA, 15 bp, Homo sapiens
agaattttaattagg

SEQ ID NO: 40462 - DNA, 15 bp, Homo sapiens
aagaattttaattag

SEQ ID NO: 40463 - DNA, 15 bp, Homo sapiens
caagaattttaatta

SEQ ID NO: 40464 - DNA, 15 bp, Homo sapiens
acaagaattttaatt

SEQ ID NO: 40465 - DNA, 15 bp, Homo sapiens
gacaagaattttaat

SEQ ID NO: 40466 - DNA, 15 bp, Homo sapiens
agacaagaattttaa

SEQ ID NO: 40467 - DNA, 15 bp, Homo sapiens
aagacaagaatttta

SEQ ID NO: 40468 - DNA, 15 bp, Homo sapiens
aaagacaagaatttt

SEQ ID NO: 40469 - DNA, 15 bp, Homo sapiens
gaaagacaagaattt

SEQ ID NO: 40470 - DNA, 15 bp, Homo sapiens
agaaagacaagaatt

SEQ ID NO: 40471 - DNA, 15 bp, Homo sapiens
tagaaagacaagaat

SEQ ID NO: 40472 - DNA, 15 bp, Homo sapiens
ctagaaagacaagaa

SEQ ID NO: 40473 - DNA, 15 bp, Homo sapiens
tctagaaagacaaga

SEQ ID NO: 40474 - DNA, 15 bp, Homo sapiens
ttctagaaagacaag

SEQ ID NO: 40475 - DNA, 15 bp, Homo sapiens
tttctagaaagacaa

SEQ ID NO: 40476 - DNA, 15 bp, Homo sapiens
ttttctagaaagaca

SEQ ID NO: 40477 - DNA, 15 bp, Homo sapiens
tttttctagaaagac

SEQ ID NO: 40478 - DNA, 15 bp, Homo sapiens
ctttttctagaaaga

SEQ ID NO: 40479 - DNA, 15 bp, Homo sapiens
actttttctagaaag

SEQ ID NO: 40480 - DNA, 15 bp, Homo sapiens
gactttttctagaaa

SEQ ID NO: 40481 - DNA, 15 bp, Homo sapiens
agactttttctagaa

SEQ ID NO: 40482 - DNA, 15 bp, Homo sapiens
tagactttttctaga

SEQ ID NO: 40483 - DNA, 15 bp, Homo sapiens
ctagactttttctag

SEQ ID NO: 40484 - DNA, 15 bp, Homo sapiens
gctagactttttcta

SEQ ID NO: 40485 - DNA, 15 bp, Homo sapiens
agctagactttttct

SEQ ID NO: 40486 - DNA, 15 bp, Homo sapiens
cagctagactttttc

SEQ ID NO: 40487 - DNA, 15 bp, Homo sapiens
acagctagacttttt

SEQ ID NO: 40488 - DNA, 15 bp, Homo sapiens
aacagctagactttt

SEQ ID NO: 40489 - DNA, 15 bp, Homo sapiens
caacagctagacttt

SEQ ID NO: 40490 - DNA, 15 bp, Homo sapiens
tcaacagctagactt

SEQ ID NO: 40491 - DNA, 15 bp, Homo sapiens
atcaacagctagact

SEQ ID NO: 40492 - DNA, 15 bp, Homo sapiens
aatcaacagctagac

SEQ ID NO: 40493 - DNA, 15 bp, Homo sapiens
aaatcaacagctaga

SEQ ID NO: 40494 - DNA, 15 bp, Homo sapiens
taaatcaacagctag

SEQ ID NO: 40495 - DNA, 15 bp, Homo sapiens
gtaaatcaacagcta

SEQ ID NO: 40496 - DNA, 15 bp, Homo sapiens
ggtaaatcaacagct

SEQ ID NO: 40497 - DNA, 15 bp, Homo sapiens
tggtaaatcaacagc

SEQ ID NO: 40498 - DNA, 15 bp, Homo sapiens
gtggtaaatcaacag

SEQ ID NO: 40499 - DNA, 15 bp, Homo sapiens
tgtggtaaatcaaca

SEQ ID NO: 40500 - DNA, 15 bp, Homo sapiens
ctgtggtaaatcaac

SEQ ID NO: 40501 - DNA, 15 bp, Homo sapiens
tctgtggtaaatcaa

SEQ ID NO: 40502 - DNA, 15 bp, Homo sapiens
ttctgtggtaaatca

SEQ ID NO: 40503 - DNA, 15 bp, Homo sapiens
tttctgtggtaaatc

SEQ ID NO: 40504 - DNA, 15 bp, Homo sapiens
ttttctgtggtaaat

SEQ ID NO: 40505 - DNA, 15 bp, Homo sapiens
attttctgtggtaaa

SEQ ID NO: 40506 - DNA, 15 bp, Homo sapiens
tattttctgtggtaa

SEQ ID NO: 40507 - DNA, 15 bp, Homo sapiens
ttattttctgtggta

SEQ ID NO: 40508 - DNA, 15 bp, Homo sapiens
attattttctgtggt

SEQ ID NO: 40509 - DNA, 15 bp, Homo sapiens
tattattttctgtgg

SEQ ID NO: 40510 - DNA, 15 bp, Homo sapiens
ttattattttctgtg

SEQ ID NO: 40511 - DNA, 15 bp, Homo sapiens
attattattttctgt

SEQ ID NO: 40512 - DNA, 15 bp, Homo sapiens
tattattattttctg

SEQ ID NO: 40513 - DNA, 15 bp, Homo sapiens
ttattattattttct

SEQ ID NO: 40514 - DNA, 15 bp, Homo sapiens
attattattattttc

SEQ ID NO: 40515 - DNA, 15 bp, Homo sapiens
tattattattatttt

SEQ ID NO: 40516 - DNA, 15 bp, Homo sapiens
ttattattattattt

SEQ ID NO: 40517 - DNA, 15 bp, Homo sapiens
attattattattatt

SEQ ID NO: 40518 - DNA, 15 bp, Homo sapiens
aattattattattat

SEQ ID NO: 40519 - DNA, 15 bp, Homo sapiens
taattattattatta

SEQ ID NO: 40520 - DNA, 15 bp, Homo sapiens
gtaattattattatt

SEQ ID NO: 40521 - DNA, 15 bp, Homo sapiens
agtaattattattat

SEQ ID NO: 40522 - DNA, 15 bp, Homo sapiens
tagtaattattatta

SEQ ID NO: 40523 - DNA, 15 bp, Homo sapiens
atagtaattattatt

SEQ ID NO: 40524 - DNA, 15 bp, Homo sapiens
aatagtaattattat

SEQ ID NO: 40525 - DNA, 15 bp, Homo sapiens
taatagtaattatta

SEQ ID NO: 40526 - DNA, 15 bp, Homo sapiens
ataatagtaattatt

SEQ ID NO: 40527 - DNA, 15 bp, Homo sapiens
aataatagtaattat

SEQ ID NO: 40528 - DNA, 15 bp, Homo sapiens
taataatagtaatta

SEQ ID NO: 40529 - DNA, 15 bp, Homo sapiens
ataataatagtaatt

SEQ ID NO: 40530 - DNA, 15 bp, Homo sapiens
aataataatagtaat

SEQ ID NO: 40531 - DNA, 15 bp, Homo sapiens
taataataatagtaa

SEQ ID NO: 40532 - DNA, 15 bp, Homo sapiens
ataataataatagta

SEQ ID NO: 40533 - DNA, 15 bp, Homo sapiens
aataataataatagt

SEQ ID NO: 40534 - DNA, 15 bp, Homo sapiens
aaataataataatag

SEQ ID NO: 40535 - DNA, 15 bp, Homo sapiens
aaaaataataataat

SEQ ID NO: 40536 - DNA, 15 bp, Homo sapiens
aaaaaataataataa

SEQ ID NO: 40537 - DNA, 15 bp, Homo sapiens
caaaaaataataata

SEQ ID NO: 40538 - DNA, 15 bp, Homo sapiens
tcaaaaaataataat

SEQ ID NO: 40539 - DNA, 15 bp, Homo sapiens
ctcaaaaaataataa

SEQ ID NO: 40540 - DNA, 15 bp, Homo sapiens
tctcaaaaaataata

SEQ ID NO: 40541 - DNA, 15 bp, Homo sapiens
gtctcaaaaaataat

SEQ ID NO: 40542 - DNA, 15 bp, Homo sapiens
tgtctcaaaaaataa

SEQ ID NO: 40543 - DNA, 15 bp, Homo sapiens
ctgtctcaaaaaata

SEQ ID NO: 40544 - DNA, 15 bp, Homo sapiens
cctgtctcaaaaaat

SEQ ID NO: 40545 - DNA, 15 bp, Homo sapiens
cgaccctgtctcaaa

SEQ ID NO: 40546 - DNA, 15 bp, Homo sapiens
gcgaccctgtctcaa

SEQ ID NO: 40547 - DNA, 15 bp, Homo sapiens
ggcgaccctgtctca

SEQ ID NO: 40548 - DNA, 15 bp, Homo sapiens
gggcgaccctgtctc

SEQ ID NO: 40549 - DNA, 15 bp, Homo sapiens
agggcgaccctgtct

SEQ ID NO: 40550 - DNA, 15 bp, Homo sapiens
cagggcgaccctgtc

SEQ ID NO: 40551 - DNA, 15 bp, Homo sapiens
acagggcgaccctgt

SEQ ID NO: 40552 - DNA, 15 bp, Homo sapiens
cacagggcgaccctg

SEQ ID NO: 40553 - DNA, 15 bp, Homo sapiens
acacagggcgaccct

SEQ ID NO: 40554 - DNA, 15 bp, Homo sapiens
gacacagggcgaccc

SEQ ID NO: 40555 - DNA, 15 bp, Homo sapiens
tgacacagggcgacc

SEQ ID NO: 40556 - DNA, 15 bp, Homo sapiens
gtgacacagggcgac

SEQ ID NO: 40557 - DNA, 15 bp, Homo sapiens
ggtgacacagggcga

SEQ ID NO: 40558 - DNA, 15 bp, Homo sapiens
aggtgacacagggcg

SEQ ID NO: 40559 - DNA, 15 bp, Homo sapiens
taggtgacacagggc

SEQ ID NO: 40560 - DNA, 15 bp, Homo sapiens
ctaggtgacacaggg

SEQ ID NO: 40561 - DNA, 15 bp, Homo sapiens
tctaggtgacacagg

SEQ ID NO: 40562 - DNA, 15 bp, Homo sapiens
atctaggtgacacag

SEQ ID NO: 40563 - DNA, 15 bp, Homo sapiens
aatctaggtgacaca

SEQ ID NO: 40564 - DNA, 15 bp, Homo sapiens
caatctaggtgacac

SEQ ID NO: 40565 - DNA, 15 bp, Homo sapiens
gcaatctaggtgaca

SEQ ID NO: 40566 - DNA, 15 bp, Homo sapiens
tgcaatctaggtgac

SEQ ID NO: 40567 - DNA, 15 bp, Homo sapiens
ctgcaatctaggtga

SEQ ID NO: 40568 - DNA, 15 bp, Homo sapiens
actgcaatctaggtg

SEQ ID NO: 40569 - DNA, 15 bp, Homo sapiens
cactgcaatctaggt

SEQ ID NO: 40570 - DNA, 15 bp, Homo sapiens
ccactgcaatctagg

SEQ ID NO: 40571 - DNA, 15 bp, Homo sapiens
accactgcaatctag

SEQ ID NO: 40572 - DNA, 15 bp, Homo sapiens
caccactgcaatcta

SEQ ID NO: 40573 - DNA, 15 bp, Homo sapiens
gcaccactgcaatct

SEQ ID NO: 40574 - DNA, 15 bp, Homo sapiens
tgcaccactgcaatc

SEQ ID NO: 40575 - DNA, 15 bp, Homo sapiens
ctgcaccactgcaat

SEQ ID NO: 40576 - DNA, 15 bp, Homo sapiens
actgcaccactgcaa

SEQ ID NO: 40577 - DNA, 15 bp, Homo sapiens
gactgcaccactgca

SEQ ID NO: 40578 - DNA, 15 bp, Homo sapiens
tgactgcaccactgc

SEQ ID NO: 40579 - DNA, 15 bp, Homo sapiens
atgactgcaccactg

SEQ ID NO: 40580 - DNA, 15 bp, Homo sapiens
catgactgcaccact

SEQ ID NO: 40581 - DNA, 15 bp, Homo sapiens
ccatgactgcaccac

SEQ ID NO: 40582 - DNA, 15 bp, Homo sapiens
gccatgactgcacca

SEQ ID NO: 40583 - DNA, 15 bp, Homo sapiens
agccatgactgcacc

SEQ ID NO: 40584 - DNA, 15 bp, Homo sapiens
gagccatgactgcac

SEQ ID NO: 40585 - DNA, 15 bp, Homo sapiens
tgagccatgactgca

SEQ ID NO: 40586 - DNA, 15 bp, Homo sapiens
gtgagccatgactgc

SEQ ID NO: 40587 - DNA, 15 bp, Homo sapiens
agtgagccatgactg

SEQ ID NO: 40588 - DNA, 15 bp, Homo sapiens
cagtgagccatgact

SEQ ID NO: 40589 - DNA, 15 bp, Homo sapiens
gcagtgagccatgac

SEQ ID NO: 40590 - DNA, 15 bp, Homo sapiens
tgcagtgagccatga

SEQ ID NO: 40591 - DNA, 15 bp, Homo sapiens
atgcagtgagccatg

SEQ ID NO: 40592 - DNA, 15 bp, Homo sapiens
gatgcagtgagccat

SEQ ID NO: 40593 - DNA, 15 bp, Homo sapiens
ggatgcagtgagcca

SEQ ID NO: 40594 - DNA, 15 bp, Homo sapiens
aggatgcagtgagcc

SEQ ID NO: 40595 - DNA, 15 bp, Homo sapiens
gaggatgcagtgagc

SEQ ID NO: 40596 - DNA, 15 bp, Homo sapiens
ggaggatgcagtgag

SEQ ID NO: 40597 - DNA, 15 bp, Homo sapiens
cggaggatgcagtga

SEQ ID NO: 40598 - DNA, 15 bp, Homo sapiens
acggaggatgcagtg

SEQ ID NO: 40599 - DNA, 15 bp, Homo sapiens
aacggaggatgcagt

SEQ ID NO: 40600 - DNA, 15 bp, Homo sapiens
aaacggaggatgcag

SEQ ID NO: 40601 - DNA, 15 bp, Homo sapiens
aaaacggaggatgca

SEQ ID NO: 40602 - DNA, 15 bp, Homo sapiens
aaaaacggaggatgc

SEQ ID NO: 40603 - DNA, 15 bp, Homo sapiens
gaaaaacggaggatg

SEQ ID NO: 40604 - DNA, 15 bp, Homo sapiens
tgaaaaacggaggat

SEQ ID NO: 40605 - DNA, 15 bp, Homo sapiens
ctgaaaaacggagga

SEQ ID NO: 40606 - DNA, 15 bp, Homo sapiens
cctgaaaaacggagg

SEQ ID NO: 40607 - DNA, 15 bp, Homo sapiens
gcctgaaaaacggag

SEQ ID NO: 40608 - DNA, 15 bp, Homo sapiens
agcctgaaaaacgga

SEQ ID NO: 40609 - DNA, 15 bp, Homo sapiens
gagcctgaaaaacgg

SEQ ID NO: 40610 - DNA, 15 bp, Homo sapiens
tgagcctgaaaaacg

SEQ ID NO: 40611 - DNA, 15 bp, Homo sapiens
ttgagcctgaaaaac

SEQ ID NO: 40612 - DNA, 15 bp, Homo sapiens
cttgagcctgaaaaa

SEQ ID NO: 40613 - DNA, 15 bp, Homo sapiens
gcttgagcctgaaaa

SEQ ID NO: 40614 - DNA, 15 bp, Homo sapiens
tgcttgagcctgaaa

SEQ ID NO: 40615 - DNA, 15 bp, Homo sapiens
ttgcttgagcctgaa

SEQ ID NO: 40616 - DNA, 15 bp, Homo sapiens
aaggtgggaggattg

SEQ ID NO: 40617 - DNA, 15 bp, Homo sapiens
taaggtgggaggatt

SEQ ID NO: 40618 - DNA, 15 bp, Homo sapiens
ctaaggtgggaggat

SEQ ID NO: 40619 - DNA, 15 bp, Homo sapiens
gctaaggtgggagga

SEQ ID NO: 40620 - DNA, 15 bp, Homo sapiens
ggctaaggtgggagg

SEQ ID NO: 40621 - DNA, 15 bp, Homo sapiens
aggctaaggtgggag

SEQ ID NO: 40622 - DNA, 15 bp, Homo sapiens
gaggctaaggtggga

SEQ ID NO: 40623 - DNA, 15 bp, Homo sapiens
ggaggctaaggtggg

SEQ ID NO: 40624 - DNA, 15 bp, Homo sapiens
aggaggctaaggtgg

SEQ ID NO: 40625 - DNA, 15 bp, Homo sapiens
caggaggctaaggtg

SEQ ID NO: 40626 - DNA, 15 bp, Homo sapiens
tcaggaggctaaggt

SEQ ID NO: 40627 - DNA, 15 bp, Homo sapiens
ctcaggaggctaagg

SEQ ID NO: 40628 - DNA, 15 bp, Homo sapiens
actcaggaggctaag

SEQ ID NO: 40629 - DNA, 15 bp, Homo sapiens
tactcaggaggctaa

SEQ ID NO: 40630 - DNA, 15 bp, Homo sapiens
ctactcaggaggcta

SEQ ID NO: 40631 - DNA, 15 bp, Homo sapiens
acccagctactcagg

SEQ ID NO: 40632 - DNA, 15 bp, Homo sapiens
gacccagctactcag

SEQ ID NO: 40633 - DNA, 15 bp, Homo sapiens
ggacccagctactca

SEQ ID NO: 40634 - DNA, 15 bp, Homo sapiens
tggacccagctactc

SEQ ID NO: 40635 - DNA, 15 bp, Homo sapiens
gtggacccagctact

SEQ ID NO: 40636 - DNA, 15 bp, Homo sapiens
tgtggacccagctac

SEQ ID NO: 40637 - DNA, 15 bp, Homo sapiens
ttgtggacccagcta

SEQ ID NO: 40638 - DNA, 15 bp, Homo sapiens
cttgtggacccagct

SEQ ID NO: 40639 - DNA, 15 bp, Homo sapiens
gcttgtggacccagc

SEQ ID NO: 40640 - DNA, 15 bp, Homo sapiens
tgcttgtggacccag

SEQ ID NO: 40641 - DNA, 15 bp, Homo sapiens
atgcttgtggaccca

SEQ ID NO: 40642 - DNA, 15 bp, Homo sapiens
catgcttgtggaccc

SEQ ID NO: 40643 - DNA, 15 bp, Homo sapiens
gcatgcttgtggacc

SEQ ID NO: 40644 - DNA, 15 bp, Homo sapiens
cgcatgcttgtggac

SEQ ID NO: 40645 - DNA, 15 bp, Homo sapiens
gcgcatgcttgtgga

SEQ ID NO: 40646 - DNA, 15 bp, Homo sapiens
ggcgcatgcttgtgg

SEQ ID NO: 40647 - DNA, 15 bp, Homo sapiens
tggcgcatgcttgtg

SEQ ID NO: 40648 - DNA, 15 bp, Homo sapiens
gtggcgcatgcttgt

SEQ ID NO: 40649 - DNA, 15 bp, Homo sapiens
ggtggcgcatgcttg

SEQ ID NO: 40650 - DNA, 15 bp, Homo sapiens
gggtggcgcatgctt

SEQ ID NO: 40651 - DNA, 15 bp, Homo sapiens
tgggtggcgcatgct

SEQ ID NO: 40652 - DNA, 15 bp, Homo sapiens
gtgggtggcgcatgc

SEQ ID NO: 40653 - DNA, 15 bp, Homo sapiens
tgtgggtggcgcatg

SEQ ID NO: 40654 - DNA, 15 bp, Homo sapiens
gtgtgggtggcgcat

SEQ ID NO: 40655 - DNA, 15 bp, Homo sapiens
ggtgtgggtggcgca

SEQ ID NO: 40656 - DNA, 15 bp, Homo sapiens
gggtgtgggtggcgc

SEQ ID NO: 40657 - DNA, 15 bp, Homo sapiens
tgggtgtgggtggcg

SEQ ID NO: 40658 - DNA, 15 bp, Homo sapiens
gtgggtgtgggtggc

SEQ ID NO: 40659 - DNA, 15 bp, Homo sapiens
agtgggtgtgggtgg

SEQ ID NO: 40660 - DNA, 15 bp, Homo sapiens
tagtgggtgtgggtg

SEQ ID NO: 40661 - DNA, 15 bp, Homo sapiens
ttagtgggtgtgggt

SEQ ID NO: 40662 - DNA, 15 bp, Homo sapiens
cttagtgggtgtggg

SEQ ID NO: 40663 - DNA, 15 bp, Homo sapiens
acttagtgggtgtgg

SEQ ID NO: 40664 - DNA, 15 bp, Homo sapiens
aacttagtgggtgtg

SEQ ID NO: 40665 - DNA, 15 bp, Homo sapiens
aaacttagtgggtgt

SEQ ID NO: 40666 - DNA, 15 bp, Homo sapiens
aaaacttagtgggtg

SEQ ID NO: 40667 - DNA, 15 bp, Homo sapiens
aaaaacttagtgggt

SEQ ID NO: 40668 - DNA, 15 bp, Homo sapiens
caaaaacttagtggg

SEQ ID NO: 40669 - DNA, 15 bp, Homo sapiens
acaaaaacttagtgg

SEQ ID NO: 40670 - DNA, 15 bp, Homo sapiens
tacaaaaacttagtg

SEQ ID NO: 40671 - DNA, 15 bp, Homo sapiens
atacaaaaacttagt

SEQ ID NO: 40672 - DNA, 15 bp, Homo sapiens
aatacaaaaacttag

SEQ ID NO: 40673 - DNA, 15 bp, Homo sapiens
aaatacaaaaactta

SEQ ID NO: 40674 - DNA, 15 bp, Homo sapiens
aaaatacaaaaactt

SEQ ID NO: 40675 - DNA, 15 bp, Homo sapiens
aaaaatacaaaaact

SEQ ID NO: 40676 - DNA, 15 bp, Homo sapiens
caaaaatacaaaaac

SEQ ID NO: 40677 - DNA, 15 bp, Homo sapiens
ccaaaaatacaaaaa

SEQ ID NO: 40678 - DNA, 15 bp, Homo sapiens
accaaaaatacaaaa

SEQ ID NO: 40679 - DNA, 15 bp, Homo sapiens
taccaaaaatacaaa

SEQ ID NO: 40680 - DNA, 15 bp, Homo sapiens
ctaccaaaaatacaa

SEQ ID NO: 40681 - DNA, 15 bp, Homo sapiens
tctaccaaaaataca

SEQ ID NO: 40682 - DNA, 15 bp, Homo sapiens
ctctaccaaaaatac

SEQ ID NO: 40683 - DNA, 15 bp, Homo sapiens
tctctaccaaaaata

SEQ ID NO: 40684 - DNA, 15 bp, Homo sapiens
atctctaccaaaaat

SEQ ID NO: 40685 - DNA, 15 bp, Homo sapiens
catctctaccaaaaa

SEQ ID NO: 40686 - DNA, 15 bp, Homo sapiens
ccatctctaccaaaa

SEQ ID NO: 40687 - DNA, 15 bp, Homo sapiens
tccatctctaccaaa

SEQ ID NO: 40688 - DNA, 15 bp, Homo sapiens
ctccatctctaccaa

SEQ ID NO: 40689 - DNA, 15 bp, Homo sapiens
actccatctctacca

SEQ ID NO: 40690 - DNA, 15 bp, Homo sapiens
aactccatctctacc

SEQ ID NO: 40691 - DNA, 15 bp, Homo sapiens
aaactccatctctac

SEQ ID NO: 40692 - DNA, 15 bp, Homo sapiens
aaaactccatctcta

SEQ ID NO: 40693 - DNA, 15 bp, Homo sapiens
taaaactccatctct

SEQ ID NO: 40694 - DNA, 15 bp, Homo sapiens
gtaaaactccatctc

SEQ ID NO: 40695 - DNA, 15 bp, Homo sapiens
ggtaaaactccatct

SEQ ID NO: 40696 - DNA, 15 bp, Homo sapiens
aggtaaaactccatc

SEQ ID NO: 40697 - DNA, 15 bp, Homo sapiens
aaggtaaaactccat

SEQ ID NO: 40698 - DNA, 15 bp, Homo sapiens
caaggtaaaactcca

SEQ ID NO: 40699 - DNA, 15 bp, Homo sapiens
acaaggtaaaactcc

SEQ ID NO: 40700 - DNA, 15 bp, Homo sapiens
aacaaggtaaaactc

SEQ ID NO: 40701 - DNA, 15 bp, Homo sapiens
caacaaggtaaaact

SEQ ID NO: 40702 - DNA, 15 bp, Homo sapiens
gcaacaaggtaaaac

SEQ ID NO: 40703 - DNA, 15 bp, Homo sapiens
ggcaacaaggtaaaa

SEQ ID NO: 40704 - DNA, 15 bp, Homo sapiens
gggcaacaaggtaaa

SEQ ID NO: 40705 - DNA, 15 bp, Homo sapiens
tgggcaacaaggtaa

SEQ ID NO: 40706 - DNA, 15 bp, Homo sapiens
ctgggcaacaaggta

SEQ ID NO: 40707 - DNA, 15 bp, Homo sapiens
cctgggcaacaaggt

SEQ ID NO: 40708 - DNA, 15 bp, Homo sapiens
gcctgggcaacaagg

SEQ ID NO: 40709 - DNA, 15 bp, Homo sapiens
atttgagaccagcct

SEQ ID NO: 40710 - DNA, 15 bp, Homo sapiens
aatttgagaccagcc

SEQ ID NO: 40711 - DNA, 15 bp, Homo sapiens
gaatttgagaccagc

SEQ ID NO: 40712 - DNA, 15 bp, Homo sapiens
ggaatttgagaccag

SEQ ID NO: 40713 - DNA, 15 bp, Homo sapiens
aggaatttgagacca

SEQ ID NO: 40714 - DNA, 15 bp, Homo sapiens
caggaatttgagacc

SEQ ID NO: 40715 - DNA, 15 bp, Homo sapiens
ccaggaatttgagac

SEQ ID NO: 40716 - DNA, 15 bp, Homo sapiens
tccaggaatttgaga

SEQ ID NO: 40717 - DNA, 15 bp, Homo sapiens
gtccaggaatttgag

SEQ ID NO: 40718 - DNA, 15 bp, Homo sapiens
agtccaggaatttga

SEQ ID NO: 40719 - DNA, 15 bp, Homo sapiens
gagtccaggaatttg

SEQ ID NO: 40720 - DNA, 15 bp, Homo sapiens
tgagtccaggaattt

SEQ ID NO: 40721 - DNA, 15 bp, Homo sapiens
ttgagtccaggaatt

SEQ ID NO: 40722 - DNA, 15 bp, Homo sapiens
cttgagtccaggaat

SEQ ID NO: 40723 - DNA, 15 bp, Homo sapiens
acttgagtccaggaa

SEQ ID NO: 40724 - DNA, 15 bp, Homo sapiens
tacttgagtccagga

SEQ ID NO: 40725 - DNA, 15 bp, Homo sapiens
ctacttgagtccagg

SEQ ID NO: 40726 - DNA, 15 bp, Homo sapiens
actacttgagtccag

SEQ ID NO: 40727 - DNA, 15 bp, Homo sapiens
gactacttgagtcca

SEQ ID NO: 40728 - DNA, 15 bp, Homo sapiens
ggactacttgagtcc

SEQ ID NO: 40729 - DNA, 15 bp, Homo sapiens
cggactacttgagtc

SEQ ID NO: 40730 - DNA, 15 bp, Homo sapiens
gcggactacttgagt

SEQ ID NO: 40731 - DNA, 15 bp, Homo sapiens
ggcggactacttgag

SEQ ID NO: 40732 - DNA, 15 bp, Homo sapiens
gggcggactacttga

SEQ ID NO: 40733 - DNA, 15 bp, Homo sapiens
cgggcggactacttg

SEQ ID NO: 40734 - DNA, 15 bp, Homo sapiens
gcgggcggactactt

SEQ ID NO: 40735 - DNA, 15 bp, Homo sapiens
ggcgggcggactact

SEQ ID NO: 40736 - DNA, 15 bp, Homo sapiens
aggcgggcggactac

SEQ ID NO: 40737 - DNA, 15 bp, Homo sapiens
aaggcgggcggacta

SEQ ID NO: 40738 - DNA, 15 bp, Homo sapiens
caaggcgggcggact

SEQ ID NO: 40739 - DNA, 15 bp, Homo sapiens
gcaaggcgggcggac

SEQ ID NO: 40740 - DNA, 15 bp, Homo sapiens
ggcaaggcgggcgga

SEQ ID NO: 40741 - DNA, 15 bp, Homo sapiens
gggcaaggcgggcgg

SEQ ID NO: 40742 - DNA, 15 bp, Homo sapiens
agggcaaggcgggcg

SEQ ID NO: 40743 - DNA, 15 bp, Homo sapiens
gagggcaaggcgggc

SEQ ID NO: 40744 - DNA, 15 bp, Homo sapiens
ggagggcaaggcggg

SEQ ID NO: 40745 - DNA, 15 bp, Homo sapiens
gggagggcaaggcgg

SEQ ID NO: 40746 - DNA, 15 bp, Homo sapiens
tgggagggcaaggcg

SEQ ID NO: 40747 - DNA, 15 bp, Homo sapiens
ttgggagggcaaggc

SEQ ID NO: 40748 - DNA, 15 bp, Homo sapiens
tttgggagggcaagg

SEQ ID NO: 40749 - DNA, 15 bp, Homo sapiens
ctttgggagggcaag

SEQ ID NO: 40750 - DNA, 15 bp, Homo sapiens
gctttgggagggcaa

SEQ ID NO: 40751 - DNA, 15 bp, Homo sapiens
ggctttgggagggca

SEQ ID NO: 40752 - DNA, 15 bp, Homo sapiens
tggctttgggagggc

SEQ ID NO: 40753 - DNA, 15 bp, Homo sapiens
ctggctttgggaggg

SEQ ID NO: 40754 - DNA, 15 bp, Homo sapiens
tctggctttgggagg

SEQ ID NO: 40755 - DNA, 15 bp, Homo sapiens
ttctggctttgggag

SEQ ID NO: 40756 - DNA, 15 bp, Homo sapiens
tttctggctttggga

SEQ ID NO: 40757 - DNA, 15 bp, Homo sapiens
ttttctggctttggg

SEQ ID NO: 40758 - DNA, 15 bp, Homo sapiens
gttttctggctttgg

SEQ ID NO: 40759 - DNA, 15 bp, Homo sapiens
tgttttctggctttg

SEQ ID NO: 40760 - DNA, 15 bp, Homo sapiens
atgttttctggcttt

SEQ ID NO: 40761 - DNA, 15 bp, Homo sapiens
aatgttttctggctt

SEQ ID NO: 40762 - DNA, 15 bp, Homo sapiens
aaatgttttctggct

SEQ ID NO: 40763 - DNA, 15 bp, Homo sapiens
taaatgttttctggc

SEQ ID NO: 40764 - DNA, 15 bp, Homo sapiens
ctaaatgttttctgg

SEQ ID NO: 40765 - DNA, 15 bp, Homo sapiens
tctaaatgttttctg

SEQ ID NO: 40766 - DNA, 15 bp, Homo sapiens
ttctaaatgttttct

SEQ ID NO: 40767 - DNA, 15 bp, Homo sapiens
attctaaatgttttc

SEQ ID NO: 40768 - DNA, 15 bp, Homo sapiens
tattctaaatgtttt

SEQ ID NO: 40769 - DNA, 15 bp, Homo sapiens
atattctaaatgttt

SEQ ID NO: 40770 - DNA, 15 bp, Homo sapiens
gatattctaaatgtt

SEQ ID NO: 40771 - DNA, 15 bp, Homo sapiens
agatattctaaatgt

SEQ ID NO: 40772 - DNA, 15 bp, Homo sapiens
aagatattctaaatg

SEQ ID NO: 40773 - DNA, 15 bp, Homo sapiens
aaagatattctaaat

SEQ ID NO: 40774 - DNA, 15 bp, Homo sapiens
gaaagatattctaaa

SEQ ID NO: 40775 - DNA, 15 bp, Homo sapiens
tgaaagatattctaa

SEQ ID NO: 40776 - DNA, 15 bp, Homo sapiens
ctgaaagatattcta

SEQ ID NO: 40777 - DNA, 15 bp, Homo sapiens
tctgaaagatattct

SEQ ID NO: 40778 - DNA, 15 bp, Homo sapiens
ctctgaaagatattc

SEQ ID NO: 40779 - DNA, 15 bp, Homo sapiens
tctctgaaagatatt

SEQ ID NO: 40780 - DNA, 15 bp, Homo sapiens
atctctgaaagatat

SEQ ID NO: 40781 - DNA, 15 bp, Homo sapiens
catctctgaaagata

SEQ ID NO: 40782 - DNA, 15 bp, Homo sapiens
acatctctgaaagat

SEQ ID NO: 40783 - DNA, 15 bp, Homo sapiens
cacatctctgaaaga

SEQ ID NO: 40784 - DNA, 15 bp, Homo sapiens
acacatctctgaaag

SEQ ID NO: 40785 - DNA, 15 bp, Homo sapiens
tacacatctctgaaa

SEQ ID NO: 40786 - DNA, 15 bp, Homo sapiens
atacacatctctgaa

SEQ ID NO: 40787 - DNA, 15 bp, Homo sapiens
aatacacatctctga

SEQ ID NO: 40788 - DNA, 15 bp, Homo sapiens
aaatacacatctctg

SEQ ID NO: 40789 - DNA, 15 bp, Homo sapiens
taaatacacatctct

SEQ ID NO: 40790 - DNA, 15 bp, Homo sapiens
gtaaatacacatctc

SEQ ID NO: 40791 - DNA, 15 bp, Homo sapiens
tgtaaatacacatct

SEQ ID NO: 40792 - DNA, 15 bp, Homo sapiens
gtgtaaatacacatc

SEQ ID NO: 40793 - DNA, 15 bp, Homo sapiens
ggtgtaaatacacat

SEQ ID NO: 40794 - DNA, 15 bp, Homo sapiens
tggtgtaaatacaca

SEQ ID NO: 40795 - DNA, 15 bp, Homo sapiens
gtggtgtaaatacac

SEQ ID NO: 40796 - DNA, 15 bp, Homo sapiens
agtggtgtaaataca

SEQ ID NO: 40797 - DNA, 15 bp, Homo sapiens
tagtggtgtaaatac

SEQ ID NO: 40798 - DNA, 15 bp, Homo sapiens
atagtggtgtaaata

SEQ ID NO: 40799 - DNA, 15 bp, Homo sapiens
aatagtggtgtaaat

SEQ ID NO: 40800 - DNA, 15 bp, Homo sapiens
taatagtggtgtaaa

SEQ ID NO: 40801 - DNA, 15 bp, Homo sapiens
ttaatagtggtgtaa

SEQ ID NO: 40802 - DNA, 15 bp, Homo sapiens
gttaatagtggtgta

SEQ ID NO: 40803 - DNA, 15 bp, Homo sapiens
tgttaatagtggtgt

SEQ ID NO: 40804 - DNA, 15 bp, Homo sapiens
gtgttaatagtggtg

SEQ ID NO: 40805 - DNA, 15 bp, Homo sapiens
tgtgttaatagtggt

SEQ ID NO: 40806 - DNA, 15 bp, Homo sapiens
ctgtgttaatagtgg

SEQ ID NO: 40807 - DNA, 15 bp, Homo sapiens
cctgtgttaatagtg

SEQ ID NO: 40808 - DNA, 15 bp, Homo sapiens
ccctgtgttaatagt

SEQ ID NO: 40809 - DNA, 15 bp, Homo sapiens
gccctgtgttaatag

SEQ ID NO: 40810 - DNA, 15 bp, Homo sapiens
agccctgtgttaata

SEQ ID NO: 40811 - DNA, 15 bp, Homo sapiens
cagccctgtgttaat

SEQ ID NO: 40812 - DNA, 15 bp, Homo sapiens
acagccctgtgttaa

SEQ ID NO: 40813 - DNA, 15 bp, Homo sapiens
tacagccctgtgtta

SEQ ID NO: 40814 - DNA, 15 bp, Homo sapiens
atacagccctgtgtt

SEQ ID NO: 40815 - DNA, 15 bp, Homo sapiens
tatacagccctgtgt

SEQ ID NO: 40816 - DNA, 15 bp, Homo sapiens
ctatacagccctgtg

SEQ ID NO: 40817 - DNA, 15 bp, Homo sapiens
gctatacagccctgt

SEQ ID NO: 40818 - DNA, 15 bp, Homo sapiens
tgctatacagccctg

SEQ ID NO: 40819 - DNA, 15 bp, Homo sapiens
ctgctatacagccct

SEQ ID NO: 40820 - DNA, 15 bp, Homo sapiens
actgctatacagccc

SEQ ID NO: 40821 - DNA, 15 bp, Homo sapiens
gactgctatacagcc

SEQ ID NO: 40822 - DNA, 15 bp, Homo sapiens
ggactgctatacagc

SEQ ID NO: 40823 - DNA, 15 bp, Homo sapiens
tggactgctatacag

SEQ ID NO: 40824 - DNA, 15 bp, Homo sapiens
ctggactgctataca

SEQ ID NO: 40825 - DNA, 15 bp, Homo sapiens
actggactgctatac

SEQ ID NO: 40826 - DNA, 15 bp, Homo sapiens
tactggactgctata

SEQ ID NO: 40827 - DNA, 15 bp, Homo sapiens
gtactggactgctat

SEQ ID NO: 40828 - DNA, 15 bp, Homo sapiens
agtactggactgcta

SEQ ID NO: 40829 - DNA, 15 bp, Homo sapiens
cagtactggactgct

SEQ ID NO: 40830 - DNA, 15 bp, Homo sapiens
ccagtactggactgc

SEQ ID NO: 40831 - DNA, 15 bp, Homo sapiens
tccagtactggactg

SEQ ID NO: 40832 - DNA, 15 bp, Homo sapiens
gtccagtactggact

SEQ ID NO: 40833 - DNA, 15 bp, Homo sapiens
agtccagtactggac

SEQ ID NO: 40834 - DNA, 15 bp, Homo sapiens
tagtccagtactgga

SEQ ID NO: 40835 - DNA, 15 bp, Homo sapiens
atagtccagtactgg

SEQ ID NO: 40836 - DNA, 15 bp, Homo sapiens
catagtccagtactg

SEQ ID NO: 40837 - DNA, 15 bp, Homo sapiens
acatagtccagtact

SEQ ID NO: 40838 - DNA, 15 bp, Homo sapiens
tacatagtccagtac

SEQ ID NO: 40839 - DNA, 15 bp, Homo sapiens
ctacatagtccagta

SEQ ID NO: 40840 - DNA, 15 bp, Homo sapiens
actacatagtccagt

SEQ ID NO: 40841 - DNA, 15 bp, Homo sapiens
gactacatagtccag

SEQ ID NO: 40842 - DNA, 15 bp, Homo sapiens
ggactacatagtcca

SEQ ID NO: 40843 - DNA, 15 bp, Homo sapiens
tggactacatagtcc

SEQ ID NO: 40844 - DNA, 15 bp, Homo sapiens
ctggactacatagtc

SEQ ID NO: 40845 - DNA, 15 bp, Homo sapiens
actggactacatagt

SEQ ID NO: 40846 - DNA, 15 bp, Homo sapiens
tactggactacatag

SEQ ID NO: 40847 - DNA, 15 bp, Homo sapiens
gtactggactacata

SEQ ID NO: 40848 - DNA, 15 bp, Homo sapiens
agtactggactacat

SEQ ID NO: 40849 - DNA, 15 bp, Homo sapiens
tagtactggactaca

SEQ ID NO: 40850 - DNA, 15 bp, Homo sapiens
atagtactggactac

SEQ ID NO: 40851 - DNA, 15 bp, Homo sapiens
aatagtactggacta

SEQ ID NO: 40852 - DNA, 15 bp, Homo sapiens
gaatagtactggact

SEQ ID NO: 40853 - DNA, 15 bp, Homo sapiens
agaatagtactggac

SEQ ID NO: 40854 - DNA, 15 bp, Homo sapiens
aagaatagtactgga

SEQ ID NO: 40855 - DNA, 15 bp, Homo sapiens
aaagaatagtactgg

SEQ ID NO: 40856 - DNA, 15 bp, Homo sapiens
aaaagaatagtactg

SEQ ID NO: 40857 - DNA, 15 bp, Homo sapiens
gaaaagaatagtact

SEQ ID NO: 40858 - DNA, 15 bp, Homo sapiens
ggaaaagaatagtac

SEQ ID NO: 40859 - DNA, 15 bp, Homo sapiens
aggaaaagaatagta

SEQ ID NO: 40860 - DNA, 15 bp, Homo sapiens
aaggaaaagaatagt

SEQ ID NO: 40861 - DNA, 15 bp, Homo sapiens
taaggaaaagaatag

SEQ ID NO: 40862 - DNA, 15 bp, Homo sapiens
gtaaggaaaagaata

SEQ ID NO: 40863 - DNA, 15 bp, Homo sapiens
agtaaggaaaagaat

SEQ ID NO: 40864 - DNA, 15 bp, Homo sapiens
cagtaaggaaaagaa

SEQ ID NO: 40865 - DNA, 15 bp, Homo sapiens
ccagtaaggaaaaga

SEQ ID NO: 40866 - DNA, 15 bp, Homo sapiens
tccagtaaggaaaag

SEQ ID NO: 40867 - DNA, 15 bp, Homo sapiens
ctccagtaaggaaaa

SEQ ID NO: 40868 - DNA, 15 bp, Homo sapiens
cctccagtaaggaaa

SEQ ID NO: 40869 - DNA, 15 bp, Homo sapiens
ccctccagtaaggaa

SEQ ID NO: 40870 - DNA, 15 bp, Homo sapiens
gccctccagtaagga

SEQ ID NO: 40871 - DNA, 15 bp, Homo sapiens
ggccctccagtaagg

SEQ ID NO: 40872 - DNA, 15 bp, Homo sapiens
tggccctccagtaag

SEQ ID NO: 40873 - DNA, 15 bp, Homo sapiens
ctggccctccagtaa

SEQ ID NO: 40874 - DNA, 15 bp, Homo sapiens
cctggccctccagta

SEQ ID NO: 40875 - DNA, 15 bp, Homo sapiens
gcctggccctccagt

SEQ ID NO: 40876 - DNA, 15 bp, Homo sapiens
cgcctggccctccag

SEQ ID NO: 40877 - DNA, 15 bp, Homo sapiens
acgcctggccctcca

SEQ ID NO: 40878 - DNA, 15 bp, Homo sapiens
cacgcctggccctcc

SEQ ID NO: 40879 - DNA, 15 bp, Homo sapiens
ccacgcctggccctc

SEQ ID NO: 40880 - DNA, 15 bp, Homo sapiens
accacgcctggccct

SEQ ID NO: 40881 - DNA, 15 bp, Homo sapiens
caccacgcctggccc

SEQ ID NO: 40882 - DNA, 15 bp, Homo sapiens
ccaccacgcctggcc

SEQ ID NO: 40883 - DNA, 15 bp, Homo sapiens
gccaccacgcctggc

SEQ ID NO: 40884 - DNA, 15 bp, Homo sapiens
tgccaccacgcctgg

SEQ ID NO: 40885 - DNA, 15 bp, Homo sapiens
ctgccaccacgcctg

SEQ ID NO: 40886 - DNA, 15 bp, Homo sapiens
cctgccaccacgcct

SEQ ID NO: 40887 - DNA, 15 bp, Homo sapiens
acctgccaccacgcc

SEQ ID NO: 40888 - DNA, 15 bp, Homo sapiens
cacctgccaccacgc

SEQ ID NO: 40889 - DNA, 15 bp, Homo sapiens
gcacctgccaccacg

SEQ ID NO: 40890 - DNA, 15 bp, Homo sapiens
ggcacctgccaccac

SEQ ID NO: 40891 - DNA, 15 bp, Homo sapiens
aggcacctgccacca

SEQ ID NO: 40892 - DNA, 15 bp, Homo sapiens
caggcacctgccacc

SEQ ID NO: 40893 - DNA, 15 bp, Homo sapiens
acaggcacctgccac

SEQ ID NO: 40894 - DNA, 15 bp, Homo sapiens
tacaggcacctgcca

SEQ ID NO: 40895 - DNA, 15 bp, Homo sapiens
ttacaggcacctgcc

SEQ ID NO: 40896 - DNA, 15 bp, Homo sapiens
attacaggcacctgc

SEQ ID NO: 40897 - DNA, 15 bp, Homo sapiens
aattctcctgcctca

SEQ ID NO: 40898 - DNA, 15 bp, Homo sapiens
caattctcctgcctc

SEQ ID NO: 40899 - DNA, 15 bp, Homo sapiens
gcaattctcctgcct

SEQ ID NO: 40900 - DNA, 15 bp, Homo sapiens
agcaattctcctgcc

SEQ ID NO: 40901 - DNA, 15 bp, Homo sapiens
caggttcaagcaatt

SEQ ID NO: 40902 - DNA, 15 bp, Homo sapiens
ccaggttcaagcaat

SEQ ID NO: 40903 - DNA, 15 bp, Homo sapiens
cccaggttcaagcaa

SEQ ID NO: 40904 - DNA, 15 bp, Homo sapiens
tcccaggttcaagca

SEQ ID NO: 40905 - DNA, 15 bp, Homo sapiens
ccagctcactgcaac

SEQ ID NO: 40906 - DNA, 15 bp, Homo sapiens
cccagctcactgcaa

SEQ ID NO: 40907 - DNA, 15 bp, Homo sapiens
tcccagctcactgca

SEQ ID NO: 40908 - DNA, 15 bp, Homo sapiens
gtcccagctcactgc

SEQ ID NO: 40909 - DNA, 15 bp, Homo sapiens
ggtcccagctcactg

SEQ ID NO: 40910 - DNA, 15 bp, Homo sapiens
cggtcccagctcact

SEQ ID NO: 40911 - DNA, 15 bp, Homo sapiens
acggtcccagctcac

SEQ ID NO: 40912 - DNA, 15 bp, Homo sapiens
cacggtcccagctca

SEQ ID NO: 40913 - DNA, 15 bp, Homo sapiens
gcacggtcccagctc

SEQ ID NO: 40914 - DNA, 15 bp, Homo sapiens
ggcacggtcccagct

SEQ ID NO: 40915 - DNA, 15 bp, Homo sapiens
tggcacggtcccagc

SEQ ID NO: 40916 - DNA, 15 bp, Homo sapiens
atggcacggtcccag

SEQ ID NO: 40917 - DNA, 15 bp, Homo sapiens
aatggcacggtccca

SEQ ID NO: 40918 - DNA, 15 bp, Homo sapiens
caatggcacggtccc

SEQ ID NO: 40919 - DNA, 15 bp, Homo sapiens
gcaatggcacggtcc

SEQ ID NO: 40920 - DNA, 15 bp, Homo sapiens
tgcaatggcacggtc

SEQ ID NO: 40921 - DNA, 15 bp, Homo sapiens
gtgcaatggcacggt

SEQ ID NO: 40922 - DNA, 15 bp, Homo sapiens
agtgcaatggcacgg

SEQ ID NO: 40923 - DNA, 15 bp, Homo sapiens
gagtgcaatggcacg

SEQ ID NO: 40924 - DNA, 15 bp, Homo sapiens
ggagtgcaatggcac

SEQ ID NO: 40925 - DNA, 15 bp, Homo sapiens
tggagtgcaatggca

SEQ ID NO: 40926 - DNA, 15 bp, Homo sapiens
gtcttgctctgtcgc

SEQ ID NO: 40927 - DNA, 15 bp, Homo sapiens
agtcttgctctgtcg

SEQ ID NO: 40928 - DNA, 15 bp, Homo sapiens
gagtcttgctctgtc

SEQ ID NO: 40929 - DNA, 15 bp, Homo sapiens
ggagtcttgctctgt

SEQ ID NO: 40930 - DNA, 15 bp, Homo sapiens
cggagtcttgctctg

SEQ ID NO: 40931 - DNA, 15 bp, Homo sapiens
acggagtcttgctct

SEQ ID NO: 40932 - DNA, 15 bp, Homo sapiens
gacggagtcttgctc

SEQ ID NO: 40933 - DNA, 15 bp, Homo sapiens
agacggagtcttgct

SEQ ID NO: 40934 - DNA, 15 bp, Homo sapiens
gagacggagtcttgc

SEQ ID NO: 40935 - DNA, 15 bp, Homo sapiens
tgagacggagtcttg

SEQ ID NO: 40936 - DNA, 15 bp, Homo sapiens
ttgagacggagtctt

SEQ ID NO: 40937 - DNA, 15 bp, Homo sapiens
gttttgagacggagt

SEQ ID NO: 40938 - DNA, 15 bp, Homo sapiens
tgttttgagacggag

SEQ ID NO: 40939 - DNA, 15 bp, Homo sapiens
ttgttttgagacgga

SEQ ID NO: 40940 - DNA, 15 bp, Homo sapiens
tttgttttgagacgg

SEQ ID NO: 40941 - DNA, 15 bp, Homo sapiens
ttttgttttgagacg

SEQ ID NO: 40942 - DNA, 15 bp, Homo sapiens
tttttgttttgagac

SEQ ID NO: 40943 - DNA, 15 bp, Homo sapiens
ttttttgttttgaga

SEQ ID NO: 40944 - DNA, 15 bp, Homo sapiens
tttttttgttttgag

SEQ ID NO: 40945 - DNA, 15 bp, Homo sapiens
ttttttttgttttga

SEQ ID NO: 40946 - DNA, 15 bp, Homo sapiens
tttttttttttgttt

SEQ ID NO: 40947 - DNA, 15 bp, Homo sapiens
ctttttttttttgtt

SEQ ID NO: 40948 - DNA, 15 bp, Homo sapiens
tctttttttttttgt

SEQ ID NO: 40949 - DNA, 15 bp, Homo sapiens
ctctttttttttttg

SEQ ID NO: 40950 - DNA, 15 bp, Homo sapiens
tctctcttttttttt

SEQ ID NO: 40951 - DNA, 15 bp, Homo sapiens
ctctctctttttttt

SEQ ID NO: 40952 - DNA, 15 bp, Homo sapiens
tctctctcttttttt

SEQ ID NO: 40953 - DNA, 15 bp, Homo sapiens
ctctctctctttttt

SEQ ID NO: 40954 - DNA, 15 bp, Homo sapiens
tctctctctcttttt

SEQ ID NO: 40955 - DNA, 15 bp, Homo sapiens
ctctctctctctttt

SEQ ID NO: 40956 - DNA, 15 bp, Homo sapiens
gctctctctctcttt

SEQ ID NO: 40957 - DNA, 15 bp, Homo sapiens
tgctctctctctctt

SEQ ID NO: 40958 - DNA, 15 bp, Homo sapiens
ctgctctctctctct

SEQ ID NO: 40959 - DNA, 15 bp, Homo sapiens
actgctctctctctc

SEQ ID NO: 40960 - DNA, 15 bp, Homo sapiens
tactgctctctctct

SEQ ID NO: 40961 - DNA, 15 bp, Homo sapiens
ttactgctctctctc

SEQ ID NO: 40962 - DNA, 15 bp, Homo sapiens
attactgctctctct

SEQ ID NO: 40963 - DNA, 15 bp, Homo sapiens
aattactgctctctc

SEQ ID NO: 40964 - DNA, 15 bp, Homo sapiens
gaattactgctctct

SEQ ID NO: 40965 - DNA, 15 bp, Homo sapiens
tgaattactgctctc

SEQ ID NO: 40966 - DNA, 15 bp, Homo sapiens
ctgaattactgctct

SEQ ID NO: 40967 - DNA, 15 bp, Homo sapiens
cctgaattactgctc

SEQ ID NO: 40968 - DNA, 15 bp, Homo sapiens
acctgaattactgct

SEQ ID NO: 40969 - DNA, 15 bp, Homo sapiens
gacctgaattactgc

SEQ ID NO: 40970 - DNA, 15 bp, Homo sapiens
agacctgaattactg

SEQ ID NO: 40971 - DNA, 15 bp, Homo sapiens
gagacctgaattact

SEQ ID NO: 40972 - DNA, 15 bp, Homo sapiens
tgagacctgaattac

SEQ ID NO: 40973 - DNA, 15 bp, Homo sapiens
gtgagacctgaatta

SEQ ID NO: 40974 - DNA, 15 bp, Homo sapiens
ggtgagacctgaatt

SEQ ID NO: 40975 - DNA, 15 bp, Homo sapiens
gggtgagacctgaat

SEQ ID NO: 40976 - DNA, 15 bp, Homo sapiens
tgggtgagacctgaa

SEQ ID NO: 40977 - DNA, 15 bp, Homo sapiens
atgggtgagacctga

SEQ ID NO: 40978 - DNA, 15 bp, Homo sapiens
gatgggtgagacctg

SEQ ID NO: 40979 - DNA, 15 bp, Homo sapiens
agatgggtgagacct

SEQ ID NO: 40980 - DNA, 15 bp, Homo sapiens
aagatgggtgagacc

SEQ ID NO: 40981 - DNA, 15 bp, Homo sapiens
gaagatgggtgagac

SEQ ID NO: 40982 - DNA, 15 bp, Homo sapiens
tgaagatgggtgaga

SEQ ID NO: 40983 - DNA, 15 bp, Homo sapiens
ttgaagatgggtgag

SEQ ID NO: 40984 - DNA, 15 bp, Homo sapiens
attgaagatgggtga

SEQ ID NO: 40985 - DNA, 15 bp, Homo sapiens
gattgaagatgggtg

SEQ ID NO: 40986 - DNA, 15 bp, Homo sapiens
ggattgaagatgggt

SEQ ID NO: 40987 - DNA, 15 bp, Homo sapiens
tggattgaagatggg

SEQ ID NO: 40988 - DNA, 15 bp, Homo sapiens
ctggattgaagatgg

SEQ ID NO: 40989 - DNA, 15 bp, Homo sapiens
cctggattgaagatg

SEQ ID NO: 40990 - DNA, 15 bp, Homo sapiens
ccctggattgaagat

SEQ ID NO: 40991 - DNA, 15 bp, Homo sapiens
cccctggattgaaga

SEQ ID NO: 40992 - DNA, 15 bp, Homo sapiens
ccccctggattgaag

SEQ ID NO: 40993 - DNA, 15 bp, Homo sapiens
gccccctggattgaa

SEQ ID NO: 40994 - DNA, 15 bp, Homo sapiens
ggccccctggattga

SEQ ID NO: 40995 - DNA, 15 bp, Homo sapiens
aggccccctggattg

SEQ ID NO: 40996 - DNA, 15 bp, Homo sapiens
taggccccctggatt

SEQ ID NO: 40997 - DNA, 15 bp, Homo sapiens
ctaggccccctggat

SEQ ID NO: 40998 - DNA, 15 bp, Homo sapiens
gctaggccccctgga

SEQ ID NO: 40999 - DNA, 15 bp, Homo sapiens
ggctaggccccctgg

SEQ ID NO: 41000 - DNA, 15 bp, Homo sapiens
aggctaggccccctg

SEQ ID NO: 41001 - DNA, 15 bp, Homo sapiens
aaggctaggccccct

SEQ ID NO: 41002 - DNA, 15 bp, Homo sapiens
taaggctaggccccc

SEQ ID NO: 41003 - DNA, 15 bp, Homo sapiens
ctaaggctaggcccc

SEQ ID NO: 41004 - DNA, 15 bp, Homo sapiens
actaaggctaggccc

SEQ ID NO: 41005 - DNA, 15 bp, Homo sapiens
tactaaggctaggcc

SEQ ID NO: 41006 - DNA, 15 bp, Homo sapiens
atactaaggctaggc

SEQ ID NO: 41007 - DNA, 15 bp, Homo sapiens
aatactaaggctagg

SEQ ID NO: 41008 - DNA, 15 bp, Homo sapiens
aaatactaaggctag

SEQ ID NO: 41009 - DNA, 15 bp, Homo sapiens
caaatactaaggcta

SEQ ID NO: 41010 - DNA, 15 bp, Homo sapiens
tcaaatactaaggct

SEQ ID NO: 41011 - DNA, 15 bp, Homo sapiens
gtcaaatactaaggc

SEQ ID NO: 41012 - DNA, 15 bp, Homo sapiens
ggtcaaatactaagg

SEQ ID NO: 41013 - DNA, 15 bp, Homo sapiens
gggtcaaatactaag

SEQ ID NO: 41014 - DNA, 15 bp, Homo sapiens
tgggtcaaatactaa

SEQ ID NO: 41015 - DNA, 15 bp, Homo sapiens
atgggtcaaatacta

SEQ ID NO: 41016 - DNA, 15 bp, Homo sapiens
tatgggtcaaatact

SEQ ID NO: 41017 - DNA, 15 bp, Homo sapiens
ctatgggtcaaatac

SEQ ID NO: 41018 - DNA, 15 bp, Homo sapiens
actatgggtcaaata

SEQ ID NO: 41019 - DNA, 15 bp, Homo sapiens
tactatgggtcaaat

SEQ ID NO: 41020 - DNA, 15 bp, Homo sapiens
ttactatgggtcaaa

SEQ ID NO: 41021 - DNA, 15 bp, Homo sapiens
cttactatgggtcaa

SEQ ID NO: 41022 - DNA, 15 bp, Homo sapiens
gcttactatgggtca

SEQ ID NO: 41023 - DNA, 15 bp, Homo sapiens
tgcttactatgggtc

SEQ ID NO: 41024 - DNA, 15 bp, Homo sapiens
gtgcttactatgggt

SEQ ID NO: 41025 - DNA, 15 bp, Homo sapiens
ggtgcttactatggg

SEQ ID NO: 41026 - DNA, 15 bp, Homo sapiens
gggtgcttactatgg

SEQ ID NO: 41027 - DNA, 15 bp, Homo sapiens
tgggtgcttactatg

SEQ ID NO: 41028 - DNA, 15 bp, Homo sapiens
ttgggtgcttactat

SEQ ID NO: 41029 - DNA, 15 bp, Homo sapiens
attgggtgcttacta

SEQ ID NO: 41030 - DNA, 15 bp, Homo sapiens
tattgggtgcttact

SEQ ID NO: 41031 - DNA, 15 bp, Homo sapiens
ttattgggtgcttac

SEQ ID NO: 41032 - DNA, 15 bp, Homo sapiens
attattgggtgctta

SEQ ID NO: 41033 - DNA, 15 bp, Homo sapiens
aattattgggtgctt

SEQ ID NO: 41034 - DNA, 15 bp, Homo sapiens
caattattgggtgct

SEQ ID NO: 41035 - DNA, 15 bp, Homo sapiens
acaattattgggtgc

SEQ ID NO: 41036 - DNA, 15 bp, Homo sapiens
aacaattattgggtg

SEQ ID NO: 41037 - DNA, 15 bp, Homo sapiens
aaacaattattgggt

SEQ ID NO: 41038 - DNA, 15 bp, Homo sapiens
taaacaattattggg

SEQ ID NO: 41039 - DNA, 15 bp, Homo sapiens
ttaaacaattattgg

SEQ ID NO: 41040 - DNA, 15 bp, Homo sapiens
tttaaacaattattg

SEQ ID NO: 41041 - DNA, 15 bp, Homo sapiens
atttaaacaattatt

SEQ ID NO: 41042 - DNA, 15 bp, Homo sapiens
aatttaaacaattat

SEQ ID NO: 41043 - DNA, 15 bp, Homo sapiens
taatttaaacaatta

SEQ ID NO: 41044 - DNA, 15 bp, Homo sapiens
ttaatttaaacaatt

SEQ ID NO: 41045 - DNA, 15 bp, Homo sapiens
attaatttaaacaat

SEQ ID NO: 41046 - DNA, 15 bp, Homo sapiens
aattaatttaaacaa

SEQ ID NO: 41047 - DNA, 15 bp, Homo sapiens
taattaatttaaaca

SEQ ID NO: 41048 - DNA, 15 bp, Homo sapiens
ttaattaatttaaac

SEQ ID NO: 41049 - DNA, 15 bp, Homo sapiens
gttaattaatttaaa

SEQ ID NO: 41050 - DNA, 15 bp, Homo sapiens
ggttaattaatttaa

SEQ ID NO: 41051 - DNA, 15 bp, Homo sapiens
aggttaattaattta

SEQ ID NO: 41052 - DNA, 15 bp, Homo sapiens
gaggttaattaattt

SEQ ID NO: 41053 - DNA, 15 bp, Homo sapiens
agaggttaattaatt

SEQ ID NO: 41054 - DNA, 15 bp, Homo sapiens
cagaggttaattaat

SEQ ID NO: 41055 - DNA, 15 bp, Homo sapiens
tcagaggttaattaa

SEQ ID NO: 41056 - DNA, 15 bp, Homo sapiens
ctcagaggttaatta

SEQ ID NO: 41057 - DNA, 15 bp, Homo sapiens
cctcagaggttaatt

SEQ ID NO: 41058 - DNA, 15 bp, Homo sapiens
gcctcagaggttaat

SEQ ID NO: 41059 - DNA, 15 bp, Homo sapiens
ggcctcagaggttaa

SEQ ID NO: 41060 - DNA, 15 bp, Homo sapiens
gggcctcagaggtta

SEQ ID NO: 41061 - DNA, 15 bp, Homo sapiens
agggcctcagaggtt

SEQ ID NO: 41062 - DNA, 15 bp, Homo sapiens
aagggcctcagaggt

SEQ ID NO: 41063 - DNA, 15 bp, Homo sapiens
aaagggcctcagagg

SEQ ID NO: 41064 - DNA, 15 bp, Homo sapiens
taaagggcctcagag

SEQ ID NO: 41065 - DNA, 15 bp, Homo sapiens
ttaaagggcctcaga

SEQ ID NO: 41066 - DNA, 15 bp, Homo sapiens
tttaaagggcctcag

SEQ ID NO: 41067 - DNA, 15 bp, Homo sapiens
atttaaagggcctca

SEQ ID NO: 41068 - DNA, 15 bp, Homo sapiens
gatttaaagggcctc

SEQ ID NO: 41069 - DNA, 15 bp, Homo sapiens
agatttaaagggcct

SEQ ID NO: 41070 - DNA, 15 bp, Homo sapiens
cagatttaaagggcc

SEQ ID NO: 41071 - DNA, 15 bp, Homo sapiens
acagatttaaagggc

SEQ ID NO: 41072 - DNA, 15 bp, Homo sapiens
aacagatttaaaggg

SEQ ID NO: 41073 - DNA, 15 bp, Homo sapiens
caacagatttaaagg

SEQ ID NO: 41074 - DNA, 15 bp, Homo sapiens
tcaacagatttaaag

SEQ ID NO: 41075 - DNA, 15 bp, Homo sapiens
atcaacagatttaaa

SEQ ID NO: 41076 - DNA, 15 bp, Homo sapiens
tatcaacagatttaa

SEQ ID NO: 41077 - DNA, 15 bp, Homo sapiens
ttatcaacagattta

SEQ ID NO: 41078 - DNA, 15 bp, Homo sapiens
cttatcaacagattt

SEQ ID NO: 41079 - DNA, 15 bp, Homo sapiens
acttatcaacagatt

SEQ ID NO: 41080 - DNA, 15 bp, Homo sapiens
tacttatcaacagat

SEQ ID NO: 41081 - DNA, 15 bp, Homo sapiens
atacttatcaacaga

SEQ ID NO: 41082 - DNA, 15 bp, Homo sapiens
gatacttatcaacag

SEQ ID NO: 41083 - DNA, 15 bp, Homo sapiens
agatacttatcaaca

SEQ ID NO: 41084 - DNA, 15 bp, Homo sapiens
aagatacttatcaac

SEQ ID NO: 41085 - DNA, 15 bp, Homo sapiens
taagatacttatcaa

SEQ ID NO: 41086 - DNA, 15 bp, Homo sapiens
ataagatacttatca

SEQ ID NO: 41087 - DNA, 15 bp, Homo sapiens
aataagatacttatc

SEQ ID NO: 41088 - DNA, 15 bp, Homo sapiens
aaataagatacttat

SEQ ID NO: 41089 - DNA, 15 bp, Homo sapiens
aaaataagatactta

SEQ ID NO: 41090 - DNA, 15 bp, Homo sapiens
caaaataagatactt

SEQ ID NO: 41091 - DNA, 15 bp, Homo sapiens
gcaaaataagatact

SEQ ID NO: 41092 - DNA, 15 bp, Homo sapiens
tgcaaaataagatac

SEQ ID NO: 41093 - DNA, 15 bp, Homo sapiens
ttgcaaaataagata

SEQ ID NO: 41094 - DNA, 15 bp, Homo sapiens
tttgcaaaataagat

SEQ ID NO: 41095 - DNA, 15 bp, Homo sapiens
ctttgcaaaataaga

SEQ ID NO: 41096 - DNA, 15 bp, Homo sapiens
actttgcaaaataag

SEQ ID NO: 41097 - DNA, 15 bp, Homo sapiens
gactttgcaaaataa

SEQ ID NO: 41098 - DNA, 15 bp, Homo sapiens
ggactttgcaaaata

SEQ ID NO: 41099 - DNA, 15 bp, Homo sapiens
aggactttgcaaaat

SEQ ID NO: 41100 - DNA, 15 bp, Homo sapiens
taggactttgcaaaa

SEQ ID NO: 41101 - DNA, 15 bp, Homo sapiens
ttaggactttgcaaa

SEQ ID NO: 41102 - DNA, 15 bp, Homo sapiens
cttaggactttgcaa

SEQ ID NO: 41103 - DNA, 15 bp, Homo sapiens
gcttaggactttgca

SEQ ID NO: 41104 - DNA, 15 bp, Homo sapiens
tgcttaggactttgc

SEQ ID NO: 41105 - DNA, 15 bp, Homo sapiens
gtgcttaggactttg

SEQ ID NO: 41106 - DNA, 15 bp, Homo sapiens
agtgcttaggacttt

SEQ ID NO: 41107 - DNA, 15 bp, Homo sapiens
aagtgcttaggactt

SEQ ID NO: 41108 - DNA, 15 bp, Homo sapiens
caagtgcttaggact

SEQ ID NO: 41109 - DNA, 15 bp, Homo sapiens
ccaagtgcttaggac

SEQ ID NO: 41110 - DNA, 15 bp, Homo sapiens
tccaagtgcttagga

SEQ ID NO: 41111 - DNA, 15 bp, Homo sapiens
ttccaagtgcttagg

SEQ ID NO: 41112 - DNA, 15 bp, Homo sapiens
cttccaagtgcttag

SEQ ID NO: 41113 - DNA, 15 bp, Homo sapiens
tcttccaagtgctta

SEQ ID NO: 41114 - DNA, 15 bp, Homo sapiens
ctcttccaagtgctt

SEQ ID NO: 41115 - DNA, 15 bp, Homo sapiens
gctcttccaagtgct

SEQ ID NO: 41116 - DNA, 15 bp, Homo sapiens
tgctcttccaagtgc

SEQ ID NO: 41117 - DNA, 15 bp, Homo sapiens
ctgctcttccaagtg

SEQ ID NO: 41118 - DNA, 15 bp, Homo sapiens
tctgctcttccaagt

SEQ ID NO: 41119 - DNA, 15 bp, Homo sapiens
ctctgctcttccaag

SEQ ID NO: 41120 - DNA, 15 bp, Homo sapiens
cctctgctcttccaa

SEQ ID NO: 41121 - DNA, 15 bp, Homo sapiens
tcctctgctcttcca

SEQ ID NO: 41122 - DNA, 15 bp, Homo sapiens
ttcctctgctcttcc

SEQ ID NO: 41123 - DNA, 15 bp, Homo sapiens
gttcctctgctcttc

SEQ ID NO: 41124 - DNA, 15 bp, Homo sapiens
agttcctctgctctt

SEQ ID NO: 41125 - DNA, 15 bp, Homo sapiens
tagttcctctgctct

SEQ ID NO: 41126 - DNA, 15 bp, Homo sapiens
atagttcctctgctc

SEQ ID NO: 41127 - DNA, 15 bp, Homo sapiens
aatagttcctctgct

SEQ ID NO: 41128 - DNA, 15 bp, Homo sapiens
aaatagttcctctgc

SEQ ID NO: 41129 - DNA, 15 bp, Homo sapiens
taaatagttcctctg

SEQ ID NO: 41130 - DNA, 15 bp, Homo sapiens
gtaaatagttcctct

SEQ ID NO: 41131 - DNA, 15 bp, Homo sapiens
agtaaatagttcctc

SEQ ID NO: 41132 - DNA, 15 bp, Homo sapiens
cagtaaatagttcct

SEQ ID NO: 41133 - DNA, 15 bp, Homo sapiens
ccagtaaatagttcc

SEQ ID NO: 41134 - DNA, 15 bp, Homo sapiens
cccagtaaatagttc

SEQ ID NO: 41135 - DNA, 15 bp, Homo sapiens
acccagtaaatagtt

SEQ ID NO: 41136 - DNA, 15 bp, Homo sapiens
cacccagtaaatagt

SEQ ID NO: 41137 - DNA, 15 bp, Homo sapiens
acacccagtaaatag

SEQ ID NO: 41138 - DNA, 15 bp, Homo sapiens
cacacccagtaaata

SEQ ID NO: 41139 - DNA, 15 bp, Homo sapiens
acacacccagtaaat

SEQ ID NO: 41140 - DNA, 15 bp, Homo sapiens
tacacacccagtaaa

SEQ ID NO: 41141 - DNA, 15 bp, Homo sapiens
atacacacccagtaa

SEQ ID NO: 41142 - DNA, 15 bp, Homo sapiens
catacacacccagta

SEQ ID NO: 41143 - DNA, 15 bp, Homo sapiens
gcatacacacccagt

SEQ ID NO: 41144 - DNA, 15 bp, Homo sapiens
agcatacacacccag

SEQ ID NO: 41145 - DNA, 15 bp, Homo sapiens
aagcatacacaccca

SEQ ID NO: 41146 - DNA, 15 bp, Homo sapiens
aaagcatacacaccc

SEQ ID NO: 41147 - DNA, 15 bp, Homo sapiens
aaaagcatacacacc

SEQ ID NO: 41148 - DNA, 15 bp, Homo sapiens
gaaaagcatacacac

SEQ ID NO: 41149 - DNA, 15 bp, Homo sapiens
agaaaagcatacaca

SEQ ID NO: 41150 - DNA, 15 bp, Homo sapiens
tagaaaagcatacac

SEQ ID NO: 41151 - DNA, 15 bp, Homo sapiens
ttagaaaagcataca

SEQ ID NO: 41152 - DNA, 15 bp, Homo sapiens
gttagaaaagcatac

SEQ ID NO: 41153 - DNA, 15 bp, Homo sapiens
tgttagaaaagcata

SEQ ID NO: 41154 - DNA, 15 bp, Homo sapiens
ttgttagaaaagcat

SEQ ID NO: 41155 - DNA, 15 bp, Homo sapiens
attgttagaaaagca

SEQ ID NO: 41156 - DNA, 15 bp, Homo sapiens
tattgttagaaaagc

SEQ ID NO: 41157 - DNA, 15 bp, Homo sapiens
atattgttagaaaag

SEQ ID NO: 41158 - DNA, 15 bp, Homo sapiens
aatattgttagaaaa

SEQ ID NO: 41159 - DNA, 15 bp, Homo sapiens
aaatattgttagaaa

SEQ ID NO: 41160 - DNA, 15 bp, Homo sapiens
aaaatattgttagaa

SEQ ID NO: 41161 - DNA, 15 bp, Homo sapiens
taaaatattgttaga

SEQ ID NO: 41162 - DNA, 15 bp, Homo sapiens
ataaaatattgttag

SEQ ID NO: 41163 - DNA, 15 bp, Homo sapiens
tataaaatattgtta

SEQ ID NO: 41164 - DNA, 15 bp, Homo sapiens
ctataaaatattgtt

SEQ ID NO: 41165 - DNA, 15 bp, Homo sapiens
gctataaaatattgt

SEQ ID NO: 41166 - DNA, 15 bp, Homo sapiens
agctataaaatattg

SEQ ID NO: 41167 - DNA, 15 bp, Homo sapiens
cagctataaaatatt

SEQ ID NO: 41168 - DNA, 15 bp, Homo sapiens
ccagctataaaatat

SEQ ID NO: 41169 - DNA, 15 bp, Homo sapiens
gccagctataaaata

SEQ ID NO: 41170 - DNA, 15 bp, Homo sapiens
agccagctataaaat

SEQ ID NO: 41171 - DNA, 15 bp, Homo sapiens
aagccagctataaaa

SEQ ID NO: 41172 - DNA, 15 bp, Homo sapiens
aaagccagctataaa

SEQ ID NO: 41173 - DNA, 15 bp, Homo sapiens
aaaagccagctataa

SEQ ID NO: 41174 - DNA, 15 bp, Homo sapiens
caaaagccagctata

SEQ ID NO: 41175 - DNA, 15 bp, Homo sapiens
acaaaagccagctat

SEQ ID NO: 41176 - DNA, 15 bp, Homo sapiens
aacaaaagccagcta

SEQ ID NO: 41177 - DNA, 15 bp, Homo sapiens
aaacaaaagccagct

SEQ ID NO: 41178 - DNA, 15 bp, Homo sapiens
aaaacaaaagccagc

SEQ ID NO: 41179 - DNA, 15 bp, Homo sapiens
aaaaacaaaagccag

SEQ ID NO: 41180 - DNA, 15 bp, Homo sapiens
taaaaacaaaagcca

SEQ ID NO: 41181 - DNA, 15 bp, Homo sapiens
ctaaaaacaaaagcc

SEQ ID NO: 41182 - DNA, 15 bp, Homo sapiens
tctaaaaacaaaagc

SEQ ID NO: 41183 - DNA, 15 bp, Homo sapiens
ttctaaaaacaaaag

SEQ ID NO: 41184 - DNA, 15 bp, Homo sapiens
attctaaaaacaaaa

SEQ ID NO: 41185 - DNA, 15 bp, Homo sapiens
cattctaaaaacaaa

SEQ ID NO: 41186 - DNA, 15 bp, Homo sapiens
tcattctaaaaacaa

SEQ ID NO: 41187 - DNA, 15 bp, Homo sapiens
ttcattctaaaaaca

SEQ ID NO: 41188 - DNA, 15 bp, Homo sapiens
attcattctaaaaac

SEQ ID NO: 41189 - DNA, 15 bp, Homo sapiens
aattcattctaaaaa

SEQ ID NO: 41190 - DNA, 15 bp, Homo sapiens
aaattcattctaaaa

SEQ ID NO: 41191 - DNA, 15 bp, Homo sapiens
caaattcattctaaa

SEQ ID NO: 41192 - DNA, 15 bp, Homo sapiens
tcaaattcattctaa

SEQ ID NO: 41193 - DNA, 15 bp, Homo sapiens
ttcaaattcattcta

SEQ ID NO: 41194 - DNA, 15 bp, Homo sapiens
gttcaaattcattct

SEQ ID NO: 41195 - DNA, 15 bp, Homo sapiens
tgttcaaattcattc

SEQ ID NO: 41196 - DNA, 15 bp, Homo sapiens
atgttcaaattcatt

SEQ ID NO: 41197 - DNA, 15 bp, Homo sapiens
aatgttcaaattcat

SEQ ID NO: 41198 - DNA, 15 bp, Homo sapiens
caatgttcaaattca

SEQ ID NO: 41199 - DNA, 15 bp, Homo sapiens
tcaatgttcaaattc

SEQ ID NO: 41200 - DNA, 15 bp, Homo sapiens
ttcaatgttcaaatt

SEQ ID NO: 41201 - DNA, 15 bp, Homo sapiens
tttcaatgttcaaat

SEQ ID NO: 41202 - DNA, 15 bp, Homo sapiens
ttttcaatgttcaaa

SEQ ID NO: 41203 - DNA, 15 bp, Homo sapiens
cttttcaatgttcaa

SEQ ID NO: 41204 - DNA, 15 bp, Homo sapiens
ccttttcaatgttca

SEQ ID NO: 41205 - DNA, 15 bp, Homo sapiens
gccttttcaatgttc

SEQ ID NO: 41206 - DNA, 15 bp, Homo sapiens
tgccttttcaatgtt

SEQ ID NO: 41207 - DNA, 15 bp, Homo sapiens
ctgccttttcaatgt

SEQ ID NO: 41208 - DNA, 15 bp, Homo sapiens
cctgccttttcaatg

SEQ ID NO: 41209 - DNA, 15 bp, Homo sapiens
gcctgccttttcaat

SEQ ID NO: 41210 - DNA, 15 bp, Homo sapiens
tgcctgccttttcaa

SEQ ID NO: 41211 - DNA, 15 bp, Homo sapiens
ttgcctgccttttca

SEQ ID NO: 41212 - DNA, 15 bp, Homo sapiens
attgcctgccttttc

SEQ ID NO: 41213 - DNA, 15 bp, Homo sapiens
tattgcctgcctttt

SEQ ID NO: 41214 - DNA, 15 bp, Homo sapiens
ctattgcctgccttt

SEQ ID NO: 41215 - DNA, 15 bp, Homo sapiens
cctattgcctgcctt

SEQ ID NO: 41216 - DNA, 15 bp, Homo sapiens
ccctattgcctgcct

SEQ ID NO: 41217 - DNA, 15 bp, Homo sapiens
tccctattgcctgcc

SEQ ID NO: 41218 - DNA, 15 bp, Homo sapiens
atccctattgcctgc

SEQ ID NO: 41219 - DNA, 15 bp, Homo sapiens
catccctattgcctg

SEQ ID NO: 41220 - DNA, 15 bp, Homo sapiens
tcatccctattgcct

SEQ ID NO: 41221 - DNA, 15 bp, Homo sapiens
atcatccctattgcc

SEQ ID NO: 41222 - DNA, 15 bp, Homo sapiens
aatcatccctattgc

SEQ ID NO: 41223 - DNA, 15 bp, Homo sapiens
gaatcatccctattg

SEQ ID NO: 41224 - DNA, 15 bp, Homo sapiens
agaatcatccctatt

SEQ ID NO: 41225 - DNA, 15 bp, Homo sapiens
cagaatcatccctat

SEQ ID NO: 41226 - DNA, 15 bp, Homo sapiens
acagaatcatcccta

SEQ ID NO: 41227 - DNA, 15 bp, Homo sapiens
cacagaatcatccct

SEQ ID NO: 41228 - DNA, 15 bp, Homo sapiens
tcacagaatcatccc

SEQ ID NO: 41229 - DNA, 15 bp, Homo sapiens
ttcacagaatcatcc

SEQ ID NO: 41230 - DNA, 15 bp, Homo sapiens
attcacagaatcatc

SEQ ID NO: 41231 - DNA, 15 bp, Homo sapiens
aattcacagaatcat

SEQ ID NO: 41232 - DNA, 15 bp, Homo sapiens
gaattcacagaatca

SEQ ID NO: 41233 - DNA, 15 bp, Homo sapiens
agaattcacagaatc

SEQ ID NO: 41234 - DNA, 15 bp, Homo sapiens
cagaattcacagaat

SEQ ID NO: 41235 - DNA, 15 bp, Homo sapiens
gcagaattcacagaa

SEQ ID NO: 41236 - DNA, 15 bp, Homo sapiens
agcagaattcacaga

SEQ ID NO: 41237 - DNA, 15 bp, Homo sapiens
tagcagaattcacag

SEQ ID NO: 41238 - DNA, 15 bp, Homo sapiens
ttagcagaattcaca

SEQ ID NO: 41239 - DNA, 15 bp, Homo sapiens
tttagcagaattcac

SEQ ID NO: 41240 - DNA, 15 bp, Homo sapiens
ttttagcagaattca

SEQ ID NO: 41241 - DNA, 15 bp, Homo sapiens
gttttagcagaattc

SEQ ID NO: 41242 - DNA, 15 bp, Homo sapiens
agttttagcagaatt

SEQ ID NO: 41243 - DNA, 15 bp, Homo sapiens
cagttttagcagaat

SEQ ID NO: 41244 - DNA, 15 bp, Homo sapiens
tcagttttagcagaa

SEQ ID NO: 41245 - DNA, 15 bp, Homo sapiens
ctcagttttagcaga

SEQ ID NO: 41246 - DNA, 15 bp, Homo sapiens
actcagttttagcag

SEQ ID NO: 41247 - DNA, 15 bp, Homo sapiens
tactcagttttagca

SEQ ID NO: 41248 - DNA, 15 bp, Homo sapiens
ctactcagttttagc

SEQ ID NO: 41249 - DNA, 15 bp, Homo sapiens
tctactcagttttag

SEQ ID NO: 41250 - DNA, 15 bp, Homo sapiens
ttctactcagtttta

SEQ ID NO: 41251 - DNA, 15 bp, Homo sapiens
tttctactcagtttt

SEQ ID NO: 41252 - DNA, 15 bp, Homo sapiens
ctttctactcagttt

SEQ ID NO: 41253 - DNA, 15 bp, Homo sapiens
tctttctactcagtt

SEQ ID NO: 41254 - DNA, 15 bp, Homo sapiens
ttctttctactcagt

SEQ ID NO: 41255 - DNA, 15 bp, Homo sapiens
attctttctactcag

SEQ ID NO: 41256 - DNA, 15 bp, Homo sapiens
cattctttctactca

SEQ ID NO: 41257 - DNA, 15 bp, Homo sapiens
tcattctttctactc

SEQ ID NO: 41258 - DNA, 15 bp, Homo sapiens
ctcattctttctact

SEQ ID NO: 41259 - DNA, 15 bp, Homo sapiens
actcattctttctac

SEQ ID NO: 41260 - DNA, 15 bp, Homo sapiens
cactcattctttcta

SEQ ID NO: 41261 - DNA, 15 bp, Homo sapiens
acactcattctttct

SEQ ID NO: 41262 - DNA, 15 bp, Homo sapiens
tacactcattctttc

SEQ ID NO: 41263 - DNA, 15 bp, Homo sapiens
ctacactcattcttt

SEQ ID NO: 41264 - DNA, 15 bp, Homo sapiens
tctacactcattctt

SEQ ID NO: 41265 - DNA, 15 bp, Homo sapiens
ctctacactcattct

SEQ ID NO: 41266 - DNA, 15 bp, Homo sapiens
tctctacactcattc

SEQ ID NO: 41267 - DNA, 15 bp, Homo sapiens
atctctacactcatt

SEQ ID NO: 41268 - DNA, 15 bp, Homo sapiens
catctctacactcat

SEQ ID NO: 41269 - DNA, 15 bp, Homo sapiens
acatctctacactca

SEQ ID NO: 41270 - DNA, 15 bp, Homo sapiens
gacatctctacactc

SEQ ID NO: 41271 - DNA, 15 bp, Homo sapiens
cgacatctctacact

SEQ ID NO: 41272 - DNA, 15 bp, Homo sapiens
tcgacatctctacac

SEQ ID NO: 41273 - DNA, 15 bp, Homo sapiens
gtcgacatctctaca

SEQ ID NO: 41274 - DNA, 15 bp, Homo sapiens
tgtcgacatctctac

SEQ ID NO: 41275 - DNA, 15 bp, Homo sapiens
atgtcgacatctcta

SEQ ID NO: 41276 - DNA, 15 bp, Homo sapiens
aatgtcgacatctct

SEQ ID NO: 41277 - DNA, 15 bp, Homo sapiens
caatgtcgacatctc

SEQ ID NO: 41278 - DNA, 15 bp, Homo sapiens
tcaatgtcgacatct

SEQ ID NO: 41279 - DNA, 15 bp, Homo sapiens
atcaatgtcgacatc

SEQ ID NO: 41280 - DNA, 15 bp, Homo sapiens
gatcaatgtcgacat

SEQ ID NO: 41281 - DNA, 15 bp, Homo sapiens
tgatcaatgtcgaca

SEQ ID NO: 41282 - DNA, 15 bp, Homo sapiens
ttgatcaatgtcgac

SEQ ID NO: 41283 - DNA, 15 bp, Homo sapiens
gttgatcaatgtcga

SEQ ID NO: 41284 - DNA, 15 bp, Homo sapiens
agttgatcaatgtcg

SEQ ID NO: 41285 - DNA, 15 bp, Homo sapiens
aagttgatcaatgtc

SEQ ID NO: 41286 - DNA, 15 bp, Homo sapiens
aaagttgatcaatgt

SEQ ID NO: 41287 - DNA, 15 bp, Homo sapiens
gaaagttgatcaatg

SEQ ID NO: 41288 - DNA, 15 bp, Homo sapiens
agaaagttgatcaat

SEQ ID NO: 41289 - DNA, 15 bp, Homo sapiens
tagaaagttgatcaa

SEQ ID NO: 41290 - DNA, 15 bp, Homo sapiens
atagaaagttgatca

SEQ ID NO: 41291 - DNA, 15 bp, Homo sapiens
gatagaaagttgatc

SEQ ID NO: 41292 - DNA, 15 bp, Homo sapiens
agatagaaagttgat

SEQ ID NO: 41293 - DNA, 15 bp, Homo sapiens
aagatagaaagttga

SEQ ID NO: 41294 - DNA, 15 bp, Homo sapiens
gaagatagaaagttg

SEQ ID NO: 41295 - DNA, 15 bp, Homo sapiens
tgaagatagaaagtt

SEQ ID NO: 41296 - DNA, 15 bp, Homo sapiens
atgaagatagaaagt

SEQ ID NO: 41297 - DNA, 15 bp, Homo sapiens
tatgaagatagaaag

SEQ ID NO: 41298 - DNA, 15 bp, Homo sapiens
ttatgaagatagaaa

SEQ ID NO: 41299 - DNA, 15 bp, Homo sapiens
cttatgaagatagaa

SEQ ID NO: 41300 - DNA, 15 bp, Homo sapiens
tcttatgaagataga

SEQ ID NO: 41301 - DNA, 15 bp, Homo sapiens
ctcttatgaagatag

SEQ ID NO: 41302 - DNA, 15 bp, Homo sapiens
tctcttatgaagata

SEQ ID NO: 41303 - DNA, 15 bp, Homo sapiens
atctcttatgaagat

SEQ ID NO: 41304 - DNA, 15 bp, Homo sapiens
gatctcttatgaaga

SEQ ID NO: 41305 - DNA, 15 bp, Homo sapiens
agatctcttatgaag

SEQ ID NO: 41306 - DNA, 15 bp, Homo sapiens
cagatctcttatgaa

SEQ ID NO: 41307 - DNA, 15 bp, Homo sapiens
tcagatctcttatga

SEQ ID NO: 41308 - DNA, 15 bp, Homo sapiens
atcagatctcttatg

SEQ ID NO: 41309 - DNA, 15 bp, Homo sapiens
aatcagatctcttat

SEQ ID NO: 41310 - DNA, 15 bp, Homo sapiens
gaatcagatctctta

SEQ ID NO: 41311 - DNA, 15 bp, Homo sapiens
agaatcagatctctt

SEQ ID NO: 41312 - DNA, 15 bp, Homo sapiens
tagaatcagatctct

SEQ ID NO: 41313 - DNA, 15 bp, Homo sapiens
ttagaatcagatctc

SEQ ID NO: 41314 - DNA, 15 bp, Homo sapiens
gttagaatcagatct

SEQ ID NO: 41315 - DNA, 15 bp, Homo sapiens
tgttagaatcagatc

SEQ ID NO: 41316 - DNA, 15 bp, Homo sapiens
atgttagaatcagat

SEQ ID NO: 41317 - DNA, 15 bp, Homo sapiens
tatgttagaatcaga

SEQ ID NO: 41318 - DNA, 15 bp, Homo sapiens
atatgttagaatcag

SEQ ID NO: 41319 - DNA, 15 bp, Homo sapiens
gatatgttagaatca

SEQ ID NO: 41320 - DNA, 15 bp, Homo sapiens
ggatatgttagaatc

SEQ ID NO: 41321 - DNA, 15 bp, Homo sapiens
tggatatgttagaat

SEQ ID NO: 41322 - DNA, 15 bp, Homo sapiens
atggatatgttagaa

SEQ ID NO: 41323 - DNA, 15 bp, Homo sapiens
aatggatatgttaga

SEQ ID NO: 41324 - DNA, 15 bp, Homo sapiens
aaatggatatgttag

SEQ ID NO: 41325 - DNA, 15 bp, Homo sapiens
taaatggatatgtta

SEQ ID NO: 41326 - DNA, 15 bp, Homo sapiens
ctaaatggatatgtt

SEQ ID NO: 41327 - DNA, 15 bp, Homo sapiens
tctaaatggatatgt

SEQ ID NO: 41328 - DNA, 15 bp, Homo sapiens
gtctaaatggatatg

SEQ ID NO: 41329 - DNA, 15 bp, Homo sapiens
agtctaaatggatat

SEQ ID NO: 41330 - DNA, 15 bp, Homo sapiens
gagtctaaatggata

SEQ ID NO: 41331 - DNA, 15 bp, Homo sapiens
tgagtctaaatggat

SEQ ID NO: 41332 - DNA, 15 bp, Homo sapiens
ttgagtctaaatgga

SEQ ID NO: 41333 - DNA, 15 bp, Homo sapiens
cttgagtctaaatgg

SEQ ID NO: 41334 - DNA, 15 bp, Homo sapiens
acttgagtctaaatg

SEQ ID NO: 41335 - DNA, 15 bp, Homo sapiens
tacttgagtctaaat

SEQ ID NO: 41336 - DNA, 15 bp, Homo sapiens
ctacttgagtctaaa

SEQ ID NO: 41337 - DNA, 15 bp, Homo sapiens
tctacttgagtctaa

SEQ ID NO: 41338 - DNA, 15 bp, Homo sapiens
ttctacttgagtcta

SEQ ID NO: 41339 - DNA, 15 bp, Homo sapiens
attctacttgagtct

SEQ ID NO: 41340 - DNA, 15 bp, Homo sapiens
tattctacttgagtc

SEQ ID NO: 41341 - DNA, 15 bp, Homo sapiens
atattctacttgagt

SEQ ID NO: 41342 - DNA, 15 bp, Homo sapiens
aatattctacttgag

SEQ ID NO: 41343 - DNA, 15 bp, Homo sapiens
caatattctacttga

SEQ ID NO: 41344 - DNA, 15 bp, Homo sapiens
acaatattctacttg

SEQ ID NO: 41345 - DNA, 15 bp, Homo sapiens
cacaatattctactt

SEQ ID NO: 41346 - DNA, 15 bp, Homo sapiens
acacaatattctact

SEQ ID NO: 41347 - DNA, 15 bp, Homo sapiens
tacacaatattctac

SEQ ID NO: 41348 - DNA, 15 bp, Homo sapiens
atacacaatattcta

SEQ ID NO: 41349 - DNA, 15 bp, Homo sapiens
tatacacaatattct

SEQ ID NO: 41350 - DNA, 15 bp, Homo sapiens
ctatacacaatattc

SEQ ID NO: 41351 - DNA, 15 bp, Homo sapiens
tctatacacaatatt

SEQ ID NO: 41352 - DNA, 15 bp, Homo sapiens
ctctatacacaatat

SEQ ID NO: 41353 - DNA, 15 bp, Homo sapiens
actctatacacaata

SEQ ID NO: 41354 - DNA, 15 bp, Homo sapiens
cactctatacacaat

SEQ ID NO: 41355 - DNA, 15 bp, Homo sapiens
tcactctatacacaa

SEQ ID NO: 41356 - DNA, 15 bp, Homo sapiens
ctcactctatacaca

SEQ ID NO: 41357 - DNA, 15 bp, Homo sapiens
actcactctatacac

SEQ ID NO: 41358 - DNA, 15 bp, Homo sapiens
cactcactctataca

SEQ ID NO: 41359 - DNA, 15 bp, Homo sapiens
ccactcactctatac

SEQ ID NO: 41360 - DNA, 15 bp, Homo sapiens
gccactcactctata

SEQ ID NO: 41361 - DNA, 15 bp, Homo sapiens
tgccactcactctat

SEQ ID NO: 41362 - DNA, 15 bp, Homo sapiens
ctgccactcactcta

SEQ ID NO: 41363 - DNA, 15 bp, Homo sapiens
actgccactcactct

SEQ ID NO: 41364 - DNA, 15 bp, Homo sapiens
cactgccactcactc

SEQ ID NO: 41365 - DNA, 15 bp, Homo sapiens
tcactgccactcact

SEQ ID NO: 41366 - DNA, 15 bp, Homo sapiens
ctcactgccactcac

SEQ ID NO: 41367 - DNA, 15 bp, Homo sapiens
actcactgccactca

SEQ ID NO: 41368 - DNA, 15 bp, Homo sapiens
tactcactgccactc

SEQ ID NO: 41369 - DNA, 15 bp, Homo sapiens
ttactcactgccact

SEQ ID NO: 41370 - DNA, 15 bp, Homo sapiens
attactcactgccac

SEQ ID NO: 41371 - DNA, 15 bp, Homo sapiens
aattactcactgcca

SEQ ID NO: 41372 - DNA, 15 bp, Homo sapiens
aaattactcactgcc

SEQ ID NO: 41373 - DNA, 15 bp, Homo sapiens
caaattactcactgc

SEQ ID NO: 41374 - DNA, 15 bp, Homo sapiens
ccaaattactcactg

SEQ ID NO: 41375 - DNA, 15 bp, Homo sapiens
accaaattactcact

SEQ ID NO: 41376 - DNA, 15 bp, Homo sapiens
taccaaattactcac

SEQ ID NO: 41377 - DNA, 15 bp, Homo sapiens
ttaccaaattactca

SEQ ID NO: 41378 - DNA, 15 bp, Homo sapiens
tttaccaaattactc
